United States Patent Application Publication US 2016/0319361 A1 - sequence listing, part 18

SEQ ID NO: 477855 - DNA, 30 bp, Artificial Sequence
  Synthetic oligonucleotide
gttacggcacacgcgttccctctatcgctg

SEQ ID NO: 477856 - DNA, 30 bp, Artificial Sequence
  Synthetic oligonucleotide
agaaggagctgcggggtgtccaagtcgctg

SEQ ID NO: 477857 - DNA, 30 bp, Artificial Sequence
  Synthetic oligonucleotide
gtgcgagacgtagtcacggctacgtcgctg

SEQ ID NO: 477858 - DNA, 30 bp, Artificial Sequence
  Synthetic oligonucleotide
atttatacttgagattgctaacattcgctg

SEQ ID NO: 477859 - DNA, 30 bp, Artificial Sequence
  Synthetic oligonucleotide
aaaaacgacagtcccttcaggtccaggctg

SEQ ID NO: 477860 - DNA, 30 bp, Artificial Sequence
  Synthetic oligonucleotide
ctctgccctgctcccggtcaggaacggctg

SEQ ID NO: 477861 - DNA, 30 bp, Artificial Sequence
  Synthetic oligonucleotide
caccaattctgtttaccggtggaccggctg

SEQ ID NO: 477862 - DNA, 30 bp, Artificial Sequence
  Synthetic oligonucleotide
agagatatgtctgctagtacgtaccggctg

SEQ ID NO: 477863 - DNA, 30 bp, Artificial Sequence
  Synthetic oligonucleotide
attttgaaacgtgccgtcctgagccggctg

SEQ ID NO: 477864 - DNA, 29 bp, Artificial Sequence
  Synthetic oligonucleotide
ctgccggatcattggtgacaaagcggctg

SEQ ID NO: 477865 - DNA, 30 bp, Artificial Sequence
  Synthetic oligonucleotide
tgagaaaaagaaaggacgcgtcggcggctg

SEQ ID NO: 477866 - DNA, 30 bp, Artificial Sequence
  Synthetic oligonucleotide
aaagttgcgactcatttatagtatcggctg

SEQ ID NO: 477867 - DNA, 30 bp, Artificial Sequence
  Synthetic oligonucleotide
atacacgcatagaagcatcgttaagggctg

SEQ ID NO: 477868 - DNA, 30 bp, Artificial Sequence
  Synthetic oligonucleotide
gtgataggcccctctctcctttaagggctg

SEQ ID NO: 477869 - DNA, 30 bp, Artificial Sequence
  Synthetic oligonucleotide
caggatgctacccatagtctcgcagggctg

SEQ ID NO: 477870 - DNA, 30 bp, Artificial Sequence
  Synthetic oligonucleotide
ggacacaagtgggtttgaacggtcgggctg

SEQ ID NO: 477871 - DNA, 30 bp, Artificial Sequence
  Synthetic oligonucleotide
gtttgggtgcggctcccgacgagggggctg

SEQ ID NO: 477872 - DNA, 30 bp, Artificial Sequence
  Synthetic oligonucleotide
atgcctcaggcctctgtagtatctgggctg

SEQ ID NO: 477873 - DNA, 30 bp, Artificial Sequence
  Synthetic oligonucleotide
accttggtctccttacatcagcgtgggctg

SEQ ID NO: 477874 - DNA, 30 bp, Artificial Sequence
  Synthetic oligonucleotide
agctgcgtatcggaggagctcgcgtggctg

SEQ ID NO: 477875 - DNA, 30 bp, Artificial Sequence
  Synthetic oligonucleotide
attttttgacagacaatcaatttgtggctg

SEQ ID NO: 477876 - DNA, 30 bp, Artificial Sequence
  Synthetic oligonucleotide
aggagtacgcctgaatccaagtattggctg

SEQ ID NO: 477877 - DNA, 30 bp, Artificial Sequence
  Synthetic oligonucleotide
gacggtttccctccgcgtggcttttggctg

SEQ ID NO: 477878 - DNA, 30 bp, Artificial Sequence
  Synthetic oligonucleotide
actttactcgccgcgaacttcaaaatgctg

SEQ ID NO: 477879 - DNA, 30 bp, Artificial Sequence
  Synthetic oligonucleotide
aatgcttgatatagtggaggtcaaatgctg

SEQ ID NO: 477880 - DNA, 30 bp, Artificial Sequence
  Synthetic oligonucleotide
tttagtcttattcctttgttttaaatgctg

SEQ ID NO: 477881 - DNA, 30 bp, Artificial Sequence
  Synthetic oligonucleotide
gcgctttgcgtgattatcacatgaatgctg

SEQ ID NO: 477882 - DNA, 30 bp, Artificial Sequence
  Synthetic oligonucleotide
atttacgatccttggggaaaaaggatgctg

SEQ ID NO: 477883 - DNA, 30 bp, Artificial Sequence
  Synthetic oligonucleotide
cgactcacagcttgagtatcatggatgctg

SEQ ID NO: 477884 - DNA, 30 bp, Artificial Sequence
  Synthetic oligonucleotide
cgatcgctaatatggggcatttggatgctg

SEQ ID NO: 477885 - DNA, 30 bp, Artificial Sequence
  Synthetic oligonucleotide
ggcgccctgagagatgaaacacgactgctg

SEQ ID NO: 477886 - DNA, 30 bp, Artificial Sequence
  Synthetic oligonucleotide
ttcccggatcagtgagcctccatgctgctg

SEQ ID NO: 477887 - DNA, 31 bp, Artificial Sequence
  Synthetic oligonucleotide
aactccgtcggtaagatctgtagtgctgctg

SEQ ID NO: 477888 - DNA, 30 bp, Artificial Sequence
  Synthetic oligonucleotide
gtttttttcataagtcgatatgtgctgctg

SEQ ID NO: 477889 - DNA, 30 bp, Artificial Sequence
  Synthetic oligonucleotide
gtgaagacgctgccattcacatgtctgctg

SEQ ID NO: 477890 - DNA, 30 bp, Artificial Sequence
  Synthetic oligonucleotide
gagagtatcagtcgctttatcgcagtgctg

SEQ ID NO: 477891 - DNA, 30 bp, Artificial Sequence
  Synthetic oligonucleotide
agtaggtccgtatttatactatatgtgctg

SEQ ID NO: 477892 - DNA, 30 bp, Artificial Sequence
  Synthetic oligonucleotide
tttcatgtgttcgtttggcccgttgtgctg

SEQ ID NO: 477893 - DNA, 30 bp, Artificial Sequence
  Synthetic oligonucleotide
tttccttttaacacaggtcggagcttgctg

SEQ ID NO: 477894 - DNA, 30 bp, Artificial Sequence
  Synthetic oligonucleotide
tagcacgcactcctaataattcgtttgctg

SEQ ID NO: 477895 - DNA, 30 bp, Artificial Sequence
  Synthetic oligonucleotide
tattgggtttcagaaaaaagagttttgctg

SEQ ID NO: 477896 - DNA, 30 bp, Artificial Sequence
  Synthetic oligonucleotide
aaaacacgttaggcttgtgtaaaaaatctg

SEQ ID NO: 477897 - DNA, 30 bp, Artificial Sequence
  Synthetic oligonucleotide
ggaagttggtgtctactcccgcaaaatctg

SEQ ID NO: 477898 - DNA, 30 bp, Artificial Sequence
  Synthetic oligonucleotide
tatgccacaggtgctttataaagcaatctg

SEQ ID NO: 477899 - DNA, 30 bp, Artificial Sequence
  Synthetic oligonucleotide
tagcgcgattctagtctaaacttgaatctg

SEQ ID NO: 477900 - DNA, 30 bp, Artificial Sequence
  Synthetic oligonucleotide
gccattcatggtgtagcagtcatacatctg

SEQ ID NO: 477901 - DNA, 30 bp, Artificial Sequence
  Synthetic oligonucleotide
ttctggctagtgcgaggcgaccgccatctg

SEQ ID NO: 477902 - DNA, 30 bp, Artificial Sequence
  Synthetic oligonucleotide
accaatgctctccatgcgttattccatctg

SEQ ID NO: 477903 - DNA, 30 bp, Artificial Sequence
  Synthetic oligonucleotide
gtttcgtcgatgagtgcagtttcgcatctg

SEQ ID NO: 477904 - DNA, 30 bp, Artificial Sequence
  Synthetic oligonucleotide
cacacgcactcaccgtggacaaggcatctg

SEQ ID NO: 477905 - DNA, 30 bp, Artificial Sequence
  Synthetic oligonucleotide
gctatcaaacccgcttttgcggttcatctg

SEQ ID NO: 477906 - DNA, 30 bp, Artificial Sequence
  Synthetic oligonucleotide
ttaaagggaactatttgggcgcgggatctg

SEQ ID NO: 477907 - DNA, 30 bp, Artificial Sequence
  Synthetic oligonucleotide
ctggacatgagggtgccaccaggggatctg

SEQ ID NO: 477908 - DNA, 30 bp, Artificial Sequence
  Synthetic oligonucleotide
gaatcgacgttcgatagcaatccatatctg

SEQ ID NO: 477909 - DNA, 30 bp, Artificial Sequence
  Synthetic oligonucleotide
actagttgagctgtcgagctaatatatctg

SEQ ID NO: 477910 - DNA, 30 bp, Artificial Sequence
  Synthetic oligonucleotide
atagcttaaaaaggatcatacccctatctg

SEQ ID NO: 477911 - DNA, 30 bp, Artificial Sequence
  Synthetic oligonucleotide
gcaacagttgtgggcccattagtctatctg

SEQ ID NO: 477912 - DNA, 30 bp, Artificial Sequence
  Synthetic oligonucleotide
tattgggaaaaaatagtgtttatgtatctg

SEQ ID NO: 477913 - DNA, 30 bp, Artificial Sequence
  Synthetic oligonucleotide
gtcgccttcggcgcgtcaccgctgtatctg

SEQ ID NO: 477914 - DNA, 30 bp, Artificial Sequence
  Synthetic oligonucleotide
tctgaccgaagacacagcggcaattatctg

SEQ ID NO: 477915 - DNA, 30 bp, Artificial Sequence
  Synthetic oligonucleotide
aacttttcaagtgtggatggatgcactctg

SEQ ID NO: 477916 - DNA, 30 bp, Artificial Sequence
  Synthetic oligonucleotide
tacgtacagaggacggccctctggactctg

SEQ ID NO: 477917 - DNA, 30 bp, Artificial Sequence
  Synthetic oligonucleotide
cggtggtagcgaaattcctaatatactctg

SEQ ID NO: 477918 - DNA, 30 bp, Artificial Sequence
  Synthetic oligonucleotide
cttgtcatagagttttacagagctactctg

SEQ ID NO: 477919 - DNA, 30 bp, Artificial Sequence
  Synthetic oligonucleotide
caataagggggacgctcctaatcccctctg

SEQ ID NO: 477920 - DNA, 30 bp, Artificial Sequence
  Synthetic oligonucleotide
gtgccgtgggaagcgaggcagcgccctctg

SEQ ID NO: 477921 - DNA, 30 bp, Artificial Sequence
  Synthetic oligonucleotide
ttctttgctgcgcccaatcggcagcctctg

SEQ ID NO: 477922 - DNA, 30 bp, Artificial Sequence
  Synthetic oligonucleotide
gaaggtctgacgaagccatgattgcctctg

SEQ ID NO: 477923 - DNA, 30 bp, Artificial Sequence
  Synthetic oligonucleotide
gatttggcgactaatttgtacacagctctg

SEQ ID NO: 477924 - DNA, 30 bp, Artificial Sequence
  Synthetic oligonucleotide
cgaattattccatacatctgcaccgctctg

SEQ ID NO: 477925 - DNA, 30 bp, Artificial Sequence
  Synthetic oligonucleotide
ttggctgactggagaatgtgaagcgctctg

SEQ ID NO: 477926 - DNA, 29 bp, Artificial Sequence
  Synthetic oligonucleotide
gacacaatagtcttggcgccccggctctg

SEQ ID NO: 477927 - DNA, 30 bp, Artificial Sequence
  Synthetic oligonucleotide
gctagtaaggctaagtagatgcaatctctg

SEQ ID NO: 477928 - DNA, 30 bp, Artificial Sequence
  Synthetic oligonucleotide
ggttaccgagtgcagtacagaatatctctg

SEQ ID NO: 477929 - DNA, 30 bp, Artificial Sequence
  Synthetic oligonucleotide
ttaagttatcagtgctccgggctatctctg

SEQ ID NO: 477930 - DNA, 30 bp, Artificial Sequence
  Synthetic oligonucleotide
ttcggcgcagggtgcagtaataggtctctg

SEQ ID NO: 477931 - DNA, 30 bp, Artificial Sequence
  Synthetic oligonucleotide
attcgcgtgtagatatgacatacttctctg

SEQ ID NO: 477932 - DNA, 30 bp, Artificial Sequence
  Synthetic oligonucleotide
cgtagcatcaaaaaaaaagttttttctctg

SEQ ID NO: 477933 - DNA, 30 bp, Artificial Sequence
  Synthetic oligonucleotide
acttctccgtaaacgcaatggccaagtctg

SEQ ID NO: 477934 - DNA, 30 bp, Artificial Sequence
  Synthetic oligonucleotide
aaattcagacgcgacagatcaggaagtctg

SEQ ID NO: 477935 - DNA, 30 bp, Artificial Sequence
  Synthetic oligonucleotide
gtttctagcgtatgcccaacgggaagtctg

SEQ ID NO: 477936 - DNA, 30 bp, Artificial Sequence
  Synthetic oligonucleotide
gaatcgtcttatacgtgtgatgtaagtctg

SEQ ID NO: 477937 - DNA, 30 bp, Artificial Sequence
  Synthetic oligonucleotide
ctatggcaaacgccgaacattacgagtctg

SEQ ID NO: 477938 - DNA, 30 bp, Artificial Sequence
  Synthetic oligonucleotide
ataaaggggcggggccgcgcccatagtctg

SEQ ID NO: 477939 - DNA, 30 bp, Artificial Sequence
  Synthetic oligonucleotide
acatgatctttttttaggggaagacgtctg

SEQ ID NO: 477940 - DNA, 30 bp, Artificial Sequence
  Synthetic oligonucleotide
gcacagctttacccgcatgaggcccgtctg

SEQ ID NO: 477941 - DNA, 30 bp, Artificial Sequence
  Synthetic oligonucleotide
aaggtatttaacacgacgcctgtgcgtctg

SEQ ID NO: 477942 - DNA, 30 bp, Artificial Sequence
  Synthetic oligonucleotide
gactctgttatcactgagtgttgtcgtctg

SEQ ID NO: 477943 - DNA, 30 bp, Artificial Sequence
  Synthetic oligonucleotide
accacataaggactgttacacgacggtctg

SEQ ID NO: 477944 - DNA, 30 bp, Artificial Sequence
  Synthetic oligonucleotide
gtcacaagacttgagaagtatgatggtctg

SEQ ID NO: 477945 - DNA, 30 bp, Artificial Sequence
  Synthetic oligonucleotide
atatgtggtgtcggaccccggagtggtctg

SEQ ID NO: 477946 - DNA, 30 bp, Artificial Sequence
  Synthetic oligonucleotide
atcctagtaggagggcgagcacgtggtctg

SEQ ID NO: 477947 - DNA, 30 bp, Artificial Sequence
  Synthetic oligonucleotide
acgtcgagcgcccggcgccgttgtggtctg

SEQ ID NO: 477948 - DNA, 30 bp, Artificial Sequence
  Synthetic oligonucleotide
tatcaagtattgctttgcttcaaatgtctg

SEQ ID NO: 477949 - DNA, 30 bp, Artificial Sequence
  Synthetic oligonucleotide
gttgttgtccatacatattttatatgtctg

SEQ ID NO: 477950 - DNA, 30 bp, Artificial Sequence
  Synthetic oligonucleotide
attctcaggaccagatgtttattatgtctg

SEQ ID NO: 477951 - DNA, 30 bp, Artificial Sequence
  Synthetic oligonucleotide
acgcaagtagtgcaggatttagcctgtctg

SEQ ID NO: 477952 - DNA, 30 bp, Artificial Sequence
  Synthetic oligonucleotide
aaccattagttcccttttatggtctgtctg

SEQ ID NO: 477953 - DNA, 30 bp, Artificial Sequence
  Synthetic oligonucleotide
gccacggtcggactcactccgaggtgtctg

SEQ ID NO: 477954 - DNA, 30 bp, Artificial Sequence
  Synthetic oligonucleotide
atgagtttatcatgtagacgacggtgtctg

SEQ ID NO: 477955 - DNA, 30 bp, Artificial Sequence
  Synthetic oligonucleotide
aatttcaagaacatcgataaattgtgtctg

SEQ ID NO: 477956 - DNA, 30 bp, Artificial Sequence
  Synthetic oligonucleotide
gacagcaagcataggaaacatggttgtctg

SEQ ID NO: 477957 - DNA, 30 bp, Artificial Sequence
  Synthetic oligonucleotide
ccagggccagacctgtttagcgacattctg

SEQ ID NO: 477958 - DNA, 30 bp, Artificial Sequence
  Synthetic oligonucleotide
gtaaacccaggtcgtaggcggcaccttctg

SEQ ID NO: 477959 - DNA, 30 bp, Artificial Sequence
  Synthetic oligonucleotide
aattatagtggtcattgcgcgtgccttctg

SEQ ID NO: 477960 - DNA, 30 bp, Artificial Sequence
  Synthetic oligonucleotide
cccgaaccataacgattatattggcttctg

SEQ ID NO: 477961 - DNA, 30 bp, Artificial Sequence
  Synthetic oligonucleotide
gtaacgaatagatagacactgctgcttctg

SEQ ID NO: 477962 - DNA, 30 bp, Artificial Sequence
  Synthetic oligonucleotide
catcaaatgtttgaattagactatcttctg

SEQ ID NO: 477963 - DNA, 30 bp, Artificial Sequence
  Synthetic oligonucleotide
atagaggactttgggctcttatccgttctg

SEQ ID NO: 477964 - DNA, 30 bp, Artificial Sequence
  Synthetic oligonucleotide
tgaatactgcgtattttgcagcaggttctg

SEQ ID NO: 477965 - DNA, 30 bp, Artificial Sequence
  Synthetic oligonucleotide
ttacagggcgttaatccagtctgggttctg

SEQ ID NO: 477966 - DNA, 30 bp, Artificial Sequence
  Synthetic oligonucleotide
cgaaggtaaccccataagatattggttctg

SEQ ID NO: 477967 - DNA, 30 bp, Artificial Sequence
  Synthetic oligonucleotide
taagcattacgtagcggtattatatttctg

SEQ ID NO: 477968 - DNA, 30 bp, Artificial Sequence
  Synthetic oligonucleotide
agcacagaagtgtgcccttaagcctttctg

SEQ ID NO: 477969 - DNA, 30 bp, Artificial Sequence
  Synthetic oligonucleotide
cttcacagccttctctaaaggaggtttctg

SEQ ID NO: 477970 - DNA, 30 bp, Artificial Sequence
  Synthetic oligonucleotide
cttttgatatttttactatacaattttctg

SEQ ID NO: 477971 - DNA, 30 bp, Artificial Sequence
  Synthetic oligonucleotide
gactaaggagttggaaagcctcattttctg

SEQ ID NO: 477972 - DNA, 30 bp, Artificial Sequence
  Synthetic oligonucleotide
gtagggcatgaccgtagtacatattttctg

SEQ ID NO: 477973 - DNA, 30 bp, Artificial Sequence
  Synthetic oligonucleotide
ttttcgtatttccgtcgctgcggttttctg

SEQ ID NO: 477974 - DNA, 30 bp, Artificial Sequence
  Synthetic oligonucleotide
gccctgtggcaggtgcgttgctgaaaagtg

SEQ ID NO: 477975 - DNA, 30 bp, Artificial Sequence
  Synthetic oligonucleotide
ttcagcgaccttagtatgacattaaaagtg

SEQ ID NO: 477976 - DNA, 30 bp, Artificial Sequence
  Synthetic oligonucleotide
cccgcgagctgctaatgccaagagaaagtg

SEQ ID NO: 477977 - DNA, 30 bp, Artificial Sequence
  Synthetic oligonucleotide
ttgcgttattagcgaggcagtcataaagtg

SEQ ID NO: 477978 - DNA, 30 bp, Artificial Sequence
  Synthetic oligonucleotide
cattagcgagctgttatcagtcctaaagtg

SEQ ID NO: 477979 - DNA, 30 bp, Artificial Sequence
  Synthetic oligonucleotide
tatctccgatttagcccgagggctaaagtg

SEQ ID NO: 477980 - DNA, 30 bp, Artificial Sequence
  Synthetic oligonucleotide
tacctaaatatatcagcccttgttaaagtg

SEQ ID NO: 477981 - DNA, 30 bp, Artificial Sequence
  Synthetic oligonucleotide
atagcaaggagctgtcagtgattacaagtg

SEQ ID NO: 477982 - DNA, 30 bp, Artificial Sequence
  Synthetic oligonucleotide
aagggaaaaggtgacggagaccaccaagtg

SEQ ID NO: 477983 - DNA, 30 bp, Artificial Sequence
  Synthetic oligonucleotide
ttattctaacggtacagctttacgcaagtg

SEQ ID NO: 477984 - DNA, 30 bp, Artificial Sequence
  Synthetic oligonucleotide
aagcaaggtggaaatgatgcctgcgaagtg

SEQ ID NO: 477985 - DNA, 30 bp, Artificial Sequence
  Synthetic oligonucleotide
aagcagtgtgatcatcaacggaaggaagtg

SEQ ID NO: 477986 - DNA, 30 bp, Artificial Sequence
  Synthetic oligonucleotide
cgcggccgttcagttgtttaactataagtg

SEQ ID NO: 477987 - DNA, 30 bp, Artificial Sequence
  Synthetic oligonucleotide
gcacctttcacagtcatgttgctataagtg

SEQ ID NO: 477988 - DNA, 30 bp, Artificial Sequence
  Synthetic oligonucleotide
ggtccggctatcaacctgccgcagtaagtg

SEQ ID NO: 477989 - DNA, 30 bp, Artificial Sequence
  Synthetic oligonucleotide
catcagtttcatagacggggcttgtaagtg

SEQ ID NO: 477990 - DNA, 30 bp, Artificial Sequence
  Synthetic oligonucleotide
ggccgagtgaattacaagcctggcacagtg

SEQ ID NO: 477991 - DNA, 30 bp, Artificial Sequence
  Synthetic oligonucleotide
atcccggttgaccatggttatctcacagtg

SEQ ID NO: 477992 - DNA, 30 bp, Artificial Sequence
  Synthetic oligonucleotide
aaccctgcgggatttgccgcaatcccagtg

SEQ ID NO: 477993 - DNA, 30 bp, Artificial Sequence
  Synthetic oligonucleotide
tttatcgagaacgtagaacgcacgccagtg

SEQ ID NO: 477994 - DNA, 30 bp, Artificial Sequence
  Synthetic oligonucleotide
tttcttgactctattcctgctacgccagtg

SEQ ID NO: 477995 - DNA, 30 bp, Artificial Sequence
  Synthetic oligonucleotide
gccattagtcaattgctctgccaagcagtg

SEQ ID NO: 477996 - DNA, 30 bp, Artificial Sequence
  Synthetic oligonucleotide
acgtttgtggctcccaatgaggacgcagtg

SEQ ID NO: 477997 - DNA, 30 bp, Artificial Sequence
  Synthetic oligonucleotide
agtaactgttacgggttgatgtccgcagtg

SEQ ID NO: 477998 - DNA, 30 bp, Artificial Sequence
  Synthetic oligonucleotide
agcgacaggcccgcgttctttttcgcagtg

SEQ ID NO: 477999 - DNA, 30 bp, Artificial Sequence
  Synthetic oligonucleotide
tacatttgtgatctgagcgagcaggcagtg

SEQ ID NO: 478000 - DNA, 30 bp, Artificial Sequence
  Synthetic oligonucleotide
ttgacagaacaacggttaaatgaggcagtg

SEQ ID NO: 478001 - DNA, 30 bp, Artificial Sequence
  Synthetic oligonucleotide
tggaatgctctctcagattgctatgcagtg

SEQ ID NO: 478002 - DNA, 30 bp, Artificial Sequence
  Synthetic oligonucleotide
accgtttaaagtcgagaatccgaatcagtg

SEQ ID NO: 478003 - DNA, 30 bp, Artificial Sequence
  Synthetic oligonucleotide
tacatgagtccggcgtcgttttaatcagtg

SEQ ID NO: 478004 - DNA, 30 bp, Artificial Sequence
  Synthetic oligonucleotide
aactcttacggcaggagcctgacacgagtg

SEQ ID NO: 478005 - DNA, 30 bp, Artificial Sequence
  Synthetic oligonucleotide
tatcccagctagacatgcacctcacgagtg

SEQ ID NO: 478006 - DNA, 30 bp, Artificial Sequence
  Synthetic oligonucleotide
accgggtctgtatttaggatcctacgagtg

SEQ ID NO: 478007 - DNA, 30 bp, Artificial Sequence
  Synthetic oligonucleotide
gaaagcaccaacttcgcatacaagcgagtg

SEQ ID NO: 478008 - DNA, 30 bp, Artificial Sequence
  Synthetic oligonucleotide
atgcacagaccaagcttcacatctcgagtg

SEQ ID NO: 478009 - DNA, 30 bp, Artificial Sequence
  Synthetic oligonucleotide
cgcgtgagcacacctgatccaacaggagtg

SEQ ID NO: 478010 - DNA, 30 bp, Artificial Sequence
  Synthetic oligonucleotide
aattgtacgcatcgcagcatcagaggagtg

SEQ ID NO: 478011 - DNA, 30 bp, Artificial Sequence
  Synthetic oligonucleotide
ggctatttcggccgtacggcgcggggagtg

SEQ ID NO: 478012 - DNA, 30 bp, Artificial Sequence
  Synthetic oligonucleotide
aatttgtggcagccgttgtgggttggagtg

SEQ ID NO: 478013 - DNA, 30 bp, Artificial Sequence
  Synthetic oligonucleotide
gcgcaccctttactagtctagggatgagtg

SEQ ID NO: 478014 - DNA, 30 bp, Artificial Sequence
  Synthetic oligonucleotide
taataggccgaacgcgaccacctatgagtg

SEQ ID NO: 478015 - DNA, 30 bp, Artificial Sequence
  Synthetic oligonucleotide
taattgtcaaagcggccgaaattatgagtg

SEQ ID NO: 478016 - DNA, 30 bp, Artificial Sequence
  Synthetic oligonucleotide
gaggagccacagacgctcaggctctgagtg

SEQ ID NO: 478017 - DNA, 30 bp, Artificial Sequence
  Synthetic oligonucleotide
gtcctggacactttctggtgagggtgagtg

SEQ ID NO: 478018 - DNA, 30 bp, Artificial Sequence
  Synthetic oligonucleotide
tttctatctgtttgaccctgggtgtgagtg

SEQ ID NO: 478019 - DNA, 30 bp, Artificial Sequence
  Synthetic oligonucleotide
cgttgcggaatcggatgcgaatccatagtg

SEQ ID NO: 478020 - DNA, 30 bp, Artificial Sequence
  Synthetic oligonucleotide
attcttcggacacctaggccccgcatagtg

SEQ ID NO: 478021 - DNA, 30 bp, Artificial Sequence
  Synthetic oligonucleotide
aggtctccgtttgtaatgccattcatagtg

SEQ ID NO: 478022 - DNA, 30 bp, Artificial Sequence
  Synthetic oligonucleotide
ttaacttaggaggagcttaaatatatagtg

SEQ ID NO: 478023 - DNA, 30 bp, Artificial Sequence
  Synthetic oligonucleotide
ggagcttttagtatcctgagtattatagtg

SEQ ID NO: 478024 - DNA, 30 bp, Artificial Sequence
  Synthetic oligonucleotide
gaatgcaggctccgcgggtacatactagtg

SEQ ID NO: 478025 - DNA, 30 bp, Artificial Sequence
  Synthetic oligonucleotide
cttctcctttctcgggagattattctagtg

SEQ ID NO: 478026 - DNA, 30 bp, Artificial Sequence
  Synthetic oligonucleotide
catgtgtgggacatggatgtgagagtagtg

SEQ ID NO: 478027 - DNA, 30 bp, Artificial Sequence
  Synthetic oligonucleotide
gagtgcaacgttgcaccgtgaatagtagtg

SEQ ID NO: 478028 - DNA, 30 bp, Artificial Sequence
  Synthetic oligonucleotide
cccgtcaaccctaatatatgttacgtagtg

SEQ ID NO: 478029 - DNA, 30 bp, Artificial Sequence
  Synthetic oligonucleotide
taaggtacttatgagcggatatccgtagtg

SEQ ID NO: 478030 - DNA, 30 bp, Artificial Sequence
  Synthetic oligonucleotide
acctaacgagctctcatcgagacggtagtg

SEQ ID NO: 478031 - DNA, 30 bp, Artificial Sequence
  Synthetic oligonucleotide
ttaaccatgaagttttgttgactggtagtg

SEQ ID NO: 478032 - DNA, 30 bp, Artificial Sequence
  Synthetic oligonucleotide
acattgaggagggttagggtgaatgtagtg

SEQ ID NO: 478033 - DNA, 30 bp, Artificial Sequence
  Synthetic oligonucleotide
tatttgcattgcctaggatgttgtgtagtg

SEQ ID NO: 478034 - DNA, 30 bp, Artificial Sequence
  Synthetic oligonucleotide
caatgcagtcatggcaaattgaaattagtg

SEQ ID NO: 478035 - DNA, 30 bp, Artificial Sequence
  Synthetic oligonucleotide
ctctctggcaggccctacagggaattagtg

SEQ ID NO: 478036 - DNA, 30 bp, Artificial Sequence
  Synthetic oligonucleotide
tgctactagtatttatccatttaattagtg

SEQ ID NO: 478037 - DNA, 30 bp, Artificial Sequence
  Synthetic oligonucleotide
ccccagtacgggcggtcagggagattagtg

SEQ ID NO: 478038 - DNA, 30 bp, Artificial Sequence
  Synthetic oligonucleotide
cgcagctttggtcgagggactcggttagtg

SEQ ID NO: 478039 - DNA, 30 bp, Artificial Sequence
  Synthetic oligonucleotide
agcctttacgtatgcgacgtggagaacgtg

SEQ ID NO: 478040 - DNA, 30 bp, Artificial Sequence
  Synthetic oligonucleotide
ctctttagcatttagccatttagtaacgtg

SEQ ID NO: 478041 - DNA, 30 bp, Artificial Sequence
  Synthetic oligonucleotide
gtgcgtacacgccaagcacagcgtaacgtg

SEQ ID NO: 478042 - DNA, 30 bp, Artificial Sequence
  Synthetic oligonucleotide
cttcgtgtcttcaacggcggatgtaacgtg

SEQ ID NO: 478043 - DNA, 29 bp, Artificial Sequence
  Synthetic oligonucleotide
gcccgtggcacggtataggcaaacacgtg

SEQ ID NO: 478044 - DNA, 30 bp, Artificial Sequence
  Synthetic oligonucleotide
tacatgatctctaatcgacaaccgcacgtg

SEQ ID NO: 478045 - DNA, 30 bp, Artificial Sequence
  Synthetic oligonucleotide
aaacagtagtgggacaacaggatgcacgtg

SEQ ID NO: 478046 - DNA, 30 bp, Artificial Sequence
  Synthetic oligonucleotide
gtctgcttaacgcctgaacgctatcacgtg

SEQ ID NO: 478047 - DNA, 30 bp, Artificial Sequence
  Synthetic oligonucleotide
ccctttaatatgccgcgttgaaaagacgtg

SEQ ID NO: 478048 - DNA, 30 bp, Artificial Sequence
  Synthetic oligonucleotide
gtgttgagttggaaaatcgaccaagacgtg

SEQ ID NO: 478049 - DNA, 30 bp, Artificial Sequence
  Synthetic oligonucleotide
agtttctcgctaccgagacctacagacgtg

SEQ ID NO: 478050 - DNA, 30 bp, Artificial Sequence
  Synthetic oligonucleotide
tttacacatcgttagtgtagatacgacgtg

SEQ ID NO: 478051 - DNA, 30 bp, Artificial Sequence
  Synthetic oligonucleotide
aaccgaaagcctattcggtatttggacgtg

SEQ ID NO: 478052 - DNA, 30 bp, Artificial Sequence
  Synthetic oligonucleotide
gtagcatagtaacttcggcagcgtgacgtg

SEQ ID NO: 478053 - DNA, 30 bp, Artificial Sequence
  Synthetic oligonucleotide
tgacagacgatcagacgtttcgaatacgtg

SEQ ID NO: 478054 - DNA, 30 bp, Artificial Sequence
  Synthetic oligonucleotide
gttcccgtacttcctatctgggtatacgtg

SEQ ID NO: 478055 - DNA, 30 bp, Artificial Sequence
  Synthetic oligonucleotide
gaaactttatttcgtacgaaatcctacgtg

SEQ ID NO: 478056 - DNA, 30 bp, Artificial Sequence
  Synthetic oligonucleotide
gataagaggtcgaaacacctgccgtacgtg

SEQ ID NO: 478057 - DNA, 30 bp, Artificial Sequence
  Synthetic oligonucleotide
tgtaagagtgagataaggtaaagttacgtg

SEQ ID NO: 478058 - DNA, 30 bp, Artificial Sequence
  Synthetic oligonucleotide
tacagtccacctagaattatcggttacgtg

SEQ ID NO: 478059 - DNA, 30 bp, Artificial Sequence
  Synthetic oligonucleotide
gggatatgcaaacgaatgatgcagaccgtg

SEQ ID NO: 478060 - DNA, 30 bp, Artificial Sequence
  Synthetic oligonucleotide
aaagttatcgggaaacaacggcctaccgtg

SEQ ID NO: 478061 - DNA, 30 bp, Artificial Sequence
  Synthetic oligonucleotide
gaaatcctagggtttcctcactctaccgtg

SEQ ID NO: 478062 - DNA, 30 bp, Artificial Sequence
  Synthetic oligonucleotide
ggtggcactgccggcgcttatgtccccgtg

SEQ ID NO: 478063 - DNA, 30 bp, Artificial Sequence
  Synthetic oligonucleotide
ggcaggacagggctggttgacccgcccgtg

SEQ ID NO: 478064 - DNA, 30 bp, Artificial Sequence
  Synthetic oligonucleotide
cccattgtgatcaactgtgggcggcccgtg

SEQ ID NO: 478065 - DNA, 30 bp, Artificial Sequence
  Synthetic oligonucleotide
cggctcaccgacgacagtcagtcagccgtg

SEQ ID NO: 478066 - DNA, 30 bp, Artificial Sequence
  Synthetic oligonucleotide
gaactcagtagtgatagtcgctcggccgtg

SEQ ID NO: 478067 - DNA, 30 bp, Artificial Sequence
  Synthetic oligonucleotide
gggtaatctataccggagacggtggccgtg

SEQ ID NO: 478068 - DNA, 30 bp, Artificial Sequence
  Synthetic oligonucleotide
tttagtcaagttcacgcgatataatccgtg

SEQ ID NO: 478069 - DNA, 30 bp, Artificial Sequence
  Synthetic oligonucleotide
agtcgggacgggagaccgtctacctccgtg

SEQ ID NO: 478070 - DNA, 30 bp, Artificial Sequence
  Synthetic oligonucleotide
ctttatgtgataaggtagaagtcctccgtg

SEQ ID NO: 478071 - DNA, 30 bp, Artificial Sequence
  Synthetic oligonucleotide
ttgaaatcaattttggacaagtgctccgtg

SEQ ID NO: 478072 - DNA, 30 bp, Artificial Sequence
  Synthetic oligonucleotide
tgatttcatataggactcttctcgtccgtg

SEQ ID NO: 478073 - DNA, 30 bp, Artificial Sequence
  Synthetic oligonucleotide
gttcaggtaatagatcagttccgcagcgtg

SEQ ID NO: 478074 - DNA, 30 bp, Artificial Sequence
  Synthetic oligonucleotide
tttaacgccacttaggtacctactagcgtg

SEQ ID NO: 478075 - DNA, 30 bp, Artificial Sequence
  Synthetic oligonucleotide
agtgcgagatttgtcggcgtgggacgcgtg

SEQ ID NO: 478076 - DNA, 30 bp, Artificial Sequence
  Synthetic oligonucleotide
gcgatctagcctaggctggcagcgcgcgtg

SEQ ID NO: 478077 - DNA, 30 bp, Artificial Sequence
  Synthetic oligonucleotide
ggcttggctcgtgtttatacgtatcgcgtg

SEQ ID NO: 478078 - DNA, 30 bp, Artificial Sequence
  Synthetic oligonucleotide
gacgtaagcacatcacagcctcagggcgtg

SEQ ID NO: 478079 - DNA, 28 bp, Artificial Sequence
  Synthetic oligonucleotide
agattcttatccgaaacgatggggcgtg

SEQ ID NO: 478080 - DNA, 30 bp, Artificial Sequence
  Synthetic oligonucleotide
ttacatacctcccaacgaccaatgggcgtg

SEQ ID NO: 478081 - DNA, 30 bp, Artificial Sequence
  Synthetic oligonucleotide
cttaggtgctttacattgtgatatggcgtg

SEQ ID NO: 478082 - DNA, 30 bp, Artificial Sequence
  Synthetic oligonucleotide
agtggggccacgcgctttgggtaatgcgtg

SEQ ID NO: 478083 - DNA, 30 bp, Artificial Sequence
  Synthetic oligonucleotide
tagaaccgcatatatatctctagatgcgtg

SEQ ID NO: 478084 - DNA, 30 bp, Artificial Sequence
  Synthetic oligonucleotide
tatggatgtcggacgattgcctacatcgtg

SEQ ID NO: 478085 - DNA, 30 bp, Artificial Sequence
  Synthetic oligonucleotide
taaaggcactcgatgcaacatggcatcgtg

SEQ ID NO: 478086 - DNA, 30 bp, Artificial Sequence
  Synthetic oligonucleotide
ttttatgataaaaggtaacataagatcgtg

SEQ ID NO: 478087 - DNA, 30 bp, Artificial Sequence
  Synthetic oligonucleotide
acatgaacccactctcgagtttatatcgtg

SEQ ID NO: 478088 - DNA, 30 bp, Artificial Sequence
  Synthetic oligonucleotide
gtccatgtacacatcgtggcgcggctcgtg

SEQ ID NO: 478089 - DNA, 30 bp, Artificial Sequence
  Synthetic oligonucleotide
gactggcaggtcgttcctttcgatctcgtg

SEQ ID NO: 478090 - DNA, 30 bp, Artificial Sequence
  Synthetic oligonucleotide
cctaaggatcgttccgcgctgatggtcgtg

SEQ ID NO: 478091 - DNA, 30 bp, Artificial Sequence
  Synthetic oligonucleotide
ccggagcaagccatacagaaagatgtcgtg

SEQ ID NO: 478092 - DNA, 30 bp, Artificial Sequence
  Synthetic oligonucleotide
gagccgcatcggcgggcccggaaattcgtg

SEQ ID NO: 478093 - DNA, 30 bp, Artificial Sequence
  Synthetic oligonucleotide
aattttcaaatcatgaaaaggagattcgtg

SEQ ID NO: 478094 - DNA, 30 bp, Artificial Sequence
  Synthetic oligonucleotide
tataaccgtgtggtaatgttgtggttcgtg

SEQ ID NO: 478095 - DNA, 30 bp, Artificial Sequence
  Synthetic oligonucleotide
atcaatgactttaagttaccggctttcgtg

SEQ ID NO: 478096 - DNA, 30 bp, Artificial Sequence
  Synthetic oligonucleotide
gaagatttctgggcttcggatccaaaggtg

SEQ ID NO: 478097 - DNA, 30 bp, Artificial Sequence
  Synthetic oligonucleotide
cacctgcgaagtataatttttaccaaggtg

SEQ ID NO: 478098 - DNA, 30 bp, Artificial Sequence
  Synthetic oligonucleotide
ctgccgccacaaacaaaaattagcaaggtg

SEQ ID NO: 478099 - DNA, 30 bp, Artificial Sequence
  Synthetic oligonucleotide
ccaatacgacaactaccgcgcggcaaggtg

SEQ ID NO: 478100 - DNA, 30 bp, Artificial Sequence
  Synthetic oligonucleotide
gccatattggcaactatcatcctcaaggtg

SEQ ID NO: 478101 - DNA, 30 bp, Artificial Sequence
  Synthetic oligonucleotide
agctacagtggaatagtctcattcaaggtg

SEQ ID NO: 478102 - DNA, 30 bp, Artificial Sequence
  Synthetic oligonucleotide
gcaaggaatcatttaattcctttcaaggtg

SEQ ID NO: 478103 - DNA, 30 bp, Artificial Sequence
  Synthetic oligonucleotide
cagaaccgactgatgcgcgcacagaaggtg

SEQ ID NO: 478104 - DNA, 30 bp, Artificial Sequence
  Synthetic oligonucleotide
gcgctcctccttatttcatgtgagaaggtg

SEQ ID NO: 478105 - DNA, 30 bp, Artificial Sequence
  Synthetic oligonucleotide
attttagaggaccaacattggcggaaggtg

SEQ ID NO: 478106 - DNA, 30 bp, Artificial Sequence
  Synthetic oligonucleotide
cgacattattcgcgaccggcgcataaggtg

SEQ ID NO: 478107 - DNA, 30 bp, Artificial Sequence
  Synthetic oligonucleotide
ctatttacttctaggtaacggtctaaggtg

SEQ ID NO: 478108 - DNA, 30 bp, Artificial Sequence
  Synthetic oligonucleotide
ggcttcaccagaagtcttgtttcacaggtg

SEQ ID NO: 478109 - DNA, 30 bp, Artificial Sequence
  Synthetic oligonucleotide
gtttggtgggtaggcattggacgccaggtg

SEQ ID NO: 478110 - DNA, 30 bp, Artificial Sequence
  Synthetic oligonucleotide
ctaatttacgcttgggtcttgtggcaggtg

SEQ ID NO: 478111 - DNA, 30 bp, Artificial Sequence
  Synthetic oligonucleotide
ttctttggaggtggagggcatctgcaggtg

SEQ ID NO: 478112 - DNA, 30 bp, Artificial Sequence
  Synthetic oligonucleotide
catactaatgacgccgtttgttatcaggtg

SEQ ID NO: 478113 - DNA, 30 bp, Artificial Sequence
  Synthetic oligonucleotide
accgggagggctagggtgagacacgaggtg

SEQ ID NO: 478114 - DNA, 30 bp, Artificial Sequence
  Synthetic oligonucleotide
tgtttgttgtaaggcaccggtcatgaggtg

SEQ ID NO: 478115 - DNA, 30 bp, Artificial Sequence
  Synthetic oligonucleotide
atagtccctcgacgcatattataataggtg

SEQ ID NO: 478116 - DNA, 30 bp, Artificial Sequence
  Synthetic oligonucleotide
ctagttttaactttttacaatacataggtg

SEQ ID NO: 478117 - DNA, 30 bp, Artificial Sequence
  Synthetic oligonucleotide
gagacttggcgctcttacctactataggtg

SEQ ID NO: 478118 - DNA, 30 bp, Artificial Sequence
  Synthetic oligonucleotide
actgcaaatatttaactgcagtactaggtg

SEQ ID NO: 478119 - DNA, 30 bp, Artificial Sequence
  Synthetic oligonucleotide
aatcataattgatacctattcacgtaggtg

SEQ ID NO: 478120 - DNA, 30 bp, Artificial Sequence
  Synthetic oligonucleotide
ttatacaaggacacataccgtctgtaggtg

SEQ ID NO: 478121 - DNA, 30 bp, Artificial Sequence
  Synthetic oligonucleotide
aaggttcccagacgaagtaacaattaggtg

SEQ ID NO: 478122 - DNA, 30 bp, Artificial Sequence
  Synthetic oligonucleotide
cacccaattaatcgccggtacgattaggtg

SEQ ID NO: 478123 - DNA, 30 bp, Artificial Sequence
  Synthetic oligonucleotide
cgtttcgcattccggaaggtgttttaggtg

SEQ ID NO: 478124 - DNA, 30 bp, Artificial Sequence
  Synthetic oligonucleotide
tgttgcagtttactgttaactctaacggtg

SEQ ID NO: 478125 - DNA, 30 bp, Artificial Sequence
  Synthetic oligonucleotide
ttgtttccggggggcatatcagccacggtg

SEQ ID NO: 478126 - DNA, 30 bp, Artificial Sequence
  Synthetic oligonucleotide
catcagggacgtttcaaattagccacggtg

SEQ ID NO: 478127 - DNA, 30 bp, Artificial Sequence
  Synthetic oligonucleotide
tagattctacgcctcgcttatgagacggtg

SEQ ID NO: 478128 - DNA, 30 bp, Artificial Sequence
  Synthetic oligonucleotide
actcacatgcagttaccggccactacggtg

SEQ ID NO: 478129 - DNA, 30 bp, Artificial Sequence
  Synthetic oligonucleotide
caatattaaaacacgtcgcgctttacggtg

SEQ ID NO: 478130 - DNA, 30 bp, Artificial Sequence
  Synthetic oligonucleotide
ctgctttcaccccttcgataccgaccggtg

SEQ ID NO: 478131 - DNA, 30 bp, Artificial Sequence
  Synthetic oligonucleotide
atgcgttgtcaacatagcacttgaccggtg

SEQ ID NO: 478132 - DNA, 30 bp, Artificial Sequence
  Synthetic oligonucleotide
ctgccaagcgttcctttacgtatcgcggtg

SEQ ID NO: 478133 - DNA, 30 bp, Artificial Sequence
  Synthetic oligonucleotide
aaaagatacgttttgccggtaacggcggtg

SEQ ID NO: 478134 - DNA, 30 bp, Artificial Sequence
  Synthetic oligonucleotide
tattatcttttaccaatcaaagaatcggtg

SEQ ID NO: 478135 - DNA, 30 bp, Artificial Sequence
  Synthetic oligonucleotide
atacaagattcatgtgaataatattcggtg

SEQ ID NO: 478136 - DNA, 30 bp, Artificial Sequence
  Synthetic oligonucleotide
tgttcaaggttttttgaccgaagaagggtg

SEQ ID NO: 478137 - DNA, 30 bp, Artificial Sequence
  Synthetic oligonucleotide
aatcaaacattaagcatgatgaacagggtg

SEQ ID NO: 478138 - DNA, 29 bp, Artificial Sequence
  Synthetic oligonucleotide
agtccgcagactagcccaccggcagggtg

SEQ ID NO: 478139 - DNA, 30 bp, Artificial Sequence
  Synthetic oligonucleotide
ctgcatagtaatcacatgctgggcagggtg

SEQ ID NO: 478140 - DNA, 30 bp, Artificial Sequence
  Synthetic oligonucleotide
tttgagtaaggacccggatcagtgagggtg

SEQ ID NO: 478141 - DNA, 30 bp, Artificial Sequence
  Synthetic oligonucleotide
agatggtatggcgctagttggtgacgggtg

SEQ ID NO: 478142 - DNA, 30 bp, Artificial Sequence
  Synthetic oligonucleotide
gacgatgacgagccaccaccgctacgggtg

SEQ ID NO: 478143 - DNA, 30 bp, Artificial Sequence
  Synthetic oligonucleotide
aggcagctatgccgatgacactcgcgggtg

SEQ ID NO: 478144 - DNA, 30 bp, Artificial Sequence
  Synthetic oligonucleotide
gcttcggccgttacgagctacaatcgggtg

SEQ ID NO: 478145 - DNA, 30 bp, Artificial Sequence
  Synthetic oligonucleotide
ctgattttccccgtcaaaaggtttcgggtg

SEQ ID NO: 478146 - DNA, 30 bp, Artificial Sequence
  Synthetic oligonucleotide
gtttagtacgactcagactgtaaaggggtg

SEQ ID NO: 478147 - DNA, 30 bp, Artificial Sequence
  Synthetic oligonucleotide
gtgccttcaacgccggttcataccggggtg

SEQ ID NO: 478148 - DNA, 30 bp, Artificial Sequence
  Synthetic oligonucleotide
gatgcccacctcacgccacagagcggggtg

SEQ ID NO: 478149 - DNA, 30 bp, Artificial Sequence
  Synthetic oligonucleotide
aggatcgccgcagtaacgatagaatgggtg

SEQ ID NO: 478150 - DNA, 30 bp, Artificial Sequence
  Synthetic oligonucleotide
taggacctgccctaattccactcatgggtg

SEQ ID NO: 478151 - DNA, 30 bp, Artificial Sequence
  Synthetic oligonucleotide
ctatgcgtgcatcctgttaattgctgggtg

SEQ ID NO: 478152 - DNA, 30 bp, Artificial Sequence
  Synthetic oligonucleotide
gctgcgccacttcatatttgtacgtgggtg

SEQ ID NO: 478153 - DNA, 30 bp, Artificial Sequence
  Synthetic oligonucleotide
ctgaattattagggtgtgccaccgtgggtg

SEQ ID NO: 478154 - DNA, 30 bp, Artificial Sequence
  Synthetic oligonucleotide
atacatccgccagctagaatatattgggtg

SEQ ID NO: 478155 - DNA, 30 bp, Artificial Sequence
  Synthetic oligonucleotide
aacactgccccagctggaatcgtttgggtg

SEQ ID NO: 478156 - DNA, 30 bp, Artificial Sequence
  Synthetic oligonucleotide
actggttaagagactggttaagacatggtg

SEQ ID NO: 478157 - DNA, 30 bp, Artificial Sequence
  Synthetic oligonucleotide
gtataacccgcggtagttttacatatggtg

SEQ ID NO: 478158 - DNA, 30 bp, Artificial Sequence
  Synthetic oligonucleotide
tctagttcgtgcacagcttttcttatggtg

SEQ ID NO: 478159 - DNA, 30 bp, Artificial Sequence
  Synthetic oligonucleotide
tctcggaaatttcgcagacagatactggtg

SEQ ID NO: 478160 - DNA, 30 bp, Artificial Sequence
  Synthetic oligonucleotide
gacaaccagtttatgtcatgagccctggtg

SEQ ID NO: 478161 - DNA, 30 bp, Artificial Sequence
  Synthetic oligonucleotide
gcacgacggatctccctgcttccgctggtg

SEQ ID NO: 478162 - DNA, 30 bp, Artificial Sequence
  Synthetic oligonucleotide
acacggcctggtttatacagccggctggtg

SEQ ID NO: 478163 - DNA, 30 bp, Artificial Sequence
  Synthetic oligonucleotide
gcagtccagaatatttcttacaatctggtg

SEQ ID NO: 478164 - DNA, 30 bp, Artificial Sequence
  Synthetic oligonucleotide
gcgggcgactcggcagagtcgcttctggtg

SEQ ID NO: 478165 - DNA, 30 bp, Artificial Sequence
  Synthetic oligonucleotide
taatcctgatgtcacggtaccatagtggtg

SEQ ID NO: 478166 - DNA, 30 bp, Artificial Sequence
  Synthetic oligonucleotide
ctctgatgtgatgcactggatagcgtggtg

SEQ ID NO: 478167 - DNA, 30 bp, Artificial Sequence
  Synthetic oligonucleotide
cgcggctctattatctggagaggcgtggtg

SEQ ID NO: 478168 - DNA, 30 bp, Artificial Sequence
  Synthetic oligonucleotide
gctgtgaaatgatgtaatgctgctgtggtg

SEQ ID NO: 478169 - DNA, 30 bp, Artificial Sequence
  Synthetic oligonucleotide
atacagggttagcataatccgtttgtggtg

SEQ ID NO: 478170 - DNA, 30 bp, Artificial Sequence
  Synthetic oligonucleotide
gaaagcattctatttttgatgtcattggtg

SEQ ID NO: 478171 - DNA, 30 bp, Artificial Sequence
  Synthetic oligonucleotide
agattcaacgtttcgcagtcaggattggtg

SEQ ID NO: 478172 - DNA, 30 bp, Artificial Sequence
  Synthetic oligonucleotide
ttccacccgcggttgttggcccccttggtg

SEQ ID NO: 478173 - DNA, 30 bp, Artificial Sequence
  Synthetic oligonucleotide
ctacgggtcttcagtcgacgcatcttggtg

SEQ ID NO: 478174 - DNA, 30 bp, Artificial Sequence
  Synthetic oligonucleotide
taaaatatcgactttctttgacagttggtg

SEQ ID NO: 478175 - DNA, 30 bp, Artificial Sequence
  Synthetic oligonucleotide
caagatgatgtggtaccccagcggttggtg

SEQ ID NO: 478176 - DNA, 30 bp, Artificial Sequence
  Synthetic oligonucleotide
agacccgtccgatcactagacgctttggtg

SEQ ID NO: 478177 - DNA, 30 bp, Artificial Sequence
  Synthetic oligonucleotide
atgcacactttcttaccgggatagaatgtg

SEQ ID NO: 478178 - DNA, 30 bp, Artificial Sequence
  Synthetic oligonucleotide
agcttttcatggtgttgcaaacataatgtg

SEQ ID NO: 478179 - DNA, 30 bp, Artificial Sequence
  Synthetic oligonucleotide
acaaattccactgagtggtctacacatgtg

SEQ ID NO: 478180 - DNA, 30 bp, Artificial Sequence
  Synthetic oligonucleotide
agcgacctagggtttaacggaacccatgtg

SEQ ID NO: 478181 - DNA, 30 bp, Artificial Sequence
  Synthetic oligonucleotide
ttcactgttcagtgtccctctccgcatgtg

SEQ ID NO: 478182 - DNA, 30 bp, Artificial Sequence
  Synthetic oligonucleotide
aagctgtatcaggatgcggctcaagatgtg

SEQ ID NO: 478183 - DNA, 30 bp, Artificial Sequence
  Synthetic oligonucleotide
cgccgcacacaaaatggtaggagagatgtg

SEQ ID NO: 478184 - DNA, 30 bp, Artificial Sequence
  Synthetic oligonucleotide
taacgacactgctctcagatggaggatgtg

SEQ ID NO: 478185 - DNA, 30 bp, Artificial Sequence
  Synthetic oligonucleotide
agtcttactactctaaaatgtagatatgtg

SEQ ID NO: 478186 - DNA, 30 bp, Artificial Sequence
  Synthetic oligonucleotide
attttatctggggtttctgcatgatatgtg

SEQ ID NO: 478187 - DNA, 30 bp, Artificial Sequence
  Synthetic oligonucleotide
agtaacgctcgtattctgcgcaggtatgtg

SEQ ID NO: 478188 - DNA, 30 bp, Artificial Sequence
  Synthetic oligonucleotide
gaattacttgaggtaggggcacggtatgtg

SEQ ID NO: 478189 - DNA, 30 bp, Artificial Sequence
  Synthetic oligonucleotide
ggggggactcgtaccggtggcgtgtatgtg

SEQ ID NO: 478190 - DNA, 30 bp, Artificial Sequence
  Synthetic oligonucleotide
tacaagtaatgcacacgcgcaacttatgtg

SEQ ID NO: 478191 - DNA, 30 bp, Artificial Sequence
  Synthetic oligonucleotide
gtcgctttagcaccgggtaacgtttatgtg

SEQ ID NO: 478192 - DNA, 30 bp, Artificial Sequence
  Synthetic oligonucleotide
taagtccttattagcgcgactgccactgtg

SEQ ID NO: 478193 - DNA, 30 bp, Artificial Sequence
  Synthetic oligonucleotide
gactatgtacacacaacttgacgcactgtg

SEQ ID NO: 478194 - DNA, 30 bp, Artificial Sequence
  Synthetic oligonucleotide
cagaaacaggggtcggaccctttgactgtg

SEQ ID NO: 478195 - DNA, 30 bp, Artificial Sequence
  Synthetic oligonucleotide
gagtagtatttgggtcgcgactatactgtg

SEQ ID NO: 478196 - DNA, 30 bp, Artificial Sequence
  Synthetic oligonucleotide
aatttttgcgaccttcaggttcgacctgtg

SEQ ID NO: 478197 - DNA, 30 bp, Artificial Sequence
  Synthetic oligonucleotide
gtgatcccaggcattcgcggaacgcctgtg

SEQ ID NO: 478198 - DNA, 30 bp, Artificial Sequence
  Synthetic oligonucleotide
cgcagcagcttcgtcttctcatcgcctgtg

SEQ ID NO: 478199 - DNA, 30 bp, Artificial Sequence
  Synthetic oligonucleotide
accctctacattagcagcatatttcctgtg

SEQ ID NO: 478200 - DNA, 30 bp, Artificial Sequence
  Synthetic oligonucleotide
agaattggtctccttctagcagccgctgtg

SEQ ID NO: 478201 - DNA, 30 bp, Artificial Sequence
  Synthetic oligonucleotide
cgcgtctgccataacactcgcggcgctgtg

SEQ ID NO: 478202 - DNA, 30 bp, Artificial Sequence
  Synthetic oligonucleotide
aataaactgccaaggttgcctgtctctgtg

SEQ ID NO: 478203 - DNA, 30 bp, Artificial Sequence
  Synthetic oligonucleotide
gtgccacattgctaccgcacgtcttctgtg

SEQ ID NO: 478204 - DNA, 30 bp, Artificial Sequence
  Synthetic oligonucleotide
gaaacatctcctgagcgctgtagttctgtg

SEQ ID NO: 478205 - DNA, 30 bp, Artificial Sequence
  Synthetic oligonucleotide
accggtgtaaactgggcctggcccagtgtg

SEQ ID NO: 478206 - DNA, 30 bp, Artificial Sequence
  Synthetic oligonucleotide
ttatctaagacccactcttgaaagagtgtg

SEQ ID NO: 478207 - DNA, 30 bp, Artificial Sequence
  Synthetic oligonucleotide
tgcacttttgacaatgcaccctttagtgtg

SEQ ID NO: 478208 - DNA, 30 bp, Artificial Sequence
  Synthetic oligonucleotide
cacagcgacgtagggtccacaagccgtgtg

SEQ ID NO: 478209 - DNA, 30 bp, Artificial Sequence
  Synthetic oligonucleotide
tagcacacaagttagatctgcgagcgtgtg

SEQ ID NO: 478210 - DNA, 30 bp, Artificial Sequence
  Synthetic oligonucleotide
cgcgagtttggaaaggcagcgcctcgtgtg

SEQ ID NO: 478211 - DNA, 30 bp, Artificial Sequence
  Synthetic oligonucleotide
cttctggaactcgacgccggacgaggtgtg

SEQ ID NO: 478212 - DNA, 30 bp, Artificial Sequence
  Synthetic oligonucleotide
caccctagttcctcttggcgcgttggtgtg

SEQ ID NO: 478213 - DNA, 30 bp, Artificial Sequence
  Synthetic oligonucleotide
ctttattttcgatcataattcaggtgtgtg

SEQ ID NO: 478214 - DNA, 30 bp, Artificial Sequence
  Synthetic oligonucleotide
tctaattatccggagccaaacaccattgtg

SEQ ID NO: 478215 - DNA, 30 bp, Artificial Sequence
  Synthetic oligonucleotide
atttcccctgctttagataagtccattgtg

SEQ ID NO: 478216 - DNA, 30 bp, Artificial Sequence
  Synthetic oligonucleotide
ctcttagggtggatcacccttcagattgtg

SEQ ID NO: 478217 - DNA, 30 bp, Artificial Sequence
  Synthetic oligonucleotide
ttgacgtcggcactgacccatatgattgtg

SEQ ID NO: 478218 - DNA, 30 bp, Artificial Sequence
  Synthetic oligonucleotide
gtgtgctagccgccatcgcattctattgtg

SEQ ID NO: 478219 - DNA, 30 bp, Artificial Sequence
  Synthetic oligonucleotide
tggaatccacaggcgcaggcaattattgtg

SEQ ID NO: 478220 - DNA, 29 bp, Artificial Sequence
  Synthetic oligonucleotide
gatcggtctgattcgagtctgcacttgtg

SEQ ID NO: 478221 - DNA, 30 bp, Artificial Sequence
  Synthetic oligonucleotide
ccaagctcccagcccggcaggagacttgtg

SEQ ID NO: 478222 - DNA, 30 bp, Artificial Sequence
  Synthetic oligonucleotide
gtttgtgacgacacactcaaggcccttgtg

SEQ ID NO: 478223 - DNA, 30 bp, Artificial Sequence
  Synthetic oligonucleotide
ggtactctaaggttaaaccaccttcttgtg

SEQ ID NO: 478224 - DNA, 30 bp, Artificial Sequence
  Synthetic oligonucleotide
ttaatattgtaaccaaatatgttggttgtg

SEQ ID NO: 478225 - DNA, 30 bp, Artificial Sequence
  Synthetic oligonucleotide
acccggggcggtatgaggggcggatttgtg

SEQ ID NO: 478226 - DNA, 30 bp, Artificial Sequence
  Synthetic oligonucleotide
tggcaggagcgatacgccaagaagtttgtg

SEQ ID NO: 478227 - DNA, 30 bp, Artificial Sequence
  Synthetic oligonucleotide
gttttacacaagcacggtaacgcttttgtg

SEQ ID NO: 478228 - DNA, 30 bp, Artificial Sequence
  Synthetic oligonucleotide
aagtatatggtgcggctaatttccaaattg

SEQ ID NO: 478229 - DNA, 31 bp, Artificial Sequence
  Synthetic oligonucleotide
tttaagcttaaacctgctcggccggaaattg

SEQ ID NO: 478230 - DNA, 30 bp, Artificial Sequence
  Synthetic oligonucleotide
acggaagaacctacctccaaaaataaattg

SEQ ID NO: 478231 - DNA, 30 bp, Artificial Sequence
  Synthetic oligonucleotide
ccctaatgggcgtacggagtgcgtaaattg

SEQ ID NO: 478232 - DNA, 30 bp, Artificial Sequence
  Synthetic oligonucleotide
ttgttgttaacaatgggtgcttaacaattg

SEQ ID NO: 478233 - DNA, 30 bp, Artificial Sequence
  Synthetic oligonucleotide
agtacggtgggggtaaaccccccggaattg

SEQ ID NO: 478234 - DNA, 30 bp, Artificial Sequence
  Synthetic oligonucleotide
aggttccataatacagtacgcagggaattg

SEQ ID NO: 478235 - DNA, 30 bp, Artificial Sequence
  Synthetic oligonucleotide
aattctcactatgtaatgaagggggaattg

SEQ ID NO: 478236 - DNA, 30 bp, Artificial Sequence
  Synthetic oligonucleotide
agttttggtaaaggaatttgcatggaattg

SEQ ID NO: 478237 - DNA, 30 bp, Artificial Sequence
  Synthetic oligonucleotide
ccggccttacttttgtaaggtttggaattg

SEQ ID NO: 478238 - DNA, 30 bp, Artificial Sequence
  Synthetic oligonucleotide
ttttacggttggtagttttttcatgaattg

SEQ ID NO: 478239 - DNA, 30 bp, Artificial Sequence
  Synthetic oligonucleotide
taatcgcggcgagtgcgagcggatgaattg

SEQ ID NO: 478240 - DNA, 30 bp, Artificial Sequence
  Synthetic oligonucleotide
ggccgggcggtattcacggatctataattg

SEQ ID NO: 478241 - DNA, 29 bp, Artificial Sequence
  Synthetic oligonucleotide
tactaactgtctatctgttcggctaattg

SEQ ID NO: 478242 - DNA, 30 bp, Artificial Sequence
  Synthetic oligonucleotide
tatacggcacggttctggatagggtaattg

SEQ ID NO: 478243 - DNA, 30 bp, Artificial Sequence
  Synthetic oligonucleotide
taagacgcttctgtacgcggagtgtaattg

SEQ ID NO: 478244 - DNA, 30 bp, Artificial Sequence
  Synthetic oligonucleotide
ctgtctcgccggaggttggcaagttaattg

SEQ ID NO: 478245 - DNA, 30 bp, Artificial Sequence
  Synthetic oligonucleotide
tattctcgagttcgggagctcggttaattg

SEQ ID NO: 478246 - DNA, 30 bp, Artificial Sequence
  Synthetic oligonucleotide
ttgttttcaaaaaccatatgtatttaattg

SEQ ID NO: 478247 - DNA, 30 bp, Artificial Sequence
  Synthetic oligonucleotide
aagatggttctttatcggggactttaattg

SEQ ID NO: 478248 - DNA, 30 bp, Artificial Sequence
  Synthetic oligonucleotide
atctggggaaattcgagattagaaacattg

SEQ ID NO: 478249 - DNA, 30 bp, Artificial Sequence
  Synthetic oligonucleotide
attgtaaaaatagccggtctcataacattg

SEQ ID NO: 478250 - DNA, 30 bp, Artificial Sequence
  Synthetic oligonucleotide
tctgttttaggggtagtgtcgtagacattg

SEQ ID NO: 478251 - DNA, 30 bp, Artificial Sequence
  Synthetic oligonucleotide
actaccgtttaatgttcacgcgaaccattg

SEQ ID NO: 478252 - DNA, 30 bp, Artificial Sequence
  Synthetic oligonucleotide
ctcgttgttcctgaatgagcatgaccattg

SEQ ID NO: 478253 - DNA, 30 bp, Artificial Sequence
  Synthetic oligonucleotide
tccttgcacgtggctggccgaatgccattg

SEQ ID NO: 478254 - DNA, 30 bp, Artificial Sequence
  Synthetic oligonucleotide
atcccaagataatcccgttattatccattg

SEQ ID NO: 478255 - DNA, 30 bp, Artificial Sequence
  Synthetic oligonucleotide
agtatatacacaccgagcgcgaaagcattg

SEQ ID NO: 478256 - DNA, 30 bp, Artificial Sequence
  Synthetic oligonucleotide
gggctgagtaaccggaaagggttcgcattg

SEQ ID NO: 478257 - DNA, 30 bp, Artificial Sequence
  Synthetic oligonucleotide
aaacaacctgagggataaacggtggcattg

SEQ ID NO: 478258 - DNA, 30 bp, Artificial Sequence
  Synthetic oligonucleotide
ttcaagctgagcactactgcaaatgcattg

SEQ ID NO: 478259 - DNA, 30 bp, Artificial Sequence
  Synthetic oligonucleotide
tccatgccaaatcatcttgctaatgcattg

SEQ ID NO: 478260 - DNA, 30 bp, Artificial Sequence
  Synthetic oligonucleotide
ttggttaggagactaaataaacatgcattg

SEQ ID NO: 478261 - DNA, 30 bp, Artificial Sequence
  Synthetic oligonucleotide
tgttcggtaatagccttttaaactgcattg

SEQ ID NO: 478262 - DNA, 30 bp, Artificial Sequence
  Synthetic oligonucleotide
tatgagcatctacgaagcgtgttgtcattg

SEQ ID NO: 478263 - DNA, 30 bp, Artificial Sequence
  Synthetic oligonucleotide
atatcgtaggcgatcgttaattattcattg

SEQ ID NO: 478264 - DNA, 30 bp, Artificial Sequence
  Synthetic oligonucleotide
aaaacacctggtgttcggcatagttcattg

SEQ ID NO: 478265 - DNA, 30 bp, Artificial Sequence
  Synthetic oligonucleotide
gcttatcttggattataaaaccacagattg

SEQ ID NO: 478266 - DNA, 30 bp, Artificial Sequence
  Synthetic oligonucleotide
ctacatggccgcggtatatttcacagattg

SEQ ID NO: 478267 - DNA, 30 bp, Artificial Sequence
  Synthetic oligonucleotide
ggaaccttttcagcagaaaccgcccgattg

SEQ ID NO: 478268 - DNA, 30 bp, Artificial Sequence
  Synthetic oligonucleotide
acatgtgaaaccgcagctgttggccgattg

SEQ ID NO: 478269 - DNA, 30 bp, Artificial Sequence
  Synthetic oligonucleotide
tgactaggacccacctttctacggcgattg

SEQ ID NO: 478270 - DNA, 30 bp, Artificial Sequence
  Synthetic oligonucleotide
aagcttcggttacataggaagtttcgattg

SEQ ID NO: 478271 - DNA, 30 bp, Artificial Sequence
  Synthetic oligonucleotide
ttttaacactggcttcactatccaggattg

SEQ ID NO: 478272 - DNA, 30 bp, Artificial Sequence
  Synthetic oligonucleotide
aatttgcaagtgaggattttgcgaggattg

SEQ ID NO: 478273 - DNA, 30 bp, Artificial Sequence
  Synthetic oligonucleotide
tagatctccacttgaaccttgggcggattg

SEQ ID NO: 478274 - DNA, 30 bp, Artificial Sequence
  Synthetic oligonucleotide
tctgctacattagcatgaggactcggattg

SEQ ID NO: 478275 - DNA, 30 bp, Artificial Sequence
  Synthetic oligonucleotide
attcctcatggcaagttatcgatgggattg

SEQ ID NO: 478276 - DNA, 30 bp, Artificial Sequence
  Synthetic oligonucleotide
tattagcaggattcggatgcttatggattg

SEQ ID NO: 478277 - DNA, 30 bp, Artificial Sequence
  Synthetic oligonucleotide
ggtatcaatgccatgccataatcatgattg

SEQ ID NO: 478278 - DNA, 30 bp, Artificial Sequence
  Synthetic oligonucleotide
aatcacagtattatcaatcatcgatgattg

SEQ ID NO: 478279 - DNA, 30 bp, Artificial Sequence
  Synthetic oligonucleotide
ctgcgcgctctattccgcgcttactgattg

SEQ ID NO: 478280 - DNA, 30 bp, Artificial Sequence
  Synthetic oligonucleotide
cgtacttaggcacaccctgtaagctgattg

SEQ ID NO: 478281 - DNA, 30 bp, Artificial Sequence
  Synthetic oligonucleotide
tgaacagtcactattcaacggatttgattg

SEQ ID NO: 478282 - DNA, 30 bp, Artificial Sequence
  Synthetic oligonucleotide
agtgggtgacgcgcaattgctttttgattg

SEQ ID NO: 478283 - DNA, 30 bp, Artificial Sequence
  Synthetic oligonucleotide
actttacaagtagcgtttcgaaaaatattg

SEQ ID NO: 478284 - DNA, 30 bp, Artificial Sequence
  Synthetic oligonucleotide
ggtatcacgtacgcaccgccgccaatattg

SEQ ID NO: 478285 - DNA, 30 bp, Artificial Sequence
  Synthetic oligonucleotide
ctcattattcaggccggatatataatattg

SEQ ID NO: 478286 - DNA, 30 bp, Artificial Sequence
  Synthetic oligonucleotide
atccatggtttagcccgagattacatattg

SEQ ID NO: 478287 - DNA, 30 bp, Artificial Sequence
  Synthetic oligonucleotide
cgcagctatgcaatggggtttagcatattg

SEQ ID NO: 478288 - DNA, 30 bp, Artificial Sequence
  Synthetic oligonucleotide
ggttttcagtgcgtttgtataacgatattg

SEQ ID NO: 478289 - DNA, 30 bp, Artificial Sequence
  Synthetic oligonucleotide
tattctgatgcttaagcggcaaatatattg

SEQ ID NO: 478290 - DNA, 30 bp, Artificial Sequence
  Synthetic oligonucleotide
aataagtttgaaagttcactagacctattg

SEQ ID NO: 478291 - DNA, 30 bp, Artificial Sequence
  Synthetic oligonucleotide
tttaattatgagcgacttgaatagctattg

SEQ ID NO: 478292 - DNA, 30 bp, Artificial Sequence
  Synthetic oligonucleotide
cacccgagcacaattcatatagggctattg

SEQ ID NO: 478293 - DNA, 30 bp, Artificial Sequence
  Synthetic oligonucleotide
ccatggacgtgtcagaagcgctctctattg

SEQ ID NO: 478294 - DNA, 30 bp, Artificial Sequence
  Synthetic oligonucleotide
acagatcatgcccaaaccttcggagtattg

SEQ ID NO: 478295 - DNA, 30 bp, Artificial Sequence
  Synthetic oligonucleotide
ttcaatgactgtcgtttagcctccgtattg

SEQ ID NO: 478296 - DNA, 30 bp, Artificial Sequence
  Synthetic oligonucleotide
ctggacgtccatgacgccgatatggtattg

SEQ ID NO: 478297 - DNA, 30 bp, Artificial Sequence
  Synthetic oligonucleotide
atttcagcccatcaccggctggtggtattg

SEQ ID NO: 478298 - DNA, 30 bp, Artificial Sequence
  Synthetic oligonucleotide
aacaacgggccatgattttcgtctgtattg

SEQ ID NO: 478299 - DNA, 30 bp, Artificial Sequence
  Synthetic oligonucleotide
ccatatttattgggtgaacactttgtattg

SEQ ID NO: 478300 - DNA, 30 bp, Artificial Sequence
  Synthetic oligonucleotide
gtttagagcctatggatcggtcacttattg

SEQ ID NO: 478301 - DNA, 30 bp, Artificial Sequence
  Synthetic oligonucleotide
taaccctggctatcttgggggtgcttattg

SEQ ID NO: 478302 - DNA, 30 bp, Artificial Sequence
  Synthetic oligonucleotide
cagaccaccatctaacaaccgttcttattg

SEQ ID NO: 478303 - DNA, 30 bp, Artificial Sequence
  Synthetic oligonucleotide
ggactaaaagaaactttgctatagttattg

SEQ ID NO: 478304 - DNA, 31 bp, Artificial Sequence
  Synthetic oligonucleotide
tccaacgttcgccttgaattttctgttattg

SEQ ID NO: 478305 - DNA, 30 bp, Artificial Sequence
  Synthetic oligonucleotide
ccgctaggtctttctaccctccttttattg

SEQ ID NO: 478306 - DNA, 30 bp, Artificial Sequence
  Synthetic oligonucleotide
acaccataagttcgactcggagttttattg

SEQ ID NO: 478307 - DNA, 30 bp, Artificial Sequence
  Synthetic oligonucleotide
aagtactcttcaacctaaacctcaaacttg

SEQ ID NO: 478308 - DNA, 30 bp, Artificial Sequence
  Synthetic oligonucleotide
ttgggggatgggtacggggcccgaaacttg

SEQ ID NO: 478309 - DNA, 30 bp, Artificial Sequence
  Synthetic oligonucleotide
tttgcaattacattggcggtcataaacttg

SEQ ID NO: 478310 - DNA, 30 bp, Artificial Sequence
  Synthetic oligonucleotide
gcaatttcgcgcaatcatgtgcacaacttg

SEQ ID NO: 478311 - DNA, 30 bp, Artificial Sequence
  Synthetic oligonucleotide
ctctgcgatcgacggtgtctggttaacttg

SEQ ID NO: 478312 - DNA, 30 bp, Artificial Sequence
  Synthetic oligonucleotide
cgtaccaataatgctactaatcagcacttg

SEQ ID NO: 478313 - DNA, 30 bp, Artificial Sequence
  Synthetic oligonucleotide
ctataatttaatgataaattgtagcacttg

SEQ ID NO: 478314 - DNA, 30 bp, Artificial Sequence
  Synthetic oligonucleotide
tcccggttccccgagtctggaaatcacttg

SEQ ID NO: 478315 - DNA, 30 bp, Artificial Sequence
  Synthetic oligonucleotide
taagtacacaaaggttcgtctaaagacttg

SEQ ID NO: 478316 - DNA, 30 bp, Artificial Sequence
  Synthetic oligonucleotide
gggcgtatctcggcagcgcaactagacttg

SEQ ID NO: 478317 - DNA, 30 bp, Artificial Sequence
  Synthetic oligonucleotide
acccggatatggcctgctcgggaatacttg

SEQ ID NO: 478318 - DNA, 30 bp, Artificial Sequence
  Synthetic oligonucleotide
acgcgctacccatagcggctggtatacttg

SEQ ID NO: 478319 - DNA, 30 bp, Artificial Sequence
  Synthetic oligonucleotide
tgcggcgacaaggcctagaggttctacttg

SEQ ID NO: 478320 - DNA, 30 bp, Artificial Sequence
  Synthetic oligonucleotide
gtgacagcacatccgttttctggttacttg

SEQ ID NO: 478321 - DNA, 30 bp, Artificial Sequence
  Synthetic oligonucleotide
ctggtactacgtacgtgctgcaggaccttg

SEQ ID NO: 478322 - DNA, 30 bp, Artificial Sequence
  Synthetic oligonucleotide
tgggacactagaagcgacgcggctaccttg

SEQ ID NO: 478323 - DNA, 30 bp, Artificial Sequence
  Synthetic oligonucleotide
tttaatggagcacataactgtacacccttg

SEQ ID NO: 478324 - DNA, 30 bp, Artificial Sequence
  Synthetic oligonucleotide
ggccccgaatacccggtagtacaccccttg

SEQ ID NO: 478325 - DNA, 30 bp, Artificial Sequence
  Synthetic oligonucleotide
tttagatagccgtgtacaaatttagccttg

SEQ ID NO: 478326 - DNA, 30 bp, Artificial Sequence
  Synthetic oligonucleotide
aacacatcgctgatgtgtgtacccgccttg

SEQ ID NO: 478327 - DNA, 30 bp, Artificial Sequence
  Synthetic oligonucleotide
attctacgccgagataaatttagggccttg

SEQ ID NO: 478328 - DNA, 30 bp, Artificial Sequence
  Synthetic oligonucleotide
acctaccggtaccgcggttttcttgccttg

SEQ ID NO: 478329 - DNA, 30 bp, Artificial Sequence
  Synthetic oligonucleotide
gctgcttgctgtagacatacatacagcttg

SEQ ID NO: 478330 - DNA, 30 bp, Artificial Sequence
  Synthetic oligonucleotide
aaaggaaggccgttgattgtcctccgcttg

SEQ ID NO: 478331 - DNA, 30 bp, Artificial Sequence
  Synthetic oligonucleotide
gcaccgggctgcacaacaggaggtcgcttg

SEQ ID NO: 478332 - DNA, 30 bp, Artificial Sequence
  Synthetic oligonucleotide
aactgtgatattatctattgcggaggcttg

SEQ ID NO: 478333 - DNA, 30 bp, Artificial Sequence
  Synthetic oligonucleotide
tgttgcgagctcacaacaacttgcggcttg

SEQ ID NO: 478334 - DNA, 30 bp, Artificial Sequence
  Synthetic oligonucleotide
aatacgcagcatcgactcgacatatgcttg

SEQ ID NO: 478335 - DNA, 30 bp, Artificial Sequence
  Synthetic oligonucleotide
tagttttccgatcggcaacacctatgcttg

SEQ ID NO: 478336 - DNA, 30 bp, Artificial Sequence
  Synthetic oligonucleotide
gcgcaacatgctacatgagtagtctgcttg

SEQ ID NO: 478337 - DNA, 30 bp, Artificial Sequence
  Synthetic oligonucleotide
ttaaagcgccaagggtataatcaaatcttg

SEQ ID NO: 478338 - DNA, 30 bp, Artificial Sequence
  Synthetic oligonucleotide
catttttagaagtcggggcctcgcatcttg

SEQ ID NO: 478339 - DNA, 30 bp, Artificial Sequence
  Synthetic oligonucleotide
attactagattactattgtctctcatcttg

SEQ ID NO: 478340 - DNA, 30 bp, Artificial Sequence
  Synthetic oligonucleotide
gttgctactagcggtgccgtccgtatcttg

SEQ ID NO: 478341 - DNA, 30 bp, Artificial Sequence
  Synthetic oligonucleotide
tgtagcattgacgcgccgcgtacactcttg

SEQ ID NO: 478342 - DNA, 30 bp, Artificial Sequence
  Synthetic oligonucleotide
tgaacaggtactaagacgccagccctcttg

SEQ ID NO: 478343 - DNA, 30 bp, Artificial Sequence
  Synthetic oligonucleotide
gtttgtactaggaggatagtcttcctcttg

SEQ ID NO: 478344 - DNA, 30 bp, Artificial Sequence
  Synthetic oligonucleotide
acccgcggacacaaggttcgtcagctcttg

SEQ ID NO: 478345 - DNA, 30 bp, Artificial Sequence
  Synthetic oligonucleotide
acccttatactaccctagatctcagtcttg

SEQ ID NO: 478346 - DNA, 30 bp, Artificial Sequence
  Synthetic oligonucleotide
ttgggcgcgacgtacgcctaagacgtcttg

SEQ ID NO: 478347 - DNA, 30 bp, Artificial Sequence
  Synthetic oligonucleotide
tctgcaaaatgaccggtccgctgtgtcttg

SEQ ID NO: 478348 - DNA, 30 bp, Artificial Sequence
  Synthetic oligonucleotide
agtcgttgggctctctgtcataaattcttg

SEQ ID NO: 478349 - DNA, 30 bp, Artificial Sequence
  Synthetic oligonucleotide
aaaattgaggtaggtaggatgccattcttg

SEQ ID NO: 478350 - DNA, 30 bp, Artificial Sequence
  Synthetic oligonucleotide
tagacacgaggacgcgagcaagttttcttg

SEQ ID NO: 478351 - DNA, 30 bp, Artificial Sequence
  Synthetic oligonucleotide
cgcaaggttgagttacgcacactaaagttg

SEQ ID NO: 478352 - DNA, 30 bp, Artificial Sequence
  Synthetic oligonucleotide
taattagctagtagtgacatttccaagttg

SEQ ID NO: 478353 - DNA, 30 bp, Artificial Sequence
  Synthetic oligonucleotide
tcaaattaatatacgccacagattaagttg

SEQ ID NO: 478354 - DNA, 30 bp, Artificial Sequence
  Synthetic oligonucleotide
agtgcttatctcacggggacgcttaagttg

SEQ ID NO: 478355 - DNA, 30 bp, Artificial Sequence
  Synthetic oligonucleotide
aagttttcgtcaagcgtttcataacagttg

SEQ ID NO: 478356 - DNA, 30 bp, Artificial Sequence
  Synthetic oligonucleotide
gattgggcacagtgggcccttggacagttg

SEQ ID NO: 478357 - DNA, 30 bp, Artificial Sequence
  Synthetic oligonucleotide
gaggtcacttagtgtaaatgtccgcagttg

SEQ ID NO: 478358 - DNA, 30 bp, Artificial Sequence
  Synthetic oligonucleotide
attaatcgcataaacgtaattatgcagttg

SEQ ID NO: 478359 - DNA, 30 bp, Artificial Sequence
  Synthetic oligonucleotide
tacagatggatcatatggttcgtgcagttg

SEQ ID NO: 478360 - DNA, 30 bp, Artificial Sequence
  Synthetic oligonucleotide
gtgggttttcgttagtagtctcttcagttg

SEQ ID NO: 478361 - DNA, 30 bp, Artificial Sequence
  Synthetic oligonucleotide
ttgcagtgcgaacaagtcccaggagagttg

SEQ ID NO: 478362 - DNA, 30 bp, Artificial Sequence
  Synthetic oligonucleotide
ctaaaatggctatgatgggccatagagttg

SEQ ID NO: 478363 - DNA, 30 bp, Artificial Sequence
  Synthetic oligonucleotide
gagtagacatacatggaacgcagggagttg

SEQ ID NO: 478364 - DNA, 30 bp, Artificial Sequence
  Synthetic oligonucleotide
ttttgatggcgtagcaggatacgggagttg

SEQ ID NO: 478365 - DNA, 30 bp, Artificial Sequence
  Synthetic oligonucleotide
ctaccatcgttttccattttgtatgagttg

SEQ ID NO: 478366 - DNA, 30 bp, Artificial Sequence
  Synthetic oligonucleotide
gatctcaaatacttcaggccaaggtagttg

SEQ ID NO: 478367 - DNA, 30 bp, Artificial Sequence
  Synthetic oligonucleotide
accaccgccgcttccaatcctcggtagttg

SEQ ID NO: 478368 - DNA, 30 bp, Artificial Sequence
  Synthetic oligonucleotide
aattatacggtctcattagagtattagttg

SEQ ID NO: 478369 - DNA, 30 bp, Artificial Sequence
  Synthetic oligonucleotide
tttcatcgaatccaggccatgtattagttg

SEQ ID NO: 478370 - DNA, 30 bp, Artificial Sequence
  Synthetic oligonucleotide
gcatcttatggcctagcctttatttagttg

SEQ ID NO: 478371 - DNA, 30 bp, Artificial Sequence
  Synthetic oligonucleotide
tcccctgagccgtgactatgattttagttg

SEQ ID NO: 478372 - DNA, 30 bp, Artificial Sequence
  Synthetic oligonucleotide
aaacgtttaaggtatgaaaggaacacgttg

SEQ ID NO: 478373 - DNA, 30 bp, Artificial Sequence
  Synthetic oligonucleotide
ggaccctggaccactatcgtaatcccgttg

SEQ ID NO: 478374 - DNA, 30 bp, Artificial Sequence
  Synthetic oligonucleotide
gcattcgggtataacggtgttacagcgttg

SEQ ID NO: 478375 - DNA, 30 bp, Artificial Sequence
  Synthetic oligonucleotide
ctttgatgtaattatcctaagagagcgttg

SEQ ID NO: 478376 - DNA, 29 bp, Artificial Sequence
  Synthetic oligonucleotide
cgcgcttcatgctattacgcgtagcgttg

SEQ ID NO: 478377 - DNA, 30 bp, Artificial Sequence
  Synthetic oligonucleotide
ctgctgcgcacaacaagtgtgtccgcgttg

SEQ ID NO: 478378 - DNA, 30 bp, Artificial Sequence
  Synthetic oligonucleotide
gctcgtatacgcttcagaggttgtgcgttg

SEQ ID NO: 478379 - DNA, 30 bp, Artificial Sequence
  Synthetic oligonucleotide
gcgggatatgatgcagtctgaggatcgttg

SEQ ID NO: 478380 - DNA, 30 bp, Artificial Sequence
  Synthetic oligonucleotide
aattactgtcgcctgactgctttatcgttg

SEQ ID NO: 478381 - DNA, 30 bp, Artificial Sequence
  Synthetic oligonucleotide
gctatcgccggcgcactctctaactcgttg

SEQ ID NO: 478382 - DNA, 30 bp, Artificial Sequence
  Synthetic oligonucleotide
aaacaagctgagcgctgccgtctttcgttg

SEQ ID NO: 478383 - DNA, 30 bp, Artificial Sequence
  Synthetic oligonucleotide
tatttcctttagggtaccttggttaggttg

SEQ ID NO: 478384 - DNA, 30 bp, Artificial Sequence
  Synthetic oligonucleotide
tcatattgacgagacaaccgctttaggttg

SEQ ID NO: 478385 - DNA, 30 bp, Artificial Sequence
  Synthetic oligonucleotide
tagaaattaggccggagtctaccacggttg

SEQ ID NO: 478386 - DNA, 30 bp, Artificial Sequence
  Synthetic oligonucleotide
tatcgctgtgaatctggagaaacgcggttg

SEQ ID NO: 478387 - DNA, 30 bp, Artificial Sequence
  Synthetic oligonucleotide
gatgttaaatgtcccttccccgtgcggttg

SEQ ID NO: 478388 - DNA, 30 bp, Artificial Sequence
  Synthetic oligonucleotide
gcgtccacggttacttggacctatcggttg

SEQ ID NO: 478389 - DNA, 30 bp, Artificial Sequence
  Synthetic oligonucleotide
atgttgcttctaagggttaattgagggttg

SEQ ID NO: 478390 - DNA, 30 bp, Artificial Sequence
  Synthetic oligonucleotide
gggtggacatgtattagcttgatagggttg

SEQ ID NO: 478391 - DNA, 30 bp, Artificial Sequence
  Synthetic oligonucleotide
cattgtaggatctgaacacacctagggttg

SEQ ID NO: 478392 - DNA, 30 bp, Artificial Sequence
  Synthetic oligonucleotide
ctataaccgtttcgaagatacaccgggttg

SEQ ID NO: 478393 - DNA, 30 bp, Artificial Sequence
  Synthetic oligonucleotide
ctcgcggccactacgtctggggcggggttg

SEQ ID NO: 478394 - DNA, 30 bp, Artificial Sequence
  Synthetic oligonucleotide
acctaattattctgacccatgatggggttg

SEQ ID NO: 478395 - DNA, 30 bp, Artificial Sequence
  Synthetic oligonucleotide
tttgaggctgctcagtatcccgtctggttg

SEQ ID NO: 478396 - DNA, 30 bp, Artificial Sequence
  Synthetic oligonucleotide
cctggagttggaacagattccaggtggttg

SEQ ID NO: 478397 - DNA, 30 bp, Artificial Sequence
  Synthetic oligonucleotide
tctttctgcctgtgaccgttgaggtggttg

SEQ ID NO: 478398 - DNA, 30 bp, Artificial Sequence
  Synthetic oligonucleotide
gaaacccggtcatgggccattagttggttg

SEQ ID NO: 478399 - DNA, 30 bp, Artificial Sequence
  Synthetic oligonucleotide
tcacgcgccggggtaccaacgttttggttg

SEQ ID NO: 478400 - DNA, 30 bp, Artificial Sequence
  Synthetic oligonucleotide
acgtattatggcagacttcatgaaatgttg

SEQ ID NO: 478401 - DNA, 30 bp, Artificial Sequence
  Synthetic oligonucleotide
gacttgatggcttgtggattttaaatgttg

SEQ ID NO: 478402 - DNA, 30 bp, Artificial Sequence
  Synthetic oligonucleotide
aagaattgtactggcgtggccgccctgttg

SEQ ID NO: 478403 - DNA, 30 bp, Artificial Sequence
  Synthetic oligonucleotide
tagcgcttacacaacttagaagagctgttg

SEQ ID NO: 478404 - DNA, 30 bp, Artificial Sequence
  Synthetic oligonucleotide
tttcgctctaattggagattttaagtgttg

SEQ ID NO: 478405 - DNA, 30 bp, Artificial Sequence
  Synthetic oligonucleotide
gattgagatcaaggtgagttttaagtgttg

SEQ ID NO: 478406 - DNA, 30 bp, Artificial Sequence
  Synthetic oligonucleotide
ttaatcagggtttggggaggtctggtgttg

SEQ ID NO: 478407 - DNA, 30 bp, Artificial Sequence
  Synthetic oligonucleotide
ccttattggacttatagaactttggtgttg

SEQ ID NO: 478408 - DNA, 30 bp, Artificial Sequence
  Synthetic oligonucleotide
ttggactgggtagacttgaggtatgtgttg

SEQ ID NO: 478409 - DNA, 30 bp, Artificial Sequence
  Synthetic oligonucleotide
caaattactcgtttgagtccccacttgttg

SEQ ID NO: 478410 - DNA, 30 bp, Artificial Sequence
  Synthetic oligonucleotide
tatgaccgagaggaattccttttgttgttg

SEQ ID NO: 478411 - DNA, 30 bp, Artificial Sequence
  Synthetic oligonucleotide
aattatccaaatccttgtgcgagtttgttg

SEQ ID NO: 478412 - DNA, 30 bp, Artificial Sequence
  Synthetic oligonucleotide
gcgtccggtttaagaaggtccggtttgttg

SEQ ID NO: 478413 - DNA, 30 bp, Artificial Sequence
  Synthetic oligonucleotide
gttggattgagtcagtgtataattttgttg

SEQ ID NO: 478414 - DNA, 30 bp, Artificial Sequence
  Synthetic oligonucleotide
aatgagatctcctaccctataccaaatttg

SEQ ID NO: 478415 - DNA, 30 bp, Artificial Sequence
  Synthetic oligonucleotide
gcacttatgaatacaccatcatgtaatttg

SEQ ID NO: 478416 - DNA, 30 bp, Artificial Sequence
  Synthetic oligonucleotide
atttccgcgatggtctgagagtaccatttg

SEQ ID NO: 478417 - DNA, 30 bp, Artificial Sequence
  Synthetic oligonucleotide
gtaaatatatgaaggacggcgtggcatttg

SEQ ID NO: 478418 - DNA, 30 bp, Artificial Sequence
  Synthetic oligonucleotide
atttggcttatacacgtggaactgcatttg

SEQ ID NO: 478419 - DNA, 30 bp, Artificial Sequence
  Synthetic oligonucleotide
tattctactggcgatctcggtcatcatttg

SEQ ID NO: 478420 - DNA, 30 bp, Artificial Sequence
  Synthetic oligonucleotide
gtttaaacttattgagtaagggctcatttg

SEQ ID NO: 478421 - DNA, 30 bp, Artificial Sequence
  Synthetic oligonucleotide
aagctttacaggacggggctgtaagatttg

SEQ ID NO: 478422 - DNA, 30 bp, Artificial Sequence
  Synthetic oligonucleotide
aattcttccatcaatagacggtgggatttg

SEQ ID NO: 478423 - DNA, 30 bp, Artificial Sequence
  Synthetic oligonucleotide
ctataccgtttgagtacgctaccatatttg

SEQ ID NO: 478424 - DNA, 30 bp, Artificial Sequence
  Synthetic oligonucleotide
ttctacatcgagtctaagtactcatatttg

SEQ ID NO: 478425 - DNA, 30 bp, Artificial Sequence
  Synthetic oligonucleotide
tcacgactacgtcccgcaatgaattatttg

SEQ ID NO: 478426 - DNA, 30 bp, Artificial Sequence
  Synthetic oligonucleotide
aatctccaagtttagccgaataattatttg

SEQ ID NO: 478427 - DNA, 30 bp, Artificial Sequence
  Synthetic oligonucleotide
aaagaaaaatggctcgacctctgttatttg

SEQ ID NO: 478428 - DNA, 30 bp, Artificial Sequence
  Synthetic oligonucleotide
ctgtgaatcatacgattgtcatcaactttg

SEQ ID NO: 478429 - DNA, 30 bp, Artificial Sequence
  Synthetic oligonucleotide
aaaaggtggagagttacgacgcacactttg

SEQ ID NO: 478430 - DNA, 30 bp, Artificial Sequence
  Synthetic oligonucleotide
catctttagtccaactggtaatggactttg

SEQ ID NO: 478431 - DNA, 30 bp, Artificial Sequence
  Synthetic oligonucleotide
atgtaaaccgcatccaaaggctggactttg

SEQ ID NO: 478432 - DNA, 30 bp, Artificial Sequence
  Synthetic oligonucleotide
gttcgtgtaagaggaagcgggtctactttg

SEQ ID NO: 478433 - DNA, 30 bp, Artificial Sequence
  Synthetic oligonucleotide
ggttaggttgatcgaatctcagagcctttg

SEQ ID NO: 478434 - DNA, 30 bp, Artificial Sequence
  Synthetic oligonucleotide
atcatgacagtcataaattagcggcctttg

SEQ ID NO: 478435 - DNA, 30 bp, Artificial Sequence
  Synthetic oligonucleotide
tcaggtttgtttatatcaagaagcgctttg

SEQ ID NO: 478436 - DNA, 30 bp, Artificial Sequence
  Synthetic oligonucleotide
tcagcaatccaacgatgagagtgcgctttg

SEQ ID NO: 478437 - DNA, 30 bp, Artificial Sequence
  Synthetic oligonucleotide
ttactaaagcgatgttactaggtcgctttg

SEQ ID NO: 478438 - DNA, 30 bp, Artificial Sequence
  Synthetic oligonucleotide
aatggtcgtaaattgactctttttgctttg

SEQ ID NO: 478439 - DNA, 30 bp, Artificial Sequence
  Synthetic oligonucleotide
tccccgtcactctgtaactcacgatctttg

SEQ ID NO: 478440 - DNA, 30 bp, Artificial Sequence
  Synthetic oligonucleotide
cctacgcaggcgcctacacataactctttg

SEQ ID NO: 478441 - DNA, 30 bp, Artificial Sequence
  Synthetic oligonucleotide
tattttagtagatagacacacgtttctttg

SEQ ID NO: 478442 - DNA, 30 bp, Artificial Sequence
  Synthetic oligonucleotide
ctccctgcccgcgtggtaccctgaagtttg

SEQ ID NO: 478443 - DNA, 30 bp, Artificial Sequence
  Synthetic oligonucleotide
gcgtaatgtccacggagcatttgaagtttg

SEQ ID NO: 478444 - DNA, 30 bp, Artificial Sequence
  Synthetic oligonucleotide
ataacataaggacctgtccgcaagagtttg

SEQ ID NO: 478445 - DNA, 30 bp, Artificial Sequence
  Synthetic oligonucleotide
acatccgatttcctcgttatcaagagtttg

SEQ ID NO: 478446 - DNA, 30 bp, Artificial Sequence
  Synthetic oligonucleotide
cctacgcatggcaaaaacgctaatagtttg

SEQ ID NO: 478447 - DNA, 30 bp, Artificial Sequence
  Synthetic oligonucleotide
cgtccacactagcgtcggcgcagtagtttg

SEQ ID NO: 478448 - DNA, 30 bp, Artificial Sequence
  Synthetic oligonucleotide
tggcgcgggggtaggggacttggtagtttg

SEQ ID NO: 478449 - DNA, 30 bp, Artificial Sequence
  Synthetic oligonucleotide
acgtgagtttctgagttgacccaacgtttg

SEQ ID NO: 478450 - DNA, 30 bp, Artificial Sequence
  Synthetic oligonucleotide
cgggtttccccaatcaacccgagacgtttg

SEQ ID NO: 478451 - DNA, 30 bp, Artificial Sequence
  Synthetic oligonucleotide
caagggctcacaaacgtggctctacgtttg

SEQ ID NO: 478452 - DNA, 30 bp, Artificial Sequence
  Synthetic oligonucleotide
ctaatccaatcgacgaccggaagccgtttg

SEQ ID NO: 478453 - DNA, 30 bp, Artificial Sequence
  Synthetic oligonucleotide
gagaacggcctaccgggtcgaggccgtttg

SEQ ID NO: 478454 - DNA, 30 bp, Artificial Sequence
  Synthetic oligonucleotide
tatgtgcgattggtgcgcagcaggcgtttg

SEQ ID NO: 478455 - DNA, 30 bp, Artificial Sequence
  Synthetic oligonucleotide
tgaaaagctcgcggcagggtatctcgtttg

SEQ ID NO: 478456 - DNA, 30 bp, Artificial Sequence
  Synthetic oligonucleotide
cgacgtcatcttttattctcaacaggtttg

SEQ ID NO: 478457 - DNA, 30 bp, Artificial Sequence
  Synthetic oligonucleotide
gtagttcttcaaaagtccatgacaggtttg

SEQ ID NO: 478458 - DNA, 30 bp, Artificial Sequence
  Synthetic oligonucleotide
tggtattcctgtgcccgctagcgcggtttg

SEQ ID NO: 478459 - DNA, 30 bp, Artificial Sequence
  Synthetic oligonucleotide
aagtagcgtgatactaactagctcggtttg

SEQ ID NO: 478460 - DNA, 30 bp, Artificial Sequence
  Synthetic oligonucleotide
gattcatcatccaatagtagctggggtttg

SEQ ID NO: 478461 - DNA, 30 bp, Artificial Sequence
  Synthetic oligonucleotide
aactgtctaattcccggcggttggggtttg

SEQ ID NO: 478462 - DNA, 30 bp, Artificial Sequence
  Synthetic oligonucleotide
agcccccgcttgaagctacgaatgtgtttg

SEQ ID NO: 478463 - DNA, 30 bp, Artificial Sequence
  Synthetic oligonucleotide
gccaggcagttagagatacatgtttgtttg

SEQ ID NO: 478464 - DNA, 30 bp, Artificial Sequence
  Synthetic oligonucleotide
tgcaatacgctgcaccagaaaaaaattttg

SEQ ID NO: 478465 - DNA, 30 bp, Artificial Sequence
  Synthetic oligonucleotide
ttccagcgcattgcgtgtagaataattttg

SEQ ID NO: 478466 - DNA, 30 bp, Artificial Sequence
  Synthetic oligonucleotide
ttgaatcccggcaaacggtctctaattttg

SEQ ID NO: 478467 - DNA, 30 bp, Artificial Sequence
  Synthetic oligonucleotide
ccccctctcagcataaattactacattttg

SEQ ID NO: 478468 - DNA, 30 bp, Artificial Sequence
  Synthetic oligonucleotide
cattgagcacgtaagggcaaatgcattttg

SEQ ID NO: 478469 - DNA, 30 bp, Artificial Sequence
  Synthetic oligonucleotide
attgctgtgaatgtcactttataacttttg

SEQ ID NO: 478470 - DNA, 30 bp, Artificial Sequence
  Synthetic oligonucleotide
acatgaccgggcttttaatgtctacttttg

SEQ ID NO: 478471 - DNA, 30 bp, Artificial Sequence
  Synthetic oligonucleotide
gaaaatacctgcacactcgaccgccttttg

SEQ ID NO: 478472 - DNA, 30 bp, Artificial Sequence
  Synthetic oligonucleotide
gaagcagcgaagtcttgtttttagcttttg

SEQ ID NO: 478473 - DNA, 30 bp, Artificial Sequence
  Synthetic oligonucleotide
tcttcgggacttttcaactttccagttttg

SEQ ID NO: 478474 - DNA, 30 bp, Artificial Sequence
  Synthetic oligonucleotide
agcattaaattttgagtaagtcacgttttg

SEQ ID NO: 478475 - DNA, 30 bp, Artificial Sequence
  Synthetic oligonucleotide
catatatatgcatagactgctaccgttttg

SEQ ID NO: 478476 - DNA, 30 bp, Artificial Sequence
  Synthetic oligonucleotide
gggggccggtgggtcaaagtttccgttttg

SEQ ID NO: 478477 - DNA, 30 bp, Artificial Sequence
  Synthetic oligonucleotide
gcagtctccctgtagcgcaacacggttttg

SEQ ID NO: 478478 - DNA, 30 bp, Artificial Sequence
  Synthetic oligonucleotide
ggcaatgcaggtcataaacggacggttttg

SEQ ID NO: 478479 - DNA, 30 bp, Artificial Sequence
  Synthetic oligonucleotide
gggttgaggcaacacgaagtgtgggttttg

SEQ ID NO: 478480 - DNA, 30 bp, Artificial Sequence
  Synthetic oligonucleotide
accatctcaatggacccttgaaatgttttg

SEQ ID NO: 478481 - DNA, 30 bp, Artificial Sequence
  Synthetic oligonucleotide
aacccgagttgtaaaagcctctctgttttg

SEQ ID NO: 478482 - DNA, 30 bp, Artificial Sequence
  Synthetic oligonucleotide
caaaatatcactgctactgagtttgttttg

SEQ ID NO: 478483 - DNA, 30 bp, Artificial Sequence
  Synthetic oligonucleotide
gtaatcattaaactcgttgcgcaatttttg

SEQ ID NO: 478484 - DNA, 30 bp, Artificial Sequence
  Synthetic oligonucleotide
tgcaattacaaccagtttctataatttttg

SEQ ID NO: 478485 - DNA, 30 bp, Artificial Sequence
  Synthetic oligonucleotide
tgaaatgtttgatcggaacttatatttttg

SEQ ID NO: 478486 - DNA, 30 bp, Artificial Sequence
  Synthetic oligonucleotide
tgaccatcttattactatttccattttttg

SEQ ID NO: 478487 - DNA, 30 bp, Artificial Sequence
  Synthetic oligonucleotide
ttcgggacctcaatgggctctgcttttttg

SEQ ID NO: 478488 - DNA, 30 bp, Artificial Sequence
  Synthetic oligonucleotide
gccgtttcgtacgactataattgttttttg

SEQ ID NO: 478489 - DNA, 30 bp, Artificial Sequence
  Synthetic oligonucleotide
tggcgtatacgctgctgatataaaaaaaat

SEQ ID NO: 478490 - DNA, 30 bp, Artificial Sequence
  Synthetic oligonucleotide
tattatcaataacgtggtcgtgaaaaaaat

SEQ ID NO: 478491 - DNA, 30 bp, Artificial Sequence
  Synthetic oligonucleotide
tcggtggagggcccgttctacgcaaaaaat

SEQ ID NO: 478492 - DNA, 30 bp, Artificial Sequence
  Synthetic oligonucleotide
taatccgcaatattttctgcatgcaaaaat

SEQ ID NO: 478493 - DNA, 30 bp, Artificial Sequence
  Synthetic oligonucleotide
ccccgagcgcactattgtagtgtcaaaaat

SEQ ID NO: 478494 - DNA, 30 bp, Artificial Sequence
  Synthetic oligonucleotide
ggagtaatctatacactcgattagaaaaat

SEQ ID NO: 478495 - DNA, 30 bp, Artificial Sequence
  Synthetic oligonucleotide
taatttcaggcaaggcaactagcgaaaaat

SEQ ID NO: 478496 - DNA, 30 bp, Artificial Sequence
  Synthetic oligonucleotide
agtgcatttcatgctagtcacgcgaaaaat

SEQ ID NO: 478497 - DNA, 30 bp, Artificial Sequence
  Synthetic oligonucleotide
tgtatccgggtctctgcaaatctgaaaaat

SEQ ID NO: 478498 - DNA, 30 bp, Artificial Sequence
  Synthetic oligonucleotide
agatcattgaattaattatacgctaaaaat

SEQ ID NO: 478499 - DNA, 30 bp, Artificial Sequence
  Synthetic oligonucleotide
ttcactttgactacgaggagacgtaaaaat

SEQ ID NO: 478500 - DNA, 30 bp, Artificial Sequence
  Synthetic oligonucleotide
gtctggggctcacagaattaagttaaaaat

SEQ ID NO: 478501 - DNA, 30 bp, Artificial Sequence
  Synthetic oligonucleotide
ttagacgcacggataccaatctttaaaaat

SEQ ID NO: 478502 - DNA, 30 bp, Artificial Sequence
  Synthetic oligonucleotide
attcggtcagctccagaacgcgaacaaaat

SEQ ID NO: 478503 - DNA, 30 bp, Artificial Sequence
  Synthetic oligonucleotide
acgttttactttaatctgccgagacaaaat

SEQ ID NO: 478504 - DNA, 30 bp, Artificial Sequence
  Synthetic oligonucleotide
acatatttgtaaggtaatcaaatacaaaat

SEQ ID NO: 478505 - DNA, 30 bp, Artificial Sequence
  Synthetic oligonucleotide
cagacctccaaacccttcagccgccaaaat

SEQ ID NO: 478506 - DNA, 30 bp, Artificial Sequence
  Synthetic oligonucleotide
tgggcaagagctggtcggatgacgcaaaat

SEQ ID NO: 478507 - DNA, 30 bp, Artificial Sequence
  Synthetic oligonucleotide
ctgctttgggttaagtattgcaatcaaaat

SEQ ID NO: 478508 - DNA, 30 bp, Artificial Sequence
  Synthetic oligonucleotide
tggatcccaggtgctccataagctcaaaat

SEQ ID NO: 478509 - DNA, 30 bp, Artificial Sequence
  Synthetic oligonucleotide
tgcgatcggctctcggattatacagaaaat

SEQ ID NO: 478510 - DNA, 30 bp, Artificial Sequence
  Synthetic oligonucleotide
atatttgcccttctagcagagtcagaaaat

SEQ ID NO: 478511 - DNA, 28 bp, Artificial Sequence
  Synthetic oligonucleotide
aaataatgctctgcttttaggagaaaat

SEQ ID NO: 478512 - DNA, 31 bp, Artificial Sequence
  Synthetic oligonucleotide
gtcgggcgattaatgacaccatcaataaaat

SEQ ID NO: 478513 - DNA, 30 bp, Artificial Sequence
  Synthetic oligonucleotide
cactgtaccgcttatgcctgcgcataaaat

SEQ ID NO: 478514 - DNA, 30 bp, Artificial Sequence
  Synthetic oligonucleotide
tctggcaagggttcagaaaacatataaaat

SEQ ID NO: 478515 - DNA, 30 bp, Artificial Sequence
  Synthetic oligonucleotide
taggcatgccattgcggtcgctgctaaaat

SEQ ID NO: 478516 - DNA, 30 bp, Artificial Sequence
  Synthetic oligonucleotide
gagtataaatgtcaattgtgcatgtaaaat

SEQ ID NO: 478517 - DNA, 30 bp, Artificial Sequence
  Synthetic oligonucleotide
acggaaatttggcactgtcatatgtaaaat

SEQ ID NO: 478518 - DNA, 30 bp, Artificial Sequence
  Synthetic oligonucleotide
ccccgggcctgcccgtatcttcaaacaaat

SEQ ID NO: 478519 - DNA, 30 bp, Artificial Sequence
  Synthetic oligonucleotide
ctccctccggtgcggctgaccgaaacaaat

SEQ ID NO: 478520 - DNA, 30 bp, Artificial Sequence
  Synthetic oligonucleotide
ggaagggaagctgcgtttaagtcaacaaat

SEQ ID NO: 478521 - DNA, 30 bp, Artificial Sequence
  Synthetic oligonucleotide
caattctacaatcggtagaagctaacaaat

SEQ ID NO: 478522 - DNA, 30 bp, Artificial Sequence
  Synthetic oligonucleotide
tatttcagattgttagttctcaacacaaat

SEQ ID NO: 478523 - DNA, 30 bp, Artificial Sequence
  Synthetic oligonucleotide
taggtaccaggcagcggtttgcccacaaat

SEQ ID NO: 478524 - DNA, 30 bp, Artificial Sequence
  Synthetic oligonucleotide
cagcttgagttgcaaccaacggtcacaaat

SEQ ID NO: 478525 - DNA, 30 bp, Artificial Sequence
  Synthetic oligonucleotide
tggatattcgctagttgcgcgttcacaaat

SEQ ID NO: 478526 - DNA, 30 bp, Artificial Sequence
  Synthetic oligonucleotide
ctattaactaattagggcatctagacaaat

SEQ ID NO: 478527 - DNA, 30 bp, Artificial Sequence
  Synthetic oligonucleotide
tgttggtcaaagcgtatttgacggacaaat

SEQ ID NO: 478528 - DNA, 30 bp, Artificial Sequence
  Synthetic oligonucleotide
gacccgtctctctactggggtcggacaaat

SEQ ID NO: 478529 - DNA, 30 bp, Artificial Sequence
  Synthetic oligonucleotide
ctttattgataccatccatacgggacaaat

SEQ ID NO: 478530 - DNA, 30 bp, Artificial Sequence
  Synthetic oligonucleotide
tatatgacggcaacgtatcggggtacaaat

SEQ ID NO: 478531 - DNA, 30 bp, Artificial Sequence
  Synthetic oligonucleotide
tttctacaaagctcgacggctggtacaaat

SEQ ID NO: 478532 - DNA, 30 bp, Artificial Sequence
  Synthetic oligonucleotide
gttattgaactcgcgcatcataaaccaaat

SEQ ID NO: 478533 - DNA, 30 bp, Artificial Sequence
  Synthetic oligonucleotide
ataattctctgcgacagctgtttaccaaat

SEQ ID NO: 478534 - DNA, 30 bp, Artificial Sequence
  Synthetic oligonucleotide
atttacatgggtacttatggatccccaaat

SEQ ID NO: 478535 - DNA, 30 bp, Artificial Sequence
  Synthetic oligonucleotide
ctgtgatctggacgtcacgaatgtccaaat

SEQ ID NO: 478536 - DNA, 30 bp, Artificial Sequence
  Synthetic oligonucleotide
ctattgtctatatgactggattgtccaaat

SEQ ID NO: 478537 - DNA, 30 bp, Artificial Sequence
  Synthetic oligonucleotide
ccttgacggggtctgaaaacttttccaaat

SEQ ID NO: 478538 - DNA, 30 bp, Artificial Sequence
  Synthetic oligonucleotide
tacgcacaactcttagttgctaaagcaaat

SEQ ID NO: 478539 - DNA, 30 bp, Artificial Sequence
  Synthetic oligonucleotide
gttatagacaacattcaacaggaagcaaat

SEQ ID NO: 478540 - DNA, 30 bp, Artificial Sequence
  Synthetic oligonucleotide
gctagttgtcggttggcatgtaacgcaaat

SEQ ID NO: 478541 - DNA, 30 bp, Artificial Sequence
  Synthetic oligonucleotide
actggcgactacttgaggccgtacgcaaat

SEQ ID NO: 478542 - DNA, 30 bp, Artificial Sequence
  Synthetic oligonucleotide
cctatcaatttattaaccccttacgcaaat

SEQ ID NO: 478543 - DNA, 30 bp, Artificial Sequence
  Synthetic oligonucleotide
cggagtcattttttaggtatgagggcaaat

SEQ ID NO: 478544 - DNA, 30 bp, Artificial Sequence
  Synthetic oligonucleotide
gaagatatcttagaacggccatttgcaaat

SEQ ID NO: 478545 - DNA, 30 bp, Artificial Sequence
  Synthetic oligonucleotide
aataatcgctttgttaccgcggaatcaaat

SEQ ID NO: 478546 - DNA, 30 bp, Artificial Sequence
  Synthetic oligonucleotide
gctgtatcgggccatttatacgcatcaaat

SEQ ID NO: 478547 - DNA, 30 bp, Artificial Sequence
  Synthetic oligonucleotide
attcaggtggccaagtgtagtctatcaaat

SEQ ID NO: 478548 - DNA, 30 bp, Artificial Sequence
  Synthetic oligonucleotide
aacctccacataatcagtccaaactcaaat

SEQ ID NO: 478549 - DNA, 30 bp, Artificial Sequence
  Synthetic oligonucleotide
tacaacttacaaccagtgaatcactcaaat

SEQ ID NO: 478550 - DNA, 30 bp, Artificial Sequence
  Synthetic oligonucleotide
cgcaatttgaaccgctagccgcagtcaaat

SEQ ID NO: 478551 - DNA, 30 bp, Artificial Sequence
  Synthetic oligonucleotide
tattcaggtttgcatgtattcatgtcaaat

SEQ ID NO: 478552 - DNA, 30 bp, Artificial Sequence
  Synthetic oligonucleotide
gcccgcaatatgttaactacttaaagaaat

SEQ ID NO: 478553 - DNA, 30 bp, Artificial Sequence
  Synthetic oligonucleotide
gcagttgtgtaatacccgggcagcagaaat

SEQ ID NO: 478554 - DNA, 30 bp, Artificial Sequence
  Synthetic oligonucleotide
gtcgccgcgagtttagcgctagagagaaat

SEQ ID NO: 478555 - DNA, 30 bp, Artificial Sequence
  Synthetic oligonucleotide
tgcccattatcatattggacggagagaaat

SEQ ID NO: 478556 - DNA, 30 bp, Artificial Sequence
  Synthetic oligonucleotide
tcaatatcgacctggcgcactagtagaaat

SEQ ID NO: 478557 - DNA, 30 bp, Artificial Sequence
  Synthetic oligonucleotide
gggcatttgaccgcaagggtaattagaaat

SEQ ID NO: 478558 - DNA, 30 bp, Artificial Sequence
  Synthetic oligonucleotide
tatgcaagttgcacagcctttgttagaaat

SEQ ID NO: 478559 - DNA, 30 bp, Artificial Sequence
  Synthetic oligonucleotide
tgcctttatagtttatccggggcacgaaat

SEQ ID NO: 478560 - DNA, 30 bp, Artificial Sequence
  Synthetic oligonucleotide
gagggggctgggattttttagtaccgaaat

SEQ ID NO: 478561 - DNA, 30 bp, Artificial Sequence
  Synthetic oligonucleotide
aaaaattcggtctcgtaatacatccgaaat

SEQ ID NO: 478562 - DNA, 30 bp, Artificial Sequence
  Synthetic oligonucleotide
aaagcgttttgtttcaaagaggcgcgaaat

SEQ ID NO: 478563 - DNA, 30 bp, Artificial Sequence
  Synthetic oligonucleotide
caaccttccatacaagcatgttcgcgaaat

SEQ ID NO: 478564 - DNA, 30 bp, Artificial Sequence
  Synthetic oligonucleotide
atttggccccccggaggtgggcggcgaaat

SEQ ID NO: 478565 - DNA, 30 bp, Artificial Sequence
  Synthetic oligonucleotide
ttctgtagacagtttatgaggggtcgaaat

SEQ ID NO: 478566 - DNA, 30 bp, Artificial Sequence
  Synthetic oligonucleotide
caagtttcgccaaatgtttgctgtcgaaat

SEQ ID NO: 478567 - DNA, 30 bp, Artificial Sequence
  Synthetic oligonucleotide
gcacgcacttatcctgtcataccaggaaat

SEQ ID NO: 478568 - DNA, 30 bp, Artificial Sequence
  Synthetic oligonucleotide
cggttccgtcggttaagcacatgaggaaat

SEQ ID NO: 478569 - DNA, 30 bp, Artificial Sequence
  Synthetic oligonucleotide
ctgcgagtgcgggttcttaaacccggaaat

SEQ ID NO: 478570 - DNA, 30 bp, Artificial Sequence
  Synthetic oligonucleotide
tagttatccgagaggagtcaatccggaaat

SEQ ID NO: 478571 - DNA, 30 bp, Artificial Sequence
  Synthetic oligonucleotide
ccctattcttatcgccagtattccggaaat

SEQ ID NO: 478572 - DNA, 30 bp, Artificial Sequence
  Synthetic oligonucleotide
gaatcataatacgattctgaacgcggaaat

SEQ ID NO: 478573 - DNA, 30 bp, Artificial Sequence
  Synthetic oligonucleotide
agtcatagtattatgtgttaaggcggaaat

SEQ ID NO: 478574 - DNA, 30 bp, Artificial Sequence
  Synthetic oligonucleotide
gcctaccgatataatgcctgaatcggaaat

SEQ ID NO: 478575 - DNA, 30 bp, Artificial Sequence
  Synthetic oligonucleotide
gtcacttggtctatacacttcctcggaaat

SEQ ID NO: 478576 - DNA, 30 bp, Artificial Sequence
  Synthetic oligonucleotide
ggatactggcagtagaggcacctgggaaat

SEQ ID NO: 478577 - DNA, 30 bp, Artificial Sequence
  Synthetic oligonucleotide
aggtagtctaataggccgcacttgggaaat

SEQ ID NO: 478578 - DNA, 30 bp, Artificial Sequence
  Synthetic oligonucleotide
aacactcggttccagacacggttgggaaat

SEQ ID NO: 478579 - DNA, 30 bp, Artificial Sequence
  Synthetic oligonucleotide
ctctgtacatacatgacggggggtggaaat

SEQ ID NO: 478580 - DNA, 30 bp, Artificial Sequence
  Synthetic oligonucleotide
tcagacgtagacttatcaatttcatgaaat

SEQ ID NO: 478581 - DNA, 30 bp, Artificial Sequence
  Synthetic oligonucleotide
gtgtccaatgaagcatttataagctgaaat

SEQ ID NO: 478582 - DNA, 30 bp, Artificial Sequence
  Synthetic oligonucleotide
gcaaatatatcctacgcaaagcagtgaaat

SEQ ID NO: 478583 - DNA, 30 bp, Artificial Sequence
  Synthetic oligonucleotide
ggcccgggaaccatggtaatcgggtgaaat

SEQ ID NO: 478584 - DNA, 30 bp, Artificial Sequence
  Synthetic oligonucleotide
tagtgtccttgcgggaccccagtgtgaaat

SEQ ID NO: 478585 - DNA, 30 bp, Artificial Sequence
  Synthetic oligonucleotide
gcagataacagtcgctctagcaattgaaat

SEQ ID NO: 478586 - DNA, 30 bp, Artificial Sequence
  Synthetic oligonucleotide
ttattgttgtggaggtattatcattgaaat

SEQ ID NO: 478587 - DNA, 30 bp, Artificial Sequence
  Synthetic oligonucleotide
tcagtgctgacccctccccatagttgaaat

SEQ ID NO: 478588 - DNA, 30 bp, Artificial Sequence
  Synthetic oligonucleotide
gaatgtggcttgggtactttcgccataaat

SEQ ID NO: 478589 - DNA, 30 bp, Artificial Sequence
  Synthetic oligonucleotide
gagaacttttcgtgttaagatttcataaat

SEQ ID NO: 478590 - DNA, 30 bp, Artificial Sequence
  Synthetic oligonucleotide
taatgttagggccccggcccaaaactaaat

SEQ ID NO: 478591 - DNA, 30 bp, Artificial Sequence
  Synthetic oligonucleotide
gttcaacccgtaattgcactcggactaaat

SEQ ID NO: 478592 - DNA, 30 bp, Artificial Sequence
  Synthetic oligonucleotide
gatcaaaatgcctaattacgcctgctaaat

SEQ ID NO: 478593 - DNA, 30 bp, Artificial Sequence
  Synthetic oligonucleotide
tcagtattcggatagcgtccggatctaaat

SEQ ID NO: 478594 - DNA, 30 bp, Artificial Sequence
  Synthetic oligonucleotide
tagtgggttatttaaggatacagagtaaat

SEQ ID NO: 478595 - DNA, 29 bp, Artificial Sequence
  Synthetic oligonucleotide
agggtctccctttggggggactagtaaat

SEQ ID NO: 478596 - DNA, 29 bp, Artificial Sequence
  Synthetic oligonucleotide
gactaaggaacgccgccagctccgtaaat

SEQ ID NO: 478597 - DNA, 30 bp, Artificial Sequence
  Synthetic oligonucleotide
gaaaaagcccgggttgtttgttccgtaaat

SEQ ID NO: 478598 - DNA, 30 bp, Artificial Sequence
  Synthetic oligonucleotide
attaaatatacgccgcccaatggcgtaaat

SEQ ID NO: 478599 - DNA, 30 bp, Artificial Sequence
  Synthetic oligonucleotide
catggttctttaatcatggtcatggtaaat

SEQ ID NO: 478600 - DNA, 30 bp, Artificial Sequence
  Synthetic oligonucleotide
atccaaacctactctggcggcacattaaat

SEQ ID NO: 478601 - DNA, 30 bp, Artificial Sequence
  Synthetic oligonucleotide
gactgttccaatcaagccggactattaaat

SEQ ID NO: 478602 - DNA, 30 bp, Artificial Sequence
  Synthetic oligonucleotide
gggcgacattacgcactccagttattaaat

SEQ ID NO: 478603 - DNA, 30 bp, Artificial Sequence
  Synthetic oligonucleotide
cccttcgattgcaaccagctgtccttaaat

SEQ ID NO: 478604 - DNA, 29 bp, Artificial Sequence
  Synthetic oligonucleotide
gtcctacttcattccatcccctcttaaat

SEQ ID NO: 478605 - DNA, 30 bp, Artificial Sequence
  Synthetic oligonucleotide
actttgctagactcgttcaattctttaaat

SEQ ID NO: 478606 - DNA, 30 bp, Artificial Sequence
  Synthetic oligonucleotide
aatagttaatccactttcttctttttaaat

SEQ ID NO: 478607 - DNA, 30 bp, Artificial Sequence
  Synthetic oligonucleotide
ttgttcaatctttaagcccgaaaaaacaat

SEQ ID NO: 478608 - DNA, 30 bp, Artificial Sequence
  Synthetic oligonucleotide
cgggaaaagcaagagctccccgccaacaat

SEQ ID NO: 478609 - DNA, 30 bp, Artificial Sequence
  Synthetic oligonucleotide
tcctatcgtataaactctttcgtcaacaat

SEQ ID NO: 478610 - DNA, 30 bp, Artificial Sequence
  Synthetic oligonucleotide
gcgtgcacgaccagtaccggtgagaacaat

SEQ ID NO: 478611 - DNA, 30 bp, Artificial Sequence
  Synthetic oligonucleotide
gggtatgtataaccggctttctagaacaat

SEQ ID NO: 478612 - DNA, 30 bp, Artificial Sequence
  Synthetic oligonucleotide
ttttggaactcggggaatgtcgttaacaat

SEQ ID NO: 478613 - DNA, 30 bp, Artificial Sequence
  Synthetic oligonucleotide
gtcgtgagtacttcggatattcaacacaat

SEQ ID NO: 478614 - DNA, 30 bp, Artificial Sequence
  Synthetic oligonucleotide
gcggtagatctacgtatatgcagacacaat

SEQ ID NO: 478615 - DNA, 30 bp, Artificial Sequence
  Synthetic oligonucleotide
aaattacacttcaagataggtatacacaat

SEQ ID NO: 478616 - DNA, 29 bp, Artificial Sequence
  Synthetic oligonucleotide
ttccgggagggttgaactgtttacacaat

SEQ ID NO: 478617 - DNA, 30 bp, Artificial Sequence
  Synthetic oligonucleotide
cgcgaggaatttatatcgcgcgtccacaat

SEQ ID NO: 478618 - DNA, 30 bp, Artificial Sequence
  Synthetic oligonucleotide
ctagcgagacctattgtagccacgcacaat

SEQ ID NO: 478619 - DNA, 30 bp, Artificial Sequence
  Synthetic oligonucleotide
tcgcgagttcgcccagcggcgacgcacaat

SEQ ID NO: 478620 - DNA, 30 bp, Artificial Sequence
  Synthetic oligonucleotide
aatcgaccacccgcgctgctcgtgcacaat

SEQ ID NO: 478621 - DNA, 30 bp, Artificial Sequence
  Synthetic oligonucleotide
taacctgtagcgcttatcatgagagacaat

SEQ ID NO: 478622 - DNA, 30 bp, Artificial Sequence
  Synthetic oligonucleotide
ataccagcgttttttcctctaagcgacaat

SEQ ID NO: 478623 - DNA, 30 bp, Artificial Sequence
  Synthetic oligonucleotide
tggaggtggttgatatttcgtcgcgacaat

SEQ ID NO: 478624 - DNA, 30 bp, Artificial Sequence
  Synthetic oligonucleotide
agattgaaatagttacaattttgggacaat

SEQ ID NO: 478625 - DNA, 30 bp, Artificial Sequence
  Synthetic oligonucleotide
tttggttactggatcggagttacatacaat

SEQ ID NO: 478626 - DNA, 30 bp, Artificial Sequence
  Synthetic oligonucleotide
ctctgctgacgcgtctctctatactacaat

SEQ ID NO: 478627 - DNA, 30 bp, Artificial Sequence
  Synthetic oligonucleotide
gtaggtagtgtcgttgcggccttctacaat

SEQ ID NO: 478628 - DNA, 30 bp, Artificial Sequence
  Synthetic oligonucleotide
gacagtcgaggttccgcttagacgtacaat

SEQ ID NO: 478629 - DNA, 30 bp, Artificial Sequence
  Synthetic oligonucleotide
atttgaacgccgccaaacttattgtacaat

SEQ ID NO: 478630 - DNA, 30 bp, Artificial Sequence
  Synthetic oligonucleotide
tattatttgagtctaagatgggattacaat

SEQ ID NO: 478631 - DNA, 30 bp, Artificial Sequence
  Synthetic oligonucleotide
tagcaattcataaaccaccgagcttacaat

SEQ ID NO: 478632 - DNA, 30 bp, Artificial Sequence
  Synthetic oligonucleotide
cattttgtgctttagtgggacttttacaat

SEQ ID NO: 478633 - DNA, 30 bp, Artificial Sequence
  Synthetic oligonucleotide
aagtgtttggtaagggtggcctaaaccaat

SEQ ID NO: 478634 - DNA, 30 bp, Artificial Sequence
  Synthetic oligonucleotide
ctttaattcccacagcccgtaaccaccaat

SEQ ID NO: 478635 - DNA, 30 bp, Artificial Sequence
  Synthetic oligonucleotide
tgaaagatttagatgccggcctgcaccaat

SEQ ID NO: 478636 - DNA, 30 bp, Artificial Sequence
  Synthetic oligonucleotide
attgagaactctgtcatgttcctgaccaat

SEQ ID NO: 478637 - DNA, 30 bp, Artificial Sequence
  Synthetic oligonucleotide
tagtttcagtgtcaggattaaactaccaat

SEQ ID NO: 478638 - DNA, 30 bp, Artificial Sequence
  Synthetic oligonucleotide
attgctttattgtcacttctcagtaccaat

SEQ ID NO: 478639 - DNA, 30 bp, Artificial Sequence
  Synthetic oligonucleotide
cagtttattgagatgcaatgccttaccaat

SEQ ID NO: 478640 - DNA, 30 bp, Artificial Sequence
  Synthetic oligonucleotide
acttaaggtcaaataaatcacggacccaat

SEQ ID NO: 478641 - DNA, 29 bp, Artificial Sequence
  Synthetic oligonucleotide
ataggctctacttgtcaagaaggcccaat

SEQ ID NO: 478642 - DNA, 30 bp, Artificial Sequence
  Synthetic oligonucleotide
taactggctcatcacggttgcaggcccaat

SEQ ID NO: 478643 - DNA, 30 bp, Artificial Sequence
  Synthetic oligonucleotide
cttaaagtaatcctaatcattaggcccaat

SEQ ID NO: 478644 - DNA, 30 bp, Artificial Sequence
  Synthetic oligonucleotide
cataccagcttgtgggagccgctgcccaat

SEQ ID NO: 478645 - DNA, 30 bp, Artificial Sequence
  Synthetic oligonucleotide
agcagtgttccgatgaggggtactcccaat

SEQ ID NO: 478646 - DNA, 30 bp, Artificial Sequence
  Synthetic oligonucleotide
ttgggcctcctaaaccgacaaccagccaat

SEQ ID NO: 478647 - DNA, 30 bp, Artificial Sequence
  Synthetic oligonucleotide
ttacgcgcgataaagcaagctcgggccaat

SEQ ID NO: 478648 - DNA, 30 bp, Artificial Sequence
  Synthetic oligonucleotide
agccaactgtctttatttgggagtgccaat

SEQ ID NO: 478649 - DNA, 30 bp, Artificial Sequence
  Synthetic oligonucleotide
aatcctaagttgtaaggttcacttgccaat

SEQ ID NO: 478650 - DNA, 30 bp, Artificial Sequence
  Synthetic oligonucleotide
aagatgaccttttggtactcaaaatccaat

SEQ ID NO: 478651 - DNA, 30 bp, Artificial Sequence
  Synthetic oligonucleotide
tttggtcaggtcgggctgatgaactccaat

SEQ ID NO: 478652 - DNA, 30 bp, Artificial Sequence
  Synthetic oligonucleotide
gggattacttagtgactcgttatctccaat

SEQ ID NO: 478653 - DNA, 30 bp, Artificial Sequence
  Synthetic oligonucleotide
tgcgtgtaaatagggcccgcggggtccaat

SEQ ID NO: 478654 - DNA, 30 bp, Artificial Sequence
  Synthetic oligonucleotide
tgagttcttcgtcgtctaatttggtccaat

SEQ ID NO: 478655 - DNA, 30 bp, Artificial Sequence
  Synthetic oligonucleotide
taaaactcgggcggtgtctgtatgtccaat

SEQ ID NO: 478656 - DNA, 30 bp, Artificial Sequence
  Synthetic oligonucleotide
atgaagctgccgagatagacagcttccaat

SEQ ID NO: 478657 - DNA, 30 bp, Artificial Sequence
  Synthetic oligonucleotide
catatgtttgattaaatttaccgaagcaat

SEQ ID NO: 478658 - DNA, 30 bp, Artificial Sequence
  Synthetic oligonucleotide
gggtgacccagataagtcatacacagcaat

SEQ ID NO: 478659 - DNA, 30 bp, Artificial Sequence
  Synthetic oligonucleotide
gactcagcgatggacgatttatccagcaat

SEQ ID NO: 478660 - DNA, 30 bp, Artificial Sequence
  Synthetic oligonucleotide
gctaatgacgataagcacgtttccagcaat

SEQ ID NO: 478661 - DNA, 30 bp, Artificial Sequence
  Synthetic oligonucleotide
agcctcatcccttggaggcggtagagcaat

SEQ ID NO: 478662 - DNA, 30 bp, Artificial Sequence
  Synthetic oligonucleotide
ttacgccatcgttacgatcgatggagcaat

SEQ ID NO: 478663 - DNA, 30 bp, Artificial Sequence
  Synthetic oligonucleotide
tttggttgcacacattgcccaatgagcaat

SEQ ID NO: 478664 - DNA, 30 bp, Artificial Sequence
  Synthetic oligonucleotide
tacaagaacatggggctttaaactagcaat

SEQ ID NO: 478665 - DNA, 30 bp, Artificial Sequence
  Synthetic oligonucleotide
tgatccttatcacctggcctctgtagcaat

SEQ ID NO: 478666 - DNA, 30 bp, Artificial Sequence
  Synthetic oligonucleotide
acgttatgtttttagtgaccaattagcaat

SEQ ID NO: 478667 - DNA, 30 bp, Artificial Sequence
  Synthetic oligonucleotide
atcctcggacaggcgcattttaaacgcaat

SEQ ID NO: 478668 - DNA, 30 bp, Artificial Sequence
  Synthetic oligonucleotide
ctaacttataatgtaggccggggacgcaat

SEQ ID NO: 478669 - DNA, 30 bp, Artificial Sequence
  Synthetic oligonucleotide
ctgttgtaccgacgcacggcgaaccgcaat

SEQ ID NO: 478670 - DNA, 30 bp, Artificial Sequence
  Synthetic oligonucleotide
cttggcctggtcgcgtaagttcgccgcaat

SEQ ID NO: 478671 - DNA, 30 bp, Artificial Sequence
  Synthetic oligonucleotide
agttttcgattgaatgaacttggccgcaat

SEQ ID NO: 478672 - DNA, 30 bp, Artificial Sequence
  Synthetic oligonucleotide
ttgtatatctaaagacgaaatctccgcaat

SEQ ID NO: 478673 - DNA, 30 bp, Artificial Sequence
  Synthetic oligonucleotide
atgaatttgcaaaatttgcgtctccgcaat

SEQ ID NO: 478674 - DNA, 30 bp, Artificial Sequence
  Synthetic oligonucleotide
acgatgtcgggttcgtagcgttgtcgcaat

SEQ ID NO: 478675 - DNA, 30 bp, Artificial Sequence
  Synthetic oligonucleotide
ttgtgctgcgcatttgaacgatcaggcaat

SEQ ID NO: 478676 - DNA, 30 bp, Artificial Sequence
  Synthetic oligonucleotide
gaaaaagattgttacttggtgataggcaat

SEQ ID NO: 478677 - DNA, 30 bp, Artificial Sequence
  Synthetic oligonucleotide
cctgttcggttatcttattatgtaggcaat

SEQ ID NO: 478678 - DNA, 31 bp, Artificial Sequence
  Synthetic oligonucleotide
gggtccgaagctgtagcatgcagccggcaat

SEQ ID NO: 478679 - DNA, 30 bp, Artificial Sequence
  Synthetic oligonucleotide
gactggacggaccggctggagtggggcaat

SEQ ID NO: 478680 - DNA, 30 bp, Artificial Sequence
  Synthetic oligonucleotide
tagatcgacaatgcatttgtgcaatgcaat

SEQ ID NO: 478681 - DNA, 30 bp, Artificial Sequence
  Synthetic oligonucleotide
aacagatcgagtactcgtagagaatgcaat

SEQ ID NO: 478682 - DNA, 30 bp, Artificial Sequence
  Synthetic oligonucleotide
attcctattaaaagttggattccctgcaat

SEQ ID NO: 478683 - DNA, 30 bp, Artificial Sequence
  Synthetic oligonucleotide
gaatctgtactaaccagcggatgctgcaat

SEQ ID NO: 478684 - DNA, 30 bp, Artificial Sequence
  Synthetic oligonucleotide
gggttttgttttgcaattttgtgctgcaat

SEQ ID NO: 478685 - DNA, 30 bp, Artificial Sequence
  Synthetic oligonucleotide
tgaagcttctcttctattactaggtgcaat

SEQ ID NO: 478686 - DNA, 30 bp, Artificial Sequence
  Synthetic oligonucleotide
gagtgccactgccaccccgtcttgtgcaat

SEQ ID NO: 478687 - DNA, 30 bp, Artificial Sequence
  Synthetic oligonucleotide
cgtacggtccttttctgtggcttttgcaat

SEQ ID NO: 478688 - DNA, 30 bp, Artificial Sequence
  Synthetic oligonucleotide
ttaaagaaatatgggggaaccaacatcaat

SEQ ID NO: 478689 - DNA, 30 bp, Artificial Sequence
  Synthetic oligonucleotide
gtggttaaggacgtagaacgtaacatcaat

SEQ ID NO: 478690 - DNA, 30 bp, Artificial Sequence
  Synthetic oligonucleotide
gcaaccgattttctacattgagacatcaat

SEQ ID NO: 478691 - DNA, 30 bp, Artificial Sequence
  Synthetic oligonucleotide
ctaagtacaaagggacggactcccatcaat

SEQ ID NO: 478692 - DNA, 30 bp, Artificial Sequence
  Synthetic oligonucleotide
gttgctccaaattgacgatcctccatcaat

SEQ ID NO: 478693 - DNA, 30 bp, Artificial Sequence
  Synthetic oligonucleotide
acgcggcgcctcagcgtaggagtcatcaat

SEQ ID NO: 478694 - DNA, 30 bp, Artificial Sequence
  Synthetic oligonucleotide
aaaaataaagaattaattagtttcatcaat

SEQ ID NO: 478695 - DNA, 30 bp, Artificial Sequence
  Synthetic oligonucleotide
cttaattatcgcttcatctgatggatcaat

SEQ ID NO: 478696 - DNA, 30 bp, Artificial Sequence
  Synthetic oligonucleotide
gacgctgcaataaacgactcgcatatcaat

SEQ ID NO: 478697 - DNA, 30 bp, Artificial Sequence
  Synthetic oligonucleotide
gatggccaccgaggcaggacgggtatcaat

SEQ ID NO: 478698 - DNA, 30 bp, Artificial Sequence
  Synthetic oligonucleotide
tttactggtgtagctcgtacttgtatcaat

SEQ ID NO: 478699 - DNA, 30 bp, Artificial Sequence
  Synthetic oligonucleotide
ctatgcatacgaagtcgatatttactcaat

SEQ ID NO: 478700 - DNA, 30 bp, Artificial Sequence
  Synthetic oligonucleotide
catatttgagagatcgatccgagcctcaat

SEQ ID NO: 478701 - DNA, 30 bp, Artificial Sequence
  Synthetic oligonucleotide
atttctttctctagatccgagaagctcaat

SEQ ID NO: 478702 - DNA, 30 bp, Artificial Sequence
  Synthetic oligonucleotide
gaaagatcgaagacacctctgtttctcaat

SEQ ID NO: 478703 - DNA, 30 bp, Artificial Sequence
  Synthetic oligonucleotide
ttgaactcattcctaacggtttttctcaat

SEQ ID NO: 478704 - DNA, 30 bp, Artificial Sequence
  Synthetic oligonucleotide
cagtttgtagatcgaagcgcgccagtcaat

SEQ ID NO: 478705 - DNA, 30 bp, Artificial Sequence
  Synthetic oligonucleotide
tatgttcaaggcagacagattgcagtcaat

SEQ ID NO: 478706 - DNA, 30 bp, Artificial Sequence
  Synthetic oligonucleotide
cttgattggtcgcctacctcggacgtcaat

SEQ ID NO: 478707 - DNA, 30 bp, Artificial Sequence
  Synthetic oligonucleotide
gagaaattcgtattaaagttgggcgtcaat

SEQ ID NO: 478708 - DNA, 30 bp, Artificial Sequence
  Synthetic oligonucleotide
aagcccttacttcttttgttctgcgtcaat

SEQ ID NO: 478709 - DNA, 30 bp, Artificial Sequence
  Synthetic oligonucleotide
ccttaagtcaaaaagtctgctatcgtcaat

SEQ ID NO: 478710 - DNA, 30 bp, Artificial Sequence
  Synthetic oligonucleotide
tcagtttatgagttgactttgggggtcaat

SEQ ID NO: 478711 - DNA, 30 bp, Artificial Sequence
  Synthetic oligonucleotide
ctatctcatgattttcgcagaggtgtcaat

SEQ ID NO: 478712 - DNA, 30 bp, Artificial Sequence
  Synthetic oligonucleotide
ggataacctagtttatacgccattgtcaat

SEQ ID NO: 478713 - DNA, 30 bp, Artificial Sequence
  Synthetic oligonucleotide
tgcatactctcgatgcctcgtgttgtcaat

SEQ ID NO: 478714 - DNA, 30 bp, Artificial Sequence
  Synthetic oligonucleotide
gagtgcctactattgcaatcgcaattcaat

SEQ ID NO: 478715 - DNA, 30 bp, Artificial Sequence
  Synthetic oligonucleotide
gtcctggtttaataagtgcatacattcaat

SEQ ID NO: 478716 - DNA, 30 bp, Artificial Sequence
  Synthetic oligonucleotide
gatggaaagagtggcccataatgattcaat

SEQ ID NO: 478717 - DNA, 30 bp, Artificial Sequence
  Synthetic oligonucleotide
tttaggtaacataatgctactttattcaat

SEQ ID NO: 478718 - DNA, 30 bp, Artificial Sequence
  Synthetic oligonucleotide
gtaagattgtttcccaatagtctcttcaat

SEQ ID NO: 478719 - DNA, 30 bp, Artificial Sequence
  Synthetic oligonucleotide
gaccagcattctaaatcactccagttcaat

SEQ ID NO: 478720 - DNA, 30 bp, Artificial Sequence
  Synthetic oligonucleotide
ttggcgaatattattacatttgagttcaat

SEQ ID NO: 478721 - DNA, 30 bp, Artificial Sequence
  Synthetic oligonucleotide
gtatataaacgattccgcatgatgttcaat

SEQ ID NO: 478722 - DNA, 30 bp, Artificial Sequence
  Synthetic oligonucleotide
gcattgaaggcgaggtttctcttgttcaat

SEQ ID NO: 478723 - DNA, 30 bp, Artificial Sequence
  Synthetic oligonucleotide
agtatttagcgtgtcacgaagttgttcaat

SEQ ID NO: 478724 - DNA, 30 bp, Artificial Sequence
  Synthetic oligonucleotide
tcaccgcggtggacagtaatgattttcaat

SEQ ID NO: 478725 - DNA, 30 bp, Artificial Sequence
  Synthetic oligonucleotide
tcttttacagggttctataaaataaagaat

SEQ ID NO: 478726 - DNA, 30 bp, Artificial Sequence
  Synthetic oligonucleotide
gcccgtggcttactccgtccagacaagaat

SEQ ID NO: 478727 - DNA, 30 bp, Artificial Sequence
  Synthetic oligonucleotide
cgttatatgccgggcgtaatcaagaagaat

SEQ ID NO: 478728 - DNA, 30 bp, Artificial Sequence
  Synthetic oligonucleotide
agttttataatattaggtggccctaagaat

SEQ ID NO: 478729 - DNA, 30 bp, Artificial Sequence
  Synthetic oligonucleotide
catactagccctgacttccggtttaagaat

SEQ ID NO: 478730 - DNA, 30 bp, Artificial Sequence
  Synthetic oligonucleotide
tggctgtgtattgatttatttaaacagaat

SEQ ID NO: 478731 - DNA, 30 bp, Artificial Sequence
  Synthetic oligonucleotide
gcttattctgcaagcattgtttaacagaat

SEQ ID NO: 478732 - DNA, 30 bp, Artificial Sequence
  Synthetic oligonucleotide
taaagttttactcttaatcttagacagaat

SEQ ID NO: 478733 - DNA, 30 bp, Artificial Sequence
  Synthetic oligonucleotide
tttactgaactcggcaaccgttaccagaat

SEQ ID NO: 478734 - DNA, 30 bp, Artificial Sequence
  Synthetic oligonucleotide
tcaactgttttcgcccacagacgccagaat

SEQ ID NO: 478735 - DNA, 30 bp, Artificial Sequence
  Synthetic oligonucleotide
ctatagtgggggatcgattatcgccagaat

SEQ ID NO: 478736 - DNA, 30 bp, Artificial Sequence
  Synthetic oligonucleotide
aagaattgtatcgcgcacctggtccagaat

SEQ ID NO: 478737 - DNA, 30 bp, Artificial Sequence
  Synthetic oligonucleotide
tatggcataatcgtttctgggtcgcagaat

SEQ ID NO: 478738 - DNA, 30 bp, Artificial Sequence
  Synthetic oligonucleotide
aagccggcgtgagcgacgttttggcagaat

SEQ ID NO: 478739 - DNA, 30 bp, Artificial Sequence
  Synthetic oligonucleotide
agctgggaccatgtacgccgactgcagaat

SEQ ID NO: 478740 - DNA, 30 bp, Artificial Sequence
  Synthetic oligonucleotide
atcaatacaacaataatctctgaagagaat

SEQ ID NO: 478741 - DNA, 30 bp, Artificial Sequence
  Synthetic oligonucleotide
caaagctctatcggttgttggtaagagaat

SEQ ID NO: 478742 - DNA, 30 bp, Artificial Sequence
  Synthetic oligonucleotide
gtacctggttttgctcccgggatagagaat

SEQ ID NO: 478743 - DNA, 30 bp, Artificial Sequence
  Synthetic oligonucleotide
tatggcatcattgtcgaggtgagcgagaat

SEQ ID NO: 478744 - DNA, 30 bp, Artificial Sequence
  Synthetic oligonucleotide
taatctcaacttcatgtaacgggcgagaat

SEQ ID NO: 478745 - DNA, 30 bp, Artificial Sequence
  Synthetic oligonucleotide
tggtgcctttagtgatgcggggctgagaat

SEQ ID NO: 478746 - DNA, 30 bp, Artificial Sequence
  Synthetic oligonucleotide
tatgttagacgcgaaactcacacatagaat

SEQ ID NO: 478747 - DNA, 30 bp, Artificial Sequence
  Synthetic oligonucleotide
cagggcttatttgtatacggacgatagaat

SEQ ID NO: 478748 - DNA, 30 bp, Artificial Sequence
  Synthetic oligonucleotide
cttttcttaggaatcgggcaccgctagaat

SEQ ID NO: 478749 - DNA, 30 bp, Artificial Sequence
  Synthetic oligonucleotide
tttgtctcaagcccgaattggggctagaat

SEQ ID NO: 478750 - DNA, 30 bp, Artificial Sequence
  Synthetic oligonucleotide
atccggaggagtgtttgtttggagtagaat

SEQ ID NO: 478751 - DNA, 30 bp, Artificial Sequence
  Synthetic oligonucleotide
ggtttagagttacagcgtttcgcgtagaat

SEQ ID NO: 478752 - DNA, 30 bp, Artificial Sequence
  Synthetic oligonucleotide
acattgtttaccccattgctcttgtagaat

SEQ ID NO: 478753 - DNA, 28 bp, Artificial Sequence
  Synthetic oligonucleotide
ttcagtcttagaacagagcttttagaat

SEQ ID NO: 478754 - DNA, 30 bp, Artificial Sequence
  Synthetic oligonucleotide
attacctaattttgaatcatccaaacgaat

SEQ ID NO: 478755 - DNA, 30 bp, Artificial Sequence
  Synthetic oligonucleotide
tggcacaattccggcgggttcagcacgaat

SEQ ID NO: 478756 - DNA, 30 bp, Artificial Sequence
  Synthetic oligonucleotide
ttgggaaatgtcgtcataaatatcacgaat

SEQ ID NO: 478757 - DNA, 30 bp, Artificial Sequence
  Synthetic oligonucleotide
ggctgcaattaacagtgctatgcgacgaat

SEQ ID NO: 478758 - DNA, 30 bp, Artificial Sequence
  Synthetic oligonucleotide
gtcggcgttctggcctttgcacaaccgaat

SEQ ID NO: 478759 - DNA, 30 bp, Artificial Sequence
  Synthetic oligonucleotide
tacttggcacattacaagtgaagaccgaat

SEQ ID NO: 478760 - DNA, 30 bp, Artificial Sequence
  Synthetic oligonucleotide
ccaacctcttttgaacacgcacgcccgaat

SEQ ID NO: 478761 - DNA, 30 bp, Artificial Sequence
  Synthetic oligonucleotide
cccgaccataattagttaccctctccgaat

SEQ ID NO: 478762 - DNA, 30 bp, Artificial Sequence
  Synthetic oligonucleotide
taccgttaatgcttccataggtgtccgaat

SEQ ID NO: 478763 - DNA, 30 bp, Artificial Sequence
  Synthetic oligonucleotide
cgcggacgttaagaggaaaaatttccgaat

SEQ ID NO: 478764 - DNA, 30 bp, Artificial Sequence
  Synthetic oligonucleotide
ggcagcgtcggcgggagtacccaagcgaat

SEQ ID NO: 478765 - DNA, 30 bp, Artificial Sequence
  Synthetic oligonucleotide
gtacctcggatcctattatataacgcgaat

SEQ ID NO: 478766 - DNA, 30 bp, Artificial Sequence
  Synthetic oligonucleotide
agtagcacatcggacccgcatgccgcgaat

SEQ ID NO: 478767 - DNA, 30 bp, Artificial Sequence
  Synthetic oligonucleotide
ggtgcatttcggcgctttcaagaggcgaat

SEQ ID NO: 478768 - DNA, 30 bp, Artificial Sequence
  Synthetic oligonucleotide
aaattgtaatcaaacgcggttggctcgaat

SEQ ID NO: 478769 - DNA, 30 bp, Artificial Sequence
  Synthetic oligonucleotide
ttgaggtatgctgtgatttgaaagtcgaat

SEQ ID NO: 478770 - DNA, 30 bp, Artificial Sequence
  Synthetic oligonucleotide
gactccaacctggatacggttaggtcgaat

SEQ ID NO: 478771 - DNA, 30 bp, Artificial Sequence
  Synthetic oligonucleotide
cgaaaagggcccggcctgtgcgggtcgaat

SEQ ID NO: 478772 - DNA, 30 bp, Artificial Sequence
  Synthetic oligonucleotide
gggacgcctgcacttaatagtagttcgaat

SEQ ID NO: 478773 - DNA, 30 bp, Artificial Sequence
  Synthetic oligonucleotide
gaatatgagccggaggactatctttcgaat

SEQ ID NO: 478774 - DNA, 30 bp, Artificial Sequence
  Synthetic oligonucleotide
cgacctcatttcttccactcgggaaggaat

SEQ ID NO: 478775 - DNA, 30 bp, Artificial Sequence
  Synthetic oligonucleotide
gcgtcatctagacacgcagtcataaggaat

SEQ ID NO: 478776 - DNA, 30 bp, Artificial Sequence
  Synthetic oligonucleotide
ccgcatgtctatattgcattgtgcaggaat

SEQ ID NO: 478777 - DNA, 30 bp, Artificial Sequence
  Synthetic oligonucleotide
ggttccaagccacaggaatctgtcaggaat

SEQ ID NO: 478778 - DNA, 30 bp, Artificial Sequence
  Synthetic oligonucleotide
ctttacttgactcattctgagttcaggaat

SEQ ID NO: 478779 - DNA, 30 bp, Artificial Sequence
  Synthetic oligonucleotide
gcgcaagcggcagcgctgcccatgaggaat

SEQ ID NO: 478780 - DNA, 30 bp, Artificial Sequence
  Synthetic oligonucleotide
gttgttatgagtaggtatacggtgaggaat

SEQ ID NO: 478781 - DNA, 30 bp, Artificial Sequence
  Synthetic oligonucleotide
tacgactttaaccactgccgattgaggaat

SEQ ID NO: 478782 - DNA, 30 bp, Artificial Sequence
  Synthetic oligonucleotide
agcttattgtggttactatttaataggaat

SEQ ID NO: 478783 - DNA, 30 bp, Artificial Sequence
  Synthetic oligonucleotide
aataatgataagggttcttaatataggaat

SEQ ID NO: 478784 - DNA, 30 bp, Artificial Sequence
  Synthetic oligonucleotide
gacctgtagccactgtcatgccaccggaat

SEQ ID NO: 478785 - DNA, 30 bp, Artificial Sequence
  Synthetic oligonucleotide
aagatcttcgcacgttgtaggttccggaat

SEQ ID NO: 478786 - DNA, 30 bp, Artificial Sequence
  Synthetic oligonucleotide
cggcacttactctctccgggcactcggaat

SEQ ID NO: 478787 - DNA, 30 bp, Artificial Sequence
  Synthetic oligonucleotide
cacagttctaggctaagacgcggtcggaat

SEQ ID NO: 478788 - DNA, 30 bp, Artificial Sequence
  Synthetic oligonucleotide
ctagaggttgagaggtattatattcggaat

SEQ ID NO: 478789 - DNA, 30 bp, Artificial Sequence
  Synthetic oligonucleotide
taccagactgaatacgagacgcccgggaat

SEQ ID NO: 478790 - DNA, 30 bp, Artificial Sequence
  Synthetic oligonucleotide
ctctcaacggtggccattggctaggggaat

SEQ ID NO: 478791 - DNA, 30 bp, Artificial Sequence
  Synthetic oligonucleotide
ggctgtcggtgtcatacaccgggggggaat

SEQ ID NO: 478792 - DNA, 30 bp, Artificial Sequence
  Synthetic oligonucleotide
aacgggccgctgtggggggggcgtgggaat

SEQ ID NO: 478793 - DNA, 30 bp, Artificial Sequence
  Synthetic oligonucleotide
gcttaccacgactcgtaaccgtcatggaat

SEQ ID NO: 478794 - DNA, 30 bp, Artificial Sequence
  Synthetic oligonucleotide
ggtcaaggtaattgcaggtaggtatggaat

SEQ ID NO: 478795 - DNA, 30 bp, Artificial Sequence
  Synthetic oligonucleotide
attttctgtccactcattatgaactggaat

SEQ ID NO: 478796 - DNA, 30 bp, Artificial Sequence
  Synthetic oligonucleotide
cagtaaagcccacggagctaccattggaat

SEQ ID NO: 478797 - DNA, 30 bp, Artificial Sequence
  Synthetic oligonucleotide
ctcccgtatttcgggtcgcgaacttggaat

SEQ ID NO: 478798 - DNA, 30 bp, Artificial Sequence
  Synthetic oligonucleotide
gccggttggatgactatggctccttggaat

SEQ ID NO: 478799 - DNA, 30 bp, Artificial Sequence
  Synthetic oligonucleotide
ttccggggatagttcttgctcttttggaat

SEQ ID NO: 478800 - DNA, 30 bp, Artificial Sequence
  Synthetic oligonucleotide
tagactgcgtttctgaacagtgcaatgaat

SEQ ID NO: 478801 - DNA, 30 bp, Artificial Sequence
  Synthetic oligonucleotide
aaaagttttggcactgtctacttaatgaat

SEQ ID NO: 478802 - DNA, 30 bp, Artificial Sequence
  Synthetic oligonucleotide
agattcggtgggatcgcagcacacatgaat

SEQ ID NO: 478803 - DNA, 30 bp, Artificial Sequence
  Synthetic oligonucleotide
gggttggcaggcaggataactcccatgaat

SEQ ID NO: 478804 - DNA, 30 bp, Artificial Sequence
  Synthetic oligonucleotide
aaaataccatccagatcctgttcgatgaat

SEQ ID NO: 478805 - DNA, 30 bp, Artificial Sequence
  Synthetic oligonucleotide
gttgggatgcggttccccgttgggatgaat

SEQ ID NO: 478806 - DNA, 30 bp, Artificial Sequence
  Synthetic oligonucleotide
gcggcgactctccgttcgcggtatatgaat

SEQ ID NO: 478807 - DNA, 30 bp, Artificial Sequence
  Synthetic oligonucleotide
ctttgggtagatatagctagggttatgaat

SEQ ID NO: 478808 - DNA, 30 bp, Artificial Sequence
  Synthetic oligonucleotide
ggatcttcttgggcgcacggcgcactgaat

SEQ ID NO: 478809 - DNA, 30 bp, Artificial Sequence
  Synthetic oligonucleotide
ttttatttccactccgtaataagactgaat

SEQ ID NO: 478810 - DNA, 30 bp, Artificial Sequence
  Synthetic oligonucleotide
cctgtactctgggataatgcagtgctgaat

SEQ ID NO: 478811 - DNA, 30 bp, Artificial Sequence
  Synthetic oligonucleotide
tctatgttccgtcgcaacggacatctgaat

SEQ ID NO: 478812 - DNA, 30 bp, Artificial Sequence
  Synthetic oligonucleotide
tgagactgctacaagtggtgtgttctgaat

SEQ ID NO: 478813 - DNA, 30 bp, Artificial Sequence
  Synthetic oligonucleotide
gtttcagcctcctcaaatcgtagcgtgaat

SEQ ID NO: 478814 - DNA, 30 bp, Artificial Sequence
  Synthetic oligonucleotide
cgtttgtgactcgtatgagggccggtgaat

SEQ ID NO: 478815 - DNA, 30 bp, Artificial Sequence
  Synthetic oligonucleotide
tttatgacgatcggatgagcacatgtgaat

SEQ ID NO: 478816 - DNA, 30 bp, Artificial Sequence
  Synthetic oligonucleotide
cagtcaaacacatggatggtatatgtgaat

SEQ ID NO: 478817 - DNA, 30 bp, Artificial Sequence
  Synthetic oligonucleotide
ggcgacattcgacgatcggtttatgtgaat

SEQ ID NO: 478818 - DNA, 30 bp, Artificial Sequence
  Synthetic oligonucleotide
ggggttctgccatttgaggtttgtgtgaat

SEQ ID NO: 478819 - DNA, 30 bp, Artificial Sequence
  Synthetic oligonucleotide
cagtctacgtataatgctgaaattgtgaat

SEQ ID NO: 478820 - DNA, 30 bp, Artificial Sequence
  Synthetic oligonucleotide
tccactatatgcagcagaatcattgtgaat

SEQ ID NO: 478821 - DNA, 30 bp, Artificial Sequence
  Synthetic oligonucleotide
aggctagcaataggttgataggttgtgaat

SEQ ID NO: 478822 - DNA, 30 bp, Artificial Sequence
  Synthetic oligonucleotide
ctaaattagacacgagcgattgttgtgaat

SEQ ID NO: 478823 - DNA, 30 bp, Artificial Sequence
  Synthetic oligonucleotide
ggtcaatgacggcatcttgctgcattgaat

SEQ ID NO: 478824 - DNA, 30 bp, Artificial Sequence
  Synthetic oligonucleotide
ggggaaacggtttatgccccatcattgaat

SEQ ID NO: 478825 - DNA, 30 bp, Artificial Sequence
  Synthetic oligonucleotide
aactaagtatggtttgtggttctattgaat

SEQ ID NO: 478826 - DNA, 30 bp, Artificial Sequence
  Synthetic oligonucleotide
tagatctttgtagcggcgcataagttgaat

SEQ ID NO: 478827 - DNA, 30 bp, Artificial Sequence
  Synthetic oligonucleotide
ttgctttcatcgaaggcatccctgttgaat

SEQ ID NO: 478828 - DNA, 30 bp, Artificial Sequence
  Synthetic oligonucleotide
tctctttggcttatgtgacgcttgttgaat

SEQ ID NO: 478829 - DNA, 30 bp, Artificial Sequence
  Synthetic oligonucleotide
tcatacctaccctgatgtgtggatttgaat

SEQ ID NO: 478830 - DNA, 30 bp, Artificial Sequence
  Synthetic oligonucleotide
gtttaataagctgtcaacagtcctttgaat

SEQ ID NO: 478831 - DNA, 30 bp, Artificial Sequence
  Synthetic oligonucleotide
ggcttgctaccgacggcaaagtctttgaat

SEQ ID NO: 478832 - DNA, 30 bp, Artificial Sequence
  Synthetic oligonucleotide
aagtagatctatagtaaggctcttttgaat

SEQ ID NO: 478833 - DNA, 30 bp, Artificial Sequence
  Synthetic oligonucleotide
gccccacaaaaaatgttgtggacaaataat

SEQ ID NO: 478834 - DNA, 30 bp, Artificial Sequence
  Synthetic oligonucleotide
caagattttgcgtagggggccttaaataat

SEQ ID NO: 478835 - DNA, 30 bp, Artificial Sequence
  Synthetic oligonucleotide
ggtaaactgacgcgcaacctatagaataat

SEQ ID NO: 478836 - DNA, 30 bp, Artificial Sequence
  Synthetic oligonucleotide
gcacagcattcttctggacccgggaataat

SEQ ID NO: 478837 - DNA, 30 bp, Artificial Sequence
  Synthetic oligonucleotide
gggtgtttcgtttaatatgcggggaataat

SEQ ID NO: 478838 - DNA, 30 bp, Artificial Sequence
  Synthetic oligonucleotide
gaactgtcctccaagatataggtgaataat

SEQ ID NO: 478839 - DNA, 30 bp, Artificial Sequence
  Synthetic oligonucleotide
gaggataatgattctcgccctttgaataat

SEQ ID NO: 478840 - DNA, 30 bp, Artificial Sequence
  Synthetic oligonucleotide
ctacagcatgttttgtcctgggataataat

SEQ ID NO: 478841 - DNA, 30 bp, Artificial Sequence
  Synthetic oligonucleotide
accaatctaactgatgtgacgcttaataat

SEQ ID NO: 478842 - DNA, 30 bp, Artificial Sequence
  Synthetic oligonucleotide
tttgatccggcctaacgtgtcggacataat

SEQ ID NO: 478843 - DNA, 30 bp, Artificial Sequence
  Synthetic oligonucleotide
atcccttaaacggacctcgtacgccataat

SEQ ID NO: 478844 - DNA, 30 bp, Artificial Sequence
  Synthetic oligonucleotide
tatcagagtatgccgcaagcaaatcataat

SEQ ID NO: 478845 - DNA, 30 bp, Artificial Sequence
  Synthetic oligonucleotide
actattggggatcctttgatacctcataat

SEQ ID NO: 478846 - DNA, 30 bp, Artificial Sequence
  Synthetic oligonucleotide
ggatcgcctaatctgactgcagctcataat

SEQ ID NO: 478847 - DNA, 30 bp, Artificial Sequence
  Synthetic oligonucleotide
gttttttatctaatcagacaaacagataat

SEQ ID NO: 478848 - DNA, 30 bp, Artificial Sequence
  Synthetic oligonucleotide
gatgtcattcgcgaatcttaaggagataat

SEQ ID NO: 478849 - DNA, 30 bp, Artificial Sequence
  Synthetic oligonucleotide
gtaaattgtagattttaattataggataat

SEQ ID NO: 478850 - DNA, 30 bp, Artificial Sequence
  Synthetic oligonucleotide
gaacggtcagctcagttggttacggataat

SEQ ID NO: 478851 - DNA, 30 bp, Artificial Sequence
  Synthetic oligonucleotide
aatatattcgctagggtacttgcggataat

SEQ ID NO: 478852 - DNA, 30 bp, Artificial Sequence
  Synthetic oligonucleotide
cgaggccgggcacgcccgaagagggataat

SEQ ID NO: 478853 - DNA, 30 bp, Artificial Sequence
  Synthetic oligonucleotide
cccatgtgacgccgtcggcagttggataat

SEQ ID NO: 478854 - DNA, 30 bp, Artificial Sequence
  Synthetic oligonucleotide
cgaattccaccgttcctccgtaaatataat

SEQ ID NO: 478855 - DNA, 30 bp, Artificial Sequence
  Synthetic oligonucleotide
atagactcactacatacgacacaatataat

SEQ ID NO: 478856 - DNA, 30 bp, Artificial Sequence
  Synthetic oligonucleotide
cattactagcctgctttatcgatatataat

SEQ ID NO: 478857 - DNA, 29 bp, Artificial Sequence
  Synthetic oligonucleotide
aatggtcactggaggatcacaactataat

SEQ ID NO: 478858 - DNA, 30 bp, Artificial Sequence
  Synthetic oligonucleotide
tagtgttaggtgacgcgaattccctataat

SEQ ID NO: 478859 - DNA, 30 bp, Artificial Sequence
  Synthetic oligonucleotide
gatttatcgaaaggctgggccaggtataat

SEQ ID NO: 478860 - DNA, 30 bp, Artificial Sequence
  Synthetic oligonucleotide
gacgctcgcgcagtattgggacattataat

SEQ ID NO: 478861 - DNA, 30 bp, Artificial Sequence
  Synthetic oligonucleotide
tttcggtaagtacacagacatgtttataat

SEQ ID NO: 478862 - DNA, 30 bp, Artificial Sequence
  Synthetic oligonucleotide
ttgtaacccagaacaggctacagcactaat

SEQ ID NO: 478863 - DNA, 30 bp, Artificial Sequence
  Synthetic oligonucleotide
gtctgttcactctgtagctcggtcactaat

SEQ ID NO: 478864 - DNA, 30 bp, Artificial Sequence
  Synthetic oligonucleotide
gaaaaggcagccgtagcgtaaaagactaat

SEQ ID NO: 478865 - DNA, 30 bp, Artificial Sequence
  Synthetic oligonucleotide
gaaaagaccgtgggtatgcactagactaat

SEQ ID NO: 478866 - DNA, 30 bp, Artificial Sequence
  Synthetic oligonucleotide
aaagtctcccaaagtcggtagcggactaat

SEQ ID NO: 478867 - DNA, 30 bp, Artificial Sequence
  Synthetic oligonucleotide
cttttagccagacccttggcaaatactaat

SEQ ID NO: 478868 - DNA, 30 bp, Artificial Sequence
  Synthetic oligonucleotide
gactgcatcctaactcctgcaaaacctaat

SEQ ID NO: 478869 - DNA, 30 bp, Artificial Sequence
  Synthetic oligonucleotide
cttttccagcaatgcttactcatccctaat

SEQ ID NO: 478870 - DNA, 30 bp, Artificial Sequence
  Synthetic oligonucleotide
atgttagcggatcagattcatgtccctaat

SEQ ID NO: 478871 - DNA, 30 bp, Artificial Sequence
  Synthetic oligonucleotide
tataacaagcccgtatcagcatagcctaat

SEQ ID NO: 478872 - DNA, 30 bp, Artificial Sequence
  Synthetic oligonucleotide
gccaaaatttggaagattcccaatcctaat

SEQ ID NO: 478873 - DNA, 30 bp, Artificial Sequence
  Synthetic oligonucleotide
ggtaagacgcctgcattaatcagtcctaat

SEQ ID NO: 478874 - DNA, 30 bp, Artificial Sequence
  Synthetic oligonucleotide
aactacatcactttgtttgagcgtcctaat

SEQ ID NO: 478875 - DNA, 30 bp, Artificial Sequence
  Synthetic oligonucleotide
gtcgcggtctccctgcccgaggtagctaat

SEQ ID NO: 478876 - DNA, 30 bp, Artificial Sequence
  Synthetic oligonucleotide
actattagtgggcttttggcatgcgctaat

SEQ ID NO: 478877 - DNA, 30 bp, Artificial Sequence
  Synthetic oligonucleotide
atcaacgtcttggaaacagacgctgctaat

SEQ ID NO: 478878 - DNA, 30 bp, Artificial Sequence
  Synthetic oligonucleotide
gcccgtatcttggctattcaccgtgctaat

SEQ ID NO: 478879 - DNA, 30 bp, Artificial Sequence
  Synthetic oligonucleotide
agcccgggatagttaacaccgattgctaat

SEQ ID NO: 478880 - DNA, 30 bp, Artificial Sequence
  Synthetic oligonucleotide
ggcctcaagtctgtccgtgaatgatctaat

SEQ ID NO: 478881 - DNA, 30 bp, Artificial Sequence
  Synthetic oligonucleotide
aaaacaaccagccctactgccgtatctaat

SEQ ID NO: 478882 - DNA, 30 bp, Artificial Sequence
  Synthetic oligonucleotide
cagatcccaggtagaattcataagtctaat

SEQ ID NO: 478883 - DNA, 30 bp, Artificial Sequence
  Synthetic oligonucleotide
aggccagcgtcctgccataggcagtctaat

SEQ ID NO: 478884 - DNA, 30 bp, Artificial Sequence
  Synthetic oligonucleotide
tgacacggtcaccattaagcgacgtctaat

SEQ ID NO: 478885 - DNA, 30 bp, Artificial Sequence
  Synthetic oligonucleotide
agcctgcggcagcccaccttttggtctaat

SEQ ID NO: 478886 - DNA, 30 bp, Artificial Sequence
  Synthetic oligonucleotide
tttcagactttcctggtcaaagtgtctaat

SEQ ID NO: 478887 - DNA, 30 bp, Artificial Sequence
  Synthetic oligonucleotide
gataggccgaaccggacccggttgtctaat

SEQ ID NO: 478888 - DNA, 30 bp, Artificial Sequence
  Synthetic oligonucleotide
cgccatgtcctacggtcagcgtcaagtaat

SEQ ID NO: 478889 - DNA, 30 bp, Artificial Sequence
  Synthetic oligonucleotide
ttattggttccctagggcgggggcagtaat

SEQ ID NO: 478890 - DNA, 30 bp, Artificial Sequence
  Synthetic oligonucleotide
gctgatcagagtacaaaccgacttagtaat

SEQ ID NO: 478891 - DNA, 30 bp, Artificial Sequence
  Synthetic oligonucleotide
gcagtacgcgttggtaggaatctacgtaat

SEQ ID NO: 478892 - DNA, 30 bp, Artificial Sequence
  Synthetic oligonucleotide
cgtgcgggttcttaaagccttcaccgtaat

SEQ ID NO: 478893 - DNA, 30 bp, Artificial Sequence
  Synthetic oligonucleotide
ctatagttttgacccaactccaagcgtaat

SEQ ID NO: 478894 - DNA, 30 bp, Artificial Sequence
  Synthetic oligonucleotide
tcgtcgattactttccgttgattgcgtaat

SEQ ID NO: 478895 - DNA, 30 bp, Artificial Sequence
  Synthetic oligonucleotide
tgcttttacatatcggtgctaataggtaat

SEQ ID NO: 478896 - DNA, 30 bp, Artificial Sequence
  Synthetic oligonucleotide
gggctgttccaatagaggattttaggtaat

SEQ ID NO: 478897 - DNA, 30 bp, Artificial Sequence
  Synthetic oligonucleotide
tgtgtagtagtcctgtataccgacggtaat

SEQ ID NO: 478898 - DNA, 30 bp, Artificial Sequence
  Synthetic oligonucleotide
ggtactttttcccaggaatataatggtaat

SEQ ID NO: 478899 - DNA, 30 bp, Artificial Sequence
  Synthetic oligonucleotide
ctagtgtcgcctaagccgccatgtggtaat

SEQ ID NO: 478900 - DNA, 30 bp, Artificial Sequence
  Synthetic oligonucleotide
agaaagggagtgtttaacgttaactgtaat

SEQ ID NO: 478901 - DNA, 30 bp, Artificial Sequence
  Synthetic oligonucleotide
tgtacagtccatacggagtttgtctgtaat

SEQ ID NO: 478902 - DNA, 30 bp, Artificial Sequence
  Synthetic oligonucleotide
cgcagcggcatggctgctaggttttgtaat

SEQ ID NO: 478903 - DNA, 30 bp, Artificial Sequence
  Synthetic oligonucleotide
catgtttagaatcccggggtagtaattaat

SEQ ID NO: 478904 - DNA, 30 bp, Artificial Sequence
  Synthetic oligonucleotide
atctctcgcattagctgaaacaacattaat

SEQ ID NO: 478905 - DNA, 30 bp, Artificial Sequence
  Synthetic oligonucleotide
ggaaaactttcatccggagcgtacattaat

SEQ ID NO: 478906 - DNA, 30 bp, Artificial Sequence
  Synthetic oligonucleotide
tggaactcctgtgtagaataacgcattaat

SEQ ID NO: 478907 - DNA, 30 bp, Artificial Sequence
  Synthetic oligonucleotide
attgagcggggtggttttcaccgcattaat

SEQ ID NO: 478908 - DNA, 30 bp, Artificial Sequence
  Synthetic oligonucleotide
aatgttgtagtagataggcaatgcattaat

SEQ ID NO: 478909 - DNA, 30 bp, Artificial Sequence
  Synthetic oligonucleotide
cagaccaaagatggtacatttagtattaat

SEQ ID NO: 478910 - DNA, 30 bp, Artificial Sequence
  Synthetic oligonucleotide
ggtgtttgttaactacacgcgagacttaat

SEQ ID NO: 478911 - DNA, 30 bp, Artificial Sequence
  Synthetic oligonucleotide
catagaagtcccatgtttggttgacttaat

SEQ ID NO: 478912 - DNA, 30 bp, Artificial Sequence
  Synthetic oligonucleotide
cttgtcaatctgactgaccgagaccttaat

SEQ ID NO: 478913 - DNA, 30 bp, Artificial Sequence
  Synthetic oligonucleotide
gattaatcgagcgcacttaacatccttaat

SEQ ID NO: 478914 - DNA, 30 bp, Artificial Sequence
  Synthetic oligonucleotide
gatccgacaagctgaacgggggagcttaat

SEQ ID NO: 478915 - DNA, 30 bp, Artificial Sequence
  Synthetic oligonucleotide
gttgttttcccaagaacaggtttagttaat

SEQ ID NO: 478916 - DNA, 30 bp, Artificial Sequence
  Synthetic oligonucleotide
gtgtatcgaacagcggaaggacgcgttaat

SEQ ID NO: 478917 - DNA, 30 bp, Artificial Sequence
  Synthetic oligonucleotide
tcctaaaccgtgagcaagataacggttaat

SEQ ID NO: 478918 - DNA, 30 bp, Artificial Sequence
  Synthetic oligonucleotide
aaaagcctctcgacaagactgtatgttaat

SEQ ID NO: 478919 - DNA, 30 bp, Artificial Sequence
  Synthetic oligonucleotide
gtaaagagtttgaaagaggattctgttaat

SEQ ID NO: 478920 - DNA, 30 bp, Artificial Sequence
  Synthetic oligonucleotide
tgagtcgcgtcaacataagccagatttaat

SEQ ID NO: 478921 - DNA, 30 bp, Artificial Sequence
  Synthetic oligonucleotide
cacagcaatatcgtaacggacggatttaat

SEQ ID NO: 478922 - DNA, 30 bp, Artificial Sequence
  Synthetic oligonucleotide
ggtttactgacaataatctttttatttaat

SEQ ID NO: 478923 - DNA, 30 bp, Artificial Sequence
  Synthetic oligonucleotide
gtctcgcgaagaagtggcattgtctttaat

SEQ ID NO: 478924 - DNA, 30 bp, Artificial Sequence
  Synthetic oligonucleotide
accttggttgggtcacacacggcgtttaat

SEQ ID NO: 478925 - DNA, 30 bp, Artificial Sequence
  Synthetic oligonucleotide
cttgtagatccattaacttcatcgtttaat

SEQ ID NO: 478926 - DNA, 30 bp, Artificial Sequence
  Synthetic oligonucleotide
aaaagacggggccgcttggcggggtttaat

SEQ ID NO: 478927 - DNA, 30 bp, Artificial Sequence
  Synthetic oligonucleotide
ctgagatcagtacgtacggtaaattttaat

SEQ ID NO: 478928 - DNA, 30 bp, Artificial Sequence
  Synthetic oligonucleotide
cctgtatttactaatgagtattaaaaacat

SEQ ID NO: 478929 - DNA, 30 bp, Artificial Sequence
  Synthetic oligonucleotide
cagtgatcttaaaatcggcattgaaaacat

SEQ ID NO: 478930 - DNA, 30 bp, Artificial Sequence
  Synthetic oligonucleotide
ctatactatcagcgacttcagcagaaacat

SEQ ID NO: 478931 - DNA, 30 bp, Artificial Sequence
  Synthetic oligonucleotide
tgtattatatggtggtttgacgtgaaacat

SEQ ID NO: 478932 - DNA, 30 bp, Artificial Sequence
  Synthetic oligonucleotide
ccagtttaggcccctatagacactaaacat

SEQ ID NO: 478933 - DNA, 30 bp, Artificial Sequence
  Synthetic oligonucleotide
gtattctatgatgtgccttctagtaaacat

SEQ ID NO: 478934 - DNA, 30 bp, Artificial Sequence
  Synthetic oligonucleotide
tttaataaggttgccaatggttaccaacat

SEQ ID NO: 478935 - DNA, 30 bp, Artificial Sequence
  Synthetic oligonucleotide
tatcctctcaatcaagctagtaagcaacat

SEQ ID NO: 478936 - DNA, 30 bp, Artificial Sequence
  Synthetic oligonucleotide
cttgatctgaatcacctacgcaggcaacat

SEQ ID NO: 478937 - DNA, 30 bp, Artificial Sequence
  Synthetic oligonucleotide
ttaagcatacggccgggagtgaggcaacat

SEQ ID NO: 478938 - DNA, 30 bp, Artificial Sequence
  Synthetic oligonucleotide
tatgtcttcccggtcgaagacttgcaacat

SEQ ID NO: 478939 - DNA, 30 bp, Artificial Sequence
  Synthetic oligonucleotide
aattctggcagatagcgagcaacagaacat

SEQ ID NO: 478940 - DNA, 31 bp, Artificial Sequence
  Synthetic oligonucleotide
ggaagcagttgctgtagcacgcagagaacat

SEQ ID NO: 478941 - DNA, 30 bp, Artificial Sequence
  Synthetic oligonucleotide
aattcgttagttgaagtttcgcgagaacat

SEQ ID NO: 478942 - DNA, 30 bp, Artificial Sequence
  Synthetic oligonucleotide
ggttttgataatcaactgtaactagaacat

SEQ ID NO: 478943 - DNA, 30 bp, Artificial Sequence
  Synthetic oligonucleotide
agtacccaatgtttgacacagcacgaacat

SEQ ID NO: 478944 - DNA, 30 bp, Artificial Sequence
  Synthetic oligonucleotide
tccgaaactcgttccgcgtttcaggaacat

SEQ ID NO: 478945 - DNA, 30 bp, Artificial Sequence
  Synthetic oligonucleotide
ttaagcttcaggtttaccgcatcggaacat

SEQ ID NO: 478946 - DNA, 30 bp, Artificial Sequence
  Synthetic oligonucleotide
ctctttcgttctacgaggctcgttgaacat

SEQ ID NO: 478947 - DNA, 30 bp, Artificial Sequence
  Synthetic oligonucleotide
agttaagactattgtttcgcacgataacat

SEQ ID NO: 478948 - DNA, 30 bp, Artificial Sequence
  Synthetic oligonucleotide
ttttatgcacatggtgcgcgattataacat

SEQ ID NO: 478949 - DNA, 30 bp, Artificial Sequence
  Synthetic oligonucleotide
gggtcagatccagacaaaaacgcgtaacat

SEQ ID NO: 478950 - DNA, 30 bp, Artificial Sequence
  Synthetic oligonucleotide
cacgatccaattctcttcgtgaggtaacat

SEQ ID NO: 478951 - DNA, 30 bp, Artificial Sequence
  Synthetic oligonucleotide
agatgggcacggtgttcaggtagttaacat

SEQ ID NO: 478952 - DNA, 30 bp, Artificial Sequence
  Synthetic oligonucleotide
tgattactttcctttttagttccaacacat

SEQ ID NO: 478953 - DNA, 30 bp, Artificial Sequence
  Synthetic oligonucleotide
ccatatggtggttatcgatgcttcacacat

SEQ ID NO: 478954 - DNA, 30 bp, Artificial Sequence
  Synthetic oligonucleotide
ttactgtgagttcgaactgtcaagacacat

SEQ ID NO: 478955 - DNA, 30 bp, Artificial Sequence
  Synthetic oligonucleotide
tagacacgttcggggatcaagcatacacat

SEQ ID NO: 478956 - DNA, 30 bp, Artificial Sequence
  Synthetic oligonucleotide
gatgtacgttgtgtagacttttatacacat

SEQ ID NO: 478957 - DNA, 30 bp, Artificial Sequence
  Synthetic oligonucleotide
actggttgccgagcacctttagttacacat

SEQ ID NO: 478958 - DNA, 30 bp, Artificial Sequence
  Synthetic oligonucleotide
tattagagaagacgctacaattaaccacat

SEQ ID NO: 478959 - DNA, 30 bp, Artificial Sequence
  Synthetic oligonucleotide
atcgatttgttcgcgggagtgccaccacat

SEQ ID NO: 478960 - DNA, 30 bp, Artificial Sequence
  Synthetic oligonucleotide
ctctttgagcactcttaatgtaccccacat

SEQ ID NO: 478961 - DNA, 30 bp, Artificial Sequence
  Synthetic oligonucleotide
gctctaagtttcaggaccttacggccacat

SEQ ID NO: 478962 - DNA, 30 bp, Artificial Sequence
  Synthetic oligonucleotide
attatgcgtaaaggtacgcacaatccacat

SEQ ID NO: 478963 - DNA, 30 bp, Artificial Sequence
  Synthetic oligonucleotide
ggcttggatactgcactgggtgcagcacat

SEQ ID NO: 478964 - DNA, 30 bp, Artificial Sequence
  Synthetic oligonucleotide
cattcccaagcctataggcgaccggcacat

SEQ ID NO: 478965 - DNA, 30 bp, Artificial Sequence
  Synthetic oligonucleotide
ttattagataaatcaacgggacgggcacat

SEQ ID NO: 478966 - DNA, 30 bp, Artificial Sequence
  Synthetic oligonucleotide
agaatccggcttattcactaccgggcacat

SEQ ID NO: 478967 - DNA, 30 bp, Artificial Sequence
  Synthetic oligonucleotide
gggtaagggttgcccaggtatcgggcacat

SEQ ID NO: 478968 - DNA, 30 bp, Artificial Sequence
  Synthetic oligonucleotide
gacctcatgctgtgtgcattgcatgcacat

SEQ ID NO: 478969 - DNA, 30 bp, Artificial Sequence
  Synthetic oligonucleotide
taaaaaagtgttgccccaggctgtgcacat

SEQ ID NO: 478970 - DNA, 30 bp, Artificial Sequence
  Synthetic oligonucleotide
cagggcaaaacggacagcacgcttgcacat

SEQ ID NO: 478971 - DNA, 30 bp, Artificial Sequence
  Synthetic oligonucleotide
agggctttatgtaatcccctctttgcacat

SEQ ID NO: 478972 - DNA, 30 bp, Artificial Sequence
  Synthetic oligonucleotide
gtgacggtaaagtgcagcgggtcatcacat

SEQ ID NO: 478973 - DNA, 30 bp, Artificial Sequence
  Synthetic oligonucleotide
tggcgccttttgctttgagccttatcacat

SEQ ID NO: 478974 - DNA, 30 bp, Artificial Sequence
  Synthetic oligonucleotide
tatcgcagtccaggcttcattcattcacat

SEQ ID NO: 478975 - DNA, 30 bp, Artificial Sequence
  Synthetic oligonucleotide
ctcaatgttctttgcccgctgacaagacat

SEQ ID NO: 478976 - DNA, 30 bp, Artificial Sequence
  Synthetic oligonucleotide
ggcagcgagccgtcatgaatacacagacat

SEQ ID NO: 478977 - DNA, 30 bp, Artificial Sequence
  Synthetic oligonucleotide
cttgttcccgattaaaccttgctcagacat

SEQ ID NO: 478978 - DNA, 30 bp, Artificial Sequence
  Synthetic oligonucleotide
gtttaaggagcggactcaaatatgagacat

SEQ ID NO: 478979 - DNA, 30 bp, Artificial Sequence
  Synthetic oligonucleotide
gttcgctcctatgtagtacgtttgagacat

SEQ ID NO: 478980 - DNA, 30 bp, Artificial Sequence
  Synthetic oligonucleotide
cccacttttttacatgtgggttgtagacat

SEQ ID NO: 478981 - DNA, 30 bp, Artificial Sequence
  Synthetic oligonucleotide
gtttacaccccgtgaaatttcaaacgacat

SEQ ID NO: 478982 - DNA, 30 bp, Artificial Sequence
  Synthetic oligonucleotide
acggaataggcctttcgaatgacgcgacat

SEQ ID NO: 478983 - DNA, 30 bp, Artificial Sequence
  Synthetic oligonucleotide
agaaactaggttttgtcgtatgtgcgacat

SEQ ID NO: 478984 - DNA, 30 bp, Artificial Sequence
  Synthetic oligonucleotide
tttggaggctgtactgttacgataggacat

SEQ ID NO: 478985 - DNA, 30 bp, Artificial Sequence
  Synthetic oligonucleotide
ttttggcacggtcttaccctgataggacat

SEQ ID NO: 478986 - DNA, 30 bp, Artificial Sequence
  Synthetic oligonucleotide
ggggggaccatcacaggtgttctcggacat

SEQ ID NO: 478987 - DNA, 30 bp, Artificial Sequence
  Synthetic oligonucleotide
atttcgtcgagtgtacatctaccgggacat

SEQ ID NO: 478988 - DNA, 30 bp, Artificial Sequence
  Synthetic oligonucleotide
gggctttcaggtgttctacggtggggacat

SEQ ID NO: 478989 - DNA, 30 bp, Artificial Sequence
  Synthetic oligonucleotide
aggtactctcacaagttactgttgggacat

SEQ ID NO: 478990 - DNA, 30 bp, Artificial Sequence
  Synthetic oligonucleotide
tacgagctagtcacttggcctcatggacat

SEQ ID NO: 478991 - DNA, 30 bp, Artificial Sequence
  Synthetic oligonucleotide
tttactccagtaagcggaccccctggacat

SEQ ID NO: 478992 - DNA, 30 bp, Artificial Sequence
  Synthetic oligonucleotide
gttacacttaaagtattgtgaagtggacat

SEQ ID NO: 478993 - DNA, 30 bp, Artificial Sequence
  Synthetic oligonucleotide
gattttcatgtgccagtaggggaatgacat

SEQ ID NO: 478994 - DNA, 30 bp, Artificial Sequence
  Synthetic oligonucleotide
ggctatgggtgtttacaatcaggatgacat

SEQ ID NO: 478995 - DNA, 30 bp, Artificial Sequence
  Synthetic oligonucleotide
tatttggaacactcgagcacattgtgacat

SEQ ID NO: 478996 - DNA, 30 bp, Artificial Sequence
  Synthetic oligonucleotide
ttgtcattgaagacgcctacgctttgacat

SEQ ID NO: 478997 - DNA, 30 bp, Artificial Sequence
  Synthetic oligonucleotide
gtgtcgcgttaacggaacctcacaatacat

SEQ ID NO: 478998 - DNA, 30 bp, Artificial Sequence
  Synthetic oligonucleotide
gtatttcttgatgtgcgcgatacaatacat

SEQ ID NO: 478999 - DNA, 30 bp, Artificial Sequence
  Synthetic oligonucleotide
cgcttgcggtgattgacacccccaatacat

SEQ ID NO: 479000 - DNA, 30 bp, Artificial Sequence
  Synthetic oligonucleotide
gaccccatcggcccaacgctgtgcatacat

SEQ ID NO: 479001 - DNA, 30 bp, Artificial Sequence
  Synthetic oligonucleotide
atcgtgccacacttgaggtccaggatacat

SEQ ID NO: 479002 - DNA, 31 bp, Artificial Sequence
  Synthetic oligonucleotide
ggggatacaagaacgccgttatattatacat

SEQ ID NO: 479003 - DNA, 30 bp, Artificial Sequence
  Synthetic oligonucleotide
aaatcgcgcttctgaacggccgttatacat

SEQ ID NO: 479004 - DNA, 30 bp, Artificial Sequence
  Synthetic oligonucleotide
ttgtgtttatttagttgtgcgggactacat

SEQ ID NO: 479005 - DNA, 30 bp, Artificial Sequence
  Synthetic oligonucleotide
aggatagtatggattgtaaccaacctacat

SEQ ID NO: 479006 - DNA, 30 bp, Artificial Sequence
  Synthetic oligonucleotide
taggaatacgctgggattgtctccctacat

SEQ ID NO: 479007 - DNA, 30 bp, Artificial Sequence
  Synthetic oligonucleotide
cagtgtttggttgattcttgccacgtacat

SEQ ID NO: 479008 - DNA, 30 bp, Artificial Sequence
  Synthetic oligonucleotide
aaggaaaaaaagaaagtacactaggtacat

SEQ ID NO: 479009 - DNA, 30 bp, Artificial Sequence
  Synthetic oligonucleotide
agcacaataaccttttatcggcgggtacat

SEQ ID NO: 479010 - DNA, 30 bp, Artificial Sequence
  Synthetic oligonucleotide
caaagaaaccggggcgttaaataattacat

SEQ ID NO: 479011 - DNA, 30 bp, Artificial Sequence
  Synthetic oligonucleotide
tcgcggaatattactttttcgctcttacat

SEQ ID NO: 479012 - DNA, 30 bp, Artificial Sequence
  Synthetic oligonucleotide
cggctgccggtttgttaaccgttgttacat

SEQ ID NO: 479013 - DNA, 30 bp, Artificial Sequence
  Synthetic oligonucleotide
tttacggttaccagttctgtgcgtttacat

SEQ ID NO: 479014 - DNA, 30 bp, Artificial Sequence
  Synthetic oligonucleotide
aacaaaccttcatcataaaggtcaaaccat

SEQ ID NO: 479015 - DNA, 30 bp, Artificial Sequence
  Synthetic oligonucleotide
gtcaccgactttgcgccgcattgaaaccat

SEQ ID NO: 479016 - DNA, 30 bp, Artificial Sequence
  Synthetic oligonucleotide
tggcacggtttatttaacataataaaccat

SEQ ID NO: 479017 - DNA, 30 bp, Artificial Sequence
  Synthetic oligonucleotide
gccctgacacgttaagtggcacccaaccat

SEQ ID NO: 479018 - DNA, 30 bp, Artificial Sequence
  Synthetic oligonucleotide
cggtggaagcacgccccgggggccaaccat

SEQ ID NO: 479019 - DNA, 30 bp, Artificial Sequence
  Synthetic oligonucleotide
tttcggcgatgcaaatacctcttcaaccat

SEQ ID NO: 479020 - DNA, 30 bp, Artificial Sequence
  Synthetic oligonucleotide
attttcaactggtggatagaatctaaccat

SEQ ID NO: 479021 - DNA, 30 bp, Artificial Sequence
  Synthetic oligonucleotide
tgcactgacatgcaacgggtgcaacaccat

SEQ ID NO: 479022 - DNA, 30 bp, Artificial Sequence
  Synthetic oligonucleotide
ttctgtgtaacatgaagcgacccacaccat

SEQ ID NO: 479023 - DNA, 30 bp, Artificial Sequence
  Synthetic oligonucleotide
gcaaacggcgtctgaagaaacggacaccat

SEQ ID NO: 479024 - DNA, 30 bp, Artificial Sequence
  Synthetic oligonucleotide
gaattagtatgatgttctgttatacaccat

SEQ ID NO: 479025 - DNA, 30 bp, Artificial Sequence
  Synthetic oligonucleotide
acctttggtgcctaccattcaaagcaccat

SEQ ID NO: 479026 - DNA, 30 bp, Artificial Sequence
  Synthetic oligonucleotide
atcaaagtactcaatattggtccgcaccat

SEQ ID NO: 479027 - DNA, 30 bp, Artificial Sequence
  Synthetic oligonucleotide
tttctacagaatagcgcaacacggcaccat

SEQ ID NO: 479028 - DNA, 30 bp, Artificial Sequence
  Synthetic oligonucleotide
taatgattaagttgtgcatcgtctcaccat

SEQ ID NO: 479029 - DNA, 30 bp, Artificial Sequence
  Synthetic oligonucleotide
gggtttatgtcccatgctcggcgggaccat

SEQ ID NO: 479030 - DNA, 30 bp, Artificial Sequence
  Synthetic oligonucleotide
gattttcgtagatacaagtaggatgaccat

SEQ ID NO: 479031 - DNA, 30 bp, Artificial Sequence
  Synthetic oligonucleotide
gtcaacccttagccgtatattcactaccat

SEQ ID NO: 479032 - DNA, 30 bp, Artificial Sequence
  Synthetic oligonucleotide
gggttgaaagaggctataggagtctaccat

SEQ ID NO: 479033 - DNA, 30 bp, Artificial Sequence
  Synthetic oligonucleotide
ggattccacacgctacatgcgaggtaccat

SEQ ID NO: 479034 - DNA, 30 bp, Artificial Sequence
  Synthetic oligonucleotide
gctcgatcgccctattgactcatgtaccat

SEQ ID NO: 479035 - DNA, 30 bp, Artificial Sequence
  Synthetic oligonucleotide
gaaacccgtttacccggcgaattgtaccat

SEQ ID NO: 479036 - DNA, 30 bp, Artificial Sequence
  Synthetic oligonucleotide
gagacaattcaatttcagaagtgttaccat

SEQ ID NO: 479037 - DNA, 30 bp, Artificial Sequence
  Synthetic oligonucleotide
caaaggtgtcttgggtcctcgtgttaccat

SEQ ID NO: 479038 - DNA, 30 bp, Artificial Sequence
  Synthetic oligonucleotide
aggcagttctcccaataggacgcaacccat

SEQ ID NO: 479039 - DNA, 30 bp, Artificial Sequence
  Synthetic oligonucleotide
agtgattaagccatacgcacctacacccat

SEQ ID NO: 479040 - DNA, 30 bp, Artificial Sequence
  Synthetic oligonucleotide
gactgcctcgctaatatccaacgcacccat

SEQ ID NO: 479041 - DNA, 30 bp, Artificial Sequence
  Synthetic oligonucleotide
attatacctcgacgtagatcaaagacccat

SEQ ID NO: 479042 - DNA, 30 bp, Artificial Sequence
  Synthetic oligonucleotide
ggagtagtgatagcgagagatgcgacccat

SEQ ID NO: 479043 - DNA, 30 bp, Artificial Sequence
  Synthetic oligonucleotide
tatgtctgcggagactgggagatgacccat

SEQ ID NO: 479044 - DNA, 30 bp, Artificial Sequence
  Synthetic oligonucleotide
gcccttagagtcatatgtttttttacccat

SEQ ID NO: 479045 - DNA, 30 bp, Artificial Sequence
  Synthetic oligonucleotide
tacgtttaccacaccagttcttcaccccat

SEQ ID NO: 479046 - DNA, 30 bp, Artificial Sequence
  Synthetic oligonucleotide
tttaaaccgacaagtagggaaagcccccat

SEQ ID NO: 479047 - DNA, 30 bp, Artificial Sequence
  Synthetic oligonucleotide
aagacgtatattcggtggtcggatccccat

SEQ ID NO: 479048 - DNA, 30 bp, Artificial Sequence
  Synthetic oligonucleotide
gacatacgtacgttaatgtacccagcccat

SEQ ID NO: 479049 - DNA, 30 bp, Artificial Sequence
  Synthetic oligonucleotide
gggcccgttacactataggcgtacgcccat

SEQ ID NO: 479050 - DNA, 30 bp, Artificial Sequence
  Synthetic oligonucleotide
gaaagcaggtcatatacgaaactggcccat

SEQ ID NO: 479051 - DNA, 30 bp, Artificial Sequence
  Synthetic oligonucleotide
ttgtgctcgtagtcatggcgatatgcccat

SEQ ID NO: 479052 - DNA, 30 bp, Artificial Sequence
  Synthetic oligonucleotide
tgtcatcaccctcccaagagttaatcccat

SEQ ID NO: 479053 - DNA, 30 bp, Artificial Sequence
  Synthetic oligonucleotide
catgtggtcccggcggttcaggggtcccat

SEQ ID NO: 479054 - DNA, 30 bp, Artificial Sequence
  Synthetic oligonucleotide
actcattttcccaagcctcgcagttcccat

SEQ ID NO: 479055 - DNA, 30 bp, Artificial Sequence
  Synthetic oligonucleotide
gaaaattgttacgcaagagagccaagccat

SEQ ID NO: 479056 - DNA, 30 bp, Artificial Sequence
  Synthetic oligonucleotide
cacagtcgcagccacttatcaataagccat

SEQ ID NO: 479057 - DNA, 30 bp, Artificial Sequence
  Synthetic oligonucleotide
gttctagcggattgatccgagagcagccat

SEQ ID NO: 479058 - DNA, 30 bp, Artificial Sequence
  Synthetic oligonucleotide
ctaccggctacttatacgtaaagtagccat

SEQ ID NO: 479059 - DNA, 30 bp, Artificial Sequence
  Synthetic oligonucleotide
cgttgtcggcgggacacggttagtagccat

SEQ ID NO: 479060 - DNA, 30 bp, Artificial Sequence
  Synthetic oligonucleotide
tttcactgtacggcaatcgaaggtagccat

SEQ ID NO: 479061 - DNA, 30 bp, Artificial Sequence
  Synthetic oligonucleotide
ttactccaggcacaaactctagaccgccat

SEQ ID NO: 479062 - DNA, 30 bp, Artificial Sequence
  Synthetic oligonucleotide
tcagtgttagaacaacactgcgggcgccat

SEQ ID NO: 479063 - DNA, 30 bp, Artificial Sequence
  Synthetic oligonucleotide
ggggtaaaatggagaagggcaggaggccat

SEQ ID NO: 479064 - DNA, 30 bp, Artificial Sequence
  Synthetic oligonucleotide
gttctaacagcaacataagctctaggccat

SEQ ID NO: 479065 - DNA, 30 bp, Artificial Sequence
  Synthetic oligonucleotide
gccactgcagccaataatgtgttaggccat

SEQ ID NO: 479066 - DNA, 30 bp, Artificial Sequence
  Synthetic oligonucleotide
cggtttcacccggagcgtgggtccggccat

SEQ ID NO: 479067 - DNA, 30 bp, Artificial Sequence
  Synthetic oligonucleotide
agggcatggatccaactgcagggcggccat

SEQ ID NO: 479068 - DNA, 30 bp, Artificial Sequence
  Synthetic oligonucleotide
aatgagcgggaaggcacagcgctcggccat

SEQ ID NO: 479069 - DNA, 30 bp, Artificial Sequence
  Synthetic oligonucleotide
tcagacgccagtgttctggcaaagggccat

SEQ ID NO: 479070 - DNA, 30 bp, Artificial Sequence
  Synthetic oligonucleotide
gcaaatgattgaaacgtacgcgagggccat

SEQ ID NO: 479071 - DNA, 30 bp, Artificial Sequence
  Synthetic oligonucleotide
cagtttgataaaacctcgttctgatgccat

SEQ ID NO: 479072 - DNA, 30 bp, Artificial Sequence
  Synthetic oligonucleotide
aaaattctagcggcctactaaaactgccat

SEQ ID NO: 479073 - DNA, 30 bp, Artificial Sequence
  Synthetic oligonucleotide
ctgaggctgtttggggtctattcctgccat

SEQ ID NO: 479074 - DNA, 30 bp, Artificial Sequence
  Synthetic oligonucleotide
tgtttaggcccgttgaatactatctgccat

SEQ ID NO: 479075 - DNA, 30 bp, Artificial Sequence
  Synthetic oligonucleotide
ctgttatggacagcatctaaagggtgccat

SEQ ID NO: 479076 - DNA, 30 bp, Artificial Sequence
  Synthetic oligonucleotide
atgattaatacatgtaccgttcgttgccat

SEQ ID NO: 479077 - DNA, 30 bp, Artificial Sequence
  Synthetic oligonucleotide
tgagtaattacttcaggtacttcaatccat

SEQ ID NO: 479078 - DNA, 30 bp, Artificial Sequence
  Synthetic oligonucleotide
tcggattttaacaggcaccgcagcatccat

SEQ ID NO: 479079 - DNA, 29 bp, Artificial Sequence
  Synthetic oligonucleotide
cccgttttaccattgtaggagatatccat

SEQ ID NO: 479080 - DNA, 30 bp, Artificial Sequence
  Synthetic oligonucleotide
ttaacattgacggtacacaaaagtatccat

SEQ ID NO: 479081 - DNA, 30 bp, Artificial Sequence
  Synthetic oligonucleotide
tgccgcaaagtagagttgtatgaactccat

SEQ ID NO: 479082 - DNA, 30 bp, Artificial Sequence
  Synthetic oligonucleotide
cttggttgtttgaattcaagctgactccat

SEQ ID NO: 479083 - DNA, 30 bp, Artificial Sequence
  Synthetic oligonucleotide
ttatagttgttgtatccattcaggctccat

SEQ ID NO: 479084 - DNA, 30 bp, Artificial Sequence
  Synthetic oligonucleotide
tgtgtcgaaatgaaaatatgtgggctccat

SEQ ID NO: 479085 - DNA, 30 bp, Artificial Sequence
  Synthetic oligonucleotide
tactccggacgataaataggaacagtccat

SEQ ID NO: 479086 - DNA, 30 bp, Artificial Sequence
  Synthetic oligonucleotide
ttacagttagaagctcaatgtaaggtccat

SEQ ID NO: 479087 - DNA, 30 bp, Artificial Sequence
  Synthetic oligonucleotide
agaaatagctaccgggcgaccggggtccat

SEQ ID NO: 479088 - DNA, 30 bp, Artificial Sequence
  Synthetic oligonucleotide
gttatgaagtcaagtgcgtagaatgtccat

SEQ ID NO: 479089 - DNA, 30 bp, Artificial Sequence
  Synthetic oligonucleotide
ctcattgcttgcgtagtctcacgattccat

SEQ ID NO: 479090 - DNA, 30 bp, Artificial Sequence
  Synthetic oligonucleotide
gtaggtagaatgtggggagtcggattccat

SEQ ID NO: 479091 - DNA, 30 bp, Artificial Sequence
  Synthetic oligonucleotide
ccgcatatccatgaacaaatcatattccat

SEQ ID NO: 479092 - DNA, 30 bp, Artificial Sequence
  Synthetic oligonucleotide
aaaaccaccggggcgtactgtcacttccat

SEQ ID NO: 479093 - DNA, 30 bp, Artificial Sequence
  Synthetic oligonucleotide
gcatggatacgctgggtgttattcttccat

SEQ ID NO: 479094 - DNA, 30 bp, Artificial Sequence
  Synthetic oligonucleotide
gcttacagatgaagcatcgcttcgttccat

SEQ ID NO: 479095 - DNA, 30 bp, Artificial Sequence
  Synthetic oligonucleotide
caaatagttatgccatccactaatttccat

SEQ ID NO: 479096 - DNA, 30 bp, Artificial Sequence
  Synthetic oligonucleotide
ttaggggggttttcttctacggctttccat

SEQ ID NO: 479097 - DNA, 30 bp, Artificial Sequence
  Synthetic oligonucleotide
aaaggaggctccacgttctacgcaaagcat

SEQ ID NO: 479098 - DNA, 30 bp, Artificial Sequence
  Synthetic oligonucleotide
agttcatcccactgttgcaccgccaagcat

SEQ ID NO: 479099 - DNA, 30 bp, Artificial Sequence
  Synthetic oligonucleotide
gcgtgctgaagcttcactttggtgaagcat

SEQ ID NO: 479100 - DNA, 30 bp, Artificial Sequence
  Synthetic oligonucleotide
caatgatctcatacatttatatgacagcat

SEQ ID NO: 479101 - DNA, 30 bp, Artificial Sequence
  Synthetic oligonucleotide
ggctggacaccggaatagggacgccagcat

SEQ ID NO: 479102 - DNA, 30 bp, Artificial Sequence
  Synthetic oligonucleotide
gtttctctaacgctactggccccgcagcat

SEQ ID NO: 479103 - DNA, 30 bp, Artificial Sequence
  Synthetic oligonucleotide
tattctgtcatccatgaccgaaggcagcat

SEQ ID NO: 479104 - DNA, 30 bp, Artificial Sequence
  Synthetic oligonucleotide
cgtcttctatgcgggatccgctatcagcat

SEQ ID NO: 479105 - DNA, 30 bp, Artificial Sequence
  Synthetic oligonucleotide
gcggctaattcagggtacgcacgtcagcat

SEQ ID NO: 479106 - DNA, 30 bp, Artificial Sequence
  Synthetic oligonucleotide
gatatgacaataattccggaagttcagcat

SEQ ID NO: 479107 - DNA, 30 bp, Artificial Sequence
  Synthetic oligonucleotide
gtcatagcctcttcgttggaggaagagcat

SEQ ID NO: 479108 - DNA, 30 bp, Artificial Sequence
  Synthetic oligonucleotide
ctgagcggtaataaactctcggaagagcat

SEQ ID NO: 479109 - DNA, 30 bp, Artificial Sequence
  Synthetic oligonucleotide
cggggcagtctgccccccgagacagagcat

SEQ ID NO: 479110 - DNA, 30 bp, Artificial Sequence
  Synthetic oligonucleotide
caataaaatataacgtggtcgtccgagcat

SEQ ID NO: 479111 - DNA, 30 bp, Artificial Sequence
  Synthetic oligonucleotide
ttacagattcatggagctgtcagcgagcat

SEQ ID NO: 479112 - DNA, 31 bp, Artificial Sequence
  Synthetic oligonucleotide
gggcctgtcggcaactctccacatggagcat

SEQ ID NO: 479113 - DNA, 30 bp, Artificial Sequence
  Synthetic oligonucleotide
gtagcgaaacccctagagattctggagcat

SEQ ID NO: 479114 - DNA, 30 bp, Artificial Sequence
  Synthetic oligonucleotide
gttatctattcacgcaaaatgtatgagcat

SEQ ID NO: 479115 - DNA, 30 bp, Artificial Sequence
  Synthetic oligonucleotide
gaatggtagcctttctcgcacgtatagcat

SEQ ID NO: 479116 - DNA, 30 bp, Artificial Sequence
  Synthetic oligonucleotide
tgagccgacagatgcggtatgtactagcat

SEQ ID NO: 479117 - DNA, 30 bp, Artificial Sequence
  Synthetic oligonucleotide
aataattaaccgaggggcttgcattagcat

SEQ ID NO: 479118 - DNA, 30 bp, Artificial Sequence
  Synthetic oligonucleotide
gaattacaacagtgcacattctattagcat

SEQ ID NO: 479119 - DNA, 30 bp, Artificial Sequence
  Synthetic oligonucleotide
cattgtagcaaagcgtatctgggttagcat

SEQ ID NO: 479120 - DNA, 30 bp, Artificial Sequence
  Synthetic oligonucleotide
taggaacatcgattggttcattgttagcat

SEQ ID NO: 479121 - DNA, 30 bp, Artificial Sequence
  Synthetic oligonucleotide
ccggttatacacgacctgtcaataacgcat

SEQ ID NO: 479122 - DNA, 30 bp, Artificial Sequence
  Synthetic oligonucleotide
attggatctggaacgaccgctaggacgcat

SEQ ID NO: 479123 - DNA, 30 bp, Artificial Sequence
  Synthetic oligonucleotide
ttcacgagtggggtgaaccagttgacgcat

SEQ ID NO: 479124 - DNA, 30 bp, Artificial Sequence
  Synthetic oligonucleotide
acgcgcgcgtggtgctggccgcaaccgcat

SEQ ID NO: 479125 - DNA, 28 bp, Artificial Sequence
  Synthetic oligonucleotide
ttaccgagcgattgggctccgcccgcat

SEQ ID NO: 479126 - DNA, 30 bp, Artificial Sequence
  Synthetic oligonucleotide
ggatatttatgtctggctgggggcccgcat

SEQ ID NO: 479127 - DNA, 30 bp, Artificial Sequence
  Synthetic oligonucleotide
aagacttaacactgctttatatgcccgcat

SEQ ID NO: 479128 - DNA, 30 bp, Artificial Sequence
  Synthetic oligonucleotide
cgcggctggatgtcactacctctcccgcat

SEQ ID NO: 479129 - DNA, 30 bp, Artificial Sequence
  Synthetic oligonucleotide
aacatgtatatggtgtctcgccggccgcat

SEQ ID NO: 479130 - DNA, 30 bp, Artificial Sequence
  Synthetic oligonucleotide
aggtggacaagccagatactcctagcgcat

SEQ ID NO: 479131 - DNA, 30 bp, Artificial Sequence
  Synthetic oligonucleotide
gtctatggacgaacctttgccaaggcgcat

SEQ ID NO: 479132 - DNA, 30 bp, Artificial Sequence
  Synthetic oligonucleotide
ggtttacaggtgtggtggcggtgggcgcat

SEQ ID NO: 479133 - DNA, 30 bp, Artificial Sequence
  Synthetic oligonucleotide
ctgacagcaacgactatgtcgattgcgcat

SEQ ID NO: 479134 - DNA, 30 bp, Artificial Sequence
  Synthetic oligonucleotide
gaatatagcatcgcggcatggcttgcgcat

SEQ ID NO: 479135 - DNA, 30 bp, Artificial Sequence
  Synthetic oligonucleotide
tactccgtgtcaatcacttggtttgcgcat

SEQ ID NO: 479136 - DNA, 30 bp, Artificial Sequence
  Synthetic oligonucleotide
caggttctgatcggacatgcttttgcgcat

SEQ ID NO: 479137 - DNA, 30 bp, Artificial Sequence
  Synthetic oligonucleotide
tgtcgattcgcatcctcccggtcatcgcat

SEQ ID NO: 479138 - DNA, 30 bp, Artificial Sequence
  Synthetic oligonucleotide
cgctggtacattacccgcattcgatcgcat

SEQ ID NO: 479139 - DNA, 30 bp, Artificial Sequence
  Synthetic oligonucleotide
tggggacagacagctctcatgcactcgcat

SEQ ID NO: 479140 - DNA, 30 bp, Artificial Sequence
  Synthetic oligonucleotide
attgatgggagcttgcgaaagcagtcgcat

SEQ ID NO: 479141 - DNA, 30 bp, Artificial Sequence
  Synthetic oligonucleotide
ggtatccgaagcaacgagcgcgcgtcgcat

SEQ ID NO: 479142 - DNA, 30 bp, Artificial Sequence
  Synthetic oligonucleotide
cggcccgcacaggcgtgttctaggtcgcat

SEQ ID NO: 479143 - DNA, 30 bp, Artificial Sequence
  Synthetic oligonucleotide
gtagactattaaaaaaaatagctttcgcat

SEQ ID NO: 479144 - DNA, 30 bp, Artificial Sequence
  Synthetic oligonucleotide
gtattattaatctcgacacttgaaaggcat

SEQ ID NO: 479145 - DNA, 30 bp, Artificial Sequence
  Synthetic oligonucleotide
tgtgaattacggcagctacctacaaggcat

SEQ ID NO: 479146 - DNA, 30 bp, Artificial Sequence
  Synthetic oligonucleotide
gttctgcaggtcatagaaggacccaggcat

SEQ ID NO: 479147 - DNA, 30 bp, Artificial Sequence
  Synthetic oligonucleotide
gctactcatcatcggacacgattcaggcat

SEQ ID NO: 479148 - DNA, 30 bp, Artificial Sequence
  Synthetic oligonucleotide
gcatgacggctaaatcacttttgccggcat

SEQ ID NO: 479149 - DNA, 30 bp, Artificial Sequence
  Synthetic oligonucleotide
atactcagtgtgtttcaatgggggcggcat

SEQ ID NO: 479150 - DNA, 30 bp, Artificial Sequence
  Synthetic oligonucleotide
tccatgactccgggcgtgcgagtgcggcat

SEQ ID NO: 479151 - DNA, 30 bp, Artificial Sequence
  Synthetic oligonucleotide
gtatagttttgcagtcgtgccgctcggcat

SEQ ID NO: 479152 - DNA, 30 bp, Artificial Sequence
  Synthetic oligonucleotide
agccgttgatgcctacgtataaaagggcat

SEQ ID NO: 479153 - DNA, 30 bp, Artificial Sequence
  Synthetic oligonucleotide
gggggcatcccgacacggtcaagcgggcat

SEQ ID NO: 479154 - DNA, 30 bp, Artificial Sequence
  Synthetic oligonucleotide
gttctagagagcagcacggagatcgggcat

SEQ ID NO: 479155 - DNA, 30 bp, Artificial Sequence
  Synthetic oligonucleotide
acgtatcgcaatttatagccccgggggcat

SEQ ID NO: 479156 - DNA, 30 bp, Artificial Sequence
  Synthetic oligonucleotide
tgctatagaatagtaacgtatcatgggcat

SEQ ID NO: 479157 - DNA, 30 bp, Artificial Sequence
  Synthetic oligonucleotide
ctgttctcctatgccttcttgcttgggcat

SEQ ID NO: 479158 - DNA, 26 bp, Artificial Sequence
  Synthetic oligonucleotide
ctttctatacgacagggcaatggcat

SEQ ID NO: 479159 - DNA, 30 bp, Artificial Sequence
  Synthetic oligonucleotide
aaatctgacgtacacgagcttcactggcat

SEQ ID NO: 479160 - DNA, 30 bp, Artificial Sequence
  Synthetic oligonucleotide
tcgaccccatggtcaagtttgacgtggcat

SEQ ID NO: 479161 - DNA, 30 bp, Artificial Sequence
  Synthetic oligonucleotide
ggggatgtgtatgtattgtaagattggcat

SEQ ID NO: 479162 - DNA, 30 bp, Artificial Sequence
  Synthetic oligonucleotide
gagcaaatcctccgggcaggctcttggcat

SEQ ID NO: 479163 - DNA, 30 bp, Artificial Sequence
  Synthetic oligonucleotide
ctataataggatcaatagtgtagttggcat

SEQ ID NO: 479164 - DNA, 30 bp, Artificial Sequence
  Synthetic oligonucleotide
gtagccgaatcacgcccacgacgttggcat

SEQ ID NO: 479165 - DNA, 30 bp, Artificial Sequence
  Synthetic oligonucleotide
aggatccgctagcaacagaacccaatgcat

SEQ ID NO: 479166 - DNA, 30 bp, Artificial Sequence
  Synthetic oligonucleotide
ttccagacgttagcaggcttactaatgcat

SEQ ID NO: 479167 - DNA, 30 bp, Artificial Sequence
  Synthetic oligonucleotide
atcggaggagtatttgtaagagtaatgcat

SEQ ID NO: 479168 - DNA, 30 bp, Artificial Sequence
  Synthetic oligonucleotide
gcagtatatataatactgatagcgatgcat

SEQ ID NO: 479169 - DNA, 30 bp, Artificial Sequence
  Synthetic oligonucleotide
tagtcagccgctcttcacgcgtgtatgcat

SEQ ID NO: 479170 - DNA, 30 bp, Artificial Sequence
  Synthetic oligonucleotide
ttattttaagcttagagctttgaactgcat

SEQ ID NO: 479171 - DNA, 30 bp, Artificial Sequence
  Synthetic oligonucleotide
cagaaactttccccaatgctataactgcat

SEQ ID NO: 479172 - DNA, 30 bp, Artificial Sequence
  Synthetic oligonucleotide
tatcatgacgagaagaaatgaacactgcat

SEQ ID NO: 479173 - DNA, 30 bp, Artificial Sequence
  Synthetic oligonucleotide
gccagtgggttcctcaagttgccactgcat

SEQ ID NO: 479174 - DNA, 30 bp, Artificial Sequence
  Synthetic oligonucleotide
actacgtgatgtaatacccgatgactgcat

SEQ ID NO: 479175 - DNA, 30 bp, Artificial Sequence
  Synthetic oligonucleotide
gtcgatttcacacgtgtattattactgcat

SEQ ID NO: 479176 - DNA, 30 bp, Artificial Sequence
  Synthetic oligonucleotide
agccgaccgtaactgatcctaggcctgcat

SEQ ID NO: 479177 - DNA, 30 bp, Artificial Sequence
  Synthetic oligonucleotide
tgcagccaagtgtgcgtgcgttttctgcat

SEQ ID NO: 479178 - DNA, 30 bp, Artificial Sequence
  Synthetic oligonucleotide
atgcaccgagccaagcaacgcgcagtgcat

SEQ ID NO: 479179 - DNA, 30 bp, Artificial Sequence
  Synthetic oligonucleotide
tttatacgtttgtaatcgatacccgtgcat

SEQ ID NO: 479180 - DNA, 30 bp, Artificial Sequence
  Synthetic oligonucleotide
ccgtgttcggcaatgacgggctgggtgcat

SEQ ID NO: 479181 - DNA, 30 bp, Artificial Sequence
  Synthetic oligonucleotide
ttggaatccgtccagaccagcgcattgcat

SEQ ID NO: 479182 - DNA, 30 bp, Artificial Sequence
  Synthetic oligonucleotide
ggactcctttgccatgttagacgattgcat

SEQ ID NO: 479183 - DNA, 30 bp, Artificial Sequence
  Synthetic oligonucleotide
cggtaacatcgggctataatatacttgcat

SEQ ID NO: 479184 - DNA, 30 bp, Artificial Sequence
  Synthetic oligonucleotide
ttttagagtagaaatagtcaagtcttgcat

SEQ ID NO: 479185 - DNA, 30 bp, Artificial Sequence
  Synthetic oligonucleotide
gtagaaccccggggggcaaaatggttgcat

SEQ ID NO: 479186 - DNA, 30 bp, Artificial Sequence
  Synthetic oligonucleotide
tataagaaaggtcgttattaaatgttgcat

SEQ ID NO: 479187 - DNA, 30 bp, Artificial Sequence
  Synthetic oligonucleotide
gtcgcaggcccgcttacaaaactgttgcat

SEQ ID NO: 479188 - DNA, 30 bp, Artificial Sequence
  Synthetic oligonucleotide
acggccgttattgttgcatggctgttgcat

SEQ ID NO: 479189 - DNA, 30 bp, Artificial Sequence
  Synthetic oligonucleotide
aactgaggctcgcaacaacctgttttgcat

SEQ ID NO: 479190 - DNA, 30 bp, Artificial Sequence
  Synthetic oligonucleotide
ttcgtcgttagtaattaatatataaatcat

SEQ ID NO: 479191 - DNA, 30 bp, Artificial Sequence
  Synthetic oligonucleotide
ggttcgagaagaagggtagataacaatcat

SEQ ID NO: 479192 - DNA, 30 bp, Artificial Sequence
  Synthetic oligonucleotide
aacgactgagccctgtgatgtagcaatcat

SEQ ID NO: 479193 - DNA, 30 bp, Artificial Sequence
  Synthetic oligonucleotide
acgatggagtctattggctcatagaatcat

SEQ ID NO: 479194 - DNA, 30 bp, Artificial Sequence
  Synthetic oligonucleotide
tcgctggctatggtcgccgacaggaatcat

SEQ ID NO: 479195 - DNA, 30 bp, Artificial Sequence
  Synthetic oligonucleotide
aatgtcgcgccggacgtcaggtgtaatcat

SEQ ID NO: 479196 - DNA, 30 bp, Artificial Sequence
  Synthetic oligonucleotide
aaaccgcggcaggcagccggaacacatcat

SEQ ID NO: 479197 - DNA, 30 bp, Artificial Sequence
  Synthetic oligonucleotide
taatatgattccatttccgtttcacatcat

SEQ ID NO: 479198 - DNA, 30 bp, Artificial Sequence
  Synthetic oligonucleotide
gcgcagtatagttgctcacggctacatcat

SEQ ID NO: 479199 - DNA, 30 bp, Artificial Sequence
  Synthetic oligonucleotide
ttttaatgtaactgattccttaaccatcat

SEQ ID NO: 479200 - DNA, 30 bp, Artificial Sequence
  Synthetic oligonucleotide
gtaatatttagtccagtggcagcgcatcat

SEQ ID NO: 479201 - DNA, 30 bp, Artificial Sequence
  Synthetic oligonucleotide
aagaagggggttgaatactaagatcatcat

SEQ ID NO: 479202 - DNA, 30 bp, Artificial Sequence
  Synthetic oligonucleotide
gtccaatttagttatgatttacttcatcat

SEQ ID NO: 479203 - DNA, 30 bp, Artificial Sequence
  Synthetic oligonucleotide
cgcggaaacatatggtgttgtttagatcat

SEQ ID NO: 479204 - DNA, 30 bp, Artificial Sequence
  Synthetic oligonucleotide
caacgcgcggcggcattatcgggggatcat

SEQ ID NO: 479205 - DNA, 30 bp, Artificial Sequence
  Synthetic oligonucleotide
gcaatgagagggaggttaccatgggatcat

SEQ ID NO: 479206 - DNA, 30 bp, Artificial Sequence
  Synthetic oligonucleotide
cctccggctcaataaggcatggtggatcat

SEQ ID NO: 479207 - DNA, 30 bp, Artificial Sequence
  Synthetic oligonucleotide
tatactactcggctttgatctgtggatcat

SEQ ID NO: 479208 - DNA, 30 bp, Artificial Sequence
  Synthetic oligonucleotide
cacctgattatatatgaggtagctgatcat

SEQ ID NO: 479209 - DNA, 30 bp, Artificial Sequence
  Synthetic oligonucleotide
tgttcaaagaacccggatttctaatatcat

SEQ ID NO: 479210 - DNA, 30 bp, Artificial Sequence
  Synthetic oligonucleotide
ccaccaaagcacggtttcttcggatatcat

SEQ ID NO: 479211 - DNA, 30 bp, Artificial Sequence
  Synthetic oligonucleotide
gctggaaagcatatcaatccatgatatcat

SEQ ID NO: 479212 - DNA, 30 bp, Artificial Sequence
  Synthetic oligonucleotide
gcgcgatattcgaaagtttgactctatcat

SEQ ID NO: 479213 - DNA, 30 bp, Artificial Sequence
  Synthetic oligonucleotide
aggactgttggagtgcttcgtcagactcat

SEQ ID NO: 479214 - DNA, 30 bp, Artificial Sequence
  Synthetic oligonucleotide
ctcggaagagcggagaagaggaggactcat

SEQ ID NO: 479215 - DNA, 30 bp, Artificial Sequence
  Synthetic oligonucleotide
gaaatgggtcgctaaggttcgcggactcat

SEQ ID NO: 479216 - DNA, 30 bp, Artificial Sequence
  Synthetic oligonucleotide
cccgtatcccgcggacccttgcatactcat

SEQ ID NO: 479217 - DNA, 30 bp, Artificial Sequence
  Synthetic oligonucleotide
aagatctgcaatggttgtttacaacctcat

SEQ ID NO: 479218 - DNA, 30 bp, Artificial Sequence
  Synthetic oligonucleotide
ccggtgtgagaggtcaaaatctgacctcat

SEQ ID NO: 479219 - DNA, 30 bp, Artificial Sequence
  Synthetic oligonucleotide
acttttcatcgggaccatcagccgcctcat

SEQ ID NO: 479220 - DNA, 30 bp, Artificial Sequence
  Synthetic oligonucleotide
ttgtgttatttcgtgccttagaatcctcat

SEQ ID NO: 479221 - DNA, 31 bp, Artificial Sequence
  Synthetic oligonucleotide
aaactctatagcaggcggatttaaagctcat

SEQ ID NO: 479222 - DNA, 30 bp, Artificial Sequence
  Synthetic oligonucleotide
gtattagtctctacaggtccctgcgctcat

SEQ ID NO: 479223 - DNA, 30 bp, Artificial Sequence
  Synthetic oligonucleotide
ccctcgtatggcgagtagcgcgtggctcat

SEQ ID NO: 479224 - DNA, 30 bp, Artificial Sequence
  Synthetic oligonucleotide
aatagtcaatgtagcaggtgacctgctcat

SEQ ID NO: 479225 - DNA, 30 bp, Artificial Sequence
  Synthetic oligonucleotide
aatgccaattttgatccatgctactctcat

SEQ ID NO: 479226 - DNA, 30 bp, Artificial Sequence
  Synthetic oligonucleotide
aactctgcctgactcactaacagctctcat

SEQ ID NO: 479227 - DNA, 30 bp, Artificial Sequence
  Synthetic oligonucleotide
gtacctagatggccacagccagggtctcat

SEQ ID NO: 479228 - DNA, 30 bp, Artificial Sequence
  Synthetic oligonucleotide
tgaaatccgcggcacatgaccacaagtcat

SEQ ID NO: 479229 - DNA, 30 bp, Artificial Sequence
  Synthetic oligonucleotide
gcttgggaactttcatcaaggttaagtcat

SEQ ID NO: 479230 - DNA, 30 bp, Artificial Sequence
  Synthetic oligonucleotide
gtgagcccaatgacacctatcaagagtcat

SEQ ID NO: 479231 - DNA, 30 bp, Artificial Sequence
  Synthetic oligonucleotide
gtttgttttcacgggcgggcagcacgtcat

SEQ ID NO: 479232 - DNA, 30 bp, Artificial Sequence
  Synthetic oligonucleotide
caattaaaccacaacggattcccgcgtcat

SEQ ID NO: 479233 - DNA, 30 bp, Artificial Sequence
  Synthetic oligonucleotide
aactcggcgtcttcccaataagtgcgtcat

SEQ ID NO: 479234 - DNA, 30 bp, Artificial Sequence
  Synthetic oligonucleotide
attgggcgggaatgtcggctagtgcgtcat

SEQ ID NO: 479235 - DNA, 30 bp, Artificial Sequence
  Synthetic oligonucleotide
agctacacggtaggcagcggacttcgtcat

SEQ ID NO: 479236 - DNA, 30 bp, Artificial Sequence
  Synthetic oligonucleotide
cgcgcatttagcgagggatttcgaggtcat

SEQ ID NO: 479237 - DNA, 30 bp, Artificial Sequence
  Synthetic oligonucleotide
ccccttgccggcgggtcaggacccggtcat

SEQ ID NO: 479238 - DNA, 30 bp, Artificial Sequence
  Synthetic oligonucleotide
tttcggggcgcaatgaactatcgcggtcat

SEQ ID NO: 479239 - DNA, 30 bp, Artificial Sequence
  Synthetic oligonucleotide
tgagcctttagattcacggcggagggtcat

SEQ ID NO: 479240 - DNA, 30 bp, Artificial Sequence
  Synthetic oligonucleotide
gtctgttcctcgccacaggtttcgggtcat

SEQ ID NO: 479241 - DNA, 30 bp, Artificial Sequence
  Synthetic oligonucleotide
gcgatataatgcgattcctaatggggtcat

SEQ ID NO: 479242 - DNA, 30 bp, Artificial Sequence
  Synthetic oligonucleotide
agtctactcgaatagttgcaacttggtcat

SEQ ID NO: 479243 - DNA, 30 bp, Artificial Sequence
  Synthetic oligonucleotide
tagttcgacccgcgtgctcctccatgtcat

SEQ ID NO: 479244 - DNA, 30 bp, Artificial Sequence
  Synthetic oligonucleotide
gccctcgcatttcttgatatcgcgtgtcat

SEQ ID NO: 479245 - DNA, 30 bp, Artificial Sequence
  Synthetic oligonucleotide
tttgtaaggtccaaggacagttcgtgtcat

SEQ ID NO: 479246 - DNA, 30 bp, Artificial Sequence
  Synthetic oligonucleotide
tcagcaatggtcctggtcttttggtgtcat

SEQ ID NO: 479247 - DNA, 30 bp, Artificial Sequence
  Synthetic oligonucleotide
gtgcacatcggggatcacttgttttgtcat

SEQ ID NO: 479248 - DNA, 30 bp, Artificial Sequence
  Synthetic oligonucleotide
aaacttcgtggtcaaggcatcacaattcat

SEQ ID NO: 479249 - DNA, 30 bp, Artificial Sequence
  Synthetic oligonucleotide
attgaatttgcctgacacccgttgattcat

SEQ ID NO: 479250 - DNA, 30 bp, Artificial Sequence
  Synthetic oligonucleotide
ctgcattaatttactctggcccgtattcat

SEQ ID NO: 479251 - DNA, 30 bp, Artificial Sequence
  Synthetic oligonucleotide
ttttacccatcattcatgtaccttattcat

SEQ ID NO: 479252 - DNA, 30 bp, Artificial Sequence
  Synthetic oligonucleotide
gataagtgcgccaacgtccttaaccttcat

SEQ ID NO: 479253 - DNA, 30 bp, Artificial Sequence
  Synthetic oligonucleotide
cgttgtttgtcgtctgggatgaatcttcat

SEQ ID NO: 479254 - DNA, 30 bp, Artificial Sequence
  Synthetic oligonucleotide
ctgggttaactctcactgtatgttcttcat

SEQ ID NO: 479255 - DNA, 30 bp, Artificial Sequence
  Synthetic oligonucleotide
gaccgcaatcaggggctactttacgttcat

SEQ ID NO: 479256 - DNA, 30 bp, Artificial Sequence
  Synthetic oligonucleotide
gttagaagtacaagtaactttgtcgttcat

SEQ ID NO: 479257 - DNA, 30 bp, Artificial Sequence
  Synthetic oligonucleotide
gaaagggccttaatcgggtgaggggttcat

SEQ ID NO: 479258 - DNA, 30 bp, Artificial Sequence
  Synthetic oligonucleotide
ctttagcgtatagcctctgctggggttcat

SEQ ID NO: 479259 - DNA, 30 bp, Artificial Sequence
  Synthetic oligonucleotide
agtatatcacttggatccgagtgggttcat

SEQ ID NO: 479260 - DNA, 30 bp, Artificial Sequence
  Synthetic oligonucleotide
ctagcccgtgtacttatatgggtggttcat

SEQ ID NO: 479261 - DNA, 30 bp, Artificial Sequence
  Synthetic oligonucleotide
ttaatagtaacggcatactatttggttcat

SEQ ID NO: 479262 - DNA, 30 bp, Artificial Sequence
  Synthetic oligonucleotide
attagaagacacttagttgaagctgttcat

SEQ ID NO: 479263 - DNA, 30 bp, Artificial Sequence
  Synthetic oligonucleotide
cagttgttttagaacacagtccgtgttcat

SEQ ID NO: 479264 - DNA, 30 bp, Artificial Sequence
  Synthetic oligonucleotide
tattcccccccttttgtcaatagatttcat

SEQ ID NO: 479265 - DNA, 30 bp, Artificial Sequence
  Synthetic oligonucleotide
aaataggcttcgtcatggcttgactttcat

SEQ ID NO: 479266 - DNA, 30 bp, Artificial Sequence
  Synthetic oligonucleotide
aatagtggcttgccgacgcacagctttcat

SEQ ID NO: 479267 - DNA, 30 bp, Artificial Sequence
  Synthetic oligonucleotide
gaattaagggcatttaaagaatagtttcat

SEQ ID NO: 479268 - DNA, 30 bp, Artificial Sequence
  Synthetic oligonucleotide
tttatcggatgccgtacgccggcttttcat

SEQ ID NO: 479269 - DNA, 30 bp, Artificial Sequence
  Synthetic oligonucleotide
gggaaagtataatacgcattttgttttcat

SEQ ID NO: 479270 - DNA, 30 bp, Artificial Sequence
  Synthetic oligonucleotide
tgtatggcgattcagggatctgaaaaagat

SEQ ID NO: 479271 - DNA, 30 bp, Artificial Sequence
  Synthetic oligonucleotide
atcttacgctttcacctcagtataaaagat

SEQ ID NO: 479272 - DNA, 30 bp, Artificial Sequence
  Synthetic oligonucleotide
aaaatcgggtattaacaccgtgtaaaagat

SEQ ID NO: 479273 - DNA, 30 bp, Artificial Sequence
  Synthetic oligonucleotide
ctagggtatgtcttaatgttggccaaagat

SEQ ID NO: 479274 - DNA, 30 bp, Artificial Sequence
  Synthetic oligonucleotide
cttaccccgttatggggcagatgcaaagat

SEQ ID NO: 479275 - DNA, 30 bp, Artificial Sequence
  Synthetic oligonucleotide
atttttgacctttggtacagaaagaaagat

SEQ ID NO: 479276 - DNA, 30 bp, Artificial Sequence
  Synthetic oligonucleotide
aagtgaaggtgttctccaatgtagaaagat

SEQ ID NO: 479277 - DNA, 30 bp, Artificial Sequence
  Synthetic oligonucleotide
ttctagctgcagggggtccgagggaaagat

SEQ ID NO: 479278 - DNA, 30 bp, Artificial Sequence
  Synthetic oligonucleotide
actttatccgtagcactcgggttgaaagat

SEQ ID NO: 479279 - DNA, 30 bp, Artificial Sequence
  Synthetic oligonucleotide
tggtggacgtgtatgtgttgtagtaaagat

SEQ ID NO: 479280 - DNA, 30 bp, Artificial Sequence
  Synthetic oligonucleotide
cggagacgttagggggcttatgaccaagat

SEQ ID NO: 479281 - DNA, 30 bp, Artificial Sequence
  Synthetic oligonucleotide
gtggggtttttcatatcaaaatcccaagat

SEQ ID NO: 479282 - DNA, 30 bp, Artificial Sequence
  Synthetic oligonucleotide
ctatcaatcggcttgactggaccgcaagat

SEQ ID NO: 479283 - DNA, 30 bp, Artificial Sequence
  Synthetic oligonucleotide
gcacggcactgtccacaagacgggcaagat

SEQ ID NO: 479284 - DNA, 30 bp, Artificial Sequence
  Synthetic oligonucleotide
tgatcaacttccgtttagtcccttcaagat

SEQ ID NO: 479285 - DNA, 30 bp, Artificial Sequence
  Synthetic oligonucleotide
taaggctctatatctatgcccatagaagat

SEQ ID NO: 479286 - DNA, 30 bp, Artificial Sequence
  Synthetic oligonucleotide
tatactttgagcttggggtcgatagaagat

SEQ ID NO: 479287 - DNA, 30 bp, Artificial Sequence
  Synthetic oligonucleotide
tggaagaccataagggctcaatcggaagat

SEQ ID NO: 479288 - DNA, 30 bp, Artificial Sequence
  Synthetic oligonucleotide
caggataatcgcacgtgtgcctctgaagat

SEQ ID NO: 479289 - DNA, 30 bp, Artificial Sequence
  Synthetic oligonucleotide
aacggtcttatggtaattggtacataagat

SEQ ID NO: 479290 - DNA, 30 bp, Artificial Sequence
  Synthetic oligonucleotide
attggaatttcggatgccacaatataagat

SEQ ID NO: 479291 - DNA, 30 bp, Artificial Sequence
  Synthetic oligonucleotide
tttgtaaagaaatcagttccgggctaagat

SEQ ID NO: 479292 - DNA, 30 bp, Artificial Sequence
  Synthetic oligonucleotide
gctcttatatccccgtaacggtattaagat

SEQ ID NO: 479293 - DNA, 30 bp, Artificial Sequence
  Synthetic oligonucleotide
caaactcactttagctaagtgtattaagat

SEQ ID NO: 479294 - DNA, 30 bp, Artificial Sequence
  Synthetic oligonucleotide
gctcctcaaatcagcgcgcgcgcttaagat

SEQ ID NO: 479295 - DNA, 30 bp, Artificial Sequence
  Synthetic oligonucleotide
gtgggaccaggatagggaccgtcttaagat

SEQ ID NO: 479296 - DNA, 30 bp, Artificial Sequence
  Synthetic oligonucleotide
ggacgtacaggtgtgaccaagagttaagat

SEQ ID NO: 479297 - DNA, 30 bp, Artificial Sequence
  Synthetic oligonucleotide
taataggtataacgctccacatgttaagat

SEQ ID NO: 479298 - DNA, 30 bp, Artificial Sequence
  Synthetic oligonucleotide
gctaacggttcggtttgacgctaaacagat

SEQ ID NO: 479299 - DNA, 30 bp, Artificial Sequence
  Synthetic oligonucleotide
gcaaccaatttcttttgtcggatgacagat

SEQ ID NO: 479300 - DNA, 30 bp, Artificial Sequence
  Synthetic oligonucleotide
ggttttaggcaattcaggacgagtacagat

SEQ ID NO: 479301 - DNA, 30 bp, Artificial Sequence
  Synthetic oligonucleotide
aggatgttacggggggctttgtgtacagat

SEQ ID NO: 479302 - DNA, 30 bp, Artificial Sequence
  Synthetic oligonucleotide
taaaagcagtttgtaggaactattacagat

SEQ ID NO: 479303 - DNA, 30 bp, Artificial Sequence
  Synthetic oligonucleotide
gcttttaggtagcaataacaagaaccagat

SEQ ID NO: 479304 - DNA, 30 bp, Artificial Sequence
  Synthetic oligonucleotide
gtttagcgctcagtgtttttagaaccagat

SEQ ID NO: 479305 - DNA, 30 bp, Artificial Sequence
  Synthetic oligonucleotide
tatgatagtcggcaatggaaccagccagat

SEQ ID NO: 479306 - DNA, 30 bp, Artificial Sequence
  Synthetic oligonucleotide
ggcttatgggatgtagttgactagccagat

SEQ ID NO: 479307 - DNA, 30 bp, Artificial Sequence
  Synthetic oligonucleotide
catttgtatgatatagggaaaacagcagat

SEQ ID NO: 479308 - DNA, 30 bp, Artificial Sequence
  Synthetic oligonucleotide
gagcattcagtacagaggtattacgcagat

SEQ ID NO: 479309 - DNA, 30 bp, Artificial Sequence
  Synthetic oligonucleotide
tcttcagttatatgcgggattggcgcagat

SEQ ID NO: 479310 - DNA, 30 bp, Artificial Sequence
  Synthetic oligonucleotide
tacttcatgtagctgaggctgttcgcagat

SEQ ID NO: 479311 - DNA, 30 bp, Artificial Sequence
  Synthetic oligonucleotide
cccggcataagtacgcgggaagaggcagat

SEQ ID NO: 479312 - DNA, 30 bp, Artificial Sequence
  Synthetic oligonucleotide
atagatgaggattttatagcttaggcagat

SEQ ID NO: 479313 - DNA, 30 bp, Artificial Sequence
  Synthetic oligonucleotide
agaattcgcagatacactcatagtgcagat

SEQ ID NO: 479314 - DNA, 30 bp, Artificial Sequence
  Synthetic oligonucleotide
gcagttctttaaacaagagacccctcagat

SEQ ID NO: 479315 - DNA, 30 bp, Artificial Sequence
  Synthetic oligonucleotide
aactttagacacgagtagaaatgctcagat

SEQ ID NO: 479316 - DNA, 30 bp, Artificial Sequence
  Synthetic oligonucleotide
ctgcatattatcatttggaattcgtcagat

SEQ ID NO: 479317 - DNA, 30 bp, Artificial Sequence
  Synthetic oligonucleotide
tattagcaccgtccgcgtggggtgtcagat

SEQ ID NO: 479318 - DNA, 30 bp, Artificial Sequence
  Synthetic oligonucleotide
ggatgaaagcatcggtagaacctttcagat

SEQ ID NO: 479319 - DNA, 30 bp, Artificial Sequence
  Synthetic oligonucleotide
taggaaaggggaaattattgcacaagagat

SEQ ID NO: 479320 - DNA, 30 bp, Artificial Sequence
  Synthetic oligonucleotide
ttagtgggattttggggtcatcgaagagat

SEQ ID NO: 479321 - DNA, 30 bp, Artificial Sequence
  Synthetic oligonucleotide
acgcatcaatatcgggctttcgacagagat

SEQ ID NO: 479322 - DNA, 30 bp, Artificial Sequence
  Synthetic oligonucleotide
aaactagttttacgggagcgaagcagagat

SEQ ID NO: 479323 - DNA, 30 bp, Artificial Sequence
  Synthetic oligonucleotide
ggcaatttcccacgatacgtttggagagat

SEQ ID NO: 479324 - DNA, 30 bp, Artificial Sequence
  Synthetic oligonucleotide
aattttaggcttcggagggaacatagagat

SEQ ID NO: 479325 - DNA, 30 bp, Artificial Sequence
  Synthetic oligonucleotide
aaatggacatgcgtctctgtcattagagat

SEQ ID NO: 479326 - DNA, 30 bp, Artificial Sequence
  Synthetic oligonucleotide
ggaggctctagggtactgttttttagagat

SEQ ID NO: 479327 - DNA, 30 bp, Artificial Sequence
  Synthetic oligonucleotide
ttctctcagtctcagaacgaatcacgagat

SEQ ID NO: 479328 - DNA, 30 bp, Artificial Sequence
  Synthetic oligonucleotide
tgttctatcaggtttaaaccttcacgagat

SEQ ID NO: 479329 - DNA, 30 bp, Artificial Sequence
  Synthetic oligonucleotide
tcggaatcaagggaaaaccatatacgagat

SEQ ID NO: 479330 - DNA, 30 bp, Artificial Sequence
  Synthetic oligonucleotide
ctctgtctcgatcgtatcagaatccgagat

SEQ ID NO: 479331 - DNA, 30 bp, Artificial Sequence
  Synthetic oligonucleotide
tgtctatcgccgtctggagataggcgagat

SEQ ID NO: 479332 - DNA, 30 bp, Artificial Sequence
  Synthetic oligonucleotide
aaaaaaacgccactgcctgttcgaggagat

SEQ ID NO: 479333 - DNA, 30 bp, Artificial Sequence
  Synthetic oligonucleotide
ccaaagtctcgagtcccttataacggagat

SEQ ID NO: 479334 - DNA, 30 bp, Artificial Sequence
  Synthetic oligonucleotide
atacgaccagtcccgatctatagcggagat

SEQ ID NO: 479335 - DNA, 30 bp, Artificial Sequence
  Synthetic oligonucleotide
gagctggaccctcatcgacgatgcggagat

SEQ ID NO: 479336 - DNA, 30 bp, Artificial Sequence
  Synthetic oligonucleotide
cccagctacgcggccgaggctttgggagat

SEQ ID NO: 479337 - DNA, 30 bp, Artificial Sequence
  Synthetic oligonucleotide
cccttctgccttttgttgagacctggagat

SEQ ID NO: 479338 - DNA, 30 bp, Artificial Sequence
  Synthetic oligonucleotide
ttttggttaactataaaggatgttggagat

SEQ ID NO: 479339 - DNA, 30 bp, Artificial Sequence
  Synthetic oligonucleotide
tcaaaagtcgacggttcaaactcatgagat

SEQ ID NO: 479340 - DNA, 29 bp, Artificial Sequence
  Synthetic oligonucleotide
tcgtgacaacgtgtataatgggatgagat

SEQ ID NO: 479341 - DNA, 30 bp, Artificial Sequence
  Synthetic oligonucleotide
gcaatgccttcacccgattttaggtgagat

SEQ ID NO: 479342 - DNA, 31 bp, Artificial Sequence
  Synthetic oligonucleotide
caacccctttggcctatgaatactttgagat

SEQ ID NO: 479343 - DNA, 30 bp, Artificial Sequence
  Synthetic oligonucleotide
ggataccgcgcggtctggtcgcagatagat

SEQ ID NO: 479344 - DNA, 30 bp, Artificial Sequence
  Synthetic oligonucleotide
tgatttagcaggcctatcaacttgatagat

SEQ ID NO: 479345 - DNA, 30 bp, Artificial Sequence
  Synthetic oligonucleotide
tccgtactgagtgtggcattaagtatagat

SEQ ID NO: 479346 - DNA, 30 bp, Artificial Sequence
  Synthetic oligonucleotide
gagggagcatcacaaacctcaggtatagat

SEQ ID NO: 479347 - DNA, 30 bp, Artificial Sequence
  Synthetic oligonucleotide
ccctttgaagggcccggttaagttatagat

SEQ ID NO: 479348 - DNA, 30 bp, Artificial Sequence
  Synthetic oligonucleotide
catgctccgagcagcacgcctgttatagat

SEQ ID NO: 479349 - DNA, 30 bp, Artificial Sequence
  Synthetic oligonucleotide
gatactaaataatatagtcgcgaactagat

SEQ ID NO: 479350 - DNA, 30 bp, Artificial Sequence
  Synthetic oligonucleotide
ttgggtgcaccatgacccggtgcactagat

SEQ ID NO: 479351 - DNA, 30 bp, Artificial Sequence
  Synthetic oligonucleotide
caaatcaacaatatgtacacgtgactagat

SEQ ID NO: 479352 - DNA, 30 bp, Artificial Sequence
  Synthetic oligonucleotide
ttggtcggccacgcagtttgggacctagat

SEQ ID NO: 479353 - DNA, 30 bp, Artificial Sequence
  Synthetic oligonucleotide
ggtgatttcctggccttattgttcctagat

SEQ ID NO: 479354 - DNA, 30 bp, Artificial Sequence
  Synthetic oligonucleotide
caaaatagtcgcagaaacttatggctagat

SEQ ID NO: 479355 - DNA, 30 bp, Artificial Sequence
  Synthetic oligonucleotide
gttcttgtacttcggactggtagtctagat

SEQ ID NO: 479356 - DNA, 30 bp, Artificial Sequence
  Synthetic oligonucleotide
aacgacggaatcgttaatacttttctagat

SEQ ID NO: 479357 - DNA, 30 bp, Artificial Sequence
  Synthetic oligonucleotide
ggtaattaacgtttcgagacgcaagtagat

SEQ ID NO: 479358 - DNA, 30 bp, Artificial Sequence
  Synthetic oligonucleotide
aaatctgctccgtgaattgatcaagtagat

SEQ ID NO: 479359 - DNA, 30 bp, Artificial Sequence
  Synthetic oligonucleotide
atgaaacttatcgtattacgcacagtagat

SEQ ID NO: 479360 - DNA, 30 bp, Artificial Sequence
  Synthetic oligonucleotide
gttcatgtgataattgcgcgcgcagtagat

SEQ ID NO: 479361 - DNA, 30 bp, Artificial Sequence
  Synthetic oligonucleotide
cactgtgttacgcaatgtcttaacgtagat

SEQ ID NO: 479362 - DNA, 30 bp, Artificial Sequence
  Synthetic oligonucleotide
gttaatgtaatgttaaagcacgacgtagat

SEQ ID NO: 479363 - DNA, 30 bp, Artificial Sequence
  Synthetic oligonucleotide
gtacagcagcaactattcgacgatgtagat

SEQ ID NO: 479364 - DNA, 30 bp, Artificial Sequence
  Synthetic oligonucleotide
cagcattttgcatgcgatggcagtgtagat

SEQ ID NO: 479365 - DNA, 30 bp, Artificial Sequence
  Synthetic oligonucleotide
aagcgtagtttgtccgacacgcttgtagat

SEQ ID NO: 479366 - DNA, 30 bp, Artificial Sequence
  Synthetic oligonucleotide
ttacctcgtcgcacttcgggtacattagat

SEQ ID NO: 479367 - DNA, 30 bp, Artificial Sequence
  Synthetic oligonucleotide
tatctatgagatgtactggtacacttagat

SEQ ID NO: 479368 - DNA, 30 bp, Artificial Sequence
  Synthetic oligonucleotide
tctcgggactctcattgcgtctccttagat

SEQ ID NO: 479369 - DNA, 30 bp, Artificial Sequence
  Synthetic oligonucleotide
gattcggagtacccgcagaaatggttagat

SEQ ID NO: 479370 - DNA, 30 bp, Artificial Sequence
  Synthetic oligonucleotide
aataattaattactagtagcgttgttagat

SEQ ID NO: 479371 - DNA, 30 bp, Artificial Sequence
  Synthetic oligonucleotide
ttggctggcgcagcgcggaggcatttagat

SEQ ID NO: 479372 - DNA, 30 bp, Artificial Sequence
  Synthetic oligonucleotide
ggaacacgctcggacgcgtttgatttagat

SEQ ID NO: 479373 - DNA, 31 bp, Artificial Sequence
  Synthetic oligonucleotide
ttttaactatagttttacagcatgtttagat

SEQ ID NO: 479374 - DNA, 30 bp, Artificial Sequence
  Synthetic oligonucleotide
ctgacaaatcatattgtgattggcaacgat

SEQ ID NO: 479375 - DNA, 30 bp, Artificial Sequence
  Synthetic oligonucleotide
ataatccttgaacctattcggcataacgat

SEQ ID NO: 479376 - DNA, 30 bp, Artificial Sequence
  Synthetic oligonucleotide
ccctgcctgctcgagatcagttgtaacgat

SEQ ID NO: 479377 - DNA, 30 bp, Artificial Sequence
  Synthetic oligonucleotide
gttagattacgccctattacgcaacacgat

SEQ ID NO: 479378 - DNA, 30 bp, Artificial Sequence
  Synthetic oligonucleotide
ctgttcgcgaggtgcgccgtgtaacacgat

SEQ ID NO: 479379 - DNA, 30 bp, Artificial Sequence
  Synthetic oligonucleotide
tggccgatccagctcccttgcccacacgat

SEQ ID NO: 479380 - DNA, 30 bp, Artificial Sequence
  Synthetic oligonucleotide
ttgcacaatggtaactcgtgccgacacgat

SEQ ID NO: 479381 - DNA, 30 bp, Artificial Sequence
  Synthetic oligonucleotide
cctttttgttggtcaagtaggtgacacgat

SEQ ID NO: 479382 - DNA, 30 bp, Artificial Sequence
  Synthetic oligonucleotide
ggcaggcttatcgatgggcacgcgcacgat

SEQ ID NO: 479383 - DNA, 30 bp, Artificial Sequence
  Synthetic oligonucleotide
agttctataaacgtggtttaaaggcacgat

SEQ ID NO: 479384 - DNA, 30 bp, Artificial Sequence
  Synthetic oligonucleotide
gtatggactgtaagccggtagtatcacgat

SEQ ID NO: 479385 - DNA, 30 bp, Artificial Sequence
  Synthetic oligonucleotide
aagctaatcgtagcacgcttacttcacgat

SEQ ID NO: 479386 - DNA, 30 bp, Artificial Sequence
  Synthetic oligonucleotide
ctggtgatgggtcgttccataaaagacgat

SEQ ID NO: 479387 - DNA, 30 bp, Artificial Sequence
  Synthetic oligonucleotide
gtttgaggcaattctggtcaagaagacgat

SEQ ID NO: 479388 - DNA, 30 bp, Artificial Sequence
  Synthetic oligonucleotide
tagtctcactcggattatgaagaagacgat

SEQ ID NO: 479389 - DNA, 29 bp, Artificial Sequence
  Synthetic oligonucleotide
gacttaacgcagacgatttggtagacgat

SEQ ID NO: 479390 - DNA, 30 bp, Artificial Sequence
  Synthetic oligonucleotide
gcaaacgtttttgccaacaaagccgacgat

SEQ ID NO: 479391 - DNA, 30 bp, Artificial Sequence
  Synthetic oligonucleotide
tctttatggcatatggccataggatacgat

SEQ ID NO: 479392 - DNA, 30 bp, Artificial Sequence
  Synthetic oligonucleotide
gagttaggtaactctgtgaaccattacgat

SEQ ID NO: 479393 - DNA, 30 bp, Artificial Sequence
  Synthetic oligonucleotide
ctggacgcgcaggtatctttaatcaccgat

SEQ ID NO: 479394 - DNA, 30 bp, Artificial Sequence
  Synthetic oligonucleotide
gacacgtgtttatgcggcgccgtcaccgat

SEQ ID NO: 479395 - DNA, 30 bp, Artificial Sequence
  Synthetic oligonucleotide
tctctcagactctcttccgaggtcaccgat

SEQ ID NO: 479396 - DNA, 30 bp, Artificial Sequence
  Synthetic oligonucleotide
atatgtaaaccggattgttgtcaccccgat

SEQ ID NO: 479397 - DNA, 30 bp, Artificial Sequence
  Synthetic oligonucleotide
tagcttggccgcggctgcgttgcccccgat

SEQ ID NO: 479398 - DNA, 30 bp, Artificial Sequence
  Synthetic oligonucleotide
tcgacgggactcctccatcaacggcccgat

SEQ ID NO: 479399 - DNA, 30 bp, Artificial Sequence
  Synthetic oligonucleotide
ttaatgtacaccgcggtaaactatcccgat

SEQ ID NO: 479400 - DNA, 30 bp, Artificial Sequence
  Synthetic oligonucleotide
gttaatatgtttaaaatagcaacagccgat

SEQ ID NO: 479401 - DNA, 30 bp, Artificial Sequence
  Synthetic oligonucleotide
gaggttttctggatttcgcgcatagccgat

SEQ ID NO: 479402 - DNA, 30 bp, Artificial Sequence
  Synthetic oligonucleotide
cgcatgcaattaattttagttagcgccgat

SEQ ID NO: 479403 - DNA, 30 bp, Artificial Sequence
  Synthetic oligonucleotide
catcgacccatcaggaccctccgcgccgat

SEQ ID NO: 479404 - DNA, 30 bp, Artificial Sequence
  Synthetic oligonucleotide
aggtaggagctgattttgtccttggccgat

SEQ ID NO: 479405 - DNA, 30 bp, Artificial Sequence
  Synthetic oligonucleotide
ttttacgtatatacgctgttcggatccgat

SEQ ID NO: 479406 - DNA, 30 bp, Artificial Sequence
  Synthetic oligonucleotide
tgcaatccgttattccggtaaggctccgat

SEQ ID NO: 479407 - DNA, 30 bp, Artificial Sequence
  Synthetic oligonucleotide
attacgtaggtccttggaacatggtccgat

SEQ ID NO: 479408 - DNA, 30 bp, Artificial Sequence
  Synthetic oligonucleotide
attgtataatttggtttcgacttgtccgat

SEQ ID NO: 479409 - DNA, 30 bp, Artificial Sequence
  Synthetic oligonucleotide
tccccgatatccgggcattccaattccgat

SEQ ID NO: 479410 - DNA, 30 bp, Artificial Sequence
  Synthetic oligonucleotide
aagctacgagaaggattttcgtcttccgat

SEQ ID NO: 479411 - DNA, 30 bp, Artificial Sequence
  Synthetic oligonucleotide
gggttttcagcccacctgatcgtcagcgat

SEQ ID NO: 479412 - DNA, 30 bp, Artificial Sequence
  Synthetic oligonucleotide
ttggggtactagaagccggatttcagcgat

SEQ ID NO: 479413 - DNA, 30 bp, Artificial Sequence
  Synthetic oligonucleotide
tgttttggcccaggcacataaatgagcgat

SEQ ID NO: 479414 - DNA, 30 bp, Artificial Sequence
  Synthetic oligonucleotide
aacgactttgatgcattttataaccgcgat

SEQ ID NO: 479415 - DNA, 30 bp, Artificial Sequence
  Synthetic oligonucleotide
gaccgcacagtcattatctggcaccgcgat

SEQ ID NO: 479416 - DNA, 30 bp, Artificial Sequence
  Synthetic oligonucleotide
acattacttcgaaacgtgttaccccgcgat

SEQ ID NO: 479417 - DNA, 30 bp, Artificial Sequence
  Synthetic oligonucleotide
gaaattcgtatactatctgcttgtcgcgat

SEQ ID NO: 479418 - DNA, 30 bp, Artificial Sequence
  Synthetic oligonucleotide
tttcctaagtgaatgcttgtatttcgcgat

SEQ ID NO: 479419 - DNA, 30 bp, Artificial Sequence
  Synthetic oligonucleotide
atctcgtataaatgtcatatttacggcgat

SEQ ID NO: 479420 - DNA, 30 bp, Artificial Sequence
  Synthetic oligonucleotide
ggacaccttggacttcatagaagcggcgat

SEQ ID NO: 479421 - DNA, 30 bp, Artificial Sequence
  Synthetic oligonucleotide
acaatcgcagttccgtctattaagggcgat

SEQ ID NO: 479422 - DNA, 30 bp, Artificial Sequence
  Synthetic oligonucleotide
tcctcttccaaagtgtttctacagggcgat

SEQ ID NO: 479423 - DNA, 30 bp, Artificial Sequence
  Synthetic oligonucleotide
gtattataacatgagtggtgtttgggcgat

SEQ ID NO: 479424 - DNA, 30 bp, Artificial Sequence
  Synthetic oligonucleotide
agtttttatgtactacaaccgagtggcgat

SEQ ID NO: 479425 - DNA, 30 bp, Artificial Sequence
  Synthetic oligonucleotide
gtacagagacctagtcatgtcaaatgcgat

SEQ ID NO: 479426 - DNA, 30 bp, Artificial Sequence
  Synthetic oligonucleotide
tggccctgttgttaccgaagtatctgcgat

SEQ ID NO: 479427 - DNA, 30 bp, Artificial Sequence
  Synthetic oligonucleotide
aggtggggacgaggcttgtgtaggtgcgat

SEQ ID NO: 479428 - DNA, 30 bp, Artificial Sequence
  Synthetic oligonucleotide
catcccaactgcgtggagctccggtgcgat

SEQ ID NO: 479429 - DNA, 30 bp, Artificial Sequence
  Synthetic oligonucleotide
acctccgtcgtaccttccgtgaattgcgat

SEQ ID NO: 479430 - DNA, 30 bp, Artificial Sequence
  Synthetic oligonucleotide
gaacccatacggataggtaaggattgcgat

SEQ ID NO: 479431 - DNA, 30 bp, Artificial Sequence
  Synthetic oligonucleotide
cgcgctgcgcaggggttgagaggttgcgat

SEQ ID NO: 479432 - DNA, 30 bp, Artificial Sequence
  Synthetic oligonucleotide
ggatgagacttcgagctttaaaaaatcgat

SEQ ID NO: 479433 - DNA, 30 bp, Artificial Sequence
  Synthetic oligonucleotide
agatacttggtaagaagtttagtaatcgat

SEQ ID NO: 479434 - DNA, 30 bp, Artificial Sequence
  Synthetic oligonucleotide
gtgtcaaagaggatctaatggtacatcgat

SEQ ID NO: 479435 - DNA, 30 bp, Artificial Sequence
  Synthetic oligonucleotide
taacaatctaacgggcgctaagcgatcgat

SEQ ID NO: 479436 - DNA, 30 bp, Artificial Sequence
  Synthetic oligonucleotide
taatcttggggcgcgacctcagggatcgat

SEQ ID NO: 479437 - DNA, 30 bp, Artificial Sequence
  Synthetic oligonucleotide
gcggctattcatgtagagctcccactcgat

SEQ ID NO: 479438 - DNA, 30 bp, Artificial Sequence
  Synthetic oligonucleotide
ggtgactaacgattccgagaattactcgat

SEQ ID NO: 479439 - DNA, 30 bp, Artificial Sequence
  Synthetic oligonucleotide
ttaggggcccactgtagtcggaccctcgat

SEQ ID NO: 479440 - DNA, 30 bp, Artificial Sequence
  Synthetic oligonucleotide
ttattagtcattgtacaccgcagcctcgat

SEQ ID NO: 479441 - DNA, 30 bp, Artificial Sequence
  Synthetic oligonucleotide
tcgaaagtgattccaaattttgtgctcgat

SEQ ID NO: 479442 - DNA, 30 bp, Artificial Sequence
  Synthetic oligonucleotide
tggagtatattgaaataggtgaatctcgat

SEQ ID NO: 479443 - DNA, 30 bp, Artificial Sequence
  Synthetic oligonucleotide
gctcgactttctagacgatgcgcagtcgat

SEQ ID NO: 479444 - DNA, 30 bp, Artificial Sequence
  Synthetic oligonucleotide
cagtgttatttcagaaaactatacgtcgat

SEQ ID NO: 479445 - DNA, 30 bp, Artificial Sequence
  Synthetic oligonucleotide
acagtacatggtatcagcggtatcgtcgat

SEQ ID NO: 479446 - DNA, 30 bp, Artificial Sequence
  Synthetic oligonucleotide
ttactgtatgagcgagttaaatgggtcgat

SEQ ID NO: 479447 - DNA, 30 bp, Artificial Sequence
  Synthetic oligonucleotide
aaatacggggcctgatcgcatctggtcgat

SEQ ID NO: 479448 - DNA, 30 bp, Artificial Sequence
  Synthetic oligonucleotide
ccacatgacaaccaagaaaattgtgtcgat

SEQ ID NO: 479449 - DNA, 30 bp, Artificial Sequence
  Synthetic oligonucleotide
tatgtctatcggaagcgaaactttgtcgat

SEQ ID NO: 479450 - DNA, 30 bp, Artificial Sequence
  Synthetic oligonucleotide
gggtcactctccggggccgtgacattcgat

SEQ ID NO: 479451 - DNA, 30 bp, Artificial Sequence
  Synthetic oligonucleotide
tttaatggccgcgaattgcctggattcgat

SEQ ID NO: 479452 - DNA, 30 bp, Artificial Sequence
  Synthetic oligonucleotide
tagattttgtccataggttctttattcgat

SEQ ID NO: 479453 - DNA, 30 bp, Artificial Sequence
  Synthetic oligonucleotide
agctacttgccagagtgcagatacttcgat

SEQ ID NO: 479454 - DNA, 30 bp, Artificial Sequence
  Synthetic oligonucleotide
agtggcagctctcgtaacaatgtcttcgat

SEQ ID NO: 479455 - DNA, 30 bp, Artificial Sequence
  Synthetic oligonucleotide
cacgccttagcgtggtgcacaccaaaggat

SEQ ID NO: 479456 - DNA, 30 bp, Artificial Sequence
  Synthetic oligonucleotide
ttgattccgcaaacccgatagttaaaggat

SEQ ID NO: 479457 - DNA, 30 bp, Artificial Sequence
  Synthetic oligonucleotide
gaataaccagacggatttacgttaaaggat

SEQ ID NO: 479458 - DNA, 30 bp, Artificial Sequence
  Synthetic oligonucleotide
agagtctgtctataaggacttgccaaggat

SEQ ID NO: 479459 - DNA, 30 bp, Artificial Sequence
  Synthetic oligonucleotide
acctaccaagcactaagtgattagaaggat

SEQ ID NO: 479460 - DNA, 30 bp, Artificial Sequence
  Synthetic oligonucleotide
tgtctctcgtggaaattagctacgaaggat

SEQ ID NO: 479461 - DNA, 30 bp, Artificial Sequence
  Synthetic oligonucleotide
cttatcactataatgtcatgaaggaaggat

SEQ ID NO: 479462 - DNA, 30 bp, Artificial Sequence
  Synthetic oligonucleotide
tgcgttattattcggacgttgatacaggat

SEQ ID NO: 479463 - DNA, 30 bp, Artificial Sequence
  Synthetic oligonucleotide
ttatgtccaggaccttgaagggcccaggat

SEQ ID NO: 479464 - DNA, 30 bp, Artificial Sequence
  Synthetic oligonucleotide
ttgatattcctcctaacggctagccaggat

SEQ ID NO: 479465 - DNA, 30 bp, Artificial Sequence
  Synthetic oligonucleotide
aaagtgctcgaaccgacgctatagcaggat

SEQ ID NO: 479466 - DNA, 30 bp, Artificial Sequence
  Synthetic oligonucleotide
ggctagctgaatcgctaccgagcgcaggat

SEQ ID NO: 479467 - DNA, 30 bp, Artificial Sequence
  Synthetic oligonucleotide
tccatgacgcacgctactggtaggcaggat

SEQ ID NO: 479468 - DNA, 30 bp, Artificial Sequence
  Synthetic oligonucleotide
gcatgccttcaagaaccgtttttgcaggat

SEQ ID NO: 479469 - DNA, 30 bp, Artificial Sequence
  Synthetic oligonucleotide
aattgttctaagttccggtgagcagaggat

SEQ ID NO: 479470 - DNA, 30 bp, Artificial Sequence
  Synthetic oligonucleotide
aacggagactcggaaaattttaacgaggat

SEQ ID NO: 479471 - DNA, 30 bp, Artificial Sequence
  Synthetic oligonucleotide
gcacagggtcgtgtgatcgaatacgaggat

SEQ ID NO: 479472 - DNA, 30 bp, Artificial Sequence
  Synthetic oligonucleotide
cgcgggtcttatccatgttcatacgaggat

SEQ ID NO: 479473 - DNA, 29 bp, Artificial Sequence
  Synthetic oligonucleotide
tctacgtagtgtcgatctgtgccgaggat

SEQ ID NO: 479474 - DNA, 30 bp, Artificial Sequence
  Synthetic oligonucleotide
gggagttatctaccttaacgaggcgaggat

SEQ ID NO: 479475 - DNA, 30 bp, Artificial Sequence
  Synthetic oligonucleotide
ccagttatactagcctcctcgtcggaggat

SEQ ID NO: 479476 - DNA, 30 bp, Artificial Sequence
  Synthetic oligonucleotide
taaaggaagctgtacatagcgggggaggat

SEQ ID NO: 479477 - DNA, 30 bp, Artificial Sequence
  Synthetic oligonucleotide
catttttcatctatccgtaatccataggat

SEQ ID NO: 479478 - DNA, 30 bp, Artificial Sequence
  Synthetic oligonucleotide
gcgcgaggtcacctacggtacgtataggat

SEQ ID NO: 479479 - DNA, 30 bp, Artificial Sequence
  Synthetic oligonucleotide
ccagtctcctcacacttttgcagctaggat

SEQ ID NO: 479480 - DNA, 30 bp, Artificial Sequence
  Synthetic oligonucleotide
taaaaataggtatggacatcttgctaggat

SEQ ID NO: 479481 - DNA, 30 bp, Artificial Sequence
  Synthetic oligonucleotide
gagtcaggctttaccggtttaaagtaggat

SEQ ID NO: 479482 - DNA, 30 bp, Artificial Sequence
  Synthetic oligonucleotide
cttgcgcttgttgaaacttggtagtaggat

SEQ ID NO: 479483 - DNA, 30 bp, Artificial Sequence
  Synthetic oligonucleotide
ggatctcatgcataaaatgaatggtaggat

SEQ ID NO: 479484 - DNA, 30 bp, Artificial Sequence
  Synthetic oligonucleotide
gtggaatccgaagactaagcgcgttaggat

SEQ ID NO: 479485 - DNA, 30 bp, Artificial Sequence
  Synthetic oligonucleotide
agtctcttgcggggattaggaatttaggat

SEQ ID NO: 479486 - DNA, 30 bp, Artificial Sequence
  Synthetic oligonucleotide
ggatccagccagaccgggccgctttaggat

SEQ ID NO: 479487 - DNA, 30 bp, Artificial Sequence
  Synthetic oligonucleotide
ggctaataataccgttcccagccaacggat

SEQ ID NO: 479488 - DNA, 30 bp, Artificial Sequence
  Synthetic oligonucleotide
caccgctcggagttggacgtgtcaacggat

SEQ ID NO: 479489 - DNA, 30 bp, Artificial Sequence
  Synthetic oligonucleotide
taccttaatagtcaggaagttaacacggat

SEQ ID NO: 479490 - DNA, 30 bp, Artificial Sequence
  Synthetic oligonucleotide
aagacacgggcctcgctcttcaccacggat

SEQ ID NO: 479491 - DNA, 30 bp, Artificial Sequence
  Synthetic oligonucleotide
tctactgagcggggtggacgtgccacggat

SEQ ID NO: 479492 - DNA, 30 bp, Artificial Sequence
  Synthetic oligonucleotide
ggatttttttttcgtgggaagtgcacggat

SEQ ID NO: 479493 - DNA, 30 bp, Artificial Sequence
  Synthetic oligonucleotide
gatttcgccgcccgggactacaggacggat

SEQ ID NO: 479494 - DNA, 30 bp, Artificial Sequence
  Synthetic oligonucleotide
tctcaatataatgcgactttgcggacggat

SEQ ID NO: 479495 - DNA, 30 bp, Artificial Sequence
  Synthetic oligonucleotide
cgtctgcgccactgtggctgcatgacggat

SEQ ID NO: 479496 - DNA, 30 bp, Artificial Sequence
  Synthetic oligonucleotide
tctatgtgtagtatatcgtggctgacggat

SEQ ID NO: 479497 - DNA, 30 bp, Artificial Sequence
  Synthetic oligonucleotide
gatgcctaatggacgcataaagatacggat

SEQ ID NO: 479498 - DNA, 30 bp, Artificial Sequence
  Synthetic oligonucleotide
tcaacacagcagatcgccgtctatacggat

SEQ ID NO: 479499 - DNA, 30 bp, Artificial Sequence
  Synthetic oligonucleotide
cctagtctttcattatattgtgctacggat

SEQ ID NO: 479500 - DNA, 30 bp, Artificial Sequence
  Synthetic oligonucleotide
attcgataagagcgcatggcgggaccggat

SEQ ID NO: 479501 - DNA, 30 bp, Artificial Sequence
  Synthetic oligonucleotide
aagagatgtctaacggggttctacccggat

SEQ ID NO: 479502 - DNA, 30 bp, Artificial Sequence
  Synthetic oligonucleotide
tatcccattctccgtactccagtgccggat

SEQ ID NO: 479503 - DNA, 30 bp, Artificial Sequence
  Synthetic oligonucleotide
taaagcccgaggatatctaacttgccggat

SEQ ID NO: 479504 - DNA, 30 bp, Artificial Sequence
  Synthetic oligonucleotide
caaattggctggggtctaatcttgccggat

SEQ ID NO: 479505 - DNA, 30 bp, Artificial Sequence
  Synthetic oligonucleotide
ttgaagttgatagctccccggtgtccggat

SEQ ID NO: 479506 - DNA, 30 bp, Artificial Sequence
  Synthetic oligonucleotide
gggattggagccacccccatgaaagcggat

SEQ ID NO: 479507 - DNA, 30 bp, Artificial Sequence
  Synthetic oligonucleotide
gctattactctactgagcgctaaagcggat

SEQ ID NO: 479508 - DNA, 30 bp, Artificial Sequence
  Synthetic oligonucleotide
tggcgcatagcccagacgggtaaagcggat

SEQ ID NO: 479509 - DNA, 30 bp, Artificial Sequence
  Synthetic oligonucleotide
gagttacgtcgcgaagagtcctaagcggat

SEQ ID NO: 479510 - DNA, 30 bp, Artificial Sequence
  Synthetic oligonucleotide
accgatgataagcggagcggacaggcggat

SEQ ID NO: 479511 - DNA, 30 bp, Artificial Sequence
  Synthetic oligonucleotide
ccggaatccgtaattgatggtgcggcggat

SEQ ID NO: 479512 - DNA, 30 bp, Artificial Sequence
  Synthetic oligonucleotide
ggctacattagaattgtagttttctcggat

SEQ ID NO: 479513 - DNA, 30 bp, Artificial Sequence
  Synthetic oligonucleotide
tacatgttccctcgggaccgaggttcggat

SEQ ID NO: 479514 - DNA, 30 bp, Artificial Sequence
  Synthetic oligonucleotide
gctcaattaagcgcctctagcttttcggat

SEQ ID NO: 479515 - DNA, 30 bp, Artificial Sequence
  Synthetic oligonucleotide
atttctacaaaaacgttggggactagggat

SEQ ID NO: 479516 - DNA, 30 bp, Artificial Sequence
  Synthetic oligonucleotide
tttttaacaggtcgactatcagctagggat

SEQ ID NO: 479517 - DNA, 30 bp, Artificial Sequence
  Synthetic oligonucleotide
gtaatcctaatctgttacagcacacgggat

SEQ ID NO: 479518 - DNA, 30 bp, Artificial Sequence
  Synthetic oligonucleotide
gagtgtgggtatataggattcgcgcgggat

SEQ ID NO: 479519 - DNA, 30 bp, Artificial Sequence
  Synthetic oligonucleotide
gccacttacttcgaagtcatgtcgcgggat

SEQ ID NO: 479520 - DNA, 30 bp, Artificial Sequence
  Synthetic oligonucleotide
accgctaaccaggtagcttgccctcgggat

SEQ ID NO: 479521 - DNA, 30 bp, Artificial Sequence
  Synthetic oligonucleotide
gatactcgggtctgttttatgtcaggggat

SEQ ID NO: 479522 - DNA, 30 bp, Artificial Sequence
  Synthetic oligonucleotide
accgcctctgctctgtgatgaaacggggat

SEQ ID NO: 479523 - DNA, 30 bp, Artificial Sequence
  Synthetic oligonucleotide
ttctccatctacgattattgagccggggat

SEQ ID NO: 479524 - DNA, 30 bp, Artificial Sequence
  Synthetic oligonucleotide
gctccgtcggccagcttttctgccggggat

SEQ ID NO: 479525 - DNA, 30 bp, Artificial Sequence
  Synthetic oligonucleotide
cgggaattccgctcgcgaatgacgggggat

SEQ ID NO: 479526 - DNA, 30 bp, Artificial Sequence
  Synthetic oligonucleotide
tgcttgtctttcctgcgcctaatgggggat

SEQ ID NO: 479527 - DNA, 30 bp, Artificial Sequence
  Synthetic oligonucleotide
tatgggttttattccccgtggaaatgggat

SEQ ID NO: 479528 - DNA, 30 bp, Artificial Sequence
  Synthetic oligonucleotide
tgatttagcaacttactcacttgatgggat

SEQ ID NO: 479529 - DNA, 30 bp, Artificial Sequence
  Synthetic oligonucleotide
acaaatatctttcgggaggcccactgggat

SEQ ID NO: 479530 - DNA, 30 bp, Artificial Sequence
  Synthetic oligonucleotide
acttctcgcagtgtcacacagacctgggat

SEQ ID NO: 479531 - DNA, 30 bp, Artificial Sequence
  Synthetic oligonucleotide
actatggccaccgcgtatcatggctgggat

SEQ ID NO: 479532 - DNA, 30 bp, Artificial Sequence
  Synthetic oligonucleotide
aaatttggaccctaatcagagtgctgggat

SEQ ID NO: 479533 - DNA, 30 bp, Artificial Sequence
  Synthetic oligonucleotide
atttcaccttggcactaaaaaaggtgggat

SEQ ID NO: 479534 - DNA, 30 bp, Artificial Sequence
  Synthetic oligonucleotide
agatacggctcgcgtcttggtgggtgggat

SEQ ID NO: 479535 - DNA, 30 bp, Artificial Sequence
  Synthetic oligonucleotide
tttccgattatacggatgaggtattgggat

SEQ ID NO: 479536 - DNA, 30 bp, Artificial Sequence
  Synthetic oligonucleotide
ggactcgctatagcgagtttattttgggat

SEQ ID NO: 479537 - DNA, 30 bp, Artificial Sequence
  Synthetic oligonucleotide
gattaatagtgcagtcaggtgctcatggat

SEQ ID NO: 479538 - DNA, 30 bp, Artificial Sequence
  Synthetic oligonucleotide
ttatttatacgattacgtaaaactatggat

SEQ ID NO: 479539 - DNA, 30 bp, Artificial Sequence
  Synthetic oligonucleotide
attatgacgttcgagacgatcactatggat

SEQ ID NO: 479540 - DNA, 30 bp, Artificial Sequence
  Synthetic oligonucleotide
tgtattatctcccccccccagtttatggat

SEQ ID NO: 479541 - DNA, 30 bp, Artificial Sequence
  Synthetic oligonucleotide
taaaagtgcgcggaagcttgcggactggat

SEQ ID NO: 479542 - DNA, 30 bp, Artificial Sequence
  Synthetic oligonucleotide
agctagactcaatcacgggtgagcctggat

SEQ ID NO: 479543 - DNA, 30 bp, Artificial Sequence
  Synthetic oligonucleotide
aggtgaaaacgatgaggcattaagctggat

SEQ ID NO: 479544 - DNA, 30 bp, Artificial Sequence
  Synthetic oligonucleotide
ctgtgcagcatataggacgggccgctggat

SEQ ID NO: 479545 - DNA, 30 bp, Artificial Sequence
  Synthetic oligonucleotide
gcgagatttttcgtggtgaaaaggctggat

SEQ ID NO: 479546 - DNA, 30 bp, Artificial Sequence
  Synthetic oligonucleotide
agggcgggttttgtggtcacggtgctggat

SEQ ID NO: 479547 - DNA, 30 bp, Artificial Sequence
  Synthetic oligonucleotide
tggtattcgtcgcagaacccttgtctggat

SEQ ID NO: 479548 - DNA, 30 bp, Artificial Sequence
  Synthetic oligonucleotide
cctagcaccacctgtcgtcagacagtggat

SEQ ID NO: 479549 - DNA, 30 bp, Artificial Sequence
  Synthetic oligonucleotide
ttcattctacgtaatcatcccgtagtggat

SEQ ID NO: 479550 - DNA, 30 bp, Artificial Sequence
  Synthetic oligonucleotide
gcatagccagtggggtggaattgggtggat

SEQ ID NO: 479551 - DNA, 30 bp, Artificial Sequence
  Synthetic oligonucleotide
aatgtgtttatcggttatgtcatggtggat

SEQ ID NO: 479552 - DNA, 30 bp, Artificial Sequence
  Synthetic oligonucleotide
ctttgattactttcctataatgatgtggat

SEQ ID NO: 479553 - DNA, 30 bp, Artificial Sequence
  Synthetic oligonucleotide
tcgaacgaggcgtattcgatcattgtggat

SEQ ID NO: 479554 - DNA, 30 bp, Artificial Sequence
  Synthetic oligonucleotide
gggtttcttcagtactaagaagaattggat

SEQ ID NO: 479555 - DNA, 30 bp, Artificial Sequence
  Synthetic oligonucleotide
cttggagccgatgtaaagtatccattggat

SEQ ID NO: 479556 - DNA, 30 bp, Artificial Sequence
  Synthetic oligonucleotide
ctttagattagtccaatttcctgattggat

SEQ ID NO: 479557 - DNA, 30 bp, Artificial Sequence
  Synthetic oligonucleotide
tatacttcggagatgtgttgccacttggat

SEQ ID NO: 479558 - DNA, 30 bp, Artificial Sequence
  Synthetic oligonucleotide
agcctagagactaggttgtaatccttggat

SEQ ID NO: 479559 - DNA, 30 bp, Artificial Sequence
  Synthetic oligonucleotide
tcggtacatgtcgagcggttcggcttggat

SEQ ID NO: 479560 - DNA, 30 bp, Artificial Sequence
  Synthetic oligonucleotide
tccgatgacagatagacgatcctcttggat

SEQ ID NO: 479561 - DNA, 30 bp, Artificial Sequence
  Synthetic oligonucleotide
ttaagaacgtgtgattggcacgtcttggat

SEQ ID NO: 479562 - DNA, 30 bp, Artificial Sequence
  Synthetic oligonucleotide
actcgactaccttaccattcgttcttggat

SEQ ID NO: 479563 - DNA, 30 bp, Artificial Sequence
  Synthetic oligonucleotide
cccagccgaatggaaaccgacaagttggat

SEQ ID NO: 479564 - DNA, 30 bp, Artificial Sequence
  Synthetic oligonucleotide
ggcgctggtcatacggtgactccgttggat

SEQ ID NO: 479565 - DNA, 30 bp, Artificial Sequence
  Synthetic oligonucleotide
gaactacgcgtacccaattgcctgttggat

SEQ ID NO: 479566 - DNA, 30 bp, Artificial Sequence
  Synthetic oligonucleotide
ttttggctactcttttggtccagtttggat

SEQ ID NO: 479567 - DNA, 30 bp, Artificial Sequence
  Synthetic oligonucleotide
aacattgtttagagcaattggcttttggat

SEQ ID NO: 479568 - DNA, 30 bp, Artificial Sequence
  Synthetic oligonucleotide
ttaactggatttgccgaccagcaaaatgat

SEQ ID NO: 479569 - DNA, 30 bp, Artificial Sequence
  Synthetic oligonucleotide
aacggtagatcagattttgacccaaatgat

SEQ ID NO: 479570 - DNA, 30 bp, Artificial Sequence
  Synthetic oligonucleotide
gtgatcaatcccgcagtgaactcaaatgat

SEQ ID NO: 479571 - DNA, 30 bp, Artificial Sequence
  Synthetic oligonucleotide
tgggatgcagctttatgtcctcgaaatgat

SEQ ID NO: 479572 - DNA, 30 bp, Artificial Sequence
  Synthetic oligonucleotide
tgttcggactagagatcgtaatgaaatgat

SEQ ID NO: 479573 - DNA, 30 bp, Artificial Sequence
  Synthetic oligonucleotide
cagccgatatgggtgtgatacaccaatgat

SEQ ID NO: 479574 - DNA, 30 bp, Artificial Sequence
  Synthetic oligonucleotide
tgacctctttccgccgttgagtccaatgat

SEQ ID NO: 479575 - DNA, 30 bp, Artificial Sequence
  Synthetic oligonucleotide
tattaaactcacgctcggtagcgcaatgat

SEQ ID NO: 479576 - DNA, 30 bp, Artificial Sequence
  Synthetic oligonucleotide
aggcgtacaggttcacctagaattaatgat

SEQ ID NO: 479577 - DNA, 30 bp, Artificial Sequence
  Synthetic oligonucleotide
tatacaggaacgcctgctagaagccatgat

SEQ ID NO: 479578 - DNA, 30 bp, Artificial Sequence
  Synthetic oligonucleotide
tttaaaggacagatcgctgccccgcatgat

SEQ ID NO: 479579 - DNA, 30 bp, Artificial Sequence
  Synthetic oligonucleotide
ggcttttatccccgtcggtaagtgcatgat

SEQ ID NO: 479580 - DNA, 29 bp, Artificial Sequence
  Synthetic oligonucleotide
gttatatctaaaacgtagcgttgcatgat

SEQ ID NO: 479581 - DNA, 30 bp, Artificial Sequence
  Synthetic oligonucleotide
aaaaagggccgttggactgtaactcatgat

SEQ ID NO: 479582 - DNA, 30 bp, Artificial Sequence
  Synthetic oligonucleotide
tgatcaatggccactgttcttggtcatgat

SEQ ID NO: 479583 - DNA, 30 bp, Artificial Sequence
  Synthetic oligonucleotide
tatgtaatggagatgcatcttcaagatgat

SEQ ID NO: 479584 - DNA, 30 bp, Artificial Sequence
  Synthetic oligonucleotide
gggctcaaagttcgcagaacaggcgatgat

SEQ ID NO: 479585 - DNA, 30 bp, Artificial Sequence
  Synthetic oligonucleotide
ggattggtcggggggtccctggatgatgat

SEQ ID NO: 479586 - DNA, 30 bp, Artificial Sequence
  Synthetic oligonucleotide
aatatggagccagcggataaaactgatgat

SEQ ID NO: 479587 - DNA, 30 bp, Artificial Sequence
  Synthetic oligonucleotide
attttttaaaacggaggtagaagtgatgat

SEQ ID NO: 479588 - DNA, 30 bp, Artificial Sequence
  Synthetic oligonucleotide
tcatttcaccaacgcatttctccatatgat

SEQ ID NO: 479589 - DNA, 30 bp, Artificial Sequence
  Synthetic oligonucleotide
tgttagattgttcccatgaatgcatatgat

SEQ ID NO: 479590 - DNA, 30 bp, Artificial Sequence
  Synthetic oligonucleotide
aaggttagtttctaagttgagcgatatgat

SEQ ID NO: 479591 - DNA, 30 bp, Artificial Sequence
  Synthetic oligonucleotide
cttctcgtgcgttccatataccattatgat

SEQ ID NO: 479592 - DNA, 30 bp, Artificial Sequence
  Synthetic oligonucleotide
tttgggtgtctgcgagctcaaagttatgat

SEQ ID NO: 479593 - DNA, 29 bp, Artificial Sequence
  Synthetic oligonucleotide
ctgtaggatctagaccccgcaaaactgat

SEQ ID NO: 479594 - DNA, 30 bp, Artificial Sequence
  Synthetic oligonucleotide
gtagatgatcgggaaggtttgccaactgat

SEQ ID NO: 479595 - DNA, 30 bp, Artificial Sequence
  Synthetic oligonucleotide
atgcaatcaggtctgattcccggcactgat

SEQ ID NO: 479596 - DNA, 30 bp, Artificial Sequence
  Synthetic oligonucleotide
ttccacgagtcctatccgcaactcactgat

SEQ ID NO: 479597 - DNA, 30 bp, Artificial Sequence
  Synthetic oligonucleotide
attgcacgtttagacttccgtgagactgat

SEQ ID NO: 479598 - DNA, 30 bp, Artificial Sequence
  Synthetic oligonucleotide
gactgcaagccctgacgatggcggactgat

SEQ ID NO: 479599 - DNA, 30 bp, Artificial Sequence
  Synthetic oligonucleotide
cgtcttttcttaaaagaaggttatactgat

SEQ ID NO: 479600 - DNA, 30 bp, Artificial Sequence
  Synthetic oligonucleotide
gagcctcagaacgcgtaagaactacctgat

SEQ ID NO: 479601 - DNA, 30 bp, Artificial Sequence
  Synthetic oligonucleotide
tatgcaattttatggtgggcggtccctgat

SEQ ID NO: 479602 - DNA, 30 bp, Artificial Sequence
  Synthetic oligonucleotide
gaaagatgcgtaacagccccccggcctgat

SEQ ID NO: 479603 - DNA, 30 bp, Artificial Sequence
  Synthetic oligonucleotide
aatattcgtagggaatatttgccggctgat

SEQ ID NO: 479604 - DNA, 30 bp, Artificial Sequence
  Synthetic oligonucleotide
acagtgatctactaatttcttccatctgat

SEQ ID NO: 479605 - DNA, 30 bp, Artificial Sequence
  Synthetic oligonucleotide
gttagttttaccgatcgttaagcatctgat

SEQ ID NO: 479606 - DNA, 30 bp, Artificial Sequence
  Synthetic oligonucleotide
gttatcatatattagaaacacagatctgat

SEQ ID NO: 479607 - DNA, 30 bp, Artificial Sequence
  Synthetic oligonucleotide
cttcaagcactcccacctcaatactctgat

SEQ ID NO: 479608 - DNA, 30 bp, Artificial Sequence
  Synthetic oligonucleotide
tatctgtagtggccctttcagacctctgat

SEQ ID NO: 479609 - DNA, 30 bp, Artificial Sequence
  Synthetic oligonucleotide
tgatgagagaccagcgtggttatctctgat

SEQ ID NO: 479610 - DNA, 30 bp, Artificial Sequence
  Synthetic oligonucleotide
cgcgccaagagctccagctctacgtctgat

SEQ ID NO: 479611 - DNA, 30 bp, Artificial Sequence
  Synthetic oligonucleotide
agctgacaatggccccgtctgccgtctgat

SEQ ID NO: 479612 - DNA, 30 bp, Artificial Sequence
  Synthetic oligonucleotide
caatctacaggctgttgtctaccttctgat

SEQ ID NO: 479613 - DNA, 30 bp, Artificial Sequence
  Synthetic oligonucleotide
ataacacgggctgatgggtttgtttctgat

SEQ ID NO: 479614 - DNA, 30 bp, Artificial Sequence
  Synthetic oligonucleotide
ctcgtctatttagaagccgtagacagtgat

SEQ ID NO: 479615 - DNA, 30 bp, Artificial Sequence
  Synthetic oligonucleotide
cggtggatctgcagatttctagtgagtgat

SEQ ID NO: 479616 - DNA, 30 bp, Artificial Sequence
  Synthetic oligonucleotide
aatcccaacgtctctccgaaggaacgtgat

SEQ ID NO: 479617 - DNA, 30 bp, Artificial Sequence
  Synthetic oligonucleotide
gagaccctagatacagtactgtcccgtgat

SEQ ID NO: 479618 - DNA, 29 bp, Artificial Sequence
  Synthetic oligonucleotide
atctgcaggaatagactccgccgcgtgat

SEQ ID NO: 479619 - DNA, 30 bp, Artificial Sequence
  Synthetic oligonucleotide
tgcgcaccgatgcaggcaaattgtcgtgat

SEQ ID NO: 479620 - DNA, 30 bp, Artificial Sequence
  Synthetic oligonucleotide
aggtgaaattgacggtcatcgcaaggtgat

SEQ ID NO: 479621 - DNA, 30 bp, Artificial Sequence
  Synthetic oligonucleotide
tcctttattgatttagtgctggtaggtgat

SEQ ID NO: 479622 - DNA, 30 bp, Artificial Sequence
  Synthetic oligonucleotide
ataagttcgacggtcaacgtgcacggtgat

SEQ ID NO: 479623 - DNA, 30 bp, Artificial Sequence
  Synthetic oligonucleotide
atttttatttctacttcaaagactggtgat

SEQ ID NO: 479624 - DNA, 30 bp, Artificial Sequence
  Synthetic oligonucleotide
gcgcgacttacaggctgaagttctggtgat

SEQ ID NO: 479625 - DNA, 30 bp, Artificial Sequence
  Synthetic oligonucleotide
cggtattctcgtggtacgacagttggtgat

SEQ ID NO: 479626 - DNA, 30 bp, Artificial Sequence
  Synthetic oligonucleotide
gattaggcccagggcaatcagccatgtgat

SEQ ID NO: 479627 - DNA, 30 bp, Artificial Sequence
  Synthetic oligonucleotide
gagattgttcatagtaagaggagctgtgat

SEQ ID NO: 479628 - DNA, 30 bp, Artificial Sequence
  Synthetic oligonucleotide
gctgatcctttccatacccgtctctgtgat

SEQ ID NO: 479629 - DNA, 30 bp, Artificial Sequence
  Synthetic oligonucleotide
taaaagagacccagtagaggattctgtgat

SEQ ID NO: 479630 - DNA, 30 bp, Artificial Sequence
  Synthetic oligonucleotide
gattattctttgttgatccgtttctgtgat

SEQ ID NO: 479631 - DNA, 30 bp, Artificial Sequence
  Synthetic oligonucleotide
gacgtccggcacgtggagttcgggtgtgat

SEQ ID NO: 479632 - DNA, 30 bp, Artificial Sequence
  Synthetic oligonucleotide
tgctgaaagccgaggaaaactagttgtgat

SEQ ID NO: 479633 - DNA, 30 bp, Artificial Sequence
  Synthetic oligonucleotide
aacaagcgcggcactccaagcaaaattgat

SEQ ID NO: 479634 - DNA, 30 bp, Artificial Sequence
  Synthetic oligonucleotide
ttctgctatcggcaagcgtcctccattgat

SEQ ID NO: 479635 - DNA, 30 bp, Artificial Sequence
  Synthetic oligonucleotide
aactagtggtaatgcgagaatgtcattgat

SEQ ID NO: 479636 - DNA, 30 bp, Artificial Sequence
  Synthetic oligonucleotide
cgcacgtagcaaatcatgggtaagattgat

SEQ ID NO: 479637 - DNA, 30 bp, Artificial Sequence
  Synthetic oligonucleotide
gccattctactcatcggatactatattgat

SEQ ID NO: 479638 - DNA, 30 bp, Artificial Sequence
  Synthetic oligonucleotide
tccgcgtatgcatatcaataaactattgat

SEQ ID NO: 479639 - DNA, 30 bp, Artificial Sequence
  Synthetic oligonucleotide
agcttggatgtaaacttctggactattgat

SEQ ID NO: 479640 - DNA, 30 bp, Artificial Sequence
  Synthetic oligonucleotide
cccgactgccgcgtggagcgtccacttgat

SEQ ID NO: 479641 - DNA, 30 bp, Artificial Sequence
  Synthetic oligonucleotide
ccttaatctgacgatttcttggcacttgat

SEQ ID NO: 479642 - DNA, 30 bp, Artificial Sequence
  Synthetic oligonucleotide
aacaattaataatgcagcaacagacttgat

SEQ ID NO: 479643 - DNA, 30 bp, Artificial Sequence
  Synthetic oligonucleotide
ggtaggtcatcggcgaggcagatccttgat

SEQ ID NO: 479644 - DNA, 30 bp, Artificial Sequence
  Synthetic oligonucleotide
aattgcgttgagacatcccggtagcttgat

SEQ ID NO: 479645 - DNA, 30 bp, Artificial Sequence
  Synthetic oligonucleotide
tgggtccttgatcagcgctcttctcttgat

SEQ ID NO: 479646 - DNA, 30 bp, Artificial Sequence
  Synthetic oligonucleotide
accggttaaggcacgttgcttcgtcttgat

SEQ ID NO: 479647 - DNA, 30 bp, Artificial Sequence
  Synthetic oligonucleotide
ggtttcctggcttaagcgcaggccgttgat

SEQ ID NO: 479648 - DNA, 30 bp, Artificial Sequence
  Synthetic oligonucleotide
caatttaatggctcacgtcgccgcgttgat

SEQ ID NO: 479649 - DNA, 30 bp, Artificial Sequence
  Synthetic oligonucleotide
gtacacagccgctaggtgttcctcgttgat

SEQ ID NO: 479650 - DNA, 30 bp, Artificial Sequence
  Synthetic oligonucleotide
caaatttgtgttttccaggacatggttgat

SEQ ID NO: 479651 - DNA, 30 bp, Artificial Sequence
  Synthetic oligonucleotide
gaaaaaccgtaattggttcatgatgttgat

SEQ ID NO: 479652 - DNA, 30 bp, Artificial Sequence
  Synthetic oligonucleotide
gcgataaccgcctagtaacagtttgttgat

SEQ ID NO: 479653 - DNA, 30 bp, Artificial Sequence
  Synthetic oligonucleotide
ttaccccttgcttcgactgtgtcatttgat

SEQ ID NO: 479654 - DNA, 30 bp, Artificial Sequence
  Synthetic oligonucleotide
agggttcgttcgagaactattggatttgat

SEQ ID NO: 479655 - DNA, 30 bp, Artificial Sequence
  Synthetic oligonucleotide
ggatagatttgacgaccttgccgctttgat

SEQ ID NO: 479656 - DNA, 30 bp, Artificial Sequence
  Synthetic oligonucleotide
agccggcccagtattacgtagcgctttgat

SEQ ID NO: 479657 - DNA, 30 bp, Artificial Sequence
  Synthetic oligonucleotide
cgtgactctttacttttcacgcattttgat

SEQ ID NO: 479658 - DNA, 30 bp, Artificial Sequence
  Synthetic oligonucleotide
aaatatgcaagaactgttcttcattttgat

SEQ ID NO: 479659 - DNA, 30 bp, Artificial Sequence
  Synthetic oligonucleotide
gagcacattatgggcgtttctgtttttgat

SEQ ID NO: 479660 - DNA, 30 bp, Artificial Sequence
  Synthetic oligonucleotide
tatcttttaggcaatagttttgcaaaatat

SEQ ID NO: 479661 - DNA, 30 bp, Artificial Sequence
  Synthetic oligonucleotide
tcgggcggcccccgtagaagcatgaaatat

SEQ ID NO: 479662 - DNA, 30 bp, Artificial Sequence
  Synthetic oligonucleotide
attcttgatcaacttccggttttgaaatat

SEQ ID NO: 479663 - DNA, 30 bp, Artificial Sequence
  Synthetic oligonucleotide
catttcgaaaggggttacgctcataaatat

SEQ ID NO: 479664 - DNA, 30 bp, Artificial Sequence
  Synthetic oligonucleotide
cagagcgctcaccattgaggcagtaaatat

SEQ ID NO: 479665 - DNA, 30 bp, Artificial Sequence
  Synthetic oligonucleotide
gccatgaaacatgagttacccggtaaatat

SEQ ID NO: 479666 - DNA, 30 bp, Artificial Sequence
  Synthetic oligonucleotide
ctatagatcgcgttgttgctaaaacaatat

SEQ ID NO: 479667 - DNA, 30 bp, Artificial Sequence
  Synthetic oligonucleotide
aatgaccatcggcacggtcgccgacaatat

SEQ ID NO: 479668 - DNA, 30 bp, Artificial Sequence
  Synthetic oligonucleotide
caattgtagaccttccggatccgacaatat

SEQ ID NO: 479669 - DNA, 30 bp, Artificial Sequence
  Synthetic oligonucleotide
tacaaccgcaaagtcacatggtaccaatat

SEQ ID NO: 479670 - DNA, 30 bp, Artificial Sequence
  Synthetic oligonucleotide
cctcgatagttttcaaacgacgcccaatat

SEQ ID NO: 479671 - DNA, 30 bp, Artificial Sequence
  Synthetic oligonucleotide
cgagcttccgatgcctcttacggccaatat

SEQ ID NO: 479672 - DNA, 30 bp, Artificial Sequence
  Synthetic oligonucleotide
gaaattccgcgcaggagataatgccaatat

SEQ ID NO: 479673 - DNA, 30 bp, Artificial Sequence
  Synthetic oligonucleotide
gtttagtgtcagggttgcatatagcaatat

SEQ ID NO: 479674 - DNA, 30 bp, Artificial Sequence
  Synthetic oligonucleotide
gcattctagtaaagagtccacacgcaatat

SEQ ID NO: 479675 - DNA, 30 bp, Artificial Sequence
  Synthetic oligonucleotide
aaattgacaacgccagtgaatgtgcaatat

SEQ ID NO: 479676 - DNA, 30 bp, Artificial Sequence
  Synthetic oligonucleotide
catcccaccagtagggggaattatcaatat

SEQ ID NO: 479677 - DNA, 30 bp, Artificial Sequence
  Synthetic oligonucleotide
atccactgtgtagtcacaaagcctcaatat

SEQ ID NO: 479678 - DNA, 30 bp, Artificial Sequence
  Synthetic oligonucleotide
agttgtaggtaccagaaatgaattcaatat

SEQ ID NO: 479679 - DNA, 30 bp, Artificial Sequence
  Synthetic oligonucleotide
gatccaccgggactcaccgggtcagaatat

SEQ ID NO: 479680 - DNA, 30 bp, Artificial Sequence
  Synthetic oligonucleotide
tacactttggtctgacgcaacttagaatat

SEQ ID NO: 479681 - DNA, 30 bp, Artificial Sequence
  Synthetic oligonucleotide
ctgatgtcttctgtaacgagctacgaatat

SEQ ID NO: 479682 - DNA, 30 bp, Artificial Sequence
  Synthetic oligonucleotide
cggcatttccctggaacaacaagggaatat

SEQ ID NO: 479683 - DNA, 30 bp, Artificial Sequence
  Synthetic oligonucleotide
atccttcaatgtcttagcgatgatgaatat

SEQ ID NO: 479684 - DNA, 30 bp, Artificial Sequence
  Synthetic oligonucleotide
ggaaaaacggttcgacgtaattatgaatat

SEQ ID NO: 479685 - DNA, 30 bp, Artificial Sequence
  Synthetic oligonucleotide
tatccagaacggaatacgcggactgaatat

SEQ ID NO: 479686 - DNA, 30 bp, Artificial Sequence
  Synthetic oligonucleotide
tcagtcaggttgtgcagcatttctgaatat

SEQ ID NO: 479687 - DNA, 30 bp, Artificial Sequence
  Synthetic oligonucleotide
taagacttagatgacccatatggtgaatat

SEQ ID NO: 479688 - DNA, 30 bp, Artificial Sequence
  Synthetic oligonucleotide
ttgtgcaaaatatatcagattcaataatat

SEQ ID NO: 479689 - DNA, 30 bp, Artificial Sequence
  Synthetic oligonucleotide
ctcaatgattggggttaattacgataatat

SEQ ID NO: 479690 - DNA, 30 bp, Artificial Sequence
  Synthetic oligonucleotide
tttatcacgctaacctgacacatataatat

SEQ ID NO: 479691 - DNA, 30 bp, Artificial Sequence
  Synthetic oligonucleotide
ttacgtctgtgttagatttgggtataatat

SEQ ID NO: 479692 - DNA, 30 bp, Artificial Sequence
  Synthetic oligonucleotide
gcaattgaactaccaagttacgcgtaatat

SEQ ID NO: 479693 - DNA, 30 bp, Artificial Sequence
  Synthetic oligonucleotide
tacggtgtattgcatcagtcttattaatat

SEQ ID NO: 479694 - DNA, 30 bp, Artificial Sequence
  Synthetic oligonucleotide
aatgctatattatatcatgctggttaatat

SEQ ID NO: 479695 - DNA, 30 bp, Artificial Sequence
  Synthetic oligonucleotide
tgaccgagcttatcggagtcaatttaatat

SEQ ID NO: 479696 - DNA, 30 bp, Artificial Sequence
  Synthetic oligonucleotide
ttcgttgtttatcattattggatttaatat

SEQ ID NO: 479697 - DNA, 30 bp, Artificial Sequence
  Synthetic oligonucleotide
cgatgcccacagactaactgagtttaatat

SEQ ID NO: 479698 - DNA, 30 bp, Artificial Sequence
  Synthetic oligonucleotide
gagtctcttaccgttcaaccaacaacatat

SEQ ID NO: 479699 - DNA, 29 bp, Artificial Sequence
  Synthetic oligonucleotide
ttaatacgatatcgggctagtcaacatat

SEQ ID NO: 479700 - DNA, 30 bp, Artificial Sequence
  Synthetic oligonucleotide
gtaacagttaatactggactatgaacatat

SEQ ID NO: 479701 - DNA, 30 bp, Artificial Sequence
  Synthetic oligonucleotide
tgcgttctcacgtcccggtctttaacatat

SEQ ID NO: 479702 - DNA, 30 bp, Artificial Sequence
  Synthetic oligonucleotide
gattctgattacttataacctcccacatat

SEQ ID NO: 479703 - DNA, 30 bp, Artificial Sequence
  Synthetic oligonucleotide
cactgttctttgagtggcaaagtcacatat

SEQ ID NO: 479704 - DNA, 31 bp, Artificial Sequence
  Synthetic oligonucleotide
cccggggtgaggtggttgatataatacatat

SEQ ID NO: 479705 - DNA, 30 bp, Artificial Sequence
  Synthetic oligonucleotide
ggcgtgcacttcggctctagggaaccatat

SEQ ID NO: 479706 - DNA, 30 bp, Artificial Sequence
  Synthetic oligonucleotide
cccgactgctagacatttaatacaccatat

SEQ ID NO: 479707 - DNA, 28 bp, Artificial Sequence
  Synthetic oligonucleotide
ggaatatcggcaaattgctcgaccatat

SEQ ID NO: 479708 - DNA, 30 bp, Artificial Sequence
  Synthetic oligonucleotide
ctactgttggttcttttaggtccgccatat

SEQ ID NO: 479709 - DNA, 30 bp, Artificial Sequence
  Synthetic oligonucleotide
gagaatgatgagacgttggtcgggccatat

SEQ ID NO: 479710 - DNA, 30 bp, Artificial Sequence
  Synthetic oligonucleotide
ggaatttgagaagcaagatcccaagcatat

SEQ ID NO: 479711 - DNA, 30 bp, Artificial Sequence
  Synthetic oligonucleotide
agacacgtagtcgatgctttctaagcatat

SEQ ID NO: 479712 - DNA, 30 bp, Artificial Sequence
  Synthetic oligonucleotide
ccgggtaagtacgatacagggccagcatat

SEQ ID NO: 479713 - DNA, 30 bp, Artificial Sequence
  Synthetic oligonucleotide
aacagaactcaccgccgctctgcggcatat

SEQ ID NO: 479714 - DNA, 30 bp, Artificial Sequence
  Synthetic oligonucleotide
acagggtagtccagacgtagctctgcatat

SEQ ID NO: 479715 - DNA, 30 bp, Artificial Sequence
  Synthetic oligonucleotide
agcaccgctagcgaatgtgctcgtgcatat

SEQ ID NO: 479716 - DNA, 30 bp, Artificial Sequence
  Synthetic oligonucleotide
tcttgcggttaagtgcttacaattgcatat

SEQ ID NO: 479717 - DNA, 30 bp, Artificial Sequence
  Synthetic oligonucleotide
ttgaacctagcacagccaattttatcatat

SEQ ID NO: 479718 - DNA, 30 bp, Artificial Sequence
  Synthetic oligonucleotide
gggattttactattactaaaggagtcatat

SEQ ID NO: 479719 - DNA, 30 bp, Artificial Sequence
  Synthetic oligonucleotide
gtatatccgggttaaatgagcgattcatat

SEQ ID NO: 479720 - DNA, 30 bp, Artificial Sequence
  Synthetic oligonucleotide
tactacctcaaagggagcatgtattcatat

SEQ ID NO: 479721 - DNA, 30 bp, Artificial Sequence
  Synthetic oligonucleotide
gatttatgacccggataatgaacttcatat

SEQ ID NO: 479722 - DNA, 30 bp, Artificial Sequence
  Synthetic oligonucleotide
actctcgtgttaaacgctgttagttcatat

SEQ ID NO: 479723 - DNA, 30 bp, Artificial Sequence
  Synthetic oligonucleotide
atattgatagttgtaagaagtaaaagatat

SEQ ID NO: 479724 - DNA, 30 bp, Artificial Sequence
  Synthetic oligonucleotide
tccaatcggatggtggtcctaaccagatat

SEQ ID NO: 479725 - DNA, 30 bp, Artificial Sequence
  Synthetic oligonucleotide
ggaatgtgtagctgacacaagcatagatat

SEQ ID NO: 479726 - DNA, 30 bp, Artificial Sequence
  Synthetic oligonucleotide
atggttgaagcacttcatcatgatagatat

SEQ ID NO: 479727 - DNA, 29 bp, Artificial Sequence
  Synthetic oligonucleotide
acactctaaaaaccttgatgtctagatat

SEQ ID NO: 479728 - DNA, 30 bp, Artificial Sequence
  Synthetic oligonucleotide
aaagtataggattatacttgagttagatat

SEQ ID NO: 479729 - DNA, 30 bp, Artificial Sequence
  Synthetic oligonucleotide
aataaccgaacccgaggctgtgcacgatat

SEQ ID NO: 479730 - DNA, 30 bp, Artificial Sequence
  Synthetic oligonucleotide
cgggccataagccgcagcatttgacgatat

SEQ ID NO: 479731 - DNA, 30 bp, Artificial Sequence
  Synthetic oligonucleotide
aaatcccgaatacgggtgcagctccgatat

SEQ ID NO: 479732 - DNA, 30 bp, Artificial Sequence
  Synthetic oligonucleotide
ccgccgcgtttgaagacttcggggcgatat

SEQ ID NO: 479733 - DNA, 30 bp, Artificial Sequence
  Synthetic oligonucleotide
ctttgtgccgccaccgctgatgtgcgatat

SEQ ID NO: 479734 - DNA, 30 bp, Artificial Sequence
  Synthetic oligonucleotide
gcaaaaatttgataatcagtaagtcgatat

SEQ ID NO: 479735 - DNA, 30 bp, Artificial Sequence
  Synthetic oligonucleotide
tttggttaaggactcatcgtacttcgatat

SEQ ID NO: 479736 - DNA, 30 bp, Artificial Sequence
  Synthetic oligonucleotide
gatagaggtcgagatatctcttttcgatat

SEQ ID NO: 479737 - DNA, 30 bp, Artificial Sequence
  Synthetic oligonucleotide
aatctaaccggcggaggttacacaggatat

SEQ ID NO: 479738 - DNA, 30 bp, Artificial Sequence
  Synthetic oligonucleotide
ccgcgattagtcgcccgcgtgtcaggatat

SEQ ID NO: 479739 - DNA, 30 bp, Artificial Sequence
  Synthetic oligonucleotide
ataattagttatctaatcagaataggatat

SEQ ID NO: 479740 - DNA, 30 bp, Artificial Sequence
  Synthetic oligonucleotide
tgtagtcgaggcagaattatagtaggatat

SEQ ID NO: 479741 - DNA, 30 bp, Artificial Sequence
  Synthetic oligonucleotide
gttttgaccaactgccccggtcacggatat

SEQ ID NO: 479742 - DNA, 30 bp, Artificial Sequence
  Synthetic oligonucleotide
acagagcttttcaccttcgtgctcggatat

SEQ ID NO: 479743 - DNA, 30 bp, Artificial Sequence
  Synthetic oligonucleotide
gtgtcttttgtagtttaatcctggggatat

SEQ ID NO: 479744 - DNA, 30 bp, Artificial Sequence
  Synthetic oligonucleotide
agagttttggtatcagacagcactggatat

SEQ ID NO: 479745 - DNA, 30 bp, Artificial Sequence
  Synthetic oligonucleotide
ccacccagactcgacccaacactatgatat

SEQ ID NO: 479746 - DNA, 30 bp, Artificial Sequence
  Synthetic oligonucleotide
taggggttgctggccgcagatctatgatat

SEQ ID NO: 479747 - DNA, 30 bp, Artificial Sequence
  Synthetic oligonucleotide
tactactctttatgaaattagaactgatat

SEQ ID NO: 479748 - DNA, 30 bp, Artificial Sequence
  Synthetic oligonucleotide
atataccgcgtcgatacaatatactgatat

SEQ ID NO: 479749 - DNA, 30 bp, Artificial Sequence
  Synthetic oligonucleotide
ttcgtttaaaccgtgatacgatgctgatat

SEQ ID NO: 479750 - DNA, 30 bp, Artificial Sequence
  Synthetic oligonucleotide
aataacttggctcggaggcacgtctgatat

SEQ ID NO: 479751 - DNA, 30 bp, Artificial Sequence
  Synthetic oligonucleotide
gttgggagaaagctaactccgttctgatat

SEQ ID NO: 479752 - DNA, 30 bp, Artificial Sequence
  Synthetic oligonucleotide
tttttatgaacttaagcagccgggtgatat

SEQ ID NO: 479753 - DNA, 30 bp, Artificial Sequence
  Synthetic oligonucleotide
tgagaagctaatctcgatgaggggtgatat

SEQ ID NO: 479754 - DNA, 30 bp, Artificial Sequence
  Synthetic oligonucleotide
gcgtttgtcctcacgggctctacaatatat

SEQ ID NO: 479755 - DNA, 30 bp, Artificial Sequence
  Synthetic oligonucleotide
ttgccgtcgattcgacggacggcaatatat

SEQ ID NO: 479756 - DNA, 30 bp, Artificial Sequence
  Synthetic oligonucleotide
gaaggttccgcggatatagtctgaatatat

SEQ ID NO: 479757 - DNA, 30 bp, Artificial Sequence
  Synthetic oligonucleotide
gtggggcagttttggttacaacacatatat

SEQ ID NO: 479758 - DNA, 30 bp, Artificial Sequence
  Synthetic oligonucleotide
aaattgttacagcttgagggtggcatatat

SEQ ID NO: 479759 - DNA, 30 bp, Artificial Sequence
  Synthetic oligonucleotide
tccccgtaagggaaatcttcggtcatatat

SEQ ID NO: 479760 - DNA, 30 bp, Artificial Sequence
  Synthetic oligonucleotide
ttaatacggtatgctatccatgagatatat

SEQ ID NO: 479761 - DNA, 30 bp, Artificial Sequence
  Synthetic oligonucleotide
tcacatatgagcgctcccgtaattatatat

SEQ ID NO: 479762 - DNA, 30 bp, Artificial Sequence
  Synthetic oligonucleotide
gacaggagatatttaagttctattatatat

SEQ ID NO: 479763 - DNA, 30 bp, Artificial Sequence
  Synthetic oligonucleotide
tccacgcggcccttcctcgtggaactatat

SEQ ID NO: 479764 - DNA, 30 bp, Artificial Sequence
  Synthetic oligonucleotide
ttgtgtccatgtggttaaagtggcctatat

SEQ ID NO: 479765 - DNA, 30 bp, Artificial Sequence
  Synthetic oligonucleotide
cttgtacacatacgttggaagctcctatat

SEQ ID NO: 479766 - DNA, 30 bp, Artificial Sequence
  Synthetic oligonucleotide
gcacgccgttaggaggccgtgctcctatat

SEQ ID NO: 479767 - DNA, 30 bp, Artificial Sequence
  Synthetic oligonucleotide
taatacaaatgtgtgcctgatctcctatat

SEQ ID NO: 479768 - DNA, 30 bp, Artificial Sequence
  Synthetic oligonucleotide
ttatgtactgactctgggaattcgctatat

SEQ ID NO: 479769 - DNA, 30 bp, Artificial Sequence
  Synthetic oligonucleotide
gtcaaggagttactcatatttttgctatat

SEQ ID NO: 479770 - DNA, 30 bp, Artificial Sequence
  Synthetic oligonucleotide
attgcgtcaccgtcctttagtgatctatat

SEQ ID NO: 479771 - DNA, 30 bp, Artificial Sequence
  Synthetic oligonucleotide
tccgagccaggctgtagttaatctctatat

SEQ ID NO: 479772 - DNA, 30 bp, Artificial Sequence
  Synthetic oligonucleotide
atgtacattgtagtctgtcaagttctatat

SEQ ID NO: 479773 - DNA, 30 bp, Artificial Sequence
  Synthetic oligonucleotide
ctagatagttgaaaattaaaacaagtatat

SEQ ID NO: 479774 - DNA, 30 bp, Artificial Sequence
  Synthetic oligonucleotide
tagcggtagtgatgcgtgaacaacgtatat

SEQ ID NO: 479775 - DNA, 30 bp, Artificial Sequence
  Synthetic oligonucleotide
gacgctgtttccaccgaaaaccacgtatat

SEQ ID NO: 479776 - DNA, 30 bp, Artificial Sequence
  Synthetic oligonucleotide
gtcaagttcacatagcatcccaccgtatat

SEQ ID NO: 479777 - DNA, 30 bp, Artificial Sequence
  Synthetic oligonucleotide
tcccttctagatgcgttttttaccgtatat

SEQ ID NO: 479778 - DNA, 30 bp, Artificial Sequence
  Synthetic oligonucleotide
gcgctatcgctggtcaggtaggccgtatat

SEQ ID NO: 479779 - DNA, 30 bp, Artificial Sequence
  Synthetic oligonucleotide
ttctacctgcgcaactggtattccgtatat

SEQ ID NO: 479780 - DNA, 30 bp, Artificial Sequence
  Synthetic oligonucleotide
gcacgacagtgccagaggctctaggtatat

SEQ ID NO: 479781 - DNA, 30 bp, Artificial Sequence
  Synthetic oligonucleotide
catattacactttaactaatgtttgtatat

SEQ ID NO: 479782 - DNA, 30 bp, Artificial Sequence
  Synthetic oligonucleotide
tttagtaggtaacgggcatcatacttatat

SEQ ID NO: 479783 - DNA, 30 bp, Artificial Sequence
  Synthetic oligonucleotide
tcaattgttactccacggtacgccttatat

SEQ ID NO: 479784 - DNA, 30 bp, Artificial Sequence
  Synthetic oligonucleotide
agcaataattggcgaggcgggctcttatat

SEQ ID NO: 479785 - DNA, 30 bp, Artificial Sequence
  Synthetic oligonucleotide
cccggaatagatataggcgagccgttatat

SEQ ID NO: 479786 - DNA, 30 bp, Artificial Sequence
  Synthetic oligonucleotide
acccgttccttcgcgaatttgcggttatat

SEQ ID NO: 479787 - DNA, 30 bp, Artificial Sequence
  Synthetic oligonucleotide
ggcgatgaatttatagaatggtctttatat

SEQ ID NO: 479788 - DNA, 30 bp, Artificial Sequence
  Synthetic oligonucleotide
agcatttctaaatgtcctaataaaaactat

SEQ ID NO: 479789 - DNA, 30 bp, Artificial Sequence
  Synthetic oligonucleotide
ccacctacacttgtggttgatcgaaactat

SEQ ID NO: 479790 - DNA, 30 bp, Artificial Sequence
  Synthetic oligonucleotide
gagtcacgcttacggttcataaacaactat

SEQ ID NO: 479791 - DNA, 30 bp, Artificial Sequence
  Synthetic oligonucleotide
atagccagttttacgatttagtataactat

SEQ ID NO: 479792 - DNA, 30 bp, Artificial Sequence
  Synthetic oligonucleotide
gtccagtcaccaactttacgtcgtaactat

SEQ ID NO: 479793 - DNA, 29 bp, Artificial Sequence
  Synthetic oligonucleotide
ttgacccagctacacaaaagtgtaactat

SEQ ID NO: 479794 - DNA, 30 bp, Artificial Sequence
  Synthetic oligonucleotide
ggtgatgttaaccctagttaaattaactat

SEQ ID NO: 479795 - DNA, 30 bp, Artificial Sequence
  Synthetic oligonucleotide
taaacatataactcccttttgtgacactat

SEQ ID NO: 479796 - DNA, 30 bp, Artificial Sequence
  Synthetic oligonucleotide
ggcgcaagtttaggcgacgccgcgcactat

SEQ ID NO: 479797 - DNA, 30 bp, Artificial Sequence
  Synthetic oligonucleotide
ctatggtacttagtgttacgtaggcactat

SEQ ID NO: 479798 - DNA, 30 bp, Artificial Sequence
  Synthetic oligonucleotide
ggccaaagaggttccattagggggcactat

SEQ ID NO: 479799 - DNA, 30 bp, Artificial Sequence
  Synthetic oligonucleotide
gaggaaggcgattgagcaaagtggcactat

SEQ ID NO: 479800 - DNA, 30 bp, Artificial Sequence
  Synthetic oligonucleotide
acgaaccgtatcgcacgcacttttcactat

SEQ ID NO: 479801 - DNA, 30 bp, Artificial Sequence
  Synthetic oligonucleotide
cacatgtcttttggataatacgaagactat

SEQ ID NO: 479802 - DNA, 30 bp, Artificial Sequence
  Synthetic oligonucleotide
gaataatgagtctactagaggtcagactat

SEQ ID NO: 479803 - DNA, 31 bp, Artificial Sequence
  Synthetic oligonucleotide
attcttcagggccatatcttgcttcgactat

SEQ ID NO: 479804 - DNA, 30 bp, Artificial Sequence
  Synthetic oligonucleotide
aaccgaggtcagtctatcttcggggactat

SEQ ID NO: 479805 - DNA, 30 bp, Artificial Sequence
  Synthetic oligonucleotide
atccataacccaaggaaatgtccgtactat

SEQ ID NO: 479806 - DNA, 30 bp, Artificial Sequence
  Synthetic oligonucleotide
tatagagatttcatgcaattaagttactat

SEQ ID NO: 479807 - DNA, 30 bp, Artificial Sequence
  Synthetic oligonucleotide
ttagaggcagcagttgcatagagttactat

SEQ ID NO: 479808 - DNA, 30 bp, Artificial Sequence
  Synthetic oligonucleotide
acccgaaacgtcccccaataggtttactat

SEQ ID NO: 479809 - DNA, 30 bp, Artificial Sequence
  Synthetic oligonucleotide
cacgcagccgttagttatgataacacctat

SEQ ID NO: 479810 - DNA, 30 bp, Artificial Sequence
  Synthetic oligonucleotide
tctatgaaggaattatatttccacacctat

SEQ ID NO: 479811 - DNA, 30 bp, Artificial Sequence
  Synthetic oligonucleotide
ttaggataaaagacttacgatagcacctat

SEQ ID NO: 479812 - DNA, 30 bp, Artificial Sequence
  Synthetic oligonucleotide
aattagaaggagttgccttaaatcacctat

SEQ ID NO: 479813 - DNA, 30 bp, Artificial Sequence
  Synthetic oligonucleotide
atttgaatatccgtcatcaccccgacctat

SEQ ID NO: 479814 - DNA, 30 bp, Artificial Sequence
  Synthetic oligonucleotide
gtctcaccgagggtagtgctctcgacctat

SEQ ID NO: 479815 - DNA, 30 bp, Artificial Sequence
  Synthetic oligonucleotide
acctcagtacacttcaaagattggacctat

SEQ ID NO: 479816 - DNA, 30 bp, Artificial Sequence
  Synthetic oligonucleotide
gtattgacgcacaccctcagagccccctat

SEQ ID NO: 479817 - DNA, 30 bp, Artificial Sequence
  Synthetic oligonucleotide
gaggaccgagctacctgtgcggatccctat

SEQ ID NO: 479818 - DNA, 30 bp, Artificial Sequence
  Synthetic oligonucleotide
ttagcgtcacttcatcttatcaacgcctat

SEQ ID NO: 479819 - DNA, 30 bp, Artificial Sequence
  Synthetic oligonucleotide
tcctctggctgaggatctccccacgcctat

SEQ ID NO: 479820 - DNA, 30 bp, Artificial Sequence
  Synthetic oligonucleotide
tgcagagacgaaatagtccggagcgcctat

SEQ ID NO: 479821 - DNA, 30 bp, Artificial Sequence
  Synthetic oligonucleotide
gactattaaattcgcgcgatttgcgcctat

SEQ ID NO: 479822 - DNA, 30 bp, Artificial Sequence
  Synthetic oligonucleotide
acgttcatgaagggtactatgaaggcctat

SEQ ID NO: 479823 - DNA, 30 bp, Artificial Sequence
  Synthetic oligonucleotide
atatgatcggatgccatttgcacggcctat

SEQ ID NO: 479824 - DNA, 30 bp, Artificial Sequence
  Synthetic oligonucleotide
ttgcctggtaataattttacctgggcctat

SEQ ID NO: 479825 - DNA, 30 bp, Artificial Sequence
  Synthetic oligonucleotide
tatcctttataacggtaggcaaatgcctat

SEQ ID NO: 479826 - DNA, 30 bp, Artificial Sequence
  Synthetic oligonucleotide
cttatagggctgagtacggataatgcctat

SEQ ID NO: 479827 - DNA, 30 bp, Artificial Sequence
  Synthetic oligonucleotide
tatttaagcgcttaattgtgcagtgcctat

SEQ ID NO: 479828 - DNA, 30 bp, Artificial Sequence
  Synthetic oligonucleotide
tatccgcgtatacactgtatcagatcctat

SEQ ID NO: 479829 - DNA, 30 bp, Artificial Sequence
  Synthetic oligonucleotide
atcatctcatactcgcggggcttatcctat

SEQ ID NO: 479830 - DNA, 30 bp, Artificial Sequence
  Synthetic oligonucleotide
tattgaccggagtttacatcgatgtcctat

SEQ ID NO: 479831 - DNA, 30 bp, Artificial Sequence
  Synthetic oligonucleotide
gagttatgtttcaggggggggctgtcctat

SEQ ID NO: 479832 - DNA, 30 bp, Artificial Sequence
  Synthetic oligonucleotide
taatacgaggtaaggacctttgtgtcctat

SEQ ID NO: 479833 - DNA, 30 bp, Artificial Sequence
  Synthetic oligonucleotide
ttgttgtgttctctttttgtgtcttcctat

SEQ ID NO: 479834 - DNA, 30 bp, Artificial Sequence
  Synthetic oligonucleotide
ccctgttttggtcgaacctgtatttcctat

SEQ ID NO: 479835 - DNA, 30 bp, Artificial Sequence
  Synthetic oligonucleotide
ttgttgtgttctctttttgagttttcctat

SEQ ID NO: 479836 - DNA, 30 bp, Artificial Sequence
  Synthetic oligonucleotide
ttgttgtgttctcttcttgtgttttcctat

SEQ ID NO: 479837 - DNA, 30 bp, Artificial Sequence
  Synthetic oligonucleotide
ttgttgtgttccctttttgtgttttcctat

SEQ ID NO: 479838 - DNA, 30 bp, Artificial Sequence
  Synthetic oligonucleotide
ttgttctgttctctttttgtgttttcctat

SEQ ID NO: 479839 - DNA, 30 bp, Artificial Sequence
  Synthetic oligonucleotide
ttgtcgtgttctctttttgtgttttcctat

SEQ ID NO: 479840 - DNA, 30 bp, Artificial Sequence
  Synthetic oligonucleotide
aaaaatctaataatagcttttcccagctat

SEQ ID NO: 479841 - DNA, 30 bp, Artificial Sequence
  Synthetic oligonucleotide
tttgcttgctcggaacggaggatgagctat

SEQ ID NO: 479842 - DNA, 30 bp, Artificial Sequence
  Synthetic oligonucleotide
ttaatgctgttccttcaggcatatagctat

SEQ ID NO: 479843 - DNA, 30 bp, Artificial Sequence
  Synthetic oligonucleotide
cgctgtatcatttgttctaattgacgctat

SEQ ID NO: 479844 - DNA, 30 bp, Artificial Sequence
  Synthetic oligonucleotide
agttcttcgccgggagtagcaatacgctat

SEQ ID NO: 479845 - DNA, 30 bp, Artificial Sequence
  Synthetic oligonucleotide
aaaagcgggctcatgaattgggaccgctat

SEQ ID NO: 479846 - DNA, 30 bp, Artificial Sequence
  Synthetic oligonucleotide
cctgctgcaggttagcatcgtatccgctat

SEQ ID NO: 479847 - DNA, 30 bp, Artificial Sequence
  Synthetic oligonucleotide
agccgcgggtgtgacattaggacgcgctat

SEQ ID NO: 479848 - DNA, 30 bp, Artificial Sequence
  Synthetic oligonucleotide
ggccaggcgtgcaatctctttgatcgctat

SEQ ID NO: 479849 - DNA, 30 bp, Artificial Sequence
  Synthetic oligonucleotide
aagttcgtaaccccatttgttcgaggctat

SEQ ID NO: 479850 - DNA, 30 bp, Artificial Sequence
  Synthetic oligonucleotide
cgccgagaactttatcagagcgtaggctat

SEQ ID NO: 479851 - DNA, 30 bp, Artificial Sequence
  Synthetic oligonucleotide
aacgtcaacatcgctgcgggatgcggctat

SEQ ID NO: 479852 - DNA, 30 bp, Artificial Sequence
  Synthetic oligonucleotide
ctaatctggatcagcaattcgtgcggctat

SEQ ID NO: 479853 - DNA, 30 bp, Artificial Sequence
  Synthetic oligonucleotide
aagctaagggcggtaaccgtccctggctat

SEQ ID NO: 479854 - DNA, 30 bp, Artificial Sequence
  Synthetic oligonucleotide
ttgaatcaaggtaaggacaggagtggctat

SEQ ID NO: 479855 - DNA, 30 bp, Artificial Sequence
  Synthetic oligonucleotide
ggacttacatctcctgcggcaggtggctat

SEQ ID NO: 479856 - DNA, 30 bp, Artificial Sequence
  Synthetic oligonucleotide
gactcgcgacgccctaaggcgcttggctat

SEQ ID NO: 479857 - DNA, 30 bp, Artificial Sequence
  Synthetic oligonucleotide
cctagatagggcttagaacttcttggctat

SEQ ID NO: 479858 - DNA, 30 bp, Artificial Sequence
  Synthetic oligonucleotide
acaaagtccggcgagcgctctaaatgctat

SEQ ID NO: 479859 - DNA, 30 bp, Artificial Sequence
  Synthetic oligonucleotide
tgagtgaaatcggatacccaggggtgctat

SEQ ID NO: 479860 - DNA, 30 bp, Artificial Sequence
  Synthetic oligonucleotide
gaggggctcggtcaagccgagaaaatctat

SEQ ID NO: 479861 - DNA, 30 bp, Artificial Sequence
  Synthetic oligonucleotide
cggttttgcgtagacgaactattaatctat

SEQ ID NO: 479862 - DNA, 30 bp, Artificial Sequence
  Synthetic oligonucleotide
gtcgccgagcgtgggcccatcaaactctat

SEQ ID NO: 479863 - DNA, 30 bp, Artificial Sequence
  Synthetic oligonucleotide
acaagaagagctctttgaagcaccctctat

SEQ ID NO: 479864 - DNA, 30 bp, Artificial Sequence
  Synthetic oligonucleotide
agcggatgattggaccagacggagctctat

SEQ ID NO: 479865 - DNA, 30 bp, Artificial Sequence
  Synthetic oligonucleotide
ttgaaaagcaggaattgacggccgctctat

SEQ ID NO: 479866 - DNA, 30 bp, Artificial Sequence
  Synthetic oligonucleotide
gaataggcttaagcggtacagatgctctat

SEQ ID NO: 479867 - DNA, 30 bp, Artificial Sequence
  Synthetic oligonucleotide
gaatagatggtgactacgaaccatctctat

SEQ ID NO: 479868 - DNA, 30 bp, Artificial Sequence
  Synthetic oligonucleotide
acaatagaaatccactaggagtaagtctat

SEQ ID NO: 479869 - DNA, 30 bp, Artificial Sequence
  Synthetic oligonucleotide
tgacgcggtagaatagggcctaacgtctat

SEQ ID NO: 479870 - DNA, 30 bp, Artificial Sequence
  Synthetic oligonucleotide
ttgggcagatctggtttcgcagacgtctat

SEQ ID NO: 479871 - DNA, 30 bp, Artificial Sequence
  Synthetic oligonucleotide
tgggttaaggtcgacgggaggttggtctat

SEQ ID NO: 479872 - DNA, 30 bp, Artificial Sequence
  Synthetic oligonucleotide
gagtggagcaaaccacaagttagtgtctat

SEQ ID NO: 479873 - DNA, 30 bp, Artificial Sequence
  Synthetic oligonucleotide
ctcaacgcactcaacgcggctcttgtctat

SEQ ID NO: 479874 - DNA, 30 bp, Artificial Sequence
  Synthetic oligonucleotide
ttataggagggcattcatgttgaattctat

SEQ ID NO: 479875 - DNA, 30 bp, Artificial Sequence
  Synthetic oligonucleotide
caggttccgcagactgcaaaaaagttctat

SEQ ID NO: 479876 - DNA, 30 bp, Artificial Sequence
  Synthetic oligonucleotide
gcttgttcggttcattataagcggttctat

SEQ ID NO: 479877 - DNA, 30 bp, Artificial Sequence
  Synthetic oligonucleotide
aaaggtagccctccagatgtcatgttctat

SEQ ID NO: 479878 - DNA, 30 bp, Artificial Sequence
  Synthetic oligonucleotide
gagattctttctactcaaaaccttttctat

SEQ ID NO: 479879 - DNA, 30 bp, Artificial Sequence
  Synthetic oligonucleotide
ctagctgggatatcacgtagtgaaaagtat

SEQ ID NO: 479880 - DNA, 30 bp, Artificial Sequence
  Synthetic oligonucleotide
agttacctaggcccaggttatcggaagtat

SEQ ID NO: 479881 - DNA, 30 bp, Artificial Sequence
  Synthetic oligonucleotide
agtatcagcgcaccgatcacgtataagtat

SEQ ID NO: 479882 - DNA, 30 bp, Artificial Sequence
  Synthetic oligonucleotide
gaatcgagaatccgatcgaggagacagtat

SEQ ID NO: 479883 - DNA, 30 bp, Artificial Sequence
  Synthetic oligonucleotide
cataccgtcgctggcattttacgacagtat

SEQ ID NO: 479884 - DNA, 30 bp, Artificial Sequence
  Synthetic oligonucleotide
cagtacttagaggagcaagttgtacagtat

SEQ ID NO: 479885 - DNA, 30 bp, Artificial Sequence
  Synthetic oligonucleotide
acaggacacgggtataagagctaccagtat

SEQ ID NO: 479886 - DNA, 30 bp, Artificial Sequence
  Synthetic oligonucleotide
aaggaggtctttagccgtcattaccagtat

SEQ ID NO: 479887 - DNA, 30 bp, Artificial Sequence
  Synthetic oligonucleotide
actgggacccgattgaagagcacgcagtat

SEQ ID NO: 479888 - DNA, 30 bp, Artificial Sequence
  Synthetic oligonucleotide
tacctttgctttacggggctcatgcagtat

SEQ ID NO: 479889 - DNA, 31 bp, Artificial Sequence
  Synthetic oligonucleotide
gcttagatacacgtacagtggtttgcagtat

SEQ ID NO: 479890 - DNA, 30 bp, Artificial Sequence
  Synthetic oligonucleotide
cacccttctcacacggtattttctcagtat

SEQ ID NO: 479891 - DNA, 30 bp, Artificial Sequence
  Synthetic oligonucleotide
atgcctaaccctggtgaaacaagtcagtat

SEQ ID NO: 479892 - DNA, 30 bp, Artificial Sequence
  Synthetic oligonucleotide
tggggccggacgccgggaacgcttcagtat

SEQ ID NO: 479893 - DNA, 30 bp, Artificial Sequence
  Synthetic oligonucleotide
agtcgacgcatatcctctccgtgagagtat

SEQ ID NO: 479894 - DNA, 30 bp, Artificial Sequence
  Synthetic oligonucleotide
gaccgcggtctatacagcataaccgagtat

SEQ ID NO: 479895 - DNA, 30 bp, Artificial Sequence
  Synthetic oligonucleotide
ctgcagtggtacaggttgaaggccgagtat

SEQ ID NO: 479896 - DNA, 30 bp, Artificial Sequence
  Synthetic oligonucleotide
ctcacgtaagtcctcaacgggctcgagtat

SEQ ID NO: 479897 - DNA, 30 bp, Artificial Sequence
  Synthetic oligonucleotide
gcaaacgagtctgctcacagactggagtat

SEQ ID NO: 479898 - DNA, 30 bp, Artificial Sequence
  Synthetic oligonucleotide
ctttagtcctcagggatcgcgaaatagtat

SEQ ID NO: 479899 - DNA, 30 bp, Artificial Sequence
  Synthetic oligonucleotide
gggctgctccggtcgctgccatcatagtat

SEQ ID NO: 479900 - DNA, 30 bp, Artificial Sequence
  Synthetic oligonucleotide
acgaggacaatactttacaagagatagtat

SEQ ID NO: 479901 - DNA, 30 bp, Artificial Sequence
  Synthetic oligonucleotide
agatctacccttcttttataggtatagtat

SEQ ID NO: 479902 - DNA, 30 bp, Artificial Sequence
  Synthetic oligonucleotide
taaggaaaaagtaggcggccggtatagtat

SEQ ID NO: 479903 - DNA, 31 bp, Artificial Sequence
  Synthetic oligonucleotide
attcgatattcaaccgattggcaactagtat

SEQ ID NO: 479904 - DNA, 30 bp, Artificial Sequence
  Synthetic oligonucleotide
ctcgacaatgtggtaagagcgacgtagtat

SEQ ID NO: 479905 - DNA, 30 bp, Artificial Sequence
  Synthetic oligonucleotide
gttctcgtgtgagaatccggcccgtagtat

SEQ ID NO: 479906 - DNA, 30 bp, Artificial Sequence
  Synthetic oligonucleotide
aatattgcgcgcaagaaagcagggtagtat

SEQ ID NO: 479907 - DNA, 30 bp, Artificial Sequence
  Synthetic oligonucleotide
ttcacattttataataccttagggtagtat

SEQ ID NO: 479908 - DNA, 30 bp, Artificial Sequence
  Synthetic oligonucleotide
acgtttacatgccactagacgcattagtat

SEQ ID NO: 479909 - DNA, 30 bp, Artificial Sequence
  Synthetic oligonucleotide
aattagaaagtaaaggatcttcgttagtat

SEQ ID NO: 479910 - DNA, 30 bp, Artificial Sequence
  Synthetic oligonucleotide
tatgcttggaaccattgagtctgttagtat

SEQ ID NO: 479911 - DNA, 30 bp, Artificial Sequence
  Synthetic oligonucleotide
cttgaccttgaccaacgaataataacgtat

SEQ ID NO: 479912 - DNA, 30 bp, Artificial Sequence
  Synthetic oligonucleotide
tgagtcaaggtgcgggaacttataacgtat

SEQ ID NO: 479913 - DNA, 30 bp, Artificial Sequence
  Synthetic oligonucleotide
cgcagcacgtaacgtccctagctaacgtat

SEQ ID NO: 479914 - DNA, 30 bp, Artificial Sequence
  Synthetic oligonucleotide
ggtatcccgctaggttagcaattaacgtat

SEQ ID NO: 479915 - DNA, 30 bp, Artificial Sequence
  Synthetic oligonucleotide
gtgttttagaaaaaatcgctattaacgtat

SEQ ID NO: 479916 - DNA, 30 bp, Artificial Sequence
  Synthetic oligonucleotide
tgaatcagcctaggaaacattgccacgtat

SEQ ID NO: 479917 - DNA, 30 bp, Artificial Sequence
  Synthetic oligonucleotide
tccttcgggacgagatgccgccagacgtat

SEQ ID NO: 479918 - DNA, 30 bp, Artificial Sequence
  Synthetic oligonucleotide
agtttatcccggcttcgtcgccatacgtat

SEQ ID NO: 479919 - DNA, 30 bp, Artificial Sequence
  Synthetic oligonucleotide
attgtatcggccttcagtcttgctacgtat

SEQ ID NO: 479920 - DNA, 30 bp, Artificial Sequence
  Synthetic oligonucleotide
gtaagcccgactataaatctatgtacgtat

SEQ ID NO: 479921 - DNA, 30 bp, Artificial Sequence
  Synthetic oligonucleotide
gttgttaacgtggtgtttacgcgaccgtat

SEQ ID NO: 479922 - DNA, 30 bp, Artificial Sequence
  Synthetic oligonucleotide
tttttggcttcttctacgtacgacccgtat

SEQ ID NO: 479923 - DNA, 30 bp, Artificial Sequence
  Synthetic oligonucleotide
ggcattcggcctgtgtagctgaatccgtat

SEQ ID NO: 479924 - DNA, 30 bp, Artificial Sequence
  Synthetic oligonucleotide
ccgcatttcgcgaaccggcagactccgtat

SEQ ID NO: 479925 - DNA, 30 bp, Artificial Sequence
  Synthetic oligonucleotide
aaccttatagggccgtctgacattccgtat

SEQ ID NO: 479926 - DNA, 30 bp, Artificial Sequence
  Synthetic oligonucleotide
tgaaataaacggatgtcgtactcagcgtat

SEQ ID NO: 479927 - DNA, 30 bp, Artificial Sequence
  Synthetic oligonucleotide
ttgttatcacggtgggggtaatacgcgtat

SEQ ID NO: 479928 - DNA, 30 bp, Artificial Sequence
  Synthetic oligonucleotide
ctagagacgtgggagctctttcccgcgtat

SEQ ID NO: 479929 - DNA, 30 bp, Artificial Sequence
  Synthetic oligonucleotide
gacgacagcgacgcaaagaccagcgcgtat

SEQ ID NO: 479930 - DNA, 30 bp, Artificial Sequence
  Synthetic oligonucleotide
ggtaacgaggcgattcaaccccgcgcgtat

SEQ ID NO: 479931 - DNA, 30 bp, Artificial Sequence
  Synthetic oligonucleotide
ttcgcaatctacagtccatcgatcgcgtat

SEQ ID NO: 479932 - DNA, 30 bp, Artificial Sequence
  Synthetic oligonucleotide
tgcgatcatatttacgttcatggatcgtat

SEQ ID NO: 479933 - DNA, 30 bp, Artificial Sequence
  Synthetic oligonucleotide
taaaccgctctgctatactgcgtatcgtat

SEQ ID NO: 479934 - DNA, 30 bp, Artificial Sequence
  Synthetic oligonucleotide
tgccgtacgcatctctggagggcctcgtat

SEQ ID NO: 479935 - DNA, 30 bp, Artificial Sequence
  Synthetic oligonucleotide
caccttgggggagctgtgagtttttcgtat

SEQ ID NO: 479936 - DNA, 30 bp, Artificial Sequence
  Synthetic oligonucleotide
gccatgatccactgttcaatggaaaggtat

SEQ ID NO: 479937 - DNA, 30 bp, Artificial Sequence
  Synthetic oligonucleotide
tttcgttcctaagaggaacctgaaaggtat

SEQ ID NO: 479938 - DNA, 30 bp, Artificial Sequence
  Synthetic oligonucleotide
tcgccacgacatagcaccttcgtaaggtat

SEQ ID NO: 479939 - DNA, 30 bp, Artificial Sequence
  Synthetic oligonucleotide
ttaactcccaagcttcacgaatgcaggtat

SEQ ID NO: 479940 - DNA, 30 bp, Artificial Sequence
  Synthetic oligonucleotide
gatagtaacttttgggcgactttgaggtat

SEQ ID NO: 479941 - DNA, 30 bp, Artificial Sequence
  Synthetic oligonucleotide
aatccacatagctattgggtggctaggtat

SEQ ID NO: 479942 - DNA, 30 bp, Artificial Sequence
  Synthetic oligonucleotide
aagtctctaaccagggctctccgtaggtat

SEQ ID NO: 479943 - DNA, 30 bp, Artificial Sequence
  Synthetic oligonucleotide
acagaacccctgttggccgtgcaacggtat

SEQ ID NO: 479944 - DNA, 30 bp, Artificial Sequence
  Synthetic oligonucleotide
aataagttttgacaagactcacgacggtat

SEQ ID NO: 479945 - DNA, 29 bp, Artificial Sequence
  Synthetic oligonucleotide
ctaatatagatgcgctccgcggacggtat

SEQ ID NO: 479946 - DNA, 30 bp, Artificial Sequence
  Synthetic oligonucleotide
tgccgctggggagggatgtggacccggtat

SEQ ID NO: 479947 - DNA, 30 bp, Artificial Sequence
  Synthetic oligonucleotide
ggtataccgcacagaccggtggcccggtat

SEQ ID NO: 479948 - DNA, 30 bp, Artificial Sequence
  Synthetic oligonucleotide
agttaggctgccaatttcggaggccggtat

SEQ ID NO: 479949 - DNA, 30 bp, Artificial Sequence
  Synthetic oligonucleotide
acctgcgtagccgctatctattagcggtat

SEQ ID NO: 479950 - DNA, 30 bp, Artificial Sequence
  Synthetic oligonucleotide
gcagcctggggcactatccgacggcggtat

SEQ ID NO: 479951 - DNA, 30 bp, Artificial Sequence
  Synthetic oligonucleotide
tcttttcgaaaaggcctctttgtgcggtat

SEQ ID NO: 479952 - DNA, 30 bp, Artificial Sequence
  Synthetic oligonucleotide
acatttaattcgtttgttggggatcggtat

SEQ ID NO: 479953 - DNA, 30 bp, Artificial Sequence
  Synthetic oligonucleotide
atggggttatgcaagaaccgggctcggtat

SEQ ID NO: 479954 - DNA, 30 bp, Artificial Sequence
  Synthetic oligonucleotide
tcttacgccaaaatccacgtgatagggtat

SEQ ID NO: 479955 - DNA, 30 bp, Artificial Sequence
  Synthetic oligonucleotide
gtcccgccgggtacctccagccaggggtat

SEQ ID NO: 479956 - DNA, 30 bp, Artificial Sequence
  Synthetic oligonucleotide
gcctataccaaactatattgataggggtat

SEQ ID NO: 479957 - DNA, 30 bp, Artificial Sequence
  Synthetic oligonucleotide
gttgctgcagctaaaagttacgcggggtat

SEQ ID NO: 479958 - DNA, 30 bp, Artificial Sequence
  Synthetic oligonucleotide
gtgcttttggggtaataagcaatggggtat

SEQ ID NO: 479959 - DNA, 30 bp, Artificial Sequence
  Synthetic oligonucleotide
ttgcggcaaaagcagaacgttaatgggtat

SEQ ID NO: 479960 - DNA, 30 bp, Artificial Sequence
  Synthetic oligonucleotide
tgccgcagacaaactcttaaatatgggtat

SEQ ID NO: 479961 - DNA, 30 bp, Artificial Sequence
  Synthetic oligonucleotide
tcttatctgttgtgttttcctcttgggtat

SEQ ID NO: 479962 - DNA, 30 bp, Artificial Sequence
  Synthetic oligonucleotide
gctacactccagtggcgcaggtttgggtat

SEQ ID NO: 479963 - DNA, 30 bp, Artificial Sequence
  Synthetic oligonucleotide
atcaaacctgtattatacgaaacatggtat

SEQ ID NO: 479964 - DNA, 30 bp, Artificial Sequence
  Synthetic oligonucleotide
gccatggtccaggttcgatggcgatggtat

SEQ ID NO: 479965 - DNA, 30 bp, Artificial Sequence
  Synthetic oligonucleotide
gtaaacatggcgagcagtctgaactggtat

SEQ ID NO: 479966 - DNA, 30 bp, Artificial Sequence
  Synthetic oligonucleotide
ggccattgagatacaaggtcggggtggtat

SEQ ID NO: 479967 - DNA, 30 bp, Artificial Sequence
  Synthetic oligonucleotide
atcagattattagaaaagtttatgtggtat

SEQ ID NO: 479968 - DNA, 30 bp, Artificial Sequence
  Synthetic oligonucleotide
cttaactgctttgttttgcatctgtggtat

SEQ ID NO: 479969 - DNA, 30 bp, Artificial Sequence
  Synthetic oligonucleotide
tgacttgctagtgacatcactcattggtat

SEQ ID NO: 479970 - DNA, 30 bp, Artificial Sequence
  Synthetic oligonucleotide
cattagccgtacggaacggtaacaatgtat

SEQ ID NO: 479971 - DNA, 30 bp, Artificial Sequence
  Synthetic oligonucleotide
tatctaaatatgttttgcactcccatgtat

SEQ ID NO: 479972 - DNA, 30 bp, Artificial Sequence
  Synthetic oligonucleotide
atattgcagacagttaccctcgccatgtat

SEQ ID NO: 479973 - DNA, 30 bp, Artificial Sequence
  Synthetic oligonucleotide
taacggttagactaaatatgaagcatgtat

SEQ ID NO: 479974 - DNA, 30 bp, Artificial Sequence
  Synthetic oligonucleotide
ttacccctagacgggcgaaacctcatgtat

SEQ ID NO: 479975 - DNA, 30 bp, Artificial Sequence
  Synthetic oligonucleotide
gtaatggcattttaacaaatattcatgtat

SEQ ID NO: 479976 - DNA, 30 bp, Artificial Sequence
  Synthetic oligonucleotide
actttaaatctaagtaaaatcaagatgtat

SEQ ID NO: 479977 - DNA, 29 bp, Artificial Sequence
  Synthetic oligonucleotide
tagagataccacgtggctttgagatgtat

SEQ ID NO: 479978 - DNA, 30 bp, Artificial Sequence
  Synthetic oligonucleotide
gccgttttggctgaggtttgatctatgtat

SEQ ID NO: 479979 - DNA, 30 bp, Artificial Sequence
  Synthetic oligonucleotide
gtctggtgcgctctgtcttgaattatgtat

SEQ ID NO: 479980 - DNA, 37 bp, Artificial Sequence
  Synthetic oligonucleotide
ttgttgtgttctctttttgtgttttcctcttatgtat

SEQ ID NO: 479981 - DNA, 30 bp, Artificial Sequence
  Synthetic oligonucleotide
gttgttagattgcaagtaagagttatgtat

SEQ ID NO: 479982 - DNA, 33 bp, Artificial Sequence
  Synthetic oligonucleotide
tcttatctgttgtgttttcgtcttgttatgtat

SEQ ID NO: 479983 - DNA, 30 bp, Artificial Sequence
  Synthetic oligonucleotide
tctaactcttcggtcaccaacgaactgtat

SEQ ID NO: 479984 - DNA, 30 bp, Artificial Sequence
  Synthetic oligonucleotide
gttagcctctaatacacaattgccctgtat

SEQ ID NO: 479985 - DNA, 30 bp, Artificial Sequence
  Synthetic oligonucleotide
atgcgacccgggggcgggtaaatcctgtat

SEQ ID NO: 479986 - DNA, 30 bp, Artificial Sequence
  Synthetic oligonucleotide
tcgaaactcctctgcgagactgagctgtat

SEQ ID NO: 479987 - DNA, 30 bp, Artificial Sequence
  Synthetic oligonucleotide
gctaatcgttgtggcccgtacgctctgtat

SEQ ID NO: 479988 - DNA, 30 bp, Artificial Sequence
  Synthetic oligonucleotide
attgtccgtgttagtttcaaacgtctgtat

SEQ ID NO: 479989 - DNA, 30 bp, Artificial Sequence
  Synthetic oligonucleotide
gccgctgaacctttctccggaccagtgtat

SEQ ID NO: 479990 - DNA, 30 bp, Artificial Sequence
  Synthetic oligonucleotide
ttcttccgattccaaactggcaacgtgtat

SEQ ID NO: 479991 - DNA, 30 bp, Artificial Sequence
  Synthetic oligonucleotide
ttcagagatgttagagaaggttttgtgtat

SEQ ID NO: 479992 - DNA, 30 bp, Artificial Sequence
  Synthetic oligonucleotide
caagccgtggggtcctttgactaattgtat

SEQ ID NO: 479993 - DNA, 30 bp, Artificial Sequence
  Synthetic oligonucleotide
atctccctggagtagagggggatcttgtat

SEQ ID NO: 479994 - DNA, 30 bp, Artificial Sequence
  Synthetic oligonucleotide
aagaagcccggttgctagtgactcttgtat

SEQ ID NO: 479995 - DNA, 30 bp, Artificial Sequence
  Synthetic oligonucleotide
aaaattcatcgaaaaccaggtgtcttgtat

SEQ ID NO: 479996 - DNA, 30 bp, Artificial Sequence
  Synthetic oligonucleotide
gtattaagtgaacaccattcaatgttgtat

SEQ ID NO: 479997 - DNA, 30 bp, Artificial Sequence
  Synthetic oligonucleotide
tgcgttggtgtttgaatgcgcgtgttgtat

SEQ ID NO: 479998 - DNA, 30 bp, Artificial Sequence
  Synthetic oligonucleotide
atagagtacggagcaagcggccttttgtat

SEQ ID NO: 479999 - DNA, 30 bp, Artificial Sequence
  Synthetic oligonucleotide
taatgggtaaagggagggagcaaaaattat

SEQ ID NO: 480000 - DNA, 30 bp, Artificial Sequence
  Synthetic oligonucleotide
tggtgaacggaacatgtaggttaaaattat

SEQ ID NO: 480001 - DNA, 30 bp, Artificial Sequence
  Synthetic oligonucleotide
tgcagcacttactgatagtatcgaaattat

SEQ ID NO: 480002 - DNA, 30 bp, Artificial Sequence
  Synthetic oligonucleotide
taccggtcatctgctggcctggacaattat

SEQ ID NO: 480003 - DNA, 30 bp, Artificial Sequence
  Synthetic oligonucleotide
aaatccactagagctggcaaaatcaattat

SEQ ID NO: 480004 - DNA, 30 bp, Artificial Sequence
  Synthetic oligonucleotide
attttcgttgaaaaaatgaaagagaattat

SEQ ID NO: 480005 - DNA, 30 bp, Artificial Sequence
  Synthetic oligonucleotide
ggtgcctactcaggatccagcctgaattat

SEQ ID NO: 480006 - DNA, 30 bp, Artificial Sequence
  Synthetic oligonucleotide
attcaggactggtttttaacagtgaattat

SEQ ID NO: 480007 - DNA, 30 bp, Artificial Sequence
  Synthetic oligonucleotide
ctgatttgtaaaattggcctttttaattat

SEQ ID NO: 480008 - DNA, 30 bp, Artificial Sequence
  Synthetic oligonucleotide
cacccgcatggttttgtaggattacattat

SEQ ID NO: 480009 - DNA, 30 bp, Artificial Sequence
  Synthetic oligonucleotide
gaactagctgtgctggcctacagccattat

SEQ ID NO: 480010 - DNA, 30 bp, Artificial Sequence
  Synthetic oligonucleotide
ggatgtcagagacgcactatgacgcattat

SEQ ID NO: 480011 - DNA, 30 bp, Artificial Sequence
  Synthetic oligonucleotide
tggctttgctaaatgttaatgtggcattat

SEQ ID NO: 480012 - DNA, 30 bp, Artificial Sequence
  Synthetic oligonucleotide
cttccgacgggcaccaattgagatcattat

SEQ ID NO: 480013 - DNA, 30 bp, Artificial Sequence
  Synthetic oligonucleotide
ctcaaaccatattatgagcgttatcattat

SEQ ID NO: 480014 - DNA, 30 bp, Artificial Sequence
  Synthetic oligonucleotide
ctatccgtcgccccggggggtcgagattat

SEQ ID NO: 480015 - DNA, 30 bp, Artificial Sequence
  Synthetic oligonucleotide
ccaaaaattgcgctgtgtgccagcgattat

SEQ ID NO: 480016 - DNA, 30 bp, Artificial Sequence
  Synthetic oligonucleotide
gatcacggctccgagccgtggatcgattat

SEQ ID NO: 480017 - DNA, 30 bp, Artificial Sequence
  Synthetic oligonucleotide
caaattttcgatgtggcctccctcgattat

SEQ ID NO: 480018 - DNA, 30 bp, Artificial Sequence
  Synthetic oligonucleotide
atggttaaaacatcttcatgttgggattat

SEQ ID NO: 480019 - DNA, 30 bp, Artificial Sequence
  Synthetic oligonucleotide
caggttttagaggcgatgaaacttgattat

SEQ ID NO: 480020 - DNA, 30 bp, Artificial Sequence
  Synthetic oligonucleotide
ataaacacgatgccatagtaggttgattat

SEQ ID NO: 480021 - DNA, 30 bp, Artificial Sequence
  Synthetic oligonucleotide
accattaacctagagaaatgaaaatattat

SEQ ID NO: 480022 - DNA, 30 bp, Artificial Sequence
  Synthetic oligonucleotide
tggcgattgttttagacgtgtcaatattat

SEQ ID NO: 480023 - DNA, 30 bp, Artificial Sequence
  Synthetic oligonucleotide
gaggaatttaacacgtagctattatattat

SEQ ID NO: 480024 - DNA, 30 bp, Artificial Sequence
  Synthetic oligonucleotide
aacgacataaataacgcgtattactattat

SEQ ID NO: 480025 - DNA, 30 bp, Artificial Sequence
  Synthetic oligonucleotide
caccggttaaatggggttcgctgctattat

SEQ ID NO: 480026 - DNA, 30 bp, Artificial Sequence
  Synthetic oligonucleotide
taatgaccttatacatagtaggtctattat

SEQ ID NO: 480027 - DNA, 30 bp, Artificial Sequence
  Synthetic oligonucleotide
agaagggcatgttctaatgtattctattat

SEQ ID NO: 480028 - DNA, 30 bp, Artificial Sequence
  Synthetic oligonucleotide
acgcaggtctcctattatagcttttattat

SEQ ID NO: 480029 - DNA, 30 bp, Artificial Sequence
  Synthetic oligonucleotide
gctctatggcccatatctgttgcaacttat

SEQ ID NO: 480030 - DNA, 30 bp, Artificial Sequence
  Synthetic oligonucleotide
gttcaatcatatacgaccactggtacttat

SEQ ID NO: 480031 - DNA, 30 bp, Artificial Sequence
  Synthetic oligonucleotide
tccctcgcttggacggcccaccttacttat

SEQ ID NO: 480032 - DNA, 30 bp, Artificial Sequence
  Synthetic oligonucleotide
aagaccctttacaaatttctgaaaccttat

SEQ ID NO: 480033 - DNA, 30 bp, Artificial Sequence
  Synthetic oligonucleotide
actcccatagattaggtcaggacaccttat

SEQ ID NO: 480034 - DNA, 30 bp, Artificial Sequence
  Synthetic oligonucleotide
ccatagcataaggcccgatgcgacccttat

SEQ ID NO: 480035 - DNA, 30 bp, Artificial Sequence
  Synthetic oligonucleotide
aacatcgatagaacgcagtggaccccttat

SEQ ID NO: 480036 - DNA, 30 bp, Artificial Sequence
  Synthetic oligonucleotide
agcgtcggatttatggggagtatcccttat

SEQ ID NO: 480037 - DNA, 30 bp, Artificial Sequence
  Synthetic oligonucleotide
aagttctgggtatacttggtcaatccttat

SEQ ID NO: 480038 - DNA, 30 bp, Artificial Sequence
  Synthetic oligonucleotide
caaaaagatgcatcccagttcattccttat

SEQ ID NO: 480039 - DNA, 30 bp, Artificial Sequence
  Synthetic oligonucleotide
cacccctggaaagtccctctcagcgcttat

SEQ ID NO: 480040 - DNA, 30 bp, Artificial Sequence
  Synthetic oligonucleotide
aatacatccaatcgccgtgttttcgcttat

SEQ ID NO: 480041 - DNA, 30 bp, Artificial Sequence
  Synthetic oligonucleotide
gaactacagcacattgccataacggcttat

SEQ ID NO: 480042 - DNA, 30 bp, Artificial Sequence
  Synthetic oligonucleotide
cgtctggttggtcgcagcagggtggcttat

SEQ ID NO: 480043 - DNA, 30 bp, Artificial Sequence
  Synthetic oligonucleotide
gcgtacaatgtgacagagaaacatgcttat

SEQ ID NO: 480044 - DNA, 30 bp, Artificial Sequence
  Synthetic oligonucleotide
tgtatgtttcattcaaaggaaactgcttat

SEQ ID NO: 480045 - DNA, 30 bp, Artificial Sequence
  Synthetic oligonucleotide
ccctgtataagactacatataattgcttat

SEQ ID NO: 480046 - DNA, 30 bp, Artificial Sequence
  Synthetic oligonucleotide
tgaaagatcagatgcgacgcaccatcttat

SEQ ID NO: 480047 - DNA, 30 bp, Artificial Sequence
  Synthetic oligonucleotide
tataaaaagtccccgttgtggggatcttat

SEQ ID NO: 480048 - DNA, 30 bp, Artificial Sequence
  Synthetic oligonucleotide
gtacagcctgatcttcgaaccgtatcttat

SEQ ID NO: 480049 - DNA, 30 bp, Artificial Sequence
  Synthetic oligonucleotide
gggtaaattagtcgaggactcgagtcttat

SEQ ID NO: 480050 - DNA, 30 bp, Artificial Sequence
  Synthetic oligonucleotide
gccggcgtggccgtggacattaggtcttat

SEQ ID NO: 480051 - DNA, 30 bp, Artificial Sequence
  Synthetic oligonucleotide
ttatactcgtcgagtaagttgtattcttat

SEQ ID NO: 480052 - DNA, 30 bp, Artificial Sequence
  Synthetic oligonucleotide
gtactaattaaagacaatcttttttcttat

SEQ ID NO: 480053 - DNA, 30 bp, Artificial Sequence
  Synthetic oligonucleotide
tgacgtaactgtgaatgattcacaagttat

SEQ ID NO: 480054 - DNA, 30 bp, Artificial Sequence
  Synthetic oligonucleotide
tcagccaagctataaatttggcgaagttat

SEQ ID NO: 480055 - DNA, 30 bp, Artificial Sequence
  Synthetic oligonucleotide
ctgtgaacttcattttcgtcttgaagttat

SEQ ID NO: 480056 - DNA, 30 bp, Artificial Sequence
  Synthetic oligonucleotide
gtgatcgctcgtgacgccagggtaagttat

SEQ ID NO: 480057 - DNA, 30 bp, Artificial Sequence
  Synthetic oligonucleotide
cctaatggtaaggatcaatccaccagttat

SEQ ID NO: 480058 - DNA, 30 bp, Artificial Sequence
  Synthetic oligonucleotide
gattctgatcaccttgcgacctgcagttat

SEQ ID NO: 480059 - DNA, 30 bp, Artificial Sequence
  Synthetic oligonucleotide
atagtttcgatcgccaggttcacgagttat

SEQ ID NO: 480060 - DNA, 30 bp, Artificial Sequence
  Synthetic oligonucleotide
gggccaccaccatcgcagggggggagttat

SEQ ID NO: 480061 - DNA, 30 bp, Artificial Sequence
  Synthetic oligonucleotide
gtgtcccggtgtggtctagattgtagttat

SEQ ID NO: 480062 - DNA, 30 bp, Artificial Sequence
  Synthetic oligonucleotide
tggtttagatatagtacttggatacgttat

SEQ ID NO: 480063 - DNA, 30 bp, Artificial Sequence
  Synthetic oligonucleotide
gcgactatttcactcaagaacagccgttat

SEQ ID NO: 480064 - DNA, 30 bp, Artificial Sequence
  Synthetic oligonucleotide
cgagaacctaaccgtgtatctctccgttat

SEQ ID NO: 480065 - DNA, 30 bp, Artificial Sequence
  Synthetic oligonucleotide
ggccccgcaaacggaactgatgtccgttat

SEQ ID NO: 480066 - DNA, 30 bp, Artificial Sequence
  Synthetic oligonucleotide
ctctaaaagtgaggaaggtgatcgcgttat

SEQ ID NO: 480067 - DNA, 30 bp, Artificial Sequence
  Synthetic oligonucleotide
ggcaaaggttagagtgaagcgttgcgttat

SEQ ID NO: 480068 - DNA, 30 bp, Artificial Sequence
  Synthetic oligonucleotide
gataaagctcggaaggccagcgctcgttat

SEQ ID NO: 480069 - DNA, 30 bp, Artificial Sequence
  Synthetic oligonucleotide
tactaagatatctcttcatggggtcgttat

SEQ ID NO: 480070 - DNA, 30 bp, Artificial Sequence
  Synthetic oligonucleotide
gagcccattacatgcttctgatgtcgttat

SEQ ID NO: 480071 - DNA, 30 bp, Artificial Sequence
  Synthetic oligonucleotide
gataagtcacgattggaggacgttcgttat

SEQ ID NO: 480072 - DNA, 30 bp, Artificial Sequence
  Synthetic oligonucleotide
tacttgactctgtgagtatttgaaggttat

SEQ ID NO: 480073 - DNA, 30 bp, Artificial Sequence
  Synthetic oligonucleotide
agtgttaatatgcgcacttaggtaggttat

SEQ ID NO: 480074 - DNA, 30 bp, Artificial Sequence
  Synthetic oligonucleotide
gccgtaccttcgccatgcgccagcggttat

SEQ ID NO: 480075 - DNA, 30 bp, Artificial Sequence
  Synthetic oligonucleotide
tactatgaaggcatgcgacaagtcggttat

SEQ ID NO: 480076 - DNA, 30 bp, Artificial Sequence
  Synthetic oligonucleotide
tcgtgtcacctgtaagagcctcggggttat

SEQ ID NO: 480077 - DNA, 30 bp, Artificial Sequence
  Synthetic oligonucleotide
gtttggcttggatccaggttggggggttat

SEQ ID NO: 480078 - DNA, 30 bp, Artificial Sequence
  Synthetic oligonucleotide
tgcccgacgccgtttgaatactggggttat

SEQ ID NO: 480079 - DNA, 30 bp, Artificial Sequence
  Synthetic oligonucleotide
catctaaagcggagttaagccctgggttat

SEQ ID NO: 480080 - DNA, 30 bp, Artificial Sequence
  Synthetic oligonucleotide
ctgcctcccagaaggtaagcctatggttat

SEQ ID NO: 480081 - DNA, 30 bp, Artificial Sequence
  Synthetic oligonucleotide
atattctgacgatttagagtctctggttat

SEQ ID NO: 480082 - DNA, 30 bp, Artificial Sequence
  Synthetic oligonucleotide
tcccttaactcagagagcccccttggttat

SEQ ID NO: 480083 - DNA, 30 bp, Artificial Sequence
  Synthetic oligonucleotide
ttaatgggaatgccgctttgagaatgttat

SEQ ID NO: 480084 - DNA, 30 bp, Artificial Sequence
  Synthetic oligonucleotide
gaatcctcttttcggcgtaaataatgttat

SEQ ID NO: 480085 - DNA, 30 bp, Artificial Sequence
  Synthetic oligonucleotide
gcaataaaggcatcacacgatcgctgttat

SEQ ID NO: 480086 - DNA, 30 bp, Artificial Sequence
  Synthetic oligonucleotide
tgtcataagcctctataaaagtgctgttat

SEQ ID NO: 480087 - DNA, 30 bp, Artificial Sequence
  Synthetic oligonucleotide
ttcaatgtgcggcgacgtgagccttgttat

SEQ ID NO: 480088 - DNA, 30 bp, Artificial Sequence
  Synthetic oligonucleotide
tggaatcggtagggtaaccggagttgttat

SEQ ID NO: 480089 - DNA, 31 bp, Artificial Sequence
  Synthetic oligonucleotide
caccagaagccggcaccgggcgacaatttat

SEQ ID NO: 480090 - DNA, 30 bp, Artificial Sequence
  Synthetic oligonucleotide
gttgccttttggtgcggttttagcatttat

SEQ ID NO: 480091 - DNA, 30 bp, Artificial Sequence
  Synthetic oligonucleotide
ggtctttaagtttttacatctacgatttat

SEQ ID NO: 480092 - DNA, 30 bp, Artificial Sequence
  Synthetic oligonucleotide
acttggttacctagctggcataggatttat

SEQ ID NO: 480093 - DNA, 30 bp, Artificial Sequence
  Synthetic oligonucleotide
gcgtaaattgagtaagagacccttatttat

SEQ ID NO: 480094 - DNA, 30 bp, Artificial Sequence
  Synthetic oligonucleotide
tgttacgctacgcgaggtctcgaactttat

SEQ ID NO: 480095 - DNA, 30 bp, Artificial Sequence
  Synthetic oligonucleotide
attcggtgcgatgttttccttgacctttat

SEQ ID NO: 480096 - DNA, 30 bp, Artificial Sequence
  Synthetic oligonucleotide
tcaatagaacagcacttacttcggctttat

SEQ ID NO: 480097 - DNA, 30 bp, Artificial Sequence
  Synthetic oligonucleotide
gtcatatttgacgtgtaaaggtggctttat

SEQ ID NO: 480098 - DNA, 30 bp, Artificial Sequence
  Synthetic oligonucleotide
atacgtcgggacttcagcgtaatgctttat

SEQ ID NO: 480099 - DNA, 30 bp, Artificial Sequence
  Synthetic oligonucleotide
ttactgggttaggcgagaatatctctttat

SEQ ID NO: 480100 - DNA, 30 bp, Artificial Sequence
  Synthetic oligonucleotide
gaatttagaaagttcaatgacattctttat

SEQ ID NO: 480101 - DNA, 30 bp, Artificial Sequence
  Synthetic oligonucleotide
tggcagcaaacacgattaacagttctttat

SEQ ID NO: 480102 - DNA, 30 bp, Artificial Sequence
  Synthetic oligonucleotide
ctgtatagcccggttgcgagagttctttat

SEQ ID NO: 480103 - DNA, 30 bp, Artificial Sequence
  Synthetic oligonucleotide
ggcctcatcgcataagcatacgtagtttat

SEQ ID NO: 480104 - DNA, 30 bp, Artificial Sequence
  Synthetic oligonucleotide
tgcgaacagtaacgttaacaatacgtttat

SEQ ID NO: 480105 - DNA, 30 bp, Artificial Sequence
  Synthetic oligonucleotide
ttgcgtcccgccaaacgggcgtgcgtttat

SEQ ID NO: 480106 - DNA, 30 bp, Artificial Sequence
  Synthetic oligonucleotide
cttgtttgcgggtggggagatagggtttat

SEQ ID NO: 480107 - DNA, 30 bp, Artificial Sequence
  Synthetic oligonucleotide
ctgttaccattataaagtgtgttggtttat

SEQ ID NO: 480108 - DNA, 30 bp, Artificial Sequence
  Synthetic oligonucleotide
gttcaacactacctctgtggaactgtttat

SEQ ID NO: 480109 - DNA, 30 bp, Artificial Sequence
  Synthetic oligonucleotide
cgtctgcgactgtaggggcgttaattttat

SEQ ID NO: 480110 - DNA, 30 bp, Artificial Sequence
  Synthetic oligonucleotide
tccgctcgggaagtataagcaacattttat

SEQ ID NO: 480111 - DNA, 30 bp, Artificial Sequence
  Synthetic oligonucleotide
tgacaggctcttggttcgtctacattttat

SEQ ID NO: 480112 - DNA, 30 bp, Artificial Sequence
  Synthetic oligonucleotide
gtagaaggggaagcgacgacttcattttat

SEQ ID NO: 480113 - DNA, 30 bp, Artificial Sequence
  Synthetic oligonucleotide
gcatttcacgtcggctaagaatgattttat

SEQ ID NO: 480114 - DNA, 30 bp, Artificial Sequence
  Synthetic oligonucleotide
tgatatctcggaataccgtcgaagttttat

SEQ ID NO: 480115 - DNA, 30 bp, Artificial Sequence
  Synthetic oligonucleotide
cgaaccaatacaaccggttgtgagttttat

SEQ ID NO: 480116 - DNA, 30 bp, Artificial Sequence
  Synthetic oligonucleotide
atgtcgttgagcaagttttactagttttat

SEQ ID NO: 480117 - DNA, 30 bp, Artificial Sequence
  Synthetic oligonucleotide
cactagtttattatttagtgcgcgttttat

SEQ ID NO: 480118 - DNA, 30 bp, Artificial Sequence
  Synthetic oligonucleotide
gggctgtagccacaaagagcccggttttat

SEQ ID NO: 480119 - DNA, 30 bp, Artificial Sequence
  Synthetic oligonucleotide
tgtggtttcgtatgtgggttaatgttttat

SEQ ID NO: 480120 - DNA, 30 bp, Artificial Sequence
  Synthetic oligonucleotide
actcgtaagttcaaggacatcattttttat

SEQ ID NO: 480121 - DNA, 30 bp, Artificial Sequence
  Synthetic oligonucleotide
aagaaatcataaacgtggcgagttttttat

SEQ ID NO: 480122 - DNA, 30 bp, Artificial Sequence
  Synthetic oligonucleotide
tcgcgccagcccgcatttcccaaaaaaact

SEQ ID NO: 480123 - DNA, 30 bp, Artificial Sequence
  Synthetic oligonucleotide
ggtttctcctgttcaattacttaaaaaact

SEQ ID NO: 480124 - DNA, 30 bp, Artificial Sequence
  Synthetic oligonucleotide
gagaacgatatgtcaggaagctgaaaaact

SEQ ID NO: 480125 - DNA, 30 bp, Artificial Sequence
  Synthetic oligonucleotide
gcgctctagaagcgaaaggggtgaaaaact

SEQ ID NO: 480126 - DNA, 30 bp, Artificial Sequence
  Synthetic oligonucleotide
gtagagggcaagggggcaacgtgcaaaact

SEQ ID NO: 480127 - DNA, 30 bp, Artificial Sequence
  Synthetic oligonucleotide
gactttcagcatttgggtcggtgtaaaact

SEQ ID NO: 480128 - DNA, 30 bp, Artificial Sequence
  Synthetic oligonucleotide
ctctagacagcgtgaagttacttacaaact

SEQ ID NO: 480129 - DNA, 30 bp, Artificial Sequence
  Synthetic oligonucleotide
ggcagtttggtcgtcgtaaacacccaaact

SEQ ID NO: 480130 - DNA, 30 bp, Artificial Sequence
  Synthetic oligonucleotide
gacaggaacgaacttactatagcgcaaact

SEQ ID NO: 480131 - DNA, 30 bp, Artificial Sequence
  Synthetic oligonucleotide
aatatatgtaataggttacattctcaaact

SEQ ID NO: 480132 - DNA, 30 bp, Artificial Sequence
  Synthetic oligonucleotide
ttaagccacttgtgggcgactagtcaaact

SEQ ID NO: 480133 - DNA, 30 bp, Artificial Sequence
  Synthetic oligonucleotide
atagcaacgacacacgtcggagttcaaact

SEQ ID NO: 480134 - DNA, 30 bp, Artificial Sequence
  Synthetic oligonucleotide
tccctcgaaaccttattgactggcgaaact

SEQ ID NO: 480135 - DNA, 30 bp, Artificial Sequence
  Synthetic oligonucleotide
ctacttttctcgcatgggagttgcgaaact

SEQ ID NO: 480136 - DNA, 30 bp, Artificial Sequence
  Synthetic oligonucleotide
ctactgtttgaaccctcttatcgtgaaact

SEQ ID NO: 480137 - DNA, 30 bp, Artificial Sequence
  Synthetic oligonucleotide
gatccttaagtgcactaggtcggtgaaact

SEQ ID NO: 480138 - DNA, 30 bp, Artificial Sequence
  Synthetic oligonucleotide
ctgtcaatggcaaggcaatgatgtgaaact

SEQ ID NO: 480139 - DNA, 30 bp, Artificial Sequence
  Synthetic oligonucleotide
gccgttaagatctatagatctgtctaaact

SEQ ID NO: 480140 - DNA, 30 bp, Artificial Sequence
  Synthetic oligonucleotide
gttcatttcagacgggtcaaccagtaaact

SEQ ID NO: 480141 - DNA, 30 bp, Artificial Sequence
  Synthetic oligonucleotide
caacgtgttcttatttatgggcagtaaact

SEQ ID NO: 480142 - DNA, 30 bp, Artificial Sequence
  Synthetic oligonucleotide
tctgtaaagcaccaaagctttcggtaaact

SEQ ID NO: 480143 - DNA, 30 bp, Artificial Sequence
  Synthetic oligonucleotide
ttttcacaggccaagccggtcggttaaact

SEQ ID NO: 480144 - DNA, 30 bp, Artificial Sequence
  Synthetic oligonucleotide
gccatctttacgctgctgcgtggcacaact

SEQ ID NO: 480145 - DNA, 30 bp, Artificial Sequence
  Synthetic oligonucleotide
tattgaaccgcgtcgagtgctcagacaact

SEQ ID NO: 480146 - DNA, 30 bp, Artificial Sequence
  Synthetic oligonucleotide
aaggaacttatgagttggttggtgacaact

SEQ ID NO: 480147 - DNA, 30 bp, Artificial Sequence
  Synthetic oligonucleotide
taagtcgtccgcgcatactactatacaact

SEQ ID NO: 480148 - DNA, 30 bp, Artificial Sequence
  Synthetic oligonucleotide
cccaaggggtatcaagtcacatgtacaact

SEQ ID NO: 480149 - DNA, 30 bp, Artificial Sequence
  Synthetic oligonucleotide
cgccggctttgcttccgggtccaaccaact

SEQ ID NO: 480150 - DNA, 30 bp, Artificial Sequence
  Synthetic oligonucleotide
tctcttaaaaataacttcgcataaccaact

SEQ ID NO: 480151 - DNA, 30 bp, Artificial Sequence
  Synthetic oligonucleotide
ggtctgttcccggtatgattctaaccaact

SEQ ID NO: 480152 - DNA, 30 bp, Artificial Sequence
  Synthetic oligonucleotide
actttgttccagagttgtcagataccaact

SEQ ID NO: 480153 - DNA, 30 bp, Artificial Sequence
  Synthetic oligonucleotide
tttgtttagtaagatcctgcgttaccaact

SEQ ID NO: 480154 - DNA, 30 bp, Artificial Sequence
  Synthetic oligonucleotide
gtaggtatcggccggacacggttaccaact

SEQ ID NO: 480155 - DNA, 30 bp, Artificial Sequence
  Synthetic oligonucleotide
tgccgcatttcaggatgtctcaacccaact

SEQ ID NO: 480156 - DNA, 30 bp, Artificial Sequence
  Synthetic oligonucleotide
ttcaaatacttcctcggagaaatcccaact

SEQ ID NO: 480157 - DNA, 30 bp, Artificial Sequence
  Synthetic oligonucleotide
gggatgtgttatactgggtcgccgccaact

SEQ ID NO: 480158 - DNA, 30 bp, Artificial Sequence
  Synthetic oligonucleotide
gaccttgaagcgtatagttctagtccaact

SEQ ID NO: 480159 - DNA, 30 bp, Artificial Sequence
  Synthetic oligonucleotide
tttcaatcaaaagggcatttggcagcaact

SEQ ID NO: 480160 - DNA, 30 bp, Artificial Sequence
  Synthetic oligonucleotide
cttaggggtatgaaaaaagtaggagcaact

SEQ ID NO: 480161 - DNA, 30 bp, Artificial Sequence
  Synthetic oligonucleotide
aggcggtttgggagattttcggacgcaact

SEQ ID NO: 480162 - DNA, 30 bp, Artificial Sequence
  Synthetic oligonucleotide
aaataatcactggctttttcctacgcaact

SEQ ID NO: 480163 - DNA, 30 bp, Artificial Sequence
  Synthetic oligonucleotide
cgtgggaggttagcatcatgcaccgcaact

SEQ ID NO: 480164 - DNA, 30 bp, Artificial Sequence
  Synthetic oligonucleotide
ttggatatcaatatacatgatagcgcaact

SEQ ID NO: 480165 - DNA, 30 bp, Artificial Sequence
  Synthetic oligonucleotide
gattacgaatccatcaaatggcgcgcaact

SEQ ID NO: 480166 - DNA, 30 bp, Artificial Sequence
  Synthetic oligonucleotide
aaatgtaggcgcagcaggcagagggcaact

SEQ ID NO: 480167 - DNA, 30 bp, Artificial Sequence
  Synthetic oligonucleotide
attatctgtgactcagtgccatgtgcaact

SEQ ID NO: 480168 - DNA, 30 bp, Artificial Sequence
  Synthetic oligonucleotide
gaccctggttcataaatcgacgactcaact

SEQ ID NO: 480169 - DNA, 30 bp, Artificial Sequence
  Synthetic oligonucleotide
gggagcgttttgagttacgcacagtcaact

SEQ ID NO: 480170 - DNA, 30 bp, Artificial Sequence
  Synthetic oligonucleotide
aataaaatttactatcggatggagtcaact

SEQ ID NO: 480171 - DNA, 30 bp, Artificial Sequence
  Synthetic oligonucleotide
caagcagacgctatcagactgccgtcaact

SEQ ID NO: 480172 - DNA, 30 bp, Artificial Sequence
  Synthetic oligonucleotide
tgactttaaagagctatcgtcaggtcaact

SEQ ID NO: 480173 - DNA, 30 bp, Artificial Sequence
  Synthetic oligonucleotide
accacgtttcctacaggggtcttgtcaact

SEQ ID NO: 480174 - DNA, 30 bp, Artificial Sequence
  Synthetic oligonucleotide
gcattcaacgctaacgccgcttgttcaact

SEQ ID NO: 480175 - DNA, 30 bp, Artificial Sequence
  Synthetic oligonucleotide
gatgctcactaattttactaagaaagaact

SEQ ID NO: 480176 - DNA, 30 bp, Artificial Sequence
  Synthetic oligonucleotide
ggtttttaggagtcgggttacgacagaact

SEQ ID NO: 480177 - DNA, 30 bp, Artificial Sequence
  Synthetic oligonucleotide
tttcattttggaaagtgatagtacagaact

SEQ ID NO: 480178 - DNA, 30 bp, Artificial Sequence
  Synthetic oligonucleotide
ccgatacatttttcatgacaccgcagaact

SEQ ID NO: 480179 - DNA, 30 bp, Artificial Sequence
  Synthetic oligonucleotide
aagtaagatcggcaaacctttcatagaact

SEQ ID NO: 480180 - DNA, 30 bp, Artificial Sequence
  Synthetic oligonucleotide
agtccgcgttacgaaggcttgtcacgaact

SEQ ID NO: 480181 - DNA, 30 bp, Artificial Sequence
  Synthetic oligonucleotide
ctacgtggtcccccttctatcatacgaact

SEQ ID NO: 480182 - DNA, 30 bp, Artificial Sequence
  Synthetic oligonucleotide
ccgtcaagtcctgaatttttgcgccgaact

SEQ ID NO: 480183 - DNA, 30 bp, Artificial Sequence
  Synthetic oligonucleotide
tacgatgtgtcttctttctgaaatcgaact

SEQ ID NO: 480184 - DNA, 30 bp, Artificial Sequence
  Synthetic oligonucleotide
gacgattagggctagaatttatctcgaact

SEQ ID NO: 480185 - DNA, 30 bp, Artificial Sequence
  Synthetic oligonucleotide
atgcttcatagcacatgtgattctcgaact

SEQ ID NO: 480186 - DNA, 30 bp, Artificial Sequence
  Synthetic oligonucleotide
aaactggcaggtgggctctgtacaggaact

SEQ ID NO: 480187 - DNA, 30 bp, Artificial Sequence
  Synthetic oligonucleotide
cccgctcaagggtagttcacggtctgaact

SEQ ID NO: 480188 - DNA, 30 bp, Artificial Sequence
  Synthetic oligonucleotide
tctattattttgtagaccgcagagtgaact

SEQ ID NO: 480189 - DNA, 30 bp, Artificial Sequence
  Synthetic oligonucleotide
aacaaagctacttgggtacgcgtgtgaact

SEQ ID NO: 480190 - DNA, 30 bp, Artificial Sequence
  Synthetic oligonucleotide
ctcagctgttctctgaaaacggtttgaact

SEQ ID NO: 480191 - DNA, 30 bp, Artificial Sequence
  Synthetic oligonucleotide
aaaaataagaggtattgatcccacataact

SEQ ID NO: 480192 - DNA, 30 bp, Artificial Sequence
  Synthetic oligonucleotide
agatggactccttccttagagtccataact

SEQ ID NO: 480193 - DNA, 30 bp, Artificial Sequence
  Synthetic oligonucleotide
cgcgtacaggctagagagtgaatcataact

SEQ ID NO: 480194 - DNA, 30 bp, Artificial Sequence
  Synthetic oligonucleotide
gcggcagatttcgggctgtgcacgataact

SEQ ID NO: 480195 - DNA, 30 bp, Artificial Sequence
  Synthetic oligonucleotide
tcgccgtgagtgacgaccaggctgataact

SEQ ID NO: 480196 - DNA, 30 bp, Artificial Sequence
  Synthetic oligonucleotide
agttacgctccaaatcgctttggtataact

SEQ ID NO: 480197 - DNA, 30 bp, Artificial Sequence
  Synthetic oligonucleotide
aggtttcacttaatgtgcggtcaactaact

SEQ ID NO: 480198 - DNA, 30 bp, Artificial Sequence
  Synthetic oligonucleotide
agagtactaccttacgtctattcactaact

SEQ ID NO: 480199 - DNA, 30 bp, Artificial Sequence
  Synthetic oligonucleotide
caactttacggtaattggtggatcctaact

SEQ ID NO: 480200 - DNA, 30 bp, Artificial Sequence
  Synthetic oligonucleotide
tggacttagacgcggctgatttctctaact

SEQ ID NO: 480201 - DNA, 30 bp, Artificial Sequence
  Synthetic oligonucleotide
caaagttttccaggttaccaaattctaact

SEQ ID NO: 480202 - DNA, 30 bp, Artificial Sequence
  Synthetic oligonucleotide
ctggtagatttttaaggacggtttctaact

SEQ ID NO: 480203 - DNA, 30 bp, Artificial Sequence
  Synthetic oligonucleotide
tactcgggcaagtcgttctatcccgtaact

SEQ ID NO: 480204 - DNA, 30 bp, Artificial Sequence
  Synthetic oligonucleotide
aattgtggttcccaacagtttgaggtaact

SEQ ID NO: 480205 - DNA, 30 bp, Artificial Sequence
  Synthetic oligonucleotide
ctttcttacatctataatttataggtaact

SEQ ID NO: 480206 - DNA, 30 bp, Artificial Sequence
  Synthetic oligonucleotide
attttgacttgtagagcgagcatggtaact

SEQ ID NO: 480207 - DNA, 30 bp, Artificial Sequence
  Synthetic oligonucleotide
aaaaatgctttaatacttgggcatgtaact

SEQ ID NO: 480208 - DNA, 30 bp, Artificial Sequence
  Synthetic oligonucleotide
gggtgtcctcggcccgcctaaccattaact

SEQ ID NO: 480209 - DNA, 30 bp, Artificial Sequence
  Synthetic oligonucleotide
ctgagaggttagtaccggtgttgattaact

SEQ ID NO: 480210 - DNA, 30 bp, Artificial Sequence
  Synthetic oligonucleotide
gttgcattaccaccccgggttcacttaact

SEQ ID NO: 480211 - DNA, 30 bp, Artificial Sequence
  Synthetic oligonucleotide
actctttcctttattatgtgtggcttaact

SEQ ID NO: 480212 - DNA, 30 bp, Artificial Sequence
  Synthetic oligonucleotide
ttgtttgaccttgctaggcccttcttaact

SEQ ID NO: 480213 - DNA, 30 bp, Artificial Sequence
  Synthetic oligonucleotide
attagcttgaccacctgaccatatttaact

SEQ ID NO: 480214 - DNA, 30 bp, Artificial Sequence
  Synthetic oligonucleotide
acgtttcagcagaccgatgcttttttaact

SEQ ID NO: 480215 - DNA, 30 bp, Artificial Sequence
  Synthetic oligonucleotide
aaaaacatgactggtcgggtaggcaacact

SEQ ID NO: 480216 - DNA, 30 bp, Artificial Sequence
  Synthetic oligonucleotide
gcaagagatgcaagccatagaccgcacact

SEQ ID NO: 480217 - DNA, 30 bp, Artificial Sequence
  Synthetic oligonucleotide
gtaagcccaaaactcggtgtgttgcacact

SEQ ID NO: 480218 - DNA, 30 bp, Artificial Sequence
  Synthetic oligonucleotide
ttgaaagagacttttcagtgatttcacact

SEQ ID NO: 480219 - DNA, 30 bp, Artificial Sequence
  Synthetic oligonucleotide
ggggacggaagcgagttgagcgaagacact

SEQ ID NO: 480220 - DNA, 30 bp, Artificial Sequence
  Synthetic oligonucleotide
gcgcctgctgccctcgagacgtaagacact

SEQ ID NO: 480221 - DNA, 30 bp, Artificial Sequence
  Synthetic oligonucleotide
agcgggctgttttttcgctgattagacact

SEQ ID NO: 480222 - DNA, 30 bp, Artificial Sequence
  Synthetic oligonucleotide
cggactgtcgctttgtggagattcgacact

SEQ ID NO: 480223 - DNA, 30 bp, Artificial Sequence
  Synthetic oligonucleotide
gaatcataaaggctacatttccaggacact

SEQ ID NO: 480224 - DNA, 30 bp, Artificial Sequence
  Synthetic oligonucleotide
gataagtgcatagggtccgcggtggacact

SEQ ID NO: 480225 - DNA, 30 bp, Artificial Sequence
  Synthetic oligonucleotide
gtgtcacacttttcgtatcccaatgacact

SEQ ID NO: 480226 - DNA, 30 bp, Artificial Sequence
  Synthetic oligonucleotide
gcactttgcgtgggctaaccgcatgacact

SEQ ID NO: 480227 - DNA, 30 bp, Artificial Sequence
  Synthetic oligonucleotide
aacattaatttgtccagagtacctgacact

SEQ ID NO: 480228 - DNA, 30 bp, Artificial Sequence
  Synthetic oligonucleotide
atcgggttcttcgatctcatagttgacact

SEQ ID NO: 480229 - DNA, 30 bp, Artificial Sequence
  Synthetic oligonucleotide
gagggcgtgtccgtaaaaggaaaatacact

SEQ ID NO: 480230 - DNA, 30 bp, Artificial Sequence
  Synthetic oligonucleotide
catagcttaggaagatgtttataatacact

SEQ ID NO: 480231 - DNA, 30 bp, Artificial Sequence
  Synthetic oligonucleotide
cttctcccagagaaggggctccgatacact

SEQ ID NO: 480232 - DNA, 30 bp, Artificial Sequence
  Synthetic oligonucleotide
gccctcaagggggtagcatctcactacact

SEQ ID NO: 480233 - DNA, 30 bp, Artificial Sequence
  Synthetic oligonucleotide
gctggggagcgtatttcaacgagctacact

SEQ ID NO: 480234 - DNA, 30 bp, Artificial Sequence
  Synthetic oligonucleotide
ataagcgcctgcatataagttttctacact

SEQ ID NO: 480235 - DNA, 30 bp, Artificial Sequence
  Synthetic oligonucleotide
taagggtcttggctcggatgcaggtacact

SEQ ID NO: 480236 - DNA, 30 bp, Artificial Sequence
  Synthetic oligonucleotide
catgtaatcccttagattattgtgtacact

SEQ ID NO: 480237 - DNA, 30 bp, Artificial Sequence
  Synthetic oligonucleotide
gagtacacgatctggtacgccggttacact

SEQ ID NO: 480238 - DNA, 30 bp, Artificial Sequence
  Synthetic oligonucleotide
ttgcaacaagtccaggggcacgtaaccact

SEQ ID NO: 480239 - DNA, 30 bp, Artificial Sequence
  Synthetic oligonucleotide
aaagctggacaacgggcacaccacaccact

SEQ ID NO: 480240 - DNA, 30 bp, Artificial Sequence
  Synthetic oligonucleotide
actgtacgacgatttgcgtgtctgaccact

SEQ ID NO: 480241 - DNA, 30 bp, Artificial Sequence
  Synthetic oligonucleotide
tcattgtatacttggaatcttctgaccact

SEQ ID NO: 480242 - DNA, 30 bp, Artificial Sequence
  Synthetic oligonucleotide
atctattttcatatatcggcgcttaccact

SEQ ID NO: 480243 - DNA, 30 bp, Artificial Sequence
  Synthetic oligonucleotide
aattttagggggatgctcgtatgacccact

SEQ ID NO: 480244 - DNA, 30 bp, Artificial Sequence
  Synthetic oligonucleotide
tttccttagctgttttacacgaatcccact

SEQ ID NO: 480245 - DNA, 30 bp, Artificial Sequence
  Synthetic oligonucleotide
ataaaacccgcaacaaattattgtcccact

SEQ ID NO: 480246 - DNA, 30 bp, Artificial Sequence
  Synthetic oligonucleotide
tcctcttttaatatgtgagattcagccact

SEQ ID NO: 480247 - DNA, 30 bp, Artificial Sequence
  Synthetic oligonucleotide
actcatagagtgtcgcttgtaggcgccact

SEQ ID NO: 480248 - DNA, 30 bp, Artificial Sequence
  Synthetic oligonucleotide
aaccgccagttttctgtacttcgggccact

SEQ ID NO: 480249 - DNA, 30 bp, Artificial Sequence
  Synthetic oligonucleotide
tttccgcgtgggaaattcatttaatccact

SEQ ID NO: 480250 - DNA, 30 bp, Artificial Sequence
  Synthetic oligonucleotide
gcagtttatctgatcttgaaacgatccact

SEQ ID NO: 480251 - DNA, 30 bp, Artificial Sequence
  Synthetic oligonucleotide
ttgaacttgacacatgcctgaagctccact

SEQ ID NO: 480252 - DNA, 30 bp, Artificial Sequence
  Synthetic oligonucleotide
tgttagtgtatgtgatttatgctttccact

SEQ ID NO: 480253 - DNA, 30 bp, Artificial Sequence
  Synthetic oligonucleotide
aaatatatgtgtcaaccgggaaacagcact

SEQ ID NO: 480254 - DNA, 30 bp, Artificial Sequence
  Synthetic oligonucleotide
tttgagaatgttcatccttacagcagcact

SEQ ID NO: 480255 - DNA, 30 bp, Artificial Sequence
  Synthetic oligonucleotide
gttcacacacgcttatccgctgcgagcact

SEQ ID NO: 480256 - DNA, 30 bp, Artificial Sequence
  Synthetic oligonucleotide
ccgggacacggcatttatcggtcgagcact

SEQ ID NO: 480257 - DNA, 30 bp, Artificial Sequence
  Synthetic oligonucleotide
gtctggtcccttactgagtcgcaacgcact

SEQ ID NO: 480258 - DNA, 30 bp, Artificial Sequence
  Synthetic oligonucleotide
tggcgcaattatgcttgggatcaacgcact

SEQ ID NO: 480259 - DNA, 30 bp, Artificial Sequence
  Synthetic oligonucleotide
ggtccttggaacgggccttgcacacgcact

SEQ ID NO: 480260 - DNA, 30 bp, Artificial Sequence
  Synthetic oligonucleotide
cttgacccggtttggatttaccagcgcact

SEQ ID NO: 480261 - DNA, 30 bp, Artificial Sequence
  Synthetic oligonucleotide
gagaagcaccctgcttgggtttagcgcact

SEQ ID NO: 480262 - DNA, 30 bp, Artificial Sequence
  Synthetic oligonucleotide
tgccagtgctttgtcgcgtaccatcgcact

SEQ ID NO: 480263 - DNA, 30 bp, Artificial Sequence
  Synthetic oligonucleotide
agtatcgaagcgacatgtatttaaggcact

SEQ ID NO: 480264 - DNA, 30 bp, Artificial Sequence
  Synthetic oligonucleotide
taagtttctgaatttgccaacccaggcact

SEQ ID NO: 480265 - DNA, 30 bp, Artificial Sequence
  Synthetic oligonucleotide
cagtaagggttgggtaaatgccgcggcact

SEQ ID NO: 480266 - DNA, 30 bp, Artificial Sequence
  Synthetic oligonucleotide
gtatgtaacaaaagaggcacacagggcact

SEQ ID NO: 480267 - DNA, 30 bp, Artificial Sequence
  Synthetic oligonucleotide
gaagatttttctgacagagctagatgcact

SEQ ID NO: 480268 - DNA, 30 bp, Artificial Sequence
  Synthetic oligonucleotide
atgggccaaccttagtagtccggatgcact

SEQ ID NO: 480269 - DNA, 29 bp, Artificial Sequence
  Synthetic oligonucleotide
tactaatgggttatggtgtcctatgcact

SEQ ID NO: 480270 - DNA, 30 bp, Artificial Sequence
  Synthetic oligonucleotide
atatcaggtgattccggggcctcgtgcact

SEQ ID NO: 480271 - DNA, 30 bp, Artificial Sequence
  Synthetic oligonucleotide
ggttcaatcttctggctgttgatgtgcact

SEQ ID NO: 480272 - DNA, 30 bp, Artificial Sequence
  Synthetic oligonucleotide
atatctcaaaagtcagcattgaattgcact

SEQ ID NO: 480273 - DNA, 30 bp, Artificial Sequence
  Synthetic oligonucleotide
attgaatgtgagccccatctcacaatcact

SEQ ID NO: 480274 - DNA, 30 bp, Artificial Sequence
  Synthetic oligonucleotide
aaggcaagtgaagtaagattcacaatcact

SEQ ID NO: 480275 - DNA, 30 bp, Artificial Sequence
  Synthetic oligonucleotide
ctttttttggacatatcaagtcagatcact

SEQ ID NO: 480276 - DNA, 30 bp, Artificial Sequence
  Synthetic oligonucleotide
tataaatgatagtaggatgcgccgatcact

SEQ ID NO: 480277 - DNA, 30 bp, Artificial Sequence
  Synthetic oligonucleotide
atcttagctattgtagggctaaggatcact

SEQ ID NO: 480278 - DNA, 30 bp, Artificial Sequence
  Synthetic oligonucleotide
ttcatacttatgtgcgcgttagatatcact

SEQ ID NO: 480279 - DNA, 30 bp, Artificial Sequence
  Synthetic oligonucleotide
aggaacgcttcgaggctttttgttatcact

SEQ ID NO: 480280 - DNA, 30 bp, Artificial Sequence
  Synthetic oligonucleotide
tctaccacataaagtggagagccactcact

SEQ ID NO: 480281 - DNA, 30 bp, Artificial Sequence
  Synthetic oligonucleotide
gcatctctagccaggtacttcaacctcact

SEQ ID NO: 480282 - DNA, 30 bp, Artificial Sequence
  Synthetic oligonucleotide
gctataagtattagcatcctcatgctcact

SEQ ID NO: 480283 - DNA, 30 bp, Artificial Sequence
  Synthetic oligonucleotide
gcattaggttctttctgtacgtaagtcact

SEQ ID NO: 480284 - DNA, 30 bp, Artificial Sequence
  Synthetic oligonucleotide
aataatagctgtccccgaactccagtcact

SEQ ID NO: 480285 - DNA, 30 bp, Artificial Sequence
  Synthetic oligonucleotide
acttctatgacggatccgcacagcgtcact

SEQ ID NO: 480286 - DNA, 30 bp, Artificial Sequence
  Synthetic oligonucleotide
tctctcgggctcaggccacggccggtcact

SEQ ID NO: 480287 - DNA, 30 bp, Artificial Sequence
  Synthetic oligonucleotide
aaaagtagtaggggactagaatgggtcact

SEQ ID NO: 480288 - DNA, 30 bp, Artificial Sequence
  Synthetic oligonucleotide
cagcataatccgatacacttctgtgtcact

SEQ ID NO: 480289 - DNA, 30 bp, Artificial Sequence
  Synthetic oligonucleotide
ggtgtgggaccccacgggcccaaattcact

SEQ ID NO: 480290 - DNA, 30 bp, Artificial Sequence
  Synthetic oligonucleotide
gtagttctttgttaggctgacacgttcact

SEQ ID NO: 480291 - DNA, 30 bp, Artificial Sequence
  Synthetic oligonucleotide
agtactgcgtctaccttggagttgttcact

SEQ ID NO: 480292 - DNA, 30 bp, Artificial Sequence
  Synthetic oligonucleotide
catgcgaaaaatagctggtgcattttcact

SEQ ID NO: 480293 - DNA, 30 bp, Artificial Sequence
  Synthetic oligonucleotide
taatttcgatgcacaaaccggctaaagact

SEQ ID NO: 480294 - DNA, 30 bp, Artificial Sequence
  Synthetic oligonucleotide
aaaaggccccgagcttaggtacccaagact

SEQ ID NO: 480295 - DNA, 31 bp, Artificial Sequence
  Synthetic oligonucleotide
actatgtcgctgccagtaggatatcaagact

SEQ ID NO: 480296 - DNA, 30 bp, Artificial Sequence
  Synthetic oligonucleotide
cctacctagtattcatggataaggaagact

SEQ ID NO: 480297 - DNA, 30 bp, Artificial Sequence
  Synthetic oligonucleotide
ggcagatcaatcctcgtatacgctaagact

SEQ ID NO: 480298 - DNA, 30 bp, Artificial Sequence
  Synthetic oligonucleotide
gcacacttcctaactcactttagtaagact

SEQ ID NO: 480299 - DNA, 30 bp, Artificial Sequence
  Synthetic oligonucleotide
tacaaaggagttacttcgtacggtaagact

SEQ ID NO: 480300 - DNA, 30 bp, Artificial Sequence
  Synthetic oligonucleotide
attctaactatagggaggcccgttaagact

SEQ ID NO: 480301 - DNA, 30 bp, Artificial Sequence
  Synthetic oligonucleotide
aacaacgagtaaagtacacctagacagact

SEQ ID NO: 480302 - DNA, 30 bp, Artificial Sequence
  Synthetic oligonucleotide
gctatacttcaggcatcaaatatgcagact

SEQ ID NO: 480303 - DNA, 30 bp, Artificial Sequence
  Synthetic oligonucleotide
gtattcgcttttcattacagtagagagact

SEQ ID NO: 480304 - DNA, 30 bp, Artificial Sequence
  Synthetic oligonucleotide
ctttactactgcaccgtgaagccggagact

SEQ ID NO: 480305 - DNA, 30 bp, Artificial Sequence
  Synthetic oligonucleotide
cttgtatagttaccgggttgagcggagact

SEQ ID NO: 480306 - DNA, 30 bp, Artificial Sequence
  Synthetic oligonucleotide
actacgcatgcccagataaactctgagact

SEQ ID NO: 480307 - DNA, 30 bp, Artificial Sequence
  Synthetic oligonucleotide
ctatgacaagtcttttacggcccgtagact

SEQ ID NO: 480308 - DNA, 30 bp, Artificial Sequence
  Synthetic oligonucleotide
agagcgttatccgttggtatgtcgtagact

SEQ ID NO: 480309 - DNA, 30 bp, Artificial Sequence
  Synthetic oligonucleotide
actctcggcagactgatgcgacattagact

SEQ ID NO: 480310 - DNA, 30 bp, Artificial Sequence
  Synthetic oligonucleotide
ctccgtggtagattctacttagcttagact

SEQ ID NO: 480311 - DNA, 30 bp, Artificial Sequence
  Synthetic oligonucleotide
cgacaattattagtccggggttgttagact

SEQ ID NO: 480312 - DNA, 30 bp, Artificial Sequence
  Synthetic oligonucleotide
gagtattaatcaaaggcgtctggcacgact

SEQ ID NO: 480313 - DNA, 30 bp, Artificial Sequence
  Synthetic oligonucleotide
tcgtaactcttcacacagtgggtcacgact

SEQ ID NO: 480314 - DNA, 28 bp, Artificial Sequence
  Synthetic oligonucleotide
tataatagccgcgtcgggtgtcacgact

SEQ ID NO: 480315 - DNA, 30 bp, Artificial Sequence
  Synthetic oligonucleotide
gtggtaagggcctatggtgcgttcacgact

SEQ ID NO: 480316 - DNA, 30 bp, Artificial Sequence
  Synthetic oligonucleotide
tgcgttcttagaactggtggatcgacgact

SEQ ID NO: 480317 - DNA, 30 bp, Artificial Sequence
  Synthetic oligonucleotide
ttttatactttatgtgattaattgacgact

SEQ ID NO: 480318 - DNA, 30 bp, Artificial Sequence
  Synthetic oligonucleotide
agtggcattttgttaaaacatgatacgact

SEQ ID NO: 480319 - DNA, 30 bp, Artificial Sequence
  Synthetic oligonucleotide
acgtggtgacttgacgccgcaggtacgact

SEQ ID NO: 480320 - DNA, 30 bp, Artificial Sequence
  Synthetic oligonucleotide
cagacgttagatgctcccccgccgccgact

SEQ ID NO: 480321 - DNA, 30 bp, Artificial Sequence
  Synthetic oligonucleotide
tctcgcgtatgctgtcgtcggcaagcgact

SEQ ID NO: 480322 - DNA, 30 bp, Artificial Sequence
  Synthetic oligonucleotide
agaccttattcgtgtttacggaccgcgact

SEQ ID NO: 480323 - DNA, 30 bp, Artificial Sequence
  Synthetic oligonucleotide
gctttgctgagaaaccaattagttgcgact

SEQ ID NO: 480324 - DNA, 30 bp, Artificial Sequence
  Synthetic oligonucleotide
gaggaaatccttgaccgaagcctatcgact

SEQ ID NO: 480325 - DNA, 30 bp, Artificial Sequence
  Synthetic oligonucleotide
ttataacgccgagtttgtggtaactcgact

SEQ ID NO: 480326 - DNA, 30 bp, Artificial Sequence
  Synthetic oligonucleotide
tcggcggcgcagccagaacgatactcgact

SEQ ID NO: 480327 - DNA, 30 bp, Artificial Sequence
  Synthetic oligonucleotide
aactcccgaggcatgggcaccgcctcgact

SEQ ID NO: 480328 - DNA, 30 bp, Artificial Sequence
  Synthetic oligonucleotide
tgatttggcattatgtcaattcgctcgact

SEQ ID NO: 480329 - DNA, 30 bp, Artificial Sequence
  Synthetic oligonucleotide
tgtttagtgtaacagagtggctgctcgact

SEQ ID NO: 480330 - DNA, 30 bp, Artificial Sequence
  Synthetic oligonucleotide
cggtagtcggaccgctcagaagtctcgact

SEQ ID NO: 480331 - DNA, 30 bp, Artificial Sequence
  Synthetic oligonucleotide
aatggtagcgtttgaggtagtatttcgact

SEQ ID NO: 480332 - DNA, 30 bp, Artificial Sequence
  Synthetic oligonucleotide
aatatagggtattgggtatggtcaaggact

SEQ ID NO: 480333 - DNA, 30 bp, Artificial Sequence
  Synthetic oligonucleotide
ggagctaggtcgtgccttttggtaaggact

SEQ ID NO: 480334 - DNA, 30 bp, Artificial Sequence
  Synthetic oligonucleotide
aagcgcacaagcactctgtcaatgaggact

SEQ ID NO: 480335 - DNA, 30 bp, Artificial Sequence
  Synthetic oligonucleotide
tactctttccaccgacgtaggcataggact

SEQ ID NO: 480336 - DNA, 30 bp, Artificial Sequence
  Synthetic oligonucleotide
taacacggtgcatgtgccgcgcgtaggact

SEQ ID NO: 480337 - DNA, 30 bp, Artificial Sequence
  Synthetic oligonucleotide
attgcggttaaagtttcacttacacggact

SEQ ID NO: 480338 - DNA, 30 bp, Artificial Sequence
  Synthetic oligonucleotide
ggtcattatcacagtcttccaggacggact

SEQ ID NO: 480339 - DNA, 30 bp, Artificial Sequence
  Synthetic oligonucleotide
agccgatttggatggcaatatacccggact

SEQ ID NO: 480340 - DNA, 30 bp, Artificial Sequence
  Synthetic oligonucleotide
ttccttaccaaacgcagggacgtccggact

SEQ ID NO: 480341 - DNA, 30 bp, Artificial Sequence
  Synthetic oligonucleotide
ccggtcgaggcgacaaggtaggggcggact

SEQ ID NO: 480342 - DNA, 30 bp, Artificial Sequence
  Synthetic oligonucleotide
ctttgaaggaagtctgacctccttcggact

SEQ ID NO: 480343 - DNA, 30 bp, Artificial Sequence
  Synthetic oligonucleotide
cctccggacgagttaggaacagttcggact

SEQ ID NO: 480344 - DNA, 30 bp, Artificial Sequence
  Synthetic oligonucleotide
cttagctgggcgtttcattgtccagggact

SEQ ID NO: 480345 - DNA, 30 bp, Artificial Sequence
  Synthetic oligonucleotide
cttgacaacagcgtcgcaactggcgggact

SEQ ID NO: 480346 - DNA, 30 bp, Artificial Sequence
  Synthetic oligonucleotide
gaataatagcatgctgcatggatcgggact

SEQ ID NO: 480347 - DNA, 30 bp, Artificial Sequence
  Synthetic oligonucleotide
cttaggtctactctaccagctacggggact

SEQ ID NO: 480348 - DNA, 30 bp, Artificial Sequence
  Synthetic oligonucleotide
acaccgccctcgatagccaaaggggggact

SEQ ID NO: 480349 - DNA, 30 bp, Artificial Sequence
  Synthetic oligonucleotide
agtcgatctatgcatggggcttatgggact

SEQ ID NO: 480350 - DNA, 30 bp, Artificial Sequence
  Synthetic oligonucleotide
tggatgatattacctggcgagtgtgggact

SEQ ID NO: 480351 - DNA, 30 bp, Artificial Sequence
  Synthetic oligonucleotide
tctttatcgttccaaggcgactttgggact

SEQ ID NO: 480352 - DNA, 30 bp, Artificial Sequence
  Synthetic oligonucleotide
catagtccatcatacgttccgttatggact

SEQ ID NO: 480353 - DNA, 30 bp, Artificial Sequence
  Synthetic oligonucleotide
gacagtaggcaattcatatcttactggact

SEQ ID NO: 480354 - DNA, 30 bp, Artificial Sequence
  Synthetic oligonucleotide
cattcttgtagcacatgataaacctggact

SEQ ID NO: 480355 - DNA, 30 bp, Artificial Sequence
  Synthetic oligonucleotide
taattccagcttatgcctacgctctggact

SEQ ID NO: 480356 - DNA, 28 bp, Artificial Sequence
  Synthetic oligonucleotide
gcggtgggcttgacagcgaaagtggact

SEQ ID NO: 480357 - DNA, 30 bp, Artificial Sequence
  Synthetic oligonucleotide
tctacaggtttatgagacttatagtggact

SEQ ID NO: 480358 - DNA, 30 bp, Artificial Sequence
  Synthetic oligonucleotide
cccgaaaaaacgaactctctcgggtggact

SEQ ID NO: 480359 - DNA, 30 bp, Artificial Sequence
  Synthetic oligonucleotide
agcacgcgtatgatcgcgcgctggtggact

SEQ ID NO: 480360 - DNA, 30 bp, Artificial Sequence
  Synthetic oligonucleotide
gtattatggaagatttataccggttggact

SEQ ID NO: 480361 - DNA, 30 bp, Artificial Sequence
  Synthetic oligonucleotide
taattatttgtctagagagtgtaaatgact

SEQ ID NO: 480362 - DNA, 30 bp, Artificial Sequence
  Synthetic oligonucleotide
cccggttatccaattacgtatacaatgact

SEQ ID NO: 480363 - DNA, 30 bp, Artificial Sequence
  Synthetic oligonucleotide
ggtttcctccggtgtattgacgatatgact

SEQ ID NO: 480364 - DNA, 30 bp, Artificial Sequence
  Synthetic oligonucleotide
tctagtggctcctctagtcgttgtatgact

SEQ ID NO: 480365 - DNA, 30 bp, Artificial Sequence
  Synthetic oligonucleotide
aatagtttgtcaccccgggaacttatgact

SEQ ID NO: 480366 - DNA, 30 bp, Artificial Sequence
  Synthetic oligonucleotide
gtgactatcaacggtgaattggttatgact

SEQ ID NO: 480367 - DNA, 30 bp, Artificial Sequence
  Synthetic oligonucleotide
agttgaggtcgtacgcaacgcgtactgact

SEQ ID NO: 480368 - DNA, 30 bp, Artificial Sequence
  Synthetic oligonucleotide
ggttgtgatcaggttggggtaaacctgact

SEQ ID NO: 480369 - DNA, 30 bp, Artificial Sequence
  Synthetic oligonucleotide
aacaagtgtcataaataaagttccctgact

SEQ ID NO: 480370 - DNA, 30 bp, Artificial Sequence
  Synthetic oligonucleotide
gcgtattagggagactggttgcagctgact

SEQ ID NO: 480371 - DNA, 30 bp, Artificial Sequence
  Synthetic oligonucleotide
gttgatacgacgcaccacgaagcgctgact

SEQ ID NO: 480372 - DNA, 30 bp, Artificial Sequence
  Synthetic oligonucleotide
tctgcggggcttttcgacattggtctgact

SEQ ID NO: 480373 - DNA, 30 bp, Artificial Sequence
  Synthetic oligonucleotide
aagcattaagctgattcactggtagtgact

SEQ ID NO: 480374 - DNA, 30 bp, Artificial Sequence
  Synthetic oligonucleotide
gggttcaattctcgcgtgccgtgcgtgact

SEQ ID NO: 480375 - DNA, 30 bp, Artificial Sequence
  Synthetic oligonucleotide
gtgaccggcactgcggtgggatcggtgact

SEQ ID NO: 480376 - DNA, 30 bp, Artificial Sequence
  Synthetic oligonucleotide
ggaccgggggacaaatagccccgggtgact

SEQ ID NO: 480377 - DNA, 30 bp, Artificial Sequence
  Synthetic oligonucleotide
attcggcagtatgctgtggacgttgtgact

SEQ ID NO: 480378 - DNA, 30 bp, Artificial Sequence
  Synthetic oligonucleotide
gagtgctcactcgaatcttgcagattgact

SEQ ID NO: 480379 - DNA, 30 bp, Artificial Sequence
  Synthetic oligonucleotide
gagcgcaagtccgagggatgactattgact

SEQ ID NO: 480380 - DNA, 30 bp, Artificial Sequence
  Synthetic oligonucleotide
gaaaaacggaagagcactgatttcttgact

SEQ ID NO: 480381 - DNA, 30 bp, Artificial Sequence
  Synthetic oligonucleotide
accgacatagtgagaccccaggagttgact

SEQ ID NO: 480382 - DNA, 30 bp, Artificial Sequence
  Synthetic oligonucleotide
gggttctgcagacagaagtatttgttgact

SEQ ID NO: 480383 - DNA, 30 bp, Artificial Sequence
  Synthetic oligonucleotide
gtaccccagtcaaggctttccgtaaatact

SEQ ID NO: 480384 - DNA, 30 bp, Artificial Sequence
  Synthetic oligonucleotide
tggtcgatgagtcatggattattaaatact

SEQ ID NO: 480385 - DNA, 30 bp, Artificial Sequence
  Synthetic oligonucleotide
cacttgagtgtcagtgcacggtgcaatact

SEQ ID NO: 480386 - DNA, 30 bp, Artificial Sequence
  Synthetic oligonucleotide
ggatcgcattgttaacgtctttagaatact

SEQ ID NO: 480387 - DNA, 30 bp, Artificial Sequence
  Synthetic oligonucleotide
aacgtttcaaggatgcggccgcggaatact

SEQ ID NO: 480388 - DNA, 30 bp, Artificial Sequence
  Synthetic oligonucleotide
atataccgcaggcgaaattagcataatact

SEQ ID NO: 480389 - DNA, 30 bp, Artificial Sequence
  Synthetic oligonucleotide
gatgagatcccgcgaagatgtgctaatact

SEQ ID NO: 480390 - DNA, 30 bp, Artificial Sequence
  Synthetic oligonucleotide
gtaggtaaccagcaacaaattcgtaatact

SEQ ID NO: 480391 - DNA, 30 bp, Artificial Sequence
  Synthetic oligonucleotide
attcatgtagcaggttacatgattaatact

SEQ ID NO: 480392 - DNA, 30 bp, Artificial Sequence
  Synthetic oligonucleotide
gctatcaggaccaattgcggaccccatact

SEQ ID NO: 480393 - DNA, 30 bp, Artificial Sequence
  Synthetic oligonucleotide
tctaatcttggatggacaagtgcccatact

SEQ ID NO: 480394 - DNA, 30 bp, Artificial Sequence
  Synthetic oligonucleotide
tttaggtccttgatcggcttatcccatact

SEQ ID NO: 480395 - DNA, 30 bp, Artificial Sequence
  Synthetic oligonucleotide
cctttgtggacaatggcaggcgtgcatact

SEQ ID NO: 480396 - DNA, 30 bp, Artificial Sequence
  Synthetic oligonucleotide
ttccgattcttgatgggccactatcatact

SEQ ID NO: 480397 - DNA, 30 bp, Artificial Sequence
  Synthetic oligonucleotide
tgtagtccattacggagtaattatcatact

SEQ ID NO: 480398 - DNA, 30 bp, Artificial Sequence
  Synthetic oligonucleotide
tgtttgcttagatgcaagagtggtcatact

SEQ ID NO: 480399 - DNA, 30 bp, Artificial Sequence
  Synthetic oligonucleotide
gaaactccattttttacgctcctagatact

SEQ ID NO: 480400 - DNA, 30 bp, Artificial Sequence
  Synthetic oligonucleotide
atagggatgcaccctacatctcttgatact

SEQ ID NO: 480401 - DNA, 30 bp, Artificial Sequence
  Synthetic oligonucleotide
ggccggggaagggctgggtggtgatatact

SEQ ID NO: 480402 - DNA, 30 bp, Artificial Sequence
  Synthetic oligonucleotide
tttcttaggatcatgtgaaccatatatact

SEQ ID NO: 480403 - DNA, 30 bp, Artificial Sequence
  Synthetic oligonucleotide
ttgaagtcggattttcaatggaactatact

SEQ ID NO: 480404 - DNA, 30 bp, Artificial Sequence
  Synthetic oligonucleotide
agtgtcttgaatacataccgcacttatact

SEQ ID NO: 480405 - DNA, 30 bp, Artificial Sequence
  Synthetic oligonucleotide
gatatggttagtattcccagccgttatact

SEQ ID NO: 480406 - DNA, 30 bp, Artificial Sequence
  Synthetic oligonucleotide
ctgtgtaggaagctttaggctcacactact

SEQ ID NO: 480407 - DNA, 30 bp, Artificial Sequence
  Synthetic oligonucleotide
cttggcgcgtgtccagtatgactcactact

SEQ ID NO: 480408 - DNA, 30 bp, Artificial Sequence
  Synthetic oligonucleotide
ggccgccggtcagtgattacatcgactact

SEQ ID NO: 480409 - DNA, 30 bp, Artificial Sequence
  Synthetic oligonucleotide
ttggccagcatcattgtattgtgtactact

SEQ ID NO: 480410 - DNA, 30 bp, Artificial Sequence
  Synthetic oligonucleotide
cctaaagggtcataaagcgcttgacctact

SEQ ID NO: 480411 - DNA, 30 bp, Artificial Sequence
  Synthetic oligonucleotide
gttaacgtgcttactcaatccttccctact

SEQ ID NO: 480412 - DNA, 30 bp, Artificial Sequence
  Synthetic oligonucleotide
gctgtcgccgttttacgtcaggtgcctact

SEQ ID NO: 480413 - DNA, 30 bp, Artificial Sequence
  Synthetic oligonucleotide
aagccaaggtcggctcagaggcctcctact

SEQ ID NO: 480414 - DNA, 30 bp, Artificial Sequence
  Synthetic oligonucleotide
aatcagctagttcagggaggaagtcctact

SEQ ID NO: 480415 - DNA, 30 bp, Artificial Sequence
  Synthetic oligonucleotide
actaagtcggttcactgtccacttcctact

SEQ ID NO: 480416 - DNA, 30 bp, Artificial Sequence
  Synthetic oligonucleotide
ccgccgaatcggttagaaaacgcagctact

SEQ ID NO: 480417 - DNA, 30 bp, Artificial Sequence
  Synthetic oligonucleotide
ctagtacgtagtgcttgaaacgcggctact

SEQ ID NO: 480418 - DNA, 30 bp, Artificial Sequence
  Synthetic oligonucleotide
gcacccactcgcctgggcgattcggctact

SEQ ID NO: 480419 - DNA, 30 bp, Artificial Sequence
  Synthetic oligonucleotide
agtgctaggagcatgccatgaattgctact

SEQ ID NO: 480420 - DNA, 30 bp, Artificial Sequence
  Synthetic oligonucleotide
aaaagaaacccaatagctggccttgctact

SEQ ID NO: 480421 - DNA, 30 bp, Artificial Sequence
  Synthetic oligonucleotide
ctttgatcaagccccttagaatgatctact

SEQ ID NO: 480422 - DNA, 30 bp, Artificial Sequence
  Synthetic oligonucleotide
gcgtcaacagcaatggagaatatatctact

SEQ ID NO: 480423 - DNA, 30 bp, Artificial Sequence
  Synthetic oligonucleotide
aagtggaacccatcatgtgacggctctact

SEQ ID NO: 480424 - DNA, 30 bp, Artificial Sequence
  Synthetic oligonucleotide
aatttgggatgtaaaagaaagtgctctact

SEQ ID NO: 480425 - DNA, 30 bp, Artificial Sequence
  Synthetic oligonucleotide
ggttattattactgggttcggatctctact

SEQ ID NO: 480426 - DNA, 30 bp, Artificial Sequence
  Synthetic oligonucleotide
cacacgggggggcgctaaaccgcgtctact

SEQ ID NO: 480427 - DNA, 30 bp, Artificial Sequence
  Synthetic oligonucleotide
cgttcgttgtgcgatggggcaggttctact

SEQ ID NO: 480428 - DNA, 30 bp, Artificial Sequence
  Synthetic oligonucleotide
gacctcgacgcaaaaattgccgcaagtact

SEQ ID NO: 480429 - DNA, 30 bp, Artificial Sequence
  Synthetic oligonucleotide
caagggttcgggcctacgtgtgtaagtact

SEQ ID NO: 480430 - DNA, 30 bp, Artificial Sequence
  Synthetic oligonucleotide
aagctctggagactagccccatccagtact

SEQ ID NO: 480431 - DNA, 30 bp, Artificial Sequence
  Synthetic oligonucleotide
gagatgttacctctgagcaacgctagtact

SEQ ID NO: 480432 - DNA, 30 bp, Artificial Sequence
  Synthetic oligonucleotide
cgcaagtcggtcagttgcaacggacgtact

SEQ ID NO: 480433 - DNA, 30 bp, Artificial Sequence
  Synthetic oligonucleotide
tagatataccggcttatggcgttacgtact

SEQ ID NO: 480434 - DNA, 30 bp, Artificial Sequence
  Synthetic oligonucleotide
ggttatgttgtgagttgacgaacccgtact

SEQ ID NO: 480435 - DNA, 30 bp, Artificial Sequence
  Synthetic oligonucleotide
gccgccgaatacggagtaagtggccgtact

SEQ ID NO: 480436 - DNA, 30 bp, Artificial Sequence
  Synthetic oligonucleotide
cacattccgtcagctttaactgtccgtact

SEQ ID NO: 480437 - DNA, 30 bp, Artificial Sequence
  Synthetic oligonucleotide
gttgaaccgaggtattacaatcctcgtact

SEQ ID NO: 480438 - DNA, 30 bp, Artificial Sequence
  Synthetic oligonucleotide
ctggaagcactctgttgggtttgtcgtact

SEQ ID NO: 480439 - DNA, 30 bp, Artificial Sequence
  Synthetic oligonucleotide
aaagcgagagtgggtttaaagccaggtact

SEQ ID NO: 480440 - DNA, 30 bp, Artificial Sequence
  Synthetic oligonucleotide
ggttatcattgtatctgggcccccggtact

SEQ ID NO: 480441 - DNA, 30 bp, Artificial Sequence
  Synthetic oligonucleotide
gagttttactcatcaagagaggagggtact

SEQ ID NO: 480442 - DNA, 30 bp, Artificial Sequence
  Synthetic oligonucleotide
ggaaagtactgcaccggagtaatgggtact

SEQ ID NO: 480443 - DNA, 30 bp, Artificial Sequence
  Synthetic oligonucleotide
ttcattagggcctagtgtgaagatggtact

SEQ ID NO: 480444 - DNA, 30 bp, Artificial Sequence
  Synthetic oligonucleotide
tataacgtcgcaagcatgtaagctggtact

SEQ ID NO: 480445 - DNA, 30 bp, Artificial Sequence
  Synthetic oligonucleotide
ttgctatactccacacttcacaaatgtact

SEQ ID NO: 480446 - DNA, 30 bp, Artificial Sequence
  Synthetic oligonucleotide
accgtgtgtcgtgatccaatctaatgtact

SEQ ID NO: 480447 - DNA, 30 bp, Artificial Sequence
  Synthetic oligonucleotide
aaatcgagagttatgctgtgtttatgtact

SEQ ID NO: 480448 - DNA, 30 bp, Artificial Sequence
  Synthetic oligonucleotide
ccggcgctcttagtttagtccgtctgtact

SEQ ID NO: 480449 - DNA, 30 bp, Artificial Sequence
  Synthetic oligonucleotide
cgctatacaagttaattttgggggtgtact

SEQ ID NO: 480450 - DNA, 30 bp, Artificial Sequence
  Synthetic oligonucleotide
tcccccccccttgcgcccttatgttgtact

SEQ ID NO: 480451 - DNA, 30 bp, Artificial Sequence
  Synthetic oligonucleotide
cttgttacagtagaggctgtttgttgtact

SEQ ID NO: 480452 - DNA, 30 bp, Artificial Sequence
  Synthetic oligonucleotide
agtattgcggacgctgctatgtaaattact

SEQ ID NO: 480453 - DNA, 30 bp, Artificial Sequence
  Synthetic oligonucleotide
cccggcctcttcagttaaactccaattact

SEQ ID NO: 480454 - DNA, 30 bp, Artificial Sequence
  Synthetic oligonucleotide
agaagagcctcgtcgacgcatggaattact

SEQ ID NO: 480455 - DNA, 30 bp, Artificial Sequence
  Synthetic oligonucleotide
gcaacttctttcggttgctcgataattact

SEQ ID NO: 480456 - DNA, 30 bp, Artificial Sequence
  Synthetic oligonucleotide
atcttattccgtgtaatggtatacattact

SEQ ID NO: 480457 - DNA, 30 bp, Artificial Sequence
  Synthetic oligonucleotide
acccccatcaccgtcctatgtatcattact

SEQ ID NO: 480458 - DNA, 30 bp, Artificial Sequence
  Synthetic oligonucleotide
ctactccaacggtcataattacctattact

SEQ ID NO: 480459 - DNA, 30 bp, Artificial Sequence
  Synthetic oligonucleotide
ctctggcgcgagttataccagtttattact

SEQ ID NO: 480460 - DNA, 30 bp, Artificial Sequence
  Synthetic oligonucleotide
gcagtggatgtagaatttcaaattcttact

SEQ ID NO: 480461 - DNA, 30 bp, Artificial Sequence
  Synthetic oligonucleotide
gaagctgtggccagtggccgaacagttact

SEQ ID NO: 480462 - DNA, 30 bp, Artificial Sequence
  Synthetic oligonucleotide
gtagcctccggcatgggcttttacgttact

SEQ ID NO: 480463 - DNA, 30 bp, Artificial Sequence
  Synthetic oligonucleotide
gaaacaacgtttgtcattttctcggttact

SEQ ID NO: 480464 - DNA, 30 bp, Artificial Sequence
  Synthetic oligonucleotide
attgagagcgctatcccgctaagggttact

SEQ ID NO: 480465 - DNA, 30 bp, Artificial Sequence
  Synthetic oligonucleotide
agggattgcaggatttgtacgaatgttact

SEQ ID NO: 480466 - DNA, 30 bp, Artificial Sequence
  Synthetic oligonucleotide
attcagggtgaaaattaaaccattgttact

SEQ ID NO: 480467 - DNA, 30 bp, Artificial Sequence
  Synthetic oligonucleotide
aatttttggtttgtgttcgatattgttact

SEQ ID NO: 480468 - DNA, 30 bp, Artificial Sequence
  Synthetic oligonucleotide
caccggaagtggtcatgtacggttgttact

SEQ ID NO: 480469 - DNA, 30 bp, Artificial Sequence
  Synthetic oligonucleotide
ctctcacgccgacagttggttccatttact

SEQ ID NO: 480470 - DNA, 30 bp, Artificial Sequence
  Synthetic oligonucleotide
atgaagatgtgccgccaacggagatttact

SEQ ID NO: 480471 - DNA, 30 bp, Artificial Sequence
  Synthetic oligonucleotide
gcgtagtaatatgtgttcccatgatttact

SEQ ID NO: 480472 - DNA, 30 bp, Artificial Sequence
  Synthetic oligonucleotide
ttcaaggtcctcgcgcgaatgaactttact

SEQ ID NO: 480473 - DNA, 30 bp, Artificial Sequence
  Synthetic oligonucleotide
gacggtgtcacgtaaacctcggactttact

SEQ ID NO: 480474 - DNA, 30 bp, Artificial Sequence
  Synthetic oligonucleotide
cttattgactctgttaatatgtcgtttact

SEQ ID NO: 480475 - DNA, 30 bp, Artificial Sequence
  Synthetic oligonucleotide
cgtgccgcaaacctggaaaccatttttact

SEQ ID NO: 480476 - DNA, 30 bp, Artificial Sequence
  Synthetic oligonucleotide
gtaagttttgttagctcgtcatcaaaacct

SEQ ID NO: 480477 - DNA, 30 bp, Artificial Sequence
  Synthetic oligonucleotide
ctcaatcagttaactcttcgtgtaaaacct

SEQ ID NO: 480478 - DNA, 30 bp, Artificial Sequence
  Synthetic oligonucleotide
gatatcagatcgtatccctttaccaaacct

SEQ ID NO: 480479 - DNA, 31 bp, Artificial Sequence
  Synthetic oligonucleotide
gtgcgcggggtttagcgtacaaatgaaacct

SEQ ID NO: 480480 - DNA, 30 bp, Artificial Sequence
  Synthetic oligonucleotide
caggtatcaagggaccggtgtccacaacct

SEQ ID NO: 480481 - DNA, 30 bp, Artificial Sequence
  Synthetic oligonucleotide
atggatgcacttggtttggtgttacaacct

SEQ ID NO: 480482 - DNA, 30 bp, Artificial Sequence
  Synthetic oligonucleotide
aatctctaccgctactactgcgaccaacct

SEQ ID NO: 480483 - DNA, 30 bp, Artificial Sequence
  Synthetic oligonucleotide
tttaattagttgcctcacgcctgccaacct

SEQ ID NO: 480484 - DNA, 30 bp, Artificial Sequence
  Synthetic oligonucleotide
tgtcgatgttttaagggagcagggcaacct

SEQ ID NO: 480485 - DNA, 30 bp, Artificial Sequence
  Synthetic oligonucleotide
agagcggtgtaaaggttaatgtaagaacct

SEQ ID NO: 480486 - DNA, 30 bp, Artificial Sequence
  Synthetic oligonucleotide
gtcctagttgtacatcataatgaggaacct

SEQ ID NO: 480487 - DNA, 30 bp, Artificial Sequence
  Synthetic oligonucleotide
acagccgtgcatgcacgggcagttgaacct

SEQ ID NO: 480488 - DNA, 30 bp, Artificial Sequence
  Synthetic oligonucleotide
tatggatgattaacgtcagggtaataacct

SEQ ID NO: 480489 - DNA, 30 bp, Artificial Sequence
  Synthetic oligonucleotide
cttctacagcttgatgcattgcgataacct

SEQ ID NO: 480490 - DNA, 30 bp, Artificial Sequence
  Synthetic oligonucleotide
tgcgatcaaggttgaggcagattataacct

SEQ ID NO: 480491 - DNA, 30 bp, Artificial Sequence
  Synthetic oligonucleotide
ttcacaggttataacgggccctactaacct

SEQ ID NO: 480492 - DNA, 30 bp, Artificial Sequence
  Synthetic oligonucleotide
caaagggtctatgggaatatagcctaacct

SEQ ID NO: 480493 - DNA, 30 bp, Artificial Sequence
  Synthetic oligonucleotide
tggacttacattgaggggatattctaacct

SEQ ID NO: 480494 - DNA, 30 bp, Artificial Sequence
  Synthetic oligonucleotide
gttcttcaatgaaataaacgagcttaacct

SEQ ID NO: 480495 - DNA, 30 bp, Artificial Sequence
  Synthetic oligonucleotide
tttcgtgcccagtaatcaggattttaacct

SEQ ID NO: 480496 - DNA, 30 bp, Artificial Sequence
  Synthetic oligonucleotide
ataatatttcgactacttgtctacacacct

SEQ ID NO: 480497 - DNA, 30 bp, Artificial Sequence
  Synthetic oligonucleotide
ttacaggtgtggcggacatcgcccacacct

SEQ ID NO: 480498 - DNA, 30 bp, Artificial Sequence
  Synthetic oligonucleotide
tagacagctgccattataggtcaaccacct

SEQ ID NO: 480499 - DNA, 30 bp, Artificial Sequence
  Synthetic oligonucleotide
cgagaaggttagggcccagccgtaccacct

SEQ ID NO: 480500 - DNA, 30 bp, Artificial Sequence
  Synthetic oligonucleotide
atttaaggaaggtcaccgggtagcccacct

SEQ ID NO: 480501 - DNA, 30 bp, Artificial Sequence
  Synthetic oligonucleotide
tggtgcagataagtgaagctccgtccacct

SEQ ID NO: 480502 - DNA, 30 bp, Artificial Sequence
  Synthetic oligonucleotide
tttccctagcggtgttgaattatagcacct

SEQ ID NO: 480503 - DNA, 30 bp, Artificial Sequence
  Synthetic oligonucleotide
atcgcggggtctccttgacgttaggcacct

SEQ ID NO: 480504 - DNA, 30 bp, Artificial Sequence
  Synthetic oligonucleotide
atctactacaagcacagcatcctggcacct

SEQ ID NO: 480505 - DNA, 30 bp, Artificial Sequence
  Synthetic oligonucleotide
ttcttggctaggataggtcccttggcacct

SEQ ID NO: 480506 - DNA, 30 bp, Artificial Sequence
  Synthetic oligonucleotide
gcagctatgccataattattctaatcacct

SEQ ID NO: 480507 - DNA, 30 bp, Artificial Sequence
  Synthetic oligonucleotide
cctgaattccaaccgacggggtgttcacct

SEQ ID NO: 480508 - DNA, 30 bp, Artificial Sequence
  Synthetic oligonucleotide
acaattatttggagcttatcggtttcacct

SEQ ID NO: 480509 - DNA, 30 bp, Artificial Sequence
  Synthetic oligonucleotide
ttcaggtgaattaattttttgcaaagacct

SEQ ID NO: 480510 - DNA, 30 bp, Artificial Sequence
  Synthetic oligonucleotide
gattgaacgggctaagtcaactaaagacct

SEQ ID NO: 480511 - DNA, 30 bp, Artificial Sequence
  Synthetic oligonucleotide
taatgggccgtcctggttccgctcagacct

SEQ ID NO: 480512 - DNA, 30 bp, Artificial Sequence
  Synthetic oligonucleotide
caacataggtccttatcggggttcagacct

SEQ ID NO: 480513 - DNA, 30 bp, Artificial Sequence
  Synthetic oligonucleotide
ttccgatagactctggatgattagagacct

SEQ ID NO: 480514 - DNA, 30 bp, Artificial Sequence
  Synthetic oligonucleotide
cgcgcacttcgtaggaggcactggagacct

SEQ ID NO: 480515 - DNA, 30 bp, Artificial Sequence
  Synthetic oligonucleotide
gaggtaacactgcgtcgctaggtgagacct

SEQ ID NO: 480516 - DNA, 29 bp, Artificial Sequence
  Synthetic oligonucleotide
taacccctctacttacttcatttagacct

SEQ ID NO: 480517 - DNA, 30 bp, Artificial Sequence
  Synthetic oligonucleotide
cagtaattctgcggcttccatacacgacct

SEQ ID NO: 480518 - DNA, 30 bp, Artificial Sequence
  Synthetic oligonucleotide
taggagggccgaacaggcaggggccgacct

SEQ ID NO: 480519 - DNA, 30 bp, Artificial Sequence
  Synthetic oligonucleotide
gtgccagtaacataatctcctggccgacct

SEQ ID NO: 480520 - DNA, 30 bp, Artificial Sequence
  Synthetic oligonucleotide
gtacttgctaactaccatagactgcgacct

SEQ ID NO: 480521 - DNA, 30 bp, Artificial Sequence
  Synthetic oligonucleotide
aaaactaaagtttaccatacgtgtcgacct

SEQ ID NO: 480522 - DNA, 30 bp, Artificial Sequence
  Synthetic oligonucleotide
aggctggttactttctttgatcaaggacct

SEQ ID NO: 480523 - DNA, 30 bp, Artificial Sequence
  Synthetic oligonucleotide
atgtcacttattatggccgacggcggacct

SEQ ID NO: 480524 - DNA, 30 bp, Artificial Sequence
  Synthetic oligonucleotide
cggggtctgagggattcgctgacgggacct

SEQ ID NO: 480525 - DNA, 31 bp, Artificial Sequence
  Synthetic oligonucleotide
aaaactcgtaccacaacaatttacgggacct

SEQ ID NO: 480526 - DNA, 30 bp, Artificial Sequence
  Synthetic oligonucleotide
ccagtttgacgcctaaagatcgatggacct

SEQ ID NO: 480527 - DNA, 30 bp, Artificial Sequence
  Synthetic oligonucleotide
ttgacgctcttacctttcacttaatgacct

SEQ ID NO: 480528 - DNA, 30 bp, Artificial Sequence
  Synthetic oligonucleotide
attctcctaaagcgtgcaaacacatgacct

SEQ ID NO: 480529 - DNA, 30 bp, Artificial Sequence
  Synthetic oligonucleotide
aagcgttccgggcagtagcaagcatgacct

SEQ ID NO: 480530 - DNA, 30 bp, Artificial Sequence
  Synthetic oligonucleotide
cacgcacacacgctgcatcgactctgacct

SEQ ID NO: 480531 - DNA, 30 bp, Artificial Sequence
  Synthetic oligonucleotide
ggtttcaccgtgacgtgcttagagtgacct

SEQ ID NO: 480532 - DNA, 30 bp, Artificial Sequence
  Synthetic oligonucleotide
gggttattgccgccacagcaacgcatacct

SEQ ID NO: 480533 - DNA, 30 bp, Artificial Sequence
  Synthetic oligonucleotide
tatctgtctaaattcggactacgcatacct

SEQ ID NO: 480534 - DNA, 30 bp, Artificial Sequence
  Synthetic oligonucleotide
tctcgaggttcgggtacggataagatacct

SEQ ID NO: 480535 - DNA, 30 bp, Artificial Sequence
  Synthetic oligonucleotide
tggactgcaacccttttgactcagatacct

SEQ ID NO: 480536 - DNA, 30 bp, Artificial Sequence
  Synthetic oligonucleotide
cagcttcgggatagtggcatctcgatacct

SEQ ID NO: 480537 - DNA, 30 bp, Artificial Sequence
  Synthetic oligonucleotide
gaagggcgctctacaaggacgttgatacct

SEQ ID NO: 480538 - DNA, 30 bp, Artificial Sequence
  Synthetic oligonucleotide
gtgattacttgcaggtaagttactatacct

SEQ ID NO: 480539 - DNA, 30 bp, Artificial Sequence
  Synthetic oligonucleotide
cactttctgcgacggcgtgatattatacct

SEQ ID NO: 480540 - DNA, 30 bp, Artificial Sequence
  Synthetic oligonucleotide
acaacgctcttggtagatatctacctacct

SEQ ID NO: 480541 - DNA, 30 bp, Artificial Sequence
  Synthetic oligonucleotide
ttttggcggaatcgggggggtcccctacct

SEQ ID NO: 480542 - DNA, 30 bp, Artificial Sequence
  Synthetic oligonucleotide
caattattatagtgaaagtcccggctacct

SEQ ID NO: 480543 - DNA, 30 bp, Artificial Sequence
  Synthetic oligonucleotide
cccggtctccgcgcgggaatttggctacct

SEQ ID NO: 480544 - DNA, 31 bp, Artificial Sequence
  Synthetic oligonucleotide
acagtagtgatttgacccaccagttctacct

SEQ ID NO: 480545 - DNA, 30 bp, Artificial Sequence
  Synthetic oligonucleotide
tctggttcatctcgctaacgggtagtacct

SEQ ID NO: 480546 - DNA, 30 bp, Artificial Sequence
  Synthetic oligonucleotide
aatgtgtctagccacgcactccacgtacct

SEQ ID NO: 480547 - DNA, 30 bp, Artificial Sequence
  Synthetic oligonucleotide
attttgcggatcactgcgtaaagcgtacct

SEQ ID NO: 480548 - DNA, 30 bp, Artificial Sequence
  Synthetic oligonucleotide
tacttcacattatacccagctggcgtacct

SEQ ID NO: 480549 - DNA, 30 bp, Artificial Sequence
  Synthetic oligonucleotide
tgtgtctggagagcatgtccaccggtacct

SEQ ID NO: 480550 - DNA, 30 bp, Artificial Sequence
  Synthetic oligonucleotide
gtgcgttttcattatgcacgtcatgtacct

SEQ ID NO: 480551 - DNA, 30 bp, Artificial Sequence
  Synthetic oligonucleotide
aagtgactgggccttgcgcggttattacct

SEQ ID NO: 480552 - DNA, 30 bp, Artificial Sequence
  Synthetic oligonucleotide
ctggcttgcgcatataccaaggtcttacct

SEQ ID NO: 480553 - DNA, 30 bp, Artificial Sequence
  Synthetic oligonucleotide
ttattgaataaaactactgaattgttacct

SEQ ID NO: 480554 - DNA, 30 bp, Artificial Sequence
  Synthetic oligonucleotide
tctatttgacagtgcttcgtttatttacct

SEQ ID NO: 480555 - DNA, 30 bp, Artificial Sequence
  Synthetic oligonucleotide
aatggggtgtaattagattgtcttttacct

SEQ ID NO: 480556 - DNA, 30 bp, Artificial Sequence
  Synthetic oligonucleotide
caattatatagaagcaaaggagaaaaccct

SEQ ID NO: 480557 - DNA, 30 bp, Artificial Sequence
  Synthetic oligonucleotide
tcagcgtcacaggcccggcggccaaaccct

SEQ ID NO: 480558 - DNA, 30 bp, Artificial Sequence
  Synthetic oligonucleotide
tcacggcctacaggcccatcgtgaaaccct

SEQ ID NO: 480559 - DNA, 30 bp, Artificial Sequence
  Synthetic oligonucleotide
ccttccggcgtgccccatgtgtgaaaccct

SEQ ID NO: 480560 - DNA, 30 bp, Artificial Sequence
  Synthetic oligonucleotide
gtccagcacgccgagaggagtctaaaccct

SEQ ID NO: 480561 - DNA, 30 bp, Artificial Sequence
  Synthetic oligonucleotide
aggcaaaatgcgttttgtgccttgaaccct

SEQ ID NO: 480562 - DNA, 30 bp, Artificial Sequence
  Synthetic oligonucleotide
aaacgactcgcatcacgccatgctaaccct

SEQ ID NO: 480563 - DNA, 30 bp, Artificial Sequence
  Synthetic oligonucleotide
ctagtcattgaggctgttccgtaacaccct

SEQ ID NO: 480564 - DNA, 30 bp, Artificial Sequence
  Synthetic oligonucleotide
ttccatcgaagacgtacggtcggacaccct

SEQ ID NO: 480565 - DNA, 26 bp, Artificial Sequence
  Synthetic oligonucleotide
aatctgggttgatgatcaagcaccct

SEQ ID NO: 480566 - DNA, 30 bp, Artificial Sequence
  Synthetic oligonucleotide
gctgggccagtttcattgggggagcaccct

SEQ ID NO: 480567 - DNA, 30 bp, Artificial Sequence
  Synthetic oligonucleotide
ccgacatcggatttctgggacgcgcaccct

SEQ ID NO: 480568 - DNA, 30 bp, Artificial Sequence
  Synthetic oligonucleotide
taccgataagacagttttctaggtcaccct

SEQ ID NO: 480569 - DNA, 30 bp, Artificial Sequence
  Synthetic oligonucleotide
acctttgtgaatgctcggtcttaagaccct

SEQ ID NO: 480570 - DNA, 30 bp, Artificial Sequence
  Synthetic oligonucleotide
tactaactttaagttaattcgtcagaccct

SEQ ID NO: 480571 - DNA, 30 bp, Artificial Sequence
  Synthetic oligonucleotide
ggtatttacctggtgccaaatatagaccct

SEQ ID NO: 480572 - DNA, 30 bp, Artificial Sequence
  Synthetic oligonucleotide
ttgtgcgagacacctcgctggcatgaccct

SEQ ID NO: 480573 - DNA, 30 bp, Artificial Sequence
  Synthetic oligonucleotide
gtatgtccgtctttagttagtaaataccct

SEQ ID NO: 480574 - DNA, 30 bp, Artificial Sequence
  Synthetic oligonucleotide
tacaggctgccagacggtcaggtataccct

SEQ ID NO: 480575 - DNA, 30 bp, Artificial Sequence
  Synthetic oligonucleotide
gtcataagcccctctggacgtcggtaccct

SEQ ID NO: 480576 - DNA, 30 bp, Artificial Sequence
  Synthetic oligonucleotide
agtggaaaagtacgtcgccctatttaccct

SEQ ID NO: 480577 - DNA, 30 bp, Artificial Sequence
  Synthetic oligonucleotide
ttaatgtgcagatattccggtttttaccct

SEQ ID NO: 480578 - DNA, 30 bp, Artificial Sequence
  Synthetic oligonucleotide
gcaatagaaggggcggttatcaacacccct

SEQ ID NO: 480579 - DNA, 30 bp, Artificial Sequence
  Synthetic oligonucleotide
gataacctcgggttcaaaataccgacccct

SEQ ID NO: 480580 - DNA, 30 bp, Artificial Sequence
  Synthetic oligonucleotide
taagtattggtggagatccaatggacccct

SEQ ID NO: 480581 - DNA, 30 bp, Artificial Sequence
  Synthetic oligonucleotide
tacgataccaggagggcaaactcgccccct

SEQ ID NO: 480582 - DNA, 30 bp, Artificial Sequence
  Synthetic oligonucleotide
gctattggtctgtggcagacgttgccccct

SEQ ID NO: 480583 - DNA, 30 bp, Artificial Sequence
  Synthetic oligonucleotide
atgagattgcgctggcttgagtttccccct

SEQ ID NO: 480584 - DNA, 30 bp, Artificial Sequence
  Synthetic oligonucleotide
gctcaggtctcacgtagggtatcagcccct

SEQ ID NO: 480585 - DNA, 30 bp, Artificial Sequence
  Synthetic oligonucleotide
ctagacgtatggggggtacaagatgcccct

SEQ ID NO: 480586 - DNA, 30 bp, Artificial Sequence
  Synthetic oligonucleotide
actacgcggcaaatttacgcagaatcccct

SEQ ID NO: 480587 - DNA, 30 bp, Artificial Sequence
  Synthetic oligonucleotide
gtatataaggtctaatagtgtttatcccct

SEQ ID NO: 480588 - DNA, 30 bp, Artificial Sequence
  Synthetic oligonucleotide
gtacgtgtgagggctatacatcactcccct

SEQ ID NO: 480589 - DNA, 29 bp, Artificial Sequence
  Synthetic oligonucleotide
gggcttcgacgcaacaccgcacctcccct

SEQ ID NO: 480590 - DNA, 30 bp, Artificial Sequence
  Synthetic oligonucleotide
agcctgctaatgaagggatctccaagccct

SEQ ID NO: 480591 - DNA, 30 bp, Artificial Sequence
  Synthetic oligonucleotide
cgctgacatgacaagctcgaacgcagccct

SEQ ID NO: 480592 - DNA, 30 bp, Artificial Sequence
  Synthetic oligonucleotide
tttagggacatgcggttcgacgtcagccct

SEQ ID NO: 480593 - DNA, 30 bp, Artificial Sequence
  Synthetic oligonucleotide
aaaagcatccgtgagttcagacagagccct

SEQ ID NO: 480594 - DNA, 30 bp, Artificial Sequence
  Synthetic oligonucleotide
atgttgccaataagttatcagccgagccct

SEQ ID NO: 480595 - DNA, 30 bp, Artificial Sequence
  Synthetic oligonucleotide
cgccaaccaccttggtgagcactgagccct

SEQ ID NO: 480596 - DNA, 30 bp, Artificial Sequence
  Synthetic oligonucleotide
gtcttcgctcccgcactggagaaacgccct

SEQ ID NO: 480597 - DNA, 30 bp, Artificial Sequence
  Synthetic oligonucleotide
gggtcttaacgtagtgaataccgacgccct

SEQ ID NO: 480598 - DNA, 30 bp, Artificial Sequence
  Synthetic oligonucleotide
ttaacatgaggggtgaccccgggccgccct

SEQ ID NO: 480599 - DNA, 30 bp, Artificial Sequence
  Synthetic oligonucleotide
tctataggcgagcccctgcggatccgccct

SEQ ID NO: 480600 - DNA, 30 bp, Artificial Sequence
  Synthetic oligonucleotide
atgtcgcatggacacatatgggggcgccct

SEQ ID NO: 480601 - DNA, 30 bp, Artificial Sequence
  Synthetic oligonucleotide
ttctctgtgaacgagacatgaacaggccct

SEQ ID NO: 480602 - DNA, 30 bp, Artificial Sequence
  Synthetic oligonucleotide
ggaactcggctgtcagcaatgagaggccct

SEQ ID NO: 480603 - DNA, 30 bp, Artificial Sequence
  Synthetic oligonucleotide
cataacgtagatgacaagtaggacggccct

SEQ ID NO: 480604 - DNA, 30 bp, Artificial Sequence
  Synthetic oligonucleotide
ggccgtacgatcaccccacgccccggccct

SEQ ID NO: 480605 - DNA, 29 bp, Artificial Sequence
  Synthetic oligonucleotide
aatttagaaggtatcagcgcctcggccct

SEQ ID NO: 480606 - DNA, 30 bp, Artificial Sequence
  Synthetic oligonucleotide
ggcattagtcttgtaaaaatattcggccct

SEQ ID NO: 480607 - DNA, 30 bp, Artificial Sequence
  Synthetic oligonucleotide
attccacgactcgcttgcttcgggggccct

SEQ ID NO: 480608 - DNA, 30 bp, Artificial Sequence
  Synthetic oligonucleotide
ttaccttaatcggtttgcaccgttggccct

SEQ ID NO: 480609 - DNA, 30 bp, Artificial Sequence
  Synthetic oligonucleotide
gtggtcagttacctttccttgaactgccct

SEQ ID NO: 480610 - DNA, 30 bp, Artificial Sequence
  Synthetic oligonucleotide
caagacttttctatcagtgaacgctgccct

SEQ ID NO: 480611 - DNA, 30 bp, Artificial Sequence
  Synthetic oligonucleotide
tgtgcttgaaatagcaggtttgagtgccct

SEQ ID NO: 480612 - DNA, 30 bp, Artificial Sequence
  Synthetic oligonucleotide
cccctctcgctttctattcatttgtgccct

SEQ ID NO: 480613 - DNA, 30 bp, Artificial Sequence
  Synthetic oligonucleotide
cccctctcgctttctagtcctttgtgccct

SEQ ID NO: 480614 - DNA, 30 bp, Artificial Sequence
  Synthetic oligonucleotide
cccctctcgctgtctattcctttgtgccct

SEQ ID NO: 480615 - DNA, 30 bp, Artificial Sequence
  Synthetic oligonucleotide
ccactctcgctttctattcctttgtgccct

SEQ ID NO: 480616 - DNA, 25 bp, Artificial Sequence
  Synthetic oligonucleotide
ccccttttctattcctttgtgccct

SEQ ID NO: 480617 - DNA, 31 bp, Artificial Sequence
  Synthetic oligonucleotide
cccctctcgctttctatttcctttgtgccct

SEQ ID NO: 480618 - DNA, 30 bp, Artificial Sequence
  Synthetic oligonucleotide
gagtatatacgcgctgcatggtattgccct

SEQ ID NO: 480619 - DNA, 30 bp, Artificial Sequence
  Synthetic oligonucleotide
tctctcaaaggggactccggttcttgccct

SEQ ID NO: 480620 - DNA, 30 bp, Artificial Sequence
  Synthetic oligonucleotide
ggtatcgtccttcaagaattgacgatccct

SEQ ID NO: 480621 - DNA, 30 bp, Artificial Sequence
  Synthetic oligonucleotide
gtattcgtcgggaaacacatgactatccct

SEQ ID NO: 480622 - DNA, 30 bp, Artificial Sequence
  Synthetic oligonucleotide
cactggagtcccacgggtccctgtatccct

SEQ ID NO: 480623 - DNA, 30 bp, Artificial Sequence
  Synthetic oligonucleotide
tcatcgcctggtgctttagggattatccct

SEQ ID NO: 480624 - DNA, 30 bp, Artificial Sequence
  Synthetic oligonucleotide
acacgatgccgttgcgttactattatccct

SEQ ID NO: 480625 - DNA, 30 bp, Artificial Sequence
  Synthetic oligonucleotide
cagcgatagcgccttgcgcccttcctccct

SEQ ID NO: 480626 - DNA, 30 bp, Artificial Sequence
  Synthetic oligonucleotide
gtgactcgcatgtgagtcatagagctccct

SEQ ID NO: 480627 - DNA, 30 bp, Artificial Sequence
  Synthetic oligonucleotide
catatcagatgtggcagctaagaagtccct

SEQ ID NO: 480628 - DNA, 30 bp, Artificial Sequence
  Synthetic oligonucleotide
aagtcaacattctagctgtagccagtccct

SEQ ID NO: 480629 - DNA, 30 bp, Artificial Sequence
  Synthetic oligonucleotide
gacctatcaatagttagtatctacgtccct

SEQ ID NO: 480630 - DNA, 30 bp, Artificial Sequence
  Synthetic oligonucleotide
tcttatggcgttacagtttaccaggtccct

SEQ ID NO: 480631 - DNA, 30 bp, Artificial Sequence
  Synthetic oligonucleotide
cctgttctgatattcagaagcggggtccct

SEQ ID NO: 480632 - DNA, 30 bp, Artificial Sequence
  Synthetic oligonucleotide
tcttcttaataagactaccaaattgtccct

SEQ ID NO: 480633 - DNA, 30 bp, Artificial Sequence
  Synthetic oligonucleotide
gcgcgcacgttaggttcaagggttgtccct

SEQ ID NO: 480634 - DNA, 30 bp, Artificial Sequence
  Synthetic oligonucleotide
attgtgtccgcaccaaattaaacattccct

SEQ ID NO: 480635 - DNA, 30 bp, Artificial Sequence
  Synthetic oligonucleotide
agtacataacccttgatcgctccattccct

SEQ ID NO: 480636 - DNA, 30 bp, Artificial Sequence
  Synthetic oligonucleotide
ccggacaacacggagaccagacgattccct

SEQ ID NO: 480637 - DNA, 30 bp, Artificial Sequence
  Synthetic oligonucleotide
ccctttgtcttcctctttcttctcttccct

SEQ ID NO: 480638 - DNA, 30 bp, Artificial Sequence
  Synthetic oligonucleotide
attgtgctactacgttaagccttcttccct

SEQ ID NO: 480639 - DNA, 30 bp, Artificial Sequence
  Synthetic oligonucleotide
ctaaacagcacgagctccgacaagttccct

SEQ ID NO: 480640 - DNA, 30 bp, Artificial Sequence
  Synthetic oligonucleotide
cccctctcgctttctattcctttgttccct

SEQ ID NO: 480641 - DNA, 30 bp, Artificial Sequence
  Synthetic oligonucleotide
gatttaagataacttttatggagtttccct

SEQ ID NO: 480642 - DNA, 30 bp, Artificial Sequence
  Synthetic oligonucleotide
ctctgagtggcagcgctttccctaaagcct

SEQ ID NO: 480643 - DNA, 30 bp, Artificial Sequence
  Synthetic oligonucleotide
ctgatctctatggtcgtcacacgcaagcct

SEQ ID NO: 480644 - DNA, 30 bp, Artificial Sequence
  Synthetic oligonucleotide
gagcccttcaggtatggcacgtagaagcct

SEQ ID NO: 480645 - DNA, 30 bp, Artificial Sequence
  Synthetic oligonucleotide
gcaccgctaaggctgccggatggtaagcct

SEQ ID NO: 480646 - DNA, 30 bp, Artificial Sequence
  Synthetic oligonucleotide
gaagagttaatgagaggcgactgtaagcct

SEQ ID NO: 480647 - DNA, 30 bp, Artificial Sequence
  Synthetic oligonucleotide
atagtcttcgtatgatgcctgtgtaagcct

SEQ ID NO: 480648 - DNA, 30 bp, Artificial Sequence
  Synthetic oligonucleotide
tgcaggtcctggtaagctggatcacagcct

SEQ ID NO: 480649 - DNA, 30 bp, Artificial Sequence
  Synthetic oligonucleotide
tttcgtagggcccctattgtctgacagcct

SEQ ID NO: 480650 - DNA, 30 bp, Artificial Sequence
  Synthetic oligonucleotide
gtacgatttagactatgcaaataccagcct

SEQ ID NO: 480651 - DNA, 30 bp, Artificial Sequence
  Synthetic oligonucleotide
ccgctcagagagcctgtcatttaccagcct

SEQ ID NO: 480652 - DNA, 30 bp, Artificial Sequence
  Synthetic oligonucleotide
tattaatgacataggcggtgattgcagcct

SEQ ID NO: 480653 - DNA, 30 bp, Artificial Sequence
  Synthetic oligonucleotide
tgaccccgacgacaagatctgacagagcct

SEQ ID NO: 480654 - DNA, 30 bp, Artificial Sequence
  Synthetic oligonucleotide
catttgtgtccacgtaaaattgacgagcct

SEQ ID NO: 480655 - DNA, 30 bp, Artificial Sequence
  Synthetic oligonucleotide
gttaccatagcgcagactagagtcgagcct

SEQ ID NO: 480656 - DNA, 30 bp, Artificial Sequence
  Synthetic oligonucleotide
gaccccagtcccgctgaccagcaggagcct

SEQ ID NO: 480657 - DNA, 30 bp, Artificial Sequence
  Synthetic oligonucleotide
atacgaattattttaggctgcagggagcct

SEQ ID NO: 480658 - DNA, 30 bp, Artificial Sequence
  Synthetic oligonucleotide
atagggtccaacgatcgtatgcgggagcct

SEQ ID NO: 480659 - DNA, 30 bp, Artificial Sequence
  Synthetic oligonucleotide
gagcggatttcagtaatatccatggagcct

SEQ ID NO: 480660 - DNA, 30 bp, Artificial Sequence
  Synthetic oligonucleotide
accaggtattgtgtctgcaacctggagcct

SEQ ID NO: 480661 - DNA, 30 bp, Artificial Sequence
  Synthetic oligonucleotide
gaacggatggctacgccacgcttggagcct

SEQ ID NO: 480662 - DNA, 30 bp, Artificial Sequence
  Synthetic oligonucleotide
attagtaatgacgtggcctttaatgagcct

SEQ ID NO: 480663 - DNA, 30 bp, Artificial Sequence
  Synthetic oligonucleotide
gccgagaattccaactttaggtcatagcct

SEQ ID NO: 480664 - DNA, 30 bp, Artificial Sequence
  Synthetic oligonucleotide
cctgagatcgtcttttcgtgatcgtagcct

SEQ ID NO: 480665 - DNA, 30 bp, Artificial Sequence
  Synthetic oligonucleotide
ggctctaggaatagattaggaatgtagcct

SEQ ID NO: 480666 - DNA, 30 bp, Artificial Sequence
  Synthetic oligonucleotide
accaatatcctacctaggtttttgtagcct

SEQ ID NO: 480667 - DNA, 30 bp, Artificial Sequence
  Synthetic oligonucleotide
accgaccctctggcgcacgtagcttagcct

SEQ ID NO: 480668 - DNA, 30 bp, Artificial Sequence
  Synthetic oligonucleotide
aaaaacgtcggcttatctaaattttagcct

SEQ ID NO: 480669 - DNA, 30 bp, Artificial Sequence
  Synthetic oligonucleotide
caggcccttgggtcataagactccacgcct

SEQ ID NO: 480670 - DNA, 30 bp, Artificial Sequence
  Synthetic oligonucleotide
aagtgaagggcgtatgacgtttgcacgcct

SEQ ID NO: 480671 - DNA, 30 bp, Artificial Sequence
  Synthetic oligonucleotide
cggatattagaaaattatgctgtcacgcct

SEQ ID NO: 480672 - DNA, 30 bp, Artificial Sequence
  Synthetic oligonucleotide
atctctcacagaacgggtatacggacgcct

SEQ ID NO: 480673 - DNA, 30 bp, Artificial Sequence
  Synthetic oligonucleotide
gtatccggaccgataaatagtcggacgcct

SEQ ID NO: 480674 - DNA, 30 bp, Artificial Sequence
  Synthetic oligonucleotide
cacggtgtactcaaatgtagatctacgcct

SEQ ID NO: 480675 - DNA, 30 bp, Artificial Sequence
  Synthetic oligonucleotide
aaggcaaccagggccggaaggtcgccgcct

SEQ ID NO: 480676 - DNA, 30 bp, Artificial Sequence
  Synthetic oligonucleotide
tcctagtaactcgtagaccggacagcgcct

SEQ ID NO: 480677 - DNA, 30 bp, Artificial Sequence
  Synthetic oligonucleotide
ttaaactcggtataggagtccgacgcgcct

SEQ ID NO: 480678 - DNA, 30 bp, Artificial Sequence
  Synthetic oligonucleotide
agaataggttgtgtcttcaatagcgcgcct

SEQ ID NO: 480679 - DNA, 30 bp, Artificial Sequence
  Synthetic oligonucleotide
tgactaatatgtaaggcgggttgcgcgcct

SEQ ID NO: 480680 - DNA, 30 bp, Artificial Sequence
  Synthetic oligonucleotide
tgatgcccataataatacacagcggcgcct

SEQ ID NO: 480681 - DNA, 30 bp, Artificial Sequence
  Synthetic oligonucleotide
ggcggtatcccagggacggtccatgcgcct

SEQ ID NO: 480682 - DNA, 30 bp, Artificial Sequence
  Synthetic oligonucleotide
gaaaaggtaatggtttcggctactgcgcct

SEQ ID NO: 480683 - DNA, 30 bp, Artificial Sequence
  Synthetic oligonucleotide
gtccgtgactaattgccaggggcatcgcct

SEQ ID NO: 480684 - DNA, 30 bp, Artificial Sequence
  Synthetic oligonucleotide
ggtactccggaccattaagttatatcgcct

SEQ ID NO: 480685 - DNA, 30 bp, Artificial Sequence
  Synthetic oligonucleotide
gctgcaagtgggtacttaatgaagtcgcct

SEQ ID NO: 480686 - DNA, 30 bp, Artificial Sequence
  Synthetic oligonucleotide
gtgcacaccggttattacacccagtcgcct

SEQ ID NO: 480687 - DNA, 30 bp, Artificial Sequence
  Synthetic oligonucleotide
tgttcgctgggggccagacaaccgtcgcct

SEQ ID NO: 480688 - DNA, 30 bp, Artificial Sequence
  Synthetic oligonucleotide
cctgtgttcagctttttagccgtttcgcct

SEQ ID NO: 480689 - DNA, 30 bp, Artificial Sequence
  Synthetic oligonucleotide
taggtttgcagagttggttttccaaggcct

SEQ ID NO: 480690 - DNA, 30 bp, Artificial Sequence
  Synthetic oligonucleotide
agcaagtgcttttgcacagccctaaggcct

SEQ ID NO: 480691 - DNA, 30 bp, Artificial Sequence
  Synthetic oligonucleotide
tgaggcaggaccctgcgtgtcaccaggcct

SEQ ID NO: 480692 - DNA, 30 bp, Artificial Sequence
  Synthetic oligonucleotide
cttcctcgccatgtcgtaagtcggaggcct

SEQ ID NO: 480693 - DNA, 30 bp, Artificial Sequence
  Synthetic oligonucleotide
acaaaggcgatcaaagcagtagggaggcct

SEQ ID NO: 480694 - DNA, 30 bp, Artificial Sequence
  Synthetic oligonucleotide
ggtttgaggtagtcgtaatgcaaacggcct

SEQ ID NO: 480695 - DNA, 30 bp, Artificial Sequence
  Synthetic oligonucleotide
tcctagatactccgttgtctaatccggcct

SEQ ID NO: 480696 - DNA, 30 bp, Artificial Sequence
  Synthetic oligonucleotide
tcgcataacgctaaccaatgaacgcggcct

SEQ ID NO: 480697 - DNA, 30 bp, Artificial Sequence
  Synthetic oligonucleotide
actactcccgcactctaggggtcagggcct

SEQ ID NO: 480698 - DNA, 30 bp, Artificial Sequence
  Synthetic oligonucleotide
gcgtctaagtagtaccttgtctgagggcct

SEQ ID NO: 480699 - DNA, 30 bp, Artificial Sequence
  Synthetic oligonucleotide
cccgcgtaattggttggatgtcccgggcct

SEQ ID NO: 480700 - DNA, 30 bp, Artificial Sequence
  Synthetic oligonucleotide
cggggactgcacgcaggcctatatgggcct

SEQ ID NO: 480701 - DNA, 30 bp, Artificial Sequence
  Synthetic oligonucleotide
gagggaacgacggatggagaacgtgggcct

SEQ ID NO: 480702 - DNA, 30 bp, Artificial Sequence
  Synthetic oligonucleotide
gatttggtagtcaaaggacgtctgtggcct

SEQ ID NO: 480703 - DNA, 30 bp, Artificial Sequence
  Synthetic oligonucleotide
aaaccccctgtcgcagacaaccattggcct

SEQ ID NO: 480704 - DNA, 30 bp, Artificial Sequence
  Synthetic oligonucleotide
ctcggttttcaaacagtgggcctttggcct

SEQ ID NO: 480705 - DNA, 30 bp, Artificial Sequence
  Synthetic oligonucleotide
agaaggggcgtcgtcatccagcagatgcct

SEQ ID NO: 480706 - DNA, 30 bp, Artificial Sequence
  Synthetic oligonucleotide
aggcaagcaaagtttgttgggcagatgcct

SEQ ID NO: 480707 - DNA, 30 bp, Artificial Sequence
  Synthetic oligonucleotide
gtagttaaacgaccgactaaccggatgcct

SEQ ID NO: 480708 - DNA, 30 bp, Artificial Sequence
  Synthetic oligonucleotide
gcccgtcaggattgcaccgggggtatgcct

SEQ ID NO: 480709 - DNA, 30 bp, Artificial Sequence
  Synthetic oligonucleotide
gtattgccatgctcagcctgcaaactgcct

SEQ ID NO: 480710 - DNA, 30 bp, Artificial Sequence
  Synthetic oligonucleotide
gtatcacaggcaggaaggaagtcactgcct

SEQ ID NO: 480711 - DNA, 30 bp, Artificial Sequence
  Synthetic oligonucleotide
tcattgtttccttaacagtgattactgcct

SEQ ID NO: 480712 - DNA, 30 bp, Artificial Sequence
  Synthetic oligonucleotide
gacaaaaaacaaggcgaccttaacctgcct

SEQ ID NO: 480713 - DNA, 30 bp, Artificial Sequence
  Synthetic oligonucleotide
ccgttaagagccctttaggccacgctgcct

SEQ ID NO: 480714 - DNA, 30 bp, Artificial Sequence
  Synthetic oligonucleotide
agacacattaagtagagagacaaagtgcct

SEQ ID NO: 480715 - DNA, 30 bp, Artificial Sequence
  Synthetic oligonucleotide
tcgtaaattagtggtatggcgttcgtgcct

SEQ ID NO: 480716 - DNA, 30 bp, Artificial Sequence
  Synthetic oligonucleotide
cacttactagggaatatgaatttcgtgcct

SEQ ID NO: 480717 - DNA, 30 bp, Artificial Sequence
  Synthetic oligonucleotide
actccaaatcgcagaactcctccggtgcct

SEQ ID NO: 480718 - DNA, 30 bp, Artificial Sequence
  Synthetic oligonucleotide
gttgcgacaagtatcgtgatacgtttgcct

SEQ ID NO: 480719 - DNA, 30 bp, Artificial Sequence
  Synthetic oligonucleotide
tcgtcttagctggggatattataaaatcct

SEQ ID NO: 480720 - DNA, 30 bp, Artificial Sequence
  Synthetic oligonucleotide
caactcctaacgagcgttgccgtaaatcct

SEQ ID NO: 480721 - DNA, 30 bp, Artificial Sequence
  Synthetic oligonucleotide
ctgagttgtaactgtataatcaacaatcct

SEQ ID NO: 480722 - DNA, 30 bp, Artificial Sequence
  Synthetic oligonucleotide
tactagggtttccaccgtacgggcaatcct

SEQ ID NO: 480723 - DNA, 30 bp, Artificial Sequence
  Synthetic oligonucleotide
tacgacgttgtgagtacgacctgcaatcct

SEQ ID NO: 480724 - DNA, 30 bp, Artificial Sequence
  Synthetic oligonucleotide
aatgtacaatcgtttgcgagtatcaatcct

SEQ ID NO: 480725 - DNA, 30 bp, Artificial Sequence
  Synthetic oligonucleotide
tgtttgactttcgaggggaaaacgaatcct

SEQ ID NO: 480726 - DNA, 30 bp, Artificial Sequence
  Synthetic oligonucleotide
tctaatctataacagctaaggttgaatcct

SEQ ID NO: 480727 - DNA, 30 bp, Artificial Sequence
  Synthetic oligonucleotide
aaaatcacgaatccctactcgtgtaatcct

SEQ ID NO: 480728 - DNA, 30 bp, Artificial Sequence
  Synthetic oligonucleotide
cacttggacttggtaccaacaattaatcct

SEQ ID NO: 480729 - DNA, 30 bp, Artificial Sequence
  Synthetic oligonucleotide
tagtacatagaagcgactgtataacatcct

SEQ ID NO: 480730 - DNA, 30 bp, Artificial Sequence
  Synthetic oligonucleotide
tatcaggcgctcgtagacatggcgcatcct

SEQ ID NO: 480731 - DNA, 31 bp, Artificial Sequence
  Synthetic oligonucleotide
gttatatcgaaaggtcatgccacttcatcct

SEQ ID NO: 480732 - DNA, 30 bp, Artificial Sequence
  Synthetic oligonucleotide
ttataagtgaatagagtaaccatagatcct

SEQ ID NO: 480733 - DNA, 30 bp, Artificial Sequence
  Synthetic oligonucleotide
aaaaatttttatcaagccttcaaggatcct

SEQ ID NO: 480734 - DNA, 30 bp, Artificial Sequence
  Synthetic oligonucleotide
gttcggtacaagctagcgtatgcggatcct

SEQ ID NO: 480735 - DNA, 30 bp, Artificial Sequence
  Synthetic oligonucleotide
tctgttaaccgcgtaggtacactggatcct

SEQ ID NO: 480736 - DNA, 30 bp, Artificial Sequence
  Synthetic oligonucleotide
ttctgtcctctttaattacctttctatcct

SEQ ID NO: 480737 - DNA, 30 bp, Artificial Sequence
  Synthetic oligonucleotide
aatactctggatgactgcagtaattatcct

SEQ ID NO: 480738 - DNA, 30 bp, Artificial Sequence
  Synthetic oligonucleotide
atacagatgagtgtcctggcccgttatcct

SEQ ID NO: 480739 - DNA, 30 bp, Artificial Sequence
  Synthetic oligonucleotide
ttactatttgcggccaattgtcaaactcct

SEQ ID NO: 480740 - DNA, 30 bp, Artificial Sequence
  Synthetic oligonucleotide
gcagcaatgaggcagaaatgcggcactcct

SEQ ID NO: 480741 - DNA, 30 bp, Artificial Sequence
  Synthetic oligonucleotide
cgctccgacgttcactgaggaatgactcct

SEQ ID NO: 480742 - DNA, 30 bp, Artificial Sequence
  Synthetic oligonucleotide
atttacaaaatgcctagggctatgactcct

SEQ ID NO: 480743 - DNA, 30 bp, Artificial Sequence
  Synthetic oligonucleotide
acatggtaaccgcagaaggtgaatactcct

SEQ ID NO: 480744 - DNA, 30 bp, Artificial Sequence
  Synthetic oligonucleotide
atagagcatagcgtacaatacgctactcct

SEQ ID NO: 480745 - DNA, 30 bp, Artificial Sequence
  Synthetic oligonucleotide
gcctcttgctgacctccgagacgccctcct

SEQ ID NO: 480746 - DNA, 30 bp, Artificial Sequence
  Synthetic oligonucleotide
gacccaaactgagcatgataggagcctcct

SEQ ID NO: 480747 - DNA, 30 bp, Artificial Sequence
  Synthetic oligonucleotide
tagtgagaaccctttatgccggggcctcct

SEQ ID NO: 480748 - DNA, 30 bp, Artificial Sequence
  Synthetic oligonucleotide
ttgttggagcctccgccttcggaagctcct

SEQ ID NO: 480749 - DNA, 30 bp, Artificial Sequence
  Synthetic oligonucleotide
ttcacgggcgacttaccaggcacggctcct

SEQ ID NO: 480750 - DNA, 30 bp, Artificial Sequence
  Synthetic oligonucleotide
gacttcaccagctttcaagatatggctcct

SEQ ID NO: 480751 - DNA, 30 bp, Artificial Sequence
  Synthetic oligonucleotide
attctatgaaattggccgtctgtggctcct

SEQ ID NO: 480752 - DNA, 29 bp, Artificial Sequence
  Synthetic oligonucleotide
catggactatcaactcttagttatctcct

SEQ ID NO: 480753 - DNA, 30 bp, Artificial Sequence
  Synthetic oligonucleotide
cctatccagtattgcacgcggctctctcct

SEQ ID NO: 480754 - DNA, 30 bp, Artificial Sequence
  Synthetic oligonucleotide
tatgagctgtagccccaccaaaggtctcct

SEQ ID NO: 480755 - DNA, 30 bp, Artificial Sequence
  Synthetic oligonucleotide
ttaactcgcagcacacaaagcgaaagtcct

SEQ ID NO: 480756 - DNA, 30 bp, Artificial Sequence
  Synthetic oligonucleotide
tattaaatatgtcgttctgactaaagtcct

SEQ ID NO: 480757 - DNA, 30 bp, Artificial Sequence
  Synthetic oligonucleotide
aattcagtaaaactccctttacccagtcct

SEQ ID NO: 480758 - DNA, 30 bp, Artificial Sequence
  Synthetic oligonucleotide
ttatatcttgggaatacactttaccgtcct

SEQ ID NO: 480759 - DNA, 30 bp, Artificial Sequence
  Synthetic oligonucleotide
aagttatttactaacatatataggcgtcct

SEQ ID NO: 480760 - DNA, 30 bp, Artificial Sequence
  Synthetic oligonucleotide
gcacaccacaggcgcaaccgatggcgtcct

SEQ ID NO: 480761 - DNA, 30 bp, Artificial Sequence
  Synthetic oligonucleotide
aagggtacttatcgctacaatctgcgtcct

SEQ ID NO: 480762 - DNA, 30 bp, Artificial Sequence
  Synthetic oligonucleotide
ggatctgtatgaaactgtaattttcgtcct

SEQ ID NO: 480763 - DNA, 30 bp, Artificial Sequence
  Synthetic oligonucleotide
gtaaagatgccatggactccacaaggtcct

SEQ ID NO: 480764 - DNA, 30 bp, Artificial Sequence
  Synthetic oligonucleotide
gttctgtgaccccatttagcctgaggtcct

SEQ ID NO: 480765 - DNA, 30 bp, Artificial Sequence
  Synthetic oligonucleotide
ttcactcaccggtggcgctgtaagggtcct

SEQ ID NO: 480766 - DNA, 30 bp, Artificial Sequence
  Synthetic oligonucleotide
gaaccgtccgaaacaaataagggtggtcct

SEQ ID NO: 480767 - DNA, 30 bp, Artificial Sequence
  Synthetic oligonucleotide
ctccgagtccctagcgccataatatgtcct

SEQ ID NO: 480768 - DNA, 30 bp, Artificial Sequence
  Synthetic oligonucleotide
gttcaatgagaggcgtttatctactgtcct

SEQ ID NO: 480769 - DNA, 30 bp, Artificial Sequence
  Synthetic oligonucleotide
ggaatattgggcgatagattcgaaattcct

SEQ ID NO: 480770 - DNA, 30 bp, Artificial Sequence
  Synthetic oligonucleotide
aatccgcaaagtcgttccgtaggaattcct

SEQ ID NO: 480771 - DNA, 30 bp, Artificial Sequence
  Synthetic oligonucleotide
gcggctgcttttgtattccactccattcct

SEQ ID NO: 480772 - DNA, 30 bp, Artificial Sequence
  Synthetic oligonucleotide
ttgccggaggaattcgtctgaatcattcct

SEQ ID NO: 480773 - DNA, 30 bp, Artificial Sequence
  Synthetic oligonucleotide
gctctgtaatctcgagactggttacttcct

SEQ ID NO: 480774 - DNA, 30 bp, Artificial Sequence
  Synthetic oligonucleotide
cactgacatccgtatatgaccaaccttcct

SEQ ID NO: 480775 - DNA, 30 bp, Artificial Sequence
  Synthetic oligonucleotide
ttggactgtccttgactcatgatccttcct

SEQ ID NO: 480776 - DNA, 30 bp, Artificial Sequence
  Synthetic oligonucleotide
agtgcgtagccgcaaagatgcttccttcct

SEQ ID NO: 480777 - DNA, 30 bp, Artificial Sequence
  Synthetic oligonucleotide
caccggctctagaatctatatatgcttcct

SEQ ID NO: 480778 - DNA, 30 bp, Artificial Sequence
  Synthetic oligonucleotide
tggtcagtcattacagtcgacggtcttcct

SEQ ID NO: 480779 - DNA, 30 bp, Artificial Sequence
  Synthetic oligonucleotide
aagcggtcacgtagttgatccccagttcct

SEQ ID NO: 480780 - DNA, 30 bp, Artificial Sequence
  Synthetic oligonucleotide
gtgatacagagacttgttcctgtagttcct

SEQ ID NO: 480781 - DNA, 30 bp, Artificial Sequence
  Synthetic oligonucleotide
gtaacctaaaatgtaattacgcaggttcct

SEQ ID NO: 480782 - DNA, 30 bp, Artificial Sequence
  Synthetic oligonucleotide
cacgatccttggccgtagcggagatttcct

SEQ ID NO: 480783 - DNA, 30 bp, Artificial Sequence
  Synthetic oligonucleotide
aggttgttattcggttacccggtctttcct

SEQ ID NO: 480784 - DNA, 30 bp, Artificial Sequence
  Synthetic oligonucleotide
cgcgacacccattgagtgggcccgtttcct

SEQ ID NO: 480785 - DNA, 30 bp, Artificial Sequence
  Synthetic oligonucleotide
ggaggccttatttatgttcacacttttcct

SEQ ID NO: 480786 - DNA, 30 bp, Artificial Sequence
  Synthetic oligonucleotide
cgaatgttaacacagaacacgaacaaagct

SEQ ID NO: 480787 - DNA, 30 bp, Artificial Sequence
  Synthetic oligonucleotide
ggcttaaggaaaaattaagatgagaaagct

SEQ ID NO: 480788 - DNA, 30 bp, Artificial Sequence
  Synthetic oligonucleotide
gtccctatagtgtccttttgtctgaaagct

SEQ ID NO: 480789 - DNA, 30 bp, Artificial Sequence
  Synthetic oligonucleotide
tgcttacttataggtttgataattaaagct

SEQ ID NO: 480790 - DNA, 30 bp, Artificial Sequence
  Synthetic oligonucleotide
cgcctcttcacgcataaggggcttaaagct

SEQ ID NO: 480791 - DNA, 30 bp, Artificial Sequence
  Synthetic oligonucleotide
atacctccggtattctgcaggtaacaagct

SEQ ID NO: 480792 - DNA, 30 bp, Artificial Sequence
  Synthetic oligonucleotide
ctagtagggaggcttgggccagcccaagct

SEQ ID NO: 480793 - DNA, 30 bp, Artificial Sequence
  Synthetic oligonucleotide
attctgaaccagctttgctccatccaagct

SEQ ID NO: 480794 - DNA, 30 bp, Artificial Sequence
  Synthetic oligonucleotide
ttcagcacgtacgtcaatcggcagcaagct

SEQ ID NO: 480795 - DNA, 30 bp, Artificial Sequence
  Synthetic oligonucleotide
gaatgcgttataaatattatcttgcaagct

SEQ ID NO: 480796 - DNA, 30 bp, Artificial Sequence
  Synthetic oligonucleotide
tactttgcaaatcgcgacggaaatcaagct

SEQ ID NO: 480797 - DNA, 30 bp, Artificial Sequence
  Synthetic oligonucleotide
agcctgatggagttaagccgtgatcaagct

SEQ ID NO: 480798 - DNA, 30 bp, Artificial Sequence
  Synthetic oligonucleotide
gcagccaggtcgaacgttacacctcaagct

SEQ ID NO: 480799 - DNA, 30 bp, Artificial Sequence
  Synthetic oligonucleotide
cggcttttttcggacagcttacgcgaagct

SEQ ID NO: 480800 - DNA, 30 bp, Artificial Sequence
  Synthetic oligonucleotide
ataaacatctttatagatgattgcgaagct

SEQ ID NO: 480801 - DNA, 30 bp, Artificial Sequence
  Synthetic oligonucleotide
tcgatccgggaggttcgacatggggaagct

SEQ ID NO: 480802 - DNA, 30 bp, Artificial Sequence
  Synthetic oligonucleotide
tgttgacgaatattgcaagattttgaagct

SEQ ID NO: 480803 - DNA, 30 bp, Artificial Sequence
  Synthetic oligonucleotide
tattccattaaagatctgcatcgctaagct

SEQ ID NO: 480804 - DNA, 30 bp, Artificial Sequence
  Synthetic oligonucleotide
acccaaccggtggcatgttaatgctaagct

SEQ ID NO: 480805 - DNA, 30 bp, Artificial Sequence
  Synthetic oligonucleotide
attcagtactccgaacccgatccttaagct

SEQ ID NO: 480806 - DNA, 30 bp, Artificial Sequence
  Synthetic oligonucleotide
ggcgctttgacttgtggccaaggttaagct

SEQ ID NO: 480807 - DNA, 30 bp, Artificial Sequence
  Synthetic oligonucleotide
cgaagttaacagtttgctgaagcaacagct

SEQ ID NO: 480808 - DNA, 30 bp, Artificial Sequence
  Synthetic oligonucleotide
tgggacgtattcaagcaatggaggacagct

SEQ ID NO: 480809 - DNA, 30 bp, Artificial Sequence
  Synthetic oligonucleotide
aatccttatgggaaagggttaagaccagct

SEQ ID NO: 480810 - DNA, 30 bp, Artificial Sequence
  Synthetic oligonucleotide
atttgagggggttgtggtttcttcccagct

SEQ ID NO: 480811 - DNA, 30 bp, Artificial Sequence
  Synthetic oligonucleotide
ggttgacgactggaagttgtcgcgccagct

SEQ ID NO: 480812 - DNA, 30 bp, Artificial Sequence
  Synthetic oligonucleotide
tatctaagagtcccttagaaacatccagct

SEQ ID NO: 480813 - DNA, 30 bp, Artificial Sequence
  Synthetic oligonucleotide
aatggccaccacaacgacttttgtccagct

SEQ ID NO: 480814 - DNA, 30 bp, Artificial Sequence
  Synthetic oligonucleotide
acatttctgacaagctagtaacccgcagct

SEQ ID NO: 480815 - DNA, 30 bp, Artificial Sequence
  Synthetic oligonucleotide
ccttctctgcaagttttcaatcccgcagct

SEQ ID NO: 480816 - DNA, 30 bp, Artificial Sequence
  Synthetic oligonucleotide
ccgtaaaccacctcacagagagtcgcagct

SEQ ID NO: 480817 - DNA, 30 bp, Artificial Sequence
  Synthetic oligonucleotide
agtcaactgctgtctgagaaggaggcagct

SEQ ID NO: 480818 - DNA, 30 bp, Artificial Sequence
  Synthetic oligonucleotide
ctagtagactagtcgctagatgcggcagct

SEQ ID NO: 480819 - DNA, 30 bp, Artificial Sequence
  Synthetic oligonucleotide
cccctgcacgaggcggtgggccatgcagct

SEQ ID NO: 480820 - DNA, 30 bp, Artificial Sequence
  Synthetic oligonucleotide
aaacagtggccccttctgcgcgctgcagct

SEQ ID NO: 480821 - DNA, 30 bp, Artificial Sequence
  Synthetic oligonucleotide
gaataaggaatttatggataaatatcagct

SEQ ID NO: 480822 - DNA, 30 bp, Artificial Sequence
  Synthetic oligonucleotide
taggcgtactgatgcatatcgcaaagagct

SEQ ID NO: 480823 - DNA, 30 bp, Artificial Sequence
  Synthetic oligonucleotide
cttacactagcaacctccatactaagagct

SEQ ID NO: 480824 - DNA, 30 bp, Artificial Sequence
  Synthetic oligonucleotide
gtactaccggcgcctcccgcacccagagct

SEQ ID NO: 480825 - DNA, 30 bp, Artificial Sequence
  Synthetic oligonucleotide
tgaatactgacgtacttcctaagcagagct

SEQ ID NO: 480826 - DNA, 30 bp, Artificial Sequence
  Synthetic oligonucleotide
ccggttatgaaactctctcagcagagagct

SEQ ID NO: 480827 - DNA, 30 bp, Artificial Sequence
  Synthetic oligonucleotide
catgggtttatgatactgcaatcgagagct

SEQ ID NO: 480828 - DNA, 30 bp, Artificial Sequence
  Synthetic oligonucleotide
gactctactacaatcaattcgccacgagct

SEQ ID NO: 480829 - DNA, 30 bp, Artificial Sequence
  Synthetic oligonucleotide
cgaattcaagtccaaggttttaaccgagct

SEQ ID NO: 480830 - DNA, 30 bp, Artificial Sequence
  Synthetic oligonucleotide
ctcgcgtaactgcgactgatccctcgagct

SEQ ID NO: 480831 - DNA, 30 bp, Artificial Sequence
  Synthetic oligonucleotide
aaatagctatgtcatgtagacagtcgagct

SEQ ID NO: 480832 - DNA, 30 bp, Artificial Sequence
  Synthetic oligonucleotide
aaagtcccggtgtcggactcgaccggagct

SEQ ID NO: 480833 - DNA, 30 bp, Artificial Sequence
  Synthetic oligonucleotide
ctcattaacggctttttgtctcgcggagct

SEQ ID NO: 480834 - DNA, 30 bp, Artificial Sequence
  Synthetic oligonucleotide
caaaaattaagccctatgcactgcggagct

SEQ ID NO: 480835 - DNA, 30 bp, Artificial Sequence
  Synthetic oligonucleotide
tatttgtttccgcatttaccggtcggagct

SEQ ID NO: 480836 - DNA, 30 bp, Artificial Sequence
  Synthetic oligonucleotide
gggtgatctcgcctcatatggccgggagct

SEQ ID NO: 480837 - DNA, 30 bp, Artificial Sequence
  Synthetic oligonucleotide
gtctcccctaggttatgttaagtgggagct

SEQ ID NO: 480838 - DNA, 30 bp, Artificial Sequence
  Synthetic oligonucleotide
ggccccggcagagtatatgctaatggagct

SEQ ID NO: 480839 - DNA, 30 bp, Artificial Sequence
  Synthetic oligonucleotide
ttgataatattctttaggattagtggagct

SEQ ID NO: 480840 - DNA, 31 bp, Artificial Sequence
  Synthetic oligonucleotide
gccacccgacacgctgaagcatggtggagct

SEQ ID NO: 480841 - DNA, 30 bp, Artificial Sequence
  Synthetic oligonucleotide
cgtttggtcaattctaacaaattgtgagct

SEQ ID NO: 480842 - DNA, 30 bp, Artificial Sequence
  Synthetic oligonucleotide
aagactatactcggaactgcgtcaatagct

SEQ ID NO: 480843 - DNA, 30 bp, Artificial Sequence
  Synthetic oligonucleotide
tttagatatattggtttcggctaactagct

SEQ ID NO: 480844 - DNA, 30 bp, Artificial Sequence
  Synthetic oligonucleotide
tgatgcggctcgccccggaaacccctagct

SEQ ID NO: 480845 - DNA, 30 bp, Artificial Sequence
  Synthetic oligonucleotide
gcaactcgctctcggctcagtaagctagct

SEQ ID NO: 480846 - DNA, 30 bp, Artificial Sequence
  Synthetic oligonucleotide
gggatcttagtttgggtcgttttgctagct

SEQ ID NO: 480847 - DNA, 30 bp, Artificial Sequence
  Synthetic oligonucleotide
tcagtggtctttctcgcgtaatgtctagct

SEQ ID NO: 480848 - DNA, 30 bp, Artificial Sequence
  Synthetic oligonucleotide
ggtttattgaatttattcgactccgtagct

SEQ ID NO: 480849 - DNA, 30 bp, Artificial Sequence
  Synthetic oligonucleotide
gtcgactcaccgcaatgctacgtggtagct

SEQ ID NO: 480850 - DNA, 30 bp, Artificial Sequence
  Synthetic oligonucleotide
agcgattatatgcataagacttatgtagct

SEQ ID NO: 480851 - DNA, 30 bp, Artificial Sequence
  Synthetic oligonucleotide
ttacgcgtagtccgagttagacgtgtagct

SEQ ID NO: 480852 - DNA, 30 bp, Artificial Sequence
  Synthetic oligonucleotide
atcagttattcgatagacattaaattagct

SEQ ID NO: 480853 - DNA, 30 bp, Artificial Sequence
  Synthetic oligonucleotide
agtacgttttatgtgtattagatattagct

SEQ ID NO: 480854 - DNA, 30 bp, Artificial Sequence
  Synthetic oligonucleotide
cacttacgttggtttgaccgcctattagct

SEQ ID NO: 480855 - DNA, 30 bp, Artificial Sequence
  Synthetic oligonucleotide
cgtccatctccgttcgaggattacttagct

SEQ ID NO: 480856 - DNA, 30 bp, Artificial Sequence
  Synthetic oligonucleotide
gctaatctgcctcaagatagtcagttagct

SEQ ID NO: 480857 - DNA, 30 bp, Artificial Sequence
  Synthetic oligonucleotide
aatgatccagactggtctatctctttagct

SEQ ID NO: 480858 - DNA, 30 bp, Artificial Sequence
  Synthetic oligonucleotide
ggacgcacactggaaccgctcgttttagct

SEQ ID NO: 480859 - DNA, 30 bp, Artificial Sequence
  Synthetic oligonucleotide
gtagggctacttatgagttcgctcaacgct

SEQ ID NO: 480860 - DNA, 30 bp, Artificial Sequence
  Synthetic oligonucleotide
aggctaatactctacgattttgagaacgct

SEQ ID NO: 480861 - DNA, 30 bp, Artificial Sequence
  Synthetic oligonucleotide
actaccgccacgaatgtcgatccgaacgct

SEQ ID NO: 480862 - DNA, 30 bp, Artificial Sequence
  Synthetic oligonucleotide
tgggcactggcccggtgagggaggaacgct

SEQ ID NO: 480863 - DNA, 30 bp, Artificial Sequence
  Synthetic oligonucleotide
agaaacccgattctgtgcatgtggaacgct

SEQ ID NO: 480864 - DNA, 30 bp, Artificial Sequence
  Synthetic oligonucleotide
ctgcgtaatgcgcgggtctataataacgct

SEQ ID NO: 480865 - DNA, 30 bp, Artificial Sequence
  Synthetic oligonucleotide
tatgccgcatccacctccatctttaacgct

SEQ ID NO: 480866 - DNA, 30 bp, Artificial Sequence
  Synthetic oligonucleotide
gcgtaaaggctttgcgtaggcaagcacgct

SEQ ID NO: 480867 - DNA, 30 bp, Artificial Sequence
  Synthetic oligonucleotide
tcgccccgaccagtctcggacatgcacgct

SEQ ID NO: 480868 - DNA, 30 bp, Artificial Sequence
  Synthetic oligonucleotide
tataacgcagatgacctttttcatcacgct

SEQ ID NO: 480869 - DNA, 30 bp, Artificial Sequence
  Synthetic oligonucleotide
tcaagcggtttgctttggcaaccagacgct

SEQ ID NO: 480870 - DNA, 30 bp, Artificial Sequence
  Synthetic oligonucleotide
gtgaaatgcccgacaaagatattcgacgct

SEQ ID NO: 480871 - DNA, 30 bp, Artificial Sequence
  Synthetic oligonucleotide
ttgtaaccaagacagcagataatggacgct

SEQ ID NO: 480872 - DNA, 30 bp, Artificial Sequence
  Synthetic oligonucleotide
gatataacaacgtttgggcacatggacgct

SEQ ID NO: 480873 - DNA, 30 bp, Artificial Sequence
  Synthetic oligonucleotide
cctgtgtactatacctcggttaaatacgct

SEQ ID NO: 480874 - DNA, 30 bp, Artificial Sequence
  Synthetic oligonucleotide
ggtgcctttatcggctttttcgggtacgct

SEQ ID NO: 480875 - DNA, 30 bp, Artificial Sequence
  Synthetic oligonucleotide
gaatggcttccgccatcgtgactgtacgct

SEQ ID NO: 480876 - DNA, 30 bp, Artificial Sequence
  Synthetic oligonucleotide
atgcgccaaagcgttcatgcaaattacgct

SEQ ID NO: 480877 - DNA, 30 bp, Artificial Sequence
  Synthetic oligonucleotide
acgttttagggcgggtaattcggaaccgct

SEQ ID NO: 480878 - DNA, 30 bp, Artificial Sequence
  Synthetic oligonucleotide
ggggcggtggcacattacgtagctaccgct

SEQ ID NO: 480879 - DNA, 30 bp, Artificial Sequence
  Synthetic oligonucleotide
ttgttaacgtatatacatccgtcacccgct

SEQ ID NO: 480880 - DNA, 30 bp, Artificial Sequence
  Synthetic oligonucleotide
ttacccacgtgatgttaaccaaaatccgct

SEQ ID NO: 480881 - DNA, 30 bp, Artificial Sequence
  Synthetic oligonucleotide
ctacgcttcaagtgtattacccgatccgct

SEQ ID NO: 480882 - DNA, 30 bp, Artificial Sequence
  Synthetic oligonucleotide
ttgcgtcatgagtcacgtggtatatccgct

SEQ ID NO: 480883 - DNA, 30 bp, Artificial Sequence
  Synthetic oligonucleotide
ctccttcgagcggttgggtcattatccgct

SEQ ID NO: 480884 - DNA, 30 bp, Artificial Sequence
  Synthetic oligonucleotide
agggagagggtatctgaatcccgctccgct

SEQ ID NO: 480885 - DNA, 30 bp, Artificial Sequence
  Synthetic oligonucleotide
aaaacgtaatggttcgtaagcaagtccgct

SEQ ID NO: 480886 - DNA, 30 bp, Artificial Sequence
  Synthetic oligonucleotide
cgcgcaacgggctgtgtttaggagtccgct

SEQ ID NO: 480887 - DNA, 30 bp, Artificial Sequence
  Synthetic oligonucleotide
gctactgtgttcagctgcggttcgtccgct

SEQ ID NO: 480888 - DNA, 30 bp, Artificial Sequence
  Synthetic oligonucleotide
ttgataagcgccttagtaagtaattccgct

SEQ ID NO: 480889 - DNA, 30 bp, Artificial Sequence
  Synthetic oligonucleotide
ggtcagagcgcaactatacaaagaagcgct

SEQ ID NO: 480890 - DNA, 30 bp, Artificial Sequence
  Synthetic oligonucleotide
ttccgtatcccgaaagcgtgtataagcgct

SEQ ID NO: 480891 - DNA, 30 bp, Artificial Sequence
  Synthetic oligonucleotide
acgattacgtggagactaatcgtaagcgct

SEQ ID NO: 480892 - DNA, 30 bp, Artificial Sequence
  Synthetic oligonucleotide
aactgctatacggaccggtcattaagcgct

SEQ ID NO: 480893 - DNA, 30 bp, Artificial Sequence
  Synthetic oligonucleotide
gccatatatagggcaatgtcaggcagcgct

SEQ ID NO: 480894 - DNA, 30 bp, Artificial Sequence
  Synthetic oligonucleotide
cctgtctcagcacccccctacatcagcgct

SEQ ID NO: 480895 - DNA, 30 bp, Artificial Sequence
  Synthetic oligonucleotide
agctataccgttactaataaggatagcgct

SEQ ID NO: 480896 - DNA, 30 bp, Artificial Sequence
  Synthetic oligonucleotide
tagcgccttgcaggtaatgcttgtagcgct

SEQ ID NO: 480897 - DNA, 30 bp, Artificial Sequence
  Synthetic oligonucleotide
ttcaagttacgtgagacagccgaacgcgct

SEQ ID NO: 480898 - DNA, 30 bp, Artificial Sequence
  Synthetic oligonucleotide
ctggatgagtaaagtttggtcagacgcgct

SEQ ID NO: 480899 - DNA, 30 bp, Artificial Sequence
  Synthetic oligonucleotide
tgctgccaaatagggctctaccgacgcgct

SEQ ID NO: 480900 - DNA, 31 bp, Artificial Sequence
  Synthetic oligonucleotide
gaggtttggtgccggtaacaacatacgcgct

SEQ ID NO: 480901 - DNA, 30 bp, Artificial Sequence
  Synthetic oligonucleotide
agcttaaacggaaggcggtatccccgcgct

SEQ ID NO: 480902 - DNA, 30 bp, Artificial Sequence
  Synthetic oligonucleotide
aaatttaatctccggacggatatccgcgct

SEQ ID NO: 480903 - DNA, 30 bp, Artificial Sequence
  Synthetic oligonucleotide
cggcattcgttacaggtgttattccgcgct

SEQ ID NO: 480904 - DNA, 30 bp, Artificial Sequence
  Synthetic oligonucleotide
agctgtcatatccgtccacgcaggcgcgct

SEQ ID NO: 480905 - DNA, 30 bp, Artificial Sequence
  Synthetic oligonucleotide
tatgcgttgttgtatagctacgtgcgcgct

SEQ ID NO: 480906 - DNA, 30 bp, Artificial Sequence
  Synthetic oligonucleotide
aagcaaccgaggcattgcgggcaaggcgct

SEQ ID NO: 480907 - DNA, 30 bp, Artificial Sequence
  Synthetic oligonucleotide
cgcctattgggcggttcgccgccaggcgct

SEQ ID NO: 480908 - DNA, 30 bp, Artificial Sequence
  Synthetic oligonucleotide
caaacaagacgccatcaatcgtacggcgct

SEQ ID NO: 480909 - DNA, 30 bp, Artificial Sequence
  Synthetic oligonucleotide
gggatcaaatttggagacggcaagggcgct

SEQ ID NO: 480910 - DNA, 30 bp, Artificial Sequence
  Synthetic oligonucleotide
gaaaccaaccccatgttggtaccgggcgct

SEQ ID NO: 480911 - DNA, 31 bp, Artificial Sequence
  Synthetic oligonucleotide
accatcatcgaacgctccgtaccggggcgct

SEQ ID NO: 480912 - DNA, 30 bp, Artificial Sequence
  Synthetic oligonucleotide
accatccagccgatgtgcggctggggcgct

SEQ ID NO: 480913 - DNA, 30 bp, Artificial Sequence
  Synthetic oligonucleotide
gaaagggaatgtagaacggccctgggcgct

SEQ ID NO: 480914 - DNA, 30 bp, Artificial Sequence
  Synthetic oligonucleotide
ttgtcgctgttcaagcggagtctgggcgct

SEQ ID NO: 480915 - DNA, 30 bp, Artificial Sequence
  Synthetic oligonucleotide
gtatgcaacaattggctaccggttggcgct

SEQ ID NO: 480916 - DNA, 30 bp, Artificial Sequence
  Synthetic oligonucleotide
gtacttataatttcaaaacgaaaatgcgct

SEQ ID NO: 480917 - DNA, 29 bp, Artificial Sequence
  Synthetic oligonucleotide
ttaaggccgagtagcttaatcgatgcgct

SEQ ID NO: 480918 - DNA, 30 bp, Artificial Sequence
  Synthetic oligonucleotide
caactccgtggggtgtttaatgggtgcgct

SEQ ID NO: 480919 - DNA, 30 bp, Artificial Sequence
  Synthetic oligonucleotide
cactgtataacaaaggctgatcattgcgct

SEQ ID NO: 480920 - DNA, 30 bp, Artificial Sequence
  Synthetic oligonucleotide
ggtatgtcatcagcgttcacgtaaatcgct

SEQ ID NO: 480921 - DNA, 30 bp, Artificial Sequence
  Synthetic oligonucleotide
gtggaagcttacgcggttgtccgaatcgct

SEQ ID NO: 480922 - DNA, 30 bp, Artificial Sequence
  Synthetic oligonucleotide
attatttgtgttcgaagtcttttaatcgct

SEQ ID NO: 480923 - DNA, 30 bp, Artificial Sequence
  Synthetic oligonucleotide
gttattaataatgcaaggtggtatatcgct

SEQ ID NO: 480924 - DNA, 30 bp, Artificial Sequence
  Synthetic oligonucleotide
gaggcacagcgaagttactaagctatcgct

SEQ ID NO: 480925 - DNA, 30 bp, Artificial Sequence
  Synthetic oligonucleotide
tctcgattactaatactcgaaggtatcgct

SEQ ID NO: 480926 - DNA, 30 bp, Artificial Sequence
  Synthetic oligonucleotide
gaacccaacggcgggcaacaagaactcgct

SEQ ID NO: 480927 - DNA, 30 bp, Artificial Sequence
  Synthetic oligonucleotide
agcacgcgcagcactacgagaggactcgct

SEQ ID NO: 480928 - DNA, 30 bp, Artificial Sequence
  Synthetic oligonucleotide
ttaaaagaattgtagtggtctgtcctcgct

SEQ ID NO: 480929 - DNA, 30 bp, Artificial Sequence
  Synthetic oligonucleotide
ttccgaattggcaatatactcacagtcgct

SEQ ID NO: 480930 - DNA, 30 bp, Artificial Sequence
  Synthetic oligonucleotide
tgcaatatgcgtcgttcaaggaacgtcgct

SEQ ID NO: 480931 - DNA, 30 bp, Artificial Sequence
  Synthetic oligonucleotide
tctagatcacctactgggcgacgcgtcgct

SEQ ID NO: 480932 - DNA, 30 bp, Artificial Sequence
  Synthetic oligonucleotide
attgaccactaattataaatcccggtcgct

SEQ ID NO: 480933 - DNA, 30 bp, Artificial Sequence
  Synthetic oligonucleotide
ggatcgggtctctagtttgatatggtcgct

SEQ ID NO: 480934 - DNA, 30 bp, Artificial Sequence
  Synthetic oligonucleotide
cgatttacgcactggtagcagcttgtcgct

SEQ ID NO: 480935 - DNA, 30 bp, Artificial Sequence
  Synthetic oligonucleotide
aaaacccatatttaatattcaggattcgct

SEQ ID NO: 480936 - DNA, 30 bp, Artificial Sequence
  Synthetic oligonucleotide
ttatttaatggctgaacgctctacttcgct

SEQ ID NO: 480937 - DNA, 30 bp, Artificial Sequence
  Synthetic oligonucleotide
attcagtctactgcgccgactgatttcgct

SEQ ID NO: 480938 - DNA, 30 bp, Artificial Sequence
  Synthetic oligonucleotide
tagcggccacacagtgtcctcattttcgct

SEQ ID NO: 480939 - DNA, 30 bp, Artificial Sequence
  Synthetic oligonucleotide
cggcagggactgaacatcaagagaaaggct

SEQ ID NO: 480940 - DNA, 30 bp, Artificial Sequence
  Synthetic oligonucleotide
atccatttggcgcgggacgcactaaaggct

SEQ ID NO: 480941 - DNA, 30 bp, Artificial Sequence
  Synthetic oligonucleotide
ccgagaagtacaagcccagctgccaaggct

SEQ ID NO: 480942 - DNA, 30 bp, Artificial Sequence
  Synthetic oligonucleotide
tcgacgcagtgaacccgagcgtgcaaggct

SEQ ID NO: 480943 - DNA, 30 bp, Artificial Sequence
  Synthetic oligonucleotide
gactttaagttactctccttaaggaaggct

SEQ ID NO: 480944 - DNA, 30 bp, Artificial Sequence
  Synthetic oligonucleotide
gcccctgcacaggtcgtttaaaataaggct

SEQ ID NO: 480945 - DNA, 30 bp, Artificial Sequence
  Synthetic oligonucleotide
gtcggaagatagcaaagacagtataaggct

SEQ ID NO: 480946 - DNA, 30 bp, Artificial Sequence
  Synthetic oligonucleotide
cgtttcagatggagcttctgtattaaggct

SEQ ID NO: 480947 - DNA, 30 bp, Artificial Sequence
  Synthetic oligonucleotide
gaaccatacgctggagcgatggttaaggct

SEQ ID NO: 480948 - DNA, 30 bp, Artificial Sequence
  Synthetic oligonucleotide
atgaatcgtctggggcgttgcccacaggct

SEQ ID NO: 480949 - DNA, 30 bp, Artificial Sequence
  Synthetic oligonucleotide
tcccgtagacccaattcccatttacaggct

SEQ ID NO: 480950 - DNA, 30 bp, Artificial Sequence
  Synthetic oligonucleotide
tcccggacaggattgccgtgtacccaggct

SEQ ID NO: 480951 - DNA, 30 bp, Artificial Sequence
  Synthetic oligonucleotide
gcaaagccattgcaccttgaagcccaggct

SEQ ID NO: 480952 - DNA, 30 bp, Artificial Sequence
  Synthetic oligonucleotide
aataacgcagtggggcctttggaagaggct

SEQ ID NO: 480953 - DNA, 30 bp, Artificial Sequence
  Synthetic oligonucleotide
ggtcactgaatttaagtagaggtagaggct

SEQ ID NO: 480954 - DNA, 30 bp, Artificial Sequence
  Synthetic oligonucleotide
atacttttccgttcaactgacaaggaggct

SEQ ID NO: 480955 - DNA, 30 bp, Artificial Sequence
  Synthetic oligonucleotide
cattcagaagcaagactcatttcggaggct

SEQ ID NO: 480956 - DNA, 30 bp, Artificial Sequence
  Synthetic oligonucleotide
gttatttgacaattgtgcggcagggaggct

SEQ ID NO: 480957 - DNA, 30 bp, Artificial Sequence
  Synthetic oligonucleotide
cgggtccaacggaacaaggctcatgaggct

SEQ ID NO: 480958 - DNA, 30 bp, Artificial Sequence
  Synthetic oligonucleotide
atgtggggattcctctgcaaggatgaggct

SEQ ID NO: 480959 - DNA, 30 bp, Artificial Sequence
  Synthetic oligonucleotide
tatgaacggcggcgtagttagagtgaggct

SEQ ID NO: 480960 - DNA, 30 bp, Artificial Sequence
  Synthetic oligonucleotide
gtcgaggtgactacctgtggatttgaggct

SEQ ID NO: 480961 - DNA, 30 bp, Artificial Sequence
  Synthetic oligonucleotide
tttgttgtaccatcggatttgggataggct

SEQ ID NO: 480962 - DNA, 30 bp, Artificial Sequence
  Synthetic oligonucleotide
ttttaggagcggcttaaattgctataggct

SEQ ID NO: 480963 - DNA, 30 bp, Artificial Sequence
  Synthetic oligonucleotide
tcccgatggagtcgcaccccgccctaggct

SEQ ID NO: 480964 - DNA, 30 bp, Artificial Sequence
  Synthetic oligonucleotide
aattccttactgggcgagaaagggtaggct

SEQ ID NO: 480965 - DNA, 30 bp, Artificial Sequence
  Synthetic oligonucleotide
tgcattcacggcttgacgtaaaacacggct

SEQ ID NO: 480966 - DNA, 30 bp, Artificial Sequence
  Synthetic oligonucleotide
gacaagattttgttcccttcttacacggct

SEQ ID NO: 480967 - DNA, 30 bp, Artificial Sequence
  Synthetic oligonucleotide
cttacaagccaagtctatgacatgacggct

SEQ ID NO: 480968 - DNA, 30 bp, Artificial Sequence
  Synthetic oligonucleotide
ccaacatttgtttaggatcccttgacggct

SEQ ID NO: 480969 - DNA, 30 bp, Artificial Sequence
  Synthetic oligonucleotide
aattgatatggttcagatattaatacggct

SEQ ID NO: 480970 - DNA, 30 bp, Artificial Sequence
  Synthetic oligonucleotide
tcggtgtgaggtactttggaggatacggct

SEQ ID NO: 480971 - DNA, 30 bp, Artificial Sequence
  Synthetic oligonucleotide
gctctaatgtccgacgtgcctgatccggct

SEQ ID NO: 480972 - DNA, 30 bp, Artificial Sequence
  Synthetic oligonucleotide
aaatccttgacagtggaccagtctccggct

SEQ ID NO: 480973 - DNA, 30 bp, Artificial Sequence
  Synthetic oligonucleotide
gtaatgggtttcgttatacacaaagcggct

SEQ ID NO: 480974 - DNA, 30 bp, Artificial Sequence
  Synthetic oligonucleotide
tatgggaatggcgacgatcccggagcggct

SEQ ID NO: 480975 - DNA, 30 bp, Artificial Sequence
  Synthetic oligonucleotide
cagtccgtcgtgacccggatggtcgcggct

SEQ ID NO: 480976 - DNA, 30 bp, Artificial Sequence
  Synthetic oligonucleotide
actagggcggggtgtagggctgaggcggct

SEQ ID NO: 480977 - DNA, 30 bp, Artificial Sequence
  Synthetic oligonucleotide
ctttaagtctttaatagtaaacgggcggct

SEQ ID NO: 480978 - DNA, 30 bp, Artificial Sequence
  Synthetic oligonucleotide
acccatttagcattaagtaggtttgcggct

SEQ ID NO: 480979 - DNA, 30 bp, Artificial Sequence
  Synthetic oligonucleotide
cagggttccatgagctcttgcgcatcggct

SEQ ID NO: 480980 - DNA, 30 bp, Artificial Sequence
  Synthetic oligonucleotide
ttcccgagtgggagacatctcacctcggct

SEQ ID NO: 480981 - DNA, 30 bp, Artificial Sequence
  Synthetic oligonucleotide
tcttacacgctacagcaagtgacctcggct

SEQ ID NO: 480982 - DNA, 30 bp, Artificial Sequence
  Synthetic oligonucleotide
gagggggactcctgatagcttttttcggct

SEQ ID NO: 480983 - DNA, 30 bp, Artificial Sequence
  Synthetic oligonucleotide
ttggtgatctgagtataaataaaaagggct

SEQ ID NO: 480984 - DNA, 30 bp, Artificial Sequence
  Synthetic oligonucleotide
tgtgctttggttggctgtaccgtaagggct

SEQ ID NO: 480985 - DNA, 30 bp, Artificial Sequence
  Synthetic oligonucleotide
catcagcacgtatgtaaagaccgcagggct

SEQ ID NO: 480986 - DNA, 30 bp, Artificial Sequence
  Synthetic oligonucleotide
gatgattgtgccagagcccgccgcagggct

SEQ ID NO: 480987 - DNA, 30 bp, Artificial Sequence
  Synthetic oligonucleotide
tgctgatggcccttcacgaatttgagggct

SEQ ID NO: 480988 - DNA, 30 bp, Artificial Sequence
  Synthetic oligonucleotide
catagggctatcagttgagacatacgggct

SEQ ID NO: 480989 - DNA, 30 bp, Artificial Sequence
  Synthetic oligonucleotide
gttttgcaagtgatctcggacatacgggct

SEQ ID NO: 480990 - DNA, 30 bp, Artificial Sequence
  Synthetic oligonucleotide
cttccatggccattagcagtggatcgggct

SEQ ID NO: 480991 - DNA, 30 bp, Artificial Sequence
  Synthetic oligonucleotide
gcggcctccaattatgtagcacgtcgggct

SEQ ID NO: 480992 - DNA, 30 bp, Artificial Sequence
  Synthetic oligonucleotide
agttagttcttttacaggtttaaaggggct

SEQ ID NO: 480993 - DNA, 30 bp, Artificial Sequence
  Synthetic oligonucleotide
ttatcgggtgactgcttctttaacggggct

SEQ ID NO: 480994 - DNA, 30 bp, Artificial Sequence
  Synthetic oligonucleotide
agagttgccaagggtttcaatcacggggct

SEQ ID NO: 480995 - DNA, 30 bp, Artificial Sequence
  Synthetic oligonucleotide
tattattcacacgctgtcaaagacggggct

SEQ ID NO: 480996 - DNA, 30 bp, Artificial Sequence
  Synthetic oligonucleotide
ctcgcgggccacatatccgtttacggggct

SEQ ID NO: 480997 - DNA, 30 bp, Artificial Sequence
  Synthetic oligonucleotide
cgagagttcaggatggcgctcccgggggct

SEQ ID NO: 480998 - DNA, 30 bp, Artificial Sequence
  Synthetic oligonucleotide
tcggaatccgtcaggacttctactggggct

SEQ ID NO: 480999 - DNA, 30 bp, Artificial Sequence
  Synthetic oligonucleotide
ctcaggtagagtcccccagagagtggggct

SEQ ID NO: 481000 - DNA, 30 bp, Artificial Sequence
  Synthetic oligonucleotide
aggatgaagccttaccgattcagatgggct

SEQ ID NO: 481001 - DNA, 30 bp, Artificial Sequence
  Synthetic oligonucleotide
ataggtcaatccggtggttcgggatgggct

SEQ ID NO: 481002 - DNA, 30 bp, Artificial Sequence
  Synthetic oligonucleotide
tggggcacgaagggctgatcagcgtgggct

SEQ ID NO: 481003 - DNA, 30 bp, Artificial Sequence
  Synthetic oligonucleotide
ttagccatcagttctaagttcctttgggct

SEQ ID NO: 481004 - DNA, 30 bp, Artificial Sequence
  Synthetic oligonucleotide
gcgtttcttcgtagcctgttcagaatggct

SEQ ID NO: 481005 - DNA, 30 bp, Artificial Sequence
  Synthetic oligonucleotide
acgggtacgcagcccgtccggagaatggct

SEQ ID NO: 481006 - DNA, 30 bp, Artificial Sequence
  Synthetic oligonucleotide
cgggtccacagattaatttattgaatggct

SEQ ID NO: 481007 - DNA, 30 bp, Artificial Sequence
  Synthetic oligonucleotide
cggcagcgctacactgactccagcatggct

SEQ ID NO: 481008 - DNA, 30 bp, Artificial Sequence
  Synthetic oligonucleotide
ccagatgtattcacgcgcagagtcatggct

SEQ ID NO: 481009 - DNA, 30 bp, Artificial Sequence
  Synthetic oligonucleotide
gtccctgccggagtagtaattgtgatggct

SEQ ID NO: 481010 - DNA, 30 bp, Artificial Sequence
  Synthetic oligonucleotide
caaagccttccgactggctgcaaactggct

SEQ ID NO: 481011 - DNA, 30 bp, Artificial Sequence
  Synthetic oligonucleotide
agtgtacgagtaactagccaaaggctggct

SEQ ID NO: 481012 - DNA, 30 bp, Artificial Sequence
  Synthetic oligonucleotide
tattactcaaacggcagctatcttctggct

SEQ ID NO: 481013 - DNA, 30 bp, Artificial Sequence
  Synthetic oligonucleotide
tggacgtggcacttcgcagcaaaagtggct

SEQ ID NO: 481014 - DNA, 30 bp, Artificial Sequence
  Synthetic oligonucleotide
aatctccattcttccagctcttacgtggct

SEQ ID NO: 481015 - DNA, 30 bp, Artificial Sequence
  Synthetic oligonucleotide
tggcacgcaactttggaccgcgcggtggct

SEQ ID NO: 481016 - DNA, 30 bp, Artificial Sequence
  Synthetic oligonucleotide
ggtaaggtgggcacggtgtagaatgtggct

SEQ ID NO: 481017 - DNA, 30 bp, Artificial Sequence
  Synthetic oligonucleotide
cccaagtgatagttgggtatggttgtggct

SEQ ID NO: 481018 - DNA, 30 bp, Artificial Sequence
  Synthetic oligonucleotide
cccgggctaaacgcccgtgacgttttggct

SEQ ID NO: 481019 - DNA, 30 bp, Artificial Sequence
  Synthetic oligonucleotide
agctcgtcgcaatatgcatgggccaatgct

SEQ ID NO: 481020 - DNA, 30 bp, Artificial Sequence
  Synthetic oligonucleotide
tcttctgggtgccactagatgatcaatgct

SEQ ID NO: 481021 - DNA, 30 bp, Artificial Sequence
  Synthetic oligonucleotide
cagagggcacgctggtgccctacgaatgct

SEQ ID NO: 481022 - DNA, 30 bp, Artificial Sequence
  Synthetic oligonucleotide
tcatactgcgtattaatgcagcttaatgct

SEQ ID NO: 481023 - DNA, 30 bp, Artificial Sequence
  Synthetic oligonucleotide
accgcacctcagcacggcaaggaacatgct

SEQ ID NO: 481024 - DNA, 30 bp, Artificial Sequence
  Synthetic oligonucleotide
cggttggacctcatgcgtttacagcatgct

SEQ ID NO: 481025 - DNA, 30 bp, Artificial Sequence
  Synthetic oligonucleotide
tcactttgaggcagattcatatcgcatgct

SEQ ID NO: 481026 - DNA, 30 bp, Artificial Sequence
  Synthetic oligonucleotide
acatggacgctgggcaacaagtgtcatgct

SEQ ID NO: 481027 - DNA, 30 bp, Artificial Sequence
  Synthetic oligonucleotide
cgcagggcgcgctcatggttcattcatgct

SEQ ID NO: 481028 - DNA, 30 bp, Artificial Sequence
  Synthetic oligonucleotide
ttgacttcaatcgaagcagatcaagatgct

SEQ ID NO: 481029 - DNA, 29 bp, Artificial Sequence
  Synthetic oligonucleotide
cggcaacgatatctcacaaacgagatgct

SEQ ID NO: 481030 - DNA, 30 bp, Artificial Sequence
  Synthetic oligonucleotide
cattgggtgagtttgctgtcctgagatgct

SEQ ID NO: 481031 - DNA, 30 bp, Artificial Sequence
  Synthetic oligonucleotide
gtgttcagacagcaccgcattatagatgct

SEQ ID NO: 481032 - DNA, 30 bp, Artificial Sequence
  Synthetic oligonucleotide
tccataagtcgacacggcagccaggatgct

SEQ ID NO: 481033 - DNA, 30 bp, Artificial Sequence
  Synthetic oligonucleotide
gtgaggcatggatattccggcggggatgct

SEQ ID NO: 481034 - DNA, 30 bp, Artificial Sequence
  Synthetic oligonucleotide
tgtcactgtttcaatatgttgagtgatgct

SEQ ID NO: 481035 - DNA, 30 bp, Artificial Sequence
  Synthetic oligonucleotide
gtcattgggtaaatgttacatggtgatgct

SEQ ID NO: 481036 - DNA, 30 bp, Artificial Sequence
  Synthetic oligonucleotide
acgtctgccctgctcgcgcatgtatatgct

SEQ ID NO: 481037 - DNA, 30 bp, Artificial Sequence
  Synthetic oligonucleotide
agggacaccttagcgtgacgaagctatgct

SEQ ID NO: 481038 - DNA, 30 bp, Artificial Sequence
  Synthetic oligonucleotide
gtcccccttccgtgctgtttaggctatgct

SEQ ID NO: 481039 - DNA, 30 bp, Artificial Sequence
  Synthetic oligonucleotide
gggccgggattatccgttgccgtgtatgct

SEQ ID NO: 481040 - DNA, 30 bp, Artificial Sequence
  Synthetic oligonucleotide
ttctaagtacggacgtcggggcattatgct

SEQ ID NO: 481041 - DNA, 30 bp, Artificial Sequence
  Synthetic oligonucleotide
taatggaggcacaggtatctactttatgct

SEQ ID NO: 481042 - DNA, 30 bp, Artificial Sequence
  Synthetic oligonucleotide
aaatctgttttattaacaagtcaaactgct

SEQ ID NO: 481043 - DNA, 30 bp, Artificial Sequence
  Synthetic oligonucleotide
tctatcctccggaatgatttgcggactgct

SEQ ID NO: 481044 - DNA, 30 bp, Artificial Sequence
  Synthetic oligonucleotide
ggtgagcataggcccacgtcacgtactgct

SEQ ID NO: 481045 - DNA, 30 bp, Artificial Sequence
  Synthetic oligonucleotide
gttattaagcgcttagatggattgcctgct

SEQ ID NO: 481046 - DNA, 30 bp, Artificial Sequence
  Synthetic oligonucleotide
atggggcgtggaatgccgacgccagctgct

SEQ ID NO: 481047 - DNA, 30 bp, Artificial Sequence
  Synthetic oligonucleotide
ggtaatctcctccatgtgcgggcagctgct

SEQ ID NO: 481048 - DNA, 29 bp, Artificial Sequence
  Synthetic oligonucleotide
tcgctcccagttggggatggttcgctgct

SEQ ID NO: 481049 - DNA, 30 bp, Artificial Sequence
  Synthetic oligonucleotide
gagttgctggtgcatcgtgccggggctgct

SEQ ID NO: 481050 - DNA, 30 bp, Artificial Sequence
  Synthetic oligonucleotide
gcaattaataccgcacttgggtatgctgct

SEQ ID NO: 481051 - DNA, 30 bp, Artificial Sequence
  Synthetic oligonucleotide
gtaagttttgtggtgctttatggatctgct

SEQ ID NO: 481052 - DNA, 30 bp, Artificial Sequence
  Synthetic oligonucleotide
ggagcacataacatttgaaaacactctgct

SEQ ID NO: 481053 - DNA, 30 bp, Artificial Sequence
  Synthetic oligonucleotide
actatggacctagcagattctaggtctgct

SEQ ID NO: 481054 - DNA, 30 bp, Artificial Sequence
  Synthetic oligonucleotide
tttactaagcccaagagccgacattctgct

SEQ ID NO: 481055 - DNA, 30 bp, Artificial Sequence
  Synthetic oligonucleotide
ttagaaagcgagtctcaattcgcttctgct

SEQ ID NO: 481056 - DNA, 30 bp, Artificial Sequence
  Synthetic oligonucleotide
ttactattgaattatgaatttagttctgct

SEQ ID NO: 481057 - DNA, 30 bp, Artificial Sequence
  Synthetic oligonucleotide
aaacttgtgagttaatcaaataaaagtgct

SEQ ID NO: 481058 - DNA, 30 bp, Artificial Sequence
  Synthetic oligonucleotide
tatgttctatataaacagatgcccagtgct

SEQ ID NO: 481059 - DNA, 30 bp, Artificial Sequence
  Synthetic oligonucleotide
ccgacaagtatgaagtacaatgagagtgct

SEQ ID NO: 481060 - DNA, 30 bp, Artificial Sequence
  Synthetic oligonucleotide
attccccctttctggacaatgttgagtgct

SEQ ID NO: 481061 - DNA, 30 bp, Artificial Sequence
  Synthetic oligonucleotide
aagcggacctttgaccaattggatagtgct

SEQ ID NO: 481062 - DNA, 30 bp, Artificial Sequence
  Synthetic oligonucleotide
aaagaggccgcatcgcctacaattagtgct

SEQ ID NO: 481063 - DNA, 30 bp, Artificial Sequence
  Synthetic oligonucleotide
aacaattaggcccatctagcaattagtgct

SEQ ID NO: 481064 - DNA, 30 bp, Artificial Sequence
  Synthetic oligonucleotide
gactgtcatctcgagtaacgacgacgtgct

SEQ ID NO: 481065 - DNA, 30 bp, Artificial Sequence
  Synthetic oligonucleotide
aaccacagaggaataacttggtgacgtgct

SEQ ID NO: 481066 - DNA, 25 bp, Artificial Sequence
  Synthetic oligonucleotide
ctcgaatcgaacagatacccgtgct

SEQ ID NO: 481067 - DNA, 30 bp, Artificial Sequence
  Synthetic oligonucleotide
tgaattccctaattgaccaattgccgtgct

SEQ ID NO: 481068 - DNA, 30 bp, Artificial Sequence
  Synthetic oligonucleotide
ggactgtaaataggcgtttattagcgtgct

SEQ ID NO: 481069 - DNA, 30 bp, Artificial Sequence
  Synthetic oligonucleotide
atgtgtggatggaagtaattccacggtgct

SEQ ID NO: 481070 - DNA, 30 bp, Artificial Sequence
  Synthetic oligonucleotide
ttttcgatctaggttttctaaatcggtgct

SEQ ID NO: 481071 - DNA, 30 bp, Artificial Sequence
  Synthetic oligonucleotide
tcaatccaacgacggagactgcagggtgct

SEQ ID NO: 481072 - DNA, 30 bp, Artificial Sequence
  Synthetic oligonucleotide
tgcggtgtccattaatgccgctaatgtgct

SEQ ID NO: 481073 - DNA, 30 bp, Artificial Sequence
  Synthetic oligonucleotide
ggttcacgcactaacgacggccattgtgct

SEQ ID NO: 481074 - DNA, 30 bp, Artificial Sequence
  Synthetic oligonucleotide
tgtgatttacttatagcatgaggttgtgct

SEQ ID NO: 481075 - DNA, 30 bp, Artificial Sequence
  Synthetic oligonucleotide
ataccgataaactcatcctggtaaattgct

SEQ ID NO: 481076 - DNA, 30 bp, Artificial Sequence
  Synthetic oligonucleotide
gatagacctgtgtaatgtcgggtaattgct

SEQ ID NO: 481077 - DNA, 30 bp, Artificial Sequence
  Synthetic oligonucleotide
caattaattaggtttattaccttaattgct

SEQ ID NO: 481078 - DNA, 30 bp, Artificial Sequence
  Synthetic oligonucleotide
taccaaagtagcctattcgacaacattgct

SEQ ID NO: 481079 - DNA, 30 bp, Artificial Sequence
  Synthetic oligonucleotide
tccacgatattatattgatctttcattgct

SEQ ID NO: 481080 - DNA, 30 bp, Artificial Sequence
  Synthetic oligonucleotide
cggtgggaacagtagttactaccgattgct

SEQ ID NO: 481081 - DNA, 30 bp, Artificial Sequence
  Synthetic oligonucleotide
gtatatggagatgcggcttggcggattgct

SEQ ID NO: 481082 - DNA, 30 bp, Artificial Sequence
  Synthetic oligonucleotide
ataattattcgttcgctgcgggtgattgct

SEQ ID NO: 481083 - DNA, 30 bp, Artificial Sequence
  Synthetic oligonucleotide
tagttgtaacacaaatctttaattattgct

SEQ ID NO: 481084 - DNA, 30 bp, Artificial Sequence
  Synthetic oligonucleotide
aagcccgatctgggtactcttagacttgct

SEQ ID NO: 481085 - DNA, 30 bp, Artificial Sequence
  Synthetic oligonucleotide
gtaagagttcagcctgtccgtacccttgct

SEQ ID NO: 481086 - DNA, 30 bp, Artificial Sequence
  Synthetic oligonucleotide
ttcattccgcagcgtccttaaacgcttgct

SEQ ID NO: 481087 - DNA, 30 bp, Artificial Sequence
  Synthetic oligonucleotide
ctttgaggcaatcttgacgtaaggcttgct

SEQ ID NO: 481088 - DNA, 30 bp, Artificial Sequence
  Synthetic oligonucleotide
ccgacacttatcaggcaagtctaagttgct

SEQ ID NO: 481089 - DNA, 30 bp, Artificial Sequence
  Synthetic oligonucleotide
attagaagacaatcgcgataaagcgttgct

SEQ ID NO: 481090 - DNA, 30 bp, Artificial Sequence
  Synthetic oligonucleotide
ggtaatggtgtgatatgcggcgtatttgct

SEQ ID NO: 481091 - DNA, 30 bp, Artificial Sequence
  Synthetic oligonucleotide
tcaaaatccgcaaaggctaaaagctttgct

SEQ ID NO: 481092 - DNA, 30 bp, Artificial Sequence
  Synthetic oligonucleotide
gccgcctgagaagcgtatttgcgctttgct

SEQ ID NO: 481093 - DNA, 30 bp, Artificial Sequence
  Synthetic oligonucleotide
ctccgacatgatgtagtctagaggtttgct

SEQ ID NO: 481094 - DNA, 30 bp, Artificial Sequence
  Synthetic oligonucleotide
gtagttcaaccattctcaaaatggtttgct

SEQ ID NO: 481095 - DNA, 30 bp, Artificial Sequence
  Synthetic oligonucleotide
gaaatactatactaacagcaagattttgct

SEQ ID NO: 481096 - DNA, 30 bp, Artificial Sequence
  Synthetic oligonucleotide
cacgttctgggttttcaaagatccaaatct

SEQ ID NO: 481097 - DNA, 30 bp, Artificial Sequence
  Synthetic oligonucleotide
ccttcctggatcactcttttacgcaaatct

SEQ ID NO: 481098 - DNA, 30 bp, Artificial Sequence
  Synthetic oligonucleotide
gccagtcattgctaaaggagttgcaaatct

SEQ ID NO: 481099 - DNA, 30 bp, Artificial Sequence
  Synthetic oligonucleotide
ttgtttcttcgacgatttactgtcaaatct

SEQ ID NO: 481100 - DNA, 30 bp, Artificial Sequence
  Synthetic oligonucleotide
tgttgtttcaacttgattggcgtgaaatct

SEQ ID NO: 481101 - DNA, 30 bp, Artificial Sequence
  Synthetic oligonucleotide
ttttacacgtttgcgattggcgataaatct

SEQ ID NO: 481102 - DNA, 30 bp, Artificial Sequence
  Synthetic oligonucleotide
gtagctgtttaaagggtatccctacaatct

SEQ ID NO: 481103 - DNA, 30 bp, Artificial Sequence
  Synthetic oligonucleotide
ataacgtctccgtttgactgtttccaatct

SEQ ID NO: 481104 - DNA, 30 bp, Artificial Sequence
  Synthetic oligonucleotide
ttgcgatcatgggagtgacataggcaatct

SEQ ID NO: 481105 - DNA, 30 bp, Artificial Sequence
  Synthetic oligonucleotide
gctgaattgcacgacgtaagggggcaatct

SEQ ID NO: 481106 - DNA, 30 bp, Artificial Sequence
  Synthetic oligonucleotide
gacctcgccggcacagttgattggcaatct

SEQ ID NO: 481107 - DNA, 30 bp, Artificial Sequence
  Synthetic oligonucleotide
ccacgtggcttactactgtacgcagaatct

SEQ ID NO: 481108 - DNA, 30 bp, Artificial Sequence
  Synthetic oligonucleotide
aaaacgcctctgacaggtaaccacgaatct

SEQ ID NO: 481109 - DNA, 30 bp, Artificial Sequence
  Synthetic oligonucleotide
ggtatcttcggagaccggtgtcaggaatct

SEQ ID NO: 481110 - DNA, 30 bp, Artificial Sequence
  Synthetic oligonucleotide
tgtgcatgattcacggattacgcggaatct

SEQ ID NO: 481111 - DNA, 30 bp, Artificial Sequence
  Synthetic oligonucleotide
cgggtggtcacaaggtacagccgctaatct

SEQ ID NO: 481112 - DNA, 30 bp, Artificial Sequence
  Synthetic oligonucleotide
gtacgctcctagagtcagtggtgctaatct

SEQ ID NO: 481113 - DNA, 30 bp, Artificial Sequence
  Synthetic oligonucleotide
ttgattggaaagttcatagcgatctaatct

SEQ ID NO: 481114 - DNA, 30 bp, Artificial Sequence
  Synthetic oligonucleotide
tcaagaagatatcccgtaaaagcgtaatct

SEQ ID NO: 481115 - DNA, 30 bp, Artificial Sequence
  Synthetic oligonucleotide
tccttacccttatgcccttagcggtaatct

SEQ ID NO: 481116 - DNA, 30 bp, Artificial Sequence
  Synthetic oligonucleotide
ccttagtgaggaacgcttcttttgtaatct

SEQ ID NO: 481117 - DNA, 30 bp, Artificial Sequence
  Synthetic oligonucleotide
cattaataagatgtcaagtttcattaatct

SEQ ID NO: 481118 - DNA, 30 bp, Artificial Sequence
  Synthetic oligonucleotide
gcccgggctatagtagctattcgttaatct

SEQ ID NO: 481119 - DNA, 30 bp, Artificial Sequence
  Synthetic oligonucleotide
gaaaacccatcccgttgtggtcaaacatct

SEQ ID NO: 481120 - DNA, 30 bp, Artificial Sequence
  Synthetic oligonucleotide
tcgtaagcttaccacgcggccctcacatct

SEQ ID NO: 481121 - DNA, 30 bp, Artificial Sequence
  Synthetic oligonucleotide
ctttattatacggagtcccagctcacatct

SEQ ID NO: 481122 - DNA, 30 bp, Artificial Sequence
  Synthetic oligonucleotide
gggtagagcaataaaatccaattcacatct

SEQ ID NO: 481123 - DNA, 30 bp, Artificial Sequence
  Synthetic oligonucleotide
ttgtttgaaatcaagtctattttcacatct

SEQ ID NO: 481124 - DNA, 30 bp, Artificial Sequence
  Synthetic oligonucleotide
ttacgagtcgctgccatgctggcgacatct

SEQ ID NO: 481125 - DNA, 30 bp, Artificial Sequence
  Synthetic oligonucleotide
taacttattcgaattgattcgaggacatct

SEQ ID NO: 481126 - DNA, 30 bp, Artificial Sequence
  Synthetic oligonucleotide
tgagtttgctctctgcggctggatacatct

SEQ ID NO: 481127 - DNA, 30 bp, Artificial Sequence
  Synthetic oligonucleotide
ctagtgcaaatggttcgtttcactacatct

SEQ ID NO: 481128 - DNA, 30 bp, Artificial Sequence
  Synthetic oligonucleotide
ttcgagattctgtacggttccaacccatct

SEQ ID NO: 481129 - DNA, 30 bp, Artificial Sequence
  Synthetic oligonucleotide
gtattattcgataccaccataactccatct

SEQ ID NO: 481130 - DNA, 30 bp, Artificial Sequence
  Synthetic oligonucleotide
gaaaacaatgctcccattttttctccatct

SEQ ID NO: 481131 - DNA, 30 bp, Artificial Sequence
  Synthetic oligonucleotide
aaaattaagtcgttgactgggaaagcatct

SEQ ID NO: 481132 - DNA, 31 bp, Artificial Sequence
  Synthetic oligonucleotide
ctatagttattctaaaaggatttcagcatct

SEQ ID NO: 481133 - DNA, 30 bp, Artificial Sequence
  Synthetic oligonucleotide
ttcaattactttacgtatggccccgcatct

SEQ ID NO: 481134 - DNA, 29 bp, Artificial Sequence
  Synthetic oligonucleotide
gcccagtcatgcacccaacatgggcatct

SEQ ID NO: 481135 - DNA, 30 bp, Artificial Sequence
  Synthetic oligonucleotide
agttttgccaatagtctgcatatggcatct

SEQ ID NO: 481136 - DNA, 30 bp, Artificial Sequence
  Synthetic oligonucleotide
atcacagactcaaatttattaaaatcatct

SEQ ID NO: 481137 - DNA, 30 bp, Artificial Sequence
  Synthetic oligonucleotide
ttgtgaacgttatgacctgatagatcatct

SEQ ID NO: 481138 - DNA, 30 bp, Artificial Sequence
  Synthetic oligonucleotide
acccgcgattgcctgaggcggttatcatct

SEQ ID NO: 481139 - DNA, 30 bp, Artificial Sequence
  Synthetic oligonucleotide
cgatgtagacaaagattggagggctcatct

SEQ ID NO: 481140 - DNA, 30 bp, Artificial Sequence
  Synthetic oligonucleotide
ttaaatacgctggagtcactacagtcatct

SEQ ID NO: 481141 - DNA, 30 bp, Artificial Sequence
  Synthetic oligonucleotide
ttatccaacacaatgttggcagtgtcatct

SEQ ID NO: 481142 - DNA, 30 bp, Artificial Sequence
  Synthetic oligonucleotide
aatgtgcaaggctctcaggaggattcatct

SEQ ID NO: 481143 - DNA, 30 bp, Artificial Sequence
  Synthetic oligonucleotide
acacatggtaaatataaatattattcatct

SEQ ID NO: 481144 - DNA, 30 bp, Artificial Sequence
  Synthetic oligonucleotide
cccaggttgatttgtctttgtggttcatct

SEQ ID NO: 481145 - DNA, 30 bp, Artificial Sequence
  Synthetic oligonucleotide
gttttagtgataaataattctaaaagatct

SEQ ID NO: 481146 - DNA, 31 bp, Artificial Sequence
  Synthetic oligonucleotide
cacaattttaggtgcttttccacaaagatct

SEQ ID NO: 481147 - DNA, 30 bp, Artificial Sequence
  Synthetic oligonucleotide
cccctatatttgttatgatcaataagatct

SEQ ID NO: 481148 - DNA, 30 bp, Artificial Sequence
  Synthetic oligonucleotide
agttctacgaaccggcgcgctcacagatct

SEQ ID NO: 481149 - DNA, 30 bp, Artificial Sequence
  Synthetic oligonucleotide
ttcgcagccaagcacgtcaattccagatct

SEQ ID NO: 481150 - DNA, 30 bp, Artificial Sequence
  Synthetic oligonucleotide
aagaaaacgggtgcgataagacgcagatct

SEQ ID NO: 481151 - DNA, 30 bp, Artificial Sequence
  Synthetic oligonucleotide
agctagtgagcgcactgtctgttcagatct

SEQ ID NO: 481152 - DNA, 30 bp, Artificial Sequence
  Synthetic oligonucleotide
atgaataagtactgctccctttttagatct

SEQ ID NO: 481153 - DNA, 30 bp, Artificial Sequence
  Synthetic oligonucleotide
gcccccatggagttgacttttgatcgatct

SEQ ID NO: 481154 - DNA, 30 bp, Artificial Sequence
  Synthetic oligonucleotide
gattaactctgcactccccgcagtcgatct

SEQ ID NO: 481155 - DNA, 30 bp, Artificial Sequence
  Synthetic oligonucleotide
gggtcttggacgaatattgaggacggatct

SEQ ID NO: 481156 - DNA, 30 bp, Artificial Sequence
  Synthetic oligonucleotide
gtctgtgtaacggagcctaggattggatct

SEQ ID NO: 481157 - DNA, 30 bp, Artificial Sequence
  Synthetic oligonucleotide
aatgcaagcaaataactgccagttggatct

SEQ ID NO: 481158 - DNA, 30 bp, Artificial Sequence
  Synthetic oligonucleotide
acaacgtgctacacgtggcgtagatgatct

SEQ ID NO: 481159 - DNA, 30 bp, Artificial Sequence
  Synthetic oligonucleotide
gattagtcgtccgagtaaagcctatgatct

SEQ ID NO: 481160 - DNA, 30 bp, Artificial Sequence
  Synthetic oligonucleotide
ggaagtggtcccgacttgggaccctgatct

SEQ ID NO: 481161 - DNA, 30 bp, Artificial Sequence
  Synthetic oligonucleotide
ccacccttctatggttagtgccgctgatct

SEQ ID NO: 481162 - DNA, 30 bp, Artificial Sequence
  Synthetic oligonucleotide
gtttggagtgtttccgcatgtcaaatatct

SEQ ID NO: 481163 - DNA, 30 bp, Artificial Sequence
  Synthetic oligonucleotide
ggaatatacaactccgcgttataaatatct

SEQ ID NO: 481164 - DNA, 30 bp, Artificial Sequence
  Synthetic oligonucleotide
ggaaaacgtacagttaaaaactacatatct

SEQ ID NO: 481165 - DNA, 30 bp, Artificial Sequence
  Synthetic oligonucleotide
cctagtcgaggtactgggtgttacatatct

SEQ ID NO: 481166 - DNA, 30 bp, Artificial Sequence
  Synthetic oligonucleotide
ggggttcttacggagcatagctagatatct

SEQ ID NO: 481167 - DNA, 30 bp, Artificial Sequence
  Synthetic oligonucleotide
aagagcctagctcagaattggtggatatct

SEQ ID NO: 481168 - DNA, 30 bp, Artificial Sequence
  Synthetic oligonucleotide
ggtatttttttacacacccctgttatatct

SEQ ID NO: 481169 - DNA, 30 bp, Artificial Sequence
  Synthetic oligonucleotide
ggccactatggcgttgaacggagactatct

SEQ ID NO: 481170 - DNA, 30 bp, Artificial Sequence
  Synthetic oligonucleotide
gttatggtcaagttaccagagaccctatct

SEQ ID NO: 481171 - DNA, 30 bp, Artificial Sequence
  Synthetic oligonucleotide
attaacttcgcgcattggaacgggctatct

SEQ ID NO: 481172 - DNA, 30 bp, Artificial Sequence
  Synthetic oligonucleotide
tatccttagctcaggatggtaagtctatct

SEQ ID NO: 481173 - DNA, 30 bp, Artificial Sequence
  Synthetic oligonucleotide
cccgcagccgtcagtaaaagtattctatct

SEQ ID NO: 481174 - DNA, 30 bp, Artificial Sequence
  Synthetic oligonucleotide
gcatagccgcgcacgcaacagtaagtatct

SEQ ID NO: 481175 - DNA, 30 bp, Artificial Sequence
  Synthetic oligonucleotide
cactcaccacctcctcgaacaagagtatct

SEQ ID NO: 481176 - DNA, 30 bp, Artificial Sequence
  Synthetic oligonucleotide
ttttgacagtggcacttggatttcgtatct

SEQ ID NO: 481177 - DNA, 30 bp, Artificial Sequence
  Synthetic oligonucleotide
ttcgacccagcgtcgtgcggtcaggtatct

SEQ ID NO: 481178 - DNA, 30 bp, Artificial Sequence
  Synthetic oligonucleotide
tctgtagattaacctgagacccgggtatct

SEQ ID NO: 481179 - DNA, 30 bp, Artificial Sequence
  Synthetic oligonucleotide
tgacacgtgtaccaggtattcggggtatct

SEQ ID NO: 481180 - DNA, 30 bp, Artificial Sequence
  Synthetic oligonucleotide
aaaaacccagctggaagcgtaatggtatct

SEQ ID NO: 481181 - DNA, 30 bp, Artificial Sequence
  Synthetic oligonucleotide
ctacaaaaaatgaggcggtttagtgtatct

SEQ ID NO: 481182 - DNA, 30 bp, Artificial Sequence
  Synthetic oligonucleotide
ggcattgtaatgaacggtgtatgtgtatct

SEQ ID NO: 481183 - DNA, 30 bp, Artificial Sequence
  Synthetic oligonucleotide
agaaatgtcgttaggttttgttgattatct

SEQ ID NO: 481184 - DNA, 29 bp, Artificial Sequence
  Synthetic oligonucleotide
gaggagagacactagcgagtctattatct

SEQ ID NO: 481185 - DNA, 30 bp, Artificial Sequence
  Synthetic oligonucleotide
agtttaacctggaaccgcagcagcttatct

SEQ ID NO: 481186 - DNA, 30 bp, Artificial Sequence
  Synthetic oligonucleotide
tcacattctattactatggccctcttatct

SEQ ID NO: 481187 - DNA, 30 bp, Artificial Sequence
  Synthetic oligonucleotide
ccgaagtgctgcgccttccttgctttatct

SEQ ID NO: 481188 - DNA, 30 bp, Artificial Sequence
  Synthetic oligonucleotide
tgcatcagcccagtcaatcagtctttatct

SEQ ID NO: 481189 - DNA, 30 bp, Artificial Sequence
  Synthetic oligonucleotide
actattttcgcatagtcaccgtgtttatct

SEQ ID NO: 481190 - DNA, 30 bp, Artificial Sequence
  Synthetic oligonucleotide
tcttgtataggaaggtatggcgttttatct

SEQ ID NO: 481191 - DNA, 30 bp, Artificial Sequence
  Synthetic oligonucleotide
tccaacgcggattggcagtcgcaaaactct

SEQ ID NO: 481192 - DNA, 30 bp, Artificial Sequence
  Synthetic oligonucleotide
gtagatgagacggattagggttccaactct

SEQ ID NO: 481193 - DNA, 30 bp, Artificial Sequence
  Synthetic oligonucleotide
attcgtctagagcggggcgaagagaactct

SEQ ID NO: 481194 - DNA, 30 bp, Artificial Sequence
  Synthetic oligonucleotide
ttggctcattactcaggaaacccgaactct

SEQ ID NO: 481195 - DNA, 30 bp, Artificial Sequence
  Synthetic oligonucleotide
ttggaagaccgcagtcctgatgcacactct

SEQ ID NO: 481196 - DNA, 30 bp, Artificial Sequence
  Synthetic oligonucleotide
agaaaggagtctaaaaaatctagacactct

SEQ ID NO: 481197 - DNA, 30 bp, Artificial Sequence
  Synthetic oligonucleotide
gaggggccctcatgctccccagtacactct

SEQ ID NO: 481198 - DNA, 30 bp, Artificial Sequence
  Synthetic oligonucleotide
aatcgatgaacatacgctcaagtccactct

SEQ ID NO: 481199 - DNA, 30 bp, Artificial Sequence
  Synthetic oligonucleotide
atagatagatgcgcttttgcttctcactct

SEQ ID NO: 481200 - DNA, 30 bp, Artificial Sequence
  Synthetic oligonucleotide
tattacaggacaatcgttcaggtcgactct

SEQ ID NO: 481201 - DNA, 30 bp, Artificial Sequence
  Synthetic oligonucleotide
tggactcctcagccgtccggacaggactct

SEQ ID NO: 481202 - DNA, 30 bp, Artificial Sequence
  Synthetic oligonucleotide
accggccgttcaggcagttaacatgactct

SEQ ID NO: 481203 - DNA, 30 bp, Artificial Sequence
  Synthetic oligonucleotide
tcaggcagccctagttcgtttgcatactct

SEQ ID NO: 481204 - DNA, 30 bp, Artificial Sequence
  Synthetic oligonucleotide
gtatcatgcgcgacaggttgaggatactct

SEQ ID NO: 481205 - DNA, 30 bp, Artificial Sequence
  Synthetic oligonucleotide
aggtcatgacagccggagttaggctactct

SEQ ID NO: 481206 - DNA, 30 bp, Artificial Sequence
  Synthetic oligonucleotide
aatgtgaattcatatactgaacagtactct

SEQ ID NO: 481207 - DNA, 30 bp, Artificial Sequence
  Synthetic oligonucleotide
tgcatctaaagagacgttaaaccgtactct

SEQ ID NO: 481208 - DNA, 30 bp, Artificial Sequence
  Synthetic oligonucleotide
tagacctttagagtccaagcagggtactct

SEQ ID NO: 481209 - DNA, 30 bp, Artificial Sequence
  Synthetic oligonucleotide
aagtagcacgccgtaccagtactgtactct

SEQ ID NO: 481210 - DNA, 30 bp, Artificial Sequence
  Synthetic oligonucleotide
agtgttgtcgcgtaagatgctgcaacctct

SEQ ID NO: 481211 - DNA, 30 bp, Artificial Sequence
  Synthetic oligonucleotide
atcagtagccgctctgcatatcgaacctct

SEQ ID NO: 481212 - DNA, 30 bp, Artificial Sequence
  Synthetic oligonucleotide
agcctcgcgaaacagcgacctacgacctct

SEQ ID NO: 481213 - DNA, 30 bp, Artificial Sequence
  Synthetic oligonucleotide
caactacggaggaatgagtaaccgacctct

SEQ ID NO: 481214 - DNA, 30 bp, Artificial Sequence
  Synthetic oligonucleotide
ttggcttaaaaactatgccgctatacctct

SEQ ID NO: 481215 - DNA, 30 bp, Artificial Sequence
  Synthetic oligonucleotide
cttcccacgcgccacgccaaagaaccctct

SEQ ID NO: 481216 - DNA, 30 bp, Artificial Sequence
  Synthetic oligonucleotide
gccagctgtttatggtataatgccccctct

SEQ ID NO: 481217 - DNA, 30 bp, Artificial Sequence
  Synthetic oligonucleotide
gtccatacgcctgttcggagcatcccctct

SEQ ID NO: 481218 - DNA, 30 bp, Artificial Sequence
  Synthetic oligonucleotide
tatagtagaggcctgaaaggtcagccctct

SEQ ID NO: 481219 - DNA, 30 bp, Artificial Sequence
  Synthetic oligonucleotide
tagccgtcctatagatacgaggcgccctct

SEQ ID NO: 481220 - DNA, 30 bp, Artificial Sequence
  Synthetic oligonucleotide
atccggtgtaagtagtgccgcaggccctct

SEQ ID NO: 481221 - DNA, 30 bp, Artificial Sequence
  Synthetic oligonucleotide
agtgtaagggtagtagtcctaatgccctct

SEQ ID NO: 481222 - DNA, 30 bp, Artificial Sequence
  Synthetic oligonucleotide
aataatacggcatatcaggctcttccctct

SEQ ID NO: 481223 - DNA, 30 bp, Artificial Sequence
  Synthetic oligonucleotide
agtcgcctgacctccgcgaacccagcctct

SEQ ID NO: 481224 - DNA, 30 bp, Artificial Sequence
  Synthetic oligonucleotide
gcgctgaagaagggctaagcaagagcctct

SEQ ID NO: 481225 - DNA, 30 bp, Artificial Sequence
  Synthetic oligonucleotide
atcgctcaagagcattcttaagaatcctct

SEQ ID NO: 481226 - DNA, 30 bp, Artificial Sequence
  Synthetic oligonucleotide
aactcctggcggagccgctaaagatcctct

SEQ ID NO: 481227 - DNA, 30 bp, Artificial Sequence
  Synthetic oligonucleotide
gatcgccctcctcacaagttaggatcctct

SEQ ID NO: 481228 - DNA, 30 bp, Artificial Sequence
  Synthetic oligonucleotide
tatttgccttttggcggcagtaactcctct

SEQ ID NO: 481229 - DNA, 30 bp, Artificial Sequence
  Synthetic oligonucleotide
actctcgtagcggttgtccgctagtcctct

SEQ ID NO: 481230 - DNA, 30 bp, Artificial Sequence
  Synthetic oligonucleotide
aacaatcaatctggtcgtgtctagtcctct

SEQ ID NO: 481231 - DNA, 30 bp, Artificial Sequence
  Synthetic oligonucleotide
cagctggcgacttatatcttatgttcctct

SEQ ID NO: 481232 - DNA, 30 bp, Artificial Sequence
  Synthetic oligonucleotide
tcgcatacagaacacagaaagataagctct

SEQ ID NO: 481233 - DNA, 30 bp, Artificial Sequence
  Synthetic oligonucleotide
gtggttggctactcaggaagttccagctct

SEQ ID NO: 481234 - DNA, 30 bp, Artificial Sequence
  Synthetic oligonucleotide
tcgcggctcgctcccacaattctcagctct

SEQ ID NO: 481235 - DNA, 30 bp, Artificial Sequence
  Synthetic oligonucleotide
gaaagcgagagctcgagtcaggagagctct

SEQ ID NO: 481236 - DNA, 30 bp, Artificial Sequence
  Synthetic oligonucleotide
cttttcccgtagacattcaggtagagctct

SEQ ID NO: 481237 - DNA, 30 bp, Artificial Sequence
  Synthetic oligonucleotide
gtgtatgaattcaaccctttagaacgctct

SEQ ID NO: 481238 - DNA, 30 bp, Artificial Sequence
  Synthetic oligonucleotide
gatgatatcatatccgcacacggacgctct

SEQ ID NO: 481239 - DNA, 30 bp, Artificial Sequence
  Synthetic oligonucleotide
cggttttcagctaactgtagtagccgctct

SEQ ID NO: 481240 - DNA, 30 bp, Artificial Sequence
  Synthetic oligonucleotide
agtacttaagcgcgcattcatggccgctct

SEQ ID NO: 481241 - DNA, 30 bp, Artificial Sequence
  Synthetic oligonucleotide
ggcaactggccatgtcgctgagttcgctct

SEQ ID NO: 481242 - DNA, 30 bp, Artificial Sequence
  Synthetic oligonucleotide
gagacggtatgccagctataataaggctct

SEQ ID NO: 481243 - DNA, 30 bp, Artificial Sequence
  Synthetic oligonucleotide
caaagtgcaggacgtagacataagggctct

SEQ ID NO: 481244 - DNA, 30 bp, Artificial Sequence
  Synthetic oligonucleotide
ccctatatggcagattagtattggggctct

SEQ ID NO: 481245 - DNA, 30 bp, Artificial Sequence
  Synthetic oligonucleotide
tagtagctcagcaaatgcgctgatggctct

SEQ ID NO: 481246 - DNA, 30 bp, Artificial Sequence
  Synthetic oligonucleotide
tgtaccgtttcaatagccttatctggctct

SEQ ID NO: 481247 - DNA, 30 bp, Artificial Sequence
  Synthetic oligonucleotide
gacccagattacactgggagccttggctct

SEQ ID NO: 481248 - DNA, 30 bp, Artificial Sequence
  Synthetic oligonucleotide
aaccgcgggactaagcgcagcagctgctct

SEQ ID NO: 481249 - DNA, 30 bp, Artificial Sequence
  Synthetic oligonucleotide
cagggcgcagcagcaaataacttctgctct

SEQ ID NO: 481250 - DNA, 30 bp, Artificial Sequence
  Synthetic oligonucleotide
taagagcggaaacgacgggttcggtgctct

SEQ ID NO: 481251 - DNA, 30 bp, Artificial Sequence
  Synthetic oligonucleotide
atacccacgttagtgcatctagtttgctct

SEQ ID NO: 481252 - DNA, 30 bp, Artificial Sequence
  Synthetic oligonucleotide
tggccgtcacgttactcctcaacaatctct

SEQ ID NO: 481253 - DNA, 30 bp, Artificial Sequence
  Synthetic oligonucleotide
tacaagtcttaactggggatgttaatctct

SEQ ID NO: 481254 - DNA, 30 bp, Artificial Sequence
  Synthetic oligonucleotide
aattacagtagccgagaactaagcatctct

SEQ ID NO: 481255 - DNA, 30 bp, Artificial Sequence
  Synthetic oligonucleotide
tagtgaaaccccttcattcaacggatctct

SEQ ID NO: 481256 - DNA, 30 bp, Artificial Sequence
  Synthetic oligonucleotide
tttaggtatcacaccttgaaagtcctctct

SEQ ID NO: 481257 - DNA, 30 bp, Artificial Sequence
  Synthetic oligonucleotide
gggttaaccggggagtgaaacgggctctct

SEQ ID NO: 481258 - DNA, 30 bp, Artificial Sequence
  Synthetic oligonucleotide
ccttgtagatgctgacatcgacacgtctct

SEQ ID NO: 481259 - DNA, 30 bp, Artificial Sequence
  Synthetic oligonucleotide
agtgggatactcatgtttttaaaggtctct

SEQ ID NO: 481260 - DNA, 30 bp, Artificial Sequence
  Synthetic oligonucleotide
gtcgtacatcttttaaccgtgcgggtctct

SEQ ID NO: 481261 - DNA, 30 bp, Artificial Sequence
  Synthetic oligonucleotide
tgctaaacagtactcggcacgctggtctct

SEQ ID NO: 481262 - DNA, 30 bp, Artificial Sequence
  Synthetic oligonucleotide
accggtagatgccgaagacaacccttctct

SEQ ID NO: 481263 - DNA, 30 bp, Artificial Sequence
  Synthetic oligonucleotide
taggtttctcgcggtgcgtaagcgttctct

SEQ ID NO: 481264 - DNA, 30 bp, Artificial Sequence
  Synthetic oligonucleotide
caagaacatgtacatttcttatatttctct

SEQ ID NO: 481265 - DNA, 30 bp, Artificial Sequence
  Synthetic oligonucleotide
tgtatcgctgtgacaactggaactttctct

SEQ ID NO: 481266 - DNA, 30 bp, Artificial Sequence
  Synthetic oligonucleotide
tgaacagagacgctagcaggataaaagtct

SEQ ID NO: 481267 - DNA, 30 bp, Artificial Sequence
  Synthetic oligonucleotide
cagtatgcaacattacagaatctaaagtct

SEQ ID NO: 481268 - DNA, 30 bp, Artificial Sequence
  Synthetic oligonucleotide
agcactgctttcttaggtagctacaagtct

SEQ ID NO: 481269 - DNA, 30 bp, Artificial Sequence
  Synthetic oligonucleotide
gcaaaaacgttaggccgttctgagaagtct

SEQ ID NO: 481270 - DNA, 30 bp, Artificial Sequence
  Synthetic oligonucleotide
ttcgcgtaggtgagattgtgattgaagtct

SEQ ID NO: 481271 - DNA, 30 bp, Artificial Sequence
  Synthetic oligonucleotide
atgttatgcttgttacatctgttccagtct

SEQ ID NO: 481272 - DNA, 30 bp, Artificial Sequence
  Synthetic oligonucleotide
gggtttttatgattggttcaccggcagtct

SEQ ID NO: 481273 - DNA, 30 bp, Artificial Sequence
  Synthetic oligonucleotide
cgcgcagctagctatagagtccctcagtct

SEQ ID NO: 481274 - DNA, 30 bp, Artificial Sequence
  Synthetic oligonucleotide
tttattggttgccattgtaattttcagtct

SEQ ID NO: 481275 - DNA, 30 bp, Artificial Sequence
  Synthetic oligonucleotide
ttctactgtttctaatcaaatcacgagtct

SEQ ID NO: 481276 - DNA, 30 bp, Artificial Sequence
  Synthetic oligonucleotide
tttcgcccgtgcctgactgaatccgagtct

SEQ ID NO: 481277 - DNA, 30 bp, Artificial Sequence
  Synthetic oligonucleotide
gaccaaaagacgttcgcaatatgcgagtct

SEQ ID NO: 481278 - DNA, 30 bp, Artificial Sequence
  Synthetic oligonucleotide
gaggtccacgcaaggttctgaaatgagtct

SEQ ID NO: 481279 - DNA, 30 bp, Artificial Sequence
  Synthetic oligonucleotide
atacagaaaattttctggtggtctgagtct

SEQ ID NO: 481280 - DNA, 30 bp, Artificial Sequence
  Synthetic oligonucleotide
tctccagggggctcgtttatatttgagtct

SEQ ID NO: 481281 - DNA, 30 bp, Artificial Sequence
  Synthetic oligonucleotide
tctttcttacttctgacgctatttgagtct

SEQ ID NO: 481282 - DNA, 30 bp, Artificial Sequence
  Synthetic oligonucleotide
ggttcgtaggtgcgggtcaggacatagtct

SEQ ID NO: 481283 - DNA, 30 bp, Artificial Sequence
  Synthetic oligonucleotide
agccgagccattgggtttcgcatatagtct

SEQ ID NO: 481284 - DNA, 30 bp, Artificial Sequence
  Synthetic oligonucleotide
gatgacgtacgcaagagaaacatgtagtct

SEQ ID NO: 481285 - DNA, 30 bp, Artificial Sequence
  Synthetic oligonucleotide
gatgtgctttccggtcaaatcctgtagtct

SEQ ID NO: 481286 - DNA, 30 bp, Artificial Sequence
  Synthetic oligonucleotide
atagacgtagtaagttgttagacaacgtct

SEQ ID NO: 481287 - DNA, 30 bp, Artificial Sequence
  Synthetic oligonucleotide
ccgacgcaatcaagaacgatatacacgtct

SEQ ID NO: 481288 - DNA, 30 bp, Artificial Sequence
  Synthetic oligonucleotide
aatcagctcagttattgggtccgcacgtct

SEQ ID NO: 481289 - DNA, 30 bp, Artificial Sequence
  Synthetic oligonucleotide
cccagtctgtgtagcgagtgtaggacgtct

SEQ ID NO: 481290 - DNA, 30 bp, Artificial Sequence
  Synthetic oligonucleotide
tagatgcatcccatgaacgtggatacgtct

SEQ ID NO: 481291 - DNA, 30 bp, Artificial Sequence
  Synthetic oligonucleotide
tctaaatttccgaagctactggttacgtct

SEQ ID NO: 481292 - DNA, 30 bp, Artificial Sequence
  Synthetic oligonucleotide
gaacctaatgacttgcgatggtgaccgtct

SEQ ID NO: 481293 - DNA, 30 bp, Artificial Sequence
  Synthetic oligonucleotide
cggcttgcgctcggtgagggaccgccgtct

SEQ ID NO: 481294 - DNA, 29 bp, Artificial Sequence
  Synthetic oligonucleotide
caatctgtctgcatacgcctgacgcgtct

SEQ ID NO: 481295 - DNA, 30 bp, Artificial Sequence
  Synthetic oligonucleotide
cagcaaactcacacttaaattgaggcgtct

SEQ ID NO: 481296 - DNA, 30 bp, Artificial Sequence
  Synthetic oligonucleotide
gggcctcacctataaaaaattttatcgtct

SEQ ID NO: 481297 - DNA, 30 bp, Artificial Sequence
  Synthetic oligonucleotide
acacaagatctggaatcacgcagctcgtct

SEQ ID NO: 481298 - DNA, 30 bp, Artificial Sequence
  Synthetic oligonucleotide
agccttgacccgtctttaagacaaaggtct

SEQ ID NO: 481299 - DNA, 30 bp, Artificial Sequence
  Synthetic oligonucleotide
gacctaactgctcatatgggcacaaggtct

SEQ ID NO: 481300 - DNA, 30 bp, Artificial Sequence
  Synthetic oligonucleotide
ggcccgttcgcaagtggggcttcaaggtct

SEQ ID NO: 481301 - DNA, 30 bp, Artificial Sequence
  Synthetic oligonucleotide
tataacccatttttgagtcaagtaaggtct

SEQ ID NO: 481302 - DNA, 30 bp, Artificial Sequence
  Synthetic oligonucleotide
atataaacggatccccagtatcacaggtct

SEQ ID NO: 481303 - DNA, 30 bp, Artificial Sequence
  Synthetic oligonucleotide
atggagtcaaagccgttctcctataggtct

SEQ ID NO: 481304 - DNA, 30 bp, Artificial Sequence
  Synthetic oligonucleotide
gctcagcataaccgcgatctaaaacggtct

SEQ ID NO: 481305 - DNA, 30 bp, Artificial Sequence
  Synthetic oligonucleotide
ctcttatttaaatcgcacaatcgacggtct

SEQ ID NO: 481306 - DNA, 30 bp, Artificial Sequence
  Synthetic oligonucleotide
gatgggctgcgcttgacaataagccggtct

SEQ ID NO: 481307 - DNA, 30 bp, Artificial Sequence
  Synthetic oligonucleotide
cctgtacggaactacattaactagcggtct

SEQ ID NO: 481308 - DNA, 30 bp, Artificial Sequence
  Synthetic oligonucleotide
tggggtcgtcaacggtgtagaacgcggtct

SEQ ID NO: 481309 - DNA, 30 bp, Artificial Sequence
  Synthetic oligonucleotide
taccgaaccatacataagtaatggcggtct

SEQ ID NO: 481310 - DNA, 30 bp, Artificial Sequence
  Synthetic oligonucleotide
gattgcttataaaggggggacgctcggtct

SEQ ID NO: 481311 - DNA, 29 bp, Artificial Sequence
  Synthetic oligonucleotide
tggggcctgcgtgttgaccggctcggtct

SEQ ID NO: 481312 - DNA, 30 bp, Artificial Sequence
  Synthetic oligonucleotide
agaccgatccactgttaacacaaagggtct

SEQ ID NO: 481313 - DNA, 30 bp, Artificial Sequence
  Synthetic oligonucleotide
gcaaatccgggacgtagcagggcagggtct

SEQ ID NO: 481314 - DNA, 30 bp, Artificial Sequence
  Synthetic oligonucleotide
tccaaaagtgtatgcgccgattcagggtct

SEQ ID NO: 481315 - DNA, 30 bp, Artificial Sequence
  Synthetic oligonucleotide
gccaaaatcctggattggctgaacgggtct

SEQ ID NO: 481316 - DNA, 30 bp, Artificial Sequence
  Synthetic oligonucleotide
acttttgatacagacgtttacatcgggtct

SEQ ID NO: 481317 - DNA, 30 bp, Artificial Sequence
  Synthetic oligonucleotide
tgggcggtttgggttggatagacggggtct

SEQ ID NO: 481318 - DNA, 30 bp, Artificial Sequence
  Synthetic oligonucleotide
gtacggagcgtaggccccgtcttggggtct

SEQ ID NO: 481319 - DNA, 30 bp, Artificial Sequence
  Synthetic oligonucleotide
acctgcggtctcccgccccccactgggtct

SEQ ID NO: 481320 - DNA, 30 bp, Artificial Sequence
  Synthetic oligonucleotide
atatatcacgatggactacagtctgggtct

SEQ ID NO: 481321 - DNA, 30 bp, Artificial Sequence
  Synthetic oligonucleotide
ctcggtgggctgcccgacccatcatggtct

SEQ ID NO: 481322 - DNA, 30 bp, Artificial Sequence
  Synthetic oligonucleotide
tgataatagccacatatagcctcctggtct

SEQ ID NO: 481323 - DNA, 30 bp, Artificial Sequence
  Synthetic oligonucleotide
gttatgggcagcgcgtcactcgcgtggtct

SEQ ID NO: 481324 - DNA, 30 bp, Artificial Sequence
  Synthetic oligonucleotide
atcacaggactggagcactgtcaaatgtct

SEQ ID NO: 481325 - DNA, 30 bp, Artificial Sequence
  Synthetic oligonucleotide
gaaacctagtagagagtttgagcaatgtct

SEQ ID NO: 481326 - DNA, 30 bp, Artificial Sequence
  Synthetic oligonucleotide
aaaactttggcgatcgtcaggagaatgtct

SEQ ID NO: 481327 - DNA, 30 bp, Artificial Sequence
  Synthetic oligonucleotide
ttttaattcgcaccatcagcaatcatgtct

SEQ ID NO: 481328 - DNA, 30 bp, Artificial Sequence
  Synthetic oligonucleotide
aagcggtttacttggcgcacttcgatgtct

SEQ ID NO: 481329 - DNA, 30 bp, Artificial Sequence
  Synthetic oligonucleotide
caggtttcatggatgtgtctgatgatgtct

SEQ ID NO: 481330 - DNA, 30 bp, Artificial Sequence
  Synthetic oligonucleotide
actggtagacgatgggaagacctgatgtct

SEQ ID NO: 481331 - DNA, 30 bp, Artificial Sequence
  Synthetic oligonucleotide
aatttgtctatgtttcgggaccctatgtct

SEQ ID NO: 481332 - DNA, 30 bp, Artificial Sequence
  Synthetic oligonucleotide
gtaggcaggtatgtaaagaacgttatgtct

SEQ ID NO: 481333 - DNA, 30 bp, Artificial Sequence
  Synthetic oligonucleotide
tgaagtaatacatgctagtcgtttatgtct

SEQ ID NO: 481334 - DNA, 30 bp, Artificial Sequence
  Synthetic oligonucleotide
taagtacttatgcactcacggccactgtct

SEQ ID NO: 481335 - DNA, 30 bp, Artificial Sequence
  Synthetic oligonucleotide
tggcgtttccctagtgtcgcggcactgtct

SEQ ID NO: 481336 - DNA, 30 bp, Artificial Sequence
  Synthetic oligonucleotide
tctaacaggcctttcgctcgtggactgtct

SEQ ID NO: 481337 - DNA, 31 bp, Artificial Sequence
  Synthetic oligonucleotide
aattgctatactctcgatactgaatctgtct

SEQ ID NO: 481338 - DNA, 30 bp, Artificial Sequence
  Synthetic oligonucleotide
tatcccggttgcagatatcttattctgtct

SEQ ID NO: 481339 - DNA, 30 bp, Artificial Sequence
  Synthetic oligonucleotide
gtaactctacacactatggctgaagtgtct

SEQ ID NO: 481340 - DNA, 30 bp, Artificial Sequence
  Synthetic oligonucleotide
ccatggttgcttcagatatttgaagtgtct

SEQ ID NO: 481341 - DNA, 30 bp, Artificial Sequence
  Synthetic oligonucleotide
aattcttaggggtacttaccgtcagtgtct

SEQ ID NO: 481342 - DNA, 30 bp, Artificial Sequence
  Synthetic oligonucleotide
tagccttcgtgccgaagtctaagggtgtct

SEQ ID NO: 481343 - DNA, 30 bp, Artificial Sequence
  Synthetic oligonucleotide
caacgcagcaggtgcacttactgggtgtct

SEQ ID NO: 481344 - DNA, 30 bp, Artificial Sequence
  Synthetic oligonucleotide
agcgacttggccgcggttgagaggttgtct

SEQ ID NO: 481345 - DNA, 30 bp, Artificial Sequence
  Synthetic oligonucleotide
tgtatacaattggcgttagcactgttgtct

SEQ ID NO: 481346 - DNA, 30 bp, Artificial Sequence
  Synthetic oligonucleotide
gtaattctgggggcatgcgcagctttgtct

SEQ ID NO: 481347 - DNA, 36 bp, Artificial Sequence
  Synthetic oligonucleotide
cttacccttttagaatagctgttcgacgctttgtct

SEQ ID NO: 481348 - DNA, 30 bp, Artificial Sequence
  Synthetic oligonucleotide
ttggatttagtcaaactaaagccaaattct

SEQ ID NO: 481349 - DNA, 30 bp, Artificial Sequence
  Synthetic oligonucleotide
actatattcttgtcgggccaattaaattct

SEQ ID NO: 481350 - DNA, 30 bp, Artificial Sequence
  Synthetic oligonucleotide
ttatccatctgcaagaatttaaagaattct

SEQ ID NO: 481351 - DNA, 30 bp, Artificial Sequence
  Synthetic oligonucleotide
tcggttataaataggcaccgatcgaattct

SEQ ID NO: 481352 - DNA, 30 bp, Artificial Sequence
  Synthetic oligonucleotide
gagagatgtatacagatattagtgaattct

SEQ ID NO: 481353 - DNA, 30 bp, Artificial Sequence
  Synthetic oligonucleotide
ttttacacctccaagctaagcgaacattct

SEQ ID NO: 481354 - DNA, 30 bp, Artificial Sequence
  Synthetic oligonucleotide
tcaagaaatgcgtgtcctcctcgccattct

SEQ ID NO: 481355 - DNA, 30 bp, Artificial Sequence
  Synthetic oligonucleotide
ggtcgtaatcctcgggtattcctccattct

SEQ ID NO: 481356 - DNA, 30 bp, Artificial Sequence
  Synthetic oligonucleotide
aatgggacatctggagggtaggcgcattct

SEQ ID NO: 481357 - DNA, 30 bp, Artificial Sequence
  Synthetic oligonucleotide
ggctgctttatatacctttactcgcattct

SEQ ID NO: 481358 - DNA, 30 bp, Artificial Sequence
  Synthetic oligonucleotide
caccatatattattgcagaaaaatcattct

SEQ ID NO: 481359 - DNA, 30 bp, Artificial Sequence
  Synthetic oligonucleotide
ataaagtggtgcaactggataaatcattct

SEQ ID NO: 481360 - DNA, 30 bp, Artificial Sequence
  Synthetic oligonucleotide
attgtcaggttcgacgggaaatctcattct

SEQ ID NO: 481361 - DNA, 30 bp, Artificial Sequence
  Synthetic oligonucleotide
tgggacggcggtcaccgcgcgcgtcattct

SEQ ID NO: 481362 - DNA, 30 bp, Artificial Sequence
  Synthetic oligonucleotide
aaccaccttactttcaaagcgggtcattct

SEQ ID NO: 481363 - DNA, 30 bp, Artificial Sequence
  Synthetic oligonucleotide
ccggataagggtgcactgcttattcattct

SEQ ID NO: 481364 - DNA, 30 bp, Artificial Sequence
  Synthetic oligonucleotide
tgcgggttgtcgtgtttgacggaagattct

SEQ ID NO: 481365 - DNA, 30 bp, Artificial Sequence
  Synthetic oligonucleotide
cgaccgtagccaaggaaactgccagattct

SEQ ID NO: 481366 - DNA, 30 bp, Artificial Sequence
  Synthetic oligonucleotide
cacaatgaagcggcggaccgatacgattct

SEQ ID NO: 481367 - DNA, 30 bp, Artificial Sequence
  Synthetic oligonucleotide
tgtctagagtttttgacacatcgatattct

SEQ ID NO: 481368 - DNA, 30 bp, Artificial Sequence
  Synthetic oligonucleotide
tcgcctttcttccgaagaatttgatattct

SEQ ID NO: 481369 - DNA, 30 bp, Artificial Sequence
  Synthetic oligonucleotide
cctgagtgtttgaacgctaagatatattct

SEQ ID NO: 481370 - DNA, 30 bp, Artificial Sequence
  Synthetic oligonucleotide
ttatcgaatggagccggcgtagtctattct

SEQ ID NO: 481371 - DNA, 30 bp, Artificial Sequence
  Synthetic oligonucleotide
gggaatgctagatcgcttatcatgtattct

SEQ ID NO: 481372 - DNA, 30 bp, Artificial Sequence
  Synthetic oligonucleotide
gctgttcggcaagattctatgctttattct

SEQ ID NO: 481373 - DNA, 30 bp, Artificial Sequence
  Synthetic oligonucleotide
ccacatcgctccacaaagcatttttattct

SEQ ID NO: 481374 - DNA, 30 bp, Artificial Sequence
  Synthetic oligonucleotide
gaaagagcaaaggcgagttctttttattct

SEQ ID NO: 481375 - DNA, 30 bp, Artificial Sequence
  Synthetic oligonucleotide
tcctctattgagtaaggtccctgcacttct

SEQ ID NO: 481376 - DNA, 30 bp, Artificial Sequence
  Synthetic oligonucleotide
tacctcggtgtaggagctagagggacttct

SEQ ID NO: 481377 - DNA, 30 bp, Artificial Sequence
  Synthetic oligonucleotide
ggtacataacaaaaatgcacattgacttct

SEQ ID NO: 481378 - DNA, 30 bp, Artificial Sequence
  Synthetic oligonucleotide
gctacaggacaagtatccttgtccccttct

SEQ ID NO: 481379 - DNA, 30 bp, Artificial Sequence
  Synthetic oligonucleotide
actctgcaggtagtctgattgtctccttct

SEQ ID NO: 481380 - DNA, 30 bp, Artificial Sequence
  Synthetic oligonucleotide
ttgcccctgttaacaaaactgggagcttct

SEQ ID NO: 481381 - DNA, 30 bp, Artificial Sequence
  Synthetic oligonucleotide
acccgaagacggtcagtacagtccgcttct

SEQ ID NO: 481382 - DNA, 29 bp, Artificial Sequence
  Synthetic oligonucleotide
atagctgtcgaaaggatttaggggcttct

SEQ ID NO: 481383 - DNA, 30 bp, Artificial Sequence
  Synthetic oligonucleotide
ttcgctcattattacgtagagggggcttct

SEQ ID NO: 481384 - DNA, 30 bp, Artificial Sequence
  Synthetic oligonucleotide
aaatagtgatcgagtgtggccaactcttct

SEQ ID NO: 481385 - DNA, 30 bp, Artificial Sequence
  Synthetic oligonucleotide
taagttggtctagcgattatgaagtcttct

SEQ ID NO: 481386 - DNA, 30 bp, Artificial Sequence
  Synthetic oligonucleotide
ttgcgacgcgtgtttatatgtgtttcttct

SEQ ID NO: 481387 - DNA, 30 bp, Artificial Sequence
  Synthetic oligonucleotide
gttttgggagttctgaataaacaaagttct

SEQ ID NO: 481388 - DNA, 30 bp, Artificial Sequence
  Synthetic oligonucleotide
ttaatcccctgggcccgttgttaaagttct

SEQ ID NO: 481389 - DNA, 30 bp, Artificial Sequence
  Synthetic oligonucleotide
ctcatagattcgattctataacgaagttct

SEQ ID NO: 481390 - DNA, 30 bp, Artificial Sequence
  Synthetic oligonucleotide
cctaaagtgaattgaattatattcagttct

SEQ ID NO: 481391 - DNA, 30 bp, Artificial Sequence
  Synthetic oligonucleotide
tgtgtatggcgaccagggacgttcagttct

SEQ ID NO: 481392 - DNA, 30 bp, Artificial Sequence
  Synthetic oligonucleotide
ttgtttggacacgaattacgggtgagttct

SEQ ID NO: 481393 - DNA, 30 bp, Artificial Sequence
  Synthetic oligonucleotide
gtgggaaaacgttgtaacgtagaacgttct

SEQ ID NO: 481394 - DNA, 30 bp, Artificial Sequence
  Synthetic oligonucleotide
cagaagcttattgtgtagagataacgttct

SEQ ID NO: 481395 - DNA, 30 bp, Artificial Sequence
  Synthetic oligonucleotide
cagccacgaaatatatatatttcacgttct

SEQ ID NO: 481396 - DNA, 30 bp, Artificial Sequence
  Synthetic oligonucleotide
catttttaagagtaacggcgtcagcgttct

SEQ ID NO: 481397 - DNA, 30 bp, Artificial Sequence
  Synthetic oligonucleotide
tctgtagactacaacaagaaaacgcgttct

SEQ ID NO: 481398 - DNA, 30 bp, Artificial Sequence
  Synthetic oligonucleotide
acccacggttctttgacggacatgcgttct

SEQ ID NO: 481399 - DNA, 30 bp, Artificial Sequence
  Synthetic oligonucleotide
tgcaaggcttgggtttacaaagctcgttct

SEQ ID NO: 481400 - DNA, 30 bp, Artificial Sequence
  Synthetic oligonucleotide
gtttgagagcggtttctacacattcgttct

SEQ ID NO: 481401 - DNA, 30 bp, Artificial Sequence
  Synthetic oligonucleotide
ttcgttatcgtaaatggaacgccaggttct

SEQ ID NO: 481402 - DNA, 30 bp, Artificial Sequence
  Synthetic oligonucleotide
agggtaaatagcaatgacgaatcaggttct

SEQ ID NO: 481403 - DNA, 30 bp, Artificial Sequence
  Synthetic oligonucleotide
gtatccacaatgacaactcgaagaggttct

SEQ ID NO: 481404 - DNA, 30 bp, Artificial Sequence
  Synthetic oligonucleotide
cttgtaggaaagataatctgccgcggttct

SEQ ID NO: 481405 - DNA, 30 bp, Artificial Sequence
  Synthetic oligonucleotide
tgaatacataatcaagccgtagcgggttct

SEQ ID NO: 481406 - DNA, 30 bp, Artificial Sequence
  Synthetic oligonucleotide
aaaatgatctcacaagaaattcggggttct

SEQ ID NO: 481407 - DNA, 30 bp, Artificial Sequence
  Synthetic oligonucleotide
agcatcgagtccctgcgctcttatggttct

SEQ ID NO: 481408 - DNA, 30 bp, Artificial Sequence
  Synthetic oligonucleotide
gcgtctttacctgctcacaacgctggttct

SEQ ID NO: 481409 - DNA, 30 bp, Artificial Sequence
  Synthetic oligonucleotide
tatgtatttccttcagcagagattggttct

SEQ ID NO: 481410 - DNA, 30 bp, Artificial Sequence
  Synthetic oligonucleotide
ctgcatccggagtatcgtactggatgttct

SEQ ID NO: 481411 - DNA, 30 bp, Artificial Sequence
  Synthetic oligonucleotide
ataataatacgagctaaaaagatatgttct

SEQ ID NO: 481412 - DNA, 30 bp, Artificial Sequence
  Synthetic oligonucleotide
gccctttgtttactgtcgtgtgtttgttct

SEQ ID NO: 481413 - DNA, 30 bp, Artificial Sequence
  Synthetic oligonucleotide
aatgttgtgagctaagggattttttgttct

SEQ ID NO: 481414 - DNA, 30 bp, Artificial Sequence
  Synthetic oligonucleotide
gctaagcggtttatacttttcaaaatttct

SEQ ID NO: 481415 - DNA, 30 bp, Artificial Sequence
  Synthetic oligonucleotide
cgccaacaggcggacactgggcaaatttct

SEQ ID NO: 481416 - DNA, 30 bp, Artificial Sequence
  Synthetic oligonucleotide
gtgtagtatttagtctaagttcaaatttct

SEQ ID NO: 481417 - DNA, 30 bp, Artificial Sequence
  Synthetic oligonucleotide
aaagcaaaccctcgggaaaaataaatttct

SEQ ID NO: 481418 - DNA, 30 bp, Artificial Sequence
  Synthetic oligonucleotide
atcagaccaggttgacctttataaatttct

SEQ ID NO: 481419 - DNA, 30 bp, Artificial Sequence
  Synthetic oligonucleotide
gagtaatttcgttcgatggggtaaatttct

SEQ ID NO: 481420 - DNA, 30 bp, Artificial Sequence
  Synthetic oligonucleotide
gcggaacacagaaatcatagtcagatttct

SEQ ID NO: 481421 - DNA, 29 bp, Artificial Sequence
  Synthetic oligonucleotide
agtctggcaaagccgagacttagatttct

SEQ ID NO: 481422 - DNA, 30 bp, Artificial Sequence
  Synthetic oligonucleotide
ctatttgcagttattcaaatgtcgatttct

SEQ ID NO: 481423 - DNA, 30 bp, Artificial Sequence
  Synthetic oligonucleotide
accggcagagatgcgggcgataatatttct

SEQ ID NO: 481424 - DNA, 30 bp, Artificial Sequence
  Synthetic oligonucleotide
gaactcaatcaaaaccgtgttgatatttct

SEQ ID NO: 481425 - DNA, 30 bp, Artificial Sequence
  Synthetic oligonucleotide
gccagacaacgatttacgtacagtatttct

SEQ ID NO: 481426 - DNA, 30 bp, Artificial Sequence
  Synthetic oligonucleotide
ggttacaatataagggtggagcgactttct

SEQ ID NO: 481427 - DNA, 30 bp, Artificial Sequence
  Synthetic oligonucleotide
atcaaacgacctgtcgtgttctgcctttct

SEQ ID NO: 481428 - DNA, 30 bp, Artificial Sequence
  Synthetic oligonucleotide
tgggcagattcggctacggccgatctttct

SEQ ID NO: 481429 - DNA, 30 bp, Artificial Sequence
  Synthetic oligonucleotide
gtactctaataatttggatctggtctttct

SEQ ID NO: 481430 - DNA, 30 bp, Artificial Sequence
  Synthetic oligonucleotide
ctgttggtcagggatatgtatgtagtttct

SEQ ID NO: 481431 - DNA, 30 bp, Artificial Sequence
  Synthetic oligonucleotide
ttatcagctaacaattttaaaaacgtttct

SEQ ID NO: 481432 - DNA, 30 bp, Artificial Sequence
  Synthetic oligonucleotide
tattgtgaacaggaatcatgccgtgtttct

SEQ ID NO: 481433 - DNA, 30 bp, Artificial Sequence
  Synthetic oligonucleotide
attgttacattgcgccgtatttacttttct

SEQ ID NO: 481434 - DNA, 30 bp, Artificial Sequence
  Synthetic oligonucleotide
gtaataggacatagcatacctccgttttct

SEQ ID NO: 481435 - DNA, 30 bp, Artificial Sequence
  Synthetic oligonucleotide
aacggtcgccttcgtgcgcaggctttttct

SEQ ID NO: 481436 - DNA, 30 bp, Artificial Sequence
  Synthetic oligonucleotide
agaagacctgttactacatgtcttttttct

SEQ ID NO: 481437 - DNA, 30 bp, Artificial Sequence
  Synthetic oligonucleotide
tggtgcagggaccagggcaattcaaaaagt

SEQ ID NO: 481438 - DNA, 30 bp, Artificial Sequence
  Synthetic oligonucleotide
cacgaacccagcgttatgcaaggaaaaagt

SEQ ID NO: 481439 - DNA, 30 bp, Artificial Sequence
  Synthetic oligonucleotide
gaaacggggctcatggtacccctaaaaagt

SEQ ID NO: 481440 - DNA, 30 bp, Artificial Sequence
  Synthetic oligonucleotide
gacgttatgcagccaagattattaaaaagt

SEQ ID NO: 481441 - DNA, 30 bp, Artificial Sequence
  Synthetic oligonucleotide
agcctatccaccgtcaggatttccaaaagt

SEQ ID NO: 481442 - DNA, 30 bp, Artificial Sequence
  Synthetic oligonucleotide
cagtttatgtctcgtgcgatacgcaaaagt

SEQ ID NO: 481443 - DNA, 30 bp, Artificial Sequence
  Synthetic oligonucleotide
ttaatcaagctgttccatacgctcaaaagt

SEQ ID NO: 481444 - DNA, 30 bp, Artificial Sequence
  Synthetic oligonucleotide
acatgctaatctagaacctaagcgaaaagt

SEQ ID NO: 481445 - DNA, 30 bp, Artificial Sequence
  Synthetic oligonucleotide
tacaacggccctgacatttgtgggaaaagt

SEQ ID NO: 481446 - DNA, 30 bp, Artificial Sequence
  Synthetic oligonucleotide
caatggttaaactaagcatgtgtgaaaagt

SEQ ID NO: 481447 - DNA, 30 bp, Artificial Sequence
  Synthetic oligonucleotide
ggatgactcacccactgcgcacataaaagt

SEQ ID NO: 481448 - DNA, 30 bp, Artificial Sequence
  Synthetic oligonucleotide
gttgcagcaagtatgcaagaacttaaaagt

SEQ ID NO: 481449 - DNA, 30 bp, Artificial Sequence
  Synthetic oligonucleotide
catcttatacattaagagaggtttaaaagt

SEQ ID NO: 481450 - DNA, 30 bp, Artificial Sequence
  Synthetic oligonucleotide
catgtcgtggtacaccttttaaaacaaagt

SEQ ID NO: 481451 - DNA, 30 bp, Artificial Sequence
  Synthetic oligonucleotide
taagtagtctttggatgcacgaaacaaagt

SEQ ID NO: 481452 - DNA, 30 bp, Artificial Sequence
  Synthetic oligonucleotide
gcttccccgactgcccgctctcagcaaagt

SEQ ID NO: 481453 - DNA, 30 bp, Artificial Sequence
  Synthetic oligonucleotide
atatcatattagggcccatctgctcaaagt

SEQ ID NO: 481454 - DNA, 30 bp, Artificial Sequence
  Synthetic oligonucleotide
ttctagattcaccgattacctgttcaaagt

SEQ ID NO: 481455 - DNA, 30 bp, Artificial Sequence
  Synthetic oligonucleotide
gggaccacggctgtttagtggcgagaaagt

SEQ ID NO: 481456 - DNA, 30 bp, Artificial Sequence
  Synthetic oligonucleotide
ttcgcaaatacctcattgggcctagaaagt

SEQ ID NO: 481457 - DNA, 30 bp, Artificial Sequence
  Synthetic oligonucleotide
gtttcgtaaccgaccaattggttagaaagt

SEQ ID NO: 481458 - DNA, 30 bp, Artificial Sequence
  Synthetic oligonucleotide
aactatttctctagcacggtcgacgaaagt

SEQ ID NO: 481459 - DNA, 30 bp, Artificial Sequence
  Synthetic oligonucleotide
gtcgtgggtatgggaggtaggcgcgaaagt

SEQ ID NO: 481460 - DNA, 30 bp, Artificial Sequence
  Synthetic oligonucleotide
tgggcataaatagtgtgaggtggcgaaagt

SEQ ID NO: 481461 - DNA, 30 bp, Artificial Sequence
  Synthetic oligonucleotide
accattgctggccgtggatagtatgaaagt

SEQ ID NO: 481462 - DNA, 30 bp, Artificial Sequence
  Synthetic oligonucleotide
aaaaagttgaaatgccgatagaaataaagt

SEQ ID NO: 481463 - DNA, 30 bp, Artificial Sequence
  Synthetic oligonucleotide
acgtcgtcgctatccatgcgccgataaagt

SEQ ID NO: 481464 - DNA, 30 bp, Artificial Sequence
  Synthetic oligonucleotide
catcactggttttgtggagagtgataaagt

SEQ ID NO: 481465 - DNA, 30 bp, Artificial Sequence
  Synthetic oligonucleotide
tcagtataaagtgggggatatatataaagt

SEQ ID NO: 481466 - DNA, 30 bp, Artificial Sequence
  Synthetic oligonucleotide
gtggtaagtcgagaacacttagactaaagt

SEQ ID NO: 481467 - DNA, 30 bp, Artificial Sequence
  Synthetic oligonucleotide
cttctctacgagaccgcggatcggtaaagt

SEQ ID NO: 481468 - DNA, 30 bp, Artificial Sequence
  Synthetic oligonucleotide
ccaatgtccgaatcagctaaactgtaaagt

SEQ ID NO: 481469 - DNA, 30 bp, Artificial Sequence
  Synthetic oligonucleotide
ggtatattcgacagcgttttatcttaaagt

SEQ ID NO: 481470 - DNA, 30 bp, Artificial Sequence
  Synthetic oligonucleotide
ccctgccaacgtttgcagttggtttaaagt

SEQ ID NO: 481471 - DNA, 30 bp, Artificial Sequence
  Synthetic oligonucleotide
cgatccttcccaccggagttcgacacaagt

SEQ ID NO: 481472 - DNA, 30 bp, Artificial Sequence
  Synthetic oligonucleotide
tttcatcgatatttaaaacatgccacaagt

SEQ ID NO: 481473 - DNA, 30 bp, Artificial Sequence
  Synthetic oligonucleotide
taatgtcttacgcatatatgctagacaagt

SEQ ID NO: 481474 - DNA, 30 bp, Artificial Sequence
  Synthetic oligonucleotide
acgattttgtactggggagtttggacaagt

SEQ ID NO: 481475 - DNA, 30 bp, Artificial Sequence
  Synthetic oligonucleotide
taataagcgggggcctactattatacaagt

SEQ ID NO: 481476 - DNA, 30 bp, Artificial Sequence
  Synthetic oligonucleotide
ccaaaacgccagcttggcacaaaaccaagt

SEQ ID NO: 481477 - DNA, 30 bp, Artificial Sequence
  Synthetic oligonucleotide
gcagcaactaacctcctgtgatcaccaagt

SEQ ID NO: 481478 - DNA, 30 bp, Artificial Sequence
  Synthetic oligonucleotide
ggtgaatagaatcgacgctccttcccaagt

SEQ ID NO: 481479 - DNA, 30 bp, Artificial Sequence
  Synthetic oligonucleotide
taatttgatgaaggcagaaccaagccaagt

SEQ ID NO: 481480 - DNA, 30 bp, Artificial Sequence
  Synthetic oligonucleotide
ggatgcgccttgcaggcactgaagccaagt

SEQ ID NO: 481481 - DNA, 30 bp, Artificial Sequence
  Synthetic oligonucleotide
gctgtaattcggaatgaatttacgccaagt

SEQ ID NO: 481482 - DNA, 30 bp, Artificial Sequence
  Synthetic oligonucleotide
cgtttggcgttagattaccgctcgccaagt

SEQ ID NO: 481483 - DNA, 30 bp, Artificial Sequence
  Synthetic oligonucleotide
agtagtccgttacttgagggctggccaagt

SEQ ID NO: 481484 - DNA, 31 bp, Artificial Sequence
  Synthetic oligonucleotide
accatctgagaatgaatttagacttccaagt

SEQ ID NO: 481485 - DNA, 30 bp, Artificial Sequence
  Synthetic oligonucleotide
tgccattttgttgagactagtttcgcaagt

SEQ ID NO: 481486 - DNA, 30 bp, Artificial Sequence
  Synthetic oligonucleotide
ggcttgtacttttgagagcgttaggcaagt

SEQ ID NO: 481487 - DNA, 30 bp, Artificial Sequence
  Synthetic oligonucleotide
tatctgcacgcaggattcgatactgcaagt

SEQ ID NO: 481488 - DNA, 30 bp, Artificial Sequence
  Synthetic oligonucleotide
aaatataaggcctccggtaagccatcaagt

SEQ ID NO: 481489 - DNA, 30 bp, Artificial Sequence
  Synthetic oligonucleotide
agaatcttgaactactagcacggatcaagt

SEQ ID NO: 481490 - DNA, 30 bp, Artificial Sequence
  Synthetic oligonucleotide
gttttacccctggagtttccactatcaagt

SEQ ID NO: 481491 - DNA, 30 bp, Artificial Sequence
  Synthetic oligonucleotide
actccctgacaccccaaccggccctcaagt

SEQ ID NO: 481492 - DNA, 30 bp, Artificial Sequence
  Synthetic oligonucleotide
ggtaagttcgcggtaataccgcagtcaagt

SEQ ID NO: 481493 - DNA, 30 bp, Artificial Sequence
  Synthetic oligonucleotide
cgatgatgaagataagagccatagtcaagt

SEQ ID NO: 481494 - DNA, 30 bp, Artificial Sequence
  Synthetic oligonucleotide
tcacggagcaccacatgtcgttagtcaagt

SEQ ID NO: 481495 - DNA, 30 bp, Artificial Sequence
  Synthetic oligonucleotide
tgcaatctggagcgctacatttagtcaagt

SEQ ID NO: 481496 - DNA, 30 bp, Artificial Sequence
  Synthetic oligonucleotide
gctaaaggagcactacatcgctaaagaagt

SEQ ID NO: 481497 - DNA, 30 bp, Artificial Sequence
  Synthetic oligonucleotide
cccggtgcccactattaatgcttcagaagt

SEQ ID NO: 481498 - DNA, 30 bp, Artificial Sequence
  Synthetic oligonucleotide
aaccatccataaattcagcaaacgagaagt

SEQ ID NO: 481499 - DNA, 30 bp, Artificial Sequence
  Synthetic oligonucleotide
ggactcacaacaattctggttttccgaagt

SEQ ID NO: 481500 - DNA, 30 bp, Artificial Sequence
  Synthetic oligonucleotide
agtcaacttcatatcttatagtatcgaagt

SEQ ID NO: 481501 - DNA, 30 bp, Artificial Sequence
  Synthetic oligonucleotide
aatacacaaggtgtgacacatggtcgaagt

SEQ ID NO: 481502 - DNA, 30 bp, Artificial Sequence
  Synthetic oligonucleotide
tgcagggcgacttctacctcggttcgaagt

SEQ ID NO: 481503 - DNA, 30 bp, Artificial Sequence
  Synthetic oligonucleotide
gataagttcttaagagtctatgttcgaagt

SEQ ID NO: 481504 - DNA, 30 bp, Artificial Sequence
  Synthetic oligonucleotide
gaaaattcggtcggtttctatcgcggaagt

SEQ ID NO: 481505 - DNA, 30 bp, Artificial Sequence
  Synthetic oligonucleotide
gttacgtggttgcaccagtagcagggaagt

SEQ ID NO: 481506 - DNA, 30 bp, Artificial Sequence
  Synthetic oligonucleotide
atacggagaacttagggccagccgggaagt

SEQ ID NO: 481507 - DNA, 30 bp, Artificial Sequence
  Synthetic oligonucleotide
gtgtaacggggttgggataaaaggggaagt

SEQ ID NO: 481508 - DNA, 30 bp, Artificial Sequence
  Synthetic oligonucleotide
aaaatgatcgacctcctggttgggggaagt

SEQ ID NO: 481509 - DNA, 30 bp, Artificial Sequence
  Synthetic oligonucleotide
ggatagttggcctgaggcgaactgggaagt

SEQ ID NO: 481510 - DNA, 30 bp, Artificial Sequence
  Synthetic oligonucleotide
cccagcactttggcgctttggtgatgaagt

SEQ ID NO: 481511 - DNA, 30 bp, Artificial Sequence
  Synthetic oligonucleotide
gttcactcactaacttctgcagactgaagt

SEQ ID NO: 481512 - DNA, 30 bp, Artificial Sequence
  Synthetic oligonucleotide
cccggtgggcaaggcctctctttctgaagt

SEQ ID NO: 481513 - DNA, 30 bp, Artificial Sequence
  Synthetic oligonucleotide
ggggtgggctgttcaaacggctagtgaagt

SEQ ID NO: 481514 - DNA, 30 bp, Artificial Sequence
  Synthetic oligonucleotide
gggtaccggtgaggtagcattgggtgaagt

SEQ ID NO: 481515 - DNA, 30 bp, Artificial Sequence
  Synthetic oligonucleotide
acggatagctggtaaatgtgtacttgaagt

SEQ ID NO: 481516 - DNA, 30 bp, Artificial Sequence
  Synthetic oligonucleotide
tttgagaactgagtaggaatgcgttgaagt

SEQ ID NO: 481517 - DNA, 30 bp, Artificial Sequence
  Synthetic oligonucleotide
gtagatcgcccttgccctgtgatttgaagt

SEQ ID NO: 481518 - DNA, 30 bp, Artificial Sequence
  Synthetic oligonucleotide
agtcagaccgcgtggcgtatcctttgaagt

SEQ ID NO: 481519 - DNA, 30 bp, Artificial Sequence
  Synthetic oligonucleotide
gcagtcatagtcacgtttcgagaaataagt

SEQ ID NO: 481520 - DNA, 30 bp, Artificial Sequence
  Synthetic oligonucleotide
gcctggaattgtcttggaaggttaataagt

SEQ ID NO: 481521 - DNA, 30 bp, Artificial Sequence
  Synthetic oligonucleotide
ctaattctttagtcaggtaaacacataagt

SEQ ID NO: 481522 - DNA, 30 bp, Artificial Sequence
  Synthetic oligonucleotide
tttttacgcttgcgtagacactagataagt

SEQ ID NO: 481523 - DNA, 30 bp, Artificial Sequence
  Synthetic oligonucleotide
tcaatgcggggcatgacgcttcggataagt

SEQ ID NO: 481524 - DNA, 30 bp, Artificial Sequence
  Synthetic oligonucleotide
ccaaagcaggacacggtctcatggataagt

SEQ ID NO: 481525 - DNA, 30 bp, Artificial Sequence
  Synthetic oligonucleotide
gatgagcgaacatggacaggttatataagt

SEQ ID NO: 481526 - DNA, 30 bp, Artificial Sequence
  Synthetic oligonucleotide
gtaagagtataccatcctttaactataagt

SEQ ID NO: 481527 - DNA, 30 bp, Artificial Sequence
  Synthetic oligonucleotide
aaattaccgcttgacattatgcgtataagt

SEQ ID NO: 481528 - DNA, 30 bp, Artificial Sequence
  Synthetic oligonucleotide
cgcctactgcggtacgttcttgttataagt

SEQ ID NO: 481529 - DNA, 30 bp, Artificial Sequence
  Synthetic oligonucleotide
gcacttcaaattggccccgctgcactaagt

SEQ ID NO: 481530 - DNA, 30 bp, Artificial Sequence
  Synthetic oligonucleotide
tggcaaatttgctgattccctggactaagt

SEQ ID NO: 481531 - DNA, 30 bp, Artificial Sequence
  Synthetic oligonucleotide
ttattatgaccagtagcaaacgacctaagt

SEQ ID NO: 481532 - DNA, 30 bp, Artificial Sequence
  Synthetic oligonucleotide
ctcatgacgctatccgtgacggccctaagt

SEQ ID NO: 481533 - DNA, 30 bp, Artificial Sequence
  Synthetic oligonucleotide
atgtctcctaaggagaacatatgcctaagt

SEQ ID NO: 481534 - DNA, 30 bp, Artificial Sequence
  Synthetic oligonucleotide
aaccctgcgtatggaaattccaatctaagt

SEQ ID NO: 481535 - DNA, 30 bp, Artificial Sequence
  Synthetic oligonucleotide
gggtaacatcgttccaacggtactctaagt

SEQ ID NO: 481536 - DNA, 30 bp, Artificial Sequence
  Synthetic oligonucleotide
gagtgagcggtaagaccatcgaaagtaagt

SEQ ID NO: 481537 - DNA, 31 bp, Artificial Sequence
  Synthetic oligonucleotide
catctgtccgcaatatttggtctaagtaagt

SEQ ID NO: 481538 - DNA, 40 bp, Artificial Sequence
  Synthetic oligonucleotide
gcctggccgggtgaacggggagaccatgggcccagtaagt

SEQ ID NO: 481539 - DNA, 30 bp, Artificial Sequence
  Synthetic oligonucleotide
gctccccggtggtagtttgattcagtaagt

SEQ ID NO: 481540 - DNA, 30 bp, Artificial Sequence
  Synthetic oligonucleotide
ctcagttatttccatgcagttatagtaagt

SEQ ID NO: 481541 - DNA, 30 bp, Artificial Sequence
  Synthetic oligonucleotide
gaaatagtgataaagggggataaggtaagt

SEQ ID NO: 481542 - DNA, 30 bp, Artificial Sequence
  Synthetic oligonucleotide
ggccaatcctccgctatacgtgcggtaagt

SEQ ID NO: 481543 - DNA, 30 bp, Artificial Sequence
  Synthetic oligonucleotide
tcctctcgccggaggagtatatcggtaagt

SEQ ID NO: 481544 - DNA, 30 bp, Artificial Sequence
  Synthetic oligonucleotide
gccacttgcttcgccagcggggatgtaagt

SEQ ID NO: 481545 - DNA, 30 bp, Artificial Sequence
  Synthetic oligonucleotide
tcagtttgcaacgatttctaaggcttaagt

SEQ ID NO: 481546 - DNA, 30 bp, Artificial Sequence
  Synthetic oligonucleotide
ctcggacttactacaaaggaatagttaagt

SEQ ID NO: 481547 - DNA, 30 bp, Artificial Sequence
  Synthetic oligonucleotide
tactttcttggtacgtttcgcgggttaagt

SEQ ID NO: 481548 - DNA, 30 bp, Artificial Sequence
  Synthetic oligonucleotide
tttattcggctacctcatactctgttaagt

SEQ ID NO: 481549 - DNA, 30 bp, Artificial Sequence
  Synthetic oligonucleotide
ccacagactttgtcagtaggggtgttaagt

SEQ ID NO: 481550 - DNA, 30 bp, Artificial Sequence
  Synthetic oligonucleotide
tgactaaatcgccttgatagttatttaagt

SEQ ID NO: 481551 - DNA, 30 bp, Artificial Sequence
  Synthetic oligonucleotide
agcctttggcccgacgctcaaataaacagt

SEQ ID NO: 481552 - DNA, 30 bp, Artificial Sequence
  Synthetic oligonucleotide
aacctctttctatctgatcttataaacagt

SEQ ID NO: 481553 - DNA, 30 bp, Artificial Sequence
  Synthetic oligonucleotide
aatctgtgaaatcatggccgagccaacagt

SEQ ID NO: 481554 - DNA, 30 bp, Artificial Sequence
  Synthetic oligonucleotide
tctgaggcacagttgtggtagcgcaacagt

SEQ ID NO: 481555 - DNA, 30 bp, Artificial Sequence
  Synthetic oligonucleotide
cttccgcctacctacggaagctgcaacagt

SEQ ID NO: 481556 - DNA, 30 bp, Artificial Sequence
  Synthetic oligonucleotide
cagggtctattaaacgagcctgggaacagt

SEQ ID NO: 481557 - DNA, 30 bp, Artificial Sequence
  Synthetic oligonucleotide
tcttctattatagtggtagtttggaacagt

SEQ ID NO: 481558 - DNA, 30 bp, Artificial Sequence
  Synthetic oligonucleotide
gtaagttcctttgatcgtcgccgacacagt

SEQ ID NO: 481559 - DNA, 30 bp, Artificial Sequence
  Synthetic oligonucleotide
cacaacaacgggtataggtaaatacacagt

SEQ ID NO: 481560 - DNA, 30 bp, Artificial Sequence
  Synthetic oligonucleotide
gtacaggccctcacttccccggggcacagt

SEQ ID NO: 481561 - DNA, 30 bp, Artificial Sequence
  Synthetic oligonucleotide
gatatttgcgctattttggcatggcacagt

SEQ ID NO: 481562 - DNA, 30 bp, Artificial Sequence
  Synthetic oligonucleotide
ctgtttgtagatagctgcatgatgcacagt

SEQ ID NO: 481563 - DNA, 30 bp, Artificial Sequence
  Synthetic oligonucleotide
accagccgtggctgacgatgagttcacagt

SEQ ID NO: 481564 - DNA, 30 bp, Artificial Sequence
  Synthetic oligonucleotide
gatactgctgagatgtgctttgttcacagt

SEQ ID NO: 481565 - DNA, 30 bp, Artificial Sequence
  Synthetic oligonucleotide
agaacgttccggggactcagctaagacagt

SEQ ID NO: 481566 - DNA, 30 bp, Artificial Sequence
  Synthetic oligonucleotide
tcatccttagatgcgatgactgtagacagt

SEQ ID NO: 481567 - DNA, 30 bp, Artificial Sequence
  Synthetic oligonucleotide
cactttcaggagtaaactacatccgacagt

SEQ ID NO: 481568 - DNA, 30 bp, Artificial Sequence
  Synthetic oligonucleotide
ccagcaacgttattagatcgcttcgacagt

SEQ ID NO: 481569 - DNA, 30 bp, Artificial Sequence
  Synthetic oligonucleotide
tttccccgaggggggaatgatagggacagt

SEQ ID NO: 481570 - DNA, 30 bp, Artificial Sequence
  Synthetic oligonucleotide
ccgtctgcggcccgacgactggtggacagt

SEQ ID NO: 481571 - DNA, 30 bp, Artificial Sequence
  Synthetic oligonucleotide
aacaacccatgctcccgatgggttgacagt

SEQ ID NO: 481572 - DNA, 30 bp, Artificial Sequence
  Synthetic oligonucleotide
tattattaatcgttccagggggtatacagt

SEQ ID NO: 481573 - DNA, 30 bp, Artificial Sequence
  Synthetic oligonucleotide
tctcccacgacaaacaactcagggtacagt

SEQ ID NO: 481574 - DNA, 30 bp, Artificial Sequence
  Synthetic oligonucleotide
atattgagcattcgacgccgagattacagt

SEQ ID NO: 481575 - DNA, 30 bp, Artificial Sequence
  Synthetic oligonucleotide
ggctagtccgcatgaacctggccttacagt

SEQ ID NO: 481576 - DNA, 30 bp, Artificial Sequence
  Synthetic oligonucleotide
ttaacttcattctgagggttacgttacagt

SEQ ID NO: 481577 - DNA, 30 bp, Artificial Sequence
  Synthetic oligonucleotide
ttgactatccgcggccttgccgtttacagt

SEQ ID NO: 481578 - DNA, 30 bp, Artificial Sequence
  Synthetic oligonucleotide
gtcattttaaatctgtatgtggaaaccagt

SEQ ID NO: 481579 - DNA, 30 bp, Artificial Sequence
  Synthetic oligonucleotide
ctcggcttggttttcacccgaagaaccagt

SEQ ID NO: 481580 - DNA, 30 bp, Artificial Sequence
  Synthetic oligonucleotide
aagtttaaatcaataatttcactaaccagt

SEQ ID NO: 481581 - DNA, 30 bp, Artificial Sequence
  Synthetic oligonucleotide
caaccggttggcatcctacagctaaccagt

SEQ ID NO: 481582 - DNA, 30 bp, Artificial Sequence
  Synthetic oligonucleotide
cgcaacagtaacattagtatcttaaccagt

SEQ ID NO: 481583 - DNA, 30 bp, Artificial Sequence
  Synthetic oligonucleotide
cttcccgtagtggcacgtgttgtccccagt

SEQ ID NO: 481584 - DNA, 30 bp, Artificial Sequence
  Synthetic oligonucleotide
caagtcgatgtggcgtccccagacgccagt

SEQ ID NO: 481585 - DNA, 30 bp, Artificial Sequence
  Synthetic oligonucleotide
gaggcgcagatctaatacctagccgccagt

SEQ ID NO: 481586 - DNA, 30 bp, Artificial Sequence
  Synthetic oligonucleotide
acatgccgggaaaccctcaagacggccagt

SEQ ID NO: 481587 - DNA, 30 bp, Artificial Sequence
  Synthetic oligonucleotide
ttgtacgtagcgtgagtcaatagggccagt

SEQ ID NO: 481588 - DNA, 30 bp, Artificial Sequence
  Synthetic oligonucleotide
caatatttagctaccgcgagcattgccagt

SEQ ID NO: 481589 - DNA, 30 bp, Artificial Sequence
  Synthetic oligonucleotide
ccttcgtatacaacggctgtccttgccagt

SEQ ID NO: 481590 - DNA, 30 bp, Artificial Sequence
  Synthetic oligonucleotide
tactggaagtctttggcttagcaatccagt

SEQ ID NO: 481591 - DNA, 30 bp, Artificial Sequence
  Synthetic oligonucleotide
taactctggccatattcaaaataatccagt

SEQ ID NO: 481592 - DNA, 30 bp, Artificial Sequence
  Synthetic oligonucleotide
tttcagtactaacatggcgcaatgtccagt

SEQ ID NO: 481593 - DNA, 30 bp, Artificial Sequence
  Synthetic oligonucleotide
cttcagcaactgtgaggtcctggttccagt

SEQ ID NO: 481594 - DNA, 30 bp, Artificial Sequence
  Synthetic oligonucleotide
ctattagcgggtagaagagtggacagcagt

SEQ ID NO: 481595 - DNA, 30 bp, Artificial Sequence
  Synthetic oligonucleotide
ataatctccgttatgcgcaggaccagcagt

SEQ ID NO: 481596 - DNA, 30 bp, Artificial Sequence
  Synthetic oligonucleotide
ttgtttcctcggcctgataggctcagcagt

SEQ ID NO: 481597 - DNA, 30 bp, Artificial Sequence
  Synthetic oligonucleotide
catctccctcgcgcatcacctcttagcagt

SEQ ID NO: 481598 - DNA, 30 bp, Artificial Sequence
  Synthetic oligonucleotide
ctaatcataaacgctcttcggtcccgcagt

SEQ ID NO: 481599 - DNA, 30 bp, Artificial Sequence
  Synthetic oligonucleotide
atatgtgatgggggttgggttgagcgcagt

SEQ ID NO: 481600 - DNA, 30 bp, Artificial Sequence
  Synthetic oligonucleotide
cggtaaggagggtcaccgacgtcgcgcagt

SEQ ID NO: 481601 - DNA, 30 bp, Artificial Sequence
  Synthetic oligonucleotide
gacatcccaaccttggtagtggtgcgcagt

SEQ ID NO: 481602 - DNA, 30 bp, Artificial Sequence
  Synthetic oligonucleotide
ggtgggcctttgcgattggtagatcgcagt

SEQ ID NO: 481603 - DNA, 30 bp, Artificial Sequence
  Synthetic oligonucleotide
ttttgtgcagtcggaaacctgcacggcagt

SEQ ID NO: 481604 - DNA, 30 bp, Artificial Sequence
  Synthetic oligonucleotide
ggaacttggttgccgctaaagaagggcagt

SEQ ID NO: 481605 - DNA, 30 bp, Artificial Sequence
  Synthetic oligonucleotide
tattttagatggcaagggcacaatggcagt

SEQ ID NO: 481606 - DNA, 30 bp, Artificial Sequence
  Synthetic oligonucleotide
ccaaacaatggtctcgtctttgctggcagt

SEQ ID NO: 481607 - DNA, 30 bp, Artificial Sequence
  Synthetic oligonucleotide
cgtgccgcttaatcaggtgtatgtggcagt

SEQ ID NO: 481608 - DNA, 30 bp, Artificial Sequence
  Synthetic oligonucleotide
acttcgcgtacccccgtcgggtgatgcagt

SEQ ID NO: 481609 - DNA, 30 bp, Artificial Sequence
  Synthetic oligonucleotide
aacaccttgcctgcactctaccactgcagt

SEQ ID NO: 481610 - DNA, 30 bp, Artificial Sequence
  Synthetic oligonucleotide
tcataaggaccagatccagttacctgcagt

SEQ ID NO: 481611 - DNA, 30 bp, Artificial Sequence
  Synthetic oligonucleotide
gagggtttttcttttgagttgctctgcagt

SEQ ID NO: 481612 - DNA, 30 bp, Artificial Sequence
  Synthetic oligonucleotide
ggtatcgcttcatgcgatcatgtctgcagt

SEQ ID NO: 481613 - DNA, 30 bp, Artificial Sequence
  Synthetic oligonucleotide
cgagaagtaggtgtgtcttacgcttgcagt

SEQ ID NO: 481614 - DNA, 30 bp, Artificial Sequence
  Synthetic oligonucleotide
ccgtgtccccatccttgctcgttttgcagt

SEQ ID NO: 481615 - DNA, 31 bp, Artificial Sequence
  Synthetic oligonucleotide
aatgttcgttgtttatatttcaaaaatcagt

SEQ ID NO: 481616 - DNA, 30 bp, Artificial Sequence
  Synthetic oligonucleotide
ccaatttggccacgcattgtgagaatcagt

SEQ ID NO: 481617 - DNA, 30 bp, Artificial Sequence
  Synthetic oligonucleotide
gatggttcttcagaggacggacgaatcagt

SEQ ID NO: 481618 - DNA, 30 bp, Artificial Sequence
  Synthetic oligonucleotide
tttttccttcttccacaagttcacatcagt

SEQ ID NO: 481619 - DNA, 30 bp, Artificial Sequence
  Synthetic oligonucleotide
caccgcttgaaaactgcccttcagatcagt

SEQ ID NO: 481620 - DNA, 30 bp, Artificial Sequence
  Synthetic oligonucleotide
gaacataaatcaaggtcttcatagatcagt

SEQ ID NO: 481621 - DNA, 30 bp, Artificial Sequence
  Synthetic oligonucleotide
ttattggtttgatacgatccaacgatcagt

SEQ ID NO: 481622 - DNA, 30 bp, Artificial Sequence
  Synthetic oligonucleotide
gttctattatggtgagttgcacggatcagt

SEQ ID NO: 481623 - DNA, 30 bp, Artificial Sequence
  Synthetic oligonucleotide
tgctttctatgcaagggactcttgatcagt

SEQ ID NO: 481624 - DNA, 30 bp, Artificial Sequence
  Synthetic oligonucleotide
atcgtgctgttcgtttagtgctatatcagt

SEQ ID NO: 481625 - DNA, 30 bp, Artificial Sequence
  Synthetic oligonucleotide
aacgtccagggctccctgcctagtatcagt

SEQ ID NO: 481626 - DNA, 30 bp, Artificial Sequence
  Synthetic oligonucleotide
atccggatcagcgcccgattacttatcagt

SEQ ID NO: 481627 - DNA, 30 bp, Artificial Sequence
  Synthetic oligonucleotide
gtaatctagggaatgtagattggactcagt

SEQ ID NO: 481628 - DNA, 30 bp, Artificial Sequence
  Synthetic oligonucleotide
tcggtttagttggtttagtgctgactcagt

SEQ ID NO: 481629 - DNA, 30 bp, Artificial Sequence
  Synthetic oligonucleotide
ttcttgccgagcactgaaaaccacctcagt

SEQ ID NO: 481630 - DNA, 30 bp, Artificial Sequence
  Synthetic oligonucleotide
tatccctgcctacttccgttatacctcagt

SEQ ID NO: 481631 - DNA, 30 bp, Artificial Sequence
  Synthetic oligonucleotide
cggtgtgcccctcggaattatcttctcagt

SEQ ID NO: 481632 - DNA, 30 bp, Artificial Sequence
  Synthetic oligonucleotide
aattacgtcgatgggtctcagcaagtcagt

SEQ ID NO: 481633 - DNA, 30 bp, Artificial Sequence
  Synthetic oligonucleotide
cggtcgttacgttggcgcctgacagtcagt

SEQ ID NO: 481634 - DNA, 30 bp, Artificial Sequence
  Synthetic oligonucleotide
cggtggttttcgcggcctgcgtcagtcagt

SEQ ID NO: 481635 - DNA, 30 bp, Artificial Sequence
  Synthetic oligonucleotide
aatcgcctgaatacgcgctcacgagtcagt

SEQ ID NO: 481636 - DNA, 30 bp, Artificial Sequence
  Synthetic oligonucleotide
tctctcccagggggtccccgaatggtcagt

SEQ ID NO: 481637 - DNA, 30 bp, Artificial Sequence
  Synthetic oligonucleotide
ttcccagtccactttataggatctgtcagt

SEQ ID NO: 481638 - DNA, 30 bp, Artificial Sequence
  Synthetic oligonucleotide
tccgactgaaattcttgtctagaattcagt

SEQ ID NO: 481639 - DNA, 30 bp, Artificial Sequence
  Synthetic oligonucleotide
agcagttgctgcaacaatgcaggattcagt

SEQ ID NO: 481640 - DNA, 30 bp, Artificial Sequence
  Synthetic oligonucleotide
ataatttgagcagtttctttaatattcagt

SEQ ID NO: 481641 - DNA, 30 bp, Artificial Sequence
  Synthetic oligonucleotide
ttagattgtgaagcacttgccctattcagt

SEQ ID NO: 481642 - DNA, 30 bp, Artificial Sequence
  Synthetic oligonucleotide
atggtttaccgtgaactggcgctattcagt

SEQ ID NO: 481643 - DNA, 30 bp, Artificial Sequence
  Synthetic oligonucleotide
gagatatagcaacgaagttcgcgcttcagt

SEQ ID NO: 481644 - DNA, 30 bp, Artificial Sequence
  Synthetic oligonucleotide
tatcggatgcatcccgggagctagttcagt

SEQ ID NO: 481645 - DNA, 30 bp, Artificial Sequence
  Synthetic oligonucleotide
ggaatggccggtggcgcatcctcgttcagt

SEQ ID NO: 481646 - DNA, 30 bp, Artificial Sequence
  Synthetic oligonucleotide
gaaatgagacttgaagtccattatttcagt

SEQ ID NO: 481647 - DNA, 30 bp, Artificial Sequence
  Synthetic oligonucleotide
gaagtaatgtctctgtcctacattttcagt

SEQ ID NO: 481648 - DNA, 30 bp, Artificial Sequence
  Synthetic oligonucleotide
tactctagaatgcctcaactcaaaaagagt

SEQ ID NO: 481649 - DNA, 30 bp, Artificial Sequence
  Synthetic oligonucleotide
aatcataagtgtgtgccgataagaaagagt

SEQ ID NO: 481650 - DNA, 31 bp, Artificial Sequence
  Synthetic oligonucleotide
ttatagtctgacgcccgtaccgtgaaagagt

SEQ ID NO: 481651 - DNA, 30 bp, Artificial Sequence
  Synthetic oligonucleotide
atatacctggtggagtcacgcaacaagagt

SEQ ID NO: 481652 - DNA, 30 bp, Artificial Sequence
  Synthetic oligonucleotide
ccggcaatttgtatcaggacgcgcaagagt

SEQ ID NO: 481653 - DNA, 30 bp, Artificial Sequence
  Synthetic oligonucleotide
ttagccaactcactgtgacggggcaagagt

SEQ ID NO: 481654 - DNA, 30 bp, Artificial Sequence
  Synthetic oligonucleotide
ctatcgctgcacagggcgcagtcgaagagt

SEQ ID NO: 481655 - DNA, 30 bp, Artificial Sequence
  Synthetic oligonucleotide
tttattttgcagatcaaaccaatgaagagt

SEQ ID NO: 481656 - DNA, 30 bp, Artificial Sequence
  Synthetic oligonucleotide
caggggtgaaccaccgctcctggtaagagt

SEQ ID NO: 481657 - DNA, 30 bp, Artificial Sequence
  Synthetic oligonucleotide
tccgttctaggtttacaagtggaacagagt

SEQ ID NO: 481658 - DNA, 30 bp, Artificial Sequence
  Synthetic oligonucleotide
ttttctgttgaaggcagacgcctacagagt

SEQ ID NO: 481659 - DNA, 30 bp, Artificial Sequence
  Synthetic oligonucleotide
tccctttgccccgacagatggacgcagagt

SEQ ID NO: 481660 - DNA, 30 bp, Artificial Sequence
  Synthetic oligonucleotide
aatcttttacgacttcacatctggcagagt

SEQ ID NO: 481661 - DNA, 30 bp, Artificial Sequence
  Synthetic oligonucleotide
ttccgaaacaggtggcatgctaatcagagt

SEQ ID NO: 481662 - DNA, 30 bp, Artificial Sequence
  Synthetic oligonucleotide
attaattaatgctccttaatgctcgagagt

SEQ ID NO: 481663 - DNA, 30 bp, Artificial Sequence
  Synthetic oligonucleotide
gagtgataggagccgacagaattcgagagt

SEQ ID NO: 481664 - DNA, 30 bp, Artificial Sequence
  Synthetic oligonucleotide
ctccaattgctataacatataaaggagagt

SEQ ID NO: 481665 - DNA, 30 bp, Artificial Sequence
  Synthetic oligonucleotide
ccatagtttaccggaccggcggaggagagt

SEQ ID NO: 481666 - DNA, 30 bp, Artificial Sequence
  Synthetic oligonucleotide
aataatcatcttttggacaggatggagagt

SEQ ID NO: 481667 - DNA, 30 bp, Artificial Sequence
  Synthetic oligonucleotide
agaacggactccagactctgcaactagagt

SEQ ID NO: 481668 - DNA, 30 bp, Artificial Sequence
  Synthetic oligonucleotide
atacttagcgtacgggcccttaactagagt

SEQ ID NO: 481669 - DNA, 30 bp, Artificial Sequence
  Synthetic oligonucleotide
cgatggtcagccgaaactataacctagagt

SEQ ID NO: 481670 - DNA, 30 bp, Artificial Sequence
  Synthetic oligonucleotide
tcactttcgcggcatcctgctacctagagt

SEQ ID NO: 481671 - DNA, 30 bp, Artificial Sequence
  Synthetic oligonucleotide
gaaggaaacatcagtgtataccgttagagt

SEQ ID NO: 481672 - DNA, 30 bp, Artificial Sequence
  Synthetic oligonucleotide
ttgtacctgcgcaagcaaactccaacgagt

SEQ ID NO: 481673 - DNA, 30 bp, Artificial Sequence
  Synthetic oligonucleotide
taataggacttcaccccgtttcgcacgagt

SEQ ID NO: 481674 - DNA, 30 bp, Artificial Sequence
  Synthetic oligonucleotide
accgatagctcggggttaatgaacccgagt

SEQ ID NO: 481675 - DNA, 30 bp, Artificial Sequence
  Synthetic oligonucleotide
ttaaatcatccgatcatgaatacgccgagt

SEQ ID NO: 481676 - DNA, 30 bp, Artificial Sequence
  Synthetic oligonucleotide
ggcataaaatcaaggactgcgttgccgagt

SEQ ID NO: 481677 - DNA, 30 bp, Artificial Sequence
  Synthetic oligonucleotide
ttccccaaataggaatgacagaccgcgagt

SEQ ID NO: 481678 - DNA, 30 bp, Artificial Sequence
  Synthetic oligonucleotide
ggggggctcgggcatattccgtctgcgagt

SEQ ID NO: 481679 - DNA, 30 bp, Artificial Sequence
  Synthetic oligonucleotide
taagtggcttagttatttagttctgcgagt

SEQ ID NO: 481680 - DNA, 30 bp, Artificial Sequence
  Synthetic oligonucleotide
taagttcgcctggaaaccgtacttgcgagt

SEQ ID NO: 481681 - DNA, 30 bp, Artificial Sequence
  Synthetic oligonucleotide
tatactttcatacagaaggagacatcgagt

SEQ ID NO: 481682 - DNA, 30 bp, Artificial Sequence
  Synthetic oligonucleotide
ttgcgcattgcacacctatcaacaaggagt

SEQ ID NO: 481683 - DNA, 30 bp, Artificial Sequence
  Synthetic oligonucleotide
cctttgttttgggcgctgggttacaggagt

SEQ ID NO: 481684 - DNA, 30 bp, Artificial Sequence
  Synthetic oligonucleotide
aaccgggttatttcgacttgcagtaggagt

SEQ ID NO: 481685 - DNA, 30 bp, Artificial Sequence
  Synthetic oligonucleotide
gccacgaggcaattccaggcgggccggagt

SEQ ID NO: 481686 - DNA, 30 bp, Artificial Sequence
  Synthetic oligonucleotide
tttctcagatctccagcattgacgcggagt

SEQ ID NO: 481687 - DNA, 30 bp, Artificial Sequence
  Synthetic oligonucleotide
aataatgtcagaagcaacaagatgcggagt

SEQ ID NO: 481688 - DNA, 30 bp, Artificial Sequence
  Synthetic oligonucleotide
gtcacacagccctcgtagacctatcggagt

SEQ ID NO: 481689 - DNA, 30 bp, Artificial Sequence
  Synthetic oligonucleotide
aatacagtgtacttatcccatagagggagt

SEQ ID NO: 481690 - DNA, 30 bp, Artificial Sequence
  Synthetic oligonucleotide
tgaacgacccggtccccatctcccgggagt

SEQ ID NO: 481691 - DNA, 30 bp, Artificial Sequence
  Synthetic oligonucleotide
gcatattgttgcatagtaattctcgggagt

SEQ ID NO: 481692 - DNA, 30 bp, Artificial Sequence
  Synthetic oligonucleotide
aacgtagcgacccaaactttgtgtgggagt

SEQ ID NO: 481693 - DNA, 30 bp, Artificial Sequence
  Synthetic oligonucleotide
aacagagtattcgctttgtgataatggagt

SEQ ID NO: 481694 - DNA, 30 bp, Artificial Sequence
  Synthetic oligonucleotide
aagctcgacatttcatgttggttatggagt

SEQ ID NO: 481695 - DNA, 30 bp, Artificial Sequence
  Synthetic oligonucleotide
aggtcggcaggcgacaaacctgcctggagt

SEQ ID NO: 481696 - DNA, 30 bp, Artificial Sequence
  Synthetic oligonucleotide
attcaaatgctactctcagggtcgtggagt

SEQ ID NO: 481697 - DNA, 30 bp, Artificial Sequence
  Synthetic oligonucleotide
tttataggcagagcccgatcacaaatgagt

SEQ ID NO: 481698 - DNA, 30 bp, Artificial Sequence
  Synthetic oligonucleotide
gcgtatgggactgttggagcctggatgagt

SEQ ID NO: 481699 - DNA, 30 bp, Artificial Sequence
  Synthetic oligonucleotide
gggactcaatggacgttagtgcatatgagt

SEQ ID NO: 481700 - DNA, 30 bp, Artificial Sequence
  Synthetic oligonucleotide
aggctcagtcgtcagcagcccagtatgagt

SEQ ID NO: 481701 - DNA, 30 bp, Artificial Sequence
  Synthetic oligonucleotide
catttaccttggaagccgcgcattatgagt

SEQ ID NO: 481702 - DNA, 30 bp, Artificial Sequence
  Synthetic oligonucleotide
gcactctgctgacccagaggaaaactgagt

SEQ ID NO: 481703 - DNA, 30 bp, Artificial Sequence
  Synthetic oligonucleotide
gaatttcttcctggtgtattagtgctgagt

SEQ ID NO: 481704 - DNA, 30 bp, Artificial Sequence
  Synthetic oligonucleotide
ttcctttggtgagcatgttcggatctgagt

SEQ ID NO: 481705 - DNA, 30 bp, Artificial Sequence
  Synthetic oligonucleotide
cttattaacgcggctgcatagaaagtgagt

SEQ ID NO: 481706 - DNA, 30 bp, Artificial Sequence
  Synthetic oligonucleotide
ctgtcgcccgacctcacacaacgggtgagt

SEQ ID NO: 481707 - DNA, 30 bp, Artificial Sequence
  Synthetic oligonucleotide
tgaatacttaggatctgctcacgggtgagt

SEQ ID NO: 481708 - DNA, 30 bp, Artificial Sequence
  Synthetic oligonucleotide
caaatgtttaggccctatccaggggtgagt

SEQ ID NO: 481709 - DNA, 30 bp, Artificial Sequence
  Synthetic oligonucleotide
ggattgtctctctcgagacagccattgagt

SEQ ID NO: 481710 - DNA, 30 bp, Artificial Sequence
  Synthetic oligonucleotide
agaaccgacccggctgccaatttcttgagt

SEQ ID NO: 481711 - DNA, 30 bp, Artificial Sequence
  Synthetic oligonucleotide
acttcttgcataggttggaaaacgttgagt

SEQ ID NO: 481712 - DNA, 30 bp, Artificial Sequence
  Synthetic oligonucleotide
gctgttcgcggactcagtgggtctttgagt

SEQ ID NO: 481713 - DNA, 30 bp, Artificial Sequence
  Synthetic oligonucleotide
tatccggccaggtctagggtctttttgagt

SEQ ID NO: 481714 - DNA, 30 bp, Artificial Sequence
  Synthetic oligonucleotide
tatctgtgggggaaagacggttcaaatagt

SEQ ID NO: 481715 - DNA, 30 bp, Artificial Sequence
  Synthetic oligonucleotide
ctggtcgtactttaacgatgtggaaatagt

SEQ ID NO: 481716 - DNA, 30 bp, Artificial Sequence
  Synthetic oligonucleotide
gctaacatctctaagattaccataaatagt

SEQ ID NO: 481717 - DNA, 30 bp, Artificial Sequence
  Synthetic oligonucleotide
atcgcgcggaatccctcctgagggaatagt

SEQ ID NO: 481718 - DNA, 30 bp, Artificial Sequence
  Synthetic oligonucleotide
cacaacgactaacgcacactctaccatagt

SEQ ID NO: 481719 - DNA, 30 bp, Artificial Sequence
  Synthetic oligonucleotide
ttttataaagcaggtcggacccgccatagt

SEQ ID NO: 481720 - DNA, 30 bp, Artificial Sequence
  Synthetic oligonucleotide
agcctgatgctgacgcagtgttggcatagt

SEQ ID NO: 481721 - DNA, 30 bp, Artificial Sequence
  Synthetic oligonucleotide
ctaaatatacgggtaatgcactctcatagt

SEQ ID NO: 481722 - DNA, 30 bp, Artificial Sequence
  Synthetic oligonucleotide
ccaagaattctgacttacattagtcatagt

SEQ ID NO: 481723 - DNA, 30 bp, Artificial Sequence
  Synthetic oligonucleotide
tgccgctgtggagcgtcattgcgtcatagt

SEQ ID NO: 481724 - DNA, 30 bp, Artificial Sequence
  Synthetic oligonucleotide
agccttgatctttgcatcctttttcatagt

SEQ ID NO: 481725 - DNA, 30 bp, Artificial Sequence
  Synthetic oligonucleotide
gatagatgagcgaaaatacccgaagatagt

SEQ ID NO: 481726 - DNA, 30 bp, Artificial Sequence
  Synthetic oligonucleotide
tttgatacgtacacgaatatggacgatagt

SEQ ID NO: 481727 - DNA, 30 bp, Artificial Sequence
  Synthetic oligonucleotide
agttgggtcaaataatatagtagcgatagt

SEQ ID NO: 481728 - DNA, 30 bp, Artificial Sequence
  Synthetic oligonucleotide
ccttatgtctttaagaacgaaaaggatagt

SEQ ID NO: 481729 - DNA, 30 bp, Artificial Sequence
  Synthetic oligonucleotide
tggatcgcggcagacagtacataggatagt

SEQ ID NO: 481730 - DNA, 30 bp, Artificial Sequence
  Synthetic oligonucleotide
gttaacggttcaactctatcatttgatagt

SEQ ID NO: 481731 - DNA, 30 bp, Artificial Sequence
  Synthetic oligonucleotide
cgtaatttgtcacggtgcactgtctatagt

SEQ ID NO: 481732 - DNA, 30 bp, Artificial Sequence
  Synthetic oligonucleotide
gcacattccgaaagcaacttgttgtatagt

SEQ ID NO: 481733 - DNA, 30 bp, Artificial Sequence
  Synthetic oligonucleotide
ctcgacgtgcgaagtgaaaatacttatagt

SEQ ID NO: 481734 - DNA, 30 bp, Artificial Sequence
  Synthetic oligonucleotide
tcttctacacacacgcgagctacttatagt

SEQ ID NO: 481735 - DNA, 30 bp, Artificial Sequence
  Synthetic oligonucleotide
aatccgccttactgccatggctcttatagt

SEQ ID NO: 481736 - DNA, 30 bp, Artificial Sequence
  Synthetic oligonucleotide
tcaaaaaaggaccggtttgcaagttatagt

SEQ ID NO: 481737 - DNA, 30 bp, Artificial Sequence
  Synthetic oligonucleotide
ataggtgtgccacataggggtggttatagt

SEQ ID NO: 481738 - DNA, 30 bp, Artificial Sequence
  Synthetic oligonucleotide
cttaaataaagtaatccgacagtttatagt

SEQ ID NO: 481739 - DNA, 30 bp, Artificial Sequence
  Synthetic oligonucleotide
ccgtataggttaaaaagccccgtttatagt

SEQ ID NO: 481740 - DNA, 30 bp, Artificial Sequence
  Synthetic oligonucleotide
gggtcctgatgtagatctacagtaactagt

SEQ ID NO: 481741 - DNA, 31 bp, Artificial Sequence
  Synthetic oligonucleotide
atttccccatagcagctgtggcagcactagt

SEQ ID NO: 481742 - DNA, 30 bp, Artificial Sequence
  Synthetic oligonucleotide
attcaaagatattggcagaacctcactagt

SEQ ID NO: 481743 - DNA, 30 bp, Artificial Sequence
  Synthetic oligonucleotide
atctgctttttgaagtggagtaagactagt

SEQ ID NO: 481744 - DNA, 30 bp, Artificial Sequence
  Synthetic oligonucleotide
attcaatttttcaccttttctatgactagt

SEQ ID NO: 481745 - DNA, 30 bp, Artificial Sequence
  Synthetic oligonucleotide
tacaattcgtctacaatcaccactcctagt

SEQ ID NO: 481746 - DNA, 30 bp, Artificial Sequence
  Synthetic oligonucleotide
ccgttaagtttcactccgaccttagctagt

SEQ ID NO: 481747 - DNA, 30 bp, Artificial Sequence
  Synthetic oligonucleotide
gcaatgcagatactagggactatcgctagt

SEQ ID NO: 481748 - DNA, 30 bp, Artificial Sequence
  Synthetic oligonucleotide
gcctttaagcgagacgctcggttcgctagt

SEQ ID NO: 481749 - DNA, 30 bp, Artificial Sequence
  Synthetic oligonucleotide
cacatcaccgtagaccaggacgcggctagt

SEQ ID NO: 481750 - DNA, 30 bp, Artificial Sequence
  Synthetic oligonucleotide
ggccagtataggttacttggcatggctagt

SEQ ID NO: 481751 - DNA, 30 bp, Artificial Sequence
  Synthetic oligonucleotide
tgtgcatcgtgctcgggctacttctctagt

SEQ ID NO: 481752 - DNA, 30 bp, Artificial Sequence
  Synthetic oligonucleotide
cgcctagaggttatggcagcacagtctagt

SEQ ID NO: 481753 - DNA, 30 bp, Artificial Sequence
  Synthetic oligonucleotide
atatagtgtatttcccgcgggatgtctagt

SEQ ID NO: 481754 - DNA, 30 bp, Artificial Sequence
  Synthetic oligonucleotide
aacaacaccgttccgaacgtgttgtctagt

SEQ ID NO: 481755 - DNA, 30 bp, Artificial Sequence
  Synthetic oligonucleotide
taattgtgggaagatcaacggtgttctagt

SEQ ID NO: 481756 - DNA, 30 bp, Artificial Sequence
  Synthetic oligonucleotide
ttactccacgatgcagccagacgacgtagt

SEQ ID NO: 481757 - DNA, 30 bp, Artificial Sequence
  Synthetic oligonucleotide
cccgagcgggtagacgtagcttgacgtagt

SEQ ID NO: 481758 - DNA, 30 bp, Artificial Sequence
  Synthetic oligonucleotide
cgcaggccacatgcctcggagtagcgtagt

SEQ ID NO: 481759 - DNA, 30 bp, Artificial Sequence
  Synthetic oligonucleotide
gcaacaaatctaatccacttaacgcgtagt

SEQ ID NO: 481760 - DNA, 30 bp, Artificial Sequence
  Synthetic oligonucleotide
aaaatatcggtgttataatccagaggtagt

SEQ ID NO: 481761 - DNA, 30 bp, Artificial Sequence
  Synthetic oligonucleotide
cttttgatggctggtactcacatgggtagt

SEQ ID NO: 481762 - DNA, 30 bp, Artificial Sequence
  Synthetic oligonucleotide
aactttggtgaattggactcgaatggtagt

SEQ ID NO: 481763 - DNA, 30 bp, Artificial Sequence
  Synthetic oligonucleotide
cgaccacatacctgactctgatttggtagt

SEQ ID NO: 481764 - DNA, 30 bp, Artificial Sequence
  Synthetic oligonucleotide
ggtgtacctttttgctgacgccaatgtagt

SEQ ID NO: 481765 - DNA, 30 bp, Artificial Sequence
  Synthetic oligonucleotide
tgaacttcctctagtacaatggcatgtagt

SEQ ID NO: 481766 - DNA, 30 bp, Artificial Sequence
  Synthetic oligonucleotide
ttattgtgttggtagagacaacactgtagt

SEQ ID NO: 481767 - DNA, 30 bp, Artificial Sequence
  Synthetic oligonucleotide
agcctacatcagaattattatatttgtagt

SEQ ID NO: 481768 - DNA, 30 bp, Artificial Sequence
  Synthetic oligonucleotide
gagtttagaacaggacttctcaacattagt

SEQ ID NO: 481769 - DNA, 30 bp, Artificial Sequence
  Synthetic oligonucleotide
accgataacgcatccatctagcacattagt

SEQ ID NO: 481770 - DNA, 30 bp, Artificial Sequence
  Synthetic oligonucleotide
ctcaagcgtcgtgagtgactgggcattagt

SEQ ID NO: 481771 - DNA, 30 bp, Artificial Sequence
  Synthetic oligonucleotide
cgaagcacgtccttgccatccaagattagt

SEQ ID NO: 481772 - DNA, 30 bp, Artificial Sequence
  Synthetic oligonucleotide
ttttcccgtcggaagacattatcgattagt

SEQ ID NO: 481773 - DNA, 30 bp, Artificial Sequence
  Synthetic oligonucleotide
tttgctaactggagcagcatggtgattagt

SEQ ID NO: 481774 - DNA, 30 bp, Artificial Sequence
  Synthetic oligonucleotide
tagcactattctcatcgaccaactattagt

SEQ ID NO: 481775 - DNA, 30 bp, Artificial Sequence
  Synthetic oligonucleotide
accttcggctgccggcggtgtggtattagt

SEQ ID NO: 481776 - DNA, 30 bp, Artificial Sequence
  Synthetic oligonucleotide
ccccataatgtattgtgtagtagacttagt

SEQ ID NO: 481777 - DNA, 30 bp, Artificial Sequence
  Synthetic oligonucleotide
ttttaatctatttgagtcttttaccttagt

SEQ ID NO: 481778 - DNA, 30 bp, Artificial Sequence
  Synthetic oligonucleotide
agtcacgcggtctagtatccgacccttagt

SEQ ID NO: 481779 - DNA, 30 bp, Artificial Sequence
  Synthetic oligonucleotide
gctccttgagggactgcggccggtcttagt

SEQ ID NO: 481780 - DNA, 30 bp, Artificial Sequence
  Synthetic oligonucleotide
aattccaagcacgctgcgatcgaagttagt

SEQ ID NO: 481781 - DNA, 30 bp, Artificial Sequence
  Synthetic oligonucleotide
ggaacacgcattactttcggttaagttagt

SEQ ID NO: 481782 - DNA, 30 bp, Artificial Sequence
  Synthetic oligonucleotide
attaccttcacgtactgtaattcagttagt

SEQ ID NO: 481783 - DNA, 30 bp, Artificial Sequence
  Synthetic oligonucleotide
agacggaaggtgcaaagaaaagtcgttagt

SEQ ID NO: 481784 - DNA, 30 bp, Artificial Sequence
  Synthetic oligonucleotide
ggacgaatgatttctctacggccggttagt

SEQ ID NO: 481785 - DNA, 30 bp, Artificial Sequence
  Synthetic oligonucleotide
ttcatgtaaggtttcactacgagggttagt

SEQ ID NO: 481786 - DNA, 30 bp, Artificial Sequence
  Synthetic oligonucleotide
ttaacatccgtttcgcactattatgttagt

SEQ ID NO: 481787 - DNA, 30 bp, Artificial Sequence
  Synthetic oligonucleotide
ctataagctaaaaaaacatgcgttgttagt

SEQ ID NO: 481788 - DNA, 30 bp, Artificial Sequence
  Synthetic oligonucleotide
gtaggtttattttagggttaaggatttagt

SEQ ID NO: 481789 - DNA, 30 bp, Artificial Sequence
  Synthetic oligonucleotide
ccaatagatgcaaagtctctgatatttagt

SEQ ID NO: 481790 - DNA, 30 bp, Artificial Sequence
  Synthetic oligonucleotide
ctttataacgtgttttcacaattatttagt

SEQ ID NO: 481791 - DNA, 30 bp, Artificial Sequence
  Synthetic oligonucleotide
gaaagccgcggcatagggtggagctttagt

SEQ ID NO: 481792 - DNA, 30 bp, Artificial Sequence
  Synthetic oligonucleotide
agttgggcgcgcacttgctccgggtttagt

SEQ ID NO: 481793 - DNA, 30 bp, Artificial Sequence
  Synthetic oligonucleotide
attccgtttcatctagccaagtgttttagt

SEQ ID NO: 481794 - DNA, 30 bp, Artificial Sequence
  Synthetic oligonucleotide
cggcaaaaagattcgtaaaacttttttagt

SEQ ID NO: 481795 - DNA, 30 bp, Artificial Sequence
  Synthetic oligonucleotide
cttgtggacatggggctgtgccacaaacgt

SEQ ID NO: 481796 - DNA, 30 bp, Artificial Sequence
  Synthetic oligonucleotide
gcattgcagggtcactgattgtacaaacgt

SEQ ID NO: 481797 - DNA, 30 bp, Artificial Sequence
  Synthetic oligonucleotide
ttctcagagatacgggtgctacccaaacgt

SEQ ID NO: 481798 - DNA, 30 bp, Artificial Sequence
  Synthetic oligonucleotide
ggtatcgcgctcatatccgtacagaaacgt

SEQ ID NO: 481799 - DNA, 30 bp, Artificial Sequence
  Synthetic oligonucleotide
gttagattatcatctttaggggagaaacgt

SEQ ID NO: 481800 - DNA, 30 bp, Artificial Sequence
  Synthetic oligonucleotide
cgccataagtactatctaagtaggaaacgt

SEQ ID NO: 481801 - DNA, 30 bp, Artificial Sequence
  Synthetic oligonucleotide
ccatggtcatcttcgctttttgggaaacgt

SEQ ID NO: 481802 - DNA, 30 bp, Artificial Sequence
  Synthetic oligonucleotide
gatacgtttgccagatctaatctgaaacgt

SEQ ID NO: 481803 - DNA, 30 bp, Artificial Sequence
  Synthetic oligonucleotide
cgaaaggttcattatcacgtggctaaacgt

SEQ ID NO: 481804 - DNA, 29 bp, Artificial Sequence
  Synthetic oligonucleotide
agttgggtgatactatttaacgtaaacgt

SEQ ID NO: 481805 - DNA, 30 bp, Artificial Sequence
  Synthetic oligonucleotide
cgcataaaagttggttggttaacacaacgt

SEQ ID NO: 481806 - DNA, 30 bp, Artificial Sequence
  Synthetic oligonucleotide
gtatgccgcttaaaacttcatatacaacgt

SEQ ID NO: 481807 - DNA, 30 bp, Artificial Sequence
  Synthetic oligonucleotide
aattatacgatcaatcgccggccccaacgt

SEQ ID NO: 481808 - DNA, 30 bp, Artificial Sequence
  Synthetic oligonucleotide
acttggtggctaaggtcataataagaacgt

SEQ ID NO: 481809 - DNA, 30 bp, Artificial Sequence
  Synthetic oligonucleotide
tcgtttggcatgggttgatctacagaacgt

SEQ ID NO: 481810 - DNA, 30 bp, Artificial Sequence
  Synthetic oligonucleotide
ctctttgacagcataggttcgtcagaacgt

SEQ ID NO: 481811 - DNA, 30 bp, Artificial Sequence
  Synthetic oligonucleotide
agtccatgcagtagcaaattctgagaacgt

SEQ ID NO: 481812 - DNA, 30 bp, Artificial Sequence
  Synthetic oligonucleotide
gtaagatcccagatgcatccagtagaacgt

SEQ ID NO: 481813 - DNA, 30 bp, Artificial Sequence
  Synthetic oligonucleotide
ggtccctaaaatcacgaccgacatgaacgt

SEQ ID NO: 481814 - DNA, 30 bp, Artificial Sequence
  Synthetic oligonucleotide
cgctaaacaggcagccgccaggctgaacgt

SEQ ID NO: 481815 - DNA, 30 bp, Artificial Sequence
  Synthetic oligonucleotide
gatctctggcgtggactggcacgctaacgt

SEQ ID NO: 481816 - DNA, 30 bp, Artificial Sequence
  Synthetic oligonucleotide
tagagcggctaccacatgggttgctaacgt

SEQ ID NO: 481817 - DNA, 30 bp, Artificial Sequence
  Synthetic oligonucleotide
agtccctatgaatctctgcagtagtaacgt

SEQ ID NO: 481818 - DNA, 30 bp, Artificial Sequence
  Synthetic oligonucleotide
ggtaccttttagatcattccttagtaacgt

SEQ ID NO: 481819 - DNA, 30 bp, Artificial Sequence
  Synthetic oligonucleotide
gtgattcgtattcgacggaatctttaacgt

SEQ ID NO: 481820 - DNA, 30 bp, Artificial Sequence
  Synthetic oligonucleotide
agcagacaagcggtaaattgtccaacacgt

SEQ ID NO: 481821 - DNA, 30 bp, Artificial Sequence
  Synthetic oligonucleotide
ccaaagcttggggcaagttgtaacacacgt

SEQ ID NO: 481822 - DNA, 30 bp, Artificial Sequence
  Synthetic oligonucleotide
cagtttcggtagttgaaaccccacacacgt

SEQ ID NO: 481823 - DNA, 30 bp, Artificial Sequence
  Synthetic oligonucleotide
gcgacgaccttatttggttgtcccacacgt

SEQ ID NO: 481824 - DNA, 30 bp, Artificial Sequence
  Synthetic oligonucleotide
acatgttcacaataattggcagccacacgt

SEQ ID NO: 481825 - DNA, 30 bp, Artificial Sequence
  Synthetic oligonucleotide
cccgacctctagacaccgtaacagacacgt

SEQ ID NO: 481826 - DNA, 30 bp, Artificial Sequence
  Synthetic oligonucleotide
gggcttaccactggtaaggcggagacacgt

SEQ ID NO: 481827 - DNA, 30 bp, Artificial Sequence
  Synthetic oligonucleotide
tactctccgatgctggccgtttagacacgt

SEQ ID NO: 481828 - DNA, 30 bp, Artificial Sequence
  Synthetic oligonucleotide
gattccgagtcgtttggcccagggacacgt

SEQ ID NO: 481829 - DNA, 30 bp, Artificial Sequence
  Synthetic oligonucleotide
cttgcatatgacctggacatggggacacgt

SEQ ID NO: 481830 - DNA, 30 bp, Artificial Sequence
  Synthetic oligonucleotide
ttctcgaaacattcactacctgggacacgt

SEQ ID NO: 481831 - DNA, 30 bp, Artificial Sequence
  Synthetic oligonucleotide
taccctgactcgtccaggagacgtacacgt

SEQ ID NO: 481832 - DNA, 30 bp, Artificial Sequence
  Synthetic oligonucleotide
atcgggatcaacggaaaacgaagcccacgt

SEQ ID NO: 481833 - DNA, 30 bp, Artificial Sequence
  Synthetic oligonucleotide
gttatgaggcctgtcgatgcagtcccacgt

SEQ ID NO: 481834 - DNA, 30 bp, Artificial Sequence
  Synthetic oligonucleotide
agaacggccgggctggtccgccacgcacgt

SEQ ID NO: 481835 - DNA, 30 bp, Artificial Sequence
  Synthetic oligonucleotide
gatcggtttcttgtgcagcgcgacgcacgt

SEQ ID NO: 481836 - DNA, 30 bp, Artificial Sequence
  Synthetic oligonucleotide
aaaaaatgtacatagttggttaccgcacgt

SEQ ID NO: 481837 - DNA, 30 bp, Artificial Sequence
  Synthetic oligonucleotide
acttctttttcgacggtggaaatcgcacgt

SEQ ID NO: 481838 - DNA, 30 bp, Artificial Sequence
  Synthetic oligonucleotide
tgataagtcttcggtgtaacggtcgcacgt

SEQ ID NO: 481839 - DNA, 30 bp, Artificial Sequence
  Synthetic oligonucleotide
ctctacgccgtgttttctttttcggcacgt

SEQ ID NO: 481840 - DNA, 30 bp, Artificial Sequence
  Synthetic oligonucleotide
atcggacccgcataaccagactctgcacgt

SEQ ID NO: 481841 - DNA, 30 bp, Artificial Sequence
  Synthetic oligonucleotide
cctttcataaaaaaggaggtagaatcacgt

SEQ ID NO: 481842 - DNA, 30 bp, Artificial Sequence
  Synthetic oligonucleotide
cctcttcgaatgttctctacacactcacgt

SEQ ID NO: 481843 - DNA, 30 bp, Artificial Sequence
  Synthetic oligonucleotide
aacggacgagttcttattaagccctcacgt

SEQ ID NO: 481844 - DNA, 30 bp, Artificial Sequence
  Synthetic oligonucleotide
ccaccttcggccgacgaaatccgctcacgt

SEQ ID NO: 481845 - DNA, 30 bp, Artificial Sequence
  Synthetic oligonucleotide
ctttgccctggaacgaaatgcttgtcacgt

SEQ ID NO: 481846 - DNA, 30 bp, Artificial Sequence
  Synthetic oligonucleotide
aatttccatgatgaggggccagattcacgt

SEQ ID NO: 481847 - DNA, 30 bp, Artificial Sequence
  Synthetic oligonucleotide
taggctccgacccagtgggtttattcacgt

SEQ ID NO: 481848 - DNA, 30 bp, Artificial Sequence
  Synthetic oligonucleotide
ctaagccttgtgtctaggccttgttcacgt

SEQ ID NO: 481849 - DNA, 30 bp, Artificial Sequence
  Synthetic oligonucleotide
cgcttatcgtacttgaaaactgcaagacgt

SEQ ID NO: 481850 - DNA, 30 bp, Artificial Sequence
  Synthetic oligonucleotide
taaatggctccgtcgtggctgtgcagacgt

SEQ ID NO: 481851 - DNA, 30 bp, Artificial Sequence
  Synthetic oligonucleotide
tcgtgtgaggccggaaacagggcgagacgt

SEQ ID NO: 481852 - DNA, 30 bp, Artificial Sequence
  Synthetic oligonucleotide
gcttctgcataggtcgtttttacccgacgt

SEQ ID NO: 481853 - DNA, 30 bp, Artificial Sequence
  Synthetic oligonucleotide
ttcacggggccttccagtaggaagcgacgt

SEQ ID NO: 481854 - DNA, 30 bp, Artificial Sequence
  Synthetic oligonucleotide
ccgcacgattcgcgtttgtagccgcgacgt

SEQ ID NO: 481855 - DNA, 30 bp, Artificial Sequence
  Synthetic oligonucleotide
gcgtacatctgactctgtttttgtcgacgt

SEQ ID NO: 481856 - DNA, 30 bp, Artificial Sequence
  Synthetic oligonucleotide
gatgttgtttagtgggtgatatttcgacgt

SEQ ID NO: 481857 - DNA, 30 bp, Artificial Sequence
  Synthetic oligonucleotide
cccccgctcaaaagaatccaccaaggacgt

SEQ ID NO: 481858 - DNA, 30 bp, Artificial Sequence
  Synthetic oligonucleotide
gccattgccactgtttggctcgaaggacgt

SEQ ID NO: 481859 - DNA, 30 bp, Artificial Sequence
  Synthetic oligonucleotide
atatgttattcgagtctgatttaaggacgt

SEQ ID NO: 481860 - DNA, 30 bp, Artificial Sequence
  Synthetic oligonucleotide
cgaaagctctacgcaaaacgaacaggacgt

SEQ ID NO: 481861 - DNA, 30 bp, Artificial Sequence
  Synthetic oligonucleotide
ggttacattactggtaataatataggacgt

SEQ ID NO: 481862 - DNA, 30 bp, Artificial Sequence
  Synthetic oligonucleotide
tgtttgctaaaagcgggatttctcggacgt

SEQ ID NO: 481863 - DNA, 30 bp, Artificial Sequence
  Synthetic oligonucleotide
cggaggtttagaccatcattacgtggacgt

SEQ ID NO: 481864 - DNA, 30 bp, Artificial Sequence
  Synthetic oligonucleotide
gaggcccgcctgccatcggcagtatgacgt

SEQ ID NO: 481865 - DNA, 30 bp, Artificial Sequence
  Synthetic oligonucleotide
catcctttcccgtcctcccgggtctgacgt

SEQ ID NO: 481866 - DNA, 30 bp, Artificial Sequence
  Synthetic oligonucleotide
aaatcaactcgtaagggtctcttttgacgt

SEQ ID NO: 481867 - DNA, 30 bp, Artificial Sequence
  Synthetic oligonucleotide
atcgaagtacaccaagagctaaaaatacgt

SEQ ID NO: 481868 - DNA, 30 bp, Artificial Sequence
  Synthetic oligonucleotide
aattctatccgagagctaaataaaatacgt

SEQ ID NO: 481869 - DNA, 30 bp, Artificial Sequence
  Synthetic oligonucleotide
tgtgaagtacagaggttatgtcaaatacgt

SEQ ID NO: 481870 - DNA, 30 bp, Artificial Sequence
  Synthetic oligonucleotide
ttttccaaagttagggtgcttagaatacgt

SEQ ID NO: 481871 - DNA, 30 bp, Artificial Sequence
  Synthetic oligonucleotide
ttcaatgacaaaataagtttcttaatacgt

SEQ ID NO: 481872 - DNA, 30 bp, Artificial Sequence
  Synthetic oligonucleotide
ttcggggcagcgcacacgtcgaagatacgt

SEQ ID NO: 481873 - DNA, 30 bp, Artificial Sequence
  Synthetic oligonucleotide
ctctttcatagttcgtcgtgtatgatacgt

SEQ ID NO: 481874 - DNA, 30 bp, Artificial Sequence
  Synthetic oligonucleotide
cccttcaggtcacggatgcgcatcctacgt

SEQ ID NO: 481875 - DNA, 30 bp, Artificial Sequence
  Synthetic oligonucleotide
ggtgtctcccagtgcacgtgtgggctacgt

SEQ ID NO: 481876 - DNA, 30 bp, Artificial Sequence
  Synthetic oligonucleotide
tcttcttaacctcaataattgatgctacgt

SEQ ID NO: 481877 - DNA, 30 bp, Artificial Sequence
  Synthetic oligonucleotide
ctatcccaggtagcgaatggttctctacgt

SEQ ID NO: 481878 - DNA, 30 bp, Artificial Sequence
  Synthetic oligonucleotide
ttcacgagagggcaaaacgtgtttctacgt

SEQ ID NO: 481879 - DNA, 30 bp, Artificial Sequence
  Synthetic oligonucleotide
tgtacacctgtcggtaatacgccagtacgt

SEQ ID NO: 481880 - DNA, 30 bp, Artificial Sequence
  Synthetic oligonucleotide
aaccctagcttataagccaataacgtacgt

SEQ ID NO: 481881 - DNA, 30 bp, Artificial Sequence
  Synthetic oligonucleotide
gtccgcaacccgtaaaattacctcgtacgt

SEQ ID NO: 481882 - DNA, 30 bp, Artificial Sequence
  Synthetic oligonucleotide
cctgtcggagcgcctttagcgaaggtacgt

SEQ ID NO: 481883 - DNA, 30 bp, Artificial Sequence
  Synthetic oligonucleotide
ggacacagctcacactgttaacaggtacgt

SEQ ID NO: 481884 - DNA, 30 bp, Artificial Sequence
  Synthetic oligonucleotide
ccgactaacttcacatcattggtggtacgt

SEQ ID NO: 481885 - DNA, 30 bp, Artificial Sequence
  Synthetic oligonucleotide
tcgacagtaatgcaaatacttgatgtacgt

SEQ ID NO: 481886 - DNA, 30 bp, Artificial Sequence
  Synthetic oligonucleotide
tttctggacattggttttgtataattacgt

SEQ ID NO: 481887 - DNA, 30 bp, Artificial Sequence
  Synthetic oligonucleotide
aagcaggaatgcccatgccgggcattacgt

SEQ ID NO: 481888 - DNA, 30 bp, Artificial Sequence
  Synthetic oligonucleotide
caacctactatgtagatttagagcttacgt

SEQ ID NO: 481889 - DNA, 30 bp, Artificial Sequence
  Synthetic oligonucleotide
ggtatatagggctatttatcgtgcttacgt

SEQ ID NO: 481890 - DNA, 30 bp, Artificial Sequence
  Synthetic oligonucleotide
tctccgttaagcaagtcaacggggttacgt

SEQ ID NO: 481891 - DNA, 30 bp, Artificial Sequence
  Synthetic oligonucleotide
ataggaagcgctgctcacatatgaaaccgt

SEQ ID NO: 481892 - DNA, 30 bp, Artificial Sequence
  Synthetic oligonucleotide
atagatgctacgagatgtttatgcaaccgt

SEQ ID NO: 481893 - DNA, 30 bp, Artificial Sequence
  Synthetic oligonucleotide
tagatggtagtaggtggagagcataaccgt

SEQ ID NO: 481894 - DNA, 30 bp, Artificial Sequence
  Synthetic oligonucleotide
ccttctgggcgctaaatggagcctaaccgt

SEQ ID NO: 481895 - DNA, 30 bp, Artificial Sequence
  Synthetic oligonucleotide
gtaatcctttggttaccaactcctaaccgt

SEQ ID NO: 481896 - DNA, 30 bp, Artificial Sequence
  Synthetic oligonucleotide
ttccagggacccctgaaatttgctaaccgt

SEQ ID NO: 481897 - DNA, 30 bp, Artificial Sequence
  Synthetic oligonucleotide
gaagtgagatttgctggttgatgtaaccgt

SEQ ID NO: 481898 - DNA, 30 bp, Artificial Sequence
  Synthetic oligonucleotide
tgaggcgaaatggcctatacaggacaccgt

SEQ ID NO: 481899 - DNA, 30 bp, Artificial Sequence
  Synthetic oligonucleotide
gttctctgcagtcgtagagcacagcaccgt

SEQ ID NO: 481900 - DNA, 30 bp, Artificial Sequence
  Synthetic oligonucleotide
caagaactcagatctcggttactgcaccgt

SEQ ID NO: 481901 - DNA, 30 bp, Artificial Sequence
  Synthetic oligonucleotide
gagaatctgtaatccgcgccacctcaccgt

SEQ ID NO: 481902 - DNA, 30 bp, Artificial Sequence
  Synthetic oligonucleotide
agaccggacccgtgtctttgcattcaccgt

SEQ ID NO: 481903 - DNA, 30 bp, Artificial Sequence
  Synthetic oligonucleotide
accttttattacaatgaaagatttcaccgt

SEQ ID NO: 481904 - DNA, 30 bp, Artificial Sequence
  Synthetic oligonucleotide
cgtccctggaattctaaaatttaggaccgt

SEQ ID NO: 481905 - DNA, 30 bp, Artificial Sequence
  Synthetic oligonucleotide
attttgacagaatgccctgggatggaccgt

SEQ ID NO: 481906 - DNA, 30 bp, Artificial Sequence
  Synthetic oligonucleotide
ggcacccccagtcaacgttatacataccgt

SEQ ID NO: 481907 - DNA, 30 bp, Artificial Sequence
  Synthetic oligonucleotide
ggtttcttactcattctggagttataccgt

SEQ ID NO: 481908 - DNA, 30 bp, Artificial Sequence
  Synthetic oligonucleotide
tcacgcgcccttggggaggcgttataccgt

SEQ ID NO: 481909 - DNA, 30 bp, Artificial Sequence
  Synthetic oligonucleotide
gttcttacaagaaatgtctgtaggtaccgt

SEQ ID NO: 481910 - DNA, 30 bp, Artificial Sequence
  Synthetic oligonucleotide
ctacaccccttgtccttatagcggtaccgt

SEQ ID NO: 481911 - DNA, 30 bp, Artificial Sequence
  Synthetic oligonucleotide
tttgtagcatatgaatgttgttattaccgt

SEQ ID NO: 481912 - DNA, 30 bp, Artificial Sequence
  Synthetic oligonucleotide
agaccaggctcttctatcagaacttaccgt

SEQ ID NO: 481913 - DNA, 30 bp, Artificial Sequence
  Synthetic oligonucleotide
tcgtgaagctcgataaaagtattttaccgt

SEQ ID NO: 481914 - DNA, 30 bp, Artificial Sequence
  Synthetic oligonucleotide
gcggtcttcccgtcgaaacagcaaacccgt

SEQ ID NO: 481915 - DNA, 30 bp, Artificial Sequence
  Synthetic oligonucleotide
cctgagagactccgcgcaggtacaacccgt

SEQ ID NO: 481916 - DNA, 30 bp, Artificial Sequence
  Synthetic oligonucleotide
agttcctctcgctgttgtgtgtgaacccgt

SEQ ID NO: 481917 - DNA, 30 bp, Artificial Sequence
  Synthetic oligonucleotide
attgaggtcgttgcaattctacgcacccgt

SEQ ID NO: 481918 - DNA, 30 bp, Artificial Sequence
  Synthetic oligonucleotide
cattatataacgtcttgaggtggcacccgt

SEQ ID NO: 481919 - DNA, 30 bp, Artificial Sequence
  Synthetic oligonucleotide
tacgcttgcgtcgccgatccacggacccgt

SEQ ID NO: 481920 - DNA, 30 bp, Artificial Sequence
  Synthetic oligonucleotide
cgacgcaagctcctgcggaatactacccgt

SEQ ID NO: 481921 - DNA, 30 bp, Artificial Sequence
  Synthetic oligonucleotide
cctgggtagctaatcgcaacgcaaccccgt

SEQ ID NO: 481922 - DNA, 30 bp, Artificial Sequence
  Synthetic oligonucleotide
tctagcgacggaatagcacagggcccccgt

SEQ ID NO: 481923 - DNA, 30 bp, Artificial Sequence
  Synthetic oligonucleotide
cttcagatccaaccaagggaaatcccccgt

SEQ ID NO: 481924 - DNA, 30 bp, Artificial Sequence
  Synthetic oligonucleotide
tcggggcctgaagacgatcgcagagcccgt

SEQ ID NO: 481925 - DNA, 30 bp, Artificial Sequence
  Synthetic oligonucleotide
attaaagcgctcgattggacggtagcccgt

SEQ ID NO: 481926 - DNA, 30 bp, Artificial Sequence
  Synthetic oligonucleotide
gctaatcaacctagtcagtagtacgcccgt

SEQ ID NO: 481927 - DNA, 30 bp, Artificial Sequence
  Synthetic oligonucleotide
gtaagtatgagggggggcctttcggcccgt

SEQ ID NO: 481928 - DNA, 30 bp, Artificial Sequence
  Synthetic oligonucleotide
aagactcgcctatagccttgttgtgcccgt

SEQ ID NO: 481929 - DNA, 30 bp, Artificial Sequence
  Synthetic oligonucleotide
agagtattgcaatgataaacgccatcccgt

SEQ ID NO: 481930 - DNA, 30 bp, Artificial Sequence
  Synthetic oligonucleotide
gaacacgatgttgttttgagcaagtcccgt

SEQ ID NO: 481931 - DNA, 30 bp, Artificial Sequence
  Synthetic oligonucleotide
gaccaattcagatccgtactcacaagccgt

SEQ ID NO: 481932 - DNA, 30 bp, Artificial Sequence
  Synthetic oligonucleotide
cctcttgggaatttcgtcgtaacgagccgt

SEQ ID NO: 481933 - DNA, 30 bp, Artificial Sequence
  Synthetic oligonucleotide
tatgatgtgacgttcgggcatctgagccgt

SEQ ID NO: 481934 - DNA, 30 bp, Artificial Sequence
  Synthetic oligonucleotide
catggttccccccaggacctagatagccgt

SEQ ID NO: 481935 - DNA, 30 bp, Artificial Sequence
  Synthetic oligonucleotide
gcggtcgtgcacaccatattttcacgccgt

SEQ ID NO: 481936 - DNA, 30 bp, Artificial Sequence
  Synthetic oligonucleotide
cggcttcgcagcaagttcacgaaccgccgt

SEQ ID NO: 481937 - DNA, 30 bp, Artificial Sequence
  Synthetic oligonucleotide
gtacacgtgttgatacatacgcgccgccgt

SEQ ID NO: 481938 - DNA, 30 bp, Artificial Sequence
  Synthetic oligonucleotide
gagcaggtttggatacccagtttccgccgt

SEQ ID NO: 481939 - DNA, 30 bp, Artificial Sequence
  Synthetic oligonucleotide
tgtacccgacgctcctcggtagcgcgccgt

SEQ ID NO: 481940 - DNA, 30 bp, Artificial Sequence
  Synthetic oligonucleotide
cggtaaggagggtaaccgacgtcgcgccgt

SEQ ID NO: 481941 - DNA, 30 bp, Artificial Sequence
  Synthetic oligonucleotide
taagctcattgattttgacaaatgcgccgt

SEQ ID NO: 481942 - DNA, 30 bp, Artificial Sequence
  Synthetic oligonucleotide
ggtccggaaatgcaaattctctcaggccgt

SEQ ID NO: 481943 - DNA, 30 bp, Artificial Sequence
  Synthetic oligonucleotide
tctttttatccgagtagactttacggccgt

SEQ ID NO: 481944 - DNA, 30 bp, Artificial Sequence
  Synthetic oligonucleotide
gatcctgcgcctgaccacggggccggccgt

SEQ ID NO: 481945 - DNA, 30 bp, Artificial Sequence
  Synthetic oligonucleotide
ctacaggatgattagtaatcagtcggccgt

SEQ ID NO: 481946 - DNA, 30 bp, Artificial Sequence
  Synthetic oligonucleotide
ttgactcagaggatttttgctgggggccgt

SEQ ID NO: 481947 - DNA, 30 bp, Artificial Sequence
  Synthetic oligonucleotide
aagcttgtgagataagactgatatggccgt

SEQ ID NO: 481948 - DNA, 30 bp, Artificial Sequence
  Synthetic oligonucleotide
acaaaggctacagtagccaacggtggccgt

SEQ ID NO: 481949 - DNA, 30 bp, Artificial Sequence
  Synthetic oligonucleotide
attatggtgccaaatttggacaactgccgt

SEQ ID NO: 481950 - DNA, 30 bp, Artificial Sequence
  Synthetic oligonucleotide
aagcaatgcgagagattaatacagtgccgt

SEQ ID NO: 481951 - DNA, 30 bp, Artificial Sequence
  Synthetic oligonucleotide
accgcttgtctgccaataagactgtgccgt

SEQ ID NO: 481952 - DNA, 30 bp, Artificial Sequence
  Synthetic oligonucleotide
ctatcggcagctccctcttacccttgccgt

SEQ ID NO: 481953 - DNA, 30 bp, Artificial Sequence
  Synthetic oligonucleotide
gcgctttgtcatattgctacgtgttgccgt

SEQ ID NO: 481954 - DNA, 30 bp, Artificial Sequence
  Synthetic oligonucleotide
tgtttgtcgctggcgcacatagccatccgt

SEQ ID NO: 481955 - DNA, 30 bp, Artificial Sequence
  Synthetic oligonucleotide
aggttgcaaccgagaggcatgtccatccgt

SEQ ID NO: 481956 - DNA, 30 bp, Artificial Sequence
  Synthetic oligonucleotide
cttagctgatcacttccgataggcatccgt

SEQ ID NO: 481957 - DNA, 30 bp, Artificial Sequence
  Synthetic oligonucleotide
ctctacaattggatcaacccgacgatccgt

SEQ ID NO: 481958 - DNA, 29 bp, Artificial Sequence
  Synthetic oligonucleotide
ctcgatacaagttgaagggggctatccgt

SEQ ID NO: 481959 - DNA, 30 bp, Artificial Sequence
  Synthetic oligonucleotide
gttatcataatttaagtctaaattatccgt

SEQ ID NO: 481960 - DNA, 30 bp, Artificial Sequence
  Synthetic oligonucleotide
tctctcctatcttcttagcttattatccgt

SEQ ID NO: 481961 - DNA, 30 bp, Artificial Sequence
  Synthetic oligonucleotide
cgacctctagggacacgcaggtttatccgt

SEQ ID NO: 481962 - DNA, 30 bp, Artificial Sequence
  Synthetic oligonucleotide
aactcttacccagggcgcaataaactccgt

SEQ ID NO: 481963 - DNA, 30 bp, Artificial Sequence
  Synthetic oligonucleotide
aattgaaacctcatcgtacgctaactccgt

SEQ ID NO: 481964 - DNA, 30 bp, Artificial Sequence
  Synthetic oligonucleotide
tccccaggaaagtatcatttgagactccgt

SEQ ID NO: 481965 - DNA, 30 bp, Artificial Sequence
  Synthetic oligonucleotide
acaatttgtttggcattgtgtgtactccgt

SEQ ID NO: 481966 - DNA, 30 bp, Artificial Sequence
  Synthetic oligonucleotide
ttctacgtttgctaaggtgttaacctccgt

SEQ ID NO: 481967 - DNA, 30 bp, Artificial Sequence
  Synthetic oligonucleotide
gtacaggtctacgttacggtcacgctccgt

SEQ ID NO: 481968 - DNA, 30 bp, Artificial Sequence
  Synthetic oligonucleotide
gcaaggcccggtagcttgcgtactctccgt

SEQ ID NO: 481969 - DNA, 30 bp, Artificial Sequence
  Synthetic oligonucleotide
catttccataacgtgtttgtctttctccgt

SEQ ID NO: 481970 - DNA, 30 bp, Artificial Sequence
  Synthetic oligonucleotide
aggcagccggtgtggaaaggtccagtccgt

SEQ ID NO: 481971 - DNA, 30 bp, Artificial Sequence
  Synthetic oligonucleotide
aagggcgcctatactaactcgcacgtccgt

SEQ ID NO: 481972 - DNA, 30 bp, Artificial Sequence
  Synthetic oligonucleotide
gggtcactcttctagtgtgtgtacgtccgt

SEQ ID NO: 481973 - DNA, 30 bp, Artificial Sequence
  Synthetic oligonucleotide
tgcacttacggctcagccaggcccgtccgt

SEQ ID NO: 481974 - DNA, 30 bp, Artificial Sequence
  Synthetic oligonucleotide
acataatggtcctcagcaagagtcgtccgt

SEQ ID NO: 481975 - DNA, 30 bp, Artificial Sequence
  Synthetic oligonucleotide
ggattatcctaacagacgtgtaatgtccgt

SEQ ID NO: 481976 - DNA, 30 bp, Artificial Sequence
  Synthetic oligonucleotide
ggctgatctaatgttcaccgtggtgtccgt

SEQ ID NO: 481977 - DNA, 30 bp, Artificial Sequence
  Synthetic oligonucleotide
aactactccggcgcatcaatctcgttccgt

SEQ ID NO: 481978 - DNA, 30 bp, Artificial Sequence
  Synthetic oligonucleotide
caatcgtttcagggacatattgtgttccgt

SEQ ID NO: 481979 - DNA, 30 bp, Artificial Sequence
  Synthetic oligonucleotide
ggtctcagccacggaacagccaatttccgt

SEQ ID NO: 481980 - DNA, 30 bp, Artificial Sequence
  Synthetic oligonucleotide
atgtggaatctggccccgggtcatttccgt

SEQ ID NO: 481981 - DNA, 30 bp, Artificial Sequence
  Synthetic oligonucleotide
gcttgtacttatcacggtgtacgtttccgt

SEQ ID NO: 481982 - DNA, 30 bp, Artificial Sequence
  Synthetic oligonucleotide
ctgttaacgcaaacatgcgtcaaaaagcgt

SEQ ID NO: 481983 - DNA, 30 bp, Artificial Sequence
  Synthetic oligonucleotide
acaaagatacggctaggtacgctgaagcgt

SEQ ID NO: 481984 - DNA, 30 bp, Artificial Sequence
  Synthetic oligonucleotide
aaaataggcgtactctgagctaataagcgt

SEQ ID NO: 481985 - DNA, 30 bp, Artificial Sequence
  Synthetic oligonucleotide
aggtcctacaaactatcatgatgacagcgt

SEQ ID NO: 481986 - DNA, 30 bp, Artificial Sequence
  Synthetic oligonucleotide
cagtgccattcttggaattgaacccagcgt

SEQ ID NO: 481987 - DNA, 30 bp, Artificial Sequence
  Synthetic oligonucleotide
cactgttccacttattaaagtattcagcgt

SEQ ID NO: 481988 - DNA, 30 bp, Artificial Sequence
  Synthetic oligonucleotide
ctagtatagaataccctgtagacagagcgt

SEQ ID NO: 481989 - DNA, 30 bp, Artificial Sequence
  Synthetic oligonucleotide
tcagtgtctcgtttttgcccatccgagcgt

SEQ ID NO: 481990 - DNA, 30 bp, Artificial Sequence
  Synthetic oligonucleotide
atcgctcgaacccgcccgtcaatcgagcgt

SEQ ID NO: 481991 - DNA, 30 bp, Artificial Sequence
  Synthetic oligonucleotide
cttaaaccactggatactactccggagcgt

SEQ ID NO: 481992 - DNA, 30 bp, Artificial Sequence
  Synthetic oligonucleotide
gacagacttggaattccttgtactgagcgt

SEQ ID NO: 481993 - DNA, 30 bp, Artificial Sequence
  Synthetic oligonucleotide
tttcagtccggttactagtaatctgagcgt

SEQ ID NO: 481994 - DNA, 30 bp, Artificial Sequence
  Synthetic oligonucleotide
cgtgcttgtgcggtgaagagtcaatagcgt

SEQ ID NO: 481995 - DNA, 30 bp, Artificial Sequence
  Synthetic oligonucleotide
gggagcatggcagcctacgcaggatagcgt

SEQ ID NO: 481996 - DNA, 30 bp, Artificial Sequence
  Synthetic oligonucleotide
caaagggcactcatggtacacgtatagcgt

SEQ ID NO: 481997 - DNA, 30 bp, Artificial Sequence
  Synthetic oligonucleotide
tttatactcgccttggagaagccgtagcgt

SEQ ID NO: 481998 - DNA, 30 bp, Artificial Sequence
  Synthetic oligonucleotide
gtaagtgtccacagttggatttcgtagcgt

SEQ ID NO: 481999 - DNA, 30 bp, Artificial Sequence
  Synthetic oligonucleotide
gacctgttgttcagagctagtcattagcgt

SEQ ID NO: 482000 - DNA, 30 bp, Artificial Sequence
  Synthetic oligonucleotide
aaagttttggggatcatcggcggttagcgt

SEQ ID NO: 482001 - DNA, 30 bp, Artificial Sequence
  Synthetic oligonucleotide
gcacgtatcaggtgttaacagctaacgcgt

SEQ ID NO: 482002 - DNA, 30 bp, Artificial Sequence
  Synthetic oligonucleotide
tcaaacgtttggtgaagacctaggacgcgt

SEQ ID NO: 482003 - DNA, 30 bp, Artificial Sequence
  Synthetic oligonucleotide
ctgcgccgaagtagagttgcagggacgcgt

SEQ ID NO: 482004 - DNA, 30 bp, Artificial Sequence
  Synthetic oligonucleotide
aggcagctcctgttccagcatctgacgcgt

SEQ ID NO: 482005 - DNA, 30 bp, Artificial Sequence
  Synthetic oligonucleotide
ggttagtgtgtatgtgggaaattgacgcgt

SEQ ID NO: 482006 - DNA, 30 bp, Artificial Sequence
  Synthetic oligonucleotide
aagtgtctagactgtaccaaagttacgcgt

SEQ ID NO: 482007 - DNA, 30 bp, Artificial Sequence
  Synthetic oligonucleotide
attgtctgtcgctactagcgccacccgcgt

SEQ ID NO: 482008 - DNA, 30 bp, Artificial Sequence
  Synthetic oligonucleotide
aacctgcgggcgctctggggtctcccgcgt

SEQ ID NO: 482009 - DNA, 30 bp, Artificial Sequence
  Synthetic oligonucleotide
aacttgcatggcaaggcaggtattccgcgt

SEQ ID NO: 482010 - DNA, 30 bp, Artificial Sequence
  Synthetic oligonucleotide
gaatattcacaagtgtaacgcggagcgcgt

SEQ ID NO: 482011 - DNA, 30 bp, Artificial Sequence
  Synthetic oligonucleotide
tgagtggtgtgtaaccctctatgagcgcgt

SEQ ID NO: 482012 - DNA, 30 bp, Artificial Sequence
  Synthetic oligonucleotide
aactgaagtgaacctttcggccccgcgcgt

SEQ ID NO: 482013 - DNA, 30 bp, Artificial Sequence
  Synthetic oligonucleotide
ctatcctgctggttgccgcggaaggcgcgt

SEQ ID NO: 482014 - DNA, 30 bp, Artificial Sequence
  Synthetic oligonucleotide
ttcccgatatgcagagataggtcggcgcgt

SEQ ID NO: 482015 - DNA, 30 bp, Artificial Sequence
  Synthetic oligonucleotide
ttggatacctatggatgtcaccgctcgcgt

SEQ ID NO: 482016 - DNA, 30 bp, Artificial Sequence
  Synthetic oligonucleotide
atctgcagtaccgactcttcttcgtcgcgt

SEQ ID NO: 482017 - DNA, 29 bp, Artificial Sequence
  Synthetic oligonucleotide
ttacgcgccatatcggcttagattcgcgt

SEQ ID NO: 482018 - DNA, 30 bp, Artificial Sequence
  Synthetic oligonucleotide
ttattgttaacggtccgtaaccgttcgcgt

SEQ ID NO: 482019 - DNA, 30 bp, Artificial Sequence
  Synthetic oligonucleotide
aagatgatagtattaatctgcgcaaggcgt

SEQ ID NO: 482020 - DNA, 30 bp, Artificial Sequence
  Synthetic oligonucleotide
ttaagtccactggaatcatgattaaggcgt

SEQ ID NO: 482021 - DNA, 30 bp, Artificial Sequence
  Synthetic oligonucleotide
gtgtacacaaagcactggggttacaggcgt

SEQ ID NO: 482022 - DNA, 30 bp, Artificial Sequence
  Synthetic oligonucleotide
ccccctagaagtgccgctttctgcaggcgt

SEQ ID NO: 482023 - DNA, 30 bp, Artificial Sequence
  Synthetic oligonucleotide
ctgcgcgatcgcaagcagcgagataggcgt

SEQ ID NO: 482024 - DNA, 30 bp, Artificial Sequence
  Synthetic oligonucleotide
ggtaatcgttaccttacaggaagccggcgt

SEQ ID NO: 482025 - DNA, 30 bp, Artificial Sequence
  Synthetic oligonucleotide
attcagccgcggtctacgaggagccggcgt

SEQ ID NO: 482026 - DNA, 30 bp, Artificial Sequence
  Synthetic oligonucleotide
gacatgtcccgcccctaccatggccggcgt

SEQ ID NO: 482027 - DNA, 30 bp, Artificial Sequence
  Synthetic oligonucleotide
accatattgacaactgctggcacgcggcgt

SEQ ID NO: 482028 - DNA, 30 bp, Artificial Sequence
  Synthetic oligonucleotide
tggtagttcactacgaccaacggtcggcgt

SEQ ID NO: 482029 - DNA, 30 bp, Artificial Sequence
  Synthetic oligonucleotide
tttgtgcagaacctctggtactcagggcgt

SEQ ID NO: 482030 - DNA, 30 bp, Artificial Sequence
  Synthetic oligonucleotide
atctttaatgacaagcgtccgctagggcgt

SEQ ID NO: 482031 - DNA, 30 bp, Artificial Sequence
  Synthetic oligonucleotide
cccttcaaccgctgagccatcttagggcgt

SEQ ID NO: 482032 - DNA, 30 bp, Artificial Sequence
  Synthetic oligonucleotide
ctgcccaattcgcatatagcatacgggcgt

SEQ ID NO: 482033 - DNA, 30 bp, Artificial Sequence
  Synthetic oligonucleotide
ttcatcggcttagacacgggctccgggcgt

SEQ ID NO: 482034 - DNA, 30 bp, Artificial Sequence
  Synthetic oligonucleotide
ggagtttggtgttaagattatcaggggcgt

SEQ ID NO: 482035 - DNA, 30 bp, Artificial Sequence
  Synthetic oligonucleotide
taatattttatgtaattcgatacggggcgt

SEQ ID NO: 482036 - DNA, 30 bp, Artificial Sequence
  Synthetic oligonucleotide
ctccgttggcatatcggataaccggggcgt

SEQ ID NO: 482037 - DNA, 30 bp, Artificial Sequence
  Synthetic oligonucleotide
atcaccgccgctggaccaggctgggggcgt

SEQ ID NO: 482038 - DNA, 30 bp, Artificial Sequence
  Synthetic oligonucleotide
cggtcgtggccatacacgtttgatgggcgt

SEQ ID NO: 482039 - DNA, 30 bp, Artificial Sequence
  Synthetic oligonucleotide
gcccacaacccagcaccgcaacgtgggcgt

SEQ ID NO: 482040 - DNA, 30 bp, Artificial Sequence
  Synthetic oligonucleotide
aatttttatttcggaccgcagtttgggcgt

SEQ ID NO: 482041 - DNA, 30 bp, Artificial Sequence
  Synthetic oligonucleotide
aatcgccccgctctatacaggcgatggcgt

SEQ ID NO: 482042 - DNA, 30 bp, Artificial Sequence
  Synthetic oligonucleotide
ttgccctttagcggccatagggtatggcgt

SEQ ID NO: 482043 - DNA, 30 bp, Artificial Sequence
  Synthetic oligonucleotide
gctcagaactcgagctgaaaacagtggcgt

SEQ ID NO: 482044 - DNA, 30 bp, Artificial Sequence
  Synthetic oligonucleotide
ccaagtatggtcagcagaaaacattggcgt

SEQ ID NO: 482045 - DNA, 30 bp, Artificial Sequence
  Synthetic oligonucleotide
taatctcgactggagttatgacaaatgcgt

SEQ ID NO: 482046 - DNA, 30 bp, Artificial Sequence
  Synthetic oligonucleotide
cgccagtttggtaagaacgcggtaatgcgt

SEQ ID NO: 482047 - DNA, 30 bp, Artificial Sequence
  Synthetic oligonucleotide
ggtctttcagttacgatttacgacatgcgt

SEQ ID NO: 482048 - DNA, 30 bp, Artificial Sequence
  Synthetic oligonucleotide
tctaataggcagatgattattgacatgcgt

SEQ ID NO: 482049 - DNA, 30 bp, Artificial Sequence
  Synthetic oligonucleotide
gatctggagacaagccacgtatagatgcgt

SEQ ID NO: 482050 - DNA, 30 bp, Artificial Sequence
  Synthetic oligonucleotide
ttctgtgtccttagggggtgttagatgcgt

SEQ ID NO: 482051 - DNA, 30 bp, Artificial Sequence
  Synthetic oligonucleotide
ttaactcaattaagttgtccctcgatgcgt

SEQ ID NO: 482052 - DNA, 30 bp, Artificial Sequence
  Synthetic oligonucleotide
agcatagcgcgctctggtcctgtgatgcgt

SEQ ID NO: 482053 - DNA, 30 bp, Artificial Sequence
  Synthetic oligonucleotide
gtattccaatgactttgaggattgatgcgt

SEQ ID NO: 482054 - DNA, 30 bp, Artificial Sequence
  Synthetic oligonucleotide
gggtcgcgcgtaaagtgtttcaatatgcgt

SEQ ID NO: 482055 - DNA, 30 bp, Artificial Sequence
  Synthetic oligonucleotide
atagagatgcttaatgggcagattatgcgt

SEQ ID NO: 482056 - DNA, 30 bp, Artificial Sequence
  Synthetic oligonucleotide
atccctagatctaaacattgagacctgcgt

SEQ ID NO: 482057 - DNA, 30 bp, Artificial Sequence
  Synthetic oligonucleotide
gtaatttgttttgtttaacagggcctgcgt

SEQ ID NO: 482058 - DNA, 30 bp, Artificial Sequence
  Synthetic oligonucleotide
tatcagctctttactcatcgggtcctgcgt

SEQ ID NO: 482059 - DNA, 30 bp, Artificial Sequence
  Synthetic oligonucleotide
attaccaacgaaggggggaagcttctgcgt

SEQ ID NO: 482060 - DNA, 30 bp, Artificial Sequence
  Synthetic oligonucleotide
atgcgcagcttgcactcgcgtagcgtgcgt

SEQ ID NO: 482061 - DNA, 30 bp, Artificial Sequence
  Synthetic oligonucleotide
agcctgtaccagcgtattaatgtcgtgcgt

SEQ ID NO: 482062 - DNA, 30 bp, Artificial Sequence
  Synthetic oligonucleotide
gtatccaaagacgtcgaaatcaatgtgcgt

SEQ ID NO: 482063 - DNA, 30 bp, Artificial Sequence
  Synthetic oligonucleotide
ttctctggcgaagcatacgcaattgtgcgt

SEQ ID NO: 482064 - DNA, 30 bp, Artificial Sequence
  Synthetic oligonucleotide
atgcttcgccgctatactaagcaattgcgt

SEQ ID NO: 482065 - DNA, 30 bp, Artificial Sequence
  Synthetic oligonucleotide
taagatactgcatcaactgcccgattgcgt

SEQ ID NO: 482066 - DNA, 30 bp, Artificial Sequence
  Synthetic oligonucleotide
caggtgatccgcggctgggaggtattgcgt

SEQ ID NO: 482067 - DNA, 30 bp, Artificial Sequence
  Synthetic oligonucleotide
gatacccggaactggcctgtacacttgcgt

SEQ ID NO: 482068 - DNA, 30 bp, Artificial Sequence
  Synthetic oligonucleotide
ggccacagaaacgatacggtagtgttgcgt

SEQ ID NO: 482069 - DNA, 30 bp, Artificial Sequence
  Synthetic oligonucleotide
ctagtttactccaggtctggttaaaatcgt

SEQ ID NO: 482070 - DNA, 30 bp, Artificial Sequence
  Synthetic oligonucleotide
ataaagcgttggaatactgtattcaatcgt

SEQ ID NO: 482071 - DNA, 30 bp, Artificial Sequence
  Synthetic oligonucleotide
gccgtgcctatggattcctcttgtaatcgt

SEQ ID NO: 482072 - DNA, 30 bp, Artificial Sequence
  Synthetic oligonucleotide
ctaaataggaaaccgcgcaacattaatcgt

SEQ ID NO: 482073 - DNA, 30 bp, Artificial Sequence
  Synthetic oligonucleotide
gtgaccgtaagtgagtgtgcacttaatcgt

SEQ ID NO: 482074 - DNA, 30 bp, Artificial Sequence
  Synthetic oligonucleotide
ttgcctaagccaggtaaggtctttaatcgt

SEQ ID NO: 482075 - DNA, 30 bp, Artificial Sequence
  Synthetic oligonucleotide
tgctttgagagcgttagcatttttaatcgt

SEQ ID NO: 482076 - DNA, 30 bp, Artificial Sequence
  Synthetic oligonucleotide
ttgagttgctcccagcgtctttgccatcgt

SEQ ID NO: 482077 - DNA, 30 bp, Artificial Sequence
  Synthetic oligonucleotide
aggggaaacgggagggtgcggtgcgatcgt

SEQ ID NO: 482078 - DNA, 30 bp, Artificial Sequence
  Synthetic oligonucleotide
tagtcgctggaagtcaacttccaggatcgt

SEQ ID NO: 482079 - DNA, 30 bp, Artificial Sequence
  Synthetic oligonucleotide
caattatagattgtgccacgatcggatcgt

SEQ ID NO: 482080 - DNA, 30 bp, Artificial Sequence
  Synthetic oligonucleotide
cctctggttcagtccactgaacgtgatcgt

SEQ ID NO: 482081 - DNA, 30 bp, Artificial Sequence
  Synthetic oligonucleotide
tactcctatagagctcgtcagtttgatcgt

SEQ ID NO: 482082 - DNA, 30 bp, Artificial Sequence
  Synthetic oligonucleotide
ctcaccctcattggattttgaacatatcgt

SEQ ID NO: 482083 - DNA, 30 bp, Artificial Sequence
  Synthetic oligonucleotide
aggtaccgagcctgtttggcaggctatcgt

SEQ ID NO: 482084 - DNA, 30 bp, Artificial Sequence
  Synthetic oligonucleotide
ttatcggagcaaccatagcaaggttatcgt

SEQ ID NO: 482085 - DNA, 30 bp, Artificial Sequence
  Synthetic oligonucleotide
aagtgatttccgcgtgttttgggttatcgt

SEQ ID NO: 482086 - DNA, 30 bp, Artificial Sequence
  Synthetic oligonucleotide
acgagtcaacaacattacattaaaactcgt

SEQ ID NO: 482087 - DNA, 30 bp, Artificial Sequence
  Synthetic oligonucleotide
ggttgggtttaacatattcctgaaactcgt

SEQ ID NO: 482088 - DNA, 30 bp, Artificial Sequence
  Synthetic oligonucleotide
ttcgtaactggtcgccaactatagactcgt

SEQ ID NO: 482089 - DNA, 30 bp, Artificial Sequence
  Synthetic oligonucleotide
atttggatacagttcccgggttagactcgt

SEQ ID NO: 482090 - DNA, 30 bp, Artificial Sequence
  Synthetic oligonucleotide
ataatcccagctccttccacggatactcgt

SEQ ID NO: 482091 - DNA, 29 bp, Artificial Sequence
  Synthetic oligonucleotide
ctcttcagggttccaacagtggtactcgt

SEQ ID NO: 482092 - DNA, 30 bp, Artificial Sequence
  Synthetic oligonucleotide
cgcccgtagggttctcgggagatacctcgt

SEQ ID NO: 482093 - DNA, 30 bp, Artificial Sequence
  Synthetic oligonucleotide
ggggcatacgctagcaacaagttacctcgt

SEQ ID NO: 482094 - DNA, 30 bp, Artificial Sequence
  Synthetic oligonucleotide
ttacaagtttgccccgatagtaacgctcgt

SEQ ID NO: 482095 - DNA, 30 bp, Artificial Sequence
  Synthetic oligonucleotide
ggtatcagtagattatacgccgcggctcgt

SEQ ID NO: 482096 - DNA, 30 bp, Artificial Sequence
  Synthetic oligonucleotide
agtcggattagcgaccgtatgggggctcgt

SEQ ID NO: 482097 - DNA, 30 bp, Artificial Sequence
  Synthetic oligonucleotide
gtaaatccatgaaccgctgttagctctcgt

SEQ ID NO: 482098 - DNA, 30 bp, Artificial Sequence
  Synthetic oligonucleotide
ttgttataatcgagggtcataacgtctcgt

SEQ ID NO: 482099 - DNA, 30 bp, Artificial Sequence
  Synthetic oligonucleotide
cagcgttactatggttccgcacattctcgt

SEQ ID NO: 482100 - DNA, 30 bp, Artificial Sequence
  Synthetic oligonucleotide
ccccaatcaagctaatatattatcagtcgt

SEQ ID NO: 482101 - DNA, 30 bp, Artificial Sequence
  Synthetic oligonucleotide
cggtggacgtgcaagattgtactcagtcgt

SEQ ID NO: 482102 - DNA, 30 bp, Artificial Sequence
  Synthetic oligonucleotide
gagtacgattaacattgatcggatagtcgt

SEQ ID NO: 482103 - DNA, 30 bp, Artificial Sequence
  Synthetic oligonucleotide
tatgcccgctccaaatctaggtatagtcgt

SEQ ID NO: 482104 - DNA, 30 bp, Artificial Sequence
  Synthetic oligonucleotide
atcgagaggctgcgagtgactgttagtcgt

SEQ ID NO: 482105 - DNA, 30 bp, Artificial Sequence
  Synthetic oligonucleotide
gttttcgtctcttggttgggtaaacgtcgt

SEQ ID NO: 482106 - DNA, 31 bp, Artificial Sequence
  Synthetic oligonucleotide
ataggtgaccgctgtttaacccgcacgtcgt

SEQ ID NO: 482107 - DNA, 30 bp, Artificial Sequence
  Synthetic oligonucleotide
ctctccggctatttgagcactggacgtcgt

SEQ ID NO: 482108 - DNA, 30 bp, Artificial Sequence
  Synthetic oligonucleotide
agcgattgtagacgcctcttatttcgtcgt

SEQ ID NO: 482109 - DNA, 30 bp, Artificial Sequence
  Synthetic oligonucleotide
gaaagtggccaaccacgctttcagggtcgt

SEQ ID NO: 482110 - DNA, 29 bp, Artificial Sequence
  Synthetic oligonucleotide
aatcacctttcgcaatcatcatgggtcgt

SEQ ID NO: 482111 - DNA, 30 bp, Artificial Sequence
  Synthetic oligonucleotide
ggcttataacatactagagttatatgtcgt

SEQ ID NO: 482112 - DNA, 30 bp, Artificial Sequence
  Synthetic oligonucleotide
tacgggtctagatcacgctggaactgtcgt

SEQ ID NO: 482113 - DNA, 30 bp, Artificial Sequence
  Synthetic oligonucleotide
cagatgagatagtctatatgagtctgtcgt

SEQ ID NO: 482114 - DNA, 30 bp, Artificial Sequence
  Synthetic oligonucleotide
ccccgtggcagtcgagtgggtgagtgtcgt

SEQ ID NO: 482115 - DNA, 30 bp, Artificial Sequence
  Synthetic oligonucleotide
cttccctaccgcaagtacacgtggtgtcgt

SEQ ID NO: 482116 - DNA, 30 bp, Artificial Sequence
  Synthetic oligonucleotide
gggagcggtagtttggtgtaacgttgtcgt

SEQ ID NO: 482117 - DNA, 30 bp, Artificial Sequence
  Synthetic oligonucleotide
gaggctgaggcgtctcaaaactgttgtcgt

SEQ ID NO: 482118 - DNA, 30 bp, Artificial Sequence
  Synthetic oligonucleotide
agaaacgtacccggaatagtataaattcgt

SEQ ID NO: 482119 - DNA, 30 bp, Artificial Sequence
  Synthetic oligonucleotide
cgcattttgcagttcctccctccaattcgt

SEQ ID NO: 482120 - DNA, 30 bp, Artificial Sequence
  Synthetic oligonucleotide
aaatcatcattcaaatgacgaataattcgt

SEQ ID NO: 482121 - DNA, 31 bp, Artificial Sequence
  Synthetic oligonucleotide
tactatgggcagcgcacaccggtccattcgt

SEQ ID NO: 482122 - DNA, 30 bp, Artificial Sequence
  Synthetic oligonucleotide
agtcctggacaaggaatgccttgcattcgt

SEQ ID NO: 482123 - DNA, 30 bp, Artificial Sequence
  Synthetic oligonucleotide
cacagttcgcagtaggtttttcatattcgt

SEQ ID NO: 482124 - DNA, 30 bp, Artificial Sequence
  Synthetic oligonucleotide
cctgttcccggtttgagccggtatattcgt

SEQ ID NO: 482125 - DNA, 30 bp, Artificial Sequence
  Synthetic oligonucleotide
ggctacatctatccccgcagccctattcgt

SEQ ID NO: 482126 - DNA, 30 bp, Artificial Sequence
  Synthetic oligonucleotide
gactcatgatcccatgcaacgcctattcgt

SEQ ID NO: 482127 - DNA, 30 bp, Artificial Sequence
  Synthetic oligonucleotide
gcaaagcagtactgtcatgcaggccttcgt

SEQ ID NO: 482128 - DNA, 30 bp, Artificial Sequence
  Synthetic oligonucleotide
ataaggcggagacagctgtggttccttcgt

SEQ ID NO: 482129 - DNA, 30 bp, Artificial Sequence
  Synthetic oligonucleotide
gggcgaattctatagactgggtcgcttcgt

SEQ ID NO: 482130 - DNA, 30 bp, Artificial Sequence
  Synthetic oligonucleotide
ataggttgtgcgatattaagatggcttcgt

SEQ ID NO: 482131 - DNA, 30 bp, Artificial Sequence
  Synthetic oligonucleotide
taattttgcgggatcttagctagtcttcgt

SEQ ID NO: 482132 - DNA, 30 bp, Artificial Sequence
  Synthetic oligonucleotide
atgtaccaaggattcacgatgaaagttcgt

SEQ ID NO: 482133 - DNA, 30 bp, Artificial Sequence
  Synthetic oligonucleotide
cgaattgactcgcaggagactcacgttcgt

SEQ ID NO: 482134 - DNA, 30 bp, Artificial Sequence
  Synthetic oligonucleotide
ctgatcaacaacgtatggcgggccgttcgt

SEQ ID NO: 482135 - DNA, 30 bp, Artificial Sequence
  Synthetic oligonucleotide
ttgtgaccttttcggttgggtgtcgttcgt

SEQ ID NO: 482136 - DNA, 30 bp, Artificial Sequence
  Synthetic oligonucleotide
ggtacgcaacacttgggcccagaggttcgt

SEQ ID NO: 482137 - DNA, 30 bp, Artificial Sequence
  Synthetic oligonucleotide
ggatttaaagtgacattgccatgtgttcgt

SEQ ID NO: 482138 - DNA, 30 bp, Artificial Sequence
  Synthetic oligonucleotide
gccatttgaacctgggacagtacatttcgt

SEQ ID NO: 482139 - DNA, 30 bp, Artificial Sequence
  Synthetic oligonucleotide
tacgtaggctatttttgcgtgagatttcgt

SEQ ID NO: 482140 - DNA, 29 bp, Artificial Sequence
  Synthetic oligonucleotide
gtacttaccgtgactaactgaactttcgt

SEQ ID NO: 482141 - DNA, 30 bp, Artificial Sequence
  Synthetic oligonucleotide
ggcaaaaaaaacaactcgattgattttcgt

SEQ ID NO: 482142 - DNA, 30 bp, Artificial Sequence
  Synthetic oligonucleotide
aatagttcaaggagtaacatcacttttcgt

SEQ ID NO: 482143 - DNA, 30 bp, Artificial Sequence
  Synthetic oligonucleotide
ttcagccacagctaaaggctacgttttcgt

SEQ ID NO: 482144 - DNA, 30 bp, Artificial Sequence
  Synthetic oligonucleotide
ggaggctcgatgaggtcttttggttttcgt

SEQ ID NO: 482145 - DNA, 30 bp, Artificial Sequence
  Synthetic oligonucleotide
ataagggcggttttaagggtcctttttcgt

SEQ ID NO: 482146 - DNA, 30 bp, Artificial Sequence
  Synthetic oligonucleotide
ctatgcgagtgtccctcggtggtttttcgt

SEQ ID NO: 482147 - DNA, 30 bp, Artificial Sequence
  Synthetic oligonucleotide
aaagggtggtcgatgtaagaccaaaaaggt

SEQ ID NO: 482148 - DNA, 30 bp, Artificial Sequence
  Synthetic oligonucleotide
cttgatatctcgctcagatcaagaaaaggt

SEQ ID NO: 482149 - DNA, 30 bp, Artificial Sequence
  Synthetic oligonucleotide
gtatcaacacacacaccctatggaaaaggt

SEQ ID NO: 482150 - DNA, 30 bp, Artificial Sequence
  Synthetic oligonucleotide
tctgccgagttcagttggtgtctaaaaggt

SEQ ID NO: 482151 - DNA, 31 bp, Artificial Sequence
  Synthetic oligonucleotide
tccccggaactaaatgagacgcaccaaaggt

SEQ ID NO: 482152 - DNA, 30 bp, Artificial Sequence
  Synthetic oligonucleotide
tcgcttattcctcccggagtcaagaaaggt

SEQ ID NO: 482153 - DNA, 30 bp, Artificial Sequence
  Synthetic oligonucleotide
tacactttccttctcacatggtataaaggt

SEQ ID NO: 482154 - DNA, 30 bp, Artificial Sequence
  Synthetic oligonucleotide
acacgattcaggctttcagctgctaaaggt

SEQ ID NO: 482155 - DNA, 30 bp, Artificial Sequence
  Synthetic oligonucleotide
tatttccaggggagcatttttaaacaaggt

SEQ ID NO: 482156 - DNA, 30 bp, Artificial Sequence
  Synthetic oligonucleotide
ttacataatcagattgttggataacaaggt

SEQ ID NO: 482157 - DNA, 30 bp, Artificial Sequence
  Synthetic oligonucleotide
cggtcgcatgaaattgaaaatgcccaaggt

SEQ ID NO: 482158 - DNA, 30 bp, Artificial Sequence
  Synthetic oligonucleotide
gcactccgtcagcgagcgcgtgagcaaggt

SEQ ID NO: 482159 - DNA, 30 bp, Artificial Sequence
  Synthetic oligonucleotide
ctcaatcgtatgcattcgacttcgcaaggt

SEQ ID NO: 482160 - DNA, 30 bp, Artificial Sequence
  Synthetic oligonucleotide
tacagctatcaggtaggcctactgcaaggt

SEQ ID NO: 482161 - DNA, 30 bp, Artificial Sequence
  Synthetic oligonucleotide
ctttattcgcactgaacgagcactcaaggt

SEQ ID NO: 482162 - DNA, 30 bp, Artificial Sequence
  Synthetic oligonucleotide
tacagttttatactacaactaagtcaaggt

SEQ ID NO: 482163 - DNA, 30 bp, Artificial Sequence
  Synthetic oligonucleotide
tccagttcgggattgtggctacaagaaggt

SEQ ID NO: 482164 - DNA, 30 bp, Artificial Sequence
  Synthetic oligonucleotide
gcctactgatagcctaatgcgtcagaaggt

SEQ ID NO: 482165 - DNA, 30 bp, Artificial Sequence
  Synthetic oligonucleotide
gtgctacgattctagttgtaactagaaggt

SEQ ID NO: 482166 - DNA, 30 bp, Artificial Sequence
  Synthetic oligonucleotide
tcataaataggccggttatgtgcggaaggt

SEQ ID NO: 482167 - DNA, 30 bp, Artificial Sequence
  Synthetic oligonucleotide
gttcatgcgcccatccgtgttgtggaaggt

SEQ ID NO: 482168 - DNA, 30 bp, Artificial Sequence
  Synthetic oligonucleotide
gcgatgtctaactgaagaatatttgaaggt

SEQ ID NO: 482169 - DNA, 30 bp, Artificial Sequence
  Synthetic oligonucleotide
gatgagtcataggcccttagtaaataaggt

SEQ ID NO: 482170 - DNA, 30 bp, Artificial Sequence
  Synthetic oligonucleotide
cgaatcaacttttctcgtaacgagtaaggt

SEQ ID NO: 482171 - DNA, 30 bp, Artificial Sequence
  Synthetic oligonucleotide
taaatgggtaacggatcttgctagtaaggt

SEQ ID NO: 482172 - DNA, 30 bp, Artificial Sequence
  Synthetic oligonucleotide
acggtggaccttctgattcgccattaaggt

SEQ ID NO: 482173 - DNA, 30 bp, Artificial Sequence
  Synthetic oligonucleotide
accttatgcgcggcaccgggtctttaaggt

SEQ ID NO: 482174 - DNA, 30 bp, Artificial Sequence
  Synthetic oligonucleotide
ggaccttaacgtccagtgacgcccacaggt

SEQ ID NO: 482175 - DNA, 30 bp, Artificial Sequence
  Synthetic oligonucleotide
gtgacccgacgggcagctatcgccacaggt

SEQ ID NO: 482176 - DNA, 30 bp, Artificial Sequence
  Synthetic oligonucleotide
ggcttctatgctccgataccaacgacaggt

SEQ ID NO: 482177 - DNA, 30 bp, Artificial Sequence
  Synthetic oligonucleotide
gagggtttcagtctggcctttccgacaggt

SEQ ID NO: 482178 - DNA, 30 bp, Artificial Sequence
  Synthetic oligonucleotide
ttccttctaccgtgtaactaagcgacaggt

SEQ ID NO: 482179 - DNA, 30 bp, Artificial Sequence
  Synthetic oligonucleotide
tccgacccggtgcttcgttgggatacaggt

SEQ ID NO: 482180 - DNA, 30 bp, Artificial Sequence
  Synthetic oligonucleotide
ttattactcagaacgccggtctatacaggt

SEQ ID NO: 482181 - DNA, 30 bp, Artificial Sequence
  Synthetic oligonucleotide
ataccacgcagaaagctccggggtacaggt

SEQ ID NO: 482182 - DNA, 30 bp, Artificial Sequence
  Synthetic oligonucleotide
tgcaacccaccacctatttgccgcccaggt

SEQ ID NO: 482183 - DNA, 30 bp, Artificial Sequence
  Synthetic oligonucleotide
ctactcagtcctctgcaggcattcccaggt

SEQ ID NO: 482184 - DNA, 30 bp, Artificial Sequence
  Synthetic oligonucleotide
aatgcgatgcatgatctaccattgccaggt

SEQ ID NO: 482185 - DNA, 30 bp, Artificial Sequence
  Synthetic oligonucleotide
gcaacttttgagctaaagtgcacagcaggt

SEQ ID NO: 482186 - DNA, 30 bp, Artificial Sequence
  Synthetic oligonucleotide
aactcggtccaaagtgacccgctagcaggt

SEQ ID NO: 482187 - DNA, 30 bp, Artificial Sequence
  Synthetic oligonucleotide
tgctgaagactctaacgcaaattagcaggt

SEQ ID NO: 482188 - DNA, 30 bp, Artificial Sequence
  Synthetic oligonucleotide
caacagtcttgtggaccgccggacgcaggt

SEQ ID NO: 482189 - DNA, 30 bp, Artificial Sequence
  Synthetic oligonucleotide
cgggtcggaacatcgtatgagggcgcaggt

SEQ ID NO: 482190 - DNA, 30 bp, Artificial Sequence
  Synthetic oligonucleotide
ggacgcggacaagatggccttacggcaggt

SEQ ID NO: 482191 - DNA, 30 bp, Artificial Sequence
  Synthetic oligonucleotide
ttcgtgtacattatgttgacacatgcaggt

SEQ ID NO: 482192 - DNA, 30 bp, Artificial Sequence
  Synthetic oligonucleotide
tataagcggaacacggcgttgtatgcaggt

SEQ ID NO: 482193 - DNA, 30 bp, Artificial Sequence
  Synthetic oligonucleotide
gaaaccgccgtatgcacggacgctgcaggt

SEQ ID NO: 482194 - DNA, 30 bp, Artificial Sequence
  Synthetic oligonucleotide
gaggatgttgatttgttgtgggttgcaggt

SEQ ID NO: 482195 - DNA, 30 bp, Artificial Sequence
  Synthetic oligonucleotide
tacatacggattagtattttaacatcaggt

SEQ ID NO: 482196 - DNA, 27 bp, Artificial Sequence
  Synthetic oligonucleotide
ggtatttccactaagccggcctcaggt

SEQ ID NO: 482197 - DNA, 30 bp, Artificial Sequence
  Synthetic oligonucleotide
gttattcttggaaggatactattctcaggt

SEQ ID NO: 482198 - DNA, 30 bp, Artificial Sequence
  Synthetic oligonucleotide
ctaattaccctcaccggaggttggtcaggt

SEQ ID NO: 482199 - DNA, 30 bp, Artificial Sequence
  Synthetic oligonucleotide
gatgcactagaatttggcgagaattcaggt

SEQ ID NO: 482200 - DNA, 30 bp, Artificial Sequence
  Synthetic oligonucleotide
agccagggacctggggaagaatattcaggt

SEQ ID NO: 482201 - DNA, 30 bp, Artificial Sequence
  Synthetic oligonucleotide
tacctcgcttcaggagggttccaaagaggt

SEQ ID NO: 482202 - DNA, 30 bp, Artificial Sequence
  Synthetic oligonucleotide
gcgaaataggaagaagttcttctaagaggt

SEQ ID NO: 482203 - DNA, 30 bp, Artificial Sequence
  Synthetic oligonucleotide
taataccacgcttacgtgtcggtcagaggt

SEQ ID NO: 482204 - DNA, 30 bp, Artificial Sequence
  Synthetic oligonucleotide
cctgtctggcattgccagaggttcagaggt

SEQ ID NO: 482205 - DNA, 30 bp, Artificial Sequence
  Synthetic oligonucleotide
agttacgtcctcttctgaggtcagagaggt

SEQ ID NO: 482206 - DNA, 30 bp, Artificial Sequence
  Synthetic oligonucleotide
atctcttagtttaatgcgactcctagaggt

SEQ ID NO: 482207 - DNA, 30 bp, Artificial Sequence
  Synthetic oligonucleotide
tcgattgacttggacctgtaaagtagaggt

SEQ ID NO: 482208 - DNA, 30 bp, Artificial Sequence
  Synthetic oligonucleotide
cggccgctttcaacctgggggagtagaggt

SEQ ID NO: 482209 - DNA, 30 bp, Artificial Sequence
  Synthetic oligonucleotide
atgggggctgttggtacctatcttagaggt

SEQ ID NO: 482210 - DNA, 30 bp, Artificial Sequence
  Synthetic oligonucleotide
attcgacgccgatctcatggcctacgaggt

SEQ ID NO: 482211 - DNA, 30 bp, Artificial Sequence
  Synthetic oligonucleotide
tgatcctacgtggttaaggatgatcgaggt

SEQ ID NO: 482212 - DNA, 30 bp, Artificial Sequence
  Synthetic oligonucleotide
aaatcgtacaggtcacgttacgaaggaggt

SEQ ID NO: 482213 - DNA, 30 bp, Artificial Sequence
  Synthetic oligonucleotide
gagcgtcccttttggcgtagtacaggaggt

SEQ ID NO: 482214 - DNA, 30 bp, Artificial Sequence
  Synthetic oligonucleotide
gaggacggtaaaacgcggaaacgtggaggt

SEQ ID NO: 482215 - DNA, 30 bp, Artificial Sequence
  Synthetic oligonucleotide
gggtgcgcagggtttttaggcggtggaggt

SEQ ID NO: 482216 - DNA, 30 bp, Artificial Sequence
  Synthetic oligonucleotide
gaatagattatagtgtctacgggtggaggt

SEQ ID NO: 482217 - DNA, 30 bp, Artificial Sequence
  Synthetic oligonucleotide
ggaaccttttctcacacagttgttggaggt

SEQ ID NO: 482218 - DNA, 30 bp, Artificial Sequence
  Synthetic oligonucleotide
ggagtaggttttcgacctacataatgaggt

SEQ ID NO: 482219 - DNA, 30 bp, Artificial Sequence
  Synthetic oligonucleotide
aatccagttaattattttcgctgatgaggt

SEQ ID NO: 482220 - DNA, 30 bp, Artificial Sequence
  Synthetic oligonucleotide
ctgcacgtaacgcacaaaccgttctgaggt

SEQ ID NO: 482221 - DNA, 30 bp, Artificial Sequence
  Synthetic oligonucleotide
ggagcgtttactaggctttccctaataggt

SEQ ID NO: 482222 - DNA, 30 bp, Artificial Sequence
  Synthetic oligonucleotide
aattgcaagttaatttggtgcaacataggt

SEQ ID NO: 482223 - DNA, 30 bp, Artificial Sequence
  Synthetic oligonucleotide
ggattttccaacatttcttcggccataggt

SEQ ID NO: 482224 - DNA, 30 bp, Artificial Sequence
  Synthetic oligonucleotide
cggcattggtctccgcagtgaatcataggt

SEQ ID NO: 482225 - DNA, 30 bp, Artificial Sequence
  Synthetic oligonucleotide
gtattattatcccttcagggccagataggt

SEQ ID NO: 482226 - DNA, 30 bp, Artificial Sequence
  Synthetic oligonucleotide
ttcacgccgcaagtataacgcgtgataggt

SEQ ID NO: 482227 - DNA, 30 bp, Artificial Sequence
  Synthetic oligonucleotide
gttaagaagatgtcacattttcgtataggt

SEQ ID NO: 482228 - DNA, 30 bp, Artificial Sequence
  Synthetic oligonucleotide
ggtttagtagcagtcctttgaggtataggt

SEQ ID NO: 482229 - DNA, 30 bp, Artificial Sequence
  Synthetic oligonucleotide
taggatagaagctgaaagttctaactaggt

SEQ ID NO: 482230 - DNA, 30 bp, Artificial Sequence
  Synthetic oligonucleotide
gaaacaaacatgcggtcgtgttaactaggt

SEQ ID NO: 482231 - DNA, 30 bp, Artificial Sequence
  Synthetic oligonucleotide
gagcttcatcaaccacgaggcgcactaggt

SEQ ID NO: 482232 - DNA, 30 bp, Artificial Sequence
  Synthetic oligonucleotide
gctatgggcctgccaaaacaggcactaggt

SEQ ID NO: 482233 - DNA, 30 bp, Artificial Sequence
  Synthetic oligonucleotide
gattacgcccggatctagcgggtactaggt

SEQ ID NO: 482234 - DNA, 30 bp, Artificial Sequence
  Synthetic oligonucleotide
tatgtctcgggctcgatacagcacctaggt

SEQ ID NO: 482235 - DNA, 30 bp, Artificial Sequence
  Synthetic oligonucleotide
caactccgggtttgcaactaaaccctaggt

SEQ ID NO: 482236 - DNA, 30 bp, Artificial Sequence
  Synthetic oligonucleotide
gtgtttaattacgactgactgaggctaggt

SEQ ID NO: 482237 - DNA, 30 bp, Artificial Sequence
  Synthetic oligonucleotide
tcattcctggctggtattcgtcggctaggt

SEQ ID NO: 482238 - DNA, 30 bp, Artificial Sequence
  Synthetic oligonucleotide
atgttgctaaggctttgtttgaatctaggt

SEQ ID NO: 482239 - DNA, 30 bp, Artificial Sequence
  Synthetic oligonucleotide
ggacttactatgccttaagtacatctaggt

SEQ ID NO: 482240 - DNA, 30 bp, Artificial Sequence
  Synthetic oligonucleotide
gggcgttaagcacgtcgcacctatctaggt

SEQ ID NO: 482241 - DNA, 30 bp, Artificial Sequence
  Synthetic oligonucleotide
gagtgtacgaattgagaaaaaagtctaggt

SEQ ID NO: 482242 - DNA, 30 bp, Artificial Sequence
  Synthetic oligonucleotide
tctctttcgcagtgctaccgtggtctaggt

SEQ ID NO: 482243 - DNA, 30 bp, Artificial Sequence
  Synthetic oligonucleotide
caattgattaaagtaggttaaattctaggt

SEQ ID NO: 482244 - DNA, 30 bp, Artificial Sequence
  Synthetic oligonucleotide
atttagtggacatgttaattgattctaggt

SEQ ID NO: 482245 - DNA, 30 bp, Artificial Sequence
  Synthetic oligonucleotide
ttattgaatttctcattgttacaagtaggt

SEQ ID NO: 482246 - DNA, 30 bp, Artificial Sequence
  Synthetic oligonucleotide
ccctaagtcaaaaggtcgaccggagtaggt

SEQ ID NO: 482247 - DNA, 30 bp, Artificial Sequence
  Synthetic oligonucleotide
tacctcgctagcccgagatgcagcgtaggt

SEQ ID NO: 482248 - DNA, 30 bp, Artificial Sequence
  Synthetic oligonucleotide
gtgagttcatggcttcttccgacggtaggt

SEQ ID NO: 482249 - DNA, 30 bp, Artificial Sequence
  Synthetic oligonucleotide
aataagatgggtatctttcgcgcggtaggt

SEQ ID NO: 482250 - DNA, 30 bp, Artificial Sequence
  Synthetic oligonucleotide
gcagtgtgtgacgctaaccctcatgtaggt

SEQ ID NO: 482251 - DNA, 30 bp, Artificial Sequence
  Synthetic oligonucleotide
ctccgtgccagtacactaagagatgtaggt

SEQ ID NO: 482252 - DNA, 30 bp, Artificial Sequence
  Synthetic oligonucleotide
gtcgggttgggcgggaacgcatatgtaggt

SEQ ID NO: 482253 - DNA, 30 bp, Artificial Sequence
  Synthetic oligonucleotide
gaaggtggcgcgcttcccctgacattaggt

SEQ ID NO: 482254 - DNA, 30 bp, Artificial Sequence
  Synthetic oligonucleotide
acagcaacggaggatcttgttgcattaggt

SEQ ID NO: 482255 - DNA, 30 bp, Artificial Sequence
  Synthetic oligonucleotide
caaaatatccgcggtgcttactcattaggt

SEQ ID NO: 482256 - DNA, 30 bp, Artificial Sequence
  Synthetic oligonucleotide
cccccttaatgggtgactcgaggattaggt

SEQ ID NO: 482257 - DNA, 30 bp, Artificial Sequence
  Synthetic oligonucleotide
cacttatcttcgacgtataccggattaggt

SEQ ID NO: 482258 - DNA, 30 bp, Artificial Sequence
  Synthetic oligonucleotide
atataaaatatccactctttgatattaggt

SEQ ID NO: 482259 - DNA, 30 bp, Artificial Sequence
  Synthetic oligonucleotide
tctatggagttatcctcgcgattattaggt

SEQ ID NO: 482260 - DNA, 30 bp, Artificial Sequence
  Synthetic oligonucleotide
gagttccccggaggttatcacaggttaggt

SEQ ID NO: 482261 - DNA, 30 bp, Artificial Sequence
  Synthetic oligonucleotide
aaatatgaatatatgcctaccctgttaggt

SEQ ID NO: 482262 - DNA, 30 bp, Artificial Sequence
  Synthetic oligonucleotide
tctttaggacacaagtttaccaatttaggt

SEQ ID NO: 482263 - DNA, 30 bp, Artificial Sequence
  Synthetic oligonucleotide
gctcccgggcgtaacttgcgaacaaacggt

SEQ ID NO: 482264 - DNA, 30 bp, Artificial Sequence
  Synthetic oligonucleotide
tggttacggccacgcgcccgtagaaacggt

SEQ ID NO: 482265 - DNA, 30 bp, Artificial Sequence
  Synthetic oligonucleotide
gtcctggctggacgaacgcgaggaaacggt

SEQ ID NO: 482266 - DNA, 30 bp, Artificial Sequence
  Synthetic oligonucleotide
ccaatgatttcgcagagcacctgaaacggt

SEQ ID NO: 482267 - DNA, 30 bp, Artificial Sequence
  Synthetic oligonucleotide
ccaacataaaaagacaccgcggccaacggt

SEQ ID NO: 482268 - DNA, 30 bp, Artificial Sequence
  Synthetic oligonucleotide
tcaacgccgcggcaattagctacgaacggt

SEQ ID NO: 482269 - DNA, 30 bp, Artificial Sequence
  Synthetic oligonucleotide
tctatattatgctgtacatccgtgaacggt

SEQ ID NO: 482270 - DNA, 30 bp, Artificial Sequence
  Synthetic oligonucleotide
ctctcccagcataacggcgcgactaacggt

SEQ ID NO: 482271 - DNA, 30 bp, Artificial Sequence
  Synthetic oligonucleotide
ggaggctccttacgggtcggttctaacggt

SEQ ID NO: 482272 - DNA, 30 bp, Artificial Sequence
  Synthetic oligonucleotide
ttgtctaatttagcatagccacttaacggt

SEQ ID NO: 482273 - DNA, 30 bp, Artificial Sequence
  Synthetic oligonucleotide
aactgttctataagagcaggaagacacggt

SEQ ID NO: 482274 - DNA, 30 bp, Artificial Sequence
  Synthetic oligonucleotide
aagaatcattaatgatcggcaagccacggt

SEQ ID NO: 482275 - DNA, 30 bp, Artificial Sequence
  Synthetic oligonucleotide
gtcgagtacaaccggaagcggggccacggt

SEQ ID NO: 482276 - DNA, 31 bp, Artificial Sequence
  Synthetic oligonucleotide
aaggcacagcggaactaactctgtccacggt

SEQ ID NO: 482277 - DNA, 30 bp, Artificial Sequence
  Synthetic oligonucleotide
gcacagatgcctgcatgggtggcgcacggt

SEQ ID NO: 482278 - DNA, 30 bp, Artificial Sequence
  Synthetic oligonucleotide
aacgacttgcggatggtaggatcgcacggt

SEQ ID NO: 482279 - DNA, 30 bp, Artificial Sequence
  Synthetic oligonucleotide
acctcgggtgcaagcgaataggggcacggt

SEQ ID NO: 482280 - DNA, 30 bp, Artificial Sequence
  Synthetic oligonucleotide
cgtgttgttaacagactgcgaaatcacggt

SEQ ID NO: 482281 - DNA, 30 bp, Artificial Sequence
  Synthetic oligonucleotide
caccttctcggacgtcaggcctaagacggt

SEQ ID NO: 482282 - DNA, 30 bp, Artificial Sequence
  Synthetic oligonucleotide
aagtgatatggggctctgcgtatagacggt

SEQ ID NO: 482283 - DNA, 30 bp, Artificial Sequence
  Synthetic oligonucleotide
gtatcaataaacggtctacgatccgacggt

SEQ ID NO: 482284 - DNA, 30 bp, Artificial Sequence
  Synthetic oligonucleotide
acagtgtggaaagatggaagacatgacggt

SEQ ID NO: 482285 - DNA, 30 bp, Artificial Sequence
  Synthetic oligonucleotide
atacagcgccacgcgctattgtgtgacggt

SEQ ID NO: 482286 - DNA, 30 bp, Artificial Sequence
  Synthetic oligonucleotide
aatcttagatcagaaacggttcaatacggt

SEQ ID NO: 482287 - DNA, 30 bp, Artificial Sequence
  Synthetic oligonucleotide
gaaagtactgctatcattaattaatacggt

SEQ ID NO: 482288 - DNA, 30 bp, Artificial Sequence
  Synthetic oligonucleotide
tattatacgcgattctcgcgaggatacggt

SEQ ID NO: 482289 - DNA, 30 bp, Artificial Sequence
  Synthetic oligonucleotide
gtcacctaaagcccgggggtaatatacggt

SEQ ID NO: 482290 - DNA, 30 bp, Artificial Sequence
  Synthetic oligonucleotide
attatgtgggcgtacggttcgttatacggt

SEQ ID NO: 482291 - DNA, 30 bp, Artificial Sequence
  Synthetic oligonucleotide
gcaacgttgacattgcccatacactacggt

SEQ ID NO: 482292 - DNA, 30 bp, Artificial Sequence
  Synthetic oligonucleotide
cattttagccagatattggattactacggt

SEQ ID NO: 482293 - DNA, 30 bp, Artificial Sequence
  Synthetic oligonucleotide
aacaccaacgatgcgccgttaacctacggt

SEQ ID NO: 482294 - DNA, 30 bp, Artificial Sequence
  Synthetic oligonucleotide
atagtcgataactcgagcgagccctacggt

SEQ ID NO: 482295 - DNA, 30 bp, Artificial Sequence
  Synthetic oligonucleotide
gccatagactaggggtcattatagtacggt

SEQ ID NO: 482296 - DNA, 30 bp, Artificial Sequence
  Synthetic oligonucleotide
tttactctatatcgtgaccggtcgtacggt

SEQ ID NO: 482297 - DNA, 30 bp, Artificial Sequence
  Synthetic oligonucleotide
gagcgcagccgcagcaatgctatgtacggt

SEQ ID NO: 482298 - DNA, 30 bp, Artificial Sequence
  Synthetic oligonucleotide
tttcttcctccgcataaagaggattacggt

SEQ ID NO: 482299 - DNA, 30 bp, Artificial Sequence
  Synthetic oligonucleotide
aacatcaatgtgggttgaagtcaaaccggt

SEQ ID NO: 482300 - DNA, 30 bp, Artificial Sequence
  Synthetic oligonucleotide
gtgccgacaactagtaccggctaaaccggt

SEQ ID NO: 482301 - DNA, 30 bp, Artificial Sequence
  Synthetic oligonucleotide
aaccctagttgcggcaagacgtaaaccggt

SEQ ID NO: 482302 - DNA, 30 bp, Artificial Sequence
  Synthetic oligonucleotide
gctgcaatcaatcctccttactgcaccggt

SEQ ID NO: 482303 - DNA, 30 bp, Artificial Sequence
  Synthetic oligonucleotide
cttacgggtccgcagacgcccttcaccggt

SEQ ID NO: 482304 - DNA, 30 bp, Artificial Sequence
  Synthetic oligonucleotide
gcaccgcataattctatacgatgtaccggt

SEQ ID NO: 482305 - DNA, 30 bp, Artificial Sequence
  Synthetic oligonucleotide
gaacgcacttctctttagtgtgaacccggt

SEQ ID NO: 482306 - DNA, 30 bp, Artificial Sequence
  Synthetic oligonucleotide
gtaatctggccggtttcccacagccccggt

SEQ ID NO: 482307 - DNA, 30 bp, Artificial Sequence
  Synthetic oligonucleotide
gtaattggttccctgaaagttgaggccggt

SEQ ID NO: 482308 - DNA, 30 bp, Artificial Sequence
  Synthetic oligonucleotide
ctggtcgttggccgtgcgtgtgatgccggt

SEQ ID NO: 482309 - DNA, 30 bp, Artificial Sequence
  Synthetic oligonucleotide
ggtcaatcaagctacaagttggttgccggt

SEQ ID NO: 482310 - DNA, 30 bp, Artificial Sequence
  Synthetic oligonucleotide
ttcggatcgggcacgggcatataatccggt

SEQ ID NO: 482311 - DNA, 30 bp, Artificial Sequence
  Synthetic oligonucleotide
ttcgaattatgatacaggtcgcactccggt

SEQ ID NO: 482312 - DNA, 30 bp, Artificial Sequence
  Synthetic oligonucleotide
actgttcttgatcgaaaaccggcctccggt

SEQ ID NO: 482313 - DNA, 30 bp, Artificial Sequence
  Synthetic oligonucleotide
ggggcaaggcatttgcacttgtcgagcggt

SEQ ID NO: 482314 - DNA, 30 bp, Artificial Sequence
  Synthetic oligonucleotide
aatttgaagggtgcgcgtgtcaatagcggt

SEQ ID NO: 482315 - DNA, 30 bp, Artificial Sequence
  Synthetic oligonucleotide
tttgtggggatagaccaaaaccttagcggt

SEQ ID NO: 482316 - DNA, 30 bp, Artificial Sequence
  Synthetic oligonucleotide
tctagggccctcctttctgctaaacgcggt

SEQ ID NO: 482317 - DNA, 30 bp, Artificial Sequence
  Synthetic oligonucleotide
cagagctaataaaatagtaggctacgcggt

SEQ ID NO: 482318 - DNA, 30 bp, Artificial Sequence
  Synthetic oligonucleotide
gaattagttatacgtggggtcttccgcggt

SEQ ID NO: 482319 - DNA, 30 bp, Artificial Sequence
  Synthetic oligonucleotide
tggtacagcgccaaatgggcaaggcgcggt

SEQ ID NO: 482320 - DNA, 30 bp, Artificial Sequence
  Synthetic oligonucleotide
cttgcaaacacttgaaacaatgggcgcggt

SEQ ID NO: 482321 - DNA, 30 bp, Artificial Sequence
  Synthetic oligonucleotide
taattactcgcagggtccaaccagggcggt

SEQ ID NO: 482322 - DNA, 30 bp, Artificial Sequence
  Synthetic oligonucleotide
gtacctttaattccgtccgggccgggcggt

SEQ ID NO: 482323 - DNA, 30 bp, Artificial Sequence
  Synthetic oligonucleotide
ctaatcccactagctgtgtaggcgggcggt

SEQ ID NO: 482324 - DNA, 30 bp, Artificial Sequence
  Synthetic oligonucleotide
catagtagtgtggccacgctatcgggcggt

SEQ ID NO: 482325 - DNA, 30 bp, Artificial Sequence
  Synthetic oligonucleotide
acaacgccgtgcatttcccatcatggcggt

SEQ ID NO: 482326 - DNA, 30 bp, Artificial Sequence
  Synthetic oligonucleotide
attgttacacacggtgagtatgaatgcggt

SEQ ID NO: 482327 - DNA, 30 bp, Artificial Sequence
  Synthetic oligonucleotide
atcagcaatgcaagagttagagtatgcggt

SEQ ID NO: 482328 - DNA, 31 bp, Artificial Sequence
  Synthetic oligonucleotide
gtcatacataggtatcggacgattatgcggt

SEQ ID NO: 482329 - DNA, 30 bp, Artificial Sequence
  Synthetic oligonucleotide
cagttactctactcctataactcctgcggt

SEQ ID NO: 482330 - DNA, 30 bp, Artificial Sequence
  Synthetic oligonucleotide
gctaccgtgtttgtgtcaggttagtgcggt

SEQ ID NO: 482331 - DNA, 30 bp, Artificial Sequence
  Synthetic oligonucleotide
ggccgggttagacgatagccggggtgcggt

SEQ ID NO: 482332 - DNA, 30 bp, Artificial Sequence
  Synthetic oligonucleotide
gagtacggaacaattgattccaattgcggt

SEQ ID NO: 482333 - DNA, 30 bp, Artificial Sequence
  Synthetic oligonucleotide
aacgagggtcaaggattttgtaattgcggt

SEQ ID NO: 482334 - DNA, 30 bp, Artificial Sequence
  Synthetic oligonucleotide
ggggcgtcaactctgttcgcgtattgcggt

SEQ ID NO: 482335 - DNA, 30 bp, Artificial Sequence
  Synthetic oligonucleotide
ttttaacagcggatgtgcgggtcttgcggt

SEQ ID NO: 482336 - DNA, 30 bp, Artificial Sequence
  Synthetic oligonucleotide
gtttgtaagactgtcaggaaaaaaatcggt

SEQ ID NO: 482337 - DNA, 30 bp, Artificial Sequence
  Synthetic oligonucleotide
attcagtttgcctttatacgaatgatcggt

SEQ ID NO: 482338 - DNA, 30 bp, Artificial Sequence
  Synthetic oligonucleotide
agatcagtggaacctgggcactatatcggt

SEQ ID NO: 482339 - DNA, 30 bp, Artificial Sequence
  Synthetic oligonucleotide
atgattgataggcataccctaagtatcggt

SEQ ID NO: 482340 - DNA, 30 bp, Artificial Sequence
  Synthetic oligonucleotide
gatctagattttatattggacgttatcggt

SEQ ID NO: 482341 - DNA, 30 bp, Artificial Sequence
  Synthetic oligonucleotide
gcgcaaaattaataaccggcgttactcggt

SEQ ID NO: 482342 - DNA, 30 bp, Artificial Sequence
  Synthetic oligonucleotide
ggacaccgaagggtgtcacgcgccctcggt

SEQ ID NO: 482343 - DNA, 30 bp, Artificial Sequence
  Synthetic oligonucleotide
gcgataatatatgtacagtctgatctcggt

SEQ ID NO: 482344 - DNA, 30 bp, Artificial Sequence
  Synthetic oligonucleotide
gagaaaataatgtttcggggccgtctcggt

SEQ ID NO: 482345 - DNA, 30 bp, Artificial Sequence
  Synthetic oligonucleotide
ttttgatgtggcggatttatacaagtcggt

SEQ ID NO: 482346 - DNA, 30 bp, Artificial Sequence
  Synthetic oligonucleotide
cgtttttggtcacgaggtcggcgggtcggt

SEQ ID NO: 482347 - DNA, 30 bp, Artificial Sequence
  Synthetic oligonucleotide
atagaaaatcatatgtctcccgtggtcggt

SEQ ID NO: 482348 - DNA, 30 bp, Artificial Sequence
  Synthetic oligonucleotide
tctttagatcaaaccgccaaccctgtcggt

SEQ ID NO: 482349 - DNA, 30 bp, Artificial Sequence
  Synthetic oligonucleotide
gtctattggagattgcatagtcctgtcggt

SEQ ID NO: 482350 - DNA, 30 bp, Artificial Sequence
  Synthetic oligonucleotide
aagaacaccgattgtcaataacgtgtcggt

SEQ ID NO: 482351 - DNA, 30 bp, Artificial Sequence
  Synthetic oligonucleotide
ccgattggtgtataaagattgccattcggt

SEQ ID NO: 482352 - DNA, 30 bp, Artificial Sequence
  Synthetic oligonucleotide
cagagaatattatttgtttcgcagttcggt

SEQ ID NO: 482353 - DNA, 30 bp, Artificial Sequence
  Synthetic oligonucleotide
ttacttgtactactgggggtagagttcggt

SEQ ID NO: 482354 - DNA, 29 bp, Artificial Sequence
  Synthetic oligonucleotide
aggctcggagtaaaccgaacaatttcggt

SEQ ID NO: 482355 - DNA, 30 bp, Artificial Sequence
  Synthetic oligonucleotide
gatgcttctttttaacgacaaactttcggt

SEQ ID NO: 482356 - DNA, 30 bp, Artificial Sequence
  Synthetic oligonucleotide
atcggtagaccacctctggtttgaaagggt

SEQ ID NO: 482357 - DNA, 30 bp, Artificial Sequence
  Synthetic oligonucleotide
tagtgcttatctactccagatcccaagggt

SEQ ID NO: 482358 - DNA, 30 bp, Artificial Sequence
  Synthetic oligonucleotide
ccgcgttttgacccagccaaggtcaagggt

SEQ ID NO: 482359 - DNA, 30 bp, Artificial Sequence
  Synthetic oligonucleotide
ctagcctccgcttatccaatagcgaagggt

SEQ ID NO: 482360 - DNA, 30 bp, Artificial Sequence
  Synthetic oligonucleotide
ggtctattctttgtctcagaaaggaagggt

SEQ ID NO: 482361 - DNA, 30 bp, Artificial Sequence
  Synthetic oligonucleotide
tcgtttaaatagtactggatgcataagggt

SEQ ID NO: 482362 - DNA, 30 bp, Artificial Sequence
  Synthetic oligonucleotide
aaagttggtgcctttaagatctataagggt

SEQ ID NO: 482363 - DNA, 30 bp, Artificial Sequence
  Synthetic oligonucleotide
gcagttatttgagtaccgtagcctaagggt

SEQ ID NO: 482364 - DNA, 30 bp, Artificial Sequence
  Synthetic oligonucleotide
aaaacttttaggaacgtgaaaacacagggt

SEQ ID NO: 482365 - DNA, 30 bp, Artificial Sequence
  Synthetic oligonucleotide
catatcctcgagggacgcggaagacagggt

SEQ ID NO: 482366 - DNA, 30 bp, Artificial Sequence
  Synthetic oligonucleotide
gggtaccagatgggaagtgaatgacagggt

SEQ ID NO: 482367 - DNA, 30 bp, Artificial Sequence
  Synthetic oligonucleotide
aaatagatgtcccacctgggactacagggt

SEQ ID NO: 482368 - DNA, 30 bp, Artificial Sequence
  Synthetic oligonucleotide
acttgcagtagttaacgaagccaccagggt

SEQ ID NO: 482369 - DNA, 30 bp, Artificial Sequence
  Synthetic oligonucleotide
ttagcacgcgtcctctcacaggttcagggt

SEQ ID NO: 482370 - DNA, 30 bp, Artificial Sequence
  Synthetic oligonucleotide
ttagattggacctcgtcataagccgagggt

SEQ ID NO: 482371 - DNA, 30 bp, Artificial Sequence
  Synthetic oligonucleotide
tgaccgtaaacgcaccacgattctgagggt

SEQ ID NO: 482372 - DNA, 30 bp, Artificial Sequence
  Synthetic oligonucleotide
ccctacccacaaggtatgaactgtgagggt

SEQ ID NO: 482373 - DNA, 30 bp, Artificial Sequence
  Synthetic oligonucleotide
gtagggcgttacccaagagtctttgagggt

SEQ ID NO: 482374 - DNA, 30 bp, Artificial Sequence
  Synthetic oligonucleotide
atgcactggtcctggacatctcaatagggt

SEQ ID NO: 482375 - DNA, 30 bp, Artificial Sequence
  Synthetic oligonucleotide
gccaccgtggtaaataggaccgcatagggt

SEQ ID NO: 482376 - DNA, 30 bp, Artificial Sequence
  Synthetic oligonucleotide
cttactcagttacagtctgttagatagggt

SEQ ID NO: 482377 - DNA, 30 bp, Artificial Sequence
  Synthetic oligonucleotide
tatgggcgcttaagcattaagccgtagggt

SEQ ID NO: 482378 - DNA, 30 bp, Artificial Sequence
  Synthetic oligonucleotide
tatcaatagggctcagtaaccgggtagggt

SEQ ID NO: 482379 - DNA, 30 bp, Artificial Sequence
  Synthetic oligonucleotide
ctgagtcacgagcaacctagccattagggt

SEQ ID NO: 482380 - DNA, 30 bp, Artificial Sequence
  Synthetic oligonucleotide
cccattccaagagctgcatcggattagggt

SEQ ID NO: 482381 - DNA, 30 bp, Artificial Sequence
  Synthetic oligonucleotide
ccaggccaactttatgttaaagtttagggt

SEQ ID NO: 482382 - DNA, 30 bp, Artificial Sequence
  Synthetic oligonucleotide
aggtcaagtgtcattcagtatgacacgggt

SEQ ID NO: 482383 - DNA, 30 bp, Artificial Sequence
  Synthetic oligonucleotide
acccgtacgacgttccacggtgccacgggt

SEQ ID NO: 482384 - DNA, 30 bp, Artificial Sequence
  Synthetic oligonucleotide
tgtccccgaatgactgttggtatcacgggt

SEQ ID NO: 482385 - DNA, 30 bp, Artificial Sequence
  Synthetic oligonucleotide
cgggtgtggacctctacaggctcgacgggt

SEQ ID NO: 482386 - DNA, 30 bp, Artificial Sequence
  Synthetic oligonucleotide
ttccttcatcggggtttgtcagaaccgggt

SEQ ID NO: 482387 - DNA, 30 bp, Artificial Sequence
  Synthetic oligonucleotide
ccaacagtgttaaagcaatttctgccgggt

SEQ ID NO: 482388 - DNA, 30 bp, Artificial Sequence
  Synthetic oligonucleotide
ctggatgcgcaaaatcgcaaccgtccgggt

SEQ ID NO: 482389 - DNA, 30 bp, Artificial Sequence
  Synthetic oligonucleotide
gcaactagcggtgtgagcgttattccgggt

SEQ ID NO: 482390 - DNA, 30 bp, Artificial Sequence
  Synthetic oligonucleotide
tgtgtttgcttatcaaacgcctatgcgggt

SEQ ID NO: 482391 - DNA, 30 bp, Artificial Sequence
  Synthetic oligonucleotide
gagtggggtcgttttgcacgctcctcgggt

SEQ ID NO: 482392 - DNA, 30 bp, Artificial Sequence
  Synthetic oligonucleotide
gaactccggtaacagggtggggcgtcgggt

SEQ ID NO: 482393 - DNA, 30 bp, Artificial Sequence
  Synthetic oligonucleotide
ttcaatgtccgcacgtggtacatgtcgggt

SEQ ID NO: 482394 - DNA, 30 bp, Artificial Sequence
  Synthetic oligonucleotide
gtttggtctgtagggaatttaaattcgggt

SEQ ID NO: 482395 - DNA, 30 bp, Artificial Sequence
  Synthetic oligonucleotide
acgtgcgtgggatagcggcaaacaaggggt

SEQ ID NO: 482396 - DNA, 30 bp, Artificial Sequence
  Synthetic oligonucleotide
gatagcccccctcaggaagactcaaggggt

SEQ ID NO: 482397 - DNA, 30 bp, Artificial Sequence
  Synthetic oligonucleotide
gcaaaacctgtctccaaaaaaattaggggt

SEQ ID NO: 482398 - DNA, 30 bp, Artificial Sequence
  Synthetic oligonucleotide
ccatccccgactcctcttaaagttaggggt

SEQ ID NO: 482399 - DNA, 30 bp, Artificial Sequence
  Synthetic oligonucleotide
caatcgcgtttagtgcgggtataacggggt

SEQ ID NO: 482400 - DNA, 30 bp, Artificial Sequence
  Synthetic oligonucleotide
tgctgaggactgtacggccaagtacggggt

SEQ ID NO: 482401 - DNA, 30 bp, Artificial Sequence
  Synthetic oligonucleotide
tccacagtttagtggatcacaagccggggt

SEQ ID NO: 482402 - DNA, 30 bp, Artificial Sequence
  Synthetic oligonucleotide
gtcgagcgcgctatcgtagggccgcggggt

SEQ ID NO: 482403 - DNA, 30 bp, Artificial Sequence
  Synthetic oligonucleotide
gctgggaaactggcggatgcagggcggggt

SEQ ID NO: 482404 - DNA, 30 bp, Artificial Sequence
  Synthetic oligonucleotide
tgggacgcgaaacctataccctaagggggt

SEQ ID NO: 482405 - DNA, 30 bp, Artificial Sequence
  Synthetic oligonucleotide
agctgcccgagaatttttacacgagggggt

SEQ ID NO: 482406 - DNA, 30 bp, Artificial Sequence
  Synthetic oligonucleotide
ctcgttttaagccatgagactgccgggggt

SEQ ID NO: 482407 - DNA, 30 bp, Artificial Sequence
  Synthetic oligonucleotide
ggataaaggtggaccgaatggtccgggggt

SEQ ID NO: 482408 - DNA, 30 bp, Artificial Sequence
  Synthetic oligonucleotide
gagcagacgcatcagcctgacggcgggggt

SEQ ID NO: 482409 - DNA, 30 bp, Artificial Sequence
  Synthetic oligonucleotide
gcgcgggcagcttggttctagggcgggggt

SEQ ID NO: 482410 - DNA, 30 bp, Artificial Sequence
  Synthetic oligonucleotide
aatgggtactttcattgaacacgggggggt

SEQ ID NO: 482411 - DNA, 30 bp, Artificial Sequence
  Synthetic oligonucleotide
ggaggcgttttattcttacttctggggggt

SEQ ID NO: 482412 - DNA, 30 bp, Artificial Sequence
  Synthetic oligonucleotide
atctttagctttgtctcacggttggggggt

SEQ ID NO: 482413 - DNA, 30 bp, Artificial Sequence
  Synthetic oligonucleotide
atctctagggtctccgtacaccatgggggt

SEQ ID NO: 482414 - DNA, 30 bp, Artificial Sequence
  Synthetic oligonucleotide
gttgaaatgactgtcttgatatatgggggt

SEQ ID NO: 482415 - DNA, 30 bp, Artificial Sequence
  Synthetic oligonucleotide
cagtttgctctaactaccacacttgggggt

SEQ ID NO: 482416 - DNA, 30 bp, Artificial Sequence
  Synthetic oligonucleotide
cagtgacctgcgccgttcggtcgatggggt

SEQ ID NO: 482417 - DNA, 30 bp, Artificial Sequence
  Synthetic oligonucleotide
ttacgtctgttgtctaggggcttatggggt

SEQ ID NO: 482418 - DNA, 30 bp, Artificial Sequence
  Synthetic oligonucleotide
aggtattcactagacatcctgccctggggt

SEQ ID NO: 482419 - DNA, 30 bp, Artificial Sequence
  Synthetic oligonucleotide
taataagtagcgcctgttggccgctggggt

SEQ ID NO: 482420 - DNA, 30 bp, Artificial Sequence
  Synthetic oligonucleotide
tcttaaggtaacgcgaaggtccgctggggt

SEQ ID NO: 482421 - DNA, 30 bp, Artificial Sequence
  Synthetic oligonucleotide
aagtacacggtacgattgtcaccgtggggt

SEQ ID NO: 482422 - DNA, 30 bp, Artificial Sequence
  Synthetic oligonucleotide
taccttcctgagggctaaagtcggtggggt

SEQ ID NO: 482423 - DNA, 30 bp, Artificial Sequence
  Synthetic oligonucleotide
atcagacattatgctgatagggattggggt

SEQ ID NO: 482424 - DNA, 30 bp, Artificial Sequence
  Synthetic oligonucleotide
catagctaaactatcatatgatgttggggt

SEQ ID NO: 482425 - DNA, 30 bp, Artificial Sequence
  Synthetic oligonucleotide
aattcggccaagtttagccaagacatgggt

SEQ ID NO: 482426 - DNA, 30 bp, Artificial Sequence
  Synthetic oligonucleotide
atgtgaccgatttacaaggcaatgatgggt

SEQ ID NO: 482427 - DNA, 30 bp, Artificial Sequence
  Synthetic oligonucleotide
agctagtatgacacgtagtactatatgggt

SEQ ID NO: 482428 - DNA, 30 bp, Artificial Sequence
  Synthetic oligonucleotide
cttgctgttgtcggaagagaatttatgggt

SEQ ID NO: 482429 - DNA, 30 bp, Artificial Sequence
  Synthetic oligonucleotide
ccgcagacataaacatgccgttttatgggt

SEQ ID NO: 482430 - DNA, 30 bp, Artificial Sequence
  Synthetic oligonucleotide
tttcgggagcgcctatttatgaggctgggt

SEQ ID NO: 482431 - DNA, 30 bp, Artificial Sequence
  Synthetic oligonucleotide
gatcgggaaccgggtcccttcgatctgggt

SEQ ID NO: 482432 - DNA, 30 bp, Artificial Sequence
  Synthetic oligonucleotide
ggatttcgttgtgcgaatccctcagtgggt

SEQ ID NO: 482433 - DNA, 30 bp, Artificial Sequence
  Synthetic oligonucleotide
ggatccatcttcatactttactgggtgggt

SEQ ID NO: 482434 - DNA, 30 bp, Artificial Sequence
  Synthetic oligonucleotide
gactccaatgtctgcggcaccaatgtgggt

SEQ ID NO: 482435 - DNA, 30 bp, Artificial Sequence
  Synthetic oligonucleotide
ggatttatattagaagtaactgctgtgggt

SEQ ID NO: 482436 - DNA, 30 bp, Artificial Sequence
  Synthetic oligonucleotide
gcaacacggcatgcgagagcaaccttgggt

SEQ ID NO: 482437 - DNA, 30 bp, Artificial Sequence
  Synthetic oligonucleotide
tattgatttctctgacgatcgatgttgggt

SEQ ID NO: 482438 - DNA, 30 bp, Artificial Sequence
  Synthetic oligonucleotide
cgcaatactgacacaacaaacttgttgggt

SEQ ID NO: 482439 - DNA, 30 bp, Artificial Sequence
  Synthetic oligonucleotide
taatattggtagggatcgggtcgtttgggt

SEQ ID NO: 482440 - DNA, 30 bp, Artificial Sequence
  Synthetic oligonucleotide
taaatgcataccagtcttctgtaaaatggt

SEQ ID NO: 482441 - DNA, 30 bp, Artificial Sequence
  Synthetic oligonucleotide
ttcggtttggtcggggtttcgggcaatggt

SEQ ID NO: 482442 - DNA, 30 bp, Artificial Sequence
  Synthetic oligonucleotide
ctctgggactggcacctccatttcaatggt

SEQ ID NO: 482443 - DNA, 30 bp, Artificial Sequence
  Synthetic oligonucleotide
gattcttggagcacgggaggaccgaatggt

SEQ ID NO: 482444 - DNA, 30 bp, Artificial Sequence
  Synthetic oligonucleotide
tagctgggcttcggcaggtcagcgaatggt

SEQ ID NO: 482445 - DNA, 30 bp, Artificial Sequence
  Synthetic oligonucleotide
aattgtatatcacccacgggatcgaatggt

SEQ ID NO: 482446 - DNA, 30 bp, Artificial Sequence
  Synthetic oligonucleotide
gtggaaagacgcaactttggacggaatggt

SEQ ID NO: 482447 - DNA, 30 bp, Artificial Sequence
  Synthetic oligonucleotide
gtgtatgtttcataccgctactggaatggt

SEQ ID NO: 482448 - DNA, 30 bp, Artificial Sequence
  Synthetic oligonucleotide
gttatccatactcataattcatataatggt

SEQ ID NO: 482449 - DNA, 30 bp, Artificial Sequence
  Synthetic oligonucleotide
gcacaccttatccgtgctcgcggtaatggt

SEQ ID NO: 482450 - DNA, 30 bp, Artificial Sequence
  Synthetic oligonucleotide
attttgaggcaataataaactgtacatggt

SEQ ID NO: 482451 - DNA, 30 bp, Artificial Sequence
  Synthetic oligonucleotide
aacctcatgtctaggttctacgagcatggt

SEQ ID NO: 482452 - DNA, 29 bp, Artificial Sequence
  Synthetic oligonucleotide
tctgaacgtttcactttaccacgcatggt

SEQ ID NO: 482453 - DNA, 30 bp, Artificial Sequence
  Synthetic oligonucleotide
aggattgctaccagtatgatatgtcatggt

SEQ ID NO: 482454 - DNA, 30 bp, Artificial Sequence
  Synthetic oligonucleotide
ccagtggaaagcactagttcagttcatggt

SEQ ID NO: 482455 - DNA, 30 bp, Artificial Sequence
  Synthetic oligonucleotide
acagtcagggtccaaccttcacgggatggt

SEQ ID NO: 482456 - DNA, 30 bp, Artificial Sequence
  Synthetic oligonucleotide
gaaaatatatggacaccgaggctggatggt

SEQ ID NO: 482457 - DNA, 30 bp, Artificial Sequence
  Synthetic oligonucleotide
agtttttcagtgcttagaaaagtggatggt

SEQ ID NO: 482458 - DNA, 30 bp, Artificial Sequence
  Synthetic oligonucleotide
atttattaaagttatcccccgtatgatggt

SEQ ID NO: 482459 - DNA, 30 bp, Artificial Sequence
  Synthetic oligonucleotide
tctaatgccgaggtgacggtttctgatggt

SEQ ID NO: 482460 - DNA, 30 bp, Artificial Sequence
  Synthetic oligonucleotide
ggcagtgagaataagtctccgacatatggt

SEQ ID NO: 482461 - DNA, 30 bp, Artificial Sequence
  Synthetic oligonucleotide
ttttggtgcgagtctactcaagcatatggt

SEQ ID NO: 482462 - DNA, 30 bp, Artificial Sequence
  Synthetic oligonucleotide
gctgtttagtactcacttagggcatatggt

SEQ ID NO: 482463 - DNA, 30 bp, Artificial Sequence
  Synthetic oligonucleotide
atattcatttggccccacgtttcatatggt

SEQ ID NO: 482464 - DNA, 30 bp, Artificial Sequence
  Synthetic oligonucleotide
ggtctagctatcaggctcattaactatggt

SEQ ID NO: 482465 - DNA, 30 bp, Artificial Sequence
  Synthetic oligonucleotide
ccggggggataccgggctatgtactatggt

SEQ ID NO: 482466 - DNA, 30 bp, Artificial Sequence
  Synthetic oligonucleotide
cgggttaagcccccggatgacaagtatggt

SEQ ID NO: 482467 - DNA, 30 bp, Artificial Sequence
  Synthetic oligonucleotide
agcagtcttgagaattcaggcccgtatggt

SEQ ID NO: 482468 - DNA, 30 bp, Artificial Sequence
  Synthetic oligonucleotide
aagcttttagtaagacccacccagactggt

SEQ ID NO: 482469 - DNA, 30 bp, Artificial Sequence
  Synthetic oligonucleotide
ccctgcttcctagtcttttttaggactggt

SEQ ID NO: 482470 - DNA, 30 bp, Artificial Sequence
  Synthetic oligonucleotide
gatcagcgccctttaattatgaaccctggt

SEQ ID NO: 482471 - DNA, 30 bp, Artificial Sequence
  Synthetic oligonucleotide
tgcattcgccagcgcaccactgcgcctggt

SEQ ID NO: 482472 - DNA, 30 bp, Artificial Sequence
  Synthetic oligonucleotide
atagtatctagcacgtaagaaatgcctggt

SEQ ID NO: 482473 - DNA, 30 bp, Artificial Sequence
  Synthetic oligonucleotide
tgcgttggaaacagcaagaattctcctggt

SEQ ID NO: 482474 - DNA, 30 bp, Artificial Sequence
  Synthetic oligonucleotide
catccgatccaccaacgcggtcttcctggt

SEQ ID NO: 482475 - DNA, 30 bp, Artificial Sequence
  Synthetic oligonucleotide
tgttaccgaccgtctcgccaagcggctggt

SEQ ID NO: 482476 - DNA, 30 bp, Artificial Sequence
  Synthetic oligonucleotide
tttaagtaaaacgacctactgcatgctggt

SEQ ID NO: 482477 - DNA, 30 bp, Artificial Sequence
  Synthetic oligonucleotide
agattggccttccgcaatgggtatgctggt

SEQ ID NO: 482478 - DNA, 30 bp, Artificial Sequence
  Synthetic oligonucleotide
caactttatgtcagtggagcttgtgctggt

SEQ ID NO: 482479 - DNA, 30 bp, Artificial Sequence
  Synthetic oligonucleotide
tggttttccatcgccatcgttaggtctggt

SEQ ID NO: 482480 - DNA, 30 bp, Artificial Sequence
  Synthetic oligonucleotide
cctcctgttgcagtaactagaatgtctggt

SEQ ID NO: 482481 - DNA, 30 bp, Artificial Sequence
  Synthetic oligonucleotide
gttggagacagtagttggcgtagaagtggt

SEQ ID NO: 482482 - DNA, 30 bp, Artificial Sequence
  Synthetic oligonucleotide
acacctctactatggcgtctagacagtggt

SEQ ID NO: 482483 - DNA, 30 bp, Artificial Sequence
  Synthetic oligonucleotide
ccttcggatatccgtactggtatcagtggt

SEQ ID NO: 482484 - DNA, 30 bp, Artificial Sequence
  Synthetic oligonucleotide
cgtggatcggttgtggcctcttggagtggt

SEQ ID NO: 482485 - DNA, 30 bp, Artificial Sequence
  Synthetic oligonucleotide
ttacacaaaagcagacaggcacctagtggt

SEQ ID NO: 482486 - DNA, 30 bp, Artificial Sequence
  Synthetic oligonucleotide
gagaatggacataccgcttttggtagtggt

SEQ ID NO: 482487 - DNA, 30 bp, Artificial Sequence
  Synthetic oligonucleotide
gcagtaagcggaattgctttctttagtggt

SEQ ID NO: 482488 - DNA, 30 bp, Artificial Sequence
  Synthetic oligonucleotide
ggcagcaacgggctgatgtgcagacgtggt

SEQ ID NO: 482489 - DNA, 30 bp, Artificial Sequence
  Synthetic oligonucleotide
catttttgccctaagcgcttatgacgtggt

SEQ ID NO: 482490 - DNA, 30 bp, Artificial Sequence
  Synthetic oligonucleotide
aatgtccatagagttttcatgtgacgtggt

SEQ ID NO: 482491 - DNA, 30 bp, Artificial Sequence
  Synthetic oligonucleotide
aggcacgacgcctgatagtttactcgtggt

SEQ ID NO: 482492 - DNA, 30 bp, Artificial Sequence
  Synthetic oligonucleotide
acagctttgccgatctgtttatttcgtggt

SEQ ID NO: 482493 - DNA, 30 bp, Artificial Sequence
  Synthetic oligonucleotide
gttggattctaactggcaatgataggtggt

SEQ ID NO: 482494 - DNA, 30 bp, Artificial Sequence
  Synthetic oligonucleotide
attatatgtacctagtggtcaaacggtggt

SEQ ID NO: 482495 - DNA, 30 bp, Artificial Sequence
  Synthetic oligonucleotide
ggcgccactgggaaaggaattctcggtggt

SEQ ID NO: 482496 - DNA, 30 bp, Artificial Sequence
  Synthetic oligonucleotide
cgtggtttccacccgaagagtttcggtggt

SEQ ID NO: 482497 - DNA, 30 bp, Artificial Sequence
  Synthetic oligonucleotide
caacctacggaagctgcccgttagggtggt

SEQ ID NO: 482498 - DNA, 30 bp, Artificial Sequence
  Synthetic oligonucleotide
gatgtttacaaggcgattccatcgggtggt

SEQ ID NO: 482499 - DNA, 30 bp, Artificial Sequence
  Synthetic oligonucleotide
ttgtaatctggttcgactacatggggtggt

SEQ ID NO: 482500 - DNA, 30 bp, Artificial Sequence
  Synthetic oligonucleotide
tgcgaatttccacacgaaaaatttggtggt

SEQ ID NO: 482501 - DNA, 30 bp, Artificial Sequence
  Synthetic oligonucleotide
aggtacggagcgtcaacatactttggtggt

SEQ ID NO: 482502 - DNA, 30 bp, Artificial Sequence
  Synthetic oligonucleotide
tctgattatgatcagtcagaaccatgtggt

SEQ ID NO: 482503 - DNA, 30 bp, Artificial Sequence
  Synthetic oligonucleotide
cgcaaactgctggccccgattgcatgtggt

SEQ ID NO: 482504 - DNA, 30 bp, Artificial Sequence
  Synthetic oligonucleotide
atacaggttcattgaaagtccgggtgtggt

SEQ ID NO: 482505 - DNA, 30 bp, Artificial Sequence
  Synthetic oligonucleotide
taagtttctcctagtaatacctggtgtggt

SEQ ID NO: 482506 - DNA, 30 bp, Artificial Sequence
  Synthetic oligonucleotide
attcttcgcaccgggtggccactgtgtggt

SEQ ID NO: 482507 - DNA, 30 bp, Artificial Sequence
  Synthetic oligonucleotide
tcacattcaccctcttagggcgattgtggt

SEQ ID NO: 482508 - DNA, 30 bp, Artificial Sequence
  Synthetic oligonucleotide
gacgggattaccacttatggctcttgtggt

SEQ ID NO: 482509 - DNA, 30 bp, Artificial Sequence
  Synthetic oligonucleotide
aacatcagcgatcgaggaactagttgtggt

SEQ ID NO: 482510 - DNA, 30 bp, Artificial Sequence
  Synthetic oligonucleotide
cttgtggcttcagacttaataacaattggt

SEQ ID NO: 482511 - DNA, 30 bp, Artificial Sequence
  Synthetic oligonucleotide
tataccagtatgcgcaggtactcaattggt

SEQ ID NO: 482512 - DNA, 30 bp, Artificial Sequence
  Synthetic oligonucleotide
ttagtgacctgagttattctcggaattggt

SEQ ID NO: 482513 - DNA, 30 bp, Artificial Sequence
  Synthetic oligonucleotide
gtccgcaaccggtggcataccaacattggt

SEQ ID NO: 482514 - DNA, 30 bp, Artificial Sequence
  Synthetic oligonucleotide
tagagggacgcgccccgggctggcattggt

SEQ ID NO: 482515 - DNA, 30 bp, Artificial Sequence
  Synthetic oligonucleotide
acccttcagattaggttgctaatcattggt

SEQ ID NO: 482516 - DNA, 30 bp, Artificial Sequence
  Synthetic oligonucleotide
cgcgcgcactgttcggtataggagattggt

SEQ ID NO: 482517 - DNA, 30 bp, Artificial Sequence
  Synthetic oligonucleotide
acatctctgatccgcatgatcccgattggt

SEQ ID NO: 482518 - DNA, 30 bp, Artificial Sequence
  Synthetic oligonucleotide
gctgcccaaccgagtcgtcgatcgattggt

SEQ ID NO: 482519 - DNA, 30 bp, Artificial Sequence
  Synthetic oligonucleotide
ccggatatttagttaacgtagcatattggt

SEQ ID NO: 482520 - DNA, 30 bp, Artificial Sequence
  Synthetic oligonucleotide
ggcctaacgcaattacataaatttattggt

SEQ ID NO: 482521 - DNA, 30 bp, Artificial Sequence
  Synthetic oligonucleotide
gttgcctcttgcggtcaataataacttggt

SEQ ID NO: 482522 - DNA, 30 bp, Artificial Sequence
  Synthetic oligonucleotide
gctttccgatccacgtgcatgagccttggt

SEQ ID NO: 482523 - DNA, 30 bp, Artificial Sequence
  Synthetic oligonucleotide
taatttattgtgcggggccgcattcttggt

SEQ ID NO: 482524 - DNA, 31 bp, Artificial Sequence
  Synthetic oligonucleotide
cttacaactgactccggctcgttaagttggt

SEQ ID NO: 482525 - DNA, 30 bp, Artificial Sequence
  Synthetic oligonucleotide
gccctttgctcgggaagctatctagttggt

SEQ ID NO: 482526 - DNA, 30 bp, Artificial Sequence
  Synthetic oligonucleotide
gattcaggccatcacccacccgacgttggt

SEQ ID NO: 482527 - DNA, 30 bp, Artificial Sequence
  Synthetic oligonucleotide
cttttgaggatggtggactcccgcgttggt

SEQ ID NO: 482528 - DNA, 30 bp, Artificial Sequence
  Synthetic oligonucleotide
tcgctcgcgaacatgcgaggaaaggttggt

SEQ ID NO: 482529 - DNA, 30 bp, Artificial Sequence
  Synthetic oligonucleotide
agaggctgtgtcagccacccggaggttggt

SEQ ID NO: 482530 - DNA, 30 bp, Artificial Sequence
  Synthetic oligonucleotide
gaagcaacaagcgcttagtgttttgttggt

SEQ ID NO: 482531 - DNA, 30 bp, Artificial Sequence
  Synthetic oligonucleotide
tgttttcgcttaggtttcattgaatttggt

SEQ ID NO: 482532 - DNA, 30 bp, Artificial Sequence
  Synthetic oligonucleotide
ataaggatgctgcgcgttggttgatttggt

SEQ ID NO: 482533 - DNA, 30 bp, Artificial Sequence
  Synthetic oligonucleotide
tactgttaggtgtaaggatgttgatttggt

SEQ ID NO: 482534 - DNA, 30 bp, Artificial Sequence
  Synthetic oligonucleotide
gagtggcatgggatatatcgactatttggt

SEQ ID NO: 482535 - DNA, 30 bp, Artificial Sequence
  Synthetic oligonucleotide
agttacctcggtttgtagatggcctttggt

SEQ ID NO: 482536 - DNA, 30 bp, Artificial Sequence
  Synthetic oligonucleotide
aaatctataggcacttaagggagctttggt

SEQ ID NO: 482537 - DNA, 30 bp, Artificial Sequence
  Synthetic oligonucleotide
tactgttcggggcattaacagttctttggt

SEQ ID NO: 482538 - DNA, 30 bp, Artificial Sequence
  Synthetic oligonucleotide
atgagattttcgcgcctagtaaagtttggt

SEQ ID NO: 482539 - DNA, 30 bp, Artificial Sequence
  Synthetic oligonucleotide
taatcctgacttttatccaccctgtttggt

SEQ ID NO: 482540 - DNA, 30 bp, Artificial Sequence
  Synthetic oligonucleotide
aaatgaccgctcacggcttatttgtttggt

SEQ ID NO: 482541 - DNA, 30 bp, Artificial Sequence
  Synthetic oligonucleotide
tataagcaaacagaattcattcgttttggt

SEQ ID NO: 482542 - DNA, 30 bp, Artificial Sequence
  Synthetic oligonucleotide
tcccgcaggtcatgccacctataaaaatgt

SEQ ID NO: 482543 - DNA, 30 bp, Artificial Sequence
  Synthetic oligonucleotide
acatacttggcaaacgccccgtcaaaatgt

SEQ ID NO: 482544 - DNA, 30 bp, Artificial Sequence
  Synthetic oligonucleotide
caacattgtcactgctcggtcttaaaatgt

SEQ ID NO: 482545 - DNA, 30 bp, Artificial Sequence
  Synthetic oligonucleotide
tgtacttagaatttttctgtagccaaatgt

SEQ ID NO: 482546 - DNA, 30 bp, Artificial Sequence
  Synthetic oligonucleotide
agtaaccaggatgcgcggggcggcaaatgt

SEQ ID NO: 482547 - DNA, 30 bp, Artificial Sequence
  Synthetic oligonucleotide
ttaaatattcgacctcagagagtcaaatgt

SEQ ID NO: 482548 - DNA, 30 bp, Artificial Sequence
  Synthetic oligonucleotide
tggtagaagtatttccgcaattcgaaatgt

SEQ ID NO: 482549 - DNA, 30 bp, Artificial Sequence
  Synthetic oligonucleotide
cttcttaatcagattagtacaaggaaatgt

SEQ ID NO: 482550 - DNA, 30 bp, Artificial Sequence
  Synthetic oligonucleotide
aggacagcagtcatgacagagcaacaatgt

SEQ ID NO: 482551 - DNA, 30 bp, Artificial Sequence
  Synthetic oligonucleotide
gatgcaagagtcttcaatcggagacaatgt

SEQ ID NO: 482552 - DNA, 30 bp, Artificial Sequence
  Synthetic oligonucleotide
agagggtcagtgtcccccatggctcaatgt

SEQ ID NO: 482553 - DNA, 30 bp, Artificial Sequence
  Synthetic oligonucleotide
gatactgatttaaccctcctctttcaatgt

SEQ ID NO: 482554 - DNA, 30 bp, Artificial Sequence
  Synthetic oligonucleotide
cttttatcaatattctatactgcagaatgt

SEQ ID NO: 482555 - DNA, 30 bp, Artificial Sequence
  Synthetic oligonucleotide
attctgatatcatcggatagtaacgaatgt

SEQ ID NO: 482556 - DNA, 30 bp, Artificial Sequence
  Synthetic oligonucleotide
agtatactgggctaaaatggatacgaatgt

SEQ ID NO: 482557 - DNA, 30 bp, Artificial Sequence
  Synthetic oligonucleotide
accaatggagtggggggcataactgaatgt

SEQ ID NO: 482558 - DNA, 30 bp, Artificial Sequence
  Synthetic oligonucleotide
cgtcctaggtccagatttttgctataatgt

SEQ ID NO: 482559 - DNA, 30 bp, Artificial Sequence
  Synthetic oligonucleotide
gcatacgccttcgtgaaaatgaagtaatgt

SEQ ID NO: 482560 - DNA, 30 bp, Artificial Sequence
  Synthetic oligonucleotide
cgccactcgagtagcagcaatctgtaatgt

SEQ ID NO: 482561 - DNA, 30 bp, Artificial Sequence
  Synthetic oligonucleotide
tagtgactataatgtttacgctattaatgt

SEQ ID NO: 482562 - DNA, 30 bp, Artificial Sequence
  Synthetic oligonucleotide
aaaacagtacggtcgtacacgcgttaatgt

SEQ ID NO: 482563 - DNA, 30 bp, Artificial Sequence
  Synthetic oligonucleotide
gtagtttgcggcttcggcgaatgttaatgt

SEQ ID NO: 482564 - DNA, 30 bp, Artificial Sequence
  Synthetic oligonucleotide
cgctgtggcacctgtacaaattgttaatgt

SEQ ID NO: 482565 - DNA, 30 bp, Artificial Sequence
  Synthetic oligonucleotide
aatacacggtccacgcgtataaaaacatgt

SEQ ID NO: 482566 - DNA, 30 bp, Artificial Sequence
  Synthetic oligonucleotide
ttcgcccggcaggtattgagcggaacatgt

SEQ ID NO: 482567 - DNA, 30 bp, Artificial Sequence
  Synthetic oligonucleotide
ttagctcctatttttttacagttcacatgt

SEQ ID NO: 482568 - DNA, 30 bp, Artificial Sequence
  Synthetic oligonucleotide
cctcttgtcgtcaacgtttttaggacatgt

SEQ ID NO: 482569 - DNA, 30 bp, Artificial Sequence
  Synthetic oligonucleotide
gcatttcttctaccgtctaaggctacatgt

SEQ ID NO: 482570 - DNA, 30 bp, Artificial Sequence
  Synthetic oligonucleotide
ctttggaaaagaatagtgctgcgtacatgt

SEQ ID NO: 482571 - DNA, 30 bp, Artificial Sequence
  Synthetic oligonucleotide
cggtgtaaacggtacccaaaccttacatgt

SEQ ID NO: 482572 - DNA, 30 bp, Artificial Sequence
  Synthetic oligonucleotide
tagctactgaggcgaaataaacgaccatgt

SEQ ID NO: 482573 - DNA, 30 bp, Artificial Sequence
  Synthetic oligonucleotide
atagcctccgcggtaatccgtcagccatgt

SEQ ID NO: 482574 - DNA, 30 bp, Artificial Sequence
  Synthetic oligonucleotide
aaggcatcattagcgtctctaattccatgt

SEQ ID NO: 482575 - DNA, 30 bp, Artificial Sequence
  Synthetic oligonucleotide
attaaagctatgcggatctaagtagcatgt

SEQ ID NO: 482576 - DNA, 30 bp, Artificial Sequence
  Synthetic oligonucleotide
attcgcgcgccatgcaacaggcacgcatgt

SEQ ID NO: 482577 - DNA, 30 bp, Artificial Sequence
  Synthetic oligonucleotide
atctggggggaggggtatgttgtcgcatgt

SEQ ID NO: 482578 - DNA, 30 bp, Artificial Sequence
  Synthetic oligonucleotide
gacgaaaaaagcaacacgtacgcggcatgt

SEQ ID NO: 482579 - DNA, 30 bp, Artificial Sequence
  Synthetic oligonucleotide
aatatcttttccgtgctcttattggcatgt

SEQ ID NO: 482580 - DNA, 30 bp, Artificial Sequence
  Synthetic oligonucleotide
gaggagttatacgcagacagctatgcatgt

SEQ ID NO: 482581 - DNA, 30 bp, Artificial Sequence
  Synthetic oligonucleotide
ctcagtctaagtctccccaataagtcatgt

SEQ ID NO: 482582 - DNA, 30 bp, Artificial Sequence
  Synthetic oligonucleotide
catgctcaggccgcggatgaatgttcatgt

SEQ ID NO: 482583 - DNA, 31 bp, Artificial Sequence
  Synthetic oligonucleotide
aaatctacttagcgaggctaagcaaagatgt

SEQ ID NO: 482584 - DNA, 30 bp, Artificial Sequence
  Synthetic oligonucleotide
cccggacatcttaattgtatacttagatgt

SEQ ID NO: 482585 - DNA, 30 bp, Artificial Sequence
  Synthetic oligonucleotide
tcacgcagcatgtgcgtagtaatacgatgt

SEQ ID NO: 482586 - DNA, 30 bp, Artificial Sequence
  Synthetic oligonucleotide
ggttatcaaatggtcccttccgtacgatgt

SEQ ID NO: 482587 - DNA, 30 bp, Artificial Sequence
  Synthetic oligonucleotide
gatagctgcaatcaacggcactaccgatgt

SEQ ID NO: 482588 - DNA, 30 bp, Artificial Sequence
  Synthetic oligonucleotide
aagaatactcgcagcggcaatagccgatgt

SEQ ID NO: 482589 - DNA, 30 bp, Artificial Sequence
  Synthetic oligonucleotide
agtgaactctggtaacattgcccgcgatgt

SEQ ID NO: 482590 - DNA, 30 bp, Artificial Sequence
  Synthetic oligonucleotide
gcaagggcggacatggtgggccgtcgatgt

SEQ ID NO: 482591 - DNA, 30 bp, Artificial Sequence
  Synthetic oligonucleotide
gccacttgcggcgctttgaggtgtcgatgt

SEQ ID NO: 482592 - DNA, 30 bp, Artificial Sequence
  Synthetic oligonucleotide
tgtctcaaatcccacgggagtgttcgatgt

SEQ ID NO: 482593 - DNA, 30 bp, Artificial Sequence
  Synthetic oligonucleotide
cggtgccatcggggtctggccgaaggatgt

SEQ ID NO: 482594 - DNA, 30 bp, Artificial Sequence
  Synthetic oligonucleotide
aaacctatgtcccaatttggtaggggatgt

SEQ ID NO: 482595 - DNA, 30 bp, Artificial Sequence
  Synthetic oligonucleotide
tcctaactaggtaacgcccacgggggatgt

SEQ ID NO: 482596 - DNA, 30 bp, Artificial Sequence
  Synthetic oligonucleotide
gggcatctacacaggacaactgaatgatgt

SEQ ID NO: 482597 - DNA, 30 bp, Artificial Sequence
  Synthetic oligonucleotide
gaggccagcatagggcgagtaacatgatgt

SEQ ID NO: 482598 - DNA, 30 bp, Artificial Sequence
  Synthetic oligonucleotide
ggggacaaattctgatctgtagcctgatgt

SEQ ID NO: 482599 - DNA, 30 bp, Artificial Sequence
  Synthetic oligonucleotide
gaaatcgttttgactacatgtgagtgatgt

SEQ ID NO: 482600 - DNA, 30 bp, Artificial Sequence
  Synthetic oligonucleotide
ggtacgcaatacaaaacagggtagtgatgt

SEQ ID NO: 482601 - DNA, 30 bp, Artificial Sequence
  Synthetic oligonucleotide
gatggagcaagcgcagcagcgccaatatgt

SEQ ID NO: 482602 - DNA, 30 bp, Artificial Sequence
  Synthetic oligonucleotide
cgcgaatgcaacctacacatcataatatgt

SEQ ID NO: 482603 - DNA, 30 bp, Artificial Sequence
  Synthetic oligonucleotide
aacgccatcggacgcgtcgctataatatgt

SEQ ID NO: 482604 - DNA, 30 bp, Artificial Sequence
  Synthetic oligonucleotide
tcttataacctggcaatgaaggtgatatgt

SEQ ID NO: 482605 - DNA, 31 bp, Artificial Sequence
  Synthetic oligonucleotide
agcaagtcgttaccatatagtacatatatgt

SEQ ID NO: 482606 - DNA, 30 bp, Artificial Sequence
  Synthetic oligonucleotide
gaattcagatccacatacgtggatatatgt

SEQ ID NO: 482607 - DNA, 30 bp, Artificial Sequence
  Synthetic oligonucleotide
tcgaaaacactagtgaagcacggtatatgt

SEQ ID NO: 482608 - DNA, 30 bp, Artificial Sequence
  Synthetic oligonucleotide
gtatcgacctagcaagatttacttatatgt

SEQ ID NO: 482609 - DNA, 30 bp, Artificial Sequence
  Synthetic oligonucleotide
ttacaggcccggaataattaagttatatgt

SEQ ID NO: 482610 - DNA, 30 bp, Artificial Sequence
  Synthetic oligonucleotide
acgaagtctcctgttcggaccgtactatgt

SEQ ID NO: 482611 - DNA, 30 bp, Artificial Sequence
  Synthetic oligonucleotide
acgccggccggagagcgaaattacctatgt

SEQ ID NO: 482612 - DNA, 30 bp, Artificial Sequence
  Synthetic oligonucleotide
tttgttatcgactcaaggaggcccctatgt

SEQ ID NO: 482613 - DNA, 30 bp, Artificial Sequence
  Synthetic oligonucleotide
ctgtgtataagtacttgggtgatcctatgt

SEQ ID NO: 482614 - DNA, 30 bp, Artificial Sequence
  Synthetic oligonucleotide
agacggagtatcatctattccgggctatgt

SEQ ID NO: 482615 - DNA, 30 bp, Artificial Sequence
  Synthetic oligonucleotide
cttctagatactttatgcttctatctatgt

SEQ ID NO: 482616 - DNA, 30 bp, Artificial Sequence
  Synthetic oligonucleotide
aaggtagtcgcctttagcaaccaagtatgt

SEQ ID NO: 482617 - DNA, 30 bp, Artificial Sequence
  Synthetic oligonucleotide
ctttcacttatgatatgagtggaagtatgt

SEQ ID NO: 482618 - DNA, 30 bp, Artificial Sequence
  Synthetic oligonucleotide
tatcacatttgaacgtaggcacgagtatgt

SEQ ID NO: 482619 - DNA, 30 bp, Artificial Sequence
  Synthetic oligonucleotide
atagaagagaatgccggacgccgagtatgt

SEQ ID NO: 482620 - DNA, 30 bp, Artificial Sequence
  Synthetic oligonucleotide
cttctcatcgggaacattcttttcgtatgt

SEQ ID NO: 482621 - DNA, 30 bp, Artificial Sequence
  Synthetic oligonucleotide
gtcattggctagatcttcagcggggtatgt

SEQ ID NO: 482622 - DNA, 30 bp, Artificial Sequence
  Synthetic oligonucleotide
aagcttgcgaccatataattaatggtatgt

SEQ ID NO: 482623 - DNA, 30 bp, Artificial Sequence
  Synthetic oligonucleotide
gactgccacgtgttcatatagttggtatgt

SEQ ID NO: 482624 - DNA, 30 bp, Artificial Sequence
  Synthetic oligonucleotide
aagttttgtagtatgaaggactatgtatgt

SEQ ID NO: 482625 - DNA, 30 bp, Artificial Sequence
  Synthetic oligonucleotide
gttattgtcttcgtgacgctgagtgtatgt

SEQ ID NO: 482626 - DNA, 30 bp, Artificial Sequence
  Synthetic oligonucleotide
ttttcgatttaaggagacttccgtgtatgt

SEQ ID NO: 482627 - DNA, 30 bp, Artificial Sequence
  Synthetic oligonucleotide
tttcagtctacgatcaaaaaccttgtatgt

SEQ ID NO: 482628 - DNA, 30 bp, Artificial Sequence
  Synthetic oligonucleotide
catattctgcttagtgatccggaattatgt

SEQ ID NO: 482629 - DNA, 30 bp, Artificial Sequence
  Synthetic oligonucleotide
atcgtacgtagggtattacatagattatgt

SEQ ID NO: 482630 - DNA, 30 bp, Artificial Sequence
  Synthetic oligonucleotide
tatagcaatttacgggaaatcttattatgt

SEQ ID NO: 482631 - DNA, 30 bp, Artificial Sequence
  Synthetic oligonucleotide
gcgttcggatgtgggctgagcaccttatgt

SEQ ID NO: 482632 - DNA, 30 bp, Artificial Sequence
  Synthetic oligonucleotide
caagttctattagtgcttggtaccttatgt

SEQ ID NO: 482633 - DNA, 30 bp, Artificial Sequence
  Synthetic oligonucleotide
aatacaagtcttgcacacgaaagcttatgt

SEQ ID NO: 482634 - DNA, 30 bp, Artificial Sequence
  Synthetic oligonucleotide
attctctcactttaaaataaggtcttatgt

SEQ ID NO: 482635 - DNA, 30 bp, Artificial Sequence
  Synthetic oligonucleotide
ccacgtatcgagctggtcacattcttatgt

SEQ ID NO: 482636 - DNA, 30 bp, Artificial Sequence
  Synthetic oligonucleotide
gcattacattacgcgtccgcgcggttatgt

SEQ ID NO: 482637 - DNA, 30 bp, Artificial Sequence
  Synthetic oligonucleotide
gtcggtcagcgtggcagtcctcggttatgt

SEQ ID NO: 482638 - DNA, 30 bp, Artificial Sequence
  Synthetic oligonucleotide
ataccgtgacttgtagagataggtttatgt

SEQ ID NO: 482639 - DNA, 30 bp, Artificial Sequence
  Synthetic oligonucleotide
atgctagatgcttatgtgttacttttatgt

SEQ ID NO: 482640 - DNA, 30 bp, Artificial Sequence
  Synthetic oligonucleotide
ctaaaaggacacggtaatagcaaaaactgt

SEQ ID NO: 482641 - DNA, 30 bp, Artificial Sequence
  Synthetic oligonucleotide
caaagtaagagttgcttcttgaacaactgt

SEQ ID NO: 482642 - DNA, 30 bp, Artificial Sequence
  Synthetic oligonucleotide
gttaatgtaatgccagttacctgcaactgt

SEQ ID NO: 482643 - DNA, 30 bp, Artificial Sequence
  Synthetic oligonucleotide
gtgacactgtacagaatatcaattaactgt

SEQ ID NO: 482644 - DNA, 30 bp, Artificial Sequence
  Synthetic oligonucleotide
gttgggttcaggacgcgccattcacactgt

SEQ ID NO: 482645 - DNA, 30 bp, Artificial Sequence
  Synthetic oligonucleotide
gactattcctactgattaatattacactgt

SEQ ID NO: 482646 - DNA, 30 bp, Artificial Sequence
  Synthetic oligonucleotide
gccgcttcggcatatggagataaccactgt

SEQ ID NO: 482647 - DNA, 30 bp, Artificial Sequence
  Synthetic oligonucleotide
tcaatggacgtggacattccaagccactgt

SEQ ID NO: 482648 - DNA, 30 bp, Artificial Sequence
  Synthetic oligonucleotide
ttgggaatcatgaacgggtaagatcactgt

SEQ ID NO: 482649 - DNA, 30 bp, Artificial Sequence
  Synthetic oligonucleotide
ctcatgatgcaacgagtccttaaagactgt

SEQ ID NO: 482650 - DNA, 30 bp, Artificial Sequence
  Synthetic oligonucleotide
gcggactgcttgctcggacggtaagactgt

SEQ ID NO: 482651 - DNA, 30 bp, Artificial Sequence
  Synthetic oligonucleotide
gggcgctattcgcagggtccgctcgactgt

SEQ ID NO: 482652 - DNA, 30 bp, Artificial Sequence
  Synthetic oligonucleotide
ctgcgatctcaggggagtcctgaggactgt

SEQ ID NO: 482653 - DNA, 30 bp, Artificial Sequence
  Synthetic oligonucleotide
tttggtcaacgagcagatgtctaggactgt

SEQ ID NO: 482654 - DNA, 30 bp, Artificial Sequence
  Synthetic oligonucleotide
cacaaccgatgcattgcatcgaatgactgt

SEQ ID NO: 482655 - DNA, 30 bp, Artificial Sequence
  Synthetic oligonucleotide
tgattttacgctggcttttgcagtgactgt

SEQ ID NO: 482656 - DNA, 30 bp, Artificial Sequence
  Synthetic oligonucleotide
ttttcattacactatctggaccttgactgt

SEQ ID NO: 482657 - DNA, 30 bp, Artificial Sequence
  Synthetic oligonucleotide
atgtattataccgacatgacggaatactgt

SEQ ID NO: 482658 - DNA, 30 bp, Artificial Sequence
  Synthetic oligonucleotide
ccggtgcactaggttaacgtgtaatactgt

SEQ ID NO: 482659 - DNA, 30 bp, Artificial Sequence
  Synthetic oligonucleotide
aagcggcccccttttacttgatcatactgt

SEQ ID NO: 482660 - DNA, 30 bp, Artificial Sequence
  Synthetic oligonucleotide
ccccgattttcacatgtagatagctactgt

SEQ ID NO: 482661 - DNA, 30 bp, Artificial Sequence
  Synthetic oligonucleotide
ctagtatatgcacggtgccgaacgtactgt

SEQ ID NO: 482662 - DNA, 30 bp, Artificial Sequence
  Synthetic oligonucleotide
ctatgcattgatggtaccctgccgtactgt

SEQ ID NO: 482663 - DNA, 30 bp, Artificial Sequence
  Synthetic oligonucleotide
gccgaacgttccgtaccgccactcacctgt

SEQ ID NO: 482664 - DNA, 30 bp, Artificial Sequence
  Synthetic oligonucleotide
gtagctctcaggaaggttggcgtaccctgt

SEQ ID NO: 482665 - DNA, 30 bp, Artificial Sequence
  Synthetic oligonucleotide
ctcgcggtgcaaagaccacaggtcccctgt

SEQ ID NO: 482666 - DNA, 29 bp, Artificial Sequence
  Synthetic oligonucleotide
acacgcactagttccataggctgccctgt

SEQ ID NO: 482667 - DNA, 30 bp, Artificial Sequence
  Synthetic oligonucleotide
ccgctaacaggcccctggcacgtgccctgt

SEQ ID NO: 482668 - DNA, 30 bp, Artificial Sequence
  Synthetic oligonucleotide
tggcctctttgttgctcagaccatccctgt

SEQ ID NO: 482669 - DNA, 29 bp, Artificial Sequence
  Synthetic oligonucleotide
accttactagtatagtgcttacatcctgt

SEQ ID NO: 482670 - DNA, 30 bp, Artificial Sequence
  Synthetic oligonucleotide
taaagcagtacgctgaaccgcggatcctgt

SEQ ID NO: 482671 - DNA, 30 bp, Artificial Sequence
  Synthetic oligonucleotide
ctatttcataactagggtgagctttcctgt

SEQ ID NO: 482672 - DNA, 30 bp, Artificial Sequence
  Synthetic oligonucleotide
ttgttgtgttctctttttgtgttttcctgt

SEQ ID NO: 482673 - DNA, 30 bp, Artificial Sequence
  Synthetic oligonucleotide
tgccacaattatctcacttctacgagctgt

SEQ ID NO: 482674 - DNA, 30 bp, Artificial Sequence
  Synthetic oligonucleotide
tgttctcgctgggcatttggcaggagctgt

SEQ ID NO: 482675 - DNA, 31 bp, Artificial Sequence
  Synthetic oligonucleotide
tctggaatgccaacgactctctttgagctgt

SEQ ID NO: 482676 - DNA, 30 bp, Artificial Sequence
  Synthetic oligonucleotide
ctttgtaccgttactctggaccgtagctgt

SEQ ID NO: 482677 - DNA, 30 bp, Artificial Sequence
  Synthetic oligonucleotide
gatgccggaatgcatgcccaatgtagctgt

SEQ ID NO: 482678 - DNA, 30 bp, Artificial Sequence
  Synthetic oligonucleotide
gcgcttgactacgactcgtttccacgctgt

SEQ ID NO: 482679 - DNA, 30 bp, Artificial Sequence
  Synthetic oligonucleotide
tccactaaatttgacggtacctcacgctgt

SEQ ID NO: 482680 - DNA, 30 bp, Artificial Sequence
  Synthetic oligonucleotide
aagccagcaccagaagtccttgcccgctgt

SEQ ID NO: 482681 - DNA, 30 bp, Artificial Sequence
  Synthetic oligonucleotide
ttaccagaggcccgtccgtaatcccgctgt

SEQ ID NO: 482682 - DNA, 30 bp, Artificial Sequence
  Synthetic oligonucleotide
gaggggtttagaacatgccgaaagcgctgt

SEQ ID NO: 482683 - DNA, 30 bp, Artificial Sequence
  Synthetic oligonucleotide
gtattggtattgtgtccatgaaatcgctgt

SEQ ID NO: 482684 - DNA, 30 bp, Artificial Sequence
  Synthetic oligonucleotide
gggatttccgtccgtgttccaaaaggctgt

SEQ ID NO: 482685 - DNA, 30 bp, Artificial Sequence
  Synthetic oligonucleotide
taaccatggggacagcacgttcaaggctgt

SEQ ID NO: 482686 - DNA, 30 bp, Artificial Sequence
  Synthetic oligonucleotide
cactttgcttcgagtagctgagtaggctgt

SEQ ID NO: 482687 - DNA, 30 bp, Artificial Sequence
  Synthetic oligonucleotide
tctccctgtaacgttggtgattggggctgt

SEQ ID NO: 482688 - DNA, 30 bp, Artificial Sequence
  Synthetic oligonucleotide
ttgccctaatcgggctaaataatgggctgt

SEQ ID NO: 482689 - DNA, 30 bp, Artificial Sequence
  Synthetic oligonucleotide
gggttataaccctacgcactagactgctgt

SEQ ID NO: 482690 - DNA, 30 bp, Artificial Sequence
  Synthetic oligonucleotide
gaatccccggagagggtaaatgattgctgt

SEQ ID NO: 482691 - DNA, 30 bp, Artificial Sequence
  Synthetic oligonucleotide
tgctgaatacgtagtgattagcgttgctgt

SEQ ID NO: 482692 - DNA, 30 bp, Artificial Sequence
  Synthetic oligonucleotide
cgtcgagtggggtgcgcgcagccaatctgt

SEQ ID NO: 482693 - DNA, 30 bp, Artificial Sequence
  Synthetic oligonucleotide
gagtgcgagggatggacgcgccgaatctgt

SEQ ID NO: 482694 - DNA, 30 bp, Artificial Sequence
  Synthetic oligonucleotide
tctattagcaatctggttatgtacatctgt

SEQ ID NO: 482695 - DNA, 30 bp, Artificial Sequence
  Synthetic oligonucleotide
tagctccggaagttgctgtagagcatctgt

SEQ ID NO: 482696 - DNA, 30 bp, Artificial Sequence
  Synthetic oligonucleotide
ccgcgattaataaccgtcgggaagatctgt

SEQ ID NO: 482697 - DNA, 30 bp, Artificial Sequence
  Synthetic oligonucleotide
atgattaaaggtctttggtggttgatctgt

SEQ ID NO: 482698 - DNA, 30 bp, Artificial Sequence
  Synthetic oligonucleotide
agtattaactatttttaaatttaactctgt

SEQ ID NO: 482699 - DNA, 30 bp, Artificial Sequence
  Synthetic oligonucleotide
acccatcggggctttggctgttcactctgt

SEQ ID NO: 482700 - DNA, 30 bp, Artificial Sequence
  Synthetic oligonucleotide
gtggcaatccaaagttcgttaggactctgt

SEQ ID NO: 482701 - DNA, 31 bp, Artificial Sequence
  Synthetic oligonucleotide
gtttgtgcacaacagaaaagggctactctgt

SEQ ID NO: 482702 - DNA, 30 bp, Artificial Sequence
  Synthetic oligonucleotide
tttcacaaaagtcgcgggattaacctctgt

SEQ ID NO: 482703 - DNA, 30 bp, Artificial Sequence
  Synthetic oligonucleotide
atagtctttctttcaaggtggatcctctgt

SEQ ID NO: 482704 - DNA, 30 bp, Artificial Sequence
  Synthetic oligonucleotide
aacactgcgtttagctcctaagggctctgt

SEQ ID NO: 482705 - DNA, 30 bp, Artificial Sequence
  Synthetic oligonucleotide
gaacgggccgccatggcctgatatctctgt

SEQ ID NO: 482706 - DNA, 30 bp, Artificial Sequence
  Synthetic oligonucleotide
ctgctttgctaatactggcgccaagtctgt

SEQ ID NO: 482707 - DNA, 30 bp, Artificial Sequence
  Synthetic oligonucleotide
taaggatagcgtgtagggcccttcgtctgt

SEQ ID NO: 482708 - DNA, 30 bp, Artificial Sequence
  Synthetic oligonucleotide
caaattggtgttcgacgattattggtctgt

SEQ ID NO: 482709 - DNA, 30 bp, Artificial Sequence
  Synthetic oligonucleotide
gtaacctccctcggctttcccaatgtctgt

SEQ ID NO: 482710 - DNA, 30 bp, Artificial Sequence
  Synthetic oligonucleotide
cttcatattcggttatctggacatgtctgt

SEQ ID NO: 482711 - DNA, 30 bp, Artificial Sequence
  Synthetic oligonucleotide
ggtgcagcctcacccactcagtgtgtctgt

SEQ ID NO: 482712 - DNA, 30 bp, Artificial Sequence
  Synthetic oligonucleotide
gccaggcgtatatggcgtgtagtattctgt

SEQ ID NO: 482713 - DNA, 30 bp, Artificial Sequence
  Synthetic oligonucleotide
ccgcagcagttcattgggaactacttctgt

SEQ ID NO: 482714 - DNA, 30 bp, Artificial Sequence
  Synthetic oligonucleotide
tcgtacgtggccgcacaaatgggcttctgt

SEQ ID NO: 482715 - DNA, 30 bp, Artificial Sequence
  Synthetic oligonucleotide
tctttcagccagtatatatgacggttctgt

SEQ ID NO: 482716 - DNA, 30 bp, Artificial Sequence
  Synthetic oligonucleotide
gcatactctctcgaccctcgtagtttctgt

SEQ ID NO: 482717 - DNA, 30 bp, Artificial Sequence
  Synthetic oligonucleotide
gctcctcggctctcatatgcggttttctgt

SEQ ID NO: 482718 - DNA, 30 bp, Artificial Sequence
  Synthetic oligonucleotide
gaggtagtgattggcgactatgttttctgt

SEQ ID NO: 482719 - DNA, 30 bp, Artificial Sequence
  Synthetic oligonucleotide
ttccattttgaccctccggaccaaaagtgt

SEQ ID NO: 482720 - DNA, 30 bp, Artificial Sequence
  Synthetic oligonucleotide
gatttcggagctcagttttggtcaaagtgt

SEQ ID NO: 482721 - DNA, 30 bp, Artificial Sequence
  Synthetic oligonucleotide
ataacgctaagacaccgatttttcaagtgt

SEQ ID NO: 482722 - DNA, 30 bp, Artificial Sequence
  Synthetic oligonucleotide
caatcgagcaaaggataaattgtgaagtgt

SEQ ID NO: 482723 - DNA, 30 bp, Artificial Sequence
  Synthetic oligonucleotide
tatctcatctagagtatgtataataagtgt

SEQ ID NO: 482724 - DNA, 30 bp, Artificial Sequence
  Synthetic oligonucleotide
gggctagggcgagtcaccggctctaagtgt

SEQ ID NO: 482725 - DNA, 30 bp, Artificial Sequence
  Synthetic oligonucleotide
tgctcacactaaaactactcggttaagtgt

SEQ ID NO: 482726 - DNA, 30 bp, Artificial Sequence
  Synthetic oligonucleotide
gagtgtaaattgaggaaagcaatacagtgt

SEQ ID NO: 482727 - DNA, 30 bp, Artificial Sequence
  Synthetic oligonucleotide
acgcctgggggggggactggcaaccagtgt

SEQ ID NO: 482728 - DNA, 30 bp, Artificial Sequence
  Synthetic oligonucleotide
ttcgagagggcattaggtatgtagcagtgt

SEQ ID NO: 482729 - DNA, 30 bp, Artificial Sequence
  Synthetic oligonucleotide
gcccccctaggaaccggccgtttgcagtgt

SEQ ID NO: 482730 - DNA, 30 bp, Artificial Sequence
  Synthetic oligonucleotide
ggaggtttgtgttggaccccggacgagtgt

SEQ ID NO: 482731 - DNA, 31 bp, Artificial Sequence
  Synthetic oligonucleotide
actgattagtcgacctgccttacgcgagtgt

SEQ ID NO: 482732 - DNA, 30 bp, Artificial Sequence
  Synthetic oligonucleotide
agcgttacaacaccagttatgtaggagtgt

SEQ ID NO: 482733 - DNA, 30 bp, Artificial Sequence
  Synthetic oligonucleotide
tccgcgcagctacaaacttgggcggagtgt

SEQ ID NO: 482734 - DNA, 30 bp, Artificial Sequence
  Synthetic oligonucleotide
tttatttgcagaattttgggttagtagtgt

SEQ ID NO: 482735 - DNA, 30 bp, Artificial Sequence
  Synthetic oligonucleotide
cgcgacactgattatagttgaacgtagtgt

SEQ ID NO: 482736 - DNA, 30 bp, Artificial Sequence
  Synthetic oligonucleotide
tcttgaaattgattcggctaatattagtgt

SEQ ID NO: 482737 - DNA, 30 bp, Artificial Sequence
  Synthetic oligonucleotide
accgtgaagcatgggctagtttcttagtgt

SEQ ID NO: 482738 - DNA, 30 bp, Artificial Sequence
  Synthetic oligonucleotide
tctatatacgtcagaagttatatttagtgt

SEQ ID NO: 482739 - DNA, 30 bp, Artificial Sequence
  Synthetic oligonucleotide
tagcgattactgcgatcggggaaaacgtgt

SEQ ID NO: 482740 - DNA, 30 bp, Artificial Sequence
  Synthetic oligonucleotide
ttgacgtaccacctggtgctcataacgtgt

SEQ ID NO: 482741 - DNA, 30 bp, Artificial Sequence
  Synthetic oligonucleotide
gcacaatagggtttacccctgaacacgtgt

SEQ ID NO: 482742 - DNA, 30 bp, Artificial Sequence
  Synthetic oligonucleotide
ttacaacttgcaccgggcaaccctacgtgt

SEQ ID NO: 482743 - DNA, 30 bp, Artificial Sequence
  Synthetic oligonucleotide
ggatacttacgtaccgtccagggtacgtgt

SEQ ID NO: 482744 - DNA, 30 bp, Artificial Sequence
  Synthetic oligonucleotide
acaatgtcatggacgccaattcttacgtgt

SEQ ID NO: 482745 - DNA, 30 bp, Artificial Sequence
  Synthetic oligonucleotide
tttttgggggtgcgcaaatcagtaccgtgt

SEQ ID NO: 482746 - DNA, 30 bp, Artificial Sequence
  Synthetic oligonucleotide
ccgtcgggttagccgttggcctacccgtgt

SEQ ID NO: 482747 - DNA, 30 bp, Artificial Sequence
  Synthetic oligonucleotide
tcggttcgctacccgaggttaggcccgtgt

SEQ ID NO: 482748 - DNA, 30 bp, Artificial Sequence
  Synthetic oligonucleotide
ttcagccagtgcatttagctccatccgtgt

SEQ ID NO: 482749 - DNA, 30 bp, Artificial Sequence
  Synthetic oligonucleotide
agacccccctcagcggagcaggatccgtgt

SEQ ID NO: 482750 - DNA, 30 bp, Artificial Sequence
  Synthetic oligonucleotide
cttgtttttgaatgttactgctatccgtgt

SEQ ID NO: 482751 - DNA, 30 bp, Artificial Sequence
  Synthetic oligonucleotide
ccaggcccgctcatgattcttagtccgtgt

SEQ ID NO: 482752 - DNA, 30 bp, Artificial Sequence
  Synthetic oligonucleotide
tcggcaacacgatactagtggacagcgtgt

SEQ ID NO: 482753 - DNA, 30 bp, Artificial Sequence
  Synthetic oligonucleotide
atcacggctaaagaacgaatgccctcgtgt

SEQ ID NO: 482754 - DNA, 30 bp, Artificial Sequence
  Synthetic oligonucleotide
agatcttcgccgtagcgtaactagtcgtgt

SEQ ID NO: 482755 - DNA, 30 bp, Artificial Sequence
  Synthetic oligonucleotide
ggtgtcgcagcatagtacagggggtcgtgt

SEQ ID NO: 482756 - DNA, 30 bp, Artificial Sequence
  Synthetic oligonucleotide
cagctcggcaacaatcgtcatacaaggtgt

SEQ ID NO: 482757 - DNA, 30 bp, Artificial Sequence
  Synthetic oligonucleotide
ctggtatctttagggatacagggaaggtgt

SEQ ID NO: 482758 - DNA, 30 bp, Artificial Sequence
  Synthetic oligonucleotide
aatttgtgagctgaagttcaccagaggtgt

SEQ ID NO: 482759 - DNA, 30 bp, Artificial Sequence
  Synthetic oligonucleotide
agtgagggagcataacaataatggaggtgt

SEQ ID NO: 482760 - DNA, 30 bp, Artificial Sequence
  Synthetic oligonucleotide
caaaacacctggagccccactttgaggtgt

SEQ ID NO: 482761 - DNA, 30 bp, Artificial Sequence
  Synthetic oligonucleotide
atagactgctctagttgatacactaggtgt

SEQ ID NO: 482762 - DNA, 30 bp, Artificial Sequence
  Synthetic oligonucleotide
tttaccacaaatggagcgcgtagtaggtgt

SEQ ID NO: 482763 - DNA, 30 bp, Artificial Sequence
  Synthetic oligonucleotide
aattcggtttgtcttacataatttaggtgt

SEQ ID NO: 482764 - DNA, 28 bp, Artificial Sequence
  Synthetic oligonucleotide
tcgtacattaggtgctggtccacggtgt

SEQ ID NO: 482765 - DNA, 30 bp, Artificial Sequence
  Synthetic oligonucleotide
acccagtacgtgggcttgatggcacggtgt

SEQ ID NO: 482766 - DNA, 30 bp, Artificial Sequence
  Synthetic oligonucleotide
gcgccaggaacaaggcgtgagtgacggtgt

SEQ ID NO: 482767 - DNA, 30 bp, Artificial Sequence
  Synthetic oligonucleotide
aggcactagttggtaagcctcgtacggtgt

SEQ ID NO: 482768 - DNA, 30 bp, Artificial Sequence
  Synthetic oligonucleotide
cagaatctgtggtctaaaattgtacggtgt

SEQ ID NO: 482769 - DNA, 30 bp, Artificial Sequence
  Synthetic oligonucleotide
tccaagtactggtctttacctgggcggtgt

SEQ ID NO: 482770 - DNA, 30 bp, Artificial Sequence
  Synthetic oligonucleotide
gacctcggtttcgattacgcatgtcggtgt

SEQ ID NO: 482771 - DNA, 30 bp, Artificial Sequence
  Synthetic oligonucleotide
cgggtactagggacgttatttaaagggtgt

SEQ ID NO: 482772 - DNA, 30 bp, Artificial Sequence
  Synthetic oligonucleotide
ttaagcgaggcagtggatattgaagggtgt

SEQ ID NO: 482773 - DNA, 30 bp, Artificial Sequence
  Synthetic oligonucleotide
ttgggatttactcctactccggcagggtgt

SEQ ID NO: 482774 - DNA, 30 bp, Artificial Sequence
  Synthetic oligonucleotide
ctgggttttacaatgtgtcgatgcgggtgt

SEQ ID NO: 482775 - DNA, 30 bp, Artificial Sequence
  Synthetic oligonucleotide
tccattgttgggtacgtatcgcgtgggtgt

SEQ ID NO: 482776 - DNA, 30 bp, Artificial Sequence
  Synthetic oligonucleotide
aagtttacatgagtggtttttacatggtgt

SEQ ID NO: 482777 - DNA, 30 bp, Artificial Sequence
  Synthetic oligonucleotide
taatctattggatgacgctagagatggtgt

SEQ ID NO: 482778 - DNA, 30 bp, Artificial Sequence
  Synthetic oligonucleotide
attcgcaagccactgaataaccgctggtgt

SEQ ID NO: 482779 - DNA, 30 bp, Artificial Sequence
  Synthetic oligonucleotide
tggtcaggcctctccgctcgtgtctggtgt

SEQ ID NO: 482780 - DNA, 30 bp, Artificial Sequence
  Synthetic oligonucleotide
gccggtagttagattctgcgattctggtgt

SEQ ID NO: 482781 - DNA, 30 bp, Artificial Sequence
  Synthetic oligonucleotide
acatataattgtaggctgtacaggtggtgt

SEQ ID NO: 482782 - DNA, 30 bp, Artificial Sequence
  Synthetic oligonucleotide
gcgctttcgctatccaacgaggattggtgt

SEQ ID NO: 482783 - DNA, 30 bp, Artificial Sequence
  Synthetic oligonucleotide
gagtcggagattttaaatcaggcttggtgt

SEQ ID NO: 482784 - DNA, 30 bp, Artificial Sequence
  Synthetic oligonucleotide
tgatatatagggtgcgtttccttcatgtgt

SEQ ID NO: 482785 - DNA, 30 bp, Artificial Sequence
  Synthetic oligonucleotide
taagtattccttcctcgcacggctatgtgt

SEQ ID NO: 482786 - DNA, 30 bp, Artificial Sequence
  Synthetic oligonucleotide
gataccgcccatacatgataatgtatgtgt

SEQ ID NO: 482787 - DNA, 30 bp, Artificial Sequence
  Synthetic oligonucleotide
tgagtcgttttttgtgtctcaattatgtgt

SEQ ID NO: 482788 - DNA, 30 bp, Artificial Sequence
  Synthetic oligonucleotide
cccgggtgaataagtgctttagcactgtgt

SEQ ID NO: 482789 - DNA, 30 bp, Artificial Sequence
  Synthetic oligonucleotide
cgtagactgtactgtagaacagtactgtgt

SEQ ID NO: 482790 - DNA, 30 bp, Artificial Sequence
  Synthetic oligonucleotide
ccccctcaacgaggcgcacctagcctgtgt

SEQ ID NO: 482791 - DNA, 30 bp, Artificial Sequence
  Synthetic oligonucleotide
aaatgtagtgttataggcgtgcagctgtgt

SEQ ID NO: 482792 - DNA, 30 bp, Artificial Sequence
  Synthetic oligonucleotide
tcccacggctgtcatcctgattagctgtgt

SEQ ID NO: 482793 - DNA, 30 bp, Artificial Sequence
  Synthetic oligonucleotide
atctctacgatatttgattggaggctgtgt

SEQ ID NO: 482794 - DNA, 30 bp, Artificial Sequence
  Synthetic oligonucleotide
atcggcgtagtctttgtagcaactctgtgt

SEQ ID NO: 482795 - DNA, 30 bp, Artificial Sequence
  Synthetic oligonucleotide
acactgagtccttattaattgactctgtgt

SEQ ID NO: 482796 - DNA, 30 bp, Artificial Sequence
  Synthetic oligonucleotide
ggaacgttgatcactttaagcagtctgtgt

SEQ ID NO: 482797 - DNA, 30 bp, Artificial Sequence
  Synthetic oligonucleotide
gaggacgatgtcacgtctgtgacagtgtgt

SEQ ID NO: 482798 - DNA, 30 bp, Artificial Sequence
  Synthetic oligonucleotide
ttaaattcagctatgatatttcccgtgtgt

SEQ ID NO: 482799 - DNA, 30 bp, Artificial Sequence
  Synthetic oligonucleotide
atctgatggaaacaatgcccaatggtgtgt

SEQ ID NO: 482800 - DNA, 30 bp, Artificial Sequence
  Synthetic oligonucleotide
ttactggtctcatgtcgcacaggtgtgtgt

SEQ ID NO: 482801 - DNA, 30 bp, Artificial Sequence
  Synthetic oligonucleotide
atagttatatcactatacccttcattgtgt

SEQ ID NO: 482802 - DNA, 30 bp, Artificial Sequence
  Synthetic oligonucleotide
gattaattttatcctatccttgagttgtgt

SEQ ID NO: 482803 - DNA, 30 bp, Artificial Sequence
  Synthetic oligonucleotide
tatttggcgtgaacagggctaacgttgtgt

SEQ ID NO: 482804 - DNA, 30 bp, Artificial Sequence
  Synthetic oligonucleotide
ttcacaactttgtgcagatacaggttgtgt

SEQ ID NO: 482805 - DNA, 30 bp, Artificial Sequence
  Synthetic oligonucleotide
attcttaggaggcgcattcggtggttgtgt

SEQ ID NO: 482806 - DNA, 30 bp, Artificial Sequence
  Synthetic oligonucleotide
acaggtggcgggtagcgtgacgtgttgtgt

SEQ ID NO: 482807 - DNA, 30 bp, Artificial Sequence
  Synthetic oligonucleotide
tgagtgaatcgctcacggcgtgtgttgtgt

SEQ ID NO: 482808 - DNA, 30 bp, Artificial Sequence
  Synthetic oligonucleotide
tgttgtaacataacaaacgatcctttgtgt

SEQ ID NO: 482809 - DNA, 28 bp, Artificial Sequence
  Synthetic oligonucleotide
ataagtatactggagggctgctttgtgt

SEQ ID NO: 482810 - DNA, 30 bp, Artificial Sequence
  Synthetic oligonucleotide
gtaagaacatacgggagccaaggtttgtgt

SEQ ID NO: 482811 - DNA, 30 bp, Artificial Sequence
  Synthetic oligonucleotide
cccggaaggtattcttggacctgtttgtgt

SEQ ID NO: 482812 - DNA, 30 bp, Artificial Sequence
  Synthetic oligonucleotide
gatgggctgccactcaggagcttaaattgt

SEQ ID NO: 482813 - DNA, 30 bp, Artificial Sequence
  Synthetic oligonucleotide
ctggctccgttgtaatggggctacaattgt

SEQ ID NO: 482814 - DNA, 30 bp, Artificial Sequence
  Synthetic oligonucleotide
gacatttatgagcctgcacaaactaattgt

SEQ ID NO: 482815 - DNA, 30 bp, Artificial Sequence
  Synthetic oligonucleotide
gactgctgaacaattcacttaagtaattgt

SEQ ID NO: 482816 - DNA, 30 bp, Artificial Sequence
  Synthetic oligonucleotide
ggttaaacttgacgccggatcgttaattgt

SEQ ID NO: 482817 - DNA, 30 bp, Artificial Sequence
  Synthetic oligonucleotide
gtcagggctcatgcgaggaatgttaattgt

SEQ ID NO: 482818 - DNA, 30 bp, Artificial Sequence
  Synthetic oligonucleotide
cttattagtttgcgtaattctacacattgt

SEQ ID NO: 482819 - DNA, 29 bp, Artificial Sequence
  Synthetic oligonucleotide
aaaatgtcttacggccagacttccattgt

SEQ ID NO: 482820 - DNA, 30 bp, Artificial Sequence
  Synthetic oligonucleotide
attggagataatacgaacgtccatcattgt

SEQ ID NO: 482821 - DNA, 30 bp, Artificial Sequence
  Synthetic oligonucleotide
tatagctcttggaatgggtagcatcattgt

SEQ ID NO: 482822 - DNA, 30 bp, Artificial Sequence
  Synthetic oligonucleotide
tggagagatgcgatacacggtaaagattgt

SEQ ID NO: 482823 - DNA, 30 bp, Artificial Sequence
  Synthetic oligonucleotide
acggtcaatcaaaatagggaatgagattgt

SEQ ID NO: 482824 - DNA, 30 bp, Artificial Sequence
  Synthetic oligonucleotide
acttttagcaagccaaggcattgagattgt

SEQ ID NO: 482825 - DNA, 30 bp, Artificial Sequence
  Synthetic oligonucleotide
ctctttagatagctcaccttatacgattgt

SEQ ID NO: 482826 - DNA, 30 bp, Artificial Sequence
  Synthetic oligonucleotide
cgctccactcccgtggacaaacgcgattgt

SEQ ID NO: 482827 - DNA, 30 bp, Artificial Sequence
  Synthetic oligonucleotide
tacaatattacatttccatcttgggattgt

SEQ ID NO: 482828 - DNA, 30 bp, Artificial Sequence
  Synthetic oligonucleotide
agttcaggcgcgcagattttagttgattgt

SEQ ID NO: 482829 - DNA, 30 bp, Artificial Sequence
  Synthetic oligonucleotide
attgtgttcaacaacaatcctaaatattgt

SEQ ID NO: 482830 - DNA, 30 bp, Artificial Sequence
  Synthetic oligonucleotide
gttcttatttgaatacgtgctcaatattgt

SEQ ID NO: 482831 - DNA, 30 bp, Artificial Sequence
  Synthetic oligonucleotide
aatcgaagtaacgagcgttcagcatattgt

SEQ ID NO: 482832 - DNA, 30 bp, Artificial Sequence
  Synthetic oligonucleotide
ggacattagtcccaaagggagtcctattgt

SEQ ID NO: 482833 - DNA, 30 bp, Artificial Sequence
  Synthetic oligonucleotide
tagtcgggcaacaacaccccgctgtattgt

SEQ ID NO: 482834 - DNA, 30 bp, Artificial Sequence
  Synthetic oligonucleotide
atcccgtgcgcagtatatcaaaattattgt

SEQ ID NO: 482835 - DNA, 30 bp, Artificial Sequence
  Synthetic oligonucleotide
atctaggctatgaagataaagccttattgt

SEQ ID NO: 482836 - DNA, 30 bp, Artificial Sequence
  Synthetic oligonucleotide
gttggtgtggaaaccgaaaccataacttgt

SEQ ID NO: 482837 - DNA, 30 bp, Artificial Sequence
  Synthetic oligonucleotide
gcgacatggtacgtttgagaggacacttgt

SEQ ID NO: 482838 - DNA, 30 bp, Artificial Sequence
  Synthetic oligonucleotide
agggtccgacgtactgcgacatagacttgt

SEQ ID NO: 482839 - DNA, 30 bp, Artificial Sequence
  Synthetic oligonucleotide
ccgagtcaatttgggagatatacgacttgt

SEQ ID NO: 482840 - DNA, 30 bp, Artificial Sequence
  Synthetic oligonucleotide
cgagcgttgaatcgggaccggtggacttgt

SEQ ID NO: 482841 - DNA, 30 bp, Artificial Sequence
  Synthetic oligonucleotide
gctctgcaatgtaaagatttctatacttgt

SEQ ID NO: 482842 - DNA, 30 bp, Artificial Sequence
  Synthetic oligonucleotide
gtgcggccgcattgcgggtaaagtacttgt

SEQ ID NO: 482843 - DNA, 30 bp, Artificial Sequence
  Synthetic oligonucleotide
acagttcattaccccgtacgcaatccttgt

SEQ ID NO: 482844 - DNA, 30 bp, Artificial Sequence
  Synthetic oligonucleotide
caataacaggtcccatcgtatagtccttgt

SEQ ID NO: 482845 - DNA, 30 bp, Artificial Sequence
  Synthetic oligonucleotide
gcattcatttgctcacagtgtttagcttgt

SEQ ID NO: 482846 - DNA, 30 bp, Artificial Sequence
  Synthetic oligonucleotide
ggtctatccacaacaccgaacaacgcttgt

SEQ ID NO: 482847 - DNA, 30 bp, Artificial Sequence
  Synthetic oligonucleotide
aggtagtgcacaacctcgttccacgcttgt

SEQ ID NO: 482848 - DNA, 30 bp, Artificial Sequence
  Synthetic oligonucleotide
ggcgttgaagggtgcttgcatgacgcttgt

SEQ ID NO: 482849 - DNA, 30 bp, Artificial Sequence
  Synthetic oligonucleotide
gagcgcactgtaagggtatgtaccgcttgt

SEQ ID NO: 482850 - DNA, 30 bp, Artificial Sequence
  Synthetic oligonucleotide
gatttgaaatttgttttatcgcgcgcttgt

SEQ ID NO: 482851 - DNA, 30 bp, Artificial Sequence
  Synthetic oligonucleotide
ggtgagtcactagatcaaggccaggcttgt

SEQ ID NO: 482852 - DNA, 30 bp, Artificial Sequence
  Synthetic oligonucleotide
aataaaaacccgatcggccgtagtgcttgt

SEQ ID NO: 482853 - DNA, 30 bp, Artificial Sequence
  Synthetic oligonucleotide
cccataacaccataagactttattgcttgt

SEQ ID NO: 482854 - DNA, 30 bp, Artificial Sequence
  Synthetic oligonucleotide
taggcacccataagccgctggtttgcttgt

SEQ ID NO: 482855 - DNA, 30 bp, Artificial Sequence
  Synthetic oligonucleotide
agtttatcactggaaaaccttgtatcttgt

SEQ ID NO: 482856 - DNA, 30 bp, Artificial Sequence
  Synthetic oligonucleotide
ggggtacagtcagggtcatcctgctcttgt

SEQ ID NO: 482857 - DNA, 30 bp, Artificial Sequence
  Synthetic oligonucleotide
ttccataacactagaccgcagctctcttgt

SEQ ID NO: 482858 - DNA, 30 bp, Artificial Sequence
  Synthetic oligonucleotide
aagtttaaatatagttcgacaaagtcttgt

SEQ ID NO: 482859 - DNA, 30 bp, Artificial Sequence
  Synthetic oligonucleotide
gagaaatagtgcgtcttcggcctttcttgt

SEQ ID NO: 482860 - DNA, 30 bp, Artificial Sequence
  Synthetic oligonucleotide
tttttcttttgtgtagtcctcttttcttgt

SEQ ID NO: 482861 - DNA, 30 bp, Artificial Sequence
  Synthetic oligonucleotide
gtaacccagcaatgactgatgttttcttgt

SEQ ID NO: 482862 - DNA, 30 bp, Artificial Sequence
  Synthetic oligonucleotide
ctaagcgtgtttgtgctctgggaaagttgt

SEQ ID NO: 482863 - DNA, 30 bp, Artificial Sequence
  Synthetic oligonucleotide
ttatactcattatcatgtagaaagagttgt

SEQ ID NO: 482864 - DNA, 30 bp, Artificial Sequence
  Synthetic oligonucleotide
ctcactaatatctattgcaagtagagttgt

SEQ ID NO: 482865 - DNA, 30 bp, Artificial Sequence
  Synthetic oligonucleotide
taagtcggttccgattcgacttggagttgt

SEQ ID NO: 482866 - DNA, 30 bp, Artificial Sequence
  Synthetic oligonucleotide
gagtgatgtaacagaaatgccatgagttgt

SEQ ID NO: 482867 - DNA, 30 bp, Artificial Sequence
  Synthetic oligonucleotide
atgttttgtcatctgggttcctgtagttgt

SEQ ID NO: 482868 - DNA, 30 bp, Artificial Sequence
  Synthetic oligonucleotide
tgacgcactgcaactgacgcgtgtagttgt

SEQ ID NO: 482869 - DNA, 30 bp, Artificial Sequence
  Synthetic oligonucleotide
aattaccttagtcaggtataggcacgttgt

SEQ ID NO: 482870 - DNA, 30 bp, Artificial Sequence
  Synthetic oligonucleotide
cagtcactaacacggatttcgcagcgttgt

SEQ ID NO: 482871 - DNA, 30 bp, Artificial Sequence
  Synthetic oligonucleotide
cagaacatagttcgttggatttctcgttgt

SEQ ID NO: 482872 - DNA, 30 bp, Artificial Sequence
  Synthetic oligonucleotide
ttaggtcatcagacagtcttcggtcgttgt

SEQ ID NO: 482873 - DNA, 30 bp, Artificial Sequence
  Synthetic oligonucleotide
caaagtgagttatgtgagtcttcaggttgt

SEQ ID NO: 482874 - DNA, 30 bp, Artificial Sequence
  Synthetic oligonucleotide
tacgcatccgatgcattgagacacggttgt

SEQ ID NO: 482875 - DNA, 30 bp, Artificial Sequence
  Synthetic oligonucleotide
cgtaaagtgatgagccacttggggggttgt

SEQ ID NO: 482876 - DNA, 30 bp, Artificial Sequence
  Synthetic oligonucleotide
agaggcttctagacaccggtatatggttgt

SEQ ID NO: 482877 - DNA, 30 bp, Artificial Sequence
  Synthetic oligonucleotide
ttggattgtcttcctcgtagccctggttgt

SEQ ID NO: 482878 - DNA, 30 bp, Artificial Sequence
  Synthetic oligonucleotide
ggctccggccatccgccaggaattggttgt

SEQ ID NO: 482879 - DNA, 30 bp, Artificial Sequence
  Synthetic oligonucleotide
agcatggcctaccaacaactttcatgttgt

SEQ ID NO: 482880 - DNA, 30 bp, Artificial Sequence
  Synthetic oligonucleotide
actgcgcctagcctacaatgcagatgttgt

SEQ ID NO: 482881 - DNA, 30 bp, Artificial Sequence
  Synthetic oligonucleotide
tacagtgcatcgataatatcgcgctgttgt

SEQ ID NO: 482882 - DNA, 30 bp, Artificial Sequence
  Synthetic oligonucleotide
tccttacggcagcatcttgaattttgttgt

SEQ ID NO: 482883 - DNA, 30 bp, Artificial Sequence
  Synthetic oligonucleotide
attagacgaatgggctttactcaaatttgt

SEQ ID NO: 482884 - DNA, 30 bp, Artificial Sequence
  Synthetic oligonucleotide
acgcgtattcatttgatcattaacatttgt

SEQ ID NO: 482885 - DNA, 30 bp, Artificial Sequence
  Synthetic oligonucleotide
ggtttacgctaaaagtctacgcacatttgt

SEQ ID NO: 482886 - DNA, 30 bp, Artificial Sequence
  Synthetic oligonucleotide
actagtatcttctttatgtgagacatttgt

SEQ ID NO: 482887 - DNA, 30 bp, Artificial Sequence
  Synthetic oligonucleotide
gaatgttttatccagtcggttatcatttgt

SEQ ID NO: 482888 - DNA, 30 bp, Artificial Sequence
  Synthetic oligonucleotide
cacataagcttttgtacggccgagatttgt

SEQ ID NO: 482889 - DNA, 30 bp, Artificial Sequence
  Synthetic oligonucleotide
attgggtttaaaatccgagacgtgatttgt

SEQ ID NO: 482890 - DNA, 30 bp, Artificial Sequence
  Synthetic oligonucleotide
atcggacgtatatgcgggagtcatatttgt

SEQ ID NO: 482891 - DNA, 30 bp, Artificial Sequence
  Synthetic oligonucleotide
tcaggggatttaattggtaaggatatttgt

SEQ ID NO: 482892 - DNA, 30 bp, Artificial Sequence
  Synthetic oligonucleotide
cgaacaaagatgatcctccggatactttgt

SEQ ID NO: 482893 - DNA, 30 bp, Artificial Sequence
  Synthetic oligonucleotide
atctggagaaaagacacgaggccgctttgt

SEQ ID NO: 482894 - DNA, 30 bp, Artificial Sequence
  Synthetic oligonucleotide
cgtggggagcggcaaagacgggggctttgt

SEQ ID NO: 482895 - DNA, 30 bp, Artificial Sequence
  Synthetic oligonucleotide
ttggatctatctagtacagatttgctttgt

SEQ ID NO: 482896 - DNA, 30 bp, Artificial Sequence
  Synthetic oligonucleotide
aaatagagcaatggcgccgttagtctttgt

SEQ ID NO: 482897 - DNA, 30 bp, Artificial Sequence
  Synthetic oligonucleotide
aaaaaggtttaaactattcctcgtctttgt

SEQ ID NO: 482898 - DNA, 30 bp, Artificial Sequence
  Synthetic oligonucleotide
acacatgagggggttagtcggcatgtttgt

SEQ ID NO: 482899 - DNA, 30 bp, Artificial Sequence
  Synthetic oligonucleotide
aatcgctcatttatcgccatggatgtttgt

SEQ ID NO: 482900 - DNA, 30 bp, Artificial Sequence
  Synthetic oligonucleotide
gtttaggaaattatagaaatgactgtttgt

SEQ ID NO: 482901 - DNA, 30 bp, Artificial Sequence
  Synthetic oligonucleotide
cggtggagatatgggtaaccatttgtttgt

SEQ ID NO: 482902 - DNA, 30 bp, Artificial Sequence
  Synthetic oligonucleotide
attaagattcgttgggcagtgaaattttgt

SEQ ID NO: 482903 - DNA, 30 bp, Artificial Sequence
  Synthetic oligonucleotide
cgctatttgagttgagaccgacaattttgt

SEQ ID NO: 482904 - DNA, 30 bp, Artificial Sequence
  Synthetic oligonucleotide
gtcccgcgcagcgagcaatgccaattttgt

SEQ ID NO: 482905 - DNA, 30 bp, Artificial Sequence
  Synthetic oligonucleotide
catgttccacttaataatcgggaattttgt

SEQ ID NO: 482906 - DNA, 30 bp, Artificial Sequence
  Synthetic oligonucleotide
tagcttagtagcatatcgagtgaattttgt

SEQ ID NO: 482907 - DNA, 30 bp, Artificial Sequence
  Synthetic oligonucleotide
tcagacgagtttacgctttgtgaattttgt

SEQ ID NO: 482908 - DNA, 30 bp, Artificial Sequence
  Synthetic oligonucleotide
gactcaggcgacaaattactccgattttgt

SEQ ID NO: 482909 - DNA, 30 bp, Artificial Sequence
  Synthetic oligonucleotide
ttgaacggagcctcggggactttattttgt

SEQ ID NO: 482910 - DNA, 30 bp, Artificial Sequence
  Synthetic oligonucleotide
ttggaacacaaattaaatatctgcttttgt

SEQ ID NO: 482911 - DNA, 30 bp, Artificial Sequence
  Synthetic oligonucleotide
tgaacctcagggacaactgcaaagttttgt

SEQ ID NO: 482912 - DNA, 30 bp, Artificial Sequence
  Synthetic oligonucleotide
taggatactattgattcgtgtgatttttgt

SEQ ID NO: 482913 - DNA, 30 bp, Artificial Sequence
  Synthetic oligonucleotide
tatttacatcacgaataaccgcgtttttgt

SEQ ID NO: 482914 - DNA, 30 bp, Artificial Sequence
  Synthetic oligonucleotide
agctttaattacaagtgtataattttttgt

SEQ ID NO: 482915 - DNA, 30 bp, Artificial Sequence
  Synthetic oligonucleotide
ctttgatgggcatgaccttcgaaaaaaatt

SEQ ID NO: 482916 - DNA, 30 bp, Artificial Sequence
  Synthetic oligonucleotide
tgagtgaggtattctaattttctaaaaatt

SEQ ID NO: 482917 - DNA, 30 bp, Artificial Sequence
  Synthetic oligonucleotide
agcgcttctgaaagtgtatggttaaaaatt

SEQ ID NO: 482918 - DNA, 30 bp, Artificial Sequence
  Synthetic oligonucleotide
tgatttagggttaagtagtttttaaaaatt

SEQ ID NO: 482919 - DNA, 30 bp, Artificial Sequence
  Synthetic oligonucleotide
atgaccctctgtatatcttgaccgaaaatt

SEQ ID NO: 482920 - DNA, 31 bp, Artificial Sequence
  Synthetic oligonucleotide
taggaagaatgtgaacggtctcaataaaatt

SEQ ID NO: 482921 - DNA, 30 bp, Artificial Sequence
  Synthetic oligonucleotide
cgtaacgactggaaattaggtgataaaatt

SEQ ID NO: 482922 - DNA, 30 bp, Artificial Sequence
  Synthetic oligonucleotide
tgcgcactgctcgcggggtagtataaaatt

SEQ ID NO: 482923 - DNA, 30 bp, Artificial Sequence
  Synthetic oligonucleotide
tcaatctttctttaggggagacctaaaatt

SEQ ID NO: 482924 - DNA, 30 bp, Artificial Sequence
  Synthetic oligonucleotide
atcaatccggattatttacgaagtaaaatt

SEQ ID NO: 482925 - DNA, 30 bp, Artificial Sequence
  Synthetic oligonucleotide
attggaatactaggtaacctaattaaaatt

SEQ ID NO: 482926 - DNA, 30 bp, Artificial Sequence
  Synthetic oligonucleotide
gatcagaggactgtcagcgctaaacaaatt

SEQ ID NO: 482927 - DNA, 30 bp, Artificial Sequence
  Synthetic oligonucleotide
tatatgacatgagtcatttgtgtacaaatt

SEQ ID NO: 482928 - DNA, 30 bp, Artificial Sequence
  Synthetic oligonucleotide
gtattcggtcccgggctaccagaccaaatt

SEQ ID NO: 482929 - DNA, 30 bp, Artificial Sequence
  Synthetic oligonucleotide
gttctgctcatgccgatctaggcccaaatt

SEQ ID NO: 482930 - DNA, 30 bp, Artificial Sequence
  Synthetic oligonucleotide
gagtcgccggcgttacccattgcccaaatt

SEQ ID NO: 482931 - DNA, 30 bp, Artificial Sequence
  Synthetic oligonucleotide
gcaagtgttgaaacgtaaaagtcccaaatt

SEQ ID NO: 482932 - DNA, 30 bp, Artificial Sequence
  Synthetic oligonucleotide
gattgctttcttgacaagaagcgccaaatt

SEQ ID NO: 482933 - DNA, 30 bp, Artificial Sequence
  Synthetic oligonucleotide
tatccataaacaagtacagttgctcaaatt

SEQ ID NO: 482934 - DNA, 30 bp, Artificial Sequence
  Synthetic oligonucleotide
attaatcagtattcgtaccaagcagaaatt

SEQ ID NO: 482935 - DNA, 30 bp, Artificial Sequence
  Synthetic oligonucleotide
aaagtcagcccattttgggtcttagaaatt

SEQ ID NO: 482936 - DNA, 30 bp, Artificial Sequence
  Synthetic oligonucleotide
ttgccgggccttaggttcatctgcgaaatt

SEQ ID NO: 482937 - DNA, 30 bp, Artificial Sequence
  Synthetic oligonucleotide
taggtgatcctgatggggggacaggaaatt

SEQ ID NO: 482938 - DNA, 30 bp, Artificial Sequence
  Synthetic oligonucleotide
tccactcctcgtcttgctgtaggggaaatt

SEQ ID NO: 482939 - DNA, 30 bp, Artificial Sequence
  Synthetic oligonucleotide
ctacccagtgatcgaccatcgcttgaaatt

SEQ ID NO: 482940 - DNA, 30 bp, Artificial Sequence
  Synthetic oligonucleotide
gagtatccctactatcacgtatttgaaatt

SEQ ID NO: 482941 - DNA, 30 bp, Artificial Sequence
  Synthetic oligonucleotide
caaggcccacttcaaaatcgtatataaatt

SEQ ID NO: 482942 - DNA, 30 bp, Artificial Sequence
  Synthetic oligonucleotide
tttttagtaaacctgagcgaaacgtaaatt

SEQ ID NO: 482943 - DNA, 30 bp, Artificial Sequence
  Synthetic oligonucleotide
tatggaagtcctacagggaatgattaaatt

SEQ ID NO: 482944 - DNA, 30 bp, Artificial Sequence
  Synthetic oligonucleotide
attaacttctgctcggcgcggacttaaatt

SEQ ID NO: 482945 - DNA, 30 bp, Artificial Sequence
  Synthetic oligonucleotide
acgcataatgttaagttttaatgttaaatt

SEQ ID NO: 482946 - DNA, 30 bp, Artificial Sequence
  Synthetic oligonucleotide
atgtgatgatctatggtctagatttaaatt

SEQ ID NO: 482947 - DNA, 30 bp, Artificial Sequence
  Synthetic oligonucleotide
ttagcgcggctcatagtatggatttaaatt

SEQ ID NO: 482948 - DNA, 30 bp, Artificial Sequence
  Synthetic oligonucleotide
gcgacataactgcttggtatgatttaaatt

SEQ ID NO: 482949 - DNA, 30 bp, Artificial Sequence
  Synthetic oligonucleotide
aaatcacagatttgatgcagcctttaaatt

SEQ ID NO: 482950 - DNA, 30 bp, Artificial Sequence
  Synthetic oligonucleotide
attgcgcagtggttagagattgtttaaatt

SEQ ID NO: 482951 - DNA, 30 bp, Artificial Sequence
  Synthetic oligonucleotide
ataacggcggaaggcggcagataaacaatt

SEQ ID NO: 482952 - DNA, 30 bp, Artificial Sequence
  Synthetic oligonucleotide
gaaccccttgctgtgaactggcacacaatt

SEQ ID NO: 482953 - DNA, 30 bp, Artificial Sequence
  Synthetic oligonucleotide
aaggacggcggggctcagtgaaccacaatt

SEQ ID NO: 482954 - DNA, 30 bp, Artificial Sequence
  Synthetic oligonucleotide
actagagagtagatatgccgacgcacaatt

SEQ ID NO: 482955 - DNA, 31 bp, Artificial Sequence
  Synthetic oligonucleotide
aacacgcgttgttcgtatacagatcacaatt

SEQ ID NO: 482956 - DNA, 30 bp, Artificial Sequence
  Synthetic oligonucleotide
gtctttgtacgaggcagtcgaaatacaatt

SEQ ID NO: 482957 - DNA, 30 bp, Artificial Sequence
  Synthetic oligonucleotide
gaggtttaaatttaatactggcatacaatt

SEQ ID NO: 482958 - DNA, 30 bp, Artificial Sequence
  Synthetic oligonucleotide
cgcacgtctatcagcgctggagatacaatt

SEQ ID NO: 482959 - DNA, 30 bp, Artificial Sequence
  Synthetic oligonucleotide
ggcatgacacccataatatccccaccaatt

SEQ ID NO: 482960 - DNA, 30 bp, Artificial Sequence
  Synthetic oligonucleotide
gttttgcatgcatcgtcctgtcggccaatt

SEQ ID NO: 482961 - DNA, 30 bp, Artificial Sequence
  Synthetic oligonucleotide
gccgcacaaacgggatcatgagggccaatt

SEQ ID NO: 482962 - DNA, 30 bp, Artificial Sequence
  Synthetic oligonucleotide
aaaacggcgcggaaaattcgctggccaatt

SEQ ID NO: 482963 - DNA, 30 bp, Artificial Sequence
  Synthetic oligonucleotide
gtttgattatacctgtggaattggccaatt

SEQ ID NO: 482964 - DNA, 30 bp, Artificial Sequence
  Synthetic oligonucleotide
acatacgagcactggttaggtgtgccaatt

SEQ ID NO: 482965 - DNA, 30 bp, Artificial Sequence
  Synthetic oligonucleotide
ttcccatgtatggaatctagtggtccaatt

SEQ ID NO: 482966 - DNA, 30 bp, Artificial Sequence
  Synthetic oligonucleotide
attgcagtctcaagtgacgtcaaagcaatt

SEQ ID NO: 482967 - DNA, 29 bp, Artificial Sequence
  Synthetic oligonucleotide
ggcgtcgctagttttttaccgcagcaatt

SEQ ID NO: 482968 - DNA, 30 bp, Artificial Sequence
  Synthetic oligonucleotide
ggcaattggcttgcgtgtgttctagcaatt

SEQ ID NO: 482969 - DNA, 30 bp, Artificial Sequence
  Synthetic oligonucleotide
tgaaaagcatcgtttggaggtcacgcaatt

SEQ ID NO: 482970 - DNA, 30 bp, Artificial Sequence
  Synthetic oligonucleotide
taatggtggaaaggagcccgagacgcaatt

SEQ ID NO: 482971 - DNA, 30 bp, Artificial Sequence
  Synthetic oligonucleotide
agtcccctggagtattatggtcgcgcaatt

SEQ ID NO: 482972 - DNA, 30 bp, Artificial Sequence
  Synthetic oligonucleotide
atcgaagcaagatgccgagtcggggcaatt

SEQ ID NO: 482973 - DNA, 30 bp, Artificial Sequence
  Synthetic oligonucleotide
cctgaacctacggcagagatgacatcaatt

SEQ ID NO: 482974 - DNA, 30 bp, Artificial Sequence
  Synthetic oligonucleotide
cttaaatgtaagcgtgaaacgctatcaatt

SEQ ID NO: 482975 - DNA, 30 bp, Artificial Sequence
  Synthetic oligonucleotide
ctaagttacagatagagcggtttatcaatt

SEQ ID NO: 482976 - DNA, 30 bp, Artificial Sequence
  Synthetic oligonucleotide
gggcgctaacaatatttgacagtctcaatt

SEQ ID NO: 482977 - DNA, 30 bp, Artificial Sequence
  Synthetic oligonucleotide
tactcccgttctagggtttagttctcaatt

SEQ ID NO: 482978 - DNA, 30 bp, Artificial Sequence
  Synthetic oligonucleotide
gcgtcgttactctcatctcataattcaatt

SEQ ID NO: 482979 - DNA, 30 bp, Artificial Sequence
  Synthetic oligonucleotide
aagttccggtgggttaatcgaggttcaatt

SEQ ID NO: 482980 - DNA, 30 bp, Artificial Sequence
  Synthetic oligonucleotide
ctccgtagacccgtgagttaccaaagaatt

SEQ ID NO: 482981 - DNA, 30 bp, Artificial Sequence
  Synthetic oligonucleotide
tagttgcactgatcgtgttaaggaagaatt

SEQ ID NO: 482982 - DNA, 30 bp, Artificial Sequence
  Synthetic oligonucleotide
gaaattgatactcaagtacagcgcagaatt

SEQ ID NO: 482983 - DNA, 30 bp, Artificial Sequence
  Synthetic oligonucleotide
agacatgatataacattgattgcgagaatt

SEQ ID NO: 482984 - DNA, 30 bp, Artificial Sequence
  Synthetic oligonucleotide
tctaaaggcggcaaacggcttgtacgaatt

SEQ ID NO: 482985 - DNA, 30 bp, Artificial Sequence
  Synthetic oligonucleotide
aagcctttcagattgtcttgtacgcgaatt

SEQ ID NO: 482986 - DNA, 30 bp, Artificial Sequence
  Synthetic oligonucleotide
ggcagcaataactaaatactactgcgaatt

SEQ ID NO: 482987 - DNA, 30 bp, Artificial Sequence
  Synthetic oligonucleotide
gtttaacgaggtcgcgaaatgcttcgaatt

SEQ ID NO: 482988 - DNA, 30 bp, Artificial Sequence
  Synthetic oligonucleotide
cacttttgacccgcgtcggtacaaggaatt

SEQ ID NO: 482989 - DNA, 30 bp, Artificial Sequence
  Synthetic oligonucleotide
ggacgtcaggcaatatacccgccaggaatt

SEQ ID NO: 482990 - DNA, 30 bp, Artificial Sequence
  Synthetic oligonucleotide
gttcgttcggtctattcccccctaggaatt

SEQ ID NO: 482991 - DNA, 30 bp, Artificial Sequence
  Synthetic oligonucleotide
aatcagaacttggtgacgccggtaggaatt

SEQ ID NO: 482992 - DNA, 30 bp, Artificial Sequence
  Synthetic oligonucleotide
aaacagcaagcgcgcctggctaccggaatt

SEQ ID NO: 482993 - DNA, 30 bp, Artificial Sequence
  Synthetic oligonucleotide
gatctcatactaataattaagctcggaatt

SEQ ID NO: 482994 - DNA, 30 bp, Artificial Sequence
  Synthetic oligonucleotide
tttactataaggagccgatcatatggaatt

SEQ ID NO: 482995 - DNA, 30 bp, Artificial Sequence
  Synthetic oligonucleotide
cgcgcatattccgtaagatcccgtggaatt

SEQ ID NO: 482996 - DNA, 30 bp, Artificial Sequence
  Synthetic oligonucleotide
ggctgatgccctcatcgtatgggtggaatt

SEQ ID NO: 482997 - DNA, 30 bp, Artificial Sequence
  Synthetic oligonucleotide
aaagtcggctgtatattttttcttggaatt

SEQ ID NO: 482998 - DNA, 30 bp, Artificial Sequence
  Synthetic oligonucleotide
gacccataatcttgtaatccgcaatgaatt

SEQ ID NO: 482999 - DNA, 30 bp, Artificial Sequence
  Synthetic oligonucleotide
acagactctatcttttcgagccgctgaatt

SEQ ID NO: 483000 - DNA, 30 bp, Artificial Sequence
  Synthetic oligonucleotide
cgtagcgagctctgctgccccggctgaatt

SEQ ID NO: 483001 - DNA, 30 bp, Artificial Sequence
  Synthetic oligonucleotide
aatgcctgtgccactttcaattgctgaatt

SEQ ID NO: 483002 - DNA, 30 bp, Artificial Sequence
  Synthetic oligonucleotide
aatggtgaatcacaatatatccagtgaatt

SEQ ID NO: 483003 - DNA, 30 bp, Artificial Sequence
  Synthetic oligonucleotide
tgttaacaaatcacactcccgtagtgaatt

SEQ ID NO: 483004 - DNA, 30 bp, Artificial Sequence
  Synthetic oligonucleotide
catgggctacttgaacttaatttgtgaatt

SEQ ID NO: 483005 - DNA, 30 bp, Artificial Sequence
  Synthetic oligonucleotide
ttcgctttatggaatacgttggtttgaatt

SEQ ID NO: 483006 - DNA, 30 bp, Artificial Sequence
  Synthetic oligonucleotide
taagctctatgtacggatggtagaataatt

SEQ ID NO: 483007 - DNA, 30 bp, Artificial Sequence
  Synthetic oligonucleotide
gtgtccgaccacgtagatgaggccataatt

SEQ ID NO: 483008 - DNA, 30 bp, Artificial Sequence
  Synthetic oligonucleotide
gcgcaatatgacggtatcctctatataatt

SEQ ID NO: 483009 - DNA, 30 bp, Artificial Sequence
  Synthetic oligonucleotide
tagttactcatcttgagggaaattataatt

SEQ ID NO: 483010 - DNA, 30 bp, Artificial Sequence
  Synthetic oligonucleotide
ctgcaaggattaggtaacgcagaactaatt

SEQ ID NO: 483011 - DNA, 30 bp, Artificial Sequence
  Synthetic oligonucleotide
agagaagtggttagtccggttggactaatt

SEQ ID NO: 483012 - DNA, 31 bp, Artificial Sequence
  Synthetic oligonucleotide
tgtttggattctcctctaccacaacctaatt

SEQ ID NO: 483013 - DNA, 30 bp, Artificial Sequence
  Synthetic oligonucleotide
actaactggtgctggaagtcgcccctaatt

SEQ ID NO: 483014 - DNA, 30 bp, Artificial Sequence
  Synthetic oligonucleotide
ggctgacggatcttggggagatccctaatt

SEQ ID NO: 483015 - DNA, 30 bp, Artificial Sequence
  Synthetic oligonucleotide
ggtatcttctggcatcccgctggcctaatt

SEQ ID NO: 483016 - DNA, 30 bp, Artificial Sequence
  Synthetic oligonucleotide
atcatacttctgtggtgctagcggctaatt

SEQ ID NO: 483017 - DNA, 30 bp, Artificial Sequence
  Synthetic oligonucleotide
accggaggcacggctgggcaagggctaatt

SEQ ID NO: 483018 - DNA, 30 bp, Artificial Sequence
  Synthetic oligonucleotide
atgaaccctggatgtgaggggttgctaatt

SEQ ID NO: 483019 - DNA, 30 bp, Artificial Sequence
  Synthetic oligonucleotide
tttcgagtgactctctaagtaaatctaatt

SEQ ID NO: 483020 - DNA, 30 bp, Artificial Sequence
  Synthetic oligonucleotide
ttaaataccattaggcttagatttctaatt

SEQ ID NO: 483021 - DNA, 30 bp, Artificial Sequence
  Synthetic oligonucleotide
cacatttcagcttgcgacaagcaagtaatt

SEQ ID NO: 483022 - DNA, 30 bp, Artificial Sequence
  Synthetic oligonucleotide
ttctctagttagactgatcccggagtaatt

SEQ ID NO: 483023 - DNA, 30 bp, Artificial Sequence
  Synthetic oligonucleotide
aggttaagaatattccgggagttagtaatt

SEQ ID NO: 483024 - DNA, 30 bp, Artificial Sequence
  Synthetic oligonucleotide
ccgtccgaaagattacgacaagtcgtaatt

SEQ ID NO: 483025 - DNA, 30 bp, Artificial Sequence
  Synthetic oligonucleotide
tgtcgcattgcggttatccgaccggtaatt

SEQ ID NO: 483026 - DNA, 30 bp, Artificial Sequence
  Synthetic oligonucleotide
ttaaaggtcgtcagctggtacctggtaatt

SEQ ID NO: 483027 - DNA, 30 bp, Artificial Sequence
  Synthetic oligonucleotide
tggcattttactggcgttcgccatgtaatt

SEQ ID NO: 483028 - DNA, 30 bp, Artificial Sequence
  Synthetic oligonucleotide
atactactaaatactcgacttggattaatt

SEQ ID NO: 483029 - DNA, 30 bp, Artificial Sequence
  Synthetic oligonucleotide
tgcaaaccattaatgcccattttattaatt

SEQ ID NO: 483030 - DNA, 30 bp, Artificial Sequence
  Synthetic oligonucleotide
gaaagggcggtcgattccaataacttaatt

SEQ ID NO: 483031 - DNA, 30 bp, Artificial Sequence
  Synthetic oligonucleotide
tcctttcaggacggtcaacgttccttaatt

SEQ ID NO: 483032 - DNA, 30 bp, Artificial Sequence
  Synthetic oligonucleotide
tacgccaacactcaacacaagagcttaatt

SEQ ID NO: 483033 - DNA, 30 bp, Artificial Sequence
  Synthetic oligonucleotide
tactcgcgctcttacctaaggggcttaatt

SEQ ID NO: 483034 - DNA, 30 bp, Artificial Sequence
  Synthetic oligonucleotide
gaaatggctaccaagctatggtgcttaatt

SEQ ID NO: 483035 - DNA, 30 bp, Artificial Sequence
  Synthetic oligonucleotide
tgtgtgcattaaaaggagagcaggttaatt

SEQ ID NO: 483036 - DNA, 30 bp, Artificial Sequence
  Synthetic oligonucleotide
tttattggtcgtcggtgcatgaggttaatt

SEQ ID NO: 483037 - DNA, 30 bp, Artificial Sequence
  Synthetic oligonucleotide
catttatatgacttgtgctcatatttaatt

SEQ ID NO: 483038 - DNA, 30 bp, Artificial Sequence
  Synthetic oligonucleotide
ctcgtgcgaggataaccggtaggtttaatt

SEQ ID NO: 483039 - DNA, 30 bp, Artificial Sequence
  Synthetic oligonucleotide
gagcaccccacactattaggaattttaatt

SEQ ID NO: 483040 - DNA, 30 bp, Artificial Sequence
  Synthetic oligonucleotide
ttaaaggtgcatttgcttggggttttaatt

SEQ ID NO: 483041 - DNA, 30 bp, Artificial Sequence
  Synthetic oligonucleotide
gcaaaaatagggaccgcttcgtaaaacatt

SEQ ID NO: 483042 - DNA, 30 bp, Artificial Sequence
  Synthetic oligonucleotide
caactgatatggctgaccttaagaaacatt

SEQ ID NO: 483043 - DNA, 30 bp, Artificial Sequence
  Synthetic oligonucleotide
tggctgttaaagtagttagcgtagaacatt

SEQ ID NO: 483044 - DNA, 30 bp, Artificial Sequence
  Synthetic oligonucleotide
taatgacgaaactagtttcgcgtgaacatt

SEQ ID NO: 483045 - DNA, 30 bp, Artificial Sequence
  Synthetic oligonucleotide
cgaatctaaatacatccatcgtctaacatt

SEQ ID NO: 483046 - DNA, 30 bp, Artificial Sequence
  Synthetic oligonucleotide
aatgttgtttcgaaatcgtagatacacatt

SEQ ID NO: 483047 - DNA, 30 bp, Artificial Sequence
  Synthetic oligonucleotide
tgcagggtcattagtcaatataggcacatt

SEQ ID NO: 483048 - DNA, 30 bp, Artificial Sequence
  Synthetic oligonucleotide
attagctcgctatagacccatcttcacatt

SEQ ID NO: 483049 - DNA, 30 bp, Artificial Sequence
  Synthetic oligonucleotide
gacagtagtatggcgaagtgagttcacatt

SEQ ID NO: 483050 - DNA, 30 bp, Artificial Sequence
  Synthetic oligonucleotide
caacatgacgttgattaggtgtacgacatt

SEQ ID NO: 483051 - DNA, 30 bp, Artificial Sequence
  Synthetic oligonucleotide
agcgacgtcagccgagttcggcaggacatt

SEQ ID NO: 483052 - DNA, 30 bp, Artificial Sequence
  Synthetic oligonucleotide
gacagggtcgtttgccaacgaccggacatt

SEQ ID NO: 483053 - DNA, 30 bp, Artificial Sequence
  Synthetic oligonucleotide
agttagcaacggacaaggcgtgcggacatt

SEQ ID NO: 483054 - DNA, 30 bp, Artificial Sequence
  Synthetic oligonucleotide
atatgtagttgacttgagatagctgacatt

SEQ ID NO: 483055 - DNA, 30 bp, Artificial Sequence
  Synthetic oligonucleotide
ttagacggcgtacttcggcaaaaatacatt

SEQ ID NO: 483056 - DNA, 30 bp, Artificial Sequence
  Synthetic oligonucleotide
attggtccgcggtctgcccaaacatacatt

SEQ ID NO: 483057 - DNA, 30 bp, Artificial Sequence
  Synthetic oligonucleotide
ttggtactagtgatgtagatcgtatacatt

SEQ ID NO: 483058 - DNA, 30 bp, Artificial Sequence
  Synthetic oligonucleotide
agttcacgttgtacggcggcggcctacatt

SEQ ID NO: 483059 - DNA, 30 bp, Artificial Sequence
  Synthetic oligonucleotide
tactgatacgacaggggtgccccgtacatt

SEQ ID NO: 483060 - DNA, 30 bp, Artificial Sequence
  Synthetic oligonucleotide
taatcgttttaatgtggtaatgcttacatt

SEQ ID NO: 483061 - DNA, 30 bp, Artificial Sequence
  Synthetic oligonucleotide
cctgtatcccagtataggccgtcttacatt

SEQ ID NO: 483062 - DNA, 30 bp, Artificial Sequence
  Synthetic oligonucleotide
atataaccaatcagtatatatggttacatt

SEQ ID NO: 483063 - DNA, 30 bp, Artificial Sequence
  Synthetic oligonucleotide
gaatcatgaacgtcaaaagagttttacatt

SEQ ID NO: 483064 - DNA, 30 bp, Artificial Sequence
  Synthetic oligonucleotide
attgccaggtgcgatgtattcgcgaccatt

SEQ ID NO: 483065 - DNA, 30 bp, Artificial Sequence
  Synthetic oligonucleotide
ggttttcatcatttagacaccactaccatt

SEQ ID NO: 483066 - DNA, 30 bp, Artificial Sequence
  Synthetic oligonucleotide
taccgctatttgtctacgtgcagtaccatt

SEQ ID NO: 483067 - DNA, 30 bp, Artificial Sequence
  Synthetic oligonucleotide
aagtctagagtattaaaccctattaccatt

SEQ ID NO: 483068 - DNA, 30 bp, Artificial Sequence
  Synthetic oligonucleotide
cgtaatatgaaccgtagcaagaaacccatt

SEQ ID NO: 483069 - DNA, 30 bp, Artificial Sequence
  Synthetic oligonucleotide
acgagcatacggacaacatttaaacccatt

SEQ ID NO: 483070 - DNA, 30 bp, Artificial Sequence
  Synthetic oligonucleotide
ataccaaagggagggtcttttttccccatt

SEQ ID NO: 483071 - DNA, 30 bp, Artificial Sequence
  Synthetic oligonucleotide
gactttatgacactcatgtgctagcccatt

SEQ ID NO: 483072 - DNA, 30 bp, Artificial Sequence
  Synthetic oligonucleotide
tgtatagggttaactttagtctagcccatt

SEQ ID NO: 483073 - DNA, 30 bp, Artificial Sequence
  Synthetic oligonucleotide
atgcgctgcaacccatgcgtttcgcccatt

SEQ ID NO: 483074 - DNA, 30 bp, Artificial Sequence
  Synthetic oligonucleotide
ggcggcccaccgacacctcaccgtcccatt

SEQ ID NO: 483075 - DNA, 30 bp, Artificial Sequence
  Synthetic oligonucleotide
aactgaaacgatatctcgttagttcccatt

SEQ ID NO: 483076 - DNA, 30 bp, Artificial Sequence
  Synthetic oligonucleotide
gacatgtgtgtcgtgaaggagtttcccatt

SEQ ID NO: 483077 - DNA, 30 bp, Artificial Sequence
  Synthetic oligonucleotide
tcgcgctaggatcttccattgcaagccatt

SEQ ID NO: 483078 - DNA, 30 bp, Artificial Sequence
  Synthetic oligonucleotide
acctaggattgccgaagtgtcgaagccatt

SEQ ID NO: 483079 - DNA, 30 bp, Artificial Sequence
  Synthetic oligonucleotide
ctctcatcggtcatgccaaccgtagccatt

SEQ ID NO: 483080 - DNA, 30 bp, Artificial Sequence
  Synthetic oligonucleotide
tctccttagtctgtactcatgttagccatt

SEQ ID NO: 483081 - DNA, 30 bp, Artificial Sequence
  Synthetic oligonucleotide
aactggtgcatgtcaacgacacgcgccatt

SEQ ID NO: 483082 - DNA, 30 bp, Artificial Sequence
  Synthetic oligonucleotide
aaatacaaccacccggtttttgatgccatt

SEQ ID NO: 483083 - DNA, 30 bp, Artificial Sequence
  Synthetic oligonucleotide
gaagggtgttgttctaatttaagtgccatt

SEQ ID NO: 483084 - DNA, 30 bp, Artificial Sequence
  Synthetic oligonucleotide
tctggtaaggaaccagttggtacatccatt

SEQ ID NO: 483085 - DNA, 30 bp, Artificial Sequence
  Synthetic oligonucleotide
gggaaccgggaggggtttcactgatccatt

SEQ ID NO: 483086 - DNA, 30 bp, Artificial Sequence
  Synthetic oligonucleotide
gagcccatatttaattggtcttagtccatt

SEQ ID NO: 483087 - DNA, 30 bp, Artificial Sequence
  Synthetic oligonucleotide
tcaatggtaaatacctaaaaaacgtccatt

SEQ ID NO: 483088 - DNA, 30 bp, Artificial Sequence
  Synthetic oligonucleotide
ttggaaaggggatgcggctacaggtccatt

SEQ ID NO: 483089 - DNA, 30 bp, Artificial Sequence
  Synthetic oligonucleotide
ccactgcccgacaaggctcatgggtccatt

SEQ ID NO: 483090 - DNA, 30 bp, Artificial Sequence
  Synthetic oligonucleotide
gagggatgatattggaacttactttccatt

SEQ ID NO: 483091 - DNA, 30 bp, Artificial Sequence
  Synthetic oligonucleotide
tgagggagtaatggcgattatggaagcatt

SEQ ID NO: 483092 - DNA, 30 bp, Artificial Sequence
  Synthetic oligonucleotide
gaaccataaactatagtttttacgagcatt

SEQ ID NO: 483093 - DNA, 30 bp, Artificial Sequence
  Synthetic oligonucleotide
cgcgtaagtagtattgcaaccccgagcatt

SEQ ID NO: 483094 - DNA, 30 bp, Artificial Sequence
  Synthetic oligonucleotide
acatcgattaaatctcctgcgcatagcatt

SEQ ID NO: 483095 - DNA, 30 bp, Artificial Sequence
  Synthetic oligonucleotide
gcaaatgaggttatgaatttgtctagcatt

SEQ ID NO: 483096 - DNA, 30 bp, Artificial Sequence
  Synthetic oligonucleotide
gagagctttctttttgttctctgtagcatt

SEQ ID NO: 483097 - DNA, 30 bp, Artificial Sequence
  Synthetic oligonucleotide
ttaatcatccgaagccctgcttttagcatt

SEQ ID NO: 483098 - DNA, 30 bp, Artificial Sequence
  Synthetic oligonucleotide
ccagggcttcttcagctgcaggcacgcatt

SEQ ID NO: 483099 - DNA, 30 bp, Artificial Sequence
  Synthetic oligonucleotide
gttgcctcgcatagggccaggtcacgcatt

SEQ ID NO: 483100 - DNA, 30 bp, Artificial Sequence
  Synthetic oligonucleotide
tttgccatcattttgagtcctcgacgcatt

SEQ ID NO: 483101 - DNA, 30 bp, Artificial Sequence
  Synthetic oligonucleotide
ggtgacgggaggagtattctatagcgcatt

SEQ ID NO: 483102 - DNA, 30 bp, Artificial Sequence
  Synthetic oligonucleotide
actgtgcatgttgctaatgtaccgcgcatt

SEQ ID NO: 483103 - DNA, 30 bp, Artificial Sequence
  Synthetic oligonucleotide
tgtgttccattaggtggaagtatgcgcatt

SEQ ID NO: 483104 - DNA, 30 bp, Artificial Sequence
  Synthetic oligonucleotide
aaaaaataaacgccatttcgggatcgcatt

SEQ ID NO: 483105 - DNA, 30 bp, Artificial Sequence
  Synthetic oligonucleotide
gtcctggattgttgtggctgtgctcgcatt

SEQ ID NO: 483106 - DNA, 30 bp, Artificial Sequence
  Synthetic oligonucleotide
cgtttgcgcggattaatggcatgtcgcatt

SEQ ID NO: 483107 - DNA, 30 bp, Artificial Sequence
  Synthetic oligonucleotide
taactatcgacatatcgcagcacaggcatt

SEQ ID NO: 483108 - DNA, 30 bp, Artificial Sequence
  Synthetic oligonucleotide
ccatggagacgatcaatagcgacaggcatt

SEQ ID NO: 483109 - DNA, 30 bp, Artificial Sequence
  Synthetic oligonucleotide
gttaataacattctccgatggggaggcatt

SEQ ID NO: 483110 - DNA, 30 bp, Artificial Sequence
  Synthetic oligonucleotide
ggtagtttcagcaaattaccactaggcatt

SEQ ID NO: 483111 - DNA, 30 bp, Artificial Sequence
  Synthetic oligonucleotide
ttcagggctggttactgcagtctaggcatt

SEQ ID NO: 483112 - DNA, 30 bp, Artificial Sequence
  Synthetic oligonucleotide
atagttagtacgctgggctaaaacggcatt

SEQ ID NO: 483113 - DNA, 30 bp, Artificial Sequence
  Synthetic oligonucleotide
gggtgataccccgtccagcagatcggcatt

SEQ ID NO: 483114 - DNA, 30 bp, Artificial Sequence
  Synthetic oligonucleotide
cgggacgggcagggggggagcaagggcatt

SEQ ID NO: 483115 - DNA, 30 bp, Artificial Sequence
  Synthetic oligonucleotide
ttaagatactcccggctaagcaggggcatt

SEQ ID NO: 483116 - DNA, 30 bp, Artificial Sequence
  Synthetic oligonucleotide
tgcgcccgcctccggtttagcactggcatt

SEQ ID NO: 483117 - DNA, 30 bp, Artificial Sequence
  Synthetic oligonucleotide
gaacttaattgtgcagctgtagctggcatt

SEQ ID NO: 483118 - DNA, 30 bp, Artificial Sequence
  Synthetic oligonucleotide
cactaagcgacagtaggtttgcttggcatt

SEQ ID NO: 483119 - DNA, 30 bp, Artificial Sequence
  Synthetic oligonucleotide
atgatcattctcgtgaagccagttggcatt

SEQ ID NO: 483120 - DNA, 30 bp, Artificial Sequence
  Synthetic oligonucleotide
ctcacaaatgcagtatttatagaatgcatt

SEQ ID NO: 483121 - DNA, 30 bp, Artificial Sequence
  Synthetic oligonucleotide
gactgcgcccgtggaagaagctaatgcatt

SEQ ID NO: 483122 - DNA, 30 bp, Artificial Sequence
  Synthetic oligonucleotide
tttcgagatcgggtatgttcgatatgcatt

SEQ ID NO: 483123 - DNA, 30 bp, Artificial Sequence
  Synthetic oligonucleotide
cgtatctaggattaatttgtactatgcatt

SEQ ID NO: 483124 - DNA, 30 bp, Artificial Sequence
  Synthetic oligonucleotide
ctctcaattattgtcaagggttgctgcatt

SEQ ID NO: 483125 - DNA, 30 bp, Artificial Sequence
  Synthetic oligonucleotide
aaactactgcatccgtatggactctgcatt

SEQ ID NO: 483126 - DNA, 30 bp, Artificial Sequence
  Synthetic oligonucleotide
cccttcaatttcttctaccagccgtgcatt

SEQ ID NO: 483127 - DNA, 30 bp, Artificial Sequence
  Synthetic oligonucleotide
acgccctgcgtatattgactacggtgcatt

SEQ ID NO: 483128 - DNA, 30 bp, Artificial Sequence
  Synthetic oligonucleotide
acgctgtatccctttagagatgcttgcatt

SEQ ID NO: 483129 - DNA, 30 bp, Artificial Sequence
  Synthetic oligonucleotide
gcacttggaaagtttccattcggttgcatt

SEQ ID NO: 483130 - DNA, 30 bp, Artificial Sequence
  Synthetic oligonucleotide
gagagtgagattttttcgtgtggttgcatt

SEQ ID NO: 483131 - DNA, 30 bp, Artificial Sequence
  Synthetic oligonucleotide
tatatcgattaccattcaaaatgttgcatt

SEQ ID NO: 483132 - DNA, 30 bp, Artificial Sequence
  Synthetic oligonucleotide
ctgtgctgcatgtattcgtgtagaatcatt

SEQ ID NO: 483133 - DNA, 30 bp, Artificial Sequence
  Synthetic oligonucleotide
gctattatgtgcgcaatgtcgggaatcatt

SEQ ID NO: 483134 - DNA, 30 bp, Artificial Sequence
  Synthetic oligonucleotide
agaattatctatataatgagggagatcatt

SEQ ID NO: 483135 - DNA, 30 bp, Artificial Sequence
  Synthetic oligonucleotide
tatttcgtatcagtttctggaaatatcatt

SEQ ID NO: 483136 - DNA, 30 bp, Artificial Sequence
  Synthetic oligonucleotide
gatgacacatctaatggggactatatcatt

SEQ ID NO: 483137 - DNA, 30 bp, Artificial Sequence
  Synthetic oligonucleotide
aggttaaggggaattgcgaaacgtatcatt

SEQ ID NO: 483138 - DNA, 30 bp, Artificial Sequence
  Synthetic oligonucleotide
ggcatctcaaagcgccgcggcgaactcatt

SEQ ID NO: 483139 - DNA, 30 bp, Artificial Sequence
  Synthetic oligonucleotide
tgggcgtcgacactattaacacgactcatt

SEQ ID NO: 483140 - DNA, 30 bp, Artificial Sequence
  Synthetic oligonucleotide
cggttttccgatagttgtttatacctcatt

SEQ ID NO: 483141 - DNA, 30 bp, Artificial Sequence
  Synthetic oligonucleotide
ccaactggatccccctgtggtgggctcatt

SEQ ID NO: 483142 - DNA, 30 bp, Artificial Sequence
  Synthetic oligonucleotide
tcatattcagacggaagacttggtctcatt

SEQ ID NO: 483143 - DNA, 30 bp, Artificial Sequence
  Synthetic oligonucleotide
tatcctagcagaccttactccattctcatt

SEQ ID NO: 483144 - DNA, 30 bp, Artificial Sequence
  Synthetic oligonucleotide
aaacttgggggaggttgcctttttctcatt

SEQ ID NO: 483145 - DNA, 30 bp, Artificial Sequence
  Synthetic oligonucleotide
taataggaggcgtttgagattaaggtcatt

SEQ ID NO: 483146 - DNA, 30 bp, Artificial Sequence
  Synthetic oligonucleotide
atgcaacggtccagtgaactacgggtcatt

SEQ ID NO: 483147 - DNA, 30 bp, Artificial Sequence
  Synthetic oligonucleotide
cttaactagtgattgatacttggggtcatt

SEQ ID NO: 483148 - DNA, 30 bp, Artificial Sequence
  Synthetic oligonucleotide
ctactacgatgcctaatgctgctggtcatt

SEQ ID NO: 483149 - DNA, 30 bp, Artificial Sequence
  Synthetic oligonucleotide
acaatcacgaaaaagcataaggtggtcatt

SEQ ID NO: 483150 - DNA, 30 bp, Artificial Sequence
  Synthetic oligonucleotide
tactaatgtgatttcttacggcatgtcatt

SEQ ID NO: 483151 - DNA, 30 bp, Artificial Sequence
  Synthetic oligonucleotide
tcactaggagagggtttttatcctgtcatt

SEQ ID NO: 483152 - DNA, 30 bp, Artificial Sequence
  Synthetic oligonucleotide
ttcaaaaccggcgttttagtagttgtcatt

SEQ ID NO: 483153 - DNA, 30 bp, Artificial Sequence
  Synthetic oligonucleotide
tttatgagctgccttctgatacaattcatt

SEQ ID NO: 483154 - DNA, 30 bp, Artificial Sequence
  Synthetic oligonucleotide
tgaaaagatccttgctacatgccattcatt

SEQ ID NO: 483155 - DNA, 30 bp, Artificial Sequence
  Synthetic oligonucleotide
ggttagaccttggctcaaaagtacttcatt

SEQ ID NO: 483156 - DNA, 30 bp, Artificial Sequence
  Synthetic oligonucleotide
agccatggggactagggtgcgtacttcatt

SEQ ID NO: 483157 - DNA, 30 bp, Artificial Sequence
  Synthetic oligonucleotide
aaagacttcaaatttatacgaaagttcatt

SEQ ID NO: 483158 - DNA, 30 bp, Artificial Sequence
  Synthetic oligonucleotide
tttaagtgtaccgcgtgttcgacgttcatt

SEQ ID NO: 483159 - DNA, 30 bp, Artificial Sequence
  Synthetic oligonucleotide
attgaaaataaaacacgtcacaatttcatt

SEQ ID NO: 483160 - DNA, 30 bp, Artificial Sequence
  Synthetic oligonucleotide
agtagatagtgctagctaaatcatttcatt

SEQ ID NO: 483161 - DNA, 30 bp, Artificial Sequence
  Synthetic oligonucleotide
tataggaataggtccagggcatatttcatt

SEQ ID NO: 483162 - DNA, 30 bp, Artificial Sequence
  Synthetic oligonucleotide
ataacgagcgaattacgctacggtttcatt

SEQ ID NO: 483163 - DNA, 30 bp, Artificial Sequence
  Synthetic oligonucleotide
cgttgctgaaactttagtcgggttttcatt

SEQ ID NO: 483164 - DNA, 30 bp, Artificial Sequence
  Synthetic oligonucleotide
agccctcaagagacggtctatgttttcatt

SEQ ID NO: 483165 - DNA, 30 bp, Artificial Sequence
  Synthetic oligonucleotide
attatggagtgcttaccgctatttttcatt

SEQ ID NO: 483166 - DNA, 30 bp, Artificial Sequence
  Synthetic oligonucleotide
gatcgtcaaaccgtttctccacgaaagatt

SEQ ID NO: 483167 - DNA, 30 bp, Artificial Sequence
  Synthetic oligonucleotide
cccgcgaacctcgctgctagcgccaagatt

SEQ ID NO: 483168 - DNA, 30 bp, Artificial Sequence
  Synthetic oligonucleotide
gttggtacaattggcgcacaaagcaagatt

SEQ ID NO: 483169 - DNA, 30 bp, Artificial Sequence
  Synthetic oligonucleotide
taatgatctctgcggaatttgatgaagatt

SEQ ID NO: 483170 - DNA, 30 bp, Artificial Sequence
  Synthetic oligonucleotide
tctgtgggaaataatgaggactctaagatt

SEQ ID NO: 483171 - DNA, 30 bp, Artificial Sequence
  Synthetic oligonucleotide
aaaagcgctgggccgctttgatgtaagatt

SEQ ID NO: 483172 - DNA, 30 bp, Artificial Sequence
  Synthetic oligonucleotide
tcccgatctaggcttagaccgcgacagatt

SEQ ID NO: 483173 - DNA, 30 bp, Artificial Sequence
  Synthetic oligonucleotide
gagccgcggtatgagtctgctatacagatt

SEQ ID NO: 483174 - DNA, 30 bp, Artificial Sequence
  Synthetic oligonucleotide
ggaaggggcgcgtcggggactttacagatt

SEQ ID NO: 483175 - DNA, 30 bp, Artificial Sequence
  Synthetic oligonucleotide
atctctctaccatctattgcggtccagatt

SEQ ID NO: 483176 - DNA, 30 bp, Artificial Sequence
  Synthetic oligonucleotide
cctagtctttgaaacagcccgtagcagatt

SEQ ID NO: 483177 - DNA, 30 bp, Artificial Sequence
  Synthetic oligonucleotide
agaggtggaaaatgttcagctacgcagatt

SEQ ID NO: 483178 - DNA, 30 bp, Artificial Sequence
  Synthetic oligonucleotide
ctatgcagtgctcatagtcacttgcagatt

SEQ ID NO: 483179 - DNA, 30 bp, Artificial Sequence
  Synthetic oligonucleotide
ctgtgagtacagccacactggaatcagatt

SEQ ID NO: 483180 - DNA, 30 bp, Artificial Sequence
  Synthetic oligonucleotide
gagtgtggcggggacaattccgatcagatt

SEQ ID NO: 483181 - DNA, 30 bp, Artificial Sequence
  Synthetic oligonucleotide
atagaacactctcttcggtgattagagatt

SEQ ID NO: 483182 - DNA, 30 bp, Artificial Sequence
  Synthetic oligonucleotide
gggctcctagttcacgaaatataggagatt

SEQ ID NO: 483183 - DNA, 30 bp, Artificial Sequence
  Synthetic oligonucleotide
aagtgatggtcagtgttgcgcacatagatt

SEQ ID NO: 483184 - DNA, 30 bp, Artificial Sequence
  Synthetic oligonucleotide
tttcctacccgaggccaaggtatatagatt

SEQ ID NO: 483185 - DNA, 30 bp, Artificial Sequence
  Synthetic oligonucleotide
aaaatataaccacttaggggtgactagatt

SEQ ID NO: 483186 - DNA, 30 bp, Artificial Sequence
  Synthetic oligonucleotide
tactacttacggacattattgcgctagatt

SEQ ID NO: 483187 - DNA, 30 bp, Artificial Sequence
  Synthetic oligonucleotide
tggttgttatttcgttcatgcacgtagatt

SEQ ID NO: 483188 - DNA, 30 bp, Artificial Sequence
  Synthetic oligonucleotide
caagagatctctaggggttgagcgtagatt

SEQ ID NO: 483189 - DNA, 30 bp, Artificial Sequence
  Synthetic oligonucleotide
gtttgtaacgcctcattgcacatgtagatt

SEQ ID NO: 483190 - DNA, 30 bp, Artificial Sequence
  Synthetic oligonucleotide
aatccacacctctatacatacgcttagatt

SEQ ID NO: 483191 - DNA, 30 bp, Artificial Sequence
  Synthetic oligonucleotide
ccatgacaagggcgacgtttggtttagatt

SEQ ID NO: 483192 - DNA, 30 bp, Artificial Sequence
  Synthetic oligonucleotide
acccaaattgtatgattttgatggacgatt

SEQ ID NO: 483193 - DNA, 30 bp, Artificial Sequence
  Synthetic oligonucleotide
ataggaacgctcttcactatataaccgatt

SEQ ID NO: 483194 - DNA, 30 bp, Artificial Sequence
  Synthetic oligonucleotide
tattcaaaatgggaccgcttaatcccgatt

SEQ ID NO: 483195 - DNA, 30 bp, Artificial Sequence
  Synthetic oligonucleotide
gaatttatctggggaatgaatttagcgatt

SEQ ID NO: 483196 - DNA, 30 bp, Artificial Sequence
  Synthetic oligonucleotide
ttagaaaatactgtatatcaattggcgatt

SEQ ID NO: 483197 - DNA, 30 bp, Artificial Sequence
  Synthetic oligonucleotide
atagatatcgaattgtacgtgtactcgatt

SEQ ID NO: 483198 - DNA, 30 bp, Artificial Sequence
  Synthetic oligonucleotide
ctgcaagtcttccctcaatgaggctcgatt

SEQ ID NO: 483199 - DNA, 30 bp, Artificial Sequence
  Synthetic oligonucleotide
caatatccactcggcgcgggttgctcgatt

SEQ ID NO: 483200 - DNA, 30 bp, Artificial Sequence
  Synthetic oligonucleotide
tcttcgtctcttagtgtgaacccttcgatt

SEQ ID NO: 483201 - DNA, 30 bp, Artificial Sequence
  Synthetic oligonucleotide
agttaggaacattcatcctgcggttcgatt

SEQ ID NO: 483202 - DNA, 30 bp, Artificial Sequence
  Synthetic oligonucleotide
ccgcagtatagctcgagttgaaaaaggatt

SEQ ID NO: 483203 - DNA, 30 bp, Artificial Sequence
  Synthetic oligonucleotide
ctgatataggcggtttatgttgaaaggatt

SEQ ID NO: 483204 - DNA, 30 bp, Artificial Sequence
  Synthetic oligonucleotide
gtaaacgcacagctctcctttataaggatt

SEQ ID NO: 483205 - DNA, 30 bp, Artificial Sequence
  Synthetic oligonucleotide
tctctttagttactacgaagtcacaggatt

SEQ ID NO: 483206 - DNA, 30 bp, Artificial Sequence
  Synthetic oligonucleotide
tttggttaggagtataaggcagacaggatt

SEQ ID NO: 483207 - DNA, 30 bp, Artificial Sequence
  Synthetic oligonucleotide
gtaaaccatagttctgccagcaccaggatt

SEQ ID NO: 483208 - DNA, 30 bp, Artificial Sequence
  Synthetic oligonucleotide
cgtgattggtgtcctcaagtgcagaggatt

SEQ ID NO: 483209 - DNA, 30 bp, Artificial Sequence
  Synthetic oligonucleotide
tatattttggagatatagcatgcgaggatt

SEQ ID NO: 483210 - DNA, 30 bp, Artificial Sequence
  Synthetic oligonucleotide
tcaagggcgcgcaatccattccataggatt

SEQ ID NO: 483211 - DNA, 30 bp, Artificial Sequence
  Synthetic oligonucleotide
gtattacgcgtatctcccggtggtaggatt

SEQ ID NO: 483212 - DNA, 30 bp, Artificial Sequence
  Synthetic oligonucleotide
cctttatgacggcagacaagaattaggatt

SEQ ID NO: 483213 - DNA, 30 bp, Artificial Sequence
  Synthetic oligonucleotide
ggagcattccggggcctatatcaccggatt

SEQ ID NO: 483214 - DNA, 30 bp, Artificial Sequence
  Synthetic oligonucleotide
gtattgattccaaatagtacattccggatt

SEQ ID NO: 483215 - DNA, 30 bp, Artificial Sequence
  Synthetic oligonucleotide
aatactcttacttagcaccggcagcggatt

SEQ ID NO: 483216 - DNA, 30 bp, Artificial Sequence
  Synthetic oligonucleotide
gggcttgtttgggataaacgcagtcggatt

SEQ ID NO: 483217 - DNA, 30 bp, Artificial Sequence
  Synthetic oligonucleotide
gttggcgacttgcagcgtgttggtcggatt

SEQ ID NO: 483218 - DNA, 30 bp, Artificial Sequence
  Synthetic oligonucleotide
caattccggatttgttccaaacaagggatt

SEQ ID NO: 483219 - DNA, 30 bp, Artificial Sequence
  Synthetic oligonucleotide
gtagtaacgcgccgggaacaatcagggatt

SEQ ID NO: 483220 - DNA, 30 bp, Artificial Sequence
  Synthetic oligonucleotide
gcgactagctggacgccagtgagagggatt

SEQ ID NO: 483221 - DNA, 30 bp, Artificial Sequence
  Synthetic oligonucleotide
agcatttttattagatatgctggagggatt

SEQ ID NO: 483222 - DNA, 30 bp, Artificial Sequence
  Synthetic oligonucleotide
gtcaacgcgtgcggtatccccgaggggatt

SEQ ID NO: 483223 - DNA, 30 bp, Artificial Sequence
  Synthetic oligonucleotide
caggttctttatggtggtccgtaggggatt

SEQ ID NO: 483224 - DNA, 30 bp, Artificial Sequence
  Synthetic oligonucleotide
caccgacccagggtttatatctgggggatt

SEQ ID NO: 483225 - DNA, 30 bp, Artificial Sequence
  Synthetic oligonucleotide
gcgttcacctttcaagaattgaatgggatt

SEQ ID NO: 483226 - DNA, 30 bp, Artificial Sequence
  Synthetic oligonucleotide
attctggcgtcatctgggctcgatgggatt

SEQ ID NO: 483227 - DNA, 30 bp, Artificial Sequence
  Synthetic oligonucleotide
taacaaaaccgctttgatatttatgggatt

SEQ ID NO: 483228 - DNA, 30 bp, Artificial Sequence
  Synthetic oligonucleotide
atctcgcttaaatacagccggcgtgggatt

SEQ ID NO: 483229 - DNA, 31 bp, Artificial Sequence
  Synthetic oligonucleotide
cacatcgtgatccatttacctttgtgggatt

SEQ ID NO: 483230 - DNA, 30 bp, Artificial Sequence
  Synthetic oligonucleotide
aaatcatgatatacagaagttcttgggatt

SEQ ID NO: 483231 - DNA, 30 bp, Artificial Sequence
  Synthetic oligonucleotide
atttctgtccgcgaggtagtacaatggatt

SEQ ID NO: 483232 - DNA, 30 bp, Artificial Sequence
  Synthetic oligonucleotide
tattgaagagtgcaagttggccaatggatt

SEQ ID NO: 483233 - DNA, 30 bp, Artificial Sequence
  Synthetic oligonucleotide
gatcgtaatgcatagcttatgcaatggatt

SEQ ID NO: 483234 - DNA, 30 bp, Artificial Sequence
  Synthetic oligonucleotide
agaattaatacagccgtggtggtatggatt

SEQ ID NO: 483235 - DNA, 30 bp, Artificial Sequence
  Synthetic oligonucleotide
ctgttataaaaggttttagtattatggatt

SEQ ID NO: 483236 - DNA, 30 bp, Artificial Sequence
  Synthetic oligonucleotide
ccagactttttcggagtttcggactggatt

SEQ ID NO: 483237 - DNA, 30 bp, Artificial Sequence
  Synthetic oligonucleotide
gagaaagaatgtgtattcatctactggatt

SEQ ID NO: 483238 - DNA, 30 bp, Artificial Sequence
  Synthetic oligonucleotide
taaccctttcttacggacacggcctggatt

SEQ ID NO: 483239 - DNA, 30 bp, Artificial Sequence
  Synthetic oligonucleotide
tactagtggcataggcccaggggctggatt

SEQ ID NO: 483240 - DNA, 30 bp, Artificial Sequence
  Synthetic oligonucleotide
tagtggactccggggggcagggagtggatt

SEQ ID NO: 483241 - DNA, 29 bp, Artificial Sequence
  Synthetic oligonucleotide
cctccaaatagagtttgtaaatgtggatt

SEQ ID NO: 483242 - DNA, 30 bp, Artificial Sequence
  Synthetic oligonucleotide
aagttaatttccgagtcacgtacttggatt

SEQ ID NO: 483243 - DNA, 30 bp, Artificial Sequence
  Synthetic oligonucleotide
agtacagatataatgtcgatatgttggatt

SEQ ID NO: 483244 - DNA, 30 bp, Artificial Sequence
  Synthetic oligonucleotide
ccgtgttcccgccttcatgtgggaatgatt

SEQ ID NO: 483245 - DNA, 30 bp, Artificial Sequence
  Synthetic oligonucleotide
ggatccaccacctgtaatcaggcgatgatt

SEQ ID NO: 483246 - DNA, 30 bp, Artificial Sequence
  Synthetic oligonucleotide
gaatcctttattaaggttctcgggatgatt

SEQ ID NO: 483247 - DNA, 30 bp, Artificial Sequence
  Synthetic oligonucleotide
agttgggttcgctcgtgttagctgatgatt

SEQ ID NO: 483248 - DNA, 30 bp, Artificial Sequence
  Synthetic oligonucleotide
gacatagcttgcagttggttagatatgatt

SEQ ID NO: 483249 - DNA, 30 bp, Artificial Sequence
  Synthetic oligonucleotide
ctatgttattatataaatatcgctatgatt

SEQ ID NO: 483250 - DNA, 30 bp, Artificial Sequence
  Synthetic oligonucleotide
aaagccgccaagcgttcgactcgtatgatt

SEQ ID NO: 483251 - DNA, 30 bp, Artificial Sequence
  Synthetic oligonucleotide
cttgagtggactttggaaactcggctgatt

SEQ ID NO: 483252 - DNA, 30 bp, Artificial Sequence
  Synthetic oligonucleotide
tctggttatattcgataagattctctgatt

SEQ ID NO: 483253 - DNA, 30 bp, Artificial Sequence
  Synthetic oligonucleotide
ttaccctggtacaaacgcaaatgtctgatt

SEQ ID NO: 483254 - DNA, 30 bp, Artificial Sequence
  Synthetic oligonucleotide
agaacaatgatcaggggtcacgcagtgatt

SEQ ID NO: 483255 - DNA, 30 bp, Artificial Sequence
  Synthetic oligonucleotide
gtgggcgagagtgacgagtgctccgtgatt

SEQ ID NO: 483256 - DNA, 30 bp, Artificial Sequence
  Synthetic oligonucleotide
gcgtctgggtacgctgaaaatcgcgtgatt

SEQ ID NO: 483257 - DNA, 30 bp, Artificial Sequence
  Synthetic oligonucleotide
tagtcttgattcgcgttcaaaatcgtgatt

SEQ ID NO: 483258 - DNA, 30 bp, Artificial Sequence
  Synthetic oligonucleotide
aaacccagaccccacgcacagatcgtgatt

SEQ ID NO: 483259 - DNA, 30 bp, Artificial Sequence
  Synthetic oligonucleotide
ctcgcatttccgtccggaggtagggtgatt

SEQ ID NO: 483260 - DNA, 30 bp, Artificial Sequence
  Synthetic oligonucleotide
actatctgcgtttgtttgttattggtgatt

SEQ ID NO: 483261 - DNA, 30 bp, Artificial Sequence
  Synthetic oligonucleotide
gaggtaccagtattttctaaggatgtgatt

SEQ ID NO: 483262 - DNA, 30 bp, Artificial Sequence
  Synthetic oligonucleotide
ccgggttatatccgtgtgggggttgtgatt

SEQ ID NO: 483263 - DNA, 30 bp, Artificial Sequence
  Synthetic oligonucleotide
ccgcgcatgacaaattgggtacgattgatt

SEQ ID NO: 483264 - DNA, 30 bp, Artificial Sequence
  Synthetic oligonucleotide
cgcaaaggcgctgccttggctaccttgatt

SEQ ID NO: 483265 - DNA, 27 bp, Artificial Sequence
  Synthetic oligonucleotide
tagaatcaaaaacaaggtggcttgatt

SEQ ID NO: 483266 - DNA, 30 bp, Artificial Sequence
  Synthetic oligonucleotide
tacattacccctcctaaggtttgcttgatt

SEQ ID NO: 483267 - DNA, 30 bp, Artificial Sequence
  Synthetic oligonucleotide
gtgcgggaaacctgctcacttctgttgatt

SEQ ID NO: 483268 - DNA, 30 bp, Artificial Sequence
  Synthetic oligonucleotide
tggcatttagcagtcagtattaatttgatt

SEQ ID NO: 483269 - DNA, 30 bp, Artificial Sequence
  Synthetic oligonucleotide
agtctctaagagactcccggacgtttgatt

SEQ ID NO: 483270 - DNA, 30 bp, Artificial Sequence
  Synthetic oligonucleotide
atgggggtgtcactacaagtaaaaaatatt

SEQ ID NO: 483271 - DNA, 30 bp, Artificial Sequence
  Synthetic oligonucleotide
cagccgggatcatgaccgggacaaaatatt

SEQ ID NO: 483272 - DNA, 30 bp, Artificial Sequence
  Synthetic oligonucleotide
ggtcaaacacacgcggtatatagaaatatt

SEQ ID NO: 483273 - DNA, 30 bp, Artificial Sequence
  Synthetic oligonucleotide
ctgggtaagcgatgccaagattgaaatatt

SEQ ID NO: 483274 - DNA, 30 bp, Artificial Sequence
  Synthetic oligonucleotide
gttcctccaccgggaggctaactaaatatt

SEQ ID NO: 483275 - DNA, 30 bp, Artificial Sequence
  Synthetic oligonucleotide
gcgatcttagggagacatatgaacaatatt

SEQ ID NO: 483276 - DNA, 30 bp, Artificial Sequence
  Synthetic oligonucleotide
aaagcaatcctctctctatccttcaatatt

SEQ ID NO: 483277 - DNA, 30 bp, Artificial Sequence
  Synthetic oligonucleotide
gtttcccaggcctttgcgagcaggaatatt

SEQ ID NO: 483278 - DNA, 30 bp, Artificial Sequence
  Synthetic oligonucleotide
actatggtcgtactccaagtgactaatatt

SEQ ID NO: 483279 - DNA, 30 bp, Artificial Sequence
  Synthetic oligonucleotide
gagacacgcttgagcccttaagctaatatt

SEQ ID NO: 483280 - DNA, 30 bp, Artificial Sequence
  Synthetic oligonucleotide
atagaatttcaggagtttatgtctaatatt

SEQ ID NO: 483281 - DNA, 30 bp, Artificial Sequence
  Synthetic oligonucleotide
cttctaagggttaccaatgggtaacatatt

SEQ ID NO: 483282 - DNA, 30 bp, Artificial Sequence
  Synthetic oligonucleotide
cttattccacgtaacgtatgttaacatatt

SEQ ID NO: 483283 - DNA, 30 bp, Artificial Sequence
  Synthetic oligonucleotide
ttaaagagacacaagctcattcgacatatt

SEQ ID NO: 483284 - DNA, 30 bp, Artificial Sequence
  Synthetic oligonucleotide
tatagtactttgctcttagtgtgacatatt

SEQ ID NO: 483285 - DNA, 30 bp, Artificial Sequence
  Synthetic oligonucleotide
agcactactgtcgacagaacggagcatatt

SEQ ID NO: 483286 - DNA, 30 bp, Artificial Sequence
  Synthetic oligonucleotide
tcctccaccgggcgatcattcacgcatatt

SEQ ID NO: 483287 - DNA, 30 bp, Artificial Sequence
  Synthetic oligonucleotide
cgcggtcacctggaacgccaacggcatatt

SEQ ID NO: 483288 - DNA, 30 bp, Artificial Sequence
  Synthetic oligonucleotide
gagtagaattcgtattatcatttgcatatt

SEQ ID NO: 483289 - DNA, 30 bp, Artificial Sequence
  Synthetic oligonucleotide
ctatgtgatcaatcgcgttagactcatatt

SEQ ID NO: 483290 - DNA, 27 bp, Artificial Sequence
  Synthetic oligonucleotide
gttcatgcccttgcgtttgctcatatt

SEQ ID NO: 483291 - DNA, 30 bp, Artificial Sequence
  Synthetic oligonucleotide
ggtttccacgtgctcagtcccggtcatatt

SEQ ID NO: 483292 - DNA, 30 bp, Artificial Sequence
  Synthetic oligonucleotide
gatgaattaggcagatgcatcaaagatatt

SEQ ID NO: 483293 - DNA, 30 bp, Artificial Sequence
  Synthetic oligonucleotide
gaaaggtaaggactattatataaagatatt

SEQ ID NO: 483294 - DNA, 30 bp, Artificial Sequence
  Synthetic oligonucleotide
ctccgtgcaaattatggatccaacgatatt

SEQ ID NO: 483295 - DNA, 30 bp, Artificial Sequence
  Synthetic oligonucleotide
agcatcttggaattttggatcaccgatatt

SEQ ID NO: 483296 - DNA, 30 bp, Artificial Sequence
  Synthetic oligonucleotide
tatcccgtggacgcactgaccctcgatatt

SEQ ID NO: 483297 - DNA, 30 bp, Artificial Sequence
  Synthetic oligonucleotide
ccaacaacgtccctcctgctgcaggatatt

SEQ ID NO: 483298 - DNA, 30 bp, Artificial Sequence
  Synthetic oligonucleotide
ctttatgttcgtacttagggagtggatatt

SEQ ID NO: 483299 - DNA, 30 bp, Artificial Sequence
  Synthetic oligonucleotide
cccgcgcttcttgggtggaaaaatgatatt

SEQ ID NO: 483300 - DNA, 30 bp, Artificial Sequence
  Synthetic oligonucleotide
tgcgcctggcatgtagtaatatctgatatt

SEQ ID NO: 483301 - DNA, 30 bp, Artificial Sequence
  Synthetic oligonucleotide
gcgttttccccacgtgtatgtagtgatatt

SEQ ID NO: 483302 - DNA, 30 bp, Artificial Sequence
  Synthetic oligonucleotide
gaatgtagttatgtaggctgtctatatatt

SEQ ID NO: 483303 - DNA, 29 bp, Artificial Sequence
  Synthetic oligonucleotide
tctggtgaggcttctagaaaccctatatt

SEQ ID NO: 483304 - DNA, 30 bp, Artificial Sequence
  Synthetic oligonucleotide
ctcagcacagcgttgactcatccctatatt

SEQ ID NO: 483305 - DNA, 30 bp, Artificial Sequence
  Synthetic oligonucleotide
aatttagtaatctcctagaatgcctatatt

SEQ ID NO: 483306 - DNA, 30 bp, Artificial Sequence
  Synthetic oligonucleotide
ctttgccaccttcaccatcgtggctatatt

SEQ ID NO: 483307 - DNA, 30 bp, Artificial Sequence
  Synthetic oligonucleotide
tatcattgtgctgtcgcaaagaggtatatt

SEQ ID NO: 483308 - DNA, 30 bp, Artificial Sequence
  Synthetic oligonucleotide
tccaaatctgtcaatgagtgtctgtatatt

SEQ ID NO: 483309 - DNA, 30 bp, Artificial Sequence
  Synthetic oligonucleotide
cctgcctttcgcaagcgtgagttgtatatt

SEQ ID NO: 483310 - DNA, 30 bp, Artificial Sequence
  Synthetic oligonucleotide
agtgttttctcattggtattcgattatatt

SEQ ID NO: 483311 - DNA, 30 bp, Artificial Sequence
  Synthetic oligonucleotide
gagtaatgcaaacctgtcatacacactatt

SEQ ID NO: 483312 - DNA, 30 bp, Artificial Sequence
  Synthetic oligonucleotide
gtacgagttcgtaagggttagatcactatt

SEQ ID NO: 483313 - DNA, 30 bp, Artificial Sequence
  Synthetic oligonucleotide
aagcaaaagttgagatgtctgctcactatt

SEQ ID NO: 483314 - DNA, 30 bp, Artificial Sequence
  Synthetic oligonucleotide
gtaagttctaccctaggggctaagactatt

SEQ ID NO: 483315 - DNA, 30 bp, Artificial Sequence
  Synthetic oligonucleotide
gatcagcatgatccgctgaactcgactatt

SEQ ID NO: 483316 - DNA, 30 bp, Artificial Sequence
  Synthetic oligonucleotide
gttgttgaaccaggttttctcctgactatt

SEQ ID NO: 483317 - DNA, 30 bp, Artificial Sequence
  Synthetic oligonucleotide
tataggttattaggatatgggactactatt

SEQ ID NO: 483318 - DNA, 30 bp, Artificial Sequence
  Synthetic oligonucleotide
cagccctcctctgttcgcctgactactatt

SEQ ID NO: 483319 - DNA, 30 bp, Artificial Sequence
  Synthetic oligonucleotide
cgcaaacggtagatgggttaccaccctatt

SEQ ID NO: 483320 - DNA, 30 bp, Artificial Sequence
  Synthetic oligonucleotide
cacttgtagctcaattagtgcagccctatt

SEQ ID NO: 483321 - DNA, 30 bp, Artificial Sequence
  Synthetic oligonucleotide
gtgtccgctctgaaatcgacggcgcctatt

SEQ ID NO: 483322 - DNA, 30 bp, Artificial Sequence
  Synthetic oligonucleotide
tcttactatctcctaacatagcgtcctatt

SEQ ID NO: 483323 - DNA, 30 bp, Artificial Sequence
  Synthetic oligonucleotide
gagtacatcgaagcctgcctcagagctatt

SEQ ID NO: 483324 - DNA, 30 bp, Artificial Sequence
  Synthetic oligonucleotide
tcggctcccacctggatgcgaaccgctatt

SEQ ID NO: 483325 - DNA, 30 bp, Artificial Sequence
  Synthetic oligonucleotide
caggagcaaaaacgcggaatcggcgctatt

SEQ ID NO: 483326 - DNA, 30 bp, Artificial Sequence
  Synthetic oligonucleotide
tgaagagttatccgtttagtcgctgctatt

SEQ ID NO: 483327 - DNA, 30 bp, Artificial Sequence
  Synthetic oligonucleotide
tctgtccacggcatcgaaatatgtgctatt

SEQ ID NO: 483328 - DNA, 30 bp, Artificial Sequence
  Synthetic oligonucleotide
taatgcgagtggaaaggattaagatctatt

SEQ ID NO: 483329 - DNA, 30 bp, Artificial Sequence
  Synthetic oligonucleotide
gtttaattaagaggagattgaggatctatt

SEQ ID NO: 483330 - DNA, 30 bp, Artificial Sequence
  Synthetic oligonucleotide
gagggccgcaattctgtgcacctatctatt

SEQ ID NO: 483331 - DNA, 30 bp, Artificial Sequence
  Synthetic oligonucleotide
ttataagggaacgtagttgtttactctatt

SEQ ID NO: 483332 - DNA, 30 bp, Artificial Sequence
  Synthetic oligonucleotide
gtacccccggaagggttgaatccctctatt

SEQ ID NO: 483333 - DNA, 30 bp, Artificial Sequence
  Synthetic oligonucleotide
gaccaggattagttttgttaaagctctatt

SEQ ID NO: 483334 - DNA, 30 bp, Artificial Sequence
  Synthetic oligonucleotide
tacgttcggatatcacgcgtacgctctatt

SEQ ID NO: 483335 - DNA, 30 bp, Artificial Sequence
  Synthetic oligonucleotide
tgggagacaagaattttcgggcgctctatt

SEQ ID NO: 483336 - DNA, 30 bp, Artificial Sequence
  Synthetic oligonucleotide
gagcctcgtagcaaatagaatttctctatt

SEQ ID NO: 483337 - DNA, 30 bp, Artificial Sequence
  Synthetic oligonucleotide
gttcgcaaatggatcccagggcgttctatt

SEQ ID NO: 483338 - DNA, 30 bp, Artificial Sequence
  Synthetic oligonucleotide
cacatatctatcgatcagcccttttctatt

SEQ ID NO: 483339 - DNA, 30 bp, Artificial Sequence
  Synthetic oligonucleotide
ggaatcagtcgaaaagttagaataagtatt

SEQ ID NO: 483340 - DNA, 30 bp, Artificial Sequence
  Synthetic oligonucleotide
tatgcgctttatctcgaggcactaagtatt

SEQ ID NO: 483341 - DNA, 30 bp, Artificial Sequence
  Synthetic oligonucleotide
ccgcctgcacgctgcttcttactaagtatt

SEQ ID NO: 483342 - DNA, 30 bp, Artificial Sequence
  Synthetic oligonucleotide
aaggccaggctttatctaggcatcagtatt

SEQ ID NO: 483343 - DNA, 30 bp, Artificial Sequence
  Synthetic oligonucleotide
tactaagggaccaggttccaggtcagtatt

SEQ ID NO: 483344 - DNA, 30 bp, Artificial Sequence
  Synthetic oligonucleotide
ccagaggaattgtttacgttcttgagtatt

SEQ ID NO: 483345 - DNA, 30 bp, Artificial Sequence
  Synthetic oligonucleotide
gtcgcggttattccacgctaacgtagtatt

SEQ ID NO: 483346 - DNA, 30 bp, Artificial Sequence
  Synthetic oligonucleotide
ggacgtctgaacgcaatatacgcacgtatt

SEQ ID NO: 483347 - DNA, 30 bp, Artificial Sequence
  Synthetic oligonucleotide
ggaagttgtcatttggtcactggacgtatt

SEQ ID NO: 483348 - DNA, 30 bp, Artificial Sequence
  Synthetic oligonucleotide
aatgctgtggacgaattcacgggccgtatt

SEQ ID NO: 483349 - DNA, 30 bp, Artificial Sequence
  Synthetic oligonucleotide
actcagtcaatattccggggctgccgtatt

SEQ ID NO: 483350 - DNA, 30 bp, Artificial Sequence
  Synthetic oligonucleotide
gtgttaggcaaatttggtagtttccgtatt

SEQ ID NO: 483351 - DNA, 30 bp, Artificial Sequence
  Synthetic oligonucleotide
ttataaaccaacttgcgagggcagcgtatt

SEQ ID NO: 483352 - DNA, 30 bp, Artificial Sequence
  Synthetic oligonucleotide
cgcaatcggggatccttaaagccgcgtatt

SEQ ID NO: 483353 - DNA, 30 bp, Artificial Sequence
  Synthetic oligonucleotide
ggacagtctgcgaaaaaacggggtcgtatt

SEQ ID NO: 483354 - DNA, 30 bp, Artificial Sequence
  Synthetic oligonucleotide
cccaaaataagctacattgattcaggtatt

SEQ ID NO: 483355 - DNA, 30 bp, Artificial Sequence
  Synthetic oligonucleotide
agggtggcaacagacaagagtagaggtatt

SEQ ID NO: 483356 - DNA, 30 bp, Artificial Sequence
  Synthetic oligonucleotide
atcaccagtattcgagcgcgtaccggtatt

SEQ ID NO: 483357 - DNA, 30 bp, Artificial Sequence
  Synthetic oligonucleotide
ggctcaagtgcggaatagcctggcggtatt

SEQ ID NO: 483358 - DNA, 30 bp, Artificial Sequence
  Synthetic oligonucleotide
aacttgatcctaaatcagggaaggggtatt

SEQ ID NO: 483359 - DNA, 30 bp, Artificial Sequence
  Synthetic oligonucleotide
gagtcaatgcaccggctcaagcggggtatt

SEQ ID NO: 483360 - DNA, 30 bp, Artificial Sequence
  Synthetic oligonucleotide
ctgtgacggagttcaggcaggcatggtatt

SEQ ID NO: 483361 - DNA, 30 bp, Artificial Sequence
  Synthetic oligonucleotide
ctcggctcatgtcggctgagagctggtatt

SEQ ID NO: 483362 - DNA, 30 bp, Artificial Sequence
  Synthetic oligonucleotide
cccgttgttagatcgatgggtggatgtatt

SEQ ID NO: 483363 - DNA, 30 bp, Artificial Sequence
  Synthetic oligonucleotide
tattctagaccacgagctcaaaagtgtatt

SEQ ID NO: 483364 - DNA, 30 bp, Artificial Sequence
  Synthetic oligonucleotide
cgcctatcttcaaatcaatcacggtgtatt

SEQ ID NO: 483365 - DNA, 30 bp, Artificial Sequence
  Synthetic oligonucleotide
ctacggtcgatagagtagtgtttgtgtatt

SEQ ID NO: 483366 - DNA, 30 bp, Artificial Sequence
  Synthetic oligonucleotide
actaatgcggccccgcgttatcgttgtatt

SEQ ID NO: 483367 - DNA, 30 bp, Artificial Sequence
  Synthetic oligonucleotide
caaaggtataacctcgcttggaaaattatt

SEQ ID NO: 483368 - DNA, 30 bp, Artificial Sequence
  Synthetic oligonucleotide
cctggaaggccctagagcttgacaattatt

SEQ ID NO: 483369 - DNA, 30 bp, Artificial Sequence
  Synthetic oligonucleotide
attcggtactgtcgataacctgcaattatt

SEQ ID NO: 483370 - DNA, 30 bp, Artificial Sequence
  Synthetic oligonucleotide
atgcgttcggtatttttggggtgaattatt

SEQ ID NO: 483371 - DNA, 30 bp, Artificial Sequence
  Synthetic oligonucleotide
tcagcctattcaggcaagtggaagattatt

SEQ ID NO: 483372 - DNA, 30 bp, Artificial Sequence
  Synthetic oligonucleotide
gagagagagaagcatcacccatagattatt

SEQ ID NO: 483373 - DNA, 30 bp, Artificial Sequence
  Synthetic oligonucleotide
taaagcaaaaagatggtttcgatacttatt

SEQ ID NO: 483374 - DNA, 30 bp, Artificial Sequence
  Synthetic oligonucleotide
gcaccagatgtaagagggtattgccttatt

SEQ ID NO: 483375 - DNA, 30 bp, Artificial Sequence
  Synthetic oligonucleotide
ttacttcacttttaggagtgttcgcttatt

SEQ ID NO: 483376 - DNA, 30 bp, Artificial Sequence
  Synthetic oligonucleotide
cttccacatccataccagccatatcttatt

SEQ ID NO: 483377 - DNA, 30 bp, Artificial Sequence
  Synthetic oligonucleotide
actcgtatcgcaacattaagcattcttatt

SEQ ID NO: 483378 - DNA, 30 bp, Artificial Sequence
  Synthetic oligonucleotide
cagaggcatgctgacctcgccgcagttatt

SEQ ID NO: 483379 - DNA, 30 bp, Artificial Sequence
  Synthetic oligonucleotide
gatacccgtacattgggtctggcagttatt

SEQ ID NO: 483380 - DNA, 30 bp, Artificial Sequence
  Synthetic oligonucleotide
caacgcctgtactgccggaggcgagttatt

SEQ ID NO: 483381 - DNA, 30 bp, Artificial Sequence
  Synthetic oligonucleotide
gtcaccttccgttgcgctaaaggagttatt

SEQ ID NO: 483382 - DNA, 30 bp, Artificial Sequence
  Synthetic oligonucleotide
gaatgtagcagagtgaagcgaatcgttatt

SEQ ID NO: 483383 - DNA, 30 bp, Artificial Sequence
  Synthetic oligonucleotide
aatgagttttaggagattcacgaggttatt

SEQ ID NO: 483384 - DNA, 30 bp, Artificial Sequence
  Synthetic oligonucleotide
ttgcaatactcagcgaaagtcgaggttatt

SEQ ID NO: 483385 - DNA, 30 bp, Artificial Sequence
  Synthetic oligonucleotide
accagattttcaggttaacggtcggttatt

SEQ ID NO: 483386 - DNA, 30 bp, Artificial Sequence
  Synthetic oligonucleotide
caccacagggcggaatcagtacgggttatt

SEQ ID NO: 483387 - DNA, 30 bp, Artificial Sequence
  Synthetic oligonucleotide
aattatatccactctttccatcctgttatt

SEQ ID NO: 483388 - DNA, 30 bp, Artificial Sequence
  Synthetic oligonucleotide
ttaagagcgatgtaaatacccagtgttatt

SEQ ID NO: 483389 - DNA, 30 bp, Artificial Sequence
  Synthetic oligonucleotide
gacggcagagcaaattaggaaggtgttatt

SEQ ID NO: 483390 - DNA, 30 bp, Artificial Sequence
  Synthetic oligonucleotide
attctaacggaattctcgaagtttgttatt

SEQ ID NO: 483391 - DNA, 30 bp, Artificial Sequence
  Synthetic oligonucleotide
agccgtttgtaccgagaatactaatttatt

SEQ ID NO: 483392 - DNA, 30 bp, Artificial Sequence
  Synthetic oligonucleotide
gaagatttaaagtgggtgcaaagatttatt

SEQ ID NO: 483393 - DNA, 30 bp, Artificial Sequence
  Synthetic oligonucleotide
tgcttgtaaagcccgctggtaaggtttatt

SEQ ID NO: 483394 - DNA, 30 bp, Artificial Sequence
  Synthetic oligonucleotide
ggggctcactctcttaataaatggtttatt

SEQ ID NO: 483395 - DNA, 30 bp, Artificial Sequence
  Synthetic oligonucleotide
taccattgacagtatggccttatgtttatt

SEQ ID NO: 483396 - DNA, 30 bp, Artificial Sequence
  Synthetic oligonucleotide
ccaagtaaaagggccgatatgggttttatt

SEQ ID NO: 483397 - DNA, 30 bp, Artificial Sequence
  Synthetic oligonucleotide
acctaggacgtgcaggtacttggaaaactt

SEQ ID NO: 483398 - DNA, 30 bp, Artificial Sequence
  Synthetic oligonucleotide
attatgggtccgatttgagggctgaaactt

SEQ ID NO: 483399 - DNA, 30 bp, Artificial Sequence
  Synthetic oligonucleotide
gtcagtttctactatgtggacactaaactt

SEQ ID NO: 483400 - DNA, 30 bp, Artificial Sequence
  Synthetic oligonucleotide
gacagtaggccgtgaaaggttattaaactt

SEQ ID NO: 483401 - DNA, 30 bp, Artificial Sequence
  Synthetic oligonucleotide
tgacagtaggtgaatagatgcacacaactt

SEQ ID NO: 483402 - DNA, 30 bp, Artificial Sequence
  Synthetic oligonucleotide
ttaagattaacgaatcagtgcatacaactt

SEQ ID NO: 483403 - DNA, 30 bp, Artificial Sequence
  Synthetic oligonucleotide
tcggccatcaacaatatcaagaagcaactt

SEQ ID NO: 483404 - DNA, 30 bp, Artificial Sequence
  Synthetic oligonucleotide
atcaaatatttgcacgatggtgggcaactt

SEQ ID NO: 483405 - DNA, 30 bp, Artificial Sequence
  Synthetic oligonucleotide
ctcgacgcacctaggaagtatgcagaactt

SEQ ID NO: 483406 - DNA, 30 bp, Artificial Sequence
  Synthetic oligonucleotide
ctgttatagtatggtcaattgaccgaactt

SEQ ID NO: 483407 - DNA, 30 bp, Artificial Sequence
  Synthetic oligonucleotide
caaaaactaccggtaccggagcaggaactt

SEQ ID NO: 483408 - DNA, 30 bp, Artificial Sequence
  Synthetic oligonucleotide
cgcgcctcgcacgccgtacctcaggaactt

SEQ ID NO: 483409 - DNA, 30 bp, Artificial Sequence
  Synthetic oligonucleotide
gagtcatacttatactgcaagccggaactt

SEQ ID NO: 483410 - DNA, 30 bp, Artificial Sequence
  Synthetic oligonucleotide
attgggcttggatggtttttgcagtaactt

SEQ ID NO: 483411 - DNA, 30 bp, Artificial Sequence
  Synthetic oligonucleotide
taaccatgatgggaacatacttcttaactt

SEQ ID NO: 483412 - DNA, 30 bp, Artificial Sequence
  Synthetic oligonucleotide
caattaacctcgaaatcgatgagaacactt

SEQ ID NO: 483413 - DNA, 30 bp, Artificial Sequence
  Synthetic oligonucleotide
ttccatgctagagtcttccagataacactt

SEQ ID NO: 483414 - DNA, 30 bp, Artificial Sequence
  Synthetic oligonucleotide
ttcagcatgaagcagaagcctttaacactt

SEQ ID NO: 483415 - DNA, 30 bp, Artificial Sequence
  Synthetic oligonucleotide
cgcgagcattggctctattactacacactt

SEQ ID NO: 483416 - DNA, 30 bp, Artificial Sequence
  Synthetic oligonucleotide
taactgccgcaatgatctgcagagacactt

SEQ ID NO: 483417 - DNA, 30 bp, Artificial Sequence
  Synthetic oligonucleotide
gagtgaaccaaacttctgtactagacactt

SEQ ID NO: 483418 - DNA, 30 bp, Artificial Sequence
  Synthetic oligonucleotide
aagatgcgttattagatctgatcgacactt

SEQ ID NO: 483419 - DNA, 30 bp, Artificial Sequence
  Synthetic oligonucleotide
gggatgaacggtccgtttacctggacactt

SEQ ID NO: 483420 - DNA, 30 bp, Artificial Sequence
  Synthetic oligonucleotide
ggcccaggagaattgtctgaatatacactt

SEQ ID NO: 483421 - DNA, 30 bp, Artificial Sequence
  Synthetic oligonucleotide
agcccgaccaaggcgtagttagttacactt

SEQ ID NO: 483422 - DNA, 30 bp, Artificial Sequence
  Synthetic oligonucleotide
tggagcctgcggagataagccgaaccactt

SEQ ID NO: 483423 - DNA, 30 bp, Artificial Sequence
  Synthetic oligonucleotide
tgcctagaatccatgaaacttcacccactt

SEQ ID NO: 483424 - DNA, 25 bp, Artificial Sequence
  Synthetic oligonucleotide
ccgtggattgcattgatacccactt

SEQ ID NO: 483425 - DNA, 30 bp, Artificial Sequence
  Synthetic oligonucleotide
catataaatgtctggcgttgtggcccactt

SEQ ID NO: 483426 - DNA, 30 bp, Artificial Sequence
  Synthetic oligonucleotide
gagaatgaacgggcctatgcccggccactt

SEQ ID NO: 483427 - DNA, 30 bp, Artificial Sequence
  Synthetic oligonucleotide
atcgcatcaaagtcctgacaacgtccactt

SEQ ID NO: 483428 - DNA, 30 bp, Artificial Sequence
  Synthetic oligonucleotide
tacatgattcttatattgggtttagcactt

SEQ ID NO: 483429 - DNA, 30 bp, Artificial Sequence
  Synthetic oligonucleotide
atccggctgctttcttttcagggcgcactt

SEQ ID NO: 483430 - DNA, 30 bp, Artificial Sequence
  Synthetic oligonucleotide
tccaacggggcgcctgtaattcgggcactt

SEQ ID NO: 483431 - DNA, 30 bp, Artificial Sequence
  Synthetic oligonucleotide
gttgccacctttaccctcgctcatgcactt

SEQ ID NO: 483432 - DNA, 30 bp, Artificial Sequence
  Synthetic oligonucleotide
aagacccgcctaaaggggctttatgcactt

SEQ ID NO: 483433 - DNA, 30 bp, Artificial Sequence
  Synthetic oligonucleotide
gattttaggttgcatagcttcgttgcactt

SEQ ID NO: 483434 - DNA, 30 bp, Artificial Sequence
  Synthetic oligonucleotide
ccccaggtggtccacactacgggatcactt

SEQ ID NO: 483435 - DNA, 30 bp, Artificial Sequence
  Synthetic oligonucleotide
ctcagggtagacaggaagattttatcactt

SEQ ID NO: 483436 - DNA, 30 bp, Artificial Sequence
  Synthetic oligonucleotide
gacccgacggaagtgaagagctactcactt

SEQ ID NO: 483437 - DNA, 30 bp, Artificial Sequence
  Synthetic oligonucleotide
tcggtatttagagccttattaaggtcactt

SEQ ID NO: 483438 - DNA, 30 bp, Artificial Sequence
  Synthetic oligonucleotide
tgtatctggaattatggagttataagactt

SEQ ID NO: 483439 - DNA, 30 bp, Artificial Sequence
  Synthetic oligonucleotide
aaattagctagacattggccaggcagactt

SEQ ID NO: 483440 - DNA, 30 bp, Artificial Sequence
  Synthetic oligonucleotide
gtatttcatcatcgcagctgctgcagactt

SEQ ID NO: 483441 - DNA, 30 bp, Artificial Sequence
  Synthetic oligonucleotide
cccgctgtgcctaggagttctcggagactt

SEQ ID NO: 483442 - DNA, 30 bp, Artificial Sequence
  Synthetic oligonucleotide
cctagctctgactatgtaggtcggagactt

SEQ ID NO: 483443 - DNA, 30 bp, Artificial Sequence
  Synthetic oligonucleotide
gttttatgatgtgtataattacatagactt

SEQ ID NO: 483444 - DNA, 30 bp, Artificial Sequence
  Synthetic oligonucleotide
attgcttatgtctagtgtttttgtagactt

SEQ ID NO: 483445 - DNA, 30 bp, Artificial Sequence
  Synthetic oligonucleotide
accagcaagccctgcacggctatacgactt

SEQ ID NO: 483446 - DNA, 30 bp, Artificial Sequence
  Synthetic oligonucleotide
ggtcccatgtaactttgatatagccgactt

SEQ ID NO: 483447 - DNA, 27 bp, Artificial Sequence
  Synthetic oligonucleotide
gcactgtttcgtgtaaagttccgactt

SEQ ID NO: 483448 - DNA, 30 bp, Artificial Sequence
  Synthetic oligonucleotide
gcaaaattcgtacgccctggttggcgactt

SEQ ID NO: 483449 - DNA, 30 bp, Artificial Sequence
  Synthetic oligonucleotide
gtttcttagtacaggtggcctcgaggactt

SEQ ID NO: 483450 - DNA, 30 bp, Artificial Sequence
  Synthetic oligonucleotide
ggctaatggagggtactggattcgggactt

SEQ ID NO: 483451 - DNA, 30 bp, Artificial Sequence
  Synthetic oligonucleotide
agttattgtatgtaagctatatcctgactt

SEQ ID NO: 483452 - DNA, 30 bp, Artificial Sequence
  Synthetic oligonucleotide
accttttggttagggcccatggtgtgactt

SEQ ID NO: 483453 - DNA, 30 bp, Artificial Sequence
  Synthetic oligonucleotide
gttgaagatgacgtactcagagtttgactt

SEQ ID NO: 483454 - DNA, 30 bp, Artificial Sequence
  Synthetic oligonucleotide
ccggaggtgagagaggcgggtgtttgactt

SEQ ID NO: 483455 - DNA, 30 bp, Artificial Sequence
  Synthetic oligonucleotide
ttcgctgggcaaagtatgcagatcatactt

SEQ ID NO: 483456 - DNA, 30 bp, Artificial Sequence
  Synthetic oligonucleotide
agtagctatgctttattacttagtatactt

SEQ ID NO: 483457 - DNA, 30 bp, Artificial Sequence
  Synthetic oligonucleotide
aattctactctgtacatgtcccgactactt

SEQ ID NO: 483458 - DNA, 30 bp, Artificial Sequence
  Synthetic oligonucleotide
gcagagtattagctgttggctttactactt

SEQ ID NO: 483459 - DNA, 30 bp, Artificial Sequence
  Synthetic oligonucleotide
acgtgtacacaaagaaggccaatcctactt

SEQ ID NO: 483460 - DNA, 30 bp, Artificial Sequence
  Synthetic oligonucleotide
tcagcacatattgtttgaggtacgctactt

SEQ ID NO: 483461 - DNA, 30 bp, Artificial Sequence
  Synthetic oligonucleotide
gtcactgggattttagttcccatgctactt

SEQ ID NO: 483462 - DNA, 30 bp, Artificial Sequence
  Synthetic oligonucleotide
ggcatgtagcgaattgtggctcatctactt

SEQ ID NO: 483463 - DNA, 30 bp, Artificial Sequence
  Synthetic oligonucleotide
gtactttgacaagacgattcagatctactt

SEQ ID NO: 483464 - DNA, 30 bp, Artificial Sequence
  Synthetic oligonucleotide
cattcttggtagagaggttgtggtctactt

SEQ ID NO: 483465 - DNA, 30 bp, Artificial Sequence
  Synthetic oligonucleotide
gcttgtctcggtgtgtagatgcaagtactt

SEQ ID NO: 483466 - DNA, 30 bp, Artificial Sequence
  Synthetic oligonucleotide
aatcagttcgaagctgaaactcgcgtactt

SEQ ID NO: 483467 - DNA, 30 bp, Artificial Sequence
  Synthetic oligonucleotide
attaacgttcttctcgatcgagtcgtactt

SEQ ID NO: 483468 - DNA, 30 bp, Artificial Sequence
  Synthetic oligonucleotide
ggaagggatacgtcctcacgtaatgtactt

SEQ ID NO: 483469 - DNA, 30 bp, Artificial Sequence
  Synthetic oligonucleotide
aaatactcgatcactgcggtcgttgtactt

SEQ ID NO: 483470 - DNA, 30 bp, Artificial Sequence
  Synthetic oligonucleotide
cagccggtatgcttttacttgaaattactt

SEQ ID NO: 483471 - DNA, 30 bp, Artificial Sequence
  Synthetic oligonucleotide
gacacttgatctcacccccaagtattactt

SEQ ID NO: 483472 - DNA, 30 bp, Artificial Sequence
  Synthetic oligonucleotide
attcgtaccctcggtcctcttaacttactt

SEQ ID NO: 483473 - DNA, 30 bp, Artificial Sequence
  Synthetic oligonucleotide
gggattacgcctcctcactggagcttactt

SEQ ID NO: 483474 - DNA, 30 bp, Artificial Sequence
  Synthetic oligonucleotide
aagtatagggcacttgggtagtcgttactt

SEQ ID NO: 483475 - DNA, 30 bp, Artificial Sequence
  Synthetic oligonucleotide
gtaacatatagccctgtaatattgttactt

SEQ ID NO: 483476 - DNA, 30 bp, Artificial Sequence
  Synthetic oligonucleotide
gcgggcaaaatttaagaaagagatttactt

SEQ ID NO: 483477 - DNA, 30 bp, Artificial Sequence
  Synthetic oligonucleotide
cttattccgtccataataagtcgtttactt

SEQ ID NO: 483478 - DNA, 28 bp, Artificial Sequence
  Synthetic oligonucleotide
gcagcgcacgcgacgcattagaaacctt

SEQ ID NO: 483479 - DNA, 30 bp, Artificial Sequence
  Synthetic oligonucleotide
aagtcgaagccatcccagtggggaaacctt

SEQ ID NO: 483480 - DNA, 30 bp, Artificial Sequence
  Synthetic oligonucleotide
cccgacagtactgcgtgcttacgcaacctt

SEQ ID NO: 483481 - DNA, 30 bp, Artificial Sequence
  Synthetic oligonucleotide
gtgacgggtcaggcttactactgcaacctt

SEQ ID NO: 483482 - DNA, 30 bp, Artificial Sequence
  Synthetic oligonucleotide
gagcttctgattgtttttgagggtaacctt

SEQ ID NO: 483483 - DNA, 30 bp, Artificial Sequence
  Synthetic oligonucleotide
gagattctctcgggcctgacgaaacacctt

SEQ ID NO: 483484 - DNA, 30 bp, Artificial Sequence
  Synthetic oligonucleotide
tcgcctcactccagcgcgtagcgacacctt

SEQ ID NO: 483485 - DNA, 30 bp, Artificial Sequence
  Synthetic oligonucleotide
agccatactagtgcgattacttggcacctt

SEQ ID NO: 483486 - DNA, 30 bp, Artificial Sequence
  Synthetic oligonucleotide
actctagttagattagaccccatgcacctt

SEQ ID NO: 483487 - DNA, 30 bp, Artificial Sequence
  Synthetic oligonucleotide
aaacatcatctaactcgcattattcacctt

SEQ ID NO: 483488 - DNA, 30 bp, Artificial Sequence
  Synthetic oligonucleotide
tttgtactcctgtatgtctattgggacctt

SEQ ID NO: 483489 - DNA, 30 bp, Artificial Sequence
  Synthetic oligonucleotide
atgaaatatctcgcttcatgacttgacctt

SEQ ID NO: 483490 - DNA, 30 bp, Artificial Sequence
  Synthetic oligonucleotide
ctttagttgcgacgcaacgcagactacctt

SEQ ID NO: 483491 - DNA, 30 bp, Artificial Sequence
  Synthetic oligonucleotide
gtggaatagcggcaccggtaggagtacctt

SEQ ID NO: 483492 - DNA, 30 bp, Artificial Sequence
  Synthetic oligonucleotide
gaggtacatggcagcagttaagggtacctt

SEQ ID NO: 483493 - DNA, 30 bp, Artificial Sequence
  Synthetic oligonucleotide
gtgggggctttccagaattttggttacctt

SEQ ID NO: 483494 - DNA, 30 bp, Artificial Sequence
  Synthetic oligonucleotide
ctggcgcgagggctcttgtaaagaaccctt

SEQ ID NO: 483495 - DNA, 30 bp, Artificial Sequence
  Synthetic oligonucleotide
gacccggtcgtcgcatggccgggaaccctt

SEQ ID NO: 483496 - DNA, 30 bp, Artificial Sequence
  Synthetic oligonucleotide
gcaaaggccactagagatttgggaaccctt

SEQ ID NO: 483497 - DNA, 30 bp, Artificial Sequence
  Synthetic oligonucleotide
atgtgccctcgccggcctggatgaaccctt

SEQ ID NO: 483498 - DNA, 30 bp, Artificial Sequence
  Synthetic oligonucleotide
ctttatgaatggcgatcccgttgaaccctt

SEQ ID NO: 483499 - DNA, 30 bp, Artificial Sequence
  Synthetic oligonucleotide
ggacagggggatgaaaggatgggcaccctt

SEQ ID NO: 483500 - DNA, 30 bp, Artificial Sequence
  Synthetic oligonucleotide
cccaggacttctgctgtagtagcgaccctt

SEQ ID NO: 483501 - DNA, 31 bp, Artificial Sequence
  Synthetic oligonucleotide
ataaacgaagcacatccgtattgcgaccctt

SEQ ID NO: 483502 - DNA, 30 bp, Artificial Sequence
  Synthetic oligonucleotide
ggtagatgggccacctgagccgggaccctt

SEQ ID NO: 483503 - DNA, 30 bp, Artificial Sequence
  Synthetic oligonucleotide
gcaaagagccattagcaacaggttaccctt

SEQ ID NO: 483504 - DNA, 30 bp, Artificial Sequence
  Synthetic oligonucleotide
tgctatacatgagtcaagagctttaccctt

SEQ ID NO: 483505 - DNA, 30 bp, Artificial Sequence
  Synthetic oligonucleotide
gttatccttctgacccgctagatacccctt

SEQ ID NO: 483506 - DNA, 30 bp, Artificial Sequence
  Synthetic oligonucleotide
gcttacaaagtagtggtatactaccccctt

SEQ ID NO: 483507 - DNA, 30 bp, Artificial Sequence
  Synthetic oligonucleotide
tattccgtgaataatccacgtggcgccctt

SEQ ID NO: 483508 - DNA, 30 bp, Artificial Sequence
  Synthetic oligonucleotide
tagtcgacgtactctggcggtcgggccctt

SEQ ID NO: 483509 - DNA, 30 bp, Artificial Sequence
  Synthetic oligonucleotide
tatgtaggcgtcatcctctcatctgccctt

SEQ ID NO: 483510 - DNA, 30 bp, Artificial Sequence
  Synthetic oligonucleotide
atcgggttttgatgactgcgcgaatccctt

SEQ ID NO: 483511 - DNA, 30 bp, Artificial Sequence
  Synthetic oligonucleotide
tgtaagttattacacacaaactcatccctt

SEQ ID NO: 483512 - DNA, 30 bp, Artificial Sequence
  Synthetic oligonucleotide
tcttctcacacttggagcagatgatccctt

SEQ ID NO: 483513 - DNA, 30 bp, Artificial Sequence
  Synthetic oligonucleotide
aactgttaggttacggcaaccctatccctt

SEQ ID NO: 483514 - DNA, 30 bp, Artificial Sequence
  Synthetic oligonucleotide
agcaaaacaagggttgtcagttactccctt

SEQ ID NO: 483515 - DNA, 30 bp, Artificial Sequence
  Synthetic oligonucleotide
aacaggttctcgaaacggaatttctccctt

SEQ ID NO: 483516 - DNA, 30 bp, Artificial Sequence
  Synthetic oligonucleotide
gggattagtctttaatatgagcggtccctt

SEQ ID NO: 483517 - DNA, 30 bp, Artificial Sequence
  Synthetic oligonucleotide
gtgacctagtacgcccggctagggtccctt

SEQ ID NO: 483518 - DNA, 30 bp, Artificial Sequence
  Synthetic oligonucleotide
gaaaaaaacttaacatgactaatgtccctt

SEQ ID NO: 483519 - DNA, 30 bp, Artificial Sequence
  Synthetic oligonucleotide
tcgcctggtcaggacatttcatgttccctt

SEQ ID NO: 483520 - DNA, 30 bp, Artificial Sequence
  Synthetic oligonucleotide
taaagactaccggccggcctattttccctt

SEQ ID NO: 483521 - DNA, 30 bp, Artificial Sequence
  Synthetic oligonucleotide
cagtagccctgttagcgcagtgaaagcctt

SEQ ID NO: 483522 - DNA, 30 bp, Artificial Sequence
  Synthetic oligonucleotide
gcgaaggcataactacgaggtacaagcctt

SEQ ID NO: 483523 - DNA, 30 bp, Artificial Sequence
  Synthetic oligonucleotide
aggcgtgcatcacctcggacaaacagcctt

SEQ ID NO: 483524 - DNA, 30 bp, Artificial Sequence
  Synthetic oligonucleotide
attcaagggggccagtgttgcagcagcctt

SEQ ID NO: 483525 - DNA, 30 bp, Artificial Sequence
  Synthetic oligonucleotide
cggaaagttcgtcaagtatggcggagcctt

SEQ ID NO: 483526 - DNA, 31 bp, Artificial Sequence
  Synthetic oligonucleotide
atttaatgctcacaacgagaggtatagcctt

SEQ ID NO: 483527 - DNA, 30 bp, Artificial Sequence
  Synthetic oligonucleotide
atcttttgtgtttttctataactacgcctt

SEQ ID NO: 483528 - DNA, 30 bp, Artificial Sequence
  Synthetic oligonucleotide
tatgtaacccgtatacccctactacgcctt

SEQ ID NO: 483529 - DNA, 30 bp, Artificial Sequence
  Synthetic oligonucleotide
acgcccgggtggcaagtggcccaccgcctt

SEQ ID NO: 483530 - DNA, 30 bp, Artificial Sequence
  Synthetic oligonucleotide
tgaaagtgttattttttgggggcccgcctt

SEQ ID NO: 483531 - DNA, 30 bp, Artificial Sequence
  Synthetic oligonucleotide
gcgcagactcatcctggatcgtatcgcctt

SEQ ID NO: 483532 - DNA, 30 bp, Artificial Sequence
  Synthetic oligonucleotide
ggaccctgctatttgggggttataggcctt

SEQ ID NO: 483533 - DNA, 30 bp, Artificial Sequence
  Synthetic oligonucleotide
acctttcttttcaaaataatggacggcctt

SEQ ID NO: 483534 - DNA, 30 bp, Artificial Sequence
  Synthetic oligonucleotide
gtcctcaccaacactgaatagaccggcctt

SEQ ID NO: 483535 - DNA, 30 bp, Artificial Sequence
  Synthetic oligonucleotide
cgagattagacgctgtcgagatcgggcctt

SEQ ID NO: 483536 - DNA, 30 bp, Artificial Sequence
  Synthetic oligonucleotide
ttactgccgcttactaccttgcatggcctt

SEQ ID NO: 483537 - DNA, 30 bp, Artificial Sequence
  Synthetic oligonucleotide
aaggtccacaacgtgacttaacgtggcctt

SEQ ID NO: 483538 - DNA, 30 bp, Artificial Sequence
  Synthetic oligonucleotide
ataaatggatcgtacgactgcgaatgcctt

SEQ ID NO: 483539 - DNA, 30 bp, Artificial Sequence
  Synthetic oligonucleotide
acaaaggcccttacagtacatcactgcctt

SEQ ID NO: 483540 - DNA, 30 bp, Artificial Sequence
  Synthetic oligonucleotide
tgggcggcaataccccctatgtggtgcctt

SEQ ID NO: 483541 - DNA, 30 bp, Artificial Sequence
  Synthetic oligonucleotide
aattgcacaccactagaattactgtgcctt

SEQ ID NO: 483542 - DNA, 30 bp, Artificial Sequence
  Synthetic oligonucleotide
aaccctttacagggatacatggtgtgcctt

SEQ ID NO: 483543 - DNA, 30 bp, Artificial Sequence
  Synthetic oligonucleotide
gtattacggctcaaaactacactttgcctt

SEQ ID NO: 483544 - DNA, 30 bp, Artificial Sequence
  Synthetic oligonucleotide
acttctgtcgggcgctgacgttaaatcctt

SEQ ID NO: 483545 - DNA, 30 bp, Artificial Sequence
  Synthetic oligonucleotide
agtccgcgaggccttttggatctaatcctt

SEQ ID NO: 483546 - DNA, 30 bp, Artificial Sequence
  Synthetic oligonucleotide
aaatgacaccttcggccagcttccatcctt

SEQ ID NO: 483547 - DNA, 30 bp, Artificial Sequence
  Synthetic oligonucleotide
aacccaagaagccgcttgctacgcatcctt

SEQ ID NO: 483548 - DNA, 30 bp, Artificial Sequence
  Synthetic oligonucleotide
agtgcatcgattttacgcacagcgatcctt

SEQ ID NO: 483549 - DNA, 30 bp, Artificial Sequence
  Synthetic oligonucleotide
tcgtggatgtaaaggcaccctgggatcctt

SEQ ID NO: 483550 - DNA, 30 bp, Artificial Sequence
  Synthetic oligonucleotide
gaggatgatatacgccaccgtgtgatcctt

SEQ ID NO: 483551 - DNA, 30 bp, Artificial Sequence
  Synthetic oligonucleotide
ggaagtggggaacgcgccgacaatatcctt

SEQ ID NO: 483552 - DNA, 30 bp, Artificial Sequence
  Synthetic oligonucleotide
ggacaaccgaaatccgatacctctatcctt

SEQ ID NO: 483553 - DNA, 30 bp, Artificial Sequence
  Synthetic oligonucleotide
gctttacagtaagcggaagtaccgctcctt

SEQ ID NO: 483554 - DNA, 30 bp, Artificial Sequence
  Synthetic oligonucleotide
catgccatatcttcttgcttaaggctcctt

SEQ ID NO: 483555 - DNA, 30 bp, Artificial Sequence
  Synthetic oligonucleotide
tatgaaaccacattcatgccccggctcctt

SEQ ID NO: 483556 - DNA, 30 bp, Artificial Sequence
  Synthetic oligonucleotide
ccggcaacctacgcaatagagttgctcctt

SEQ ID NO: 483557 - DNA, 30 bp, Artificial Sequence
  Synthetic oligonucleotide
gtcgttttgggacacgttcagagtctcctt

SEQ ID NO: 483558 - DNA, 30 bp, Artificial Sequence
  Synthetic oligonucleotide
ggatagggtcgtctgtcctattaagtcctt

SEQ ID NO: 483559 - DNA, 30 bp, Artificial Sequence
  Synthetic oligonucleotide
cacgctactatagcgacgcaccgagtcctt

SEQ ID NO: 483560 - DNA, 30 bp, Artificial Sequence
  Synthetic oligonucleotide
gttagacagtttagtacggtagacgtcctt

SEQ ID NO: 483561 - DNA, 30 bp, Artificial Sequence
  Synthetic oligonucleotide
aaagatttagtatttgttcgcacggtcctt

SEQ ID NO: 483562 - DNA, 30 bp, Artificial Sequence
  Synthetic oligonucleotide
ggaagaggtacggcaaggagcgcggtcctt

SEQ ID NO: 483563 - DNA, 30 bp, Artificial Sequence
  Synthetic oligonucleotide
ggcaccgagcgcaacacatgtgcggtcctt

SEQ ID NO: 483564 - DNA, 30 bp, Artificial Sequence
  Synthetic oligonucleotide
ccataagcgacaatctggttcagggtcctt

SEQ ID NO: 483565 - DNA, 30 bp, Artificial Sequence
  Synthetic oligonucleotide
gggttgggggcactatagggccgggtcctt

SEQ ID NO: 483566 - DNA, 30 bp, Artificial Sequence
  Synthetic oligonucleotide
tcaacctactaatggagcaaccatgtcctt

SEQ ID NO: 483567 - DNA, 30 bp, Artificial Sequence
  Synthetic oligonucleotide
attaaaaaagggacacccttaatattcctt

SEQ ID NO: 483568 - DNA, 30 bp, Artificial Sequence
  Synthetic oligonucleotide
gcggactcgcgtcagaagatggtattcctt

SEQ ID NO: 483569 - DNA, 30 bp, Artificial Sequence
  Synthetic oligonucleotide
tggcaggaaatgagcatcgcctagttcctt

SEQ ID NO: 483570 - DNA, 29 bp, Artificial Sequence
  Synthetic oligonucleotide
ctcctttctccctgagagatgggttcctt

SEQ ID NO: 483571 - DNA, 30 bp, Artificial Sequence
  Synthetic oligonucleotide
gctgttggtttacctagttacgtgttcctt

SEQ ID NO: 483572 - DNA, 30 bp, Artificial Sequence
  Synthetic oligonucleotide
gaggccttgtcaggatttttagatttcctt

SEQ ID NO: 483573 - DNA, 30 bp, Artificial Sequence
  Synthetic oligonucleotide
tttaagattgagagataaaattatttcctt

SEQ ID NO: 483574 - DNA, 30 bp, Artificial Sequence
  Synthetic oligonucleotide
accagcggcaaagtgtcttattctttcctt

SEQ ID NO: 483575 - DNA, 30 bp, Artificial Sequence
  Synthetic oligonucleotide
acgtttatctcggaattttctaaaaagctt

SEQ ID NO: 483576 - DNA, 30 bp, Artificial Sequence
  Synthetic oligonucleotide
ccccaatgatgttcgccacacgcaaagctt

SEQ ID NO: 483577 - DNA, 30 bp, Artificial Sequence
  Synthetic oligonucleotide
aaaatagtgagttgacgcatcagaaagctt

SEQ ID NO: 483578 - DNA, 30 bp, Artificial Sequence
  Synthetic oligonucleotide
tcatccccggtttaggaaaacggaaagctt

SEQ ID NO: 483579 - DNA, 30 bp, Artificial Sequence
  Synthetic oligonucleotide
agaccccaaattggcggcagttccaagctt

SEQ ID NO: 483580 - DNA, 30 bp, Artificial Sequence
  Synthetic oligonucleotide
ccgccgaaacgtcttattttggagaagctt

SEQ ID NO: 483581 - DNA, 30 bp, Artificial Sequence
  Synthetic oligonucleotide
ctaaacacgaacgctcatcgacggaagctt

SEQ ID NO: 483582 - DNA, 30 bp, Artificial Sequence
  Synthetic oligonucleotide
attagctaccgaattacgcgatggaagctt

SEQ ID NO: 483583 - DNA, 30 bp, Artificial Sequence
  Synthetic oligonucleotide
tttgtgcactgcagccagaacgataagctt

SEQ ID NO: 483584 - DNA, 30 bp, Artificial Sequence
  Synthetic oligonucleotide
aactagaatgttctgtaagtgcctaagctt

SEQ ID NO: 483585 - DNA, 30 bp, Artificial Sequence
  Synthetic oligonucleotide
taagcataagcatgaactcaagtacagctt

SEQ ID NO: 483586 - DNA, 30 bp, Artificial Sequence
  Synthetic oligonucleotide
ccatgctctagtccgtctctttaccagctt

SEQ ID NO: 483587 - DNA, 30 bp, Artificial Sequence
  Synthetic oligonucleotide
ctcccagtatatatggacgttggccagctt

SEQ ID NO: 483588 - DNA, 30 bp, Artificial Sequence
  Synthetic oligonucleotide
ggcgcatgaatctaggattttatccagctt

SEQ ID NO: 483589 - DNA, 30 bp, Artificial Sequence
  Synthetic oligonucleotide
gagatgcttggcactgcagcagagcagctt

SEQ ID NO: 483590 - DNA, 30 bp, Artificial Sequence
  Synthetic oligonucleotide
gcccaacctgttacggctctccggcagctt

SEQ ID NO: 483591 - DNA, 30 bp, Artificial Sequence
  Synthetic oligonucleotide
acttaaaggttgaactacatggtgcagctt

SEQ ID NO: 483592 - DNA, 30 bp, Artificial Sequence
  Synthetic oligonucleotide
ctgcgtccgtaccgatctggtttgcagctt

SEQ ID NO: 483593 - DNA, 30 bp, Artificial Sequence
  Synthetic oligonucleotide
aacctggaccgctctacaggccatcagctt

SEQ ID NO: 483594 - DNA, 30 bp, Artificial Sequence
  Synthetic oligonucleotide
acggcagtacgataagatttgggtcagctt

SEQ ID NO: 483595 - DNA, 30 bp, Artificial Sequence
  Synthetic oligonucleotide
tgttgcgatgagtgagagaagtaagagctt

SEQ ID NO: 483596 - DNA, 30 bp, Artificial Sequence
  Synthetic oligonucleotide
aagtggcatactcggtcaactaccgagctt

SEQ ID NO: 483597 - DNA, 30 bp, Artificial Sequence
  Synthetic oligonucleotide
ttagcgtgagtggatcatgatcccgagctt

SEQ ID NO: 483598 - DNA, 30 bp, Artificial Sequence
  Synthetic oligonucleotide
cctgggaacctattaagatttgccgagctt

SEQ ID NO: 483599 - DNA, 30 bp, Artificial Sequence
  Synthetic oligonucleotide
taacttcactctgagctaatttaggagctt

SEQ ID NO: 483600 - DNA, 30 bp, Artificial Sequence
  Synthetic oligonucleotide
ggcaaaacaaccgtacatgtggcggagctt

SEQ ID NO: 483601 - DNA, 30 bp, Artificial Sequence
  Synthetic oligonucleotide
gcgagtatcataggaattgcgtcggagctt

SEQ ID NO: 483602 - DNA, 30 bp, Artificial Sequence
  Synthetic oligonucleotide
cgcagctcgagcacagtgtgacgatagctt

SEQ ID NO: 483603 - DNA, 30 bp, Artificial Sequence
  Synthetic oligonucleotide
gaagcactaaatgacgcccgacggtagctt

SEQ ID NO: 483604 - DNA, 30 bp, Artificial Sequence
  Synthetic oligonucleotide
cacttgtacgcgggaagcgtaatgtagctt

SEQ ID NO: 483605 - DNA, 30 bp, Artificial Sequence
  Synthetic oligonucleotide
gatcctacgtagttaagcttcttgtagctt

SEQ ID NO: 483606 - DNA, 30 bp, Artificial Sequence
  Synthetic oligonucleotide
ggtccagggatagcttgttatgaaacgctt

SEQ ID NO: 483607 - DNA, 30 bp, Artificial Sequence
  Synthetic oligonucleotide
ctgggatgtgttattcttgcgggcacgctt

SEQ ID NO: 483608 - DNA, 30 bp, Artificial Sequence
  Synthetic oligonucleotide
tgaatttggtgatgcttccaggtcacgctt

SEQ ID NO: 483609 - DNA, 30 bp, Artificial Sequence
  Synthetic oligonucleotide
attgaatttacattcaatgatttgacgctt

SEQ ID NO: 483610 - DNA, 30 bp, Artificial Sequence
  Synthetic oligonucleotide
tcattatatacagaaccggtgaatacgctt

SEQ ID NO: 483611 - DNA, 30 bp, Artificial Sequence
  Synthetic oligonucleotide
ctgtggttttatgcggtttcggttacgctt

SEQ ID NO: 483612 - DNA, 30 bp, Artificial Sequence
  Synthetic oligonucleotide
ctagcatacggagctcaaggatttacgctt

SEQ ID NO: 483613 - DNA, 30 bp, Artificial Sequence
  Synthetic oligonucleotide
agttttgtttagtggacaacgtttacgctt

SEQ ID NO: 483614 - DNA, 30 bp, Artificial Sequence
  Synthetic oligonucleotide
ataagacgactcaatacggggcacccgctt

SEQ ID NO: 483615 - DNA, 30 bp, Artificial Sequence
  Synthetic oligonucleotide
ttgtattaaggtacgtgcttttccccgctt

SEQ ID NO: 483616 - DNA, 30 bp, Artificial Sequence
  Synthetic oligonucleotide
tcagctatagcggtcaagacaaagccgctt

SEQ ID NO: 483617 - DNA, 30 bp, Artificial Sequence
  Synthetic oligonucleotide
gcgcggatccttggacaagcacttccgctt

SEQ ID NO: 483618 - DNA, 30 bp, Artificial Sequence
  Synthetic oligonucleotide
ccggttgcgattctgttatcctaagcgctt

SEQ ID NO: 483619 - DNA, 30 bp, Artificial Sequence
  Synthetic oligonucleotide
aagcagcgccgtaatcatcgggacgcgctt

SEQ ID NO: 483620 - DNA, 30 bp, Artificial Sequence
  Synthetic oligonucleotide
agaagttagcggcgcgacagactcgcgctt

SEQ ID NO: 483621 - DNA, 30 bp, Artificial Sequence
  Synthetic oligonucleotide
taggccgtgggattcccactaggggcgctt

SEQ ID NO: 483622 - DNA, 30 bp, Artificial Sequence
  Synthetic oligonucleotide
ctcagacaagtacatatcaaacttgcgctt

SEQ ID NO: 483623 - DNA, 30 bp, Artificial Sequence
  Synthetic oligonucleotide
ggagtcgcacaaactgtgtactcatcgctt

SEQ ID NO: 483624 - DNA, 30 bp, Artificial Sequence
  Synthetic oligonucleotide
gtttccgttcgggaagcggacttttcgctt

SEQ ID NO: 483625 - DNA, 30 bp, Artificial Sequence
  Synthetic oligonucleotide
ggtctgatacaatttagtatacaaaggctt

SEQ ID NO: 483626 - DNA, 30 bp, Artificial Sequence
  Synthetic oligonucleotide
accgaaggattcttaatgacgcaaaggctt

SEQ ID NO: 483627 - DNA, 30 bp, Artificial Sequence
  Synthetic oligonucleotide
gtagaggagactcgtagggacgcaaggctt

SEQ ID NO: 483628 - DNA, 30 bp, Artificial Sequence
  Synthetic oligonucleotide
tcagggggatccctgatgacgttaaggctt

SEQ ID NO: 483629 - DNA, 30 bp, Artificial Sequence
  Synthetic oligonucleotide
gaagtacggtgttttctaacgaggaggctt

SEQ ID NO: 483630 - DNA, 30 bp, Artificial Sequence
  Synthetic oligonucleotide
tattaaacagcctgagttgtggggaggctt

SEQ ID NO: 483631 - DNA, 30 bp, Artificial Sequence
  Synthetic oligonucleotide
ctagtattacatgtgctaggttggaggctt

SEQ ID NO: 483632 - DNA, 30 bp, Artificial Sequence
  Synthetic oligonucleotide
ataacgcattagaatgtccgcagtaggctt

SEQ ID NO: 483633 - DNA, 30 bp, Artificial Sequence
  Synthetic oligonucleotide
gcatgtgctagtaaattttgacgtaggctt

SEQ ID NO: 483634 - DNA, 30 bp, Artificial Sequence
  Synthetic oligonucleotide
ccctctgatatagaccatttttgtaggctt

SEQ ID NO: 483635 - DNA, 30 bp, Artificial Sequence
  Synthetic oligonucleotide
atcagagccccgtatacatcgcttaggctt

SEQ ID NO: 483636 - DNA, 30 bp, Artificial Sequence
  Synthetic oligonucleotide
ggtttccgacccaattgtctaatacggctt

SEQ ID NO: 483637 - DNA, 31 bp, Artificial Sequence
  Synthetic oligonucleotide
aatctgtcgcctctcggggtgggaccggctt

SEQ ID NO: 483638 - DNA, 30 bp, Artificial Sequence
  Synthetic oligonucleotide
gtacccagcacgtgagcacgcttgcggctt

SEQ ID NO: 483639 - DNA, 30 bp, Artificial Sequence
  Synthetic oligonucleotide
aattctttctgttgcgaaaggcctcggctt

SEQ ID NO: 483640 - DNA, 30 bp, Artificial Sequence
  Synthetic oligonucleotide
atcaaatctcaaatatagactagtcggctt

SEQ ID NO: 483641 - DNA, 30 bp, Artificial Sequence
  Synthetic oligonucleotide
gtctctgttggattccacgaccgtcggctt

SEQ ID NO: 483642 - DNA, 30 bp, Artificial Sequence
  Synthetic oligonucleotide
ttgccaccgttcaaaccccctgttcggctt

SEQ ID NO: 483643 - DNA, 30 bp, Artificial Sequence
  Synthetic oligonucleotide
ccggtgaacttaaccgccgcttgagggctt

SEQ ID NO: 483644 - DNA, 30 bp, Artificial Sequence
  Synthetic oligonucleotide
ggaaaggtcaaccttctcgaggtagggctt

SEQ ID NO: 483645 - DNA, 30 bp, Artificial Sequence
  Synthetic oligonucleotide
ttatagtgattgaacaggcggatcgggctt

SEQ ID NO: 483646 - DNA, 30 bp, Artificial Sequence
  Synthetic oligonucleotide
tttttaatgatttacaggctactcgggctt

SEQ ID NO: 483647 - DNA, 30 bp, Artificial Sequence
  Synthetic oligonucleotide
aagcgtagacagggtagggtctgggggctt

SEQ ID NO: 483648 - DNA, 30 bp, Artificial Sequence
  Synthetic oligonucleotide
gaaggggggggcggaggcgtggtggggctt

SEQ ID NO: 483649 - DNA, 30 bp, Artificial Sequence
  Synthetic oligonucleotide
cggatccttcgaaccgttattaatgggctt

SEQ ID NO: 483650 - DNA, 30 bp, Artificial Sequence
  Synthetic oligonucleotide
tcgttttcgttgcacgcgacgtatgggctt

SEQ ID NO: 483651 - DNA, 30 bp, Artificial Sequence
  Synthetic oligonucleotide
ctatgccttggtctcttcggataatggctt

SEQ ID NO: 483652 - DNA, 30 bp, Artificial Sequence
  Synthetic oligonucleotide
cagattacttctcagatatattaatggctt

SEQ ID NO: 483653 - DNA, 30 bp, Artificial Sequence
  Synthetic oligonucleotide
agggggggtgcgtttttcaatctatggctt

SEQ ID NO: 483654 - DNA, 30 bp, Artificial Sequence
  Synthetic oligonucleotide
gctacgcattgaactattagactctggctt

SEQ ID NO: 483655 - DNA, 30 bp, Artificial Sequence
  Synthetic oligonucleotide
gttcctgttccgggtcgaaggccgtggctt

SEQ ID NO: 483656 - DNA, 30 bp, Artificial Sequence
  Synthetic oligonucleotide
ggagaataaagcctcgtagcaatgtggctt

SEQ ID NO: 483657 - DNA, 30 bp, Artificial Sequence
  Synthetic oligonucleotide
cagtagccgtgtcgtggttgccattggctt

SEQ ID NO: 483658 - DNA, 30 bp, Artificial Sequence
  Synthetic oligonucleotide
tagcaatatattattctattggtaatgctt

SEQ ID NO: 483659 - DNA, 30 bp, Artificial Sequence
  Synthetic oligonucleotide
aggatgcacacagcaaacaggttaatgctt

SEQ ID NO: 483660 - DNA, 30 bp, Artificial Sequence
  Synthetic oligonucleotide
acaaactttggtcgatatggccccatgctt

SEQ ID NO: 483661 - DNA, 30 bp, Artificial Sequence
  Synthetic oligonucleotide
tggtaaaaagtggggtttgatggtatgctt

SEQ ID NO: 483662 - DNA, 30 bp, Artificial Sequence
  Synthetic oligonucleotide
taattttcagaagtataaggatgtatgctt

SEQ ID NO: 483663 - DNA, 30 bp, Artificial Sequence
  Synthetic oligonucleotide
gttagtatggctttatagggtattatgctt

SEQ ID NO: 483664 - DNA, 29 bp, Artificial Sequence
  Synthetic oligonucleotide
attttttgattaatgtcgtctttatgctt

SEQ ID NO: 483665 - DNA, 30 bp, Artificial Sequence
  Synthetic oligonucleotide
gccatgtcaaatatattcaaagtactgctt

SEQ ID NO: 483666 - DNA, 30 bp, Artificial Sequence
  Synthetic oligonucleotide
tttcgctaccatcggtgaatgtgcctgctt

SEQ ID NO: 483667 - DNA, 30 bp, Artificial Sequence
  Synthetic oligonucleotide
cttgactgatataacagatcacagctgctt

SEQ ID NO: 483668 - DNA, 30 bp, Artificial Sequence
  Synthetic oligonucleotide
ctcagagtctagacgagacggcagctgctt

SEQ ID NO: 483669 - DNA, 30 bp, Artificial Sequence
  Synthetic oligonucleotide
ttggtgtatgctacccctgtacggctgctt

SEQ ID NO: 483670 - DNA, 30 bp, Artificial Sequence
  Synthetic oligonucleotide
tgttcctgttgcgggcaagccgggctgctt

SEQ ID NO: 483671 - DNA, 30 bp, Artificial Sequence
  Synthetic oligonucleotide
gccttgatgcactggggctctatgctgctt

SEQ ID NO: 483672 - DNA, 30 bp, Artificial Sequence
  Synthetic oligonucleotide
tcaggtacccgcaagtacgaatatctgctt

SEQ ID NO: 483673 - DNA, 30 bp, Artificial Sequence
  Synthetic oligonucleotide
ccctgcgcgcagaggtgcagatcagtgctt

SEQ ID NO: 483674 - DNA, 30 bp, Artificial Sequence
  Synthetic oligonucleotide
gggggcagttcaagaactgctcgagtgctt

SEQ ID NO: 483675 - DNA, 30 bp, Artificial Sequence
  Synthetic oligonucleotide
tccaaatacctagcggagtcaaaattgctt

SEQ ID NO: 483676 - DNA, 30 bp, Artificial Sequence
  Synthetic oligonucleotide
tattcacgtaaaccgtggttgcgattgctt

SEQ ID NO: 483677 - DNA, 30 bp, Artificial Sequence
  Synthetic oligonucleotide
cccccgaaaactcctctgcttaagttgctt

SEQ ID NO: 483678 - DNA, 30 bp, Artificial Sequence
  Synthetic oligonucleotide
gaccctccatagggggttgtcggtttgctt

SEQ ID NO: 483679 - DNA, 30 bp, Artificial Sequence
  Synthetic oligonucleotide
tgacttcatcgataagcaagcccaaatctt

SEQ ID NO: 483680 - DNA, 30 bp, Artificial Sequence
  Synthetic oligonucleotide
cgtttaggagctcagggttccgtaaatctt

SEQ ID NO: 483681 - DNA, 30 bp, Artificial Sequence
  Synthetic oligonucleotide
taggatcagctcattgttccctacaatctt

SEQ ID NO: 483682 - DNA, 30 bp, Artificial Sequence
  Synthetic oligonucleotide
atgtacaacggatccgcaaccgcgaatctt

SEQ ID NO: 483683 - DNA, 30 bp, Artificial Sequence
  Synthetic oligonucleotide
ccatcaagagagtagttggtcggtaatctt

SEQ ID NO: 483684 - DNA, 30 bp, Artificial Sequence
  Synthetic oligonucleotide
ttaggcgggtctttatatctgggtaatctt

SEQ ID NO: 483685 - DNA, 30 bp, Artificial Sequence
  Synthetic oligonucleotide
agccttcagtcgggaagtacgattaatctt

SEQ ID NO: 483686 - DNA, 30 bp, Artificial Sequence
  Synthetic oligonucleotide
atacctcgggttagttctctataacatctt

SEQ ID NO: 483687 - DNA, 30 bp, Artificial Sequence
  Synthetic oligonucleotide
ggtcgtacttaccatgctgcctaacatctt

SEQ ID NO: 483688 - DNA, 30 bp, Artificial Sequence
  Synthetic oligonucleotide
ggcgccctccaggcgtactatgtacatctt

SEQ ID NO: 483689 - DNA, 30 bp, Artificial Sequence
  Synthetic oligonucleotide
atctacctgtcaggaggatgctcccatctt

SEQ ID NO: 483690 - DNA, 30 bp, Artificial Sequence
  Synthetic oligonucleotide
gcagtttcttttttggcttgaatccatctt

SEQ ID NO: 483691 - DNA, 30 bp, Artificial Sequence
  Synthetic oligonucleotide
gactaagaaacgtgggctaagctccatctt

SEQ ID NO: 483692 - DNA, 30 bp, Artificial Sequence
  Synthetic oligonucleotide
taggtggttccggttatcgtaacgcatctt

SEQ ID NO: 483693 - DNA, 30 bp, Artificial Sequence
  Synthetic oligonucleotide
gactatcgataacttgattgcgatcatctt

SEQ ID NO: 483694 - DNA, 30 bp, Artificial Sequence
  Synthetic oligonucleotide
cctaggcattaagtagtgaaccttcatctt

SEQ ID NO: 483695 - DNA, 30 bp, Artificial Sequence
  Synthetic oligonucleotide
agtgaaatagtttattcgcggctagatctt

SEQ ID NO: 483696 - DNA, 30 bp, Artificial Sequence
  Synthetic oligonucleotide
cacggaaatctctctccggagatcgatctt

SEQ ID NO: 483697 - DNA, 30 bp, Artificial Sequence
  Synthetic oligonucleotide
tatgtggaatccggtgatcagccggatctt

SEQ ID NO: 483698 - DNA, 30 bp, Artificial Sequence
  Synthetic oligonucleotide
agttaagtacgtagacgcagaggggatctt

SEQ ID NO: 483699 - DNA, 30 bp, Artificial Sequence
  Synthetic oligonucleotide
ggcaggaagagatgcgagctctttgatctt

SEQ ID NO: 483700 - DNA, 30 bp, Artificial Sequence
  Synthetic oligonucleotide
taatactcgtgatgtctaccgtttgatctt

SEQ ID NO: 483701 - DNA, 30 bp, Artificial Sequence
  Synthetic oligonucleotide
gtactaagaattgtccaggtaacatatctt

SEQ ID NO: 483702 - DNA, 30 bp, Artificial Sequence
  Synthetic oligonucleotide
ggtaattaatgcgaacagtggtcatatctt

SEQ ID NO: 483703 - DNA, 30 bp, Artificial Sequence
  Synthetic oligonucleotide
ccatatctttgtacactgttacagtatctt

SEQ ID NO: 483704 - DNA, 30 bp, Artificial Sequence
  Synthetic oligonucleotide
gctagaccctaaaatgctgagacgtatctt

SEQ ID NO: 483705 - DNA, 30 bp, Artificial Sequence
  Synthetic oligonucleotide
gtatcgaccgaacgaagcttgaggtatctt

SEQ ID NO: 483706 - DNA, 30 bp, Artificial Sequence
  Synthetic oligonucleotide
tgacggggttataaatagcatttttatctt

SEQ ID NO: 483707 - DNA, 30 bp, Artificial Sequence
  Synthetic oligonucleotide
actgatttcattgttgccattttttatctt

SEQ ID NO: 483708 - DNA, 30 bp, Artificial Sequence
  Synthetic oligonucleotide
ctctaatgattcaagtttgtgaaaactctt

SEQ ID NO: 483709 - DNA, 30 bp, Artificial Sequence
  Synthetic oligonucleotide
atatttatggtgatatcggagacaactctt

SEQ ID NO: 483710 - DNA, 30 bp, Artificial Sequence
  Synthetic oligonucleotide
cacctttattgagtaaataatccaactctt

SEQ ID NO: 483711 - DNA, 30 bp, Artificial Sequence
  Synthetic oligonucleotide
agcaatgaggggttaacccccgtaactctt

SEQ ID NO: 483712 - DNA, 30 bp, Artificial Sequence
  Synthetic oligonucleotide
acccctgttttggggaaagtacccactctt

SEQ ID NO: 483713 - DNA, 30 bp, Artificial Sequence
  Synthetic oligonucleotide
gattagataggcggaacatggatgactctt

SEQ ID NO: 483714 - DNA, 30 bp, Artificial Sequence
  Synthetic oligonucleotide
gacggcgttcggtagaggcgtaatactctt

SEQ ID NO: 483715 - DNA, 30 bp, Artificial Sequence
  Synthetic oligonucleotide
tggataggtataacggcttttggtactctt

SEQ ID NO: 483716 - DNA, 30 bp, Artificial Sequence
  Synthetic oligonucleotide
gtgattcggccgtccgactggcgccctctt

SEQ ID NO: 483717 - DNA, 30 bp, Artificial Sequence
  Synthetic oligonucleotide
tagttatcgaaaagttggagcggccctctt

SEQ ID NO: 483718 - DNA, 30 bp, Artificial Sequence
  Synthetic oligonucleotide
aggtccccgtggcatcaacgcatccctctt

SEQ ID NO: 483719 - DNA, 29 bp, Artificial Sequence
  Synthetic oligonucleotide
aactagttccgtaccacaaagtgcctctt

SEQ ID NO: 483720 - DNA, 30 bp, Artificial Sequence
  Synthetic oligonucleotide
atctatcttcgaaactgcctccgagctctt

SEQ ID NO: 483721 - DNA, 30 bp, Artificial Sequence
  Synthetic oligonucleotide
aagtaataaggagcacccggctgagctctt

SEQ ID NO: 483722 - DNA, 30 bp, Artificial Sequence
  Synthetic oligonucleotide
atataagacgtcgagattctcatagctctt

SEQ ID NO: 483723 - DNA, 30 bp, Artificial Sequence
  Synthetic oligonucleotide
ggcacattacggaagggtatgaaggctctt

SEQ ID NO: 483724 - DNA, 30 bp, Artificial Sequence
  Synthetic oligonucleotide
gctcctggcttgccctgtcaggttgctctt

SEQ ID NO: 483725 - DNA, 30 bp, Artificial Sequence
  Synthetic oligonucleotide
gtgcatagtattatgcaaaacatctctctt

SEQ ID NO: 483726 - DNA, 30 bp, Artificial Sequence
  Synthetic oligonucleotide
tatcaggaaaggttaattacaacgtctctt

SEQ ID NO: 483727 - DNA, 29 bp, Artificial Sequence
  Synthetic oligonucleotide
cgctggtttactacacttgcaggtctctt

SEQ ID NO: 483728 - DNA, 30 bp, Artificial Sequence
  Synthetic oligonucleotide
attagccggcctatagttacggtttctctt

SEQ ID NO: 483729 - DNA, 30 bp, Artificial Sequence
  Synthetic oligonucleotide
ggcagtctgattaatattgcataaagtctt

SEQ ID NO: 483730 - DNA, 30 bp, Artificial Sequence
  Synthetic oligonucleotide
cccttagtcgggtaaagatagagaagtctt

SEQ ID NO: 483731 - DNA, 30 bp, Artificial Sequence
  Synthetic oligonucleotide
aatctggtaggttattatataggaagtctt

SEQ ID NO: 483732 - DNA, 30 bp, Artificial Sequence
  Synthetic oligonucleotide
agtaggcgctgtctaagtatccccagtctt

SEQ ID NO: 483733 - DNA, 30 bp, Artificial Sequence
  Synthetic oligonucleotide
caacggtcgcagcgaatgacatccagtctt

SEQ ID NO: 483734 - DNA, 30 bp, Artificial Sequence
  Synthetic oligonucleotide
aattgcagacggaaagatttggggagtctt

SEQ ID NO: 483735 - DNA, 30 bp, Artificial Sequence
  Synthetic oligonucleotide
gctgggatcggccagtttacgggtagtctt

SEQ ID NO: 483736 - DNA, 30 bp, Artificial Sequence
  Synthetic oligonucleotide
ttatatacgtgttcattcacgtaccgtctt

SEQ ID NO: 483737 - DNA, 30 bp, Artificial Sequence
  Synthetic oligonucleotide
cgtgccatttagttagactggtaccgtctt

SEQ ID NO: 483738 - DNA, 30 bp, Artificial Sequence
  Synthetic oligonucleotide
gcaagaggccagcctccactgggccgtctt

SEQ ID NO: 483739 - DNA, 30 bp, Artificial Sequence
  Synthetic oligonucleotide
atctcagatacacgcaatggttcgcgtctt

SEQ ID NO: 483740 - DNA, 30 bp, Artificial Sequence
  Synthetic oligonucleotide
tatcacgggaatgaaatgagacggcgtctt

SEQ ID NO: 483741 - DNA, 30 bp, Artificial Sequence
  Synthetic oligonucleotide
gtggtgtaaatgatctccaattatcgtctt

SEQ ID NO: 483742 - DNA, 30 bp, Artificial Sequence
  Synthetic oligonucleotide
cggctcaaaagacgcatgtgacctcgtctt

SEQ ID NO: 483743 - DNA, 30 bp, Artificial Sequence
  Synthetic oligonucleotide
accacatgtgcctaaaagtttacaggtctt

SEQ ID NO: 483744 - DNA, 30 bp, Artificial Sequence
  Synthetic oligonucleotide
gtgaaggcgtttgtacccagtggaggtctt

SEQ ID NO: 483745 - DNA, 30 bp, Artificial Sequence
  Synthetic oligonucleotide
agagatacaggtttttagtcgtatggtctt

SEQ ID NO: 483746 - DNA, 30 bp, Artificial Sequence
  Synthetic oligonucleotide
tatatgaaagccttatgctaagctggtctt

SEQ ID NO: 483747 - DNA, 30 bp, Artificial Sequence
  Synthetic oligonucleotide
aaggaaggttaaacgcacaatattggtctt

SEQ ID NO: 483748 - DNA, 30 bp, Artificial Sequence
  Synthetic oligonucleotide
tttgatgcaagaatctatacagcctgtctt

SEQ ID NO: 483749 - DNA, 30 bp, Artificial Sequence
  Synthetic oligonucleotide
ttcaaccagcggcgattttagcgctgtctt

SEQ ID NO: 483750 - DNA, 30 bp, Artificial Sequence
  Synthetic oligonucleotide
ccatatgtaggtagacccttatgctgtctt

SEQ ID NO: 483751 - DNA, 30 bp, Artificial Sequence
  Synthetic oligonucleotide
gccccttggtttgctacagctaggtgtctt

SEQ ID NO: 483752 - DNA, 30 bp, Artificial Sequence
  Synthetic oligonucleotide
gaggacagcagagatgttaatctgtgtctt

SEQ ID NO: 483753 - DNA, 30 bp, Artificial Sequence
  Synthetic oligonucleotide
cttgtataattaccctgtacttcttgtctt

SEQ ID NO: 483754 - DNA, 30 bp, Artificial Sequence
  Synthetic oligonucleotide
atagagggggtaagatactttatttgtctt

SEQ ID NO: 483755 - DNA, 30 bp, Artificial Sequence
  Synthetic oligonucleotide
agtgagttggttcattagtctgtttgtctt

SEQ ID NO: 483756 - DNA, 30 bp, Artificial Sequence
  Synthetic oligonucleotide
gatgttcgaagcccccgggtcccaattctt

SEQ ID NO: 483757 - DNA, 30 bp, Artificial Sequence
  Synthetic oligonucleotide
acgacttgcggactccgcgcttcaattctt

SEQ ID NO: 483758 - DNA, 30 bp, Artificial Sequence
  Synthetic oligonucleotide
gtatgagccctagccctttccacgattctt

SEQ ID NO: 483759 - DNA, 30 bp, Artificial Sequence
  Synthetic oligonucleotide
gtagaatctccgccccagtgagggattctt

SEQ ID NO: 483760 - DNA, 30 bp, Artificial Sequence
  Synthetic oligonucleotide
agtatcagatgagtgaccagaatgattctt

SEQ ID NO: 483761 - DNA, 30 bp, Artificial Sequence
  Synthetic oligonucleotide
gatctgttccgcatgtacctaactattctt

SEQ ID NO: 483762 - DNA, 30 bp, Artificial Sequence
  Synthetic oligonucleotide
cttccctatccagattgcccctttattctt

SEQ ID NO: 483763 - DNA, 30 bp, Artificial Sequence
  Synthetic oligonucleotide
atccatttgttcattcgaatctcacttctt

SEQ ID NO: 483764 - DNA, 30 bp, Artificial Sequence
  Synthetic oligonucleotide
tttcggcagcaaaccgcgtgaaagcttctt

SEQ ID NO: 483765 - DNA, 30 bp, Artificial Sequence
  Synthetic oligonucleotide
cggtagacctttgtattcagacagcttctt

SEQ ID NO: 483766 - DNA, 30 bp, Artificial Sequence
  Synthetic oligonucleotide
cccttgtgggttatctcagaacaagttctt

SEQ ID NO: 483767 - DNA, 30 bp, Artificial Sequence
  Synthetic oligonucleotide
ctcatatcaaagtgcactgtgctagttctt

SEQ ID NO: 483768 - DNA, 30 bp, Artificial Sequence
  Synthetic oligonucleotide
tggggagccggccgggcatggtcggttctt

SEQ ID NO: 483769 - DNA, 30 bp, Artificial Sequence
  Synthetic oligonucleotide
tgacgacggtattgttatatagttgttctt

SEQ ID NO: 483770 - DNA, 30 bp, Artificial Sequence
  Synthetic oligonucleotide
gaagagtcgctttcttatctagaatttctt

SEQ ID NO: 483771 - DNA, 30 bp, Artificial Sequence
  Synthetic oligonucleotide
actccctttacaattgaatcaacatttctt

SEQ ID NO: 483772 - DNA, 30 bp, Artificial Sequence
  Synthetic oligonucleotide
ttctgtaaagatgcggacactttatttctt

SEQ ID NO: 483773 - DNA, 30 bp, Artificial Sequence
  Synthetic oligonucleotide
taaacgcagaggtgtcctctagactttctt

SEQ ID NO: 483774 - DNA, 30 bp, Artificial Sequence
  Synthetic oligonucleotide
gaggcgtcctttcctttcgggccctttctt

SEQ ID NO: 483775 - DNA, 30 bp, Artificial Sequence
  Synthetic oligonucleotide
ggtctattgataattccaaagtcctttctt

SEQ ID NO: 483776 - DNA, 30 bp, Artificial Sequence
  Synthetic oligonucleotide
acgtcttctgttgcgcatcagctctttctt

SEQ ID NO: 483777 - DNA, 30 bp, Artificial Sequence
  Synthetic oligonucleotide
ccgtggctgacggtgggccggatgtttctt

SEQ ID NO: 483778 - DNA, 30 bp, Artificial Sequence
  Synthetic oligonucleotide
taagagaagctgggcgcagatcattttctt

SEQ ID NO: 483779 - DNA, 30 bp, Artificial Sequence
  Synthetic oligonucleotide
attatcgtggcgcctacggcagtttttctt

SEQ ID NO: 483780 - DNA, 30 bp, Artificial Sequence
  Synthetic oligonucleotide
gatgaagcattttagagataataaaaagtt

SEQ ID NO: 483781 - DNA, 30 bp, Artificial Sequence
  Synthetic oligonucleotide
gcaggttaaagacagcacagtaacaaagtt

SEQ ID NO: 483782 - DNA, 30 bp, Artificial Sequence
  Synthetic oligonucleotide
tgtattagcagtaaactccggctcaaagtt

SEQ ID NO: 483783 - DNA, 30 bp, Artificial Sequence
  Synthetic oligonucleotide
ggccgacctcttatgatttctatacaagtt

SEQ ID NO: 483784 - DNA, 30 bp, Artificial Sequence
  Synthetic oligonucleotide
ccggaatttatctatgactgactacaagtt

SEQ ID NO: 483785 - DNA, 30 bp, Artificial Sequence
  Synthetic oligonucleotide
aattgatttgtaagatgttagttacaagtt

SEQ ID NO: 483786 - DNA, 30 bp, Artificial Sequence
  Synthetic oligonucleotide
gacccccggcggcgccaaacactccaagtt

SEQ ID NO: 483787 - DNA, 30 bp, Artificial Sequence
  Synthetic oligonucleotide
gtccacccgtttacgcgatccgtccaagtt

SEQ ID NO: 483788 - DNA, 30 bp, Artificial Sequence
  Synthetic oligonucleotide
tacaattccctgattggagctcagcaagtt

SEQ ID NO: 483789 - DNA, 30 bp, Artificial Sequence
  Synthetic oligonucleotide
aatctttcagcgcgtagaagttagcaagtt

SEQ ID NO: 483790 - DNA, 30 bp, Artificial Sequence
  Synthetic oligonucleotide
gttgggtctctgcaagacggaaggcaagtt

SEQ ID NO: 483791 - DNA, 30 bp, Artificial Sequence
  Synthetic oligonucleotide
gaacctcaatggactataccggtgcaagtt

SEQ ID NO: 483792 - DNA, 30 bp, Artificial Sequence
  Synthetic oligonucleotide
ccggcaaactgatgggcattccgtcaagtt

SEQ ID NO: 483793 - DNA, 30 bp, Artificial Sequence
  Synthetic oligonucleotide
caattccagcagacgttattcgttcaagtt

SEQ ID NO: 483794 - DNA, 30 bp, Artificial Sequence
  Synthetic oligonucleotide
taactagggtatgtcctgtgagcagaagtt

SEQ ID NO: 483795 - DNA, 30 bp, Artificial Sequence
  Synthetic oligonucleotide
gtttgtgggacacaattactctccgaagtt

SEQ ID NO: 483796 - DNA, 30 bp, Artificial Sequence
  Synthetic oligonucleotide
agttacattgcagtacacaacctcgaagtt

SEQ ID NO: 483797 - DNA, 30 bp, Artificial Sequence
  Synthetic oligonucleotide
atcttgacacgcggccatttggtcgaagtt

SEQ ID NO: 483798 - DNA, 30 bp, Artificial Sequence
  Synthetic oligonucleotide
aaccgcataagccccttcgttagggaagtt

SEQ ID NO: 483799 - DNA, 30 bp, Artificial Sequence
  Synthetic oligonucleotide
tccgccgcaaaaagggtaggccctgaagtt

SEQ ID NO: 483800 - DNA, 30 bp, Artificial Sequence
  Synthetic oligonucleotide
gcatttaggcactttaacgcatctgaagtt

SEQ ID NO: 483801 - DNA, 30 bp, Artificial Sequence
  Synthetic oligonucleotide
tgatattcctcgaccgtcccgcttgaagtt

SEQ ID NO: 483802 - DNA, 30 bp, Artificial Sequence
  Synthetic oligonucleotide
tttctccgtatttctactaattaataagtt

SEQ ID NO: 483803 - DNA, 30 bp, Artificial Sequence
  Synthetic oligonucleotide
tgaggttagcaaccgattgcctcataagtt

SEQ ID NO: 483804 - DNA, 30 bp, Artificial Sequence
  Synthetic oligonucleotide
ttgggttcttatgagaagtcgtcataagtt

SEQ ID NO: 483805 - DNA, 30 bp, Artificial Sequence
  Synthetic oligonucleotide
tcatttatactatcaggattgtgataagtt

SEQ ID NO: 483806 - DNA, 30 bp, Artificial Sequence
  Synthetic oligonucleotide
cgagcaacttacgatttcggtgtataagtt

SEQ ID NO: 483807 - DNA, 30 bp, Artificial Sequence
  Synthetic oligonucleotide
aggtattctttttggttgtggacctaagtt

SEQ ID NO: 483808 - DNA, 30 bp, Artificial Sequence
  Synthetic oligonucleotide
taactgatcacacaccgctcgcagtaagtt

SEQ ID NO: 483809 - DNA, 30 bp, Artificial Sequence
  Synthetic oligonucleotide
attccatgcacgtgtgggtttgagtaagtt

SEQ ID NO: 483810 - DNA, 30 bp, Artificial Sequence
  Synthetic oligonucleotide
atcggcggaaataagaatcctaggtaagtt

SEQ ID NO: 483811 - DNA, 30 bp, Artificial Sequence
  Synthetic oligonucleotide
gataacgatggtagctacgtggattaagtt

SEQ ID NO: 483812 - DNA, 30 bp, Artificial Sequence
  Synthetic oligonucleotide
tttaacgatatccaatcgatcctttaagtt

SEQ ID NO: 483813 - DNA, 30 bp, Artificial Sequence
  Synthetic oligonucleotide
agcgctatgctgggcagtaatgccacagtt

SEQ ID NO: 483814 - DNA, 30 bp, Artificial Sequence
  Synthetic oligonucleotide
tgtgccagaaaccttctcgtctatacagtt

SEQ ID NO: 483815 - DNA, 30 bp, Artificial Sequence
  Synthetic oligonucleotide
ttttgcctacccccgttttcctctacagtt

SEQ ID NO: 483816 - DNA, 30 bp, Artificial Sequence
  Synthetic oligonucleotide
gaaataagtttgctaagcgggaaaccagtt

SEQ ID NO: 483817 - DNA, 30 bp, Artificial Sequence
  Synthetic oligonucleotide
tatatattaggccttaaggtccgaccagtt

SEQ ID NO: 483818 - DNA, 30 bp, Artificial Sequence
  Synthetic oligonucleotide
taagggtggtagggtaagagttcgccagtt

SEQ ID NO: 483819 - DNA, 30 bp, Artificial Sequence
  Synthetic oligonucleotide
gcgcggcaagaacaccaaagtgtgccagtt

SEQ ID NO: 483820 - DNA, 30 bp, Artificial Sequence
  Synthetic oligonucleotide
ccgccatcatatgagaagggcttgccagtt

SEQ ID NO: 483821 - DNA, 30 bp, Artificial Sequence
  Synthetic oligonucleotide
gttattcaggatagttgagtaggggcagtt

SEQ ID NO: 483822 - DNA, 30 bp, Artificial Sequence
  Synthetic oligonucleotide
tataattaaagatcgcatcttggggcagtt

SEQ ID NO: 483823 - DNA, 30 bp, Artificial Sequence
  Synthetic oligonucleotide
gcagctatggccactgtgaagatggcagtt

SEQ ID NO: 483824 - DNA, 30 bp, Artificial Sequence
  Synthetic oligonucleotide
cccaacagaaacgtgcgtttatctgcagtt

SEQ ID NO: 483825 - DNA, 30 bp, Artificial Sequence
  Synthetic oligonucleotide
cagcaggaaacgatcgttagtattgcagtt

SEQ ID NO: 483826 - DNA, 30 bp, Artificial Sequence
  Synthetic oligonucleotide
acacaacgatgcgctaaccgcacatcagtt

SEQ ID NO: 483827 - DNA, 30 bp, Artificial Sequence
  Synthetic oligonucleotide
aatcaacgtagcgcgtaaattacatcagtt

SEQ ID NO: 483828 - DNA, 30 bp, Artificial Sequence
  Synthetic oligonucleotide
aagagcgacacactcggttaggcctcagtt

SEQ ID NO: 483829 - DNA, 30 bp, Artificial Sequence
  Synthetic oligonucleotide
tgctacttcgtgcggtaaacacagtcagtt

SEQ ID NO: 483830 - DNA, 30 bp, Artificial Sequence
  Synthetic oligonucleotide
gatttgtgtgtctatcattgggtgtcagtt

SEQ ID NO: 483831 - DNA, 30 bp, Artificial Sequence
  Synthetic oligonucleotide
ttttaacattgggtgaaaaaattgtcagtt

SEQ ID NO: 483832 - DNA, 30 bp, Artificial Sequence
  Synthetic oligonucleotide
atattattcagtgacgtatatatttcagtt

SEQ ID NO: 483833 - DNA, 30 bp, Artificial Sequence
  Synthetic oligonucleotide
ctatgctcaagtctgccctggctttcagtt

SEQ ID NO: 483834 - DNA, 30 bp, Artificial Sequence
  Synthetic oligonucleotide
aaattggctcgcgacgaccgactcagagtt

SEQ ID NO: 483835 - DNA, 30 bp, Artificial Sequence
  Synthetic oligonucleotide
gtttttgatcgtgtgtgtcaatggagagtt

SEQ ID NO: 483836 - DNA, 30 bp, Artificial Sequence
  Synthetic oligonucleotide
attgaagcgaaaactcctccgtatagagtt

SEQ ID NO: 483837 - DNA, 30 bp, Artificial Sequence
  Synthetic oligonucleotide
acaatgttctgatcgcaacgatgtcgagtt

SEQ ID NO: 483838 - DNA, 30 bp, Artificial Sequence
  Synthetic oligonucleotide
ggtttcgatattgtgtgttataacggagtt

SEQ ID NO: 483839 - DNA, 30 bp, Artificial Sequence
  Synthetic oligonucleotide
gcctttgagatggtccaacggtacggagtt

SEQ ID NO: 483840 - DNA, 30 bp, Artificial Sequence
  Synthetic oligonucleotide
tatagcggttacatttagcaaatcggagtt

SEQ ID NO: 483841 - DNA, 30 bp, Artificial Sequence
  Synthetic oligonucleotide
cggttgcttgaaccaacaactatgggagtt

SEQ ID NO: 483842 - DNA, 30 bp, Artificial Sequence
  Synthetic oligonucleotide
attatatggtcaattagatctgaatgagtt

SEQ ID NO: 483843 - DNA, 30 bp, Artificial Sequence
  Synthetic oligonucleotide
gattatagggattaatctgggttatgagtt

SEQ ID NO: 483844 - DNA, 30 bp, Artificial Sequence
  Synthetic oligonucleotide
tagaactctgtggaacaatagaactgagtt

SEQ ID NO: 483845 - DNA, 30 bp, Artificial Sequence
  Synthetic oligonucleotide
gcgctctccttgactgagcgatcctgagtt

SEQ ID NO: 483846 - DNA, 30 bp, Artificial Sequence
  Synthetic oligonucleotide
ctttataatggcatggacactctctgagtt

SEQ ID NO: 483847 - DNA, 30 bp, Artificial Sequence
  Synthetic oligonucleotide
tcgctttaatatattaggcttacgtgagtt

SEQ ID NO: 483848 - DNA, 30 bp, Artificial Sequence
  Synthetic oligonucleotide
ttggttctgctcaggactggttcgtgagtt

SEQ ID NO: 483849 - DNA, 30 bp, Artificial Sequence
  Synthetic oligonucleotide
tttacgagggtcgcgtttgattattgagtt

SEQ ID NO: 483850 - DNA, 30 bp, Artificial Sequence
  Synthetic oligonucleotide
cgcggctgtatgggactgtattattgagtt

SEQ ID NO: 483851 - DNA, 30 bp, Artificial Sequence
  Synthetic oligonucleotide
cgcaaatctacccgagtaatcccttgagtt

SEQ ID NO: 483852 - DNA, 30 bp, Artificial Sequence
  Synthetic oligonucleotide
gatgtgattattgcaagtgatagttgagtt

SEQ ID NO: 483853 - DNA, 30 bp, Artificial Sequence
  Synthetic oligonucleotide
taccttatgggggctgaatggatttgagtt

SEQ ID NO: 483854 - DNA, 30 bp, Artificial Sequence
  Synthetic oligonucleotide
tacgaaatgatgtttattagggtttgagtt

SEQ ID NO: 483855 - DNA, 30 bp, Artificial Sequence
  Synthetic oligonucleotide
tgttttatttataggtgttgtgtttgagtt

SEQ ID NO: 483856 - DNA, 30 bp, Artificial Sequence
  Synthetic oligonucleotide
ggttctaatgtagatacacgtacaatagtt

SEQ ID NO: 483857 - DNA, 30 bp, Artificial Sequence
  Synthetic oligonucleotide
aggcggacttttttcttttgcgacatagtt

SEQ ID NO: 483858 - DNA, 30 bp, Artificial Sequence
  Synthetic oligonucleotide
cttgtttaacatctgcgatattacatagtt

SEQ ID NO: 483859 - DNA, 30 bp, Artificial Sequence
  Synthetic oligonucleotide
ctagcgtggcgaacggcagcttccatagtt

SEQ ID NO: 483860 - DNA, 30 bp, Artificial Sequence
  Synthetic oligonucleotide
ctgagactgttttttggtcccccgatagtt

SEQ ID NO: 483861 - DNA, 30 bp, Artificial Sequence
  Synthetic oligonucleotide
ctgtcgactttgccaattatatggatagtt

SEQ ID NO: 483862 - DNA, 30 bp, Artificial Sequence
  Synthetic oligonucleotide
gtgcatccggaaccactgatgatgatagtt

SEQ ID NO: 483863 - DNA, 30 bp, Artificial Sequence
  Synthetic oligonucleotide
atatactttgaaaaggcaggattgatagtt

SEQ ID NO: 483864 - DNA, 30 bp, Artificial Sequence
  Synthetic oligonucleotide
gactttgctgagaacttagtaaatatagtt

SEQ ID NO: 483865 - DNA, 30 bp, Artificial Sequence
  Synthetic oligonucleotide
ctctagcgaattttagtaaccaatatagtt

SEQ ID NO: 483866 - DNA, 30 bp, Artificial Sequence
  Synthetic oligonucleotide
actgttttttcgtaggcttaccctatagtt

SEQ ID NO: 483867 - DNA, 30 bp, Artificial Sequence
  Synthetic oligonucleotide
aacaatactagtcattacaccgctatagtt

SEQ ID NO: 483868 - DNA, 30 bp, Artificial Sequence
  Synthetic oligonucleotide
ggcggcgatgctcgataccgggctatagtt

SEQ ID NO: 483869 - DNA, 30 bp, Artificial Sequence
  Synthetic oligonucleotide
agacaaacggagaacatatcccttatagtt

SEQ ID NO: 483870 - DNA, 30 bp, Artificial Sequence
  Synthetic oligonucleotide
tgggttacccccattggggtatttatagtt

SEQ ID NO: 483871 - DNA, 30 bp, Artificial Sequence
  Synthetic oligonucleotide
ttcgctgaggcatagttgataaaactagtt

SEQ ID NO: 483872 - DNA, 30 bp, Artificial Sequence
  Synthetic oligonucleotide
cccctgaggccgctagatcgccgactagtt

SEQ ID NO: 483873 - DNA, 30 bp, Artificial Sequence
  Synthetic oligonucleotide
tgctcgcttttgagtttaagggggctagtt

SEQ ID NO: 483874 - DNA, 30 bp, Artificial Sequence
  Synthetic oligonucleotide
attccgcaggcttgcgctctatgtctagtt

SEQ ID NO: 483875 - DNA, 30 bp, Artificial Sequence
  Synthetic oligonucleotide
ccctactgtgcataccagtacgttctagtt

SEQ ID NO: 483876 - DNA, 30 bp, Artificial Sequence
  Synthetic oligonucleotide
gtaaactatcgctccacgagccaagtagtt

SEQ ID NO: 483877 - DNA, 30 bp, Artificial Sequence
  Synthetic oligonucleotide
tatcccctgcgaagtggtccgtcagtagtt

SEQ ID NO: 483878 - DNA, 30 bp, Artificial Sequence
  Synthetic oligonucleotide
tgaattgataggacgcctgactgagtagtt

SEQ ID NO: 483879 - DNA, 30 bp, Artificial Sequence
  Synthetic oligonucleotide
tggattctgttctgcagtcagtccgtagtt

SEQ ID NO: 483880 - DNA, 30 bp, Artificial Sequence
  Synthetic oligonucleotide
gtttcctgagcgaatagaggtggcgtagtt

SEQ ID NO: 483881 - DNA, 30 bp, Artificial Sequence
  Synthetic oligonucleotide
aatacacgttatttcaataggtgcgtagtt

SEQ ID NO: 483882 - DNA, 30 bp, Artificial Sequence
  Synthetic oligonucleotide
caggaagataaatgcctggaggcattagtt

SEQ ID NO: 483883 - DNA, 30 bp, Artificial Sequence
  Synthetic oligonucleotide
tgtctggcaggcctaaactaggctttagtt

SEQ ID NO: 483884 - DNA, 30 bp, Artificial Sequence
  Synthetic oligonucleotide
tacttatacggcgataagaattgtttagtt

SEQ ID NO: 483885 - DNA, 30 bp, Artificial Sequence
  Synthetic oligonucleotide
gcaaacggcctgtgttgacgatagaacgtt

SEQ ID NO: 483886 - DNA, 30 bp, Artificial Sequence
  Synthetic oligonucleotide
gagatacgtgccattgctataatgaacgtt

SEQ ID NO: 483887 - DNA, 30 bp, Artificial Sequence
  Synthetic oligonucleotide
aactattagcgagctggtagtaataacgtt

SEQ ID NO: 483888 - DNA, 30 bp, Artificial Sequence
  Synthetic oligonucleotide
catcggatatgaccgcacaatgctaacgtt

SEQ ID NO: 483889 - DNA, 30 bp, Artificial Sequence
  Synthetic oligonucleotide
actatcttgcactgaagtacaagtaacgtt

SEQ ID NO: 483890 - DNA, 30 bp, Artificial Sequence
  Synthetic oligonucleotide
ctcagcgcactagcacagagtatacacgtt

SEQ ID NO: 483891 - DNA, 30 bp, Artificial Sequence
  Synthetic oligonucleotide
cgatggatcagcctgaagatccaccacgtt

SEQ ID NO: 483892 - DNA, 31 bp, Artificial Sequence
  Synthetic oligonucleotide
gaaggttataggttctcgcccgcgccacgtt

SEQ ID NO: 483893 - DNA, 30 bp, Artificial Sequence
  Synthetic oligonucleotide
gcaattacattaggggacgttaagcacgtt

SEQ ID NO: 483894 - DNA, 30 bp, Artificial Sequence
  Synthetic oligonucleotide
attgtgcgtaagtgcatgggtattcacgtt

SEQ ID NO: 483895 - DNA, 30 bp, Artificial Sequence
  Synthetic oligonucleotide
gcccctcttccacgaccttcggttcacgtt

SEQ ID NO: 483896 - DNA, 30 bp, Artificial Sequence
  Synthetic oligonucleotide
agttaccaggcgatttcaacaagagacgtt

SEQ ID NO: 483897 - DNA, 30 bp, Artificial Sequence
  Synthetic oligonucleotide
caacacatacgtctggcaaaacgagacgtt

SEQ ID NO: 483898 - DNA, 30 bp, Artificial Sequence
  Synthetic oligonucleotide
cgcccatggtttaggacctaaatagacgtt

SEQ ID NO: 483899 - DNA, 30 bp, Artificial Sequence
  Synthetic oligonucleotide
gcccctcagctagaatatcggcccgacgtt

SEQ ID NO: 483900 - DNA, 30 bp, Artificial Sequence
  Synthetic oligonucleotide
gcaaactgctgaggggtctttgccgacgtt

SEQ ID NO: 483901 - DNA, 30 bp, Artificial Sequence
  Synthetic oligonucleotide
atgatcgggctctatcaagatatcgacgtt

SEQ ID NO: 483902 - DNA, 30 bp, Artificial Sequence
  Synthetic oligonucleotide
aaatatgatacgtctcgatggtcggacgtt

SEQ ID NO: 483903 - DNA, 30 bp, Artificial Sequence
  Synthetic oligonucleotide
acacgagggaaacgtacgcaactggacgtt

SEQ ID NO: 483904 - DNA, 30 bp, Artificial Sequence
  Synthetic oligonucleotide
tgtagcatcctaggaatttacctggacgtt

SEQ ID NO: 483905 - DNA, 30 bp, Artificial Sequence
  Synthetic oligonucleotide
gatggagtaaacgtagaattgcgatacgtt

SEQ ID NO: 483906 - DNA, 30 bp, Artificial Sequence
  Synthetic oligonucleotide
accgtcagaagtaccgcgcagtagtacgtt

SEQ ID NO: 483907 - DNA, 30 bp, Artificial Sequence
  Synthetic oligonucleotide
acctcggccctctttcgcgttttgtacgtt

SEQ ID NO: 483908 - DNA, 30 bp, Artificial Sequence
  Synthetic oligonucleotide
cggtggaatgctcgtattacaccttacgtt

SEQ ID NO: 483909 - DNA, 30 bp, Artificial Sequence
  Synthetic oligonucleotide
aaaccaaaagactcattagccggttacgtt

SEQ ID NO: 483910 - DNA, 30 bp, Artificial Sequence
  Synthetic oligonucleotide
gttacataactatcacgcaaatgttacgtt

SEQ ID NO: 483911 - DNA, 30 bp, Artificial Sequence
  Synthetic oligonucleotide
ggagggccctcgtaacgggatctttacgtt

SEQ ID NO: 483912 - DNA, 30 bp, Artificial Sequence
  Synthetic oligonucleotide
cccgaactacgattagcaactcaaaccgtt

SEQ ID NO: 483913 - DNA, 30 bp, Artificial Sequence
  Synthetic oligonucleotide
gaaaaaagacgccccgcagcaggaaccgtt

SEQ ID NO: 483914 - DNA, 30 bp, Artificial Sequence
  Synthetic oligonucleotide
taacagaacgaagagtacggcgtaaccgtt

SEQ ID NO: 483915 - DNA, 31 bp, Artificial Sequence
  Synthetic oligonucleotide
tttgaagatgtgcccgtaccgcacgaccgtt

SEQ ID NO: 483916 - DNA, 30 bp, Artificial Sequence
  Synthetic oligonucleotide
ttccccggtgtttatctgattacgaccgtt

SEQ ID NO: 483917 - DNA, 30 bp, Artificial Sequence
  Synthetic oligonucleotide
gaaatctctatataggtgagcgggaccgtt

SEQ ID NO: 483918 - DNA, 30 bp, Artificial Sequence
  Synthetic oligonucleotide
aagatcaaatttttcattcaaaataccgtt

SEQ ID NO: 483919 - DNA, 30 bp, Artificial Sequence
  Synthetic oligonucleotide
ttcttcaaggtatagagtattaataccgtt

SEQ ID NO: 483920 - DNA, 30 bp, Artificial Sequence
  Synthetic oligonucleotide
ctgggtattgagtgcatctgctaacccgtt

SEQ ID NO: 483921 - DNA, 30 bp, Artificial Sequence
  Synthetic oligonucleotide
gaaatttgcgagctgagtggttcccccgtt

SEQ ID NO: 483922 - DNA, 30 bp, Artificial Sequence
  Synthetic oligonucleotide
gtctagaccttgattttcacgacgcccgtt

SEQ ID NO: 483923 - DNA, 30 bp, Artificial Sequence
  Synthetic oligonucleotide
acccggatcggtttctgttatgggcccgtt

SEQ ID NO: 483924 - DNA, 30 bp, Artificial Sequence
  Synthetic oligonucleotide
ttgtcgttgacgagcggccttgtgcccgtt

SEQ ID NO: 483925 - DNA, 30 bp, Artificial Sequence
  Synthetic oligonucleotide
tcgcgtttactttctagcaggtacgccgtt

SEQ ID NO: 483926 - DNA, 30 bp, Artificial Sequence
  Synthetic oligonucleotide
taagtattcacacacagctagcgggccgtt

SEQ ID NO: 483927 - DNA, 30 bp, Artificial Sequence
  Synthetic oligonucleotide
aatttgcggtacgttgtttgtcgtgccgtt

SEQ ID NO: 483928 - DNA, 30 bp, Artificial Sequence
  Synthetic oligonucleotide
aatgtaacggtattaggtggaacatccgtt

SEQ ID NO: 483929 - DNA, 30 bp, Artificial Sequence
  Synthetic oligonucleotide
taatatggtactttgttcgtggcatccgtt

SEQ ID NO: 483930 - DNA, 30 bp, Artificial Sequence
  Synthetic oligonucleotide
taaaaaggtcacagcttgtcatcatccgtt

SEQ ID NO: 483931 - DNA, 30 bp, Artificial Sequence
  Synthetic oligonucleotide
ataaccctgaaatcatgttcgcggtccgtt

SEQ ID NO: 483932 - DNA, 30 bp, Artificial Sequence
  Synthetic oligonucleotide
ccctcctagtatgtatattacagttccgtt

SEQ ID NO: 483933 - DNA, 30 bp, Artificial Sequence
  Synthetic oligonucleotide
catgacctaggcgaagcgcaagcaagcgtt

SEQ ID NO: 483934 - DNA, 30 bp, Artificial Sequence
  Synthetic oligonucleotide
gcttgttgggccacttttaggggaagcgtt

SEQ ID NO: 483935 - DNA, 30 bp, Artificial Sequence
  Synthetic oligonucleotide
aactctgggtacaactgactggccagcgtt

SEQ ID NO: 483936 - DNA, 30 bp, Artificial Sequence
  Synthetic oligonucleotide
cccatgacgcattcacagacccagagcgtt

SEQ ID NO: 483937 - DNA, 30 bp, Artificial Sequence
  Synthetic oligonucleotide
atgggcgggaggatctaggtatagagcgtt

SEQ ID NO: 483938 - DNA, 30 bp, Artificial Sequence
  Synthetic oligonucleotide
gatctaataattccactaccgactagcgtt

SEQ ID NO: 483939 - DNA, 30 bp, Artificial Sequence
  Synthetic oligonucleotide
tcgctttgcttgtccgatcggcctagcgtt

SEQ ID NO: 483940 - DNA, 30 bp, Artificial Sequence
  Synthetic oligonucleotide
ttgctcaatagcaacagtaaatgtagcgtt

SEQ ID NO: 483941 - DNA, 30 bp, Artificial Sequence
  Synthetic oligonucleotide
ctatggggttcggagcgtcttaaacgcgtt

SEQ ID NO: 483942 - DNA, 30 bp, Artificial Sequence
  Synthetic oligonucleotide
ctactgcaccctagaaacatgcaacgcgtt

SEQ ID NO: 483943 - DNA, 30 bp, Artificial Sequence
  Synthetic oligonucleotide
agttttcctcccagtttatgcacacgcgtt

SEQ ID NO: 483944 - DNA, 30 bp, Artificial Sequence
  Synthetic oligonucleotide
actatgatatcaacggggatgttccgcgtt

SEQ ID NO: 483945 - DNA, 30 bp, Artificial Sequence
  Synthetic oligonucleotide
tttaaaataatgacatcgatgtagcgcgtt

SEQ ID NO: 483946 - DNA, 30 bp, Artificial Sequence
  Synthetic oligonucleotide
gagtgtatcgcaaacttcccgtggcgcgtt

SEQ ID NO: 483947 - DNA, 30 bp, Artificial Sequence
  Synthetic oligonucleotide
gccttcacacgtggccccataatgcgcgtt

SEQ ID NO: 483948 - DNA, 30 bp, Artificial Sequence
  Synthetic oligonucleotide
acgcggtattagtccctgtcgattcgcgtt

SEQ ID NO: 483949 - DNA, 30 bp, Artificial Sequence
  Synthetic oligonucleotide
agcccactgctgatagagaacgcaggcgtt

SEQ ID NO: 483950 - DNA, 30 bp, Artificial Sequence
  Synthetic oligonucleotide
aacggctcgtctacagagatatgaggcgtt

SEQ ID NO: 483951 - DNA, 30 bp, Artificial Sequence
  Synthetic oligonucleotide
caaaataagcacagcgccagaatcggcgtt

SEQ ID NO: 483952 - DNA, 30 bp, Artificial Sequence
  Synthetic oligonucleotide
agcacctttatgtggatttaactcggcgtt

SEQ ID NO: 483953 - DNA, 29 bp, Artificial Sequence
  Synthetic oligonucleotide
cgggattacagccggcttatacgggcgtt

SEQ ID NO: 483954 - DNA, 30 bp, Artificial Sequence
  Synthetic oligonucleotide
aatactattcgataactggacgcgggcgtt

SEQ ID NO: 483955 - DNA, 30 bp, Artificial Sequence
  Synthetic oligonucleotide
actggcaatttctacaagttctggggcgtt

SEQ ID NO: 483956 - DNA, 30 bp, Artificial Sequence
  Synthetic oligonucleotide
cagaaaggtcatctactttgcatatgcgtt

SEQ ID NO: 483957 - DNA, 30 bp, Artificial Sequence
  Synthetic oligonucleotide
ggttcagacaatagcatcctgttttgcgtt

SEQ ID NO: 483958 - DNA, 30 bp, Artificial Sequence
  Synthetic oligonucleotide
tgtaatctgccgttatatacccaaatcgtt

SEQ ID NO: 483959 - DNA, 30 bp, Artificial Sequence
  Synthetic oligonucleotide
gggtatgcatatgcatctcgataaatcgtt

SEQ ID NO: 483960 - DNA, 30 bp, Artificial Sequence
  Synthetic oligonucleotide
tgattagggagattgtgcgtgcgcatcgtt

SEQ ID NO: 483961 - DNA, 30 bp, Artificial Sequence
  Synthetic oligonucleotide
tcaacgccgattaatactattatgatcgtt

SEQ ID NO: 483962 - DNA, 30 bp, Artificial Sequence
  Synthetic oligonucleotide
gcacctgaacgacggccaccacgtatcgtt

SEQ ID NO: 483963 - DNA, 30 bp, Artificial Sequence
  Synthetic oligonucleotide
caccatgtggcgtatgatgacgcactcgtt

SEQ ID NO: 483964 - DNA, 30 bp, Artificial Sequence
  Synthetic oligonucleotide
atctatgtcaagggtgtgagagacctcgtt

SEQ ID NO: 483965 - DNA, 30 bp, Artificial Sequence
  Synthetic oligonucleotide
ggattacgtacccctgtttcagccctcgtt

SEQ ID NO: 483966 - DNA, 30 bp, Artificial Sequence
  Synthetic oligonucleotide
cctttcgccgtccacgcagcgcctgtcgtt

SEQ ID NO: 483967 - DNA, 30 bp, Artificial Sequence
  Synthetic oligonucleotide
taggctcgacggctttggctgtttgtcgtt

SEQ ID NO: 483968 - DNA, 30 bp, Artificial Sequence
  Synthetic oligonucleotide
gcccggctatttttctgaccgagcttcgtt

SEQ ID NO: 483969 - DNA, 30 bp, Artificial Sequence
  Synthetic oligonucleotide
tttagcaggtgtgacattcagttcttcgtt

SEQ ID NO: 483970 - DNA, 30 bp, Artificial Sequence
  Synthetic oligonucleotide
gtcccctgacccccaagccaactgttcgtt

SEQ ID NO: 483971 - DNA, 30 bp, Artificial Sequence
  Synthetic oligonucleotide
ccattgtacttgaagtgaaacgtgttcgtt

SEQ ID NO: 483972 - DNA, 30 bp, Artificial Sequence
  Synthetic oligonucleotide
ggtacgttaacttactacgaaattttcgtt

SEQ ID NO: 483973 - DNA, 30 bp, Artificial Sequence
  Synthetic oligonucleotide
ggacggattcgcagggtagacgttttcgtt

SEQ ID NO: 483974 - DNA, 30 bp, Artificial Sequence
  Synthetic oligonucleotide
gcagacaaacttttcgtaatgtttttcgtt

SEQ ID NO: 483975 - DNA, 30 bp, Artificial Sequence
  Synthetic oligonucleotide
atatctaaaagcgcccaatgtccaaaggtt

SEQ ID NO: 483976 - DNA, 30 bp, Artificial Sequence
  Synthetic oligonucleotide
tacttgggatttttactgcaatcaaaggtt

SEQ ID NO: 483977 - DNA, 30 bp, Artificial Sequence
  Synthetic oligonucleotide
ttcagccccagtttcctatctttaaaggtt

SEQ ID NO: 483978 - DNA, 30 bp, Artificial Sequence
  Synthetic oligonucleotide
gatgcccccatggacggctccgtcaaggtt

SEQ ID NO: 483979 - DNA, 30 bp, Artificial Sequence
  Synthetic oligonucleotide
agggctgttagccccgcgaggggacaggtt

SEQ ID NO: 483980 - DNA, 30 bp, Artificial Sequence
  Synthetic oligonucleotide
ttgaccttttaaaccttctcagaccaggtt

SEQ ID NO: 483981 - DNA, 30 bp, Artificial Sequence
  Synthetic oligonucleotide
agctttttttgcatggaatccacccaggtt

SEQ ID NO: 483982 - DNA, 30 bp, Artificial Sequence
  Synthetic oligonucleotide
taagtcaaccactttgaacttgcgcaggtt

SEQ ID NO: 483983 - DNA, 30 bp, Artificial Sequence
  Synthetic oligonucleotide
aaagtctgtgtaccttgacgatttcaggtt

SEQ ID NO: 483984 - DNA, 30 bp, Artificial Sequence
  Synthetic oligonucleotide
tattctggctcaagtgggaaaagagaggtt

SEQ ID NO: 483985 - DNA, 30 bp, Artificial Sequence
  Synthetic oligonucleotide
ttacattaaacctagctgtgcaccgaggtt

SEQ ID NO: 483986 - DNA, 30 bp, Artificial Sequence
  Synthetic oligonucleotide
atcgctcacgcaggtaaaacgatcgaggtt

SEQ ID NO: 483987 - DNA, 30 bp, Artificial Sequence
  Synthetic oligonucleotide
ggaacattggttactcgttttttggaggtt

SEQ ID NO: 483988 - DNA, 30 bp, Artificial Sequence
  Synthetic oligonucleotide
caaagtcttggggctaacagtagataggtt

SEQ ID NO: 483989 - DNA, 30 bp, Artificial Sequence
  Synthetic oligonucleotide
tcctaattttacaagtctcatctataggtt

SEQ ID NO: 483990 - DNA, 30 bp, Artificial Sequence
  Synthetic oligonucleotide
gatacctcaaaccccgtcgcggactaggtt

SEQ ID NO: 483991 - DNA, 30 bp, Artificial Sequence
  Synthetic oligonucleotide
tggttagtatgtcgtagactgttctaggtt

SEQ ID NO: 483992 - DNA, 30 bp, Artificial Sequence
  Synthetic oligonucleotide
acttgtgggtagcaccaggtgttctaggtt

SEQ ID NO: 483993 - DNA, 30 bp, Artificial Sequence
  Synthetic oligonucleotide
cccactcaaggttctaccgtccggtaggtt

SEQ ID NO: 483994 - DNA, 30 bp, Artificial Sequence
  Synthetic oligonucleotide
cacctgagatttacgtaagccctttaggtt

SEQ ID NO: 483995 - DNA, 30 bp, Artificial Sequence
  Synthetic oligonucleotide
taataaggttcaagtaagatcgaaacggtt

SEQ ID NO: 483996 - DNA, 31 bp, Artificial Sequence
  Synthetic oligonucleotide
accttagcccagtatgtttaccggcacggtt

SEQ ID NO: 483997 - DNA, 30 bp, Artificial Sequence
  Synthetic oligonucleotide
tcgcttttgaacgttcagctaccgacggtt

SEQ ID NO: 483998 - DNA, 30 bp, Artificial Sequence
  Synthetic oligonucleotide
cgtcagttggtcatagctctttcgacggtt

SEQ ID NO: 483999 - DNA, 30 bp, Artificial Sequence
  Synthetic oligonucleotide
gggtcggtataatataggaaacgaccggtt

SEQ ID NO: 484000 - DNA, 30 bp, Artificial Sequence
  Synthetic oligonucleotide
gacggggcgcgaccgcgtaatataccggtt

SEQ ID NO: 484001 - DNA, 30 bp, Artificial Sequence
  Synthetic oligonucleotide
atcgctagagattattttcctgccccggtt

SEQ ID NO: 484002 - DNA, 30 bp, Artificial Sequence
  Synthetic oligonucleotide
aattcttatttaaggtcaaacctgccggtt

SEQ ID NO: 484003 - DNA, 30 bp, Artificial Sequence
  Synthetic oligonucleotide
gtttgaaagattaaggaggtcgctccggtt

SEQ ID NO: 484004 - DNA, 30 bp, Artificial Sequence
  Synthetic oligonucleotide
aatgcccgatcgcaaatagtctgtccggtt

SEQ ID NO: 484005 - DNA, 30 bp, Artificial Sequence
  Synthetic oligonucleotide
tctaggtcctgtcaagccacttgagcggtt

SEQ ID NO: 484006 - DNA, 30 bp, Artificial Sequence
  Synthetic oligonucleotide
gccagctaagttaggtgtaatcctgcggtt

SEQ ID NO: 484007 - DNA, 30 bp, Artificial Sequence
  Synthetic oligonucleotide
agcttctaaggctcctgcgaggtttcggtt

SEQ ID NO: 484008 - DNA, 30 bp, Artificial Sequence
  Synthetic oligonucleotide
atcctcggcctttgcgttctattttcggtt

SEQ ID NO: 484009 - DNA, 29 bp, Artificial Sequence
  Synthetic oligonucleotide
gtcaaagtgagataggaaaaaaaagggtt

SEQ ID NO: 484010 - DNA, 30 bp, Artificial Sequence
  Synthetic oligonucleotide
ccggtcgtgatcaaatgtgggaaaagggtt

SEQ ID NO: 484011 - DNA, 30 bp, Artificial Sequence
  Synthetic oligonucleotide
acaccgatttcctgcagtggctacagggtt

SEQ ID NO: 484012 - DNA, 30 bp, Artificial Sequence
  Synthetic oligonucleotide
gagatttgtgcctgacaggactgcagggtt

SEQ ID NO: 484013 - DNA, 30 bp, Artificial Sequence
  Synthetic oligonucleotide
tctatagggtttcgatcgtgctgcagggtt

SEQ ID NO: 484014 - DNA, 30 bp, Artificial Sequence
  Synthetic oligonucleotide
taagccacagggcatggcatggatagggtt

SEQ ID NO: 484015 - DNA, 30 bp, Artificial Sequence
  Synthetic oligonucleotide
ttggtttattagtttagaggggctagggtt

SEQ ID NO: 484016 - DNA, 30 bp, Artificial Sequence
  Synthetic oligonucleotide
ccggctagctcagtgcaattacttagggtt

SEQ ID NO: 484017 - DNA, 30 bp, Artificial Sequence
  Synthetic oligonucleotide
gaacctttggggaatctgtgacaacgggtt

SEQ ID NO: 484018 - DNA, 30 bp, Artificial Sequence
  Synthetic oligonucleotide
gcaggaacccaactacaccatagacgggtt

SEQ ID NO: 484019 - DNA, 30 bp, Artificial Sequence
  Synthetic oligonucleotide
ttcgtacgatcaaaggaagctgtacgggtt

SEQ ID NO: 484020 - DNA, 31 bp, Artificial Sequence
  Synthetic oligonucleotide
ctcctgtatctgcatagcggcgcaccgggtt

SEQ ID NO: 484021 - DNA, 30 bp, Artificial Sequence
  Synthetic oligonucleotide
ttctgtctcaacaagcgttgtatccgggtt

SEQ ID NO: 484022 - DNA, 30 bp, Artificial Sequence
  Synthetic oligonucleotide
gactatcattaacagttagtggcgcgggtt

SEQ ID NO: 484023 - DNA, 30 bp, Artificial Sequence
  Synthetic oligonucleotide
gagacgaaacactaatttatctcgcgggtt

SEQ ID NO: 484024 - DNA, 30 bp, Artificial Sequence
  Synthetic oligonucleotide
gattcttgtgaaagatgattcatgcgggtt

SEQ ID NO: 484025 - DNA, 30 bp, Artificial Sequence
  Synthetic oligonucleotide
gtaacccgggtatattagaccaatcgggtt

SEQ ID NO: 484026 - DNA, 30 bp, Artificial Sequence
  Synthetic oligonucleotide
atgggtcgtattggcaaacgcagtcgggtt

SEQ ID NO: 484027 - DNA, 30 bp, Artificial Sequence
  Synthetic oligonucleotide
ttcatatagcccgagcaatttcgtcgggtt

SEQ ID NO: 484028 - DNA, 30 bp, Artificial Sequence
  Synthetic oligonucleotide
aggaacgatcgaaggactggcgttcgggtt

SEQ ID NO: 484029 - DNA, 30 bp, Artificial Sequence
  Synthetic oligonucleotide
cgttgttacccctgtcttctcctaggggtt

SEQ ID NO: 484030 - DNA, 30 bp, Artificial Sequence
  Synthetic oligonucleotide
tggggatagccacatattcaacccggggtt

SEQ ID NO: 484031 - DNA, 30 bp, Artificial Sequence
  Synthetic oligonucleotide
taacagttgatcgacgctagtcgcggggtt

SEQ ID NO: 484032 - DNA, 30 bp, Artificial Sequence
  Synthetic oligonucleotide
aatgtgaaatccgacccctttttcggggtt

SEQ ID NO: 484033 - DNA, 30 bp, Artificial Sequence
  Synthetic oligonucleotide
ccggttttgtgggtagggtacaatggggtt

SEQ ID NO: 484034 - DNA, 30 bp, Artificial Sequence
  Synthetic oligonucleotide
tatacgggcttaataacttagtgtggggtt

SEQ ID NO: 484035 - DNA, 30 bp, Artificial Sequence
  Synthetic oligonucleotide
cccctagagcggcgctcgaatacctgggtt

SEQ ID NO: 484036 - DNA, 30 bp, Artificial Sequence
  Synthetic oligonucleotide
ttttttgcaaactagctggaagagtgggtt

SEQ ID NO: 484037 - DNA, 30 bp, Artificial Sequence
  Synthetic oligonucleotide
gggacaatgtagggctccgggtagtgggtt

SEQ ID NO: 484038 - DNA, 30 bp, Artificial Sequence
  Synthetic oligonucleotide
cttgcggcggttggcactgcaaggtgggtt

SEQ ID NO: 484039 - DNA, 30 bp, Artificial Sequence
  Synthetic oligonucleotide
atctcttacggttcctccagtgggtgggtt

SEQ ID NO: 484040 - DNA, 30 bp, Artificial Sequence
  Synthetic oligonucleotide
tgatacgggtaccacgcaatgttgtgggtt

SEQ ID NO: 484041 - DNA, 30 bp, Artificial Sequence
  Synthetic oligonucleotide
ctggaaaacaccgtgaatagattttgggtt

SEQ ID NO: 484042 - DNA, 30 bp, Artificial Sequence
  Synthetic oligonucleotide
tggttagtcgatgtccagcggttaatggtt

SEQ ID NO: 484043 - DNA, 30 bp, Artificial Sequence
  Synthetic oligonucleotide
aatacttcctctaagcagttatgcatggtt

SEQ ID NO: 484044 - DNA, 27 bp, Artificial Sequence
  Synthetic oligonucleotide
cattgggtcgaatgaaggcttatggtt

SEQ ID NO: 484045 - DNA, 30 bp, Artificial Sequence
  Synthetic oligonucleotide
atcagtttatacgcctaaggcacactggtt

SEQ ID NO: 484046 - DNA, 30 bp, Artificial Sequence
  Synthetic oligonucleotide
ggtgtgtagctagggtgctaaaacctggtt

SEQ ID NO: 484047 - DNA, 30 bp, Artificial Sequence
  Synthetic oligonucleotide
ctaccaagctgtcttatactgcacctggtt

SEQ ID NO: 484048 - DNA, 30 bp, Artificial Sequence
  Synthetic oligonucleotide
gatattttctacagacgcccacagctggtt

SEQ ID NO: 484049 - DNA, 30 bp, Artificial Sequence
  Synthetic oligonucleotide
ggtcaagggggtaccgtatagttgctggtt

SEQ ID NO: 484050 - DNA, 30 bp, Artificial Sequence
  Synthetic oligonucleotide
gtcagggtgaggaagtcggttcaagtggtt

SEQ ID NO: 484051 - DNA, 30 bp, Artificial Sequence
  Synthetic oligonucleotide
tttttgctacaacatgtacctgtagtggtt

SEQ ID NO: 484052 - DNA, 30 bp, Artificial Sequence
  Synthetic oligonucleotide
tggttaaccgagatcaacgtttcggtggtt

SEQ ID NO: 484053 - DNA, 30 bp, Artificial Sequence
  Synthetic oligonucleotide
ggcaataacgcagcagccttaactgtggtt

SEQ ID NO: 484054 - DNA, 30 bp, Artificial Sequence
  Synthetic oligonucleotide
ctttgcgctgtttctcattaaagtgtggtt

SEQ ID NO: 484055 - DNA, 30 bp, Artificial Sequence
  Synthetic oligonucleotide
aacaaccattgtatcttcgacaaattggtt

SEQ ID NO: 484056 - DNA, 30 bp, Artificial Sequence
  Synthetic oligonucleotide
gaccccaaggggacaggaaggcaattggtt

SEQ ID NO: 484057 - DNA, 30 bp, Artificial Sequence
  Synthetic oligonucleotide
aaatgatgaagaacccaggatacattggtt

SEQ ID NO: 484058 - DNA, 30 bp, Artificial Sequence
  Synthetic oligonucleotide
cagagtatcaaattgtgcgagttcttggtt

SEQ ID NO: 484059 - DNA, 30 bp, Artificial Sequence
  Synthetic oligonucleotide
acaattccttcccgtaaagggccgttggtt

SEQ ID NO: 484060 - DNA, 30 bp, Artificial Sequence
  Synthetic oligonucleotide
attacgcggcagggaccaagactgttggtt

SEQ ID NO: 484061 - DNA, 30 bp, Artificial Sequence
  Synthetic oligonucleotide
aggcgtcaatattcaccccaggtgttggtt

SEQ ID NO: 484062 - DNA, 30 bp, Artificial Sequence
  Synthetic oligonucleotide
gtctcgtcagtgagacccaacgatttggtt

SEQ ID NO: 484063 - DNA, 30 bp, Artificial Sequence
  Synthetic oligonucleotide
gtgattaagcttcaattgcggagcaatgtt

SEQ ID NO: 484064 - DNA, 30 bp, Artificial Sequence
  Synthetic oligonucleotide
aactccaggctggggtagcacctcaatgtt

SEQ ID NO: 484065 - DNA, 30 bp, Artificial Sequence
  Synthetic oligonucleotide
tatcccctatcgatatttgatgggaatgtt

SEQ ID NO: 484066 - DNA, 30 bp, Artificial Sequence
  Synthetic oligonucleotide
tcacattcaggcggggaacccctgaatgtt

SEQ ID NO: 484067 - DNA, 30 bp, Artificial Sequence
  Synthetic oligonucleotide
gtataggaaaccacatgtatgactaatgtt

SEQ ID NO: 484068 - DNA, 30 bp, Artificial Sequence
  Synthetic oligonucleotide
tgatacctgtgggttgtaacaggtaatgtt

SEQ ID NO: 484069 - DNA, 30 bp, Artificial Sequence
  Synthetic oligonucleotide
ttttttgtaggtattgagaagtttaatgtt

SEQ ID NO: 484070 - DNA, 30 bp, Artificial Sequence
  Synthetic oligonucleotide
agtatagcagattctccctaacaccatgtt

SEQ ID NO: 484071 - DNA, 30 bp, Artificial Sequence
  Synthetic oligonucleotide
atgcgaatggagttgcgcagcttccatgtt

SEQ ID NO: 484072 - DNA, 30 bp, Artificial Sequence
  Synthetic oligonucleotide
gtcaataatgaattcatgtcgaagcatgtt

SEQ ID NO: 484073 - DNA, 30 bp, Artificial Sequence
  Synthetic oligonucleotide
cgcagtcgtgtacactatgtacggcatgtt

SEQ ID NO: 484074 - DNA, 30 bp, Artificial Sequence
  Synthetic oligonucleotide
acagtcattgctcgtcggcaccggcatgtt

SEQ ID NO: 484075 - DNA, 30 bp, Artificial Sequence
  Synthetic oligonucleotide
taatcaaaactagctataataatgcatgtt

SEQ ID NO: 484076 - DNA, 30 bp, Artificial Sequence
  Synthetic oligonucleotide
acattccaaggcgggctatttactcatgtt

SEQ ID NO: 484077 - DNA, 30 bp, Artificial Sequence
  Synthetic oligonucleotide
gaagtccgtcaacaaacagtatgagatgtt

SEQ ID NO: 484078 - DNA, 30 bp, Artificial Sequence
  Synthetic oligonucleotide
ttttcgtatcacggatcgaatgtagatgtt

SEQ ID NO: 484079 - DNA, 30 bp, Artificial Sequence
  Synthetic oligonucleotide
taagaaccctgtactagtcgtcccgatgtt

SEQ ID NO: 484080 - DNA, 30 bp, Artificial Sequence
  Synthetic oligonucleotide
ttggtctagcactgacgcgctatcgatgtt

SEQ ID NO: 484081 - DNA, 30 bp, Artificial Sequence
  Synthetic oligonucleotide
tcttaacctctttgctccaatctggatgtt

SEQ ID NO: 484082 - DNA, 30 bp, Artificial Sequence
  Synthetic oligonucleotide
cagccgttgtctcccgttgaattggatgtt

SEQ ID NO: 484083 - DNA, 30 bp, Artificial Sequence
  Synthetic oligonucleotide
tctagaaatagtggcactcggttggatgtt

SEQ ID NO: 484084 - DNA, 30 bp, Artificial Sequence
  Synthetic oligonucleotide
tgcgccgaggtattaggggctgttgatgtt

SEQ ID NO: 484085 - DNA, 30 bp, Artificial Sequence
  Synthetic oligonucleotide
ccgggaggtcaatcggtcctcccatatgtt

SEQ ID NO: 484086 - DNA, 30 bp, Artificial Sequence
  Synthetic oligonucleotide
gcctttgcgcggattaggttggcatatgtt

SEQ ID NO: 484087 - DNA, 30 bp, Artificial Sequence
  Synthetic oligonucleotide
cattcagcgtcctccacaaatgtatatgtt

SEQ ID NO: 484088 - DNA, 30 bp, Artificial Sequence
  Synthetic oligonucleotide
gttgcggacgcacgcatatcagagtatgtt

SEQ ID NO: 484089 - DNA, 30 bp, Artificial Sequence
  Synthetic oligonucleotide
gccgcgagcggcctcgtgttactgtatgtt

SEQ ID NO: 484090 - DNA, 30 bp, Artificial Sequence
  Synthetic oligonucleotide
ccaagctttgactacaatcttgtgtatgtt

SEQ ID NO: 484091 - DNA, 30 bp, Artificial Sequence
  Synthetic oligonucleotide
cacaactaatagcttaacttaagttatgtt

SEQ ID NO: 484092 - DNA, 30 bp, Artificial Sequence
  Synthetic oligonucleotide
tcttcaactcccggaaatgtctgttatgtt

SEQ ID NO: 484093 - DNA, 30 bp, Artificial Sequence
  Synthetic oligonucleotide
gacctgaaccaatcccatctaaaaactgtt

SEQ ID NO: 484094 - DNA, 30 bp, Artificial Sequence
  Synthetic oligonucleotide
ttaacgcctgttgccaaacatggcactgtt

SEQ ID NO: 484095 - DNA, 30 bp, Artificial Sequence
  Synthetic oligonucleotide
taatcttgcgttacatattgcgtcactgtt

SEQ ID NO: 484096 - DNA, 30 bp, Artificial Sequence
  Synthetic oligonucleotide
atcctttgcgcagtataacatgagactgtt

SEQ ID NO: 484097 - DNA, 30 bp, Artificial Sequence
  Synthetic oligonucleotide
aacacttgttctctgtaggtctggactgtt

SEQ ID NO: 484098 - DNA, 30 bp, Artificial Sequence
  Synthetic oligonucleotide
accattgacgtatccatccgtactactgtt

SEQ ID NO: 484099 - DNA, 30 bp, Artificial Sequence
  Synthetic oligonucleotide
gatcgctaacaacccgcattatcccctgtt

SEQ ID NO: 484100 - DNA, 30 bp, Artificial Sequence
  Synthetic oligonucleotide
actgttctatcggtcactaggcgccctgtt

SEQ ID NO: 484101 - DNA, 30 bp, Artificial Sequence
  Synthetic oligonucleotide
atcgctcgccttcatccagtaacgcctgtt

SEQ ID NO: 484102 - DNA, 30 bp, Artificial Sequence
  Synthetic oligonucleotide
ttatatataaatcacttgatggtgcctgtt

SEQ ID NO: 484103 - DNA, 30 bp, Artificial Sequence
  Synthetic oligonucleotide
atattcgagctcgatgtccgctacgctgtt

SEQ ID NO: 484104 - DNA, 30 bp, Artificial Sequence
  Synthetic oligonucleotide
ggaaaacacttcggtacggactaggctgtt

SEQ ID NO: 484105 - DNA, 30 bp, Artificial Sequence
  Synthetic oligonucleotide
gccgagttgggccgcgcctttagggctgtt

SEQ ID NO: 484106 - DNA, 30 bp, Artificial Sequence
  Synthetic oligonucleotide
gtgtggccggggacggtatttggggctgtt

SEQ ID NO: 484107 - DNA, 30 bp, Artificial Sequence
  Synthetic oligonucleotide
catccgcaacggggttgtccacgtgctgtt

SEQ ID NO: 484108 - DNA, 30 bp, Artificial Sequence
  Synthetic oligonucleotide
gtaagtggaagtttcggcaccctctctgtt

SEQ ID NO: 484109 - DNA, 30 bp, Artificial Sequence
  Synthetic oligonucleotide
aagcttaggtctcagatggtcgtctctgtt

SEQ ID NO: 484110 - DNA, 30 bp, Artificial Sequence
  Synthetic oligonucleotide
gcctttgaagtagttaaacggatgtctgtt

SEQ ID NO: 484111 - DNA, 30 bp, Artificial Sequence
  Synthetic oligonucleotide
ataccactccttccgggagaatcttctgtt

SEQ ID NO: 484112 - DNA, 30 bp, Artificial Sequence
  Synthetic oligonucleotide
agttccacggttgcgtttaggagttctgtt

SEQ ID NO: 484113 - DNA, 30 bp, Artificial Sequence
  Synthetic oligonucleotide
gcgtcttaaaaggccactaacacaagtgtt

SEQ ID NO: 484114 - DNA, 30 bp, Artificial Sequence
  Synthetic oligonucleotide
ttatgtcagaaggggtttattaacagtgtt

SEQ ID NO: 484115 - DNA, 30 bp, Artificial Sequence
  Synthetic oligonucleotide
ctccttagtattcacgtaacgatcagtgtt

SEQ ID NO: 484116 - DNA, 30 bp, Artificial Sequence
  Synthetic oligonucleotide
ctgttcggctcgccaaacccattcagtgtt

SEQ ID NO: 484117 - DNA, 30 bp, Artificial Sequence
  Synthetic oligonucleotide
atgaaggggaactacccataggctagtgtt

SEQ ID NO: 484118 - DNA, 30 bp, Artificial Sequence
  Synthetic oligonucleotide
actcctcagtgagaatatttggctagtgtt

SEQ ID NO: 484119 - DNA, 30 bp, Artificial Sequence
  Synthetic oligonucleotide
gcgttgactgtaacgggatacccacgtgtt

SEQ ID NO: 484120 - DNA, 30 bp, Artificial Sequence
  Synthetic oligonucleotide
tctcccgtgcgcggccgggattcacgtgtt

SEQ ID NO: 484121 - DNA, 30 bp, Artificial Sequence
  Synthetic oligonucleotide
atatagggggtgctggaaactagacgtgtt

SEQ ID NO: 484122 - DNA, 30 bp, Artificial Sequence
  Synthetic oligonucleotide
gtggtttacttactgatgtaatgacgtgtt

SEQ ID NO: 484123 - DNA, 30 bp, Artificial Sequence
  Synthetic oligonucleotide
acgtcgacgcccctgtggacatagcgtgtt

SEQ ID NO: 484124 - DNA, 30 bp, Artificial Sequence
  Synthetic oligonucleotide
atcaacttcaagccaggatccagtcgtgtt

SEQ ID NO: 484125 - DNA, 30 bp, Artificial Sequence
  Synthetic oligonucleotide
tccgaattgaaatggctcctctttcgtgtt

SEQ ID NO: 484126 - DNA, 30 bp, Artificial Sequence
  Synthetic oligonucleotide
ggggtgtcccaggtcaaaaagtttcgtgtt

SEQ ID NO: 484127 - DNA, 30 bp, Artificial Sequence
  Synthetic oligonucleotide
atataggagcgcttttgagttgtaggtgtt

SEQ ID NO: 484128 - DNA, 30 bp, Artificial Sequence
  Synthetic oligonucleotide
tattgagtgatgtcagacgtacacggtgtt

SEQ ID NO: 484129 - DNA, 30 bp, Artificial Sequence
  Synthetic oligonucleotide
gatataagtatatgtctgccgcacggtgtt

SEQ ID NO: 484130 - DNA, 30 bp, Artificial Sequence
  Synthetic oligonucleotide
cccgcgcgtgtatattccaacgacggtgtt

SEQ ID NO: 484131 - DNA, 30 bp, Artificial Sequence
  Synthetic oligonucleotide
gtacacaggaaatctaagaaccccggtgtt

SEQ ID NO: 484132 - DNA, 30 bp, Artificial Sequence
  Synthetic oligonucleotide
cgactgcccgtcacctggcatgccggtgtt

SEQ ID NO: 484133 - DNA, 30 bp, Artificial Sequence
  Synthetic oligonucleotide
tggaagattcctgcccccgaatagggtgtt

SEQ ID NO: 484134 - DNA, 30 bp, Artificial Sequence
  Synthetic oligonucleotide
tcataggcgaatgggcggcggtcgggtgtt

SEQ ID NO: 484135 - DNA, 30 bp, Artificial Sequence
  Synthetic oligonucleotide
gagccgcaggtcgccacgctcgtgggtgtt

SEQ ID NO: 484136 - DNA, 30 bp, Artificial Sequence
  Synthetic oligonucleotide
cgagctctctatgatagttattatggtgtt

SEQ ID NO: 484137 - DNA, 30 bp, Artificial Sequence
  Synthetic oligonucleotide
gacgggccccggttactcgtcgctggtgtt

SEQ ID NO: 484138 - DNA, 30 bp, Artificial Sequence
  Synthetic oligonucleotide
aagttgcgatgagtacaataaggtggtgtt

SEQ ID NO: 484139 - DNA, 30 bp, Artificial Sequence
  Synthetic oligonucleotide
gccggtggaatagtcattaagcgctgtgtt

SEQ ID NO: 484140 - DNA, 30 bp, Artificial Sequence
  Synthetic oligonucleotide
gtaatctgggtcagagcgaccaattgtgtt

SEQ ID NO: 484141 - DNA, 30 bp, Artificial Sequence
  Synthetic oligonucleotide
atataatgttggcttatttaaatttgtgtt

SEQ ID NO: 484142 - DNA, 30 bp, Artificial Sequence
  Synthetic oligonucleotide
gatgccaaagtccgtgtcttttcaattgtt

SEQ ID NO: 484143 - DNA, 30 bp, Artificial Sequence
  Synthetic oligonucleotide
gagttgcggaggttccatatacgaattgtt

SEQ ID NO: 484144 - DNA, 30 bp, Artificial Sequence
  Synthetic oligonucleotide
gcttatcatcgcacctgctggcccattgtt

SEQ ID NO: 484145 - DNA, 30 bp, Artificial Sequence
  Synthetic oligonucleotide
ctacaaagtgaaattacgtagggcattgtt

SEQ ID NO: 484146 - DNA, 30 bp, Artificial Sequence
  Synthetic oligonucleotide
acctccgtcctgcagtcaccctagattgtt

SEQ ID NO: 484147 - DNA, 30 bp, Artificial Sequence
  Synthetic oligonucleotide
aagttgacatagtcgtatttctaccttgtt

SEQ ID NO: 484148 - DNA, 30 bp, Artificial Sequence
  Synthetic oligonucleotide
acacggattgaaaaaattttgtcccttgtt

SEQ ID NO: 484149 - DNA, 30 bp, Artificial Sequence
  Synthetic oligonucleotide
cctttggctaatcttagtgccctccttgtt

SEQ ID NO: 484150 - DNA, 30 bp, Artificial Sequence
  Synthetic oligonucleotide
taaaaaatttatgcggcatgtctccttgtt

SEQ ID NO: 484151 - DNA, 30 bp, Artificial Sequence
  Synthetic oligonucleotide
gtatcactgctggtagcatccaagcttgtt

SEQ ID NO: 484152 - DNA, 30 bp, Artificial Sequence
  Synthetic oligonucleotide
agaatgcttcttgcagctcaacatcttgtt

SEQ ID NO: 484153 - DNA, 30 bp, Artificial Sequence
  Synthetic oligonucleotide
gcaatagttgataccgacgctcctcttgtt

SEQ ID NO: 484154 - DNA, 30 bp, Artificial Sequence
  Synthetic oligonucleotide
cccgggagccacttaaagcaccgggttgtt

SEQ ID NO: 484155 - DNA, 30 bp, Artificial Sequence
  Synthetic oligonucleotide
atgaagaagttgccgcgaaaccatgttgtt

SEQ ID NO: 484156 - DNA, 30 bp, Artificial Sequence
  Synthetic oligonucleotide
tttgggttgtgtcgtgacgatagtgttgtt

SEQ ID NO: 484157 - DNA, 30 bp, Artificial Sequence
  Synthetic oligonucleotide
taccatttttctaagttaaccgttgttgtt

SEQ ID NO: 484158 - DNA, 30 bp, Artificial Sequence
  Synthetic oligonucleotide
aaatccccttctcatgttcagcgatttgtt

SEQ ID NO: 484159 - DNA, 30 bp, Artificial Sequence
  Synthetic oligonucleotide
tttagtaagcgaggttaccgcaactttgtt

SEQ ID NO: 484160 - DNA, 30 bp, Artificial Sequence
  Synthetic oligonucleotide
tttaggtggtgggtcctttgtaactttgtt

SEQ ID NO: 484161 - DNA, 30 bp, Artificial Sequence
  Synthetic oligonucleotide
tagcagcgttagccctttctcagctttgtt

SEQ ID NO: 484162 - DNA, 30 bp, Artificial Sequence
  Synthetic oligonucleotide
aataacattccagtgtatggtgagtttgtt

SEQ ID NO: 484163 - DNA, 30 bp, Artificial Sequence
  Synthetic oligonucleotide
gaaacagcggataggaaggagtattttgtt

SEQ ID NO: 484164 - DNA, 30 bp, Artificial Sequence
  Synthetic oligonucleotide
ccattagaatccgacctcgcgttttttgtt

SEQ ID NO: 484165 - DNA, 30 bp, Artificial Sequence
  Synthetic oligonucleotide
tcattggaggtttctgtcacaggaaaattt

SEQ ID NO: 484166 - DNA, 30 bp, Artificial Sequence
  Synthetic oligonucleotide
agagcgacaaggaagatggaagtaaaattt

SEQ ID NO: 484167 - DNA, 30 bp, Artificial Sequence
  Synthetic oligonucleotide
tcaaatgaaagatgccgctctcacaaattt

SEQ ID NO: 484168 - DNA, 30 bp, Artificial Sequence
  Synthetic oligonucleotide
cagtgttctgattagaccctaagcaaattt

SEQ ID NO: 484169 - DNA, 30 bp, Artificial Sequence
  Synthetic oligonucleotide
agacgtacttgcaatcccacacgcaaattt

SEQ ID NO: 484170 - DNA, 30 bp, Artificial Sequence
  Synthetic oligonucleotide
tccataaaggcttacacatcagagaaattt

SEQ ID NO: 484171 - DNA, 30 bp, Artificial Sequence
  Synthetic oligonucleotide
ccgctaatgtagtaacgggcatggaaattt

SEQ ID NO: 484172 - DNA, 30 bp, Artificial Sequence
  Synthetic oligonucleotide
tatgagggaaagtgtcaaataatgaaattt

SEQ ID NO: 484173 - DNA, 30 bp, Artificial Sequence
  Synthetic oligonucleotide
tgcggcgctaatctaaggagccgtaaattt

SEQ ID NO: 484174 - DNA, 30 bp, Artificial Sequence
  Synthetic oligonucleotide
gtccaacgagagcccgcgtccgttaaattt

SEQ ID NO: 484175 - DNA, 30 bp, Artificial Sequence
  Synthetic oligonucleotide
catgacggaatccaggggcaatttaaattt

SEQ ID NO: 484176 - DNA, 30 bp, Artificial Sequence
  Synthetic oligonucleotide
cagcaaagcttgagaatcaaaaaacaattt

SEQ ID NO: 484177 - DNA, 30 bp, Artificial Sequence
  Synthetic oligonucleotide
gatatattcgtaacttaaccttaccaattt

SEQ ID NO: 484178 - DNA, 30 bp, Artificial Sequence
  Synthetic oligonucleotide
cttctagcgttcaaagactaacgccaattt

SEQ ID NO: 484179 - DNA, 30 bp, Artificial Sequence
  Synthetic oligonucleotide
actgtctcgtcctttttgtcactccaattt

SEQ ID NO: 484180 - DNA, 30 bp, Artificial Sequence
  Synthetic oligonucleotide
ttctgcattggtaggaagatttcgcaattt

SEQ ID NO: 484181 - DNA, 30 bp, Artificial Sequence
  Synthetic oligonucleotide
gaaatgagtcacaaatatcccgggcaattt

SEQ ID NO: 484182 - DNA, 30 bp, Artificial Sequence
  Synthetic oligonucleotide
gttatgcaggcgagctcataacatcaattt

SEQ ID NO: 484183 - DNA, 30 bp, Artificial Sequence
  Synthetic oligonucleotide
tgacatcgtcatgtcgctcttgttcaattt

SEQ ID NO: 484184 - DNA, 30 bp, Artificial Sequence
  Synthetic oligonucleotide
atggatagctttttcctatactcagaattt

SEQ ID NO: 484185 - DNA, 30 bp, Artificial Sequence
  Synthetic oligonucleotide
ggcagcaccatgggccggtgaggcgaattt

SEQ ID NO: 484186 - DNA, 30 bp, Artificial Sequence
  Synthetic oligonucleotide
taccatggtagaaaatcggtcttcgaattt

SEQ ID NO: 484187 - DNA, 30 bp, Artificial Sequence
  Synthetic oligonucleotide
atcatgccatattttatgagacaggaattt

SEQ ID NO: 484188 - DNA, 30 bp, Artificial Sequence
  Synthetic oligonucleotide
actatcgcccgtttgaatgcgcaggaattt

SEQ ID NO: 484189 - DNA, 30 bp, Artificial Sequence
  Synthetic oligonucleotide
ggtccaaaaccttctatcgtaacggaattt

SEQ ID NO: 484190 - DNA, 30 bp, Artificial Sequence
  Synthetic oligonucleotide
gcttccactagtacgggaggacgggaattt

SEQ ID NO: 484191 - DNA, 30 bp, Artificial Sequence
  Synthetic oligonucleotide
atccggttatgaaaccggaacggggaattt

SEQ ID NO: 484192 - DNA, 30 bp, Artificial Sequence
  Synthetic oligonucleotide
cctaggcggaatcaagtgctgatggaattt

SEQ ID NO: 484193 - DNA, 30 bp, Artificial Sequence
  Synthetic oligonucleotide
gatcagggcttaaggatccaagaataattt

SEQ ID NO: 484194 - DNA, 30 bp, Artificial Sequence
  Synthetic oligonucleotide
gggtattgaaaagattggtggcgataattt

SEQ ID NO: 484195 - DNA, 30 bp, Artificial Sequence
  Synthetic oligonucleotide
agatgttgcattaagtgcgcagtataattt

SEQ ID NO: 484196 - DNA, 30 bp, Artificial Sequence
  Synthetic oligonucleotide
tacgtgaacggtcctcgtgacgtataattt

SEQ ID NO: 484197 - DNA, 30 bp, Artificial Sequence
  Synthetic oligonucleotide
cagcttaggaaaatctgctaagactaattt

SEQ ID NO: 484198 - DNA, 30 bp, Artificial Sequence
  Synthetic oligonucleotide
tctatgatgcccgcaaaattacgctaattt

SEQ ID NO: 484199 - DNA, 30 bp, Artificial Sequence
  Synthetic oligonucleotide
aaaaactgggcgtaatcgcccggctaattt

SEQ ID NO: 484200 - DNA, 30 bp, Artificial Sequence
  Synthetic oligonucleotide
taggtccgatgcttcagatttgcgtaattt

SEQ ID NO: 484201 - DNA, 30 bp, Artificial Sequence
  Synthetic oligonucleotide
agcggactctgactggcgcaggggtaattt

SEQ ID NO: 484202 - DNA, 30 bp, Artificial Sequence
  Synthetic oligonucleotide
aagaattccagaactcctgactggtaattt

SEQ ID NO: 484203 - DNA, 30 bp, Artificial Sequence
  Synthetic oligonucleotide
gagccgaagttttggtcctgcgattaattt

SEQ ID NO: 484204 - DNA, 30 bp, Artificial Sequence
  Synthetic oligonucleotide
gatgttacgtactcctgtgggggttaattt

SEQ ID NO: 484205 - DNA, 30 bp, Artificial Sequence
  Synthetic oligonucleotide
agcaaatcttgtacagggacgtgttaattt

SEQ ID NO: 484206 - DNA, 30 bp, Artificial Sequence
  Synthetic oligonucleotide
cataaccggcgtgcaatgtctatttaattt

SEQ ID NO: 484207 - DNA, 30 bp, Artificial Sequence
  Synthetic oligonucleotide
catcattgagcgcaatagcttagaacattt

SEQ ID NO: 484208 - DNA, 30 bp, Artificial Sequence
  Synthetic oligonucleotide
gagaagggcagagggatcagtaacacattt

SEQ ID NO: 484209 - DNA, 30 bp, Artificial Sequence
  Synthetic oligonucleotide
tttagcaagatttctgacgcggacacattt

SEQ ID NO: 484210 - DNA, 30 bp, Artificial Sequence
  Synthetic oligonucleotide
taaatgatatggccttattcggtcacattt

SEQ ID NO: 484211 - DNA, 30 bp, Artificial Sequence
  Synthetic oligonucleotide
atttaattcaaggcagacgtgttgacattt

SEQ ID NO: 484212 - DNA, 30 bp, Artificial Sequence
  Synthetic oligonucleotide
ggcgggggttaaccccctgcagatacattt

SEQ ID NO: 484213 - DNA, 30 bp, Artificial Sequence
  Synthetic oligonucleotide
ctgtcctatcgcacgatagtagctacattt

SEQ ID NO: 484214 - DNA, 30 bp, Artificial Sequence
  Synthetic oligonucleotide
gtctttgtgtagcttgtaaattttacattt

SEQ ID NO: 484215 - DNA, 30 bp, Artificial Sequence
  Synthetic oligonucleotide
tctttgtggcaaatctgatgcgcagcattt

SEQ ID NO: 484216 - DNA, 30 bp, Artificial Sequence
  Synthetic oligonucleotide
gaaatcacgccgattgagtacgccgcattt

SEQ ID NO: 484217 - DNA, 30 bp, Artificial Sequence
  Synthetic oligonucleotide
cattccgggagtcgtattaggagcgcattt

SEQ ID NO: 484218 - DNA, 31 bp, Artificial Sequence
  Synthetic oligonucleotide
ggattctggccccagatcctgtagcgcattt

SEQ ID NO: 484219 - DNA, 30 bp, Artificial Sequence
  Synthetic oligonucleotide
gcaaattatctcatgctgctaaaggcattt

SEQ ID NO: 484220 - DNA, 30 bp, Artificial Sequence
  Synthetic oligonucleotide
cgccctttatttcacagagcctgggcattt

SEQ ID NO: 484221 - DNA, 30 bp, Artificial Sequence
  Synthetic oligonucleotide
gaatcggtcgattgtgtgtatcatgcattt

SEQ ID NO: 484222 - DNA, 30 bp, Artificial Sequence
  Synthetic oligonucleotide
cgtttagacaagacgcttctccgtgcattt

SEQ ID NO: 484223 - DNA, 30 bp, Artificial Sequence
  Synthetic oligonucleotide
tgggcgctcgcttgcaattacggtgcattt

SEQ ID NO: 484224 - DNA, 30 bp, Artificial Sequence
  Synthetic oligonucleotide
tttttaccgggcatgcgaatgggtgcattt

SEQ ID NO: 484225 - DNA, 30 bp, Artificial Sequence
  Synthetic oligonucleotide
attcaaaattcgattggtggaattgcattt

SEQ ID NO: 484226 - DNA, 30 bp, Artificial Sequence
  Synthetic oligonucleotide
aaaacctccctggtcatcagcacatcattt

SEQ ID NO: 484227 - DNA, 30 bp, Artificial Sequence
  Synthetic oligonucleotide
cagatccatcctacagggattttatcattt

SEQ ID NO: 484228 - DNA, 30 bp, Artificial Sequence
  Synthetic oligonucleotide
actgctaacaacctagtcatatactcattt

SEQ ID NO: 484229 - DNA, 30 bp, Artificial Sequence
  Synthetic oligonucleotide
aactgggaatgttcgcagtgctactcattt

SEQ ID NO: 484230 - DNA, 30 bp, Artificial Sequence
  Synthetic oligonucleotide
gtaatcaaaacaggtatggttatctcattt

SEQ ID NO: 484231 - DNA, 30 bp, Artificial Sequence
  Synthetic oligonucleotide
tccaaccagtttcgaaccgtcctctcattt

SEQ ID NO: 484232 - DNA, 30 bp, Artificial Sequence
  Synthetic oligonucleotide
tttttatgcagagagtctattaagtcattt

SEQ ID NO: 484233 - DNA, 30 bp, Artificial Sequence
  Synthetic oligonucleotide
gcggtttagtaccggctggtgaattcattt

SEQ ID NO: 484234 - DNA, 30 bp, Artificial Sequence
  Synthetic oligonucleotide
atcaagggttaaaaacccacattttcattt

SEQ ID NO: 484235 - DNA, 30 bp, Artificial Sequence
  Synthetic oligonucleotide
ggtgacacgtagcttcggcacacaagattt

SEQ ID NO: 484236 - DNA, 30 bp, Artificial Sequence
  Synthetic oligonucleotide
caactacttgtcccatgttcggatagattt

SEQ ID NO: 484237 - DNA, 30 bp, Artificial Sequence
  Synthetic oligonucleotide
tgcttaaatgtatggggttaaagtagattt

SEQ ID NO: 484238 - DNA, 30 bp, Artificial Sequence
  Synthetic oligonucleotide
ggcggcaacaaccaaattttacttagattt

SEQ ID NO: 484239 - DNA, 30 bp, Artificial Sequence
  Synthetic oligonucleotide
tcaatcctcctttgaactttgcgacgattt

SEQ ID NO: 484240 - DNA, 30 bp, Artificial Sequence
  Synthetic oligonucleotide
ttaatactggatctgcatttttaccgattt

SEQ ID NO: 484241 - DNA, 30 bp, Artificial Sequence
  Synthetic oligonucleotide
acccgccgttacacaagtaacgtccgattt

SEQ ID NO: 484242 - DNA, 30 bp, Artificial Sequence
  Synthetic oligonucleotide
cctctcccaattgccggtgtcttccgattt

SEQ ID NO: 484243 - DNA, 30 bp, Artificial Sequence
  Synthetic oligonucleotide
tcacagggggttcttctgtttctgcgattt

SEQ ID NO: 484244 - DNA, 30 bp, Artificial Sequence
  Synthetic oligonucleotide
ccaagggctaattattcatcatttcgattt

SEQ ID NO: 484245 - DNA, 30 bp, Artificial Sequence
  Synthetic oligonucleotide
ctgattcgatgactgcgcaaccacggattt

SEQ ID NO: 484246 - DNA, 30 bp, Artificial Sequence
  Synthetic oligonucleotide
agcccgcaagttgtatgtctcggcggattt

SEQ ID NO: 484247 - DNA, 30 bp, Artificial Sequence
  Synthetic oligonucleotide
cagcctatacgcactagccggggcggattt

SEQ ID NO: 484248 - DNA, 30 bp, Artificial Sequence
  Synthetic oligonucleotide
acagcacagtgatatatagatgcgggattt

SEQ ID NO: 484249 - DNA, 30 bp, Artificial Sequence
  Synthetic oligonucleotide
tctttgataagcgaatggtaactgggattt

SEQ ID NO: 484250 - DNA, 30 bp, Artificial Sequence
  Synthetic oligonucleotide
tagcccgtttctccaagtacgttgggattt

SEQ ID NO: 484251 - DNA, 30 bp, Artificial Sequence
  Synthetic oligonucleotide
atttccaattacgccatgtacattggattt

SEQ ID NO: 484252 - DNA, 30 bp, Artificial Sequence
  Synthetic oligonucleotide
tatgtacagactttcggaagcattggattt

SEQ ID NO: 484253 - DNA, 30 bp, Artificial Sequence
  Synthetic oligonucleotide
gaggcaggtcacccgccgaaggttggattt

SEQ ID NO: 484254 - DNA, 30 bp, Artificial Sequence
  Synthetic oligonucleotide
ccccgttcggactgtaatctactatgattt

SEQ ID NO: 484255 - DNA, 30 bp, Artificial Sequence
  Synthetic oligonucleotide
acgccagtagtatcgtagatggtctgattt

SEQ ID NO: 484256 - DNA, 30 bp, Artificial Sequence
  Synthetic oligonucleotide
gcccattaaaatgtaactttttcgtgattt

SEQ ID NO: 484257 - DNA, 30 bp, Artificial Sequence
  Synthetic oligonucleotide
aatactcaactacaatcttgttggtgattt

SEQ ID NO: 484258 - DNA, 30 bp, Artificial Sequence
  Synthetic oligonucleotide
gaggagccacaattccttatcaattgattt

SEQ ID NO: 484259 - DNA, 30 bp, Artificial Sequence
  Synthetic oligonucleotide
ttattggggactagttagggcttttgattt

SEQ ID NO: 484260 - DNA, 30 bp, Artificial Sequence
  Synthetic oligonucleotide
ttctaaagacttaagtttgttttttgattt

SEQ ID NO: 484261 - DNA, 30 bp, Artificial Sequence
  Synthetic oligonucleotide
cgatagaacgggttattgggtccaatattt

SEQ ID NO: 484262 - DNA, 30 bp, Artificial Sequence
  Synthetic oligonucleotide
tattgcgcacgccaacgtaggagaatattt

SEQ ID NO: 484263 - DNA, 30 bp, Artificial Sequence
  Synthetic oligonucleotide
ccgaactttttactacatccactaatattt

SEQ ID NO: 484264 - DNA, 30 bp, Artificial Sequence
  Synthetic oligonucleotide
gatgccaacggtgtattctggaccatattt

SEQ ID NO: 484265 - DNA, 30 bp, Artificial Sequence
  Synthetic oligonucleotide
gtttgggaagcaaaagagttcttcatattt

SEQ ID NO: 484266 - DNA, 30 bp, Artificial Sequence
  Synthetic oligonucleotide
gctctattggggccgtaattcgggatattt

SEQ ID NO: 484267 - DNA, 30 bp, Artificial Sequence
  Synthetic oligonucleotide
gcgcctctcttccatgcgcattggatattt

SEQ ID NO: 484268 - DNA, 30 bp, Artificial Sequence
  Synthetic oligonucleotide
caacgttgtccgggcgctttttggatattt

SEQ ID NO: 484269 - DNA, 30 bp, Artificial Sequence
  Synthetic oligonucleotide
gatataaggctctccatctaaaatatattt

SEQ ID NO: 484270 - DNA, 30 bp, Artificial Sequence
  Synthetic oligonucleotide
ataaagctattctactgaatcagtatattt

SEQ ID NO: 484271 - DNA, 30 bp, Artificial Sequence
  Synthetic oligonucleotide
catctgcatctaattgtgtatattatattt

SEQ ID NO: 484272 - DNA, 30 bp, Artificial Sequence
  Synthetic oligonucleotide
ctcggttattacacgactttatgactattt

SEQ ID NO: 484273 - DNA, 30 bp, Artificial Sequence
  Synthetic oligonucleotide
tcaatcaagtcaaaaattccactactattt

SEQ ID NO: 484274 - DNA, 30 bp, Artificial Sequence
  Synthetic oligonucleotide
gggtgccgtgctgttggaatatccctattt

SEQ ID NO: 484275 - DNA, 30 bp, Artificial Sequence
  Synthetic oligonucleotide
aacaatggctaggtgtggatcccgctattt

SEQ ID NO: 484276 - DNA, 30 bp, Artificial Sequence
  Synthetic oligonucleotide
gctgctacactttatgtgggcagagtattt

SEQ ID NO: 484277 - DNA, 30 bp, Artificial Sequence
  Synthetic oligonucleotide
caaaatccccctacaaatctggtagtattt

SEQ ID NO: 484278 - DNA, 30 bp, Artificial Sequence
  Synthetic oligonucleotide
agcaaaattgatctggatcccttagtattt

SEQ ID NO: 484279 - DNA, 30 bp, Artificial Sequence
  Synthetic oligonucleotide
ataccagcgtattaaccatgggacgtattt

SEQ ID NO: 484280 - DNA, 30 bp, Artificial Sequence
  Synthetic oligonucleotide
tggcctacattgtcactacaagccgtattt

SEQ ID NO: 484281 - DNA, 30 bp, Artificial Sequence
  Synthetic oligonucleotide
gactgggttatccagcgaataagggtattt

SEQ ID NO: 484282 - DNA, 30 bp, Artificial Sequence
  Synthetic oligonucleotide
taagtagttgcaatggttttacgggtattt

SEQ ID NO: 484283 - DNA, 30 bp, Artificial Sequence
  Synthetic oligonucleotide
gaactggactagaccgctcatgatgtattt

SEQ ID NO: 484284 - DNA, 30 bp, Artificial Sequence
  Synthetic oligonucleotide
cgatacagtacgcttcgcaacactgtattt

SEQ ID NO: 484285 - DNA, 30 bp, Artificial Sequence
  Synthetic oligonucleotide
tttgcggcattcatctgcccccctgtattt

SEQ ID NO: 484286 - DNA, 30 bp, Artificial Sequence
  Synthetic oligonucleotide
tgcggtcaattgtagtttaatggtgtattt

SEQ ID NO: 484287 - DNA, 30 bp, Artificial Sequence
  Synthetic oligonucleotide
tcttacgtacaggatacagcagtattattt

SEQ ID NO: 484288 - DNA, 30 bp, Artificial Sequence
  Synthetic oligonucleotide
ctgttagacacactagcccccgccttattt

SEQ ID NO: 484289 - DNA, 30 bp, Artificial Sequence
  Synthetic oligonucleotide
atagtttccagagcatgggagcgcttattt

SEQ ID NO: 484290 - DNA, 30 bp, Artificial Sequence
  Synthetic oligonucleotide
gagagctacgtgcactagacgcgcttattt

SEQ ID NO: 484291 - DNA, 30 bp, Artificial Sequence
  Synthetic oligonucleotide
gcttcttaaaatcaacatcttaagttattt

SEQ ID NO: 484292 - DNA, 30 bp, Artificial Sequence
  Synthetic oligonucleotide
actcagctttggtccatatcaaggttattt

SEQ ID NO: 484293 - DNA, 30 bp, Artificial Sequence
  Synthetic oligonucleotide
ttgaagttatcgtgtgtggataggttattt

SEQ ID NO: 484294 - DNA, 30 bp, Artificial Sequence
  Synthetic oligonucleotide
gagagggagcactatcagggactgttattt

SEQ ID NO: 484295 - DNA, 30 bp, Artificial Sequence
  Synthetic oligonucleotide
tgttacagttcccccttgagcgctttattt

SEQ ID NO: 484296 - DNA, 30 bp, Artificial Sequence
  Synthetic oligonucleotide
ccggagaaattacgggttcacattttattt

SEQ ID NO: 484297 - DNA, 30 bp, Artificial Sequence
  Synthetic oligonucleotide
ctatctttacaatattggggcattttattt

SEQ ID NO: 484298 - DNA, 30 bp, Artificial Sequence
  Synthetic oligonucleotide
gtagtagtgtcacactgttagcttttattt

SEQ ID NO: 484299 - DNA, 30 bp, Artificial Sequence
  Synthetic oligonucleotide
gaaaaatgactgttataacatcttttattt

SEQ ID NO: 484300 - DNA, 30 bp, Artificial Sequence
  Synthetic oligonucleotide
gcttctgccacgtaatcgagatgaaacttt

SEQ ID NO: 484301 - DNA, 30 bp, Artificial Sequence
  Synthetic oligonucleotide
aacatttgggccgtaggaagcctaaacttt

SEQ ID NO: 484302 - DNA, 30 bp, Artificial Sequence
  Synthetic oligonucleotide
gatatggagctattgatcttttccaacttt

SEQ ID NO: 484303 - DNA, 30 bp, Artificial Sequence
  Synthetic oligonucleotide
aatgtcaaatattgcgacctatgcaacttt

SEQ ID NO: 484304 - DNA, 30 bp, Artificial Sequence
  Synthetic oligonucleotide
ctgatccgttagaaggttatcttcaacttt

SEQ ID NO: 484305 - DNA, 30 bp, Artificial Sequence
  Synthetic oligonucleotide
gggttgtaacggatcgtaggtccgaacttt

SEQ ID NO: 484306 - DNA, 31 bp, Artificial Sequence
  Synthetic oligonucleotide
gctaaatatcaacggtctcttccggaacttt

SEQ ID NO: 484307 - DNA, 30 bp, Artificial Sequence
  Synthetic oligonucleotide
ctttcgcgtgcagtagtgtcagggaacttt

SEQ ID NO: 484308 - DNA, 30 bp, Artificial Sequence
  Synthetic oligonucleotide
aacactgcatagtaagtccataataacttt

SEQ ID NO: 484309 - DNA, 30 bp, Artificial Sequence
  Synthetic oligonucleotide
gtccttccgattgaatgggtccataacttt

SEQ ID NO: 484310 - DNA, 30 bp, Artificial Sequence
  Synthetic oligonucleotide
acttaaaacccgtggtgacgagctaacttt

SEQ ID NO: 484311 - DNA, 30 bp, Artificial Sequence
  Synthetic oligonucleotide
actttgttcctattatctactcttaacttt

SEQ ID NO: 484312 - DNA, 30 bp, Artificial Sequence
  Synthetic oligonucleotide
tttgactccgatgtgtttagtgttaacttt

SEQ ID NO: 484313 - DNA, 30 bp, Artificial Sequence
  Synthetic oligonucleotide
gggtagagataatgatccccgtcacacttt

SEQ ID NO: 484314 - DNA, 30 bp, Artificial Sequence
  Synthetic oligonucleotide
taaatgcgttaaatggaaccttcacacttt

SEQ ID NO: 484315 - DNA, 30 bp, Artificial Sequence
  Synthetic oligonucleotide
gactctagagaactttcggtatcccacttt

SEQ ID NO: 484316 - DNA, 30 bp, Artificial Sequence
  Synthetic oligonucleotide
cagcaatctcgtttccgtgtctcccacttt

SEQ ID NO: 484317 - DNA, 30 bp, Artificial Sequence
  Synthetic oligonucleotide
tgtcaccatagctccgcgatagggcacttt

SEQ ID NO: 484318 - DNA, 30 bp, Artificial Sequence
  Synthetic oligonucleotide
aaaaagaccaggggtcatacactgcacttt

SEQ ID NO: 484319 - DNA, 30 bp, Artificial Sequence
  Synthetic oligonucleotide
ccaagtttagggtcccgttggcttcacttt

SEQ ID NO: 484320 - DNA, 30 bp, Artificial Sequence
  Synthetic oligonucleotide
agcctgaatgctttcagaatgtaagacttt

SEQ ID NO: 484321 - DNA, 30 bp, Artificial Sequence
  Synthetic oligonucleotide
tggattagcagctagctactgtaggacttt

SEQ ID NO: 484322 - DNA, 30 bp, Artificial Sequence
  Synthetic oligonucleotide
ctcgctagcgcggcaaatatgtcggacttt

SEQ ID NO: 484323 - DNA, 30 bp, Artificial Sequence
  Synthetic oligonucleotide
aaatacggatttactttactgactgacttt

SEQ ID NO: 484324 - DNA, 30 bp, Artificial Sequence
  Synthetic oligonucleotide
tttgtagcggagacccttgtaccctacttt

SEQ ID NO: 484325 - DNA, 30 bp, Artificial Sequence
  Synthetic oligonucleotide
gtgacggaacgtgaagtcgttagctacttt

SEQ ID NO: 484326 - DNA, 31 bp, Artificial Sequence
  Synthetic oligonucleotide
ctatgcatcttattagtgcccgcagtacttt

SEQ ID NO: 484327 - DNA, 30 bp, Artificial Sequence
  Synthetic oligonucleotide
attctattcatggtgggtacagggtacttt

SEQ ID NO: 484328 - DNA, 30 bp, Artificial Sequence
  Synthetic oligonucleotide
gggaactccgatagtctcctcatttacttt

SEQ ID NO: 484329 - DNA, 30 bp, Artificial Sequence
  Synthetic oligonucleotide
gcatacttgtattggcggaggaaaaccttt

SEQ ID NO: 484330 - DNA, 30 bp, Artificial Sequence
  Synthetic oligonucleotide
gctgtctcgtgtctacgggctgcaaccttt

SEQ ID NO: 484331 - DNA, 30 bp, Artificial Sequence
  Synthetic oligonucleotide
tttcgggtggcaagaaatacgcccaccttt

SEQ ID NO: 484332 - DNA, 30 bp, Artificial Sequence
  Synthetic oligonucleotide
aaaagctaagataggtctgtacagaccttt

SEQ ID NO: 484333 - DNA, 30 bp, Artificial Sequence
  Synthetic oligonucleotide
tgtacctatgagctattcgggacgaccttt

SEQ ID NO: 484334 - DNA, 30 bp, Artificial Sequence
  Synthetic oligonucleotide
ttttggtccggagcgcgcaccagtaccttt

SEQ ID NO: 484335 - DNA, 30 bp, Artificial Sequence
  Synthetic oligonucleotide
tggggttgacagcagactgtgtttaccttt

SEQ ID NO: 484336 - DNA, 30 bp, Artificial Sequence
  Synthetic oligonucleotide
tcaggacattcttcgcttcaagtacccttt

SEQ ID NO: 484337 - DNA, 30 bp, Artificial Sequence
  Synthetic oligonucleotide
ttagtggccggttgaactatcctccccttt

SEQ ID NO: 484338 - DNA, 30 bp, Artificial Sequence
  Synthetic oligonucleotide
tgaaaggtacgacaaggacctgtccccttt

SEQ ID NO: 484339 - DNA, 30 bp, Artificial Sequence
  Synthetic oligonucleotide
gagaacgtgcagagtagtggacagcccttt

SEQ ID NO: 484340 - DNA, 30 bp, Artificial Sequence
  Synthetic oligonucleotide
atgtagaatgtcgggtactagcctcccttt

SEQ ID NO: 484341 - DNA, 30 bp, Artificial Sequence
  Synthetic oligonucleotide
tgtcaatgtcttgcgcctgaacgtcccttt

SEQ ID NO: 484342 - DNA, 30 bp, Artificial Sequence
  Synthetic oligonucleotide
tatcacatacaaactcttctaattcccttt

SEQ ID NO: 484343 - DNA, 30 bp, Artificial Sequence
  Synthetic oligonucleotide
gagcaactaggtccaataaccattcccttt

SEQ ID NO: 484344 - DNA, 30 bp, Artificial Sequence
  Synthetic oligonucleotide
tcatagttcggcaactgaaaggcagccttt

SEQ ID NO: 484345 - DNA, 30 bp, Artificial Sequence
  Synthetic oligonucleotide
gcaggattcccgtaaggccacagagccttt

SEQ ID NO: 484346 - DNA, 30 bp, Artificial Sequence
  Synthetic oligonucleotide
cagtgcttggatatgtccagcggcgccttt

SEQ ID NO: 484347 - DNA, 30 bp, Artificial Sequence
  Synthetic oligonucleotide
cgcggtgatggggtatgacgcgaggccttt

SEQ ID NO: 484348 - DNA, 30 bp, Artificial Sequence
  Synthetic oligonucleotide
cgcaatcacataccccagtcctaggccttt

SEQ ID NO: 484349 - DNA, 30 bp, Artificial Sequence
  Synthetic oligonucleotide
tctgaatccgcccgttcccggcaatccttt

SEQ ID NO: 484350 - DNA, 30 bp, Artificial Sequence
  Synthetic oligonucleotide
atggagtccgcgtatgtaggaagatccttt

SEQ ID NO: 484351 - DNA, 30 bp, Artificial Sequence
  Synthetic oligonucleotide
ttccactttaccttcgttgtattctccttt

SEQ ID NO: 484352 - DNA, 30 bp, Artificial Sequence
  Synthetic oligonucleotide
ttccactgtcccttcgttgtattctccttt

SEQ ID NO: 484353 - DNA, 26 bp, Artificial Sequence
  Synthetic oligonucleotide
tgtttcccttcgttgtattctccttt

SEQ ID NO: 484354 - DNA, 30 bp, Artificial Sequence
  Synthetic oligonucleotide
aattcacatactcttatgacaaggtccttt

SEQ ID NO: 484355 - DNA, 30 bp, Artificial Sequence
  Synthetic oligonucleotide
caactgaaatccatgggacgcagttccttt

SEQ ID NO: 484356 - DNA, 30 bp, Artificial Sequence
  Synthetic oligonucleotide
cttagaccgtcggcaagctctcaaagcttt

SEQ ID NO: 484357 - DNA, 30 bp, Artificial Sequence
  Synthetic oligonucleotide
tactctctggcaccactctcgggaagcttt

SEQ ID NO: 484358 - DNA, 30 bp, Artificial Sequence
  Synthetic oligonucleotide
cttcatcccctggtcttcgtattaagcttt

SEQ ID NO: 484359 - DNA, 30 bp, Artificial Sequence
  Synthetic oligonucleotide
aggggggactttacttgcggatacagcttt

SEQ ID NO: 484360 - DNA, 30 bp, Artificial Sequence
  Synthetic oligonucleotide
gagaatagctaccacccctgaatgagcttt

SEQ ID NO: 484361 - DNA, 30 bp, Artificial Sequence
  Synthetic oligonucleotide
tgtaagaacacctaggacatcgtgagcttt

SEQ ID NO: 484362 - DNA, 30 bp, Artificial Sequence
  Synthetic oligonucleotide
acacttgccggctcaaaactgttgagcttt

SEQ ID NO: 484363 - DNA, 30 bp, Artificial Sequence
  Synthetic oligonucleotide
ctgacctggacgctttggtcgtgtagcttt

SEQ ID NO: 484364 - DNA, 30 bp, Artificial Sequence
  Synthetic oligonucleotide
gttggtccggtttctgtgtggattagcttt

SEQ ID NO: 484365 - DNA, 30 bp, Artificial Sequence
  Synthetic oligonucleotide
actactttatttgcggaatctccacgcttt

SEQ ID NO: 484366 - DNA, 30 bp, Artificial Sequence
  Synthetic oligonucleotide
gtttcttagcagaggcaaaagagacgcttt

SEQ ID NO: 484367 - DNA, 30 bp, Artificial Sequence
  Synthetic oligonucleotide
ctcgcgccgccaaagcaggatagacgcttt

SEQ ID NO: 484368 - DNA, 30 bp, Artificial Sequence
  Synthetic oligonucleotide
aaaacacgcatggtcgctccaggacgcttt

SEQ ID NO: 484369 - DNA, 30 bp, Artificial Sequence
  Synthetic oligonucleotide
cgggggcgcccaccaccagagttacgcttt

SEQ ID NO: 484370 - DNA, 30 bp, Artificial Sequence
  Synthetic oligonucleotide
ttatggtttggggttgtacatccccgcttt

SEQ ID NO: 484371 - DNA, 30 bp, Artificial Sequence
  Synthetic oligonucleotide
actgccaggcacatgtgtagtcaaggcttt

SEQ ID NO: 484372 - DNA, 30 bp, Artificial Sequence
  Synthetic oligonucleotide
cgccgcgcttaggcgcatgccagaggcttt

SEQ ID NO: 484373 - DNA, 30 bp, Artificial Sequence
  Synthetic oligonucleotide
ctcttgagaatggacgagtgcagcggcttt

SEQ ID NO: 484374 - DNA, 30 bp, Artificial Sequence
  Synthetic oligonucleotide
gaataccggggtatgtactcctagggcttt

SEQ ID NO: 484375 - DNA, 30 bp, Artificial Sequence
  Synthetic oligonucleotide
agttacacaggagttattgggacgggcttt

SEQ ID NO: 484376 - DNA, 30 bp, Artificial Sequence
  Synthetic oligonucleotide
actgtcctcacgggtacgcatcctggcttt

SEQ ID NO: 484377 - DNA, 30 bp, Artificial Sequence
  Synthetic oligonucleotide
aactatgccccatgcgataaacgtggcttt

SEQ ID NO: 484378 - DNA, 30 bp, Artificial Sequence
  Synthetic oligonucleotide
actagaatcctgaggcctgtttttggcttt

SEQ ID NO: 484379 - DNA, 30 bp, Artificial Sequence
  Synthetic oligonucleotide
cttaggagtctagtaggggtcagatgcttt

SEQ ID NO: 484380 - DNA, 29 bp, Artificial Sequence
  Synthetic oligonucleotide
gtaaaggggtagattcctagggatgcttt

SEQ ID NO: 484381 - DNA, 30 bp, Artificial Sequence
  Synthetic oligonucleotide
agcccgtcgtcatgccgcatattgtgcttt

SEQ ID NO: 484382 - DNA, 30 bp, Artificial Sequence
  Synthetic oligonucleotide
agagttttgggggcctgaattaattgcttt

SEQ ID NO: 484383 - DNA, 30 bp, Artificial Sequence
  Synthetic oligonucleotide
aaaggtcccgagacagggccgttttgcttt

SEQ ID NO: 484384 - DNA, 30 bp, Artificial Sequence
  Synthetic oligonucleotide
ggagtttgcaaatgtagtacgtaaatcttt

SEQ ID NO: 484385 - DNA, 30 bp, Artificial Sequence
  Synthetic oligonucleotide
gacaattcgttctgtttttatccaatcttt

SEQ ID NO: 484386 - DNA, 30 bp, Artificial Sequence
  Synthetic oligonucleotide
tctgtgagtccagggatgaggataatcttt

SEQ ID NO: 484387 - DNA, 30 bp, Artificial Sequence
  Synthetic oligonucleotide
ggcggttattgtccctgtatcttaatcttt

SEQ ID NO: 484388 - DNA, 30 bp, Artificial Sequence
  Synthetic oligonucleotide
ccagtctacttagacgtacagtagatcttt

SEQ ID NO: 484389 - DNA, 30 bp, Artificial Sequence
  Synthetic oligonucleotide
agtccaccagcacagcggtatgggatcttt

SEQ ID NO: 484390 - DNA, 30 bp, Artificial Sequence
  Synthetic oligonucleotide
gcaagtggccggggtcccaattctatcttt

SEQ ID NO: 484391 - DNA, 30 bp, Artificial Sequence
  Synthetic oligonucleotide
tgcttacgacctgcggctcaggaactcttt

SEQ ID NO: 484392 - DNA, 30 bp, Artificial Sequence
  Synthetic oligonucleotide
agctggctgtcgctttcgttacgactcttt

SEQ ID NO: 484393 - DNA, 30 bp, Artificial Sequence
  Synthetic oligonucleotide
attaaagtctaagtaacttgattactcttt

SEQ ID NO: 484394 - DNA, 30 bp, Artificial Sequence
  Synthetic oligonucleotide
gtttctgaccagctaatgcaagcgctcttt

SEQ ID NO: 484395 - DNA, 30 bp, Artificial Sequence
  Synthetic oligonucleotide
gtttcttattaacggatctcgtggctcttt

SEQ ID NO: 484396 - DNA, 30 bp, Artificial Sequence
  Synthetic oligonucleotide
gcagcatgagtatatctaagtatgctcttt

SEQ ID NO: 484397 - DNA, 30 bp, Artificial Sequence
  Synthetic oligonucleotide
aatccccgtcatgcaatgacaaatctcttt

SEQ ID NO: 484398 - DNA, 30 bp, Artificial Sequence
  Synthetic oligonucleotide
taaaactattatgtacgtggtagtctcttt

SEQ ID NO: 484399 - DNA, 30 bp, Artificial Sequence
  Synthetic oligonucleotide
ggaaatgagacatgggtttcccgtctcttt

SEQ ID NO: 484400 - DNA, 30 bp, Artificial Sequence
  Synthetic oligonucleotide
tcgcccgtttctttctcctagtttctcttt

SEQ ID NO: 484401 - DNA, 30 bp, Artificial Sequence
  Synthetic oligonucleotide
gacaggtccgagtaatcgaccgcagtcttt

SEQ ID NO: 484402 - DNA, 30 bp, Artificial Sequence
  Synthetic oligonucleotide
attgggactgtaaacaggggggcagtcttt

SEQ ID NO: 484403 - DNA, 30 bp, Artificial Sequence
  Synthetic oligonucleotide
atcggggggtgtcggcaggccggcgtcttt

SEQ ID NO: 484404 - DNA, 30 bp, Artificial Sequence
  Synthetic oligonucleotide
catttaaatcaggctcctcagcgtgtcttt

SEQ ID NO: 484405 - DNA, 30 bp, Artificial Sequence
  Synthetic oligonucleotide
gcaggctattggtaacgtctgaaattcttt

SEQ ID NO: 484406 - DNA, 30 bp, Artificial Sequence
  Synthetic oligonucleotide
tatgtcatctgatgctatatagaattcttt

SEQ ID NO: 484407 - DNA, 30 bp, Artificial Sequence
  Synthetic oligonucleotide
cctggtgttgtgatacattccgtcttcttt

SEQ ID NO: 484408 - DNA, 30 bp, Artificial Sequence
  Synthetic oligonucleotide
gtaccacgtaggtccactgcttggttcttt

SEQ ID NO: 484409 - DNA, 30 bp, Artificial Sequence
  Synthetic oligonucleotide
tgatttaagtactggaggtgacctttcttt

SEQ ID NO: 484410 - DNA, 30 bp, Artificial Sequence
  Synthetic oligonucleotide
ctgggaagcggcgtagtttgatctttcttt

SEQ ID NO: 484411 - DNA, 30 bp, Artificial Sequence
  Synthetic oligonucleotide
aaagcatccagccgtactcaggttttcttt

SEQ ID NO: 484412 - DNA, 29 bp, Artificial Sequence
  Synthetic oligonucleotide
cgacatatttttcacttacgagaaagttt

SEQ ID NO: 484413 - DNA, 30 bp, Artificial Sequence
  Synthetic oligonucleotide
tgacttttctttaagccgaatgacaagttt

SEQ ID NO: 484414 - DNA, 30 bp, Artificial Sequence
  Synthetic oligonucleotide
gataacggtccacttttctgtatgaagttt

SEQ ID NO: 484415 - DNA, 30 bp, Artificial Sequence
  Synthetic oligonucleotide
gaacttccgaggcgcagaattgttaagttt

SEQ ID NO: 484416 - DNA, 30 bp, Artificial Sequence
  Synthetic oligonucleotide
gctatacttaaatgcgaattttaacagttt

SEQ ID NO: 484417 - DNA, 30 bp, Artificial Sequence
  Synthetic oligonucleotide
aaaacctcttagcgatgtcagtgacagttt

SEQ ID NO: 484418 - DNA, 30 bp, Artificial Sequence
  Synthetic oligonucleotide
ctcggtatatgaaagccggctcaccagttt

SEQ ID NO: 484419 - DNA, 30 bp, Artificial Sequence
  Synthetic oligonucleotide
ctcccccattgaacatctgagacccagttt

SEQ ID NO: 484420 - DNA, 30 bp, Artificial Sequence
  Synthetic oligonucleotide
aatgaggggcttatttgatccaagcagttt

SEQ ID NO: 484421 - DNA, 30 bp, Artificial Sequence
  Synthetic oligonucleotide
gatcaagacgggctgagctatacgcagttt

SEQ ID NO: 484422 - DNA, 30 bp, Artificial Sequence
  Synthetic oligonucleotide
gaactcaccaggtctctaggtccgcagttt

SEQ ID NO: 484423 - DNA, 30 bp, Artificial Sequence
  Synthetic oligonucleotide
tctgtattgaagagcggtagggcgcagttt

SEQ ID NO: 484424 - DNA, 29 bp, Artificial Sequence
  Synthetic oligonucleotide
aaaagtatgtcggatgagtttggcagttt

SEQ ID NO: 484425 - DNA, 30 bp, Artificial Sequence
  Synthetic oligonucleotide
agtcgtgtatcaatggagcaaatgcagttt

SEQ ID NO: 484426 - DNA, 30 bp, Artificial Sequence
  Synthetic oligonucleotide
ctccggaacagtagatagattatgcagttt

SEQ ID NO: 484427 - DNA, 30 bp, Artificial Sequence
  Synthetic oligonucleotide
cagcccactttaaatgatcaccatcagttt

SEQ ID NO: 484428 - DNA, 30 bp, Artificial Sequence
  Synthetic oligonucleotide
tcccttacgggcatgatgctaattcagttt

SEQ ID NO: 484429 - DNA, 30 bp, Artificial Sequence
  Synthetic oligonucleotide
aagtttatgatgtcgatctctcacgagttt

SEQ ID NO: 484430 - DNA, 30 bp, Artificial Sequence
  Synthetic oligonucleotide
gtgattggtgcttataaagttgacgagttt

SEQ ID NO: 484431 - DNA, 30 bp, Artificial Sequence
  Synthetic oligonucleotide
agcggtgtggataggtgcattgaggagttt

SEQ ID NO: 484432 - DNA, 30 bp, Artificial Sequence
  Synthetic oligonucleotide
aaaataggatttatcatgaatatggagttt

SEQ ID NO: 484433 - DNA, 30 bp, Artificial Sequence
  Synthetic oligonucleotide
gggtggcccgaaagcaaggtcgatgagttt

SEQ ID NO: 484434 - DNA, 30 bp, Artificial Sequence
  Synthetic oligonucleotide
tgagacctagtaaagtgatatgatgagttt

SEQ ID NO: 484435 - DNA, 30 bp, Artificial Sequence
  Synthetic oligonucleotide
atattagaggccaggtgagcgtgtgagttt

SEQ ID NO: 484436 - DNA, 30 bp, Artificial Sequence
  Synthetic oligonucleotide
ataatattatctgaagggccggttgagttt

SEQ ID NO: 484437 - DNA, 30 bp, Artificial Sequence
  Synthetic oligonucleotide
cacactagaaacggaagcagcatatagttt

SEQ ID NO: 484438 - DNA, 30 bp, Artificial Sequence
  Synthetic oligonucleotide
ctaataaaccttatattccatgtatagttt

SEQ ID NO: 484439 - DNA, 30 bp, Artificial Sequence
  Synthetic oligonucleotide
ccctattcgtacaccaaccgagcttagttt

SEQ ID NO: 484440 - DNA, 30 bp, Artificial Sequence
  Synthetic oligonucleotide
tttgactgtgcgcttgatacagtttagttt

SEQ ID NO: 484441 - DNA, 30 bp, Artificial Sequence
  Synthetic oligonucleotide
ttggatggcgtgcctgcatgtgtttagttt

SEQ ID NO: 484442 - DNA, 30 bp, Artificial Sequence
  Synthetic oligonucleotide
aactgtcacgcgatcatagccaaaacgttt

SEQ ID NO: 484443 - DNA, 30 bp, Artificial Sequence
  Synthetic oligonucleotide
cattaagattattgcttttgccgaacgttt

SEQ ID NO: 484444 - DNA, 30 bp, Artificial Sequence
  Synthetic oligonucleotide
gaggatcacactatatttgcagacacgttt

SEQ ID NO: 484445 - DNA, 30 bp, Artificial Sequence
  Synthetic oligonucleotide
aaataacttactttcaccactgacacgttt

SEQ ID NO: 484446 - DNA, 30 bp, Artificial Sequence
  Synthetic oligonucleotide
gaccaagtttagatcagtggtcccacgttt

SEQ ID NO: 484447 - DNA, 30 bp, Artificial Sequence
  Synthetic oligonucleotide
tttgataggtaatagacgtgtcggacgttt

SEQ ID NO: 484448 - DNA, 30 bp, Artificial Sequence
  Synthetic oligonucleotide
tggggaaatatcctagtgttgttgacgttt

SEQ ID NO: 484449 - DNA, 30 bp, Artificial Sequence
  Synthetic oligonucleotide
gatttaacaatgttagtatgtcatacgttt

SEQ ID NO: 484450 - DNA, 30 bp, Artificial Sequence
  Synthetic oligonucleotide
aaagtaggtcactgttatttctctacgttt

SEQ ID NO: 484451 - DNA, 30 bp, Artificial Sequence
  Synthetic oligonucleotide
actaggcttagccgttattttccaccgttt

SEQ ID NO: 484452 - DNA, 30 bp, Artificial Sequence
  Synthetic oligonucleotide
ctcgtcttatgttttccaataggaccgttt

SEQ ID NO: 484453 - DNA, 30 bp, Artificial Sequence
  Synthetic oligonucleotide
gcgaaacgggcaaggtgtacatgaccgttt

SEQ ID NO: 484454 - DNA, 30 bp, Artificial Sequence
  Synthetic oligonucleotide
atggggtggattcaagaggagaacccgttt

SEQ ID NO: 484455 - DNA, 30 bp, Artificial Sequence
  Synthetic oligonucleotide
gttcctcttaaaacggcgttcaccccgttt

SEQ ID NO: 484456 - DNA, 30 bp, Artificial Sequence
  Synthetic oligonucleotide
acgccatgcatttctcgtgcccgcccgttt

SEQ ID NO: 484457 - DNA, 30 bp, Artificial Sequence
  Synthetic oligonucleotide
aatcagaattaggctatcaagatgccgttt

SEQ ID NO: 484458 - DNA, 30 bp, Artificial Sequence
  Synthetic oligonucleotide
ccgcgcgatttacgccacgtcgctccgttt

SEQ ID NO: 484459 - DNA, 30 bp, Artificial Sequence
  Synthetic oligonucleotide
taaaagggcgagaagcggtacggtccgttt

SEQ ID NO: 484460 - DNA, 30 bp, Artificial Sequence
  Synthetic oligonucleotide
ctccgactgagtttcggggcttaagcgttt

SEQ ID NO: 484461 - DNA, 30 bp, Artificial Sequence
  Synthetic oligonucleotide
acttgcggggctcgaggtaatgcagcgttt

SEQ ID NO: 484462 - DNA, 30 bp, Artificial Sequence
  Synthetic oligonucleotide
gatcgcaaacaacgtgtacttcacgcgttt

SEQ ID NO: 484463 - DNA, 30 bp, Artificial Sequence
  Synthetic oligonucleotide
gccacggccgtcaagaatgaacaggcgttt

SEQ ID NO: 484464 - DNA, 30 bp, Artificial Sequence
  Synthetic oligonucleotide
gggctttatgtattccacccgcaggcgttt

SEQ ID NO: 484465 - DNA, 30 bp, Artificial Sequence
  Synthetic oligonucleotide
gacactagtggaggggttcgcagatcgttt

SEQ ID NO: 484466 - DNA, 29 bp, Artificial Sequence
  Synthetic oligonucleotide
aaccgggaacaactcgcgtcggatcgttt

SEQ ID NO: 484467 - DNA, 30 bp, Artificial Sequence
  Synthetic oligonucleotide
ttcgatggtaccaaaacgccattatcgttt

SEQ ID NO: 484468 - DNA, 30 bp, Artificial Sequence
  Synthetic oligonucleotide
gtttgtaccgtatggcagcggaactcgttt

SEQ ID NO: 484469 - DNA, 30 bp, Artificial Sequence
  Synthetic oligonucleotide
ttcctcttgattggtccaattcagtcgttt

SEQ ID NO: 484470 - DNA, 30 bp, Artificial Sequence
  Synthetic oligonucleotide
ttacttagtacctaccagaatcggtcgttt

SEQ ID NO: 484471 - DNA, 30 bp, Artificial Sequence
  Synthetic oligonucleotide
tcattggaatgcgcgtgctaaaattcgttt

SEQ ID NO: 484472 - DNA, 30 bp, Artificial Sequence
  Synthetic oligonucleotide
gcgtactgtaggaggaagctccgttcgttt

SEQ ID NO: 484473 - DNA, 30 bp, Artificial Sequence
  Synthetic oligonucleotide
ttctagtccatatagagaacgcaaaggttt

SEQ ID NO: 484474 - DNA, 30 bp, Artificial Sequence
  Synthetic oligonucleotide
gccagagtgtacattttgtgctgaaggttt

SEQ ID NO: 484475 - DNA, 30 bp, Artificial Sequence
  Synthetic oligonucleotide
gctttggccacaaatatatgttgaaggttt

SEQ ID NO: 484476 - DNA, 30 bp, Artificial Sequence
  Synthetic oligonucleotide
gacgccgtcaaggcattaatcgtcaggttt

SEQ ID NO: 484477 - DNA, 30 bp, Artificial Sequence
  Synthetic oligonucleotide
gctagcgcggataacgcatagttcaggttt

SEQ ID NO: 484478 - DNA, 30 bp, Artificial Sequence
  Synthetic oligonucleotide
aaatgatgacgttggtaactaccgaggttt

SEQ ID NO: 484479 - DNA, 30 bp, Artificial Sequence
  Synthetic oligonucleotide
tgttatgatgtgccggtgcgcactaggttt

SEQ ID NO: 484480 - DNA, 30 bp, Artificial Sequence
  Synthetic oligonucleotide
gacattggatataagcttggacctaggttt

SEQ ID NO: 484481 - DNA, 30 bp, Artificial Sequence
  Synthetic oligonucleotide
gtatcttttctaaagaacacaacacggttt

SEQ ID NO: 484482 - DNA, 30 bp, Artificial Sequence
  Synthetic oligonucleotide
tcactcggatacactaataacccacggttt

SEQ ID NO: 484483 - DNA, 30 bp, Artificial Sequence
  Synthetic oligonucleotide
aagggggagctaaccgggcagcgacggttt

SEQ ID NO: 484484 - DNA, 30 bp, Artificial Sequence
  Synthetic oligonucleotide
accttagaacagaatcctactctacggttt

SEQ ID NO: 484485 - DNA, 30 bp, Artificial Sequence
  Synthetic oligonucleotide
tgcagtatcagagcaaaccaattacggttt

SEQ ID NO: 484486 - DNA, 30 bp, Artificial Sequence
  Synthetic oligonucleotide
gcactcaaacccgatccaatgcagcggttt

SEQ ID NO: 484487 - DNA, 30 bp, Artificial Sequence
  Synthetic oligonucleotide
tttggtgagctggtttaagcggcgcggttt

SEQ ID NO: 484488 - DNA, 30 bp, Artificial Sequence
  Synthetic oligonucleotide
gccaactttagtctgtccactgtgcggttt

SEQ ID NO: 484489 - DNA, 30 bp, Artificial Sequence
  Synthetic oligonucleotide
cacagcatagcccgggagccgagtcggttt

SEQ ID NO: 484490 - DNA, 30 bp, Artificial Sequence
  Synthetic oligonucleotide
agcaatggatttctgcataggagtcggttt

SEQ ID NO: 484491 - DNA, 30 bp, Artificial Sequence
  Synthetic oligonucleotide
gtctatggtagaacggagatttgtcggttt

SEQ ID NO: 484492 - DNA, 30 bp, Artificial Sequence
  Synthetic oligonucleotide
agtaatactgaactctccagtgtcgggttt

SEQ ID NO: 484493 - DNA, 30 bp, Artificial Sequence
  Synthetic oligonucleotide
tggtaaactcagttggactgtaaggggttt

SEQ ID NO: 484494 - DNA, 30 bp, Artificial Sequence
  Synthetic oligonucleotide
gccttcccggggcggatgtgcccggggttt

SEQ ID NO: 484495 - DNA, 30 bp, Artificial Sequence
  Synthetic oligonucleotide
cgcgggccaaatttgatgtgccatgggttt

SEQ ID NO: 484496 - DNA, 30 bp, Artificial Sequence
  Synthetic oligonucleotide
aaagcccgtaggtctcaaatgagtgggttt

SEQ ID NO: 484497 - DNA, 30 bp, Artificial Sequence
  Synthetic oligonucleotide
gaagcggtaagcgatattcacggtgggttt

SEQ ID NO: 484498 - DNA, 30 bp, Artificial Sequence
  Synthetic oligonucleotide
cactgtagcgagtcatcataccttgggttt

SEQ ID NO: 484499 - DNA, 30 bp, Artificial Sequence
  Synthetic oligonucleotide
gaagcgtcttcaacatatttcgttgggttt

SEQ ID NO: 484500 - DNA, 30 bp, Artificial Sequence
  Synthetic oligonucleotide
gctagttcttttttgtaataggtatggttt

SEQ ID NO: 484501 - DNA, 30 bp, Artificial Sequence
  Synthetic oligonucleotide
agctatatcctagttccttaatactggttt

SEQ ID NO: 484502 - DNA, 30 bp, Artificial Sequence
  Synthetic oligonucleotide
atttacactacagtgcaaatactctggttt

SEQ ID NO: 484503 - DNA, 30 bp, Artificial Sequence
  Synthetic oligonucleotide
tgagggcggcagtctgagaccaagtggttt

SEQ ID NO: 484504 - DNA, 30 bp, Artificial Sequence
  Synthetic oligonucleotide
cggggttttgtgatacctgtcaggtggttt

SEQ ID NO: 484505 - DNA, 30 bp, Artificial Sequence
  Synthetic oligonucleotide
gttgcagagggtttcttatggcattggttt

SEQ ID NO: 484506 - DNA, 30 bp, Artificial Sequence
  Synthetic oligonucleotide
caagcgtggtcgcttaacttgtattggttt

SEQ ID NO: 484507 - DNA, 30 bp, Artificial Sequence
  Synthetic oligonucleotide
gtatcgaggtcctacgcctccctttggttt

SEQ ID NO: 484508 - DNA, 30 bp, Artificial Sequence
  Synthetic oligonucleotide
tatttcgggtcttgggtatatctttggttt

SEQ ID NO: 484509 - DNA, 30 bp, Artificial Sequence
  Synthetic oligonucleotide
gtagtgacatccattttagtaaaaatgttt

SEQ ID NO: 484510 - DNA, 30 bp, Artificial Sequence
  Synthetic oligonucleotide
gctatggagtcctacataggctcaatgttt

SEQ ID NO: 484511 - DNA, 30 bp, Artificial Sequence
  Synthetic oligonucleotide
taatgtcacgagaggctccttcgaatgttt

SEQ ID NO: 484512 - DNA, 30 bp, Artificial Sequence
  Synthetic oligonucleotide
acgtttttgtccgccggatctttaatgttt

SEQ ID NO: 484513 - DNA, 30 bp, Artificial Sequence
  Synthetic oligonucleotide
tcaaatactggcaatcgatagcacatgttt

SEQ ID NO: 484514 - DNA, 30 bp, Artificial Sequence
  Synthetic oligonucleotide
gttagtatttttgctttggagcccatgttt

SEQ ID NO: 484515 - DNA, 30 bp, Artificial Sequence
  Synthetic oligonucleotide
tagtacatacaaagacggccagccatgttt

SEQ ID NO: 484516 - DNA, 30 bp, Artificial Sequence
  Synthetic oligonucleotide
aaattacgagcgaaacgcatcctcatgttt

SEQ ID NO: 484517 - DNA, 30 bp, Artificial Sequence
  Synthetic oligonucleotide
gtacggtcaacaccaattgatctcatgttt

SEQ ID NO: 484518 - DNA, 30 bp, Artificial Sequence
  Synthetic oligonucleotide
agcctgaaaaattgaataaacttcatgttt

SEQ ID NO: 484519 - DNA, 30 bp, Artificial Sequence
  Synthetic oligonucleotide
cccataccgtcggttcaaagacatatgttt

SEQ ID NO: 484520 - DNA, 30 bp, Artificial Sequence
  Synthetic oligonucleotide
gaatatgaatacgtacaggaagatatgttt

SEQ ID NO: 484521 - DNA, 30 bp, Artificial Sequence
  Synthetic oligonucleotide
tcgggttgagtcttatgttgtggtatgttt

SEQ ID NO: 484522 - DNA, 30 bp, Artificial Sequence
  Synthetic oligonucleotide
ctttatattctgacagtgcgttttatgttt

SEQ ID NO: 484523 - DNA, 30 bp, Artificial Sequence
  Synthetic oligonucleotide
gcttcacgagctttcaattgcgaactgttt

SEQ ID NO: 484524 - DNA, 30 bp, Artificial Sequence
  Synthetic oligonucleotide
ttatattggttagctgggatttgactgttt

SEQ ID NO: 484525 - DNA, 30 bp, Artificial Sequence
  Synthetic oligonucleotide
taatacacttttcaccagtgccacctgttt

SEQ ID NO: 484526 - DNA, 30 bp, Artificial Sequence
  Synthetic oligonucleotide
gtcctatttgcggtcagtgttgacctgttt

SEQ ID NO: 484527 - DNA, 30 bp, Artificial Sequence
  Synthetic oligonucleotide
tcacattcagtatcatttaaaaagctgttt

SEQ ID NO: 484528 - DNA, 30 bp, Artificial Sequence
  Synthetic oligonucleotide
tttagtataccggctatgttttagctgttt

SEQ ID NO: 484529 - DNA, 30 bp, Artificial Sequence
  Synthetic oligonucleotide
ttcaaaccatgtaacgacttcgggctgttt

SEQ ID NO: 484530 - DNA, 30 bp, Artificial Sequence
  Synthetic oligonucleotide
catggccctcttgcaggtcattggctgttt

SEQ ID NO: 484531 - DNA, 30 bp, Artificial Sequence
  Synthetic oligonucleotide
actgtctcacatttgtacacaatgctgttt

SEQ ID NO: 484532 - DNA, 30 bp, Artificial Sequence
  Synthetic oligonucleotide
tccagaatttagctgtcgttgcgagtgttt

SEQ ID NO: 484533 - DNA, 30 bp, Artificial Sequence
  Synthetic oligonucleotide
attaatatgaggcgtcacagcctcgtgttt

SEQ ID NO: 484534 - DNA, 30 bp, Artificial Sequence
  Synthetic oligonucleotide
gagcagtggtgcaagtaagcagaggtgttt

SEQ ID NO: 484535 - DNA, 30 bp, Artificial Sequence
  Synthetic oligonucleotide
gagctcggagtttactctctttaggtgttt

SEQ ID NO: 484536 - DNA, 30 bp, Artificial Sequence
  Synthetic oligonucleotide
tgaattttgaataacacttcgaaattgttt

SEQ ID NO: 484537 - DNA, 30 bp, Artificial Sequence
  Synthetic oligonucleotide
gataacttcgggggactgcccggattgttt

SEQ ID NO: 484538 - DNA, 30 bp, Artificial Sequence
  Synthetic oligonucleotide
tatcaacgcactatcgaacatttattgttt

SEQ ID NO: 484539 - DNA, 30 bp, Artificial Sequence
  Synthetic oligonucleotide
aacttagtttttaggtggtagcccttgttt

SEQ ID NO: 484540 - DNA, 30 bp, Artificial Sequence
  Synthetic oligonucleotide
ggtaaacttatgggccatactcgcttgttt

SEQ ID NO: 484541 - DNA, 30 bp, Artificial Sequence
  Synthetic oligonucleotide
gcggcgccagcattacagtctccgttgttt

SEQ ID NO: 484542 - DNA, 30 bp, Artificial Sequence
  Synthetic oligonucleotide
tctaatgtttggaggaataattcgttgttt

SEQ ID NO: 484543 - DNA, 30 bp, Artificial Sequence
  Synthetic oligonucleotide
ctcaggaattcgacgtcaacattgttgttt

SEQ ID NO: 484544 - DNA, 30 bp, Artificial Sequence
  Synthetic oligonucleotide
ccgctaactactagttagtgaaaaaatttt

SEQ ID NO: 484545 - DNA, 30 bp, Artificial Sequence
  Synthetic oligonucleotide
atccggtctcagttttcgttaccaaatttt

SEQ ID NO: 484546 - DNA, 30 bp, Artificial Sequence
  Synthetic oligonucleotide
gggccgccgaatgccaaagtccggaatttt

SEQ ID NO: 484547 - DNA, 30 bp, Artificial Sequence
  Synthetic oligonucleotide
ggtctcccgtgctctgcagaattgaatttt

SEQ ID NO: 484548 - DNA, 30 bp, Artificial Sequence
  Synthetic oligonucleotide
ctaatttttaagcagggttaatataatttt

SEQ ID NO: 484549 - DNA, 30 bp, Artificial Sequence
  Synthetic oligonucleotide
cagacgtgccccagattgtcttataatttt

SEQ ID NO: 484550 - DNA, 30 bp, Artificial Sequence
  Synthetic oligonucleotide
gccacggaggccaataaggggcctaatttt

SEQ ID NO: 484551 - DNA, 30 bp, Artificial Sequence
  Synthetic oligonucleotide
ccagcaagctgatgcactgcaggtaatttt

SEQ ID NO: 484552 - DNA, 30 bp, Artificial Sequence
  Synthetic oligonucleotide
aatctacgctgcttaacgtgaggtaatttt

SEQ ID NO: 484553 - DNA, 30 bp, Artificial Sequence
  Synthetic oligonucleotide
gatccacggttccgatgtacgattaatttt

SEQ ID NO: 484554 - DNA, 30 bp, Artificial Sequence
  Synthetic oligonucleotide
ataggtgtcaactttgaaagtcttaatttt

SEQ ID NO: 484555 - DNA, 30 bp, Artificial Sequence
  Synthetic oligonucleotide
acaaagaaagccaggagtgtatgacatttt

SEQ ID NO: 484556 - DNA, 30 bp, Artificial Sequence
  Synthetic oligonucleotide
agctttttggcattggcactgtgacatttt

SEQ ID NO: 484557 - DNA, 30 bp, Artificial Sequence
  Synthetic oligonucleotide
gagacgcaatcgaatctttgataccatttt

SEQ ID NO: 484558 - DNA, 30 bp, Artificial Sequence
  Synthetic oligonucleotide
aacggtaaaggggagtttgcacagcatttt

SEQ ID NO: 484559 - DNA, 30 bp, Artificial Sequence
  Synthetic oligonucleotide
aaaatgtcgagtccgaacggccagcatttt

SEQ ID NO: 484560 - DNA, 30 bp, Artificial Sequence
  Synthetic oligonucleotide
gccctaaatctttcatgctcgacgcatttt

SEQ ID NO: 484561 - DNA, 30 bp, Artificial Sequence
  Synthetic oligonucleotide
cacagcttcctacaagttggtacgcatttt

SEQ ID NO: 484562 - DNA, 30 bp, Artificial Sequence
  Synthetic oligonucleotide
aataccagcatataaatccagccgcatttt

SEQ ID NO: 484563 - DNA, 30 bp, Artificial Sequence
  Synthetic oligonucleotide
aaagttccaagcattaaaaagctgcatttt

SEQ ID NO: 484564 - DNA, 30 bp, Artificial Sequence
  Synthetic oligonucleotide
attagccgcgtatccgcagtggatcatttt

SEQ ID NO: 484565 - DNA, 30 bp, Artificial Sequence
  Synthetic oligonucleotide
tgaatgatgaccacgggaggtgctcatttt

SEQ ID NO: 484566 - DNA, 30 bp, Artificial Sequence
  Synthetic oligonucleotide
tattagttaccgatttatttaaaagatttt

SEQ ID NO: 484567 - DNA, 30 bp, Artificial Sequence
  Synthetic oligonucleotide
tgccggaaagttatctagacagaagatttt

SEQ ID NO: 484568 - DNA, 30 bp, Artificial Sequence
  Synthetic oligonucleotide
agcagcttacagtttcctcggtaagatttt

SEQ ID NO: 484569 - DNA, 30 bp, Artificial Sequence
  Synthetic oligonucleotide
ctaaactgttccgaaggattgacagatttt

SEQ ID NO: 484570 - DNA, 30 bp, Artificial Sequence
  Synthetic oligonucleotide
gatgcctaattctgacgttaaggagatttt

SEQ ID NO: 484571 - DNA, 30 bp, Artificial Sequence
  Synthetic oligonucleotide
taacgcaatacatttatgccttgcgatttt

SEQ ID NO: 484572 - DNA, 30 bp, Artificial Sequence
  Synthetic oligonucleotide
gcctgcaaggtggcagccaatacggatttt

SEQ ID NO: 484573 - DNA, 30 bp, Artificial Sequence
  Synthetic oligonucleotide
caacgcgttatttgtatccgtatggatttt

SEQ ID NO: 484574 - DNA, 30 bp, Artificial Sequence
  Synthetic oligonucleotide
ttcttcttcgttttcgatgttcttgatttt

SEQ ID NO: 484575 - DNA, 30 bp, Artificial Sequence
  Synthetic oligonucleotide
ttgaagccactcgtttgttatgttgatttt

SEQ ID NO: 484576 - DNA, 30 bp, Artificial Sequence
  Synthetic oligonucleotide
ctgtgcctttgattaggctatgcatatttt

SEQ ID NO: 484577 - DNA, 30 bp, Artificial Sequence
  Synthetic oligonucleotide
ctgttaagatgccgtaaaatactatatttt

SEQ ID NO: 484578 - DNA, 30 bp, Artificial Sequence
  Synthetic oligonucleotide
cattgcatatacaaaattatgttatatttt

SEQ ID NO: 484579 - DNA, 30 bp, Artificial Sequence
  Synthetic oligonucleotide
ttccgttgcacggcgccgtgccggtatttt

SEQ ID NO: 484580 - DNA, 30 bp, Artificial Sequence
  Synthetic oligonucleotide
gatttggccccacactaggtagtgtatttt

SEQ ID NO: 484581 - DNA, 30 bp, Artificial Sequence
  Synthetic oligonucleotide
gcctcaaggcactggatgttggattatttt

SEQ ID NO: 484582 - DNA, 30 bp, Artificial Sequence
  Synthetic oligonucleotide
gagcctagtctccggctggacccttatttt

SEQ ID NO: 484583 - DNA, 30 bp, Artificial Sequence
  Synthetic oligonucleotide
tctggtgccaaaacttatcgggcttatttt

SEQ ID NO: 484584 - DNA, 30 bp, Artificial Sequence
  Synthetic oligonucleotide
acatgtctctctgcccctcttggttatttt

SEQ ID NO: 484585 - DNA, 30 bp, Artificial Sequence
  Synthetic oligonucleotide
cgctttcgggttacaggcccgctttatttt

SEQ ID NO: 484586 - DNA, 30 bp, Artificial Sequence
  Synthetic oligonucleotide
gcaaagcgattagctcgcgccttttatttt

SEQ ID NO: 484587 - DNA, 30 bp, Artificial Sequence
  Synthetic oligonucleotide
aacttagagcgcctattatagacaactttt

SEQ ID NO: 484588 - DNA, 30 bp, Artificial Sequence
  Synthetic oligonucleotide
gacttgaacctggaacgtagtacaactttt

SEQ ID NO: 484589 - DNA, 30 bp, Artificial Sequence
  Synthetic oligonucleotide
tagaactcacctccgttaggtataactttt

SEQ ID NO: 484590 - DNA, 30 bp, Artificial Sequence
  Synthetic oligonucleotide
tgggcagcgaagtcgtattgtgtaactttt

SEQ ID NO: 484591 - DNA, 30 bp, Artificial Sequence
  Synthetic oligonucleotide
tagaggttgcaaagagggaatgccactttt

SEQ ID NO: 484592 - DNA, 30 bp, Artificial Sequence
  Synthetic oligonucleotide
gacggcgtgaaagttccactttccactttt

SEQ ID NO: 484593 - DNA, 30 bp, Artificial Sequence
  Synthetic oligonucleotide
catgttgtgtgcataaaaatacctactttt

SEQ ID NO: 484594 - DNA, 30 bp, Artificial Sequence
  Synthetic oligonucleotide
ccaatattcccgcgtgaaacagctactttt

SEQ ID NO: 484595 - DNA, 30 bp, Artificial Sequence
  Synthetic oligonucleotide
acttatgttctacataagtcgagtactttt

SEQ ID NO: 484596 - DNA, 30 bp, Artificial Sequence
  Synthetic oligonucleotide
ggtcctctaaaaggacaggatcttactttt

SEQ ID NO: 484597 - DNA, 30 bp, Artificial Sequence
  Synthetic oligonucleotide
ggaataggaattaggggtcggccccctttt

SEQ ID NO: 484598 - DNA, 30 bp, Artificial Sequence
  Synthetic oligonucleotide
ctctgtgtgaaaggtgatgcccgccctttt

SEQ ID NO: 484599 - DNA, 30 bp, Artificial Sequence
  Synthetic oligonucleotide
aggtgtttaccgaccgggcacgctcctttt

SEQ ID NO: 484600 - DNA, 30 bp, Artificial Sequence
  Synthetic oligonucleotide
gcaatggactgtagtttaggttttcctttt

SEQ ID NO: 484601 - DNA, 30 bp, Artificial Sequence
  Synthetic oligonucleotide
tggccaggctagcctcgcgtggcagctttt

SEQ ID NO: 484602 - DNA, 30 bp, Artificial Sequence
  Synthetic oligonucleotide
aatgaactccgattcatgcatatagctttt

SEQ ID NO: 484603 - DNA, 30 bp, Artificial Sequence
  Synthetic oligonucleotide
cggctattgttgtacccgagtggcgctttt

SEQ ID NO: 484604 - DNA, 30 bp, Artificial Sequence
  Synthetic oligonucleotide
tggaatttaccgagagaacctacggctttt

SEQ ID NO: 484605 - DNA, 30 bp, Artificial Sequence
  Synthetic oligonucleotide
cggcaaactagctgtctgagttctgctttt

SEQ ID NO: 484606 - DNA, 30 bp, Artificial Sequence
  Synthetic oligonucleotide
caccagcactttatgggacttggtgctttt

SEQ ID NO: 484607 - DNA, 30 bp, Artificial Sequence
  Synthetic oligonucleotide
cttcatcattacgttgaattggttgctttt

SEQ ID NO: 484608 - DNA, 30 bp, Artificial Sequence
  Synthetic oligonucleotide
ggattcgcaattaggtgatgaagatctttt

SEQ ID NO: 484609 - DNA, 30 bp, Artificial Sequence
  Synthetic oligonucleotide
gaactctcaccggcattgttggtatctttt

SEQ ID NO: 484610 - DNA, 30 bp, Artificial Sequence
  Synthetic oligonucleotide
taaaagccgcggtgtagagccttatctttt

SEQ ID NO: 484611 - DNA, 30 bp, Artificial Sequence
  Synthetic oligonucleotide
tctaacggattctcgttggcggagtctttt

SEQ ID NO: 484612 - DNA, 30 bp, Artificial Sequence
  Synthetic oligonucleotide
ggtatgcagccaccacagcgggcgtctttt

SEQ ID NO: 484613 - DNA, 30 bp, Artificial Sequence
  Synthetic oligonucleotide
ccgtagctaacttctcactcacggtctttt

SEQ ID NO: 484614 - DNA, 30 bp, Artificial Sequence
  Synthetic oligonucleotide
ggtaagatacgcttatgtggttattctttt

SEQ ID NO: 484615 - DNA, 30 bp, Artificial Sequence
  Synthetic oligonucleotide
ttctgaatctcttttcacttttcttctttt

SEQ ID NO: 484616 - DNA, 30 bp, Artificial Sequence
  Synthetic oligonucleotide
tgcatacctaatcgaatacggcgttctttt

SEQ ID NO: 484617 - DNA, 30 bp, Artificial Sequence
  Synthetic oligonucleotide
tatgttctttaccctcgttatcgttctttt

SEQ ID NO: 484618 - DNA, 30 bp, Artificial Sequence
  Synthetic oligonucleotide
tagtagggcgctcatttatattgaagtttt

SEQ ID NO: 484619 - DNA, 30 bp, Artificial Sequence
  Synthetic oligonucleotide
gtgcgcggtcgtcctgtaggtttaagtttt

SEQ ID NO: 484620 - DNA, 30 bp, Artificial Sequence
  Synthetic oligonucleotide
aatgctattagaatttctcgtcagagtttt

SEQ ID NO: 484621 - DNA, 30 bp, Artificial Sequence
  Synthetic oligonucleotide
gcacgtctccgtaaacgcattgcgagtttt

SEQ ID NO: 484622 - DNA, 30 bp, Artificial Sequence
  Synthetic oligonucleotide
aaataggtctagatactcccggatagtttt

SEQ ID NO: 484623 - DNA, 30 bp, Artificial Sequence
  Synthetic oligonucleotide
aatacaacgggctatatcccatttagtttt

SEQ ID NO: 484624 - DNA, 30 bp, Artificial Sequence
  Synthetic oligonucleotide
gtgcggagtggtttgcttaacagacgtttt

SEQ ID NO: 484625 - DNA, 30 bp, Artificial Sequence
  Synthetic oligonucleotide
gtacagttagctactccggaactccgtttt

SEQ ID NO: 484626 - DNA, 30 bp, Artificial Sequence
  Synthetic oligonucleotide
ctagcctccgagtcgatccacgagcgtttt

SEQ ID NO: 484627 - DNA, 30 bp, Artificial Sequence
  Synthetic oligonucleotide
agccacggggataccatagcttcgcgtttt

SEQ ID NO: 484628 - DNA, 30 bp, Artificial Sequence
  Synthetic oligonucleotide
ccatacaaaaaccatcagtataaaggtttt

SEQ ID NO: 484629 - DNA, 30 bp, Artificial Sequence
  Synthetic oligonucleotide
tcgtactgtcgagaaacaaaaaagggtttt

SEQ ID NO: 484630 - DNA, 30 bp, Artificial Sequence
  Synthetic oligonucleotide
ctaatgttcagcctgtgctcaacgggtttt

SEQ ID NO: 484631 - DNA, 30 bp, Artificial Sequence
  Synthetic oligonucleotide
ctagtggcctgtacaaagtacatgggtttt

SEQ ID NO: 484632 - DNA, 30 bp, Artificial Sequence
  Synthetic oligonucleotide
ggttcgcggatgaaagcagtgtatggtttt

SEQ ID NO: 484633 - DNA, 30 bp, Artificial Sequence
  Synthetic oligonucleotide
acgattatgatgtcattccatcgtggtttt

SEQ ID NO: 484634 - DNA, 30 bp, Artificial Sequence
  Synthetic oligonucleotide
gagagaactattgtcctgctaattggtttt

SEQ ID NO: 484635 - DNA, 30 bp, Artificial Sequence
  Synthetic oligonucleotide
tgaataatgaggcaccacaaggttggtttt

SEQ ID NO: 484636 - DNA, 30 bp, Artificial Sequence
  Synthetic oligonucleotide
gtaggtaaacagcatctaaaggtatgtttt

SEQ ID NO: 484637 - DNA, 30 bp, Artificial Sequence
  Synthetic oligonucleotide
cagattatatgttcgctattaaactgtttt

SEQ ID NO: 484638 - DNA, 30 bp, Artificial Sequence
  Synthetic oligonucleotide
tgccagttacgcatgttttgaacctgtttt

SEQ ID NO: 484639 - DNA, 30 bp, Artificial Sequence
  Synthetic oligonucleotide
gactcccttcagggatctgattgctgtttt

SEQ ID NO: 484640 - DNA, 30 bp, Artificial Sequence
  Synthetic oligonucleotide
aacaatggtaggtcctcgggacggtgtttt

SEQ ID NO: 484641 - DNA, 30 bp, Artificial Sequence
  Synthetic oligonucleotide
cctctcacgtggcgcgtagttcattgtttt

SEQ ID NO: 484642 - DNA, 30 bp, Artificial Sequence
  Synthetic oligonucleotide
cccgctcatattagtccgcttccttgtttt

SEQ ID NO: 484643 - DNA, 30 bp, Artificial Sequence
  Synthetic oligonucleotide
tccactctgtaacacacgggtttttgtttt

SEQ ID NO: 484644 - DNA, 30 bp, Artificial Sequence
  Synthetic oligonucleotide
ttgcgactaatttagtcgggccaaattttt

SEQ ID NO: 484645 - DNA, 30 bp, Artificial Sequence
  Synthetic oligonucleotide
attcggagacgcggggtatggagaattttt

SEQ ID NO: 484646 - DNA, 30 bp, Artificial Sequence
  Synthetic oligonucleotide
gtctggtctcacttttcgctttccattttt

SEQ ID NO: 484647 - DNA, 30 bp, Artificial Sequence
  Synthetic oligonucleotide
actactcaccaccagcggggaagcattttt

SEQ ID NO: 484648 - DNA, 30 bp, Artificial Sequence
  Synthetic oligonucleotide
ggcaatggatatgtacgcaattgcattttt

SEQ ID NO: 484649 - DNA, 30 bp, Artificial Sequence
  Synthetic oligonucleotide
agttctttctgtcacttctcgtagattttt

SEQ ID NO: 484650 - DNA, 30 bp, Artificial Sequence
  Synthetic oligonucleotide
gactgcgtgatatctttctttgcgattttt

SEQ ID NO: 484651 - DNA, 30 bp, Artificial Sequence
  Synthetic oligonucleotide
aatcaaagcggtgttcgtagctggattttt

SEQ ID NO: 484652 - DNA, 30 bp, Artificial Sequence
  Synthetic oligonucleotide
accgttcgagatggtacgagtcctattttt

SEQ ID NO: 484653 - DNA, 30 bp, Artificial Sequence
  Synthetic oligonucleotide
agtttagttcttatggaatcgtctattttt

SEQ ID NO: 484654 - DNA, 30 bp, Artificial Sequence
  Synthetic oligonucleotide
gtttgaaccgttatttcatatgttattttt

SEQ ID NO: 484655 - DNA, 30 bp, Artificial Sequence
  Synthetic oligonucleotide
tccagagtgggctaataggagtcacttttt

SEQ ID NO: 484656 - DNA, 30 bp, Artificial Sequence
  Synthetic oligonucleotide
atgaatttcgaaatacacgtaggacttttt

SEQ ID NO: 484657 - DNA, 30 bp, Artificial Sequence
  Synthetic oligonucleotide
cctacttggaagcgtaactcttcccttttt

SEQ ID NO: 484658 - DNA, 30 bp, Artificial Sequence
  Synthetic oligonucleotide
attgtatagtcgttaatcatcaagcttttt

SEQ ID NO: 484659 - DNA, 30 bp, Artificial Sequence
  Synthetic oligonucleotide
tttgtgcatgttagtttttcatagcttttt

SEQ ID NO: 484660 - DNA, 30 bp, Artificial Sequence
  Synthetic oligonucleotide
aagtagaaaaataagtatttttagcttttt

SEQ ID NO: 484661 - DNA, 30 bp, Artificial Sequence
  Synthetic oligonucleotide
taaccgatatatgggcttgacattcttttt

SEQ ID NO: 484662 - DNA, 30 bp, Artificial Sequence
  Synthetic oligonucleotide
cggtattaaaatacgcaacattaagttttt

SEQ ID NO: 484663 - DNA, 30 bp, Artificial Sequence
  Synthetic oligonucleotide
aaacgttcttctgtttacttgtacgttttt

SEQ ID NO: 484664 - DNA, 30 bp, Artificial Sequence
  Synthetic oligonucleotide
gattcagtgcagctatagataagcgttttt

SEQ ID NO: 484665 - DNA, 30 bp, Artificial Sequence
  Synthetic oligonucleotide
ctcattcctcatggaatagggcgggttttt

SEQ ID NO: 484666 - DNA, 30 bp, Artificial Sequence
  Synthetic oligonucleotide
ctagttcgggaaatcgcacagtgggttttt

SEQ ID NO: 484667 - DNA, 31 bp, Artificial Sequence
  Synthetic oligonucleotide
ttatgctcctcggaggaggtcaaatgttttt

SEQ ID NO: 484668 - DNA, 30 bp, Artificial Sequence
  Synthetic oligonucleotide
taggtctgtgataaatggacatatgttttt

SEQ ID NO: 484669 - DNA, 30 bp, Artificial Sequence
  Synthetic oligonucleotide
ttccaaaagcgacgcgtttaaggtgttttt

SEQ ID NO: 484670 - DNA, 30 bp, Artificial Sequence
  Synthetic oligonucleotide
tcagacaaccttctaggaagtgaatttttt

SEQ ID NO: 484671 - DNA, 30 bp, Artificial Sequence
  Synthetic oligonucleotide
cgtggatttcgcatcctgcaccgatttttt

SEQ ID NO: 484672 - DNA, 30 bp, Artificial Sequence
  Synthetic oligonucleotide
gactcacacactcgcggcatgacctttttt

SEQ ID NO: 484673 - DNA, 30 bp, Artificial Sequence
  Synthetic oligonucleotide
agtatatttaccaggttggatctctttttt

SEQ ID NO: 484674 - DNA, 30 bp, Artificial Sequence
  Synthetic oligonucleotide
cgtttatgatagactatgcgcgtctttttt

SEQ ID NO: 484675 - DNA, 30 bp, Artificial Sequence
  Synthetic oligonucleotide
ctggattatagctcccatcatttctttttt

SEQ ID NO: 484676 - DNA, 30 bp, Artificial Sequence
  Synthetic oligonucleotide
ccggctttaaagaacttgtctacgtttttt

SEQ ID NO: 484677 - DNA, 30 bp, Artificial Sequence
  Synthetic oligonucleotide
atgccgtgtttagactgtattgcgtttttt

SEQ ID NO: 484678 - DNA, 30 bp, Artificial Sequence
  Synthetic oligonucleotide
gcaaatttctagctagtgatgtattttttt

SEQ ID NO: 484679 - DNA, 30 bp, Artificial Sequence
  Synthetic oligonucleotide
aaggtttagtcagccagctctacttttttt

SEQ ID NO: 484680 - DNA, 30 bp, Artificial Sequence
  Synthetic oligonucleotide
gttctgcagaaaacgaaatgtacttttttt

SEQ ID NO: 484681 - DNA, 30 bp, Artificial Sequence
  Synthetic oligonucleotide
acaccaacatcagtttcacttggttttttt

SEQ ID NO: 484682 - DNA, 30 bp, Artificial Sequence
  Synthetic oligonucleotide
ggttaggatatggcttaaatgctttttttt

SEQ ID NO: 484683 - DNA, 30 bp, Artificial Sequence
  Synthetic oligonucleotide
cctaacatccaactatgggcaaaaaaaaaa

SEQ ID NO: 484684 - DNA, 30 bp, Artificial Sequence
  Synthetic oligonucleotide
ctaccgcttgtctggaattaacaaaaaaaa

SEQ ID NO: 484685 - DNA, 30 bp, Artificial Sequence
  Synthetic oligonucleotide
gatgctcgggtgacgacgtatgaaaaaaaa

SEQ ID NO: 484686 - DNA, 30 bp, Artificial Sequence
  Synthetic oligonucleotide
ccctataattcataaatgtcaccaaaaaaa

SEQ ID NO: 484687 - DNA, 30 bp, Artificial Sequence
  Synthetic oligonucleotide
accccacagttgttccgtaggtgaaaaaaa

SEQ ID NO: 484688 - DNA, 30 bp, Artificial Sequence
  Synthetic oligonucleotide
aaatatggcccataggttagagtaaaaaaa

SEQ ID NO: 484689 - DNA, 30 bp, Artificial Sequence
  Synthetic oligonucleotide
cttgatgccacaaatgttattatcaaaaaa

SEQ ID NO: 484690 - DNA, 30 bp, Artificial Sequence
  Synthetic oligonucleotide
gagcactggatgtcgcagcgggtcaaaaaa

SEQ ID NO: 484691 - DNA, 30 bp, Artificial Sequence
  Synthetic oligonucleotide
gagaattcgtcatgcaagtttttcaaaaaa

SEQ ID NO: 484692 - DNA, 30 bp, Artificial Sequence
  Synthetic oligonucleotide
gaaatacacgatgcgttgcaacgtaaaaaa

SEQ ID NO: 484693 - DNA, 30 bp, Artificial Sequence
  Synthetic oligonucleotide
tagttttcacctcgggtttgtaaacaaaaa

SEQ ID NO: 484694 - DNA, 30 bp, Artificial Sequence
  Synthetic oligonucleotide
gacttgcccggtcaggatatacaacaaaaa

SEQ ID NO: 484695 - DNA, 30 bp, Artificial Sequence
  Synthetic oligonucleotide
agcgctttggtagaacgttaaggacaaaaa

SEQ ID NO: 484696 - DNA, 30 bp, Artificial Sequence
  Synthetic oligonucleotide
gaagatttttcacggagatcgatacaaaaa

SEQ ID NO: 484697 - DNA, 30 bp, Artificial Sequence
  Synthetic oligonucleotide
gatctatgtcatgaggtgcaattacaaaaa

SEQ ID NO: 484698 - DNA, 30 bp, Artificial Sequence
  Synthetic oligonucleotide
agtgtattagcgagctgatcgtgccaaaaa

SEQ ID NO: 484699 - DNA, 30 bp, Artificial Sequence
  Synthetic oligonucleotide
gtaaggctagtatgccgggcatagcaaaaa

SEQ ID NO: 484700 - DNA, 30 bp, Artificial Sequence
  Synthetic oligonucleotide
gctgggaatcatttgtacacaacgcaaaaa

SEQ ID NO: 484701 - DNA, 30 bp, Artificial Sequence
  Synthetic oligonucleotide
aaacacgatgaaccgtacgggacgcaaaaa

SEQ ID NO: 484702 - DNA, 30 bp, Artificial Sequence
  Synthetic oligonucleotide
catgacattatctggagtgccatgcaaaaa

SEQ ID NO: 484703 - DNA, 30 bp, Artificial Sequence
  Synthetic oligonucleotide
aattaagtcatatcgtttaactatcaaaaa

SEQ ID NO: 484704 - DNA, 30 bp, Artificial Sequence
  Synthetic oligonucleotide
ggtacttcgtgagcgacataaagtcaaaaa

SEQ ID NO: 484705 - DNA, 30 bp, Artificial Sequence
  Synthetic oligonucleotide
ggttatgattaagcacttccggttcaaaaa

SEQ ID NO: 484706 - DNA, 30 bp, Artificial Sequence
  Synthetic oligonucleotide
tatttacggtatcttagtcgcctagaaaaa

SEQ ID NO: 484707 - DNA, 30 bp, Artificial Sequence
  Synthetic oligonucleotide
taatcgacgtcagagattcataacgaaaaa

SEQ ID NO: 484708 - DNA, 30 bp, Artificial Sequence
  Synthetic oligonucleotide
agcgcaattccaaagagggctaacgaaaaa

SEQ ID NO: 484709 - DNA, 30 bp, Artificial Sequence
  Synthetic oligonucleotide
ttattaaagttctgtgcataactcgaaaaa

SEQ ID NO: 484710 - DNA, 30 bp, Artificial Sequence
  Synthetic oligonucleotide
aaatcaattttcggtcctcgattggaaaaa

SEQ ID NO: 484711 - DNA, 30 bp, Artificial Sequence
  Synthetic oligonucleotide
gatgtattgttgaagtaataccctgaaaaa

SEQ ID NO: 484712 - DNA, 30 bp, Artificial Sequence
  Synthetic oligonucleotide
tcttatatcttaaatctgaacggtgaaaaa

SEQ ID NO: 484713 - DNA, 30 bp, Artificial Sequence
  Synthetic oligonucleotide
ttttaaactgcgcgaaatcgacttgaaaaa

SEQ ID NO: 484714 - DNA, 30 bp, Artificial Sequence
  Synthetic oligonucleotide
acagaatgctccagtcgcaaaaaataaaaa

SEQ ID NO: 484715 - DNA, 30 bp, Artificial Sequence
  Synthetic oligonucleotide
tgaaaggtcatgcgtagcggctaataaaaa

SEQ ID NO: 484716 - DNA, 30 bp, Artificial Sequence
  Synthetic oligonucleotide
agctaagcgtttgttttatgtagataaaaa

SEQ ID NO: 484717 - DNA, 30 bp, Artificial Sequence
  Synthetic oligonucleotide
taacccgggaaagcgtcgtagggataaaaa

SEQ ID NO: 484718 - DNA, 30 bp, Artificial Sequence
  Synthetic oligonucleotide
taatgacggaatcatacctttatataaaaa

SEQ ID NO: 484719 - DNA, 30 bp, Artificial Sequence
  Synthetic oligonucleotide
cacggtttccacggggctatgcactaaaaa

SEQ ID NO: 484720 - DNA, 30 bp, Artificial Sequence
  Synthetic oligonucleotide
ggcaaagttagccagaaatagctctaaaaa

SEQ ID NO: 484721 - DNA, 30 bp, Artificial Sequence
  Synthetic oligonucleotide
ccttaagacgcgacaataataaagtaaaaa

SEQ ID NO: 484722 - DNA, 30 bp, Artificial Sequence
  Synthetic oligonucleotide
gcagaactggttggaaatttttagtaaaaa

SEQ ID NO: 484723 - DNA, 30 bp, Artificial Sequence
  Synthetic oligonucleotide
tagacccttaccgatcttcttcggtaaaaa

SEQ ID NO: 484724 - DNA, 30 bp, Artificial Sequence
  Synthetic oligonucleotide
cagcggtaggaagcggagatatggtaaaaa

SEQ ID NO: 484725 - DNA, 30 bp, Artificial Sequence
  Synthetic oligonucleotide
ccctcatttgggacgaatacagattaaaaa

SEQ ID NO: 484726 - DNA, 30 bp, Artificial Sequence
  Synthetic oligonucleotide
cagcactgtatattgagaaatggttaaaaa

SEQ ID NO: 484727 - DNA, 30 bp, Artificial Sequence
  Synthetic oligonucleotide
tgataagttgacgattgggctttttaaaaa

SEQ ID NO: 484728 - DNA, 30 bp, Artificial Sequence
  Synthetic oligonucleotide
taaagctggcgatcggcatctttttaaaaa

SEQ ID NO: 484729 - DNA, 30 bp, Artificial Sequence
  Synthetic oligonucleotide
aggcccggtctgataggcagcaaaacaaaa

SEQ ID NO: 484730 - DNA, 30 bp, Artificial Sequence
  Synthetic oligonucleotide
gcaaaggccataaatgtgtgtaaaacaaaa

SEQ ID NO: 484731 - DNA, 30 bp, Artificial Sequence
  Synthetic oligonucleotide
gtgtttgttacgcagggcagctaaacaaaa

SEQ ID NO: 484732 - DNA, 30 bp, Artificial Sequence
  Synthetic oligonucleotide
accatatgtttaaagtatgagacaacaaaa

SEQ ID NO: 484733 - DNA, 30 bp, Artificial Sequence
  Synthetic oligonucleotide
agcaagagtcatctgccattagtaacaaaa

SEQ ID NO: 484734 - DNA, 30 bp, Artificial Sequence
  Synthetic oligonucleotide
atgcagcatctggcaatgaacgtcacaaaa

SEQ ID NO: 484735 - DNA, 30 bp, Artificial Sequence
  Synthetic oligonucleotide
gatctttttgactcggagccggtcacaaaa

SEQ ID NO: 484736 - DNA, 30 bp, Artificial Sequence
  Synthetic oligonucleotide
ttcaggtatactgttgctttgaggacaaaa

SEQ ID NO: 484737 - DNA, 30 bp, Artificial Sequence
  Synthetic oligonucleotide
gaggtggtcgccaaagaaggacgtacaaaa

SEQ ID NO: 484738 - DNA, 30 bp, Artificial Sequence
  Synthetic oligonucleotide
ggtatgagcttaagcttatgttgtacaaaa

SEQ ID NO: 484739 - DNA, 30 bp, Artificial Sequence
  Synthetic oligonucleotide
cgctacagcaattggtaatgacacccaaaa

SEQ ID NO: 484740 - DNA, 30 bp, Artificial Sequence
  Synthetic oligonucleotide
agtaattttggagtgcattagctcccaaaa

SEQ ID NO: 484741 - DNA, 30 bp, Artificial Sequence
  Synthetic oligonucleotide
gataacccgagcgatgctattttcccaaaa

SEQ ID NO: 484742 - DNA, 30 bp, Artificial Sequence
  Synthetic oligonucleotide
tatccgcttcaaataggtgcccttccaaaa

SEQ ID NO: 484743 - DNA, 30 bp, Artificial Sequence
  Synthetic oligonucleotide
cctttagtttcgtgcaatggctaagcaaaa

SEQ ID NO: 484744 - DNA, 30 bp, Artificial Sequence
  Synthetic oligonucleotide
acaactttttcggtgcaatgcttagcaaaa

SEQ ID NO: 484745 - DNA, 30 bp, Artificial Sequence
  Synthetic oligonucleotide
cgaattttgttcctgtcagttaacgcaaaa

SEQ ID NO: 484746 - DNA, 30 bp, Artificial Sequence
  Synthetic oligonucleotide
gtacacaggttgctattttaggacgcaaaa

SEQ ID NO: 484747 - DNA, 30 bp, Artificial Sequence
  Synthetic oligonucleotide
tttgtttgggtaaactaccatgtcgcaaaa

SEQ ID NO: 484748 - DNA, 30 bp, Artificial Sequence
  Synthetic oligonucleotide
ggattgatttttgggattaaattcgcaaaa

SEQ ID NO: 484749 - DNA, 30 bp, Artificial Sequence
  Synthetic oligonucleotide
gagtggagtaggcgggtaccataggcaaaa

SEQ ID NO: 484750 - DNA, 30 bp, Artificial Sequence
  Synthetic oligonucleotide
ctgatacaatggaaaatgctcgcggcaaaa

SEQ ID NO: 484751 - DNA, 30 bp, Artificial Sequence
  Synthetic oligonucleotide
gtttccggcatgtctgatcaccatgcaaaa

SEQ ID NO: 484752 - DNA, 30 bp, Artificial Sequence
  Synthetic oligonucleotide
tcccatgcttttacacaagtagatgcaaaa

SEQ ID NO: 484753 - DNA, 30 bp, Artificial Sequence
  Synthetic oligonucleotide
cgttgcatgccggcagcgtgccttgcaaaa

SEQ ID NO: 484754 - DNA, 30 bp, Artificial Sequence
  Synthetic oligonucleotide
cgctttatgatagcatagtgctgatcaaaa

SEQ ID NO: 484755 - DNA, 30 bp, Artificial Sequence
  Synthetic oligonucleotide
atgatcaaccggttacggcggttctcaaaa

SEQ ID NO: 484756 - DNA, 30 bp, Artificial Sequence
  Synthetic oligonucleotide
aactttaggttccttaatatgtggtcaaaa

SEQ ID NO: 484757 - DNA, 30 bp, Artificial Sequence
  Synthetic oligonucleotide
ttacgcctttgattaaggatttggtcaaaa

SEQ ID NO: 484758 - DNA, 30 bp, Artificial Sequence
  Synthetic oligonucleotide
ggaattttgagatttactatccattcaaaa

SEQ ID NO: 484759 - DNA, 30 bp, Artificial Sequence
  Synthetic oligonucleotide
cattcacgcccaggtcgcatctgttcaaaa

SEQ ID NO: 484760 - DNA, 30 bp, Artificial Sequence
  Synthetic oligonucleotide
cagatctgtcgttacgcagtgctttcaaaa

SEQ ID NO: 484761 - DNA, 30 bp, Artificial Sequence
  Synthetic oligonucleotide
tcatggactgttgacctggccttttcaaaa

SEQ ID NO: 484762 - DNA, 30 bp, Artificial Sequence
  Synthetic oligonucleotide
ctaagttgtaatgaggcggagaaaagaaaa

SEQ ID NO: 484763 - DNA, 30 bp, Artificial Sequence
  Synthetic oligonucleotide
gcaatatgcccggtatatatggcaagaaaa

SEQ ID NO: 484764 - DNA, 30 bp, Artificial Sequence
  Synthetic oligonucleotide
ttaattgtacacgtggagccttcaagaaaa

SEQ ID NO: 484765 - DNA, 30 bp, Artificial Sequence
  Synthetic oligonucleotide
attatccacgagttggtgagcataagaaaa

SEQ ID NO: 484766 - DNA, 30 bp, Artificial Sequence
  Synthetic oligonucleotide
gtgtgccgtacaacgccaggcttaagaaaa

SEQ ID NO: 484767 - DNA, 30 bp, Artificial Sequence
  Synthetic oligonucleotide
tgcttagtactgatttgtgtctccagaaaa

SEQ ID NO: 484768 - DNA, 30 bp, Artificial Sequence
  Synthetic oligonucleotide
atcctgggaccttatctagggaggagaaaa

SEQ ID NO: 484769 - DNA, 30 bp, Artificial Sequence
  Synthetic oligonucleotide
gttattacggttaacgtccaatctagaaaa

SEQ ID NO: 484770 - DNA, 30 bp, Artificial Sequence
  Synthetic oligonucleotide
gacacagcgttcctccctaaaagtagaaaa

SEQ ID NO: 484771 - DNA, 30 bp, Artificial Sequence
  Synthetic oligonucleotide
gcaggcagccatgagctttacagtagaaaa

SEQ ID NO: 484772 - DNA, 30 bp, Artificial Sequence
  Synthetic oligonucleotide
atccccgctgtcatccgccaagcacgaaaa

SEQ ID NO: 484773 - DNA, 30 bp, Artificial Sequence
  Synthetic oligonucleotide
acgcccagtattcaacgccatggacgaaaa

SEQ ID NO: 484774 - DNA, 30 bp, Artificial Sequence
  Synthetic oligonucleotide
ttgactttgtgctagggatccaatcgaaaa

SEQ ID NO: 484775 - DNA, 30 bp, Artificial Sequence
  Synthetic oligonucleotide
acgcaaggtcggaacccggactcgggaaaa

SEQ ID NO: 484776 - DNA, 30 bp, Artificial Sequence
  Synthetic oligonucleotide
gatatgtttcaactctctatagtgggaaaa

SEQ ID NO: 484777 - DNA, 30 bp, Artificial Sequence
  Synthetic oligonucleotide
aagagagtcgtgctagaaagttatggaaaa

SEQ ID NO: 484778 - DNA, 30 bp, Artificial Sequence
  Synthetic oligonucleotide
ttatactcgtaaaaaccctaacaatgaaaa

SEQ ID NO: 484779 - DNA, 30 bp, Artificial Sequence
  Synthetic oligonucleotide
gcattcagttgccccgtacgcccctgaaaa

SEQ ID NO: 484780 - DNA, 30 bp, Artificial Sequence
  Synthetic oligonucleotide
ccgcggtcttaggtgtttataaggtgaaaa

SEQ ID NO: 484781 - DNA, 30 bp, Artificial Sequence
  Synthetic oligonucleotide
gagtcttattgcagatgcgctaggtgaaaa

SEQ ID NO: 484782 - DNA, 30 bp, Artificial Sequence
  Synthetic oligonucleotide
tggtgcccacttgtaagctgggtgtgaaaa

SEQ ID NO: 484783 - DNA, 30 bp, Artificial Sequence
  Synthetic oligonucleotide
tgcgatttgcactgctccacaaattgaaaa

SEQ ID NO: 484784 - DNA, 30 bp, Artificial Sequence
  Synthetic oligonucleotide
gtctcgatttatgacggatttctttgaaaa

SEQ ID NO: 484785 - DNA, 30 bp, Artificial Sequence
  Synthetic oligonucleotide
cgctctaccggcctttaagaagtttgaaaa

SEQ ID NO: 484786 - DNA, 30 bp, Artificial Sequence
  Synthetic oligonucleotide
gagttccgttatacactctatgcaataaaa

SEQ ID NO: 484787 - DNA, 30 bp, Artificial Sequence
  Synthetic oligonucleotide
cggaggcgaagacgaaggtaatcaataaaa

SEQ ID NO: 484788 - DNA, 30 bp, Artificial Sequence
  Synthetic oligonucleotide
acgagttactttcagactctcagcataaaa

SEQ ID NO: 484789 - DNA, 30 bp, Artificial Sequence
  Synthetic oligonucleotide
tgaaatgaagtatctccattcgggataaaa

SEQ ID NO: 484790 - DNA, 30 bp, Artificial Sequence
  Synthetic oligonucleotide
cgtttagtgtaactcctagttcatataaaa

SEQ ID NO: 484791 - DNA, 30 bp, Artificial Sequence
  Synthetic oligonucleotide
gctaccacaggttttagataaattataaaa

SEQ ID NO: 484792 - DNA, 30 bp, Artificial Sequence
  Synthetic oligonucleotide
agataatccgatcagcagcaaatactaaaa

SEQ ID NO: 484793 - DNA, 30 bp, Artificial Sequence
  Synthetic oligonucleotide
tatccggtagatctgtatctatgtctaaaa

SEQ ID NO: 484794 - DNA, 30 bp, Artificial Sequence
  Synthetic oligonucleotide
agagttaggacgcttttggattttctaaaa

SEQ ID NO: 484795 - DNA, 30 bp, Artificial Sequence
  Synthetic oligonucleotide
tgcataccgacgcgcgcttgctaagtaaaa

SEQ ID NO: 484796 - DNA, 30 bp, Artificial Sequence
  Synthetic oligonucleotide
gcacattgattggcgacatttcgagtaaaa

SEQ ID NO: 484797 - DNA, 30 bp, Artificial Sequence
  Synthetic oligonucleotide
tgcaagttggggtttcccccttgagtaaaa

SEQ ID NO: 484798 - DNA, 30 bp, Artificial Sequence
  Synthetic oligonucleotide
gaagggtgatcatccggcccttacgtaaaa

SEQ ID NO: 484799 - DNA, 30 bp, Artificial Sequence
  Synthetic oligonucleotide
tttggggtcaacaagccgattaccgtaaaa

SEQ ID NO: 484800 - DNA, 30 bp, Artificial Sequence
  Synthetic oligonucleotide
ggtaatgctttgcacagacacagcgtaaaa

SEQ ID NO: 484801 - DNA, 30 bp, Artificial Sequence
  Synthetic oligonucleotide
tttagttaccttaatattcaggtcgtaaaa

SEQ ID NO: 484802 - DNA, 30 bp, Artificial Sequence
  Synthetic oligonucleotide
cccatcgcagttgacgtcctcgaggtaaaa

SEQ ID NO: 484803 - DNA, 30 bp, Artificial Sequence
  Synthetic oligonucleotide
ggtgacgaaggctaatttagtacggtaaaa

SEQ ID NO: 484804 - DNA, 30 bp, Artificial Sequence
  Synthetic oligonucleotide
gccatggcagtgaggccgcattgggtaaaa

SEQ ID NO: 484805 - DNA, 30 bp, Artificial Sequence
  Synthetic oligonucleotide
ttactttccatttctgtctgacgtgtaaaa

SEQ ID NO: 484806 - DNA, 30 bp, Artificial Sequence
  Synthetic oligonucleotide
cattagaacccttaattcttcgcattaaaa

SEQ ID NO: 484807 - DNA, 30 bp, Artificial Sequence
  Synthetic oligonucleotide
acctaactttctaaaaacgggtcattaaaa

SEQ ID NO: 484808 - DNA, 30 bp, Artificial Sequence
  Synthetic oligonucleotide
acccctacacattaggggattggattaaaa

SEQ ID NO: 484809 - DNA, 30 bp, Artificial Sequence
  Synthetic oligonucleotide
tggagcagtctcgtaattggcagcttaaaa

SEQ ID NO: 484810 - DNA, 30 bp, Artificial Sequence
  Synthetic oligonucleotide
tatgctcggctagcggtgcttttcttaaaa

SEQ ID NO: 484811 - DNA, 30 bp, Artificial Sequence
  Synthetic oligonucleotide
tagtagaccctttccgcttcaaggttaaaa

SEQ ID NO: 484812 - DNA, 30 bp, Artificial Sequence
  Synthetic oligonucleotide
tggtctggttgggtccggtcacgtttaaaa

SEQ ID NO: 484813 - DNA, 30 bp, Artificial Sequence
  Synthetic oligonucleotide
cagaagcttgttgaccgtgtcctaaacaaa

SEQ ID NO: 484814 - DNA, 30 bp, Artificial Sequence
  Synthetic oligonucleotide
gcatactaggtattatagaccaacaacaaa

SEQ ID NO: 484815 - DNA, 30 bp, Artificial Sequence
  Synthetic oligonucleotide
tttacactcttggtggatctgctcaacaaa

SEQ ID NO: 484816 - DNA, 30 bp, Artificial Sequence
  Synthetic oligonucleotide
aaaaactaataatcgaacacatgtaacaaa

SEQ ID NO: 484817 - DNA, 30 bp, Artificial Sequence
  Synthetic oligonucleotide
ttcggaagtctactcggagtattacacaaa

SEQ ID NO: 484818 - DNA, 30 bp, Artificial Sequence
  Synthetic oligonucleotide
ggtattccagatgcagtgtgggaccacaaa

SEQ ID NO: 484819 - DNA, 30 bp, Artificial Sequence
  Synthetic oligonucleotide
ctacggctatatccattcacgggccacaaa

SEQ ID NO: 484820 - DNA, 30 bp, Artificial Sequence
  Synthetic oligonucleotide
gcgagctaaaggcgaatatctaagcacaaa

SEQ ID NO: 484821 - DNA, 30 bp, Artificial Sequence
  Synthetic oligonucleotide
ttcacacgccatgctatccgttagcacaaa

SEQ ID NO: 484822 - DNA, 30 bp, Artificial Sequence
  Synthetic oligonucleotide
aggatctgtagttttaccggcgtgcacaaa

SEQ ID NO: 484823 - DNA, 30 bp, Artificial Sequence
  Synthetic oligonucleotide
cagtataacgttagcatatattctcacaaa

SEQ ID NO: 484824 - DNA, 30 bp, Artificial Sequence
  Synthetic oligonucleotide
gttcatattatcatccctaggggagacaaa

SEQ ID NO: 484825 - DNA, 30 bp, Artificial Sequence
  Synthetic oligonucleotide
aactgaggggcgtttgccctttgagacaaa

SEQ ID NO: 484826 - DNA, 30 bp, Artificial Sequence
  Synthetic oligonucleotide
ggtctttcggctacgtttaggaccgacaaa

SEQ ID NO: 484827 - DNA, 30 bp, Artificial Sequence
  Synthetic oligonucleotide
ttgccgattacgcggcgtccccccgacaaa

SEQ ID NO: 484828 - DNA, 30 bp, Artificial Sequence
  Synthetic oligonucleotide
atctaagctcatgtacgcgatcaggacaaa

SEQ ID NO: 484829 - DNA, 30 bp, Artificial Sequence
  Synthetic oligonucleotide
cgtacttaccgttggagtttcccggacaaa

SEQ ID NO: 484830 - DNA, 30 bp, Artificial Sequence
  Synthetic oligonucleotide
tacaggtagtcattatgtcggtgggacaaa

SEQ ID NO: 484831 - DNA, 30 bp, Artificial Sequence
  Synthetic oligonucleotide
caacacgcaccaggatagcttgtggacaaa

SEQ ID NO: 484832 - DNA, 30 bp, Artificial Sequence
  Synthetic oligonucleotide
gctccgacggtaccccctcactctgacaaa

SEQ ID NO: 484833 - DNA, 30 bp, Artificial Sequence
  Synthetic oligonucleotide
tgatgctcaatggactctatgcgatacaaa

SEQ ID NO: 484834 - DNA, 30 bp, Artificial Sequence
  Synthetic oligonucleotide
aaacaggactgaaacagaggaaagtacaaa

SEQ ID NO: 484835 - DNA, 30 bp, Artificial Sequence
  Synthetic oligonucleotide
ctcattgaatgtgctccggaggagtacaaa

SEQ ID NO: 484836 - DNA, 30 bp, Artificial Sequence
  Synthetic oligonucleotide
ggccgctgaggtaccatttctggttacaaa

SEQ ID NO: 484837 - DNA, 30 bp, Artificial Sequence
  Synthetic oligonucleotide
tgtcaaatcacagcacacggcatttacaaa

SEQ ID NO: 484838 - DNA, 30 bp, Artificial Sequence
  Synthetic oligonucleotide
tggtgaaggactcaggccatttcaaccaaa

SEQ ID NO: 484839 - DNA, 30 bp, Artificial Sequence
  Synthetic oligonucleotide
aaggttcactacatagcacttataaccaaa

SEQ ID NO: 484840 - DNA, 30 bp, Artificial Sequence
  Synthetic oligonucleotide
gttagctcttctgccctttgactaaccaaa

SEQ ID NO: 484841 - DNA, 30 bp, Artificial Sequence
  Synthetic oligonucleotide
tagctgttggacttagcatctaacaccaaa

SEQ ID NO: 484842 - DNA, 30 bp, Artificial Sequence
  Synthetic oligonucleotide
gccaaaagtggattaggttgatacaccaaa

SEQ ID NO: 484843 - DNA, 30 bp, Artificial Sequence
  Synthetic oligonucleotide
aagaccataatagtgttatttccacccaaa

SEQ ID NO: 484844 - DNA, 30 bp, Artificial Sequence
  Synthetic oligonucleotide
ccttcaactcaccttccctggaaccccaaa

SEQ ID NO: 484845 - DNA, 30 bp, Artificial Sequence
  Synthetic oligonucleotide
tctatggctatgagctatggagggcccaaa

SEQ ID NO: 484846 - DNA, 30 bp, Artificial Sequence
  Synthetic oligonucleotide
aaaccgtgacctgtgccgttcgggcccaaa

SEQ ID NO: 484847 - DNA, 30 bp, Artificial Sequence
  Synthetic oligonucleotide
aaccgatttagatagacccgataagccaaa

SEQ ID NO: 484848 - DNA, 30 bp, Artificial Sequence
  Synthetic oligonucleotide
tgcccaataagtggtagtcctctcgccaaa

SEQ ID NO: 484849 - DNA, 30 bp, Artificial Sequence
  Synthetic oligonucleotide
agcagccttacggctcttgtaaatgccaaa

SEQ ID NO: 484850 - DNA, 30 bp, Artificial Sequence
  Synthetic oligonucleotide
tgtacggagccatggccgttgggatccaaa

SEQ ID NO: 484851 - DNA, 30 bp, Artificial Sequence
  Synthetic oligonucleotide
ggaatagctgttagttcgcggtgatccaaa

SEQ ID NO: 484852 - DNA, 30 bp, Artificial Sequence
  Synthetic oligonucleotide
aaagcactataagagtgaagaaactccaaa

SEQ ID NO: 484853 - DNA, 30 bp, Artificial Sequence
  Synthetic oligonucleotide
cgacaggcctgactcaggagacgctccaaa

SEQ ID NO: 484854 - DNA, 30 bp, Artificial Sequence
  Synthetic oligonucleotide
gaaggatcgaactcttccgttaaaagcaaa

SEQ ID NO: 484855 - DNA, 30 bp, Artificial Sequence
  Synthetic oligonucleotide
caggcggagcatggtgctacattaagcaaa

SEQ ID NO: 484856 - DNA, 30 bp, Artificial Sequence
  Synthetic oligonucleotide
tgtgggtgcacactgcgtacgaacagcaaa

SEQ ID NO: 484857 - DNA, 30 bp, Artificial Sequence
  Synthetic oligonucleotide
ttatgatcctgaagcctttagaccagcaaa

SEQ ID NO: 484858 - DNA, 30 bp, Artificial Sequence
  Synthetic oligonucleotide
aggaagaatcaggcacatttacgcagcaaa

SEQ ID NO: 484859 - DNA, 30 bp, Artificial Sequence
  Synthetic oligonucleotide
atagaccaattcaaaaacgttcgcagcaaa

SEQ ID NO: 484860 - DNA, 30 bp, Artificial Sequence
  Synthetic oligonucleotide
aatgggtaacttctatgtatgtgcagcaaa

SEQ ID NO: 484861 - DNA, 30 bp, Artificial Sequence
  Synthetic oligonucleotide
ttacactgagcatatactagcgatagcaaa

SEQ ID NO: 484862 - DNA, 30 bp, Artificial Sequence
  Synthetic oligonucleotide
gttgcgtatgactttcggaatactagcaaa

SEQ ID NO: 484863 - DNA, 30 bp, Artificial Sequence
  Synthetic oligonucleotide
tgagacttgtggtgcaggtgttgtagcaaa

SEQ ID NO: 484864 - DNA, 30 bp, Artificial Sequence
  Synthetic oligonucleotide
cttgtatcgtgaggtagcagatttagcaaa

SEQ ID NO: 484865 - DNA, 30 bp, Artificial Sequence
  Synthetic oligonucleotide
cccagttctggatcggctctaccacgcaaa

SEQ ID NO: 484866 - DNA, 30 bp, Artificial Sequence
  Synthetic oligonucleotide
aggaattaaattactgatgcgtcacgcaaa

SEQ ID NO: 484867 - DNA, 30 bp, Artificial Sequence
  Synthetic oligonucleotide
tttctaacggaaatcttatttcgacgcaaa

SEQ ID NO: 484868 - DNA, 30 bp, Artificial Sequence
  Synthetic oligonucleotide
gagggaggtgacttagctgatatacgcaaa

SEQ ID NO: 484869 - DNA, 30 bp, Artificial Sequence
  Synthetic oligonucleotide
gatggaaatatttagcactgcgtacgcaaa

SEQ ID NO: 484870 - DNA, 30 bp, Artificial Sequence
  Synthetic oligonucleotide
cggtacgcagcccgtgtacgttcccgcaaa

SEQ ID NO: 484871 - DNA, 30 bp, Artificial Sequence
  Synthetic oligonucleotide
taaattgtgggccattcgccgagccgcaaa

SEQ ID NO: 484872 - DNA, 30 bp, Artificial Sequence
  Synthetic oligonucleotide
gattttgttggttctatcgcccagcgcaaa

SEQ ID NO: 484873 - DNA, 30 bp, Artificial Sequence
  Synthetic oligonucleotide
agttcgtatgctccacgccgtgggcgcaaa

SEQ ID NO: 484874 - DNA, 30 bp, Artificial Sequence
  Synthetic oligonucleotide
aatctaggtgaaacacacgcctggcgcaaa

SEQ ID NO: 484875 - DNA, 30 bp, Artificial Sequence
  Synthetic oligonucleotide
gtcaaaacttgattggcacgcagcggcaaa

SEQ ID NO: 484876 - DNA, 30 bp, Artificial Sequence
  Synthetic oligonucleotide
cttctttcgacaatcctgataggcggcaaa

SEQ ID NO: 484877 - DNA, 30 bp, Artificial Sequence
  Synthetic oligonucleotide
gggtcggcagtcggcccagttcggggcaaa

SEQ ID NO: 484878 - DNA, 30 bp, Artificial Sequence
  Synthetic oligonucleotide
ctaaaccctcgtccgcagtttgcatgcaaa

SEQ ID NO: 484879 - DNA, 30 bp, Artificial Sequence
  Synthetic oligonucleotide
gtataagcgcacatctaaagatgatgcaaa

SEQ ID NO: 484880 - DNA, 30 bp, Artificial Sequence
  Synthetic oligonucleotide
tgggatatccctcaagaaagttactgcaaa

SEQ ID NO: 484881 - DNA, 30 bp, Artificial Sequence
  Synthetic oligonucleotide
aaccgaactgtctgaggtgttcgctgcaaa

SEQ ID NO: 484882 - DNA, 30 bp, Artificial Sequence
  Synthetic oligonucleotide
tctgccatcttcgccacttcaatctgcaaa

SEQ ID NO: 484883 - DNA, 30 bp, Artificial Sequence
  Synthetic oligonucleotide
tatgggaaccttagcaaagatgagtgcaaa

SEQ ID NO: 484884 - DNA, 30 bp, Artificial Sequence
  Synthetic oligonucleotide
gtacagtcgagatcagagggccattgcaaa

SEQ ID NO: 484885 - DNA, 30 bp, Artificial Sequence
  Synthetic oligonucleotide
agtagtggaatgacgcatccggcaatcaaa

SEQ ID NO: 484886 - DNA, 30 bp, Artificial Sequence
  Synthetic oligonucleotide
attggaaagtgttctatggacggaatcaaa

SEQ ID NO: 484887 - DNA, 30 bp, Artificial Sequence
  Synthetic oligonucleotide
gtgttatgttgattggaacaggtaatcaaa

SEQ ID NO: 484888 - DNA, 31 bp, Artificial Sequence
  Synthetic oligonucleotide
gctatacactgaatgactcggtatgatcaaa

SEQ ID NO: 484889 - DNA, 30 bp, Artificial Sequence
  Synthetic oligonucleotide
cgcatcatgacaagacttggatgtatcaaa

SEQ ID NO: 484890 - DNA, 30 bp, Artificial Sequence
  Synthetic oligonucleotide
gtaccaatacgcgccttgggccccctcaaa

SEQ ID NO: 484891 - DNA, 30 bp, Artificial Sequence
  Synthetic oligonucleotide
attcacatcagcccgacgtggttcctcaaa

SEQ ID NO: 484892 - DNA, 30 bp, Artificial Sequence
  Synthetic oligonucleotide
aagggtctggattgttttgtgcagctcaaa

SEQ ID NO: 484893 - DNA, 30 bp, Artificial Sequence
  Synthetic oligonucleotide
aatttttaagggcagttaaaattgctcaaa

SEQ ID NO: 484894 - DNA, 30 bp, Artificial Sequence
  Synthetic oligonucleotide
acagtcgtaaatagagccggtcaagtcaaa

SEQ ID NO: 484895 - DNA, 30 bp, Artificial Sequence
  Synthetic oligonucleotide
aataaatttcagcctcgttactcagtcaaa

SEQ ID NO: 484896 - DNA, 30 bp, Artificial Sequence
  Synthetic oligonucleotide
cccgctcaagtggtaaagttcggcgtcaaa

SEQ ID NO: 484897 - DNA, 30 bp, Artificial Sequence
  Synthetic oligonucleotide
acccataagagatatagttgtacggtcaaa

SEQ ID NO: 484898 - DNA, 30 bp, Artificial Sequence
  Synthetic oligonucleotide
tgtaggttttcagacgcccatagggtcaaa

SEQ ID NO: 484899 - DNA, 30 bp, Artificial Sequence
  Synthetic oligonucleotide
caaaggatcatcggaggccccatggtcaaa

SEQ ID NO: 484900 - DNA, 31 bp, Artificial Sequence
  Synthetic oligonucleotide
ttctgtaagagacgaatataccttggtcaaa

SEQ ID NO: 484901 - DNA, 30 bp, Artificial Sequence
  Synthetic oligonucleotide
atctgatatacatctgtaggcgtattcaaa

SEQ ID NO: 484902 - DNA, 30 bp, Artificial Sequence
  Synthetic oligonucleotide
tcagtattatattcttccaatttattcaaa

SEQ ID NO: 484903 - DNA, 30 bp, Artificial Sequence
  Synthetic oligonucleotide
gtttcaattgggcgtagattcgccttcaaa

SEQ ID NO: 484904 - DNA, 30 bp, Artificial Sequence
  Synthetic oligonucleotide
ttctatgcgtgtcattcaaaggccttcaaa

SEQ ID NO: 484905 - DNA, 30 bp, Artificial Sequence
  Synthetic oligonucleotide
cgatcaacatgggggatcatgaatttcaaa

SEQ ID NO: 484906 - DNA, 30 bp, Artificial Sequence
  Synthetic oligonucleotide
agcacttacccatactcaaagcctttcaaa

SEQ ID NO: 484907 - DNA, 30 bp, Artificial Sequence
  Synthetic oligonucleotide
gagattctcctaggttttctgggtttcaaa

SEQ ID NO: 484908 - DNA, 30 bp, Artificial Sequence
  Synthetic oligonucleotide
gatctgtagttttagttgaagtttttcaaa

SEQ ID NO: 484909 - DNA, 30 bp, Artificial Sequence
  Synthetic oligonucleotide
gtagaaatcgtccgtacgcaggaaaagaaa

SEQ ID NO: 484910 - DNA, 30 bp, Artificial Sequence
  Synthetic oligonucleotide
agacattaaatttgcgtgtcgaacaagaaa

SEQ ID NO: 484911 - DNA, 30 bp, Artificial Sequence
  Synthetic oligonucleotide
gtggtccttattctgtgataggcgaagaaa

SEQ ID NO: 484912 - DNA, 30 bp, Artificial Sequence
  Synthetic oligonucleotide
ctttaattgcgttaccgatctgggaagaaa

SEQ ID NO: 484913 - DNA, 30 bp, Artificial Sequence
  Synthetic oligonucleotide
ggtgcagacccgcgctgtagatgacagaaa

SEQ ID NO: 484914 - DNA, 30 bp, Artificial Sequence
  Synthetic oligonucleotide
ggccggttgagtagtgccgcgaagcagaaa

SEQ ID NO: 484915 - DNA, 29 bp, Artificial Sequence
  Synthetic oligonucleotide
tactctagacaacggtggtgaagcagaaa

SEQ ID NO: 484916 - DNA, 30 bp, Artificial Sequence
  Synthetic oligonucleotide
tggcacctcctgtgtgtagatttgcagaaa

SEQ ID NO: 484917 - DNA, 30 bp, Artificial Sequence
  Synthetic oligonucleotide
ccctgaaccgtcctggctcaggctcagaaa

SEQ ID NO: 484918 - DNA, 30 bp, Artificial Sequence
  Synthetic oligonucleotide
tgatctctaggcggttttacgcaagagaaa

SEQ ID NO: 484919 - DNA, 30 bp, Artificial Sequence
  Synthetic oligonucleotide
gattagtcgtcattttaggtagaagagaaa

SEQ ID NO: 484920 - DNA, 30 bp, Artificial Sequence
  Synthetic oligonucleotide
attctgtcgcacctacgaaagtaagagaaa

SEQ ID NO: 484921 - DNA, 30 bp, Artificial Sequence
  Synthetic oligonucleotide
cggtcgcagcgagtctctacgtgagagaaa

SEQ ID NO: 484922 - DNA, 30 bp, Artificial Sequence
  Synthetic oligonucleotide
tactctgcacgcccgtgtacgcacgagaaa

SEQ ID NO: 484923 - DNA, 30 bp, Artificial Sequence
  Synthetic oligonucleotide
gggctttatcatcttttcggcggggagaaa

SEQ ID NO: 484924 - DNA, 30 bp, Artificial Sequence
  Synthetic oligonucleotide
acaccgatacactttcgcagttaatagaaa

SEQ ID NO: 484925 - DNA, 30 bp, Artificial Sequence
  Synthetic oligonucleotide
ctaagcttttttttggctcattcatagaaa

SEQ ID NO: 484926 - DNA, 30 bp, Artificial Sequence
  Synthetic oligonucleotide
gaatcggtcgactgaatgcagccctagaaa

SEQ ID NO: 484927 - DNA, 30 bp, Artificial Sequence
  Synthetic oligonucleotide
gatgcaaggtcattgttacaatagtagaaa

SEQ ID NO: 484928 - DNA, 30 bp, Artificial Sequence
  Synthetic oligonucleotide
accccgtttccaaattttagaccttagaaa

SEQ ID NO: 484929 - DNA, 30 bp, Artificial Sequence
  Synthetic oligonucleotide
taagtcctgatgttggtgcggccttagaaa

SEQ ID NO: 484930 - DNA, 30 bp, Artificial Sequence
  Synthetic oligonucleotide
ttgtcagttaataaacttaaatgaacgaaa

SEQ ID NO: 484931 - DNA, 30 bp, Artificial Sequence
  Synthetic oligonucleotide
aataagtgtctgctcttgcacttaacgaaa

SEQ ID NO: 484932 - DNA, 30 bp, Artificial Sequence
  Synthetic oligonucleotide
tgtctacctggcgttggtttggccacgaaa

SEQ ID NO: 484933 - DNA, 30 bp, Artificial Sequence
  Synthetic oligonucleotide
tgtacatttcggctattcctaacgacgaaa

SEQ ID NO: 484934 - DNA, 30 bp, Artificial Sequence
  Synthetic oligonucleotide
gacctcgaaagatcgtttaatcgaccgaaa

SEQ ID NO: 484935 - DNA, 30 bp, Artificial Sequence
  Synthetic oligonucleotide
ttgaatcagttaataatcgtcggaccgaaa

SEQ ID NO: 484936 - DNA, 30 bp, Artificial Sequence
  Synthetic oligonucleotide
gacttggagtttttcttcagaaacccgaaa

SEQ ID NO: 484937 - DNA, 30 bp, Artificial Sequence
  Synthetic oligonucleotide
caactctctactgaatttagctatccgaaa

SEQ ID NO: 484938 - DNA, 30 bp, Artificial Sequence
  Synthetic oligonucleotide
ttgaaatgcgctttgcgctgtagtccgaaa

SEQ ID NO: 484939 - DNA, 30 bp, Artificial Sequence
  Synthetic oligonucleotide
acggccactccccatttatacgtagcgaaa

SEQ ID NO: 484940 - DNA, 30 bp, Artificial Sequence
  Synthetic oligonucleotide
tcttagcctaatattcgctgtatcgcgaaa

SEQ ID NO: 484941 - DNA, 30 bp, Artificial Sequence
  Synthetic oligonucleotide
ctatggtctgtatggacgcagtcggcgaaa

SEQ ID NO: 484942 - DNA, 30 bp, Artificial Sequence
  Synthetic oligonucleotide
gaaatgaggaagaggcctagcggggcgaaa

SEQ ID NO: 484943 - DNA, 30 bp, Artificial Sequence
  Synthetic oligonucleotide
tttaagtttatcgcttgtaatttggcgaaa

SEQ ID NO: 484944 - DNA, 30 bp, Artificial Sequence
  Synthetic oligonucleotide
tgttttatttttctacagcttcttgcgaaa

SEQ ID NO: 484945 - DNA, 30 bp, Artificial Sequence
  Synthetic oligonucleotide
gtcgcttctgtagttcgtttcacatcgaaa

SEQ ID NO: 484946 - DNA, 30 bp, Artificial Sequence
  Synthetic oligonucleotide
atctgataggctcgtaacgtctgatcgaaa

SEQ ID NO: 484947 - DNA, 30 bp, Artificial Sequence
  Synthetic oligonucleotide
catacgactaagttggggcatatctcgaaa

SEQ ID NO: 484948 - DNA, 30 bp, Artificial Sequence
  Synthetic oligonucleotide
cggtggatagaatgtaatgcgcagtcgaaa

SEQ ID NO: 484949 - DNA, 30 bp, Artificial Sequence
  Synthetic oligonucleotide
taattagctagatttacgacagcgtcgaaa

SEQ ID NO: 484950 - DNA, 30 bp, Artificial Sequence
  Synthetic oligonucleotide
tttgacgccaccgcgcactatttaaggaaa

SEQ ID NO: 484951 - DNA, 30 bp, Artificial Sequence
  Synthetic oligonucleotide
gtcccgcccacatctggtcctcgcaggaaa

SEQ ID NO: 484952 - DNA, 30 bp, Artificial Sequence
  Synthetic oligonucleotide
aaaaattgaggcccgttagcctcgaggaaa

SEQ ID NO: 484953 - DNA, 30 bp, Artificial Sequence
  Synthetic oligonucleotide
ttaccgcttgggagtacaccacggaggaaa

SEQ ID NO: 484954 - DNA, 30 bp, Artificial Sequence
  Synthetic oligonucleotide
actagaataggccacttacgtactaggaaa

SEQ ID NO: 484955 - DNA, 30 bp, Artificial Sequence
  Synthetic oligonucleotide
gcttttaattctttgtcccccggacggaaa

SEQ ID NO: 484956 - DNA, 30 bp, Artificial Sequence
  Synthetic oligonucleotide
aatttaagaggattggttatttagcggaaa

SEQ ID NO: 484957 - DNA, 30 bp, Artificial Sequence
  Synthetic oligonucleotide
aggctctgcgcgtaaaggtattaagggaaa

SEQ ID NO: 484958 - DNA, 30 bp, Artificial Sequence
  Synthetic oligonucleotide
acaaggcccgaattatatagttcagggaaa

SEQ ID NO: 484959 - DNA, 30 bp, Artificial Sequence
  Synthetic oligonucleotide
tatcgagttttcgtagggggtaccgggaaa

SEQ ID NO: 484960 - DNA, 30 bp, Artificial Sequence
  Synthetic oligonucleotide
gtcaatcgcataaaggtcctgaatgggaaa

SEQ ID NO: 484961 - DNA, 30 bp, Artificial Sequence
  Synthetic oligonucleotide
aactttgatgattaatctacacatgggaaa

SEQ ID NO: 484962 - DNA, 30 bp, Artificial Sequence
  Synthetic oligonucleotide
cgattctgcgcctccgatttgcgtgggaaa

SEQ ID NO: 484963 - DNA, 30 bp, Artificial Sequence
  Synthetic oligonucleotide
gaactatggtcgcaggacatgccatggaaa

SEQ ID NO: 484964 - DNA, 30 bp, Artificial Sequence
  Synthetic oligonucleotide
aaattctatgcctcagctttagcatggaaa

SEQ ID NO: 484965 - DNA, 30 bp, Artificial Sequence
  Synthetic oligonucleotide
aggagacctaccgaagtgtgagtatggaaa

SEQ ID NO: 484966 - DNA, 30 bp, Artificial Sequence
  Synthetic oligonucleotide
ctttttaaacttaaggtttcgcactggaaa

SEQ ID NO: 484967 - DNA, 30 bp, Artificial Sequence
  Synthetic oligonucleotide
gagttggagcccgttatttgagactggaaa

SEQ ID NO: 484968 - DNA, 30 bp, Artificial Sequence
  Synthetic oligonucleotide
tgacggagctttttccctgacgcttggaaa

SEQ ID NO: 484969 - DNA, 30 bp, Artificial Sequence
  Synthetic oligonucleotide
cgcaatcaccgaaacccgcatctttggaaa

SEQ ID NO: 484970 - DNA, 30 bp, Artificial Sequence
  Synthetic oligonucleotide
gaccgttgatagttgacgggataaatgaaa

SEQ ID NO: 484971 - DNA, 30 bp, Artificial Sequence
  Synthetic oligonucleotide
gtgcccattcatacagcttacgacatgaaa

SEQ ID NO: 484972 - DNA, 30 bp, Artificial Sequence
  Synthetic oligonucleotide
attttcctcgcccgtcccgatcgcatgaaa

SEQ ID NO: 484973 - DNA, 30 bp, Artificial Sequence
  Synthetic oligonucleotide
tttaacggtgttaattacagctgcatgaaa

SEQ ID NO: 484974 - DNA, 30 bp, Artificial Sequence
  Synthetic oligonucleotide
ccgaacaagctcggcgtgagcatcatgaaa

SEQ ID NO: 484975 - DNA, 30 bp, Artificial Sequence
  Synthetic oligonucleotide
atctactacttcatctagacgccgatgaaa

SEQ ID NO: 484976 - DNA, 30 bp, Artificial Sequence
  Synthetic oligonucleotide
tatggttctacgccggtctttaatatgaaa

SEQ ID NO: 484977 - DNA, 30 bp, Artificial Sequence
  Synthetic oligonucleotide
cgatatactggtcataggatctatatgaaa

SEQ ID NO: 484978 - DNA, 30 bp, Artificial Sequence
  Synthetic oligonucleotide
atcggggctagagtagtgagagctatgaaa

SEQ ID NO: 484979 - DNA, 30 bp, Artificial Sequence
  Synthetic oligonucleotide
gcttcacagtactttaaggcaccactgaaa

SEQ ID NO: 484980 - DNA, 30 bp, Artificial Sequence
  Synthetic oligonucleotide
ttgctttccggcatgtctccaagactgaaa

SEQ ID NO: 484981 - DNA, 30 bp, Artificial Sequence
  Synthetic oligonucleotide
gcacccatatgtttaaaacgtggactgaaa

SEQ ID NO: 484982 - DNA, 30 bp, Artificial Sequence
  Synthetic oligonucleotide
tctccaagtaagaacgcaaaagccctgaaa

SEQ ID NO: 484983 - DNA, 30 bp, Artificial Sequence
  Synthetic oligonucleotide
gcctatgcaacgggtactgttaggctgaaa

SEQ ID NO: 484984 - DNA, 30 bp, Artificial Sequence
  Synthetic oligonucleotide
gtccgtgtccctgggctgccttacgtgaaa

SEQ ID NO: 484985 - DNA, 30 bp, Artificial Sequence
  Synthetic oligonucleotide
gggtcggcggtaagagcgccgagggtgaaa

SEQ ID NO: 484986 - DNA, 30 bp, Artificial Sequence
  Synthetic oligonucleotide
ggattaaggttagagcagcggttggtgaaa

SEQ ID NO: 484987 - DNA, 30 bp, Artificial Sequence
  Synthetic oligonucleotide
actttaactaaccggaacatatgtgtgaaa

SEQ ID NO: 484988 - DNA, 30 bp, Artificial Sequence
  Synthetic oligonucleotide
actatgtcattgcgctggcaaaaattgaaa

SEQ ID NO: 484989 - DNA, 30 bp, Artificial Sequence
  Synthetic oligonucleotide
agccattagttcgaagctatcccattgaaa

SEQ ID NO: 484990 - DNA, 30 bp, Artificial Sequence
  Synthetic oligonucleotide
gcaaagccagcgaaatatgggaacttgaaa

SEQ ID NO: 484991 - DNA, 30 bp, Artificial Sequence
  Synthetic oligonucleotide
catttatctggccttgctttttacttgaaa

SEQ ID NO: 484992 - DNA, 30 bp, Artificial Sequence
  Synthetic oligonucleotide
ttcccggggctcttgcggcatccgttgaaa

SEQ ID NO: 484993 - DNA, 30 bp, Artificial Sequence
  Synthetic oligonucleotide
caccctttcaaggaagatccttctttgaaa

SEQ ID NO: 484994 - DNA, 30 bp, Artificial Sequence
  Synthetic oligonucleotide
cccatgaggtcgcaagaagatataaataaa

SEQ ID NO: 484995 - DNA, 30 bp, Artificial Sequence
  Synthetic oligonucleotide
gactttttggaatgagtctccgccaataaa

SEQ ID NO: 484996 - DNA, 30 bp, Artificial Sequence
  Synthetic oligonucleotide
gggtttgaaatcaccgcactgtggaataaa

SEQ ID NO: 484997 - DNA, 30 bp, Artificial Sequence
  Synthetic oligonucleotide
actattacaatatacattttagttaataaa

SEQ ID NO: 484998 - DNA, 30 bp, Artificial Sequence
  Synthetic oligonucleotide
cgcaatgatagcgtggtcaatttacataaa

SEQ ID NO: 484999 - DNA, 30 bp, Artificial Sequence
  Synthetic oligonucleotide
tgcgccctttacctgcggcgctatcataaa

SEQ ID NO: 485000 - DNA, 30 bp, Artificial Sequence
  Synthetic oligonucleotide
cggcgtcaatacggcgctagccctcataaa

SEQ ID NO: 485001 - DNA, 30 bp, Artificial Sequence
  Synthetic oligonucleotide
ttaggtataccggggcgctagcttcataaa

SEQ ID NO: 485002 - DNA, 30 bp, Artificial Sequence
  Synthetic oligonucleotide
agtgctgtcaaagatatttctgttcataaa

SEQ ID NO: 485003 - DNA, 30 bp, Artificial Sequence
  Synthetic oligonucleotide
atcttaagagctgatgttttgaccgataaa

SEQ ID NO: 485004 - DNA, 30 bp, Artificial Sequence
  Synthetic oligonucleotide
gccttttttcacggaatgggttgcgataaa

SEQ ID NO: 485005 - DNA, 30 bp, Artificial Sequence
  Synthetic oligonucleotide
ttctcactcaccgcaggttcggtcgataaa

SEQ ID NO: 485006 - DNA, 30 bp, Artificial Sequence
  Synthetic oligonucleotide
gtgaccggatgaaagaggttccgggataaa

SEQ ID NO: 485007 - DNA, 30 bp, Artificial Sequence
  Synthetic oligonucleotide
actttccaacgcgatttgcgtgtggataaa

SEQ ID NO: 485008 - DNA, 30 bp, Artificial Sequence
  Synthetic oligonucleotide
cgctcggccaggcgagcatggaactataaa

SEQ ID NO: 485009 - DNA, 30 bp, Artificial Sequence
  Synthetic oligonucleotide
aaaaaaatttgtgtgaccatccagtataaa

SEQ ID NO: 485010 - DNA, 29 bp, Artificial Sequence
  Synthetic oligonucleotide
tttgttgtgtaggtttactcacgtataaa

SEQ ID NO: 485011 - DNA, 29 bp, Artificial Sequence
  Synthetic oligonucleotide
tttgttgtgtaggttgactcccgtataaa

SEQ ID NO: 485012 - DNA, 29 bp, Artificial Sequence
  Synthetic oligonucleotide
tttgttgtgtagggttactcccgtataaa

SEQ ID NO: 485013 - DNA, 27 bp, Artificial Sequence
  Synthetic oligonucleotide
tgttgtgtaggtttactcccgtataaa

SEQ ID NO: 485014 - DNA, 29 bp, Artificial Sequence
  Synthetic oligonucleotide
tttgttgtgtaggtttcctcccgtataaa

SEQ ID NO: 485015 - DNA, 30 bp, Artificial Sequence
  Synthetic oligonucleotide
agaattaaaccacggtagtggatgtataaa

SEQ ID NO: 485016 - DNA, 30 bp, Artificial Sequence
  Synthetic oligonucleotide
tatctagcaagaccggtatcgtgttataaa

SEQ ID NO: 485017 - DNA, 30 bp, Artificial Sequence
  Synthetic oligonucleotide
gcggcgttttattaattcggcaaaactaaa

SEQ ID NO: 485018 - DNA, 30 bp, Artificial Sequence
  Synthetic oligonucleotide
gcaccaggcgtgcatttcgtccaaactaaa

SEQ ID NO: 485019 - DNA, 30 bp, Artificial Sequence
  Synthetic oligonucleotide
gtaattatatccacaactccgtcaactaaa

SEQ ID NO: 485020 - DNA, 30 bp, Artificial Sequence
  Synthetic oligonucleotide
gcatctgcctgggattctaccagaactaaa

SEQ ID NO: 485021 - DNA, 30 bp, Artificial Sequence
  Synthetic oligonucleotide
tgctaaaggctcccggtaacatgaactaaa

SEQ ID NO: 485022 - DNA, 30 bp, Artificial Sequence
  Synthetic oligonucleotide
ctctctcgcggccggaggcggtgaactaaa

SEQ ID NO: 485023 - DNA, 30 bp, Artificial Sequence
  Synthetic oligonucleotide
aaacagaatgtaatttactttctaactaaa

SEQ ID NO: 485024 - DNA, 30 bp, Artificial Sequence
  Synthetic oligonucleotide
tttgatgccgaacgttagggtatcactaaa

SEQ ID NO: 485025 - DNA, 30 bp, Artificial Sequence
  Synthetic oligonucleotide
cacgaaacatgaacaacgtcaccgactaaa

SEQ ID NO: 485026 - DNA, 30 bp, Artificial Sequence
  Synthetic oligonucleotide
tgctgcgtatgttgtaatgccgatactaaa

SEQ ID NO: 485027 - DNA, 30 bp, Artificial Sequence
  Synthetic oligonucleotide
cattttgtagttatgtccgaatctactaaa

SEQ ID NO: 485028 - DNA, 30 bp, Artificial Sequence
  Synthetic oligonucleotide
caggtgtgtacggggtatatagttactaaa

SEQ ID NO: 485029 - DNA, 30 bp, Artificial Sequence
  Synthetic oligonucleotide
ttaatccgaccttgatggtcaaaacctaaa

SEQ ID NO: 485030 - DNA, 30 bp, Artificial Sequence
  Synthetic oligonucleotide
tttattcgtggctctgcgtcgcaacctaaa

SEQ ID NO: 485031 - DNA, 30 bp, Artificial Sequence
  Synthetic oligonucleotide
gcccaatgaacccaataccgataacctaaa

SEQ ID NO: 485032 - DNA, 30 bp, Artificial Sequence
  Synthetic oligonucleotide
aaggtctagcgtctagctagccgccctaaa

SEQ ID NO: 485033 - DNA, 30 bp, Artificial Sequence
  Synthetic oligonucleotide
attaacctagttccggcagacgggcctaaa

SEQ ID NO: 485034 - DNA, 31 bp, Artificial Sequence
  Synthetic oligonucleotide
gactttacatcacgcgcggcggtgtcctaaa

SEQ ID NO: 485035 - DNA, 30 bp, Artificial Sequence
  Synthetic oligonucleotide
gagtacacacattctttgtctagagctaaa

SEQ ID NO: 485036 - DNA, 30 bp, Artificial Sequence
  Synthetic oligonucleotide
taccattgttaaactggctacctcgctaaa

SEQ ID NO: 485037 - DNA, 30 bp, Artificial Sequence
  Synthetic oligonucleotide
gagttggtcgtgtttgcagggaaggctaaa

SEQ ID NO: 485038 - DNA, 30 bp, Artificial Sequence
  Synthetic oligonucleotide
gaggtaataggccacagctcggtggctaaa

SEQ ID NO: 485039 - DNA, 30 bp, Artificial Sequence
  Synthetic oligonucleotide
aactccataatacgtttcttgggatctaaa

SEQ ID NO: 485040 - DNA, 30 bp, Artificial Sequence
  Synthetic oligonucleotide
tcgcatttatagacaatatcatgctctaaa

SEQ ID NO: 485041 - DNA, 30 bp, Artificial Sequence
  Synthetic oligonucleotide
ttagtagtagttgaagacagtgagtctaaa

SEQ ID NO: 485042 - DNA, 30 bp, Artificial Sequence
  Synthetic oligonucleotide
ggatagacccaatccgtgggggggtctaaa

SEQ ID NO: 485043 - DNA, 30 bp, Artificial Sequence
  Synthetic oligonucleotide
tgaattacgggttctagtgcactttctaaa

SEQ ID NO: 485044 - DNA, 30 bp, Artificial Sequence
  Synthetic oligonucleotide
aaacagcaagcatcaaagggttccagtaaa

SEQ ID NO: 485045 - DNA, 31 bp, Artificial Sequence
  Synthetic oligonucleotide
ccatatgaccctctatttcatacgcagtaaa

SEQ ID NO: 485046 - DNA, 30 bp, Artificial Sequence
  Synthetic oligonucleotide
acatcttacgttgtatgaacaaagagtaaa

SEQ ID NO: 485047 - DNA, 30 bp, Artificial Sequence
  Synthetic oligonucleotide
cagattctcatatctcctatgatgagtaaa

SEQ ID NO: 485048 - DNA, 30 bp, Artificial Sequence
  Synthetic oligonucleotide
tagtcttcatactttttattgaatagtaaa

SEQ ID NO: 485049 - DNA, 30 bp, Artificial Sequence
  Synthetic oligonucleotide
gcatttacggatcatggcacatttagtaaa

SEQ ID NO: 485050 - DNA, 30 bp, Artificial Sequence
  Synthetic oligonucleotide
cgccaatgcgactgatgacagcaacgtaaa

SEQ ID NO: 485051 - DNA, 30 bp, Artificial Sequence
  Synthetic oligonucleotide
agccgcttctacttttgtgcccgacgtaaa

SEQ ID NO: 485052 - DNA, 30 bp, Artificial Sequence
  Synthetic oligonucleotide
taccctgatcatgaggggtcaggccgtaaa

SEQ ID NO: 485053 - DNA, 30 bp, Artificial Sequence
  Synthetic oligonucleotide
ttaggagggttgtaccataagtggcgtaaa

SEQ ID NO: 485054 - DNA, 30 bp, Artificial Sequence
  Synthetic oligonucleotide
gaaaactattgcgcgcccctgtggcgtaaa

SEQ ID NO: 485055 - DNA, 30 bp, Artificial Sequence
  Synthetic oligonucleotide
taacttaccgtattgggatgcattcgtaaa

SEQ ID NO: 485056 - DNA, 30 bp, Artificial Sequence
  Synthetic oligonucleotide
cgagtggaagaagctatgactattcgtaaa

SEQ ID NO: 485057 - DNA, 30 bp, Artificial Sequence
  Synthetic oligonucleotide
cagccactataatacggtatagacggtaaa

SEQ ID NO: 485058 - DNA, 30 bp, Artificial Sequence
  Synthetic oligonucleotide
tatctgagggtggccaatttgcgcggtaaa

SEQ ID NO: 485059 - DNA, 30 bp, Artificial Sequence
  Synthetic oligonucleotide
tatccttataggtggagtttgaggggtaaa

SEQ ID NO: 485060 - DNA, 30 bp, Artificial Sequence
  Synthetic oligonucleotide
caaaattgacagacattacggtatggtaaa

SEQ ID NO: 485061 - DNA, 30 bp, Artificial Sequence
  Synthetic oligonucleotide
tttatcccagattcgatctagtctggtaaa

SEQ ID NO: 485062 - DNA, 30 bp, Artificial Sequence
  Synthetic oligonucleotide
atacagaagcggcggaaagccagtggtaaa

SEQ ID NO: 485063 - DNA, 30 bp, Artificial Sequence
  Synthetic oligonucleotide
cgggtagatatgatttaggttcttggtaaa

SEQ ID NO: 485064 - DNA, 30 bp, Artificial Sequence
  Synthetic oligonucleotide
caaaaattatgtgacgcattagaatgtaaa

SEQ ID NO: 485065 - DNA, 30 bp, Artificial Sequence
  Synthetic oligonucleotide
gtccacccgtgggcctcactgatatgtaaa

SEQ ID NO: 485066 - DNA, 30 bp, Artificial Sequence
  Synthetic oligonucleotide
tcaagtcgcatcttgggataacgctgtaaa

SEQ ID NO: 485067 - DNA, 30 bp, Artificial Sequence
  Synthetic oligonucleotide
aagggtcttttacgattttggcgctgtaaa

SEQ ID NO: 485068 - DNA, 30 bp, Artificial Sequence
  Synthetic oligonucleotide
gtggtccgctgaggaccccaagtctgtaaa

SEQ ID NO: 485069 - DNA, 30 bp, Artificial Sequence
  Synthetic oligonucleotide
ctcacaggtttcgcccgttttaagtgtaaa

SEQ ID NO: 485070 - DNA, 30 bp, Artificial Sequence
  Synthetic oligonucleotide
aactatggacaatcatcatgctggtgtaaa

SEQ ID NO: 485071 - DNA, 30 bp, Artificial Sequence
  Synthetic oligonucleotide
tttttaaccagatttccagagatgtgtaaa

SEQ ID NO: 485072 - DNA, 30 bp, Artificial Sequence
  Synthetic oligonucleotide
cgcgtacttcacatcccccgcctgtgtaaa

SEQ ID NO: 485073 - DNA, 30 bp, Artificial Sequence
  Synthetic oligonucleotide
aagtttacgagctttttatcattgtgtaaa

SEQ ID NO: 485074 - DNA, 30 bp, Artificial Sequence
  Synthetic oligonucleotide
ccatctttatatcgaaaaaaaaattgtaaa

SEQ ID NO: 485075 - DNA, 30 bp, Artificial Sequence
  Synthetic oligonucleotide
gctgatgcaaggtatcagacactttgtaaa

SEQ ID NO: 485076 - DNA, 30 bp, Artificial Sequence
  Synthetic oligonucleotide
atgcaactggccccctgtatcgcaattaaa

SEQ ID NO: 485077 - DNA, 30 bp, Artificial Sequence
  Synthetic oligonucleotide
ctctgggggatgcactggcggtcaattaaa

SEQ ID NO: 485078 - DNA, 30 bp, Artificial Sequence
  Synthetic oligonucleotide
ctaatttaaatacgtctacgttcaattaaa

SEQ ID NO: 485079 - DNA, 30 bp, Artificial Sequence
  Synthetic oligonucleotide
gactatagcgttgatgccctttccattaaa

SEQ ID NO: 485080 - DNA, 30 bp, Artificial Sequence
  Synthetic oligonucleotide
ggtcctactcgcagaacacgtaagattaaa

SEQ ID NO: 485081 - DNA, 30 bp, Artificial Sequence
  Synthetic oligonucleotide
ctgaaagcggcctaatctacgacgattaaa

SEQ ID NO: 485082 - DNA, 30 bp, Artificial Sequence
  Synthetic oligonucleotide
gttattggggctcattctgacaggattaaa

SEQ ID NO: 485083 - DNA, 30 bp, Artificial Sequence
  Synthetic oligonucleotide
tgtcggcacggaccatgacaccggattaaa

SEQ ID NO: 485084 - DNA, 30 bp, Artificial Sequence
  Synthetic oligonucleotide
ttctcataagtgtagaactgtgggattaaa

SEQ ID NO: 485085 - DNA, 30 bp, Artificial Sequence
  Synthetic oligonucleotide
aaggatttccgtgagctctattatattaaa

SEQ ID NO: 485086 - DNA, 30 bp, Artificial Sequence
  Synthetic oligonucleotide
gtaaaatcttttctacggatttatattaaa

SEQ ID NO: 485087 - DNA, 30 bp, Artificial Sequence
  Synthetic oligonucleotide
aattgatgcagtaatatcgttactattaaa

SEQ ID NO: 485088 - DNA, 30 bp, Artificial Sequence
  Synthetic oligonucleotide
tcgcatagcatgggtgccctagctattaaa

SEQ ID NO: 485089 - DNA, 30 bp, Artificial Sequence
  Synthetic oligonucleotide
gttagaggtcaacccttgtagcttattaaa

SEQ ID NO: 485090 - DNA, 30 bp, Artificial Sequence
  Synthetic oligonucleotide
aataaagggttgcatctatattttattaaa

SEQ ID NO: 485091 - DNA, 30 bp, Artificial Sequence
  Synthetic oligonucleotide
ggtagaaaccatattcacatgtaccttaaa

SEQ ID NO: 485092 - DNA, 30 bp, Artificial Sequence
  Synthetic oligonucleotide
gggctttcggtgcatgaggcaacccttaaa

SEQ ID NO: 485093 - DNA, 30 bp, Artificial Sequence
  Synthetic oligonucleotide
gtttatttggatacactaacggtccttaaa

SEQ ID NO: 485094 - DNA, 30 bp, Artificial Sequence
  Synthetic oligonucleotide
tttactttaaaactggtcggttagcttaaa

SEQ ID NO: 485095 - DNA, 30 bp, Artificial Sequence
  Synthetic oligonucleotide
tcaaattggccaccgtcatgcacgcttaaa

SEQ ID NO: 485096 - DNA, 30 bp, Artificial Sequence
  Synthetic oligonucleotide
ggtaaccgcttataagcggatgcgcttaaa

SEQ ID NO: 485097 - DNA, 30 bp, Artificial Sequence
  Synthetic oligonucleotide
gagacgcaaaaataggattagtttcttaaa

SEQ ID NO: 485098 - DNA, 30 bp, Artificial Sequence
  Synthetic oligonucleotide
ttacgtcctgtgatctatcacaaagttaaa

SEQ ID NO: 485099 - DNA, 30 bp, Artificial Sequence
  Synthetic oligonucleotide
agcgaatgggttatattcctgaaagttaaa

SEQ ID NO: 485100 - DNA, 30 bp, Artificial Sequence
  Synthetic oligonucleotide
ctagtattgtttttcctgggcgaagttaaa

SEQ ID NO: 485101 - DNA, 30 bp, Artificial Sequence
  Synthetic oligonucleotide
tatgcgagagtttctcaggactcagttaaa

SEQ ID NO: 485102 - DNA, 30 bp, Artificial Sequence
  Synthetic oligonucleotide
ggaagatttgattcatgttagcgagttaaa

SEQ ID NO: 485103 - DNA, 30 bp, Artificial Sequence
  Synthetic oligonucleotide
taggggcctgtccctcatgatctagttaaa

SEQ ID NO: 485104 - DNA, 30 bp, Artificial Sequence
  Synthetic oligonucleotide
gcatacgtttctatctctagggccgttaaa

SEQ ID NO: 485105 - DNA, 30 bp, Artificial Sequence
  Synthetic oligonucleotide
agtgtgtgagcagttaattagtccgttaaa

SEQ ID NO: 485106 - DNA, 30 bp, Artificial Sequence
  Synthetic oligonucleotide
taagcctgaggccgacgttcttccgttaaa

SEQ ID NO: 485107 - DNA, 30 bp, Artificial Sequence
  Synthetic oligonucleotide
tgtgacagtttagtcatcgtaatcgttaaa

SEQ ID NO: 485108 - DNA, 30 bp, Artificial Sequence
  Synthetic oligonucleotide
tgctactttattgtctataccacggttaaa

SEQ ID NO: 485109 - DNA, 30 bp, Artificial Sequence
  Synthetic oligonucleotide
cataggggcacttgacgctcggatgttaaa

SEQ ID NO: 485110 - DNA, 30 bp, Artificial Sequence
  Synthetic oligonucleotide
tttgtcctcgctaagcccgagtgtgttaaa

SEQ ID NO: 485111 - DNA, 30 bp, Artificial Sequence
  Synthetic oligonucleotide
aggcattacgcgctgtatgggtgtgttaaa

SEQ ID NO: 485112 - DNA, 30 bp, Artificial Sequence
  Synthetic oligonucleotide
cagtgtctactgaagcaacagattgttaaa

SEQ ID NO: 485113 - DNA, 30 bp, Artificial Sequence
  Synthetic oligonucleotide
atgtttcaggataaccggcctattgttaaa

SEQ ID NO: 485114 - DNA, 30 bp, Artificial Sequence
  Synthetic oligonucleotide
ggaatcatcgggataatgtatgaatttaaa

SEQ ID NO: 485115 - DNA, 30 bp, Artificial Sequence
  Synthetic oligonucleotide
ccgtgcacttggtgcttcgcggcatttaaa

SEQ ID NO: 485116 - DNA, 30 bp, Artificial Sequence
  Synthetic oligonucleotide
ttactacggatttttttgtagggctttaaa

SEQ ID NO: 485117 - DNA, 30 bp, Artificial Sequence
  Synthetic oligonucleotide
tatccattgtccgtgactcagctctttaaa

SEQ ID NO: 485118 - DNA, 30 bp, Artificial Sequence
  Synthetic oligonucleotide
atgagaaccttctgtgaaacggtctttaaa

SEQ ID NO: 485119 - DNA, 30 bp, Artificial Sequence
  Synthetic oligonucleotide
tggtggggcaccttttagggtgtctttaaa

SEQ ID NO: 485120 - DNA, 30 bp, Artificial Sequence
  Synthetic oligonucleotide
tatattctgtggtatccccgagagtttaaa

SEQ ID NO: 485121 - DNA, 30 bp, Artificial Sequence
  Synthetic oligonucleotide
gaggggcggagccgcccagtatagtttaaa

SEQ ID NO: 485122 - DNA, 30 bp, Artificial Sequence
  Synthetic oligonucleotide
tgctcttctcgaggcttatgcccgtttaaa

SEQ ID NO: 485123 - DNA, 30 bp, Artificial Sequence
  Synthetic oligonucleotide
tttcatccagcttaagtgagatcgtttaaa

SEQ ID NO: 485124 - DNA, 30 bp, Artificial Sequence
  Synthetic oligonucleotide
tcggaaaatttataaacatataggtttaaa

SEQ ID NO: 485125 - DNA, 30 bp, Artificial Sequence
  Synthetic oligonucleotide
ttagtgttgtccgagtgatgacggtttaaa

SEQ ID NO: 485126 - DNA, 30 bp, Artificial Sequence
  Synthetic oligonucleotide
ctgaacgtaccagttaatttttattttaaa

SEQ ID NO: 485127 - DNA, 28 bp, Artificial Sequence
  Synthetic oligonucleotide
caaggtcatccaggagacttcttttaaa

SEQ ID NO: 485128 - DNA, 30 bp, Artificial Sequence
  Synthetic oligonucleotide
cactaccgtacttagagatgtatttttaaa

SEQ ID NO: 485129 - DNA, 30 bp, Artificial Sequence
  Synthetic oligonucleotide
aattacttattacaatggttcctttttaaa

SEQ ID NO: 485130 - DNA, 30 bp, Artificial Sequence
  Synthetic oligonucleotide
gcggtacccttagcagttttattttttaaa

SEQ ID NO: 485131 - DNA, 30 bp, Artificial Sequence
  Synthetic oligonucleotide
tcaggctccgagaattaatagtgaaaacaa

SEQ ID NO: 485132 - DNA, 31 bp, Artificial Sequence
  Synthetic oligonucleotide
aagtgggacaccggttagctatgacaaacaa

SEQ ID NO: 485133 - DNA, 30 bp, Artificial Sequence
  Synthetic oligonucleotide
atatgacgccgtgtaaggggagccaaacaa

SEQ ID NO: 485134 - DNA, 30 bp, Artificial Sequence
  Synthetic oligonucleotide
ggagaacgcggcaagatcgccgcgaaacaa

SEQ ID NO: 485135 - DNA, 30 bp, Artificial Sequence
  Synthetic oligonucleotide
cggaacgtgcccttaggatccgggaaacaa

SEQ ID NO: 485136 - DNA, 30 bp, Artificial Sequence
  Synthetic oligonucleotide
ctcacactcatcagggggagcactaaacaa

SEQ ID NO: 485137 - DNA, 30 bp, Artificial Sequence
  Synthetic oligonucleotide
cccacggaccgcccctatggcggccaacaa

SEQ ID NO: 485138 - DNA, 30 bp, Artificial Sequence
  Synthetic oligonucleotide
gtaatagctgatagttggaagtgccaacaa

SEQ ID NO: 485139 - DNA, 30 bp, Artificial Sequence
  Synthetic oligonucleotide
taagttagatgagctatacatcttcaacaa

SEQ ID NO: 485140 - DNA, 30 bp, Artificial Sequence
  Synthetic oligonucleotide
tgttatgccctgccgctcgcgtacgaacaa

SEQ ID NO: 485141 - DNA, 30 bp, Artificial Sequence
  Synthetic oligonucleotide
gattccgtatttctattccggaaggaacaa

SEQ ID NO: 485142 - DNA, 30 bp, Artificial Sequence
  Synthetic oligonucleotide
cccgtttagagtacatcccctgaggaacaa

SEQ ID NO: 485143 - DNA, 30 bp, Artificial Sequence
  Synthetic oligonucleotide
ttaaggtgtcatgtgtaaaagcgggaacaa

SEQ ID NO: 485144 - DNA, 30 bp, Artificial Sequence
  Synthetic oligonucleotide
tggtacgtatgtatgttacgtactgaacaa

SEQ ID NO: 485145 - DNA, 30 bp, Artificial Sequence
  Synthetic oligonucleotide
gatttcgcactaggctgaacctctgaacaa

SEQ ID NO: 485146 - DNA, 30 bp, Artificial Sequence
  Synthetic oligonucleotide
ggcggtcctctgggtgcctcgcgtgaacaa

SEQ ID NO: 485147 - DNA, 30 bp, Artificial Sequence
  Synthetic oligonucleotide
tattatacgcagacagatctgtgtgaacaa

SEQ ID NO: 485148 - DNA, 30 bp, Artificial Sequence
  Synthetic oligonucleotide
cataccttcacggggaattgttgtgaacaa

SEQ ID NO: 485149 - DNA, 30 bp, Artificial Sequence
  Synthetic oligonucleotide
gcgtaaaatttaccagagtgaggataacaa

SEQ ID NO: 485150 - DNA, 30 bp, Artificial Sequence
  Synthetic oligonucleotide
cttttagatagaaactatgccgcgtaacaa

SEQ ID NO: 485151 - DNA, 30 bp, Artificial Sequence
  Synthetic oligonucleotide
gatataccactaggttcatgacattaacaa

SEQ ID NO: 485152 - DNA, 30 bp, Artificial Sequence
  Synthetic oligonucleotide
taaatcgtgtctgaacgtagctattaacaa

SEQ ID NO: 485153 - DNA, 30 bp, Artificial Sequence
  Synthetic oligonucleotide
ataaaaggcactggccgctgaggaacacaa

SEQ ID NO: 485154 - DNA, 31 bp, Artificial Sequence
  Synthetic oligonucleotide
aatatgtctcccggactcggcacgcacacaa

SEQ ID NO: 485155 - DNA, 30 bp, Artificial Sequence
  Synthetic oligonucleotide
tcgccgacttccaccaaccgcggcacacaa

SEQ ID NO: 485156 - DNA, 30 bp, Artificial Sequence
  Synthetic oligonucleotide
atcctgtcgacgtcccccgcggtcacacaa

SEQ ID NO: 485157 - DNA, 30 bp, Artificial Sequence
  Synthetic oligonucleotide
ggcatagttgatgtaggaaccgtgacacaa

SEQ ID NO: 485158 - DNA, 30 bp, Artificial Sequence
  Synthetic oligonucleotide
aagtctgacgggcattagattcgtacacaa

SEQ ID NO: 485159 - DNA, 30 bp, Artificial Sequence
  Synthetic oligonucleotide
cggagctagggccgcacctgggtcgcacaa

SEQ ID NO: 485160 - DNA, 30 bp, Artificial Sequence
  Synthetic oligonucleotide
acgcaggattctcttcgccggggtgcacaa

SEQ ID NO: 485161 - DNA, 30 bp, Artificial Sequence
  Synthetic oligonucleotide
tatctccgattatttgggggatcatcacaa

SEQ ID NO: 485162 - DNA, 30 bp, Artificial Sequence
  Synthetic oligonucleotide
agttaggagcacagtgattatcgatcacaa

SEQ ID NO: 485163 - DNA, 30 bp, Artificial Sequence
  Synthetic oligonucleotide
agtggtgagccggtgacacagtcctcacaa

SEQ ID NO: 485164 - DNA, 30 bp, Artificial Sequence
  Synthetic oligonucleotide
tgattcttccgaacggttttaatgtcacaa

SEQ ID NO: 485165 - DNA, 30 bp, Artificial Sequence
  Synthetic oligonucleotide
ttgccgtaacagccggccgagctgtcacaa

SEQ ID NO: 485166 - DNA, 30 bp, Artificial Sequence
  Synthetic oligonucleotide
aatataaagttggtagccgacacaagacaa

SEQ ID NO: 485167 - DNA, 30 bp, Artificial Sequence
  Synthetic oligonucleotide
tgaacaagaacgagcgccaacggcagacaa

SEQ ID NO: 485168 - DNA, 30 bp, Artificial Sequence
  Synthetic oligonucleotide
gctgactgatcgctacctgtctcgagacaa

SEQ ID NO: 485169 - DNA, 30 bp, Artificial Sequence
  Synthetic oligonucleotide
catccctcactctaaagctgagggagacaa

SEQ ID NO: 485170 - DNA, 30 bp, Artificial Sequence
  Synthetic oligonucleotide
taagggtgggtacaaggtatagtgagacaa

SEQ ID NO: 485171 - DNA, 30 bp, Artificial Sequence
  Synthetic oligonucleotide
gcataatgcagcgtatctagagctagacaa

SEQ ID NO: 485172 - DNA, 30 bp, Artificial Sequence
  Synthetic oligonucleotide
cactgtcgcggtctttcctgtccacgacaa

SEQ ID NO: 485173 - DNA, 30 bp, Artificial Sequence
  Synthetic oligonucleotide
aagaacagatacaacatggggcaccgacaa

SEQ ID NO: 485174 - DNA, 30 bp, Artificial Sequence
  Synthetic oligonucleotide
tctttcgttgacatttgttcgaagcgacaa

SEQ ID NO: 485175 - DNA, 30 bp, Artificial Sequence
  Synthetic oligonucleotide
acgtctcgatttggtggagacaccggacaa

SEQ ID NO: 485176 - DNA, 30 bp, Artificial Sequence
  Synthetic oligonucleotide
tttccatcctaacgcccggcgcagggacaa

SEQ ID NO: 485177 - DNA, 30 bp, Artificial Sequence
  Synthetic oligonucleotide
caggatctgcccttgcgtgattagggacaa

SEQ ID NO: 485178 - DNA, 30 bp, Artificial Sequence
  Synthetic oligonucleotide
ggcgaccccactaacaatttctatggacaa

SEQ ID NO: 485179 - DNA, 30 bp, Artificial Sequence
  Synthetic oligonucleotide
tatcatcgacttctccgcatacgtggacaa

SEQ ID NO: 485180 - DNA, 30 bp, Artificial Sequence
  Synthetic oligonucleotide
atgtttagtatatccttctgggcatgacaa

SEQ ID NO: 485181 - DNA, 30 bp, Artificial Sequence
  Synthetic oligonucleotide
agtgccgctgcttttcggagaatatgacaa

SEQ ID NO: 485182 - DNA, 30 bp, Artificial Sequence
  Synthetic oligonucleotide
tcacagctatacattgccgaggtatgacaa

SEQ ID NO: 485183 - DNA, 30 bp, Artificial Sequence
  Synthetic oligonucleotide
tacagccttcgtcgactgccattatgacaa

SEQ ID NO: 485184 - DNA, 30 bp, Artificial Sequence
  Synthetic oligonucleotide
aacttggagtgtttcggactgtactgacaa

SEQ ID NO: 485185 - DNA, 30 bp, Artificial Sequence
  Synthetic oligonucleotide
atcaccgttcaccatgtttagtgctgacaa

SEQ ID NO: 485186 - DNA, 30 bp, Artificial Sequence
  Synthetic oligonucleotide
tcaagaattatcaggttcaccctctgacaa

SEQ ID NO: 485187 - DNA, 30 bp, Artificial Sequence
  Synthetic oligonucleotide
gacatcggcaggttactcccggattgacaa

SEQ ID NO: 485188 - DNA, 30 bp, Artificial Sequence
  Synthetic oligonucleotide
aacgaaagccagagtcagcaagcttgacaa

SEQ ID NO: 485189 - DNA, 30 bp, Artificial Sequence
  Synthetic oligonucleotide
ggaatgtcgtagccttgggtgctttgacaa

SEQ ID NO: 485190 - DNA, 30 bp, Artificial Sequence
  Synthetic oligonucleotide
cttcaggggccaattgtgaaattttgacaa

SEQ ID NO: 485191 - DNA, 30 bp, Artificial Sequence
  Synthetic oligonucleotide
aaatctgttggaccaacaacaggaatacaa

SEQ ID NO: 485192 - DNA, 30 bp, Artificial Sequence
  Synthetic oligonucleotide
aatcccttaactagctaactgtgaatacaa

SEQ ID NO: 485193 - DNA, 30 bp, Artificial Sequence
  Synthetic oligonucleotide
ttagtgataccccaagccggccgcatacaa

SEQ ID NO: 485194 - DNA, 30 bp, Artificial Sequence
  Synthetic oligonucleotide
ataaaatacatttgaattgtttctatacaa

SEQ ID NO: 485195 - DNA, 30 bp, Artificial Sequence
  Synthetic oligonucleotide
ttttggggttagcaattgtaacttatacaa

SEQ ID NO: 485196 - DNA, 30 bp, Artificial Sequence
  Synthetic oligonucleotide
ccaacttcgggagcccaaaggcgactacaa

SEQ ID NO: 485197 - DNA, 30 bp, Artificial Sequence
  Synthetic oligonucleotide
gaccccgtaccctatgtaatgttactacaa

SEQ ID NO: 485198 - DNA, 30 bp, Artificial Sequence
  Synthetic oligonucleotide
gacatgggctaggagggtcgcgagctacaa

SEQ ID NO: 485199 - DNA, 30 bp, Artificial Sequence
  Synthetic oligonucleotide
gacttgagttcctatgctatatcgctacaa

SEQ ID NO: 485200 - DNA, 30 bp, Artificial Sequence
  Synthetic oligonucleotide
ttcaggctgattttggcggatgggctacaa

SEQ ID NO: 485201 - DNA, 30 bp, Artificial Sequence
  Synthetic oligonucleotide
ttctacactctttgttctagcatgctacaa

SEQ ID NO: 485202 - DNA, 30 bp, Artificial Sequence
  Synthetic oligonucleotide
ttatttagtccttcctctcttttgctacaa

SEQ ID NO: 485203 - DNA, 30 bp, Artificial Sequence
  Synthetic oligonucleotide
cgcgactagccacggtgggtgagtctacaa

SEQ ID NO: 485204 - DNA, 30 bp, Artificial Sequence
  Synthetic oligonucleotide
catgacgttacacattatgattttctacaa

SEQ ID NO: 485205 - DNA, 30 bp, Artificial Sequence
  Synthetic oligonucleotide
gcccaggaggggtggggggctagggtacaa

SEQ ID NO: 485206 - DNA, 30 bp, Artificial Sequence
  Synthetic oligonucleotide
taacccggcggggcctattgtgtggtacaa

SEQ ID NO: 485207 - DNA, 30 bp, Artificial Sequence
  Synthetic oligonucleotide
tttcggatttccccccaaacgcatgtacaa

SEQ ID NO: 485208 - DNA, 30 bp, Artificial Sequence
  Synthetic oligonucleotide
acatcggcccgcacgcggcatcaattacaa

SEQ ID NO: 485209 - DNA, 31 bp, Artificial Sequence
  Synthetic oligonucleotide
gaattcactgatcaattttaggtgattacaa

SEQ ID NO: 485210 - DNA, 30 bp, Artificial Sequence
  Synthetic oligonucleotide
gcaccctcgattaagccccgaaccttacaa

SEQ ID NO: 485211 - DNA, 30 bp, Artificial Sequence
  Synthetic oligonucleotide
gtgaaagcctcttggcggagcgccttacaa

SEQ ID NO: 485212 - DNA, 30 bp, Artificial Sequence
  Synthetic oligonucleotide
tgtacaagcctatttaggagggccttacaa

SEQ ID NO: 485213 - DNA, 30 bp, Artificial Sequence
  Synthetic oligonucleotide
atttgtggttgcgcctgaatgcagttacaa

SEQ ID NO: 485214 - DNA, 30 bp, Artificial Sequence
  Synthetic oligonucleotide
ttgcttggacgcactttgaaggggttacaa

SEQ ID NO: 485215 - DNA, 30 bp, Artificial Sequence
  Synthetic oligonucleotide
gtatctcatctacgcgcgactaatttacaa

SEQ ID NO: 485216 - DNA, 30 bp, Artificial Sequence
  Synthetic oligonucleotide
ttgcatagcagactacctcgcactttacaa

SEQ ID NO: 485217 - DNA, 30 bp, Artificial Sequence
  Synthetic oligonucleotide
gattattatagctgctttggtcctttacaa

SEQ ID NO: 485218 - DNA, 31 bp, Artificial Sequence
  Synthetic oligonucleotide
accccgatttcaagtacattgtttaaaccaa

SEQ ID NO: 485219 - DNA, 30 bp, Artificial Sequence
  Synthetic oligonucleotide
ggagctgataacgcttgttatcgcaaccaa

SEQ ID NO: 485220 - DNA, 30 bp, Artificial Sequence
  Synthetic oligonucleotide
tgcatttgatgtcagcgatatcggaaccaa

SEQ ID NO: 485221 - DNA, 30 bp, Artificial Sequence
  Synthetic oligonucleotide
gcattatcggagtacctgcagcataaccaa

SEQ ID NO: 485222 - DNA, 30 bp, Artificial Sequence
  Synthetic oligonucleotide
cggtctcgctgtggttacacctgtaaccaa

SEQ ID NO: 485223 - DNA, 30 bp, Artificial Sequence
  Synthetic oligonucleotide
agaggagccaacggtcatagacttaaccaa

SEQ ID NO: 485224 - DNA, 30 bp, Artificial Sequence
  Synthetic oligonucleotide
gtcagccaacctggatccgacgcacaccaa

SEQ ID NO: 485225 - DNA, 30 bp, Artificial Sequence
  Synthetic oligonucleotide
tatatacgcacggaatttcgggcacaccaa

SEQ ID NO: 485226 - DNA, 30 bp, Artificial Sequence
  Synthetic oligonucleotide
aaagtcagtagttatgtataccaccaccaa

SEQ ID NO: 485227 - DNA, 30 bp, Artificial Sequence
  Synthetic oligonucleotide
gctgaaattccacggttaccctaccaccaa

SEQ ID NO: 485228 - DNA, 30 bp, Artificial Sequence
  Synthetic oligonucleotide
ctatccatgagaacacggatcctccaccaa

SEQ ID NO: 485229 - DNA, 30 bp, Artificial Sequence
  Synthetic oligonucleotide
aatgatttcacacagcatgaatggcaccaa

SEQ ID NO: 485230 - DNA, 29 bp, Artificial Sequence
  Synthetic oligonucleotide
cagcataacggggagcaccagctcaccaa

SEQ ID NO: 485231 - DNA, 30 bp, Artificial Sequence
  Synthetic oligonucleotide
cttaagggtgtcgcattgaacgacgaccaa

SEQ ID NO: 485232 - DNA, 30 bp, Artificial Sequence
  Synthetic oligonucleotide
tggtcgggaatttatatcgaacccgaccaa

SEQ ID NO: 485233 - DNA, 30 bp, Artificial Sequence
  Synthetic oligonucleotide
tataattaagcgacgccacatccggaccaa

SEQ ID NO: 485234 - DNA, 30 bp, Artificial Sequence
  Synthetic oligonucleotide
tcgcaccgagttttggttcatattgaccaa

SEQ ID NO: 485235 - DNA, 30 bp, Artificial Sequence
  Synthetic oligonucleotide
tgatagacatttgtcaaattctttgaccaa

SEQ ID NO: 485236 - DNA, 30 bp, Artificial Sequence
  Synthetic oligonucleotide
gaattccgtaccattctatatagataccaa

SEQ ID NO: 485237 - DNA, 30 bp, Artificial Sequence
  Synthetic oligonucleotide
gggatgacacattaattcgttgtataccaa

SEQ ID NO: 485238 - DNA, 30 bp, Artificial Sequence
  Synthetic oligonucleotide
gtcaattttgtggaacttttgtactaccaa

SEQ ID NO: 485239 - DNA, 30 bp, Artificial Sequence
  Synthetic oligonucleotide
cgtcgcaggatatggtaagccccctaccaa

SEQ ID NO: 485240 - DNA, 30 bp, Artificial Sequence
  Synthetic oligonucleotide
ctcataattttagctttaatgtcgtaccaa

SEQ ID NO: 485241 - DNA, 30 bp, Artificial Sequence
  Synthetic oligonucleotide
aattgtcaatatggctcgccgaacacccaa

SEQ ID NO: 485242 - DNA, 30 bp, Artificial Sequence
  Synthetic oligonucleotide
tattatggtgtgctaaacattagcacccaa

SEQ ID NO: 485243 - DNA, 30 bp, Artificial Sequence
  Synthetic oligonucleotide
atataggtatgttagtttatccgcacccaa

SEQ ID NO: 485244 - DNA, 30 bp, Artificial Sequence
  Synthetic oligonucleotide
ccgaatatgtggccttgcgctcagacccaa

SEQ ID NO: 485245 - DNA, 30 bp, Artificial Sequence
  Synthetic oligonucleotide
ctcgggtcagcctggctccactagacccaa

SEQ ID NO: 485246 - DNA, 30 bp, Artificial Sequence
  Synthetic oligonucleotide
gtcctgtactccggccggggcgtgacccaa

SEQ ID NO: 485247 - DNA, 30 bp, Artificial Sequence
  Synthetic oligonucleotide
cgttgtgcccgcagtttgttcattacccaa

SEQ ID NO: 485248 - DNA, 30 bp, Artificial Sequence
  Synthetic oligonucleotide
cttgtgtagtatggctgcgggtcaccccaa

SEQ ID NO: 485249 - DNA, 30 bp, Artificial Sequence
  Synthetic oligonucleotide
tcacagtaacccggtctccacagaccccaa

SEQ ID NO: 485250 - DNA, 30 bp, Artificial Sequence
  Synthetic oligonucleotide
gccccaaagacgcctggcaggtttccccaa

SEQ ID NO: 485251 - DNA, 30 bp, Artificial Sequence
  Synthetic oligonucleotide
tttaatacgttgtctatcgcaaccgcccaa

SEQ ID NO: 485252 - DNA, 30 bp, Artificial Sequence
  Synthetic oligonucleotide
tttctagatccgtagtatcagggggcccaa

SEQ ID NO: 485253 - DNA, 30 bp, Artificial Sequence
  Synthetic oligonucleotide
acgtatgcgacggacccccccttggcccaa

SEQ ID NO: 485254 - DNA, 30 bp, Artificial Sequence
  Synthetic oligonucleotide
gacatttaagaacctactgctatgtcccaa

SEQ ID NO: 485255 - DNA, 30 bp, Artificial Sequence
  Synthetic oligonucleotide
ttctctaaaaatatctagcggtattcccaa

SEQ ID NO: 485256 - DNA, 30 bp, Artificial Sequence
  Synthetic oligonucleotide
aaacaattaattccttagcatatttcccaa

SEQ ID NO: 485257 - DNA, 30 bp, Artificial Sequence
  Synthetic oligonucleotide
aagtcgcggatcttgatatcgtcaagccaa

SEQ ID NO: 485258 - DNA, 30 bp, Artificial Sequence
  Synthetic oligonucleotide
tatcatgccttttatcgcaattcaagccaa

SEQ ID NO: 485259 - DNA, 30 bp, Artificial Sequence
  Synthetic oligonucleotide
tctacggcatgctcgtcttgacccagccaa

SEQ ID NO: 485260 - DNA, 30 bp, Artificial Sequence
  Synthetic oligonucleotide
tgctatgccgcgtaatgtgtcgagagccaa

SEQ ID NO: 485261 - DNA, 30 bp, Artificial Sequence
  Synthetic oligonucleotide
ctacaccctctacgtcggagctatagccaa

SEQ ID NO: 485262 - DNA, 30 bp, Artificial Sequence
  Synthetic oligonucleotide
gatgcagttatatcggcgggttatagccaa

SEQ ID NO: 485263 - DNA, 30 bp, Artificial Sequence
  Synthetic oligonucleotide
gtaaaaaattggcgcccggatacccgccaa

SEQ ID NO: 485264 - DNA, 30 bp, Artificial Sequence
  Synthetic oligonucleotide
gcacactctccgggaattgcctcccgccaa

SEQ ID NO: 485265 - DNA, 30 bp, Artificial Sequence
  Synthetic oligonucleotide
tgctgaccttgattcgtgccaacgcgccaa

SEQ ID NO: 485266 - DNA, 30 bp, Artificial Sequence
  Synthetic oligonucleotide
cttcagcacattacgacagttgatcgccaa

SEQ ID NO: 485267 - DNA, 30 bp, Artificial Sequence
  Synthetic oligonucleotide
aattccgacgagtgtatggcggctcgccaa

SEQ ID NO: 485268 - DNA, 30 bp, Artificial Sequence
  Synthetic oligonucleotide
ggttctcggtatttgtatgactaaggccaa

SEQ ID NO: 485269 - DNA, 30 bp, Artificial Sequence
  Synthetic oligonucleotide
gggggcactacgattttagccgcaggccaa

SEQ ID NO: 485270 - DNA, 30 bp, Artificial Sequence
  Synthetic oligonucleotide
ttgtgaacttctcatctgtcaaacggccaa

SEQ ID NO: 485271 - DNA, 30 bp, Artificial Sequence
  Synthetic oligonucleotide
gagtattgttgtacaatttactggggccaa

SEQ ID NO: 485272 - DNA, 30 bp, Artificial Sequence
  Synthetic oligonucleotide
cgcatccttcccacccgtcagctgggccaa

SEQ ID NO: 485273 - DNA, 30 bp, Artificial Sequence
  Synthetic oligonucleotide
tccgtgaggttaattacacaggctggccaa

SEQ ID NO: 485274 - DNA, 30 bp, Artificial Sequence
  Synthetic oligonucleotide
atttagttcaccaagtcactgagtggccaa

SEQ ID NO: 485275 - DNA, 30 bp, Artificial Sequence
  Synthetic oligonucleotide
gttgtagcgttgtacatcagggaatgccaa

SEQ ID NO: 485276 - DNA, 30 bp, Artificial Sequence
  Synthetic oligonucleotide
gtcagtggaacactgaagacggcatgccaa

SEQ ID NO: 485277 - DNA, 30 bp, Artificial Sequence
  Synthetic oligonucleotide
cgtattgtcatgcattgtgaggcgtgccaa

SEQ ID NO: 485278 - DNA, 30 bp, Artificial Sequence
  Synthetic oligonucleotide
aaactatcgtactcttctataaaaatccaa

SEQ ID NO: 485279 - DNA, 30 bp, Artificial Sequence
  Synthetic oligonucleotide
gacttcttcatatgtaggtaaagcatccaa

SEQ ID NO: 485280 - DNA, 30 bp, Artificial Sequence
  Synthetic oligonucleotide
gtatgccagcattgtgcagggtgcatccaa

SEQ ID NO: 485281 - DNA, 30 bp, Artificial Sequence
  Synthetic oligonucleotide
caatttaatttttaagagcgcgctatccaa

SEQ ID NO: 485282 - DNA, 30 bp, Artificial Sequence
  Synthetic oligonucleotide
ggtcgtgcgcgttgaaactgcggtatccaa

SEQ ID NO: 485283 - DNA, 30 bp, Artificial Sequence
  Synthetic oligonucleotide
tagtcattgggttaaggttgtctactccaa

SEQ ID NO: 485284 - DNA, 30 bp, Artificial Sequence
  Synthetic oligonucleotide
catcgtgtttttggatcaagcgtactccaa

SEQ ID NO: 485285 - DNA, 30 bp, Artificial Sequence
  Synthetic oligonucleotide
tgagtgcggattggggattaatccctccaa

SEQ ID NO: 485286 - DNA, 30 bp, Artificial Sequence
  Synthetic oligonucleotide
tagagcaagacgtgacgcgcggagctccaa

SEQ ID NO: 485287 - DNA, 30 bp, Artificial Sequence
  Synthetic oligonucleotide
aatatggatcccctgtgcatcgcgctccaa

SEQ ID NO: 485288 - DNA, 30 bp, Artificial Sequence
  Synthetic oligonucleotide
aacccaggcatctgcctggcggggctccaa

SEQ ID NO: 485289 - DNA, 30 bp, Artificial Sequence
  Synthetic oligonucleotide
gtgttcgcttacattacctggtaagtccaa

SEQ ID NO: 485290 - DNA, 30 bp, Artificial Sequence
  Synthetic oligonucleotide
ccggatggcgtcgctaaatgcacagtccaa

SEQ ID NO: 485291 - DNA, 35 bp, Artificial Sequence
  Synthetic oligonucleotide
gatgttaggtcgaaattgccaagcccccagtccaa

SEQ ID NO: 485292 - DNA, 30 bp, Artificial Sequence
  Synthetic oligonucleotide
tttaattgcgctgattcgcatgtcgtccaa

SEQ ID NO: 485293 - DNA, 30 bp, Artificial Sequence
  Synthetic oligonucleotide
attcctgctcagggagtgatagaattccaa

SEQ ID NO: 485294 - DNA, 30 bp, Artificial Sequence
  Synthetic oligonucleotide
gagttttttgccgaccatagtatattccaa

SEQ ID NO: 485295 - DNA, 30 bp, Artificial Sequence
  Synthetic oligonucleotide
aatcatccgcaaatagcagttatcttccaa

SEQ ID NO: 485296 - DNA, 30 bp, Artificial Sequence
  Synthetic oligonucleotide
ataatattaggtgcacggggaacgttccaa

SEQ ID NO: 485297 - DNA, 30 bp, Artificial Sequence
  Synthetic oligonucleotide
gtcttcattggggggtggtctaaaaagcaa

SEQ ID NO: 485298 - DNA, 30 bp, Artificial Sequence
  Synthetic oligonucleotide
aggctcgacgcgattgcatctcaaaagcaa

SEQ ID NO: 485299 - DNA, 30 bp, Artificial Sequence
  Synthetic oligonucleotide
gtttttaccgtcaccaggatccgcaagcaa

SEQ ID NO: 485300 - DNA, 30 bp, Artificial Sequence
  Synthetic oligonucleotide
tttcctggattgaagcgtcttgagaagcaa

SEQ ID NO: 485301 - DNA, 30 bp, Artificial Sequence
  Synthetic oligonucleotide
gaccccattatcttagcgacgttgaagcaa

SEQ ID NO: 485302 - DNA, 30 bp, Artificial Sequence
  Synthetic oligonucleotide
atctaacgcacacattgtcgaaaacagcaa

SEQ ID NO: 485303 - DNA, 30 bp, Artificial Sequence
  Synthetic oligonucleotide
gacacggtacctcccggccatctccagcaa

SEQ ID NO: 485304 - DNA, 30 bp, Artificial Sequence
  Synthetic oligonucleotide
gatgtaggaaagtttcagttacagcagcaa

SEQ ID NO: 485305 - DNA, 30 bp, Artificial Sequence
  Synthetic oligonucleotide
gtcagaaatctaaagatgtcaaggcagcaa

SEQ ID NO: 485306 - DNA, 30 bp, Artificial Sequence
  Synthetic oligonucleotide
tgctacctcaaggggacactcatgcagcaa

SEQ ID NO: 485307 - DNA, 30 bp, Artificial Sequence
  Synthetic oligonucleotide
gaattgctggacatccagttggttcagcaa

SEQ ID NO: 485308 - DNA, 31 bp, Artificial Sequence
  Synthetic oligonucleotide
actatataaattggccacgtttccagagcaa

SEQ ID NO: 485309 - DNA, 30 bp, Artificial Sequence
  Synthetic oligonucleotide
gcctacaatctatcagtggttctagagcaa

SEQ ID NO: 485310 - DNA, 30 bp, Artificial Sequence
  Synthetic oligonucleotide
gaactggtgtgtgtcaatcacgtagagcaa

SEQ ID NO: 485311 - DNA, 30 bp, Artificial Sequence
  Synthetic oligonucleotide
gctcatctctttaatccgcagttagagcaa

SEQ ID NO: 485312 - DNA, 30 bp, Artificial Sequence
  Synthetic oligonucleotide
ttatgctatatcggttcgccagacgagcaa

SEQ ID NO: 485313 - DNA, 30 bp, Artificial Sequence
  Synthetic oligonucleotide
tcattaagaggtatgaagacgaccgagcaa

SEQ ID NO: 485314 - DNA, 30 bp, Artificial Sequence
  Synthetic oligonucleotide
agcaaggctcgactctgatgcagcgagcaa

SEQ ID NO: 485315 - DNA, 30 bp, Artificial Sequence
  Synthetic oligonucleotide
gaatagcagagaccttacagtgtcgagcaa

SEQ ID NO: 485316 - DNA, 30 bp, Artificial Sequence
  Synthetic oligonucleotide
cggtggataaacaccggctggttcgagcaa

SEQ ID NO: 485317 - DNA, 30 bp, Artificial Sequence
  Synthetic oligonucleotide
gcatgctttctgcatgccagcactgagcaa

SEQ ID NO: 485318 - DNA, 30 bp, Artificial Sequence
  Synthetic oligonucleotide
tacttcagagcagccctgcgcgttgagcaa

SEQ ID NO: 485319 - DNA, 30 bp, Artificial Sequence
  Synthetic oligonucleotide
ctctgagtaccaggcggacactactagcaa

SEQ ID NO: 485320 - DNA, 30 bp, Artificial Sequence
  Synthetic oligonucleotide
gggtgtgggagaagtcggaggtactagcaa

SEQ ID NO: 485321 - DNA, 30 bp, Artificial Sequence
  Synthetic oligonucleotide
cctctcacagcacaaagaggacagtagcaa

SEQ ID NO: 485322 - DNA, 30 bp, Artificial Sequence
  Synthetic oligonucleotide
ttttatagttaagccttggattaaacgcaa

SEQ ID NO: 485323 - DNA, 30 bp, Artificial Sequence
  Synthetic oligonucleotide
gccggtagttaaagtggtaggatcacgcaa

SEQ ID NO: 485324 - DNA, 30 bp, Artificial Sequence
  Synthetic oligonucleotide
agtaatgctgttttcgacttcaagacgcaa

SEQ ID NO: 485325 - DNA, 30 bp, Artificial Sequence
  Synthetic oligonucleotide
ccaccatgtctccaaggcggtaagacgcaa

SEQ ID NO: 485326 - DNA, 30 bp, Artificial Sequence
  Synthetic oligonucleotide
ggatggtgtgcagcgtctcaccgtacgcaa

SEQ ID NO: 485327 - DNA, 30 bp, Artificial Sequence
  Synthetic oligonucleotide
gacttaacagggtattttacctaaccgcaa

SEQ ID NO: 485328 - DNA, 30 bp, Artificial Sequence
  Synthetic oligonucleotide
aatctattgataccttttgactcaccgcaa

SEQ ID NO: 485329 - DNA, 30 bp, Artificial Sequence
  Synthetic oligonucleotide
tacctagtacttgtttgtgttagcccgcaa

SEQ ID NO: 485330 - DNA, 30 bp, Artificial Sequence
  Synthetic oligonucleotide
ttcgtcggcgtctctggtaaatgcccgcaa

SEQ ID NO: 485331 - DNA, 30 bp, Artificial Sequence
  Synthetic oligonucleotide
gttagcttatatcggctcccatcgccgcaa

SEQ ID NO: 485332 - DNA, 30 bp, Artificial Sequence
  Synthetic oligonucleotide
tgatactgcctaactgcatgtatgccgcaa

SEQ ID NO: 485333 - DNA, 30 bp, Artificial Sequence
  Synthetic oligonucleotide
ggtagtacgccaacttcgcctttgccgcaa

SEQ ID NO: 485334 - DNA, 30 bp, Artificial Sequence
  Synthetic oligonucleotide
ttgttctacgccagcgaagacagtccgcaa

SEQ ID NO: 485335 - DNA, 30 bp, Artificial Sequence
  Synthetic oligonucleotide
accttactaacatgtccatttcgtccgcaa

SEQ ID NO: 485336 - DNA, 30 bp, Artificial Sequence
  Synthetic oligonucleotide
ttggccacttgcgcgtaggacaaagcgcaa

SEQ ID NO: 485337 - DNA, 30 bp, Artificial Sequence
  Synthetic oligonucleotide
gaagaagacagcacggttctattagcgcaa

SEQ ID NO: 485338 - DNA, 30 bp, Artificial Sequence
  Synthetic oligonucleotide
gcagttctgccatattgctcctacgcgcaa

SEQ ID NO: 485339 - DNA, 30 bp, Artificial Sequence
  Synthetic oligonucleotide
gtaagtgggtataccgcgtcggccgcgcaa

SEQ ID NO: 485340 - DNA, 30 bp, Artificial Sequence
  Synthetic oligonucleotide
ccatgcatacgatcggttaagagcgcgcaa

SEQ ID NO: 485341 - DNA, 30 bp, Artificial Sequence
  Synthetic oligonucleotide
gcgtccttcctgtcgaccatagtcgcgcaa

SEQ ID NO: 485342 - DNA, 30 bp, Artificial Sequence
  Synthetic oligonucleotide
caaattatgagacgtaccgtgttcgcgcaa

SEQ ID NO: 485343 - DNA, 30 bp, Artificial Sequence
  Synthetic oligonucleotide
tggaagattccagaggatagggaggcgcaa

SEQ ID NO: 485344 - DNA, 30 bp, Artificial Sequence
  Synthetic oligonucleotide
gttgtcttgccgccaagattgcgggcgcaa

SEQ ID NO: 485345 - DNA, 30 bp, Artificial Sequence
  Synthetic oligonucleotide
gctggactagcccttacgcttgatgcgcaa

SEQ ID NO: 485346 - DNA, 30 bp, Artificial Sequence
  Synthetic oligonucleotide
tttcagaaaaaaaaacttgccatgtcgcaa

SEQ ID NO: 485347 - DNA, 30 bp, Artificial Sequence
  Synthetic oligonucleotide
gcaattgggttacgatgctacttgtcgcaa

SEQ ID NO: 485348 - DNA, 30 bp, Artificial Sequence
  Synthetic oligonucleotide
gtcatcttattgtcaacctcaatttcgcaa

SEQ ID NO: 485349 - DNA, 30 bp, Artificial Sequence
  Synthetic oligonucleotide
acgccacttgacactgctgatggcaggcaa

SEQ ID NO: 485350 - DNA, 30 bp, Artificial Sequence
  Synthetic oligonucleotide
agttgctcgtactaccttcataagaggcaa

SEQ ID NO: 485351 - DNA, 30 bp, Artificial Sequence
  Synthetic oligonucleotide
ctcccccaatagaggaattctcagaggcaa

SEQ ID NO: 485352 - DNA, 30 bp, Artificial Sequence
  Synthetic oligonucleotide
aacgtcttgccttctaagggggagaggcaa

SEQ ID NO: 485353 - DNA, 30 bp, Artificial Sequence
  Synthetic oligonucleotide
tgccatgctccattcatttcatagaggcaa

SEQ ID NO: 485354 - DNA, 30 bp, Artificial Sequence
  Synthetic oligonucleotide
acggcggaagcctaagtcagaccgaggcaa

SEQ ID NO: 485355 - DNA, 30 bp, Artificial Sequence
  Synthetic oligonucleotide
ttctgctgactgccactgttttggaggcaa

SEQ ID NO: 485356 - DNA, 30 bp, Artificial Sequence
  Synthetic oligonucleotide
acgcagctccacgcatcggcacctaggcaa

SEQ ID NO: 485357 - DNA, 30 bp, Artificial Sequence
  Synthetic oligonucleotide
cgcgtagcgatcctactgacatgtaggcaa

SEQ ID NO: 485358 - DNA, 30 bp, Artificial Sequence
  Synthetic oligonucleotide
cccggttccctaagaagtacgcttaggcaa

SEQ ID NO: 485359 - DNA, 30 bp, Artificial Sequence
  Synthetic oligonucleotide
gaatctcacaccctcttgtatgaacggcaa

SEQ ID NO: 485360 - DNA, 30 bp, Artificial Sequence
  Synthetic oligonucleotide
aatgggccgtaaagtccgataatacggcaa

SEQ ID NO: 485361 - DNA, 30 bp, Artificial Sequence
  Synthetic oligonucleotide
ttttaattagttcccaggggtgaccggcaa

SEQ ID NO: 485362 - DNA, 30 bp, Artificial Sequence
  Synthetic oligonucleotide
ggcactggaccagcgcgtggtgaccggcaa

SEQ ID NO: 485363 - DNA, 30 bp, Artificial Sequence
  Synthetic oligonucleotide
accgccgtaaacaattcgctacatcggcaa

SEQ ID NO: 485364 - DNA, 30 bp, Artificial Sequence
  Synthetic oligonucleotide
gactcagtaataagcccgccttgtcggcaa

SEQ ID NO: 485365 - DNA, 30 bp, Artificial Sequence
  Synthetic oligonucleotide
taacgtgcacggaggtagacgcaagggcaa

SEQ ID NO: 485366 - DNA, 30 bp, Artificial Sequence
  Synthetic oligonucleotide
taccttgcatgccactccaacacagggcaa

SEQ ID NO: 485367 - DNA, 30 bp, Artificial Sequence
  Synthetic oligonucleotide
gagtacagcgaccagctgcacagagggcaa

SEQ ID NO: 485368 - DNA, 30 bp, Artificial Sequence
  Synthetic oligonucleotide
tatttatctaggagtcttagtgtagggcaa

SEQ ID NO: 485369 - DNA, 30 bp, Artificial Sequence
  Synthetic oligonucleotide
agttcggttttaatcttcgaaaacgggcaa

SEQ ID NO: 485370 - DNA, 30 bp, Artificial Sequence
  Synthetic oligonucleotide
cgcgggcaggcgaatcggggtcacgggcaa

SEQ ID NO: 485371 - DNA, 30 bp, Artificial Sequence
  Synthetic oligonucleotide
agagcgccctacggtacgaatcgcgggcaa

SEQ ID NO: 485372 - DNA, 30 bp, Artificial Sequence
  Synthetic oligonucleotide
gattggtgaggcccaattgtagtcgggcaa

SEQ ID NO: 485373 - DNA, 30 bp, Artificial Sequence
  Synthetic oligonucleotide
gttgaggacgaggcgagcgaagctgggcaa

SEQ ID NO: 485374 - DNA, 30 bp, Artificial Sequence
  Synthetic oligonucleotide
acaagcgcctatgacggataacaatggcaa

SEQ ID NO: 485375 - DNA, 30 bp, Artificial Sequence
  Synthetic oligonucleotide
tggggcggtcagtggtatcatccgtggcaa

SEQ ID NO: 485376 - DNA, 30 bp, Artificial Sequence
  Synthetic oligonucleotide
gtttagggactctttatcagtttgtggcaa

SEQ ID NO: 485377 - DNA, 30 bp, Artificial Sequence
  Synthetic oligonucleotide
acaatttccggctcaacggtgccttggcaa

SEQ ID NO: 485378 - DNA, 30 bp, Artificial Sequence
  Synthetic oligonucleotide
tgcgcgccttgggaagatgtaggttggcaa

SEQ ID NO: 485379 - DNA, 30 bp, Artificial Sequence
  Synthetic oligonucleotide
aaaattgactgaccggtaagtcaaatgcaa

SEQ ID NO: 485380 - DNA, 30 bp, Artificial Sequence
  Synthetic oligonucleotide
cctagtatcaactagttgataggaatgcaa

SEQ ID NO: 485381 - DNA, 30 bp, Artificial Sequence
  Synthetic oligonucleotide
tcggccgtaatgctcacggtgccgatgcaa

SEQ ID NO: 485382 - DNA, 30 bp, Artificial Sequence
  Synthetic oligonucleotide
accgtgtggggtcataatttcgggatgcaa

SEQ ID NO: 485383 - DNA, 30 bp, Artificial Sequence
  Synthetic oligonucleotide
gcccgctatgtagattgtacaaatatgcaa

SEQ ID NO: 485384 - DNA, 30 bp, Artificial Sequence
  Synthetic oligonucleotide
actattggttcgcataagggtcgtatgcaa

SEQ ID NO: 485385 - DNA, 30 bp, Artificial Sequence
  Synthetic oligonucleotide
ttctggtcagctacagtagaacaactgcaa

SEQ ID NO: 485386 - DNA, 30 bp, Artificial Sequence
  Synthetic oligonucleotide
agtggataggtcgtggtacggggcctgcaa

SEQ ID NO: 485387 - DNA, 30 bp, Artificial Sequence
  Synthetic oligonucleotide
cacctctcagcagctagtacatagctgcaa

SEQ ID NO: 485388 - DNA, 30 bp, Artificial Sequence
  Synthetic oligonucleotide
cgcggaataggaataagtgtggcgctgcaa

SEQ ID NO: 485389 - DNA, 30 bp, Artificial Sequence
  Synthetic oligonucleotide
gagccgcagacatgcgcagaatgtctgcaa

SEQ ID NO: 485390 - DNA, 30 bp, Artificial Sequence
  Synthetic oligonucleotide
acgacgttcacagcgtgccgaattctgcaa

SEQ ID NO: 485391 - DNA, 30 bp, Artificial Sequence
  Synthetic oligonucleotide
ttaccattcttaagcgcaaagcttctgcaa

SEQ ID NO: 485392 - DNA, 30 bp, Artificial Sequence
  Synthetic oligonucleotide
aacatagagcgcttttggtatcacgtgcaa

SEQ ID NO: 485393 - DNA, 30 bp, Artificial Sequence
  Synthetic oligonucleotide
tatcttattccacaactactggccgtgcaa

SEQ ID NO: 485394 - DNA, 30 bp, Artificial Sequence
  Synthetic oligonucleotide
caaattataatattaaagtacgtggtgcaa

SEQ ID NO: 485395 - DNA, 30 bp, Artificial Sequence
  Synthetic oligonucleotide
gcgagtcttgttaaatattattaattgcaa

SEQ ID NO: 485396 - DNA, 30 bp, Artificial Sequence
  Synthetic oligonucleotide
gatattgtgtggtacgcgcaaccattgcaa

SEQ ID NO: 485397 - DNA, 30 bp, Artificial Sequence
  Synthetic oligonucleotide
gattctgcggcaataagtaggatattgcaa

SEQ ID NO: 485398 - DNA, 30 bp, Artificial Sequence
  Synthetic oligonucleotide
cagcgttacttaacaggttgggtattgcaa

SEQ ID NO: 485399 - DNA, 30 bp, Artificial Sequence
  Synthetic oligonucleotide
actgccgttgttaagggtcggccgttgcaa

SEQ ID NO: 485400 - DNA, 30 bp, Artificial Sequence
  Synthetic oligonucleotide
ccagtaccactaaatgcaattctgttgcaa

SEQ ID NO: 485401 - DNA, 30 bp, Artificial Sequence
  Synthetic oligonucleotide
ccacaatgtcgaaacagtccaaatttgcaa

SEQ ID NO: 485402 - DNA, 30 bp, Artificial Sequence
  Synthetic oligonucleotide
ggattgaaaagtgcgtaagacgatttgcaa

SEQ ID NO: 485403 - DNA, 30 bp, Artificial Sequence
  Synthetic oligonucleotide
tgactggtattgcaccagccgtgtttgcaa

SEQ ID NO: 485404 - DNA, 30 bp, Artificial Sequence
  Synthetic oligonucleotide
tgactataggtggtatattcgcaaaatcaa

SEQ ID NO: 485405 - DNA, 28 bp, Artificial Sequence
  Synthetic oligonucleotide
tttttgacatatttctttttcaaatcaa

SEQ ID NO: 485406 - DNA, 30 bp, Artificial Sequence
  Synthetic oligonucleotide
gtatggaatttagaaatcgagagaaatcaa

SEQ ID NO: 485407 - DNA, 30 bp, Artificial Sequence
  Synthetic oligonucleotide
cgtttggtggcatatagccttgtaaatcaa

SEQ ID NO: 485408 - DNA, 30 bp, Artificial Sequence
  Synthetic oligonucleotide
gatagtattgtttttacctccaacaatcaa

SEQ ID NO: 485409 - DNA, 30 bp, Artificial Sequence
  Synthetic oligonucleotide
cgcccggacccagatgagcatcacaatcaa

SEQ ID NO: 485410 - DNA, 30 bp, Artificial Sequence
  Synthetic oligonucleotide
aagacgcagacgcgcaacttgatcaatcaa

SEQ ID NO: 485411 - DNA, 30 bp, Artificial Sequence
  Synthetic oligonucleotide
ggcggccgggtaccggacgaggtcaatcaa

SEQ ID NO: 485412 - DNA, 30 bp, Artificial Sequence
  Synthetic oligonucleotide
tatttaagtgcccggcaacaggcgaatcaa

SEQ ID NO: 485413 - DNA, 30 bp, Artificial Sequence
  Synthetic oligonucleotide
tttggtctctgattcagcagacctaatcaa

SEQ ID NO: 485414 - DNA, 30 bp, Artificial Sequence
  Synthetic oligonucleotide
ctctcatttcgacttggtaagtctaatcaa

SEQ ID NO: 485415 - DNA, 30 bp, Artificial Sequence
  Synthetic oligonucleotide
tccgggaattgctgagacgtgtaacatcaa

SEQ ID NO: 485416 - DNA, 30 bp, Artificial Sequence
  Synthetic oligonucleotide
gtgcccaacctgacgtggatgagacatcaa

SEQ ID NO: 485417 - DNA, 30 bp, Artificial Sequence
  Synthetic oligonucleotide
gctattagatattgagctttataccatcaa

SEQ ID NO: 485418 - DNA, 30 bp, Artificial Sequence
  Synthetic oligonucleotide
actggttaaggtagtctcgggtaccatcaa

SEQ ID NO: 485419 - DNA, 30 bp, Artificial Sequence
  Synthetic oligonucleotide
cccgagtacatgatgaccctgtatcatcaa

SEQ ID NO: 485420 - DNA, 30 bp, Artificial Sequence
  Synthetic oligonucleotide
tctatcggcagcattgcttaaagtcatcaa

SEQ ID NO: 485421 - DNA, 30 bp, Artificial Sequence
  Synthetic oligonucleotide
tcagagcatgacaaataatatatagatcaa

SEQ ID NO: 485422 - DNA, 30 bp, Artificial Sequence
  Synthetic oligonucleotide
atgatgtcttacgaatcgacctacgatcaa

SEQ ID NO: 485423 - DNA, 30 bp, Artificial Sequence
  Synthetic oligonucleotide
cagcgctgagtatctgatttcagcgatcaa

SEQ ID NO: 485424 - DNA, 30 bp, Artificial Sequence
  Synthetic oligonucleotide
tccggctagctgatcgtgcctcgcgatcaa

SEQ ID NO: 485425 - DNA, 30 bp, Artificial Sequence
  Synthetic oligonucleotide
tgcgagctcagttttattaaaatggatcaa

SEQ ID NO: 485426 - DNA, 30 bp, Artificial Sequence
  Synthetic oligonucleotide
acgatcagagaatgtacgattcctgatcaa

SEQ ID NO: 485427 - DNA, 30 bp, Artificial Sequence
  Synthetic oligonucleotide
gtctacctgtagaacaggcgcagtgatcaa

SEQ ID NO: 485428 - DNA, 30 bp, Artificial Sequence
  Synthetic oligonucleotide
tacgggtctcatttccgcaaggttgatcaa

SEQ ID NO: 485429 - DNA, 30 bp, Artificial Sequence
  Synthetic oligonucleotide
atgccttacctgatgcccacggcgtatcaa

SEQ ID NO: 485430 - DNA, 30 bp, Artificial Sequence
  Synthetic oligonucleotide
aatttttagcacgggcgattttcgtatcaa

SEQ ID NO: 485431 - DNA, 30 bp, Artificial Sequence
  Synthetic oligonucleotide
tgtataaatcggccatcacgtcattatcaa

SEQ ID NO: 485432 - DNA, 30 bp, Artificial Sequence
  Synthetic oligonucleotide
gtagcgttgttgtagatgcgatattatcaa

SEQ ID NO: 485433 - DNA, 30 bp, Artificial Sequence
  Synthetic oligonucleotide
cctgagggggtagtcgcgggatcttatcaa

SEQ ID NO: 485434 - DNA, 30 bp, Artificial Sequence
  Synthetic oligonucleotide
tcatatatgaaatgagcatctttttatcaa

SEQ ID NO: 485435 - DNA, 30 bp, Artificial Sequence
  Synthetic oligonucleotide
ccgcctttagtattctaatgaaaaactcaa

SEQ ID NO: 485436 - DNA, 30 bp, Artificial Sequence
  Synthetic oligonucleotide
tatgcctgatgtaagctcttcgtaactcaa

SEQ ID NO: 485437 - DNA, 30 bp, Artificial Sequence
  Synthetic oligonucleotide
cgtaacaggtcccggttgcggagcactcaa

SEQ ID NO: 485438 - DNA, 30 bp, Artificial Sequence
  Synthetic oligonucleotide
cttcactgacgaggcccgagtaagactcaa

SEQ ID NO: 485439 - DNA, 30 bp, Artificial Sequence
  Synthetic oligonucleotide
tctgcataaacgccaatgtattggactcaa

SEQ ID NO: 485440 - DNA, 30 bp, Artificial Sequence
  Synthetic oligonucleotide
tgaccgttccacacatcggcccgccctcaa

SEQ ID NO: 485441 - DNA, 30 bp, Artificial Sequence
  Synthetic oligonucleotide
gtgccgcgtatccccttgggtgagcctcaa

SEQ ID NO: 485442 - DNA, 30 bp, Artificial Sequence
  Synthetic oligonucleotide
acccgctcgctgcgtgagtaaacgcctcaa

SEQ ID NO: 485443 - DNA, 30 bp, Artificial Sequence
  Synthetic oligonucleotide
agcttgagattcctatgttgttgtcctcaa

SEQ ID NO: 485444 - DNA, 30 bp, Artificial Sequence
  Synthetic oligonucleotide
atttcagctgcatagaagggctcagctcaa

SEQ ID NO: 485445 - DNA, 30 bp, Artificial Sequence
  Synthetic oligonucleotide
agactaacgttgtgggtgcagggagctcaa

SEQ ID NO: 485446 - DNA, 30 bp, Artificial Sequence
  Synthetic oligonucleotide
ttccagggttctgctagatactacgctcaa

SEQ ID NO: 485447 - DNA, 30 bp, Artificial Sequence
  Synthetic oligonucleotide
ttactagggtcttcttctgaagcggctcaa

SEQ ID NO: 485448 - DNA, 30 bp, Artificial Sequence
  Synthetic oligonucleotide
tgcagcgcgtcgagttattatggggctcaa

SEQ ID NO: 485449 - DNA, 30 bp, Artificial Sequence
  Synthetic oligonucleotide
tacaaagcaattttgcccgcagtggctcaa

SEQ ID NO: 485450 - DNA, 30 bp, Artificial Sequence
  Synthetic oligonucleotide
caactcaagtacgtatgtcgggagtctcaa

SEQ ID NO: 485451 - DNA, 30 bp, Artificial Sequence
  Synthetic oligonucleotide
cactacgtgtttgatgttgtaatttctcaa

SEQ ID NO: 485452 - DNA, 30 bp, Artificial Sequence
  Synthetic oligonucleotide
ggaatgactcgaaatgcaaatttaagtcaa

SEQ ID NO: 485453 - DNA, 30 bp, Artificial Sequence
  Synthetic oligonucleotide
cgtctataacagaatttgccgcacagtcaa

SEQ ID NO: 485454 - DNA, 30 bp, Artificial Sequence
  Synthetic oligonucleotide
gcatcctactcggaaggagtggtcagtcaa

SEQ ID NO: 485455 - DNA, 30 bp, Artificial Sequence
  Synthetic oligonucleotide
gttgatgatcgctgggctggtttcagtcaa

SEQ ID NO: 485456 - DNA, 30 bp, Artificial Sequence
  Synthetic oligonucleotide
atcatgggctcccggctcttgcatagtcaa

SEQ ID NO: 485457 - DNA, 30 bp, Artificial Sequence
  Synthetic oligonucleotide
tttactggtctgagggcggcacttagtcaa

SEQ ID NO: 485458 - DNA, 30 bp, Artificial Sequence
  Synthetic oligonucleotide
ccgtacatataacaagaatgcgttagtcaa

SEQ ID NO: 485459 - DNA, 30 bp, Artificial Sequence
  Synthetic oligonucleotide
caggtttttacaatacaagtgtttagtcaa

SEQ ID NO: 485460 - DNA, 30 bp, Artificial Sequence
  Synthetic oligonucleotide
tgttccggcttttacggtaacgagcgtcaa

SEQ ID NO: 485461 - DNA, 30 bp, Artificial Sequence
  Synthetic oligonucleotide
ggtgaagcagtggctagctacacgcgtcaa

SEQ ID NO: 485462 - DNA, 30 bp, Artificial Sequence
  Synthetic oligonucleotide
tgtttttcgtcatggtgctataggcgtcaa

SEQ ID NO: 485463 - DNA, 29 bp, Artificial Sequence
  Synthetic oligonucleotide
gatcgcttgaggaagcctcggttcgtcaa

SEQ ID NO: 485464 - DNA, 30 bp, Artificial Sequence
  Synthetic oligonucleotide
tcacagaaacggcacaaaggagcaggtcaa

SEQ ID NO: 485465 - DNA, 30 bp, Artificial Sequence
  Synthetic oligonucleotide
tttaactatactataggggcctcaggtcaa

SEQ ID NO: 485466 - DNA, 30 bp, Artificial Sequence
  Synthetic oligonucleotide
taatggtaaaggggagggtgttcaggtcaa

SEQ ID NO: 485467 - DNA, 30 bp, Artificial Sequence
  Synthetic oligonucleotide
tgctaaaaagctttgcattttagaggtcaa

SEQ ID NO: 485468 - DNA, 30 bp, Artificial Sequence
  Synthetic oligonucleotide
gataatgattaggatgatcattagggtcaa

SEQ ID NO: 485469 - DNA, 30 bp, Artificial Sequence
  Synthetic oligonucleotide
ctctagcctggtgctatcgcgcggggtcaa

SEQ ID NO: 485470 - DNA, 30 bp, Artificial Sequence
  Synthetic oligonucleotide
cgtcaaaatgtgtattacatccttggtcaa

SEQ ID NO: 485471 - DNA, 30 bp, Artificial Sequence
  Synthetic oligonucleotide
agggtagtatcgtctatgctggttggtcaa

SEQ ID NO: 485472 - DNA, 30 bp, Artificial Sequence
  Synthetic oligonucleotide
tagcctatattctaccgcgctagatgtcaa

SEQ ID NO: 485473 - DNA, 30 bp, Artificial Sequence
  Synthetic oligonucleotide
ctaccgtctgggcgcatctctggatgtcaa

SEQ ID NO: 485474 - DNA, 30 bp, Artificial Sequence
  Synthetic oligonucleotide
attgcgccgattaaacacttgacctgtcaa

SEQ ID NO: 485475 - DNA, 30 bp, Artificial Sequence
  Synthetic oligonucleotide
ttcagactagactgaataccttcctgtcaa

SEQ ID NO: 485476 - DNA, 30 bp, Artificial Sequence
  Synthetic oligonucleotide
cggtctcgatcaaagcgttgccgctgtcaa

SEQ ID NO: 485477 - DNA, 30 bp, Artificial Sequence
  Synthetic oligonucleotide
ggataatgaccggtggacgcaggctgtcaa

SEQ ID NO: 485478 - DNA, 30 bp, Artificial Sequence
  Synthetic oligonucleotide
tttccatatagtgaatattattagtgtcaa

SEQ ID NO: 485479 - DNA, 30 bp, Artificial Sequence
  Synthetic oligonucleotide
tttgacaagttaactttaagtctgtgtcaa

SEQ ID NO: 485480 - DNA, 30 bp, Artificial Sequence
  Synthetic oligonucleotide
taggcgcaggtagaacagtgaacttgtcaa

SEQ ID NO: 485481 - DNA, 30 bp, Artificial Sequence
  Synthetic oligonucleotide
gtgagtttggtccctgaagggacttgtcaa

SEQ ID NO: 485482 - DNA, 30 bp, Artificial Sequence
  Synthetic oligonucleotide
tggaatttggtatactaacacgcaattcaa

SEQ ID NO: 485483 - DNA, 30 bp, Artificial Sequence
  Synthetic oligonucleotide
aacaaaagttacttgtacacggtcattcaa

SEQ ID NO: 485484 - DNA, 30 bp, Artificial Sequence
  Synthetic oligonucleotide
cggcagcagatatttacgattccgattcaa

SEQ ID NO: 485485 - DNA, 30 bp, Artificial Sequence
  Synthetic oligonucleotide
tagttgcgtactgggtcctcttcgattcaa

SEQ ID NO: 485486 - DNA, 30 bp, Artificial Sequence
  Synthetic oligonucleotide
ggagctttgggtgtagggcgggggattcaa

SEQ ID NO: 485487 - DNA, 30 bp, Artificial Sequence
  Synthetic oligonucleotide
gtacaggatttacagcgggttgatattcaa

SEQ ID NO: 485488 - DNA, 30 bp, Artificial Sequence
  Synthetic oligonucleotide
tagtgggacttttttttggagtatattcaa

SEQ ID NO: 485489 - DNA, 30 bp, Artificial Sequence
  Synthetic oligonucleotide
tagtctatatcttcactcgtgcctattcaa

SEQ ID NO: 485490 - DNA, 30 bp, Artificial Sequence
  Synthetic oligonucleotide
ggtcacccgggagccacggagcgtattcaa

SEQ ID NO: 485491 - DNA, 30 bp, Artificial Sequence
  Synthetic oligonucleotide
ttacgcctggattggatacgacttattcaa

SEQ ID NO: 485492 - DNA, 30 bp, Artificial Sequence
  Synthetic oligonucleotide
aacagcactaagaagacagatcaacttcaa

SEQ ID NO: 485493 - DNA, 30 bp, Artificial Sequence
  Synthetic oligonucleotide
acccccgacaatgcggtagctccgcttcaa

SEQ ID NO: 485494 - DNA, 30 bp, Artificial Sequence
  Synthetic oligonucleotide
tgaccattgttactcatgtacaggcttcaa

SEQ ID NO: 485495 - DNA, 30 bp, Artificial Sequence
  Synthetic oligonucleotide
gccattgaccatattacctatggtcttcaa

SEQ ID NO: 485496 - DNA, 30 bp, Artificial Sequence
  Synthetic oligonucleotide
cttacattgggtaagaataaaagcgttcaa

SEQ ID NO: 485497 - DNA, 30 bp, Artificial Sequence
  Synthetic oligonucleotide
ttattgtcattgtacccgacgggcgttcaa

SEQ ID NO: 485498 - DNA, 30 bp, Artificial Sequence
  Synthetic oligonucleotide
ggtttcctagtcacctacttcgctgttcaa

SEQ ID NO: 485499 - DNA, 30 bp, Artificial Sequence
  Synthetic oligonucleotide
gttcctctgagacgttgagcacttgttcaa

SEQ ID NO: 485500 - DNA, 30 bp, Artificial Sequence
  Synthetic oligonucleotide
atcaacggaacggacgttcgtcaatttcaa

SEQ ID NO: 485501 - DNA, 30 bp, Artificial Sequence
  Synthetic oligonucleotide
ttaggaagatcccgcgatagttgatttcaa

SEQ ID NO: 485502 - DNA, 30 bp, Artificial Sequence
  Synthetic oligonucleotide
gtataacataggtaatctgttccctttcaa

SEQ ID NO: 485503 - DNA, 30 bp, Artificial Sequence
  Synthetic oligonucleotide
ttttgggatgaatgtttgagtgcttttcaa

SEQ ID NO: 485504 - DNA, 30 bp, Artificial Sequence
  Synthetic oligonucleotide
ggagcttgaggcaatattcagaaaaaagaa

SEQ ID NO: 485505 - DNA, 30 bp, Artificial Sequence
  Synthetic oligonucleotide
aactttaatcgtccgagattatcaaaagaa

SEQ ID NO: 485506 - DNA, 30 bp, Artificial Sequence
  Synthetic oligonucleotide
agctatctcatgtgcttatggatcaaagaa

SEQ ID NO: 485507 - DNA, 30 bp, Artificial Sequence
  Synthetic oligonucleotide
ttttgacggggagcatgaaagtttaaagaa

SEQ ID NO: 485508 - DNA, 30 bp, Artificial Sequence
  Synthetic oligonucleotide
gtagcgctagattgtttgatgcaacaagaa

SEQ ID NO: 485509 - DNA, 30 bp, Artificial Sequence
  Synthetic oligonucleotide
attccgacgccaacatccgggccacaagaa

SEQ ID NO: 485510 - DNA, 30 bp, Artificial Sequence
  Synthetic oligonucleotide
ctgaagaatgaactaacctgtccgcaagaa

SEQ ID NO: 485511 - DNA, 30 bp, Artificial Sequence
  Synthetic oligonucleotide
gaagtacggctcgcataggttttgcaagaa

SEQ ID NO: 485512 - DNA, 30 bp, Artificial Sequence
  Synthetic oligonucleotide
gatttacttacgcggtattatgactaagaa

SEQ ID NO: 485513 - DNA, 30 bp, Artificial Sequence
  Synthetic oligonucleotide
atttgtcaagccgatatccttggttaagaa

SEQ ID NO: 485514 - DNA, 30 bp, Artificial Sequence
  Synthetic oligonucleotide
atctcacattctgtcgttttttgaacagaa

SEQ ID NO: 485515 - DNA, 30 bp, Artificial Sequence
  Synthetic oligonucleotide
tcactgatacaaccagtaccacgcacagaa

SEQ ID NO: 485516 - DNA, 30 bp, Artificial Sequence
  Synthetic oligonucleotide
cgtctttaggttacgcttgcagtcacagaa

SEQ ID NO: 485517 - DNA, 31 bp, Artificial Sequence
  Synthetic oligonucleotide
gaaatttgatgaattcgcttacagtacagaa

SEQ ID NO: 485518 - DNA, 30 bp, Artificial Sequence
  Synthetic oligonucleotide
gatcaataaagtgtctcagacgcaccagaa

SEQ ID NO: 485519 - DNA, 30 bp, Artificial Sequence
  Synthetic oligonucleotide
tgatttcgcgcacggaccgcagtaccagaa

SEQ ID NO: 485520 - DNA, 30 bp, Artificial Sequence
  Synthetic oligonucleotide
gctccctcttacctattacctctcccagaa

SEQ ID NO: 485521 - DNA, 30 bp, Artificial Sequence
  Synthetic oligonucleotide
ccgcttcggcaatgggccgcattgccagaa

SEQ ID NO: 485522 - DNA, 30 bp, Artificial Sequence
  Synthetic oligonucleotide
tatttagtcacggaaagctcgttgccagaa

SEQ ID NO: 485523 - DNA, 30 bp, Artificial Sequence
  Synthetic oligonucleotide
cgtccgaagatttcctgggagactccagaa

SEQ ID NO: 485524 - DNA, 30 bp, Artificial Sequence
  Synthetic oligonucleotide
gatccggtcgccgtcgcgacggtagcagaa

SEQ ID NO: 485525 - DNA, 30 bp, Artificial Sequence
  Synthetic oligonucleotide
tcggttgtccacaaacggattgtagcagaa

SEQ ID NO: 485526 - DNA, 30 bp, Artificial Sequence
  Synthetic oligonucleotide
taacagaaggggtagatataacacgcagaa

SEQ ID NO: 485527 - DNA, 30 bp, Artificial Sequence
  Synthetic oligonucleotide
ttattctgccgagttctggaggacgcagaa

SEQ ID NO: 485528 - DNA, 30 bp, Artificial Sequence
  Synthetic oligonucleotide
ttggtaggcggagcaccagcatgcgcagaa

SEQ ID NO: 485529 - DNA, 30 bp, Artificial Sequence
  Synthetic oligonucleotide
aaagccagatggctacagccatcggcagaa

SEQ ID NO: 485530 - DNA, 30 bp, Artificial Sequence
  Synthetic oligonucleotide
gagcatgcacgactcggggtcagtgcagaa

SEQ ID NO: 485531 - DNA, 30 bp, Artificial Sequence
  Synthetic oligonucleotide
tttgcttattaatctcttagagcatcagaa

SEQ ID NO: 485532 - DNA, 30 bp, Artificial Sequence
  Synthetic oligonucleotide
tgaaaccacaaaatctccgcgatatcagaa

SEQ ID NO: 485533 - DNA, 30 bp, Artificial Sequence
  Synthetic oligonucleotide
cgcgaggcggatattctgatcgtatcagaa

SEQ ID NO: 485534 - DNA, 30 bp, Artificial Sequence
  Synthetic oligonucleotide
cctattaggggctggatatcccgctcagaa

SEQ ID NO: 485535 - DNA, 30 bp, Artificial Sequence
  Synthetic oligonucleotide
tggtttagtcgggtattcgactaaagagaa

SEQ ID NO: 485536 - DNA, 30 bp, Artificial Sequence
  Synthetic oligonucleotide
tgtaaatcacgggcagcaataggaagagaa

SEQ ID NO: 485537 - DNA, 30 bp, Artificial Sequence
  Synthetic oligonucleotide
aaaaacttaccagcgtttgcacagagagaa

SEQ ID NO: 485538 - DNA, 30 bp, Artificial Sequence
  Synthetic oligonucleotide
catatgcacagggccaagtcaaggagagaa

SEQ ID NO: 485539 - DNA, 30 bp, Artificial Sequence
  Synthetic oligonucleotide
gggttattgcagctcgattccaggagagaa

SEQ ID NO: 485540 - DNA, 30 bp, Artificial Sequence
  Synthetic oligonucleotide
tctcttttcttagaggaaagctctagagaa

SEQ ID NO: 485541 - DNA, 30 bp, Artificial Sequence
  Synthetic oligonucleotide
ctcatccccgacgagctcttaggtagagaa

SEQ ID NO: 485542 - DNA, 30 bp, Artificial Sequence
  Synthetic oligonucleotide
cgtggttgtcactcagagtacattagagaa

SEQ ID NO: 485543 - DNA, 30 bp, Artificial Sequence
  Synthetic oligonucleotide
tattctacccactttatgtcagttagagaa

SEQ ID NO: 485544 - DNA, 30 bp, Artificial Sequence
  Synthetic oligonucleotide
aaaactttggccagattgtctgaacgagaa

SEQ ID NO: 485545 - DNA, 30 bp, Artificial Sequence
  Synthetic oligonucleotide
catatcgtagcagcccctccctgacgagaa

SEQ ID NO: 485546 - DNA, 30 bp, Artificial Sequence
  Synthetic oligonucleotide
aactaactattccgtactctctcccgagaa

SEQ ID NO: 485547 - DNA, 30 bp, Artificial Sequence
  Synthetic oligonucleotide
agcaaatctcgcagtatgtgaattcgagaa

SEQ ID NO: 485548 - DNA, 30 bp, Artificial Sequence
  Synthetic oligonucleotide
tcgtgatacgagggtttatgcaaaggagaa

SEQ ID NO: 485549 - DNA, 30 bp, Artificial Sequence
  Synthetic oligonucleotide
gggccgggtctctttgtcaaccccggagaa

SEQ ID NO: 485550 - DNA, 30 bp, Artificial Sequence
  Synthetic oligonucleotide
cgagcttacgccaacaggcgtaagggagaa

SEQ ID NO: 485551 - DNA, 30 bp, Artificial Sequence
  Synthetic oligonucleotide
gagcacacctccccactcatcgcgggagaa

SEQ ID NO: 485552 - DNA, 30 bp, Artificial Sequence
  Synthetic oligonucleotide
gattatattggtaccacagatgcgggagaa

SEQ ID NO: 485553 - DNA, 30 bp, Artificial Sequence
  Synthetic oligonucleotide
tgttcaagtgatggggggctatggggagaa

SEQ ID NO: 485554 - DNA, 30 bp, Artificial Sequence
  Synthetic oligonucleotide
tgttaaaattaagcgcgccagcatggagaa

SEQ ID NO: 485555 - DNA, 30 bp, Artificial Sequence
  Synthetic oligonucleotide
atgggtcggtgcccgggggcaatatgagaa

SEQ ID NO: 485556 - DNA, 30 bp, Artificial Sequence
  Synthetic oligonucleotide
tgcctttcgcaactaccactacgctgagaa

SEQ ID NO: 485557 - DNA, 30 bp, Artificial Sequence
  Synthetic oligonucleotide
tttatcatcgggcgtaagccaatctgagaa

SEQ ID NO: 485558 - DNA, 30 bp, Artificial Sequence
  Synthetic oligonucleotide
ggttgatcggtttacgctttccggtgagaa

SEQ ID NO: 485559 - DNA, 30 bp, Artificial Sequence
  Synthetic oligonucleotide
cgctttaaactgatagcggcttggtgagaa

SEQ ID NO: 485560 - DNA, 30 bp, Artificial Sequence
  Synthetic oligonucleotide
gaattaggttaataattggtttggtgagaa

SEQ ID NO: 485561 - DNA, 30 bp, Artificial Sequence
  Synthetic oligonucleotide
ttccaactggggtatacatcagcttgagaa

SEQ ID NO: 485562 - DNA, 30 bp, Artificial Sequence
  Synthetic oligonucleotide
caaggaagtatttcggtgtcggtttgagaa

SEQ ID NO: 485563 - DNA, 30 bp, Artificial Sequence
  Synthetic oligonucleotide
aaaacgcttggtgtttacatctacatagaa

SEQ ID NO: 485564 - DNA, 30 bp, Artificial Sequence
  Synthetic oligonucleotide
ttagaagctgtaggaattagttccatagaa

SEQ ID NO: 485565 - DNA, 30 bp, Artificial Sequence
  Synthetic oligonucleotide
tgagcgttagggcacagggtcggtatagaa

SEQ ID NO: 485566 - DNA, 30 bp, Artificial Sequence
  Synthetic oligonucleotide
gactgatagcgtaagcacgtaggactagaa

SEQ ID NO: 485567 - DNA, 30 bp, Artificial Sequence
  Synthetic oligonucleotide
aacgcccggtgttagcttctgggactagaa

SEQ ID NO: 485568 - DNA, 30 bp, Artificial Sequence
  Synthetic oligonucleotide
gagttctgctccgtggacgcgaacctagaa

SEQ ID NO: 485569 - DNA, 30 bp, Artificial Sequence
  Synthetic oligonucleotide
tttcaaggcagtgcgttagttttcctagaa

SEQ ID NO: 485570 - DNA, 30 bp, Artificial Sequence
  Synthetic oligonucleotide
ctttggttaacgtgtcattaaaatctagaa

SEQ ID NO: 485571 - DNA, 30 bp, Artificial Sequence
  Synthetic oligonucleotide
atttttcgcacaactgggccttctctagaa

SEQ ID NO: 485572 - DNA, 30 bp, Artificial Sequence
  Synthetic oligonucleotide
aattaattcgcattctggcctattctagaa

SEQ ID NO: 485573 - DNA, 30 bp, Artificial Sequence
  Synthetic oligonucleotide
aaaagccgcggacatgcctatcaggtagaa

SEQ ID NO: 485574 - DNA, 30 bp, Artificial Sequence
  Synthetic oligonucleotide
gattagtcgctataattcaacgcggtagaa

SEQ ID NO: 485575 - DNA, 30 bp, Artificial Sequence
  Synthetic oligonucleotide
gacaggataggtttggtgtaacatgtagaa

SEQ ID NO: 485576 - DNA, 30 bp, Artificial Sequence
  Synthetic oligonucleotide
gtagattccgctctatctcacttattagaa

SEQ ID NO: 485577 - DNA, 30 bp, Artificial Sequence
  Synthetic oligonucleotide
ctctatcgtgtggaaagatcgggcttagaa

SEQ ID NO: 485578 - DNA, 30 bp, Artificial Sequence
  Synthetic oligonucleotide
atcgtcttttggttaatgacgatgttagaa

SEQ ID NO: 485579 - DNA, 30 bp, Artificial Sequence
  Synthetic oligonucleotide
aatcttttttctaggaacaggaaaaacgaa

SEQ ID NO: 485580 - DNA, 30 bp, Artificial Sequence
  Synthetic oligonucleotide
attccctcaacatatgctgaggtaaacgaa

SEQ ID NO: 485581 - DNA, 30 bp, Artificial Sequence
  Synthetic oligonucleotide
ttccttgacttaaactggggttacaacgaa

SEQ ID NO: 485582 - DNA, 30 bp, Artificial Sequence
  Synthetic oligonucleotide
tactggggtgcatggttggtgttcaacgaa

SEQ ID NO: 485583 - DNA, 29 bp, Artificial Sequence
  Synthetic oligonucleotide
agctagtggtaggttgttcgttgaacgaa

SEQ ID NO: 485584 - DNA, 30 bp, Artificial Sequence
  Synthetic oligonucleotide
gcgggtgtggctcaacaagagccccacgaa

SEQ ID NO: 485585 - DNA, 30 bp, Artificial Sequence
  Synthetic oligonucleotide
atttagccacttgtcgctaatgtccacgaa

SEQ ID NO: 485586 - DNA, 30 bp, Artificial Sequence
  Synthetic oligonucleotide
ctattcaactgaccgcaacaggtgcacgaa

SEQ ID NO: 485587 - DNA, 30 bp, Artificial Sequence
  Synthetic oligonucleotide
cttcaatcgcatcacaattctcgtcacgaa

SEQ ID NO: 485588 - DNA, 30 bp, Artificial Sequence
  Synthetic oligonucleotide
attgaggcgtcaataacctatctagacgaa

SEQ ID NO: 485589 - DNA, 30 bp, Artificial Sequence
  Synthetic oligonucleotide
attcggttggttgggcctttcggcgacgaa

SEQ ID NO: 485590 - DNA, 30 bp, Artificial Sequence
  Synthetic oligonucleotide
acttatgcagcttccggagcaatcgacgaa

SEQ ID NO: 485591 - DNA, 30 bp, Artificial Sequence
  Synthetic oligonucleotide
gggggtgaatattaacctacggactacgaa

SEQ ID NO: 485592 - DNA, 30 bp, Artificial Sequence
  Synthetic oligonucleotide
gtgtagatctggttagggaatgcctacgaa

SEQ ID NO: 485593 - DNA, 30 bp, Artificial Sequence
  Synthetic oligonucleotide
agcggagaccgatacaaagtagggtacgaa

SEQ ID NO: 485594 - DNA, 30 bp, Artificial Sequence
  Synthetic oligonucleotide
gccctgtcgtggtgtgcggacacttacgaa

SEQ ID NO: 485595 - DNA, 30 bp, Artificial Sequence
  Synthetic oligonucleotide
gtattttactaataccaaaggggttacgaa

SEQ ID NO: 485596 - DNA, 30 bp, Artificial Sequence
  Synthetic oligonucleotide
agtttgccaagaattcgttaatcaaccgaa

SEQ ID NO: 485597 - DNA, 30 bp, Artificial Sequence
  Synthetic oligonucleotide
ctgcagcttgcgggtctacaagagaccgaa

SEQ ID NO: 485598 - DNA, 30 bp, Artificial Sequence
  Synthetic oligonucleotide
ccactgtgaaaaacagtggctgggaccgaa

SEQ ID NO: 485599 - DNA, 30 bp, Artificial Sequence
  Synthetic oligonucleotide
taccacgcaaccattctcagtgtccccgaa

SEQ ID NO: 485600 - DNA, 30 bp, Artificial Sequence
  Synthetic oligonucleotide
cccgtccgctggggcttttcttcgcccgaa

SEQ ID NO: 485601 - DNA, 30 bp, Artificial Sequence
  Synthetic oligonucleotide
cattcggggagaagttagggcagtcccgaa

SEQ ID NO: 485602 - DNA, 30 bp, Artificial Sequence
  Synthetic oligonucleotide
aaaacgtcccttgagattagaattcccgaa

SEQ ID NO: 485603 - DNA, 30 bp, Artificial Sequence
  Synthetic oligonucleotide
ctgggtttattcgacaggggctcggccgaa

SEQ ID NO: 485604 - DNA, 30 bp, Artificial Sequence
  Synthetic oligonucleotide
atgtgcagcgtcgtatgagccattgccgaa

SEQ ID NO: 485605 - DNA, 30 bp, Artificial Sequence
  Synthetic oligonucleotide
ttccggggattcgggcatgtattatccgaa

SEQ ID NO: 485606 - DNA, 30 bp, Artificial Sequence
  Synthetic oligonucleotide
ggtatctacactgattcgcgtgtttccgaa

SEQ ID NO: 485607 - DNA, 30 bp, Artificial Sequence
  Synthetic oligonucleotide
cttcgccctgaatccgaatccccaagcgaa

SEQ ID NO: 485608 - DNA, 30 bp, Artificial Sequence
  Synthetic oligonucleotide
tgatagctaaagtgcggatgtgggagcgaa

SEQ ID NO: 485609 - DNA, 30 bp, Artificial Sequence
  Synthetic oligonucleotide
gtcgggactaacacaggttcgtggagcgaa

SEQ ID NO: 485610 - DNA, 30 bp, Artificial Sequence
  Synthetic oligonucleotide
tcaaacacaggaagttgattccaacgcgaa

SEQ ID NO: 485611 - DNA, 30 bp, Artificial Sequence
  Synthetic oligonucleotide
gccacggaaaacctggatcggagacgcgaa

SEQ ID NO: 485612 - DNA, 30 bp, Artificial Sequence
  Synthetic oligonucleotide
ggatgggctgcatttatgcgtagacgcgaa

SEQ ID NO: 485613 - DNA, 30 bp, Artificial Sequence
  Synthetic oligonucleotide
cgggtacccaatgctttcgcgcaccgcgaa

SEQ ID NO: 485614 - DNA, 30 bp, Artificial Sequence
  Synthetic oligonucleotide
gaccgcgcgcatgacatacatcaccgcgaa

SEQ ID NO: 485615 - DNA, 30 bp, Artificial Sequence
  Synthetic oligonucleotide
gagggtacacaggaacattcggaccgcgaa

SEQ ID NO: 485616 - DNA, 30 bp, Artificial Sequence
  Synthetic oligonucleotide
ctacttgacttagcacaggtacgccgcgaa

SEQ ID NO: 485617 - DNA, 30 bp, Artificial Sequence
  Synthetic oligonucleotide
agcatcgcttgtattataaacaagcgcgaa

SEQ ID NO: 485618 - DNA, 30 bp, Artificial Sequence
  Synthetic oligonucleotide
gtatccggaggcgctgcaagaggcggcgaa

SEQ ID NO: 485619 - DNA, 30 bp, Artificial Sequence
  Synthetic oligonucleotide
ctctctccggaaatatattgtgttggcgaa

SEQ ID NO: 485620 - DNA, 30 bp, Artificial Sequence
  Synthetic oligonucleotide
tagcagtttgagtcatggaacgcttgcgaa

SEQ ID NO: 485621 - DNA, 30 bp, Artificial Sequence
  Synthetic oligonucleotide
aagggttgatgttgccaagctaaaatcgaa

SEQ ID NO: 485622 - DNA, 30 bp, Artificial Sequence
  Synthetic oligonucleotide
ttattctgctaaagccagggcccaatcgaa

SEQ ID NO: 485623 - DNA, 30 bp, Artificial Sequence
  Synthetic oligonucleotide
cctgctatccggttcttagaatgcatcgaa

SEQ ID NO: 485624 - DNA, 31 bp, Artificial Sequence
  Synthetic oligonucleotide
gcacttttttcacggctacggcgccctcgaa

SEQ ID NO: 485625 - DNA, 30 bp, Artificial Sequence
  Synthetic oligonucleotide
ggcattcggataaaggtcgtttagctcgaa

SEQ ID NO: 485626 - DNA, 30 bp, Artificial Sequence
  Synthetic oligonucleotide
gtttgaagaggcgacgttccgtcgctcgaa

SEQ ID NO: 485627 - DNA, 30 bp, Artificial Sequence
  Synthetic oligonucleotide
gtgcatacagagactaccccgttgctcgaa

SEQ ID NO: 485628 - DNA, 30 bp, Artificial Sequence
  Synthetic oligonucleotide
tgtgtgtagaatggttaccaggctctcgaa

SEQ ID NO: 485629 - DNA, 30 bp, Artificial Sequence
  Synthetic oligonucleotide
ggcactacacagttaagctggtaagtcgaa

SEQ ID NO: 485630 - DNA, 30 bp, Artificial Sequence
  Synthetic oligonucleotide
gtaggggataccagccaggttacagtcgaa

SEQ ID NO: 485631 - DNA, 30 bp, Artificial Sequence
  Synthetic oligonucleotide
aattcactcggcattggggctagagtcgaa

SEQ ID NO: 485632 - DNA, 30 bp, Artificial Sequence
  Synthetic oligonucleotide
gaaccccgtgctaattttatagccgtcgaa

SEQ ID NO: 485633 - DNA, 30 bp, Artificial Sequence
  Synthetic oligonucleotide
atccttggctggggagtcattcaggtcgaa

SEQ ID NO: 485634 - DNA, 30 bp, Artificial Sequence
  Synthetic oligonucleotide
cttggcacggtgcgataaaacctggtcgaa

SEQ ID NO: 485635 - DNA, 30 bp, Artificial Sequence
  Synthetic oligonucleotide
atatcgggataaaaacatactaaattcgaa

SEQ ID NO: 485636 - DNA, 30 bp, Artificial Sequence
  Synthetic oligonucleotide
cttcaggttcagagaatgataaatttcgaa

SEQ ID NO: 485637 - DNA, 30 bp, Artificial Sequence
  Synthetic oligonucleotide
ctttaggtctttttcaacctacaaaaggaa

SEQ ID NO: 485638 - DNA, 30 bp, Artificial Sequence
  Synthetic oligonucleotide
aacggggccttcgctgcgtagataaaggaa

SEQ ID NO: 485639 - DNA, 30 bp, Artificial Sequence
  Synthetic oligonucleotide
tatagccacgtcgccgctctttccaaggaa

SEQ ID NO: 485640 - DNA, 30 bp, Artificial Sequence
  Synthetic oligonucleotide
aacacgcgtcgtatcgcagataagaaggaa

SEQ ID NO: 485641 - DNA, 30 bp, Artificial Sequence
  Synthetic oligonucleotide
taatgggtgcatagagttacagggaaggaa

SEQ ID NO: 485642 - DNA, 30 bp, Artificial Sequence
  Synthetic oligonucleotide
cgcgatggcgaccagacgcagctgaaggaa

SEQ ID NO: 485643 - DNA, 30 bp, Artificial Sequence
  Synthetic oligonucleotide
tattaggccgtagcactttccttacaggaa

SEQ ID NO: 485644 - DNA, 30 bp, Artificial Sequence
  Synthetic oligonucleotide
ggtgtaccgcctcagtggctgtgccaggaa

SEQ ID NO: 485645 - DNA, 30 bp, Artificial Sequence
  Synthetic oligonucleotide
gcctccatataggtcctgttgttccaggaa

SEQ ID NO: 485646 - DNA, 30 bp, Artificial Sequence
  Synthetic oligonucleotide
cggcacgatagcacattgtagacgcaggaa

SEQ ID NO: 485647 - DNA, 30 bp, Artificial Sequence
  Synthetic oligonucleotide
gagtgtgtaaagtccgacttagggcaggaa

SEQ ID NO: 485648 - DNA, 30 bp, Artificial Sequence
  Synthetic oligonucleotide
gctcctttacacacgttatgggtgcaggaa

SEQ ID NO: 485649 - DNA, 31 bp, Artificial Sequence
  Synthetic oligonucleotide
tcaagcgttaatagcgccggacgcagaggaa

SEQ ID NO: 485650 - DNA, 30 bp, Artificial Sequence
  Synthetic oligonucleotide
cggactaaagcgtctagataagccgaggaa

SEQ ID NO: 485651 - DNA, 30 bp, Artificial Sequence
  Synthetic oligonucleotide
ttttctggtagttaaacgttgggggaggaa

SEQ ID NO: 485652 - DNA, 30 bp, Artificial Sequence
  Synthetic oligonucleotide
tggcctcgggccaggggccgttttgaggaa

SEQ ID NO: 485653 - DNA, 30 bp, Artificial Sequence
  Synthetic oligonucleotide
agggccaagggtcgctcccagggataggaa

SEQ ID NO: 485654 - DNA, 30 bp, Artificial Sequence
  Synthetic oligonucleotide
tgcgattcctgctatatcactctataggaa

SEQ ID NO: 485655 - DNA, 30 bp, Artificial Sequence
  Synthetic oligonucleotide
gagtgtcggatatgatacaacaagtaggaa

SEQ ID NO: 485656 - DNA, 30 bp, Artificial Sequence
  Synthetic oligonucleotide
taatttcttaaacacttttacgcgtaggaa

SEQ ID NO: 485657 - DNA, 30 bp, Artificial Sequence
  Synthetic oligonucleotide
ctctatcaaagattatcagtcgtgtaggaa

SEQ ID NO: 485658 - DNA, 30 bp, Artificial Sequence
  Synthetic oligonucleotide
ttctaatgatacccgcatgtcctttaggaa

SEQ ID NO: 485659 - DNA, 30 bp, Artificial Sequence
  Synthetic oligonucleotide
ttttaaaagattttagcagggggaacggaa

SEQ ID NO: 485660 - DNA, 30 bp, Artificial Sequence
  Synthetic oligonucleotide
catagcttgtcgcaccaccccgtaacggaa

SEQ ID NO: 485661 - DNA, 30 bp, Artificial Sequence
  Synthetic oligonucleotide
tgagcttttaagtaaaccgcctacacggaa

SEQ ID NO: 485662 - DNA, 30 bp, Artificial Sequence
  Synthetic oligonucleotide
gaatctgcacgcttctttcagtccacggaa

SEQ ID NO: 485663 - DNA, 30 bp, Artificial Sequence
  Synthetic oligonucleotide
atcagtgggctaggaacttatggcacggaa

SEQ ID NO: 485664 - DNA, 30 bp, Artificial Sequence
  Synthetic oligonucleotide
ttctctaaggccgttatgagaacgacggaa

SEQ ID NO: 485665 - DNA, 30 bp, Artificial Sequence
  Synthetic oligonucleotide
tctgttgcatcggctattatacgtacggaa

SEQ ID NO: 485666 - DNA, 30 bp, Artificial Sequence
  Synthetic oligonucleotide
tatgaggctcctgcatgcaatggtacggaa

SEQ ID NO: 485667 - DNA, 30 bp, Artificial Sequence
  Synthetic oligonucleotide
atcaatagccttctagcatcgagaccggaa

SEQ ID NO: 485668 - DNA, 30 bp, Artificial Sequence
  Synthetic oligonucleotide
gtagcatgggctatttctaagaacccggaa

SEQ ID NO: 485669 - DNA, 30 bp, Artificial Sequence
  Synthetic oligonucleotide
ttggctcatgggatttaatccggcccggaa

SEQ ID NO: 485670 - DNA, 30 bp, Artificial Sequence
  Synthetic oligonucleotide
tcgggaactgtggctcgtgatggtccggaa

SEQ ID NO: 485671 - DNA, 30 bp, Artificial Sequence
  Synthetic oligonucleotide
tgattcagtccatttaacaccgcagcggaa

SEQ ID NO: 485672 - DNA, 30 bp, Artificial Sequence
  Synthetic oligonucleotide
tatctatcctcatggaccaataccgcggaa

SEQ ID NO: 485673 - DNA, 30 bp, Artificial Sequence
  Synthetic oligonucleotide
ccctgagtagtgggccgcagcggcgcggaa

SEQ ID NO: 485674 - DNA, 30 bp, Artificial Sequence
  Synthetic oligonucleotide
tgggagctaaaccatagaaagtcggcggaa

SEQ ID NO: 485675 - DNA, 30 bp, Artificial Sequence
  Synthetic oligonucleotide
gctcttttcggccggttcttctatgcggaa

SEQ ID NO: 485676 - DNA, 30 bp, Artificial Sequence
  Synthetic oligonucleotide
acatctgaggcttggaggcctattgcggaa

SEQ ID NO: 485677 - DNA, 30 bp, Artificial Sequence
  Synthetic oligonucleotide
atacgcaagaaaaatttgccagttgcggaa

SEQ ID NO: 485678 - DNA, 30 bp, Artificial Sequence
  Synthetic oligonucleotide
gttaatatcgctttctacttataatcggaa

SEQ ID NO: 485679 - DNA, 30 bp, Artificial Sequence
  Synthetic oligonucleotide
ggggttcgaggacccatctatgggtcggaa

SEQ ID NO: 485680 - DNA, 30 bp, Artificial Sequence
  Synthetic oligonucleotide
cgacctggcgctcgcctccagatgtcggaa

SEQ ID NO: 485681 - DNA, 30 bp, Artificial Sequence
  Synthetic oligonucleotide
acgcaccacacttcgcaagaagtgtcggaa

SEQ ID NO: 485682 - DNA, 30 bp, Artificial Sequence
  Synthetic oligonucleotide
attaagttccgccgcggtctcaattcggaa

SEQ ID NO: 485683 - DNA, 30 bp, Artificial Sequence
  Synthetic oligonucleotide
atttccggaagatatgttcatctttcggaa

SEQ ID NO: 485684 - DNA, 30 bp, Artificial Sequence
  Synthetic oligonucleotide
acgcagtctttccgtccgactgcgagggaa

SEQ ID NO: 485685 - DNA, 30 bp, Artificial Sequence
  Synthetic oligonucleotide
aaacactgcttcgtgaggggcgggagggaa

SEQ ID NO: 485686 - DNA, 30 bp, Artificial Sequence
  Synthetic oligonucleotide
gacgcaatagttacgttttgtaatagggaa

SEQ ID NO: 485687 - DNA, 30 bp, Artificial Sequence
  Synthetic oligonucleotide
ttttaacacatgcgggcgattattagggaa

SEQ ID NO: 485688 - DNA, 30 bp, Artificial Sequence
  Synthetic oligonucleotide
cataactcttatgtccttaattttagggaa

SEQ ID NO: 485689 - DNA, 30 bp, Artificial Sequence
  Synthetic oligonucleotide
agatatggtcccattagcctgtaacgggaa

SEQ ID NO: 485690 - DNA, 30 bp, Artificial Sequence
  Synthetic oligonucleotide
aaaccctgatccccgcagagaccccgggaa

SEQ ID NO: 485691 - DNA, 30 bp, Artificial Sequence
  Synthetic oligonucleotide
aagtgcagtccgggacgtcgcctgcgggaa

SEQ ID NO: 485692 - DNA, 30 bp, Artificial Sequence
  Synthetic oligonucleotide
gttgggtaggacgcattctagtatcgggaa

SEQ ID NO: 485693 - DNA, 30 bp, Artificial Sequence
  Synthetic oligonucleotide
ttcctcatggggccttgatagtcaggggaa

SEQ ID NO: 485694 - DNA, 30 bp, Artificial Sequence
  Synthetic oligonucleotide
gattcattcgccatagccgcagtaggggaa

SEQ ID NO: 485695 - DNA, 30 bp, Artificial Sequence
  Synthetic oligonucleotide
acacggtaactcgcgacttcgtacggggaa

SEQ ID NO: 485696 - DNA, 30 bp, Artificial Sequence
  Synthetic oligonucleotide
gtctgttatacgttgtaggctctcggggaa

SEQ ID NO: 485697 - DNA, 31 bp, Artificial Sequence
  Synthetic oligonucleotide
gctccccctgaaaagcggttgccagggggaa

SEQ ID NO: 485698 - DNA, 30 bp, Artificial Sequence
  Synthetic oligonucleotide
agcaccggtggtgcataggaccctggggaa

SEQ ID NO: 485699 - DNA, 30 bp, Artificial Sequence
  Synthetic oligonucleotide
gccttcggttgtccactataaacatgggaa

SEQ ID NO: 485700 - DNA, 30 bp, Artificial Sequence
  Synthetic oligonucleotide
aaatctagatggtcggcaaagccatgggaa

SEQ ID NO: 485701 - DNA, 30 bp, Artificial Sequence
  Synthetic oligonucleotide
aaatccggtattacggcaacaggatgggaa

SEQ ID NO: 485702 - DNA, 30 bp, Artificial Sequence
  Synthetic oligonucleotide
ttgccgtatagtccctattagggatgggaa

SEQ ID NO: 485703 - DNA, 30 bp, Artificial Sequence
  Synthetic oligonucleotide
tctcgagcctaagacatttaatgatgggaa

SEQ ID NO: 485704 - DNA, 30 bp, Artificial Sequence
  Synthetic oligonucleotide
tatcgtcattgggtaatgattgcctgggaa

SEQ ID NO: 485705 - DNA, 30 bp, Artificial Sequence
  Synthetic oligonucleotide
acgggttccaagccgccagtcggctgggaa

SEQ ID NO: 485706 - DNA, 30 bp, Artificial Sequence
  Synthetic oligonucleotide
cccgcgcatcgacatccaggacggtgggaa

SEQ ID NO: 485707 - DNA, 30 bp, Artificial Sequence
  Synthetic oligonucleotide
agtcacatttaacggacatgggggtgggaa

SEQ ID NO: 485708 - DNA, 30 bp, Artificial Sequence
  Synthetic oligonucleotide
ccgctatacgtacttcgcgtgctgtgggaa

SEQ ID NO: 485709 - DNA, 30 bp, Artificial Sequence
  Synthetic oligonucleotide
cgagagcattgccgtggacatcattgggaa

SEQ ID NO: 485710 - DNA, 30 bp, Artificial Sequence
  Synthetic oligonucleotide
tcgggagttatgggaactcagctttgggaa

SEQ ID NO: 485711 - DNA, 30 bp, Artificial Sequence
  Synthetic oligonucleotide
aatgtatgttttcctttcaagtaaatggaa

SEQ ID NO: 485712 - DNA, 30 bp, Artificial Sequence
  Synthetic oligonucleotide
tacaattccttttcaatccggtaaatggaa

SEQ ID NO: 485713 - DNA, 30 bp, Artificial Sequence
  Synthetic oligonucleotide
attaagtagttcacccgatttccaatggaa

SEQ ID NO: 485714 - DNA, 30 bp, Artificial Sequence
  Synthetic oligonucleotide
atcctaactagaagtagttagagaatggaa

SEQ ID NO: 485715 - DNA, 30 bp, Artificial Sequence
  Synthetic oligonucleotide
tttcactggcgcaacagctgtctcatggaa

SEQ ID NO: 485716 - DNA, 30 bp, Artificial Sequence
  Synthetic oligonucleotide
ctaagcccatgtagacgaggaccgatggaa

SEQ ID NO: 485717 - DNA, 30 bp, Artificial Sequence
  Synthetic oligonucleotide
ggtcatcaagggtagttcgaactgatggaa

SEQ ID NO: 485718 - DNA, 30 bp, Artificial Sequence
  Synthetic oligonucleotide
ttatcgacccggtagttgatcttgatggaa

SEQ ID NO: 485719 - DNA, 30 bp, Artificial Sequence
  Synthetic oligonucleotide
atagattacttcgtaacacggtgtatggaa

SEQ ID NO: 485720 - DNA, 30 bp, Artificial Sequence
  Synthetic oligonucleotide
ggcctccgcaattcttttcggatcctggaa

SEQ ID NO: 485721 - DNA, 30 bp, Artificial Sequence
  Synthetic oligonucleotide
cagacgtgatgcttgcggacggtcctggaa

SEQ ID NO: 485722 - DNA, 30 bp, Artificial Sequence
  Synthetic oligonucleotide
gtctaccactttacggtcgggaagctggaa

SEQ ID NO: 485723 - DNA, 30 bp, Artificial Sequence
  Synthetic oligonucleotide
atcggcgctggtacagacactaagctggaa

SEQ ID NO: 485724 - DNA, 30 bp, Artificial Sequence
  Synthetic oligonucleotide
tatctttaccgtgcccgggcagctctggaa

SEQ ID NO: 485725 - DNA, 31 bp, Artificial Sequence
  Synthetic oligonucleotide
cccaattcttgccgaccttggctgtctggaa

SEQ ID NO: 485726 - DNA, 30 bp, Artificial Sequence
  Synthetic oligonucleotide
tttcttattagaaaaggctgtgttctggaa

SEQ ID NO: 485727 - DNA, 30 bp, Artificial Sequence
  Synthetic oligonucleotide
aaacattaagggccctgtaggccagtggaa

SEQ ID NO: 485728 - DNA, 30 bp, Artificial Sequence
  Synthetic oligonucleotide
tatggcgtatactgggtcggagccgtggaa

SEQ ID NO: 485729 - DNA, 30 bp, Artificial Sequence
  Synthetic oligonucleotide
gactgtagcgcgagtgagacggtcgtggaa

SEQ ID NO: 485730 - DNA, 30 bp, Artificial Sequence
  Synthetic oligonucleotide
attcacccggggtcgtcgcccgaggtggaa

SEQ ID NO: 485731 - DNA, 30 bp, Artificial Sequence
  Synthetic oligonucleotide
aatctacagaacgctttgggtcctgtggaa

SEQ ID NO: 485732 - DNA, 30 bp, Artificial Sequence
  Synthetic oligonucleotide
cctacgatacacgtcagtctttacttggaa

SEQ ID NO: 485733 - DNA, 30 bp, Artificial Sequence
  Synthetic oligonucleotide
gtctgtaagtcgaccggacgacgcttggaa

SEQ ID NO: 485734 - DNA, 30 bp, Artificial Sequence
  Synthetic oligonucleotide
gaccccacgtccgattctcgacgcttggaa

SEQ ID NO: 485735 - DNA, 30 bp, Artificial Sequence
  Synthetic oligonucleotide
ttattatatatagtagttcgggagttggaa

SEQ ID NO: 485736 - DNA, 30 bp, Artificial Sequence
  Synthetic oligonucleotide
agtccaatgtagcgtaagctgcatttggaa

SEQ ID NO: 485737 - DNA, 30 bp, Artificial Sequence
  Synthetic oligonucleotide
gatttaagggtgcatgctaatgatttggaa

SEQ ID NO: 485738 - DNA, 30 bp, Artificial Sequence
  Synthetic oligonucleotide
cttggcaaccgcccacgctactatttggaa

SEQ ID NO: 485739 - DNA, 30 bp, Artificial Sequence
  Synthetic oligonucleotide
gattgcgtatcagtttgtacctatttggaa

SEQ ID NO: 485740 - DNA, 30 bp, Artificial Sequence
  Synthetic oligonucleotide
taaaaaataggtgtaccttactgaaatgaa

SEQ ID NO: 485741 - DNA, 30 bp, Artificial Sequence
  Synthetic oligonucleotide
agtcctgcgaacgccggattcggcaatgaa

SEQ ID NO: 485742 - DNA, 30 bp, Artificial Sequence
  Synthetic oligonucleotide
aagtgagctgctatcagtctttagaatgaa

SEQ ID NO: 485743 - DNA, 30 bp, Artificial Sequence
  Synthetic oligonucleotide
attggaaatgcactttatcataataatgaa

SEQ ID NO: 485744 - DNA, 30 bp, Artificial Sequence
  Synthetic oligonucleotide
cttgctttaatgcgccttaaggcacatgaa

SEQ ID NO: 485745 - DNA, 30 bp, Artificial Sequence
  Synthetic oligonucleotide
gttaacagccttgtaatgacaatacatgaa

SEQ ID NO: 485746 - DNA, 30 bp, Artificial Sequence
  Synthetic oligonucleotide
aacgtatacggtaaggctaggttacatgaa

SEQ ID NO: 485747 - DNA, 30 bp, Artificial Sequence
  Synthetic oligonucleotide
ccgcacgtggaagtcgaaggcctccatgaa

SEQ ID NO: 485748 - DNA, 30 bp, Artificial Sequence
  Synthetic oligonucleotide
aactctgccaattcatgttcacggcatgaa

SEQ ID NO: 485749 - DNA, 30 bp, Artificial Sequence
  Synthetic oligonucleotide
gagtatcttcggtttcgactgcggcatgaa

SEQ ID NO: 485750 - DNA, 30 bp, Artificial Sequence
  Synthetic oligonucleotide
atacttgacccttcttccgctggtcatgaa

SEQ ID NO: 485751 - DNA, 30 bp, Artificial Sequence
  Synthetic oligonucleotide
ccatgattgcgcccgccgacgcttcatgaa

SEQ ID NO: 485752 - DNA, 30 bp, Artificial Sequence
  Synthetic oligonucleotide
attctttgtatgcgagagttctttcatgaa

SEQ ID NO: 485753 - DNA, 30 bp, Artificial Sequence
  Synthetic oligonucleotide
agttgaatgacagatttaacaaaagatgaa

SEQ ID NO: 485754 - DNA, 30 bp, Artificial Sequence
  Synthetic oligonucleotide
tcactctcaatgcaatattatcgagatgaa

SEQ ID NO: 485755 - DNA, 30 bp, Artificial Sequence
  Synthetic oligonucleotide
ggtgcgatgggaaaacatttggtagatgaa

SEQ ID NO: 485756 - DNA, 30 bp, Artificial Sequence
  Synthetic oligonucleotide
ataggtcgatacagtgggtgacaggatgaa

SEQ ID NO: 485757 - DNA, 30 bp, Artificial Sequence
  Synthetic oligonucleotide
cgtagagatcgaatccgtccagaggatgaa

SEQ ID NO: 485758 - DNA, 30 bp, Artificial Sequence
  Synthetic oligonucleotide
taactttctttgtctcgacggacggatgaa

SEQ ID NO: 485759 - DNA, 30 bp, Artificial Sequence
  Synthetic oligonucleotide
attattttacctcacataagctaatatgaa

SEQ ID NO: 485760 - DNA, 30 bp, Artificial Sequence
  Synthetic oligonucleotide
gtgtggcggagcgtagctcaacgatatgaa

SEQ ID NO: 485761 - DNA, 30 bp, Artificial Sequence
  Synthetic oligonucleotide
atttttacatcacaattcatggtatatgaa

SEQ ID NO: 485762 - DNA, 30 bp, Artificial Sequence
  Synthetic oligonucleotide
ttcgagtccgtatgttaaggacgctatgaa

SEQ ID NO: 485763 - DNA, 30 bp, Artificial Sequence
  Synthetic oligonucleotide
cagatttcacgcaagggcctgctctatgaa

SEQ ID NO: 485764 - DNA, 30 bp, Artificial Sequence
  Synthetic oligonucleotide
ttttagtaagggtacggctctctaactgaa

SEQ ID NO: 485765 - DNA, 30 bp, Artificial Sequence
  Synthetic oligonucleotide
tttgggcctgccggttggccaaagactgaa

SEQ ID NO: 485766 - DNA, 30 bp, Artificial Sequence
  Synthetic oligonucleotide
agaaagggattcaagggttaccgtactgaa

SEQ ID NO: 485767 - DNA, 30 bp, Artificial Sequence
  Synthetic oligonucleotide
attagtacgtgtttccggagcgaacctgaa

SEQ ID NO: 485768 - DNA, 30 bp, Artificial Sequence
  Synthetic oligonucleotide
ttgattttcacaagtcaagttcgacctgaa

SEQ ID NO: 485769 - DNA, 30 bp, Artificial Sequence
  Synthetic oligonucleotide
acaccgatcggcacgcaatttctacctgaa

SEQ ID NO: 485770 - DNA, 30 bp, Artificial Sequence
  Synthetic oligonucleotide
tgtacaaatggataatagttcacgcctgaa

SEQ ID NO: 485771 - DNA, 30 bp, Artificial Sequence
  Synthetic oligonucleotide
aaattgaaaacgaaagctctggtgcctgaa

SEQ ID NO: 485772 - DNA, 30 bp, Artificial Sequence
  Synthetic oligonucleotide
aaatctgttccgaacgctagatctcctgaa

SEQ ID NO: 485773 - DNA, 30 bp, Artificial Sequence
  Synthetic oligonucleotide
cgtgcagacgcgggcactgggggtcctgaa

SEQ ID NO: 485774 - DNA, 30 bp, Artificial Sequence
  Synthetic oligonucleotide
ctgtcacgaccgcccggacacttcgctgaa

SEQ ID NO: 485775 - DNA, 30 bp, Artificial Sequence
  Synthetic oligonucleotide
ttctgctgtttaggctgaatcgcggctgaa

SEQ ID NO: 485776 - DNA, 30 bp, Artificial Sequence
  Synthetic oligonucleotide
atttggaagagctttaagcattgggctgaa

SEQ ID NO: 485777 - DNA, 30 bp, Artificial Sequence
  Synthetic oligonucleotide
gaaaatcagaggtgaattttcggtgctgaa

SEQ ID NO: 485778 - DNA, 30 bp, Artificial Sequence
  Synthetic oligonucleotide
ccgttgttaccctagtttggatagtctgaa

SEQ ID NO: 485779 - DNA, 29 bp, Artificial Sequence
  Synthetic oligonucleotide
ttttttgtttataatacctggcgtctgaa

SEQ ID NO: 485780 - DNA, 30 bp, Artificial Sequence
  Synthetic oligonucleotide
ctgcagtccacacgatcgaggccaagtgaa

SEQ ID NO: 485781 - DNA, 30 bp, Artificial Sequence
  Synthetic oligonucleotide
acgattctcatagggtccaaaggaagtgaa

SEQ ID NO: 485782 - DNA, 30 bp, Artificial Sequence
  Synthetic oligonucleotide
atttctatatatcctctgcatggaagtgaa

SEQ ID NO: 485783 - DNA, 30 bp, Artificial Sequence
  Synthetic oligonucleotide
actcaggggtttcgtgaaaaaagcagtgaa

SEQ ID NO: 485784 - DNA, 30 bp, Artificial Sequence
  Synthetic oligonucleotide
ctactcatgcttgttcgagcgagcagtgaa

SEQ ID NO: 485785 - DNA, 30 bp, Artificial Sequence
  Synthetic oligonucleotide
ccccatactcttcattatactctcagtgaa

SEQ ID NO: 485786 - DNA, 30 bp, Artificial Sequence
  Synthetic oligonucleotide
ctatgtgtgacagttcagatggagagtgaa

SEQ ID NO: 485787 - DNA, 30 bp, Artificial Sequence
  Synthetic oligonucleotide
gtctctttctagtgcttttcataacgtgaa

SEQ ID NO: 485788 - DNA, 30 bp, Artificial Sequence
  Synthetic oligonucleotide
ctcctattcatctgcggaaacgcacgtgaa

SEQ ID NO: 485789 - DNA, 30 bp, Artificial Sequence
  Synthetic oligonucleotide
aattctggttatcagtagcctagccgtgaa

SEQ ID NO: 485790 - DNA, 30 bp, Artificial Sequence
  Synthetic oligonucleotide
gaattaattaacgataacgacgcgcgtgaa

SEQ ID NO: 485791 - DNA, 30 bp, Artificial Sequence
  Synthetic oligonucleotide
cccacctttgattttactctaaggcgtgaa

SEQ ID NO: 485792 - DNA, 30 bp, Artificial Sequence
  Synthetic oligonucleotide
cattgcatgggcagcttcatcctgcgtgaa

SEQ ID NO: 485793 - DNA, 30 bp, Artificial Sequence
  Synthetic oligonucleotide
ggcgcaggggtgctctcggcgtagggtgaa

SEQ ID NO: 485794 - DNA, 30 bp, Artificial Sequence
  Synthetic oligonucleotide
gcgctggcaaacacctcggctaggggtgaa

SEQ ID NO: 485795 - DNA, 30 bp, Artificial Sequence
  Synthetic oligonucleotide
gaatgacccgtggcattactgagatgtgaa

SEQ ID NO: 485796 - DNA, 30 bp, Artificial Sequence
  Synthetic oligonucleotide
ggctaagtgttgcgacaagaactctgtgaa

SEQ ID NO: 485797 - DNA, 30 bp, Artificial Sequence
  Synthetic oligonucleotide
gagtcgccggtcaaaagacctaagtgtgaa

SEQ ID NO: 485798 - DNA, 30 bp, Artificial Sequence
  Synthetic oligonucleotide
gcagaacgtaagcgcgagtgacggtgtgaa

SEQ ID NO: 485799 - DNA, 30 bp, Artificial Sequence
  Synthetic oligonucleotide
ccgcggcacaccgagagactttattgtgaa

SEQ ID NO: 485800 - DNA, 30 bp, Artificial Sequence
  Synthetic oligonucleotide
taaatggggctttcactttgagcttgtgaa

SEQ ID NO: 485801 - DNA, 30 bp, Artificial Sequence
  Synthetic oligonucleotide
ctgtacgtagggcatacaagtgtaattgaa

SEQ ID NO: 485802 - DNA, 30 bp, Artificial Sequence
  Synthetic oligonucleotide
ttaccttcttcgccggccattttaattgaa

SEQ ID NO: 485803 - DNA, 30 bp, Artificial Sequence
  Synthetic oligonucleotide
tcgccggccgcatcatgctaaaccattgaa

SEQ ID NO: 485804 - DNA, 30 bp, Artificial Sequence
  Synthetic oligonucleotide
gtacttggggctgcggcaatcggcattgaa

SEQ ID NO: 485805 - DNA, 30 bp, Artificial Sequence
  Synthetic oligonucleotide
gaatcataggtaagaattgagcagattgaa

SEQ ID NO: 485806 - DNA, 30 bp, Artificial Sequence
  Synthetic oligonucleotide
ttcaaccgccgttattgcgatctgattgaa

SEQ ID NO: 485807 - DNA, 30 bp, Artificial Sequence
  Synthetic oligonucleotide
acgcccgcgctctgaaggatccctattgaa

SEQ ID NO: 485808 - DNA, 30 bp, Artificial Sequence
  Synthetic oligonucleotide
cctcgtgtctaaatattctataggcttgaa

SEQ ID NO: 485809 - DNA, 30 bp, Artificial Sequence
  Synthetic oligonucleotide
gcgtttggggtactgaatatatggcttgaa

SEQ ID NO: 485810 - DNA, 30 bp, Artificial Sequence
  Synthetic oligonucleotide
aagttttggatctaggcgaacttgcttgaa

SEQ ID NO: 485811 - DNA, 30 bp, Artificial Sequence
  Synthetic oligonucleotide
gccgattaccaagacatattcgatcttgaa

SEQ ID NO: 485812 - DNA, 30 bp, Artificial Sequence
  Synthetic oligonucleotide
ttttgattcgagtacgatgtttatcttgaa

SEQ ID NO: 485813 - DNA, 30 bp, Artificial Sequence
  Synthetic oligonucleotide
gtttttaatcgtataggtcttacagttgaa

SEQ ID NO: 485814 - DNA, 30 bp, Artificial Sequence
  Synthetic oligonucleotide
ggtgggtatctggggtattaaccagttgaa

SEQ ID NO: 485815 - DNA, 30 bp, Artificial Sequence
  Synthetic oligonucleotide
ctcttgcctaggtattttccaagagttgaa

SEQ ID NO: 485816 - DNA, 30 bp, Artificial Sequence
  Synthetic oligonucleotide
gcagtcgagagtagactcagcaacgttgaa

SEQ ID NO: 485817 - DNA, 30 bp, Artificial Sequence
  Synthetic oligonucleotide
gcaaggaactgttatgatccggccgttgaa

SEQ ID NO: 485818 - DNA, 30 bp, Artificial Sequence
  Synthetic oligonucleotide
ccactaatggcacccgcgtcgggcgttgaa

SEQ ID NO: 485819 - DNA, 30 bp, Artificial Sequence
  Synthetic oligonucleotide
ttctaactcaggcgtctaggtatggttgaa

SEQ ID NO: 485820 - DNA, 30 bp, Artificial Sequence
  Synthetic oligonucleotide
tattgacgcgggcatatatcagttgttgaa

SEQ ID NO: 485821 - DNA, 30 bp, Artificial Sequence
  Synthetic oligonucleotide
attgatattacggaccggctgtgctttgaa

SEQ ID NO: 485822 - DNA, 30 bp, Artificial Sequence
  Synthetic oligonucleotide
ccttgtacgacaaggcaataggtctttgaa

SEQ ID NO: 485823 - DNA, 30 bp, Artificial Sequence
  Synthetic oligonucleotide
tagtgctgttctgagaacggacattttgaa

SEQ ID NO: 485824 - DNA, 30 bp, Artificial Sequence
  Synthetic oligonucleotide
ttcccactcatatctggggaaacaaaataa

SEQ ID NO: 485825 - DNA, 30 bp, Artificial Sequence
  Synthetic oligonucleotide
taacctcagggttatcaattaccaaaataa

SEQ ID NO: 485826 - DNA, 30 bp, Artificial Sequence
  Synthetic oligonucleotide
aacgtgctaacgcagacagtttcaaaataa

SEQ ID NO: 485827 - DNA, 30 bp, Artificial Sequence
  Synthetic oligonucleotide
taatatttcgagcctcatagtataaaataa

SEQ ID NO: 485828 - DNA, 30 bp, Artificial Sequence
  Synthetic oligonucleotide
ggctgcagcggaatagccccggacaaataa

SEQ ID NO: 485829 - DNA, 30 bp, Artificial Sequence
  Synthetic oligonucleotide
gatgcataggttaagagaggaagcaaataa

SEQ ID NO: 485830 - DNA, 30 bp, Artificial Sequence
  Synthetic oligonucleotide
tagcggttttttcatcccccaaagaaataa

SEQ ID NO: 485831 - DNA, 30 bp, Artificial Sequence
  Synthetic oligonucleotide
gagattggatgatggagtatgtggaaataa

SEQ ID NO: 485832 - DNA, 30 bp, Artificial Sequence
  Synthetic oligonucleotide
caattatactcaatgtaacggtctaaataa

SEQ ID NO: 485833 - DNA, 30 bp, Artificial Sequence
  Synthetic oligonucleotide
cggatagttaagatcgatcatgaacaataa

SEQ ID NO: 485834 - DNA, 30 bp, Artificial Sequence
  Synthetic oligonucleotide
aataaagcaggggccgtttaaacccaataa

SEQ ID NO: 485835 - DNA, 30 bp, Artificial Sequence
  Synthetic oligonucleotide
tagccctcctgttatatgcgccgccaataa

SEQ ID NO: 485836 - DNA, 30 bp, Artificial Sequence
  Synthetic oligonucleotide
ggtcttagccatgggtcggtgcagcaataa

SEQ ID NO: 485837 - DNA, 30 bp, Artificial Sequence
  Synthetic oligonucleotide
agggataccactcggcaaagaaggcaataa

SEQ ID NO: 485838 - DNA, 30 bp, Artificial Sequence
  Synthetic oligonucleotide
tctatgccttcgaccacagaaatgcaataa

SEQ ID NO: 485839 - DNA, 30 bp, Artificial Sequence
  Synthetic oligonucleotide
aacccgtatgaggttttcctatatcaataa

SEQ ID NO: 485840 - DNA, 30 bp, Artificial Sequence
  Synthetic oligonucleotide
gctctgccattcccaggggaacgtcaataa

SEQ ID NO: 485841 - DNA, 30 bp, Artificial Sequence
  Synthetic oligonucleotide
gccgaaaaaatgcaaataatcgcagaataa

SEQ ID NO: 485842 - DNA, 30 bp, Artificial Sequence
  Synthetic oligonucleotide
agatatttttattaatgtagctaataataa

SEQ ID NO: 485843 - DNA, 30 bp, Artificial Sequence
  Synthetic oligonucleotide
agccatgtgggttcgaacagaccataataa

SEQ ID NO: 485844 - DNA, 30 bp, Artificial Sequence
  Synthetic oligonucleotide
tgtcctcactaacctcatcgcgtataataa

SEQ ID NO: 485845 - DNA, 30 bp, Artificial Sequence
  Synthetic oligonucleotide
agtgaatactttcagggatcggtataataa

SEQ ID NO: 485846 - DNA, 30 bp, Artificial Sequence
  Synthetic oligonucleotide
gggctaatgttcggctcaccggcctaataa

SEQ ID NO: 485847 - DNA, 30 bp, Artificial Sequence
  Synthetic oligonucleotide
gccgccggcatggctaatccggcgtaataa

SEQ ID NO: 485848 - DNA, 30 bp, Artificial Sequence
  Synthetic oligonucleotide
tccactacgtggccgacaagaatgtaataa

SEQ ID NO: 485849 - DNA, 30 bp, Artificial Sequence
  Synthetic oligonucleotide
gcacaggcaaaggacttcccgtattaataa

SEQ ID NO: 485850 - DNA, 30 bp, Artificial Sequence
  Synthetic oligonucleotide
acggaaacgggtactctgaagccaacataa

SEQ ID NO: 485851 - DNA, 30 bp, Artificial Sequence
  Synthetic oligonucleotide
tactggttcggtatgaactaggtaacataa

SEQ ID NO: 485852 - DNA, 30 bp, Artificial Sequence
  Synthetic oligonucleotide
ggtcctcccctgtatccatataggacataa

SEQ ID NO: 485853 - DNA, 30 bp, Artificial Sequence
  Synthetic oligonucleotide
acttgcgtaagatagcccggagggacataa

SEQ ID NO: 485854 - DNA, 30 bp, Artificial Sequence
  Synthetic oligonucleotide
atccgccggcataattaagttagtacataa

SEQ ID NO: 485855 - DNA, 30 bp, Artificial Sequence
  Synthetic oligonucleotide
gcgttctgggacccataatgacgtacataa

SEQ ID NO: 485856 - DNA, 30 bp, Artificial Sequence
  Synthetic oligonucleotide
gaacaattttgggtggcccttggaccataa

SEQ ID NO: 485857 - DNA, 30 bp, Artificial Sequence
  Synthetic oligonucleotide
gcttatgaaatgcgcaagtagctaccataa

SEQ ID NO: 485858 - DNA, 30 bp, Artificial Sequence
  Synthetic oligonucleotide
gttatatgactatgcgagatagtaccataa

SEQ ID NO: 485859 - DNA, 30 bp, Artificial Sequence
  Synthetic oligonucleotide
tacccgcaacaacccggctcaacgccataa

SEQ ID NO: 485860 - DNA, 30 bp, Artificial Sequence
  Synthetic oligonucleotide
tactttagtttttgtagcaattggccataa

SEQ ID NO: 485861 - DNA, 30 bp, Artificial Sequence
  Synthetic oligonucleotide
ttcttaacgataaaacgggtctcagcataa

SEQ ID NO: 485862 - DNA, 30 bp, Artificial Sequence
  Synthetic oligonucleotide
tgggttgttttagtccaatgcatagcataa

SEQ ID NO: 485863 - DNA, 30 bp, Artificial Sequence
  Synthetic oligonucleotide
gcagccccccatagtcgggttgtagcataa

SEQ ID NO: 485864 - DNA, 30 bp, Artificial Sequence
  Synthetic oligonucleotide
ggacacgctgtcatgatgatacccgcataa

SEQ ID NO: 485865 - DNA, 30 bp, Artificial Sequence
  Synthetic oligonucleotide
aacggaaggctagggctgctgaaggcataa

SEQ ID NO: 485866 - DNA, 30 bp, Artificial Sequence
  Synthetic oligonucleotide
gtgatttatccggtggttcgtgctgcataa

SEQ ID NO: 485867 - DNA, 30 bp, Artificial Sequence
  Synthetic oligonucleotide
taccctagagattagtagacggactcataa

SEQ ID NO: 485868 - DNA, 30 bp, Artificial Sequence
  Synthetic oligonucleotide
ctcgactgtgctaggttagatcgctcataa

SEQ ID NO: 485869 - DNA, 30 bp, Artificial Sequence
  Synthetic oligonucleotide
caaaagtattcattgtatcgagcgtcataa

SEQ ID NO: 485870 - DNA, 30 bp, Artificial Sequence
  Synthetic oligonucleotide
gctacacccccggggttgcaaacttcataa

SEQ ID NO: 485871 - DNA, 30 bp, Artificial Sequence
  Synthetic oligonucleotide
gtacgggattccacctgagaatcttcataa

SEQ ID NO: 485872 - DNA, 30 bp, Artificial Sequence
  Synthetic oligonucleotide
ggaattggatgcatctcccttcaaagataa

SEQ ID NO: 485873 - DNA, 30 bp, Artificial Sequence
  Synthetic oligonucleotide
attctgttaattcagtcgagcttaagataa

SEQ ID NO: 485874 - DNA, 30 bp, Artificial Sequence
  Synthetic oligonucleotide
gctgttagtacctgtaaaatattgagataa

SEQ ID NO: 485875 - DNA, 30 bp, Artificial Sequence
  Synthetic oligonucleotide
tcttgcgataggtaccggaactatagataa

SEQ ID NO: 485876 - DNA, 30 bp, Artificial Sequence
  Synthetic oligonucleotide
cagttgtggcacggcaataagggtagataa

SEQ ID NO: 485877 - DNA, 30 bp, Artificial Sequence
  Synthetic oligonucleotide
agtactatattttgactgagctttagataa

SEQ ID NO: 485878 - DNA, 30 bp, Artificial Sequence
  Synthetic oligonucleotide
ctatccgcagcatgttttcaggaacgataa

SEQ ID NO: 485879 - DNA, 30 bp, Artificial Sequence
  Synthetic oligonucleotide
gtaaatacgcagatgctcgtactccgataa

SEQ ID NO: 485880 - DNA, 29 bp, Artificial Sequence
  Synthetic oligonucleotide
tttataatgatggcaatcggctccgataa

SEQ ID NO: 485881 - DNA, 30 bp, Artificial Sequence
  Synthetic oligonucleotide
gggccctgcatacggtacacggagcgataa

SEQ ID NO: 485882 - DNA, 30 bp, Artificial Sequence
  Synthetic oligonucleotide
tgtcacgaggtgcctattggcttgcgataa

SEQ ID NO: 485883 - DNA, 30 bp, Artificial Sequence
  Synthetic oligonucleotide
cctctggtggacaggctaagtagtcgataa

SEQ ID NO: 485884 - DNA, 30 bp, Artificial Sequence
  Synthetic oligonucleotide
gagggcgcatacgaccacgttcgtcgataa

SEQ ID NO: 485885 - DNA, 30 bp, Artificial Sequence
  Synthetic oligonucleotide
taatagctttggggtatacgttgtcgataa

SEQ ID NO: 485886 - DNA, 30 bp, Artificial Sequence
  Synthetic oligonucleotide
tagacccctcctagtgccttgcacggataa

SEQ ID NO: 485887 - DNA, 30 bp, Artificial Sequence
  Synthetic oligonucleotide
gcattccttcctgataccatacccggataa

SEQ ID NO: 485888 - DNA, 30 bp, Artificial Sequence
  Synthetic oligonucleotide
gtcttttaccgtactgtctgttccggataa

SEQ ID NO: 485889 - DNA, 30 bp, Artificial Sequence
  Synthetic oligonucleotide
gaattctatatgtttggtaaatgatgataa

SEQ ID NO: 485890 - DNA, 30 bp, Artificial Sequence
  Synthetic oligonucleotide
catagcttttaggagttacaatcctgataa

SEQ ID NO: 485891 - DNA, 30 bp, Artificial Sequence
  Synthetic oligonucleotide
agcattcctgtggcaacgattctctgataa

SEQ ID NO: 485892 - DNA, 30 bp, Artificial Sequence
  Synthetic oligonucleotide
aaaagtggtacgggccaagttgtttgataa

SEQ ID NO: 485893 - DNA, 30 bp, Artificial Sequence
  Synthetic oligonucleotide
agtttaacaatcccacggccattttgataa

SEQ ID NO: 485894 - DNA, 30 bp, Artificial Sequence
  Synthetic oligonucleotide
tggccgccagcactaggtaatacaatataa

SEQ ID NO: 485895 - DNA, 30 bp, Artificial Sequence
  Synthetic oligonucleotide
gcagctaagcaattatatcgtgcaatataa

SEQ ID NO: 485896 - DNA, 30 bp, Artificial Sequence
  Synthetic oligonucleotide
atttaagcgatcgaggtttggtcaatataa

SEQ ID NO: 485897 - DNA, 30 bp, Artificial Sequence
  Synthetic oligonucleotide
cggtcgctagttattagatgtggcatataa

SEQ ID NO: 485898 - DNA, 30 bp, Artificial Sequence
  Synthetic oligonucleotide
cgccaaagtagggccggcttcgtcatataa

SEQ ID NO: 485899 - DNA, 30 bp, Artificial Sequence
  Synthetic oligonucleotide
aaatctgttggataattgcggaagatataa

SEQ ID NO: 485900 - DNA, 30 bp, Artificial Sequence
  Synthetic oligonucleotide
aactcataacaccaataaccgtgactataa

SEQ ID NO: 485901 - DNA, 30 bp, Artificial Sequence
  Synthetic oligonucleotide
tctaataacaacacgtttaggccgctataa

SEQ ID NO: 485902 - DNA, 30 bp, Artificial Sequence
  Synthetic oligonucleotide
attgtcaacggcggctatgattaagtataa

SEQ ID NO: 485903 - DNA, 30 bp, Artificial Sequence
  Synthetic oligonucleotide
agagacacgctgttggttgcaccagtataa

SEQ ID NO: 485904 - DNA, 30 bp, Artificial Sequence
  Synthetic oligonucleotide
taacatctgagtgttaagaaattagtataa

SEQ ID NO: 485905 - DNA, 30 bp, Artificial Sequence
  Synthetic oligonucleotide
tctacacctcgttcttgctgcggcgtataa

SEQ ID NO: 485906 - DNA, 30 bp, Artificial Sequence
  Synthetic oligonucleotide
tttcctgctgactatatacgggaggtataa

SEQ ID NO: 485907 - DNA, 30 bp, Artificial Sequence
  Synthetic oligonucleotide
cgtttttataatagccggctcgatgtataa

SEQ ID NO: 485908 - DNA, 30 bp, Artificial Sequence
  Synthetic oligonucleotide
aatctgcttcagctgtccgcatctgtataa

SEQ ID NO: 485909 - DNA, 30 bp, Artificial Sequence
  Synthetic oligonucleotide
atgtgatgtttactaagagtttctgtataa

SEQ ID NO: 485910 - DNA, 30 bp, Artificial Sequence
  Synthetic oligonucleotide
aaccctcttctactgcttgttaaattataa

SEQ ID NO: 485911 - DNA, 30 bp, Artificial Sequence
  Synthetic oligonucleotide
tgtaacgcattaaatggaaccccattataa

SEQ ID NO: 485912 - DNA, 30 bp, Artificial Sequence
  Synthetic oligonucleotide
aagtagttagcaatgttagctcgattataa

SEQ ID NO: 485913 - DNA, 30 bp, Artificial Sequence
  Synthetic oligonucleotide
ccttacacctcgaaggtaggcggattataa

SEQ ID NO: 485914 - DNA, 30 bp, Artificial Sequence
  Synthetic oligonucleotide
ctctgtgcgatccagggccctgacttataa

SEQ ID NO: 485915 - DNA, 30 bp, Artificial Sequence
  Synthetic oligonucleotide
gcgtgagtccctccggcatagcggttataa

SEQ ID NO: 485916 - DNA, 30 bp, Artificial Sequence
  Synthetic oligonucleotide
gatattcatccttgtacggtccatttataa

SEQ ID NO: 485917 - DNA, 30 bp, Artificial Sequence
  Synthetic oligonucleotide
tgggtatgaagcggccaaaaacttttataa

SEQ ID NO: 485918 - DNA, 30 bp, Artificial Sequence
  Synthetic oligonucleotide
ttttttccgggatacacggttagaaactaa

SEQ ID NO: 485919 - DNA, 30 bp, Artificial Sequence
  Synthetic oligonucleotide
gaatggtcagcaggctgtgagttaaactaa

SEQ ID NO: 485920 - DNA, 30 bp, Artificial Sequence
  Synthetic oligonucleotide
cgcgttgcgagcctacggcgcaacaactaa

SEQ ID NO: 485921 - DNA, 30 bp, Artificial Sequence
  Synthetic oligonucleotide
ggatgccgaatgtaggaaacgtacaactaa

SEQ ID NO: 485922 - DNA, 30 bp, Artificial Sequence
  Synthetic oligonucleotide
gttgttcatcatcgcggtgagaccaactaa

SEQ ID NO: 485923 - DNA, 30 bp, Artificial Sequence
  Synthetic oligonucleotide
cttagaagacatgacggctttaataactaa

SEQ ID NO: 485924 - DNA, 30 bp, Artificial Sequence
  Synthetic oligonucleotide
ttctgaatattgcgccataacgcccactaa

SEQ ID NO: 485925 - DNA, 30 bp, Artificial Sequence
  Synthetic oligonucleotide
cagctttgtgttccctacgggtcgcactaa

SEQ ID NO: 485926 - DNA, 30 bp, Artificial Sequence
  Synthetic oligonucleotide
aatcttccaacccagcatcgtcgtcactaa

SEQ ID NO: 485927 - DNA, 30 bp, Artificial Sequence
  Synthetic oligonucleotide
atgcttataccacaggagcaggaagactaa

SEQ ID NO: 485928 - DNA, 30 bp, Artificial Sequence
  Synthetic oligonucleotide
gtagttgagttcaattgtttttaagactaa

SEQ ID NO: 485929 - DNA, 30 bp, Artificial Sequence
  Synthetic oligonucleotide
aggatgtggggtcattctagtgccgactaa

SEQ ID NO: 485930 - DNA, 30 bp, Artificial Sequence
  Synthetic oligonucleotide
gcccatttatatcctcacgcatgggactaa

SEQ ID NO: 485931 - DNA, 30 bp, Artificial Sequence
  Synthetic oligonucleotide
ggatccctgaggttgaggggaatggactaa

SEQ ID NO: 485932 - DNA, 30 bp, Artificial Sequence
  Synthetic oligonucleotide
gacgtataaatcaggatggcattggactaa

SEQ ID NO: 485933 - DNA, 30 bp, Artificial Sequence
  Synthetic oligonucleotide
caagttttgcgagatgtagcataatactaa

SEQ ID NO: 485934 - DNA, 30 bp, Artificial Sequence
  Synthetic oligonucleotide
cttcttaaaatgtggtgacccagctactaa

SEQ ID NO: 485935 - DNA, 30 bp, Artificial Sequence
  Synthetic oligonucleotide
ttcccgtaaagcaacatctaggtctactaa

SEQ ID NO: 485936 - DNA, 30 bp, Artificial Sequence
  Synthetic oligonucleotide
tcattttaccgtaggagcctcacaacctaa

SEQ ID NO: 485937 - DNA, 30 bp, Artificial Sequence
  Synthetic oligonucleotide
ggggcgtgcgctctaccatggacaacctaa

SEQ ID NO: 485938 - DNA, 30 bp, Artificial Sequence
  Synthetic oligonucleotide
catttaggtcaacggagtaatgcgacctaa

SEQ ID NO: 485939 - DNA, 30 bp, Artificial Sequence
  Synthetic oligonucleotide
tgctatagttgttatacgcttcatacctaa

SEQ ID NO: 485940 - DNA, 30 bp, Artificial Sequence
  Synthetic oligonucleotide
tgctagaacgcacgcacgcaacgaccctaa

SEQ ID NO: 485941 - DNA, 30 bp, Artificial Sequence
  Synthetic oligonucleotide
ttgcgatggcgacgtgtgtagggaccctaa

SEQ ID NO: 485942 - DNA, 30 bp, Artificial Sequence
  Synthetic oligonucleotide
ctgtattccccaggcctccaaatcccctaa

SEQ ID NO: 485943 - DNA, 30 bp, Artificial Sequence
  Synthetic oligonucleotide
tctattagtttactcatatcgtagccctaa

SEQ ID NO: 485944 - DNA, 30 bp, Artificial Sequence
  Synthetic oligonucleotide
tgctcggcagggggcccgggttagccctaa

SEQ ID NO: 485945 - DNA, 30 bp, Artificial Sequence
  Synthetic oligonucleotide
acccgttatacattaccgctggatccctaa

SEQ ID NO: 485946 - DNA, 30 bp, Artificial Sequence
  Synthetic oligonucleotide
ccgtacttcgcacataacgctggtccctaa

SEQ ID NO: 485947 - DNA, 30 bp, Artificial Sequence
  Synthetic oligonucleotide
ttaatcttactcaacgagctgcaagcctaa

SEQ ID NO: 485948 - DNA, 30 bp, Artificial Sequence
  Synthetic oligonucleotide
tatattcccagaggattatatcccgcctaa

SEQ ID NO: 485949 - DNA, 30 bp, Artificial Sequence
  Synthetic oligonucleotide
gtcccccgccatggctagcttagctcctaa

SEQ ID NO: 485950 - DNA, 30 bp, Artificial Sequence
  Synthetic oligonucleotide
tgctcctggagatccaggtgcaagtcctaa

SEQ ID NO: 485951 - DNA, 30 bp, Artificial Sequence
  Synthetic oligonucleotide
tgcccgcgtgcagcagtcatcaagtcctaa

SEQ ID NO: 485952 - DNA, 30 bp, Artificial Sequence
  Synthetic oligonucleotide
cttcttcaatttggcacatatcggtcctaa

SEQ ID NO: 485953 - DNA, 30 bp, Artificial Sequence
  Synthetic oligonucleotide
gggaaccgacgcctgttgggagattcctaa

SEQ ID NO: 485954 - DNA, 30 bp, Artificial Sequence
  Synthetic oligonucleotide
cgtctatccgcttcgtcgggaagttcctaa

SEQ ID NO: 485955 - DNA, 30 bp, Artificial Sequence
  Synthetic oligonucleotide
tccgtttttaaggcattacaaaaaagctaa

SEQ ID NO: 485956 - DNA, 30 bp, Artificial Sequence
  Synthetic oligonucleotide
tgggttcccttcgccattagggcaagctaa

SEQ ID NO: 485957 - DNA, 30 bp, Artificial Sequence
  Synthetic oligonucleotide
tttgagcatattataaatatggctagctaa

SEQ ID NO: 485958 - DNA, 30 bp, Artificial Sequence
  Synthetic oligonucleotide
aaaatgttttgaagggtctgaagacgctaa

SEQ ID NO: 485959 - DNA, 30 bp, Artificial Sequence
  Synthetic oligonucleotide
gaagtaataccctatcagtcacatcgctaa

SEQ ID NO: 485960 - DNA, 30 bp, Artificial Sequence
  Synthetic oligonucleotide
gactcgaacgcgggtttgcatgatcgctaa

SEQ ID NO: 485961 - DNA, 30 bp, Artificial Sequence
  Synthetic oligonucleotide
attggggagttgttggggcgttatcgctaa

SEQ ID NO: 485962 - DNA, 30 bp, Artificial Sequence
  Synthetic oligonucleotide
cccgcatccgcacggctacttccaggctaa

SEQ ID NO: 485963 - DNA, 30 bp, Artificial Sequence
  Synthetic oligonucleotide
caccatatgtgatcagatttcaagggctaa

SEQ ID NO: 485964 - DNA, 30 bp, Artificial Sequence
  Synthetic oligonucleotide
ctaaacagtcagaggtctgttgtgggctaa

SEQ ID NO: 485965 - DNA, 30 bp, Artificial Sequence
  Synthetic oligonucleotide
gttaataaaaatctatggacctaatgctaa

SEQ ID NO: 485966 - DNA, 30 bp, Artificial Sequence
  Synthetic oligonucleotide
gccgctacaggtacgcatattccatgctaa

SEQ ID NO: 485967 - DNA, 30 bp, Artificial Sequence
  Synthetic oligonucleotide
ttcgagacgcatcatgacggcatatgctaa

SEQ ID NO: 485968 - DNA, 30 bp, Artificial Sequence
  Synthetic oligonucleotide
agtgaacgctcagatcacgattactgctaa

SEQ ID NO: 485969 - DNA, 30 bp, Artificial Sequence
  Synthetic oligonucleotide
tcggcatttttatatgtttggcgctgctaa

SEQ ID NO: 485970 - DNA, 30 bp, Artificial Sequence
  Synthetic oligonucleotide
aaagacgtctgatgagctagagattgctaa

SEQ ID NO: 485971 - DNA, 30 bp, Artificial Sequence
  Synthetic oligonucleotide
tccagcattcttcccatcgaaagttgctaa

SEQ ID NO: 485972 - DNA, 30 bp, Artificial Sequence
  Synthetic oligonucleotide
tttgggtatatttatagactataaatctaa

SEQ ID NO: 485973 - DNA, 30 bp, Artificial Sequence
  Synthetic oligonucleotide
cttctcaggcggggtagcaactgaatctaa

SEQ ID NO: 485974 - DNA, 30 bp, Artificial Sequence
  Synthetic oligonucleotide
ttacctgatcgatctaggatgcacatctaa

SEQ ID NO: 485975 - DNA, 30 bp, Artificial Sequence
  Synthetic oligonucleotide
taccttttcaaatacacgggctagatctaa

SEQ ID NO: 485976 - DNA, 30 bp, Artificial Sequence
  Synthetic oligonucleotide
cattggtgtatcacctgaactaatatctaa

SEQ ID NO: 485977 - DNA, 30 bp, Artificial Sequence
  Synthetic oligonucleotide
attcccactttcaactgaaggcgtatctaa

SEQ ID NO: 485978 - DNA, 30 bp, Artificial Sequence
  Synthetic oligonucleotide
tcataggaacgcatctactcagttatctaa

SEQ ID NO: 485979 - DNA, 30 bp, Artificial Sequence
  Synthetic oligonucleotide
attaacggttaaagaatatgctttatctaa

SEQ ID NO: 485980 - DNA, 30 bp, Artificial Sequence
  Synthetic oligonucleotide
ttaaactagtgcttgataatctaactctaa

SEQ ID NO: 485981 - DNA, 30 bp, Artificial Sequence
  Synthetic oligonucleotide
tgaaaccttactagagcgtcggtactctaa

SEQ ID NO: 485982 - DNA, 30 bp, Artificial Sequence
  Synthetic oligonucleotide
caggatttcagtgttgccggggtactctaa

SEQ ID NO: 485983 - DNA, 30 bp, Artificial Sequence
  Synthetic oligonucleotide
gccgatcactaccggcgcagaatcctctaa

SEQ ID NO: 485984 - DNA, 30 bp, Artificial Sequence
  Synthetic oligonucleotide
cgtctctgcggttcaaacacgctcctctaa

SEQ ID NO: 485985 - DNA, 30 bp, Artificial Sequence
  Synthetic oligonucleotide
ccgggcctagagttatattggctgctctaa

SEQ ID NO: 485986 - DNA, 30 bp, Artificial Sequence
  Synthetic oligonucleotide
gcctttatgaatgtagagaggttgctctaa

SEQ ID NO: 485987 - DNA, 30 bp, Artificial Sequence
  Synthetic oligonucleotide
aatctcaacgaagtgttaaagaatctctaa

SEQ ID NO: 485988 - DNA, 30 bp, Artificial Sequence
  Synthetic oligonucleotide
ggcacttcgtgagatatattggatctctaa

SEQ ID NO: 485989 - DNA, 30 bp, Artificial Sequence
  Synthetic oligonucleotide
agcgcattcaatgagtgggcgatagtctaa

SEQ ID NO: 485990 - DNA, 30 bp, Artificial Sequence
  Synthetic oligonucleotide
tattctgcctccttttgaggattagtctaa

SEQ ID NO: 485991 - DNA, 30 bp, Artificial Sequence
  Synthetic oligonucleotide
cactgctatccctggtaagtgagcgtctaa

SEQ ID NO: 485992 - DNA, 30 bp, Artificial Sequence
  Synthetic oligonucleotide
cagtttggacctcggatagacaatgtctaa

SEQ ID NO: 485993 - DNA, 30 bp, Artificial Sequence
  Synthetic oligonucleotide
ttgacaatatcgcacaaagggtatgtctaa

SEQ ID NO: 485994 - DNA, 30 bp, Artificial Sequence
  Synthetic oligonucleotide
cttcgcaatgtgttttataataaattctaa

SEQ ID NO: 485995 - DNA, 30 bp, Artificial Sequence
  Synthetic oligonucleotide
gtcgcctccttcattttgagtaaattctaa

SEQ ID NO: 485996 - DNA, 30 bp, Artificial Sequence
  Synthetic oligonucleotide
acgaataaacgacggtcggttaaattctaa

SEQ ID NO: 485997 - DNA, 31 bp, Artificial Sequence
  Synthetic oligonucleotide
gtggcctttcgtacagaatcgggaattctaa

SEQ ID NO: 485998 - DNA, 30 bp, Artificial Sequence
  Synthetic oligonucleotide
gtgacacataatttcgcatgataattctaa

SEQ ID NO: 485999 - DNA, 30 bp, Artificial Sequence
  Synthetic oligonucleotide
ttaagaagtaacatggctgcagtattctaa

SEQ ID NO: 486000 - DNA, 30 bp, Artificial Sequence
  Synthetic oligonucleotide
ccgacttacttattgccgtagaacttctaa

SEQ ID NO: 486001 - DNA, 30 bp, Artificial Sequence
  Synthetic oligonucleotide
atttcatccatctcgaatggtgacttctaa

SEQ ID NO: 486002 - DNA, 30 bp, Artificial Sequence
  Synthetic oligonucleotide
cacgcgcattaagtgtcgtgactgttctaa

SEQ ID NO: 486003 - DNA, 30 bp, Artificial Sequence
  Synthetic oligonucleotide
ctaaaggaattgcccgttagcgttttctaa

SEQ ID NO: 486004 - DNA, 30 bp, Artificial Sequence
  Synthetic oligonucleotide
tcatgtcatgtgtgagttatttttttctaa

SEQ ID NO: 486005 - DNA, 30 bp, Artificial Sequence
  Synthetic oligonucleotide
actataacttcacgccgacgaggaaagtaa

SEQ ID NO: 486006 - DNA, 30 bp, Artificial Sequence
  Synthetic oligonucleotide
gttgttgtcagtgccaggcgtcgcaagtaa

SEQ ID NO: 486007 - DNA, 30 bp, Artificial Sequence
  Synthetic oligonucleotide
atcaggtcttccttcgggaagtttaagtaa

SEQ ID NO: 486008 - DNA, 30 bp, Artificial Sequence
  Synthetic oligonucleotide
tcttggcctagcggacagctgacacagtaa

SEQ ID NO: 486009 - DNA, 30 bp, Artificial Sequence
  Synthetic oligonucleotide
tgaacccgccattggagcaaaggacagtaa

SEQ ID NO: 486010 - DNA, 30 bp, Artificial Sequence
  Synthetic oligonucleotide
gtcgtgtaagagcaaaacaagtaccagtaa

SEQ ID NO: 486011 - DNA, 30 bp, Artificial Sequence
  Synthetic oligonucleotide
tgatcgcgaacgtacctgcgtctgcagtaa

SEQ ID NO: 486012 - DNA, 30 bp, Artificial Sequence
  Synthetic oligonucleotide
ggttcaattacgggacttatgttgcagtaa

SEQ ID NO: 486013 - DNA, 30 bp, Artificial Sequence
  Synthetic oligonucleotide
atccggttcaagggtatgacgcctcagtaa

SEQ ID NO: 486014 - DNA, 30 bp, Artificial Sequence
  Synthetic oligonucleotide
caccaaataactccacgtctttttcagtaa

SEQ ID NO: 486015 - DNA, 30 bp, Artificial Sequence
  Synthetic oligonucleotide
ttttcgtcactgtggtctctaaacgagtaa

SEQ ID NO: 486016 - DNA, 30 bp, Artificial Sequence
  Synthetic oligonucleotide
ttcgttgtacaaagtaagcttgacgagtaa

SEQ ID NO: 486017 - DNA, 30 bp, Artificial Sequence
  Synthetic oligonucleotide
tgccgtggatgtcctggagagctcgagtaa

SEQ ID NO: 486018 - DNA, 30 bp, Artificial Sequence
  Synthetic oligonucleotide
tgttgcatatttagtgtagtgatggagtaa

SEQ ID NO: 486019 - DNA, 30 bp, Artificial Sequence
  Synthetic oligonucleotide
ggttggcactgtaactcaggtaatgagtaa

SEQ ID NO: 486020 - DNA, 30 bp, Artificial Sequence
  Synthetic oligonucleotide
tcgagccgaatgtgtgcttcctatgagtaa

SEQ ID NO: 486021 - DNA, 30 bp, Artificial Sequence
  Synthetic oligonucleotide
actttttgtatttacggccttgaatagtaa

SEQ ID NO: 486022 - DNA, 30 bp, Artificial Sequence
  Synthetic oligonucleotide
gaactatctacggctataagcagatagtaa

SEQ ID NO: 486023 - DNA, 30 bp, Artificial Sequence
  Synthetic oligonucleotide
catttaaccatggtagggagcatatagtaa

SEQ ID NO: 486024 - DNA, 30 bp, Artificial Sequence
  Synthetic oligonucleotide
gagttaaaaagacggacgtcgttatagtaa

SEQ ID NO: 486025 - DNA, 30 bp, Artificial Sequence
  Synthetic oligonucleotide
accatttaggctatggataaagtttagtaa

SEQ ID NO: 486026 - DNA, 30 bp, Artificial Sequence
  Synthetic oligonucleotide
gaatgagaaagtcgcttttgcggaacgtaa

SEQ ID NO: 486027 - DNA, 30 bp, Artificial Sequence
  Synthetic oligonucleotide
gacaaaacgttagacacacttataacgtaa

SEQ ID NO: 486028 - DNA, 30 bp, Artificial Sequence
  Synthetic oligonucleotide
atttcacaggtgatttatcgtcgcacgtaa

SEQ ID NO: 486029 - DNA, 30 bp, Artificial Sequence
  Synthetic oligonucleotide
taataatcttttaaaggtagatctacgtaa

SEQ ID NO: 486030 - DNA, 30 bp, Artificial Sequence
  Synthetic oligonucleotide
ttcagcgtatatgtcagacagattacgtaa

SEQ ID NO: 486031 - DNA, 30 bp, Artificial Sequence
  Synthetic oligonucleotide
ggaaagatctaggccaccaaatccccgtaa

SEQ ID NO: 486032 - DNA, 30 bp, Artificial Sequence
  Synthetic oligonucleotide
tgactaatccaggggcgctggacgccgtaa

SEQ ID NO: 486033 - DNA, 30 bp, Artificial Sequence
  Synthetic oligonucleotide
ttaccctgtattatttacaggaatccgtaa

SEQ ID NO: 486034 - DNA, 30 bp, Artificial Sequence
  Synthetic oligonucleotide
ggcaacaacggaggacattatcctccgtaa

SEQ ID NO: 486035 - DNA, 30 bp, Artificial Sequence
  Synthetic oligonucleotide
ttccggattagctgggactcgtacgcgtaa

SEQ ID NO: 486036 - DNA, 30 bp, Artificial Sequence
  Synthetic oligonucleotide
ggattatatagatgttcacacagcgcgtaa

SEQ ID NO: 486037 - DNA, 30 bp, Artificial Sequence
  Synthetic oligonucleotide
gacatcgggagtaccccgatgcgggcgtaa

SEQ ID NO: 486038 - DNA, 30 bp, Artificial Sequence
  Synthetic oligonucleotide
gctactgatcatagggcaagtcgatcgtaa

SEQ ID NO: 486039 - DNA, 30 bp, Artificial Sequence
  Synthetic oligonucleotide
acgagtttacgatggaaagacgtatcgtaa

SEQ ID NO: 486040 - DNA, 30 bp, Artificial Sequence
  Synthetic oligonucleotide
aagcagatagcgtttacatcgtgctcgtaa

SEQ ID NO: 486041 - DNA, 30 bp, Artificial Sequence
  Synthetic oligonucleotide
taaagatggcgtttgttactgttctcgtaa

SEQ ID NO: 486042 - DNA, 30 bp, Artificial Sequence
  Synthetic oligonucleotide
aaaactttttacctgtggtacatgtcgtaa

SEQ ID NO: 486043 - DNA, 30 bp, Artificial Sequence
  Synthetic oligonucleotide
tagactcaaggattcagttcatcttcgtaa

SEQ ID NO: 486044 - DNA, 30 bp, Artificial Sequence
  Synthetic oligonucleotide
gaaaggtccactgagcaggagtaaaggtaa

SEQ ID NO: 486045 - DNA, 30 bp, Artificial Sequence
  Synthetic oligonucleotide
gagttttgaacgggtcctaacagcaggtaa

SEQ ID NO: 486046 - DNA, 30 bp, Artificial Sequence
  Synthetic oligonucleotide
gttgacctacaattgaaccggagcaggtaa

SEQ ID NO: 486047 - DNA, 30 bp, Artificial Sequence
  Synthetic oligonucleotide
aacttatacgtgttgcccaagggcaggtaa

SEQ ID NO: 486048 - DNA, 30 bp, Artificial Sequence
  Synthetic oligonucleotide
aagtactcatatgatgtattagtcaggtaa

SEQ ID NO: 486049 - DNA, 30 bp, Artificial Sequence
  Synthetic oligonucleotide
acaatgttccacgtacctttacagaggtaa

SEQ ID NO: 486050 - DNA, 30 bp, Artificial Sequence
  Synthetic oligonucleotide
gcttttgatgcctccgacaaaatgaggtaa

SEQ ID NO: 486051 - DNA, 30 bp, Artificial Sequence
  Synthetic oligonucleotide
cggtgttacctcacttcttgcctgaggtaa

SEQ ID NO: 486052 - DNA, 29 bp, Artificial Sequence
  Synthetic oligonucleotide
ccccgcagaatcgtttgcatctgaggtaa

SEQ ID NO: 486053 - DNA, 30 bp, Artificial Sequence
  Synthetic oligonucleotide
aagttccaaacgaggtagcatgtgaggtaa

SEQ ID NO: 486054 - DNA, 30 bp, Artificial Sequence
  Synthetic oligonucleotide
ataacctttttgaaactaaccttgaggtaa

SEQ ID NO: 486055 - DNA, 30 bp, Artificial Sequence
  Synthetic oligonucleotide
tcggcttaaccacgtcagcggacacggtaa

SEQ ID NO: 486056 - DNA, 30 bp, Artificial Sequence
  Synthetic oligonucleotide
cgctttagaagtgagaatgatatacggtaa

SEQ ID NO: 486057 - DNA, 30 bp, Artificial Sequence
  Synthetic oligonucleotide
caaaatttggaagcggttgttacgcggtaa

SEQ ID NO: 486058 - DNA, 30 bp, Artificial Sequence
  Synthetic oligonucleotide
ggatctacaggccgattttccaatcggtaa

SEQ ID NO: 486059 - DNA, 30 bp, Artificial Sequence
  Synthetic oligonucleotide
agagtcttacataaatgggtaagcgggtaa

SEQ ID NO: 486060 - DNA, 30 bp, Artificial Sequence
  Synthetic oligonucleotide
tggcgcagcacctagtcaggtcgcgggtaa

SEQ ID NO: 486061 - DNA, 30 bp, Artificial Sequence
  Synthetic oligonucleotide
attagccataactttctatgggcggggtaa

SEQ ID NO: 486062 - DNA, 30 bp, Artificial Sequence
  Synthetic oligonucleotide
ttgccaggttgtcgaggcggttgggggtaa

SEQ ID NO: 486063 - DNA, 30 bp, Artificial Sequence
  Synthetic oligonucleotide
gattagccacccagtcgagaacctgggtaa

SEQ ID NO: 486064 - DNA, 30 bp, Artificial Sequence
  Synthetic oligonucleotide
gaatcaaacagtttttacaatcctgggtaa

SEQ ID NO: 486065 - DNA, 30 bp, Artificial Sequence
  Synthetic oligonucleotide
gcctcaatttttggtgcctactttgggtaa

SEQ ID NO: 486066 - DNA, 30 bp, Artificial Sequence
  Synthetic oligonucleotide
tacgtagccattatagcgccctggtggtaa

SEQ ID NO: 486067 - DNA, 30 bp, Artificial Sequence
  Synthetic oligonucleotide
ccaaatgcgcacgttaacgcagattggtaa

SEQ ID NO: 486068 - DNA, 30 bp, Artificial Sequence
  Synthetic oligonucleotide
tgattggagacatcgcttataatttggtaa

SEQ ID NO: 486069 - DNA, 30 bp, Artificial Sequence
  Synthetic oligonucleotide
cgatgagtacaaaagcgtgaacccatgtaa

SEQ ID NO: 486070 - DNA, 30 bp, Artificial Sequence
  Synthetic oligonucleotide
ataggtaataacgccgcgcataatatgtaa

SEQ ID NO: 486071 - DNA, 30 bp, Artificial Sequence
  Synthetic oligonucleotide
gttcttgaatattcgcgaaacgctatgtaa

SEQ ID NO: 486072 - DNA, 30 bp, Artificial Sequence
  Synthetic oligonucleotide
tacagcgttctaactttatcatctatgtaa

SEQ ID NO: 486073 - DNA, 30 bp, Artificial Sequence
  Synthetic oligonucleotide
gctgacgcgcagcactcttggattatgtaa

SEQ ID NO: 486074 - DNA, 31 bp, Artificial Sequence
  Synthetic oligonucleotide
gagcacttcgttgtcgtatcaacttatgtaa

SEQ ID NO: 486075 - DNA, 30 bp, Artificial Sequence
  Synthetic oligonucleotide
atgaacaaatacgtttgcgctcttatgtaa

SEQ ID NO: 486076 - DNA, 30 bp, Artificial Sequence
  Synthetic oligonucleotide
aacgaggcattttctatgcgagttatgtaa

SEQ ID NO: 486077 - DNA, 30 bp, Artificial Sequence
  Synthetic oligonucleotide
cgagattcaggtttctcacaaaaactgtaa

SEQ ID NO: 486078 - DNA, 30 bp, Artificial Sequence
  Synthetic oligonucleotide
ggtgtaaatatcttcgtacgcggcctgtaa

SEQ ID NO: 486079 - DNA, 30 bp, Artificial Sequence
  Synthetic oligonucleotide
gcgctggtatgggtccttggtccgctgtaa

SEQ ID NO: 486080 - DNA, 30 bp, Artificial Sequence
  Synthetic oligonucleotide
taaatttatacctaactgaatgttctgtaa

SEQ ID NO: 486081 - DNA, 30 bp, Artificial Sequence
  Synthetic oligonucleotide
cccccatgtcgcagactatccgaagtgtaa

SEQ ID NO: 486082 - DNA, 30 bp, Artificial Sequence
  Synthetic oligonucleotide
gctctaaaataaattttattcacagtgtaa

SEQ ID NO: 486083 - DNA, 30 bp, Artificial Sequence
  Synthetic oligonucleotide
agctctatatctctccacttaaccgtgtaa

SEQ ID NO: 486084 - DNA, 30 bp, Artificial Sequence
  Synthetic oligonucleotide
aacttttagtggatccagcgacccgtgtaa

SEQ ID NO: 486085 - DNA, 30 bp, Artificial Sequence
  Synthetic oligonucleotide
gcattcacgatagggatgattgtcgtgtaa

SEQ ID NO: 486086 - DNA, 30 bp, Artificial Sequence
  Synthetic oligonucleotide
aacacttctgttgtggcacatacggtgtaa

SEQ ID NO: 486087 - DNA, 30 bp, Artificial Sequence
  Synthetic oligonucleotide
aatcccggttatgcatatgcaagggtgtaa

SEQ ID NO: 486088 - DNA, 30 bp, Artificial Sequence
  Synthetic oligonucleotide
aatgtgcataaagtgtatcgttgggtgtaa

SEQ ID NO: 486089 - DNA, 30 bp, Artificial Sequence
  Synthetic oligonucleotide
gctattttacttccccctcagggtgtgtaa

SEQ ID NO: 486090 - DNA, 30 bp, Artificial Sequence
  Synthetic oligonucleotide
gtatgcctacggctctatgtacttgtgtaa

SEQ ID NO: 486091 - DNA, 30 bp, Artificial Sequence
  Synthetic oligonucleotide
agtatcaatagagtcccgatctttgtgtaa

SEQ ID NO: 486092 - DNA, 30 bp, Artificial Sequence
  Synthetic oligonucleotide
atgtcatctggactgttttttcaattgtaa

SEQ ID NO: 486093 - DNA, 30 bp, Artificial Sequence
  Synthetic oligonucleotide
tgatgcagtcacgccaaccagggattgtaa

SEQ ID NO: 486094 - DNA, 30 bp, Artificial Sequence
  Synthetic oligonucleotide
cggtctgtcacagaagtgtcgggattgtaa

SEQ ID NO: 486095 - DNA, 30 bp, Artificial Sequence
  Synthetic oligonucleotide
ggagtcacaatgccctccagggtattgtaa

SEQ ID NO: 486096 - DNA, 30 bp, Artificial Sequence
  Synthetic oligonucleotide
atgaaccttcctgttgcggaaaacttgtaa

SEQ ID NO: 486097 - DNA, 30 bp, Artificial Sequence
  Synthetic oligonucleotide
tgagctttttgcctcaacgaaaccttgtaa

SEQ ID NO: 486098 - DNA, 30 bp, Artificial Sequence
  Synthetic oligonucleotide
aaaatgacgtgccataagtagtggttgtaa

SEQ ID NO: 486099 - DNA, 30 bp, Artificial Sequence
  Synthetic oligonucleotide
gcacacacactgctcagatcacctttgtaa

SEQ ID NO: 486100 - DNA, 30 bp, Artificial Sequence
  Synthetic oligonucleotide
gacattcctgggttgtcgggagctttgtaa

SEQ ID NO: 486101 - DNA, 30 bp, Artificial Sequence
  Synthetic oligonucleotide
ggcagtacacgattttctcgaattttgtaa

SEQ ID NO: 486102 - DNA, 30 bp, Artificial Sequence
  Synthetic oligonucleotide
aaaggtccggtcaggaccatcgttttgtaa

SEQ ID NO: 486103 - DNA, 30 bp, Artificial Sequence
  Synthetic oligonucleotide
aatcccaatcgctgacttcccccaaattaa

SEQ ID NO: 486104 - DNA, 30 bp, Artificial Sequence
  Synthetic oligonucleotide
gctgggttacacacgtgaccagcaaattaa

SEQ ID NO: 486105 - DNA, 30 bp, Artificial Sequence
  Synthetic oligonucleotide
gtaaagtactataatgatggaagaaattaa

SEQ ID NO: 486106 - DNA, 30 bp, Artificial Sequence
  Synthetic oligonucleotide
gtctccttgtactttgcgcgagccaattaa

SEQ ID NO: 486107 - DNA, 30 bp, Artificial Sequence
  Synthetic oligonucleotide
aaactccacccgcttccacgaggcaattaa

SEQ ID NO: 486108 - DNA, 30 bp, Artificial Sequence
  Synthetic oligonucleotide
gccgaccagcggctgacgggctcgaattaa

SEQ ID NO: 486109 - DNA, 30 bp, Artificial Sequence
  Synthetic oligonucleotide
ggaactaggcgagaacactacgctaattaa

SEQ ID NO: 486110 - DNA, 30 bp, Artificial Sequence
  Synthetic oligonucleotide
ggatccgacacgtcatcgtctcaacattaa

SEQ ID NO: 486111 - DNA, 30 bp, Artificial Sequence
  Synthetic oligonucleotide
aagaggtagctcatttacaaccgacattaa

SEQ ID NO: 486112 - DNA, 30 bp, Artificial Sequence
  Synthetic oligonucleotide
ggtttattatgtagaagcaatacccattaa

SEQ ID NO: 486113 - DNA, 30 bp, Artificial Sequence
  Synthetic oligonucleotide
acggtagatgtactacaggtacctcattaa

SEQ ID NO: 486114 - DNA, 30 bp, Artificial Sequence
  Synthetic oligonucleotide
acccattttgtttctaataggtaagattaa

SEQ ID NO: 486115 - DNA, 30 bp, Artificial Sequence
  Synthetic oligonucleotide
tctcagtttcagactagcatatgagattaa

SEQ ID NO: 486116 - DNA, 30 bp, Artificial Sequence
  Synthetic oligonucleotide
gcttgtccattcctttttggattagattaa

SEQ ID NO: 486117 - DNA, 30 bp, Artificial Sequence
  Synthetic oligonucleotide
taaaaatataaccagtaatacgccgattaa

SEQ ID NO: 486118 - DNA, 30 bp, Artificial Sequence
  Synthetic oligonucleotide
cccggcggtcagcaccgtccggaggattaa

SEQ ID NO: 486119 - DNA, 30 bp, Artificial Sequence
  Synthetic oligonucleotide
gactggattacaggttttttattggattaa

SEQ ID NO: 486120 - DNA, 30 bp, Artificial Sequence
  Synthetic oligonucleotide
cgcgagtcgaacggcatagacgatgattaa

SEQ ID NO: 486121 - DNA, 30 bp, Artificial Sequence
  Synthetic oligonucleotide
agaaaggcccgtattacagggcctgattaa

SEQ ID NO: 486122 - DNA, 30 bp, Artificial Sequence
  Synthetic oligonucleotide
cttgaatcattaattgggcgaagtgattaa

SEQ ID NO: 486123 - DNA, 30 bp, Artificial Sequence
  Synthetic oligonucleotide
ttaatggagataatcaggatgcgtgattaa

SEQ ID NO: 486124 - DNA, 30 bp, Artificial Sequence
  Synthetic oligonucleotide
acgtattagcactagacgcgggttgattaa

SEQ ID NO: 486125 - DNA, 30 bp, Artificial Sequence
  Synthetic oligonucleotide
ggttaagggactgaagagcgatttgattaa

SEQ ID NO: 486126 - DNA, 30 bp, Artificial Sequence
  Synthetic oligonucleotide
ttatagttgcttaggaacaggtaatattaa

SEQ ID NO: 486127 - DNA, 30 bp, Artificial Sequence
  Synthetic oligonucleotide
tagtccaagggcatttctactccatattaa

SEQ ID NO: 486128 - DNA, 30 bp, Artificial Sequence
  Synthetic oligonucleotide
gccggggatctcttcccagcatcatattaa

SEQ ID NO: 486129 - DNA, 30 bp, Artificial Sequence
  Synthetic oligonucleotide
aagtttctattggttggtaaggtatattaa

SEQ ID NO: 486130 - DNA, 30 bp, Artificial Sequence
  Synthetic oligonucleotide
gtagttctataaagatatgggtcctattaa

SEQ ID NO: 486131 - DNA, 30 bp, Artificial Sequence
  Synthetic oligonucleotide
gaaatcctgttgggctacagaggctattaa

SEQ ID NO: 486132 - DNA, 30 bp, Artificial Sequence
  Synthetic oligonucleotide
tagctgtagaacccggttccacagtattaa

SEQ ID NO: 486133 - DNA, 30 bp, Artificial Sequence
  Synthetic oligonucleotide
ttctgcaagtacacttctaatcagtattaa

SEQ ID NO: 486134 - DNA, 30 bp, Artificial Sequence
  Synthetic oligonucleotide
taaaatctggcacatgcggatcgaacttaa

SEQ ID NO: 486135 - DNA, 30 bp, Artificial Sequence
  Synthetic oligonucleotide
gggatacatagtgggaggcctgccacttaa

SEQ ID NO: 486136 - DNA, 30 bp, Artificial Sequence
  Synthetic oligonucleotide
gaaggtgcgcacgagcccccgcagacttaa

SEQ ID NO: 486137 - DNA, 30 bp, Artificial Sequence
  Synthetic oligonucleotide
tagtcgaatcgtgatgtcagctagacttaa

SEQ ID NO: 486138 - DNA, 30 bp, Artificial Sequence
  Synthetic oligonucleotide
ggtttcgttttgcgctaactagcgacttaa

SEQ ID NO: 486139 - DNA, 30 bp, Artificial Sequence
  Synthetic oligonucleotide
ggaaaaatcactttccctttgcggacttaa

SEQ ID NO: 486140 - DNA, 30 bp, Artificial Sequence
  Synthetic oligonucleotide
cgctgagagtgtccctgtatacttacttaa

SEQ ID NO: 486141 - DNA, 30 bp, Artificial Sequence
  Synthetic oligonucleotide
gcacttttttgtgactacagcgcaccttaa

SEQ ID NO: 486142 - DNA, 30 bp, Artificial Sequence
  Synthetic oligonucleotide
ggatgcgctcgtgatatcctgaggccttaa

SEQ ID NO: 486143 - DNA, 30 bp, Artificial Sequence
  Synthetic oligonucleotide
gagagttttgtcaaccggcgtagagcttaa

SEQ ID NO: 486144 - DNA, 30 bp, Artificial Sequence
  Synthetic oligonucleotide
tcaatccgtcccagacgggcgctagcttaa

SEQ ID NO: 486145 - DNA, 30 bp, Artificial Sequence
  Synthetic oligonucleotide
ggtgtactagccgcttaatgtcacgcttaa

SEQ ID NO: 486146 - DNA, 30 bp, Artificial Sequence
  Synthetic oligonucleotide
gcgtagattccgcatagagcgagcgcttaa

SEQ ID NO: 486147 - DNA, 30 bp, Artificial Sequence
  Synthetic oligonucleotide
gtgtgcgtcattagtaagcgtcctgcttaa

SEQ ID NO: 486148 - DNA, 30 bp, Artificial Sequence
  Synthetic oligonucleotide
atcagctagcattgagcgcgacaatcttaa

SEQ ID NO: 486149 - DNA, 30 bp, Artificial Sequence
  Synthetic oligonucleotide
aatattcattccgagctaccagcatcttaa

SEQ ID NO: 486150 - DNA, 30 bp, Artificial Sequence
  Synthetic oligonucleotide
tgtagctaaaacgttgaacccgcttcttaa

SEQ ID NO: 486151 - DNA, 30 bp, Artificial Sequence
  Synthetic oligonucleotide
cttacatcctttcatgaaaaaagttcttaa

SEQ ID NO: 486152 - DNA, 30 bp, Artificial Sequence
  Synthetic oligonucleotide
gacatcatatggagatcacattccagttaa

SEQ ID NO: 486153 - DNA, 30 bp, Artificial Sequence
  Synthetic oligonucleotide
tctcactcttatctccatttacgcagttaa

SEQ ID NO: 486154 - DNA, 30 bp, Artificial Sequence
  Synthetic oligonucleotide
gtctacccttacttatcgtgttagagttaa

SEQ ID NO: 486155 - DNA, 30 bp, Artificial Sequence
  Synthetic oligonucleotide
gaaattacatttaaaatctagatgagttaa

SEQ ID NO: 486156 - DNA, 30 bp, Artificial Sequence
  Synthetic oligonucleotide
gacatctccgctgggtcttatatgagttaa

SEQ ID NO: 486157 - DNA, 30 bp, Artificial Sequence
  Synthetic oligonucleotide
gaaaagtttccttaggtaagggtgagttaa

SEQ ID NO: 486158 - DNA, 30 bp, Artificial Sequence
  Synthetic oligonucleotide
aatcgaagagattccagacctgtgagttaa

SEQ ID NO: 486159 - DNA, 30 bp, Artificial Sequence
  Synthetic oligonucleotide
tcaacttaggtgctgtgaacccatagttaa

SEQ ID NO: 486160 - DNA, 30 bp, Artificial Sequence
  Synthetic oligonucleotide
atattctcagcactcggtcaggctagttaa

SEQ ID NO: 486161 - DNA, 30 bp, Artificial Sequence
  Synthetic oligonucleotide
cagatggtgagagttacataccttagttaa

SEQ ID NO: 486162 - DNA, 30 bp, Artificial Sequence
  Synthetic oligonucleotide
gggaaaccgacttgcccccatacacgttaa

SEQ ID NO: 486163 - DNA, 30 bp, Artificial Sequence
  Synthetic oligonucleotide
gtggagttgatgaatgcttaagcacgttaa

SEQ ID NO: 486164 - DNA, 30 bp, Artificial Sequence
  Synthetic oligonucleotide
gagtatacatcgtggatgccactacgttaa

SEQ ID NO: 486165 - DNA, 30 bp, Artificial Sequence
  Synthetic oligonucleotide
atccctaacgcaggggccccggtacgttaa

SEQ ID NO: 486166 - DNA, 30 bp, Artificial Sequence
  Synthetic oligonucleotide
tttaccgtcgtcgttattaactaccgttaa

SEQ ID NO: 486167 - DNA, 30 bp, Artificial Sequence
  Synthetic oligonucleotide
gttagaccttgtttagactgtcagcgttaa

SEQ ID NO: 486168 - DNA, 30 bp, Artificial Sequence
  Synthetic oligonucleotide
cgcggcttatcgatttgacccgatcgttaa

SEQ ID NO: 486169 - DNA, 30 bp, Artificial Sequence
  Synthetic oligonucleotide
cctaagccactgacgagggcgggtcgttaa

SEQ ID NO: 486170 - DNA, 30 bp, Artificial Sequence
  Synthetic oligonucleotide
agcccggagcttgtgccgggcacaggttaa

SEQ ID NO: 486171 - DNA, 30 bp, Artificial Sequence
  Synthetic oligonucleotide
aaagtagacggacatatcgagtcaggttaa

SEQ ID NO: 486172 - DNA, 30 bp, Artificial Sequence
  Synthetic oligonucleotide
tagaggctggtcgtgagaaagataggttaa

SEQ ID NO: 486173 - DNA, 30 bp, Artificial Sequence
  Synthetic oligonucleotide
cctgtctttacttaatactgtcacggttaa

SEQ ID NO: 486174 - DNA, 30 bp, Artificial Sequence
  Synthetic oligonucleotide
cggagggtcttctacaatggtcccggttaa

SEQ ID NO: 486175 - DNA, 30 bp, Artificial Sequence
  Synthetic oligonucleotide
tttgttcgccagatgtatcacgccggttaa

SEQ ID NO: 486176 - DNA, 30 bp, Artificial Sequence
  Synthetic oligonucleotide
taccagctttacaaaaaactcatcggttaa

SEQ ID NO: 486177 - DNA, 30 bp, Artificial Sequence
  Synthetic oligonucleotide
tatcgcttggttatcccaaagactggttaa

SEQ ID NO: 486178 - DNA, 30 bp, Artificial Sequence
  Synthetic oligonucleotide
caacgagcccttagtcgggaacttggttaa

SEQ ID NO: 486179 - DNA, 31 bp, Artificial Sequence
  Synthetic oligonucleotide
cctagtcgcgtggaggctcatcaaatgttaa

SEQ ID NO: 486180 - DNA, 30 bp, Artificial Sequence
  Synthetic oligonucleotide
ccggctggccagttgacaaggaaatgttaa

SEQ ID NO: 486181 - DNA, 30 bp, Artificial Sequence
  Synthetic oligonucleotide
ggtgccaggaggcaacataacacctgttaa

SEQ ID NO: 486182 - DNA, 30 bp, Artificial Sequence
  Synthetic oligonucleotide
gattcagcaaatttccccacgatctgttaa

SEQ ID NO: 486183 - DNA, 30 bp, Artificial Sequence
  Synthetic oligonucleotide
gtaggccccgtagcgaatgttgtctgttaa

SEQ ID NO: 486184 - DNA, 30 bp, Artificial Sequence
  Synthetic oligonucleotide
gatttgtctcgactttttctatagtgttaa

SEQ ID NO: 486185 - DNA, 30 bp, Artificial Sequence
  Synthetic oligonucleotide
gcacaaacccagagaaatgcaccttgttaa

SEQ ID NO: 486186 - DNA, 30 bp, Artificial Sequence
  Synthetic oligonucleotide
atactgagatagcgctgatgaatttgttaa

SEQ ID NO: 486187 - DNA, 30 bp, Artificial Sequence
  Synthetic oligonucleotide
gattgactcacgacgggggttttaatttaa

SEQ ID NO: 486188 - DNA, 30 bp, Artificial Sequence
  Synthetic oligonucleotide
ggaatagtgttggttaggaggcgcatttaa

SEQ ID NO: 486189 - DNA, 30 bp, Artificial Sequence
  Synthetic oligonucleotide
ttaaaaaggcgcgcattaagagggatttaa

SEQ ID NO: 486190 - DNA, 30 bp, Artificial Sequence
  Synthetic oligonucleotide
tatatttcggacccatttagcgggatttaa

SEQ ID NO: 486191 - DNA, 30 bp, Artificial Sequence
  Synthetic oligonucleotide
gagcgtgctaactatcccagcactatttaa

SEQ ID NO: 486192 - DNA, 30 bp, Artificial Sequence
  Synthetic oligonucleotide
tataacgttcaccttcgggatcctatttaa

SEQ ID NO: 486193 - DNA, 30 bp, Artificial Sequence
  Synthetic oligonucleotide
ctggcactggcaaatgcatatattatttaa

SEQ ID NO: 486194 - DNA, 30 bp, Artificial Sequence
  Synthetic oligonucleotide
ggtattagcaagatactagtacttatttaa

SEQ ID NO: 486195 - DNA, 30 bp, Artificial Sequence
  Synthetic oligonucleotide
ttccactcggctaccaacgttgaactttaa

SEQ ID NO: 486196 - DNA, 30 bp, Artificial Sequence
  Synthetic oligonucleotide
cttcgtctcgccaggcgtttactcctttaa

SEQ ID NO: 486197 - DNA, 30 bp, Artificial Sequence
  Synthetic oligonucleotide
attcacttacgtgttgggaggtcgctttaa

SEQ ID NO: 486198 - DNA, 30 bp, Artificial Sequence
  Synthetic oligonucleotide
ttcgtaactgcgcatctacgatggctttaa

SEQ ID NO: 486199 - DNA, 30 bp, Artificial Sequence
  Synthetic oligonucleotide
tcgtcctaaaagaatattcagcctctttaa

SEQ ID NO: 486200 - DNA, 30 bp, Artificial Sequence
  Synthetic oligonucleotide
attcataggccgtccccttactctctttaa

SEQ ID NO: 486201 - DNA, 30 bp, Artificial Sequence
  Synthetic oligonucleotide
gtatgaggaggtgcgcccctcattctttaa

SEQ ID NO: 486202 - DNA, 30 bp, Artificial Sequence
  Synthetic oligonucleotide
cccctactgctcctgcggccgaaagtttaa

SEQ ID NO: 486203 - DNA, 30 bp, Artificial Sequence
  Synthetic oligonucleotide
gaaagccagttgcatgccgaagcagtttaa

SEQ ID NO: 486204 - DNA, 30 bp, Artificial Sequence
  Synthetic oligonucleotide
gatctcgaaggtgatgcgttggcagtttaa

SEQ ID NO: 486205 - DNA, 30 bp, Artificial Sequence
  Synthetic oligonucleotide
gccattattcttaagaacaagaccgtttaa

SEQ ID NO: 486206 - DNA, 30 bp, Artificial Sequence
  Synthetic oligonucleotide
accatttctctaataaactcaagcgtttaa

SEQ ID NO: 486207 - DNA, 30 bp, Artificial Sequence
  Synthetic oligonucleotide
tcgcagaaattttctgacagccgcgtttaa

SEQ ID NO: 486208 - DNA, 30 bp, Artificial Sequence
  Synthetic oligonucleotide
ttagtacctctttggagaaaacaggtttaa

SEQ ID NO: 486209 - DNA, 30 bp, Artificial Sequence
  Synthetic oligonucleotide
ggtgggggttattaacgggttacggtttaa

SEQ ID NO: 486210 - DNA, 30 bp, Artificial Sequence
  Synthetic oligonucleotide
tagatgccgctactttcttattgggtttaa

SEQ ID NO: 486211 - DNA, 30 bp, Artificial Sequence
  Synthetic oligonucleotide
cctccctgatcgcgaagagtcagtgtttaa

SEQ ID NO: 486212 - DNA, 30 bp, Artificial Sequence
  Synthetic oligonucleotide
cctaaaggagcggtttactcaggtgtttaa

SEQ ID NO: 486213 - DNA, 30 bp, Artificial Sequence
  Synthetic oligonucleotide
tatgctgatacgtgatatataattgtttaa

SEQ ID NO: 486214 - DNA, 29 bp, Artificial Sequence
  Synthetic oligonucleotide
gaaatcgctcaggatattctgcattttaa

SEQ ID NO: 486215 - DNA, 30 bp, Artificial Sequence
  Synthetic oligonucleotide
gttgcatcgtagaaggaacttcgcttttaa

SEQ ID NO: 486216 - DNA, 30 bp, Artificial Sequence
  Synthetic oligonucleotide
cgttatacgtgtcctcaacacaagttttaa

SEQ ID NO: 486217 - DNA, 30 bp, Artificial Sequence
  Synthetic oligonucleotide
gctctccgcgggcgtaagcatcagttttaa

SEQ ID NO: 486218 - DNA, 30 bp, Artificial Sequence
  Synthetic oligonucleotide
gaagtatgtcttcggggttagacgttttaa

SEQ ID NO: 486219 - DNA, 30 bp, Artificial Sequence
  Synthetic oligonucleotide
cacatcgatgctcaaattttgtatttttaa

SEQ ID NO: 486220 - DNA, 30 bp, Artificial Sequence
  Synthetic oligonucleotide
tcgcgccctggtccttataagcgtttttaa

SEQ ID NO: 486221 - DNA, 30 bp, Artificial Sequence
  Synthetic oligonucleotide
ccgtgtttgggtggagcatggattttttaa

SEQ ID NO: 486222 - DNA, 30 bp, Artificial Sequence
  Synthetic oligonucleotide
atataaccaacgtaggggtactgaaaaaca

SEQ ID NO: 486223 - DNA, 30 bp, Artificial Sequence
  Synthetic oligonucleotide
atgtttctacatgctacctagcacaaaaca

SEQ ID NO: 486224 - DNA, 30 bp, Artificial Sequence
  Synthetic oligonucleotide
tatatttcactgcgccccattggcaaaaca

SEQ ID NO: 486225 - DNA, 30 bp, Artificial Sequence
  Synthetic oligonucleotide
ctagtcttatactgagggatttgcaaaaca

SEQ ID NO: 486226 - DNA, 30 bp, Artificial Sequence
  Synthetic oligonucleotide
catagtgtttaaatgggaacgcagaaaaca

SEQ ID NO: 486227 - DNA, 30 bp, Artificial Sequence
  Synthetic oligonucleotide
ccaaccagccatgcgataatgtttaaaaca

SEQ ID NO: 486228 - DNA, 30 bp, Artificial Sequence
  Synthetic oligonucleotide
gccaatgtttagcggaatgcatcacaaaca

SEQ ID NO: 486229 - DNA, 30 bp, Artificial Sequence
  Synthetic oligonucleotide
tgttggatctctctgatgaccctacaaaca

SEQ ID NO: 486230 - DNA, 30 bp, Artificial Sequence
  Synthetic oligonucleotide
aagactcttttgctgtctatgcgccaaaca

SEQ ID NO: 486231 - DNA, 30 bp, Artificial Sequence
  Synthetic oligonucleotide
catactattcgctcgatgctggagcaaaca

SEQ ID NO: 486232 - DNA, 30 bp, Artificial Sequence
  Synthetic oligonucleotide
attctgtgcaagacgccagatttgcaaaca

SEQ ID NO: 486233 - DNA, 30 bp, Artificial Sequence
  Synthetic oligonucleotide
gtcacaagatgcagtgcgggagatcaaaca

SEQ ID NO: 486234 - DNA, 30 bp, Artificial Sequence
  Synthetic oligonucleotide
ggggtgcggggcataacattttaagaaaca

SEQ ID NO: 486235 - DNA, 30 bp, Artificial Sequence
  Synthetic oligonucleotide
ctttaacttgatctatggacgctagaaaca

SEQ ID NO: 486236 - DNA, 30 bp, Artificial Sequence
  Synthetic oligonucleotide
gtatgtttcgtcatcgacctcgtcgaaaca

SEQ ID NO: 486237 - DNA, 30 bp, Artificial Sequence
  Synthetic oligonucleotide
tacatttgtattgttgaacccaaggaaaca

SEQ ID NO: 486238 - DNA, 30 bp, Artificial Sequence
  Synthetic oligonucleotide
tcaatatagtgtcgtgacatgtcggaaaca

SEQ ID NO: 486239 - DNA, 30 bp, Artificial Sequence
  Synthetic oligonucleotide
aaactctgtagacatcgggtccgggaaaca

SEQ ID NO: 486240 - DNA, 30 bp, Artificial Sequence
  Synthetic oligonucleotide
gagcatggttccaaaattagtgatgaaaca

SEQ ID NO: 486241 - DNA, 30 bp, Artificial Sequence
  Synthetic oligonucleotide
ctttcacgtgccagttctgcctgtgaaaca

SEQ ID NO: 486242 - DNA, 30 bp, Artificial Sequence
  Synthetic oligonucleotide
ctcttaacgtgagaactgtaatttgaaaca

SEQ ID NO: 486243 - DNA, 30 bp, Artificial Sequence
  Synthetic oligonucleotide
ctgattttttgaatgcggttcaaataaaca

SEQ ID NO: 486244 - DNA, 30 bp, Artificial Sequence
  Synthetic oligonucleotide
gatatggtttatgacagttgatcataaaca

SEQ ID NO: 486245 - DNA, 30 bp, Artificial Sequence
  Synthetic oligonucleotide
gctctggtcccgcccaatctccgataaaca

SEQ ID NO: 486246 - DNA, 30 bp, Artificial Sequence
  Synthetic oligonucleotide
attaatgtatttcatgtgttacactaaaca

SEQ ID NO: 486247 - DNA, 30 bp, Artificial Sequence
  Synthetic oligonucleotide
acaatcattaatccatagtttccctaaaca

SEQ ID NO: 486248 - DNA, 30 bp, Artificial Sequence
  Synthetic oligonucleotide
cgcacgcatagggggtctatactctaaaca

SEQ ID NO: 486249 - DNA, 30 bp, Artificial Sequence
  Synthetic oligonucleotide
gattcacaccgccgcatgagtctctaaaca

SEQ ID NO: 486250 - DNA, 31 bp, Artificial Sequence
  Synthetic oligonucleotide
agattttgaatccacgggtctaccgtaaaca

SEQ ID NO: 486251 - DNA, 30 bp, Artificial Sequence
  Synthetic oligonucleotide
cgctgatcgtacatgtcttacgggtaaaca

SEQ ID NO: 486252 - DNA, 30 bp, Artificial Sequence
  Synthetic oligonucleotide
aatatctgatagcgggtaagtttgtaaaca

SEQ ID NO: 486253 - DNA, 30 bp, Artificial Sequence
  Synthetic oligonucleotide
gtcctatgtaaacaaattctgcgttaaaca

SEQ ID NO: 486254 - DNA, 30 bp, Artificial Sequence
  Synthetic oligonucleotide
tctggctgttcgcgtctgtcggagacaaca

SEQ ID NO: 486255 - DNA, 30 bp, Artificial Sequence
  Synthetic oligonucleotide
tttggatatcgaagagcagacgcgacaaca

SEQ ID NO: 486256 - DNA, 30 bp, Artificial Sequence
  Synthetic oligonucleotide
gtgtttaatttttggtatctacgtacaaca

SEQ ID NO: 486257 - DNA, 30 bp, Artificial Sequence
  Synthetic oligonucleotide
tctgttatgtgagtacaaacccaaccaaca

SEQ ID NO: 486258 - DNA, 30 bp, Artificial Sequence
  Synthetic oligonucleotide
ggaatagggtaacggtgcatgtaaccaaca

SEQ ID NO: 486259 - DNA, 30 bp, Artificial Sequence
  Synthetic oligonucleotide
tccactaattaggtgttatattgaccaaca

SEQ ID NO: 486260 - DNA, 30 bp, Artificial Sequence
  Synthetic oligonucleotide
gtcatccggtttttaatacaattaccaaca

SEQ ID NO: 486261 - DNA, 30 bp, Artificial Sequence
  Synthetic oligonucleotide
gggaggatttcgtgcaaatacgagccaaca

SEQ ID NO: 486262 - DNA, 30 bp, Artificial Sequence
  Synthetic oligonucleotide
taaacacgtgactgaagacagtcagcaaca

SEQ ID NO: 486263 - DNA, 30 bp, Artificial Sequence
  Synthetic oligonucleotide
attggcacgcacatgcccagccacgcaaca

SEQ ID NO: 486264 - DNA, 30 bp, Artificial Sequence
  Synthetic oligonucleotide
tacccctgtcgtcttggtcgagaggcaaca

SEQ ID NO: 486265 - DNA, 30 bp, Artificial Sequence
  Synthetic oligonucleotide
atcaatcacttagcacgcggctctgcaaca

SEQ ID NO: 486266 - DNA, 30 bp, Artificial Sequence
  Synthetic oligonucleotide
gtgtgttagaagtgatcaacggttgcaaca

SEQ ID NO: 486267 - DNA, 30 bp, Artificial Sequence
  Synthetic oligonucleotide
tcattggttttactgtcgtataaatcaaca

SEQ ID NO: 486268 - DNA, 30 bp, Artificial Sequence
  Synthetic oligonucleotide
tgttcatactttgaacagagcgtctcaaca

SEQ ID NO: 486269 - DNA, 30 bp, Artificial Sequence
  Synthetic oligonucleotide
gaatattcaagcgtaacgttgcggtcaaca

SEQ ID NO: 486270 - DNA, 30 bp, Artificial Sequence
  Synthetic oligonucleotide
tcaaaacgcagttcatactatgaaagaaca

SEQ ID NO: 486271 - DNA, 30 bp, Artificial Sequence
  Synthetic oligonucleotide
tagtcctgggatatgcgttaatgaagaaca

SEQ ID NO: 486272 - DNA, 30 bp, Artificial Sequence
  Synthetic oligonucleotide
tttcttggctttgtctgaagcgtaagaaca

SEQ ID NO: 486273 - DNA, 30 bp, Artificial Sequence
  Synthetic oligonucleotide
gcactaaaggtattcgactcaattagaaca

SEQ ID NO: 486274 - DNA, 30 bp, Artificial Sequence
  Synthetic oligonucleotide
agcgttggaggttaattcagatttagaaca

SEQ ID NO: 486275 - DNA, 30 bp, Artificial Sequence
  Synthetic oligonucleotide
ttttagttaccggggctgggataacgaaca

SEQ ID NO: 486276 - DNA, 30 bp, Artificial Sequence
  Synthetic oligonucleotide
cctcgttagtgcctctggatgccacgaaca

SEQ ID NO: 486277 - DNA, 30 bp, Artificial Sequence
  Synthetic oligonucleotide
tcatagtagtttaagccgcaccgacgaaca

SEQ ID NO: 486278 - DNA, 30 bp, Artificial Sequence
  Synthetic oligonucleotide
gtccggcgttatagtctgttccgacgaaca

SEQ ID NO: 486279 - DNA, 30 bp, Artificial Sequence
  Synthetic oligonucleotide
tggcaagggagttcgtggtaattccgaaca

SEQ ID NO: 486280 - DNA, 30 bp, Artificial Sequence
  Synthetic oligonucleotide
agagacgagaatgttaccaggcagcgaaca

SEQ ID NO: 486281 - DNA, 30 bp, Artificial Sequence
  Synthetic oligonucleotide
ccgcgagattcactcctttcgcggcgaaca

SEQ ID NO: 486282 - DNA, 30 bp, Artificial Sequence
  Synthetic oligonucleotide
gccaatcgtagaacgtctggttctcgaaca

SEQ ID NO: 486283 - DNA, 30 bp, Artificial Sequence
  Synthetic oligonucleotide
gatgtagggattagcatcctttaaggaaca

SEQ ID NO: 486284 - DNA, 30 bp, Artificial Sequence
  Synthetic oligonucleotide
cagataggtactctcttgacaagaggaaca

SEQ ID NO: 486285 - DNA, 30 bp, Artificial Sequence
  Synthetic oligonucleotide
aagcgtccgcgcttcaagatgataggaaca

SEQ ID NO: 486286 - DNA, 30 bp, Artificial Sequence
  Synthetic oligonucleotide
cgaatagggtatgcagcagcgctaggaaca

SEQ ID NO: 486287 - DNA, 30 bp, Artificial Sequence
  Synthetic oligonucleotide
ccgccagcactgaggcaggcgttaggaaca

SEQ ID NO: 486288 - DNA, 30 bp, Artificial Sequence
  Synthetic oligonucleotide
gcacgttcaggctgatcgtcaggcggaaca

SEQ ID NO: 486289 - DNA, 30 bp, Artificial Sequence
  Synthetic oligonucleotide
atctgtccggacccttgttcgggcggaaca

SEQ ID NO: 486290 - DNA, 30 bp, Artificial Sequence
  Synthetic oligonucleotide
gataaaaggaacgcacgatcttggggaaca

SEQ ID NO: 486291 - DNA, 30 bp, Artificial Sequence
  Synthetic oligonucleotide
agaattagctaaaatagacaaaaatgaaca

SEQ ID NO: 486292 - DNA, 30 bp, Artificial Sequence
  Synthetic oligonucleotide
ggtcctcacgaagcatgaactccatgaaca

SEQ ID NO: 486293 - DNA, 30 bp, Artificial Sequence
  Synthetic oligonucleotide
gtcaatcacgtaaacagcgtcacgtgaaca

SEQ ID NO: 486294 - DNA, 30 bp, Artificial Sequence
  Synthetic oligonucleotide
ttgtcctgcgctagggtgatcgattgaaca

SEQ ID NO: 486295 - DNA, 30 bp, Artificial Sequence
  Synthetic oligonucleotide
gaaatgttcttacgtccttgattttgaaca

SEQ ID NO: 486296 - DNA, 30 bp, Artificial Sequence
  Synthetic oligonucleotide
ggcaaaaatgaaataggcacaaaaataaca

SEQ ID NO: 486297 - DNA, 30 bp, Artificial Sequence
  Synthetic oligonucleotide
gaatgccatgccctatcgctatgaataaca

SEQ ID NO: 486298 - DNA, 30 bp, Artificial Sequence
  Synthetic oligonucleotide
gctgattatggacccggggctcagataaca

SEQ ID NO: 486299 - DNA, 30 bp, Artificial Sequence
  Synthetic oligonucleotide
gataaccgaacgcccgggcgaacgataaca

SEQ ID NO: 486300 - DNA, 30 bp, Artificial Sequence
  Synthetic oligonucleotide
agggaagctatatcgactgtagggataaca

SEQ ID NO: 486301 - DNA, 30 bp, Artificial Sequence
  Synthetic oligonucleotide
cctgtgcacgagaaggaataacatataaca

SEQ ID NO: 486302 - DNA, 30 bp, Artificial Sequence
  Synthetic oligonucleotide
tgtggtaataattacatggtatatataaca

SEQ ID NO: 486303 - DNA, 30 bp, Artificial Sequence
  Synthetic oligonucleotide
accacattgtcccgggcagcctacctaaca

SEQ ID NO: 486304 - DNA, 30 bp, Artificial Sequence
  Synthetic oligonucleotide
tatttcgattcgacagctattacgctaaca

SEQ ID NO: 486305 - DNA, 30 bp, Artificial Sequence
  Synthetic oligonucleotide
tttccacagttacgcggggatgcagtaaca

SEQ ID NO: 486306 - DNA, 30 bp, Artificial Sequence
  Synthetic oligonucleotide
tacatgtctcgcactgtacgttgggtaaca

SEQ ID NO: 486307 - DNA, 30 bp, Artificial Sequence
  Synthetic oligonucleotide
gacgcgggctattaagtaacgtatgtaaca

SEQ ID NO: 486308 - DNA, 30 bp, Artificial Sequence
  Synthetic oligonucleotide
gagcatggagagtgaacagcgtatgtaaca

SEQ ID NO: 486309 - DNA, 30 bp, Artificial Sequence
  Synthetic oligonucleotide
aatggtattatttccgtcgtgtgattaaca

SEQ ID NO: 486310 - DNA, 30 bp, Artificial Sequence
  Synthetic oligonucleotide
gttgtaatgctttatatagaggtattaaca

SEQ ID NO: 486311 - DNA, 30 bp, Artificial Sequence
  Synthetic oligonucleotide
tttgtagagtcgctgtctcagtgcttaaca

SEQ ID NO: 486312 - DNA, 30 bp, Artificial Sequence
  Synthetic oligonucleotide
atggctttctacgcatctgcacagttaaca

SEQ ID NO: 486313 - DNA, 30 bp, Artificial Sequence
  Synthetic oligonucleotide
cttttgtagacacttgggctttagttaaca

SEQ ID NO: 486314 - DNA, 30 bp, Artificial Sequence
  Synthetic oligonucleotide
ttgttggaatctaaagctaccgatttaaca

SEQ ID NO: 486315 - DNA, 30 bp, Artificial Sequence
  Synthetic oligonucleotide
ttaagctttaggtctggttgtggtttaaca

SEQ ID NO: 486316 - DNA, 30 bp, Artificial Sequence
  Synthetic oligonucleotide
cttcgaatttcgactctctcttttttaaca

SEQ ID NO: 486317 - DNA, 30 bp, Artificial Sequence
  Synthetic oligonucleotide
tattgtagatctggggaatgtacaaacaca

SEQ ID NO: 486318 - DNA, 30 bp, Artificial Sequence
  Synthetic oligonucleotide
gactttcgcttcatgggttcgcgcaacaca

SEQ ID NO: 486319 - DNA, 30 bp, Artificial Sequence
  Synthetic oligonucleotide
gacgagattcgcgcccggcgtatcaacaca

SEQ ID NO: 486320 - DNA, 30 bp, Artificial Sequence
  Synthetic oligonucleotide
cccagaccgttaatgtggacatggaacaca

SEQ ID NO: 486321 - DNA, 30 bp, Artificial Sequence
  Synthetic oligonucleotide
ggcgctatgcacgttatgatacgtaacaca

SEQ ID NO: 486322 - DNA, 30 bp, Artificial Sequence
  Synthetic oligonucleotide
cagcaagggtggaggtctactacacacaca

SEQ ID NO: 486323 - DNA, 30 bp, Artificial Sequence
  Synthetic oligonucleotide
atcgtttggctggcatacgacgcacacaca

SEQ ID NO: 486324 - DNA, 30 bp, Artificial Sequence
  Synthetic oligonucleotide
ttttagaaatgcccatgctaatgacacaca

SEQ ID NO: 486325 - DNA, 30 bp, Artificial Sequence
  Synthetic oligonucleotide
tttatactaaagactgtaacactacacaca

SEQ ID NO: 486326 - DNA, 30 bp, Artificial Sequence
  Synthetic oligonucleotide
gaccagtagaacgtgcctatcctacacaca

SEQ ID NO: 486327 - DNA, 30 bp, Artificial Sequence
  Synthetic oligonucleotide
agtccagagacgcaggaccaacagcacaca

SEQ ID NO: 486328 - DNA, 30 bp, Artificial Sequence
  Synthetic oligonucleotide
tttattataagcaacccgagaacgcacaca

SEQ ID NO: 486329 - DNA, 30 bp, Artificial Sequence
  Synthetic oligonucleotide
aacgtagttgaaaatattatagcgcacaca

SEQ ID NO: 486330 - DNA, 30 bp, Artificial Sequence
  Synthetic oligonucleotide
gaaaagtcatggagggcctcgggtcacaca

SEQ ID NO: 486331 - DNA, 30 bp, Artificial Sequence
  Synthetic oligonucleotide
gagtgtcactatttcgtttgaggagacaca

SEQ ID NO: 486332 - DNA, 30 bp, Artificial Sequence
  Synthetic oligonucleotide
gatcctcaggactaaagcactgtagacaca

SEQ ID NO: 486333 - DNA, 30 bp, Artificial Sequence
  Synthetic oligonucleotide
gggtttagctttgaagctaaaaaggacaca

SEQ ID NO: 486334 - DNA, 30 bp, Artificial Sequence
  Synthetic oligonucleotide
gaatgcttactcagcaaagtggctgacaca

SEQ ID NO: 486335 - DNA, 30 bp, Artificial Sequence
  Synthetic oligonucleotide
ccgcaaggatttgacgctaggtgatacaca

SEQ ID NO: 486336 - DNA, 31 bp, Artificial Sequence
  Synthetic oligonucleotide
gggcggatggatgcaatcatggtgatacaca

SEQ ID NO: 486337 - DNA, 30 bp, Artificial Sequence
  Synthetic oligonucleotide
gttaactgtggatcagtccgcatctacaca

SEQ ID NO: 486338 - DNA, 30 bp, Artificial Sequence
  Synthetic oligonucleotide
ggcaggcctggtatagcctcaacgtacaca

SEQ ID NO: 486339 - DNA, 30 bp, Artificial Sequence
  Synthetic oligonucleotide
accgattctaatcttatgcttctgtacaca

SEQ ID NO: 486340 - DNA, 30 bp, Artificial Sequence
  Synthetic oligonucleotide
aaaatccgggtaataggtagaagttacaca

SEQ ID NO: 486341 - DNA, 30 bp, Artificial Sequence
  Synthetic oligonucleotide
actcagttcatgtttaacgtttggaccaca

SEQ ID NO: 486342 - DNA, 30 bp, Artificial Sequence
  Synthetic oligonucleotide
ttaagtctactttcgctacgatgtaccaca

SEQ ID NO: 486343 - DNA, 30 bp, Artificial Sequence
  Synthetic oligonucleotide
ataaaagctttgcagtcacgttgacccaca

SEQ ID NO: 486344 - DNA, 30 bp, Artificial Sequence
  Synthetic oligonucleotide
gtatccaatacgcacaggggttgacccaca

SEQ ID NO: 486345 - DNA, 30 bp, Artificial Sequence
  Synthetic oligonucleotide
actctaagccattatcgactgggccccaca

SEQ ID NO: 486346 - DNA, 30 bp, Artificial Sequence
  Synthetic oligonucleotide
ggagtcgttccaggtataacatatcccaca

SEQ ID NO: 486347 - DNA, 30 bp, Artificial Sequence
  Synthetic oligonucleotide
ttctttattttgttggcactgcttcccaca

SEQ ID NO: 486348 - DNA, 30 bp, Artificial Sequence
  Synthetic oligonucleotide
aggctcttccagtttgtcgacggagccaca

SEQ ID NO: 486349 - DNA, 30 bp, Artificial Sequence
  Synthetic oligonucleotide
tgtagcgctcattaggcaaattgagccaca

SEQ ID NO: 486350 - DNA, 30 bp, Artificial Sequence
  Synthetic oligonucleotide
ctcttcccatatttcaatcccgtagccaca

SEQ ID NO: 486351 - DNA, 30 bp, Artificial Sequence
  Synthetic oligonucleotide
aaagtataataagatagcactaaggccaca

SEQ ID NO: 486352 - DNA, 30 bp, Artificial Sequence
  Synthetic oligonucleotide
aatttcgtcaggatggagctagaggccaca

SEQ ID NO: 486353 - DNA, 30 bp, Artificial Sequence
  Synthetic oligonucleotide
gcgggcaacccttcgtgtctttcggccaca

SEQ ID NO: 486354 - DNA, 30 bp, Artificial Sequence
  Synthetic oligonucleotide
ctcctagcggagttcgctgtgagggccaca

SEQ ID NO: 486355 - DNA, 30 bp, Artificial Sequence
  Synthetic oligonucleotide
catcgtaggaatgtggcgctacatgccaca

SEQ ID NO: 486356 - DNA, 30 bp, Artificial Sequence
  Synthetic oligonucleotide
actaacaagattctcgtgtttcaatccaca

SEQ ID NO: 486357 - DNA, 30 bp, Artificial Sequence
  Synthetic oligonucleotide
gtacaggctttctgctaggaaatatccaca

SEQ ID NO: 486358 - DNA, 30 bp, Artificial Sequence
  Synthetic oligonucleotide
cgggctcggataacggggagaggctccaca

SEQ ID NO: 486359 - DNA, 30 bp, Artificial Sequence
  Synthetic oligonucleotide
caaacggtaaaccacactcctttttccaca

SEQ ID NO: 486360 - DNA, 30 bp, Artificial Sequence
  Synthetic oligonucleotide
gaaattccgaaaagcgcggcagcaagcaca

SEQ ID NO: 486361 - DNA, 30 bp, Artificial Sequence
  Synthetic oligonucleotide
gaatgtgctgcacctagatttgcaagcaca

SEQ ID NO: 486362 - DNA, 30 bp, Artificial Sequence
  Synthetic oligonucleotide
catggtgagttggcacatccacgcagcaca

SEQ ID NO: 486363 - DNA, 30 bp, Artificial Sequence
  Synthetic oligonucleotide
agcagcatattttggttaattactagcaca

SEQ ID NO: 486364 - DNA, 30 bp, Artificial Sequence
  Synthetic oligonucleotide
gggcattgcaagctgggtgtccgtagcaca

SEQ ID NO: 486365 - DNA, 30 bp, Artificial Sequence
  Synthetic oligonucleotide
gaagcctagcaaaatgaagccgaacgcaca

SEQ ID NO: 486366 - DNA, 30 bp, Artificial Sequence
  Synthetic oligonucleotide
ttaaactcctttacgtatctatcacgcaca

SEQ ID NO: 486367 - DNA, 30 bp, Artificial Sequence
  Synthetic oligonucleotide
tgttacctgcatgatatcggatggcgcaca

SEQ ID NO: 486368 - DNA, 30 bp, Artificial Sequence
  Synthetic oligonucleotide
tagtatatagaagctagttatgctcgcaca

SEQ ID NO: 486369 - DNA, 31 bp, Artificial Sequence
  Synthetic oligonucleotide
catatactgacactagcagcaatctcgcaca

SEQ ID NO: 486370 - DNA, 30 bp, Artificial Sequence
  Synthetic oligonucleotide
aatccgttgcaaccttatgtaagtcgcaca

SEQ ID NO: 486371 - DNA, 30 bp, Artificial Sequence
  Synthetic oligonucleotide
ccggcgtcttaataaattgaggcaggcaca

SEQ ID NO: 486372 - DNA, 30 bp, Artificial Sequence
  Synthetic oligonucleotide
gggttgtggccaacattatgcggaggcaca

SEQ ID NO: 486373 - DNA, 30 bp, Artificial Sequence
  Synthetic oligonucleotide
gatagatctttatatattggcaccggcaca

SEQ ID NO: 486374 - DNA, 30 bp, Artificial Sequence
  Synthetic oligonucleotide
acttctattcatgtttgcttctgcggcaca

SEQ ID NO: 486375 - DNA, 30 bp, Artificial Sequence
  Synthetic oligonucleotide
ttaacgctcaatgagtaggaaaagggcaca

SEQ ID NO: 486376 - DNA, 30 bp, Artificial Sequence
  Synthetic oligonucleotide
ccggtttaaaacgggccacacgcgggcaca

SEQ ID NO: 486377 - DNA, 30 bp, Artificial Sequence
  Synthetic oligonucleotide
acgcagcgaagttccatctgactgggcaca

SEQ ID NO: 486378 - DNA, 30 bp, Artificial Sequence
  Synthetic oligonucleotide
aaaatgttggatccgtacgcgttgggcaca

SEQ ID NO: 486379 - DNA, 30 bp, Artificial Sequence
  Synthetic oligonucleotide
gtttattcgtctggctgcatcacctgcaca

SEQ ID NO: 486380 - DNA, 30 bp, Artificial Sequence
  Synthetic oligonucleotide
gtcccgcatactattggcctattttgcaca

SEQ ID NO: 486381 - DNA, 31 bp, Artificial Sequence
  Synthetic oligonucleotide
cctttttgttctcccatctgtttcaatcaca

SEQ ID NO: 486382 - DNA, 30 bp, Artificial Sequence
  Synthetic oligonucleotide
gcgtggtcgaaccattgttctagaatcaca

SEQ ID NO: 486383 - DNA, 30 bp, Artificial Sequence
  Synthetic oligonucleotide
ggcaattatgtgaaactcccccggatcaca

SEQ ID NO: 486384 - DNA, 30 bp, Artificial Sequence
  Synthetic oligonucleotide
ctgcagcaggagtggcgccgatggatcaca

SEQ ID NO: 486385 - DNA, 30 bp, Artificial Sequence
  Synthetic oligonucleotide
tgtgtctcatccgttcataataatatcaca

SEQ ID NO: 486386 - DNA, 30 bp, Artificial Sequence
  Synthetic oligonucleotide
ttgaaagattactctgttgcatatatcaca

SEQ ID NO: 486387 - DNA, 30 bp, Artificial Sequence
  Synthetic oligonucleotide
caattgaagtcgcatgtttttactatcaca

SEQ ID NO: 486388 - DNA, 30 bp, Artificial Sequence
  Synthetic oligonucleotide
tttctaattcgctcttgagtagacctcaca

SEQ ID NO: 486389 - DNA, 30 bp, Artificial Sequence
  Synthetic oligonucleotide
gtttgcgtacgtgtgtgactcgccctcaca

SEQ ID NO: 486390 - DNA, 30 bp, Artificial Sequence
  Synthetic oligonucleotide
tgttgctcgacccgggctccaatcctcaca

SEQ ID NO: 486391 - DNA, 30 bp, Artificial Sequence
  Synthetic oligonucleotide
aggttcaagttcagagacctcctgctcaca

SEQ ID NO: 486392 - DNA, 30 bp, Artificial Sequence
  Synthetic oligonucleotide
agaatccacatgggaggctgtaaagtcaca

SEQ ID NO: 486393 - DNA, 30 bp, Artificial Sequence
  Synthetic oligonucleotide
atctgctgagaccatttactggaagtcaca

SEQ ID NO: 486394 - DNA, 30 bp, Artificial Sequence
  Synthetic oligonucleotide
tggaattcgtttcgctgggtatgagtcaca

SEQ ID NO: 486395 - DNA, 30 bp, Artificial Sequence
  Synthetic oligonucleotide
ttgtggcgttgctggacagcagccgtcaca

SEQ ID NO: 486396 - DNA, 30 bp, Artificial Sequence
  Synthetic oligonucleotide
acccgtatttttggttgatgaacggtcaca

SEQ ID NO: 486397 - DNA, 30 bp, Artificial Sequence
  Synthetic oligonucleotide
tcccctagcccggcatgataagcggtcaca

SEQ ID NO: 486398 - DNA, 30 bp, Artificial Sequence
  Synthetic oligonucleotide
gtgccgtcggacgggtttaagaaattcaca

SEQ ID NO: 486399 - DNA, 30 bp, Artificial Sequence
  Synthetic oligonucleotide
ggggttatacacggtcttcagtaattcaca

SEQ ID NO: 486400 - DNA, 30 bp, Artificial Sequence
  Synthetic oligonucleotide
ccatgcacccgcgcggactcagcattcaca

SEQ ID NO: 486401 - DNA, 30 bp, Artificial Sequence
  Synthetic oligonucleotide
ctcgtgaagcagggacgaccattattcaca

SEQ ID NO: 486402 - DNA, 30 bp, Artificial Sequence
  Synthetic oligonucleotide
aatgctgaaaaaagcgggcgaagcttcaca

SEQ ID NO: 486403 - DNA, 30 bp, Artificial Sequence
  Synthetic oligonucleotide
atctgtaatttctctactgctatcttcaca

SEQ ID NO: 486404 - DNA, 30 bp, Artificial Sequence
  Synthetic oligonucleotide
acattgttgcagcttcccaactggttcaca

SEQ ID NO: 486405 - DNA, 30 bp, Artificial Sequence
  Synthetic oligonucleotide
aaagattttgcagagaagtgattgttcaca

SEQ ID NO: 486406 - DNA, 30 bp, Artificial Sequence
  Synthetic oligonucleotide
gtttgacctattaaaaaattgaatttcaca

SEQ ID NO: 486407 - DNA, 30 bp, Artificial Sequence
  Synthetic oligonucleotide
tgcacccattataaccgtccgtatttcaca

SEQ ID NO: 486408 - DNA, 30 bp, Artificial Sequence
  Synthetic oligonucleotide
cccgatttacgtagttcgtagcgtttcaca

SEQ ID NO: 486409 - DNA, 30 bp, Artificial Sequence
  Synthetic oligonucleotide
aagcaaagtagaaccgagccaggtttcaca

SEQ ID NO: 486410 - DNA, 30 bp, Artificial Sequence
  Synthetic oligonucleotide
taggagttgccagttgtacgcgttttcaca

SEQ ID NO: 486411 - DNA, 30 bp, Artificial Sequence
  Synthetic oligonucleotide
gggaacacagcatacttagataaaaagaca

SEQ ID NO: 486412 - DNA, 30 bp, Artificial Sequence
  Synthetic oligonucleotide
cttgctaagcgggccgaggcccaaaagaca

SEQ ID NO: 486413 - DNA, 30 bp, Artificial Sequence
  Synthetic oligonucleotide
atgttagttcttagctacgatgcaaagaca

SEQ ID NO: 486414 - DNA, 30 bp, Artificial Sequence
  Synthetic oligonucleotide
tatccttctgtacgcgattataagaagaca

SEQ ID NO: 486415 - DNA, 30 bp, Artificial Sequence
  Synthetic oligonucleotide
gacaccgcttttatcaggggcagtaagaca

SEQ ID NO: 486416 - DNA, 30 bp, Artificial Sequence
  Synthetic oligonucleotide
ataaatcgctcgcgtccatgtgaacagaca

SEQ ID NO: 486417 - DNA, 31 bp, Artificial Sequence
  Synthetic oligonucleotide
gagaggtctcgacgcctattcaagccagaca

SEQ ID NO: 486418 - DNA, 30 bp, Artificial Sequence
  Synthetic oligonucleotide
gtgtcagtatattttagctgacgccagaca

SEQ ID NO: 486419 - DNA, 30 bp, Artificial Sequence
  Synthetic oligonucleotide
tattaaagtgctttgcactatctgcagaca

SEQ ID NO: 486420 - DNA, 30 bp, Artificial Sequence
  Synthetic oligonucleotide
gttcagctcgcaagcgttgacattcagaca

SEQ ID NO: 486421 - DNA, 30 bp, Artificial Sequence
  Synthetic oligonucleotide
gattattggacggagcgccgctcagagaca

SEQ ID NO: 486422 - DNA, 30 bp, Artificial Sequence
  Synthetic oligonucleotide
tgcttttttcataatctagccccggagaca

SEQ ID NO: 486423 - DNA, 30 bp, Artificial Sequence
  Synthetic oligonucleotide
ttaatggcaaatcaaaaacatccggagaca

SEQ ID NO: 486424 - DNA, 30 bp, Artificial Sequence
  Synthetic oligonucleotide
atctctagtgacggaggttaaggtgagaca

SEQ ID NO: 486425 - DNA, 30 bp, Artificial Sequence
  Synthetic oligonucleotide
tgaaagtatcagtggtcgcatttatagaca

SEQ ID NO: 486426 - DNA, 30 bp, Artificial Sequence
  Synthetic oligonucleotide
ttgtccatatctaaacgtttcgtctagaca

SEQ ID NO: 486427 - DNA, 30 bp, Artificial Sequence
  Synthetic oligonucleotide
agtatttctggtcaagtcccaaagtagaca

SEQ ID NO: 486428 - DNA, 30 bp, Artificial Sequence
  Synthetic oligonucleotide
tataaatcgcaggactcacggacgtagaca

SEQ ID NO: 486429 - DNA, 30 bp, Artificial Sequence
  Synthetic oligonucleotide
aaaactcaggcgtttactgcaggaacgaca

SEQ ID NO: 486430 - DNA, 30 bp, Artificial Sequence
  Synthetic oligonucleotide
ggacggcctgcgagcacccacggaacgaca

SEQ ID NO: 486431 - DNA, 30 bp, Artificial Sequence
  Synthetic oligonucleotide
acttagcatgcaaccggctcacagacgaca

SEQ ID NO: 486432 - DNA, 30 bp, Artificial Sequence
  Synthetic oligonucleotide
gagcttgcgcgcggaataggagtgacgaca

SEQ ID NO: 486433 - DNA, 30 bp, Artificial Sequence
  Synthetic oligonucleotide
tacacgcaacacccgcggatgcccccgaca

SEQ ID NO: 486434 - DNA, 30 bp, Artificial Sequence
  Synthetic oligonucleotide
tctttcagcatcgttatcgggcgcccgaca

SEQ ID NO: 486435 - DNA, 30 bp, Artificial Sequence
  Synthetic oligonucleotide
acgcaggcatagagtaatctctgcccgaca

SEQ ID NO: 486436 - DNA, 30 bp, Artificial Sequence
  Synthetic oligonucleotide
aaacccattagcgcctagatcgcagcgaca

SEQ ID NO: 486437 - DNA, 30 bp, Artificial Sequence
  Synthetic oligonucleotide
gtgacgctgtctctaccctctctagcgaca

SEQ ID NO: 486438 - DNA, 30 bp, Artificial Sequence
  Synthetic oligonucleotide
atcactaatgctactactcgcgtagcgaca

SEQ ID NO: 486439 - DNA, 30 bp, Artificial Sequence
  Synthetic oligonucleotide
ggggtaccggcagtatgtctgtccgcgaca

SEQ ID NO: 486440 - DNA, 29 bp, Artificial Sequence
  Synthetic oligonucleotide
tgggaagactgcttgtcgggcgcgcgaca

SEQ ID NO: 486441 - DNA, 30 bp, Artificial Sequence
  Synthetic oligonucleotide
atatcggctggcgtaaccggccaggcgaca

SEQ ID NO: 486442 - DNA, 30 bp, Artificial Sequence
  Synthetic oligonucleotide
agagagtcttcaaaggctaacatggcgaca

SEQ ID NO: 486443 - DNA, 30 bp, Artificial Sequence
  Synthetic oligonucleotide
catagaaaccgcttagataaagaatcgaca

SEQ ID NO: 486444 - DNA, 30 bp, Artificial Sequence
  Synthetic oligonucleotide
cgcattcatgttacctaggattgttcgaca

SEQ ID NO: 486445 - DNA, 30 bp, Artificial Sequence
  Synthetic oligonucleotide
agtattatcgcggatcatggtcgaaggaca

SEQ ID NO: 486446 - DNA, 30 bp, Artificial Sequence
  Synthetic oligonucleotide
ttaatacctatacgaaggtaagtaaggaca

SEQ ID NO: 486447 - DNA, 30 bp, Artificial Sequence
  Synthetic oligonucleotide
gcatagccagaatcatgtttctccaggaca

SEQ ID NO: 486448 - DNA, 30 bp, Artificial Sequence
  Synthetic oligonucleotide
agataaccaatgaaatgctaggggaggaca

SEQ ID NO: 486449 - DNA, 30 bp, Artificial Sequence
  Synthetic oligonucleotide
tataacgttcttggaaaacagtataggaca

SEQ ID NO: 486450 - DNA, 30 bp, Artificial Sequence
  Synthetic oligonucleotide
aatgggttcacgaggtacaaccttaggaca

SEQ ID NO: 486451 - DNA, 30 bp, Artificial Sequence
  Synthetic oligonucleotide
tgcagtcggtccaacttatttgttaggaca

SEQ ID NO: 486452 - DNA, 30 bp, Artificial Sequence
  Synthetic oligonucleotide
agcaagcgtcaataccaaagggaacggaca

SEQ ID NO: 486453 - DNA, 30 bp, Artificial Sequence
  Synthetic oligonucleotide
gcccacttcggcgtttggaggcgccggaca

SEQ ID NO: 486454 - DNA, 30 bp, Artificial Sequence
  Synthetic oligonucleotide
caaatattggatgtagcgcgtcgccggaca

SEQ ID NO: 486455 - DNA, 30 bp, Artificial Sequence
  Synthetic oligonucleotide
cagttccctgaaggccttggtgtccggaca

SEQ ID NO: 486456 - DNA, 30 bp, Artificial Sequence
  Synthetic oligonucleotide
atgcgttccagtaccacttgacggcggaca

SEQ ID NO: 486457 - DNA, 30 bp, Artificial Sequence
  Synthetic oligonucleotide
tgttcaattatgagtacagccttgcggaca

SEQ ID NO: 486458 - DNA, 30 bp, Artificial Sequence
  Synthetic oligonucleotide
ccttatttgaacatagcaatggttcggaca

SEQ ID NO: 486459 - DNA, 30 bp, Artificial Sequence
  Synthetic oligonucleotide
aagtcgccctccgattcaagtaaggggaca

SEQ ID NO: 486460 - DNA, 30 bp, Artificial Sequence
  Synthetic oligonucleotide
gaaaatgagatatctgcccctactgggaca

SEQ ID NO: 486461 - DNA, 30 bp, Artificial Sequence
  Synthetic oligonucleotide
cccctaaagggtacgctggtgtactggaca

SEQ ID NO: 486462 - DNA, 30 bp, Artificial Sequence
  Synthetic oligonucleotide
cgattttggtagcttcccccgacctggaca

SEQ ID NO: 486463 - DNA, 30 bp, Artificial Sequence
  Synthetic oligonucleotide
tgtccgcgcgaggacacacagcgctggaca

SEQ ID NO: 486464 - DNA, 30 bp, Artificial Sequence
  Synthetic oligonucleotide
cagttatttaagggccacctactctggaca

SEQ ID NO: 486465 - DNA, 30 bp, Artificial Sequence
  Synthetic oligonucleotide
gtaacagccgtttcggctactgtctggaca

SEQ ID NO: 486466 - DNA, 30 bp, Artificial Sequence
  Synthetic oligonucleotide
tattaatttttcgattgtcaccagtggaca

SEQ ID NO: 486467 - DNA, 30 bp, Artificial Sequence
  Synthetic oligonucleotide
gctgttgatgcctctccaaattattggaca

SEQ ID NO: 486468 - DNA, 30 bp, Artificial Sequence
  Synthetic oligonucleotide
ggcgcctatttatttatgggcctttggaca

SEQ ID NO: 486469 - DNA, 30 bp, Artificial Sequence
  Synthetic oligonucleotide
atgggggaacgcgaccgcgggctttggaca

SEQ ID NO: 486470 - DNA, 30 bp, Artificial Sequence
  Synthetic oligonucleotide
acggcccgcaacgacaatgggggaatgaca

SEQ ID NO: 486471 - DNA, 30 bp, Artificial Sequence
  Synthetic oligonucleotide
cactctagctgggttatctttagcatgaca

SEQ ID NO: 486472 - DNA, 30 bp, Artificial Sequence
  Synthetic oligonucleotide
gactgctaatgttatgtgttctagatgaca

SEQ ID NO: 486473 - DNA, 30 bp, Artificial Sequence
  Synthetic oligonucleotide
ggtatgcaggcctgatatttttatatgaca

SEQ ID NO: 486474 - DNA, 30 bp, Artificial Sequence
  Synthetic oligonucleotide
gaaaaagcatactataaatctatactgaca

SEQ ID NO: 486475 - DNA, 30 bp, Artificial Sequence
  Synthetic oligonucleotide
tagattcctccgaaccacgtagccctgaca

SEQ ID NO: 486476 - DNA, 30 bp, Artificial Sequence
  Synthetic oligonucleotide
actcacggcaatgaacgggtatgcctgaca

SEQ ID NO: 486477 - DNA, 30 bp, Artificial Sequence
  Synthetic oligonucleotide
cgaactaagtgacatattctaagagtgaca

SEQ ID NO: 486478 - DNA, 30 bp, Artificial Sequence
  Synthetic oligonucleotide
aattgatttctttaataatggggcgtgaca

SEQ ID NO: 486479 - DNA, 30 bp, Artificial Sequence
  Synthetic oligonucleotide
ggccatcgtggcgcggccgcagcggtgaca

SEQ ID NO: 486480 - DNA, 30 bp, Artificial Sequence
  Synthetic oligonucleotide
cgcgagattcgtaaatgtcgcgatgtgaca

SEQ ID NO: 486481 - DNA, 30 bp, Artificial Sequence
  Synthetic oligonucleotide
tttagcgtcttgattagcgttagtgtgaca

SEQ ID NO: 486482 - DNA, 30 bp, Artificial Sequence
  Synthetic oligonucleotide
ttaagcagaatagtcggcacccaattgaca

SEQ ID NO: 486483 - DNA, 30 bp, Artificial Sequence
  Synthetic oligonucleotide
tacaaattaaggacaagttgagtattgaca

SEQ ID NO: 486484 - DNA, 30 bp, Artificial Sequence
  Synthetic oligonucleotide
tgggtccatgttaacattacggtattgaca

SEQ ID NO: 486485 - DNA, 30 bp, Artificial Sequence
  Synthetic oligonucleotide
gcaccgtctcgtccattcatttacttgaca

SEQ ID NO: 486486 - DNA, 30 bp, Artificial Sequence
  Synthetic oligonucleotide
cattttttcgaagcaggaccatcgttgaca

SEQ ID NO: 486487 - DNA, 30 bp, Artificial Sequence
  Synthetic oligonucleotide
gctatgcatgctgacatgttgtatttgaca

SEQ ID NO: 486488 - DNA, 30 bp, Artificial Sequence
  Synthetic oligonucleotide
gtgtttaaacttagagaggagcgtttgaca

SEQ ID NO: 486489 - DNA, 30 bp, Artificial Sequence
  Synthetic oligonucleotide
cttgcgggctaagggcatgcgcaaaataca

SEQ ID NO: 486490 - DNA, 30 bp, Artificial Sequence
  Synthetic oligonucleotide
atccaaaaaaagtgcttgtatcaaaataca

SEQ ID NO: 486491 - DNA, 30 bp, Artificial Sequence
  Synthetic oligonucleotide
tctcgtcctctgtcggctgatgaaaataca

SEQ ID NO: 486492 - DNA, 30 bp, Artificial Sequence
  Synthetic oligonucleotide
ggaatgcacgacataatgcccagaaataca

SEQ ID NO: 486493 - DNA, 31 bp, Artificial Sequence
  Synthetic oligonucleotide
ggtccacgcatgacgcgaccgcaggaataca

SEQ ID NO: 486494 - DNA, 30 bp, Artificial Sequence
  Synthetic oligonucleotide
gatattgctgttacttgttcccataataca

SEQ ID NO: 486495 - DNA, 30 bp, Artificial Sequence
  Synthetic oligonucleotide
tcatgttgatcacagtgggctcataataca

SEQ ID NO: 486496 - DNA, 30 bp, Artificial Sequence
  Synthetic oligonucleotide
aagtgtagctatgtccgcagccgtaataca

SEQ ID NO: 486497 - DNA, 30 bp, Artificial Sequence
  Synthetic oligonucleotide
aaaccgctggcatctgagaattcacataca

SEQ ID NO: 486498 - DNA, 30 bp, Artificial Sequence
  Synthetic oligonucleotide
tctacccgtttgcaaagtatgtgccataca

SEQ ID NO: 486499 - DNA, 30 bp, Artificial Sequence
  Synthetic oligonucleotide
gtattttacgctggtcgacctgggcataca

SEQ ID NO: 486500 - DNA, 30 bp, Artificial Sequence
  Synthetic oligonucleotide
tgagaaccgacgccggatgtattgcataca

SEQ ID NO: 486501 - DNA, 30 bp, Artificial Sequence
  Synthetic oligonucleotide
cgggaggttatccctcatacacctcataca

SEQ ID NO: 486502 - DNA, 30 bp, Artificial Sequence
  Synthetic oligonucleotide
tcccgggcgtcgatatggcaccgtcataca

SEQ ID NO: 486503 - DNA, 30 bp, Artificial Sequence
  Synthetic oligonucleotide
atacgcattactgtagcttttattcataca

SEQ ID NO: 486504 - DNA, 30 bp, Artificial Sequence
  Synthetic oligonucleotide
aaaatagaggagctatttcttgttcataca

SEQ ID NO: 486505 - DNA, 30 bp, Artificial Sequence
  Synthetic oligonucleotide
tatagatgctacgtaacagtgtttcataca

SEQ ID NO: 486506 - DNA, 25 bp, Artificial Sequence
  Synthetic oligonucleotide
ttagcaatatacggggcacgataca

SEQ ID NO: 486507 - DNA, 30 bp, Artificial Sequence
  Synthetic oligonucleotide
atttgtcgctaagctccacttagcgataca

SEQ ID NO: 486508 - DNA, 30 bp, Artificial Sequence
  Synthetic oligonucleotide
tacaaattcaggttcttcggacaggataca

SEQ ID NO: 486509 - DNA, 30 bp, Artificial Sequence
  Synthetic oligonucleotide
gaattaggagtttatatttgtagggataca

SEQ ID NO: 486510 - DNA, 30 bp, Artificial Sequence
  Synthetic oligonucleotide
tgaagaactgctaacctgattcgggataca

SEQ ID NO: 486511 - DNA, 30 bp, Artificial Sequence
  Synthetic oligonucleotide
aagattggccgccttgcacgcaatgataca

SEQ ID NO: 486512 - DNA, 30 bp, Artificial Sequence
  Synthetic oligonucleotide
tcaacctcacggtactttaccattgataca

SEQ ID NO: 486513 - DNA, 30 bp, Artificial Sequence
  Synthetic oligonucleotide
atatttaatcattagcagccttaatataca

SEQ ID NO: 486514 - DNA, 30 bp, Artificial Sequence
  Synthetic oligonucleotide
gaacgctggtttgccgtaaaccactataca

SEQ ID NO: 486515 - DNA, 30 bp, Artificial Sequence
  Synthetic oligonucleotide
attcgcacctacaagccagtttgttataca

SEQ ID NO: 486516 - DNA, 30 bp, Artificial Sequence
  Synthetic oligonucleotide
gacattagcgtcccgatcctaggaactaca

SEQ ID NO: 486517 - DNA, 29 bp, Artificial Sequence
  Synthetic oligonucleotide
ccattgtgtataatgtggtaataactaca

SEQ ID NO: 486518 - DNA, 30 bp, Artificial Sequence
  Synthetic oligonucleotide
cgcacttgctacttcttgtaactgactaca

SEQ ID NO: 486519 - DNA, 30 bp, Artificial Sequence
  Synthetic oligonucleotide
aacaaccccaggtccaattcaacacctaca

SEQ ID NO: 486520 - DNA, 30 bp, Artificial Sequence
  Synthetic oligonucleotide
tgcttcaatatgggctataatagccctaca

SEQ ID NO: 486521 - DNA, 30 bp, Artificial Sequence
  Synthetic oligonucleotide
gtttcttccggattggtggcagagcctaca

SEQ ID NO: 486522 - DNA, 30 bp, Artificial Sequence
  Synthetic oligonucleotide
aaccatctgccgaaatcaatgtagcctaca

SEQ ID NO: 486523 - DNA, 30 bp, Artificial Sequence
  Synthetic oligonucleotide
gtaaaaaagggccgtgccacccccgctaca

SEQ ID NO: 486524 - DNA, 30 bp, Artificial Sequence
  Synthetic oligonucleotide
cgcggaattgtaccgtgagttcgcgctaca

SEQ ID NO: 486525 - DNA, 30 bp, Artificial Sequence
  Synthetic oligonucleotide
ctttatggcttgtgcaatgtccatgctaca

SEQ ID NO: 486526 - DNA, 30 bp, Artificial Sequence
  Synthetic oligonucleotide
tgcagagcctgtgtggttaggtctgctaca

SEQ ID NO: 486527 - DNA, 30 bp, Artificial Sequence
  Synthetic oligonucleotide
tccaatatcccgttaccgtacggatctaca

SEQ ID NO: 486528 - DNA, 30 bp, Artificial Sequence
  Synthetic oligonucleotide
tttttattgacattgtacaatatgtctaca

SEQ ID NO: 486529 - DNA, 30 bp, Artificial Sequence
  Synthetic oligonucleotide
gaaaccgggggaacccgggaagattctaca

SEQ ID NO: 486530 - DNA, 30 bp, Artificial Sequence
  Synthetic oligonucleotide
tttcaaacccccaacttaggtgcttctaca

SEQ ID NO: 486531 - DNA, 30 bp, Artificial Sequence
  Synthetic oligonucleotide
tggttccctctagtattaggaaccagtaca

SEQ ID NO: 486532 - DNA, 30 bp, Artificial Sequence
  Synthetic oligonucleotide
ctcggcttttatctgcttactagcagtaca

SEQ ID NO: 486533 - DNA, 30 bp, Artificial Sequence
  Synthetic oligonucleotide
acatgatacctagatggaagccgcagtaca

SEQ ID NO: 486534 - DNA, 30 bp, Artificial Sequence
  Synthetic oligonucleotide
ctgaaaacaggacgcagatcatggagtaca

SEQ ID NO: 486535 - DNA, 30 bp, Artificial Sequence
  Synthetic oligonucleotide
catacttcttgtatggggacgctgagtaca

SEQ ID NO: 486536 - DNA, 30 bp, Artificial Sequence
  Synthetic oligonucleotide
gtatagttacactacagggattctagtaca

SEQ ID NO: 486537 - DNA, 30 bp, Artificial Sequence
  Synthetic oligonucleotide
gatcatcgtatcactgtcaccagtagtaca

SEQ ID NO: 486538 - DNA, 30 bp, Artificial Sequence
  Synthetic oligonucleotide
tagatgctatgactgctcatgagacgtaca

SEQ ID NO: 486539 - DNA, 30 bp, Artificial Sequence
  Synthetic oligonucleotide
tgggaataattacggagcatggagcgtaca

SEQ ID NO: 486540 - DNA, 30 bp, Artificial Sequence
  Synthetic oligonucleotide
tattcgtgtatctacaggaaacatcgtaca

SEQ ID NO: 486541 - DNA, 30 bp, Artificial Sequence
  Synthetic oligonucleotide
tggcattacgacgcgttaaagtgtcgtaca

SEQ ID NO: 486542 - DNA, 30 bp, Artificial Sequence
  Synthetic oligonucleotide
tttatgctttataacgacacgattcgtaca

SEQ ID NO: 486543 - DNA, 30 bp, Artificial Sequence
  Synthetic oligonucleotide
tatattagataggacaccctacttcgtaca

SEQ ID NO: 486544 - DNA, 30 bp, Artificial Sequence
  Synthetic oligonucleotide
gtggattcataatcatagatacgaggtaca

SEQ ID NO: 486545 - DNA, 30 bp, Artificial Sequence
  Synthetic oligonucleotide
agttcgacgcatcaataactccgaggtaca

SEQ ID NO: 486546 - DNA, 30 bp, Artificial Sequence
  Synthetic oligonucleotide
cgggccgggacttggtggttcataggtaca

SEQ ID NO: 486547 - DNA, 30 bp, Artificial Sequence
  Synthetic oligonucleotide
gtcatggctggggcctgcgaacccggtaca

SEQ ID NO: 486548 - DNA, 30 bp, Artificial Sequence
  Synthetic oligonucleotide
gccgttacatgccgggtaccatccggtaca

SEQ ID NO: 486549 - DNA, 30 bp, Artificial Sequence
  Synthetic oligonucleotide
tcgtccagaccgtttaccgggcatggtaca

SEQ ID NO: 486550 - DNA, 30 bp, Artificial Sequence
  Synthetic oligonucleotide
cgtcatcataaatgcatgtcaagtggtaca

SEQ ID NO: 486551 - DNA, 30 bp, Artificial Sequence
  Synthetic oligonucleotide
tttcacggttatggttgtaaatgtggtaca

SEQ ID NO: 486552 - DNA, 30 bp, Artificial Sequence
  Synthetic oligonucleotide
aggttccttgcagcgatgacgtttggtaca

SEQ ID NO: 486553 - DNA, 30 bp, Artificial Sequence
  Synthetic oligonucleotide
acgtggatttctttttgagtagaatgtaca

SEQ ID NO: 486554 - DNA, 30 bp, Artificial Sequence
  Synthetic oligonucleotide
acctgcgtcgtagaacatggctaatgtaca

SEQ ID NO: 486555 - DNA, 30 bp, Artificial Sequence
  Synthetic oligonucleotide
gatgtataaaagataagacggagctgtaca

SEQ ID NO: 486556 - DNA, 30 bp, Artificial Sequence
  Synthetic oligonucleotide
ataaattcttcaggatatcggagctgtaca

SEQ ID NO: 486557 - DNA, 30 bp, Artificial Sequence
  Synthetic oligonucleotide
aaattacggttcggctcttattgctgtaca

SEQ ID NO: 486558 - DNA, 30 bp, Artificial Sequence
  Synthetic oligonucleotide
tgatttgtttgtacatgacgtagttgtaca

SEQ ID NO: 486559 - DNA, 30 bp, Artificial Sequence
  Synthetic oligonucleotide
gtgcggaactgttcgggctttctttgtaca

SEQ ID NO: 486560 - DNA, 30 bp, Artificial Sequence
  Synthetic oligonucleotide
cgtgacatgtgcatatgcgacggaattaca

SEQ ID NO: 486561 - DNA, 30 bp, Artificial Sequence
  Synthetic oligonucleotide
attgactatttgggggtctattgaattaca

SEQ ID NO: 486562 - DNA, 30 bp, Artificial Sequence
  Synthetic oligonucleotide
aatggccacgggccgaccgtgataattaca

SEQ ID NO: 486563 - DNA, 30 bp, Artificial Sequence
  Synthetic oligonucleotide
tacatacatgagggttgtatcttaattaca

SEQ ID NO: 486564 - DNA, 30 bp, Artificial Sequence
  Synthetic oligonucleotide
aatgagacccgtatagacaatgtgattaca

SEQ ID NO: 486565 - DNA, 30 bp, Artificial Sequence
  Synthetic oligonucleotide
taaagcttgactctgcccaaacctattaca

SEQ ID NO: 486566 - DNA, 30 bp, Artificial Sequence
  Synthetic oligonucleotide
gggcgagtaatgttcagtaaaagtattaca

SEQ ID NO: 486567 - DNA, 30 bp, Artificial Sequence
  Synthetic oligonucleotide
cccgtagacgtatgatttgcgagacttaca

SEQ ID NO: 486568 - DNA, 30 bp, Artificial Sequence
  Synthetic oligonucleotide
acattgcgttggagacgacgccagcttaca

SEQ ID NO: 486569 - DNA, 30 bp, Artificial Sequence
  Synthetic oligonucleotide
aaaccgcatatacgccgccgaacgcttaca

SEQ ID NO: 486570 - DNA, 30 bp, Artificial Sequence
  Synthetic oligonucleotide
aagttccaaacccgtgcttcatatcttaca

SEQ ID NO: 486571 - DNA, 30 bp, Artificial Sequence
  Synthetic oligonucleotide
acccggtgagccatttatcggactcttaca

SEQ ID NO: 486572 - DNA, 30 bp, Artificial Sequence
  Synthetic oligonucleotide
tgattgtttcgagccagaccctttcttaca

SEQ ID NO: 486573 - DNA, 30 bp, Artificial Sequence
  Synthetic oligonucleotide
tgggcgctggttatcgacccggtagttaca

SEQ ID NO: 486574 - DNA, 30 bp, Artificial Sequence
  Synthetic oligonucleotide
gattcttatttgaattccggtgtagttaca

SEQ ID NO: 486575 - DNA, 30 bp, Artificial Sequence
  Synthetic oligonucleotide
gagagtcgcacaagtctttgctgcgttaca

SEQ ID NO: 486576 - DNA, 30 bp, Artificial Sequence
  Synthetic oligonucleotide
gtaatccatattctgggaattctcgttaca

SEQ ID NO: 486577 - DNA, 30 bp, Artificial Sequence
  Synthetic oligonucleotide
cgtatccgaacatcacaccgaactgttaca

SEQ ID NO: 486578 - DNA, 30 bp, Artificial Sequence
  Synthetic oligonucleotide
gttattatggatatgcccatcggtgttaca

SEQ ID NO: 486579 - DNA, 30 bp, Artificial Sequence
  Synthetic oligonucleotide
ctcagatttagggtgcccgtaattgttaca

SEQ ID NO: 486580 - DNA, 30 bp, Artificial Sequence
  Synthetic oligonucleotide
gacgccggccaataacagacgattgttaca

SEQ ID NO: 486581 - DNA, 30 bp, Artificial Sequence
  Synthetic oligonucleotide
cctaatctagtaacaaggttggttgttaca

SEQ ID NO: 486582 - DNA, 30 bp, Artificial Sequence
  Synthetic oligonucleotide
gagaaatgtatcggcacagagtttgttaca

SEQ ID NO: 486583 - DNA, 30 bp, Artificial Sequence
  Synthetic oligonucleotide
gcatgcggagtgatttggccgtaatttaca

SEQ ID NO: 486584 - DNA, 30 bp, Artificial Sequence
  Synthetic oligonucleotide
cgaactggagtttgtcgtattcgatttaca

SEQ ID NO: 486585 - DNA, 30 bp, Artificial Sequence
  Synthetic oligonucleotide
ttgatcaaagtcggttttctagtatttaca

SEQ ID NO: 486586 - DNA, 30 bp, Artificial Sequence
  Synthetic oligonucleotide
caccgtaaggcgcttaccaccttatttaca

SEQ ID NO: 486587 - DNA, 30 bp, Artificial Sequence
  Synthetic oligonucleotide
atttccctgatagtatggttatgctttaca

SEQ ID NO: 486588 - DNA, 30 bp, Artificial Sequence
  Synthetic oligonucleotide
tctataaaagtcttttaggggtagtttaca

SEQ ID NO: 486589 - DNA, 30 bp, Artificial Sequence
  Synthetic oligonucleotide
ctgataatgatgaacttatggatttttaca

SEQ ID NO: 486590 - DNA, 30 bp, Artificial Sequence
  Synthetic oligonucleotide
tctgaggacgtagaatggagtgtcaaacca

SEQ ID NO: 486591 - DNA, 30 bp, Artificial Sequence
  Synthetic oligonucleotide
caagcgtctctttcgtggtagcagaaacca

SEQ ID NO: 486592 - DNA, 30 bp, Artificial Sequence
  Synthetic oligonucleotide
tagtacataatgatccccatgtagaaacca

SEQ ID NO: 486593 - DNA, 30 bp, Artificial Sequence
  Synthetic oligonucleotide
gtcgcaggacgtatttcatgcgggaaacca

SEQ ID NO: 486594 - DNA, 30 bp, Artificial Sequence
  Synthetic oligonucleotide
atataaattggtcttagttgtatgaaacca

SEQ ID NO: 486595 - DNA, 30 bp, Artificial Sequence
  Synthetic oligonucleotide
cagacgcatcagagtcaggacctgaaacca

SEQ ID NO: 486596 - DNA, 30 bp, Artificial Sequence
  Synthetic oligonucleotide
ctcagtttaacaatctcggcgtttaaacca

SEQ ID NO: 486597 - DNA, 30 bp, Artificial Sequence
  Synthetic oligonucleotide
tattttcctctacacccccacagacaacca

SEQ ID NO: 486598 - DNA, 30 bp, Artificial Sequence
  Synthetic oligonucleotide
gcaatcgatatctcaaggttgcgacaacca

SEQ ID NO: 486599 - DNA, 30 bp, Artificial Sequence
  Synthetic oligonucleotide
atccactccttatcagaacacgagcaacca

SEQ ID NO: 486600 - DNA, 30 bp, Artificial Sequence
  Synthetic oligonucleotide
ttgcgtgatccggagtaacgcgctcaacca

SEQ ID NO: 486601 - DNA, 30 bp, Artificial Sequence
  Synthetic oligonucleotide
caccgtgacacatagtaacattgtcaacca

SEQ ID NO: 486602 - DNA, 30 bp, Artificial Sequence
  Synthetic oligonucleotide
ttatttgtaatacgtagtttatgcgaacca

SEQ ID NO: 486603 - DNA, 30 bp, Artificial Sequence
  Synthetic oligonucleotide
ttcgccttccgaaacctatcaatcgaacca

SEQ ID NO: 486604 - DNA, 30 bp, Artificial Sequence
  Synthetic oligonucleotide
tgttaacaagacgaagcagccccggaacca

SEQ ID NO: 486605 - DNA, 30 bp, Artificial Sequence
  Synthetic oligonucleotide
tggtagcgatctcattatcctctggaacca

SEQ ID NO: 486606 - DNA, 30 bp, Artificial Sequence
  Synthetic oligonucleotide
aatactttgtttcgtagcgagtaataacca

SEQ ID NO: 486607 - DNA, 30 bp, Artificial Sequence
  Synthetic oligonucleotide
tggctgttctttactttgacgatataacca

SEQ ID NO: 486608 - DNA, 30 bp, Artificial Sequence
  Synthetic oligonucleotide
aagagcataggcgcttaaattaggtaacca

SEQ ID NO: 486609 - DNA, 30 bp, Artificial Sequence
  Synthetic oligonucleotide
gttgaccataagtggcaaggatttacacca

SEQ ID NO: 486610 - DNA, 30 bp, Artificial Sequence
  Synthetic oligonucleotide
tccggctgcactcccctccactaaccacca

SEQ ID NO: 486611 - DNA, 30 bp, Artificial Sequence
  Synthetic oligonucleotide
ggtctgttccaacttacccggtggccacca

SEQ ID NO: 486612 - DNA, 30 bp, Artificial Sequence
  Synthetic oligonucleotide
gaccgaacgtatctttttgggcctccacca

SEQ ID NO: 486613 - DNA, 30 bp, Artificial Sequence
  Synthetic oligonucleotide
ctggcacacttgaattagtgagctccacca

SEQ ID NO: 486614 - DNA, 30 bp, Artificial Sequence
  Synthetic oligonucleotide
gcagggaggtcataaaggatcagtccacca

SEQ ID NO: 486615 - DNA, 30 bp, Artificial Sequence
  Synthetic oligonucleotide
cgatgaatatcacacagaattgacgcacca

SEQ ID NO: 486616 - DNA, 30 bp, Artificial Sequence
  Synthetic oligonucleotide
gtttatttggcgacgagcacttccgcacca

SEQ ID NO: 486617 - DNA, 30 bp, Artificial Sequence
  Synthetic oligonucleotide
tgttgagcctcgtcctgaagttccgcacca

SEQ ID NO: 486618 - DNA, 30 bp, Artificial Sequence
  Synthetic oligonucleotide
ccgccatgtccgcttgtatgaatcgcacca

SEQ ID NO: 486619 - DNA, 30 bp, Artificial Sequence
  Synthetic oligonucleotide
gaacaatgacgttgtgaagccatcgcacca

SEQ ID NO: 486620 - DNA, 30 bp, Artificial Sequence
  Synthetic oligonucleotide
tatcgcgaatggtatgctcgtaaggcacca

SEQ ID NO: 486621 - DNA, 30 bp, Artificial Sequence
  Synthetic oligonucleotide
tcatactttagaaacgcacttaaggcacca

SEQ ID NO: 486622 - DNA, 30 bp, Artificial Sequence
  Synthetic oligonucleotide
ggcatcttcgcatccttgaaggcggcacca

SEQ ID NO: 486623 - DNA, 30 bp, Artificial Sequence
  Synthetic oligonucleotide
attaaaacgcatgaatcaatcggggcacca

SEQ ID NO: 486624 - DNA, 30 bp, Artificial Sequence
  Synthetic oligonucleotide
gttcagtatagatagttgctcgtggcacca

SEQ ID NO: 486625 - DNA, 30 bp, Artificial Sequence
  Synthetic oligonucleotide
caaccttgacgcgtaagcataatatcacca

SEQ ID NO: 486626 - DNA, 30 bp, Artificial Sequence
  Synthetic oligonucleotide
aatcctgggtatgtttcgaccgtatcacca

SEQ ID NO: 486627 - DNA, 30 bp, Artificial Sequence
  Synthetic oligonucleotide
tatttttataagcttgatccaaattcacca

SEQ ID NO: 486628 - DNA, 30 bp, Artificial Sequence
  Synthetic oligonucleotide
acatcagcacggtcttatagaggttcacca

SEQ ID NO: 486629 - DNA, 30 bp, Artificial Sequence
  Synthetic oligonucleotide
gatcctccgatgatacattgattttcacca

SEQ ID NO: 486630 - DNA, 30 bp, Artificial Sequence
  Synthetic oligonucleotide
acacgcctctatgctgtgctcacaagacca

SEQ ID NO: 486631 - DNA, 30 bp, Artificial Sequence
  Synthetic oligonucleotide
accatattagaggcagtcgttcgaagacca

SEQ ID NO: 486632 - DNA, 30 bp, Artificial Sequence
  Synthetic oligonucleotide
aaggtcttgagtgcagcgatcggaagacca

SEQ ID NO: 486633 - DNA, 30 bp, Artificial Sequence
  Synthetic oligonucleotide
caatttacacaggggcctggtctaagacca

SEQ ID NO: 486634 - DNA, 30 bp, Artificial Sequence
  Synthetic oligonucleotide
cgttcctcctttaagtgtccacgcagacca

SEQ ID NO: 486635 - DNA, 30 bp, Artificial Sequence
  Synthetic oligonucleotide
gaaactgtcttgatatacttcgggagacca

SEQ ID NO: 486636 - DNA, 30 bp, Artificial Sequence
  Synthetic oligonucleotide
cggcttcggtaaggggcagcacagcgacca

SEQ ID NO: 486637 - DNA, 30 bp, Artificial Sequence
  Synthetic oligonucleotide
gcgccagcaatgagtattctacctcgacca

SEQ ID NO: 486638 - DNA, 30 bp, Artificial Sequence
  Synthetic oligonucleotide
tagggcaggggtagggaattcggaggacca

SEQ ID NO: 486639 - DNA, 30 bp, Artificial Sequence
  Synthetic oligonucleotide
attgtgatgtgatactgggtatcgggacca

SEQ ID NO: 486640 - DNA, 31 bp, Artificial Sequence
  Synthetic oligonucleotide
gctagcgtggtcgggctattccggtggacca

SEQ ID NO: 486641 - DNA, 30 bp, Artificial Sequence
  Synthetic oligonucleotide
gcacaaagcttcgcgtaaaagcgatgacca

SEQ ID NO: 486642 - DNA, 30 bp, Artificial Sequence
  Synthetic oligonucleotide
gaatcgtactaaaccgttgcaaactgacca

SEQ ID NO: 486643 - DNA, 30 bp, Artificial Sequence
  Synthetic oligonucleotide
ggttaatatcgtgcaaaagcagcctgacca

SEQ ID NO: 486644 - DNA, 30 bp, Artificial Sequence
  Synthetic oligonucleotide
actcccggccaactaagctgacattgacca

SEQ ID NO: 486645 - DNA, 30 bp, Artificial Sequence
  Synthetic oligonucleotide
ctttgcactaccagacgcgcgggttgacca

SEQ ID NO: 486646 - DNA, 30 bp, Artificial Sequence
  Synthetic oligonucleotide
cctaggtgatcgggcaacgatacaatacca

SEQ ID NO: 486647 - DNA, 30 bp, Artificial Sequence
  Synthetic oligonucleotide
cggtgaacgtccacggtgagcgtaatacca

SEQ ID NO: 486648 - DNA, 30 bp, Artificial Sequence
  Synthetic oligonucleotide
attgagcataggtaatactcggctatacca

SEQ ID NO: 486649 - DNA, 30 bp, Artificial Sequence
  Synthetic oligonucleotide
atcgcaagctcggccgctaattctatacca

SEQ ID NO: 486650 - DNA, 30 bp, Artificial Sequence
  Synthetic oligonucleotide
acatttagttggtatactttggttatacca

SEQ ID NO: 486651 - DNA, 30 bp, Artificial Sequence
  Synthetic oligonucleotide
atcctgtatacggccaatttatagctacca

SEQ ID NO: 486652 - DNA, 30 bp, Artificial Sequence
  Synthetic oligonucleotide
gcttcgtgtttagcgctatcatcgctacca

SEQ ID NO: 486653 - DNA, 30 bp, Artificial Sequence
  Synthetic oligonucleotide
gctctcatgggtcaacattggctgctacca

SEQ ID NO: 486654 - DNA, 30 bp, Artificial Sequence
  Synthetic oligonucleotide
gctgcataagatgcaccgcaaaatctacca

SEQ ID NO: 486655 - DNA, 30 bp, Artificial Sequence
  Synthetic oligonucleotide
ctgagatgctccagacgctccaatctacca

SEQ ID NO: 486656 - DNA, 30 bp, Artificial Sequence
  Synthetic oligonucleotide
gccttagatacgcaactctgggctctacca

SEQ ID NO: 486657 - DNA, 30 bp, Artificial Sequence
  Synthetic oligonucleotide
tacagtctctactgtagagagcgtctacca

SEQ ID NO: 486658 - DNA, 30 bp, Artificial Sequence
  Synthetic oligonucleotide
tgtttgattttctgattgcagtgcgtacca

SEQ ID NO: 486659 - DNA, 30 bp, Artificial Sequence
  Synthetic oligonucleotide
gcccatcgaaactgatagtagatggtacca

SEQ ID NO: 486660 - DNA, 30 bp, Artificial Sequence
  Synthetic oligonucleotide
gatgtacttgcatcggcaggccatgtacca

SEQ ID NO: 486661 - DNA, 30 bp, Artificial Sequence
  Synthetic oligonucleotide
caacatatacgggaggttgcttcattacca

SEQ ID NO: 486662 - DNA, 30 bp, Artificial Sequence
  Synthetic oligonucleotide
acagtcggatacagccttgtttgattacca

SEQ ID NO: 486663 - DNA, 30 bp, Artificial Sequence
  Synthetic oligonucleotide
gtggacggttagtcctcaaacaagttacca

SEQ ID NO: 486664 - DNA, 30 bp, Artificial Sequence
  Synthetic oligonucleotide
cccatacaaaaatggtcacggaggttacca

SEQ ID NO: 486665 - DNA, 30 bp, Artificial Sequence
  Synthetic oligonucleotide
gagtgcgtcgggctgggaagaactttacca

SEQ ID NO: 486666 - DNA, 30 bp, Artificial Sequence
  Synthetic oligonucleotide
agtgataaggtatggtatgtaattttacca

SEQ ID NO: 486667 - DNA, 30 bp, Artificial Sequence
  Synthetic oligonucleotide
tttatggggcagactatttttaagaaccca

SEQ ID NO: 486668 - DNA, 30 bp, Artificial Sequence
  Synthetic oligonucleotide
gacctcttctgagtcgcattaactaaccca

SEQ ID NO: 486669 - DNA, 30 bp, Artificial Sequence
  Synthetic oligonucleotide
attgggatagcctattcagcagttaaccca

SEQ ID NO: 486670 - DNA, 30 bp, Artificial Sequence
  Synthetic oligonucleotide
gctggtctttataagtccggttgacaccca

SEQ ID NO: 486671 - DNA, 30 bp, Artificial Sequence
  Synthetic oligonucleotide
gaatctcggaatctcgggtagtaccaccca

SEQ ID NO: 486672 - DNA, 30 bp, Artificial Sequence
  Synthetic oligonucleotide
gtttccatggcactatagtcgggtcaccca

SEQ ID NO: 486673 - DNA, 30 bp, Artificial Sequence
  Synthetic oligonucleotide
tgagcgatgcgggtacttaataaagaccca

SEQ ID NO: 486674 - DNA, 30 bp, Artificial Sequence
  Synthetic oligonucleotide
agggccaatcccctattgccttaagaccca

SEQ ID NO: 486675 - DNA, 30 bp, Artificial Sequence
  Synthetic oligonucleotide
ggcccgttaatgaggcaatttggagaccca

SEQ ID NO: 486676 - DNA, 30 bp, Artificial Sequence
  Synthetic oligonucleotide
gccgcctcgctcgtagcattctaggaccca

SEQ ID NO: 486677 - DNA, 30 bp, Artificial Sequence
  Synthetic oligonucleotide
gccggtaatggaataatcctatgataccca

SEQ ID NO: 486678 - DNA, 30 bp, Artificial Sequence
  Synthetic oligonucleotide
attcaattggtttgtgtaagtctgtaccca

SEQ ID NO: 486679 - DNA, 30 bp, Artificial Sequence
  Synthetic oligonucleotide
gcgcatggaacatatccagatttttaccca

SEQ ID NO: 486680 - DNA, 36 bp, Artificial Sequence
  Synthetic oligonucleotide
aagcttccgatgcttggttgccacatcgaaacccca

SEQ ID NO: 486681 - DNA, 30 bp, Artificial Sequence
  Synthetic oligonucleotide
attggggctgtagtagatgactcaacccca

SEQ ID NO: 486682 - DNA, 30 bp, Artificial Sequence
  Synthetic oligonucleotide
tggagctcggtaaaatcgttgagtacccca

SEQ ID NO: 486683 - DNA, 30 bp, Artificial Sequence
  Synthetic oligonucleotide
ccggtgttttgcagcgtctacggtacccca

SEQ ID NO: 486684 - DNA, 30 bp, Artificial Sequence
  Synthetic oligonucleotide
tctccgggctctgcctacgcgggaccccca

SEQ ID NO: 486685 - DNA, 30 bp, Artificial Sequence
  Synthetic oligonucleotide
gttaatactcctatagtttatttaccccca

SEQ ID NO: 486686 - DNA, 30 bp, Artificial Sequence
  Synthetic oligonucleotide
ccagcccaagacgcgcttcgtagcccccca

SEQ ID NO: 486687 - DNA, 30 bp, Artificial Sequence
  Synthetic oligonucleotide
ataacgcagtctgatcacgaagtgccccca

SEQ ID NO: 486688 - DNA, 30 bp, Artificial Sequence
  Synthetic oligonucleotide
attactaacgcttcccgggtaacagcccca

SEQ ID NO: 486689 - DNA, 30 bp, Artificial Sequence
  Synthetic oligonucleotide
agttagtaaaccacgttggatcgcgcccca

SEQ ID NO: 486690 - DNA, 30 bp, Artificial Sequence
  Synthetic oligonucleotide
acaccgctagtttggttagatgaggcccca

SEQ ID NO: 486691 - DNA, 30 bp, Artificial Sequence
  Synthetic oligonucleotide
ttaatgcttgtagagacacgactggcccca

SEQ ID NO: 486692 - DNA, 30 bp, Artificial Sequence
  Synthetic oligonucleotide
caagcattggcagcagcgcatcctgcccca

SEQ ID NO: 486693 - DNA, 30 bp, Artificial Sequence
  Synthetic oligonucleotide
tggtctttagtagccatcttaagtgcccca

SEQ ID NO: 486694 - DNA, 30 bp, Artificial Sequence
  Synthetic oligonucleotide
aaacaagtcatgtctggatgcagtgcccca

SEQ ID NO: 486695 - DNA, 30 bp, Artificial Sequence
  Synthetic oligonucleotide
gtatgggggcccggctggtttcgtgcccca

SEQ ID NO: 486696 - DNA, 30 bp, Artificial Sequence
  Synthetic oligonucleotide
acatgtgtcacaataaggaggggtgcccca

SEQ ID NO: 486697 - DNA, 30 bp, Artificial Sequence
  Synthetic oligonucleotide
acatgggagccagaaatgcttacgtcccca

SEQ ID NO: 486698 - DNA, 30 bp, Artificial Sequence
  Synthetic oligonucleotide
gtcattcgttgcatcgctctgctaagccca

SEQ ID NO: 486699 - DNA, 30 bp, Artificial Sequence
  Synthetic oligonucleotide
ggaggtccaggtacttggttgcacagccca

SEQ ID NO: 486700 - DNA, 30 bp, Artificial Sequence
  Synthetic oligonucleotide
atcttgtggtattgtgcgtcttcgagccca

SEQ ID NO: 486701 - DNA, 30 bp, Artificial Sequence
  Synthetic oligonucleotide
gttagctgaggactaaatagtgcacgccca

SEQ ID NO: 486702 - DNA, 30 bp, Artificial Sequence
  Synthetic oligonucleotide
aatgagtgatatgcctcttttagacgccca

SEQ ID NO: 486703 - DNA, 30 bp, Artificial Sequence
  Synthetic oligonucleotide
tctgcaaacggtgaacctaagctccgccca

SEQ ID NO: 486704 - DNA, 30 bp, Artificial Sequence
  Synthetic oligonucleotide
ggcagcgataggtgaccgacgaggcgccca

SEQ ID NO: 486705 - DNA, 31 bp, Artificial Sequence
  Synthetic oligonucleotide
tggaagcatggggggaggatatggtcgccca

SEQ ID NO: 486706 - DNA, 30 bp, Artificial Sequence
  Synthetic oligonucleotide
aggtctcatatcaacaagtatataggccca

SEQ ID NO: 486707 - DNA, 30 bp, Artificial Sequence
  Synthetic oligonucleotide
ctcgtgttagcgaatcgcgcatagggccca

SEQ ID NO: 486708 - DNA, 30 bp, Artificial Sequence
  Synthetic oligonucleotide
tacctactgcatgctagccctgggggccca

SEQ ID NO: 486709 - DNA, 30 bp, Artificial Sequence
  Synthetic oligonucleotide
aggcagctgtaagggtatacagctggccca

SEQ ID NO: 486710 - DNA, 30 bp, Artificial Sequence
  Synthetic oligonucleotide
attaatttcaaggtaacagctaaatgccca

SEQ ID NO: 486711 - DNA, 30 bp, Artificial Sequence
  Synthetic oligonucleotide
ttatcacaatcgggtcgattacgatgccca

SEQ ID NO: 486712 - DNA, 30 bp, Artificial Sequence
  Synthetic oligonucleotide
atgggattggatcggccaggacactgccca

SEQ ID NO: 486713 - DNA, 30 bp, Artificial Sequence
  Synthetic oligonucleotide
cagattgtggaccgccctcagatttgccca

SEQ ID NO: 486714 - DNA, 30 bp, Artificial Sequence
  Synthetic oligonucleotide
tttttttctaagggctcaattcgaatccca

SEQ ID NO: 486715 - DNA, 30 bp, Artificial Sequence
  Synthetic oligonucleotide
gccaccagaggtggaatctaaatgatccca

SEQ ID NO: 486716 - DNA, 30 bp, Artificial Sequence
  Synthetic oligonucleotide
agaagagttctggtgtatgaggaactccca

SEQ ID NO: 486717 - DNA, 30 bp, Artificial Sequence
  Synthetic oligonucleotide
ggccgttgttaaaagggacacggcgtccca

SEQ ID NO: 486718 - DNA, 30 bp, Artificial Sequence
  Synthetic oligonucleotide
tctggcttacgcagttatccattcgtccca

SEQ ID NO: 486719 - DNA, 30 bp, Artificial Sequence
  Synthetic oligonucleotide
tttgttacaaagtttctagcctatgtccca

SEQ ID NO: 486720 - DNA, 30 bp, Artificial Sequence
  Synthetic oligonucleotide
tgcagtcggcagaaccgggatcctgtccca

SEQ ID NO: 486721 - DNA, 30 bp, Artificial Sequence
  Synthetic oligonucleotide
tgacattgaaatgttcacgtctgtgtccca

SEQ ID NO: 486722 - DNA, 30 bp, Artificial Sequence
  Synthetic oligonucleotide
ggataatgggagacgcagtccaagttccca

SEQ ID NO: 486723 - DNA, 30 bp, Artificial Sequence
  Synthetic oligonucleotide
tttagtccagtggcagcattcacgttccca

SEQ ID NO: 486724 - DNA, 30 bp, Artificial Sequence
  Synthetic oligonucleotide
caccctcgcaggcaatccatgagtttccca

SEQ ID NO: 486725 - DNA, 30 bp, Artificial Sequence
  Synthetic oligonucleotide
cgtcaagtcaatgacgatcatagaaagcca

SEQ ID NO: 486726 - DNA, 30 bp, Artificial Sequence
  Synthetic oligonucleotide
ggactgctcaggagacttctgaacaagcca

SEQ ID NO: 486727 - DNA, 30 bp, Artificial Sequence
  Synthetic oligonucleotide
agctttagggttgccattaaaggcaagcca

SEQ ID NO: 486728 - DNA, 30 bp, Artificial Sequence
  Synthetic oligonucleotide
gtaatatcgagttaatagacccagaagcca

SEQ ID NO: 486729 - DNA, 30 bp, Artificial Sequence
  Synthetic oligonucleotide
gaggatcattgcggcatgggaaaacagcca

SEQ ID NO: 486730 - DNA, 30 bp, Artificial Sequence
  Synthetic oligonucleotide
gtatatgtatgacgcggagtgagacagcca

SEQ ID NO: 486731 - DNA, 30 bp, Artificial Sequence
  Synthetic oligonucleotide
cggttattcgtcagaccggacgcccagcca

SEQ ID NO: 486732 - DNA, 30 bp, Artificial Sequence
  Synthetic oligonucleotide
agctactactataatgcctgacggcagcca

SEQ ID NO: 486733 - DNA, 30 bp, Artificial Sequence
  Synthetic oligonucleotide
aggcgaagacgcttgctacgtcggcagcca

SEQ ID NO: 486734 - DNA, 30 bp, Artificial Sequence
  Synthetic oligonucleotide
ggtctttcttagcttaatttcctgcagcca

SEQ ID NO: 486735 - DNA, 30 bp, Artificial Sequence
  Synthetic oligonucleotide
gcaagtcgtatttgtagtgagtatcagcca

SEQ ID NO: 486736 - DNA, 30 bp, Artificial Sequence
  Synthetic oligonucleotide
aagggaagcggactaattatcaaagagcca

SEQ ID NO: 486737 - DNA, 30 bp, Artificial Sequence
  Synthetic oligonucleotide
acaggggttcgtggtatggagttagagcca

SEQ ID NO: 486738 - DNA, 30 bp, Artificial Sequence
  Synthetic oligonucleotide
ggggagacggatgtggacctgactgagcca

SEQ ID NO: 486739 - DNA, 30 bp, Artificial Sequence
  Synthetic oligonucleotide
agtttttttgtcaaaaccaatagatagcca

SEQ ID NO: 486740 - DNA, 30 bp, Artificial Sequence
  Synthetic oligonucleotide
gtggtatatatgtcctggtggggatagcca

SEQ ID NO: 486741 - DNA, 30 bp, Artificial Sequence
  Synthetic oligonucleotide
gtggtatatatgtcctggtggtgatagcca

SEQ ID NO: 486742 - DNA, 30 bp, Artificial Sequence
  Synthetic oligonucleotide
tagcagcccgcacgtttgaccgtatagcca

SEQ ID NO: 486743 - DNA, 30 bp, Artificial Sequence
  Synthetic oligonucleotide
gagggtcgattttccgactgaggctagcca

SEQ ID NO: 486744 - DNA, 30 bp, Artificial Sequence
  Synthetic oligonucleotide
tctactcttaggctggacgactagtagcca

SEQ ID NO: 486745 - DNA, 30 bp, Artificial Sequence
  Synthetic oligonucleotide
gcccaaggcccaacgcctacgctgtagcca

SEQ ID NO: 486746 - DNA, 30 bp, Artificial Sequence
  Synthetic oligonucleotide
tctgggttgaagccaaaaggcacaacgcca

SEQ ID NO: 486747 - DNA, 30 bp, Artificial Sequence
  Synthetic oligonucleotide
aattccattagtagaaaacattgcacgcca

SEQ ID NO: 486748 - DNA, 30 bp, Artificial Sequence
  Synthetic oligonucleotide
agttttcgtaccggtttaggcatcacgcca

SEQ ID NO: 486749 - DNA, 30 bp, Artificial Sequence
  Synthetic oligonucleotide
ctgggcgggtgaataggtttagtcacgcca

SEQ ID NO: 486750 - DNA, 30 bp, Artificial Sequence
  Synthetic oligonucleotide
agcgcctaaagcataagatgtcggacgcca

SEQ ID NO: 486751 - DNA, 30 bp, Artificial Sequence
  Synthetic oligonucleotide
acacgcgcccaactaggaaaggtgacgcca

SEQ ID NO: 486752 - DNA, 30 bp, Artificial Sequence
  Synthetic oligonucleotide
atattcccgaggcctacgattttgacgcca

SEQ ID NO: 486753 - DNA, 30 bp, Artificial Sequence
  Synthetic oligonucleotide
gtggaaatttaaccaaacggagaaccgcca

SEQ ID NO: 486754 - DNA, 30 bp, Artificial Sequence
  Synthetic oligonucleotide
agatattcttctttgtgttttttaccgcca

SEQ ID NO: 486755 - DNA, 30 bp, Artificial Sequence
  Synthetic oligonucleotide
gactgacctacggctatctttaacccgcca

SEQ ID NO: 486756 - DNA, 30 bp, Artificial Sequence
  Synthetic oligonucleotide
gatcaaggtgattacgcagttcccccgcca

SEQ ID NO: 486757 - DNA, 30 bp, Artificial Sequence
  Synthetic oligonucleotide
gctactgcgtggtctcctggagccccgcca

SEQ ID NO: 486758 - DNA, 30 bp, Artificial Sequence
  Synthetic oligonucleotide
gatcatgccggtagtcggagcagcccgcca

SEQ ID NO: 486759 - DNA, 30 bp, Artificial Sequence
  Synthetic oligonucleotide
tgtccaaccaaaccttttggacatccgcca

SEQ ID NO: 486760 - DNA, 30 bp, Artificial Sequence
  Synthetic oligonucleotide
gaaatttattatatgggtggaacagcgcca

SEQ ID NO: 486761 - DNA, 30 bp, Artificial Sequence
  Synthetic oligonucleotide
ctatgaccggtgagtggggttacagcgcca

SEQ ID NO: 486762 - DNA, 30 bp, Artificial Sequence
  Synthetic oligonucleotide
tacggatgttcgattatgatgccagcgcca

SEQ ID NO: 486763 - DNA, 30 bp, Artificial Sequence
  Synthetic oligonucleotide
gccgcaagacgttggacgtctccagcgcca

SEQ ID NO: 486764 - DNA, 30 bp, Artificial Sequence
  Synthetic oligonucleotide
taacgccacgcgcttgtggtattagcgcca

SEQ ID NO: 486765 - DNA, 30 bp, Artificial Sequence
  Synthetic oligonucleotide
gtaaatgcctttctacatcacgccgcgcca

SEQ ID NO: 486766 - DNA, 30 bp, Artificial Sequence
  Synthetic oligonucleotide
gcgcctctgacacggccctggtgcgcgcca

SEQ ID NO: 486767 - DNA, 30 bp, Artificial Sequence
  Synthetic oligonucleotide
accagtccttaatgtacgcacctcgcgcca

SEQ ID NO: 486768 - DNA, 30 bp, Artificial Sequence
  Synthetic oligonucleotide
tttttcaatcgtctcgctctctcggcgcca

SEQ ID NO: 486769 - DNA, 30 bp, Artificial Sequence
  Synthetic oligonucleotide
gagagacgataggttggccggagggcgcca

SEQ ID NO: 486770 - DNA, 30 bp, Artificial Sequence
  Synthetic oligonucleotide
agcatagaatacggtatacctactgcgcca

SEQ ID NO: 486771 - DNA, 30 bp, Artificial Sequence
  Synthetic oligonucleotide
aagaactccgttagctccagccctgcgcca

SEQ ID NO: 486772 - DNA, 30 bp, Artificial Sequence
  Synthetic oligonucleotide
aatggattcaaaaacgcatcaattgcgcca

SEQ ID NO: 486773 - DNA, 30 bp, Artificial Sequence
  Synthetic oligonucleotide
gacacataaattgcgcccccctttgcgcca

SEQ ID NO: 486774 - DNA, 30 bp, Artificial Sequence
  Synthetic oligonucleotide
ttagcgctgagttgtacgtcatggtcgcca

SEQ ID NO: 486775 - DNA, 30 bp, Artificial Sequence
  Synthetic oligonucleotide
tcctcgatgggactctaaggttggtcgcca

SEQ ID NO: 486776 - DNA, 30 bp, Artificial Sequence
  Synthetic oligonucleotide
aggtagggtccgttgacgggaggttcgcca

SEQ ID NO: 486777 - DNA, 30 bp, Artificial Sequence
  Synthetic oligonucleotide
ataatcgttcttagtcatgctggaaggcca

SEQ ID NO: 486778 - DNA, 30 bp, Artificial Sequence
  Synthetic oligonucleotide
tggttaccagtcgtagtaaaggccaggcca

SEQ ID NO: 486779 - DNA, 30 bp, Artificial Sequence
  Synthetic oligonucleotide
ctctttattttgagggcaaacggcaggcca

SEQ ID NO: 486780 - DNA, 30 bp, Artificial Sequence
  Synthetic oligonucleotide
tggatcgagagtcagagtattttgaggcca

SEQ ID NO: 486781 - DNA, 30 bp, Artificial Sequence
  Synthetic oligonucleotide
ggttttgaagcgaatcagttcgcacggcca

SEQ ID NO: 486782 - DNA, 30 bp, Artificial Sequence
  Synthetic oligonucleotide
tggatgcaacgactatccgttttacggcca

SEQ ID NO: 486783 - DNA, 30 bp, Artificial Sequence
  Synthetic oligonucleotide
ttccctaagctaacggcttgctatcggcca

SEQ ID NO: 486784 - DNA, 30 bp, Artificial Sequence
  Synthetic oligonucleotide
aagggccgtcggtgagagtatcgtcggcca

SEQ ID NO: 486785 - DNA, 30 bp, Artificial Sequence
  Synthetic oligonucleotide
tttcgtagcatcggtaaatccgcagggcca

SEQ ID NO: 486786 - DNA, 30 bp, Artificial Sequence
  Synthetic oligonucleotide
ctgggccaagttatgaacccgtcagggcca

SEQ ID NO: 486787 - DNA, 30 bp, Artificial Sequence
  Synthetic oligonucleotide
ggaagttcgcgtccctaaaggaacgggcca

SEQ ID NO: 486788 - DNA, 30 bp, Artificial Sequence
  Synthetic oligonucleotide
ctgggggtttagatgcattataccgggcca

SEQ ID NO: 486789 - DNA, 30 bp, Artificial Sequence
  Synthetic oligonucleotide
gccactgaccgctgtgtgccaccggggcca

SEQ ID NO: 486790 - DNA, 30 bp, Artificial Sequence
  Synthetic oligonucleotide
cttcgtcctgtaactttgtatatggggcca

SEQ ID NO: 486791 - DNA, 30 bp, Artificial Sequence
  Synthetic oligonucleotide
tcaaatgctcaagaagacagcctggggcca

SEQ ID NO: 486792 - DNA, 30 bp, Artificial Sequence
  Synthetic oligonucleotide
taacaggagatgcagctagctttggggcca

SEQ ID NO: 486793 - DNA, 30 bp, Artificial Sequence
  Synthetic oligonucleotide
gatgttcgctgacgccccccctgtgggcca

SEQ ID NO: 486794 - DNA, 30 bp, Artificial Sequence
  Synthetic oligonucleotide
cgggtcagagtttctctctgccaatggcca

SEQ ID NO: 486795 - DNA, 30 bp, Artificial Sequence
  Synthetic oligonucleotide
cagcaagggacagcagtttctagatggcca

SEQ ID NO: 486796 - DNA, 30 bp, Artificial Sequence
  Synthetic oligonucleotide
ccatcaggcccgatgcagtaatcctggcca

SEQ ID NO: 486797 - DNA, 29 bp, Artificial Sequence
  Synthetic oligonucleotide
tttttgcgggtgcttggaccggctggcca

SEQ ID NO: 486798 - DNA, 30 bp, Artificial Sequence
  Synthetic oligonucleotide
cttaagtagaaccgacatttggggtggcca

SEQ ID NO: 486799 - DNA, 30 bp, Artificial Sequence
  Synthetic oligonucleotide
agattacacactctcgaaagaataatgcca

SEQ ID NO: 486800 - DNA, 30 bp, Artificial Sequence
  Synthetic oligonucleotide
gcacgtgggaaaaatgggcggggtatgcca

SEQ ID NO: 486801 - DNA, 30 bp, Artificial Sequence
  Synthetic oligonucleotide
agcagtttctcggtattatgtccactgcca

SEQ ID NO: 486802 - DNA, 30 bp, Artificial Sequence
  Synthetic oligonucleotide
caggtccggcgcgggctagtggcactgcca

SEQ ID NO: 486803 - DNA, 30 bp, Artificial Sequence
  Synthetic oligonucleotide
tgttgggagcgcgatcggcgtatactgcca

SEQ ID NO: 486804 - DNA, 30 bp, Artificial Sequence
  Synthetic oligonucleotide
caaacgtttggatcatagggcctagtgcca

SEQ ID NO: 486805 - DNA, 30 bp, Artificial Sequence
  Synthetic oligonucleotide
tgaaatgctcagagcagtggaacggtgcca

SEQ ID NO: 486806 - DNA, 30 bp, Artificial Sequence
  Synthetic oligonucleotide
taaattggcaatggtgcggctatattgcca

SEQ ID NO: 486807 - DNA, 30 bp, Artificial Sequence
  Synthetic oligonucleotide
aatattccagtgtggtagatctacttgcca

SEQ ID NO: 486808 - DNA, 30 bp, Artificial Sequence
  Synthetic oligonucleotide
atgctaaatcgttacgtttcgcccttgcca

SEQ ID NO: 486809 - DNA, 30 bp, Artificial Sequence
  Synthetic oligonucleotide
gttccaaacaacgacgtatctcggttgcca

SEQ ID NO: 486810 - DNA, 30 bp, Artificial Sequence
  Synthetic oligonucleotide
ccccgctaattgtttcagggttctttgcca

SEQ ID NO: 486811 - DNA, 30 bp, Artificial Sequence
  Synthetic oligonucleotide
ccccccgaccgattactttaatgtttgcca

SEQ ID NO: 486812 - DNA, 30 bp, Artificial Sequence
  Synthetic oligonucleotide
tcaatgatgcagcgtaagggttaaaatcca

SEQ ID NO: 486813 - DNA, 30 bp, Artificial Sequence
  Synthetic oligonucleotide
gagcagatggcttccttgagtggaaatcca

SEQ ID NO: 486814 - DNA, 30 bp, Artificial Sequence
  Synthetic oligonucleotide
gacgggagctggtttccttgcgtcaatcca

SEQ ID NO: 486815 - DNA, 30 bp, Artificial Sequence
  Synthetic oligonucleotide
tttaagcgctcgggatagtaccggaatcca

SEQ ID NO: 486816 - DNA, 30 bp, Artificial Sequence
  Synthetic oligonucleotide
aattaaaatctctggtatgcggggaatcca

SEQ ID NO: 486817 - DNA, 30 bp, Artificial Sequence
  Synthetic oligonucleotide
agcattgtgtatgcctacggcaataatcca

SEQ ID NO: 486818 - DNA, 30 bp, Artificial Sequence
  Synthetic oligonucleotide
gcctgatagtaggttttccatattaatcca

SEQ ID NO: 486819 - DNA, 30 bp, Artificial Sequence
  Synthetic oligonucleotide
ttggatagactggcgcactacggacatcca

SEQ ID NO: 486820 - DNA, 30 bp, Artificial Sequence
  Synthetic oligonucleotide
ttgttttttataatacgcagagtacatcca

SEQ ID NO: 486821 - DNA, 30 bp, Artificial Sequence
  Synthetic oligonucleotide
tttggtattagacgccgtcaaacagatcca

SEQ ID NO: 486822 - DNA, 30 bp, Artificial Sequence
  Synthetic oligonucleotide
ttcttcaaacgacaggaggtctcagatcca

SEQ ID NO: 486823 - DNA, 30 bp, Artificial Sequence
  Synthetic oligonucleotide
gagcggctctattgcgtacggagagatcca

SEQ ID NO: 486824 - DNA, 30 bp, Artificial Sequence
  Synthetic oligonucleotide
tcttgctagggcaacacttgtgtagatcca

SEQ ID NO: 486825 - DNA, 30 bp, Artificial Sequence
  Synthetic oligonucleotide
gttacccgaatggtcccctgcgaggatcca

SEQ ID NO: 486826 - DNA, 30 bp, Artificial Sequence
  Synthetic oligonucleotide
atctatatcgtgtagggagctttggatcca

SEQ ID NO: 486827 - DNA, 30 bp, Artificial Sequence
  Synthetic oligonucleotide
cagtggacgcagggtcggctatttgatcca

SEQ ID NO: 486828 - DNA, 30 bp, Artificial Sequence
  Synthetic oligonucleotide
aaacggttcgagtcgatcactaaatatcca

SEQ ID NO: 486829 - DNA, 30 bp, Artificial Sequence
  Synthetic oligonucleotide
gggtagtgattcgcgagtatcgaatatcca

SEQ ID NO: 486830 - DNA, 30 bp, Artificial Sequence
  Synthetic oligonucleotide
ctcagccctaacgggacatggggatatcca

SEQ ID NO: 486831 - DNA, 30 bp, Artificial Sequence
  Synthetic oligonucleotide
agtgctacggcctccttgctaaactatcca

SEQ ID NO: 486832 - DNA, 30 bp, Artificial Sequence
  Synthetic oligonucleotide
tattggtatcgggttttacgcgcctatcca

SEQ ID NO: 486833 - DNA, 30 bp, Artificial Sequence
  Synthetic oligonucleotide
aagcagtgtctggtttgccgtggctatcca

SEQ ID NO: 486834 - DNA, 30 bp, Artificial Sequence
  Synthetic oligonucleotide
agtacaatctatgcttacgaatgctatcca

SEQ ID NO: 486835 - DNA, 30 bp, Artificial Sequence
  Synthetic oligonucleotide
aaagcctttgaaatcacttttcattatcca

SEQ ID NO: 486836 - DNA, 30 bp, Artificial Sequence
  Synthetic oligonucleotide
aagagtctgctgcatgcggactcttatcca

SEQ ID NO: 486837 - DNA, 30 bp, Artificial Sequence
  Synthetic oligonucleotide
atttaacgttacccgtacagctgttatcca

SEQ ID NO: 486838 - DNA, 30 bp, Artificial Sequence
  Synthetic oligonucleotide
gagggacactcggttcacgtgccaactcca

SEQ ID NO: 486839 - DNA, 30 bp, Artificial Sequence
  Synthetic oligonucleotide
gaaggaggttgcgcaatctgcaacactcca

SEQ ID NO: 486840 - DNA, 30 bp, Artificial Sequence
  Synthetic oligonucleotide
attcggccgtcggctagtcctatcactcca

SEQ ID NO: 486841 - DNA, 30 bp, Artificial Sequence
  Synthetic oligonucleotide
aggcctggcctccgcacgcaaccgactcca

SEQ ID NO: 486842 - DNA, 30 bp, Artificial Sequence
  Synthetic oligonucleotide
gcatagtctatggctgaaaacgctactcca

SEQ ID NO: 486843 - DNA, 30 bp, Artificial Sequence
  Synthetic oligonucleotide
gctaaataacgccatcggttatttactcca

SEQ ID NO: 486844 - DNA, 30 bp, Artificial Sequence
  Synthetic oligonucleotide
aaattcctacgttatccacagtaacctcca

SEQ ID NO: 486845 - DNA, 30 bp, Artificial Sequence
  Synthetic oligonucleotide
ttctctccgcgaatctgagtataccctcca

SEQ ID NO: 486846 - DNA, 30 bp, Artificial Sequence
  Synthetic oligonucleotide
tgtatctatttaccggttaccccccctcca

SEQ ID NO: 486847 - DNA, 30 bp, Artificial Sequence
  Synthetic oligonucleotide
atattcaaaattgcgatcagctagcctcca

SEQ ID NO: 486848 - DNA, 30 bp, Artificial Sequence
  Synthetic oligonucleotide
aacccggttggctaatatttggctcctcca

SEQ ID NO: 486849 - DNA, 30 bp, Artificial Sequence
  Synthetic oligonucleotide
cccctttagagcaataaggtgggtcctcca

SEQ ID NO: 486850 - DNA, 30 bp, Artificial Sequence
  Synthetic oligonucleotide
taccacaaaacctaatctcgttgagctcca

SEQ ID NO: 486851 - DNA, 30 bp, Artificial Sequence
  Synthetic oligonucleotide
agctccatttcggccatcatcgatgctcca

SEQ ID NO: 486852 - DNA, 30 bp, Artificial Sequence
  Synthetic oligonucleotide
gacgattgccgcttacaagcaattgctcca

SEQ ID NO: 486853 - DNA, 30 bp, Artificial Sequence
  Synthetic oligonucleotide
agcgtcgctaatggtccatcgattgctcca

SEQ ID NO: 486854 - DNA, 30 bp, Artificial Sequence
  Synthetic oligonucleotide
catttataaaataggctgatagcctctcca

SEQ ID NO: 486855 - DNA, 30 bp, Artificial Sequence
  Synthetic oligonucleotide
ttcctcccggtatagcctcgacggtctcca

SEQ ID NO: 486856 - DNA, 30 bp, Artificial Sequence
  Synthetic oligonucleotide
ccttggctctgtagtacggagggttctcca

SEQ ID NO: 486857 - DNA, 30 bp, Artificial Sequence
  Synthetic oligonucleotide
gatgtgatttctgtccgggaggacagtcca

SEQ ID NO: 486858 - DNA, 30 bp, Artificial Sequence
  Synthetic oligonucleotide
ctacgaaggtctctgtctaaacgcagtcca

SEQ ID NO: 486859 - DNA, 30 bp, Artificial Sequence
  Synthetic oligonucleotide
ggagcaggtaattatgctgccggcagtcca

SEQ ID NO: 486860 - DNA, 30 bp, Artificial Sequence
  Synthetic oligonucleotide
tgggtcgttgtgttggctgtgtaacgtcca

SEQ ID NO: 486861 - DNA, 30 bp, Artificial Sequence
  Synthetic oligonucleotide
gtctttttagaagacaaacgttgacgtcca

SEQ ID NO: 486862 - DNA, 30 bp, Artificial Sequence
  Synthetic oligonucleotide
tgattttccgatcttaatccttggcgtcca

SEQ ID NO: 486863 - DNA, 30 bp, Artificial Sequence
  Synthetic oligonucleotide
agcaaaatcgttctggacgcgcatcgtcca

SEQ ID NO: 486864 - DNA, 30 bp, Artificial Sequence
  Synthetic oligonucleotide
taaaacccttgattgtgcattgtaggtcca

SEQ ID NO: 486865 - DNA, 30 bp, Artificial Sequence
  Synthetic oligonucleotide
atttttcaagtaaacgttcgcaacggtcca

SEQ ID NO: 486866 - DNA, 30 bp, Artificial Sequence
  Synthetic oligonucleotide
ttctcccgcgtgattggggcgcgcggtcca

SEQ ID NO: 486867 - DNA, 30 bp, Artificial Sequence
  Synthetic oligonucleotide
gcttaaacgcaggacagacgctcgggtcca

SEQ ID NO: 486868 - DNA, 30 bp, Artificial Sequence
  Synthetic oligonucleotide
gcaaaccatacgatgtttgtgcgtggtcca

SEQ ID NO: 486869 - DNA, 30 bp, Artificial Sequence
  Synthetic oligonucleotide
acccgcagatggataccaagacttggtcca

SEQ ID NO: 486870 - DNA, 30 bp, Artificial Sequence
  Synthetic oligonucleotide
atctgttcttggcgcttgggtcaatgtcca

SEQ ID NO: 486871 - DNA, 30 bp, Artificial Sequence
  Synthetic oligonucleotide
ttaccatatacaaaattaaccagatgtcca

SEQ ID NO: 486872 - DNA, 30 bp, Artificial Sequence
  Synthetic oligonucleotide
aaaaatgtgggtgtaccaccgaactgtcca

SEQ ID NO: 486873 - DNA, 30 bp, Artificial Sequence
  Synthetic oligonucleotide
gtttttactcatcatctgcgaccctgtcca

SEQ ID NO: 486874 - DNA, 30 bp, Artificial Sequence
  Synthetic oligonucleotide
agagccaagagccccataggtctctgtcca

SEQ ID NO: 486875 - DNA, 30 bp, Artificial Sequence
  Synthetic oligonucleotide
aactaagttgggtcattgttctgttgtcca

SEQ ID NO: 486876 - DNA, 30 bp, Artificial Sequence
  Synthetic oligonucleotide
gagtacatcaactatggatcgtgaattcca

SEQ ID NO: 486877 - DNA, 30 bp, Artificial Sequence
  Synthetic oligonucleotide
actaggtccgtttgcaggaggcgcattcca

SEQ ID NO: 486878 - DNA, 30 bp, Artificial Sequence
  Synthetic oligonucleotide
gattcagtaccgaagtttggtctgattcca

SEQ ID NO: 486879 - DNA, 30 bp, Artificial Sequence
  Synthetic oligonucleotide
gatctgctccatcactccttaagtattcca

SEQ ID NO: 486880 - DNA, 30 bp, Artificial Sequence
  Synthetic oligonucleotide
gattcgcgggaagggcatctaatacttcca

SEQ ID NO: 486881 - DNA, 30 bp, Artificial Sequence
  Synthetic oligonucleotide
gaagcaccgcagttcggaatcccccttcca

SEQ ID NO: 486882 - DNA, 30 bp, Artificial Sequence
  Synthetic oligonucleotide
gtccttaatctttgcgaatcattccttcca

SEQ ID NO: 486883 - DNA, 30 bp, Artificial Sequence
  Synthetic oligonucleotide
ggaaactcctcggaaaggtgcaagcttcca

SEQ ID NO: 486884 - DNA, 30 bp, Artificial Sequence
  Synthetic oligonucleotide
ttacgtgacaattatattcaatggcttcca

SEQ ID NO: 486885 - DNA, 30 bp, Artificial Sequence
  Synthetic oligonucleotide
agtctcagcaagagaagcctaaatcttcca

SEQ ID NO: 486886 - DNA, 30 bp, Artificial Sequence
  Synthetic oligonucleotide
cacgcttaagacacccattattctcttcca

SEQ ID NO: 486887 - DNA, 30 bp, Artificial Sequence
  Synthetic oligonucleotide
tcgcaaggagcaggactttggtaagttcca

SEQ ID NO: 486888 - DNA, 30 bp, Artificial Sequence
  Synthetic oligonucleotide
cgctgctttatttatcgtaataacgttcca

SEQ ID NO: 486889 - DNA, 30 bp, Artificial Sequence
  Synthetic oligonucleotide
aattgtccgctctagttttcttaaaaagca

SEQ ID NO: 486890 - DNA, 30 bp, Artificial Sequence
  Synthetic oligonucleotide
atagacccgtaacacggcagcataaaagca

SEQ ID NO: 486891 - DNA, 30 bp, Artificial Sequence
  Synthetic oligonucleotide
ctaagcacggcttttggacttgtaaaagca

SEQ ID NO: 486892 - DNA, 30 bp, Artificial Sequence
  Synthetic oligonucleotide
aattggggtcttcggggttagaacaaagca

SEQ ID NO: 486893 - DNA, 30 bp, Artificial Sequence
  Synthetic oligonucleotide
agtgtgtatggacgttgaaagggcaaagca

SEQ ID NO: 486894 - DNA, 30 bp, Artificial Sequence
  Synthetic oligonucleotide
ttatcagagtctccattgctgtgcaaagca

SEQ ID NO: 486895 - DNA, 30 bp, Artificial Sequence
  Synthetic oligonucleotide
agacctacaggagctgctgttgagaaagca

SEQ ID NO: 486896 - DNA, 30 bp, Artificial Sequence
  Synthetic oligonucleotide
acccgtttacgaacgcatctatgacaagca

SEQ ID NO: 486897 - DNA, 30 bp, Artificial Sequence
  Synthetic oligonucleotide
aaattatagctccccttaccgttccaagca

SEQ ID NO: 486898 - DNA, 30 bp, Artificial Sequence
  Synthetic oligonucleotide
gcaaaaggaggggtgccatcctgagaagca

SEQ ID NO: 486899 - DNA, 30 bp, Artificial Sequence
  Synthetic oligonucleotide
ccgtgtctgtagtctggtcgtttcgaagca

SEQ ID NO: 486900 - DNA, 30 bp, Artificial Sequence
  Synthetic oligonucleotide
atcgagagatgtctgttgataatggaagca

SEQ ID NO: 486901 - DNA, 30 bp, Artificial Sequence
  Synthetic oligonucleotide
tattagcaggcactagaaatagctgaagca

SEQ ID NO: 486902 - DNA, 30 bp, Artificial Sequence
  Synthetic oligonucleotide
aatgaacacccgctatggctaacataagca

SEQ ID NO: 486903 - DNA, 30 bp, Artificial Sequence
  Synthetic oligonucleotide
caccggcataccacagcttgacgataagca

SEQ ID NO: 486904 - DNA, 30 bp, Artificial Sequence
  Synthetic oligonucleotide
agtgtcctgtgggtccctcgcaactaagca

SEQ ID NO: 486905 - DNA, 30 bp, Artificial Sequence
  Synthetic oligonucleotide
cgcatccacttctgctgctctaggtaagca

SEQ ID NO: 486906 - DNA, 30 bp, Artificial Sequence
  Synthetic oligonucleotide
tggttgttaataaacgttgcagcttaagca

SEQ ID NO: 486907 - DNA, 30 bp, Artificial Sequence
  Synthetic oligonucleotide
gtctgtcccccgtaagctggcagttaagca

SEQ ID NO: 486908 - DNA, 30 bp, Artificial Sequence
  Synthetic oligonucleotide
attcacaaccactcacgcaacgccacagca

SEQ ID NO: 486909 - DNA, 30 bp, Artificial Sequence
  Synthetic oligonucleotide
gtctactagacggcaatagatagcacagca

SEQ ID NO: 486910 - DNA, 30 bp, Artificial Sequence
  Synthetic oligonucleotide
gcgatcgcccgatttcaataaacgacagca

SEQ ID NO: 486911 - DNA, 30 bp, Artificial Sequence
  Synthetic oligonucleotide
gacctatcgcacaaagcaactgtgacagca

SEQ ID NO: 486912 - DNA, 30 bp, Artificial Sequence
  Synthetic oligonucleotide
tccggggtgtgacaatgcctggatacagca

SEQ ID NO: 486913 - DNA, 30 bp, Artificial Sequence
  Synthetic oligonucleotide
gagcgctacaagatatttgaaagaccagca

SEQ ID NO: 486914 - DNA, 30 bp, Artificial Sequence
  Synthetic oligonucleotide
aagaaaggaacaaaaacagcgttcccagca

SEQ ID NO: 486915 - DNA, 30 bp, Artificial Sequence
  Synthetic oligonucleotide
gaaaggtatgacgtgggaaaatcgccagca

SEQ ID NO: 486916 - DNA, 30 bp, Artificial Sequence
  Synthetic oligonucleotide
cagattagtactcggcggctagctccagca

SEQ ID NO: 486917 - DNA, 30 bp, Artificial Sequence
  Synthetic oligonucleotide
tacaaaacgccataaaaagttcttccagca

SEQ ID NO: 486918 - DNA, 30 bp, Artificial Sequence
  Synthetic oligonucleotide
taagcagaggtttgcgagctttttccagca

SEQ ID NO: 486919 - DNA, 30 bp, Artificial Sequence
  Synthetic oligonucleotide
tccactaaaattccccccgtgttggcagca

SEQ ID NO: 486920 - DNA, 30 bp, Artificial Sequence
  Synthetic oligonucleotide
tgaactgcggacatgcctgtgtttgcagca

SEQ ID NO: 486921 - DNA, 30 bp, Artificial Sequence
  Synthetic oligonucleotide
tgacattttacagctggggttgtatcagca

SEQ ID NO: 486922 - DNA, 30 bp, Artificial Sequence
  Synthetic oligonucleotide
tatctagcttttcgtatgtaacgctcagca

SEQ ID NO: 486923 - DNA, 30 bp, Artificial Sequence
  Synthetic oligonucleotide
gaaaccctcttggtacaggcacgctcagca

SEQ ID NO: 486924 - DNA, 30 bp, Artificial Sequence
  Synthetic oligonucleotide
ccagggcgcgagtctcaaagatcttcagca

SEQ ID NO: 486925 - DNA, 30 bp, Artificial Sequence
  Synthetic oligonucleotide
aaattaaaacaagcgtcttgatcttcagca

SEQ ID NO: 486926 - DNA, 30 bp, Artificial Sequence
  Synthetic oligonucleotide
taaccttttatggattaataggtttcagca

SEQ ID NO: 486927 - DNA, 30 bp, Artificial Sequence
  Synthetic oligonucleotide
tcgctagctctacatccatacagaagagca

SEQ ID NO: 486928 - DNA, 30 bp, Artificial Sequence
  Synthetic oligonucleotide
aaccgatatcgacgccagttgcgaagagca

SEQ ID NO: 486929 - DNA, 30 bp, Artificial Sequence
  Synthetic oligonucleotide
ataaatgtgttttgttaacttcgcagagca

SEQ ID NO: 486930 - DNA, 30 bp, Artificial Sequence
  Synthetic oligonucleotide
gtttttcaactgataaggtttctgagagca

SEQ ID NO: 486931 - DNA, 30 bp, Artificial Sequence
  Synthetic oligonucleotide
ccgcggggctaacctcgtttgcaaggagca

SEQ ID NO: 486932 - DNA, 29 bp, Artificial Sequence
  Synthetic oligonucleotide
cattcggctgtactgggatataaggagca

SEQ ID NO: 486933 - DNA, 30 bp, Artificial Sequence
  Synthetic oligonucleotide
gtgcttttcgtctgatgcctcccaggagca

SEQ ID NO: 486934 - DNA, 30 bp, Artificial Sequence
  Synthetic oligonucleotide
tttcgactaggcgtttttgcgaccggagca

SEQ ID NO: 486935 - DNA, 30 bp, Artificial Sequence
  Synthetic oligonucleotide
ggcatactatagagagggcgcggcggagca

SEQ ID NO: 486936 - DNA, 30 bp, Artificial Sequence
  Synthetic oligonucleotide
attaggccgcaagcaggtggagtcggagca

SEQ ID NO: 486937 - DNA, 30 bp, Artificial Sequence
  Synthetic oligonucleotide
aaatcggtccgttctcgaggcgcgggagca

SEQ ID NO: 486938 - DNA, 30 bp, Artificial Sequence
  Synthetic oligonucleotide
attgggcgacgaccactggcctcgggagca

SEQ ID NO: 486939 - DNA, 30 bp, Artificial Sequence
  Synthetic oligonucleotide
ccacgcaccccgtatcaaacatcctgagca

SEQ ID NO: 486940 - DNA, 30 bp, Artificial Sequence
  Synthetic oligonucleotide
atcgaggtgtatacggttgacagctgagca

SEQ ID NO: 486941 - DNA, 30 bp, Artificial Sequence
  Synthetic oligonucleotide
tttcaacaagattcttttagaggctgagca

SEQ ID NO: 486942 - DNA, 30 bp, Artificial Sequence
  Synthetic oligonucleotide
aggatcgctcaccggggaaagaagtgagca

SEQ ID NO: 486943 - DNA, 30 bp, Artificial Sequence
  Synthetic oligonucleotide
atgacacagccactgtacgctggaatagca

SEQ ID NO: 486944 - DNA, 30 bp, Artificial Sequence
  Synthetic oligonucleotide
gattttgatctgcaaatagcagtaatagca

SEQ ID NO: 486945 - DNA, 30 bp, Artificial Sequence
  Synthetic oligonucleotide
gatatgggagtagtactataaagcatagca

SEQ ID NO: 486946 - DNA, 30 bp, Artificial Sequence
  Synthetic oligonucleotide
taatggaaggcagcagacaggaagatagca

SEQ ID NO: 486947 - DNA, 30 bp, Artificial Sequence
  Synthetic oligonucleotide
cccgcatgggctcaaaggacgtctatagca

SEQ ID NO: 486948 - DNA, 30 bp, Artificial Sequence
  Synthetic oligonucleotide
gtgactgagctatctccatagcttatagca

SEQ ID NO: 486949 - DNA, 30 bp, Artificial Sequence
  Synthetic oligonucleotide
tagcgccagaagcagttacccgagctagca

SEQ ID NO: 486950 - DNA, 30 bp, Artificial Sequence
  Synthetic oligonucleotide
aggatgacctgctttaagtgttgtctagca

SEQ ID NO: 486951 - DNA, 31 bp, Artificial Sequence
  Synthetic oligonucleotide
aattcagatccctaagttaggtcttctagca

SEQ ID NO: 486952 - DNA, 30 bp, Artificial Sequence
  Synthetic oligonucleotide
ccagtcgggctatacgatcgtaaagtagca

SEQ ID NO: 486953 - DNA, 30 bp, Artificial Sequence
  Synthetic oligonucleotide
cttgtaaaagatccgggttccgaagtagca

SEQ ID NO: 486954 - DNA, 30 bp, Artificial Sequence
  Synthetic oligonucleotide
gttgtggggcgagttgatcatctagtagca

SEQ ID NO: 486955 - DNA, 30 bp, Artificial Sequence
  Synthetic oligonucleotide
tcgatctaggccctaaggtctgcggtagca

SEQ ID NO: 486956 - DNA, 30 bp, Artificial Sequence
  Synthetic oligonucleotide
tgggggtccggcctcgcagtaggtgtagca

SEQ ID NO: 486957 - DNA, 30 bp, Artificial Sequence
  Synthetic oligonucleotide
attagttcggctcgtagacccgaattagca

SEQ ID NO: 486958 - DNA, 30 bp, Artificial Sequence
  Synthetic oligonucleotide
agaagactgacgcccgtatcacacttagca

SEQ ID NO: 486959 - DNA, 30 bp, Artificial Sequence
  Synthetic oligonucleotide
ccttacttttgtatccgtatgcggttagca

SEQ ID NO: 486960 - DNA, 30 bp, Artificial Sequence
  Synthetic oligonucleotide
gagtttgcattcgtagcaaaatttttagca

SEQ ID NO: 486961 - DNA, 30 bp, Artificial Sequence
  Synthetic oligonucleotide
tgcggatctactggtagctgaccaaacgca

SEQ ID NO: 486962 - DNA, 30 bp, Artificial Sequence
  Synthetic oligonucleotide
ttctgaactttcagctacggatacaacgca

SEQ ID NO: 486963 - DNA, 30 bp, Artificial Sequence
  Synthetic oligonucleotide
gtaggctactacgcacggcacagcaacgca

SEQ ID NO: 486964 - DNA, 30 bp, Artificial Sequence
  Synthetic oligonucleotide
gtccagtgtgccacccttgtgccgaacgca

SEQ ID NO: 486965 - DNA, 30 bp, Artificial Sequence
  Synthetic oligonucleotide
atttgatccgtgtccatttgcgggaacgca

SEQ ID NO: 486966 - DNA, 30 bp, Artificial Sequence
  Synthetic oligonucleotide
taataatcgccgggggaatcattgaacgca

SEQ ID NO: 486967 - DNA, 30 bp, Artificial Sequence
  Synthetic oligonucleotide
cgtacgtgaactgaggattatggtaacgca

SEQ ID NO: 486968 - DNA, 30 bp, Artificial Sequence
  Synthetic oligonucleotide
ccacagcacttcttcacatctgttaacgca

SEQ ID NO: 486969 - DNA, 30 bp, Artificial Sequence
  Synthetic oligonucleotide
gtaaattgttgcaggatttccggacacgca

SEQ ID NO: 486970 - DNA, 30 bp, Artificial Sequence
  Synthetic oligonucleotide
gcacgtacaacgcagttcaacgcccacgca

SEQ ID NO: 486971 - DNA, 30 bp, Artificial Sequence
  Synthetic oligonucleotide
gggactctctttattgaattaatccacgca

SEQ ID NO: 486972 - DNA, 30 bp, Artificial Sequence
  Synthetic oligonucleotide
tttgttgaaccattaggtaaagagcacgca

SEQ ID NO: 486973 - DNA, 30 bp, Artificial Sequence
  Synthetic oligonucleotide
taaacttttagcagggagcgtcggcacgca

SEQ ID NO: 486974 - DNA, 30 bp, Artificial Sequence
  Synthetic oligonucleotide
aatgatcgtgtcgtctgttatttgcacgca

SEQ ID NO: 486975 - DNA, 30 bp, Artificial Sequence
  Synthetic oligonucleotide
ccccttatgaggcctttgtagactcacgca

SEQ ID NO: 486976 - DNA, 30 bp, Artificial Sequence
  Synthetic oligonucleotide
ctcaatagacaggatcgctgagttcacgca

SEQ ID NO: 486977 - DNA, 30 bp, Artificial Sequence
  Synthetic oligonucleotide
agataagtacgcttccagcatgacgacgca

SEQ ID NO: 486978 - DNA, 30 bp, Artificial Sequence
  Synthetic oligonucleotide
cggttaataatcgagcttaattacgacgca

SEQ ID NO: 486979 - DNA, 30 bp, Artificial Sequence
  Synthetic oligonucleotide
ttgacgatacctgctgatgagttcgacgca

SEQ ID NO: 486980 - DNA, 30 bp, Artificial Sequence
  Synthetic oligonucleotide
gcgatcagtcatgctgtcaagaaggacgca

SEQ ID NO: 486981 - DNA, 30 bp, Artificial Sequence
  Synthetic oligonucleotide
ggggaccatgattagcacttcccggacgca

SEQ ID NO: 486982 - DNA, 30 bp, Artificial Sequence
  Synthetic oligonucleotide
cgatcccattcaccatgtccggtggacgca

SEQ ID NO: 486983 - DNA, 30 bp, Artificial Sequence
  Synthetic oligonucleotide
aagctgcgttgagggtggacgaatgacgca

SEQ ID NO: 486984 - DNA, 30 bp, Artificial Sequence
  Synthetic oligonucleotide
atgccataaagacgtgcattagctgacgca

SEQ ID NO: 486985 - DNA, 30 bp, Artificial Sequence
  Synthetic oligonucleotide
acccgaggagctgagcgccgggttgacgca

SEQ ID NO: 486986 - DNA, 30 bp, Artificial Sequence
  Synthetic oligonucleotide
ttgcagaagatttatgacttgatatacgca

SEQ ID NO: 486987 - DNA, 30 bp, Artificial Sequence
  Synthetic oligonucleotide
aaaccattagcgccagtacgcttatacgca

SEQ ID NO: 486988 - DNA, 30 bp, Artificial Sequence
  Synthetic oligonucleotide
atcgactcatagcgccccatatgctacgca

SEQ ID NO: 486989 - DNA, 30 bp, Artificial Sequence
  Synthetic oligonucleotide
taaggtccagttggtatctggtcgtacgca

SEQ ID NO: 486990 - DNA, 30 bp, Artificial Sequence
  Synthetic oligonucleotide
ttcgaacgacgggagattttcgtgtacgca

SEQ ID NO: 486991 - DNA, 30 bp, Artificial Sequence
  Synthetic oligonucleotide
tgagtatactgggggaaaattgcttacgca

SEQ ID NO: 486992 - DNA, 30 bp, Artificial Sequence
  Synthetic oligonucleotide
accctgctaaatgaccgcgttgtttacgca

SEQ ID NO: 486993 - DNA, 30 bp, Artificial Sequence
  Synthetic oligonucleotide
acggcacaccatccttgcgaaccaaccgca

SEQ ID NO: 486994 - DNA, 30 bp, Artificial Sequence
  Synthetic oligonucleotide
attcaccgtctcctggtattggacaccgca

SEQ ID NO: 486995 - DNA, 30 bp, Artificial Sequence
  Synthetic oligonucleotide
gtgtaggatgccgttagcagccctaccgca

SEQ ID NO: 486996 - DNA, 30 bp, Artificial Sequence
  Synthetic oligonucleotide
gtgtttaaaggaagctgccgccctaccgca

SEQ ID NO: 486997 - DNA, 30 bp, Artificial Sequence
  Synthetic oligonucleotide
gcatgatggatctttgtcttctcccccgca

SEQ ID NO: 486998 - DNA, 30 bp, Artificial Sequence
  Synthetic oligonucleotide
tgcggggatataatcttcaaacgccccgca

SEQ ID NO: 486999 - DNA, 30 bp, Artificial Sequence
  Synthetic oligonucleotide
aaagtttagagctgtaccagaatccccgca

SEQ ID NO: 487000 - DNA, 30 bp, Artificial Sequence
  Synthetic oligonucleotide
aatttggatctgtacctcgctagtcccgca

SEQ ID NO: 487001 - DNA, 30 bp, Artificial Sequence
  Synthetic oligonucleotide
gcattttgttacgccaacccatttcccgca

SEQ ID NO: 487002 - DNA, 30 bp, Artificial Sequence
  Synthetic oligonucleotide
gctggatatgcctcaccaacagaagccgca

SEQ ID NO: 487003 - DNA, 30 bp, Artificial Sequence
  Synthetic oligonucleotide
gccctgtctacgttgatatctgcggccgca

SEQ ID NO: 487004 - DNA, 30 bp, Artificial Sequence
  Synthetic oligonucleotide
agcattaatcagctctctgtggtatccgca

SEQ ID NO: 487005 - DNA, 30 bp, Artificial Sequence
  Synthetic oligonucleotide
aatggccccatacctatagcggcctccgca

SEQ ID NO: 487006 - DNA, 30 bp, Artificial Sequence
  Synthetic oligonucleotide
ggggctagtgtaacattggccgtctccgca

SEQ ID NO: 487007 - DNA, 30 bp, Artificial Sequence
  Synthetic oligonucleotide
aaacatgtacggacgattagcaattccgca

SEQ ID NO: 487008 - DNA, 30 bp, Artificial Sequence
  Synthetic oligonucleotide
agcgacgaccatcagcctgccgacagcgca

SEQ ID NO: 487009 - DNA, 30 bp, Artificial Sequence
  Synthetic oligonucleotide
tggttcttttaatgtggaggacaacgcgca

SEQ ID NO: 487010 - DNA, 30 bp, Artificial Sequence
  Synthetic oligonucleotide
tgttttacctggagactttcgtcacgcgca

SEQ ID NO: 487011 - DNA, 30 bp, Artificial Sequence
  Synthetic oligonucleotide
ataataccgccattaccactcggacgcgca

SEQ ID NO: 487012 - DNA, 30 bp, Artificial Sequence
  Synthetic oligonucleotide
aatattacacgccgccgtgtgcaccgcgca

SEQ ID NO: 487013 - DNA, 30 bp, Artificial Sequence
  Synthetic oligonucleotide
caacgaactggggggcgcatcaagcgcgca

SEQ ID NO: 487014 - DNA, 30 bp, Artificial Sequence
  Synthetic oligonucleotide
cgcgcagatatggatggactggtgcgcgca

SEQ ID NO: 487015 - DNA, 30 bp, Artificial Sequence
  Synthetic oligonucleotide
gagagtgcggagattctagatttgcgcgca

SEQ ID NO: 487016 - DNA, 29 bp, Artificial Sequence
  Synthetic oligonucleotide
agtatttcgaatttggaggtgaaggcgca

SEQ ID NO: 487017 - DNA, 30 bp, Artificial Sequence
  Synthetic oligonucleotide
gttgctatgtaccggttaaaaacaggcgca

SEQ ID NO: 487018 - DNA, 30 bp, Artificial Sequence
  Synthetic oligonucleotide
tccggagtgttgtgaattcgtataggcgca

SEQ ID NO: 487019 - DNA, 30 bp, Artificial Sequence
  Synthetic oligonucleotide
gcgacaacagttagtgttcttttaggcgca

SEQ ID NO: 487020 - DNA, 30 bp, Artificial Sequence
  Synthetic oligonucleotide
ttccctcatatacattctcgttacggcgca

SEQ ID NO: 487021 - DNA, 30 bp, Artificial Sequence
  Synthetic oligonucleotide
tgttgttttttaaaagaccataagggcgca

SEQ ID NO: 487022 - DNA, 30 bp, Artificial Sequence
  Synthetic oligonucleotide
gatcaggccccaggcgggcgaccgggcgca

SEQ ID NO: 487023 - DNA, 30 bp, Artificial Sequence
  Synthetic oligonucleotide
ctcccggtgtgcatggttggaattggcgca

SEQ ID NO: 487024 - DNA, 30 bp, Artificial Sequence
  Synthetic oligonucleotide
ctaagaaacgcgcatgtgtatccatgcgca

SEQ ID NO: 487025 - DNA, 30 bp, Artificial Sequence
  Synthetic oligonucleotide
accccggttgaaattttatttttctgcgca

SEQ ID NO: 487026 - DNA, 30 bp, Artificial Sequence
  Synthetic oligonucleotide
ggtgctcgcttgaggcaactagcgtgcgca

SEQ ID NO: 487027 - DNA, 30 bp, Artificial Sequence
  Synthetic oligonucleotide
ccgagagtctacggacaacacgattgcgca

SEQ ID NO: 487028 - DNA, 30 bp, Artificial Sequence
  Synthetic oligonucleotide
caccgagtccgacgcaaattgcaaatcgca

SEQ ID NO: 487029 - DNA, 30 bp, Artificial Sequence
  Synthetic oligonucleotide
gagacgcttggtttaaatgaggctatcgca

SEQ ID NO: 487030 - DNA, 30 bp, Artificial Sequence
  Synthetic oligonucleotide
tttactatgcacacggcctccgcactcgca

SEQ ID NO: 487031 - DNA, 30 bp, Artificial Sequence
  Synthetic oligonucleotide
taatctctgatatgctgctcttgactcgca

SEQ ID NO: 487032 - DNA, 30 bp, Artificial Sequence
  Synthetic oligonucleotide
ccgggatcgggaaaccccgatcacctcgca

SEQ ID NO: 487033 - DNA, 30 bp, Artificial Sequence
  Synthetic oligonucleotide
ttccttaaatgagaggtagatacattcgca

SEQ ID NO: 487034 - DNA, 30 bp, Artificial Sequence
  Synthetic oligonucleotide
gttgaagtattggttgccggagacttcgca

SEQ ID NO: 487035 - DNA, 30 bp, Artificial Sequence
  Synthetic oligonucleotide
gctgcagtttgattgttacaaacgttcgca

SEQ ID NO: 487036 - DNA, 30 bp, Artificial Sequence
  Synthetic oligonucleotide
actcctccttaggttccgtcagatttcgca

SEQ ID NO: 487037 - DNA, 30 bp, Artificial Sequence
  Synthetic oligonucleotide
cctacaccctcagtggaccagcccaaggca

SEQ ID NO: 487038 - DNA, 30 bp, Artificial Sequence
  Synthetic oligonucleotide
ggttgtttgtaccagatttgcttacaggca

SEQ ID NO: 487039 - DNA, 30 bp, Artificial Sequence
  Synthetic oligonucleotide
ccttgtcctattcataggtttctccaggca

SEQ ID NO: 487040 - DNA, 30 bp, Artificial Sequence
  Synthetic oligonucleotide
tgaagtcacgctgtcaaagctttccaggca

SEQ ID NO: 487041 - DNA, 30 bp, Artificial Sequence
  Synthetic oligonucleotide
gccttgcctctatgacggctcaaagaggca

SEQ ID NO: 487042 - DNA, 30 bp, Artificial Sequence
  Synthetic oligonucleotide
tttccgaggtgctgggacacactagaggca

SEQ ID NO: 487043 - DNA, 30 bp, Artificial Sequence
  Synthetic oligonucleotide
aacagcaattcgtgggcttgtgcggaggca

SEQ ID NO: 487044 - DNA, 30 bp, Artificial Sequence
  Synthetic oligonucleotide
acagagtgcctggcttctgtgtgtgaggca

SEQ ID NO: 487045 - DNA, 30 bp, Artificial Sequence
  Synthetic oligonucleotide
aacaacgaacgttttgccctgtttgaggca

SEQ ID NO: 487046 - DNA, 30 bp, Artificial Sequence
  Synthetic oligonucleotide
ccgccacgatgcaccggtgacaaataggca

SEQ ID NO: 487047 - DNA, 30 bp, Artificial Sequence
  Synthetic oligonucleotide
taaaacctatcgcttcagtgaacataggca

SEQ ID NO: 487048 - DNA, 30 bp, Artificial Sequence
  Synthetic oligonucleotide
catgtgtgatatcatttgaccacataggca

SEQ ID NO: 487049 - DNA, 30 bp, Artificial Sequence
  Synthetic oligonucleotide
tatccggtagataaggcttgggagtaggca

SEQ ID NO: 487050 - DNA, 30 bp, Artificial Sequence
  Synthetic oligonucleotide
tgggcagctccaactctgggtccttaggca

SEQ ID NO: 487051 - DNA, 30 bp, Artificial Sequence
  Synthetic oligonucleotide
gagtccatagagtcttatggaatttaggca

SEQ ID NO: 487052 - DNA, 30 bp, Artificial Sequence
  Synthetic oligonucleotide
ccctcgtttaaattggaggtattttaggca

SEQ ID NO: 487053 - DNA, 30 bp, Artificial Sequence
  Synthetic oligonucleotide
gaggcgttccactacgtgcggggaacggca

SEQ ID NO: 487054 - DNA, 30 bp, Artificial Sequence
  Synthetic oligonucleotide
atattgcccgtaatgatctatcagacggca

SEQ ID NO: 487055 - DNA, 30 bp, Artificial Sequence
  Synthetic oligonucleotide
tccacgccaactaattttaaatctacggca

SEQ ID NO: 487056 - DNA, 30 bp, Artificial Sequence
  Synthetic oligonucleotide
gaaacttctagagaagcgctccttacggca

SEQ ID NO: 487057 - DNA, 30 bp, Artificial Sequence
  Synthetic oligonucleotide
ggaaacgaagcataaaataatgtaccggca

SEQ ID NO: 487058 - DNA, 30 bp, Artificial Sequence
  Synthetic oligonucleotide
tgttgtgagcggaggtattctatgccggca

SEQ ID NO: 487059 - DNA, 30 bp, Artificial Sequence
  Synthetic oligonucleotide
cggaggccgcggccttgggccgatccggca

SEQ ID NO: 487060 - DNA, 30 bp, Artificial Sequence
  Synthetic oligonucleotide
agttataaatgtatttgtaactgtccggca

SEQ ID NO: 487061 - DNA, 30 bp, Artificial Sequence
  Synthetic oligonucleotide
gacccccgtggagtgcgctgcgaagcggca

SEQ ID NO: 487062 - DNA, 30 bp, Artificial Sequence
  Synthetic oligonucleotide
ttggatattgacagcgaatgcgcagcggca

SEQ ID NO: 487063 - DNA, 30 bp, Artificial Sequence
  Synthetic oligonucleotide
agtgatagtcactgctatccggcagcggca

SEQ ID NO: 487064 - DNA, 30 bp, Artificial Sequence
  Synthetic oligonucleotide
gaagggggggtgccgggttgatacgcggca

SEQ ID NO: 487065 - DNA, 29 bp, Artificial Sequence
  Synthetic oligonucleotide
actagctcagtcaatgtaaaagggcggca

SEQ ID NO: 487066 - DNA, 30 bp, Artificial Sequence
  Synthetic oligonucleotide
gtaccctactgaattccgagactctcggca

SEQ ID NO: 487067 - DNA, 31 bp, Artificial Sequence
  Synthetic oligonucleotide
caccctttggtaaattatactcaaaagggca

SEQ ID NO: 487068 - DNA, 26 bp, Artificial Sequence
  Synthetic oligonucleotide
cttcagccgtgcatgtacgaagggca

SEQ ID NO: 487069 - DNA, 30 bp, Artificial Sequence
  Synthetic oligonucleotide
cagcttcgcgtccaatcgagaaacagggca

SEQ ID NO: 487070 - DNA, 30 bp, Artificial Sequence
  Synthetic oligonucleotide
acatgtggtataagactctcctagagggca

SEQ ID NO: 487071 - DNA, 30 bp, Artificial Sequence
  Synthetic oligonucleotide
gccctctctagacggactagtacgagggca

SEQ ID NO: 487072 - DNA, 30 bp, Artificial Sequence
  Synthetic oligonucleotide
gaacccgacctgggtgctgcccgccgggca

SEQ ID NO: 487073 - DNA, 30 bp, Artificial Sequence
  Synthetic oligonucleotide
tgggatccgccaatcccggtcctccgggca

SEQ ID NO: 487074 - DNA, 30 bp, Artificial Sequence
  Synthetic oligonucleotide
cagccttcccacggccttagagatcgggca

SEQ ID NO: 487075 - DNA, 30 bp, Artificial Sequence
  Synthetic oligonucleotide
aaagcctacgagctaatggttgttcgggca

SEQ ID NO: 487076 - DNA, 30 bp, Artificial Sequence
  Synthetic oligonucleotide
tatggttggcacgtattgtggcaaggggca

SEQ ID NO: 487077 - DNA, 30 bp, Artificial Sequence
  Synthetic oligonucleotide
aaagtgaatacctgcgggctccgaggggca

SEQ ID NO: 487078 - DNA, 30 bp, Artificial Sequence
  Synthetic oligonucleotide
tatgaggctttccagtactgccggggggca

SEQ ID NO: 487079 - DNA, 30 bp, Artificial Sequence
  Synthetic oligonucleotide
atggaagaaggtctccgggaggggggggca

SEQ ID NO: 487080 - DNA, 30 bp, Artificial Sequence
  Synthetic oligonucleotide
aatgaacatggcaattccacaccatgggca

SEQ ID NO: 487081 - DNA, 30 bp, Artificial Sequence
  Synthetic oligonucleotide
cacccacatctttttttttgttgatgggca

SEQ ID NO: 487082 - DNA, 30 bp, Artificial Sequence
  Synthetic oligonucleotide
ggattccctaaaggccggatagcctgggca

SEQ ID NO: 487083 - DNA, 30 bp, Artificial Sequence
  Synthetic oligonucleotide
attacacctagacctccgtattaaatggca

SEQ ID NO: 487084 - DNA, 30 bp, Artificial Sequence
  Synthetic oligonucleotide
aaatttggcgatgtcaccgtaagaatggca

SEQ ID NO: 487085 - DNA, 30 bp, Artificial Sequence
  Synthetic oligonucleotide
ggtaatgaatggagtaccgcgacgatggca

SEQ ID NO: 487086 - DNA, 30 bp, Artificial Sequence
  Synthetic oligonucleotide
ctgtagttaagcacatgacattctatggca

SEQ ID NO: 487087 - DNA, 30 bp, Artificial Sequence
  Synthetic oligonucleotide
tcgtcgttaacattccagcaaggtatggca

SEQ ID NO: 487088 - DNA, 30 bp, Artificial Sequence
  Synthetic oligonucleotide
ctgtgtattcaagcgccgcgcaaactggca

SEQ ID NO: 487089 - DNA, 30 bp, Artificial Sequence
  Synthetic oligonucleotide
aaacctgtcttagtatacatcagactggca

SEQ ID NO: 487090 - DNA, 30 bp, Artificial Sequence
  Synthetic oligonucleotide
caatctgtatcgcggtaacttctactggca

SEQ ID NO: 487091 - DNA, 30 bp, Artificial Sequence
  Synthetic oligonucleotide
accttcgccagtcgtagaaagccgctggca

SEQ ID NO: 487092 - DNA, 30 bp, Artificial Sequence
  Synthetic oligonucleotide
cacgcggttacaccaaccgtcaggctggca

SEQ ID NO: 487093 - DNA, 30 bp, Artificial Sequence
  Synthetic oligonucleotide
atctggagcggcgccagttcttggctggca

SEQ ID NO: 487094 - DNA, 30 bp, Artificial Sequence
  Synthetic oligonucleotide
cttcagtacaggaagcggactatgctggca

SEQ ID NO: 487095 - DNA, 30 bp, Artificial Sequence
  Synthetic oligonucleotide
gattttacgggtctgtgcagaaatctggca

SEQ ID NO: 487096 - DNA, 30 bp, Artificial Sequence
  Synthetic oligonucleotide
gattctggacggcacacaagaggtctggca

SEQ ID NO: 487097 - DNA, 30 bp, Artificial Sequence
  Synthetic oligonucleotide
agttggttcgactcttgggaataagtggca

SEQ ID NO: 487098 - DNA, 30 bp, Artificial Sequence
  Synthetic oligonucleotide
ccggccacatcacgcctacttaacgtggca

SEQ ID NO: 487099 - DNA, 30 bp, Artificial Sequence
  Synthetic oligonucleotide
acatatctgcacggtctgcgccccgtggca

SEQ ID NO: 487100 - DNA, 30 bp, Artificial Sequence
  Synthetic oligonucleotide
ttaattccaaaaaaattctagatggtggca

SEQ ID NO: 487101 - DNA, 30 bp, Artificial Sequence
  Synthetic oligonucleotide
attttattcgtaatgaggtctgcattggca

SEQ ID NO: 487102 - DNA, 30 bp, Artificial Sequence
  Synthetic oligonucleotide
gattgttaagccaagatatttgtattggca

SEQ ID NO: 487103 - DNA, 30 bp, Artificial Sequence
  Synthetic oligonucleotide
tagctctactactttccttaccacttggca

SEQ ID NO: 487104 - DNA, 30 bp, Artificial Sequence
  Synthetic oligonucleotide
aattactgacccagtatctgcacgttggca

SEQ ID NO: 487105 - DNA, 30 bp, Artificial Sequence
  Synthetic oligonucleotide
gaaccggtggcggggggtactacgttggca

SEQ ID NO: 487106 - DNA, 30 bp, Artificial Sequence
  Synthetic oligonucleotide
taaccagttcgttatgaagtacggttggca

SEQ ID NO: 487107 - DNA, 30 bp, Artificial Sequence
  Synthetic oligonucleotide
cacggttgagtaaaacagaggtatttggca

SEQ ID NO: 487108 - DNA, 30 bp, Artificial Sequence
  Synthetic oligonucleotide
taattcagagaagcattgccattaaatgca

SEQ ID NO: 487109 - DNA, 30 bp, Artificial Sequence
  Synthetic oligonucleotide
attgcatttgtcactggtgtagacaatgca

SEQ ID NO: 487110 - DNA, 30 bp, Artificial Sequence
  Synthetic oligonucleotide
agagcgatgcgggatgaaactacgaatgca

SEQ ID NO: 487111 - DNA, 30 bp, Artificial Sequence
  Synthetic oligonucleotide
cttagagtcatgtatctgacaggtaatgca

SEQ ID NO: 487112 - DNA, 30 bp, Artificial Sequence
  Synthetic oligonucleotide
tggcgtgacagggctcagcgcattaatgca

SEQ ID NO: 487113 - DNA, 30 bp, Artificial Sequence
  Synthetic oligonucleotide
cgcaaagtatagcgggcaactgcccatgca

SEQ ID NO: 487114 - DNA, 30 bp, Artificial Sequence
  Synthetic oligonucleotide
gactatactgcgcttatcagacgccatgca

SEQ ID NO: 487115 - DNA, 30 bp, Artificial Sequence
  Synthetic oligonucleotide
gaaatagtgcctggtttagtgtgccatgca

SEQ ID NO: 487116 - DNA, 30 bp, Artificial Sequence
  Synthetic oligonucleotide
cccagacactctctcaagaacgggcatgca

SEQ ID NO: 487117 - DNA, 30 bp, Artificial Sequence
  Synthetic oligonucleotide
atagtatgattgtggtcgcttctgcatgca

SEQ ID NO: 487118 - DNA, 30 bp, Artificial Sequence
  Synthetic oligonucleotide
tgggctcctttttgcacaacaactcatgca

SEQ ID NO: 487119 - DNA, 30 bp, Artificial Sequence
  Synthetic oligonucleotide
taagtttcttcaccgcgccggtttcatgca

SEQ ID NO: 487120 - DNA, 30 bp, Artificial Sequence
  Synthetic oligonucleotide
tgtataaggcagattcaaaattaagatgca

SEQ ID NO: 487121 - DNA, 30 bp, Artificial Sequence
  Synthetic oligonucleotide
gcaaagccgtttccggcaaatacagatgca

SEQ ID NO: 487122 - DNA, 30 bp, Artificial Sequence
  Synthetic oligonucleotide
gaaacttccatatgtctgggaagcgatgca

SEQ ID NO: 487123 - DNA, 30 bp, Artificial Sequence
  Synthetic oligonucleotide
cttttggtacatgcgggtcttaaggatgca

SEQ ID NO: 487124 - DNA, 30 bp, Artificial Sequence
  Synthetic oligonucleotide
taaaaggtgttcttagaagcatgggatgca

SEQ ID NO: 487125 - DNA, 30 bp, Artificial Sequence
  Synthetic oligonucleotide
gacaaagcacagacatctccagtggatgca

SEQ ID NO: 487126 - DNA, 30 bp, Artificial Sequence
  Synthetic oligonucleotide
tactgcatcaaccttttggttgcatatgca

SEQ ID NO: 487127 - DNA, 30 bp, Artificial Sequence
  Synthetic oligonucleotide
tcggtgaaaagtagtgaaccgttatatgca

SEQ ID NO: 487128 - DNA, 30 bp, Artificial Sequence
  Synthetic oligonucleotide
atgaatgccgtattggcagcgggttatgca

SEQ ID NO: 487129 - DNA, 30 bp, Artificial Sequence
  Synthetic oligonucleotide
ggatgggggcccagcgccggctccactgca

SEQ ID NO: 487130 - DNA, 30 bp, Artificial Sequence
  Synthetic oligonucleotide
gtgtatgttctctatgggtgttctactgca

SEQ ID NO: 487131 - DNA, 30 bp, Artificial Sequence
  Synthetic oligonucleotide
acaaattagcacgtgcttttaaagcctgca

SEQ ID NO: 487132 - DNA, 30 bp, Artificial Sequence
  Synthetic oligonucleotide
atatctgctttgagtgctgaaatgcctgca

SEQ ID NO: 487133 - DNA, 30 bp, Artificial Sequence
  Synthetic oligonucleotide
accatgcaccgttgactgccgcgagctgca

SEQ ID NO: 487134 - DNA, 30 bp, Artificial Sequence
  Synthetic oligonucleotide
ttctgaattgttctactatactacgctgca

SEQ ID NO: 487135 - DNA, 30 bp, Artificial Sequence
  Synthetic oligonucleotide
ggcggcagacggttactcgtaagcgctgca

SEQ ID NO: 487136 - DNA, 30 bp, Artificial Sequence
  Synthetic oligonucleotide
gagtcgtcagcttgattttccacatctgca

SEQ ID NO: 487137 - DNA, 30 bp, Artificial Sequence
  Synthetic oligonucleotide
ccggaacgccccctggtgatgtcatctgca

SEQ ID NO: 487138 - DNA, 30 bp, Artificial Sequence
  Synthetic oligonucleotide
cgtatactttactttcctggtttatctgca

SEQ ID NO: 487139 - DNA, 30 bp, Artificial Sequence
  Synthetic oligonucleotide
tatcatgcagctttaggatatgtctctgca

SEQ ID NO: 487140 - DNA, 30 bp, Artificial Sequence
  Synthetic oligonucleotide
tcgatgcatcagagtcaagctaggtctgca

SEQ ID NO: 487141 - DNA, 30 bp, Artificial Sequence
  Synthetic oligonucleotide
ataatttttttatcatggcctctgtctgca

SEQ ID NO: 487142 - DNA, 30 bp, Artificial Sequence
  Synthetic oligonucleotide
actgttcagggaatccatataatttctgca

SEQ ID NO: 487143 - DNA, 30 bp, Artificial Sequence
  Synthetic oligonucleotide
gacacattgtatgctagggtaatttctgca

SEQ ID NO: 487144 - DNA, 30 bp, Artificial Sequence
  Synthetic oligonucleotide
ccctctcaactaagtcactgtaaaagtgca

SEQ ID NO: 487145 - DNA, 30 bp, Artificial Sequence
  Synthetic oligonucleotide
ggaattcaaggtgaatattttctaagtgca

SEQ ID NO: 487146 - DNA, 30 bp, Artificial Sequence
  Synthetic oligonucleotide
tattatggaaggttgcgggggacgagtgca

SEQ ID NO: 487147 - DNA, 30 bp, Artificial Sequence
  Synthetic oligonucleotide
ttaacaagcttgcatattgctatgagtgca

SEQ ID NO: 487148 - DNA, 30 bp, Artificial Sequence
  Synthetic oligonucleotide
agagccggcttctggctttaggatagtgca

SEQ ID NO: 487149 - DNA, 30 bp, Artificial Sequence
  Synthetic oligonucleotide
aaattgaaacgacgcggtttataccgtgca

SEQ ID NO: 487150 - DNA, 30 bp, Artificial Sequence
  Synthetic oligonucleotide
catttggactccttcacgagtaggcgtgca

SEQ ID NO: 487151 - DNA, 30 bp, Artificial Sequence
  Synthetic oligonucleotide
gatctagagcgtccgacagcgcgtcgtgca

SEQ ID NO: 487152 - DNA, 30 bp, Artificial Sequence
  Synthetic oligonucleotide
aactaagcctaccttgtggtcattcgtgca

SEQ ID NO: 487153 - DNA, 30 bp, Artificial Sequence
  Synthetic oligonucleotide
cccccgctgagcggagcccgaatcggtgca

SEQ ID NO: 487154 - DNA, 30 bp, Artificial Sequence
  Synthetic oligonucleotide
cacagctcggtcctatatatatggggtgca

SEQ ID NO: 487155 - DNA, 30 bp, Artificial Sequence
  Synthetic oligonucleotide
cttttgcggtagtactgattccatggtgca

SEQ ID NO: 487156 - DNA, 30 bp, Artificial Sequence
  Synthetic oligonucleotide
ttaattctaggatatgtagtctttggtgca

SEQ ID NO: 487157 - DNA, 30 bp, Artificial Sequence
  Synthetic oligonucleotide
gcagctggcgtaatgcagcgaatatgtgca

SEQ ID NO: 487158 - DNA, 30 bp, Artificial Sequence
  Synthetic oligonucleotide
gtgtggtacggcgaccccatttagtgtgca

SEQ ID NO: 487159 - DNA, 30 bp, Artificial Sequence
  Synthetic oligonucleotide
ttagggttcccaactgcaccggacattgca

SEQ ID NO: 487160 - DNA, 30 bp, Artificial Sequence
  Synthetic oligonucleotide
agttgccgcggtaagcagggttacattgca

SEQ ID NO: 487161 - DNA, 30 bp, Artificial Sequence
  Synthetic oligonucleotide
atacctggtgccacgtatctcagcattgca

SEQ ID NO: 487162 - DNA, 31 bp, Artificial Sequence
  Synthetic oligonucleotide
ccaaacttgcatccagaaaagaactattgca

SEQ ID NO: 487163 - DNA, 30 bp, Artificial Sequence
  Synthetic oligonucleotide
accctattggggtgctcgagaagtattgca

SEQ ID NO: 487164 - DNA, 30 bp, Artificial Sequence
  Synthetic oligonucleotide
gaatacaaggaggcagatgcgcttattgca

SEQ ID NO: 487165 - DNA, 30 bp, Artificial Sequence
  Synthetic oligonucleotide
gcaaggcgactttctctgggtaaccttgca

SEQ ID NO: 487166 - DNA, 30 bp, Artificial Sequence
  Synthetic oligonucleotide
tgtatacgcagggaaagctacaagcttgca

SEQ ID NO: 487167 - DNA, 30 bp, Artificial Sequence
  Synthetic oligonucleotide
ttgaagcttagtatgcaatgagggcttgca

SEQ ID NO: 487168 - DNA, 30 bp, Artificial Sequence
  Synthetic oligonucleotide
tatataaattggcctcttgcctttcttgca

SEQ ID NO: 487169 - DNA, 30 bp, Artificial Sequence
  Synthetic oligonucleotide
tttagtacgaggtcatgattaacagttgca

SEQ ID NO: 487170 - DNA, 30 bp, Artificial Sequence
  Synthetic oligonucleotide
cactaggcagcgtcttaaaccctagttgca

SEQ ID NO: 487171 - DNA, 30 bp, Artificial Sequence
  Synthetic oligonucleotide
gtttcacgctcgcaagttttgcgcgttgca

SEQ ID NO: 487172 - DNA, 30 bp, Artificial Sequence
  Synthetic oligonucleotide
gccccgccacgacgagattctcgcgttgca

SEQ ID NO: 487173 - DNA, 30 bp, Artificial Sequence
  Synthetic oligonucleotide
ggcagatgtctacggtatgaattggttgca

SEQ ID NO: 487174 - DNA, 30 bp, Artificial Sequence
  Synthetic oligonucleotide
aaacgcgcagcgagcattcgggatgttgca

SEQ ID NO: 487175 - DNA, 29 bp, Artificial Sequence
  Synthetic oligonucleotide
ggcgcaactgatagatggcttctgttgca

SEQ ID NO: 487176 - DNA, 30 bp, Artificial Sequence
  Synthetic oligonucleotide
ataaggatgaagtctattgctagtgttgca

SEQ ID NO: 487177 - DNA, 30 bp, Artificial Sequence
  Synthetic oligonucleotide
taatacctattctgatgtggtgcatttgca

SEQ ID NO: 487178 - DNA, 30 bp, Artificial Sequence
  Synthetic oligonucleotide
gtattttctcacacacttataagatttgca

SEQ ID NO: 487179 - DNA, 30 bp, Artificial Sequence
  Synthetic oligonucleotide
taacgtccattaatgacacggtgatttgca

SEQ ID NO: 487180 - DNA, 30 bp, Artificial Sequence
  Synthetic oligonucleotide
ggggctgactaagacaccttgtactttgca

SEQ ID NO: 487181 - DNA, 30 bp, Artificial Sequence
  Synthetic oligonucleotide
ctaccagattacagctggacatgctttgca

SEQ ID NO: 487182 - DNA, 30 bp, Artificial Sequence
  Synthetic oligonucleotide
aatccccagagcccatgctagacgtttgca

SEQ ID NO: 487183 - DNA, 30 bp, Artificial Sequence
  Synthetic oligonucleotide
tttaacgtactatgacgtcacaggtttgca

SEQ ID NO: 487184 - DNA, 30 bp, Artificial Sequence
  Synthetic oligonucleotide
aggtatacaggagacgactgagggtttgca

SEQ ID NO: 487185 - DNA, 30 bp, Artificial Sequence
  Synthetic oligonucleotide
tgagtcgagtagtatgacttctattttgca

SEQ ID NO: 487186 - DNA, 30 bp, Artificial Sequence
  Synthetic oligonucleotide
gatttatgtgtccacaccggatcttttgca

SEQ ID NO: 487187 - DNA, 30 bp, Artificial Sequence
  Synthetic oligonucleotide
tgtattgccaggatggcgctcgcaaaatca

SEQ ID NO: 487188 - DNA, 30 bp, Artificial Sequence
  Synthetic oligonucleotide
aactaccaaatacgccggctgctaaaatca

SEQ ID NO: 487189 - DNA, 30 bp, Artificial Sequence
  Synthetic oligonucleotide
tcgctggtacgaagtcgagaaaccaaatca

SEQ ID NO: 487190 - DNA, 30 bp, Artificial Sequence
  Synthetic oligonucleotide
aattttcaaaccattgaagttcgcaaatca

SEQ ID NO: 487191 - DNA, 30 bp, Artificial Sequence
  Synthetic oligonucleotide
gaggcgggtcagcataattcaaagaaatca

SEQ ID NO: 487192 - DNA, 30 bp, Artificial Sequence
  Synthetic oligonucleotide
tacttacgcatgatatttcgtgtgaaatca

SEQ ID NO: 487193 - DNA, 30 bp, Artificial Sequence
  Synthetic oligonucleotide
aagtgacagtatccattcacgaataaatca

SEQ ID NO: 487194 - DNA, 30 bp, Artificial Sequence
  Synthetic oligonucleotide
tggtatcgcgaggatgtatttcataaatca

SEQ ID NO: 487195 - DNA, 30 bp, Artificial Sequence
  Synthetic oligonucleotide
acgcaacatttgttggcgggagctaaatca

SEQ ID NO: 487196 - DNA, 30 bp, Artificial Sequence
  Synthetic oligonucleotide
aaaagatagccatagggtaaaattaaatca

SEQ ID NO: 487197 - DNA, 30 bp, Artificial Sequence
  Synthetic oligonucleotide
acaggatatagcgaccgaggtcgccaatca

SEQ ID NO: 487198 - DNA, 30 bp, Artificial Sequence
  Synthetic oligonucleotide
acatttcccgacacacgcgcgcagcaatca

SEQ ID NO: 487199 - DNA, 30 bp, Artificial Sequence
  Synthetic oligonucleotide
tgatataatgatagcttacgtctgcaatca

SEQ ID NO: 487200 - DNA, 30 bp, Artificial Sequence
  Synthetic oligonucleotide
gacctgctaagttgtggatttcttcaatca

SEQ ID NO: 487201 - DNA, 30 bp, Artificial Sequence
  Synthetic oligonucleotide
tgtgtaagtgcccccactacatttcaatca

SEQ ID NO: 487202 - DNA, 30 bp, Artificial Sequence
  Synthetic oligonucleotide
ttccttacgcggcatcgtgtaatcgaatca

SEQ ID NO: 487203 - DNA, 30 bp, Artificial Sequence
  Synthetic oligonucleotide
aataatagcaggacttgcattgatgaatca

SEQ ID NO: 487204 - DNA, 30 bp, Artificial Sequence
  Synthetic oligonucleotide
cagcagcatcgctagcccgtctttgaatca

SEQ ID NO: 487205 - DNA, 30 bp, Artificial Sequence
  Synthetic oligonucleotide
ctattgctatgatcatgccgagaataatca

SEQ ID NO: 487206 - DNA, 30 bp, Artificial Sequence
  Synthetic oligonucleotide
ttgatcaactgtaccgggccgcgataatca

SEQ ID NO: 487207 - DNA, 30 bp, Artificial Sequence
  Synthetic oligonucleotide
aatcgcgcacatatttcgtatcgataatca

SEQ ID NO: 487208 - DNA, 30 bp, Artificial Sequence
  Synthetic oligonucleotide
ttccggtcggcctccgcacaaacctaatca

SEQ ID NO: 487209 - DNA, 30 bp, Artificial Sequence
  Synthetic oligonucleotide
tcttttcttcagccgggggccccctaatca

SEQ ID NO: 487210 - DNA, 30 bp, Artificial Sequence
  Synthetic oligonucleotide
gcattactcggcagcatggtacgctaatca

SEQ ID NO: 487211 - DNA, 30 bp, Artificial Sequence
  Synthetic oligonucleotide
attcgcgcgttttagagagctcgctaatca

SEQ ID NO: 487212 - DNA, 30 bp, Artificial Sequence
  Synthetic oligonucleotide
tagcacagccctttgcacgtctcgtaatca

SEQ ID NO: 487213 - DNA, 30 bp, Artificial Sequence
  Synthetic oligonucleotide
ctttatcacgaaacaaactcaaaaacatca

SEQ ID NO: 487214 - DNA, 30 bp, Artificial Sequence
  Synthetic oligonucleotide
tacacaatcatgggcgcttatgtcacatca

SEQ ID NO: 487215 - DNA, 30 bp, Artificial Sequence
  Synthetic oligonucleotide
tctgttcgactacaacaagttcggacatca

SEQ ID NO: 487216 - DNA, 30 bp, Artificial Sequence
  Synthetic oligonucleotide
gaagggtcactctgcgcatgggtgacatca

SEQ ID NO: 487217 - DNA, 30 bp, Artificial Sequence
  Synthetic oligonucleotide
gctgatgctagctctatggttttgacatca

SEQ ID NO: 487218 - DNA, 30 bp, Artificial Sequence
  Synthetic oligonucleotide
gaaggctacgggccgcgtgctaatacatca

SEQ ID NO: 487219 - DNA, 30 bp, Artificial Sequence
  Synthetic oligonucleotide
cctcgtactagggcgtcggtacctacatca

SEQ ID NO: 487220 - DNA, 30 bp, Artificial Sequence
  Synthetic oligonucleotide
gaatgtccttatggctgaacagttacatca

SEQ ID NO: 487221 - DNA, 30 bp, Artificial Sequence
  Synthetic oligonucleotide
ttgactcctagaggcagggagtaaccatca

SEQ ID NO: 487222 - DNA, 30 bp, Artificial Sequence
  Synthetic oligonucleotide
gccacatattatttcagggattacccatca

SEQ ID NO: 487223 - DNA, 30 bp, Artificial Sequence
  Synthetic oligonucleotide
gactcaagcatcaagtatattgccccatca

SEQ ID NO: 487224 - DNA, 30 bp, Artificial Sequence
  Synthetic oligonucleotide
ccgacggaatgcattcccggtcgtccatca

SEQ ID NO: 487225 - DNA, 30 bp, Artificial Sequence
  Synthetic oligonucleotide
ataaacgcggaggttgggccgggtccatca

SEQ ID NO: 487226 - DNA, 27 bp, Artificial Sequence
  Synthetic oligonucleotide
aaaaaataaattccgcatcttccatca

SEQ ID NO: 487227 - DNA, 30 bp, Artificial Sequence
  Synthetic oligonucleotide
cagaccgccttgtctcctagcgcagcatca

SEQ ID NO: 487228 - DNA, 30 bp, Artificial Sequence
  Synthetic oligonucleotide
gtctgtacgaagtatcgcatgcgagcatca

SEQ ID NO: 487229 - DNA, 30 bp, Artificial Sequence
  Synthetic oligonucleotide
gtcgcttatgcattgcgtccgggagcatca

SEQ ID NO: 487230 - DNA, 30 bp, Artificial Sequence
  Synthetic oligonucleotide
tattagctgtaatcggtcctatgagcatca

SEQ ID NO: 487231 - DNA, 30 bp, Artificial Sequence
  Synthetic oligonucleotide
ctcggataaactggccatagaatagcatca

SEQ ID NO: 487232 - DNA, 30 bp, Artificial Sequence
  Synthetic oligonucleotide
tataaatatatctatgctagaatagcatca

SEQ ID NO: 487233 - DNA, 30 bp, Artificial Sequence
  Synthetic oligonucleotide
acccttatttaactctagttcgccgcatca

SEQ ID NO: 487234 - DNA, 30 bp, Artificial Sequence
  Synthetic oligonucleotide
tgagccggcgacttttgtttcggcgcatca

SEQ ID NO: 487235 - DNA, 30 bp, Artificial Sequence
  Synthetic oligonucleotide
gaataattatatttcaaccttctggcatca

SEQ ID NO: 487236 - DNA, 30 bp, Artificial Sequence
  Synthetic oligonucleotide
tcgcataatgataaggattctaatgcatca

SEQ ID NO: 487237 - DNA, 30 bp, Artificial Sequence
  Synthetic oligonucleotide
ggcgccctaatgggtccggatcatgcatca

SEQ ID NO: 487238 - DNA, 40 bp, Artificial Sequence
  Synthetic oligonucleotide
tggtaaggagggtcaccgacgtcgcgccgttgctgcatca

SEQ ID NO: 487239 - DNA, 30 bp, Artificial Sequence
  Synthetic oligonucleotide
gaagcgtgggttcgcaacagattatcatca

SEQ ID NO: 487240 - DNA, 30 bp, Artificial Sequence
  Synthetic oligonucleotide
agctactgcacactgacggtgcagtcatca

SEQ ID NO: 487241 - DNA, 30 bp, Artificial Sequence
  Synthetic oligonucleotide
gtttttttgggtgatgagtagacttcatca

SEQ ID NO: 487242 - DNA, 30 bp, Artificial Sequence
  Synthetic oligonucleotide
agattgcagcaaaggagcgaaccttcatca

SEQ ID NO: 487243 - DNA, 30 bp, Artificial Sequence
  Synthetic oligonucleotide
taacgctgctatctcagcatctaaagatca

SEQ ID NO: 487244 - DNA, 30 bp, Artificial Sequence
  Synthetic oligonucleotide
tattcttcgacatagcattcgaggagatca

SEQ ID NO: 487245 - DNA, 30 bp, Artificial Sequence
  Synthetic oligonucleotide
cgaacgaaacaggtaacggcataacgatca

SEQ ID NO: 487246 - DNA, 30 bp, Artificial Sequence
  Synthetic oligonucleotide
atcagacggcgcgccccagggggccgatca

SEQ ID NO: 487247 - DNA, 30 bp, Artificial Sequence
  Synthetic oligonucleotide
ggatatgtgtaactggtaaagactcgatca

SEQ ID NO: 487248 - DNA, 30 bp, Artificial Sequence
  Synthetic oligonucleotide
tggctgggaagcggggggaggacaggatca

SEQ ID NO: 487249 - DNA, 30 bp, Artificial Sequence
  Synthetic oligonucleotide
gcaattactgcttatcaaggggcaggatca

SEQ ID NO: 487250 - DNA, 30 bp, Artificial Sequence
  Synthetic oligonucleotide
caccacgcatccatatgaaattgcggatca

SEQ ID NO: 487251 - DNA, 30 bp, Artificial Sequence
  Synthetic oligonucleotide
ggggagtttgagtgggaaaaatagggatca

SEQ ID NO: 487252 - DNA, 30 bp, Artificial Sequence
  Synthetic oligonucleotide
attttacaagtcaaatatcgaatgggatca

SEQ ID NO: 487253 - DNA, 30 bp, Artificial Sequence
  Synthetic oligonucleotide
cttttatttgggatgagctaagcatgatca

SEQ ID NO: 487254 - DNA, 30 bp, Artificial Sequence
  Synthetic oligonucleotide
ctatccactccgattgaggcgctctgatca

SEQ ID NO: 487255 - DNA, 30 bp, Artificial Sequence
  Synthetic oligonucleotide
ttatgcacgacgatagcgggagaaatatca

SEQ ID NO: 487256 - DNA, 30 bp, Artificial Sequence
  Synthetic oligonucleotide
atctatagacgacatgaaaacctaatatca

SEQ ID NO: 487257 - DNA, 30 bp, Artificial Sequence
  Synthetic oligonucleotide
gctgttatagcattgtgttgattaatatca

SEQ ID NO: 487258 - DNA, 30 bp, Artificial Sequence
  Synthetic oligonucleotide
tatacaggcgcttgtactggattcatatca

SEQ ID NO: 487259 - DNA, 30 bp, Artificial Sequence
  Synthetic oligonucleotide
cattagggcccaacccaggatgcgatatca

SEQ ID NO: 487260 - DNA, 30 bp, Artificial Sequence
  Synthetic oligonucleotide
atagtctagagttaccaggtgcggatatca

SEQ ID NO: 487261 - DNA, 30 bp, Artificial Sequence
  Synthetic oligonucleotide
aactctagaacgtgcaccagctggatatca

SEQ ID NO: 487262 - DNA, 30 bp, Artificial Sequence
  Synthetic oligonucleotide
aagatctaccatgtgaaaaaggatatatca

SEQ ID NO: 487263 - DNA, 30 bp, Artificial Sequence
  Synthetic oligonucleotide
ggagatgttagtcctcccccggttatatca

SEQ ID NO: 487264 - DNA, 30 bp, Artificial Sequence
  Synthetic oligonucleotide
tcgcataactttactacttcttcactatca

SEQ ID NO: 487265 - DNA, 30 bp, Artificial Sequence
  Synthetic oligonucleotide
accagtgttaggccgcactggcatctatca

SEQ ID NO: 487266 - DNA, 30 bp, Artificial Sequence
  Synthetic oligonucleotide
tccggttaccgcaagcgtctcggtctatca

SEQ ID NO: 487267 - DNA, 30 bp, Artificial Sequence
  Synthetic oligonucleotide
tgggggatacagacggctcaatgtctatca

SEQ ID NO: 487268 - DNA, 30 bp, Artificial Sequence
  Synthetic oligonucleotide
aatatttctgcacctgggaggaaagtatca

SEQ ID NO: 487269 - DNA, 30 bp, Artificial Sequence
  Synthetic oligonucleotide
cgcagatgtacttcgtttgtctaagtatca

SEQ ID NO: 487270 - DNA, 30 bp, Artificial Sequence
  Synthetic oligonucleotide
acaacacggtctgattgtgctcacgtatca

SEQ ID NO: 487271 - DNA, 28 bp, Artificial Sequence
  Synthetic oligonucleotide
ggaatggtgtgcggccccttgcgtatca

SEQ ID NO: 487272 - DNA, 30 bp, Artificial Sequence
  Synthetic oligonucleotide
agttttctttgtgtagttgtgtaggtatca

SEQ ID NO: 487273 - DNA, 30 bp, Artificial Sequence
  Synthetic oligonucleotide
cagcccttaaatgtcttacgtcatgtatca

SEQ ID NO: 487274 - DNA, 29 bp, Artificial Sequence
  Synthetic oligonucleotide
gacccccgcacgaaagttgtattgtatca

SEQ ID NO: 487275 - DNA, 30 bp, Artificial Sequence
  Synthetic oligonucleotide
tggtgatggagctttatgctccaattatca

SEQ ID NO: 487276 - DNA, 30 bp, Artificial Sequence
  Synthetic oligonucleotide
ttgacctgagattaacctctggaattatca

SEQ ID NO: 487277 - DNA, 30 bp, Artificial Sequence
  Synthetic oligonucleotide
attgaggccgctaaaagtattacattatca

SEQ ID NO: 487278 - DNA, 30 bp, Artificial Sequence
  Synthetic oligonucleotide
ttgcagctctcaagaagactatcattatca

SEQ ID NO: 487279 - DNA, 30 bp, Artificial Sequence
  Synthetic oligonucleotide
gacggcactgatgtatgtggtaacttatca

SEQ ID NO: 487280 - DNA, 30 bp, Artificial Sequence
  Synthetic oligonucleotide
gatacccgcgcataattgtgcgacttatca

SEQ ID NO: 487281 - DNA, 30 bp, Artificial Sequence
  Synthetic oligonucleotide
gccacattgtcgcatagctgctacttatca

SEQ ID NO: 487282 - DNA, 30 bp, Artificial Sequence
  Synthetic oligonucleotide
tactgagccatagcagatttttatttatca

SEQ ID NO: 487283 - DNA, 30 bp, Artificial Sequence
  Synthetic oligonucleotide
gacagcctgtacgggggctttattttatca

SEQ ID NO: 487284 - DNA, 30 bp, Artificial Sequence
  Synthetic oligonucleotide
acttcttttagagctgctgatagaaactca

SEQ ID NO: 487285 - DNA, 30 bp, Artificial Sequence
  Synthetic oligonucleotide
cacataataacatccggccacttaaactca

SEQ ID NO: 487286 - DNA, 30 bp, Artificial Sequence
  Synthetic oligonucleotide
atccctgtgagtatcctacctatcaactca

SEQ ID NO: 487287 - DNA, 30 bp, Artificial Sequence
  Synthetic oligonucleotide
cggatgcaaggggtcccatcgttcaactca

SEQ ID NO: 487288 - DNA, 30 bp, Artificial Sequence
  Synthetic oligonucleotide
gcaggaagttaccatttcttgtagaactca

SEQ ID NO: 487289 - DNA, 30 bp, Artificial Sequence
  Synthetic oligonucleotide
gatttatagtctcgagcccgttggaactca

SEQ ID NO: 487290 - DNA, 30 bp, Artificial Sequence
  Synthetic oligonucleotide
atgtcccttcgcttcgtcctccataactca

SEQ ID NO: 487291 - DNA, 30 bp, Artificial Sequence
  Synthetic oligonucleotide
ccaaagactggctccggtcgaagtaactca

SEQ ID NO: 487292 - DNA, 30 bp, Artificial Sequence
  Synthetic oligonucleotide
tatgcattctcacaagtagatggtaactca

SEQ ID NO: 487293 - DNA, 30 bp, Artificial Sequence
  Synthetic oligonucleotide
aaagaacctggtaagcagcagggacactca

SEQ ID NO: 487294 - DNA, 30 bp, Artificial Sequence
  Synthetic oligonucleotide
gggatctgcctttacagctggaagcactca

SEQ ID NO: 487295 - DNA, 30 bp, Artificial Sequence
  Synthetic oligonucleotide
tcgcagcagagctttggcaccaatcactca

SEQ ID NO: 487296 - DNA, 30 bp, Artificial Sequence
  Synthetic oligonucleotide
tatgcagtgatgaggattttttcagactca

SEQ ID NO: 487297 - DNA, 30 bp, Artificial Sequence
  Synthetic oligonucleotide
cgaatcgccgcctgccgcctattcgactca

SEQ ID NO: 487298 - DNA, 30 bp, Artificial Sequence
  Synthetic oligonucleotide
gaaatgtaggcgacaagatacgttgactca

SEQ ID NO: 487299 - DNA, 30 bp, Artificial Sequence
  Synthetic oligonucleotide
gtttactaaaccgctggttcctagtactca

SEQ ID NO: 487300 - DNA, 30 bp, Artificial Sequence
  Synthetic oligonucleotide
tggtactgttctttcacctgaaggtactca

SEQ ID NO: 487301 - DNA, 30 bp, Artificial Sequence
  Synthetic oligonucleotide
acagggccaaagaccgtgaggatgtactca

SEQ ID NO: 487302 - DNA, 30 bp, Artificial Sequence
  Synthetic oligonucleotide
gaagcagacaccttcaaggtcaattactca

SEQ ID NO: 487303 - DNA, 30 bp, Artificial Sequence
  Synthetic oligonucleotide
gaaacaaggagtccctgagaattttactca

SEQ ID NO: 487304 - DNA, 30 bp, Artificial Sequence
  Synthetic oligonucleotide
tttataacggttgtgatcgacgcaacctca

SEQ ID NO: 487305 - DNA, 30 bp, Artificial Sequence
  Synthetic oligonucleotide
acttgttagtggcgaagcattctaacctca

SEQ ID NO: 487306 - DNA, 30 bp, Artificial Sequence
  Synthetic oligonucleotide
tctatatcggtaccgttattgttaacctca

SEQ ID NO: 487307 - DNA, 30 bp, Artificial Sequence
  Synthetic oligonucleotide
gtatgtattttgcggcccagttacacctca

SEQ ID NO: 487308 - DNA, 30 bp, Artificial Sequence
  Synthetic oligonucleotide
gtactgagcacctactcatttaatacctca

SEQ ID NO: 487309 - DNA, 30 bp, Artificial Sequence
  Synthetic oligonucleotide
gacgggcattatcacggaactcttacctca

SEQ ID NO: 487310 - DNA, 30 bp, Artificial Sequence
  Synthetic oligonucleotide
gtttacctcatcgaccttcctcttacctca

SEQ ID NO: 487311 - DNA, 30 bp, Artificial Sequence
  Synthetic oligonucleotide
tttgtttccttattccaagtgtgaccctca

SEQ ID NO: 487312 - DNA, 29 bp, Artificial Sequence
  Synthetic oligonucleotide
gaaaatacgcattccctaagataccctca

SEQ ID NO: 487313 - DNA, 30 bp, Artificial Sequence
  Synthetic oligonucleotide
tcttacagaaggttgagaccgcagccctca

SEQ ID NO: 487314 - DNA, 30 bp, Artificial Sequence
  Synthetic oligonucleotide
tcgtacgccccctctagcgcagcgccctca

SEQ ID NO: 487315 - DNA, 30 bp, Artificial Sequence
  Synthetic oligonucleotide
cctccatagggtgatacgagtaggccctca

SEQ ID NO: 487316 - DNA, 30 bp, Artificial Sequence
  Synthetic oligonucleotide
acaacgtattctactgttagtaggccctca

SEQ ID NO: 487317 - DNA, 30 bp, Artificial Sequence
  Synthetic oligonucleotide
atctgggaaaattaagcactcggtccctca

SEQ ID NO: 487318 - DNA, 30 bp, Artificial Sequence
  Synthetic oligonucleotide
attatcacgtagcacgaggtcggtccctca

SEQ ID NO: 487319 - DNA, 30 bp, Artificial Sequence
  Synthetic oligonucleotide
tgggggttatgtatttaacagaaagcctca

SEQ ID NO: 487320 - DNA, 30 bp, Artificial Sequence
  Synthetic oligonucleotide
cgcctttggaccttttgagtcctatcctca

SEQ ID NO: 487321 - DNA, 30 bp, Artificial Sequence
  Synthetic oligonucleotide
ctcacctgacttatgagaagtctatcctca

SEQ ID NO: 487322 - DNA, 30 bp, Artificial Sequence
  Synthetic oligonucleotide
gatggacgctcgttcacgcaagcctcctca

SEQ ID NO: 487323 - DNA, 29 bp, Artificial Sequence
  Synthetic oligonucleotide
tggcgcagtgcatcatcttccggtcctca

SEQ ID NO: 487324 - DNA, 30 bp, Artificial Sequence
  Synthetic oligonucleotide
tacgagcatctggaatcatgactgtcctca

SEQ ID NO: 487325 - DNA, 30 bp, Artificial Sequence
  Synthetic oligonucleotide
attactcgagacaggcatgggcaaagctca

SEQ ID NO: 487326 - DNA, 30 bp, Artificial Sequence
  Synthetic oligonucleotide
gacagctcgggttgacaacatacaagctca

SEQ ID NO: 487327 - DNA, 30 bp, Artificial Sequence
  Synthetic oligonucleotide
aaaacaacaagttaggtaagatgaagctca

SEQ ID NO: 487328 - DNA, 30 bp, Artificial Sequence
  Synthetic oligonucleotide
tgtccttcactcgcacatcagtgaagctca

SEQ ID NO: 487329 - DNA, 30 bp, Artificial Sequence
  Synthetic oligonucleotide
atgacaggtgtggctagtcccttcagctca

SEQ ID NO: 487330 - DNA, 30 bp, Artificial Sequence
  Synthetic oligonucleotide
cgcttggcatgatttgaagttaagagctca

SEQ ID NO: 487331 - DNA, 30 bp, Artificial Sequence
  Synthetic oligonucleotide
gcggccgctatccgtaggatacagagctca

SEQ ID NO: 487332 - DNA, 30 bp, Artificial Sequence
  Synthetic oligonucleotide
ctgaaatggttgcacggagctatgagctca

SEQ ID NO: 487333 - DNA, 30 bp, Artificial Sequence
  Synthetic oligonucleotide
aagacgatatcattcaaaaatcttagctca

SEQ ID NO: 487334 - DNA, 30 bp, Artificial Sequence
  Synthetic oligonucleotide
tcagtcgagggcggcatcaagtaacgctca

SEQ ID NO: 487335 - DNA, 30 bp, Artificial Sequence
  Synthetic oligonucleotide
tttgaaaactcctaggttagaacccgctca

SEQ ID NO: 487336 - DNA, 30 bp, Artificial Sequence
  Synthetic oligonucleotide
gttttattccacccgtatcccccccgctca

SEQ ID NO: 487337 - DNA, 30 bp, Artificial Sequence
  Synthetic oligonucleotide
ctaatttcagacaggtttacgcacggctca

SEQ ID NO: 487338 - DNA, 30 bp, Artificial Sequence
  Synthetic oligonucleotide
gctcaataacgcggtcagattatgggctca

SEQ ID NO: 487339 - DNA, 30 bp, Artificial Sequence
  Synthetic oligonucleotide
aatgttatgatgaacgggaattatggctca

SEQ ID NO: 487340 - DNA, 30 bp, Artificial Sequence
  Synthetic oligonucleotide
ctcggcaagtcatgaagccttgcctgctca

SEQ ID NO: 487341 - DNA, 30 bp, Artificial Sequence
  Synthetic oligonucleotide
agtgcggtgatgcataaacgtttgtgctca

SEQ ID NO: 487342 - DNA, 30 bp, Artificial Sequence
  Synthetic oligonucleotide
atatccaggcactttgaatgtcattgctca

SEQ ID NO: 487343 - DNA, 30 bp, Artificial Sequence
  Synthetic oligonucleotide
gtcgctagtatactagtccttacaatctca

SEQ ID NO: 487344 - DNA, 30 bp, Artificial Sequence
  Synthetic oligonucleotide
ttagttctacgttctcggacgggaatctca

SEQ ID NO: 487345 - DNA, 30 bp, Artificial Sequence
  Synthetic oligonucleotide
gaggtagcatatgcggtgctggacatctca

SEQ ID NO: 487346 - DNA, 30 bp, Artificial Sequence
  Synthetic oligonucleotide
cattcaatcacagcaaagaaaaccatctca

SEQ ID NO: 487347 - DNA, 30 bp, Artificial Sequence
  Synthetic oligonucleotide
atcgaatagggcgttcgacaattcatctca

SEQ ID NO: 487348 - DNA, 30 bp, Artificial Sequence
  Synthetic oligonucleotide
tctcgcatattccaatggatgtggatctca

SEQ ID NO: 487349 - DNA, 30 bp, Artificial Sequence
  Synthetic oligonucleotide
ttcacgactatcttgtcaatcacactctca

SEQ ID NO: 487350 - DNA, 30 bp, Artificial Sequence
  Synthetic oligonucleotide
agaggcgctgggcttcgtccaagcctctca

SEQ ID NO: 487351 - DNA, 30 bp, Artificial Sequence
  Synthetic oligonucleotide
ccagaacgacgtcatccaggtgtagtctca

SEQ ID NO: 487352 - DNA, 30 bp, Artificial Sequence
  Synthetic oligonucleotide
tacttgatcaggggcggcattgtagtctca

SEQ ID NO: 487353 - DNA, 30 bp, Artificial Sequence
  Synthetic oligonucleotide
tttacgtagagtggctccgctttagtctca

SEQ ID NO: 487354 - DNA, 30 bp, Artificial Sequence
  Synthetic oligonucleotide
acgcagctattcggctctccagtggtctca

SEQ ID NO: 487355 - DNA, 30 bp, Artificial Sequence
  Synthetic oligonucleotide
aaaccagggctccttaggggctctgtctca

SEQ ID NO: 487356 - DNA, 30 bp, Artificial Sequence
  Synthetic oligonucleotide
tgggttgtatatttggagagctgtgtctca

SEQ ID NO: 487357 - DNA, 30 bp, Artificial Sequence
  Synthetic oligonucleotide
tttttcagggaatggccttaaatattctca

SEQ ID NO: 487358 - DNA, 30 bp, Artificial Sequence
  Synthetic oligonucleotide
gaatagagtggaggacatgtagtattctca

SEQ ID NO: 487359 - DNA, 30 bp, Artificial Sequence
  Synthetic oligonucleotide
agtctttgaggtaaaccatcacacttctca

SEQ ID NO: 487360 - DNA, 30 bp, Artificial Sequence
  Synthetic oligonucleotide
ccttgccacgcagttggtttaggcttctca

SEQ ID NO: 487361 - DNA, 30 bp, Artificial Sequence
  Synthetic oligonucleotide
ggccatacaaccgagaggtctggcttctca

SEQ ID NO: 487362 - DNA, 30 bp, Artificial Sequence
  Synthetic oligonucleotide
catattgaattcttacactgttgtttctca

SEQ ID NO: 487363 - DNA, 30 bp, Artificial Sequence
  Synthetic oligonucleotide
tagcatagctgtggtctataccacaagtca

SEQ ID NO: 487364 - DNA, 30 bp, Artificial Sequence
  Synthetic oligonucleotide
gaataataggaaccggaaagtcacaagtca

SEQ ID NO: 487365 - DNA, 30 bp, Artificial Sequence
  Synthetic oligonucleotide
cagtatacgaagctttacgctcagaagtca

SEQ ID NO: 487366 - DNA, 30 bp, Artificial Sequence
  Synthetic oligonucleotide
gacatgcgatagttggaagaacggaagtca

SEQ ID NO: 487367 - DNA, 30 bp, Artificial Sequence
  Synthetic oligonucleotide
ttataaactatgcagcggaagctgaagtca

SEQ ID NO: 487368 - DNA, 30 bp, Artificial Sequence
  Synthetic oligonucleotide
tgagcctgactcgggtattactataagtca

SEQ ID NO: 487369 - DNA, 30 bp, Artificial Sequence
  Synthetic oligonucleotide
caacgactaagaaagactcggacacagtca

SEQ ID NO: 487370 - DNA, 30 bp, Artificial Sequence
  Synthetic oligonucleotide
gatgtagatggctcgccggtcatacagtca

SEQ ID NO: 487371 - DNA, 30 bp, Artificial Sequence
  Synthetic oligonucleotide
gtgtgtctgtggacctatacgcaccagtca

SEQ ID NO: 487372 - DNA, 30 bp, Artificial Sequence
  Synthetic oligonucleotide
gagacacatcactatacgctgtagcagtca

SEQ ID NO: 487373 - DNA, 30 bp, Artificial Sequence
  Synthetic oligonucleotide
gttgcatagaccgatcttggcggtcagtca

SEQ ID NO: 487374 - DNA, 30 bp, Artificial Sequence
  Synthetic oligonucleotide
gttagcgcgcaggaactcccttgagagtca

SEQ ID NO: 487375 - DNA, 30 bp, Artificial Sequence
  Synthetic oligonucleotide
ggtgccgccggtcactatgactgggagtca

SEQ ID NO: 487376 - DNA, 30 bp, Artificial Sequence
  Synthetic oligonucleotide
tgcccccggtccagcgttgtagcatagtca

SEQ ID NO: 487377 - DNA, 30 bp, Artificial Sequence
  Synthetic oligonucleotide
taattgcttatactgtttttcggatagtca

SEQ ID NO: 487378 - DNA, 30 bp, Artificial Sequence
  Synthetic oligonucleotide
tctgagcttgtctcgatattatactagtca

SEQ ID NO: 487379 - DNA, 30 bp, Artificial Sequence
  Synthetic oligonucleotide
tatgattagagctctatagcgaggtagtca

SEQ ID NO: 487380 - DNA, 30 bp, Artificial Sequence
  Synthetic oligonucleotide
tacattgataattttcgatttaaaacgtca

SEQ ID NO: 487381 - DNA, 30 bp, Artificial Sequence
  Synthetic oligonucleotide
tgctctacacgcatgatgtccgtcacgtca

SEQ ID NO: 487382 - DNA, 30 bp, Artificial Sequence
  Synthetic oligonucleotide
cagcaccttgaggactacttcaagacgtca

SEQ ID NO: 487383 - DNA, 30 bp, Artificial Sequence
  Synthetic oligonucleotide
cttcctcttatcggagctaagtggacgtca

SEQ ID NO: 487384 - DNA, 30 bp, Artificial Sequence
  Synthetic oligonucleotide
gcgaacgacaagctgaggaaattgacgtca

SEQ ID NO: 487385 - DNA, 40 bp, Artificial Sequence
  Synthetic oligonucleotide
tacttatgtctaggtataagtcgtttactgtgctacgtca

SEQ ID NO: 487386 - DNA, 30 bp, Artificial Sequence
  Synthetic oligonucleotide
accgaagaatggtcgaagttcgacccgtca

SEQ ID NO: 487387 - DNA, 30 bp, Artificial Sequence
  Synthetic oligonucleotide
cccatgtctttccgggatcgtgacccgtca

SEQ ID NO: 487388 - DNA, 30 bp, Artificial Sequence
  Synthetic oligonucleotide
gcttagacgttataacgtcttgacccgtca

SEQ ID NO: 487389 - DNA, 30 bp, Artificial Sequence
  Synthetic oligonucleotide
gggggtacctaagctaagccatttccgtca

SEQ ID NO: 487390 - DNA, 30 bp, Artificial Sequence
  Synthetic oligonucleotide
cagcagactgacggccaggaggcggcgtca

SEQ ID NO: 487391 - DNA, 30 bp, Artificial Sequence
  Synthetic oligonucleotide
cctttcttccctgttgaggcacgggcgtca

SEQ ID NO: 487392 - DNA, 40 bp, Artificial Sequence
  Synthetic oligonucleotide
cggtaaggagggtcaccgacgtcgcgccgttgatgcgtca

SEQ ID NO: 487393 - DNA, 30 bp, Artificial Sequence
  Synthetic oligonucleotide
ggcagagtcgctagactctaccctgcgtca

SEQ ID NO: 487394 - DNA, 30 bp, Artificial Sequence
  Synthetic oligonucleotide
gcaattaacaattgaggccattcatcgtca

SEQ ID NO: 487395 - DNA, 30 bp, Artificial Sequence
  Synthetic oligonucleotide
tctagccgttctccggttactaactcgtca

SEQ ID NO: 487396 - DNA, 30 bp, Artificial Sequence
  Synthetic oligonucleotide
atgcagtccctaaagtgactatgctcgtca

SEQ ID NO: 487397 - DNA, 30 bp, Artificial Sequence
  Synthetic oligonucleotide
gcctcggcagtttggactcatgattcgtca

SEQ ID NO: 487398 - DNA, 30 bp, Artificial Sequence
  Synthetic oligonucleotide
gggtggccgctgcaaacgcggccttcgtca

SEQ ID NO: 487399 - DNA, 30 bp, Artificial Sequence
  Synthetic oligonucleotide
ccgtgatgattggcagcattgatttcgtca

SEQ ID NO: 487400 - DNA, 30 bp, Artificial Sequence
  Synthetic oligonucleotide
aaacttccgatgtgcatgcaagtaaggtca

SEQ ID NO: 487401 - DNA, 30 bp, Artificial Sequence
  Synthetic oligonucleotide
ttagtacgcgtctgacgtgcacacaggtca

SEQ ID NO: 487402 - DNA, 30 bp, Artificial Sequence
  Synthetic oligonucleotide
ggatgcagatgattactcagtggcaggtca

SEQ ID NO: 487403 - DNA, 30 bp, Artificial Sequence
  Synthetic oligonucleotide
cccgtgtctgtgggctaggttaagaggtca

SEQ ID NO: 487404 - DNA, 30 bp, Artificial Sequence
  Synthetic oligonucleotide
acagtactatcaacacgcatcacgaggtca

SEQ ID NO: 487405 - DNA, 30 bp, Artificial Sequence
  Synthetic oligonucleotide
ctaaagccatagccatagtgatcgaggtca

SEQ ID NO: 487406 - DNA, 30 bp, Artificial Sequence
  Synthetic oligonucleotide
tcagccacttgataaaacacgtcgaggtca

SEQ ID NO: 487407 - DNA, 30 bp, Artificial Sequence
  Synthetic oligonucleotide
taaacttcgaacatagagttcggtaggtca

SEQ ID NO: 487408 - DNA, 30 bp, Artificial Sequence
  Synthetic oligonucleotide
catctcctggcttccggttcgcttaggtca

SEQ ID NO: 487409 - DNA, 30 bp, Artificial Sequence
  Synthetic oligonucleotide
ggtacttagttctaatctagtcttaggtca

SEQ ID NO: 487410 - DNA, 30 bp, Artificial Sequence
  Synthetic oligonucleotide
gctaacctcaggttgctatttcttaggtca

SEQ ID NO: 487411 - DNA, 29 bp, Artificial Sequence
  Synthetic oligonucleotide
gagcctatcattcgaggcggtcacggtca

SEQ ID NO: 487412 - DNA, 30 bp, Artificial Sequence
  Synthetic oligonucleotide
cgtagaggatcttttcccgcgggacggtca

SEQ ID NO: 487413 - DNA, 30 bp, Artificial Sequence
  Synthetic oligonucleotide
cctgacctggattggagcctggtacggtca

SEQ ID NO: 487414 - DNA, 30 bp, Artificial Sequence
  Synthetic oligonucleotide
cccaatctgcctgatgacaatacgcggtca

SEQ ID NO: 487415 - DNA, 30 bp, Artificial Sequence
  Synthetic oligonucleotide
aacctttccgaaacctgtacagttcggtca

SEQ ID NO: 487416 - DNA, 30 bp, Artificial Sequence
  Synthetic oligonucleotide
gctaattctcggttatgagtctttcggtca

SEQ ID NO: 487417 - DNA, 30 bp, Artificial Sequence
  Synthetic oligonucleotide
attggtgtgatattagcagcacaagggtca

SEQ ID NO: 487418 - DNA, 30 bp, Artificial Sequence
  Synthetic oligonucleotide
aaagtctattacatgtttggtctagggtca

SEQ ID NO: 487419 - DNA, 30 bp, Artificial Sequence
  Synthetic oligonucleotide
cgcagagaagcccggatccgagacgggtca

SEQ ID NO: 487420 - DNA, 30 bp, Artificial Sequence
  Synthetic oligonucleotide
cccatgacgcattacgcgtattacgggtca

SEQ ID NO: 487421 - DNA, 30 bp, Artificial Sequence
  Synthetic oligonucleotide
tgatgttcctaccgctaatacctggggtca

SEQ ID NO: 487422 - DNA, 30 bp, Artificial Sequence
  Synthetic oligonucleotide
ttgggcgagctttcgctccgcctggggtca

SEQ ID NO: 487423 - DNA, 30 bp, Artificial Sequence
  Synthetic oligonucleotide
attagtagagtcccccggtattaatggtca

SEQ ID NO: 487424 - DNA, 30 bp, Artificial Sequence
  Synthetic oligonucleotide
atttgttatgcgaggtatggggcatggtca

SEQ ID NO: 487425 - DNA, 30 bp, Artificial Sequence
  Synthetic oligonucleotide
gtttgggcagtaagcacccttgactggtca

SEQ ID NO: 487426 - DNA, 30 bp, Artificial Sequence
  Synthetic oligonucleotide
atcctgatcccccattgactgcagtggtca

SEQ ID NO: 487427 - DNA, 30 bp, Artificial Sequence
  Synthetic oligonucleotide
aaaaaatgtcaatagttttaattgtggtca

SEQ ID NO: 487428 - DNA, 30 bp, Artificial Sequence
  Synthetic oligonucleotide
tttgattgtttagtggaacacaaaatgtca

SEQ ID NO: 487429 - DNA, 30 bp, Artificial Sequence
  Synthetic oligonucleotide
cggtatctaaatgactaacatgaaatgtca

SEQ ID NO: 487430 - DNA, 30 bp, Artificial Sequence
  Synthetic oligonucleotide
gaggcggaattcgcgcttcgctaaatgtca

SEQ ID NO: 487431 - DNA, 30 bp, Artificial Sequence
  Synthetic oligonucleotide
ttctgacgtactcagaccagctgaatgtca

SEQ ID NO: 487432 - DNA, 30 bp, Artificial Sequence
  Synthetic oligonucleotide
taatcaacgcgattgacgacaaacatgtca

SEQ ID NO: 487433 - DNA, 30 bp, Artificial Sequence
  Synthetic oligonucleotide
agtgggggacaaaaggccctagacatgtca

SEQ ID NO: 487434 - DNA, 30 bp, Artificial Sequence
  Synthetic oligonucleotide
taagaactagtatatggaagcagcatgtca

SEQ ID NO: 487435 - DNA, 30 bp, Artificial Sequence
  Synthetic oligonucleotide
aatggaatttgcaggatgattggcatgtca

SEQ ID NO: 487436 - DNA, 30 bp, Artificial Sequence
  Synthetic oligonucleotide
tgactttccctggtgataagattcatgtca

SEQ ID NO: 487437 - DNA, 29 bp, Artificial Sequence
  Synthetic oligonucleotide
caaagggcttcagcttttaaaagatgtca

SEQ ID NO: 487438 - DNA, 30 bp, Artificial Sequence
  Synthetic oligonucleotide
cagctgtcaatataacagaaatcgatgtca

SEQ ID NO: 487439 - DNA, 30 bp, Artificial Sequence
  Synthetic oligonucleotide
gctctttggcagttaaatggaatgatgtca

SEQ ID NO: 487440 - DNA, 30 bp, Artificial Sequence
  Synthetic oligonucleotide
acgttttagatcgcagaggcggtgatgtca

SEQ ID NO: 487441 - DNA, 31 bp, Artificial Sequence
  Synthetic oligonucleotide
aacacttatggttacaaacaattctatgtca

SEQ ID NO: 487442 - DNA, 30 bp, Artificial Sequence
  Synthetic oligonucleotide
ggatctataagttgctggagtgttatgtca

SEQ ID NO: 487443 - DNA, 30 bp, Artificial Sequence
  Synthetic oligonucleotide
catggcccgagtactctatcgacactgtca

SEQ ID NO: 487444 - DNA, 30 bp, Artificial Sequence
  Synthetic oligonucleotide
gcgtaggcggagtaggttgaaatactgtca

SEQ ID NO: 487445 - DNA, 30 bp, Artificial Sequence
  Synthetic oligonucleotide
tacccctgcgttcaccaaacccgcctgtca

SEQ ID NO: 487446 - DNA, 30 bp, Artificial Sequence
  Synthetic oligonucleotide
taaagtgctaagccgctgctgacgctgtca

SEQ ID NO: 487447 - DNA, 30 bp, Artificial Sequence
  Synthetic oligonucleotide
atgtttgggatctttgcctgtaggctgtca

SEQ ID NO: 487448 - DNA, 30 bp, Artificial Sequence
  Synthetic oligonucleotide
gtataggacggcagaaaccgatgggtgtca

SEQ ID NO: 487449 - DNA, 30 bp, Artificial Sequence
  Synthetic oligonucleotide
aatcattttcataacgtaagcaccttgtca

SEQ ID NO: 487450 - DNA, 30 bp, Artificial Sequence
  Synthetic oligonucleotide
ttaggttcatgagccgcacatttcttgtca

SEQ ID NO: 487451 - DNA, 30 bp, Artificial Sequence
  Synthetic oligonucleotide
tgatgcagtcctggagtccctcgtttgtca

SEQ ID NO: 487452 - DNA, 30 bp, Artificial Sequence
  Synthetic oligonucleotide
gcttgggttattaatttcaacgcaaattca

SEQ ID NO: 487453 - DNA, 30 bp, Artificial Sequence
  Synthetic oligonucleotide
gtgtcgcgggaccgaattttgtgaaattca

SEQ ID NO: 487454 - DNA, 30 bp, Artificial Sequence
  Synthetic oligonucleotide
actccgtatgggcgttagctttgaaattca

SEQ ID NO: 487455 - DNA, 30 bp, Artificial Sequence
  Synthetic oligonucleotide
aaataccgcgacagcgggacacacaattca

SEQ ID NO: 487456 - DNA, 30 bp, Artificial Sequence
  Synthetic oligonucleotide
gatttcattgcagatggtacgtacaattca

SEQ ID NO: 487457 - DNA, 30 bp, Artificial Sequence
  Synthetic oligonucleotide
gtggtttggtctagggtaacaaccaattca

SEQ ID NO: 487458 - DNA, 30 bp, Artificial Sequence
  Synthetic oligonucleotide
accgacttaggcagaatactggggaattca

SEQ ID NO: 487459 - DNA, 30 bp, Artificial Sequence
  Synthetic oligonucleotide
aactaggattcacgcttagcattgaattca

SEQ ID NO: 487460 - DNA, 30 bp, Artificial Sequence
  Synthetic oligonucleotide
ggagtcaacgcagtcatcatacgtaattca

SEQ ID NO: 487461 - DNA, 30 bp, Artificial Sequence
  Synthetic oligonucleotide
gtttgcgcgcgttaaaactgtagacattca

SEQ ID NO: 487462 - DNA, 30 bp, Artificial Sequence
  Synthetic oligonucleotide
gacctgctggcctcttgggtatcccattca

SEQ ID NO: 487463 - DNA, 30 bp, Artificial Sequence
  Synthetic oligonucleotide
gtgaaacgtcatgatcagcgtagccattca

SEQ ID NO: 487464 - DNA, 30 bp, Artificial Sequence
  Synthetic oligonucleotide
tccccactctgcctgcagcgtaagcattca

SEQ ID NO: 487465 - DNA, 30 bp, Artificial Sequence
  Synthetic oligonucleotide
ctgaaacggattaagacatcgtgtcattca

SEQ ID NO: 487466 - DNA, 30 bp, Artificial Sequence
  Synthetic oligonucleotide
agtaaataactataggcgttgacagattca

SEQ ID NO: 487467 - DNA, 30 bp, Artificial Sequence
  Synthetic oligonucleotide
gaaaccctacagagatctagagcagattca

SEQ ID NO: 487468 - DNA, 30 bp, Artificial Sequence
  Synthetic oligonucleotide
ttcgctattttttccaatcatgcagattca

SEQ ID NO: 487469 - DNA, 30 bp, Artificial Sequence
  Synthetic oligonucleotide
gacccggcagaattaggggatgcagattca

SEQ ID NO: 487470 - DNA, 30 bp, Artificial Sequence
  Synthetic oligonucleotide
gagggaaactattgctgtcgcatagattca

SEQ ID NO: 487471 - DNA, 30 bp, Artificial Sequence
  Synthetic oligonucleotide
gtttttaagctatcgatgggatacgattca

SEQ ID NO: 487472 - DNA, 30 bp, Artificial Sequence
  Synthetic oligonucleotide
agcatactacatattaggctcgaggattca

SEQ ID NO: 487473 - DNA, 30 bp, Artificial Sequence
  Synthetic oligonucleotide
cgggccctcgtgctaggtccccgggattca

SEQ ID NO: 487474 - DNA, 30 bp, Artificial Sequence
  Synthetic oligonucleotide
ttccgcgtgatatgggaaactgatgattca

SEQ ID NO: 487475 - DNA, 30 bp, Artificial Sequence
  Synthetic oligonucleotide
taaagtgatccggaaggacccggtgattca

SEQ ID NO: 487476 - DNA, 30 bp, Artificial Sequence
  Synthetic oligonucleotide
aattctgacgtgctataggatcttgattca

SEQ ID NO: 487477 - DNA, 30 bp, Artificial Sequence
  Synthetic oligonucleotide
tcgttcttgacgagctatgattttgattca

SEQ ID NO: 487478 - DNA, 30 bp, Artificial Sequence
  Synthetic oligonucleotide
gcattggtcttatattgcggttttgattca

SEQ ID NO: 487479 - DNA, 30 bp, Artificial Sequence
  Synthetic oligonucleotide
gtggtagtcttggctaggagaacatattca

SEQ ID NO: 487480 - DNA, 30 bp, Artificial Sequence
  Synthetic oligonucleotide
ccggagccgagttagcagcagtcatattca

SEQ ID NO: 487481 - DNA, 30 bp, Artificial Sequence
  Synthetic oligonucleotide
cttgggatcaacgcagcgtcgggatattca

SEQ ID NO: 487482 - DNA, 31 bp, Artificial Sequence
  Synthetic oligonucleotide
tatgatcaggacatggcgcataatctattca

SEQ ID NO: 487483 - DNA, 30 bp, Artificial Sequence
  Synthetic oligonucleotide
tatcgacataacatggtggatgtctattca

SEQ ID NO: 487484 - DNA, 30 bp, Artificial Sequence
  Synthetic oligonucleotide
agattgttcaggcaccagcggaattattca

SEQ ID NO: 487485 - DNA, 30 bp, Artificial Sequence
  Synthetic oligonucleotide
gcttccgatcgacgtaggacaccaacttca

SEQ ID NO: 487486 - DNA, 30 bp, Artificial Sequence
  Synthetic oligonucleotide
ataaagtactgggtacatatccacacttca

SEQ ID NO: 487487 - DNA, 30 bp, Artificial Sequence
  Synthetic oligonucleotide
aatgccggctgtggagtcactcacacttca

SEQ ID NO: 487488 - DNA, 30 bp, Artificial Sequence
  Synthetic oligonucleotide
gaatttcgggctggctggagagtcacttca

SEQ ID NO: 487489 - DNA, 30 bp, Artificial Sequence
  Synthetic oligonucleotide
aaattggtcttccggatgggtgctacttca

SEQ ID NO: 487490 - DNA, 30 bp, Artificial Sequence
  Synthetic oligonucleotide
aatacagaacgagtctgatttagtacttca

SEQ ID NO: 487491 - DNA, 30 bp, Artificial Sequence
  Synthetic oligonucleotide
gttggaggaagccgcccagcgattacttca

SEQ ID NO: 487492 - DNA, 30 bp, Artificial Sequence
  Synthetic oligonucleotide
gtgttactttcttgttatgtatcgccttca

SEQ ID NO: 487493 - DNA, 30 bp, Artificial Sequence
  Synthetic oligonucleotide
cagcacatggctcgtgccttatggccttca

SEQ ID NO: 487494 - DNA, 30 bp, Artificial Sequence
  Synthetic oligonucleotide
ctactgggcggataatttggccacgcttca

SEQ ID NO: 487495 - DNA, 30 bp, Artificial Sequence
  Synthetic oligonucleotide
gaagcggtcggtcaatgacggtccgcttca

SEQ ID NO: 487496 - DNA, 30 bp, Artificial Sequence
  Synthetic oligonucleotide
gagtgttgtccccggataacgagcgcttca

SEQ ID NO: 487497 - DNA, 30 bp, Artificial Sequence
  Synthetic oligonucleotide
ctgatcccactggttctagcgcgcgcttca

SEQ ID NO: 487498 - DNA, 30 bp, Artificial Sequence
  Synthetic oligonucleotide
gaagatcccttaatgctatttggggcttca

SEQ ID NO: 487499 - DNA, 30 bp, Artificial Sequence
  Synthetic oligonucleotide
gctttgggtgaaactcgttgataatcttca

SEQ ID NO: 487500 - DNA, 30 bp, Artificial Sequence
  Synthetic oligonucleotide
agcaacctccccttgattggcgcatcttca

SEQ ID NO: 487501 - DNA, 30 bp, Artificial Sequence
  Synthetic oligonucleotide
caatggaagtggatcttacccgtatcttca

SEQ ID NO: 487502 - DNA, 30 bp, Artificial Sequence
  Synthetic oligonucleotide
gttatgaagagcctccgacagccctcttca

SEQ ID NO: 487503 - DNA, 30 bp, Artificial Sequence
  Synthetic oligonucleotide
cgaactcctccgtccgtcagtgggtcttca

SEQ ID NO: 487504 - DNA, 30 bp, Artificial Sequence
  Synthetic oligonucleotide
gttggacacaatcaggcgactagttcttca

SEQ ID NO: 487505 - DNA, 30 bp, Artificial Sequence
  Synthetic oligonucleotide
agtcctttcaccatgtgttaccgttcttca

SEQ ID NO: 487506 - DNA, 30 bp, Artificial Sequence
  Synthetic oligonucleotide
gtgcactcagcatgagttaggataagttca

SEQ ID NO: 487507 - DNA, 30 bp, Artificial Sequence
  Synthetic oligonucleotide
tctccaggcctagactcacgcaacagttca

SEQ ID NO: 487508 - DNA, 30 bp, Artificial Sequence
  Synthetic oligonucleotide
tcatgtatcgttggaggtgggaacagttca

SEQ ID NO: 487509 - DNA, 30 bp, Artificial Sequence
  Synthetic oligonucleotide
tgctcgccaatagtcccggcatctagttca

SEQ ID NO: 487510 - DNA, 30 bp, Artificial Sequence
  Synthetic oligonucleotide
agctgggcatgactcatccctattagttca

SEQ ID NO: 487511 - DNA, 30 bp, Artificial Sequence
  Synthetic oligonucleotide
gttccattaaggtcgaccgcttaacgttca

SEQ ID NO: 487512 - DNA, 30 bp, Artificial Sequence
  Synthetic oligonucleotide
taacgagatacccttccgggccgacgttca

SEQ ID NO: 487513 - DNA, 30 bp, Artificial Sequence
  Synthetic oligonucleotide
gcaagctccgctcggtgggaggaccgttca

SEQ ID NO: 487514 - DNA, 30 bp, Artificial Sequence
  Synthetic oligonucleotide
atatacgttctagcgctagatgaccgttca

SEQ ID NO: 487515 - DNA, 30 bp, Artificial Sequence
  Synthetic oligonucleotide
gagaatggttcttctgtattaacccgttca

SEQ ID NO: 487516 - DNA, 30 bp, Artificial Sequence
  Synthetic oligonucleotide
accggggataggcgacgcaggcaaggttca

SEQ ID NO: 487517 - DNA, 30 bp, Artificial Sequence
  Synthetic oligonucleotide
catttgtttacttacgattcgaacggttca

SEQ ID NO: 487518 - DNA, 30 bp, Artificial Sequence
  Synthetic oligonucleotide
aacaccgctcaacgaaatacaatcggttca

SEQ ID NO: 487519 - DNA, 30 bp, Artificial Sequence
  Synthetic oligonucleotide
ggggatgtgttagcatgtgagcagggttca

SEQ ID NO: 487520 - DNA, 30 bp, Artificial Sequence
  Synthetic oligonucleotide
aacttctcccgcagacagaccgatggttca

SEQ ID NO: 487521 - DNA, 30 bp, Artificial Sequence
  Synthetic oligonucleotide
tggttcaaaacaaggagtcagagtggttca

SEQ ID NO: 487522 - DNA, 30 bp, Artificial Sequence
  Synthetic oligonucleotide
ttaaacgattttttctctaatcgctgttca

SEQ ID NO: 487523 - DNA, 30 bp, Artificial Sequence
  Synthetic oligonucleotide
acacacacatttgattgccccgtttgttca

SEQ ID NO: 487524 - DNA, 30 bp, Artificial Sequence
  Synthetic oligonucleotide
cctgggttttcgcggtcgccatacatttca

SEQ ID NO: 487525 - DNA, 30 bp, Artificial Sequence
  Synthetic oligonucleotide
catactgcagcaacatgggtttacatttca

SEQ ID NO: 487526 - DNA, 30 bp, Artificial Sequence
  Synthetic oligonucleotide
gacgcgttgggaggttccgcagtcatttca

SEQ ID NO: 487527 - DNA, 30 bp, Artificial Sequence
  Synthetic oligonucleotide
ataaccactcggatgcacacgttcatttca

SEQ ID NO: 487528 - DNA, 30 bp, Artificial Sequence
  Synthetic oligonucleotide
tatccgggatagagagcatataagatttca

SEQ ID NO: 487529 - DNA, 30 bp, Artificial Sequence
  Synthetic oligonucleotide
ttttatgggttacgaggtttctcgatttca

SEQ ID NO: 487530 - DNA, 30 bp, Artificial Sequence
  Synthetic oligonucleotide
ttagagacgggagaactttcttggatttca

SEQ ID NO: 487531 - DNA, 29 bp, Artificial Sequence
  Synthetic oligonucleotide
gctcgctgaattgcagtgtcgtgatttca

SEQ ID NO: 487532 - DNA, 30 bp, Artificial Sequence
  Synthetic oligonucleotide
ttacgatatggctgatgcgggtaactttca

SEQ ID NO: 487533 - DNA, 30 bp, Artificial Sequence
  Synthetic oligonucleotide
tatgcctgagattactacgatagactttca

SEQ ID NO: 487534 - DNA, 30 bp, Artificial Sequence
  Synthetic oligonucleotide
gactcgcgacgcggaggtcttatactttca

SEQ ID NO: 487535 - DNA, 30 bp, Artificial Sequence
  Synthetic oligonucleotide
gacgttgacggaagaacaactagcctttca

SEQ ID NO: 487536 - DNA, 30 bp, Artificial Sequence
  Synthetic oligonucleotide
ggcacatgaaaattctgcacatgcctttca

SEQ ID NO: 487537 - DNA, 30 bp, Artificial Sequence
  Synthetic oligonucleotide
ttgcagcccaggacaatgcgtccgctttca

SEQ ID NO: 487538 - DNA, 30 bp, Artificial Sequence
  Synthetic oligonucleotide
cctctgacctgtcggcaacgcgggctttca

SEQ ID NO: 487539 - DNA, 30 bp, Artificial Sequence
  Synthetic oligonucleotide
gagttagagttttcacaaaactcagtttca

SEQ ID NO: 487540 - DNA, 30 bp, Artificial Sequence
  Synthetic oligonucleotide
caaatgggcgatcccgctgcacgggtttca

SEQ ID NO: 487541 - DNA, 30 bp, Artificial Sequence
  Synthetic oligonucleotide
aatgtggacaatgagttggaaatggtttca

SEQ ID NO: 487542 - DNA, 30 bp, Artificial Sequence
  Synthetic oligonucleotide
gggtctctcccgcggctgttcaatgtttca

SEQ ID NO: 487543 - DNA, 30 bp, Artificial Sequence
  Synthetic oligonucleotide
tgtcgccaactcgaacttgcggacttttca

SEQ ID NO: 487544 - DNA, 30 bp, Artificial Sequence
  Synthetic oligonucleotide
atctgcggaatggatagtcttagcttttca

SEQ ID NO: 487545 - DNA, 31 bp, Artificial Sequence
  Synthetic oligonucleotide
cagccaaccagttctgtacgtacgcttttca

SEQ ID NO: 487546 - DNA, 30 bp, Artificial Sequence
  Synthetic oligonucleotide
agtcgcagcttgagccagagactcttttca

SEQ ID NO: 487547 - DNA, 30 bp, Artificial Sequence
  Synthetic oligonucleotide
ctcgacatcggttagttctcacatttttca

SEQ ID NO: 487548 - DNA, 30 bp, Artificial Sequence
  Synthetic oligonucleotide
gtggtaagatgtctaacgtagcatttttca

SEQ ID NO: 487549 - DNA, 30 bp, Artificial Sequence
  Synthetic oligonucleotide
ctggaacgcatatcaagaatagctttttca

SEQ ID NO: 487550 - DNA, 30 bp, Artificial Sequence
  Synthetic oligonucleotide
taagcgcattgcacctttatatgtttttca

SEQ ID NO: 487551 - DNA, 31 bp, Artificial Sequence
  Synthetic oligonucleotide
gttctgtgagtcataatcggtttttttttca

SEQ ID NO: 487552 - DNA, 30 bp, Artificial Sequence
  Synthetic oligonucleotide
aaccattttattttgtcgaatacaaaaaga

SEQ ID NO: 487553 - DNA, 30 bp, Artificial Sequence
  Synthetic oligonucleotide
gataaccttttccacttagtgagaaaaaga

SEQ ID NO: 487554 - DNA, 30 bp, Artificial Sequence
  Synthetic oligonucleotide
aggaccagtgatcttgtatgcagcaaaaga

SEQ ID NO: 487555 - DNA, 30 bp, Artificial Sequence
  Synthetic oligonucleotide
gcgctaaagtggcaaaaatatagcaaaaga

SEQ ID NO: 487556 - DNA, 30 bp, Artificial Sequence
  Synthetic oligonucleotide
ggattgacaccgcatccggacgaccaaaga

SEQ ID NO: 487557 - DNA, 30 bp, Artificial Sequence
  Synthetic oligonucleotide
ttccacgcttttgctgcccgagcgcaaaga

SEQ ID NO: 487558 - DNA, 30 bp, Artificial Sequence
  Synthetic oligonucleotide
gattttacccccccctccgattatcaaaga

SEQ ID NO: 487559 - DNA, 30 bp, Artificial Sequence
  Synthetic oligonucleotide
gcaagtagcttactcgattgggttcaaaga

SEQ ID NO: 487560 - DNA, 30 bp, Artificial Sequence
  Synthetic oligonucleotide
tagtggaaggagagtcactagtaagaaaga

SEQ ID NO: 487561 - DNA, 30 bp, Artificial Sequence
  Synthetic oligonucleotide
tcatttcgtggcgcccactggggagaaaga

SEQ ID NO: 487562 - DNA, 30 bp, Artificial Sequence
  Synthetic oligonucleotide
caatgcttcagataagtaggtttagaaaga

SEQ ID NO: 487563 - DNA, 30 bp, Artificial Sequence
  Synthetic oligonucleotide
cacacggcagtccagctggcaatcgaaaga

SEQ ID NO: 487564 - DNA, 30 bp, Artificial Sequence
  Synthetic oligonucleotide
gtgagtcccctttcttaaccgcaggaaaga

SEQ ID NO: 487565 - DNA, 30 bp, Artificial Sequence
  Synthetic oligonucleotide
atcacggatgcagctactctacgggaaaga

SEQ ID NO: 487566 - DNA, 30 bp, Artificial Sequence
  Synthetic oligonucleotide
atatcctgcgcagaatggaagcgggaaaga

SEQ ID NO: 487567 - DNA, 30 bp, Artificial Sequence
  Synthetic oligonucleotide
tagatggtgtacaacacgaaaggggaaaga

SEQ ID NO: 487568 - DNA, 30 bp, Artificial Sequence
  Synthetic oligonucleotide
aagctttaagtctttttcgtttgggaaaga

SEQ ID NO: 487569 - DNA, 30 bp, Artificial Sequence
  Synthetic oligonucleotide
tacacctgggtaactcagtggtctgaaaga

SEQ ID NO: 487570 - DNA, 30 bp, Artificial Sequence
  Synthetic oligonucleotide
ggactagaactctttctccaaagtgaaaga

SEQ ID NO: 487571 - DNA, 30 bp, Artificial Sequence
  Synthetic oligonucleotide
ctatgagtcaccgtcgtctttaaataaaga

SEQ ID NO: 487572 - DNA, 30 bp, Artificial Sequence
  Synthetic oligonucleotide
gatttatcaaggtaggagttataataaaga

SEQ ID NO: 487573 - DNA, 30 bp, Artificial Sequence
  Synthetic oligonucleotide
gcgctttacgccttgatttgtttataaaga

SEQ ID NO: 487574 - DNA, 30 bp, Artificial Sequence
  Synthetic oligonucleotide
tttgcttgatcttttctctatctctaaaga

SEQ ID NO: 487575 - DNA, 30 bp, Artificial Sequence
  Synthetic oligonucleotide
gtacaaactaagggtcccgaaccgtaaaga

SEQ ID NO: 487576 - DNA, 30 bp, Artificial Sequence
  Synthetic oligonucleotide
gtgtcagaggaaaggcgaatttggtaaaga

SEQ ID NO: 487577 - DNA, 30 bp, Artificial Sequence
  Synthetic oligonucleotide
ccacagtttatgggagggcaggaaacaaga

SEQ ID NO: 487578 - DNA, 30 bp, Artificial Sequence
  Synthetic oligonucleotide
ggttaagtgcgctggtattgtcgaacaaga

SEQ ID NO: 487579 - DNA, 30 bp, Artificial Sequence
  Synthetic oligonucleotide
ggtaacaatcgggaaagcggcgtaacaaga

SEQ ID NO: 487580 - DNA, 30 bp, Artificial Sequence
  Synthetic oligonucleotide
atatgagtctatccatcttagcacacaaga

SEQ ID NO: 487581 - DNA, 30 bp, Artificial Sequence
  Synthetic oligonucleotide
gctagattgtgcccctcattacgcacaaga

SEQ ID NO: 487582 - DNA, 30 bp, Artificial Sequence
  Synthetic oligonucleotide
atctttggaattacgtcgttgctgacaaga

SEQ ID NO: 487583 - DNA, 30 bp, Artificial Sequence
  Synthetic oligonucleotide
attcgccccacgtgggcgatatgtacaaga

SEQ ID NO: 487584 - DNA, 30 bp, Artificial Sequence
  Synthetic oligonucleotide
acgcagcagacccgaagcgtccggccaaga

SEQ ID NO: 487585 - DNA, 30 bp, Artificial Sequence
  Synthetic oligonucleotide
gttgttgacgtctatgaacttaatccaaga

SEQ ID NO: 487586 - DNA, 30 bp, Artificial Sequence
  Synthetic oligonucleotide
ttattttaccgggagtagatatctccaaga

SEQ ID NO: 487587 - DNA, 30 bp, Artificial Sequence
  Synthetic oligonucleotide
cccaaattattgtcttttaatacggcaaga

SEQ ID NO: 487588 - DNA, 30 bp, Artificial Sequence
  Synthetic oligonucleotide
tcccggaattggaggtttcttgtggcaaga

SEQ ID NO: 487589 - DNA, 30 bp, Artificial Sequence
  Synthetic oligonucleotide
gtccctatgaagctggtattctatgcaaga

SEQ ID NO: 487590 - DNA, 30 bp, Artificial Sequence
  Synthetic oligonucleotide
tgttgaatagagcacagacgcccatcaaga

SEQ ID NO: 487591 - DNA, 30 bp, Artificial Sequence
  Synthetic oligonucleotide
tcgtttcaagaggttgcgcatgtttcaaga

SEQ ID NO: 487592 - DNA, 30 bp, Artificial Sequence
  Synthetic oligonucleotide
tgcgtaatattctgcccctttgtttcaaga

SEQ ID NO: 487593 - DNA, 30 bp, Artificial Sequence
  Synthetic oligonucleotide
tagcgtacgatgattgattctgaaagaaga

SEQ ID NO: 487594 - DNA, 30 bp, Artificial Sequence
  Synthetic oligonucleotide
cattgctctggacccggcgtgggcagaaga

SEQ ID NO: 487595 - DNA, 30 bp, Artificial Sequence
  Synthetic oligonucleotide
tttttaggtattgtttgtggcatcagaaga

SEQ ID NO: 487596 - DNA, 30 bp, Artificial Sequence
  Synthetic oligonucleotide
caaaatgatccatcggtatgcggtagaaga

SEQ ID NO: 487597 - DNA, 30 bp, Artificial Sequence
  Synthetic oligonucleotide
gtgtaattgcttatgtcaggacaacgaaga

SEQ ID NO: 487598 - DNA, 30 bp, Artificial Sequence
  Synthetic oligonucleotide
tttcttaaacgtaacgcacgtcaacgaaga

SEQ ID NO: 487599 - DNA, 30 bp, Artificial Sequence
  Synthetic oligonucleotide
taatgcgattgggcacaagacaagcgaaga

SEQ ID NO: 487600 - DNA, 30 bp, Artificial Sequence
  Synthetic oligonucleotide
gccgtgggcgtttaggagcctcatcgaaga

SEQ ID NO: 487601 - DNA, 30 bp, Artificial Sequence
  Synthetic oligonucleotide
atttatcaactgaggtgggccgatcgaaga

SEQ ID NO: 487602 - DNA, 30 bp, Artificial Sequence
  Synthetic oligonucleotide
ctaaaatttccctcgagttttaccggaaga

SEQ ID NO: 487603 - DNA, 30 bp, Artificial Sequence
  Synthetic oligonucleotide
attgacacatccccccttttgagatgaaga

SEQ ID NO: 487604 - DNA, 30 bp, Artificial Sequence
  Synthetic oligonucleotide
actcaggcctcctgaacaggaggctgaaga

SEQ ID NO: 487605 - DNA, 30 bp, Artificial Sequence
  Synthetic oligonucleotide
gtaatcagaatagttttggttttgtgaaga

SEQ ID NO: 487606 - DNA, 30 bp, Artificial Sequence
  Synthetic oligonucleotide
atgaacgggggagagtcgtgtcattgaaga

SEQ ID NO: 487607 - DNA, 30 bp, Artificial Sequence
  Synthetic oligonucleotide
gagagcccgcatatctataagataataaga

SEQ ID NO: 487608 - DNA, 30 bp, Artificial Sequence
  Synthetic oligonucleotide
acttccccctattaacttgacgacataaga

SEQ ID NO: 487609 - DNA, 30 bp, Artificial Sequence
  Synthetic oligonucleotide
catgaatgttgtcagaatgaccccctaaga

SEQ ID NO: 487610 - DNA, 30 bp, Artificial Sequence
  Synthetic oligonucleotide
tttgtagtgataatccatttccccctaaga

SEQ ID NO: 487611 - DNA, 30 bp, Artificial Sequence
  Synthetic oligonucleotide
acaaaagacgtgttcgcttctcccctaaga

SEQ ID NO: 487612 - DNA, 30 bp, Artificial Sequence
  Synthetic oligonucleotide
gtttacattggcggccgcgatgtcctaaga

SEQ ID NO: 487613 - DNA, 30 bp, Artificial Sequence
  Synthetic oligonucleotide
tacgcaggtatgtcaatcatatagctaaga

SEQ ID NO: 487614 - DNA, 30 bp, Artificial Sequence
  Synthetic oligonucleotide
gattcagaggttagttgcgccactctaaga

SEQ ID NO: 487615 - DNA, 30 bp, Artificial Sequence
  Synthetic oligonucleotide
tggtcaccagcatgttctatccctctaaga

SEQ ID NO: 487616 - DNA, 30 bp, Artificial Sequence
  Synthetic oligonucleotide
gctcctcctttccgcgacggtgttctaaga

SEQ ID NO: 487617 - DNA, 30 bp, Artificial Sequence
  Synthetic oligonucleotide
gaaaacctcagcctgcacgcgtaagtaaga

SEQ ID NO: 487618 - DNA, 30 bp, Artificial Sequence
  Synthetic oligonucleotide
tactctgggtgcgtctgccctcgagtaaga

SEQ ID NO: 487619 - DNA, 30 bp, Artificial Sequence
  Synthetic oligonucleotide
attatgtttcgtgcattatattacgtaaga

SEQ ID NO: 487620 - DNA, 30 bp, Artificial Sequence
  Synthetic oligonucleotide
cggcgaaatcttactcacttattggtaaga

SEQ ID NO: 487621 - DNA, 30 bp, Artificial Sequence
  Synthetic oligonucleotide
aaatttttgtcggtaggtagggatgtaaga

SEQ ID NO: 487622 - DNA, 30 bp, Artificial Sequence
  Synthetic oligonucleotide
accggaactcgtgatcgcggccctgtaaga

SEQ ID NO: 487623 - DNA, 30 bp, Artificial Sequence
  Synthetic oligonucleotide
gtggacgaccattttacagtgcttgtaaga

SEQ ID NO: 487624 - DNA, 30 bp, Artificial Sequence
  Synthetic oligonucleotide
ctgtgccggtggctaaagctaaacttaaga

SEQ ID NO: 487625 - DNA, 30 bp, Artificial Sequence
  Synthetic oligonucleotide
taagcctggcgagcttcatggaagttaaga

SEQ ID NO: 487626 - DNA, 30 bp, Artificial Sequence
  Synthetic oligonucleotide
gttagagaactccgcacttgactgttaaga

SEQ ID NO: 487627 - DNA, 30 bp, Artificial Sequence
  Synthetic oligonucleotide
tttccggattttagctcgtcgctgttaaga

SEQ ID NO: 487628 - DNA, 30 bp, Artificial Sequence
  Synthetic oligonucleotide
tcgggaaagcatacgtataaccatttaaga

SEQ ID NO: 487629 - DNA, 30 bp, Artificial Sequence
  Synthetic oligonucleotide
catcggctcatgatgcaagatactttaaga

SEQ ID NO: 487630 - DNA, 30 bp, Artificial Sequence
  Synthetic oligonucleotide
ggacttaccttgagttatgagggtttaaga

SEQ ID NO: 487631 - DNA, 30 bp, Artificial Sequence
  Synthetic oligonucleotide
tatgcagcaggtaaacatcttttcaacaga

SEQ ID NO: 487632 - DNA, 30 bp, Artificial Sequence
  Synthetic oligonucleotide
gaccgctgcagtaccgttgctcagaacaga

SEQ ID NO: 487633 - DNA, 30 bp, Artificial Sequence
  Synthetic oligonucleotide
aaagtataccagctatcatatttgaacaga

SEQ ID NO: 487634 - DNA, 30 bp, Artificial Sequence
  Synthetic oligonucleotide
gagtgtatgagtttccctaatcgtaacaga

SEQ ID NO: 487635 - DNA, 30 bp, Artificial Sequence
  Synthetic oligonucleotide
tgagtaacttggccacgcgcgcttaacaga

SEQ ID NO: 487636 - DNA, 30 bp, Artificial Sequence
  Synthetic oligonucleotide
gttcgtagaaactttaaatgcgcacacaga

SEQ ID NO: 487637 - DNA, 30 bp, Artificial Sequence
  Synthetic oligonucleotide
ttatgtatctggcaatgtcaaggacacaga

SEQ ID NO: 487638 - DNA, 30 bp, Artificial Sequence
  Synthetic oligonucleotide
gaatgactctgcgtttcaagctcgcacaga

SEQ ID NO: 487639 - DNA, 30 bp, Artificial Sequence
  Synthetic oligonucleotide
aacattcgttttcgggtattttgagacaga

SEQ ID NO: 487640 - DNA, 30 bp, Artificial Sequence
  Synthetic oligonucleotide
ggcttagttatttatagcagcctggacaga

SEQ ID NO: 487641 - DNA, 30 bp, Artificial Sequence
  Synthetic oligonucleotide
acgaagacacgattcggctgcagatacaga

SEQ ID NO: 487642 - DNA, 30 bp, Artificial Sequence
  Synthetic oligonucleotide
gaatttgatacggcggggttaacctacaga

SEQ ID NO: 487643 - DNA, 30 bp, Artificial Sequence
  Synthetic oligonucleotide
atccaggtcactcacccggccctttacaga

SEQ ID NO: 487644 - DNA, 30 bp, Artificial Sequence
  Synthetic oligonucleotide
ataaagtgttctgggaatttattttacaga

SEQ ID NO: 487645 - DNA, 30 bp, Artificial Sequence
  Synthetic oligonucleotide
gaacaggtagctgttcgtgccggcaccaga

SEQ ID NO: 487646 - DNA, 30 bp, Artificial Sequence
  Synthetic oligonucleotide
gtacgagcgctgggttgttccactaccaga

SEQ ID NO: 487647 - DNA, 30 bp, Artificial Sequence
  Synthetic oligonucleotide
taatcgaggctgcatacttgagaacccaga

SEQ ID NO: 487648 - DNA, 30 bp, Artificial Sequence
  Synthetic oligonucleotide
gtgatcacttgctgagccctataacccaga

SEQ ID NO: 487649 - DNA, 30 bp, Artificial Sequence
  Synthetic oligonucleotide
aaaagagatttacctgacatctcccccaga

SEQ ID NO: 487650 - DNA, 30 bp, Artificial Sequence
  Synthetic oligonucleotide
acttcggaaaatctagaatgtctccccaga

SEQ ID NO: 487651 - DNA, 30 bp, Artificial Sequence
  Synthetic oligonucleotide
ggagagggcccctggtgagagtatcccaga

SEQ ID NO: 487652 - DNA, 30 bp, Artificial Sequence
  Synthetic oligonucleotide
gtggagagtacggcctgggggggcgccaga

SEQ ID NO: 487653 - DNA, 30 bp, Artificial Sequence
  Synthetic oligonucleotide
gaattaggtctactctacatatgggccaga

SEQ ID NO: 487654 - DNA, 30 bp, Artificial Sequence
  Synthetic oligonucleotide
aagtatttcatgaccttggaaactgccaga

SEQ ID NO: 487655 - DNA, 30 bp, Artificial Sequence
  Synthetic oligonucleotide
acttgctcgttttatagaatttttgccaga

SEQ ID NO: 487656 - DNA, 30 bp, Artificial Sequence
  Synthetic oligonucleotide
ttgttcgtggaccagggctggaaatccaga

SEQ ID NO: 487657 - DNA, 30 bp, Artificial Sequence
  Synthetic oligonucleotide
ttctggaattacttacatggttgctccaga

SEQ ID NO: 487658 - DNA, 30 bp, Artificial Sequence
  Synthetic oligonucleotide
actattgggtttcaacgagttcaaagcaga

SEQ ID NO: 487659 - DNA, 30 bp, Artificial Sequence
  Synthetic oligonucleotide
acgttaccagctaaattcggcctaagcaga

SEQ ID NO: 487660 - DNA, 30 bp, Artificial Sequence
  Synthetic oligonucleotide
ccgttggggaacaaaatgagtgacagcaga

SEQ ID NO: 487661 - DNA, 30 bp, Artificial Sequence
  Synthetic oligonucleotide
aatatccacaggatcattaaatccagcaga

SEQ ID NO: 487662 - DNA, 30 bp, Artificial Sequence
  Synthetic oligonucleotide
ctcaagtttaggtgacttggacggagcaga

SEQ ID NO: 487663 - DNA, 29 bp, Artificial Sequence
  Synthetic oligonucleotide
acgcagcagtccgagacgttactagcaga

SEQ ID NO: 487664 - DNA, 30 bp, Artificial Sequence
  Synthetic oligonucleotide
gaggtcgtatcggaatatggcgaacgcaga

SEQ ID NO: 487665 - DNA, 30 bp, Artificial Sequence
  Synthetic oligonucleotide
gtcgagtccgtaatgctctgctaacgcaga

SEQ ID NO: 487666 - DNA, 30 bp, Artificial Sequence
  Synthetic oligonucleotide
atttgtttccccactttcatgacacgcaga

SEQ ID NO: 487667 - DNA, 30 bp, Artificial Sequence
  Synthetic oligonucleotide
gagtatgtgtacttttaggagtaccgcaga

SEQ ID NO: 487668 - DNA, 30 bp, Artificial Sequence
  Synthetic oligonucleotide
cgtattacctactggattcaagtccgcaga

SEQ ID NO: 487669 - DNA, 31 bp, Artificial Sequence
  Synthetic oligonucleotide
acgcttttaggctaactccgaagggcgcaga

SEQ ID NO: 487670 - DNA, 30 bp, Artificial Sequence
  Synthetic oligonucleotide
caactttatggtcggggaaactgaggcaga

SEQ ID NO: 487671 - DNA, 30 bp, Artificial Sequence
  Synthetic oligonucleotide
gacctgagatctgcacgacactgaggcaga

SEQ ID NO: 487672 - DNA, 30 bp, Artificial Sequence
  Synthetic oligonucleotide
ggggacgctctcttatgatagttcggcaga

SEQ ID NO: 487673 - DNA, 30 bp, Artificial Sequence
  Synthetic oligonucleotide
gagtccgtgggagaaattgccgagggcaga

SEQ ID NO: 487674 - DNA, 30 bp, Artificial Sequence
  Synthetic oligonucleotide
aaactgtagcaggtgctgcgcacgggcaga

SEQ ID NO: 487675 - DNA, 30 bp, Artificial Sequence
  Synthetic oligonucleotide
caataacgccggcctgcttgttcatgcaga

SEQ ID NO: 487676 - DNA, 30 bp, Artificial Sequence
  Synthetic oligonucleotide
ttttgaactgattagaattctatttgcaga

SEQ ID NO: 487677 - DNA, 30 bp, Artificial Sequence
  Synthetic oligonucleotide
tgcttgtgcagatttgataactcaatcaga

SEQ ID NO: 487678 - DNA, 30 bp, Artificial Sequence
  Synthetic oligonucleotide
gctccattccaaacatggatctggatcaga

SEQ ID NO: 487679 - DNA, 30 bp, Artificial Sequence
  Synthetic oligonucleotide
acacataactttgttgggcatggtatcaga

SEQ ID NO: 487680 - DNA, 30 bp, Artificial Sequence
  Synthetic oligonucleotide
gggacagtggcgagacaatgccaactcaga

SEQ ID NO: 487681 - DNA, 30 bp, Artificial Sequence
  Synthetic oligonucleotide
tcagttttacccgttagcatatgactcaga

SEQ ID NO: 487682 - DNA, 30 bp, Artificial Sequence
  Synthetic oligonucleotide
gtcatccctttcctaaagtgtcaagtcaga

SEQ ID NO: 487683 - DNA, 30 bp, Artificial Sequence
  Synthetic oligonucleotide
aagccctttcagctttcttggtgggtcaga

SEQ ID NO: 487684 - DNA, 30 bp, Artificial Sequence
  Synthetic oligonucleotide
agtcgcggttgtggcggcttgcaattcaga

SEQ ID NO: 487685 - DNA, 30 bp, Artificial Sequence
  Synthetic oligonucleotide
ggttattgtttccggcggcccccgttcaga

SEQ ID NO: 487686 - DNA, 30 bp, Artificial Sequence
  Synthetic oligonucleotide
agtcttgaattgctgcggacttttttcaga

SEQ ID NO: 487687 - DNA, 30 bp, Artificial Sequence
  Synthetic oligonucleotide
ttgcaccgcggcctccctaatttaaagaga

SEQ ID NO: 487688 - DNA, 30 bp, Artificial Sequence
  Synthetic oligonucleotide
agcggtagccaatccccaccactcaagaga

SEQ ID NO: 487689 - DNA, 30 bp, Artificial Sequence
  Synthetic oligonucleotide
gggaaaacaaggtatagggtttagaagaga

SEQ ID NO: 487690 - DNA, 30 bp, Artificial Sequence
  Synthetic oligonucleotide
tagcacgctttaagtcctttaacgaagaga

SEQ ID NO: 487691 - DNA, 30 bp, Artificial Sequence
  Synthetic oligonucleotide
ttcaccgacatttcgattctctctcagaga

SEQ ID NO: 487692 - DNA, 30 bp, Artificial Sequence
  Synthetic oligonucleotide
aatatggactatatggtgagcagtcagaga

SEQ ID NO: 487693 - DNA, 30 bp, Artificial Sequence
  Synthetic oligonucleotide
acggtcaaatcaacgatgcctcgtcagaga

SEQ ID NO: 487694 - DNA, 30 bp, Artificial Sequence
  Synthetic oligonucleotide
gccaaactgcgatgctaaatcgaagagaga

SEQ ID NO: 487695 - DNA, 30 bp, Artificial Sequence
  Synthetic oligonucleotide
tatttatttattaaggccaaacgggagaga

SEQ ID NO: 487696 - DNA, 30 bp, Artificial Sequence
  Synthetic oligonucleotide
caaagtttgacgcctaaagtcatggagaga

SEQ ID NO: 487697 - DNA, 30 bp, Artificial Sequence
  Synthetic oligonucleotide
taggggtgagttgctcttacaaatgagaga

SEQ ID NO: 487698 - DNA, 30 bp, Artificial Sequence
  Synthetic oligonucleotide
gcacagggcggagagtgtgacaatgagaga

SEQ ID NO: 487699 - DNA, 30 bp, Artificial Sequence
  Synthetic oligonucleotide
aactttttcgttacacaacttcatgagaga

SEQ ID NO: 487700 - DNA, 30 bp, Artificial Sequence
  Synthetic oligonucleotide
aacttggaatatccgggggtcaaatagaga

SEQ ID NO: 487701 - DNA, 30 bp, Artificial Sequence
  Synthetic oligonucleotide
attgacgacgagaaggatttcaaatagaga

SEQ ID NO: 487702 - DNA, 30 bp, Artificial Sequence
  Synthetic oligonucleotide
gcgacctcagagcaaacacgagaatagaga

SEQ ID NO: 487703 - DNA, 30 bp, Artificial Sequence
  Synthetic oligonucleotide
aaggggttaatccgcactactccatagaga

SEQ ID NO: 487704 - DNA, 30 bp, Artificial Sequence
  Synthetic oligonucleotide
ccactgtggacagcatcaggaggctagaga

SEQ ID NO: 487705 - DNA, 30 bp, Artificial Sequence
  Synthetic oligonucleotide
tattctacgggcgatccccttaagtagaga

SEQ ID NO: 487706 - DNA, 30 bp, Artificial Sequence
  Synthetic oligonucleotide
gtagcattgctaagggagccggcaacgaga

SEQ ID NO: 487707 - DNA, 30 bp, Artificial Sequence
  Synthetic oligonucleotide
cctgttcttatgttttgttcatcaacgaga

SEQ ID NO: 487708 - DNA, 30 bp, Artificial Sequence
  Synthetic oligonucleotide
atactttttacctgaagttgtggaacgaga

SEQ ID NO: 487709 - DNA, 30 bp, Artificial Sequence
  Synthetic oligonucleotide
cccctcggacttcaacacctggacacgaga

SEQ ID NO: 487710 - DNA, 30 bp, Artificial Sequence
  Synthetic oligonucleotide
cggatagattcatcccggaacaggacgaga

SEQ ID NO: 487711 - DNA, 30 bp, Artificial Sequence
  Synthetic oligonucleotide
tttcgggcgcaattaaatgagggcccgaga

SEQ ID NO: 487712 - DNA, 30 bp, Artificial Sequence
  Synthetic oligonucleotide
ttctctaagcttgggagtaatcttccgaga

SEQ ID NO: 487713 - DNA, 30 bp, Artificial Sequence
  Synthetic oligonucleotide
aacaacataacccagctcgtataagcgaga

SEQ ID NO: 487714 - DNA, 30 bp, Artificial Sequence
  Synthetic oligonucleotide
tcagggcctttattcttttacatcgcgaga

SEQ ID NO: 487715 - DNA, 30 bp, Artificial Sequence
  Synthetic oligonucleotide
ttgcccactcttattatcaggttcgcgaga

SEQ ID NO: 487716 - DNA, 30 bp, Artificial Sequence
  Synthetic oligonucleotide
gcagtcgtctcactttgatgcgaggcgaga

SEQ ID NO: 487717 - DNA, 30 bp, Artificial Sequence
  Synthetic oligonucleotide
ttcgcacaatgttcctcggacgcggcgaga

SEQ ID NO: 487718 - DNA, 30 bp, Artificial Sequence
  Synthetic oligonucleotide
tacacagtttattaattcttgggctcgaga

SEQ ID NO: 487719 - DNA, 30 bp, Artificial Sequence
  Synthetic oligonucleotide
cgaggcgcgtctcggctccaaaggtcgaga

SEQ ID NO: 487720 - DNA, 30 bp, Artificial Sequence
  Synthetic oligonucleotide
ttaggcggatcacgcctaaagttttcgaga

SEQ ID NO: 487721 - DNA, 30 bp, Artificial Sequence
  Synthetic oligonucleotide
gtatgcgacgcgctattaattaacaggaga

SEQ ID NO: 487722 - DNA, 30 bp, Artificial Sequence
  Synthetic oligonucleotide
taacgcgttctcatgatactgtacaggaga

SEQ ID NO: 487723 - DNA, 30 bp, Artificial Sequence
  Synthetic oligonucleotide
tgagtgcacgagggctgtacgcgcaggaga

SEQ ID NO: 487724 - DNA, 30 bp, Artificial Sequence
  Synthetic oligonucleotide
ttgctctcacacggcctgatatagaggaga

SEQ ID NO: 487725 - DNA, 30 bp, Artificial Sequence
  Synthetic oligonucleotide
ctaaatgttgccacggctgcacgtaggaga

SEQ ID NO: 487726 - DNA, 30 bp, Artificial Sequence
  Synthetic oligonucleotide
gggtgacgatcggaactttccagacggaga

SEQ ID NO: 487727 - DNA, 30 bp, Artificial Sequence
  Synthetic oligonucleotide
gctggcagggcctctgtagggaaccggaga

SEQ ID NO: 487728 - DNA, 28 bp, Artificial Sequence
  Synthetic oligonucleotide
gaaacttaccctactgcgctggcggaga

SEQ ID NO: 487729 - DNA, 30 bp, Artificial Sequence
  Synthetic oligonucleotide
agacgaccgcagtcagggacggatcggaga

SEQ ID NO: 487730 - DNA, 30 bp, Artificial Sequence
  Synthetic oligonucleotide
ccacgtagtttctcccggcactttcggaga

SEQ ID NO: 487731 - DNA, 30 bp, Artificial Sequence
  Synthetic oligonucleotide
tatgaagaaaattagggtctatgagggaga

SEQ ID NO: 487732 - DNA, 30 bp, Artificial Sequence
  Synthetic oligonucleotide
gtgcatccacgggatagacaacccgggaga

SEQ ID NO: 487733 - DNA, 30 bp, Artificial Sequence
  Synthetic oligonucleotide
ccgatggtacccggagaggtctgcgggaga

SEQ ID NO: 487734 - DNA, 30 bp, Artificial Sequence
  Synthetic oligonucleotide
cccggtaggcagtctcctcggtaggggaga

SEQ ID NO: 487735 - DNA, 30 bp, Artificial Sequence
  Synthetic oligonucleotide
ggcgtatatttgtccctgtagacggggaga

SEQ ID NO: 487736 - DNA, 30 bp, Artificial Sequence
  Synthetic oligonucleotide
ccttatattgcaacagttctgatggggaga

SEQ ID NO: 487737 - DNA, 30 bp, Artificial Sequence
  Synthetic oligonucleotide
ggactgtacatgtttaatcaactatggaga

SEQ ID NO: 487738 - DNA, 31 bp, Artificial Sequence
  Synthetic oligonucleotide
agtatagcgcactcccctctgctggtggaga

SEQ ID NO: 487739 - DNA, 30 bp, Artificial Sequence
  Synthetic oligonucleotide
gtggtttgcatccggtttattgcttggaga

SEQ ID NO: 487740 - DNA, 30 bp, Artificial Sequence
  Synthetic oligonucleotide
gcaggtcacgttgccggcgaaaagatgaga

SEQ ID NO: 487741 - DNA, 30 bp, Artificial Sequence
  Synthetic oligonucleotide
aagacttaggcatggcacgtcaagatgaga

SEQ ID NO: 487742 - DNA, 30 bp, Artificial Sequence
  Synthetic oligonucleotide
gaaaataccagattcacaggatcgatgaga

SEQ ID NO: 487743 - DNA, 30 bp, Artificial Sequence
  Synthetic oligonucleotide
tagtctatagggcccgcgatcattatgaga

SEQ ID NO: 487744 - DNA, 30 bp, Artificial Sequence
  Synthetic oligonucleotide
caattactggtggaagcaccgcggctgaga

SEQ ID NO: 487745 - DNA, 30 bp, Artificial Sequence
  Synthetic oligonucleotide
acaggtcttttaacgtcaacatctctgaga

SEQ ID NO: 487746 - DNA, 30 bp, Artificial Sequence
  Synthetic oligonucleotide
gcaggagcactctatggtccaagtctgaga

SEQ ID NO: 487747 - DNA, 30 bp, Artificial Sequence
  Synthetic oligonucleotide
gattagcacgtaatccgcgtgctagtgaga

SEQ ID NO: 487748 - DNA, 30 bp, Artificial Sequence
  Synthetic oligonucleotide
agggttccactcgacaagatgtacgtgaga

SEQ ID NO: 487749 - DNA, 30 bp, Artificial Sequence
  Synthetic oligonucleotide
tgttagcgaggcactggctgttgggtgaga

SEQ ID NO: 487750 - DNA, 30 bp, Artificial Sequence
  Synthetic oligonucleotide
tgctttaaattatgggatgatgtggtgaga

SEQ ID NO: 487751 - DNA, 30 bp, Artificial Sequence
  Synthetic oligonucleotide
tatctatatgccggtggccactatgtgaga

SEQ ID NO: 487752 - DNA, 30 bp, Artificial Sequence
  Synthetic oligonucleotide
cagcagatcacaagtggttgcctattgaga

SEQ ID NO: 487753 - DNA, 30 bp, Artificial Sequence
  Synthetic oligonucleotide
ggcctggtgcggcatgcgttacatttgaga

SEQ ID NO: 487754 - DNA, 30 bp, Artificial Sequence
  Synthetic oligonucleotide
tctagtcggcaccgcaccaatcttttgaga

SEQ ID NO: 487755 - DNA, 30 bp, Artificial Sequence
  Synthetic oligonucleotide
tgctcagtttagacgcgcgagggaaataga

SEQ ID NO: 487756 - DNA, 30 bp, Artificial Sequence
  Synthetic oligonucleotide
ttaggttgtattgtagtcaatgtaaataga

SEQ ID NO: 487757 - DNA, 30 bp, Artificial Sequence
  Synthetic oligonucleotide
tgtcggtggctcatggttgggaccaataga

SEQ ID NO: 487758 - DNA, 30 bp, Artificial Sequence
  Synthetic oligonucleotide
acaaatatttaccatagctggagcaataga

SEQ ID NO: 487759 - DNA, 30 bp, Artificial Sequence
  Synthetic oligonucleotide
ttcaccccccagctcctcgccgggaataga

SEQ ID NO: 487760 - DNA, 30 bp, Artificial Sequence
  Synthetic oligonucleotide
gctcacgatttattcaggattgtgaataga

SEQ ID NO: 487761 - DNA, 30 bp, Artificial Sequence
  Synthetic oligonucleotide
ttaacccttgtctagaccaatggtaataga

SEQ ID NO: 487762 - DNA, 30 bp, Artificial Sequence
  Synthetic oligonucleotide
aggcaatggttcatatacagatttaataga

SEQ ID NO: 487763 - DNA, 28 bp, Artificial Sequence
  Synthetic oligonucleotide
tgccgagttttgtacgtcctttaataga

SEQ ID NO: 487764 - DNA, 30 bp, Artificial Sequence
  Synthetic oligonucleotide
gtggccgtccattccagtgccacacataga

SEQ ID NO: 487765 - DNA, 30 bp, Artificial Sequence
  Synthetic oligonucleotide
gcggcatccctaaggacgtatggacataga

SEQ ID NO: 487766 - DNA, 30 bp, Artificial Sequence
  Synthetic oligonucleotide
cattgttcgcatatagtaaacctacataga

SEQ ID NO: 487767 - DNA, 30 bp, Artificial Sequence
  Synthetic oligonucleotide
ctatagcatctgcaatcggcggtacataga

SEQ ID NO: 487768 - DNA, 30 bp, Artificial Sequence
  Synthetic oligonucleotide
aatttgaggttccccaacttttgccataga

SEQ ID NO: 487769 - DNA, 30 bp, Artificial Sequence
  Synthetic oligonucleotide
caaaacatctagagtcctaacgctcataga

SEQ ID NO: 487770 - DNA, 30 bp, Artificial Sequence
  Synthetic oligonucleotide
gaagtgttgtcgggaactatgtttcataga

SEQ ID NO: 487771 - DNA, 30 bp, Artificial Sequence
  Synthetic oligonucleotide
ccgatgcagactcagaccccgcaagataga

SEQ ID NO: 487772 - DNA, 30 bp, Artificial Sequence
  Synthetic oligonucleotide
gccgttcactaccggttgatgacagataga

SEQ ID NO: 487773 - DNA, 30 bp, Artificial Sequence
  Synthetic oligonucleotide
gcgtttagtcctgcgagacgtgcagataga

SEQ ID NO: 487774 - DNA, 30 bp, Artificial Sequence
  Synthetic oligonucleotide
gtgttcaattcgcgtaagcagggcgataga

SEQ ID NO: 487775 - DNA, 30 bp, Artificial Sequence
  Synthetic oligonucleotide
ggaccggagagctgtgtgccattggataga

SEQ ID NO: 487776 - DNA, 30 bp, Artificial Sequence
  Synthetic oligonucleotide
gggccgcagcgcatgtatcaatctgataga

SEQ ID NO: 487777 - DNA, 30 bp, Artificial Sequence
  Synthetic oligonucleotide
atatatgatttttaggggtcgtctgataga

SEQ ID NO: 487778 - DNA, 30 bp, Artificial Sequence
  Synthetic oligonucleotide
tgcatctaaggtcccagtttaacatataga

SEQ ID NO: 487779 - DNA, 30 bp, Artificial Sequence
  Synthetic oligonucleotide
cgtcatgcatgtgggtaatccagatataga

SEQ ID NO: 487780 - DNA, 30 bp, Artificial Sequence
  Synthetic oligonucleotide
gtgtaggttccgccgcacatgaactataga

SEQ ID NO: 487781 - DNA, 30 bp, Artificial Sequence
  Synthetic oligonucleotide
ttgcaatatgtttcgcatacaaagtataga

SEQ ID NO: 487782 - DNA, 30 bp, Artificial Sequence
  Synthetic oligonucleotide
agcgcacttcatcaacggtctaagtataga

SEQ ID NO: 487783 - DNA, 30 bp, Artificial Sequence
  Synthetic oligonucleotide
catcttcaatttgggggctgacggtataga

SEQ ID NO: 487784 - DNA, 30 bp, Artificial Sequence
  Synthetic oligonucleotide
tttgttgccttgacggcgtgatggtataga

SEQ ID NO: 487785 - DNA, 30 bp, Artificial Sequence
  Synthetic oligonucleotide
tcatatacccccgcagagcgactgtataga

SEQ ID NO: 487786 - DNA, 30 bp, Artificial Sequence
  Synthetic oligonucleotide
tgtcaacatatggggcagttcgtttataga

SEQ ID NO: 487787 - DNA, 30 bp, Artificial Sequence
  Synthetic oligonucleotide
attgtttggcaccacgttgggaaaactaga

SEQ ID NO: 487788 - DNA, 30 bp, Artificial Sequence
  Synthetic oligonucleotide
tggagataatgagtaggtcatacaactaga

SEQ ID NO: 487789 - DNA, 30 bp, Artificial Sequence
  Synthetic oligonucleotide
tgcgtaataatcgacgagaatggaactaga

SEQ ID NO: 487790 - DNA, 30 bp, Artificial Sequence
  Synthetic oligonucleotide
cccctctgataccatactcatttaactaga

SEQ ID NO: 487791 - DNA, 30 bp, Artificial Sequence
  Synthetic oligonucleotide
atatcgcactgaacgctacagccgactaga

SEQ ID NO: 487792 - DNA, 30 bp, Artificial Sequence
  Synthetic oligonucleotide
atacttggctagttttttcggccccctaga

SEQ ID NO: 487793 - DNA, 30 bp, Artificial Sequence
  Synthetic oligonucleotide
ctatatagaccgtgtgtactaattcctaga

SEQ ID NO: 487794 - DNA, 30 bp, Artificial Sequence
  Synthetic oligonucleotide
gagtttctgaattgtcgctgcctagctaga

SEQ ID NO: 487795 - DNA, 30 bp, Artificial Sequence
  Synthetic oligonucleotide
gcgggggcgactcagagccttctcgctaga

SEQ ID NO: 487796 - DNA, 30 bp, Artificial Sequence
  Synthetic oligonucleotide
gaagccggggtatcgtctttttaggctaga

SEQ ID NO: 487797 - DNA, 30 bp, Artificial Sequence
  Synthetic oligonucleotide
gttttcgaaattatcggcacagcctctaga

SEQ ID NO: 487798 - DNA, 30 bp, Artificial Sequence
  Synthetic oligonucleotide
tctatttgtccagcccgtaaggcctctaga

SEQ ID NO: 487799 - DNA, 30 bp, Artificial Sequence
  Synthetic oligonucleotide
attgatattttcataagcggcatgtctaga

SEQ ID NO: 487800 - DNA, 30 bp, Artificial Sequence
  Synthetic oligonucleotide
gtgcagccaaacgattgctcctattctaga

SEQ ID NO: 487801 - DNA, 30 bp, Artificial Sequence
  Synthetic oligonucleotide
tgtacccttcctgttatttcctgaagtaga

SEQ ID NO: 487802 - DNA, 30 bp, Artificial Sequence
  Synthetic oligonucleotide
aattaagttaagttaatatggcacagtaga

SEQ ID NO: 487803 - DNA, 30 bp, Artificial Sequence
  Synthetic oligonucleotide
tgggatggcgtagccattactgttagtaga

SEQ ID NO: 487804 - DNA, 30 bp, Artificial Sequence
  Synthetic oligonucleotide
agtttgcgactcggcatcaccacgcgtaga

SEQ ID NO: 487805 - DNA, 30 bp, Artificial Sequence
  Synthetic oligonucleotide
tgaaaaattcgaactacgtcctggcgtaga

SEQ ID NO: 487806 - DNA, 30 bp, Artificial Sequence
  Synthetic oligonucleotide
ggagaccgcatcttttttgatactcgtaga

SEQ ID NO: 487807 - DNA, 30 bp, Artificial Sequence
  Synthetic oligonucleotide
gaccggtaccagaatttgcagcgtcgtaga

SEQ ID NO: 487808 - DNA, 30 bp, Artificial Sequence
  Synthetic oligonucleotide
ctcattggcacctgttaagcttgtcgtaga

SEQ ID NO: 487809 - DNA, 30 bp, Artificial Sequence
  Synthetic oligonucleotide
atgaggccagaggcgagagacgttcgtaga

SEQ ID NO: 487810 - DNA, 30 bp, Artificial Sequence
  Synthetic oligonucleotide
tgtggatttataaaccctgcctgaggtaga

SEQ ID NO: 487811 - DNA, 30 bp, Artificial Sequence
  Synthetic oligonucleotide
aattttcttggggtaatagcggacggtaga

SEQ ID NO: 487812 - DNA, 30 bp, Artificial Sequence
  Synthetic oligonucleotide
aggaataaggatgtgcgacggcgcggtaga

SEQ ID NO: 487813 - DNA, 30 bp, Artificial Sequence
  Synthetic oligonucleotide
aagttcaaaaatagggtggcgcagggtaga

SEQ ID NO: 487814 - DNA, 30 bp, Artificial Sequence
  Synthetic oligonucleotide
gtgacgccgaagctaacgtttcggggtaga

SEQ ID NO: 487815 - DNA, 29 bp, Artificial Sequence
  Synthetic oligonucleotide
cagcaaggacccgagtacatatgggtaga

SEQ ID NO: 487816 - DNA, 30 bp, Artificial Sequence
  Synthetic oligonucleotide
gaaattacggtttaatcctgaagtggtaga

SEQ ID NO: 487817 - DNA, 30 bp, Artificial Sequence
  Synthetic oligonucleotide
atttgcggttgataggcccctggtggtaga

SEQ ID NO: 487818 - DNA, 30 bp, Artificial Sequence
  Synthetic oligonucleotide
ttcatagatgttttgttggaacgatgtaga

SEQ ID NO: 487819 - DNA, 30 bp, Artificial Sequence
  Synthetic oligonucleotide
atcactagtggctacgatacacactgtaga

SEQ ID NO: 487820 - DNA, 30 bp, Artificial Sequence
  Synthetic oligonucleotide
tgtaggccgagcccaacacaaaagtgtaga

SEQ ID NO: 487821 - DNA, 30 bp, Artificial Sequence
  Synthetic oligonucleotide
cattacgttagcacttaattatcgtgtaga

SEQ ID NO: 487822 - DNA, 30 bp, Artificial Sequence
  Synthetic oligonucleotide
tgtcccctcggtcatgttactaccattaga

SEQ ID NO: 487823 - DNA, 30 bp, Artificial Sequence
  Synthetic oligonucleotide
aattatgtcatacgcggggtcgttattaga

SEQ ID NO: 487824 - DNA, 30 bp, Artificial Sequence
  Synthetic oligonucleotide
gaaacgaacggaacttttacctaacttaga

SEQ ID NO: 487825 - DNA, 30 bp, Artificial Sequence
  Synthetic oligonucleotide
tttgtgatcagatggaggcaacaccttaga

SEQ ID NO: 487826 - DNA, 30 bp, Artificial Sequence
  Synthetic oligonucleotide
cggaatggatgcgttcggtgcccccttaga

SEQ ID NO: 487827 - DNA, 30 bp, Artificial Sequence
  Synthetic oligonucleotide
gcacatgggcatatatgcgggcgtcttaga

SEQ ID NO: 487828 - DNA, 30 bp, Artificial Sequence
  Synthetic oligonucleotide
caggcaacttgcgatctttacgttcttaga

SEQ ID NO: 487829 - DNA, 30 bp, Artificial Sequence
  Synthetic oligonucleotide
gagcacaagtttcgtaatcgttttcttaga

SEQ ID NO: 487830 - DNA, 30 bp, Artificial Sequence
  Synthetic oligonucleotide
agcgtctatccctttccccccatagttaga

SEQ ID NO: 487831 - DNA, 30 bp, Artificial Sequence
  Synthetic oligonucleotide
cattatggtagatctttgtctgcggttaga

SEQ ID NO: 487832 - DNA, 30 bp, Artificial Sequence
  Synthetic oligonucleotide
tagtcccaatttttgagttctcgggttaga

SEQ ID NO: 487833 - DNA, 30 bp, Artificial Sequence
  Synthetic oligonucleotide
aattgtcctagctgtactggtagttttaga

SEQ ID NO: 487834 - DNA, 30 bp, Artificial Sequence
  Synthetic oligonucleotide
ttaaccgtgtgtgtctaacagcgttttaga

SEQ ID NO: 487835 - DNA, 30 bp, Artificial Sequence
  Synthetic oligonucleotide
ctctgaaattcagcgtgacggcgttttaga

SEQ ID NO: 487836 - DNA, 30 bp, Artificial Sequence
  Synthetic oligonucleotide
gggcgcatataccagacatcatgttttaga

SEQ ID NO: 487837 - DNA, 30 bp, Artificial Sequence
  Synthetic oligonucleotide
ccttcttgaatcggaagagcactttttaga

SEQ ID NO: 487838 - DNA, 30 bp, Artificial Sequence
  Synthetic oligonucleotide
cttgttttgctgtcgaatgatgaaaaacga

SEQ ID NO: 487839 - DNA, 30 bp, Artificial Sequence
  Synthetic oligonucleotide
ttcaacaaatatttttattcaatcaaacga

SEQ ID NO: 487840 - DNA, 30 bp, Artificial Sequence
  Synthetic oligonucleotide
tattcttaagcggccgttaagttgaaacga

SEQ ID NO: 487841 - DNA, 30 bp, Artificial Sequence
  Synthetic oligonucleotide
gggccgtgtcttctgtttcgagtccaacga

SEQ ID NO: 487842 - DNA, 30 bp, Artificial Sequence
  Synthetic oligonucleotide
cccctatcaccgacgataatcgtgcaacga

SEQ ID NO: 487843 - DNA, 30 bp, Artificial Sequence
  Synthetic oligonucleotide
ggtcggtatatctacgacgcttctcaacga

SEQ ID NO: 487844 - DNA, 30 bp, Artificial Sequence
  Synthetic oligonucleotide
aagtatatggtcaggaaccggtgtcaacga

SEQ ID NO: 487845 - DNA, 30 bp, Artificial Sequence
  Synthetic oligonucleotide
gactcgtttataatggtcttcattcaacga

SEQ ID NO: 487846 - DNA, 30 bp, Artificial Sequence
  Synthetic oligonucleotide
ggtatatatggaatgcatgtatttcaacga

SEQ ID NO: 487847 - DNA, 30 bp, Artificial Sequence
  Synthetic oligonucleotide
acggaaatacagttttagccccacgaacga

SEQ ID NO: 487848 - DNA, 30 bp, Artificial Sequence
  Synthetic oligonucleotide
ggtatctttgctccaatggatgacgaacga

SEQ ID NO: 487849 - DNA, 30 bp, Artificial Sequence
  Synthetic oligonucleotide
atttgaatctttgatctaggattggaacga

SEQ ID NO: 487850 - DNA, 30 bp, Artificial Sequence
  Synthetic oligonucleotide
gatgtttttcagctgcctgcggaataacga

SEQ ID NO: 487851 - DNA, 30 bp, Artificial Sequence
  Synthetic oligonucleotide
ttgcctatttttaatcatacatgataacga

SEQ ID NO: 487852 - DNA, 30 bp, Artificial Sequence
  Synthetic oligonucleotide
aagccctacgcttgtggggccgcctaacga

SEQ ID NO: 487853 - DNA, 30 bp, Artificial Sequence
  Synthetic oligonucleotide
taagcaccttggtaagggttaaggtaacga

SEQ ID NO: 487854 - DNA, 30 bp, Artificial Sequence
  Synthetic oligonucleotide
tgtacgaagtgaagtgtgcgtttttaacga

SEQ ID NO: 487855 - DNA, 30 bp, Artificial Sequence
  Synthetic oligonucleotide
tagtctttgctgtaattacgacaaacacga

SEQ ID NO: 487856 - DNA, 30 bp, Artificial Sequence
  Synthetic oligonucleotide
aaagttcgtgtgctacgagtctgcacacga

SEQ ID NO: 487857 - DNA, 30 bp, Artificial Sequence
  Synthetic oligonucleotide
aatatccgtcgcatcggccgcaagacacga

SEQ ID NO: 487858 - DNA, 30 bp, Artificial Sequence
  Synthetic oligonucleotide
cttacaactcgcaggcggaatcatacacga

SEQ ID NO: 487859 - DNA, 30 bp, Artificial Sequence
  Synthetic oligonucleotide
ctgtcgaggcccttgggaataggcccacga

SEQ ID NO: 487860 - DNA, 30 bp, Artificial Sequence
  Synthetic oligonucleotide
gtgtagcggacctcggcgcggccgccacga

SEQ ID NO: 487861 - DNA, 30 bp, Artificial Sequence
  Synthetic oligonucleotide
tttaggttctatctcgatcgacatccacga

SEQ ID NO: 487862 - DNA, 30 bp, Artificial Sequence
  Synthetic oligonucleotide
tccaatgattgatactgtacgtaagcacga

SEQ ID NO: 487863 - DNA, 30 bp, Artificial Sequence
  Synthetic oligonucleotide
gttttatgtcaaaacctgcgccccgcacga

SEQ ID NO: 487864 - DNA, 30 bp, Artificial Sequence
  Synthetic oligonucleotide
gtttggtcggagaatattaactccgcacga

SEQ ID NO: 487865 - DNA, 30 bp, Artificial Sequence
  Synthetic oligonucleotide
ccgggtaattgctattgacagagcgcacga

SEQ ID NO: 487866 - DNA, 30 bp, Artificial Sequence
  Synthetic oligonucleotide
gaagaaagctagcttacatggagggcacga

SEQ ID NO: 487867 - DNA, 30 bp, Artificial Sequence
  Synthetic oligonucleotide
tcgagataaaagtgtcccgtatggtcacga

SEQ ID NO: 487868 - DNA, 30 bp, Artificial Sequence
  Synthetic oligonucleotide
ccgactggaggtcacggggggccttcacga

SEQ ID NO: 487869 - DNA, 30 bp, Artificial Sequence
  Synthetic oligonucleotide
agattccgggaagttcacattggaagacga

SEQ ID NO: 487870 - DNA, 30 bp, Artificial Sequence
  Synthetic oligonucleotide
cacgtagacacatctgttgtatcgagacga

SEQ ID NO: 487871 - DNA, 30 bp, Artificial Sequence
  Synthetic oligonucleotide
cctcgaggcagccttagcgctcggagacga

SEQ ID NO: 487872 - DNA, 30 bp, Artificial Sequence
  Synthetic oligonucleotide
gttgcaaggttaatcggaatagtgcgacga

SEQ ID NO: 487873 - DNA, 30 bp, Artificial Sequence
  Synthetic oligonucleotide
aataactcaataggatcacctttgcgacga

SEQ ID NO: 487874 - DNA, 30 bp, Artificial Sequence
  Synthetic oligonucleotide
gtgacgtagcaaagctgtgccagaggacga

SEQ ID NO: 487875 - DNA, 30 bp, Artificial Sequence
  Synthetic oligonucleotide
ctgtttgcactcgtcctcgaacacggacga

SEQ ID NO: 487876 - DNA, 30 bp, Artificial Sequence
  Synthetic oligonucleotide
agagtctaggtgcacggggctgtgggacga

SEQ ID NO: 487877 - DNA, 30 bp, Artificial Sequence
  Synthetic oligonucleotide
ggaaaaaatttttgtatattgactggacga

SEQ ID NO: 487878 - DNA, 30 bp, Artificial Sequence
  Synthetic oligonucleotide
aaggtagttgagttcgccctatgtggacga

SEQ ID NO: 487879 - DNA, 30 bp, Artificial Sequence
  Synthetic oligonucleotide
aacgcggcggtccgtatcaatcaatgacga

SEQ ID NO: 487880 - DNA, 30 bp, Artificial Sequence
  Synthetic oligonucleotide
gttgcttacttaccccgtcctcgatgacga

SEQ ID NO: 487881 - DNA, 30 bp, Artificial Sequence
  Synthetic oligonucleotide
taaatcgaagagaccgtttacctatgacga

SEQ ID NO: 487882 - DNA, 30 bp, Artificial Sequence
  Synthetic oligonucleotide
ccctctgttgactaacgtgtttggtgacga

SEQ ID NO: 487883 - DNA, 30 bp, Artificial Sequence
  Synthetic oligonucleotide
ccggtactaataacgcgcgcagacatacga

SEQ ID NO: 487884 - DNA, 30 bp, Artificial Sequence
  Synthetic oligonucleotide
aacaattgtcttacagattagcggatacga

SEQ ID NO: 487885 - DNA, 29 bp, Artificial Sequence
  Synthetic oligonucleotide
aatgtcccagttcagacttttcactacga

SEQ ID NO: 487886 - DNA, 30 bp, Artificial Sequence
  Synthetic oligonucleotide
gccgaccacggtccccgggcatatctacga

SEQ ID NO: 487887 - DNA, 30 bp, Artificial Sequence
  Synthetic oligonucleotide
tctaagaagtttggcgtggctcgtctacga

SEQ ID NO: 487888 - DNA, 30 bp, Artificial Sequence
  Synthetic oligonucleotide
atacgctgaaaatcgagacgaaaagtacga

SEQ ID NO: 487889 - DNA, 30 bp, Artificial Sequence
  Synthetic oligonucleotide
tactgcttgaagtgcaacgtatgagtacga

SEQ ID NO: 487890 - DNA, 30 bp, Artificial Sequence
  Synthetic oligonucleotide
cggcccgaaaagtggagtctcttagtacga

SEQ ID NO: 487891 - DNA, 30 bp, Artificial Sequence
  Synthetic oligonucleotide
ctatttctttgcgggctgacctcggtacga

SEQ ID NO: 487892 - DNA, 30 bp, Artificial Sequence
  Synthetic oligonucleotide
tcccacaaagcatggcgcccgcttgtacga

SEQ ID NO: 487893 - DNA, 30 bp, Artificial Sequence
  Synthetic oligonucleotide
tgggatgaacggcacgaatattaattacga

SEQ ID NO: 487894 - DNA, 30 bp, Artificial Sequence
  Synthetic oligonucleotide
gagacttactctaagtgtttatcattacga

SEQ ID NO: 487895 - DNA, 30 bp, Artificial Sequence
  Synthetic oligonucleotide
tgccctcagtttaaggagacagtattacga

SEQ ID NO: 487896 - DNA, 30 bp, Artificial Sequence
  Synthetic oligonucleotide
gtgaattcatcggcgccgccttagttacga

SEQ ID NO: 487897 - DNA, 30 bp, Artificial Sequence
  Synthetic oligonucleotide
ccagtgtagctcgtagtttccggaaaccga

SEQ ID NO: 487898 - DNA, 30 bp, Artificial Sequence
  Synthetic oligonucleotide
actatccctgcccgggggagcgacaaccga

SEQ ID NO: 487899 - DNA, 30 bp, Artificial Sequence
  Synthetic oligonucleotide
tcaaagcgggtgcgttgcagcatcaaccga

SEQ ID NO: 487900 - DNA, 30 bp, Artificial Sequence
  Synthetic oligonucleotide
cattacggttgccccatgggatggaaccga

SEQ ID NO: 487901 - DNA, 26 bp, Artificial Sequence
  Synthetic oligonucleotide
tttatcctgcctcggttattaaccga

SEQ ID NO: 487902 - DNA, 30 bp, Artificial Sequence
  Synthetic oligonucleotide
tgtagcctgcgtgcggaaaggacacaccga

SEQ ID NO: 487903 - DNA, 30 bp, Artificial Sequence
  Synthetic oligonucleotide
acgacactgtcttcggggataacccaccga

SEQ ID NO: 487904 - DNA, 30 bp, Artificial Sequence
  Synthetic oligonucleotide
tgtaatactgaatgattattattgcaccga

SEQ ID NO: 487905 - DNA, 30 bp, Artificial Sequence
  Synthetic oligonucleotide
gctggtctcatgatatacttatgagaccga

SEQ ID NO: 487906 - DNA, 30 bp, Artificial Sequence
  Synthetic oligonucleotide
aatagacgccgctacagcgacatggaccga

SEQ ID NO: 487907 - DNA, 30 bp, Artificial Sequence
  Synthetic oligonucleotide
gtagtcaagtgcattcactttatataccga

SEQ ID NO: 487908 - DNA, 30 bp, Artificial Sequence
  Synthetic oligonucleotide
ttgcgatttgacctacggaattgctaccga

SEQ ID NO: 487909 - DNA, 30 bp, Artificial Sequence
  Synthetic oligonucleotide
ggctacgcgtcggggcctaatatgtaccga

SEQ ID NO: 487910 - DNA, 30 bp, Artificial Sequence
  Synthetic oligonucleotide
tataagttgatctggtggcagctttaccga

SEQ ID NO: 487911 - DNA, 30 bp, Artificial Sequence
  Synthetic oligonucleotide
cagggacgtagtttttagaccacaacccga

SEQ ID NO: 487912 - DNA, 30 bp, Artificial Sequence
  Synthetic oligonucleotide
attctaaatttgtcctttcgtggaacccga

SEQ ID NO: 487913 - DNA, 30 bp, Artificial Sequence
  Synthetic oligonucleotide
gagtgtgtagtgatcgttctccacacccga

SEQ ID NO: 487914 - DNA, 30 bp, Artificial Sequence
  Synthetic oligonucleotide
gcacggccatttcctcggttagtcacccga

SEQ ID NO: 487915 - DNA, 30 bp, Artificial Sequence
  Synthetic oligonucleotide
ttatgtttgagtcgtggtttgccgacccga

SEQ ID NO: 487916 - DNA, 30 bp, Artificial Sequence
  Synthetic oligonucleotide
cgtccctcgtccaaaaatttcgggacccga

SEQ ID NO: 487917 - DNA, 30 bp, Artificial Sequence
  Synthetic oligonucleotide
attggtccggtaaataattagaatacccga

SEQ ID NO: 487918 - DNA, 30 bp, Artificial Sequence
  Synthetic oligonucleotide
gttagggccgtacgacgccaggccccccga

SEQ ID NO: 487919 - DNA, 30 bp, Artificial Sequence
  Synthetic oligonucleotide
aaaaaaaaatagcaaatggttttcccccga

SEQ ID NO: 487920 - DNA, 30 bp, Artificial Sequence
  Synthetic oligonucleotide
agtgacgtcgcaagtgctcatggtccccga

SEQ ID NO: 487921 - DNA, 30 bp, Artificial Sequence
  Synthetic oligonucleotide
aacgcctataagtcgtgcgattccgcccga

SEQ ID NO: 487922 - DNA, 30 bp, Artificial Sequence
  Synthetic oligonucleotide
tcttctagccagactatagccctcgcccga

SEQ ID NO: 487923 - DNA, 30 bp, Artificial Sequence
  Synthetic oligonucleotide
tagacttgtgcctattcctctggggcccga

SEQ ID NO: 487924 - DNA, 30 bp, Artificial Sequence
  Synthetic oligonucleotide
tttgttagtatcgaacaagctatggcccga

SEQ ID NO: 487925 - DNA, 30 bp, Artificial Sequence
  Synthetic oligonucleotide
aataccacggatctatttacagatgcccga

SEQ ID NO: 487926 - DNA, 30 bp, Artificial Sequence
  Synthetic oligonucleotide
ctttgagagaatctgattgaggcatcccga

SEQ ID NO: 487927 - DNA, 30 bp, Artificial Sequence
  Synthetic oligonucleotide
gaattaatacatggtgtatctttatcccga

SEQ ID NO: 487928 - DNA, 30 bp, Artificial Sequence
  Synthetic oligonucleotide
tgcataaatgctccagcgtatttgtcccga

SEQ ID NO: 487929 - DNA, 30 bp, Artificial Sequence
  Synthetic oligonucleotide
gcccaatggtcaggttgcatttgttcccga

SEQ ID NO: 487930 - DNA, 30 bp, Artificial Sequence
  Synthetic oligonucleotide
taaaattttccgtttccgcgattttcccga

SEQ ID NO: 487931 - DNA, 30 bp, Artificial Sequence
  Synthetic oligonucleotide
gtttataaattagataccgtttaaagccga

SEQ ID NO: 487932 - DNA, 30 bp, Artificial Sequence
  Synthetic oligonucleotide
cttaggcccgatcgcaggttagacagccga

SEQ ID NO: 487933 - DNA, 30 bp, Artificial Sequence
  Synthetic oligonucleotide
tcggagtcccgagtaagaaacaccagccga

SEQ ID NO: 487934 - DNA, 30 bp, Artificial Sequence
  Synthetic oligonucleotide
agacggcgccaggcatcagacgctagccga

SEQ ID NO: 487935 - DNA, 30 bp, Artificial Sequence
  Synthetic oligonucleotide
atcaacaaattttagctacgaggacgccga

SEQ ID NO: 487936 - DNA, 30 bp, Artificial Sequence
  Synthetic oligonucleotide
gacgtttagctttcatcagaatatcgccga

SEQ ID NO: 487937 - DNA, 30 bp, Artificial Sequence
  Synthetic oligonucleotide
gtacgcgtactacgattacgctgtcgccga

SEQ ID NO: 487938 - DNA, 30 bp, Artificial Sequence
  Synthetic oligonucleotide
attccaaggtaggtgcacttgccatgccga

SEQ ID NO: 487939 - DNA, 30 bp, Artificial Sequence
  Synthetic oligonucleotide
gggttagggcggtaggatcggcattgccga

SEQ ID NO: 487940 - DNA, 30 bp, Artificial Sequence
  Synthetic oligonucleotide
cacccattcgagctaacctcaaaaatccga

SEQ ID NO: 487941 - DNA, 30 bp, Artificial Sequence
  Synthetic oligonucleotide
taatgactccatcgagcccccccaatccga

SEQ ID NO: 487942 - DNA, 30 bp, Artificial Sequence
  Synthetic oligonucleotide
gaaccgaccgcgcgctgcactagaatccga

SEQ ID NO: 487943 - DNA, 30 bp, Artificial Sequence
  Synthetic oligonucleotide
tgttggtgcacctcggaagtcgagatccga

SEQ ID NO: 487944 - DNA, 30 bp, Artificial Sequence
  Synthetic oligonucleotide
ttcgaacgttttacaagtgccgcgatccga

SEQ ID NO: 487945 - DNA, 30 bp, Artificial Sequence
  Synthetic oligonucleotide
tttatcacgcagcagtaggcacttatccga

SEQ ID NO: 487946 - DNA, 30 bp, Artificial Sequence
  Synthetic oligonucleotide
taaccgaagcattcgttattttccctccga

SEQ ID NO: 487947 - DNA, 31 bp, Artificial Sequence
  Synthetic oligonucleotide
atttgaatagactagttgtctcaggctccga

SEQ ID NO: 487948 - DNA, 30 bp, Artificial Sequence
  Synthetic oligonucleotide
cgtttcagaatttagttgcagcttctccga

SEQ ID NO: 487949 - DNA, 30 bp, Artificial Sequence
  Synthetic oligonucleotide
gacgtctttctcatgcgtggcagcgtccga

SEQ ID NO: 487950 - DNA, 29 bp, Artificial Sequence
  Synthetic oligonucleotide
aagccatagcattacgctgatcgttccga

SEQ ID NO: 487951 - DNA, 30 bp, Artificial Sequence
  Synthetic oligonucleotide
tcatagccggctccggggaaacctttccga

SEQ ID NO: 487952 - DNA, 30 bp, Artificial Sequence
  Synthetic oligonucleotide
tgatcggatcgaactttctaagttttccga

SEQ ID NO: 487953 - DNA, 30 bp, Artificial Sequence
  Synthetic oligonucleotide
agttctgtaggtgccgcactccgaaagcga

SEQ ID NO: 487954 - DNA, 30 bp, Artificial Sequence
  Synthetic oligonucleotide
tcaatggggttcttgatactccgaaagcga

SEQ ID NO: 487955 - DNA, 30 bp, Artificial Sequence
  Synthetic oligonucleotide
tgattagacttcgggccctagttaaagcga

SEQ ID NO: 487956 - DNA, 30 bp, Artificial Sequence
  Synthetic oligonucleotide
tggtttgaataatctctatgatgcaagcga

SEQ ID NO: 487957 - DNA, 30 bp, Artificial Sequence
  Synthetic oligonucleotide
gtgcgcctctgtatgcagcagcagaagcga

SEQ ID NO: 487958 - DNA, 30 bp, Artificial Sequence
  Synthetic oligonucleotide
tttattgtgagtcgtccaggagataagcga

SEQ ID NO: 487959 - DNA, 30 bp, Artificial Sequence
  Synthetic oligonucleotide
cggtcaggcagcgatgtgaccaaacagcga

SEQ ID NO: 487960 - DNA, 30 bp, Artificial Sequence
  Synthetic oligonucleotide
acaattctttgcaaaggcatcaaacagcga

SEQ ID NO: 487961 - DNA, 30 bp, Artificial Sequence
  Synthetic oligonucleotide
tgtcgcggtccgactgagctgaaacagcga

SEQ ID NO: 487962 - DNA, 30 bp, Artificial Sequence
  Synthetic oligonucleotide
ctcagaaagtcggcagtctcgtgacagcga

SEQ ID NO: 487963 - DNA, 30 bp, Artificial Sequence
  Synthetic oligonucleotide
aaaacgcagacgctcatgcaggagcagcga

SEQ ID NO: 487964 - DNA, 30 bp, Artificial Sequence
  Synthetic oligonucleotide
gcggcccccgctaagtcctggatgcagcga

SEQ ID NO: 487965 - DNA, 30 bp, Artificial Sequence
  Synthetic oligonucleotide
tgcgactcataaaaggattggcttcagcga

SEQ ID NO: 487966 - DNA, 30 bp, Artificial Sequence
  Synthetic oligonucleotide
atttggtatctattacttttaagagagcga

SEQ ID NO: 487967 - DNA, 30 bp, Artificial Sequence
  Synthetic oligonucleotide
ataaaggagggaggggtacagggggagcga

SEQ ID NO: 487968 - DNA, 30 bp, Artificial Sequence
  Synthetic oligonucleotide
agataatcactaaggcgcgggccctagcga

SEQ ID NO: 487969 - DNA, 30 bp, Artificial Sequence
  Synthetic oligonucleotide
gttagaaaggagtcaggtgtcgcctagcga

SEQ ID NO: 487970 - DNA, 30 bp, Artificial Sequence
  Synthetic oligonucleotide
tcatcgcacttcgtattgtacgtctagcga

SEQ ID NO: 487971 - DNA, 30 bp, Artificial Sequence
  Synthetic oligonucleotide
actactaagcgcaagaaatcgctgtagcga

SEQ ID NO: 487972 - DNA, 30 bp, Artificial Sequence
  Synthetic oligonucleotide
gtcatgttccatgaaccccactattagcga

SEQ ID NO: 487973 - DNA, 30 bp, Artificial Sequence
  Synthetic oligonucleotide
tcagagcgcaaacttttgtgggagacgcga

SEQ ID NO: 487974 - DNA, 30 bp, Artificial Sequence
  Synthetic oligonucleotide
tctccttcggcttccaggtaattgacgcga

SEQ ID NO: 487975 - DNA, 30 bp, Artificial Sequence
  Synthetic oligonucleotide
ccacatccgggtagccgagtcttgacgcga

SEQ ID NO: 487976 - DNA, 30 bp, Artificial Sequence
  Synthetic oligonucleotide
gttggtgatgggcctattctatggccgcga

SEQ ID NO: 487977 - DNA, 30 bp, Artificial Sequence
  Synthetic oligonucleotide
catgtagcatttttggtctgtagtccgcga

SEQ ID NO: 487978 - DNA, 29 bp, Artificial Sequence
  Synthetic oligonucleotide
aggaataggagttgagcaatggcgcgcga

SEQ ID NO: 487979 - DNA, 30 bp, Artificial Sequence
  Synthetic oligonucleotide
cgcaaatcaagctagacttggctcgcgcga

SEQ ID NO: 487980 - DNA, 30 bp, Artificial Sequence
  Synthetic oligonucleotide
gtttggatctatctctttacaattgcgcga

SEQ ID NO: 487981 - DNA, 30 bp, Artificial Sequence
  Synthetic oligonucleotide
gagggtgggggagcgcttctaaagtcgcga

SEQ ID NO: 487982 - DNA, 30 bp, Artificial Sequence
  Synthetic oligonucleotide
ttttttaatgcatatgcacgtacgtcgcga

SEQ ID NO: 487983 - DNA, 30 bp, Artificial Sequence
  Synthetic oligonucleotide
cgacataggtctggttttcacggttcgcga

SEQ ID NO: 487984 - DNA, 30 bp, Artificial Sequence
  Synthetic oligonucleotide
caagcctgtttattgctgcagatttcgcga

SEQ ID NO: 487985 - DNA, 30 bp, Artificial Sequence
  Synthetic oligonucleotide
attatatgcgcacattccggtaaaaggcga

SEQ ID NO: 487986 - DNA, 30 bp, Artificial Sequence
  Synthetic oligonucleotide
tataatccgacgtttgtattaagaaggcga

SEQ ID NO: 487987 - DNA, 30 bp, Artificial Sequence
  Synthetic oligonucleotide
tccatgcgggacgcaggtaaagcgaggcga

SEQ ID NO: 487988 - DNA, 30 bp, Artificial Sequence
  Synthetic oligonucleotide
atagctcgccctaggcaattacctaggcga

SEQ ID NO: 487989 - DNA, 30 bp, Artificial Sequence
  Synthetic oligonucleotide
taatacttgagtcagcatgcaatccggcga

SEQ ID NO: 487990 - DNA, 30 bp, Artificial Sequence
  Synthetic oligonucleotide
ttcacgggtcccattgattctcgggggcga

SEQ ID NO: 487991 - DNA, 30 bp, Artificial Sequence
  Synthetic oligonucleotide
gaagggcagtgtttcgcaattctatggcga

SEQ ID NO: 487992 - DNA, 30 bp, Artificial Sequence
  Synthetic oligonucleotide
aaaagttcactgcttagataactctggcga

SEQ ID NO: 487993 - DNA, 30 bp, Artificial Sequence
  Synthetic oligonucleotide
caaaagtgtacaaagggtagaacgtggcga

SEQ ID NO: 487994 - DNA, 30 bp, Artificial Sequence
  Synthetic oligonucleotide
gctctggggccggagttagaaaattggcga

SEQ ID NO: 487995 - DNA, 30 bp, Artificial Sequence
  Synthetic oligonucleotide
acgcgcgtatagacgttatgttattggcga

SEQ ID NO: 487996 - DNA, 30 bp, Artificial Sequence
  Synthetic oligonucleotide
ctgttggaaatagtctcatacgcttggcga

SEQ ID NO: 487997 - DNA, 30 bp, Artificial Sequence
  Synthetic oligonucleotide
actgtcatcattatattaatttggatgcga

SEQ ID NO: 487998 - DNA, 30 bp, Artificial Sequence
  Synthetic oligonucleotide
atgcggaagtccggttaacccttactgcga

SEQ ID NO: 487999 - DNA, 30 bp, Artificial Sequence
  Synthetic oligonucleotide
gtaagcttcatgccgttagcgatcctgcga

SEQ ID NO: 488000 - DNA, 30 bp, Artificial Sequence
  Synthetic oligonucleotide
caacaggaccattgtacattcacgctgcga

SEQ ID NO: 488001 - DNA, 30 bp, Artificial Sequence
  Synthetic oligonucleotide
tacccttaacgtgggaaatgacgtctgcga

SEQ ID NO: 488002 - DNA, 30 bp, Artificial Sequence
  Synthetic oligonucleotide
tatggttttcattcatgaaatgccgtgcga

SEQ ID NO: 488003 - DNA, 30 bp, Artificial Sequence
  Synthetic oligonucleotide
actcgtctttaccccattatccgcgtgcga

SEQ ID NO: 488004 - DNA, 30 bp, Artificial Sequence
  Synthetic oligonucleotide
tcggggatttatagttagcagctggtgcga

SEQ ID NO: 488005 - DNA, 30 bp, Artificial Sequence
  Synthetic oligonucleotide
ataacttagacacagccggatttggtgcga

SEQ ID NO: 488006 - DNA, 30 bp, Artificial Sequence
  Synthetic oligonucleotide
gaggaccgcagtgtaaacgttacattgcga

SEQ ID NO: 488007 - DNA, 30 bp, Artificial Sequence
  Synthetic oligonucleotide
gagcgtccccgctccagtctatgcttgcga

SEQ ID NO: 488008 - DNA, 30 bp, Artificial Sequence
  Synthetic oligonucleotide
aatctgcacggtgacgtaggagtcttgcga

SEQ ID NO: 488009 - DNA, 30 bp, Artificial Sequence
  Synthetic oligonucleotide
actgctgaagttcacttcgccactttgcga

SEQ ID NO: 488010 - DNA, 30 bp, Artificial Sequence
  Synthetic oligonucleotide
ggcctatttggcaccattgggcccaatcga

SEQ ID NO: 488011 - DNA, 30 bp, Artificial Sequence
  Synthetic oligonucleotide
acggagcctaatcgtctaaggacgaatcga

SEQ ID NO: 488012 - DNA, 30 bp, Artificial Sequence
  Synthetic oligonucleotide
cctacataattacgaagacagggtaatcga

SEQ ID NO: 488013 - DNA, 30 bp, Artificial Sequence
  Synthetic oligonucleotide
ggatccgcgacatgatggagggttaatcga

SEQ ID NO: 488014 - DNA, 30 bp, Artificial Sequence
  Synthetic oligonucleotide
aaagtggatctataagccacatttaatcga

SEQ ID NO: 488015 - DNA, 30 bp, Artificial Sequence
  Synthetic oligonucleotide
tcttctagaaacgggcctcgacaacatcga

SEQ ID NO: 488016 - DNA, 30 bp, Artificial Sequence
  Synthetic oligonucleotide
gggtgtacctggtggattacgtcgcatcga

SEQ ID NO: 488017 - DNA, 30 bp, Artificial Sequence
  Synthetic oligonucleotide
agtctcgagataccggagggtgtgcatcga

SEQ ID NO: 488018 - DNA, 30 bp, Artificial Sequence
  Synthetic oligonucleotide
gagcaattacgcatgctagaattgcatcga

SEQ ID NO: 488019 - DNA, 30 bp, Artificial Sequence
  Synthetic oligonucleotide
ctattgtgaatgcttgatctgcctcatcga

SEQ ID NO: 488020 - DNA, 30 bp, Artificial Sequence
  Synthetic oligonucleotide
tttacccggacaaggctaatcgtcgatcga

SEQ ID NO: 488021 - DNA, 30 bp, Artificial Sequence
  Synthetic oligonucleotide
tactcaccccagtcccgggagatggatcga

SEQ ID NO: 488022 - DNA, 30 bp, Artificial Sequence
  Synthetic oligonucleotide
aattcactaaaacgacctttgtgtgatcga

SEQ ID NO: 488023 - DNA, 30 bp, Artificial Sequence
  Synthetic oligonucleotide
tccccccgatactggcaggagacctatcga

SEQ ID NO: 488024 - DNA, 30 bp, Artificial Sequence
  Synthetic oligonucleotide
accctcagatgctggttataaatctatcga

SEQ ID NO: 488025 - DNA, 30 bp, Artificial Sequence
  Synthetic oligonucleotide
ttcccataggatgaagctttgaagtatcga

SEQ ID NO: 488026 - DNA, 30 bp, Artificial Sequence
  Synthetic oligonucleotide
gctttagtcggtttttcttccgcgtatcga

SEQ ID NO: 488027 - DNA, 30 bp, Artificial Sequence
  Synthetic oligonucleotide
ctccgtatgtaccggtggatgacttatcga

SEQ ID NO: 488028 - DNA, 30 bp, Artificial Sequence
  Synthetic oligonucleotide
tctgttcactggaaggtctttagttatcga

SEQ ID NO: 488029 - DNA, 30 bp, Artificial Sequence
  Synthetic oligonucleotide
tgacgcaatcttacccgcagccggactcga

SEQ ID NO: 488030 - DNA, 30 bp, Artificial Sequence
  Synthetic oligonucleotide
tctacggtaagagttctaattgttactcga

SEQ ID NO: 488031 - DNA, 30 bp, Artificial Sequence
  Synthetic oligonucleotide
aaaatgaattagatatgagattgccctcga

SEQ ID NO: 488032 - DNA, 28 bp, Artificial Sequence
  Synthetic oligonucleotide
gtcgtcatcatcggcatgtcaagctcga

SEQ ID NO: 488033 - DNA, 30 bp, Artificial Sequence
  Synthetic oligonucleotide
gagttcttagggttacgcttaatcgctcga

SEQ ID NO: 488034 - DNA, 30 bp, Artificial Sequence
  Synthetic oligonucleotide
gcaggtagggggagcggttaaacggctcga

SEQ ID NO: 488035 - DNA, 30 bp, Artificial Sequence
  Synthetic oligonucleotide
gaattttcaccggataccgacaatgctcga

SEQ ID NO: 488036 - DNA, 30 bp, Artificial Sequence
  Synthetic oligonucleotide
cgatgttctaatcgagttcgaaaatctcga

SEQ ID NO: 488037 - DNA, 30 bp, Artificial Sequence
  Synthetic oligonucleotide
ataaaatgaggcaatatgtgtgagtctcga

SEQ ID NO: 488038 - DNA, 30 bp, Artificial Sequence
  Synthetic oligonucleotide
agaacgcggctgcatcatgtagtttctcga

SEQ ID NO: 488039 - DNA, 30 bp, Artificial Sequence
  Synthetic oligonucleotide
tgatttgacaattttcacgatcacagtcga

SEQ ID NO: 488040 - DNA, 30 bp, Artificial Sequence
  Synthetic oligonucleotide
tttcatgctgatccgagagattacagtcga

SEQ ID NO: 488041 - DNA, 30 bp, Artificial Sequence
  Synthetic oligonucleotide
catatatttgatgtcaaagggctcagtcga

SEQ ID NO: 488042 - DNA, 30 bp, Artificial Sequence
  Synthetic oligonucleotide
ctgactggcagagtcactacgttcagtcga

SEQ ID NO: 488043 - DNA, 30 bp, Artificial Sequence
  Synthetic oligonucleotide
ggtcctggtcgatacggcagtccgagtcga

SEQ ID NO: 488044 - DNA, 30 bp, Artificial Sequence
  Synthetic oligonucleotide
gtagtatcgatcgctgatcgataacgtcga

SEQ ID NO: 488045 - DNA, 30 bp, Artificial Sequence
  Synthetic oligonucleotide
tatagcctttttgcgggcattaaaggtcga

SEQ ID NO: 488046 - DNA, 30 bp, Artificial Sequence
  Synthetic oligonucleotide
agtgcttgcttttataaagcccaaggtcga

SEQ ID NO: 488047 - DNA, 30 bp, Artificial Sequence
  Synthetic oligonucleotide
ttcaaacggtttcgatcaaagaccggtcga

SEQ ID NO: 488048 - DNA, 30 bp, Artificial Sequence
  Synthetic oligonucleotide
attcgacggactcagcactagcgcggtcga

SEQ ID NO: 488049 - DNA, 30 bp, Artificial Sequence
  Synthetic oligonucleotide
accaagatgatgccccgaagtacgggtcga

SEQ ID NO: 488050 - DNA, 30 bp, Artificial Sequence
  Synthetic oligonucleotide
tgtttatatgaatcccgtattgtgggtcga

SEQ ID NO: 488051 - DNA, 30 bp, Artificial Sequence
  Synthetic oligonucleotide
tattgatttcagccgcactggttctgtcga

SEQ ID NO: 488052 - DNA, 30 bp, Artificial Sequence
  Synthetic oligonucleotide
tcgcttatgcctttagacgccgcgtgtcga

SEQ ID NO: 488053 - DNA, 30 bp, Artificial Sequence
  Synthetic oligonucleotide
atcaatccggaactacgacataattgtcga

SEQ ID NO: 488054 - DNA, 30 bp, Artificial Sequence
  Synthetic oligonucleotide
gaacgcaaccgtatcaattttacttgtcga

SEQ ID NO: 488055 - DNA, 30 bp, Artificial Sequence
  Synthetic oligonucleotide
atcaacagacgcaggcgaacgagaattcga

SEQ ID NO: 488056 - DNA, 30 bp, Artificial Sequence
  Synthetic oligonucleotide
ttgtcgcatgcgtatgtgatatgaattcga

SEQ ID NO: 488057 - DNA, 30 bp, Artificial Sequence
  Synthetic oligonucleotide
gcgggcgtcttgaaacgcgccataattcga

SEQ ID NO: 488058 - DNA, 30 bp, Artificial Sequence
  Synthetic oligonucleotide
caatgaaatcctctgcgacgggcgattcga

SEQ ID NO: 488059 - DNA, 30 bp, Artificial Sequence
  Synthetic oligonucleotide
tacagttctgaccccccgcggccacttcga

SEQ ID NO: 488060 - DNA, 30 bp, Artificial Sequence
  Synthetic oligonucleotide
tttataccgagccgggccctgggccttcga

SEQ ID NO: 488061 - DNA, 30 bp, Artificial Sequence
  Synthetic oligonucleotide
tatgaccataattaacaatatctggttcga

SEQ ID NO: 488062 - DNA, 30 bp, Artificial Sequence
  Synthetic oligonucleotide
cattcttcagaacgcgaaccttttgttcga

SEQ ID NO: 488063 - DNA, 30 bp, Artificial Sequence
  Synthetic oligonucleotide
aaaagctgggactctatctaaaaatttcga

SEQ ID NO: 488064 - DNA, 30 bp, Artificial Sequence
  Synthetic oligonucleotide
acacgcggaacgaatcggtcagcatttcga

SEQ ID NO: 488065 - DNA, 30 bp, Artificial Sequence
  Synthetic oligonucleotide
gtcgaaatccttatattgtcatgatttcga

SEQ ID NO: 488066 - DNA, 30 bp, Artificial Sequence
  Synthetic oligonucleotide
ggtttggcatgccagtagcgtttctttcga

SEQ ID NO: 488067 - DNA, 30 bp, Artificial Sequence
  Synthetic oligonucleotide
aacatcaagattctaggcgatgagtttcga

SEQ ID NO: 488068 - DNA, 30 bp, Artificial Sequence
  Synthetic oligonucleotide
tagaaaccccgatccttctatgagtttcga

SEQ ID NO: 488069 - DNA, 30 bp, Artificial Sequence
  Synthetic oligonucleotide
gactaatggtatggcggggcctcttttcga

SEQ ID NO: 488070 - DNA, 30 bp, Artificial Sequence
  Synthetic oligonucleotide
atccgcgtaagctgcaacgaattttttcga

SEQ ID NO: 488071 - DNA, 30 bp, Artificial Sequence
  Synthetic oligonucleotide
cctgtacggcgtacgtccctataaaaagga

SEQ ID NO: 488072 - DNA, 30 bp, Artificial Sequence
  Synthetic oligonucleotide
aagtctggataaaatctgctgagaaaagga

SEQ ID NO: 488073 - DNA, 30 bp, Artificial Sequence
  Synthetic oligonucleotide
agtaacgtcgctgatgacgtttgaaaagga

SEQ ID NO: 488074 - DNA, 30 bp, Artificial Sequence
  Synthetic oligonucleotide
atccttggtgtgtgcgagagagccaaagga

SEQ ID NO: 488075 - DNA, 30 bp, Artificial Sequence
  Synthetic oligonucleotide
tgcgttgtacagcaagacctttcgaaagga

SEQ ID NO: 488076 - DNA, 30 bp, Artificial Sequence
  Synthetic oligonucleotide
attctttagacgaataggcctcggaaagga

SEQ ID NO: 488077 - DNA, 30 bp, Artificial Sequence
  Synthetic oligonucleotide
cttattggttaagctgattgcctgaaagga

SEQ ID NO: 488078 - DNA, 30 bp, Artificial Sequence
  Synthetic oligonucleotide
ttttatgttctttatttagttttgaaagga

SEQ ID NO: 488079 - DNA, 30 bp, Artificial Sequence
  Synthetic oligonucleotide
gagaaaacggtacggtccctcgctaaagga

SEQ ID NO: 488080 - DNA, 30 bp, Artificial Sequence
  Synthetic oligonucleotide
ttaccttactcatccgcaatttcacaagga

SEQ ID NO: 488081 - DNA, 30 bp, Artificial Sequence
  Synthetic oligonucleotide
attttgggtcaggatgtaaatgaccaagga

SEQ ID NO: 488082 - DNA, 30 bp, Artificial Sequence
  Synthetic oligonucleotide
gaactatatctggctaaggcagcgcaagga

SEQ ID NO: 488083 - DNA, 30 bp, Artificial Sequence
  Synthetic oligonucleotide
agcaatgacttagcaaagacagtgcaagga

SEQ ID NO: 488084 - DNA, 30 bp, Artificial Sequence
  Synthetic oligonucleotide
aatttacctcgggtaaattataaagaagga

SEQ ID NO: 488085 - DNA, 30 bp, Artificial Sequence
  Synthetic oligonucleotide
attcagctcgagcacggaatcttagaagga

SEQ ID NO: 488086 - DNA, 30 bp, Artificial Sequence
  Synthetic oligonucleotide
acgcccgtaatatctggcacttacgaagga

SEQ ID NO: 488087 - DNA, 30 bp, Artificial Sequence
  Synthetic oligonucleotide
tctttagcttaccctcttttgggcgaagga

SEQ ID NO: 488088 - DNA, 30 bp, Artificial Sequence
  Synthetic oligonucleotide
ttttttttcacgagcgctttggaggaagga

SEQ ID NO: 488089 - DNA, 30 bp, Artificial Sequence
  Synthetic oligonucleotide
gttcccggtttagggttctcataggaagga

SEQ ID NO: 488090 - DNA, 30 bp, Artificial Sequence
  Synthetic oligonucleotide
ttttaggttttagcagggcaagctgaagga

SEQ ID NO: 488091 - DNA, 30 bp, Artificial Sequence
  Synthetic oligonucleotide
gaactttatcctctgcgtccatctgaagga

SEQ ID NO: 488092 - DNA, 30 bp, Artificial Sequence
  Synthetic oligonucleotide
tgtatgcagcacgccacatgcggtgaagga

SEQ ID NO: 488093 - DNA, 30 bp, Artificial Sequence
  Synthetic oligonucleotide
gattctagcagtatttttttatttgaagga

SEQ ID NO: 488094 - DNA, 30 bp, Artificial Sequence
  Synthetic oligonucleotide
gcttagatgtaaccactgagaatataagga

SEQ ID NO: 488095 - DNA, 30 bp, Artificial Sequence
  Synthetic oligonucleotide
aagtataagtacacagaatcattataagga

SEQ ID NO: 488096 - DNA, 30 bp, Artificial Sequence
  Synthetic oligonucleotide
agttatttatttaggagtattttgtaagga

SEQ ID NO: 488097 - DNA, 30 bp, Artificial Sequence
  Synthetic oligonucleotide
aaccctcgtactcacgcggacggttaagga

SEQ ID NO: 488098 - DNA, 26 bp, Artificial Sequence
  Synthetic oligonucleotide
gcagggaattgggagaaaaaacagga

SEQ ID NO: 488099 - DNA, 30 bp, Artificial Sequence
  Synthetic oligonucleotide
gcgccgctggaccaaccggacttaacagga

SEQ ID NO: 488100 - DNA, 30 bp, Artificial Sequence
  Synthetic oligonucleotide
tgtaacgataacaagatgtatgtgacagga

SEQ ID NO: 488101 - DNA, 30 bp, Artificial Sequence
  Synthetic oligonucleotide
tttccgggacggatcaatcatgacccagga

SEQ ID NO: 488102 - DNA, 30 bp, Artificial Sequence
  Synthetic oligonucleotide
ctctaccgtgtactgcgcgatggagcagga

SEQ ID NO: 488103 - DNA, 30 bp, Artificial Sequence
  Synthetic oligonucleotide
cagaggtgtatcttacgttatatcgcagga

SEQ ID NO: 488104 - DNA, 30 bp, Artificial Sequence
  Synthetic oligonucleotide
gtcccgagaaccctacggttcgaggcagga

SEQ ID NO: 488105 - DNA, 30 bp, Artificial Sequence
  Synthetic oligonucleotide
gtattaggaaatagtgtccaggaggcagga

SEQ ID NO: 488106 - DNA, 30 bp, Artificial Sequence
  Synthetic oligonucleotide
gataaaagcgcgggtgtccaagatgcagga

SEQ ID NO: 488107 - DNA, 30 bp, Artificial Sequence
  Synthetic oligonucleotide
actttaggtggtattgcaacacctgcagga

SEQ ID NO: 488108 - DNA, 30 bp, Artificial Sequence
  Synthetic oligonucleotide
gttagtacgcacacatcggtgcttgcagga

SEQ ID NO: 488109 - DNA, 30 bp, Artificial Sequence
  Synthetic oligonucleotide
gtaaagtttctataaataggtaaatcagga

SEQ ID NO: 488110 - DNA, 30 bp, Artificial Sequence
  Synthetic oligonucleotide
tgtaactcctgtacggtttatcaatcagga

SEQ ID NO: 488111 - DNA, 30 bp, Artificial Sequence
  Synthetic oligonucleotide
actctgtgttgcaaataccgggaatcagga

SEQ ID NO: 488112 - DNA, 30 bp, Artificial Sequence
  Synthetic oligonucleotide
agtagcgcctgtcagaggctgtcatcagga

SEQ ID NO: 488113 - DNA, 30 bp, Artificial Sequence
  Synthetic oligonucleotide
atctaggaatgcacacgccgctgatcagga

SEQ ID NO: 488114 - DNA, 30 bp, Artificial Sequence
  Synthetic oligonucleotide
gcattccaatatcggctatttgcctcagga

SEQ ID NO: 488115 - DNA, 30 bp, Artificial Sequence
  Synthetic oligonucleotide
tgtgtcctacaaacctgtagaggttcagga

SEQ ID NO: 488116 - DNA, 30 bp, Artificial Sequence
  Synthetic oligonucleotide
gtagcccctggctgagattttcaaagagga

SEQ ID NO: 488117 - DNA, 30 bp, Artificial Sequence
  Synthetic oligonucleotide
aatttgatggggctatatagcgatagagga

SEQ ID NO: 488118 - DNA, 30 bp, Artificial Sequence
  Synthetic oligonucleotide
ccatcctctatgcaggcgggcgatagagga

SEQ ID NO: 488119 - DNA, 30 bp, Artificial Sequence
  Synthetic oligonucleotide
ttgtccggagatgttaataactcacgagga

SEQ ID NO: 488120 - DNA, 30 bp, Artificial Sequence
  Synthetic oligonucleotide
agcgttaccgttggcgcgactcaccgagga

SEQ ID NO: 488121 - DNA, 30 bp, Artificial Sequence
  Synthetic oligonucleotide
ccagcttctgtccattagtactagcgagga

SEQ ID NO: 488122 - DNA, 30 bp, Artificial Sequence
  Synthetic oligonucleotide
ttgtgatcaccgccagcggggacgcgagga

SEQ ID NO: 488123 - DNA, 30 bp, Artificial Sequence
  Synthetic oligonucleotide
taaccgataaccttgccatcgcaaggagga

SEQ ID NO: 488124 - DNA, 30 bp, Artificial Sequence
  Synthetic oligonucleotide
cgatggtgatacgagcctgcaaagggagga

SEQ ID NO: 488125 - DNA, 30 bp, Artificial Sequence
  Synthetic oligonucleotide
tacgcaggcagttgcgcttcggagggagga

SEQ ID NO: 488126 - DNA, 40 bp, Artificial Sequence
  Synthetic oligonucleotide
aagataatacattcatagtatggtcggggatcggggagga

SEQ ID NO: 488127 - DNA, 30 bp, Artificial Sequence
  Synthetic oligonucleotide
gccacaggtcttattttctttcaatgagga

SEQ ID NO: 488128 - DNA, 30 bp, Artificial Sequence
  Synthetic oligonucleotide
gtctcttctattagggtatccgtgtgagga

SEQ ID NO: 488129 - DNA, 30 bp, Artificial Sequence
  Synthetic oligonucleotide
ataagggtacgttagttatggttgtgagga

SEQ ID NO: 488130 - DNA, 30 bp, Artificial Sequence
  Synthetic oligonucleotide
gcaacaaacaggttctcggacggttgagga

SEQ ID NO: 488131 - DNA, 30 bp, Artificial Sequence
  Synthetic oligonucleotide
gtcagcagtgtatattaagggttttgagga

SEQ ID NO: 488132 - DNA, 30 bp, Artificial Sequence
  Synthetic oligonucleotide
tgatccccacatgaaggacgtcaaatagga

SEQ ID NO: 488133 - DNA, 30 bp, Artificial Sequence
  Synthetic oligonucleotide
ccgttgtccgattaccatgactcaatagga

SEQ ID NO: 488134 - DNA, 30 bp, Artificial Sequence
  Synthetic oligonucleotide
tgcagcgtatctttccgcttggacatagga

SEQ ID NO: 488135 - DNA, 30 bp, Artificial Sequence
  Synthetic oligonucleotide
ttgccgctggacttattgtgtgacatagga

SEQ ID NO: 488136 - DNA, 30 bp, Artificial Sequence
  Synthetic oligonucleotide
cttgtagttacgggtcatgcttacatagga

SEQ ID NO: 488137 - DNA, 30 bp, Artificial Sequence
  Synthetic oligonucleotide
aaaaggtttattgatcgcgcgcccatagga

SEQ ID NO: 488138 - DNA, 30 bp, Artificial Sequence
  Synthetic oligonucleotide
cgctctttgagctctcttcaatgcatagga

SEQ ID NO: 488139 - DNA, 30 bp, Artificial Sequence
  Synthetic oligonucleotide
gaaattctaacaagtacttgctagatagga

SEQ ID NO: 488140 - DNA, 30 bp, Artificial Sequence
  Synthetic oligonucleotide
tggtacgccatataaatagggtctatagga

SEQ ID NO: 488141 - DNA, 30 bp, Artificial Sequence
  Synthetic oligonucleotide
ttatggagatgtttgtcagaccgtatagga

SEQ ID NO: 488142 - DNA, 30 bp, Artificial Sequence
  Synthetic oligonucleotide
taccgcatactacggggtaaagagctagga

SEQ ID NO: 488143 - DNA, 30 bp, Artificial Sequence
  Synthetic oligonucleotide
tttcgacccttagccaacgcagctctagga

SEQ ID NO: 488144 - DNA, 30 bp, Artificial Sequence
  Synthetic oligonucleotide
gctccttcctccgtgtaccctggtctagga

SEQ ID NO: 488145 - DNA, 30 bp, Artificial Sequence
  Synthetic oligonucleotide
atacctcccagacggctataccttctagga

SEQ ID NO: 488146 - DNA, 30 bp, Artificial Sequence
  Synthetic oligonucleotide
accttctgaggcaggcccacagcagtagga

SEQ ID NO: 488147 - DNA, 30 bp, Artificial Sequence
  Synthetic oligonucleotide
aacactggcagacggcgtgtgagagtagga

SEQ ID NO: 488148 - DNA, 30 bp, Artificial Sequence
  Synthetic oligonucleotide
ggcgcgcgcttagttaagctattagtagga

SEQ ID NO: 488149 - DNA, 30 bp, Artificial Sequence
  Synthetic oligonucleotide
accttcggggcctatctgaatatcgtagga

SEQ ID NO: 488150 - DNA, 30 bp, Artificial Sequence
  Synthetic oligonucleotide
cattcaccttgtcaacgcgatgtcgtagga

SEQ ID NO: 488151 - DNA, 30 bp, Artificial Sequence
  Synthetic oligonucleotide
gttgctatcgcttccgaagcgttcttagga

SEQ ID NO: 488152 - DNA, 30 bp, Artificial Sequence
  Synthetic oligonucleotide
aatcggcacaggacgaggtgggatttagga

SEQ ID NO: 488153 - DNA, 30 bp, Artificial Sequence
  Synthetic oligonucleotide
taacaagtgcaccctaattatactttagga

SEQ ID NO: 488154 - DNA, 30 bp, Artificial Sequence
  Synthetic oligonucleotide
tatttgtacttaagtctctttactttagga

SEQ ID NO: 488155 - DNA, 30 bp, Artificial Sequence
  Synthetic oligonucleotide
gcacgtgttagcggcgagttcccaaacgga

SEQ ID NO: 488156 - DNA, 30 bp, Artificial Sequence
  Synthetic oligonucleotide
ttatcctagaatagaatagagacgaacgga

SEQ ID NO: 488157 - DNA, 30 bp, Artificial Sequence
  Synthetic oligonucleotide
cagatgaaacctaggtaaccggcgaacgga

SEQ ID NO: 488158 - DNA, 30 bp, Artificial Sequence
  Synthetic oligonucleotide
tccgggcggccggataggcgcctgaacgga

SEQ ID NO: 488159 - DNA, 30 bp, Artificial Sequence
  Synthetic oligonucleotide
gcgtcgctctgcctggtgataattaacgga

SEQ ID NO: 488160 - DNA, 30 bp, Artificial Sequence
  Synthetic oligonucleotide
tactcagcgttaaggcttaaacttaacgga

SEQ ID NO: 488161 - DNA, 30 bp, Artificial Sequence
  Synthetic oligonucleotide
gagcttaccgcggacactctgtaacacgga

SEQ ID NO: 488162 - DNA, 30 bp, Artificial Sequence
  Synthetic oligonucleotide
tcgagttgtaattatcaactcacacacgga

SEQ ID NO: 488163 - DNA, 30 bp, Artificial Sequence
  Synthetic oligonucleotide
tgaagcccgtttgaggcccgccaccacgga

SEQ ID NO: 488164 - DNA, 30 bp, Artificial Sequence
  Synthetic oligonucleotide
gttatttgttgaccttataactaccacgga

SEQ ID NO: 488165 - DNA, 30 bp, Artificial Sequence
  Synthetic oligonucleotide
gtgggggtggcttaattgaggacgcacgga

SEQ ID NO: 488166 - DNA, 30 bp, Artificial Sequence
  Synthetic oligonucleotide
gagagagctcggcggaagacaagtcacgga

SEQ ID NO: 488167 - DNA, 30 bp, Artificial Sequence
  Synthetic oligonucleotide
cgcgcgccacaggacgctccgtttcacgga

SEQ ID NO: 488168 - DNA, 30 bp, Artificial Sequence
  Synthetic oligonucleotide
gtctcactaattcttgattggggagacgga

SEQ ID NO: 488169 - DNA, 30 bp, Artificial Sequence
  Synthetic oligonucleotide
ttttggcccattcatctacgtcacgacgga

SEQ ID NO: 488170 - DNA, 30 bp, Artificial Sequence
  Synthetic oligonucleotide
cccggatggtgcgctcaataagcggacgga

SEQ ID NO: 488171 - DNA, 30 bp, Artificial Sequence
  Synthetic oligonucleotide
tttcaaaggaggtgagggactgtggacgga

SEQ ID NO: 488172 - DNA, 30 bp, Artificial Sequence
  Synthetic oligonucleotide
gttcaaggggtttccaatctaaaatacgga

SEQ ID NO: 488173 - DNA, 30 bp, Artificial Sequence
  Synthetic oligonucleotide
tatgcatcatgttaaaacccgagatacgga

SEQ ID NO: 488174 - DNA, 30 bp, Artificial Sequence
  Synthetic oligonucleotide
gaaagtaggcgttcaagtattcgatacgga

SEQ ID NO: 488175 - DNA, 30 bp, Artificial Sequence
  Synthetic oligonucleotide
tggagcacgtaaatttacccgtattacgga

SEQ ID NO: 488176 - DNA, 30 bp, Artificial Sequence
  Synthetic oligonucleotide
atgcggcttttcgccgcatgcggttacgga

SEQ ID NO: 488177 - DNA, 30 bp, Artificial Sequence
  Synthetic oligonucleotide
gggggtttagtctggcggcttctttacgga

SEQ ID NO: 488178 - DNA, 30 bp, Artificial Sequence
  Synthetic oligonucleotide
atatggacactgtcgctccagcaaaccgga

SEQ ID NO: 488179 - DNA, 30 bp, Artificial Sequence
  Synthetic oligonucleotide
acaagccggatggattattgttgaaccgga

SEQ ID NO: 488180 - DNA, 30 bp, Artificial Sequence
  Synthetic oligonucleotide
gattcccggtcagtggtgagcaggaccgga

SEQ ID NO: 488181 - DNA, 30 bp, Artificial Sequence
  Synthetic oligonucleotide
atacacaacgcacggtgtatgcctaccgga

SEQ ID NO: 488182 - DNA, 30 bp, Artificial Sequence
  Synthetic oligonucleotide
tttcaattttcgccgaactagtctaccgga

SEQ ID NO: 488183 - DNA, 30 bp, Artificial Sequence
  Synthetic oligonucleotide
gagctgcaccggtatcaaaaagttaccgga

SEQ ID NO: 488184 - DNA, 30 bp, Artificial Sequence
  Synthetic oligonucleotide
cggcaggagatcggctttatcaaacccgga

SEQ ID NO: 488185 - DNA, 30 bp, Artificial Sequence
  Synthetic oligonucleotide
ttcgactgacgttctctatccacccccgga

SEQ ID NO: 488186 - DNA, 30 bp, Artificial Sequence
  Synthetic oligonucleotide
ttgaagcgtaccggccatcttagccccgga

SEQ ID NO: 488187 - DNA, 30 bp, Artificial Sequence
  Synthetic oligonucleotide
ctcgttaatgaagtatgtaagggccccgga

SEQ ID NO: 488188 - DNA, 30 bp, Artificial Sequence
  Synthetic oligonucleotide
atcacgtacggttaccgggggcatcccgga

SEQ ID NO: 488189 - DNA, 30 bp, Artificial Sequence
  Synthetic oligonucleotide
ggaacttttaaccgctggccggttcccgga

SEQ ID NO: 488190 - DNA, 30 bp, Artificial Sequence
  Synthetic oligonucleotide
tttatggcataggtcgctagcgcagccgga

SEQ ID NO: 488191 - DNA, 30 bp, Artificial Sequence
  Synthetic oligonucleotide
agaacccaggcacattcaaccagagccgga

SEQ ID NO: 488192 - DNA, 30 bp, Artificial Sequence
  Synthetic oligonucleotide
tgcccgtagttgacctagcctgccgccgga

SEQ ID NO: 488193 - DNA, 30 bp, Artificial Sequence
  Synthetic oligonucleotide
tataaaagctggttatattcacaggccgga

SEQ ID NO: 488194 - DNA, 30 bp, Artificial Sequence
  Synthetic oligonucleotide
gatccgttaggctagccagatcaggccgga

SEQ ID NO: 488195 - DNA, 30 bp, Artificial Sequence
  Synthetic oligonucleotide
gttattgcgatacagttccgctgggccgga

SEQ ID NO: 488196 - DNA, 30 bp, Artificial Sequence
  Synthetic oligonucleotide
ttttccacgttatcactggacattgccgga

SEQ ID NO: 488197 - DNA, 30 bp, Artificial Sequence
  Synthetic oligonucleotide
ccggtcacaggtcgcaggggtccctccgga

SEQ ID NO: 488198 - DNA, 30 bp, Artificial Sequence
  Synthetic oligonucleotide
gtagattatcgtgtatgaggacagtccgga

SEQ ID NO: 488199 - DNA, 30 bp, Artificial Sequence
  Synthetic oligonucleotide
ctccatggtcatcagccatggtagtccgga

SEQ ID NO: 488200 - DNA, 30 bp, Artificial Sequence
  Synthetic oligonucleotide
cctcaccgctaatccgggctactgtccgga

SEQ ID NO: 488201 - DNA, 30 bp, Artificial Sequence
  Synthetic oligonucleotide
agactcggggcacatgttatgttgtccgga

SEQ ID NO: 488202 - DNA, 30 bp, Artificial Sequence
  Synthetic oligonucleotide
ttttgtggttcaagtcatggtggttccgga

SEQ ID NO: 488203 - DNA, 30 bp, Artificial Sequence
  Synthetic oligonucleotide
tgttactacttgtcaacacagacaagcgga

SEQ ID NO: 488204 - DNA, 30 bp, Artificial Sequence
  Synthetic oligonucleotide
acgtttttggctaaattcatttgaagcgga

SEQ ID NO: 488205 - DNA, 30 bp, Artificial Sequence
  Synthetic oligonucleotide
gtctcctttgtggtggcacagtagagcgga

SEQ ID NO: 488206 - DNA, 30 bp, Artificial Sequence
  Synthetic oligonucleotide
gtccttcactggggatcttcgtatagcgga

SEQ ID NO: 488207 - DNA, 30 bp, Artificial Sequence
  Synthetic oligonucleotide
cttctatccacaggatttatgactagcgga

SEQ ID NO: 488208 - DNA, 30 bp, Artificial Sequence
  Synthetic oligonucleotide
taaatggagtgtcgaatatgtactagcgga

SEQ ID NO: 488209 - DNA, 30 bp, Artificial Sequence
  Synthetic oligonucleotide
attgataacgcgcgttcatatattagcgga

SEQ ID NO: 488210 - DNA, 30 bp, Artificial Sequence
  Synthetic oligonucleotide
cgtgatgttttggcacactcgtcacgcgga

SEQ ID NO: 488211 - DNA, 30 bp, Artificial Sequence
  Synthetic oligonucleotide
acttatgcaaacccgtgcagtcgacgcgga

SEQ ID NO: 488212 - DNA, 30 bp, Artificial Sequence
  Synthetic oligonucleotide
ccagtgttttttctggcctaggtccgcgga

SEQ ID NO: 488213 - DNA, 30 bp, Artificial Sequence
  Synthetic oligonucleotide
accgcagcaagtggatctgtcatgcgcgga

SEQ ID NO: 488214 - DNA, 30 bp, Artificial Sequence
  Synthetic oligonucleotide
gacccccagcaaatcatggacaatcgcgga

SEQ ID NO: 488215 - DNA, 30 bp, Artificial Sequence
  Synthetic oligonucleotide
gatttgtggtacgtatcaagacgtcgcgga

SEQ ID NO: 488216 - DNA, 30 bp, Artificial Sequence
  Synthetic oligonucleotide
tgataactatacgtcctgcaccccggcgga

SEQ ID NO: 488217 - DNA, 30 bp, Artificial Sequence
  Synthetic oligonucleotide
acaaaacactcgcgtgtaaggatcggcgga

SEQ ID NO: 488218 - DNA, 30 bp, Artificial Sequence
  Synthetic oligonucleotide
ctaggcggggtgattataggacgatgcgga

SEQ ID NO: 488219 - DNA, 30 bp, Artificial Sequence
  Synthetic oligonucleotide
cggcgcgttcacttagtagtgacgtgcgga

SEQ ID NO: 488220 - DNA, 30 bp, Artificial Sequence
  Synthetic oligonucleotide
cgtcggtacatgtagctaaaggattgcgga

SEQ ID NO: 488221 - DNA, 30 bp, Artificial Sequence
  Synthetic oligonucleotide
cacatgtcttcggccccgctgatttgcgga

SEQ ID NO: 488222 - DNA, 30 bp, Artificial Sequence
  Synthetic oligonucleotide
acacattatttttttggtgctggcatcgga

SEQ ID NO: 488223 - DNA, 30 bp, Artificial Sequence
  Synthetic oligonucleotide
cgcggtaatagtccggtccttcctatcgga

SEQ ID NO: 488224 - DNA, 30 bp, Artificial Sequence
  Synthetic oligonucleotide
tcgctgcccaacaaacatttcgaactcgga

SEQ ID NO: 488225 - DNA, 30 bp, Artificial Sequence
  Synthetic oligonucleotide
ctttagaggtcgatgcattccgtactcgga

SEQ ID NO: 488226 - DNA, 30 bp, Artificial Sequence
  Synthetic oligonucleotide
tatcggttttttgaggttggccccctcgga

SEQ ID NO: 488227 - DNA, 30 bp, Artificial Sequence
  Synthetic oligonucleotide
ttataattatgtacctaaaggttcctcgga

SEQ ID NO: 488228 - DNA, 30 bp, Artificial Sequence
  Synthetic oligonucleotide
ccaaacccgatattcacctgagaagtcgga

SEQ ID NO: 488229 - DNA, 29 bp, Artificial Sequence
  Synthetic oligonucleotide
tgcacagtaccccaactagttgcgtcgga

SEQ ID NO: 488230 - DNA, 30 bp, Artificial Sequence
  Synthetic oligonucleotide
tgacagatccgattatatcggcctgtcgga

SEQ ID NO: 488231 - DNA, 30 bp, Artificial Sequence
  Synthetic oligonucleotide
acctctttgggttgtagtgtcggtgtcgga

SEQ ID NO: 488232 - DNA, 30 bp, Artificial Sequence
  Synthetic oligonucleotide
taacacgcacggtgactcgggttattcgga

SEQ ID NO: 488233 - DNA, 30 bp, Artificial Sequence
  Synthetic oligonucleotide
tctatcaatacggccgtaggacgcttcgga

SEQ ID NO: 488234 - DNA, 30 bp, Artificial Sequence
  Synthetic oligonucleotide
agctgagtaggtattttttgtgtcttcgga

SEQ ID NO: 488235 - DNA, 30 bp, Artificial Sequence
  Synthetic oligonucleotide
gcttatccgcgcccagacccggcgttcgga

SEQ ID NO: 488236 - DNA, 30 bp, Artificial Sequence
  Synthetic oligonucleotide
aacaaacattctctctatcgtaggttcgga

SEQ ID NO: 488237 - DNA, 30 bp, Artificial Sequence
  Synthetic oligonucleotide
ctataagtacatcaggtagaaatgttcgga

SEQ ID NO: 488238 - DNA, 30 bp, Artificial Sequence
  Synthetic oligonucleotide
atgttacgcgctccaagcatatatttcgga

SEQ ID NO: 488239 - DNA, 30 bp, Artificial Sequence
  Synthetic oligonucleotide
attcttgggcggtgatcagcccacaaggga

SEQ ID NO: 488240 - DNA, 30 bp, Artificial Sequence
  Synthetic oligonucleotide
gtttccggtcggtcgtagttggttaaggga

SEQ ID NO: 488241 - DNA, 30 bp, Artificial Sequence
  Synthetic oligonucleotide
ttttttttggatggtcacaaatttcaggga

SEQ ID NO: 488242 - DNA, 30 bp, Artificial Sequence
  Synthetic oligonucleotide
cgcctcccccttggctcaaggatggaggga

SEQ ID NO: 488243 - DNA, 30 bp, Artificial Sequence
  Synthetic oligonucleotide
gttaatggaccgatgtcattttttgaggga

SEQ ID NO: 488244 - DNA, 30 bp, Artificial Sequence
  Synthetic oligonucleotide
taagccgacgcaggcgactccatataggga

SEQ ID NO: 488245 - DNA, 30 bp, Artificial Sequence
  Synthetic oligonucleotide
aattcgcaatatttcctgtgtacaacggga

SEQ ID NO: 488246 - DNA, 30 bp, Artificial Sequence
  Synthetic oligonucleotide
gagttcttcgtattctacagtataacggga

SEQ ID NO: 488247 - DNA, 30 bp, Artificial Sequence
  Synthetic oligonucleotide
ctattgactagccggaggggcagcacggga

SEQ ID NO: 488248 - DNA, 30 bp, Artificial Sequence
  Synthetic oligonucleotide
gatagatctactgacgcagaatagacggga

SEQ ID NO: 488249 - DNA, 30 bp, Artificial Sequence
  Synthetic oligonucleotide
gggcacgcgtgtttctaggagggtacggga

SEQ ID NO: 488250 - DNA, 30 bp, Artificial Sequence
  Synthetic oligonucleotide
gacaatagcccacctcaaggtattacggga

SEQ ID NO: 488251 - DNA, 30 bp, Artificial Sequence
  Synthetic oligonucleotide
ttcaaaattgatgacttcattatcccggga

SEQ ID NO: 488252 - DNA, 30 bp, Artificial Sequence
  Synthetic oligonucleotide
ggatcaccgttagcttgagacgagccggga

SEQ ID NO: 488253 - DNA, 30 bp, Artificial Sequence
  Synthetic oligonucleotide
ggtttattctattctatctgcttgccggga

SEQ ID NO: 488254 - DNA, 30 bp, Artificial Sequence
  Synthetic oligonucleotide
tagagtgggatttcgatttcacgtccggga

SEQ ID NO: 488255 - DNA, 30 bp, Artificial Sequence
  Synthetic oligonucleotide
ctcagataaagtcggggcggttgtccggga

SEQ ID NO: 488256 - DNA, 30 bp, Artificial Sequence
  Synthetic oligonucleotide
aatatagtgttttccgcaacacacgcggga

SEQ ID NO: 488257 - DNA, 30 bp, Artificial Sequence
  Synthetic oligonucleotide
ttgaatcgcggatgtcgcgtaatcgcggga

SEQ ID NO: 488258 - DNA, 30 bp, Artificial Sequence
  Synthetic oligonucleotide
cagcctgtcgggttaggtatggtcgcggga

SEQ ID NO: 488259 - DNA, 30 bp, Artificial Sequence
  Synthetic oligonucleotide
tcctcaactggctgggtacggacatcggga

SEQ ID NO: 488260 - DNA, 30 bp, Artificial Sequence
  Synthetic oligonucleotide
ggctcgggctacctctgctgaggatcggga

SEQ ID NO: 488261 - DNA, 30 bp, Artificial Sequence
  Synthetic oligonucleotide
cagtgcgctctataaaaggttatatcggga

SEQ ID NO: 488262 - DNA, 30 bp, Artificial Sequence
  Synthetic oligonucleotide
gcatcccaagccacacgaagatgttcggga

SEQ ID NO: 488263 - DNA, 30 bp, Artificial Sequence
  Synthetic oligonucleotide
gggatggatttaccccggtcctgttcggga

SEQ ID NO: 488264 - DNA, 30 bp, Artificial Sequence
  Synthetic oligonucleotide
tgtctacatttgctataactattttcggga

SEQ ID NO: 488265 - DNA, 30 bp, Artificial Sequence
  Synthetic oligonucleotide
atccccgatcggccagtgaatccaagggga

SEQ ID NO: 488266 - DNA, 30 bp, Artificial Sequence
  Synthetic oligonucleotide
caaattcacgacctttgggtcgagagggga

SEQ ID NO: 488267 - DNA, 30 bp, Artificial Sequence
  Synthetic oligonucleotide
taacgatgatgtcgcccttaggctagggga

SEQ ID NO: 488268 - DNA, 30 bp, Artificial Sequence
  Synthetic oligonucleotide
atcaggtatccgttcggcagggcacgggga

SEQ ID NO: 488269 - DNA, 40 bp, Artificial Sequence
  Synthetic oligonucleotide
aagataatacattcatggtatggtcggggatcggcgggga

SEQ ID NO: 488270 - DNA, 30 bp, Artificial Sequence
  Synthetic oligonucleotide
aggtaacgcagcataagggaaagtcgggga

SEQ ID NO: 488271 - DNA, 30 bp, Artificial Sequence
  Synthetic oligonucleotide
ggaatactgttcgagcggccgcttcgggga

SEQ ID NO: 488272 - DNA, 40 bp, Artificial Sequence
  Synthetic oligonucleotide
aagataatacattaatggtatggtcggggatcgaggggga

SEQ ID NO: 488273 - DNA, 30 bp, Artificial Sequence
  Synthetic oligonucleotide
atttgattcttggtctgagttagcggggga

SEQ ID NO: 488274 - DNA, 30 bp, Artificial Sequence
  Synthetic oligonucleotide
ttagaagaacaaggtcctagttgcggggga

SEQ ID NO: 488275 - DNA, 40 bp, Artificial Sequence
  Synthetic oligonucleotide
aagataatacattcagggtatggtcggggagcggggggga

SEQ ID NO: 488276 - DNA, 40 bp, Artificial Sequence
  Synthetic oligonucleotide
aagataatacattcattgtatggtcggggagcggggggga

SEQ ID NO: 488277 - DNA, 40 bp, Artificial Sequence
  Synthetic oligonucleotide
aagataatccattcatggtatggtaggggatcggggggga

SEQ ID NO: 488278 - DNA, 40 bp, Artificial Sequence
  Synthetic oligonucleotide
aagataatacagtcatggtatagtcggggatcggggggga

SEQ ID NO: 488279 - DNA, 40 bp, Artificial Sequence
  Synthetic oligonucleotide
aagataatccattcagggtatggtcggggatcggggggga

SEQ ID NO: 488280 - DNA, 40 bp, Artificial Sequence
  Synthetic oligonucleotide
aagataataaattaatggtatggtcggggatcggggggga

SEQ ID NO: 488281 - DNA, 39 bp, Artificial Sequence
  Synthetic oligonucleotide
aagataatacattcatgtatggtcggggatcggggggga

SEQ ID NO: 488282 - DNA, 40 bp, Artificial Sequence
  Synthetic oligonucleotide
aagataagacattcatgttatggtcggggatcggggggga

SEQ ID NO: 488283 - DNA, 40 bp, Artificial Sequence
  Synthetic oligonucleotide
aagataatacattcattttatggtcggggatcggggggga

SEQ ID NO: 488284 - DNA, 40 bp, Artificial Sequence
  Synthetic oligonucleotide
aagataatacattcatgttatggtcgtggatcggggggga

SEQ ID NO: 488285 - DNA, 40 bp, Artificial Sequence
  Synthetic oligonucleotide
aatataatacattcatggtatggtcggtgatcggggggga

SEQ ID NO: 488286 - DNA, 40 bp, Artificial Sequence
  Synthetic oligonucleotide
aagataatccattcatggtatggtcggtgatcggggggga

SEQ ID NO: 488287 - DNA, 40 bp, Artificial Sequence
  Synthetic oligonucleotide
aagataatacattcatggtatgttcggtgatcggggggga

SEQ ID NO: 488288 - DNA, 40 bp, Artificial Sequence
  Synthetic oligonucleotide
aagataatccattcatggtatggtcggggttcggggggga

SEQ ID NO: 488289 - DNA, 30 bp, Artificial Sequence
  Synthetic oligonucleotide
gcatcctctaccagcacgacagttggggga

SEQ ID NO: 488290 - DNA, 30 bp, Artificial Sequence
  Synthetic oligonucleotide
ggaggcacatcatcatatagttttggggga

SEQ ID NO: 488291 - DNA, 30 bp, Artificial Sequence
  Synthetic oligonucleotide
attgcggtattcgagcggtattgatgggga

SEQ ID NO: 488292 - DNA, 30 bp, Artificial Sequence
  Synthetic oligonucleotide
atgcaccctgtactattttatcactgggga

SEQ ID NO: 488293 - DNA, 30 bp, Artificial Sequence
  Synthetic oligonucleotide
ggcatgtaggggtgacttctttattgggga

SEQ ID NO: 488294 - DNA, 30 bp, Artificial Sequence
  Synthetic oligonucleotide
actaacttatgatattaagtgtaaatggga

SEQ ID NO: 488295 - DNA, 30 bp, Artificial Sequence
  Synthetic oligonucleotide
tcctgttagaattatactgaacgaatggga

SEQ ID NO: 488296 - DNA, 30 bp, Artificial Sequence
  Synthetic oligonucleotide
gagagggggcaagggagtgagcgaatggga

SEQ ID NO: 488297 - DNA, 30 bp, Artificial Sequence
  Synthetic oligonucleotide
ttctgtcgtatcgaaaattgacacatggga

SEQ ID NO: 488298 - DNA, 30 bp, Artificial Sequence
  Synthetic oligonucleotide
tgtctttatatactgatacttgacatggga

SEQ ID NO: 488299 - DNA, 30 bp, Artificial Sequence
  Synthetic oligonucleotide
gttgtttattataagattaattacatggga

SEQ ID NO: 488300 - DNA, 30 bp, Artificial Sequence
  Synthetic oligonucleotide
ccgtcttaatatcggtccatacggatggga

SEQ ID NO: 488301 - DNA, 30 bp, Artificial Sequence
  Synthetic oligonucleotide
atttccttgtgacttagtgatcggatggga

SEQ ID NO: 488302 - DNA, 30 bp, Artificial Sequence
  Synthetic oligonucleotide
gatgagaatgatcgtagcctccgtatggga

SEQ ID NO: 488303 - DNA, 30 bp, Artificial Sequence
  Synthetic oligonucleotide
cgcctatatagcatctgcccgtttatggga

SEQ ID NO: 488304 - DNA, 30 bp, Artificial Sequence
  Synthetic oligonucleotide
ttcttcctcttccagggacacagactggga

SEQ ID NO: 488305 - DNA, 30 bp, Artificial Sequence
  Synthetic oligonucleotide
tattgtcagatgtacgcatgtctcctggga

SEQ ID NO: 488306 - DNA, 30 bp, Artificial Sequence
  Synthetic oligonucleotide
gtctagttcattccgtgcaagatgctggga

SEQ ID NO: 488307 - DNA, 30 bp, Artificial Sequence
  Synthetic oligonucleotide
ggtcccatttaaggtaaagaacttctggga

SEQ ID NO: 488308 - DNA, 29 bp, Artificial Sequence
  Synthetic oligonucleotide
tgtagttctggaccacccaggttctggga

SEQ ID NO: 488309 - DNA, 31 bp, Artificial Sequence
  Synthetic oligonucleotide
gcacccagttattggtgagttatttctggga

SEQ ID NO: 488310 - DNA, 30 bp, Artificial Sequence
  Synthetic oligonucleotide
cgcagtcagagggcgtgggcggtggtggga

SEQ ID NO: 488311 - DNA, 30 bp, Artificial Sequence
  Synthetic oligonucleotide
attgtactttcacttttagtgtatgtggga

SEQ ID NO: 488312 - DNA, 30 bp, Artificial Sequence
  Synthetic oligonucleotide
atacagctgatcaccctgtggttattggga

SEQ ID NO: 488313 - DNA, 30 bp, Artificial Sequence
  Synthetic oligonucleotide
atttagaagatatatgtcagggacttggga

SEQ ID NO: 488314 - DNA, 30 bp, Artificial Sequence
  Synthetic oligonucleotide
ggtctttgttataatcagcggtctttggga

SEQ ID NO: 488315 - DNA, 30 bp, Artificial Sequence
  Synthetic oligonucleotide
tggcgcgtgtatagagtatttctcaatgga

SEQ ID NO: 488316 - DNA, 30 bp, Artificial Sequence
  Synthetic oligonucleotide
gaggtttgacgattttaacatgagaatgga

SEQ ID NO: 488317 - DNA, 30 bp, Artificial Sequence
  Synthetic oligonucleotide
acacacaggctacggtattccacgaatgga

SEQ ID NO: 488318 - DNA, 30 bp, Artificial Sequence
  Synthetic oligonucleotide
ttctaccttaggctcgcaggatcgaatgga

SEQ ID NO: 488319 - DNA, 30 bp, Artificial Sequence
  Synthetic oligonucleotide
gagttcgggcgttttcttttttggaatgga

SEQ ID NO: 488320 - DNA, 30 bp, Artificial Sequence
  Synthetic oligonucleotide
agtagtattatgcacggggcagataatgga

SEQ ID NO: 488321 - DNA, 30 bp, Artificial Sequence
  Synthetic oligonucleotide
tggactctaattgctaaacggactaatgga

SEQ ID NO: 488322 - DNA, 30 bp, Artificial Sequence
  Synthetic oligonucleotide
gtttctgaatatcctcagtacattaatgga

SEQ ID NO: 488323 - DNA, 30 bp, Artificial Sequence
  Synthetic oligonucleotide
cactggtttataaccgcaggtaaacatgga

SEQ ID NO: 488324 - DNA, 30 bp, Artificial Sequence
  Synthetic oligonucleotide
gtccccggcagtagacgcataccacatgga

SEQ ID NO: 488325 - DNA, 30 bp, Artificial Sequence
  Synthetic oligonucleotide
tagatactttagatgagtctaagacatgga

SEQ ID NO: 488326 - DNA, 30 bp, Artificial Sequence
  Synthetic oligonucleotide
cagcatccttttcaaacggttatccatgga

SEQ ID NO: 488327 - DNA, 30 bp, Artificial Sequence
  Synthetic oligonucleotide
tgtgaggaatgcgcaaccgctgctcatgga

SEQ ID NO: 488328 - DNA, 30 bp, Artificial Sequence
  Synthetic oligonucleotide
ggccccgcttttgatccccgggttcatgga

SEQ ID NO: 488329 - DNA, 30 bp, Artificial Sequence
  Synthetic oligonucleotide
gatccagaaatgttagttcccatagatgga

SEQ ID NO: 488330 - DNA, 30 bp, Artificial Sequence
  Synthetic oligonucleotide
ggttgtacggctatgccattattagatgga

SEQ ID NO: 488331 - DNA, 30 bp, Artificial Sequence
  Synthetic oligonucleotide
gcttctctttcgctgtcaagacacgatgga

SEQ ID NO: 488332 - DNA, 30 bp, Artificial Sequence
  Synthetic oligonucleotide
ttgtcgtactgatcgtggaaccacgatgga

SEQ ID NO: 488333 - DNA, 30 bp, Artificial Sequence
  Synthetic oligonucleotide
tttggtgaatctttacacgggtacgatgga

SEQ ID NO: 488334 - DNA, 30 bp, Artificial Sequence
  Synthetic oligonucleotide
gcacccacgtattttattaccccggatgga

SEQ ID NO: 488335 - DNA, 30 bp, Artificial Sequence
  Synthetic oligonucleotide
tggaccccaattattttgccatatgatgga

SEQ ID NO: 488336 - DNA, 30 bp, Artificial Sequence
  Synthetic oligonucleotide
atgaatctgttgttagaatggggtgatgga

SEQ ID NO: 488337 - DNA, 30 bp, Artificial Sequence
  Synthetic oligonucleotide
ttaaaaatgagtgggtagtccacatatgga

SEQ ID NO: 488338 - DNA, 30 bp, Artificial Sequence
  Synthetic oligonucleotide
aaatcttaattcactaagaaggtctatgga

SEQ ID NO: 488339 - DNA, 30 bp, Artificial Sequence
  Synthetic oligonucleotide
ttagccaaaatcttgattctggtctatgga

SEQ ID NO: 488340 - DNA, 30 bp, Artificial Sequence
  Synthetic oligonucleotide
gtttaatggaatatctaggacgcgtatgga

SEQ ID NO: 488341 - DNA, 30 bp, Artificial Sequence
  Synthetic oligonucleotide
tatcaaagaagtgcggaaacgatgtatgga

SEQ ID NO: 488342 - DNA, 30 bp, Artificial Sequence
  Synthetic oligonucleotide
ttcacccataggagtaccggtgtgtatgga

SEQ ID NO: 488343 - DNA, 30 bp, Artificial Sequence
  Synthetic oligonucleotide
tcacctttaatcataccacttcgttatgga

SEQ ID NO: 488344 - DNA, 30 bp, Artificial Sequence
  Synthetic oligonucleotide
ttgtaattacgcacattaacgtacactgga

SEQ ID NO: 488345 - DNA, 30 bp, Artificial Sequence
  Synthetic oligonucleotide
catttaaggccttcaatctgccgcactgga

SEQ ID NO: 488346 - DNA, 30 bp, Artificial Sequence
  Synthetic oligonucleotide
ctatgtgccacgtccagacttcgcactgga

SEQ ID NO: 488347 - DNA, 30 bp, Artificial Sequence
  Synthetic oligonucleotide
agatgcgggctgtcaggttggattactgga

SEQ ID NO: 488348 - DNA, 30 bp, Artificial Sequence
  Synthetic oligonucleotide
ggccgtgtgcatccatggacttttactgga

SEQ ID NO: 488349 - DNA, 30 bp, Artificial Sequence
  Synthetic oligonucleotide
caaggacgcagtgaggctgaagcccctgga

SEQ ID NO: 488350 - DNA, 30 bp, Artificial Sequence
  Synthetic oligonucleotide
gacacagcttgtcgtagttccagccctgga

SEQ ID NO: 488351 - DNA, 30 bp, Artificial Sequence
  Synthetic oligonucleotide
agtgagcatcttgtgacagttcgccctgga

SEQ ID NO: 488352 - DNA, 30 bp, Artificial Sequence
  Synthetic oligonucleotide
ctgattctgaccggcgctagttcgcctgga

SEQ ID NO: 488353 - DNA, 31 bp, Artificial Sequence
  Synthetic oligonucleotide
ggcttttggattatcaagcctagatcctgga

SEQ ID NO: 488354 - DNA, 30 bp, Artificial Sequence
  Synthetic oligonucleotide
aggtagtgcttacttttcaattatcctgga

SEQ ID NO: 488355 - DNA, 30 bp, Artificial Sequence
  Synthetic oligonucleotide
gtggttaaacccgagtcgtggtgtcctgga

SEQ ID NO: 488356 - DNA, 30 bp, Artificial Sequence
  Synthetic oligonucleotide
ttctcagccatcctttaggtacttgctgga

SEQ ID NO: 488357 - DNA, 30 bp, Artificial Sequence
  Synthetic oligonucleotide
tggcgacatccatgccgtcactttgctgga

SEQ ID NO: 488358 - DNA, 30 bp, Artificial Sequence
  Synthetic oligonucleotide
tatactgatattcgacggttcttatctgga

SEQ ID NO: 488359 - DNA, 30 bp, Artificial Sequence
  Synthetic oligonucleotide
gactaatcagatcttgtattttactctgga

SEQ ID NO: 488360 - DNA, 30 bp, Artificial Sequence
  Synthetic oligonucleotide
agggccgctagacgcgcaccacgctctgga

SEQ ID NO: 488361 - DNA, 30 bp, Artificial Sequence
  Synthetic oligonucleotide
ctgcagcagttagtacacgtttgctctgga

SEQ ID NO: 488362 - DNA, 30 bp, Artificial Sequence
  Synthetic oligonucleotide
ttctttccaagcggacactggctctctgga

SEQ ID NO: 488363 - DNA, 30 bp, Artificial Sequence
  Synthetic oligonucleotide
aattggatctggactggggcggtctctgga

SEQ ID NO: 488364 - DNA, 30 bp, Artificial Sequence
  Synthetic oligonucleotide
gtactaacctaaggcgagtagcggtctgga

SEQ ID NO: 488365 - DNA, 30 bp, Artificial Sequence
  Synthetic oligonucleotide
cgaatcccggggcgtcgctcgttttctgga

SEQ ID NO: 488366 - DNA, 30 bp, Artificial Sequence
  Synthetic oligonucleotide
cggcaacttgaacgctaccacgcaagtgga

SEQ ID NO: 488367 - DNA, 30 bp, Artificial Sequence
  Synthetic oligonucleotide
cgcttggtatcaaactttgcacggagtgga

SEQ ID NO: 488368 - DNA, 30 bp, Artificial Sequence
  Synthetic oligonucleotide
ctatagatttatgtccaagttgttagtgga

SEQ ID NO: 488369 - DNA, 30 bp, Artificial Sequence
  Synthetic oligonucleotide
gagtctttgggttttgtttcgtttagtgga

SEQ ID NO: 488370 - DNA, 30 bp, Artificial Sequence
  Synthetic oligonucleotide
acgggccgccagcccagggagtgacgtgga

SEQ ID NO: 488371 - DNA, 30 bp, Artificial Sequence
  Synthetic oligonucleotide
tccatcttccctgatcagcaggagcgtgga

SEQ ID NO: 488372 - DNA, 30 bp, Artificial Sequence
  Synthetic oligonucleotide
tttaacggagtcaggaaagatgtgcgtgga

SEQ ID NO: 488373 - DNA, 30 bp, Artificial Sequence
  Synthetic oligonucleotide
attagtggacacccctccatggctcgtgga

SEQ ID NO: 488374 - DNA, 30 bp, Artificial Sequence
  Synthetic oligonucleotide
acgggaaattcccgtcggcgacttcgtgga

SEQ ID NO: 488375 - DNA, 30 bp, Artificial Sequence
  Synthetic oligonucleotide
tgatattagaagtctatctattacggtgga

SEQ ID NO: 488376 - DNA, 30 bp, Artificial Sequence
  Synthetic oligonucleotide
atttttggctgtataatacataatggtgga

SEQ ID NO: 488377 - DNA, 30 bp, Artificial Sequence
  Synthetic oligonucleotide
catgcggaccgcgaccatccgcatggtgga

SEQ ID NO: 488378 - DNA, 30 bp, Artificial Sequence
  Synthetic oligonucleotide
ttcctcgactaatttattctacttggtgga

SEQ ID NO: 488379 - DNA, 30 bp, Artificial Sequence
  Synthetic oligonucleotide
tattcaaatgttatttcaataaagtgtgga

SEQ ID NO: 488380 - DNA, 30 bp, Artificial Sequence
  Synthetic oligonucleotide
tcttagaggagctcccacgtctagtgtgga

SEQ ID NO: 488381 - DNA, 30 bp, Artificial Sequence
  Synthetic oligonucleotide
atccgttttaggcttgttacgaattgtgga

SEQ ID NO: 488382 - DNA, 30 bp, Artificial Sequence
  Synthetic oligonucleotide
cgcgcatatgtcgcgacgcgttgttgtgga

SEQ ID NO: 488383 - DNA, 30 bp, Artificial Sequence
  Synthetic oligonucleotide
taggtgtgttgaagcagcgtagtttgtgga

SEQ ID NO: 488384 - DNA, 30 bp, Artificial Sequence
  Synthetic oligonucleotide
caataaggtcaagtcaggctgaaaattgga

SEQ ID NO: 488385 - DNA, 30 bp, Artificial Sequence
  Synthetic oligonucleotide
atgatctttggtgacggtgctcaaattgga

SEQ ID NO: 488386 - DNA, 30 bp, Artificial Sequence
  Synthetic oligonucleotide
atcattgacctggagcagtaggaaattgga

SEQ ID NO: 488387 - DNA, 30 bp, Artificial Sequence
  Synthetic oligonucleotide
aaaaagcccacctggtgtttcagaattgga

SEQ ID NO: 488388 - DNA, 30 bp, Artificial Sequence
  Synthetic oligonucleotide
tattcagtatagtggaatcttaccattgga

SEQ ID NO: 488389 - DNA, 30 bp, Artificial Sequence
  Synthetic oligonucleotide
cctcatggatgtttcgtggtatgcattgga

SEQ ID NO: 488390 - DNA, 30 bp, Artificial Sequence
  Synthetic oligonucleotide
tttaagtttaagcctccatgggttattgga

SEQ ID NO: 488391 - DNA, 30 bp, Artificial Sequence
  Synthetic oligonucleotide
tcaccactcccccgggaatatcgacttgga

SEQ ID NO: 488392 - DNA, 30 bp, Artificial Sequence
  Synthetic oligonucleotide
tcgagtattgatcggtctcgcggacttgga

SEQ ID NO: 488393 - DNA, 30 bp, Artificial Sequence
  Synthetic oligonucleotide
tttgaatcctaattggcttcttgacttgga

SEQ ID NO: 488394 - DNA, 30 bp, Artificial Sequence
  Synthetic oligonucleotide
ttagattggcttctttaccttccccttgga

SEQ ID NO: 488395 - DNA, 30 bp, Artificial Sequence
  Synthetic oligonucleotide
tgtacgggggtcctgccccctatccttgga

SEQ ID NO: 488396 - DNA, 30 bp, Artificial Sequence
  Synthetic oligonucleotide
gccgatagccgtttatacgcattccttgga

SEQ ID NO: 488397 - DNA, 29 bp, Artificial Sequence
  Synthetic oligonucleotide
gagcgtttgatcccctcgaaacgcttgga

SEQ ID NO: 488398 - DNA, 30 bp, Artificial Sequence
  Synthetic oligonucleotide
gaaatcaatgtcagtgattatatgcttgga

SEQ ID NO: 488399 - DNA, 30 bp, Artificial Sequence
  Synthetic oligonucleotide
attggtcaagggagttcatgaccagttgga

SEQ ID NO: 488400 - DNA, 30 bp, Artificial Sequence
  Synthetic oligonucleotide
caaccggtgtcgagccactcggcagttgga

SEQ ID NO: 488401 - DNA, 30 bp, Artificial Sequence
  Synthetic oligonucleotide
ccgctgtgtagttgtcttacaatagttgga

SEQ ID NO: 488402 - DNA, 30 bp, Artificial Sequence
  Synthetic oligonucleotide
agacatacgcaggcctacgataacgttgga

SEQ ID NO: 488403 - DNA, 30 bp, Artificial Sequence
  Synthetic oligonucleotide
acggagccccccaatggtccggacgttgga

SEQ ID NO: 488404 - DNA, 30 bp, Artificial Sequence
  Synthetic oligonucleotide
aacgttccgcgatgcggttgccgtgttgga

SEQ ID NO: 488405 - DNA, 30 bp, Artificial Sequence
  Synthetic oligonucleotide
attcgactgcagcagaacataatatttgga

SEQ ID NO: 488406 - DNA, 30 bp, Artificial Sequence
  Synthetic oligonucleotide
tgcttatgacggtcgcaggaggcctttgga

SEQ ID NO: 488407 - DNA, 30 bp, Artificial Sequence
  Synthetic oligonucleotide
gctcccatggtcatcgtataggcctttgga

SEQ ID NO: 488408 - DNA, 30 bp, Artificial Sequence
  Synthetic oligonucleotide
gacatcacagagcgttttattagctttgga

SEQ ID NO: 488409 - DNA, 30 bp, Artificial Sequence
  Synthetic oligonucleotide
aatctgctattattacgtgtactctttgga

SEQ ID NO: 488410 - DNA, 30 bp, Artificial Sequence
  Synthetic oligonucleotide
cttgagtgtggtctcgtcagttgaaaatga

SEQ ID NO: 488411 - DNA, 30 bp, Artificial Sequence
  Synthetic oligonucleotide
ccaaagagttgcctgatcgtactaaaatga

SEQ ID NO: 488412 - DNA, 30 bp, Artificial Sequence
  Synthetic oligonucleotide
gtatcaaatgggcctgtaggattaaaatga

SEQ ID NO: 488413 - DNA, 30 bp, Artificial Sequence
  Synthetic oligonucleotide
ctgatgttggcgtacatttctatcaaatga

SEQ ID NO: 488414 - DNA, 30 bp, Artificial Sequence
  Synthetic oligonucleotide
gatcgtacgctagggtagacgcagaaatga

SEQ ID NO: 488415 - DNA, 30 bp, Artificial Sequence
  Synthetic oligonucleotide
tattctaggggacatttcctctggaaatga

SEQ ID NO: 488416 - DNA, 30 bp, Artificial Sequence
  Synthetic oligonucleotide
ttttgtcgaaggtaataccaaaataaatga

SEQ ID NO: 488417 - DNA, 30 bp, Artificial Sequence
  Synthetic oligonucleotide
aatttgtggggagcgggacgttgtaaatga

SEQ ID NO: 488418 - DNA, 30 bp, Artificial Sequence
  Synthetic oligonucleotide
gaccaatttgaatccatcggctaacaatga

SEQ ID NO: 488419 - DNA, 30 bp, Artificial Sequence
  Synthetic oligonucleotide
gatacagctaattcgttgctggagcaatga

SEQ ID NO: 488420 - DNA, 30 bp, Artificial Sequence
  Synthetic oligonucleotide
acctagccataaaggcgatggaatcaatga

SEQ ID NO: 488421 - DNA, 30 bp, Artificial Sequence
  Synthetic oligonucleotide
ggatcatgcggctggagcatcagtcaatga

SEQ ID NO: 488422 - DNA, 30 bp, Artificial Sequence
  Synthetic oligonucleotide
taatgggcgttaaatttagggccagaatga

SEQ ID NO: 488423 - DNA, 30 bp, Artificial Sequence
  Synthetic oligonucleotide
atctcataggcaatcgcttgaatagaatga

SEQ ID NO: 488424 - DNA, 30 bp, Artificial Sequence
  Synthetic oligonucleotide
ctatagtggactcatctttgcctagaatga

SEQ ID NO: 488425 - DNA, 30 bp, Artificial Sequence
  Synthetic oligonucleotide
cgcattatcagatcattgaataatgaatga

SEQ ID NO: 488426 - DNA, 30 bp, Artificial Sequence
  Synthetic oligonucleotide
acatacaaggtttcttctgactgtgaatga

SEQ ID NO: 488427 - DNA, 30 bp, Artificial Sequence
  Synthetic oligonucleotide
ggtatattctacgcaaccaattactaatga

SEQ ID NO: 488428 - DNA, 30 bp, Artificial Sequence
  Synthetic oligonucleotide
ctctactgattatctgtaaaaccgtaatga

SEQ ID NO: 488429 - DNA, 30 bp, Artificial Sequence
  Synthetic oligonucleotide
gtgtgcaacgcggctcgcaatgcgtaatga

SEQ ID NO: 488430 - DNA, 30 bp, Artificial Sequence
  Synthetic oligonucleotide
agcattctgatttcataggtcacttaatga

SEQ ID NO: 488431 - DNA, 31 bp, Artificial Sequence
  Synthetic oligonucleotide
gtaatgtctgctatgggcgaagcgttaatga

SEQ ID NO: 488432 - DNA, 30 bp, Artificial Sequence
  Synthetic oligonucleotide
gttcatgctctctatagatccgaaacatga

SEQ ID NO: 488433 - DNA, 30 bp, Artificial Sequence
  Synthetic oligonucleotide
ctgtgatcgggactgcatcgtaaagcatga

SEQ ID NO: 488434 - DNA, 30 bp, Artificial Sequence
  Synthetic oligonucleotide
aaaggctgaactaggttctgtgcagcatga

SEQ ID NO: 488435 - DNA, 30 bp, Artificial Sequence
  Synthetic oligonucleotide
gtttcaaacactgcgagcaacctagcatga

SEQ ID NO: 488436 - DNA, 30 bp, Artificial Sequence
  Synthetic oligonucleotide
ttatagactggtagtatcagcctagcatga

SEQ ID NO: 488437 - DNA, 30 bp, Artificial Sequence
  Synthetic oligonucleotide
gaatgcaatgcatctagtctggtagcatga

SEQ ID NO: 488438 - DNA, 30 bp, Artificial Sequence
  Synthetic oligonucleotide
gctatcttagggaagatatataacgcatga

SEQ ID NO: 488439 - DNA, 30 bp, Artificial Sequence
  Synthetic oligonucleotide
gcaaacgctctgtgaaaactgagcgcatga

SEQ ID NO: 488440 - DNA, 30 bp, Artificial Sequence
  Synthetic oligonucleotide
ttatttccgcgtaggcacataagggcatga

SEQ ID NO: 488441 - DNA, 30 bp, Artificial Sequence
  Synthetic oligonucleotide
aagcaggccgtaagttcggccgctgcatga

SEQ ID NO: 488442 - DNA, 30 bp, Artificial Sequence
  Synthetic oligonucleotide
taatcctcagtcccaaatggagcatcatga

SEQ ID NO: 488443 - DNA, 30 bp, Artificial Sequence
  Synthetic oligonucleotide
aatattcgtattgaggttgtcgcatcatga

SEQ ID NO: 488444 - DNA, 30 bp, Artificial Sequence
  Synthetic oligonucleotide
gtacggccccatgctatgtgttcatcatga

SEQ ID NO: 488445 - DNA, 30 bp, Artificial Sequence
  Synthetic oligonucleotide
gttcgctggcctacggttgcctcctcatga

SEQ ID NO: 488446 - DNA, 30 bp, Artificial Sequence
  Synthetic oligonucleotide
ctacattcgcgtttaaaacgtcattcatga

SEQ ID NO: 488447 - DNA, 30 bp, Artificial Sequence
  Synthetic oligonucleotide
acttcatgggttcgcatacgcgtttcatga

SEQ ID NO: 488448 - DNA, 30 bp, Artificial Sequence
  Synthetic oligonucleotide
tccgcggcagaaacgacctctgtttcatga

SEQ ID NO: 488449 - DNA, 30 bp, Artificial Sequence
  Synthetic oligonucleotide
ctgaatttagcatttacgaaattttcatga

SEQ ID NO: 488450 - DNA, 29 bp, Artificial Sequence
  Synthetic oligonucleotide
tagcccccccccttggaccgggaagatga

SEQ ID NO: 488451 - DNA, 31 bp, Artificial Sequence
  Synthetic oligonucleotide
tcattgcatttcggcagtacaccatagatga

SEQ ID NO: 488452 - DNA, 30 bp, Artificial Sequence
  Synthetic oligonucleotide
gagccggctgtagtctgatagtatagatga

SEQ ID NO: 488453 - DNA, 30 bp, Artificial Sequence
  Synthetic oligonucleotide
ttcatgtcagggagccacattggtagatga

SEQ ID NO: 488454 - DNA, 30 bp, Artificial Sequence
  Synthetic oligonucleotide
tgcgtaacgcacaactttcggcgacgatga

SEQ ID NO: 488455 - DNA, 30 bp, Artificial Sequence
  Synthetic oligonucleotide
gcacctctgcataattagaatacgcgatga

SEQ ID NO: 488456 - DNA, 30 bp, Artificial Sequence
  Synthetic oligonucleotide
attggattactcacagatataatgcgatga

SEQ ID NO: 488457 - DNA, 30 bp, Artificial Sequence
  Synthetic oligonucleotide
ctccgcctggtcaaggcgtggagaggatga

SEQ ID NO: 488458 - DNA, 30 bp, Artificial Sequence
  Synthetic oligonucleotide
ttggacgatgtatccacctctcccggatga

SEQ ID NO: 488459 - DNA, 30 bp, Artificial Sequence
  Synthetic oligonucleotide
gcgcacgcagcgccttgcgtcaatggatga

SEQ ID NO: 488460 - DNA, 30 bp, Artificial Sequence
  Synthetic oligonucleotide
gagccatggtcgacagatctttcgtgatga

SEQ ID NO: 488461 - DNA, 30 bp, Artificial Sequence
  Synthetic oligonucleotide
gaaatatgcactggatctgtctcttgatga

SEQ ID NO: 488462 - DNA, 30 bp, Artificial Sequence
  Synthetic oligonucleotide
tgtcgctattctggcccgttattttgatga

SEQ ID NO: 488463 - DNA, 30 bp, Artificial Sequence
  Synthetic oligonucleotide
attgtagggatgtgacttcttttttgatga

SEQ ID NO: 488464 - DNA, 30 bp, Artificial Sequence
  Synthetic oligonucleotide
gggatttttacatcgaggcttaaaatatga

SEQ ID NO: 488465 - DNA, 30 bp, Artificial Sequence
  Synthetic oligonucleotide
aaaaattcacgcggggttaaccaaatatga

SEQ ID NO: 488466 - DNA, 30 bp, Artificial Sequence
  Synthetic oligonucleotide
aagacagcctgccggggatttcgaatatga

SEQ ID NO: 488467 - DNA, 30 bp, Artificial Sequence
  Synthetic oligonucleotide
ttcgagtcttgcaggtactttggaatatga

SEQ ID NO: 488468 - DNA, 30 bp, Artificial Sequence
  Synthetic oligonucleotide
cgcatatgcacatggtttcaccccatatga

SEQ ID NO: 488469 - DNA, 30 bp, Artificial Sequence
  Synthetic oligonucleotide
ccgtaatgatcgggcacggcatgcatatga

SEQ ID NO: 488470 - DNA, 30 bp, Artificial Sequence
  Synthetic oligonucleotide
gctatgttgagtcaatacaaacggatatga

SEQ ID NO: 488471 - DNA, 30 bp, Artificial Sequence
  Synthetic oligonucleotide
tctagtgtgttataacgtagcagtatatga

SEQ ID NO: 488472 - DNA, 30 bp, Artificial Sequence
  Synthetic oligonucleotide
tcgaccttagattatatcgcaattatatga

SEQ ID NO: 488473 - DNA, 30 bp, Artificial Sequence
  Synthetic oligonucleotide
actcccccgacgatcgtagtgattatatga

SEQ ID NO: 488474 - DNA, 30 bp, Artificial Sequence
  Synthetic oligonucleotide
ggttctacttatagctagggttacctatga

SEQ ID NO: 488475 - DNA, 30 bp, Artificial Sequence
  Synthetic oligonucleotide
ttttcagtgcttttatctagtttgctatga

SEQ ID NO: 488476 - DNA, 30 bp, Artificial Sequence
  Synthetic oligonucleotide
aagttcacatagtccctagcaattctatga

SEQ ID NO: 488477 - DNA, 30 bp, Artificial Sequence
  Synthetic oligonucleotide
agttctaacggtccatgccgtcttctatga

SEQ ID NO: 488478 - DNA, 30 bp, Artificial Sequence
  Synthetic oligonucleotide
tgtgccattacgccggagatcacagtatga

SEQ ID NO: 488479 - DNA, 30 bp, Artificial Sequence
  Synthetic oligonucleotide
ctatcaagggcaaatggttgtgcagtatga

SEQ ID NO: 488480 - DNA, 30 bp, Artificial Sequence
  Synthetic oligonucleotide
tttccttcgataagcatgtaactcgtatga

SEQ ID NO: 488481 - DNA, 30 bp, Artificial Sequence
  Synthetic oligonucleotide
aaagtcatcaatagatctattgctgtatga

SEQ ID NO: 488482 - DNA, 30 bp, Artificial Sequence
  Synthetic oligonucleotide
atattatcaaactctttaaggtttgtatga

SEQ ID NO: 488483 - DNA, 30 bp, Artificial Sequence
  Synthetic oligonucleotide
attcgtacctttaaggtaaatcaattatga

SEQ ID NO: 488484 - DNA, 30 bp, Artificial Sequence
  Synthetic oligonucleotide
tacatcgcagtgtatatagaatcattatga

SEQ ID NO: 488485 - DNA, 30 bp, Artificial Sequence
  Synthetic oligonucleotide
atcgtatcgggtacgaagcattgattatga

SEQ ID NO: 488486 - DNA, 30 bp, Artificial Sequence
  Synthetic oligonucleotide
cagactaaagtaaatagaagtcacttatga

SEQ ID NO: 488487 - DNA, 30 bp, Artificial Sequence
  Synthetic oligonucleotide
tgtaaatgcccgtatgtttagttcttatga

SEQ ID NO: 488488 - DNA, 30 bp, Artificial Sequence
  Synthetic oligonucleotide
actggcaatcacaagctgattgatttatga

SEQ ID NO: 488489 - DNA, 30 bp, Artificial Sequence
  Synthetic oligonucleotide
ggaagctcgatagtagcatgatctttatga

SEQ ID NO: 488490 - DNA, 30 bp, Artificial Sequence
  Synthetic oligonucleotide
cgtggtcctcgatcgggtacgccgaactga

SEQ ID NO: 488491 - DNA, 30 bp, Artificial Sequence
  Synthetic oligonucleotide
ctcttagtcgcgaccgtggtcgcgaactga

SEQ ID NO: 488492 - DNA, 30 bp, Artificial Sequence
  Synthetic oligonucleotide
caattacttggccataagcaacggaactga

SEQ ID NO: 488493 - DNA, 30 bp, Artificial Sequence
  Synthetic oligonucleotide
tataggtaggtttcaactactatgaactga

SEQ ID NO: 488494 - DNA, 30 bp, Artificial Sequence
  Synthetic oligonucleotide
tatagttatagaccggtagtccataactga

SEQ ID NO: 488495 - DNA, 30 bp, Artificial Sequence
  Synthetic oligonucleotide
catgtggcccaaagggtcactggacactga

SEQ ID NO: 488496 - DNA, 30 bp, Artificial Sequence
  Synthetic oligonucleotide
gcttcgacagatcagttgtcatgacactga

SEQ ID NO: 488497 - DNA, 30 bp, Artificial Sequence
  Synthetic oligonucleotide
attttctatgcggcaattaggttacactga

SEQ ID NO: 488498 - DNA, 30 bp, Artificial Sequence
  Synthetic oligonucleotide
tcaattatttttggggatttgattcactga

SEQ ID NO: 488499 - DNA, 30 bp, Artificial Sequence
  Synthetic oligonucleotide
tgctctcttctagctacgagccgagactga

SEQ ID NO: 488500 - DNA, 30 bp, Artificial Sequence
  Synthetic oligonucleotide
aatccatatttacgtcgttctttagactga

SEQ ID NO: 488501 - DNA, 30 bp, Artificial Sequence
  Synthetic oligonucleotide
aaagtctagcaacgttcacttaatgactga

SEQ ID NO: 488502 - DNA, 30 bp, Artificial Sequence
  Synthetic oligonucleotide
gtattcgtcgactattataactgatactga

SEQ ID NO: 488503 - DNA, 30 bp, Artificial Sequence
  Synthetic oligonucleotide
cgcagcctgaactcagggttctactactga

SEQ ID NO: 488504 - DNA, 30 bp, Artificial Sequence
  Synthetic oligonucleotide
tattaaaacaggggtaggtaacagtactga

SEQ ID NO: 488505 - DNA, 30 bp, Artificial Sequence
  Synthetic oligonucleotide
ctctcgagagttacgtggcacacgtactga

SEQ ID NO: 488506 - DNA, 30 bp, Artificial Sequence
  Synthetic oligonucleotide
aattctgtatgataatgaccgaattactga

SEQ ID NO: 488507 - DNA, 30 bp, Artificial Sequence
  Synthetic oligonucleotide
atcgctcgtaaagtcatattttattactga

SEQ ID NO: 488508 - DNA, 30 bp, Artificial Sequence
  Synthetic oligonucleotide
gctactataatgtactaaattctttactga

SEQ ID NO: 488509 - DNA, 30 bp, Artificial Sequence
  Synthetic oligonucleotide
agaagacgcgcgcacgtattaaaaacctga

SEQ ID NO: 488510 - DNA, 30 bp, Artificial Sequence
  Synthetic oligonucleotide
ctgcctgcggaattgaaggtcgtaacctga

SEQ ID NO: 488511 - DNA, 30 bp, Artificial Sequence
  Synthetic oligonucleotide
taatttcacttggagccggaaaacacctga

SEQ ID NO: 488512 - DNA, 30 bp, Artificial Sequence
  Synthetic oligonucleotide
aactgtgtccgggcgaggtcagacacctga

SEQ ID NO: 488513 - DNA, 30 bp, Artificial Sequence
  Synthetic oligonucleotide
ccaggtctccgtccaagagggcggacctga

SEQ ID NO: 488514 - DNA, 30 bp, Artificial Sequence
  Synthetic oligonucleotide
tatgcgccaacgtcttgcagcccaccctga

SEQ ID NO: 488515 - DNA, 30 bp, Artificial Sequence
  Synthetic oligonucleotide
tagaagcttccgtttactcttaagccctga

SEQ ID NO: 488516 - DNA, 30 bp, Artificial Sequence
  Synthetic oligonucleotide
aaagttacttttatgtgtgtttaagcctga

SEQ ID NO: 488517 - DNA, 30 bp, Artificial Sequence
  Synthetic oligonucleotide
tcatcggctaattgtcataagacagcctga

SEQ ID NO: 488518 - DNA, 30 bp, Artificial Sequence
  Synthetic oligonucleotide
gatcctgctggatggtcagggacagcctga

SEQ ID NO: 488519 - DNA, 30 bp, Artificial Sequence
  Synthetic oligonucleotide
gcactttcttgacacgaaatattcgcctga

SEQ ID NO: 488520 - DNA, 30 bp, Artificial Sequence
  Synthetic oligonucleotide
agtgaccgggggccttatgtagcttcctga

SEQ ID NO: 488521 - DNA, 30 bp, Artificial Sequence
  Synthetic oligonucleotide
gtctactggttatagccaaccatttcctga

SEQ ID NO: 488522 - DNA, 30 bp, Artificial Sequence
  Synthetic oligonucleotide
acagaggggggaagcctatagctaagctga

SEQ ID NO: 488523 - DNA, 30 bp, Artificial Sequence
  Synthetic oligonucleotide
ctctgtggcatctataagtgagccagctga

SEQ ID NO: 488524 - DNA, 30 bp, Artificial Sequence
  Synthetic oligonucleotide
aagagaacagttggtgctcggcgcagctga

SEQ ID NO: 488525 - DNA, 30 bp, Artificial Sequence
  Synthetic oligonucleotide
taacctgctttcgtttctagtttgagctga

SEQ ID NO: 488526 - DNA, 30 bp, Artificial Sequence
  Synthetic oligonucleotide
cattcgcactatctatttgattatagctga

SEQ ID NO: 488527 - DNA, 30 bp, Artificial Sequence
  Synthetic oligonucleotide
ccacagcgtgcgattattagatctagctga

SEQ ID NO: 488528 - DNA, 30 bp, Artificial Sequence
  Synthetic oligonucleotide
ggccggtaaatagattcgttagaacgctga

SEQ ID NO: 488529 - DNA, 30 bp, Artificial Sequence
  Synthetic oligonucleotide
gaatttctctttttggctgctcaccgctga

SEQ ID NO: 488530 - DNA, 30 bp, Artificial Sequence
  Synthetic oligonucleotide
gctgaatttctccgttcagcaccccgctga

SEQ ID NO: 488531 - DNA, 30 bp, Artificial Sequence
  Synthetic oligonucleotide
ctgtggtcgctgccggtcagacatcgctga

SEQ ID NO: 488532 - DNA, 30 bp, Artificial Sequence
  Synthetic oligonucleotide
tactccggtggtttaaacggccagggctga

SEQ ID NO: 488533 - DNA, 30 bp, Artificial Sequence
  Synthetic oligonucleotide
gcatcacaggaaaactatatagttggctga

SEQ ID NO: 488534 - DNA, 30 bp, Artificial Sequence
  Synthetic oligonucleotide
cgcagaagctgtctcataaagacatgctga

SEQ ID NO: 488535 - DNA, 30 bp, Artificial Sequence
  Synthetic oligonucleotide
tgatcgtttgtagcacagctgttatgctga

SEQ ID NO: 488536 - DNA, 29 bp, Artificial Sequence
  Synthetic oligonucleotide
gcactaccgctgcctaacagaggtgctga

SEQ ID NO: 488537 - DNA, 30 bp, Artificial Sequence
  Synthetic oligonucleotide
taatcggcataggacaaacttcggtgctga

SEQ ID NO: 488538 - DNA, 30 bp, Artificial Sequence
  Synthetic oligonucleotide
ccatcaaacattatctgagacgattgctga

SEQ ID NO: 488539 - DNA, 30 bp, Artificial Sequence
  Synthetic oligonucleotide
gatggtcgacccgtttgtaacgcttgctga

SEQ ID NO: 488540 - DNA, 30 bp, Artificial Sequence
  Synthetic oligonucleotide
gagcataatggcgttctcgcaatttgctga

SEQ ID NO: 488541 - DNA, 30 bp, Artificial Sequence
  Synthetic oligonucleotide
ggattcggggaactcacgtctctaatctga

SEQ ID NO: 488542 - DNA, 30 bp, Artificial Sequence
  Synthetic oligonucleotide
gagacgcatctagtgaaggaggtcatctga

SEQ ID NO: 488543 - DNA, 30 bp, Artificial Sequence
  Synthetic oligonucleotide
aaatccgacgacggagtaacagcgatctga

SEQ ID NO: 488544 - DNA, 30 bp, Artificial Sequence
  Synthetic oligonucleotide
taggtttatcattaatacgccaggatctga

SEQ ID NO: 488545 - DNA, 30 bp, Artificial Sequence
  Synthetic oligonucleotide
tataagacagtttggtaaggcaggatctga

SEQ ID NO: 488546 - DNA, 30 bp, Artificial Sequence
  Synthetic oligonucleotide
cgtcataatgaacatctttattatatctga

SEQ ID NO: 488547 - DNA, 30 bp, Artificial Sequence
  Synthetic oligonucleotide
agatgatcaagagcgtctgcaccgctctga

SEQ ID NO: 488548 - DNA, 30 bp, Artificial Sequence
  Synthetic oligonucleotide
cccgtaataaaatcaccccaatgtctctga

SEQ ID NO: 488549 - DNA, 30 bp, Artificial Sequence
  Synthetic oligonucleotide
ccgatagtctaacgcaatgtagttctctga

SEQ ID NO: 488550 - DNA, 30 bp, Artificial Sequence
  Synthetic oligonucleotide
ctcaataatggctgaaagtaaagagtctga

SEQ ID NO: 488551 - DNA, 30 bp, Artificial Sequence
  Synthetic oligonucleotide
aatacggccaactcttttggacacgtctga

SEQ ID NO: 488552 - DNA, 30 bp, Artificial Sequence
  Synthetic oligonucleotide
agtcaggtgacacagctcccggtcgtctga

SEQ ID NO: 488553 - DNA, 30 bp, Artificial Sequence
  Synthetic oligonucleotide
tattcgtgcgatccggttcgaaaggtctga

SEQ ID NO: 488554 - DNA, 30 bp, Artificial Sequence
  Synthetic oligonucleotide
agaggctgtcgctagaccttgaaggtctga

SEQ ID NO: 488555 - DNA, 30 bp, Artificial Sequence
  Synthetic oligonucleotide
cttggtcctaccaggtgtctaagggtctga

SEQ ID NO: 488556 - DNA, 30 bp, Artificial Sequence
  Synthetic oligonucleotide
ccggttccatcaatcgaaatcagggtctga

SEQ ID NO: 488557 - DNA, 30 bp, Artificial Sequence
  Synthetic oligonucleotide
aagcctagctgatgcgaaggactggtctga

SEQ ID NO: 488558 - DNA, 30 bp, Artificial Sequence
  Synthetic oligonucleotide
gctaccactcttttggacacgcaattctga

SEQ ID NO: 488559 - DNA, 30 bp, Artificial Sequence
  Synthetic oligonucleotide
ctcgcgtaaggtacgagtattatattctga

SEQ ID NO: 488560 - DNA, 30 bp, Artificial Sequence
  Synthetic oligonucleotide
aaattataggtcaagtcaggtcccttctga

SEQ ID NO: 488561 - DNA, 30 bp, Artificial Sequence
  Synthetic oligonucleotide
gtacgcgcttgggattctgaatccttctga

SEQ ID NO: 488562 - DNA, 30 bp, Artificial Sequence
  Synthetic oligonucleotide
cagcgcagaaacagcgcgtcttgcttctga

SEQ ID NO: 488563 - DNA, 30 bp, Artificial Sequence
  Synthetic oligonucleotide
catcctacaggaaatccataaaggaagtga

SEQ ID NO: 488564 - DNA, 30 bp, Artificial Sequence
  Synthetic oligonucleotide
attggctattcatttgttgaaagtaagtga

SEQ ID NO: 488565 - DNA, 30 bp, Artificial Sequence
  Synthetic oligonucleotide
gaggactccagctcagtgaatatacagtga

SEQ ID NO: 488566 - DNA, 30 bp, Artificial Sequence
  Synthetic oligonucleotide
gattgcgaagcaccacaatatatacagtga

SEQ ID NO: 488567 - DNA, 30 bp, Artificial Sequence
  Synthetic oligonucleotide
tagcgtaacgggattgtctcgacgcagtga

SEQ ID NO: 488568 - DNA, 30 bp, Artificial Sequence
  Synthetic oligonucleotide
aaacctttacgaataaatatgccgcagtga

SEQ ID NO: 488569 - DNA, 30 bp, Artificial Sequence
  Synthetic oligonucleotide
acaggcttcatatctcctccggatcagtga

SEQ ID NO: 488570 - DNA, 30 bp, Artificial Sequence
  Synthetic oligonucleotide
cggtttgtgaggggcggaccccctcagtga

SEQ ID NO: 488571 - DNA, 30 bp, Artificial Sequence
  Synthetic oligonucleotide
ggtaacgtgtatgaacagtgcatagagtga

SEQ ID NO: 488572 - DNA, 40 bp, Artificial Sequence
  Synthetic oligonucleotide
aagataatacattcatggtatggtcggggatcgggagtga

SEQ ID NO: 488573 - DNA, 30 bp, Artificial Sequence
  Synthetic oligonucleotide
atcctgttgtgatcgtgaaagcttgagtga

SEQ ID NO: 488574 - DNA, 30 bp, Artificial Sequence
  Synthetic oligonucleotide
caaggctaagtgtgcagagtccaatagtga

SEQ ID NO: 488575 - DNA, 30 bp, Artificial Sequence
  Synthetic oligonucleotide
acatatattagcactcctccctaatagtga

SEQ ID NO: 488576 - DNA, 30 bp, Artificial Sequence
  Synthetic oligonucleotide
gcagctatacacaagcgtccgggatagtga

SEQ ID NO: 488577 - DNA, 30 bp, Artificial Sequence
  Synthetic oligonucleotide
attatagagtatgggattctcttatagtga

SEQ ID NO: 488578 - DNA, 30 bp, Artificial Sequence
  Synthetic oligonucleotide
agtacaggaggaatgctcgatctctagtga

SEQ ID NO: 488579 - DNA, 30 bp, Artificial Sequence
  Synthetic oligonucleotide
gaaaagttaaattgagagttgcagtagtga

SEQ ID NO: 488580 - DNA, 30 bp, Artificial Sequence
  Synthetic oligonucleotide
ttcttactttgaagttatgctacgtagtga

SEQ ID NO: 488581 - DNA, 30 bp, Artificial Sequence
  Synthetic oligonucleotide
aaatgtccctagtaagcaaacacttagtga

SEQ ID NO: 488582 - DNA, 30 bp, Artificial Sequence
  Synthetic oligonucleotide
aatgtatgatcatcaggggccgtttagtga

SEQ ID NO: 488583 - DNA, 30 bp, Artificial Sequence
  Synthetic oligonucleotide
ttagacctgcactcggctgtaacaacgtga

SEQ ID NO: 488584 - DNA, 30 bp, Artificial Sequence
  Synthetic oligonucleotide
agactataggtgttttgcggtctaacgtga

SEQ ID NO: 488585 - DNA, 30 bp, Artificial Sequence
  Synthetic oligonucleotide
actggccacttcgatctatgaaacacgtga

SEQ ID NO: 488586 - DNA, 30 bp, Artificial Sequence
  Synthetic oligonucleotide
tcttgttccgacctagcgacaaccacgtga

SEQ ID NO: 488587 - DNA, 30 bp, Artificial Sequence
  Synthetic oligonucleotide
actcttgttacgcacctgacattcacgtga

SEQ ID NO: 488588 - DNA, 30 bp, Artificial Sequence
  Synthetic oligonucleotide
ttgtcttacgcggtatgtgcgacgacgtga

SEQ ID NO: 488589 - DNA, 30 bp, Artificial Sequence
  Synthetic oligonucleotide
cggccctgcttatgcggagaactgacgtga

SEQ ID NO: 488590 - DNA, 30 bp, Artificial Sequence
  Synthetic oligonucleotide
gttctaggaatacagctcgaagtgacgtga

SEQ ID NO: 488591 - DNA, 30 bp, Artificial Sequence
  Synthetic oligonucleotide
aactctcaaagcagattttttgtgacgtga

SEQ ID NO: 488592 - DNA, 30 bp, Artificial Sequence
  Synthetic oligonucleotide
acgccacatcgctcggttgaagctacgtga

SEQ ID NO: 488593 - DNA, 30 bp, Artificial Sequence
  Synthetic oligonucleotide
gttttatggacactttccgtacaaccgtga

SEQ ID NO: 488594 - DNA, 30 bp, Artificial Sequence
  Synthetic oligonucleotide
gtccaaaagggttttgcagctaggccgtga

SEQ ID NO: 488595 - DNA, 30 bp, Artificial Sequence
  Synthetic oligonucleotide
gggttctctataactgtacaagtgccgtga

SEQ ID NO: 488596 - DNA, 30 bp, Artificial Sequence
  Synthetic oligonucleotide
tacaaggcgcggcctatcagatgtccgtga

SEQ ID NO: 488597 - DNA, 29 bp, Artificial Sequence
  Synthetic oligonucleotide
gaataacgaagggaaacatctaagcgtga

SEQ ID NO: 488598 - DNA, 30 bp, Artificial Sequence
  Synthetic oligonucleotide
attcgttaaagtcgactaggctacgcgtga

SEQ ID NO: 488599 - DNA, 30 bp, Artificial Sequence
  Synthetic oligonucleotide
gcgtttctgaatcacaactaattggcgtga

SEQ ID NO: 488600 - DNA, 30 bp, Artificial Sequence
  Synthetic oligonucleotide
ggcgatcgcacgcttcctcgaggtgcgtga

SEQ ID NO: 488601 - DNA, 30 bp, Artificial Sequence
  Synthetic oligonucleotide
atcaaaatcggcctactgacaagaaggtga

SEQ ID NO: 488602 - DNA, 30 bp, Artificial Sequence
  Synthetic oligonucleotide
aaggcagctcgctcgcaccacgccaggtga

SEQ ID NO: 488603 - DNA, 30 bp, Artificial Sequence
  Synthetic oligonucleotide
gcgttctacgtttgcctgaaacgtaggtga

SEQ ID NO: 488604 - DNA, 30 bp, Artificial Sequence
  Synthetic oligonucleotide
tacatcaatagacccactcttaaacggtga

SEQ ID NO: 488605 - DNA, 30 bp, Artificial Sequence
  Synthetic oligonucleotide
ttggtttaagtgcctcgatacgcccggtga

SEQ ID NO: 488606 - DNA, 30 bp, Artificial Sequence
  Synthetic oligonucleotide
ggtgtaggagtgatggagcacaagcggtga

SEQ ID NO: 488607 - DNA, 30 bp, Artificial Sequence
  Synthetic oligonucleotide
aaactccgactttccgtcgaaactcggtga

SEQ ID NO: 488608 - DNA, 30 bp, Artificial Sequence
  Synthetic oligonucleotide
cggctaccccttccatggtctcctcggtga

SEQ ID NO: 488609 - DNA, 30 bp, Artificial Sequence
  Synthetic oligonucleotide
tctatcatgtctgatacgaggattcggtga

SEQ ID NO: 488610 - DNA, 30 bp, Artificial Sequence
  Synthetic oligonucleotide
ttatttctttgcgtacattgcagagggtga

SEQ ID NO: 488611 - DNA, 30 bp, Artificial Sequence
  Synthetic oligonucleotide
aagaccgagttacgaaccgacaaggggtga

SEQ ID NO: 488612 - DNA, 40 bp, Artificial Sequence
  Synthetic oligonucleotide
aagataatacattcattgtatggtcggggatcgggggtga

SEQ ID NO: 488613 - DNA, 40 bp, Artificial Sequence
  Synthetic oligonucleotide
aagataatacattcatgttatggtcggggatcgggggtga

SEQ ID NO: 488614 - DNA, 40 bp, Artificial Sequence
  Synthetic oligonucleotide
aagataatacattcatggtatggtctgggatcgggggtga

SEQ ID NO: 488615 - DNA, 40 bp, Artificial Sequence
  Synthetic oligonucleotide
aagataatacattcatggtatggtcgggtatcgggggtga

SEQ ID NO: 488616 - DNA, 40 bp, Artificial Sequence
  Synthetic oligonucleotide
aagataatacattcatggtatggtcggggttcgggggtga

SEQ ID NO: 488617 - DNA, 30 bp, Artificial Sequence
  Synthetic oligonucleotide
ccataatggtcgtgtagcatcggggggtga

SEQ ID NO: 488618 - DNA, 30 bp, Artificial Sequence
  Synthetic oligonucleotide
cagccacccagacactggagtatggggtga

SEQ ID NO: 488619 - DNA, 30 bp, Artificial Sequence
  Synthetic oligonucleotide
ccatcattcgcacgcgctcgtgatgggtga

SEQ ID NO: 488620 - DNA, 30 bp, Artificial Sequence
  Synthetic oligonucleotide
cactacaacgcgctggagagcactgggtga

SEQ ID NO: 488621 - DNA, 30 bp, Artificial Sequence
  Synthetic oligonucleotide
cccatattgagaatgggttgtattgggtga

SEQ ID NO: 488622 - DNA, 30 bp, Artificial Sequence
  Synthetic oligonucleotide
atcttactttacaaagcattgtttgggtga

SEQ ID NO: 488623 - DNA, 30 bp, Artificial Sequence
  Synthetic oligonucleotide
tttatgctattcaatataacaatatggtga

SEQ ID NO: 488624 - DNA, 30 bp, Artificial Sequence
  Synthetic oligonucleotide
tttaacgctttgcctaaaagatactggtga

SEQ ID NO: 488625 - DNA, 30 bp, Artificial Sequence
  Synthetic oligonucleotide
ataggggtctgggcagcgcgttcgtggtga

SEQ ID NO: 488626 - DNA, 30 bp, Artificial Sequence
  Synthetic oligonucleotide
agagaaggcttccatttggccgcaatgtga

SEQ ID NO: 488627 - DNA, 30 bp, Artificial Sequence
  Synthetic oligonucleotide
gaatagtaggcccaccacaccttaatgtga

SEQ ID NO: 488628 - DNA, 30 bp, Artificial Sequence
  Synthetic oligonucleotide
attaagtggggcggtagtgccctcatgtga

SEQ ID NO: 488629 - DNA, 30 bp, Artificial Sequence
  Synthetic oligonucleotide
aggttttggatgcagcgggccttcatgtga

SEQ ID NO: 488630 - DNA, 30 bp, Artificial Sequence
  Synthetic oligonucleotide
tcgaatgatcccttgacgggggcgatgtga

SEQ ID NO: 488631 - DNA, 30 bp, Artificial Sequence
  Synthetic oligonucleotide
aatctggccagggcccgctgcttgatgtga

SEQ ID NO: 488632 - DNA, 30 bp, Artificial Sequence
  Synthetic oligonucleotide
tgaatttctaacagccgggtcaatatgtga

SEQ ID NO: 488633 - DNA, 30 bp, Artificial Sequence
  Synthetic oligonucleotide
atcctttagatttagatatacctactgtga

SEQ ID NO: 488634 - DNA, 30 bp, Artificial Sequence
  Synthetic oligonucleotide
atcaaggccataactgttcaagtactgtga

SEQ ID NO: 488635 - DNA, 30 bp, Artificial Sequence
  Synthetic oligonucleotide
ggccaaaacacctgctgttgtggcctgtga

SEQ ID NO: 488636 - DNA, 30 bp, Artificial Sequence
  Synthetic oligonucleotide
ccatgataccagacggtatttgatctgtga

SEQ ID NO: 488637 - DNA, 30 bp, Artificial Sequence
  Synthetic oligonucleotide
gataagttctgtagtgcatagcttctgtga

SEQ ID NO: 488638 - DNA, 30 bp, Artificial Sequence
  Synthetic oligonucleotide
aattgttattctcgggacgtgaaagtgtga

SEQ ID NO: 488639 - DNA, 30 bp, Artificial Sequence
  Synthetic oligonucleotide
ggtcactcgtttttctcgatgtcagtgtga

SEQ ID NO: 488640 - DNA, 30 bp, Artificial Sequence
  Synthetic oligonucleotide
tatgccgcgaatgcaccctatggagtgtga

SEQ ID NO: 488641 - DNA, 30 bp, Artificial Sequence
  Synthetic oligonucleotide
ggtttagtcatgttctatcgtcccgtgtga

SEQ ID NO: 488642 - DNA, 30 bp, Artificial Sequence
  Synthetic oligonucleotide
acagcagttgttctaaatgccgccgtgtga

SEQ ID NO: 488643 - DNA, 30 bp, Artificial Sequence
  Synthetic oligonucleotide
gtaggtcgcgctcataccaatgaggtgtga

SEQ ID NO: 488644 - DNA, 30 bp, Artificial Sequence
  Synthetic oligonucleotide
ggctagacgcagacaagctaaaatgtgtga

SEQ ID NO: 488645 - DNA, 30 bp, Artificial Sequence
  Synthetic oligonucleotide
gatacagggatcacccaaaaagttgtgtga

SEQ ID NO: 488646 - DNA, 30 bp, Artificial Sequence
  Synthetic oligonucleotide
aattagactcgagatctttgtgaattgtga

SEQ ID NO: 488647 - DNA, 30 bp, Artificial Sequence
  Synthetic oligonucleotide
ggcgccagcaccactcacacttgattgtga

SEQ ID NO: 488648 - DNA, 30 bp, Artificial Sequence
  Synthetic oligonucleotide
aagaatagcacgtcttaactggtattgtga

SEQ ID NO: 488649 - DNA, 30 bp, Artificial Sequence
  Synthetic oligonucleotide
taagggatttcatgattttatgacttgtga

SEQ ID NO: 488650 - DNA, 30 bp, Artificial Sequence
  Synthetic oligonucleotide
ttgatttgacacagtcaaccgggcttgtga

SEQ ID NO: 488651 - DNA, 30 bp, Artificial Sequence
  Synthetic oligonucleotide
gtgtatttataataaatcgtgtggttgtga

SEQ ID NO: 488652 - DNA, 30 bp, Artificial Sequence
  Synthetic oligonucleotide
tcctctatggtcaagcggtgtagtttgtga

SEQ ID NO: 488653 - DNA, 30 bp, Artificial Sequence
  Synthetic oligonucleotide
cccggtgggtttatgtggatataaaattga

SEQ ID NO: 488654 - DNA, 30 bp, Artificial Sequence
  Synthetic oligonucleotide
tgtaatactattacgacggtataaaattga

SEQ ID NO: 488655 - DNA, 30 bp, Artificial Sequence
  Synthetic oligonucleotide
ccgggactattcgtatcactaccaaattga

SEQ ID NO: 488656 - DNA, 30 bp, Artificial Sequence
  Synthetic oligonucleotide
aacaggggatggtcccatgaccgcaattga

SEQ ID NO: 488657 - DNA, 30 bp, Artificial Sequence
  Synthetic oligonucleotide
aaatcatgtgaaaattcgcgtctcaattga

SEQ ID NO: 488658 - DNA, 30 bp, Artificial Sequence
  Synthetic oligonucleotide
accaaaatttctgcagagtctcagaattga

SEQ ID NO: 488659 - DNA, 30 bp, Artificial Sequence
  Synthetic oligonucleotide
gcagcacgaatagatcattgctataattga

SEQ ID NO: 488660 - DNA, 30 bp, Artificial Sequence
  Synthetic oligonucleotide
ttgaggagccgttgcttatgttttaattga

SEQ ID NO: 488661 - DNA, 30 bp, Artificial Sequence
  Synthetic oligonucleotide
gagtgcggctccctactgtcctaacattga

SEQ ID NO: 488662 - DNA, 30 bp, Artificial Sequence
  Synthetic oligonucleotide
ttcaagactaccactcgtgcgccacattga

SEQ ID NO: 488663 - DNA, 30 bp, Artificial Sequence
  Synthetic oligonucleotide
aatcttaacggtgccgcgagcggccattga

SEQ ID NO: 488664 - DNA, 31 bp, Artificial Sequence
  Synthetic oligonucleotide
gagttgaccatcagctttaacacagcattga

SEQ ID NO: 488665 - DNA, 30 bp, Artificial Sequence
  Synthetic oligonucleotide
atttgatttcagcgtagccgtgggcattga

SEQ ID NO: 488666 - DNA, 30 bp, Artificial Sequence
  Synthetic oligonucleotide
tgtttgtttcaatggacaatctggcattga

SEQ ID NO: 488667 - DNA, 30 bp, Artificial Sequence
  Synthetic oligonucleotide
gcacaattgcgcgtttcgcgaaaagattga

SEQ ID NO: 488668 - DNA, 30 bp, Artificial Sequence
  Synthetic oligonucleotide
cgcgtgtgctttccgtattgggaagattga

SEQ ID NO: 488669 - DNA, 30 bp, Artificial Sequence
  Synthetic oligonucleotide
aactatcttgccatgaggtgcacagattga

SEQ ID NO: 488670 - DNA, 30 bp, Artificial Sequence
  Synthetic oligonucleotide
aaaggtccacgagggccagtatgggattga

SEQ ID NO: 488671 - DNA, 30 bp, Artificial Sequence
  Synthetic oligonucleotide
cgccttgaagtcacgcccaccatggattga

SEQ ID NO: 488672 - DNA, 30 bp, Artificial Sequence
  Synthetic oligonucleotide
cacgtatgcaggttacattggatggattga

SEQ ID NO: 488673 - DNA, 30 bp, Artificial Sequence
  Synthetic oligonucleotide
ataaccccgcgcagcgtttcgtgtgattga

SEQ ID NO: 488674 - DNA, 30 bp, Artificial Sequence
  Synthetic oligonucleotide
aatccttgagcatcttatcagaaatattga

SEQ ID NO: 488675 - DNA, 30 bp, Artificial Sequence
  Synthetic oligonucleotide
ttaattgatgctggtgttgaggaatattga

SEQ ID NO: 488676 - DNA, 30 bp, Artificial Sequence
  Synthetic oligonucleotide
gaccagcgtcacaatttcagtgtatattga

SEQ ID NO: 488677 - DNA, 30 bp, Artificial Sequence
  Synthetic oligonucleotide
tgtttatccgtacatcactgttcctattga

SEQ ID NO: 488678 - DNA, 30 bp, Artificial Sequence
  Synthetic oligonucleotide
gctattccatcaccaacgtggctctattga

SEQ ID NO: 488679 - DNA, 30 bp, Artificial Sequence
  Synthetic oligonucleotide
gggggtggaatcactcctttggagtattga

SEQ ID NO: 488680 - DNA, 30 bp, Artificial Sequence
  Synthetic oligonucleotide
ttactgataacttagtgatattagtattga

SEQ ID NO: 488681 - DNA, 30 bp, Artificial Sequence
  Synthetic oligonucleotide
ctagcagttcgggttctttggccgtattga

SEQ ID NO: 488682 - DNA, 30 bp, Artificial Sequence
  Synthetic oligonucleotide
cccattacttttttagctggggtgtattga

SEQ ID NO: 488683 - DNA, 30 bp, Artificial Sequence
  Synthetic oligonucleotide
gttatactcgccagcgtttacgattattga

SEQ ID NO: 488684 - DNA, 30 bp, Artificial Sequence
  Synthetic oligonucleotide
cgtatttgatactaagatttttaaacttga

SEQ ID NO: 488685 - DNA, 30 bp, Artificial Sequence
  Synthetic oligonucleotide
tttatgttctaggcacggatctcaacttga

SEQ ID NO: 488686 - DNA, 30 bp, Artificial Sequence
  Synthetic oligonucleotide
gtatacctgtatatgaaccgcagaacttga

SEQ ID NO: 488687 - DNA, 30 bp, Artificial Sequence
  Synthetic oligonucleotide
ttttttgacttgtgacgcatattaacttga

SEQ ID NO: 488688 - DNA, 30 bp, Artificial Sequence
  Synthetic oligonucleotide
cattgttaggattttatgtggcacacttga

SEQ ID NO: 488689 - DNA, 30 bp, Artificial Sequence
  Synthetic oligonucleotide
atgacaaactccccctcaaccggcacttga

SEQ ID NO: 488690 - DNA, 30 bp, Artificial Sequence
  Synthetic oligonucleotide
cccatatcttaggcaaagaatgtcacttga

SEQ ID NO: 488691 - DNA, 30 bp, Artificial Sequence
  Synthetic oligonucleotide
tgtttacttcggcaatagtaaggaccttga

SEQ ID NO: 488692 - DNA, 30 bp, Artificial Sequence
  Synthetic oligonucleotide
cgtcaggagaagacctcctgggccccttga

SEQ ID NO: 488693 - DNA, 30 bp, Artificial Sequence
  Synthetic oligonucleotide
ttccggggtgatggagataaaactccttga

SEQ ID NO: 488694 - DNA, 30 bp, Artificial Sequence
  Synthetic oligonucleotide
cgcagttagcagtggcccgctttagcttga

SEQ ID NO: 488695 - DNA, 30 bp, Artificial Sequence
  Synthetic oligonucleotide
tactatatcgcgaagcagtattccgcttga

SEQ ID NO: 488696 - DNA, 30 bp, Artificial Sequence
  Synthetic oligonucleotide
aacgctggaggtagtggatgcggcgcttga

SEQ ID NO: 488697 - DNA, 30 bp, Artificial Sequence
  Synthetic oligonucleotide
tttccgactttatggactcaaagggcttga

SEQ ID NO: 488698 - DNA, 30 bp, Artificial Sequence
  Synthetic oligonucleotide
ttctctcctaatatgtcacaataatcttga

SEQ ID NO: 488699 - DNA, 30 bp, Artificial Sequence
  Synthetic oligonucleotide
gacaccggtagagccacaatttgatcttga

SEQ ID NO: 488700 - DNA, 30 bp, Artificial Sequence
  Synthetic oligonucleotide
caatttttcatgagagtttgtccctcttga

SEQ ID NO: 488701 - DNA, 30 bp, Artificial Sequence
  Synthetic oligonucleotide
agatagcatcacttctctctaatctcttga

SEQ ID NO: 488702 - DNA, 30 bp, Artificial Sequence
  Synthetic oligonucleotide
gtatacttaacggggaggttcagttcttga

SEQ ID NO: 488703 - DNA, 30 bp, Artificial Sequence
  Synthetic oligonucleotide
ggaccggtcgtaccaaacagagagagttga

SEQ ID NO: 488704 - DNA, 30 bp, Artificial Sequence
  Synthetic oligonucleotide
gaaatagagcggtcacgtgattctagttga

SEQ ID NO: 488705 - DNA, 30 bp, Artificial Sequence
  Synthetic oligonucleotide
tctaggcaaagtcgaacgcgacgtagttga

SEQ ID NO: 488706 - DNA, 30 bp, Artificial Sequence
  Synthetic oligonucleotide
accgacagcacacacctgttccaacgttga

SEQ ID NO: 488707 - DNA, 30 bp, Artificial Sequence
  Synthetic oligonucleotide
ctaatcaacagtatgttttcaagacgttga

SEQ ID NO: 488708 - DNA, 30 bp, Artificial Sequence
  Synthetic oligonucleotide
cctgcgttacccggtgtgacgaggcgttga

SEQ ID NO: 488709 - DNA, 30 bp, Artificial Sequence
  Synthetic oligonucleotide
gtgcatatatatgacggcaggttgcgttga

SEQ ID NO: 488710 - DNA, 30 bp, Artificial Sequence
  Synthetic oligonucleotide
gagtgtttactcagaacccactcaggttga

SEQ ID NO: 488711 - DNA, 30 bp, Artificial Sequence
  Synthetic oligonucleotide
acgatggagccttcattgaagcacggttga

SEQ ID NO: 488712 - DNA, 30 bp, Artificial Sequence
  Synthetic oligonucleotide
agcataaggacgcttttacgggtcggttga

SEQ ID NO: 488713 - DNA, 30 bp, Artificial Sequence
  Synthetic oligonucleotide
taattgttccggatcagggtaaagggttga

SEQ ID NO: 488714 - DNA, 30 bp, Artificial Sequence
  Synthetic oligonucleotide
ctcgagaagccgcagtcaagacgatgttga

SEQ ID NO: 488715 - DNA, 30 bp, Artificial Sequence
  Synthetic oligonucleotide
gagccaactctatgggttaatgtatgttga

SEQ ID NO: 488716 - DNA, 30 bp, Artificial Sequence
  Synthetic oligonucleotide
accccgtatggctcgattcgctactgttga

SEQ ID NO: 488717 - DNA, 30 bp, Artificial Sequence
  Synthetic oligonucleotide
ctttaacttggaaaaccctacacgtgttga

SEQ ID NO: 488718 - DNA, 30 bp, Artificial Sequence
  Synthetic oligonucleotide
ataaaactggtacccccccctgggtgttga

SEQ ID NO: 488719 - DNA, 30 bp, Artificial Sequence
  Synthetic oligonucleotide
gtacaggaacatatattgccagtgtgttga

SEQ ID NO: 488720 - DNA, 30 bp, Artificial Sequence
  Synthetic oligonucleotide
aatagcggcatcaaaccgtgtgaaatttga

SEQ ID NO: 488721 - DNA, 30 bp, Artificial Sequence
  Synthetic oligonucleotide
ctgcatctcgaaagctttaaagcaatttga

SEQ ID NO: 488722 - DNA, 30 bp, Artificial Sequence
  Synthetic oligonucleotide
ccgcgattatctactggcagtgcaatttga

SEQ ID NO: 488723 - DNA, 30 bp, Artificial Sequence
  Synthetic oligonucleotide
tgtcgtctgagctcctcactgtcaatttga

SEQ ID NO: 488724 - DNA, 30 bp, Artificial Sequence
  Synthetic oligonucleotide
gtttcaataaacggacggacgcgaatttga

SEQ ID NO: 488725 - DNA, 30 bp, Artificial Sequence
  Synthetic oligonucleotide
acgctgtagtcaatttagtcattaatttga

SEQ ID NO: 488726 - DNA, 30 bp, Artificial Sequence
  Synthetic oligonucleotide
attcacctcagctgccgttacgccatttga

SEQ ID NO: 488727 - DNA, 30 bp, Artificial Sequence
  Synthetic oligonucleotide
aagccttgctatcttatcgtcaagatttga

SEQ ID NO: 488728 - DNA, 30 bp, Artificial Sequence
  Synthetic oligonucleotide
attaatttggattgcgtaccaaggatttga

SEQ ID NO: 488729 - DNA, 30 bp, Artificial Sequence
  Synthetic oligonucleotide
atcatattgaacggtaggaataggatttga

SEQ ID NO: 488730 - DNA, 30 bp, Artificial Sequence
  Synthetic oligonucleotide
atacgatttctgaatttcataactatttga

SEQ ID NO: 488731 - DNA, 30 bp, Artificial Sequence
  Synthetic oligonucleotide
gaagatttggagtttttccgccctatttga

SEQ ID NO: 488732 - DNA, 30 bp, Artificial Sequence
  Synthetic oligonucleotide
agcgcctgtgccccacaagcccttatttga

SEQ ID NO: 488733 - DNA, 30 bp, Artificial Sequence
  Synthetic oligonucleotide
ttatgtgattccccgaagtcgacgctttga

SEQ ID NO: 488734 - DNA, 30 bp, Artificial Sequence
  Synthetic oligonucleotide
tgtaatttaccaaattggagggggctttga

SEQ ID NO: 488735 - DNA, 30 bp, Artificial Sequence
  Synthetic oligonucleotide
atgggagtcccatgagaaacgaatctttga

SEQ ID NO: 488736 - DNA, 30 bp, Artificial Sequence
  Synthetic oligonucleotide
attatatccgctatttctaggagagtttga

SEQ ID NO: 488737 - DNA, 30 bp, Artificial Sequence
  Synthetic oligonucleotide
cgcagcacgccagagggtttcttagtttga

SEQ ID NO: 488738 - DNA, 30 bp, Artificial Sequence
  Synthetic oligonucleotide
ttagggtataacgtgtggtcacacgtttga

SEQ ID NO: 488739 - DNA, 30 bp, Artificial Sequence
  Synthetic oligonucleotide
aaggtcttacgcggccggaccctcgtttga

SEQ ID NO: 488740 - DNA, 30 bp, Artificial Sequence
  Synthetic oligonucleotide
caaattgcccatatgcgggccgcggtttga

SEQ ID NO: 488741 - DNA, 30 bp, Artificial Sequence
  Synthetic oligonucleotide
ctaccaaaatttgatgccgagcatgtttga

SEQ ID NO: 488742 - DNA, 30 bp, Artificial Sequence
  Synthetic oligonucleotide
gccccagaattgtgataggttcaattttga

SEQ ID NO: 488743 - DNA, 30 bp, Artificial Sequence
  Synthetic oligonucleotide
cgccatatcacgcaaaccagtagattttga

SEQ ID NO: 488744 - DNA, 30 bp, Artificial Sequence
  Synthetic oligonucleotide
aatgtaattcctgcattccctcgattttga

SEQ ID NO: 488745 - DNA, 30 bp, Artificial Sequence
  Synthetic oligonucleotide
tgatgtccacgggggggacagggattttga

SEQ ID NO: 488746 - DNA, 30 bp, Artificial Sequence
  Synthetic oligonucleotide
ggggtagacgatcggaatcttgccttttga

SEQ ID NO: 488747 - DNA, 30 bp, Artificial Sequence
  Synthetic oligonucleotide
tattacatctgccgcatttatggcttttga

SEQ ID NO: 488748 - DNA, 30 bp, Artificial Sequence
  Synthetic oligonucleotide
cttatgtgacggcggagctctttcttttga

SEQ ID NO: 488749 - DNA, 30 bp, Artificial Sequence
  Synthetic oligonucleotide
gatactcataggcccgaagtatatttttga

SEQ ID NO: 488750 - DNA, 30 bp, Artificial Sequence
  Synthetic oligonucleotide
ggaaaccgggtccactcccacaaaaaaata

SEQ ID NO: 488751 - DNA, 30 bp, Artificial Sequence
  Synthetic oligonucleotide
tttagaaggctgtttattcgagaaaaaata

SEQ ID NO: 488752 - DNA, 30 bp, Artificial Sequence
  Synthetic oligonucleotide
cgaccgcaacatatacggctaacaaaaata

SEQ ID NO: 488753 - DNA, 30 bp, Artificial Sequence
  Synthetic oligonucleotide
ggcctcttgcgacaaattaaaataaaaata

SEQ ID NO: 488754 - DNA, 30 bp, Artificial Sequence
  Synthetic oligonucleotide
tttgattgggtgagccagccggtaaaaata

SEQ ID NO: 488755 - DNA, 30 bp, Artificial Sequence
  Synthetic oligonucleotide
gtggtgggtataggaggatcgaccaaaata

SEQ ID NO: 488756 - DNA, 30 bp, Artificial Sequence
  Synthetic oligonucleotide
tgggtcgaggggatatagcacgccaaaata

SEQ ID NO: 488757 - DNA, 30 bp, Artificial Sequence
  Synthetic oligonucleotide
gttttgaatataagtataccttagaaaata

SEQ ID NO: 488758 - DNA, 30 bp, Artificial Sequence
  Synthetic oligonucleotide
aattagtatttcgtcacactttggaaaata

SEQ ID NO: 488759 - DNA, 30 bp, Artificial Sequence
  Synthetic oligonucleotide
tgataggctttcgtaagtgataataaaata

SEQ ID NO: 488760 - DNA, 30 bp, Artificial Sequence
  Synthetic oligonucleotide
tggataaacggagacacctctactaaaata

SEQ ID NO: 488761 - DNA, 30 bp, Artificial Sequence
  Synthetic oligonucleotide
gaactaatcctcccaggtattcttaaaata

SEQ ID NO: 488762 - DNA, 30 bp, Artificial Sequence
  Synthetic oligonucleotide
cttatacaaagacaaaacaggcaacaaata

SEQ ID NO: 488763 - DNA, 30 bp, Artificial Sequence
  Synthetic oligonucleotide
cccttattatatctaaacttataacaaata

SEQ ID NO: 488764 - DNA, 30 bp, Artificial Sequence
  Synthetic oligonucleotide
gcgttccgagtctgttgggcgtaacaaata

SEQ ID NO: 488765 - DNA, 30 bp, Artificial Sequence
  Synthetic oligonucleotide
cataatattcgtgactggttaccccaaata

SEQ ID NO: 488766 - DNA, 30 bp, Artificial Sequence
  Synthetic oligonucleotide
atgtggtatcataagtagaatttccaaata

SEQ ID NO: 488767 - DNA, 30 bp, Artificial Sequence
  Synthetic oligonucleotide
ttctgtatagcgcagagggagccgcaaata

SEQ ID NO: 488768 - DNA, 30 bp, Artificial Sequence
  Synthetic oligonucleotide
gacatgacatgtgttaccatctatcaaata

SEQ ID NO: 488769 - DNA, 30 bp, Artificial Sequence
  Synthetic oligonucleotide
tgaatcgggtagggttaactgactcaaata

SEQ ID NO: 488770 - DNA, 30 bp, Artificial Sequence
  Synthetic oligonucleotide
taagggcagacgtccataatttttcaaata

SEQ ID NO: 488771 - DNA, 30 bp, Artificial Sequence
  Synthetic oligonucleotide
agttacccacaggtggccttagaagaaata

SEQ ID NO: 488772 - DNA, 30 bp, Artificial Sequence
  Synthetic oligonucleotide
gatcagctaggtctaaccggagtagaaata

SEQ ID NO: 488773 - DNA, 30 bp, Artificial Sequence
  Synthetic oligonucleotide
gttgcgtgcttcattgcacctttagaaata

SEQ ID NO: 488774 - DNA, 30 bp, Artificial Sequence
  Synthetic oligonucleotide
atttcgttgttataccccagagacgaaata

SEQ ID NO: 488775 - DNA, 30 bp, Artificial Sequence
  Synthetic oligonucleotide
acgcaggattccggggacttgccggaaata

SEQ ID NO: 488776 - DNA, 30 bp, Artificial Sequence
  Synthetic oligonucleotide
cttcagtatcggaaaagacatccggaaata

SEQ ID NO: 488777 - DNA, 30 bp, Artificial Sequence
  Synthetic oligonucleotide
caaaggctaagttgtaattcatgggaaata

SEQ ID NO: 488778 - DNA, 30 bp, Artificial Sequence
  Synthetic oligonucleotide
acatggtgtcaccgtctgcggatggaaata

SEQ ID NO: 488779 - DNA, 30 bp, Artificial Sequence
  Synthetic oligonucleotide
tgcctatcagtctccaattcgggtgaaata

SEQ ID NO: 488780 - DNA, 30 bp, Artificial Sequence
  Synthetic oligonucleotide
tttcctccaagggggaactagtgtgaaata

SEQ ID NO: 488781 - DNA, 30 bp, Artificial Sequence
  Synthetic oligonucleotide
aaaggctcaatagtaacgcgtgcataaata

SEQ ID NO: 488782 - DNA, 30 bp, Artificial Sequence
  Synthetic oligonucleotide
acttcacagcttggttccagaccctaaata

SEQ ID NO: 488783 - DNA, 30 bp, Artificial Sequence
  Synthetic oligonucleotide
gccgtatgctctgatgatgatacgtaaata

SEQ ID NO: 488784 - DNA, 30 bp, Artificial Sequence
  Synthetic oligonucleotide
accttcccacgacggttgatgttgtaaata

SEQ ID NO: 488785 - DNA, 30 bp, Artificial Sequence
  Synthetic oligonucleotide
cacagcaatactaagtaaccgacttaaata

SEQ ID NO: 488786 - DNA, 30 bp, Artificial Sequence
  Synthetic oligonucleotide
taaccgcctatgtatgctgcaccttaaata

SEQ ID NO: 488787 - DNA, 30 bp, Artificial Sequence
  Synthetic oligonucleotide
gtaggttaccggttgtcggtcccttaaata

SEQ ID NO: 488788 - DNA, 30 bp, Artificial Sequence
  Synthetic oligonucleotide
cgtgtcatcccgtaacaaggcctttaaata

SEQ ID NO: 488789 - DNA, 30 bp, Artificial Sequence
  Synthetic oligonucleotide
taatttttcattgtattagtgtaaacaata

SEQ ID NO: 488790 - DNA, 30 bp, Artificial Sequence
  Synthetic oligonucleotide
agtcctgaggtaaccgaccggtagacaata

SEQ ID NO: 488791 - DNA, 30 bp, Artificial Sequence
  Synthetic oligonucleotide
catctcgcattaatgctttccgtgacaata

SEQ ID NO: 488792 - DNA, 30 bp, Artificial Sequence
  Synthetic oligonucleotide
ggctgcggtggtgggattacggtgacaata

SEQ ID NO: 488793 - DNA, 30 bp, Artificial Sequence
  Synthetic oligonucleotide
agtcgggtgaaaaccgggccgttgacaata

SEQ ID NO: 488794 - DNA, 30 bp, Artificial Sequence
  Synthetic oligonucleotide
cccaggggaatgggcatttctcatacaata

SEQ ID NO: 488795 - DNA, 30 bp, Artificial Sequence
  Synthetic oligonucleotide
acgtcactttgattttctagtactacaata

SEQ ID NO: 488796 - DNA, 30 bp, Artificial Sequence
  Synthetic oligonucleotide
tcgacgcgtattgatagtcgtgttccaata

SEQ ID NO: 488797 - DNA, 30 bp, Artificial Sequence
  Synthetic oligonucleotide
ctccgttaccagatcagttagacagcaata

SEQ ID NO: 488798 - DNA, 30 bp, Artificial Sequence
  Synthetic oligonucleotide
attcccaaaggcaagaccccaggagcaata

SEQ ID NO: 488799 - DNA, 30 bp, Artificial Sequence
  Synthetic oligonucleotide
gccctccgtgacgggaaatgtggagcaata

SEQ ID NO: 488800 - DNA, 30 bp, Artificial Sequence
  Synthetic oligonucleotide
ccgaatccaccgttggtcgctatagcaata

SEQ ID NO: 488801 - DNA, 30 bp, Artificial Sequence
  Synthetic oligonucleotide
cacatatacccatccggtttacgcgcaata

SEQ ID NO: 488802 - DNA, 30 bp, Artificial Sequence
  Synthetic oligonucleotide
ccactatctggcggactaggaatcgcaata

SEQ ID NO: 488803 - DNA, 30 bp, Artificial Sequence
  Synthetic oligonucleotide
tacgcatgttccgattcacccttcgcaata

SEQ ID NO: 488804 - DNA, 30 bp, Artificial Sequence
  Synthetic oligonucleotide
ggagaggccttgataatgggctaggcaata

SEQ ID NO: 488805 - DNA, 30 bp, Artificial Sequence
  Synthetic oligonucleotide
ttctccacttacagaaccgcaagggcaata

SEQ ID NO: 488806 - DNA, 30 bp, Artificial Sequence
  Synthetic oligonucleotide
ctgcggtataatgcgaatggaagggcaata

SEQ ID NO: 488807 - DNA, 30 bp, Artificial Sequence
  Synthetic oligonucleotide
agattgtggagtagacggagcagctcaata

SEQ ID NO: 488808 - DNA, 30 bp, Artificial Sequence
  Synthetic oligonucleotide
cttgcacctacaggtatctgatggtcaata

SEQ ID NO: 488809 - DNA, 30 bp, Artificial Sequence
  Synthetic oligonucleotide
taccactaaatagtttgtatcggttcaata

SEQ ID NO: 488810 - DNA, 30 bp, Artificial Sequence
  Synthetic oligonucleotide
gtggactctcagctgtttgcagtttcaata

SEQ ID NO: 488811 - DNA, 30 bp, Artificial Sequence
  Synthetic oligonucleotide
aaatccccgctgagtccagaattttcaata

SEQ ID NO: 488812 - DNA, 31 bp, Artificial Sequence
  Synthetic oligonucleotide
aagtcgtgccgcttgatattagagaagaata

SEQ ID NO: 488813 - DNA, 30 bp, Artificial Sequence
  Synthetic oligonucleotide
acaggtttttcgtggggcctcgacagaata

SEQ ID NO: 488814 - DNA, 30 bp, Artificial Sequence
  Synthetic oligonucleotide
caccgtgtcccacgtagcggggacagaata

SEQ ID NO: 488815 - DNA, 30 bp, Artificial Sequence
  Synthetic oligonucleotide
ttatatctctacacttatagggggagaata

SEQ ID NO: 488816 - DNA, 30 bp, Artificial Sequence
  Synthetic oligonucleotide
ctgtcgcgcacaagtgtccctaatagaata

SEQ ID NO: 488817 - DNA, 30 bp, Artificial Sequence
  Synthetic oligonucleotide
tgcaaatctttgtaacaacgttatagaata

SEQ ID NO: 488818 - DNA, 30 bp, Artificial Sequence
  Synthetic oligonucleotide
cgagggaataagtacaagaaattacgaata

SEQ ID NO: 488819 - DNA, 30 bp, Artificial Sequence
  Synthetic oligonucleotide
gataagttatggattggcagacgccgaata

SEQ ID NO: 488820 - DNA, 30 bp, Artificial Sequence
  Synthetic oligonucleotide
tagactttggtggacgcactcctccgaata

SEQ ID NO: 488821 - DNA, 30 bp, Artificial Sequence
  Synthetic oligonucleotide
gggtggcagatatacggttctacgcgaata

SEQ ID NO: 488822 - DNA, 30 bp, Artificial Sequence
  Synthetic oligonucleotide
agtcgccccatccgttctgcttcgcgaata

SEQ ID NO: 488823 - DNA, 30 bp, Artificial Sequence
  Synthetic oligonucleotide
gatagaagtaaatgcagcaatgggcgaata

SEQ ID NO: 488824 - DNA, 30 bp, Artificial Sequence
  Synthetic oligonucleotide
aatcctttgatcgcgggaaagaatcgaata

SEQ ID NO: 488825 - DNA, 30 bp, Artificial Sequence
  Synthetic oligonucleotide
cgcgttcccggtaaccgctgacatcgaata

SEQ ID NO: 488826 - DNA, 30 bp, Artificial Sequence
  Synthetic oligonucleotide
tgtctctgacgggcgactatagatcgaata

SEQ ID NO: 488827 - DNA, 30 bp, Artificial Sequence
  Synthetic oligonucleotide
ttactaggtattccaacgtagccaggaata

SEQ ID NO: 488828 - DNA, 30 bp, Artificial Sequence
  Synthetic oligonucleotide
cccggattacccccgtgggggaacggaata

SEQ ID NO: 488829 - DNA, 30 bp, Artificial Sequence
  Synthetic oligonucleotide
cattcttctccctgacgagctaacggaata

SEQ ID NO: 488830 - DNA, 30 bp, Artificial Sequence
  Synthetic oligonucleotide
ctgttgtgcctcgacaggcgcatcggaata

SEQ ID NO: 488831 - DNA, 30 bp, Artificial Sequence
  Synthetic oligonucleotide
cagctaggtacatacatcctcaagggaata

SEQ ID NO: 488832 - DNA, 30 bp, Artificial Sequence
  Synthetic oligonucleotide
caccagctcggggttctgcacgcgggaata

SEQ ID NO: 488833 - DNA, 30 bp, Artificial Sequence
  Synthetic oligonucleotide
acctccagagagcacggagactggggaata

SEQ ID NO: 488834 - DNA, 30 bp, Artificial Sequence
  Synthetic oligonucleotide
attctcttcgatgatggtaaaatgggaata

SEQ ID NO: 488835 - DNA, 30 bp, Artificial Sequence
  Synthetic oligonucleotide
gattctcgaatcggtataaacggtggaata

SEQ ID NO: 488836 - DNA, 30 bp, Artificial Sequence
  Synthetic oligonucleotide
tgctgctttattatcggctgtggtggaata

SEQ ID NO: 488837 - DNA, 30 bp, Artificial Sequence
  Synthetic oligonucleotide
tatatcctcaacacgtctctcgttggaata

SEQ ID NO: 488838 - DNA, 30 bp, Artificial Sequence
  Synthetic oligonucleotide
gttactaggggcagagattattttggaata

SEQ ID NO: 488839 - DNA, 30 bp, Artificial Sequence
  Synthetic oligonucleotide
catgggcaagtagaatgttaatcatgaata

SEQ ID NO: 488840 - DNA, 30 bp, Artificial Sequence
  Synthetic oligonucleotide
atctcttgatctggtacggtatcatgaata

SEQ ID NO: 488841 - DNA, 30 bp, Artificial Sequence
  Synthetic oligonucleotide
taatgtaatatattgacagctggatgaata

SEQ ID NO: 488842 - DNA, 30 bp, Artificial Sequence
  Synthetic oligonucleotide
gttagagggcttacgaatgcatgatgaata

SEQ ID NO: 488843 - DNA, 30 bp, Artificial Sequence
  Synthetic oligonucleotide
attgtatcctaggttttgccgcactgaata

SEQ ID NO: 488844 - DNA, 30 bp, Artificial Sequence
  Synthetic oligonucleotide
tgctataataaggggtgcttcacctgaata

SEQ ID NO: 488845 - DNA, 30 bp, Artificial Sequence
  Synthetic oligonucleotide
ttatattaattacggaatgatagctgaata

SEQ ID NO: 488846 - DNA, 30 bp, Artificial Sequence
  Synthetic oligonucleotide
tgtgttcataattcaatcgccgcgtgaata

SEQ ID NO: 488847 - DNA, 30 bp, Artificial Sequence
  Synthetic oligonucleotide
gatgcatggagggatatcatacgcataata

SEQ ID NO: 488848 - DNA, 30 bp, Artificial Sequence
  Synthetic oligonucleotide
tgcagcgatgtcatcggttagcagataata

SEQ ID NO: 488849 - DNA, 30 bp, Artificial Sequence
  Synthetic oligonucleotide
cactgcggctggtggagagtaaggataata

SEQ ID NO: 488850 - DNA, 30 bp, Artificial Sequence
  Synthetic oligonucleotide
ttgttgaaattcgttagctgagggataata

SEQ ID NO: 488851 - DNA, 30 bp, Artificial Sequence
  Synthetic oligonucleotide
gtccttccatgaattccttggtggataata

SEQ ID NO: 488852 - DNA, 30 bp, Artificial Sequence
  Synthetic oligonucleotide
atttagacacgcgatcgctgcatgataata

SEQ ID NO: 488853 - DNA, 30 bp, Artificial Sequence
  Synthetic oligonucleotide
tcgttgggtgtaggaacttaataactaata

SEQ ID NO: 488854 - DNA, 30 bp, Artificial Sequence
  Synthetic oligonucleotide
ttggtcttggattacaaagttacactaata

SEQ ID NO: 488855 - DNA, 30 bp, Artificial Sequence
  Synthetic oligonucleotide
tactttgacctagcagatatatcactaata

SEQ ID NO: 488856 - DNA, 30 bp, Artificial Sequence
  Synthetic oligonucleotide
tactctcgtatatgggttaggatactaata

SEQ ID NO: 488857 - DNA, 30 bp, Artificial Sequence
  Synthetic oligonucleotide
tatgtcttgcctatcaggattaacctaata

SEQ ID NO: 488858 - DNA, 30 bp, Artificial Sequence
  Synthetic oligonucleotide
aatttgccgtctgacgtctggaccctaata

SEQ ID NO: 488859 - DNA, 30 bp, Artificial Sequence
  Synthetic oligonucleotide
atcacagacaatcggacgagcatcctaata

SEQ ID NO: 488860 - DNA, 30 bp, Artificial Sequence
  Synthetic oligonucleotide
ttcagaactaggggtatggttatcctaata

SEQ ID NO: 488861 - DNA, 30 bp, Artificial Sequence
  Synthetic oligonucleotide
gcattgtaggttttaggctacaagctaata

SEQ ID NO: 488862 - DNA, 30 bp, Artificial Sequence
  Synthetic oligonucleotide
aaaggagtttatcttcgtataaatctaata

SEQ ID NO: 488863 - DNA, 30 bp, Artificial Sequence
  Synthetic oligonucleotide
ctttaccctcatgcgaccggcagtctaata

SEQ ID NO: 488864 - DNA, 30 bp, Artificial Sequence
  Synthetic oligonucleotide
tttccaggcttgaccagataacgtctaata

SEQ ID NO: 488865 - DNA, 30 bp, Artificial Sequence
  Synthetic oligonucleotide
attggtgctatagctaagtagcttctaata

SEQ ID NO: 488866 - DNA, 30 bp, Artificial Sequence
  Synthetic oligonucleotide
cagatcataggattcaaattgtttctaata

SEQ ID NO: 488867 - DNA, 30 bp, Artificial Sequence
  Synthetic oligonucleotide
gtctacggtcccaaacgcggggccgtaata

SEQ ID NO: 488868 - DNA, 30 bp, Artificial Sequence
  Synthetic oligonucleotide
gttctacagctaattagtctagatgtaata

SEQ ID NO: 488869 - DNA, 30 bp, Artificial Sequence
  Synthetic oligonucleotide
aatgacaagacctgtgttattgatgtaata

SEQ ID NO: 488870 - DNA, 30 bp, Artificial Sequence
  Synthetic oligonucleotide
ccgaagcatagggcacaatcaattgtaata

SEQ ID NO: 488871 - DNA, 30 bp, Artificial Sequence
  Synthetic oligonucleotide
tgttcattagcctccggtaagattgtaata

SEQ ID NO: 488872 - DNA, 30 bp, Artificial Sequence
  Synthetic oligonucleotide
aatatcccttgcgacttagcttcattaata

SEQ ID NO: 488873 - DNA, 30 bp, Artificial Sequence
  Synthetic oligonucleotide
tcaaaaaaaggcatacgtccgttattaata

SEQ ID NO: 488874 - DNA, 30 bp, Artificial Sequence
  Synthetic oligonucleotide
agaagccgcgtgtggtaaggacgcttaata

SEQ ID NO: 488875 - DNA, 30 bp, Artificial Sequence
  Synthetic oligonucleotide
aagcgcgttaagattacacgccgcttaata

SEQ ID NO: 488876 - DNA, 28 bp, Artificial Sequence
  Synthetic oligonucleotide
catcggactttttctagtcaatttaata

SEQ ID NO: 488877 - DNA, 30 bp, Artificial Sequence
  Synthetic oligonucleotide
tcatgggggggcctatggccccatttaata

SEQ ID NO: 488878 - DNA, 30 bp, Artificial Sequence
  Synthetic oligonucleotide
ataggcacttcagtatttccgcatttaata

SEQ ID NO: 488879 - DNA, 30 bp, Artificial Sequence
  Synthetic oligonucleotide
ggggcatccgcgcaggaaatgcaaaacata

SEQ ID NO: 488880 - DNA, 30 bp, Artificial Sequence
  Synthetic oligonucleotide
acgattgcatgagctgtaggatacaacata

SEQ ID NO: 488881 - DNA, 30 bp, Artificial Sequence
  Synthetic oligonucleotide
gattacaaatagcggccaattgccaacata

SEQ ID NO: 488882 - DNA, 30 bp, Artificial Sequence
  Synthetic oligonucleotide
taacctcaccgggatttaaattgcaacata

SEQ ID NO: 488883 - DNA, 30 bp, Artificial Sequence
  Synthetic oligonucleotide
gccgagtgcacactcgtgcacgaacacata

SEQ ID NO: 488884 - DNA, 30 bp, Artificial Sequence
  Synthetic oligonucleotide
ccctcttggattcgcaggatcatacacata

SEQ ID NO: 488885 - DNA, 30 bp, Artificial Sequence
  Synthetic oligonucleotide
tttcgtatcaacgacgtagccctacacata

SEQ ID NO: 488886 - DNA, 30 bp, Artificial Sequence
  Synthetic oligonucleotide
aaatattttgagcactcgtggtcccacata

SEQ ID NO: 488887 - DNA, 30 bp, Artificial Sequence
  Synthetic oligonucleotide
aaggttatgctcgttatataaggtcacata

SEQ ID NO: 488888 - DNA, 30 bp, Artificial Sequence
  Synthetic oligonucleotide
attttcacgcgataatcgtaatcagacata

SEQ ID NO: 488889 - DNA, 30 bp, Artificial Sequence
  Synthetic oligonucleotide
gtctaacccgcacagagacgcatagacata

SEQ ID NO: 488890 - DNA, 30 bp, Artificial Sequence
  Synthetic oligonucleotide
aatgaagactgggcaattgtcatagacata

SEQ ID NO: 488891 - DNA, 30 bp, Artificial Sequence
  Synthetic oligonucleotide
ttttcaaaaatggagagcacgcgcgacata

SEQ ID NO: 488892 - DNA, 30 bp, Artificial Sequence
  Synthetic oligonucleotide
gtcatttgtgttactccctccgaggacata

SEQ ID NO: 488893 - DNA, 30 bp, Artificial Sequence
  Synthetic oligonucleotide
tctatcctgtcgtgagtgtcggtggacata

SEQ ID NO: 488894 - DNA, 30 bp, Artificial Sequence
  Synthetic oligonucleotide
gctctgacaccacctcggaaattatacata

SEQ ID NO: 488895 - DNA, 30 bp, Artificial Sequence
  Synthetic oligonucleotide
cgtcacaccatgtcctcttatttatacata

SEQ ID NO: 488896 - DNA, 30 bp, Artificial Sequence
  Synthetic oligonucleotide
gattcaatagttggactgcggcgctacata

SEQ ID NO: 488897 - DNA, 30 bp, Artificial Sequence
  Synthetic oligonucleotide
tactcttgacgcaagccctctctctacata

SEQ ID NO: 488898 - DNA, 30 bp, Artificial Sequence
  Synthetic oligonucleotide
catggtagtttcccggcaaatgtctacata

SEQ ID NO: 488899 - DNA, 30 bp, Artificial Sequence
  Synthetic oligonucleotide
aagctttcatatcccgttaaatagtacata

SEQ ID NO: 488900 - DNA, 30 bp, Artificial Sequence
  Synthetic oligonucleotide
gatctatacgataagatacgaacgtacata

SEQ ID NO: 488901 - DNA, 30 bp, Artificial Sequence
  Synthetic oligonucleotide
tcgcattttaggcatgagcttgcgtacata

SEQ ID NO: 488902 - DNA, 30 bp, Artificial Sequence
  Synthetic oligonucleotide
ttatatggcagcgactcctcaaattacata

SEQ ID NO: 488903 - DNA, 30 bp, Artificial Sequence
  Synthetic oligonucleotide
actcacctttgcgttcatttgtattacata

SEQ ID NO: 488904 - DNA, 30 bp, Artificial Sequence
  Synthetic oligonucleotide
aattatgttggcggacggataccttacata

SEQ ID NO: 488905 - DNA, 30 bp, Artificial Sequence
  Synthetic oligonucleotide
gtcgaccggccgctgtattggtcttacata

SEQ ID NO: 488906 - DNA, 30 bp, Artificial Sequence
  Synthetic oligonucleotide
tgtaatcttattcactagatagtttacata

SEQ ID NO: 488907 - DNA, 30 bp, Artificial Sequence
  Synthetic oligonucleotide
attgcacaatgtaaaaattatgtttacata

SEQ ID NO: 488908 - DNA, 30 bp, Artificial Sequence
  Synthetic oligonucleotide
ttttactcgaaaaacgccctctgcaccata

SEQ ID NO: 488909 - DNA, 30 bp, Artificial Sequence
  Synthetic oligonucleotide
cgaaccttcttcctgtaggcgatcaccata

SEQ ID NO: 488910 - DNA, 30 bp, Artificial Sequence
  Synthetic oligonucleotide
taagtgtcccttaatccttccgtcaccata

SEQ ID NO: 488911 - DNA, 30 bp, Artificial Sequence
  Synthetic oligonucleotide
gagtccgtggcgtccacttggctgaccata

SEQ ID NO: 488912 - DNA, 30 bp, Artificial Sequence
  Synthetic oligonucleotide
ctccgcatgataggttttgctttgaccata

SEQ ID NO: 488913 - DNA, 30 bp, Artificial Sequence
  Synthetic oligonucleotide
aaataaatattcatgagactggataccata

SEQ ID NO: 488914 - DNA, 30 bp, Artificial Sequence
  Synthetic oligonucleotide
acatcccatcataggccggtctttaccata

SEQ ID NO: 488915 - DNA, 30 bp, Artificial Sequence
  Synthetic oligonucleotide
taaggtcagttcacaagtattgtacccata

SEQ ID NO: 488916 - DNA, 30 bp, Artificial Sequence
  Synthetic oligonucleotide
tcagaggtggcagctttgctgaaccccata

SEQ ID NO: 488917 - DNA, 30 bp, Artificial Sequence
  Synthetic oligonucleotide
ctgtctgctgggtttgggtgtcagcccata

SEQ ID NO: 488918 - DNA, 30 bp, Artificial Sequence
  Synthetic oligonucleotide
ataatcgcccctagtttcacatggcccata

SEQ ID NO: 488919 - DNA, 30 bp, Artificial Sequence
  Synthetic oligonucleotide
ttcagtgatgatctctaggaggttcccata

SEQ ID NO: 488920 - DNA, 30 bp, Artificial Sequence
  Synthetic oligonucleotide
atgtcggcaatggtcaatttacaagccata

SEQ ID NO: 488921 - DNA, 30 bp, Artificial Sequence
  Synthetic oligonucleotide
gcgatggcgccctagacaccgtgagccata

SEQ ID NO: 488922 - DNA, 30 bp, Artificial Sequence
  Synthetic oligonucleotide
ccgatccactcagcggattcgctagccata

SEQ ID NO: 488923 - DNA, 30 bp, Artificial Sequence
  Synthetic oligonucleotide
cccctttagggggcgagcacagtcgccata

SEQ ID NO: 488924 - DNA, 30 bp, Artificial Sequence
  Synthetic oligonucleotide
agggacagatgcctggtgcttggggccata

SEQ ID NO: 488925 - DNA, 30 bp, Artificial Sequence
  Synthetic oligonucleotide
gatggcaaattcggcaccagtagtgccata

SEQ ID NO: 488926 - DNA, 30 bp, Artificial Sequence
  Synthetic oligonucleotide
catccttcggggcccgggcgcaaatccata

SEQ ID NO: 488927 - DNA, 30 bp, Artificial Sequence
  Synthetic oligonucleotide
tgtggtttaaggccggtacaccgatccata

SEQ ID NO: 488928 - DNA, 30 bp, Artificial Sequence
  Synthetic oligonucleotide
taaaattttaaatcgacaaattcctccata

SEQ ID NO: 488929 - DNA, 30 bp, Artificial Sequence
  Synthetic oligonucleotide
ggtttgcggatgggttggacgccgtccata

SEQ ID NO: 488930 - DNA, 30 bp, Artificial Sequence
  Synthetic oligonucleotide
catcgggctagctggttattatggtccata

SEQ ID NO: 488931 - DNA, 30 bp, Artificial Sequence
  Synthetic oligonucleotide
cagttccttcgagggccgtgctattccata

SEQ ID NO: 488932 - DNA, 30 bp, Artificial Sequence
  Synthetic oligonucleotide
agggacactggaagccaacaggcttccata

SEQ ID NO: 488933 - DNA, 30 bp, Artificial Sequence
  Synthetic oligonucleotide
actgacaatttgggggtttcaagttccata

SEQ ID NO: 488934 - DNA, 30 bp, Artificial Sequence
  Synthetic oligonucleotide
tcggaagtatccttaatcggccgcagcata

SEQ ID NO: 488935 - DNA, 30 bp, Artificial Sequence
  Synthetic oligonucleotide
agaactggcatatatacagccaggagcata

SEQ ID NO: 488936 - DNA, 30 bp, Artificial Sequence
  Synthetic oligonucleotide
aaaatgccttatgcgggcaatgtgagcata

SEQ ID NO: 488937 - DNA, 30 bp, Artificial Sequence
  Synthetic oligonucleotide
caatggggaggggtctacctttatagcata

SEQ ID NO: 488938 - DNA, 30 bp, Artificial Sequence
  Synthetic oligonucleotide
cttgataaggtacgtacccactgtagcata

SEQ ID NO: 488939 - DNA, 30 bp, Artificial Sequence
  Synthetic oligonucleotide
aatctaaatcgagaccttgaatttagcata

SEQ ID NO: 488940 - DNA, 30 bp, Artificial Sequence
  Synthetic oligonucleotide
tacatagcttactcgtactcccgccgcata

SEQ ID NO: 488941 - DNA, 30 bp, Artificial Sequence
  Synthetic oligonucleotide
gaacatgtgttctatttaatgtagcgcata

SEQ ID NO: 488942 - DNA, 30 bp, Artificial Sequence
  Synthetic oligonucleotide
atttatgccatagtccgcatcactcgcata

SEQ ID NO: 488943 - DNA, 30 bp, Artificial Sequence
  Synthetic oligonucleotide
gcttatacgagggttggaagagctcgcata

SEQ ID NO: 488944 - DNA, 30 bp, Artificial Sequence
  Synthetic oligonucleotide
tttgctcgacttagcagatgatcaggcata

SEQ ID NO: 488945 - DNA, 30 bp, Artificial Sequence
  Synthetic oligonucleotide
aacaacccgataggagtgtttttaggcata

SEQ ID NO: 488946 - DNA, 30 bp, Artificial Sequence
  Synthetic oligonucleotide
cagacatatcgaggctaagcgcacggcata

SEQ ID NO: 488947 - DNA, 30 bp, Artificial Sequence
  Synthetic oligonucleotide
cacacatgtcgtcaggaggttagcggcata

SEQ ID NO: 488948 - DNA, 30 bp, Artificial Sequence
  Synthetic oligonucleotide
gttcaatccatgtccttgtacggcggcata

SEQ ID NO: 488949 - DNA, 30 bp, Artificial Sequence
  Synthetic oligonucleotide
gtatttcgcagatgctcggaggagggcata

SEQ ID NO: 488950 - DNA, 30 bp, Artificial Sequence
  Synthetic oligonucleotide
actttccccgtacatatgtcgcactgcata

SEQ ID NO: 488951 - DNA, 30 bp, Artificial Sequence
  Synthetic oligonucleotide
gctcttcagcttaagtaattcccctgcata

SEQ ID NO: 488952 - DNA, 30 bp, Artificial Sequence
  Synthetic oligonucleotide
tcaccctcacccgtcggggtgaggtgcata

SEQ ID NO: 488953 - DNA, 30 bp, Artificial Sequence
  Synthetic oligonucleotide
atgtctctgttggcaccggctatgtgcata

SEQ ID NO: 488954 - DNA, 30 bp, Artificial Sequence
  Synthetic oligonucleotide
ttctatgctggcctccagaaaaaaatcata

SEQ ID NO: 488955 - DNA, 30 bp, Artificial Sequence
  Synthetic oligonucleotide
ccccaagggtaatcgacggtgtaaatcata

SEQ ID NO: 488956 - DNA, 30 bp, Artificial Sequence
  Synthetic oligonucleotide
aaattctatcattgatcgccactaatcata

SEQ ID NO: 488957 - DNA, 30 bp, Artificial Sequence
  Synthetic oligonucleotide
ttgcccgcaaacctgtggatatagatcata

SEQ ID NO: 488958 - DNA, 30 bp, Artificial Sequence
  Synthetic oligonucleotide
agattgaggcggttggatctcaggatcata

SEQ ID NO: 488959 - DNA, 30 bp, Artificial Sequence
  Synthetic oligonucleotide
gcagcttgggattcccgtctgaggatcata

SEQ ID NO: 488960 - DNA, 30 bp, Artificial Sequence
  Synthetic oligonucleotide
aatgacggagctatgggtcaggggatcata

SEQ ID NO: 488961 - DNA, 30 bp, Artificial Sequence
  Synthetic oligonucleotide
ttatacgggtcaggggttctttggatcata

SEQ ID NO: 488962 - DNA, 30 bp, Artificial Sequence
  Synthetic oligonucleotide
gtgattttctttaagtctcctactatcata

SEQ ID NO: 488963 - DNA, 30 bp, Artificial Sequence
  Synthetic oligonucleotide
gccccttgagagcgttttacatctatcata

SEQ ID NO: 488964 - DNA, 30 bp, Artificial Sequence
  Synthetic oligonucleotide
aagttaccctgcgcttgtaggcgtatcata

SEQ ID NO: 488965 - DNA, 30 bp, Artificial Sequence
  Synthetic oligonucleotide
actttttcgcagccatgtcccgaactcata

SEQ ID NO: 488966 - DNA, 30 bp, Artificial Sequence
  Synthetic oligonucleotide
tcttggcacagaggtgttgatggactcata

SEQ ID NO: 488967 - DNA, 30 bp, Artificial Sequence
  Synthetic oligonucleotide
gggtatgagcgcccggttagctgactcata

SEQ ID NO: 488968 - DNA, 30 bp, Artificial Sequence
  Synthetic oligonucleotide
tctaagctaatggaatcagatatactcata

SEQ ID NO: 488969 - DNA, 30 bp, Artificial Sequence
  Synthetic oligonucleotide
ctcactcattttgcccgacggagcctcata

SEQ ID NO: 488970 - DNA, 30 bp, Artificial Sequence
  Synthetic oligonucleotide
gtaagaatggtatgggctgtgagcctcata

SEQ ID NO: 488971 - DNA, 30 bp, Artificial Sequence
  Synthetic oligonucleotide
tttgatagacgatgctgctagcgcctcata

SEQ ID NO: 488972 - DNA, 30 bp, Artificial Sequence
  Synthetic oligonucleotide
tgtacgcacctctcgtagagtggcctcata

SEQ ID NO: 488973 - DNA, 30 bp, Artificial Sequence
  Synthetic oligonucleotide
agctcgtccaaattatggaacgagctcata

SEQ ID NO: 488974 - DNA, 30 bp, Artificial Sequence
  Synthetic oligonucleotide
tcaatcagtagctggcaaacttatctcata

SEQ ID NO: 488975 - DNA, 30 bp, Artificial Sequence
  Synthetic oligonucleotide
ttaagtcctttggtagcctaaactctcata

SEQ ID NO: 488976 - DNA, 30 bp, Artificial Sequence
  Synthetic oligonucleotide
tttatccattcatacttggttactctcata

SEQ ID NO: 488977 - DNA, 30 bp, Artificial Sequence
  Synthetic oligonucleotide
gcccacgctctatgtagtcggacagtcata

SEQ ID NO: 488978 - DNA, 30 bp, Artificial Sequence
  Synthetic oligonucleotide
taaccaagagtgagtaattcgaccgtcata

SEQ ID NO: 488979 - DNA, 30 bp, Artificial Sequence
  Synthetic oligonucleotide
gctaaatgtctgtttaacggacgcgtcata

SEQ ID NO: 488980 - DNA, 30 bp, Artificial Sequence
  Synthetic oligonucleotide
gttaactttcaatcgatagtaacggtcata

SEQ ID NO: 488981 - DNA, 30 bp, Artificial Sequence
  Synthetic oligonucleotide
tgtacctgtagccatctgcgctcggtcata

SEQ ID NO: 488982 - DNA, 30 bp, Artificial Sequence
  Synthetic oligonucleotide
gatagttactgacgtgcacctaacttcata

SEQ ID NO: 488983 - DNA, 30 bp, Artificial Sequence
  Synthetic oligonucleotide
tacataagtctctggaatcgtctcttcata

SEQ ID NO: 488984 - DNA, 30 bp, Artificial Sequence
  Synthetic oligonucleotide
gtggtattcgttgccaacgcttagttcata

SEQ ID NO: 488985 - DNA, 30 bp, Artificial Sequence
  Synthetic oligonucleotide
gcaaagatcaaaagtaagcatgcgttcata

SEQ ID NO: 488986 - DNA, 30 bp, Artificial Sequence
  Synthetic oligonucleotide
gaactgcagttagaaatgaatttgttcata

SEQ ID NO: 488987 - DNA, 30 bp, Artificial Sequence
  Synthetic oligonucleotide
tttttacggcaatgtgaaaagaatttcata

SEQ ID NO: 488988 - DNA, 30 bp, Artificial Sequence
  Synthetic oligonucleotide
gttaatttccattgaggcggagctttcata

SEQ ID NO: 488989 - DNA, 30 bp, Artificial Sequence
  Synthetic oligonucleotide
atttgctgttccaaccgtcagcgtttcata

SEQ ID NO: 488990 - DNA, 30 bp, Artificial Sequence
  Synthetic oligonucleotide
gtaattaagcatttatgtaggattttcata

SEQ ID NO: 488991 - DNA, 30 bp, Artificial Sequence
  Synthetic oligonucleotide
accgggtagcaaattgatggagttttcata

SEQ ID NO: 488992 - DNA, 30 bp, Artificial Sequence
  Synthetic oligonucleotide
cagcacacggatgcaacactgtttttcata

SEQ ID NO: 488993 - DNA, 30 bp, Artificial Sequence
  Synthetic oligonucleotide
agtcacatgctgcacgactttgcaaagata

SEQ ID NO: 488994 - DNA, 30 bp, Artificial Sequence
  Synthetic oligonucleotide
ggcctacttctacctattgatggaaagata

SEQ ID NO: 488995 - DNA, 30 bp, Artificial Sequence
  Synthetic oligonucleotide
acattacgtttttaggtcattaccaagata

SEQ ID NO: 488996 - DNA, 30 bp, Artificial Sequence
  Synthetic oligonucleotide
gcggtatatgtgcttggtgactccaagata

SEQ ID NO: 488997 - DNA, 30 bp, Artificial Sequence
  Synthetic oligonucleotide
ttaccaccaagtatccatatccagaagata

SEQ ID NO: 488998 - DNA, 30 bp, Artificial Sequence
  Synthetic oligonucleotide
tctttcgtggtcgaaagtgcctataagata

SEQ ID NO: 488999 - DNA, 30 bp, Artificial Sequence
  Synthetic oligonucleotide
gaaacagctacaatccgggttctacagata

SEQ ID NO: 489000 - DNA, 30 bp, Artificial Sequence
  Synthetic oligonucleotide
gtttgtattctaaggcccagggtacagata

SEQ ID NO: 489001 - DNA, 30 bp, Artificial Sequence
  Synthetic oligonucleotide
acgaactcacaggtccgtagggtacagata

SEQ ID NO: 489002 - DNA, 30 bp, Artificial Sequence
  Synthetic oligonucleotide
gaatgataggttaccacgggtaaccagata

SEQ ID NO: 489003 - DNA, 30 bp, Artificial Sequence
  Synthetic oligonucleotide
gagtagaggggagtttcgttgtcccagata

SEQ ID NO: 489004 - DNA, 30 bp, Artificial Sequence
  Synthetic oligonucleotide
tttttgagcgtcacgcaggcaggccagata

SEQ ID NO: 489005 - DNA, 30 bp, Artificial Sequence
  Synthetic oligonucleotide
gttagtattaaccgctaaggaaagcagata

SEQ ID NO: 489006 - DNA, 30 bp, Artificial Sequence
  Synthetic oligonucleotide
ttgatctgatgtaaggaactaaagcagata

SEQ ID NO: 489007 - DNA, 30 bp, Artificial Sequence
  Synthetic oligonucleotide
ctcgtgacgggcttccttgaatatcagata

SEQ ID NO: 489008 - DNA, 30 bp, Artificial Sequence
  Synthetic oligonucleotide
ttgtgcctaattacagtgtttgctcagata

SEQ ID NO: 489009 - DNA, 27 bp, Artificial Sequence
  Synthetic oligonucleotide
agggttaatgaattgagtcgtcagata

SEQ ID NO: 489010 - DNA, 30 bp, Artificial Sequence
  Synthetic oligonucleotide
taccccaccaccggagcatatggagagata

SEQ ID NO: 489011 - DNA, 30 bp, Artificial Sequence
  Synthetic oligonucleotide
agtcgcggcctggatctttgggccgagata

SEQ ID NO: 489012 - DNA, 30 bp, Artificial Sequence
  Synthetic oligonucleotide
ttctgtatcaacatggtacaaacggagata

SEQ ID NO: 489013 - DNA, 30 bp, Artificial Sequence
  Synthetic oligonucleotide
agccccctcccaaggggagcttgggagata

SEQ ID NO: 489014 - DNA, 30 bp, Artificial Sequence
  Synthetic oligonucleotide
cgcttgatacgatcatcgttacgtgagata

SEQ ID NO: 489015 - DNA, 30 bp, Artificial Sequence
  Synthetic oligonucleotide
gttaattaagttcattttcggggtgagata

SEQ ID NO: 489016 - DNA, 30 bp, Artificial Sequence
  Synthetic oligonucleotide
ccgagctcaagctcagaaaggagatagata

SEQ ID NO: 489017 - DNA, 30 bp, Artificial Sequence
  Synthetic oligonucleotide
tttgttgtttggcattgtagagtatagata

SEQ ID NO: 489018 - DNA, 30 bp, Artificial Sequence
  Synthetic oligonucleotide
atttcaaggagatcttatccggactagata

SEQ ID NO: 489019 - DNA, 30 bp, Artificial Sequence
  Synthetic oligonucleotide
ttttgggtaaagcggcagaagttctagata

SEQ ID NO: 489020 - DNA, 30 bp, Artificial Sequence
  Synthetic oligonucleotide
gagtgttcgtaggatacgacgtattagata

SEQ ID NO: 489021 - DNA, 30 bp, Artificial Sequence
  Synthetic oligonucleotide
acgagtttaatcccgccgggtttttagata

SEQ ID NO: 489022 - DNA, 30 bp, Artificial Sequence
  Synthetic oligonucleotide
accgataacccaaagtcttagtagacgata

SEQ ID NO: 489023 - DNA, 30 bp, Artificial Sequence
  Synthetic oligonucleotide
tgcgcgcccggtccgtctaatactacgata

SEQ ID NO: 489024 - DNA, 30 bp, Artificial Sequence
  Synthetic oligonucleotide
ttgtaagaatgtaggcgacgtcctacgata

SEQ ID NO: 489025 - DNA, 30 bp, Artificial Sequence
  Synthetic oligonucleotide
gtaaagacctcggttcgtgcctgtacgata

SEQ ID NO: 489026 - DNA, 30 bp, Artificial Sequence
  Synthetic oligonucleotide
tctagagcacgcgcagactgtattacgata

SEQ ID NO: 489027 - DNA, 30 bp, Artificial Sequence
  Synthetic oligonucleotide
ggcttcggtatccacatcgcggtagcgata

SEQ ID NO: 489028 - DNA, 30 bp, Artificial Sequence
  Synthetic oligonucleotide
ataagctaataaatgagttaattagcgata

SEQ ID NO: 489029 - DNA, 30 bp, Artificial Sequence
  Synthetic oligonucleotide
cttttgctgttagcagggccttacgcgata

SEQ ID NO: 489030 - DNA, 30 bp, Artificial Sequence
  Synthetic oligonucleotide
ctgttgcaggcgactctactcctcgcgata

SEQ ID NO: 489031 - DNA, 30 bp, Artificial Sequence
  Synthetic oligonucleotide
gcggttggccaaaacacaagagtggcgata

SEQ ID NO: 489032 - DNA, 30 bp, Artificial Sequence
  Synthetic oligonucleotide
tttccttataaactaatggtttgtgcgata

SEQ ID NO: 489033 - DNA, 30 bp, Artificial Sequence
  Synthetic oligonucleotide
ggcatcctatcgtgagcggagtaatcgata

SEQ ID NO: 489034 - DNA, 30 bp, Artificial Sequence
  Synthetic oligonucleotide
ggttgatatcccttccctcatcaaaggata

SEQ ID NO: 489035 - DNA, 30 bp, Artificial Sequence
  Synthetic oligonucleotide
ctctctcaatgggacggtattggaaggata

SEQ ID NO: 489036 - DNA, 30 bp, Artificial Sequence
  Synthetic oligonucleotide
cgcattctagtgacgttccccataaggata

SEQ ID NO: 489037 - DNA, 30 bp, Artificial Sequence
  Synthetic oligonucleotide
ggaggtctgtgcaacatattggacaggata

SEQ ID NO: 489038 - DNA, 30 bp, Artificial Sequence
  Synthetic oligonucleotide
ctatgaatgggcatgcagttgtacaggata

SEQ ID NO: 489039 - DNA, 30 bp, Artificial Sequence
  Synthetic oligonucleotide
gatgaacgtgaccaatggtaaagcaggata

SEQ ID NO: 489040 - DNA, 30 bp, Artificial Sequence
  Synthetic oligonucleotide
cgcctgtatttttcgcgttggcgcaggata

SEQ ID NO: 489041 - DNA, 30 bp, Artificial Sequence
  Synthetic oligonucleotide
tgattagttggacccccaggactcaggata

SEQ ID NO: 489042 - DNA, 39 bp, Artificial Sequence
  Synthetic oligonucleotide
agctcgccctagtccattacgcaaattgtatcgaggata

SEQ ID NO: 489043 - DNA, 30 bp, Artificial Sequence
  Synthetic oligonucleotide
gattctccccttgaaagggctaggaggata

SEQ ID NO: 489044 - DNA, 30 bp, Artificial Sequence
  Synthetic oligonucleotide
actttcttggtctaattgacctggaggata

SEQ ID NO: 489045 - DNA, 30 bp, Artificial Sequence
  Synthetic oligonucleotide
agttgtaagacgcatagacccatacggata

SEQ ID NO: 489046 - DNA, 30 bp, Artificial Sequence
  Synthetic oligonucleotide
tgccacgcgctgagtaacggcctacggata

SEQ ID NO: 489047 - DNA, 30 bp, Artificial Sequence
  Synthetic oligonucleotide
gcccgccttgaagtgattagtcggcggata

SEQ ID NO: 489048 - DNA, 30 bp, Artificial Sequence
  Synthetic oligonucleotide
cagaccaactacgttgccaaagatcggata

SEQ ID NO: 489049 - DNA, 30 bp, Artificial Sequence
  Synthetic oligonucleotide
gcatacagatagcttcgttctcctcggata

SEQ ID NO: 489050 - DNA, 30 bp, Artificial Sequence
  Synthetic oligonucleotide
tttttacgggtgacgtacttagcagggata

SEQ ID NO: 489051 - DNA, 30 bp, Artificial Sequence
  Synthetic oligonucleotide
aacattggtcggaaatccggccccgggata

SEQ ID NO: 489052 - DNA, 30 bp, Artificial Sequence
  Synthetic oligonucleotide
tatagggaatcccctgtgtagggcgggata

SEQ ID NO: 489053 - DNA, 30 bp, Artificial Sequence
  Synthetic oligonucleotide
atgaatagtagttagatgcagctcgggata

SEQ ID NO: 489054 - DNA, 30 bp, Artificial Sequence
  Synthetic oligonucleotide
aggcgatttgcgcagctacctagggggata

SEQ ID NO: 489055 - DNA, 30 bp, Artificial Sequence
  Synthetic oligonucleotide
aaaaaagtatgacagattttcatggggata

SEQ ID NO: 489056 - DNA, 30 bp, Artificial Sequence
  Synthetic oligonucleotide
gttctatgggttgtacacacatatgggata

SEQ ID NO: 489057 - DNA, 30 bp, Artificial Sequence
  Synthetic oligonucleotide
gaagctcgtgggttgtagtcatgtgggata

SEQ ID NO: 489058 - DNA, 30 bp, Artificial Sequence
  Synthetic oligonucleotide
accatttaatccgcatggtgtagatggata

SEQ ID NO: 489059 - DNA, 30 bp, Artificial Sequence
  Synthetic oligonucleotide
gagacacggctagtaatccgagcctggata

SEQ ID NO: 489060 - DNA, 30 bp, Artificial Sequence
  Synthetic oligonucleotide
cgccttggctgttttcagctaagctggata

SEQ ID NO: 489061 - DNA, 30 bp, Artificial Sequence
  Synthetic oligonucleotide
ctatattctgctgggcgaatcttctggata

SEQ ID NO: 489062 - DNA, 30 bp, Artificial Sequence
  Synthetic oligonucleotide
gaattgggctccaccatacttcggtggata

SEQ ID NO: 489063 - DNA, 30 bp, Artificial Sequence
  Synthetic oligonucleotide
gcggcaaacggatccgccacggtgtggata

SEQ ID NO: 489064 - DNA, 30 bp, Artificial Sequence
  Synthetic oligonucleotide
gctctcatacgcggctcagctgattggata

SEQ ID NO: 489065 - DNA, 30 bp, Artificial Sequence
  Synthetic oligonucleotide
acgccccattactgacctgattcttggata

SEQ ID NO: 489066 - DNA, 30 bp, Artificial Sequence
  Synthetic oligonucleotide
gcatgtctgccgacttcatgaagttggata

SEQ ID NO: 489067 - DNA, 30 bp, Artificial Sequence
  Synthetic oligonucleotide
gaaaagtgttgtttcttttatttttggata

SEQ ID NO: 489068 - DNA, 30 bp, Artificial Sequence
  Synthetic oligonucleotide
cgtctctcatgtaattatggagaaatgata

SEQ ID NO: 489069 - DNA, 30 bp, Artificial Sequence
  Synthetic oligonucleotide
tcactgacctgtagatgcaaggcaatgata

SEQ ID NO: 489070 - DNA, 30 bp, Artificial Sequence
  Synthetic oligonucleotide
ttttgtcaggaccatatgtgttacatgata

SEQ ID NO: 489071 - DNA, 30 bp, Artificial Sequence
  Synthetic oligonucleotide
gacctacgttaagttgatatcgtcatgata

SEQ ID NO: 489072 - DNA, 30 bp, Artificial Sequence
  Synthetic oligonucleotide
tcaagaaaggtcatcattgcatggatgata

SEQ ID NO: 489073 - DNA, 30 bp, Artificial Sequence
  Synthetic oligonucleotide
aattgatatccgtcttatcatcatatgata

SEQ ID NO: 489074 - DNA, 30 bp, Artificial Sequence
  Synthetic oligonucleotide
tgactctaagatgcatttatggatatgata

SEQ ID NO: 489075 - DNA, 30 bp, Artificial Sequence
  Synthetic oligonucleotide
agcgccaggcccattatttgttttatgata

SEQ ID NO: 489076 - DNA, 30 bp, Artificial Sequence
  Synthetic oligonucleotide
agagcaagtcgtagatggggcgtactgata

SEQ ID NO: 489077 - DNA, 30 bp, Artificial Sequence
  Synthetic oligonucleotide
gaagcggaaaacccaggtggaggcctgata

SEQ ID NO: 489078 - DNA, 30 bp, Artificial Sequence
  Synthetic oligonucleotide
ctgcagctaacattctttgataagctgata

SEQ ID NO: 489079 - DNA, 25 bp, Artificial Sequence
  Synthetic oligonucleotide
cgatttgtaggccttagggctgata

SEQ ID NO: 489080 - DNA, 30 bp, Artificial Sequence
  Synthetic oligonucleotide
ttactagtactaccaggtcgtgggctgata

SEQ ID NO: 489081 - DNA, 30 bp, Artificial Sequence
  Synthetic oligonucleotide
aatgatgtaatatctcaggactctctgata

SEQ ID NO: 489082 - DNA, 30 bp, Artificial Sequence
  Synthetic oligonucleotide
gatgttgaatattggggttcactagtgata

SEQ ID NO: 489083 - DNA, 30 bp, Artificial Sequence
  Synthetic oligonucleotide
atcatttcgccttcgccactttccgtgata

SEQ ID NO: 489084 - DNA, 30 bp, Artificial Sequence
  Synthetic oligonucleotide
gttacgaagcacaactaagtttccgtgata

SEQ ID NO: 489085 - DNA, 30 bp, Artificial Sequence
  Synthetic oligonucleotide
tttatcaacatgcgcgcatcgagggtgata

SEQ ID NO: 489086 - DNA, 30 bp, Artificial Sequence
  Synthetic oligonucleotide
atgttaaatcgagggagggataatgtgata

SEQ ID NO: 489087 - DNA, 30 bp, Artificial Sequence
  Synthetic oligonucleotide
tgctcccctgagcattactgcggtgtgata

SEQ ID NO: 489088 - DNA, 30 bp, Artificial Sequence
  Synthetic oligonucleotide
agagatccttcctcatgaagcgcattgata

SEQ ID NO: 489089 - DNA, 30 bp, Artificial Sequence
  Synthetic oligonucleotide
cctgtccctgctgctacaattttattgata

SEQ ID NO: 489090 - DNA, 30 bp, Artificial Sequence
  Synthetic oligonucleotide
cggaggtcaagcccatctgggagcttgata

SEQ ID NO: 489091 - DNA, 30 bp, Artificial Sequence
  Synthetic oligonucleotide
tggcgcagctcaataggacgttgcttgata

SEQ ID NO: 489092 - DNA, 30 bp, Artificial Sequence
  Synthetic oligonucleotide
gactgtgatacaactcaaaggcctttgata

SEQ ID NO: 489093 - DNA, 30 bp, Artificial Sequence
  Synthetic oligonucleotide
gtaagcaaaccctcgtatgatcttttgata

SEQ ID NO: 489094 - DNA, 30 bp, Artificial Sequence
  Synthetic oligonucleotide
gccacatgcaaggctcacggccaaaatata

SEQ ID NO: 489095 - DNA, 30 bp, Artificial Sequence
  Synthetic oligonucleotide
gggtggatggtaggagatcagctaaatata

SEQ ID NO: 489096 - DNA, 30 bp, Artificial Sequence
  Synthetic oligonucleotide
aatattcttggaggtcttgggcccaatata

SEQ ID NO: 489097 - DNA, 30 bp, Artificial Sequence
  Synthetic oligonucleotide
ttagtctgacatcatataaatacgaatata

SEQ ID NO: 489098 - DNA, 30 bp, Artificial Sequence
  Synthetic oligonucleotide
gcattatatttgtgttatccgcttaatata

SEQ ID NO: 489099 - DNA, 30 bp, Artificial Sequence
  Synthetic oligonucleotide
aacgtaagtatggaggtgggcgttaatata

SEQ ID NO: 489100 - DNA, 30 bp, Artificial Sequence
  Synthetic oligonucleotide
caatcgccctggttcagaccagtacatata

SEQ ID NO: 489101 - DNA, 30 bp, Artificial Sequence
  Synthetic oligonucleotide
attaaagttcttcattgttgcgtacatata

SEQ ID NO: 489102 - DNA, 30 bp, Artificial Sequence
  Synthetic oligonucleotide
cactctgagaggttatgccataagcatata

SEQ ID NO: 489103 - DNA, 30 bp, Artificial Sequence
  Synthetic oligonucleotide
acggccatgccattgagaattgggcatata

SEQ ID NO: 489104 - DNA, 30 bp, Artificial Sequence
  Synthetic oligonucleotide
ccgttacgactgaggcgcaattatcatata

SEQ ID NO: 489105 - DNA, 30 bp, Artificial Sequence
  Synthetic oligonucleotide
cgctacagatacgagaaatcttctcatata

SEQ ID NO: 489106 - DNA, 30 bp, Artificial Sequence
  Synthetic oligonucleotide
aacttcgatctggatagtgtccgtcatata

SEQ ID NO: 489107 - DNA, 30 bp, Artificial Sequence
  Synthetic oligonucleotide
acccgtccggaatgccttggaggtcatata

SEQ ID NO: 489108 - DNA, 30 bp, Artificial Sequence
  Synthetic oligonucleotide
ggccaatagtcgttgctgctgattcatata

SEQ ID NO: 489109 - DNA, 30 bp, Artificial Sequence
  Synthetic oligonucleotide
cttatagtttcaattgggttgtttcatata

SEQ ID NO: 489110 - DNA, 30 bp, Artificial Sequence
  Synthetic oligonucleotide
ttggggtcatgcattgtagttggagatata

SEQ ID NO: 489111 - DNA, 30 bp, Artificial Sequence
  Synthetic oligonucleotide
gagtgttcggagatcggcagatacgatata

SEQ ID NO: 489112 - DNA, 30 bp, Artificial Sequence
  Synthetic oligonucleotide
acgtcacggcgttggtctctaagcgatata

SEQ ID NO: 489113 - DNA, 30 bp, Artificial Sequence
  Synthetic oligonucleotide
ttggaggaggtcgatcagggatgcgatata

SEQ ID NO: 489114 - DNA, 30 bp, Artificial Sequence
  Synthetic oligonucleotide
gcataatccttctcgggactacgggatata

SEQ ID NO: 489115 - DNA, 28 bp, Artificial Sequence
  Synthetic oligonucleotide
tggctgtttagtaaaataacttgatata

SEQ ID NO: 489116 - DNA, 30 bp, Artificial Sequence
  Synthetic oligonucleotide
ggagctacgtatgggctctgctaatatata

SEQ ID NO: 489117 - DNA, 30 bp, Artificial Sequence
  Synthetic oligonucleotide
gccgcattctattgcgaatcgtcatatata

SEQ ID NO: 489118 - DNA, 30 bp, Artificial Sequence
  Synthetic oligonucleotide
cagtggaaccgggtgacacaattctatata

SEQ ID NO: 489119 - DNA, 29 bp, Artificial Sequence
  Synthetic oligonucleotide
atcagtaggatctaactaccatttatata

SEQ ID NO: 489120 - DNA, 30 bp, Artificial Sequence
  Synthetic oligonucleotide
atttactgaaacgggaacattaacactata

SEQ ID NO: 489121 - DNA, 30 bp, Artificial Sequence
  Synthetic oligonucleotide
aaatgctcgtataatgtcccatagactata

SEQ ID NO: 489122 - DNA, 30 bp, Artificial Sequence
  Synthetic oligonucleotide
ctattgattataacccagtaatggactata

SEQ ID NO: 489123 - DNA, 30 bp, Artificial Sequence
  Synthetic oligonucleotide
gtcactaattgggcgcttattatgactata

SEQ ID NO: 489124 - DNA, 30 bp, Artificial Sequence
  Synthetic oligonucleotide
agtcggtcattcgatagacgctgtactata

SEQ ID NO: 489125 - DNA, 30 bp, Artificial Sequence
  Synthetic oligonucleotide
aaaggtgtattggattacgtttttactata

SEQ ID NO: 489126 - DNA, 30 bp, Artificial Sequence
  Synthetic oligonucleotide
attgctactaccataacggtttttactata

SEQ ID NO: 489127 - DNA, 30 bp, Artificial Sequence
  Synthetic oligonucleotide
cgggcccgaaacacgcgtaacagacctata

SEQ ID NO: 489128 - DNA, 30 bp, Artificial Sequence
  Synthetic oligonucleotide
ttccaaaatagcaatttgtatatacctata

SEQ ID NO: 489129 - DNA, 30 bp, Artificial Sequence
  Synthetic oligonucleotide
aaatccttgcgcatacctagctgccctata

SEQ ID NO: 489130 - DNA, 30 bp, Artificial Sequence
  Synthetic oligonucleotide
tttcgtcaacactgcttgctgtggcctata

SEQ ID NO: 489131 - DNA, 30 bp, Artificial Sequence
  Synthetic oligonucleotide
ataagctgcagagtatagagccatcctata

SEQ ID NO: 489132 - DNA, 30 bp, Artificial Sequence
  Synthetic oligonucleotide
ggtaaatttaactgttacagcgaagctata

SEQ ID NO: 489133 - DNA, 30 bp, Artificial Sequence
  Synthetic oligonucleotide
gttattctcaaggtgccggcctcagctata

SEQ ID NO: 489134 - DNA, 30 bp, Artificial Sequence
  Synthetic oligonucleotide
agttgatggattccggtttcaggagctata

SEQ ID NO: 489135 - DNA, 30 bp, Artificial Sequence
  Synthetic oligonucleotide
acaggacagccagacgcggctatagctata

SEQ ID NO: 489136 - DNA, 30 bp, Artificial Sequence
  Synthetic oligonucleotide
atatcaagtatttgttgcaggttcgctata

SEQ ID NO: 489137 - DNA, 30 bp, Artificial Sequence
  Synthetic oligonucleotide
atactttggtatattttagacgaggctata

SEQ ID NO: 489138 - DNA, 30 bp, Artificial Sequence
  Synthetic oligonucleotide
tacaactggcacggtgattctactgctata

SEQ ID NO: 489139 - DNA, 30 bp, Artificial Sequence
  Synthetic oligonucleotide
aacaccctgcggactgtcccgagtgctata

SEQ ID NO: 489140 - DNA, 30 bp, Artificial Sequence
  Synthetic oligonucleotide
tgtggtcttgccgatgtgtgtagtgctata

SEQ ID NO: 489141 - DNA, 30 bp, Artificial Sequence
  Synthetic oligonucleotide
ttaaggaatctatcacacggtgttgctata

SEQ ID NO: 489142 - DNA, 30 bp, Artificial Sequence
  Synthetic oligonucleotide
ggggtttccatgaaaaggaacagatctata

SEQ ID NO: 489143 - DNA, 30 bp, Artificial Sequence
  Synthetic oligonucleotide
atcgttttcagaattcatgcgtgatctata

SEQ ID NO: 489144 - DNA, 30 bp, Artificial Sequence
  Synthetic oligonucleotide
aataacttcacagaaatccatcagtctata

SEQ ID NO: 489145 - DNA, 31 bp, Artificial Sequence
  Synthetic oligonucleotide
atctccgcgttgatatatctaagggtctata

SEQ ID NO: 489146 - DNA, 30 bp, Artificial Sequence
  Synthetic oligonucleotide
cgttgagttgagggacagtacgtgtctata

SEQ ID NO: 489147 - DNA, 30 bp, Artificial Sequence
  Synthetic oligonucleotide
tgcgagagtagtatagagcgaggttctata

SEQ ID NO: 489148 - DNA, 30 bp, Artificial Sequence
  Synthetic oligonucleotide
aagcaacgcagacgaatatctggttctata

SEQ ID NO: 489149 - DNA, 30 bp, Artificial Sequence
  Synthetic oligonucleotide
gggggacgcgaaataagaggcctttctata

SEQ ID NO: 489150 - DNA, 30 bp, Artificial Sequence
  Synthetic oligonucleotide
aacccaccccgagaggcacggcaaagtata

SEQ ID NO: 489151 - DNA, 30 bp, Artificial Sequence
  Synthetic oligonucleotide
gtgattgggttatatattaaaagaagtata

SEQ ID NO: 489152 - DNA, 30 bp, Artificial Sequence
  Synthetic oligonucleotide
cgcagttcatcacgatcgacgatcagtata

SEQ ID NO: 489153 - DNA, 30 bp, Artificial Sequence
  Synthetic oligonucleotide
gtcgttgcgaacctgtgctatatcagtata

SEQ ID NO: 489154 - DNA, 30 bp, Artificial Sequence
  Synthetic oligonucleotide
ttcgcccgaaacctatgtaacgtcagtata

SEQ ID NO: 489155 - DNA, 30 bp, Artificial Sequence
  Synthetic oligonucleotide
tatgctcggattactaacgatgtcagtata

SEQ ID NO: 489156 - DNA, 30 bp, Artificial Sequence
  Synthetic oligonucleotide
ttgctagccggcatgctaataccgagtata

SEQ ID NO: 489157 - DNA, 30 bp, Artificial Sequence
  Synthetic oligonucleotide
gactacaaatctctatatgtgcatagtata

SEQ ID NO: 489158 - DNA, 30 bp, Artificial Sequence
  Synthetic oligonucleotide
tatacctttgggatgcattgaacacgtata

SEQ ID NO: 489159 - DNA, 30 bp, Artificial Sequence
  Synthetic oligonucleotide
ttacgtgtcgtgctatagtcgacacgtata

SEQ ID NO: 489160 - DNA, 30 bp, Artificial Sequence
  Synthetic oligonucleotide
gtcctctagcagcagtaactttcacgtata

SEQ ID NO: 489161 - DNA, 30 bp, Artificial Sequence
  Synthetic oligonucleotide
aagggccctgtttttgcaaacaaccgtata

SEQ ID NO: 489162 - DNA, 30 bp, Artificial Sequence
  Synthetic oligonucleotide
gttacgtaacttctcatgttctcccgtata

SEQ ID NO: 489163 - DNA, 30 bp, Artificial Sequence
  Synthetic oligonucleotide
gttttacgattgaattgatgcagccgtata

SEQ ID NO: 489164 - DNA, 30 bp, Artificial Sequence
  Synthetic oligonucleotide
caatatggcacggggcagacgtagcgtata

SEQ ID NO: 489165 - DNA, 30 bp, Artificial Sequence
  Synthetic oligonucleotide
tgcaaagggggcattggctgcccgcgtata

SEQ ID NO: 489166 - DNA, 30 bp, Artificial Sequence
  Synthetic oligonucleotide
ttagctcattgtcgatgcgatctgcgtata

SEQ ID NO: 489167 - DNA, 30 bp, Artificial Sequence
  Synthetic oligonucleotide
tgtctcagcaaatcacacgatttgcgtata

SEQ ID NO: 489168 - DNA, 30 bp, Artificial Sequence
  Synthetic oligonucleotide
tctggtaacatcagccaaacttctcgtata

SEQ ID NO: 489169 - DNA, 30 bp, Artificial Sequence
  Synthetic oligonucleotide
attgccaacacatatagcggtaaaggtata

SEQ ID NO: 489170 - DNA, 30 bp, Artificial Sequence
  Synthetic oligonucleotide
aattctcatattgggccagtaagaggtata

SEQ ID NO: 489171 - DNA, 30 bp, Artificial Sequence
  Synthetic oligonucleotide
ccgtatccaaatggaacaagttacggtata

SEQ ID NO: 489172 - DNA, 30 bp, Artificial Sequence
  Synthetic oligonucleotide
ttattaagggttggcgtgcccaccggtata

SEQ ID NO: 489173 - DNA, 30 bp, Artificial Sequence
  Synthetic oligonucleotide
atcatcaagtgatggtactatcgcggtata

SEQ ID NO: 489174 - DNA, 30 bp, Artificial Sequence
  Synthetic oligonucleotide
caaaccggcaacaaattcgttcgcggtata

SEQ ID NO: 489175 - DNA, 30 bp, Artificial Sequence
  Synthetic oligonucleotide
ctgggatcactgcatatccaaatcggtata

SEQ ID NO: 489176 - DNA, 30 bp, Artificial Sequence
  Synthetic oligonucleotide
gcccccgatattctgcgctataagggtata

SEQ ID NO: 489177 - DNA, 30 bp, Artificial Sequence
  Synthetic oligonucleotide
tctctgggcagctttgatgcgcagggtata

SEQ ID NO: 489178 - DNA, 30 bp, Artificial Sequence
  Synthetic oligonucleotide
atgtcttgcggtcctctgacctggggtata

SEQ ID NO: 489179 - DNA, 30 bp, Artificial Sequence
  Synthetic oligonucleotide
gtctaaggagctcgcagtgtgttgggtata

SEQ ID NO: 489180 - DNA, 30 bp, Artificial Sequence
  Synthetic oligonucleotide
tggatcttgcagatcgtcgatgctggtata

SEQ ID NO: 489181 - DNA, 30 bp, Artificial Sequence
  Synthetic oligonucleotide
ataataggtgctgtatcattttaatgtata

SEQ ID NO: 489182 - DNA, 30 bp, Artificial Sequence
  Synthetic oligonucleotide
gcgtgattgggattttgcattagatgtata

SEQ ID NO: 489183 - DNA, 30 bp, Artificial Sequence
  Synthetic oligonucleotide
gggttctccagggatatcatcatatgtata

SEQ ID NO: 489184 - DNA, 30 bp, Artificial Sequence
  Synthetic oligonucleotide
aataaaactcctagagtgcagctatgtata

SEQ ID NO: 489185 - DNA, 30 bp, Artificial Sequence
  Synthetic oligonucleotide
ctcctataaagttaatggcctatctgtata

SEQ ID NO: 489186 - DNA, 30 bp, Artificial Sequence
  Synthetic oligonucleotide
ttctagttttgacctacacataagtgtata

SEQ ID NO: 489187 - DNA, 30 bp, Artificial Sequence
  Synthetic oligonucleotide
attggatatagatgtatgccggggtgtata

SEQ ID NO: 489188 - DNA, 30 bp, Artificial Sequence
  Synthetic oligonucleotide
gttggaaaaactaaacgttagaaaattata

SEQ ID NO: 489189 - DNA, 30 bp, Artificial Sequence
  Synthetic oligonucleotide
ggggttgtaaagggggctgattaaattata

SEQ ID NO: 489190 - DNA, 30 bp, Artificial Sequence
  Synthetic oligonucleotide
ggccatatcgttaactggcaccccattata

SEQ ID NO: 489191 - DNA, 30 bp, Artificial Sequence
  Synthetic oligonucleotide
ctcctgagtgcttaggaatgacgcattata

SEQ ID NO: 489192 - DNA, 30 bp, Artificial Sequence
  Synthetic oligonucleotide
cggactgaatactaggggatcgggattata

SEQ ID NO: 489193 - DNA, 30 bp, Artificial Sequence
  Synthetic oligonucleotide
tagttgggcacggccgtatgcatgattata

SEQ ID NO: 489194 - DNA, 30 bp, Artificial Sequence
  Synthetic oligonucleotide
gtggtgtccgatgcttcggcctatattata

SEQ ID NO: 489195 - DNA, 30 bp, Artificial Sequence
  Synthetic oligonucleotide
ctcccgtggagctcagtcgcctctattata

SEQ ID NO: 489196 - DNA, 30 bp, Artificial Sequence
  Synthetic oligonucleotide
gtcgcagatgtataaaaaggttgtattata

SEQ ID NO: 489197 - DNA, 30 bp, Artificial Sequence
  Synthetic oligonucleotide
agggtgcatacacgtgacccgattattata

SEQ ID NO: 489198 - DNA, 30 bp, Artificial Sequence
  Synthetic oligonucleotide
ttactaggcggcgcggccatgaaacttata

SEQ ID NO: 489199 - DNA, 30 bp, Artificial Sequence
  Synthetic oligonucleotide
cacgtgacatactttcattcgacacttata

SEQ ID NO: 489200 - DNA, 30 bp, Artificial Sequence
  Synthetic oligonucleotide
agaagtgttcgtgtgttataggtacttata

SEQ ID NO: 489201 - DNA, 30 bp, Artificial Sequence
  Synthetic oligonucleotide
cccctacgaatctctgccaagaaccttata

SEQ ID NO: 489202 - DNA, 30 bp, Artificial Sequence
  Synthetic oligonucleotide
aatgtaagatctcaaaattgtgaccttata

SEQ ID NO: 489203 - DNA, 30 bp, Artificial Sequence
  Synthetic oligonucleotide
cggtattactgtcaaagagcaggccttata

SEQ ID NO: 489204 - DNA, 30 bp, Artificial Sequence
  Synthetic oligonucleotide
gagctgatctgaaacgacaagttccttata

SEQ ID NO: 489205 - DNA, 30 bp, Artificial Sequence
  Synthetic oligonucleotide
caatctgtgtgcgatatcgactcgcttata

SEQ ID NO: 489206 - DNA, 30 bp, Artificial Sequence
  Synthetic oligonucleotide
tcggggactatgacacagtttttgcttata

SEQ ID NO: 489207 - DNA, 30 bp, Artificial Sequence
  Synthetic oligonucleotide
tataactacgatatatggtaaaatcttata

SEQ ID NO: 489208 - DNA, 30 bp, Artificial Sequence
  Synthetic oligonucleotide
agtaatgagatcctatgtcgcgatcttata

SEQ ID NO: 489209 - DNA, 30 bp, Artificial Sequence
  Synthetic oligonucleotide
agattcgcgcttttggagggttaagttata

SEQ ID NO: 489210 - DNA, 30 bp, Artificial Sequence
  Synthetic oligonucleotide
tagatgtgcagggatcggttatccgttata

SEQ ID NO: 489211 - DNA, 31 bp, Artificial Sequence
  Synthetic oligonucleotide
ctcggtatggtaatttataccatgggttata

SEQ ID NO: 489212 - DNA, 30 bp, Artificial Sequence
  Synthetic oligonucleotide
acgaggcacacggtagccacttttgttata

SEQ ID NO: 489213 - DNA, 30 bp, Artificial Sequence
  Synthetic oligonucleotide
gatatacagataggtacctagcaatttata

SEQ ID NO: 489214 - DNA, 30 bp, Artificial Sequence
  Synthetic oligonucleotide
cattgggacctgacaaattatgaatttata

SEQ ID NO: 489215 - DNA, 30 bp, Artificial Sequence
  Synthetic oligonucleotide
gtagccatcattcctttcgttatatttata

SEQ ID NO: 489216 - DNA, 30 bp, Artificial Sequence
  Synthetic oligonucleotide
gcccatgtgaagaacatacggagctttata

SEQ ID NO: 489217 - DNA, 30 bp, Artificial Sequence
  Synthetic oligonucleotide
tcatccggggcatgttataagcgctttata

SEQ ID NO: 489218 - DNA, 30 bp, Artificial Sequence
  Synthetic oligonucleotide
gtttactcttagtttgcccaatagtttata

SEQ ID NO: 489219 - DNA, 30 bp, Artificial Sequence
  Synthetic oligonucleotide
ttaaagacgcaggggaaaagaacgtttata

SEQ ID NO: 489220 - DNA, 30 bp, Artificial Sequence
  Synthetic oligonucleotide
caactgttgaaactggctcttcggtttata

SEQ ID NO: 489221 - DNA, 30 bp, Artificial Sequence
  Synthetic oligonucleotide
gcccgtcgcaagtctaacgtggaaaaacta

SEQ ID NO: 489222 - DNA, 30 bp, Artificial Sequence
  Synthetic oligonucleotide
tatacctggccttgccagaaatcaaaacta

SEQ ID NO: 489223 - DNA, 30 bp, Artificial Sequence
  Synthetic oligonucleotide
gcattgcacagacgcttctaatcaaaacta

SEQ ID NO: 489224 - DNA, 30 bp, Artificial Sequence
  Synthetic oligonucleotide
gtctatacaacgaccgctgtgagcaaacta

SEQ ID NO: 489225 - DNA, 30 bp, Artificial Sequence
  Synthetic oligonucleotide
tgccgacatcgggatccgtgacgcaaacta

SEQ ID NO: 489226 - DNA, 30 bp, Artificial Sequence
  Synthetic oligonucleotide
gtgttgagcgttacgcctaacggcaaacta

SEQ ID NO: 489227 - DNA, 30 bp, Artificial Sequence
  Synthetic oligonucleotide
cgcagcagggtctttggactcgagaaacta

SEQ ID NO: 489228 - DNA, 30 bp, Artificial Sequence
  Synthetic oligonucleotide
acatctgcactaaggacgttttggaaacta

SEQ ID NO: 489229 - DNA, 30 bp, Artificial Sequence
  Synthetic oligonucleotide
ctctataaaatttcgaggccgctgaaacta

SEQ ID NO: 489230 - DNA, 30 bp, Artificial Sequence
  Synthetic oligonucleotide
gtctatagagaggactagatctataaacta

SEQ ID NO: 489231 - DNA, 30 bp, Artificial Sequence
  Synthetic oligonucleotide
attccttaactgtaaggtaggcctaaacta

SEQ ID NO: 489232 - DNA, 30 bp, Artificial Sequence
  Synthetic oligonucleotide
gcagttcgtaaccagtcttatgttaaacta

SEQ ID NO: 489233 - DNA, 30 bp, Artificial Sequence
  Synthetic oligonucleotide
gctctagttgcggagaagtagggccaacta

SEQ ID NO: 489234 - DNA, 30 bp, Artificial Sequence
  Synthetic oligonucleotide
cctctcgcagcagtgtgtgtatagcaacta

SEQ ID NO: 489235 - DNA, 30 bp, Artificial Sequence
  Synthetic oligonucleotide
ttcacataagttgaaactcacgtgcaacta

SEQ ID NO: 489236 - DNA, 30 bp, Artificial Sequence
  Synthetic oligonucleotide
gctttttctttaggcgtgggaaaagaacta

SEQ ID NO: 489237 - DNA, 30 bp, Artificial Sequence
  Synthetic oligonucleotide
ctactcgtgacggcccttatcgcagaacta

SEQ ID NO: 489238 - DNA, 30 bp, Artificial Sequence
  Synthetic oligonucleotide
tataccggggggcgtgagccgaacgaacta

SEQ ID NO: 489239 - DNA, 30 bp, Artificial Sequence
  Synthetic oligonucleotide
aatgctataacgctgtagaccggcgaacta

SEQ ID NO: 489240 - DNA, 30 bp, Artificial Sequence
  Synthetic oligonucleotide
ttattcagtatcctgtattttagggaacta

SEQ ID NO: 489241 - DNA, 30 bp, Artificial Sequence
  Synthetic oligonucleotide
ccatgcgtttagcccggagctgtggaacta

SEQ ID NO: 489242 - DNA, 30 bp, Artificial Sequence
  Synthetic oligonucleotide
ctgggctttacagggatccatcaataacta

SEQ ID NO: 489243 - DNA, 30 bp, Artificial Sequence
  Synthetic oligonucleotide
acagcggttgcgtacattccactgtaacta

SEQ ID NO: 489244 - DNA, 30 bp, Artificial Sequence
  Synthetic oligonucleotide
gatccggccaacactcctcgggtgtaacta

SEQ ID NO: 489245 - DNA, 30 bp, Artificial Sequence
  Synthetic oligonucleotide
gtcctgttagcggatggatatcgcacacta

SEQ ID NO: 489246 - DNA, 30 bp, Artificial Sequence
  Synthetic oligonucleotide
tgggcgataaattttgtgcgtgggacacta

SEQ ID NO: 489247 - DNA, 30 bp, Artificial Sequence
  Synthetic oligonucleotide
atttgtatagcctccgatcagctgacacta

SEQ ID NO: 489248 - DNA, 30 bp, Artificial Sequence
  Synthetic oligonucleotide
ctgacatgcggccgttcggcattgacacta

SEQ ID NO: 489249 - DNA, 30 bp, Artificial Sequence
  Synthetic oligonucleotide
ctcccgcgcatagataaacaaagtacacta

SEQ ID NO: 489250 - DNA, 30 bp, Artificial Sequence
  Synthetic oligonucleotide
tgcgttgctaggtctatccgccttacacta

SEQ ID NO: 489251 - DNA, 30 bp, Artificial Sequence
  Synthetic oligonucleotide
catccttgagtgagatcgtctgtcccacta

SEQ ID NO: 489252 - DNA, 30 bp, Artificial Sequence
  Synthetic oligonucleotide
tggcatagtggcgattaatcatggccacta

SEQ ID NO: 489253 - DNA, 30 bp, Artificial Sequence
  Synthetic oligonucleotide
gcagccatgctcataactagatggccacta

SEQ ID NO: 489254 - DNA, 30 bp, Artificial Sequence
  Synthetic oligonucleotide
gtacttgtagtgtttcacgccgtgccacta

SEQ ID NO: 489255 - DNA, 30 bp, Artificial Sequence
  Synthetic oligonucleotide
tcttagccagcacgtggataccgtccacta

SEQ ID NO: 489256 - DNA, 30 bp, Artificial Sequence
  Synthetic oligonucleotide
taaaactcaggaatggcgggaattccacta

SEQ ID NO: 489257 - DNA, 30 bp, Artificial Sequence
  Synthetic oligonucleotide
atagtaagaatgttcatgtctatcgcacta

SEQ ID NO: 489258 - DNA, 30 bp, Artificial Sequence
  Synthetic oligonucleotide
aaagtattacacagtcgggacgctgcacta

SEQ ID NO: 489259 - DNA, 30 bp, Artificial Sequence
  Synthetic oligonucleotide
gtgtatcataacgcagagtgaagatcacta

SEQ ID NO: 489260 - DNA, 30 bp, Artificial Sequence
  Synthetic oligonucleotide
gttgtttgttcatcggcgtctatctcacta

SEQ ID NO: 489261 - DNA, 30 bp, Artificial Sequence
  Synthetic oligonucleotide
tcgggaggctacgtggtctacacgtcacta

SEQ ID NO: 489262 - DNA, 30 bp, Artificial Sequence
  Synthetic oligonucleotide
tccggacccgcgcaacatgtcgtgtcacta

SEQ ID NO: 489263 - DNA, 30 bp, Artificial Sequence
  Synthetic oligonucleotide
aagtagaacagtctctactctttaagacta

SEQ ID NO: 489264 - DNA, 30 bp, Artificial Sequence
  Synthetic oligonucleotide
gcctggatgttctcattttcttacagacta

SEQ ID NO: 489265 - DNA, 30 bp, Artificial Sequence
  Synthetic oligonucleotide
ggatttggcctgcgggtgcatcagagacta

SEQ ID NO: 489266 - DNA, 30 bp, Artificial Sequence
  Synthetic oligonucleotide
aaatgtgggggaaggcagcattgtagacta

SEQ ID NO: 489267 - DNA, 30 bp, Artificial Sequence
  Synthetic oligonucleotide
tccaatttgtctttgagttggattagacta

SEQ ID NO: 489268 - DNA, 30 bp, Artificial Sequence
  Synthetic oligonucleotide
agaccgggggaatatcacatgtcacgacta

SEQ ID NO: 489269 - DNA, 29 bp, Artificial Sequence
  Synthetic oligonucleotide
ggatagttttgcgaaccgtcattcgacta

SEQ ID NO: 489270 - DNA, 30 bp, Artificial Sequence
  Synthetic oligonucleotide
ttaattagacgcggttactttctaggacta

SEQ ID NO: 489271 - DNA, 30 bp, Artificial Sequence
  Synthetic oligonucleotide
aattgctcataaagaaacaataacggacta

SEQ ID NO: 489272 - DNA, 30 bp, Artificial Sequence
  Synthetic oligonucleotide
caccgctgctacaactatattaacggacta

SEQ ID NO: 489273 - DNA, 30 bp, Artificial Sequence
  Synthetic oligonucleotide
actttattcaatcaggtgcgcccgggacta

SEQ ID NO: 489274 - DNA, 30 bp, Artificial Sequence
  Synthetic oligonucleotide
taatcacatatatcactttattatggacta

SEQ ID NO: 489275 - DNA, 30 bp, Artificial Sequence
  Synthetic oligonucleotide
aactctatctttgaacaactcctatgacta

SEQ ID NO: 489276 - DNA, 30 bp, Artificial Sequence
  Synthetic oligonucleotide
cgcccacggtggagtgcatcgtcgtgacta

SEQ ID NO: 489277 - DNA, 30 bp, Artificial Sequence
  Synthetic oligonucleotide
tgttcgttgttagtgtacgcaaggtgacta

SEQ ID NO: 489278 - DNA, 30 bp, Artificial Sequence
  Synthetic oligonucleotide
gcatactggttgcggtttttgtattgacta

SEQ ID NO: 489279 - DNA, 30 bp, Artificial Sequence
  Synthetic oligonucleotide
gggaccttcaagctcccttaaacttgacta

SEQ ID NO: 489280 - DNA, 30 bp, Artificial Sequence
  Synthetic oligonucleotide
gcggttctgacagtctgttcatcttgacta

SEQ ID NO: 489281 - DNA, 30 bp, Artificial Sequence
  Synthetic oligonucleotide
gaagacatagttctattaaaagaaatacta

SEQ ID NO: 489282 - DNA, 30 bp, Artificial Sequence
  Synthetic oligonucleotide
agggttccgcacgggccctttgaaatacta

SEQ ID NO: 489283 - DNA, 30 bp, Artificial Sequence
  Synthetic oligonucleotide
cccttttctatatacaccaattaaatacta

SEQ ID NO: 489284 - DNA, 30 bp, Artificial Sequence
  Synthetic oligonucleotide
acatgtcaccccctttggcagaccatacta

SEQ ID NO: 489285 - DNA, 30 bp, Artificial Sequence
  Synthetic oligonucleotide
caaggaactgtaatatgtgggagcatacta

SEQ ID NO: 489286 - DNA, 30 bp, Artificial Sequence
  Synthetic oligonucleotide
gcgagggatccgggagtcgcgtgcatacta

SEQ ID NO: 489287 - DNA, 30 bp, Artificial Sequence
  Synthetic oligonucleotide
tctattttaaacgggctgttactcatacta

SEQ ID NO: 489288 - DNA, 30 bp, Artificial Sequence
  Synthetic oligonucleotide
ttaagagaacgtgttgtctacgagatacta

SEQ ID NO: 489289 - DNA, 30 bp, Artificial Sequence
  Synthetic oligonucleotide
cggtccgggtacgcggcctaaaggatacta

SEQ ID NO: 489290 - DNA, 30 bp, Artificial Sequence
  Synthetic oligonucleotide
ggaccactagcgctgtcagcgcttatacta

SEQ ID NO: 489291 - DNA, 30 bp, Artificial Sequence
  Synthetic oligonucleotide
gccctagtttttagcacatcgggactacta

SEQ ID NO: 489292 - DNA, 30 bp, Artificial Sequence
  Synthetic oligonucleotide
tccacacatcttcaccgttcgtacctacta

SEQ ID NO: 489293 - DNA, 30 bp, Artificial Sequence
  Synthetic oligonucleotide
gagtgcctgccatacaaaacgtccctacta

SEQ ID NO: 489294 - DNA, 30 bp, Artificial Sequence
  Synthetic oligonucleotide
gtctagttttgtgggccaattttgctacta

SEQ ID NO: 489295 - DNA, 30 bp, Artificial Sequence
  Synthetic oligonucleotide
cacactgactccacttttaccctcgtacta

SEQ ID NO: 489296 - DNA, 30 bp, Artificial Sequence
  Synthetic oligonucleotide
gaggcagtccgttcctctgtctcggtacta

SEQ ID NO: 489297 - DNA, 30 bp, Artificial Sequence
  Synthetic oligonucleotide
ttttcctatagtcacagtggaagcttacta

SEQ ID NO: 489298 - DNA, 30 bp, Artificial Sequence
  Synthetic oligonucleotide
ctatggcgcactggtaaggatgtcttacta

SEQ ID NO: 489299 - DNA, 30 bp, Artificial Sequence
  Synthetic oligonucleotide
cgtgaacaactcagcttcttagggttacta

SEQ ID NO: 489300 - DNA, 30 bp, Artificial Sequence
  Synthetic oligonucleotide
gatcgatccttatcgaaagtcttgttacta

SEQ ID NO: 489301 - DNA, 30 bp, Artificial Sequence
  Synthetic oligonucleotide
ttaccaagtagagagaccgcaattttacta

SEQ ID NO: 489302 - DNA, 30 bp, Artificial Sequence
  Synthetic oligonucleotide
agctcccccttgaatgtgacagcaaaccta

SEQ ID NO: 489303 - DNA, 30 bp, Artificial Sequence
  Synthetic oligonucleotide
cgcagcaacaggtagacttgccggaaccta

SEQ ID NO: 489304 - DNA, 30 bp, Artificial Sequence
  Synthetic oligonucleotide
cagatataggtgtccgagccagtgaaccta

SEQ ID NO: 489305 - DNA, 30 bp, Artificial Sequence
  Synthetic oligonucleotide
aggtctaatgcgcgtggacaacataaccta

SEQ ID NO: 489306 - DNA, 30 bp, Artificial Sequence
  Synthetic oligonucleotide
aagacagtgttcgaaaacgtgtataaccta

SEQ ID NO: 489307 - DNA, 30 bp, Artificial Sequence
  Synthetic oligonucleotide
ccccactgaagattaaattatattaaccta

SEQ ID NO: 489308 - DNA, 30 bp, Artificial Sequence
  Synthetic oligonucleotide
gttctttgagagccttgacgaggacaccta

SEQ ID NO: 489309 - DNA, 30 bp, Artificial Sequence
  Synthetic oligonucleotide
atatagtacttcgggcccttgaatcaccta

SEQ ID NO: 489310 - DNA, 30 bp, Artificial Sequence
  Synthetic oligonucleotide
tacgtgccaagctgcgtctcccatcaccta

SEQ ID NO: 489311 - DNA, 30 bp, Artificial Sequence
  Synthetic oligonucleotide
ccggcggctagctctacccagagcgaccta

SEQ ID NO: 489312 - DNA, 30 bp, Artificial Sequence
  Synthetic oligonucleotide
tgtcttcccataggagttgctcctgaccta

SEQ ID NO: 489313 - DNA, 30 bp, Artificial Sequence
  Synthetic oligonucleotide
acaatagaggttgtaacacgcggctaccta

SEQ ID NO: 489314 - DNA, 30 bp, Artificial Sequence
  Synthetic oligonucleotide
tttgtcatcgttcctgagtcagggtaccta

SEQ ID NO: 489315 - DNA, 30 bp, Artificial Sequence
  Synthetic oligonucleotide
gatttctggtgcgtagttgataattaccta

SEQ ID NO: 489316 - DNA, 30 bp, Artificial Sequence
  Synthetic oligonucleotide
ctaatcactaccggagctgggtaaacccta

SEQ ID NO: 489317 - DNA, 30 bp, Artificial Sequence
  Synthetic oligonucleotide
cgttgacccatctaataaatatacacccta

SEQ ID NO: 489318 - DNA, 30 bp, Artificial Sequence
  Synthetic oligonucleotide
gccgtggtgcacacgcaccaaaccacccta

SEQ ID NO: 489319 - DNA, 30 bp, Artificial Sequence
  Synthetic oligonucleotide
agactatgactagagtcctgactcccccta

SEQ ID NO: 489320 - DNA, 30 bp, Artificial Sequence
  Synthetic oligonucleotide
tcacgagcagggagtcagctcaagccccta

SEQ ID NO: 489321 - DNA, 30 bp, Artificial Sequence
  Synthetic oligonucleotide
acgtcagggtagcatttacttgtgccccta

SEQ ID NO: 489322 - DNA, 30 bp, Artificial Sequence
  Synthetic oligonucleotide
aaatgaattaggggcggatatcgagcccta

SEQ ID NO: 489323 - DNA, 30 bp, Artificial Sequence
  Synthetic oligonucleotide
ccatggattaatggatctgttcctgcccta

SEQ ID NO: 489324 - DNA, 30 bp, Artificial Sequence
  Synthetic oligonucleotide
gtgctccgctaatagttcgcgggatcccta

SEQ ID NO: 489325 - DNA, 30 bp, Artificial Sequence
  Synthetic oligonucleotide
tcaaggcttctagaaattcggggaagccta

SEQ ID NO: 489326 - DNA, 30 bp, Artificial Sequence
  Synthetic oligonucleotide
cccagccgagcggagatccgctggagccta

SEQ ID NO: 489327 - DNA, 30 bp, Artificial Sequence
  Synthetic oligonucleotide
taagctagttttaagaagccgttgagccta

SEQ ID NO: 489328 - DNA, 30 bp, Artificial Sequence
  Synthetic oligonucleotide
aattggccgagccttattccaagtagccta

SEQ ID NO: 489329 - DNA, 30 bp, Artificial Sequence
  Synthetic oligonucleotide
aaatctcggattactcttgatgaacgccta

SEQ ID NO: 489330 - DNA, 30 bp, Artificial Sequence
  Synthetic oligonucleotide
attataacgtgcattaacccttaacgccta

SEQ ID NO: 489331 - DNA, 30 bp, Artificial Sequence
  Synthetic oligonucleotide
tttgatcacctccatgcgcctatgcgccta

SEQ ID NO: 489332 - DNA, 30 bp, Artificial Sequence
  Synthetic oligonucleotide
tttgcaaaaggaagccggtgctgtcgccta

SEQ ID NO: 489333 - DNA, 30 bp, Artificial Sequence
  Synthetic oligonucleotide
acaacggcttggcttgtgtctattcgccta

SEQ ID NO: 489334 - DNA, 30 bp, Artificial Sequence
  Synthetic oligonucleotide
gcacaactagatgccgtaaagtacggccta

SEQ ID NO: 489335 - DNA, 30 bp, Artificial Sequence
  Synthetic oligonucleotide
gctaggttattaggccgataaagcggccta

SEQ ID NO: 489336 - DNA, 30 bp, Artificial Sequence
  Synthetic oligonucleotide
cgtggcatatcgtctcgaggccgcggccta

SEQ ID NO: 489337 - DNA, 30 bp, Artificial Sequence
  Synthetic oligonucleotide
gtcatcaccttgggccgtgggaagggccta

SEQ ID NO: 489338 - DNA, 30 bp, Artificial Sequence
  Synthetic oligonucleotide
ggcgcggggtctaatggtaagtcgggccta

SEQ ID NO: 489339 - DNA, 30 bp, Artificial Sequence
  Synthetic oligonucleotide
tccggtaatactcgtcattcccggggccta

SEQ ID NO: 489340 - DNA, 30 bp, Artificial Sequence
  Synthetic oligonucleotide
tacatcacttatgggggatatcggggccta

SEQ ID NO: 489341 - DNA, 30 bp, Artificial Sequence
  Synthetic oligonucleotide
tcgctagcagagattagttcgttgggccta

SEQ ID NO: 489342 - DNA, 30 bp, Artificial Sequence
  Synthetic oligonucleotide
aatgcatccatcagccagcgttctggccta

SEQ ID NO: 489343 - DNA, 30 bp, Artificial Sequence
  Synthetic oligonucleotide
ctatcaacattcctaatcataagtggccta

SEQ ID NO: 489344 - DNA, 31 bp, Artificial Sequence
  Synthetic oligonucleotide
tgctcgcgctcttgctataggtcttggccta

SEQ ID NO: 489345 - DNA, 30 bp, Artificial Sequence
  Synthetic oligonucleotide
agcgcccaactactatttcctgttggccta

SEQ ID NO: 489346 - DNA, 30 bp, Artificial Sequence
  Synthetic oligonucleotide
ccacaggcgcggggttcggcgatatgccta

SEQ ID NO: 489347 - DNA, 30 bp, Artificial Sequence
  Synthetic oligonucleotide
tagaatttgttgacagcttactactgccta

SEQ ID NO: 489348 - DNA, 30 bp, Artificial Sequence
  Synthetic oligonucleotide
aagcaaagcgatttcgcctagtactgccta

SEQ ID NO: 489349 - DNA, 30 bp, Artificial Sequence
  Synthetic oligonucleotide
ttcatattcgaaggttacctattctgccta

SEQ ID NO: 489350 - DNA, 30 bp, Artificial Sequence
  Synthetic oligonucleotide
gacttcgcaccatattatcccatgtgccta

SEQ ID NO: 489351 - DNA, 30 bp, Artificial Sequence
  Synthetic oligonucleotide
aattgcggactaaatgtacatgtgtgccta

SEQ ID NO: 489352 - DNA, 30 bp, Artificial Sequence
  Synthetic oligonucleotide
ctattggacgaccggcgaaggctaatccta

SEQ ID NO: 489353 - DNA, 30 bp, Artificial Sequence
  Synthetic oligonucleotide
tgggttcacgtcgtcttattacgcatccta

SEQ ID NO: 489354 - DNA, 30 bp, Artificial Sequence
  Synthetic oligonucleotide
ctgttcataggcaccatttcaaggatccta

SEQ ID NO: 489355 - DNA, 30 bp, Artificial Sequence
  Synthetic oligonucleotide
gattagatacgtcctacacggtggatccta

SEQ ID NO: 489356 - DNA, 30 bp, Artificial Sequence
  Synthetic oligonucleotide
acatctgaaatatagaagaggagtatccta

SEQ ID NO: 489357 - DNA, 30 bp, Artificial Sequence
  Synthetic oligonucleotide
accatactactgcttgtttgataactccta

SEQ ID NO: 489358 - DNA, 30 bp, Artificial Sequence
  Synthetic oligonucleotide
catggcctagggggtaacgagcgactccta

SEQ ID NO: 489359 - DNA, 30 bp, Artificial Sequence
  Synthetic oligonucleotide
ggtacgggcggtgaggtaggatccctccta

SEQ ID NO: 489360 - DNA, 30 bp, Artificial Sequence
  Synthetic oligonucleotide
ccggggtggtggtatgaactactcctccta

SEQ ID NO: 489361 - DNA, 30 bp, Artificial Sequence
  Synthetic oligonucleotide
cacaaatagctttataagttattgctccta

SEQ ID NO: 489362 - DNA, 30 bp, Artificial Sequence
  Synthetic oligonucleotide
ccgcgccgccgccgctattaacaagtccta

SEQ ID NO: 489363 - DNA, 30 bp, Artificial Sequence
  Synthetic oligonucleotide
agctgtcaagcattatctacttgagtccta

SEQ ID NO: 489364 - DNA, 30 bp, Artificial Sequence
  Synthetic oligonucleotide
cgctgttgtcttgctgtactaaacgtccta

SEQ ID NO: 489365 - DNA, 30 bp, Artificial Sequence
  Synthetic oligonucleotide
gagcggtgttggatttacgaccgcgtccta

SEQ ID NO: 489366 - DNA, 30 bp, Artificial Sequence
  Synthetic oligonucleotide
cgttagggtaggtctttcttagaggtccta

SEQ ID NO: 489367 - DNA, 30 bp, Artificial Sequence
  Synthetic oligonucleotide
taatatggatcgcacccgaccgcggtccta

SEQ ID NO: 489368 - DNA, 30 bp, Artificial Sequence
  Synthetic oligonucleotide
tacgtcggtgcggtgggtgccaatgtccta

SEQ ID NO: 489369 - DNA, 30 bp, Artificial Sequence
  Synthetic oligonucleotide
acattcatgcttttgtttatccctgtccta

SEQ ID NO: 489370 - DNA, 30 bp, Artificial Sequence
  Synthetic oligonucleotide
tttgcataagggtccggtgatagtttccta

SEQ ID NO: 489371 - DNA, 30 bp, Artificial Sequence
  Synthetic oligonucleotide
taacaaagaccaatggaagtgacaaagcta

SEQ ID NO: 489372 - DNA, 30 bp, Artificial Sequence
  Synthetic oligonucleotide
ggcgaactagcgggtaggtaagcaaagcta

SEQ ID NO: 489373 - DNA, 30 bp, Artificial Sequence
  Synthetic oligonucleotide
ttacaatctggccagctgctctccaagcta

SEQ ID NO: 489374 - DNA, 30 bp, Artificial Sequence
  Synthetic oligonucleotide
acacatttgcttaacctgtttctcaagcta

SEQ ID NO: 489375 - DNA, 30 bp, Artificial Sequence
  Synthetic oligonucleotide
gcgaggtataaaattggacatacgaagcta

SEQ ID NO: 489376 - DNA, 30 bp, Artificial Sequence
  Synthetic oligonucleotide
gaccaaatttgaatcggtcgcactaagcta

SEQ ID NO: 489377 - DNA, 30 bp, Artificial Sequence
  Synthetic oligonucleotide
tatgagacccagccagtgacttgtaagcta

SEQ ID NO: 489378 - DNA, 30 bp, Artificial Sequence
  Synthetic oligonucleotide
gaccgctttatatattgtcataaacagcta

SEQ ID NO: 489379 - DNA, 30 bp, Artificial Sequence
  Synthetic oligonucleotide
tttatacgtttccattgagtggaacagcta

SEQ ID NO: 489380 - DNA, 30 bp, Artificial Sequence
  Synthetic oligonucleotide
tgacctttctgggcgcgctcaagacagcta

SEQ ID NO: 489381 - DNA, 30 bp, Artificial Sequence
  Synthetic oligonucleotide
gcaagcgcggtccagagttcgcgacagcta

SEQ ID NO: 489382 - DNA, 30 bp, Artificial Sequence
  Synthetic oligonucleotide
acgtggagagcgcaatggccggcgcagcta

SEQ ID NO: 489383 - DNA, 30 bp, Artificial Sequence
  Synthetic oligonucleotide
ttatatcaatttctgggccacgggcagcta

SEQ ID NO: 489384 - DNA, 30 bp, Artificial Sequence
  Synthetic oligonucleotide
ggttgatgatgtggtcacgcttaggagcta

SEQ ID NO: 489385 - DNA, 30 bp, Artificial Sequence
  Synthetic oligonucleotide
caagataattcgaagtctttttcggagcta

SEQ ID NO: 489386 - DNA, 30 bp, Artificial Sequence
  Synthetic oligonucleotide
tgttcgcaccttcaatttaccggggagcta

SEQ ID NO: 489387 - DNA, 30 bp, Artificial Sequence
  Synthetic oligonucleotide
tgacgacgtaggttactcatcatggagcta

SEQ ID NO: 489388 - DNA, 30 bp, Artificial Sequence
  Synthetic oligonucleotide
ctctctgatagcgccgtacgccttgagcta

SEQ ID NO: 489389 - DNA, 30 bp, Artificial Sequence
  Synthetic oligonucleotide
tactccgtttagggcggtctgttatagcta

SEQ ID NO: 489390 - DNA, 30 bp, Artificial Sequence
  Synthetic oligonucleotide
cgtaaccagccagtgacggagtactagcta

SEQ ID NO: 489391 - DNA, 30 bp, Artificial Sequence
  Synthetic oligonucleotide
agaaacgggggtaagatccatgagtagcta

SEQ ID NO: 489392 - DNA, 30 bp, Artificial Sequence
  Synthetic oligonucleotide
gagaagatacccccaaatttgaggtagcta

SEQ ID NO: 489393 - DNA, 30 bp, Artificial Sequence
  Synthetic oligonucleotide
gtcagcctgctagtctggtaactgtagcta

SEQ ID NO: 489394 - DNA, 30 bp, Artificial Sequence
  Synthetic oligonucleotide
ggggctcccctctactactcactgtagcta

SEQ ID NO: 489395 - DNA, 30 bp, Artificial Sequence
  Synthetic oligonucleotide
gggcgtcaaaatacggtttgaggaacgcta

SEQ ID NO: 489396 - DNA, 30 bp, Artificial Sequence
  Synthetic oligonucleotide
tatagtccctacccggctttgggaacgcta

SEQ ID NO: 489397 - DNA, 30 bp, Artificial Sequence
  Synthetic oligonucleotide
cagttgcgcggttcagatgatgtaacgcta

SEQ ID NO: 489398 - DNA, 30 bp, Artificial Sequence
  Synthetic oligonucleotide
tttttatacggtacaggggaaaacacgcta

SEQ ID NO: 489399 - DNA, 30 bp, Artificial Sequence
  Synthetic oligonucleotide
accggtatactttggtagcttagcacgcta

SEQ ID NO: 489400 - DNA, 30 bp, Artificial Sequence
  Synthetic oligonucleotide
aaagttaaatgcccgattacagggacgcta

SEQ ID NO: 489401 - DNA, 30 bp, Artificial Sequence
  Synthetic oligonucleotide
aaaatatgctcaacaactgtttggacgcta

SEQ ID NO: 489402 - DNA, 30 bp, Artificial Sequence
  Synthetic oligonucleotide
atactttaaaaagagcccgctctcccgcta

SEQ ID NO: 489403 - DNA, 30 bp, Artificial Sequence
  Synthetic oligonucleotide
gtttgcattacggtgaagtattcgccgcta

SEQ ID NO: 489404 - DNA, 30 bp, Artificial Sequence
  Synthetic oligonucleotide
tccatccggtgagtagcatagcttccgcta

SEQ ID NO: 489405 - DNA, 29 bp, Artificial Sequence
  Synthetic oligonucleotide
caggctcagatttttggcaagccgcgcta

SEQ ID NO: 489406 - DNA, 29 bp, Artificial Sequence
  Synthetic oligonucleotide
gcgagcgtcgtgatgccgggtccgcgcta

SEQ ID NO: 489407 - DNA, 30 bp, Artificial Sequence
  Synthetic oligonucleotide
tcgttcgaggggttgcgtgaaagggcgcta

SEQ ID NO: 489408 - DNA, 30 bp, Artificial Sequence
  Synthetic oligonucleotide
tgcgtctaccgcctttcactaacatcgcta

SEQ ID NO: 489409 - DNA, 30 bp, Artificial Sequence
  Synthetic oligonucleotide
accagaataaatggacggtgtacatcgcta

SEQ ID NO: 489410 - DNA, 30 bp, Artificial Sequence
  Synthetic oligonucleotide
gtaatagatgcaattttccatttatcgcta

SEQ ID NO: 489411 - DNA, 30 bp, Artificial Sequence
  Synthetic oligonucleotide
aaagcattagttcgtgctaagagctcgcta

SEQ ID NO: 489412 - DNA, 30 bp, Artificial Sequence
  Synthetic oligonucleotide
gcgtctaaagagcggtgctgtatctcgcta

SEQ ID NO: 489413 - DNA, 30 bp, Artificial Sequence
  Synthetic oligonucleotide
cacacggtagtaaccgcagcattctcgcta

SEQ ID NO: 489414 - DNA, 30 bp, Artificial Sequence
  Synthetic oligonucleotide
ctattccctaatctacagaatcattcgcta

SEQ ID NO: 489415 - DNA, 30 bp, Artificial Sequence
  Synthetic oligonucleotide
atgccaacaattttgtttagaggttcgcta

SEQ ID NO: 489416 - DNA, 30 bp, Artificial Sequence
  Synthetic oligonucleotide
ccaatctggcacgtagcacgcaaaaggcta

SEQ ID NO: 489417 - DNA, 30 bp, Artificial Sequence
  Synthetic oligonucleotide
cggcggacttctcccgctagagcaaggcta

SEQ ID NO: 489418 - DNA, 30 bp, Artificial Sequence
  Synthetic oligonucleotide
gtttgcctgcgggcatttcagagaaggcta

SEQ ID NO: 489419 - DNA, 30 bp, Artificial Sequence
  Synthetic oligonucleotide
attttctattcacgtagtacgctaaggcta

SEQ ID NO: 489420 - DNA, 30 bp, Artificial Sequence
  Synthetic oligonucleotide
tatacttatgggactagatttgacaggcta

SEQ ID NO: 489421 - DNA, 30 bp, Artificial Sequence
  Synthetic oligonucleotide
cacaccgcctggggggtcaagtccaggcta

SEQ ID NO: 489422 - DNA, 30 bp, Artificial Sequence
  Synthetic oligonucleotide
attactcaatgattaggcctgtccaggcta

SEQ ID NO: 489423 - DNA, 30 bp, Artificial Sequence
  Synthetic oligonucleotide
ggagatagcagcattgcttgctgcaggcta

SEQ ID NO: 489424 - DNA, 30 bp, Artificial Sequence
  Synthetic oligonucleotide
tgggcccgaccgcgtgacgcactcaggcta

SEQ ID NO: 489425 - DNA, 30 bp, Artificial Sequence
  Synthetic oligonucleotide
ggtaagctaaaagagagtccaccgaggcta

SEQ ID NO: 489426 - DNA, 30 bp, Artificial Sequence
  Synthetic oligonucleotide
ctaggtgacacatgagtaaggtggaggcta

SEQ ID NO: 489427 - DNA, 30 bp, Artificial Sequence
  Synthetic oligonucleotide
aagcatttctctgacttgtgttggaggcta

SEQ ID NO: 489428 - DNA, 30 bp, Artificial Sequence
  Synthetic oligonucleotide
gcagtataaacgagctattgactgaggcta

SEQ ID NO: 489429 - DNA, 30 bp, Artificial Sequence
  Synthetic oligonucleotide
aagatgtttgacgcccagatacataggcta

SEQ ID NO: 489430 - DNA, 30 bp, Artificial Sequence
  Synthetic oligonucleotide
caccaattcgcttggaccaaccttaggcta

SEQ ID NO: 489431 - DNA, 31 bp, Artificial Sequence
  Synthetic oligonucleotide
gagttgggcatagcgaatctctaaacggcta

SEQ ID NO: 489432 - DNA, 30 bp, Artificial Sequence
  Synthetic oligonucleotide
aattccccgcccatcgtcatattacggcta

SEQ ID NO: 489433 - DNA, 30 bp, Artificial Sequence
  Synthetic oligonucleotide
gagatgcaggataatataaaaccccggcta

SEQ ID NO: 489434 - DNA, 31 bp, Artificial Sequence
  Synthetic oligonucleotide
caatcttttccttgggtgggcgctgcggcta

SEQ ID NO: 489435 - DNA, 30 bp, Artificial Sequence
  Synthetic oligonucleotide
ggtcttgcgcttggaagacggcatcggcta

SEQ ID NO: 489436 - DNA, 30 bp, Artificial Sequence
  Synthetic oligonucleotide
ggagttgtcggatgcctggggccagggcta

SEQ ID NO: 489437 - DNA, 30 bp, Artificial Sequence
  Synthetic oligonucleotide
gttaagccgttatcctctcgtatagggcta

SEQ ID NO: 489438 - DNA, 30 bp, Artificial Sequence
  Synthetic oligonucleotide
gttgtcagctcgcgggtcatccgcgggcta

SEQ ID NO: 489439 - DNA, 30 bp, Artificial Sequence
  Synthetic oligonucleotide
ccctccttgtggtaacagtggcgcgggcta

SEQ ID NO: 489440 - DNA, 30 bp, Artificial Sequence
  Synthetic oligonucleotide
tccgctttgagatgcttgctattcgggcta

SEQ ID NO: 489441 - DNA, 30 bp, Artificial Sequence
  Synthetic oligonucleotide
cgttgagacccggcattccacacggggcta

SEQ ID NO: 489442 - DNA, 30 bp, Artificial Sequence
  Synthetic oligonucleotide
ttgtattatgagatgtgcacgacggggcta

SEQ ID NO: 489443 - DNA, 30 bp, Artificial Sequence
  Synthetic oligonucleotide
cgcatgccgggacgcccgaatacggggcta

SEQ ID NO: 489444 - DNA, 30 bp, Artificial Sequence
  Synthetic oligonucleotide
tggtgactccgaacagcataaaatgggcta

SEQ ID NO: 489445 - DNA, 30 bp, Artificial Sequence
  Synthetic oligonucleotide
accgcgccgtccatatttcctactgggcta

SEQ ID NO: 489446 - DNA, 30 bp, Artificial Sequence
  Synthetic oligonucleotide
ctcttctatcgtatgtctgtctcatggcta

SEQ ID NO: 489447 - DNA, 30 bp, Artificial Sequence
  Synthetic oligonucleotide
ttaaggaagcatttaccactgctatggcta

SEQ ID NO: 489448 - DNA, 30 bp, Artificial Sequence
  Synthetic oligonucleotide
gacagccttggactacgactcttatggcta

SEQ ID NO: 489449 - DNA, 30 bp, Artificial Sequence
  Synthetic oligonucleotide
tatggtccctacgcgaacagcttctggcta

SEQ ID NO: 489450 - DNA, 30 bp, Artificial Sequence
  Synthetic oligonucleotide
ccggggccagcggtgctgtattagtggcta

SEQ ID NO: 489451 - DNA, 30 bp, Artificial Sequence
  Synthetic oligonucleotide
ctcccctgtgtttagtctgctgggtggcta

SEQ ID NO: 489452 - DNA, 30 bp, Artificial Sequence
  Synthetic oligonucleotide
aataaacccgggaactgtaaggtgtggcta

SEQ ID NO: 489453 - DNA, 30 bp, Artificial Sequence
  Synthetic oligonucleotide
aaaacccatagatccggcttacgttggcta

SEQ ID NO: 489454 - DNA, 30 bp, Artificial Sequence
  Synthetic oligonucleotide
atacgccgaggcaatagctaccgttggcta

SEQ ID NO: 489455 - DNA, 30 bp, Artificial Sequence
  Synthetic oligonucleotide
atatgatagtcttccgcggatatcatgcta

SEQ ID NO: 489456 - DNA, 30 bp, Artificial Sequence
  Synthetic oligonucleotide
gaaccccattattcgataaccttcatgcta

SEQ ID NO: 489457 - DNA, 30 bp, Artificial Sequence
  Synthetic oligonucleotide
gcagggatggacttgttcaccaagatgcta

SEQ ID NO: 489458 - DNA, 30 bp, Artificial Sequence
  Synthetic oligonucleotide
aaccccacctcgtaattctgcaggatgcta

SEQ ID NO: 489459 - DNA, 30 bp, Artificial Sequence
  Synthetic oligonucleotide
atgacagttactctcgcatatcggatgcta

SEQ ID NO: 489460 - DNA, 30 bp, Artificial Sequence
  Synthetic oligonucleotide
ttaagaatcccttattaggcgatgatgcta

SEQ ID NO: 489461 - DNA, 30 bp, Artificial Sequence
  Synthetic oligonucleotide
caaattgggaattccacaccggtcctgcta

SEQ ID NO: 489462 - DNA, 30 bp, Artificial Sequence
  Synthetic oligonucleotide
gctgttctgaaaaggtctccgcagctgcta

SEQ ID NO: 489463 - DNA, 30 bp, Artificial Sequence
  Synthetic oligonucleotide
taatcctattatctagcgggaacgctgcta

SEQ ID NO: 489464 - DNA, 30 bp, Artificial Sequence
  Synthetic oligonucleotide
agtttccatagttggttaaccgtgctgcta

SEQ ID NO: 489465 - DNA, 30 bp, Artificial Sequence
  Synthetic oligonucleotide
gatgcaagtcactaattcttgcatgtgcta

SEQ ID NO: 489466 - DNA, 30 bp, Artificial Sequence
  Synthetic oligonucleotide
aatttgattctactttcctaccctgtgcta

SEQ ID NO: 489467 - DNA, 30 bp, Artificial Sequence
  Synthetic oligonucleotide
gccacttgcatgtgacacccatgtgtgcta

SEQ ID NO: 489468 - DNA, 30 bp, Artificial Sequence
  Synthetic oligonucleotide
atgaatatcgccgtcctcacccttgtgcta

SEQ ID NO: 489469 - DNA, 30 bp, Artificial Sequence
  Synthetic oligonucleotide
ggggttttctcatgttgatcgaaattgcta

SEQ ID NO: 489470 - DNA, 30 bp, Artificial Sequence
  Synthetic oligonucleotide
acatacaagcgaacgccatgctacttgcta

SEQ ID NO: 489471 - DNA, 30 bp, Artificial Sequence
  Synthetic oligonucleotide
tagcccgtctgatgaggtatcgccttgcta

SEQ ID NO: 489472 - DNA, 30 bp, Artificial Sequence
  Synthetic oligonucleotide
gtcaaatggttctcagtattgagtttgcta

SEQ ID NO: 489473 - DNA, 31 bp, Artificial Sequence
  Synthetic oligonucleotide
ttagtcgagaaggctgtatggggcaaatcta

SEQ ID NO: 489474 - DNA, 30 bp, Artificial Sequence
  Synthetic oligonucleotide
cgtattttgatcatttttttaagaaatcta

SEQ ID NO: 489475 - DNA, 30 bp, Artificial Sequence
  Synthetic oligonucleotide
gtgacaatcgggcttggccgagtaaatcta

SEQ ID NO: 489476 - DNA, 30 bp, Artificial Sequence
  Synthetic oligonucleotide
acatggttgtttttcgtaaaatacaatcta

SEQ ID NO: 489477 - DNA, 30 bp, Artificial Sequence
  Synthetic oligonucleotide
agacacttctacgtcggtgcaggcaatcta

SEQ ID NO: 489478 - DNA, 30 bp, Artificial Sequence
  Synthetic oligonucleotide
tgcccgcgttatagtcaacaacggaatcta

SEQ ID NO: 489479 - DNA, 30 bp, Artificial Sequence
  Synthetic oligonucleotide
atgattgaatcgtgcgttttgtataatcta

SEQ ID NO: 489480 - DNA, 30 bp, Artificial Sequence
  Synthetic oligonucleotide
gtgtgctagttgcgccgctacgttaatcta

SEQ ID NO: 489481 - DNA, 30 bp, Artificial Sequence
  Synthetic oligonucleotide
atacatgatgtgtggcctctcccacatcta

SEQ ID NO: 489482 - DNA, 30 bp, Artificial Sequence
  Synthetic oligonucleotide
tatctaccctacccaacatatagacatcta

SEQ ID NO: 489483 - DNA, 30 bp, Artificial Sequence
  Synthetic oligonucleotide
gcctttcagagtggacgagctgcgcatcta

SEQ ID NO: 489484 - DNA, 30 bp, Artificial Sequence
  Synthetic oligonucleotide
taagccgttgaacgaacacccaggcatcta

SEQ ID NO: 489485 - DNA, 30 bp, Artificial Sequence
  Synthetic oligonucleotide
tctgttaacggctgcgccaaaactcatcta

SEQ ID NO: 489486 - DNA, 30 bp, Artificial Sequence
  Synthetic oligonucleotide
taacaatgtcacatcttcatcgctcatcta

SEQ ID NO: 489487 - DNA, 31 bp, Artificial Sequence
  Synthetic oligonucleotide
tgattctttaactactcgaagcacagatcta

SEQ ID NO: 489488 - DNA, 30 bp, Artificial Sequence
  Synthetic oligonucleotide
ttaatggggtgcccgcctagtatagatcta

SEQ ID NO: 489489 - DNA, 30 bp, Artificial Sequence
  Synthetic oligonucleotide
caggacggcggctcaggtgaatgggatcta

SEQ ID NO: 489490 - DNA, 30 bp, Artificial Sequence
  Synthetic oligonucleotide
gtggttttacggtgcgttttaacatatcta

SEQ ID NO: 489491 - DNA, 30 bp, Artificial Sequence
  Synthetic oligonucleotide
tttgacatctaggacgaatacgcatatcta

SEQ ID NO: 489492 - DNA, 30 bp, Artificial Sequence
  Synthetic oligonucleotide
gttaggtcaattggtcgtctctgatatcta

SEQ ID NO: 489493 - DNA, 30 bp, Artificial Sequence
  Synthetic oligonucleotide
gctttggatcgtcggcacacaggctatcta

SEQ ID NO: 489494 - DNA, 30 bp, Artificial Sequence
  Synthetic oligonucleotide
gcatgatctcaaatcgagctttgctatcta

SEQ ID NO: 489495 - DNA, 30 bp, Artificial Sequence
  Synthetic oligonucleotide
gtactgtcatagttccagcttcagtatcta

SEQ ID NO: 489496 - DNA, 30 bp, Artificial Sequence
  Synthetic oligonucleotide
attttgggagatagtgcaagactgtatcta

SEQ ID NO: 489497 - DNA, 30 bp, Artificial Sequence
  Synthetic oligonucleotide
ctattgtggaacgccggtagggtgtatcta

SEQ ID NO: 489498 - DNA, 30 bp, Artificial Sequence
  Synthetic oligonucleotide
taaccatatgtgccaatagaatattatcta

SEQ ID NO: 489499 - DNA, 30 bp, Artificial Sequence
  Synthetic oligonucleotide
tggtcaggactgcagtttgctagttatcta

SEQ ID NO: 489500 - DNA, 30 bp, Artificial Sequence
  Synthetic oligonucleotide
gatttgggtacaggttataacttttatcta

SEQ ID NO: 489501 - DNA, 30 bp, Artificial Sequence
  Synthetic oligonucleotide
gtcactacgagaactcgccggttttatcta

SEQ ID NO: 489502 - DNA, 30 bp, Artificial Sequence
  Synthetic oligonucleotide
gagggtgcctttaccgcaggcaaaactcta

SEQ ID NO: 489503 - DNA, 30 bp, Artificial Sequence
  Synthetic oligonucleotide
attctcgccgaaagaaaattggcaactcta

SEQ ID NO: 489504 - DNA, 30 bp, Artificial Sequence
  Synthetic oligonucleotide
gcggtgagtcccctggatggcgacactcta

SEQ ID NO: 489505 - DNA, 30 bp, Artificial Sequence
  Synthetic oligonucleotide
acttttctggtgctaatcggttgcactcta

SEQ ID NO: 489506 - DNA, 30 bp, Artificial Sequence
  Synthetic oligonucleotide
tttgataacttcgcctcgtttctcactcta

SEQ ID NO: 489507 - DNA, 30 bp, Artificial Sequence
  Synthetic oligonucleotide
taccgaatatcatactgttcaaagactcta

SEQ ID NO: 489508 - DNA, 30 bp, Artificial Sequence
  Synthetic oligonucleotide
attggcacgggacagcataaacagactcta

SEQ ID NO: 489509 - DNA, 30 bp, Artificial Sequence
  Synthetic oligonucleotide
gtcgcttggtactttagaagttctactcta

SEQ ID NO: 489510 - DNA, 31 bp, Artificial Sequence
  Synthetic oligonucleotide
caagttcgttctaatatgagggattactcta

SEQ ID NO: 489511 - DNA, 30 bp, Artificial Sequence
  Synthetic oligonucleotide
atctagtttttgttctaaaaacttactcta

SEQ ID NO: 489512 - DNA, 30 bp, Artificial Sequence
  Synthetic oligonucleotide
gagtacacataattccgtaagatacctcta

SEQ ID NO: 489513 - DNA, 30 bp, Artificial Sequence
  Synthetic oligonucleotide
aagtgtcaccctgaacgggtaatccctcta

SEQ ID NO: 489514 - DNA, 30 bp, Artificial Sequence
  Synthetic oligonucleotide
aatgatctggcggcaaaactgccgcctcta

SEQ ID NO: 489515 - DNA, 30 bp, Artificial Sequence
  Synthetic oligonucleotide
ctcgctcttatcgcgctactcgcgcctcta

SEQ ID NO: 489516 - DNA, 30 bp, Artificial Sequence
  Synthetic oligonucleotide
aagcgctttccgtcgcatcagggtcctcta

SEQ ID NO: 489517 - DNA, 30 bp, Artificial Sequence
  Synthetic oligonucleotide
catccccgcgagcatactcgttaagctcta

SEQ ID NO: 489518 - DNA, 30 bp, Artificial Sequence
  Synthetic oligonucleotide
ccccttcgggcgccgtcccgcaacgctcta

SEQ ID NO: 489519 - DNA, 30 bp, Artificial Sequence
  Synthetic oligonucleotide
tgcctagcggctgggaccgatgccgctcta

SEQ ID NO: 489520 - DNA, 30 bp, Artificial Sequence
  Synthetic oligonucleotide
gctccatagtatttcagggtaacggctcta

SEQ ID NO: 489521 - DNA, 30 bp, Artificial Sequence
  Synthetic oligonucleotide
cccaaagactaagacggtagtccggctcta

SEQ ID NO: 489522 - DNA, 30 bp, Artificial Sequence
  Synthetic oligonucleotide
attggtcatcggagcaagtcacctgctcta

SEQ ID NO: 489523 - DNA, 30 bp, Artificial Sequence
  Synthetic oligonucleotide
actgagggcggtctatggcgacttgctcta

SEQ ID NO: 489524 - DNA, 30 bp, Artificial Sequence
  Synthetic oligonucleotide
gtacgatactcgagaagcagcgagagtcta

SEQ ID NO: 489525 - DNA, 30 bp, Artificial Sequence
  Synthetic oligonucleotide
cttttttgttgcaaacatatggatagtcta

SEQ ID NO: 489526 - DNA, 30 bp, Artificial Sequence
  Synthetic oligonucleotide
gtgtcgggcgtcagcgtagacatacgtcta

SEQ ID NO: 489527 - DNA, 30 bp, Artificial Sequence
  Synthetic oligonucleotide
agtatcaattaggttgtaaccaaccgtcta

SEQ ID NO: 489528 - DNA, 30 bp, Artificial Sequence
  Synthetic oligonucleotide
gaccctctgtatctacatcgacgccgtcta

SEQ ID NO: 489529 - DNA, 30 bp, Artificial Sequence
  Synthetic oligonucleotide
gagtgaggagtgcggcgcactaagcgtcta

SEQ ID NO: 489530 - DNA, 30 bp, Artificial Sequence
  Synthetic oligonucleotide
acacagtttagaagctgtaggcggcgtcta

SEQ ID NO: 489531 - DNA, 30 bp, Artificial Sequence
  Synthetic oligonucleotide
aagtgccgcagaagcaggtttgggcgtcta

SEQ ID NO: 489532 - DNA, 30 bp, Artificial Sequence
  Synthetic oligonucleotide
tcctcgcaggactggctaggtccaggtcta

SEQ ID NO: 489533 - DNA, 30 bp, Artificial Sequence
  Synthetic oligonucleotide
acggcttaattctagtgtagcggaggtcta

SEQ ID NO: 489534 - DNA, 30 bp, Artificial Sequence
  Synthetic oligonucleotide
ctgaaaagcgctctggttggacacggtcta

SEQ ID NO: 489535 - DNA, 30 bp, Artificial Sequence
  Synthetic oligonucleotide
agtatcgattaagttaattcttagggtcta

SEQ ID NO: 489536 - DNA, 30 bp, Artificial Sequence
  Synthetic oligonucleotide
gactgcacgatcccagctgagaggggtcta

SEQ ID NO: 489537 - DNA, 30 bp, Artificial Sequence
  Synthetic oligonucleotide
cgatcgctcgtattttattggaggggtcta

SEQ ID NO: 489538 - DNA, 30 bp, Artificial Sequence
  Synthetic oligonucleotide
atctgaaactgacccggttttcggggtcta

SEQ ID NO: 489539 - DNA, 30 bp, Artificial Sequence
  Synthetic oligonucleotide
cagaccgctgggtgcacggcacctggtcta

SEQ ID NO: 489540 - DNA, 30 bp, Artificial Sequence
  Synthetic oligonucleotide
gtggcgaccgccgcaagacatcaatgtcta

SEQ ID NO: 489541 - DNA, 30 bp, Artificial Sequence
  Synthetic oligonucleotide
aatatgtcaacccgagggtacccatgtcta

SEQ ID NO: 489542 - DNA, 30 bp, Artificial Sequence
  Synthetic oligonucleotide
ccggcgggcattcttaggggctagtgtcta

SEQ ID NO: 489543 - DNA, 30 bp, Artificial Sequence
  Synthetic oligonucleotide
tatgcacctagtgaatcacactcgtgtcta

SEQ ID NO: 489544 - DNA, 30 bp, Artificial Sequence
  Synthetic oligonucleotide
aataatgttatccatacggctctgtgtcta

SEQ ID NO: 489545 - DNA, 30 bp, Artificial Sequence
  Synthetic oligonucleotide
ccggtctcattcagacagatgttttgtcta

SEQ ID NO: 489546 - DNA, 30 bp, Artificial Sequence
  Synthetic oligonucleotide
cccgacgttagtggactgcttagaattcta

SEQ ID NO: 489547 - DNA, 30 bp, Artificial Sequence
  Synthetic oligonucleotide
tttatcgccgattctctagtgtggattcta

SEQ ID NO: 489548 - DNA, 30 bp, Artificial Sequence
  Synthetic oligonucleotide
cgcttagagggctatctcggcaaccttcta

SEQ ID NO: 489549 - DNA, 30 bp, Artificial Sequence
  Synthetic oligonucleotide
gaggctaataagttttagtagccccttcta

SEQ ID NO: 489550 - DNA, 30 bp, Artificial Sequence
  Synthetic oligonucleotide
gaagcctagttacgcgcggtggcccttcta

SEQ ID NO: 489551 - DNA, 30 bp, Artificial Sequence
  Synthetic oligonucleotide
gacaggccggccgcgagggcgtagcttcta

SEQ ID NO: 489552 - DNA, 30 bp, Artificial Sequence
  Synthetic oligonucleotide
ttaaactgggcaccggtagagatgcttcta

SEQ ID NO: 489553 - DNA, 30 bp, Artificial Sequence
  Synthetic oligonucleotide
gactgctccatcgaaacgaatctgcttcta

SEQ ID NO: 489554 - DNA, 30 bp, Artificial Sequence
  Synthetic oligonucleotide
tagggtgtcgccgcccctacacatcttcta

SEQ ID NO: 489555 - DNA, 30 bp, Artificial Sequence
  Synthetic oligonucleotide
tacagggattctgcgggcaagactcttcta

SEQ ID NO: 489556 - DNA, 30 bp, Artificial Sequence
  Synthetic oligonucleotide
gaacagaagaatttggattcaagtcttcta

SEQ ID NO: 489557 - DNA, 30 bp, Artificial Sequence
  Synthetic oligonucleotide
aattaaggttatacgcggtgtacagttcta

SEQ ID NO: 489558 - DNA, 30 bp, Artificial Sequence
  Synthetic oligonucleotide
gttgcgcgggtgctgttcagcaccgttcta

SEQ ID NO: 489559 - DNA, 30 bp, Artificial Sequence
  Synthetic oligonucleotide
tatataatcaaacgtattttcttcgttcta

SEQ ID NO: 489560 - DNA, 30 bp, Artificial Sequence
  Synthetic oligonucleotide
gtccaccacatgacgcttgcataggttcta

SEQ ID NO: 489561 - DNA, 30 bp, Artificial Sequence
  Synthetic oligonucleotide
ggtggagcatgaaggtcttatacggttcta

SEQ ID NO: 489562 - DNA, 30 bp, Artificial Sequence
  Synthetic oligonucleotide
gaaatggacatgggatcggtatgggttcta

SEQ ID NO: 489563 - DNA, 30 bp, Artificial Sequence
  Synthetic oligonucleotide
attggatgggcccattggaactgggttcta

SEQ ID NO: 489564 - DNA, 30 bp, Artificial Sequence
  Synthetic oligonucleotide
ggaccaagtctggcatttaatttggttcta

SEQ ID NO: 489565 - DNA, 30 bp, Artificial Sequence
  Synthetic oligonucleotide
ctcacgcaccatatctctcggcctgttcta

SEQ ID NO: 489566 - DNA, 30 bp, Artificial Sequence
  Synthetic oligonucleotide
gttctacaaccctttagaagtcgtgttcta

SEQ ID NO: 489567 - DNA, 30 bp, Artificial Sequence
  Synthetic oligonucleotide
gcataaagccaatttagcacctttgttcta

SEQ ID NO: 489568 - DNA, 30 bp, Artificial Sequence
  Synthetic oligonucleotide
aacttacaaaggacctgttatctatttcta

SEQ ID NO: 489569 - DNA, 30 bp, Artificial Sequence
  Synthetic oligonucleotide
tgtgattgcggggcaaatcgctgctttcta

SEQ ID NO: 489570 - DNA, 30 bp, Artificial Sequence
  Synthetic oligonucleotide
aggtcccgggataccggtaggtgctttcta

SEQ ID NO: 489571 - DNA, 30 bp, Artificial Sequence
  Synthetic oligonucleotide
tatttcgcaaggcaaccattatggtttcta

SEQ ID NO: 489572 - DNA, 30 bp, Artificial Sequence
  Synthetic oligonucleotide
ggattttaataagataacccattgtttcta

SEQ ID NO: 489573 - DNA, 31 bp, Artificial Sequence
  Synthetic oligonucleotide
cccccctcctgtctcttgtttctcttttcta

SEQ ID NO: 489574 - DNA, 30 bp, Artificial Sequence
  Synthetic oligonucleotide
cgcgcagacttggattttcgaataaaagta

SEQ ID NO: 489575 - DNA, 30 bp, Artificial Sequence
  Synthetic oligonucleotide
tagacagcggaggtgaggactcgcaaagta

SEQ ID NO: 489576 - DNA, 30 bp, Artificial Sequence
  Synthetic oligonucleotide
attctgtgtgtaagcattaagattaaagta

SEQ ID NO: 489577 - DNA, 30 bp, Artificial Sequence
  Synthetic oligonucleotide
cttcatcggtaagaggtagtatttaaagta

SEQ ID NO: 489578 - DNA, 30 bp, Artificial Sequence
  Synthetic oligonucleotide
gaatccccgtgccccccgtaccatcaagta

SEQ ID NO: 489579 - DNA, 30 bp, Artificial Sequence
  Synthetic oligonucleotide
acgatggtaaaacaatgcatgccagaagta

SEQ ID NO: 489580 - DNA, 30 bp, Artificial Sequence
  Synthetic oligonucleotide
tacaactccctacttgtcatgcatgaagta

SEQ ID NO: 489581 - DNA, 30 bp, Artificial Sequence
  Synthetic oligonucleotide
tttttgcaacggctggcggtcgctgaagta

SEQ ID NO: 489582 - DNA, 30 bp, Artificial Sequence
  Synthetic oligonucleotide
gtaagacgcactgtttgtcattctgaagta

SEQ ID NO: 489583 - DNA, 30 bp, Artificial Sequence
  Synthetic oligonucleotide
catttgctgatctcttacgtatgataagta

SEQ ID NO: 489584 - DNA, 30 bp, Artificial Sequence
  Synthetic oligonucleotide
gctgtgtcacagggcattaacacgtaagta

SEQ ID NO: 489585 - DNA, 30 bp, Artificial Sequence
  Synthetic oligonucleotide
gctgttctctagggaatagcggtgtaagta

SEQ ID NO: 489586 - DNA, 30 bp, Artificial Sequence
  Synthetic oligonucleotide
gcagtcataccttgtgttaacccttaagta

SEQ ID NO: 489587 - DNA, 30 bp, Artificial Sequence
  Synthetic oligonucleotide
tgggtggaaagaatttcatcgggcacagta

SEQ ID NO: 489588 - DNA, 31 bp, Artificial Sequence
  Synthetic oligonucleotide
attccggtgtacctctcgcggtgtcacagta

SEQ ID NO: 489589 - DNA, 30 bp, Artificial Sequence
  Synthetic oligonucleotide
taaaccctgtttctcccgtgacatacagta

SEQ ID NO: 489590 - DNA, 30 bp, Artificial Sequence
  Synthetic oligonucleotide
ctgtctaggattattccgaggactacagta

SEQ ID NO: 489591 - DNA, 30 bp, Artificial Sequence
  Synthetic oligonucleotide
ggcttgttaaacgacttcggcaacccagta

SEQ ID NO: 489592 - DNA, 30 bp, Artificial Sequence
  Synthetic oligonucleotide
gagtcctactagtactagtatcagccagta

SEQ ID NO: 489593 - DNA, 30 bp, Artificial Sequence
  Synthetic oligonucleotide
ggaacgagccaaagataacctggtccagta

SEQ ID NO: 489594 - DNA, 30 bp, Artificial Sequence
  Synthetic oligonucleotide
gtttttcatcacctggtgattagagcagta

SEQ ID NO: 489595 - DNA, 30 bp, Artificial Sequence
  Synthetic oligonucleotide
gtttggcaagtttatcatgacctagcagta

SEQ ID NO: 489596 - DNA, 30 bp, Artificial Sequence
  Synthetic oligonucleotide
ttctaccagctcatgacgcgtttggcagta

SEQ ID NO: 489597 - DNA, 30 bp, Artificial Sequence
  Synthetic oligonucleotide
ctcctatcgatgtttattaggtctgcagta

SEQ ID NO: 489598 - DNA, 30 bp, Artificial Sequence
  Synthetic oligonucleotide
cgggattaactgggcgtttaacgtgcagta

SEQ ID NO: 489599 - DNA, 30 bp, Artificial Sequence
  Synthetic oligonucleotide
gttgatggcattgcgcgcacgtttgcagta

SEQ ID NO: 489600 - DNA, 30 bp, Artificial Sequence
  Synthetic oligonucleotide
gggtgtagccattatcgcagaaaatcagta

SEQ ID NO: 489601 - DNA, 30 bp, Artificial Sequence
  Synthetic oligonucleotide
tttgtcatgtcgctgttgctaccatcagta

SEQ ID NO: 489602 - DNA, 30 bp, Artificial Sequence
  Synthetic oligonucleotide
atgtatgctggcgtgcctgtgctatcagta

SEQ ID NO: 489603 - DNA, 30 bp, Artificial Sequence
  Synthetic oligonucleotide
atgttatttacaccctgttccttatcagta

SEQ ID NO: 489604 - DNA, 31 bp, Artificial Sequence
  Synthetic oligonucleotide
gcctaagcaaggctcctctctatactcagta

SEQ ID NO: 489605 - DNA, 30 bp, Artificial Sequence
  Synthetic oligonucleotide
tagtaccttggaacggtttttccaagagta

SEQ ID NO: 489606 - DNA, 30 bp, Artificial Sequence
  Synthetic oligonucleotide
gtgtgttcctgagcctttctgcgaagagta

SEQ ID NO: 489607 - DNA, 30 bp, Artificial Sequence
  Synthetic oligonucleotide
atatattaggcgagctcacaagtaagagta

SEQ ID NO: 489608 - DNA, 30 bp, Artificial Sequence
  Synthetic oligonucleotide
attaatttagtcatagtgtcaaccagagta

SEQ ID NO: 489609 - DNA, 30 bp, Artificial Sequence
  Synthetic oligonucleotide
taggataacattgtaatgaccagcagagta

SEQ ID NO: 489610 - DNA, 30 bp, Artificial Sequence
  Synthetic oligonucleotide
tggtgctagccaaccagtaagctcagagta

SEQ ID NO: 489611 - DNA, 30 bp, Artificial Sequence
  Synthetic oligonucleotide
ccttggacatccgaacgagattcgagagta

SEQ ID NO: 489612 - DNA, 30 bp, Artificial Sequence
  Synthetic oligonucleotide
aagcatcataaatccagatcttcgagagta

SEQ ID NO: 489613 - DNA, 30 bp, Artificial Sequence
  Synthetic oligonucleotide
ggagagtcatcccgcagcaattctagagta

SEQ ID NO: 489614 - DNA, 30 bp, Artificial Sequence
  Synthetic oligonucleotide
agattattgatgctatgaacgccgcgagta

SEQ ID NO: 489615 - DNA, 30 bp, Artificial Sequence
  Synthetic oligonucleotide
gctaaatcttccgagcgcttgtcgcgagta

SEQ ID NO: 489616 - DNA, 30 bp, Artificial Sequence
  Synthetic oligonucleotide
gcatatcggggcatcttactgcggcgagta

SEQ ID NO: 489617 - DNA, 30 bp, Artificial Sequence
  Synthetic oligonucleotide
ctaatcgagcaagacacggcagtgcgagta

SEQ ID NO: 489618 - DNA, 30 bp, Artificial Sequence
  Synthetic oligonucleotide
gaccttacggcctgctccagctgtcgagta

SEQ ID NO: 489619 - DNA, 30 bp, Artificial Sequence
  Synthetic oligonucleotide
acccattattcagcttgtagcgcaggagta

SEQ ID NO: 489620 - DNA, 30 bp, Artificial Sequence
  Synthetic oligonucleotide
agctttttatgtaacagaagcatcggagta

SEQ ID NO: 489621 - DNA, 30 bp, Artificial Sequence
  Synthetic oligonucleotide
ttataagactactgtggttatacgggagta

SEQ ID NO: 489622 - DNA, 30 bp, Artificial Sequence
  Synthetic oligonucleotide
ctcactgttccccgctatacatctggagta

SEQ ID NO: 489623 - DNA, 30 bp, Artificial Sequence
  Synthetic oligonucleotide
atgaggatgcaccgtcaagtgtctggagta

SEQ ID NO: 489624 - DNA, 30 bp, Artificial Sequence
  Synthetic oligonucleotide
tatgtgatccctagagtgacacagtgagta

SEQ ID NO: 489625 - DNA, 30 bp, Artificial Sequence
  Synthetic oligonucleotide
tgaaacaaaggccggcaggtgcattgagta

SEQ ID NO: 489626 - DNA, 30 bp, Artificial Sequence
  Synthetic oligonucleotide
gtacaccagacgtaggaagctcattgagta

SEQ ID NO: 489627 - DNA, 30 bp, Artificial Sequence
  Synthetic oligonucleotide
ctgcttaggagactttcttatgcttgagta

SEQ ID NO: 489628 - DNA, 30 bp, Artificial Sequence
  Synthetic oligonucleotide
attcatgataatacccaacattgttgagta

SEQ ID NO: 489629 - DNA, 30 bp, Artificial Sequence
  Synthetic oligonucleotide
ccacggtgagtacgatatgaaatttgagta

SEQ ID NO: 489630 - DNA, 30 bp, Artificial Sequence
  Synthetic oligonucleotide
acaatcctatggtcgattatcagcatagta

SEQ ID NO: 489631 - DNA, 30 bp, Artificial Sequence
  Synthetic oligonucleotide
gggtgttagaacacgccactgcttatagta

SEQ ID NO: 489632 - DNA, 30 bp, Artificial Sequence
  Synthetic oligonucleotide
tttccaatttacaacagttggccactagta

SEQ ID NO: 489633 - DNA, 30 bp, Artificial Sequence
  Synthetic oligonucleotide
attgcgcctgtagagccgcgcggcctagta

SEQ ID NO: 489634 - DNA, 30 bp, Artificial Sequence
  Synthetic oligonucleotide
gccgcctagcggatactactctagctagta

SEQ ID NO: 489635 - DNA, 30 bp, Artificial Sequence
  Synthetic oligonucleotide
tagacgttttgttttcaaatacgtctagta

SEQ ID NO: 489636 - DNA, 30 bp, Artificial Sequence
  Synthetic oligonucleotide
aaccctcaggggtgacagtacggtctagta

SEQ ID NO: 489637 - DNA, 30 bp, Artificial Sequence
  Synthetic oligonucleotide
cagcatatttaggtaagtgctcttctagta

SEQ ID NO: 489638 - DNA, 30 bp, Artificial Sequence
  Synthetic oligonucleotide
agctaactgacgcacttgcgactcgtagta

SEQ ID NO: 489639 - DNA, 30 bp, Artificial Sequence
  Synthetic oligonucleotide
agctgtaattttatcagttgcccggtagta

SEQ ID NO: 489640 - DNA, 30 bp, Artificial Sequence
  Synthetic oligonucleotide
cgccgaagataccgccattgcgcggtagta

SEQ ID NO: 489641 - DNA, 30 bp, Artificial Sequence
  Synthetic oligonucleotide
gtggccttatcctaattcaagactgtagta

SEQ ID NO: 489642 - DNA, 27 bp, Artificial Sequence
  Synthetic oligonucleotide
taatctcgacaagcgattactgtagta

SEQ ID NO: 489643 - DNA, 30 bp, Artificial Sequence
  Synthetic oligonucleotide
tagccaggaaacagtcgagtcggattagta

SEQ ID NO: 489644 - DNA, 30 bp, Artificial Sequence
  Synthetic oligonucleotide
catgcttcttgatgatacaacagcttagta

SEQ ID NO: 489645 - DNA, 30 bp, Artificial Sequence
  Synthetic oligonucleotide
taaggtttaggcccgtgacggagcttagta

SEQ ID NO: 489646 - DNA, 30 bp, Artificial Sequence
  Synthetic oligonucleotide
tcctttcagggaacaaatgacggcttagta

SEQ ID NO: 489647 - DNA, 30 bp, Artificial Sequence
  Synthetic oligonucleotide
ggaaggtatatgcaaccgtccgttttagta

SEQ ID NO: 489648 - DNA, 30 bp, Artificial Sequence
  Synthetic oligonucleotide
taaaccaggctaacgtcgacgtaaaacgta

SEQ ID NO: 489649 - DNA, 30 bp, Artificial Sequence
  Synthetic oligonucleotide
tacgcaccgcattcagtatcaacaaacgta

SEQ ID NO: 489650 - DNA, 30 bp, Artificial Sequence
  Synthetic oligonucleotide
tttagtaatgatgcaggtacattcaacgta

SEQ ID NO: 489651 - DNA, 30 bp, Artificial Sequence
  Synthetic oligonucleotide
tctgatgaatttatcttttgtacgaacgta

SEQ ID NO: 489652 - DNA, 30 bp, Artificial Sequence
  Synthetic oligonucleotide
aggtatgaggctcgcagccggatgaacgta

SEQ ID NO: 489653 - DNA, 30 bp, Artificial Sequence
  Synthetic oligonucleotide
gtgcaccgttctatcttagggtctaacgta

SEQ ID NO: 489654 - DNA, 30 bp, Artificial Sequence
  Synthetic oligonucleotide
attcaaagatagcagcaagacggtaacgta

SEQ ID NO: 489655 - DNA, 30 bp, Artificial Sequence
  Synthetic oligonucleotide
ggagcgattttatccctattatgacacgta

SEQ ID NO: 489656 - DNA, 30 bp, Artificial Sequence
  Synthetic oligonucleotide
acctctacgtgctggacaatccaccacgta

SEQ ID NO: 489657 - DNA, 30 bp, Artificial Sequence
  Synthetic oligonucleotide
ttgccgctccaaaacagagcggcccacgta

SEQ ID NO: 489658 - DNA, 30 bp, Artificial Sequence
  Synthetic oligonucleotide
gatcgtgggtacgtgcgttgttcccacgta

SEQ ID NO: 489659 - DNA, 30 bp, Artificial Sequence
  Synthetic oligonucleotide
acatccgtttgggggtacgacccgcacgta

SEQ ID NO: 489660 - DNA, 30 bp, Artificial Sequence
  Synthetic oligonucleotide
aatgtggtgacagcgcacttatggcacgta

SEQ ID NO: 489661 - DNA, 30 bp, Artificial Sequence
  Synthetic oligonucleotide
aataattgatgagtgagttgtttgcacgta

SEQ ID NO: 489662 - DNA, 30 bp, Artificial Sequence
  Synthetic oligonucleotide
tatagatccgcccgcaggaaaactcacgta

SEQ ID NO: 489663 - DNA, 30 bp, Artificial Sequence
  Synthetic oligonucleotide
gccaaacgcgagcggaatgtccgtcacgta

SEQ ID NO: 489664 - DNA, 30 bp, Artificial Sequence
  Synthetic oligonucleotide
tagttcggatatgaggaccacattcacgta

SEQ ID NO: 489665 - DNA, 30 bp, Artificial Sequence
  Synthetic oligonucleotide
cacatcaaggtgcgatctctataagacgta

SEQ ID NO: 489666 - DNA, 30 bp, Artificial Sequence
  Synthetic oligonucleotide
ggtttcccatgtggatgtttcagcgacgta

SEQ ID NO: 489667 - DNA, 30 bp, Artificial Sequence
  Synthetic oligonucleotide
ctaacgagatctctcaagttacgcgacgta

SEQ ID NO: 489668 - DNA, 30 bp, Artificial Sequence
  Synthetic oligonucleotide
tatataatcaatgatgacactactgacgta

SEQ ID NO: 489669 - DNA, 30 bp, Artificial Sequence
  Synthetic oligonucleotide
tatgtaaccggtttacccccttcatacgta

SEQ ID NO: 489670 - DNA, 29 bp, Artificial Sequence
  Synthetic oligonucleotide
gcgggtttacctgttgcctgtactacgta

SEQ ID NO: 489671 - DNA, 30 bp, Artificial Sequence
  Synthetic oligonucleotide
acatcatcctgcggattcggaggctacgta

SEQ ID NO: 489672 - DNA, 30 bp, Artificial Sequence
  Synthetic oligonucleotide
gaaaaacccggaatcgggcatttctacgta

SEQ ID NO: 489673 - DNA, 30 bp, Artificial Sequence
  Synthetic oligonucleotide
gccaggacttctcgcaaaattcgttacgta

SEQ ID NO: 489674 - DNA, 30 bp, Artificial Sequence
  Synthetic oligonucleotide
tcgaccacgtccacctcccggtgttacgta

SEQ ID NO: 489675 - DNA, 30 bp, Artificial Sequence
  Synthetic oligonucleotide
ccaatgctcattctgtgtcgctaaaccgta

SEQ ID NO: 489676 - DNA, 30 bp, Artificial Sequence
  Synthetic oligonucleotide
cccattaacagcccccgcccgccaaccgta

SEQ ID NO: 489677 - DNA, 30 bp, Artificial Sequence
  Synthetic oligonucleotide
gggcttgttcatcatactgacggaaccgta

SEQ ID NO: 489678 - DNA, 30 bp, Artificial Sequence
  Synthetic oligonucleotide
tcccgagaagttcatgaacaccgcaccgta

SEQ ID NO: 489679 - DNA, 30 bp, Artificial Sequence
  Synthetic oligonucleotide
ggaaagtaagcgaggaggattgtcaccgta

SEQ ID NO: 489680 - DNA, 30 bp, Artificial Sequence
  Synthetic oligonucleotide
agttactggcgtattttggccacgaccgta

SEQ ID NO: 489681 - DNA, 30 bp, Artificial Sequence
  Synthetic oligonucleotide
ctgggaaaacccgcagcggtctctaccgta

SEQ ID NO: 489682 - DNA, 30 bp, Artificial Sequence
  Synthetic oligonucleotide
ctcagtttgttgtagcgatacatacccgta

SEQ ID NO: 489683 - DNA, 30 bp, Artificial Sequence
  Synthetic oligonucleotide
ccatttggggaagtggtatatccccccgta

SEQ ID NO: 489684 - DNA, 29 bp, Artificial Sequence
  Synthetic oligonucleotide
taacgttctgaaatacctactagcccgta

SEQ ID NO: 489685 - DNA, 30 bp, Artificial Sequence
  Synthetic oligonucleotide
cgaaattggagctctctcggcgctcccgta

SEQ ID NO: 489686 - DNA, 30 bp, Artificial Sequence
  Synthetic oligonucleotide
aagtttatcctatcggtacgtgttcccgta

SEQ ID NO: 489687 - DNA, 30 bp, Artificial Sequence
  Synthetic oligonucleotide
gacgcagtttcctggagtagtaccgccgta

SEQ ID NO: 489688 - DNA, 30 bp, Artificial Sequence
  Synthetic oligonucleotide
gagatcgtatacgagcggatcaaggccgta

SEQ ID NO: 489689 - DNA, 30 bp, Artificial Sequence
  Synthetic oligonucleotide
cttcattgcagtccaactatcccggccgta

SEQ ID NO: 489690 - DNA, 30 bp, Artificial Sequence
  Synthetic oligonucleotide
gatagacgcaggggattacttcatgccgta

SEQ ID NO: 489691 - DNA, 30 bp, Artificial Sequence
  Synthetic oligonucleotide
taaccatgataagggagactccttgccgta

SEQ ID NO: 489692 - DNA, 30 bp, Artificial Sequence
  Synthetic oligonucleotide
atcctactaccagctctcacgggatccgta

SEQ ID NO: 489693 - DNA, 30 bp, Artificial Sequence
  Synthetic oligonucleotide
gggacagggtcgtcggtatcgctatccgta

SEQ ID NO: 489694 - DNA, 30 bp, Artificial Sequence
  Synthetic oligonucleotide
gatgtgcacgctaagcttagatcgtccgta

SEQ ID NO: 489695 - DNA, 30 bp, Artificial Sequence
  Synthetic oligonucleotide
agtttttatctaatcgtcccaatgtccgta

SEQ ID NO: 489696 - DNA, 30 bp, Artificial Sequence
  Synthetic oligonucleotide
aaaaccgcagatcggcatgcgctgtccgta

SEQ ID NO: 489697 - DNA, 30 bp, Artificial Sequence
  Synthetic oligonucleotide
atttttgtgcgggcgaaccctgattccgta

SEQ ID NO: 489698 - DNA, 30 bp, Artificial Sequence
  Synthetic oligonucleotide
agtttacgagattagctcgtagcttccgta

SEQ ID NO: 489699 - DNA, 30 bp, Artificial Sequence
  Synthetic oligonucleotide
ctcctgctttctcttgcgtctgaaagcgta

SEQ ID NO: 489700 - DNA, 30 bp, Artificial Sequence
  Synthetic oligonucleotide
aactgaggttcgttggtatctaccagcgta

SEQ ID NO: 489701 - DNA, 30 bp, Artificial Sequence
  Synthetic oligonucleotide
ataactctggttactcgggtactcagcgta

SEQ ID NO: 489702 - DNA, 30 bp, Artificial Sequence
  Synthetic oligonucleotide
gagaacggatatacgtatctgatgagcgta

SEQ ID NO: 489703 - DNA, 30 bp, Artificial Sequence
  Synthetic oligonucleotide
atttaacaatcggcatggaatgtgagcgta

SEQ ID NO: 489704 - DNA, 30 bp, Artificial Sequence
  Synthetic oligonucleotide
actccatgcagcaatggctaattgagcgta

SEQ ID NO: 489705 - DNA, 30 bp, Artificial Sequence
  Synthetic oligonucleotide
taataactaagcgggccttaattgagcgta

SEQ ID NO: 489706 - DNA, 30 bp, Artificial Sequence
  Synthetic oligonucleotide
ttgtttatgggacattgactttctagcgta

SEQ ID NO: 489707 - DNA, 30 bp, Artificial Sequence
  Synthetic oligonucleotide
aatttccgactttgtaagaaagttagcgta

SEQ ID NO: 489708 - DNA, 30 bp, Artificial Sequence
  Synthetic oligonucleotide
gcatactcttttcgctgaaccgcacgcgta

SEQ ID NO: 489709 - DNA, 30 bp, Artificial Sequence
  Synthetic oligonucleotide
aaccgtatggtccattatagcagacgcgta

SEQ ID NO: 489710 - DNA, 30 bp, Artificial Sequence
  Synthetic oligonucleotide
ttttacggagctaatgtgatccaccgcgta

SEQ ID NO: 489711 - DNA, 30 bp, Artificial Sequence
  Synthetic oligonucleotide
gcttcaaaaattcgcttttccgcccgcgta

SEQ ID NO: 489712 - DNA, 30 bp, Artificial Sequence
  Synthetic oligonucleotide
aaggtccttacatgggtcgcgtatcgcgta

SEQ ID NO: 489713 - DNA, 30 bp, Artificial Sequence
  Synthetic oligonucleotide
ctttatcacggtcgcccaaacctaggcgta

SEQ ID NO: 489714 - DNA, 30 bp, Artificial Sequence
  Synthetic oligonucleotide
gagcaagcaacgagaggcataactggcgta

SEQ ID NO: 489715 - DNA, 30 bp, Artificial Sequence
  Synthetic oligonucleotide
cattgaatacacactcccggacgtggcgta

SEQ ID NO: 489716 - DNA, 30 bp, Artificial Sequence
  Synthetic oligonucleotide
actgttatgtcgttaggagcgatgatcgta

SEQ ID NO: 489717 - DNA, 30 bp, Artificial Sequence
  Synthetic oligonucleotide
tgcagcaacagaacctttcttgtgatcgta

SEQ ID NO: 489718 - DNA, 30 bp, Artificial Sequence
  Synthetic oligonucleotide
gatcacagctagtcgggttttcaactcgta

SEQ ID NO: 489719 - DNA, 30 bp, Artificial Sequence
  Synthetic oligonucleotide
aaagagactcattatgcccatgatctcgta

SEQ ID NO: 489720 - DNA, 30 bp, Artificial Sequence
  Synthetic oligonucleotide
cacagtggcattaagacatgaagtgtcgta

SEQ ID NO: 489721 - DNA, 30 bp, Artificial Sequence
  Synthetic oligonucleotide
agcccaccgcgtctttgcgcccgtgtcgta

SEQ ID NO: 489722 - DNA, 30 bp, Artificial Sequence
  Synthetic oligonucleotide
gcattgtggactgcaatggactgattcgta

SEQ ID NO: 489723 - DNA, 30 bp, Artificial Sequence
  Synthetic oligonucleotide
atatgtgggattgtggacaaatagttcgta

SEQ ID NO: 489724 - DNA, 30 bp, Artificial Sequence
  Synthetic oligonucleotide
cccccggatatttgggtcctacatttcgta

SEQ ID NO: 489725 - DNA, 30 bp, Artificial Sequence
  Synthetic oligonucleotide
tggagcggctcagctcgaaccgcaaaggta

SEQ ID NO: 489726 - DNA, 30 bp, Artificial Sequence
  Synthetic oligonucleotide
tacgttcataggcttgctacggcaaaggta

SEQ ID NO: 489727 - DNA, 30 bp, Artificial Sequence
  Synthetic oligonucleotide
cggccacgatactgtaggatgcgaaaggta

SEQ ID NO: 489728 - DNA, 30 bp, Artificial Sequence
  Synthetic oligonucleotide
gacttagacaaccgtcggcctggaaaggta

SEQ ID NO: 489729 - DNA, 30 bp, Artificial Sequence
  Synthetic oligonucleotide
tattaagttgggcaaattatctcgaaggta

SEQ ID NO: 489730 - DNA, 30 bp, Artificial Sequence
  Synthetic oligonucleotide
cacccaaatttcgaggagcaattgaaggta

SEQ ID NO: 489731 - DNA, 30 bp, Artificial Sequence
  Synthetic oligonucleotide
gtcatgcgacacggaaagggacctaaggta

SEQ ID NO: 489732 - DNA, 30 bp, Artificial Sequence
  Synthetic oligonucleotide
gcgcgcaaaagtccacgacgccgtaaggta

SEQ ID NO: 489733 - DNA, 30 bp, Artificial Sequence
  Synthetic oligonucleotide
ctggatgcgagccttacgagaggtaaggta

SEQ ID NO: 489734 - DNA, 30 bp, Artificial Sequence
  Synthetic oligonucleotide
gtatggataaaccatgaaaggtaacaggta

SEQ ID NO: 489735 - DNA, 30 bp, Artificial Sequence
  Synthetic oligonucleotide
agttttcatagctgtgtcaagttacaggta

SEQ ID NO: 489736 - DNA, 30 bp, Artificial Sequence
  Synthetic oligonucleotide
tcttcatacatcccccacagtaaccaggta

SEQ ID NO: 489737 - DNA, 30 bp, Artificial Sequence
  Synthetic oligonucleotide
gggtcctcccggcggtctataatccaggta

SEQ ID NO: 489738 - DNA, 30 bp, Artificial Sequence
  Synthetic oligonucleotide
gtcacgagagtggcgaatggcatgcaggta

SEQ ID NO: 489739 - DNA, 30 bp, Artificial Sequence
  Synthetic oligonucleotide
tggaagctacctggctcggccgctcaggta

SEQ ID NO: 489740 - DNA, 30 bp, Artificial Sequence
  Synthetic oligonucleotide
cttgagattgatttgtgctttcaagaggta

SEQ ID NO: 489741 - DNA, 30 bp, Artificial Sequence
  Synthetic oligonucleotide
ttgatgaccttgcagataagtcgggaggta

SEQ ID NO: 489742 - DNA, 30 bp, Artificial Sequence
  Synthetic oligonucleotide
tactgatacgacgtggctgttcgggaggta

SEQ ID NO: 489743 - DNA, 30 bp, Artificial Sequence
  Synthetic oligonucleotide
gttaaacgaaggaaatattgtctggaggta

SEQ ID NO: 489744 - DNA, 30 bp, Artificial Sequence
  Synthetic oligonucleotide
tgcgcatcgtacgggtctagttctgaggta

SEQ ID NO: 489745 - DNA, 30 bp, Artificial Sequence
  Synthetic oligonucleotide
tgggtttatgtgctttctttacttgaggta

SEQ ID NO: 489746 - DNA, 30 bp, Artificial Sequence
  Synthetic oligonucleotide
gctgataagcgccttccaattcaataggta

SEQ ID NO: 489747 - DNA, 30 bp, Artificial Sequence
  Synthetic oligonucleotide
tcttgggttgaccctaacctactataggta

SEQ ID NO: 489748 - DNA, 30 bp, Artificial Sequence
  Synthetic oligonucleotide
gagtctgtattattgttaatttcctaggta

SEQ ID NO: 489749 - DNA, 30 bp, Artificial Sequence
  Synthetic oligonucleotide
gaggcatagcataaccttgcaatctaggta

SEQ ID NO: 489750 - DNA, 30 bp, Artificial Sequence
  Synthetic oligonucleotide
ccccttaatttttctccgactcattaggta

SEQ ID NO: 489751 - DNA, 30 bp, Artificial Sequence
  Synthetic oligonucleotide
ggacgcaacattattagcggcagaacggta

SEQ ID NO: 489752 - DNA, 30 bp, Artificial Sequence
  Synthetic oligonucleotide
agtgagtgtccgtcgcccggtaacacggta

SEQ ID NO: 489753 - DNA, 30 bp, Artificial Sequence
  Synthetic oligonucleotide
tggatgatgcagggtcggacgctcacggta

SEQ ID NO: 489754 - DNA, 30 bp, Artificial Sequence
  Synthetic oligonucleotide
ggtcttactccggtatttccgacgacggta

SEQ ID NO: 489755 - DNA, 30 bp, Artificial Sequence
  Synthetic oligonucleotide
agtaagcatagcgtttatatagctacggta

SEQ ID NO: 489756 - DNA, 30 bp, Artificial Sequence
  Synthetic oligonucleotide
cgccaggcatatgacgcagattctacggta

SEQ ID NO: 489757 - DNA, 30 bp, Artificial Sequence
  Synthetic oligonucleotide
ttcgacaagaaggcgggaaaaccaccggta

SEQ ID NO: 489758 - DNA, 30 bp, Artificial Sequence
  Synthetic oligonucleotide
ccttgctaaacgtctgggaatcagccggta

SEQ ID NO: 489759 - DNA, 30 bp, Artificial Sequence
  Synthetic oligonucleotide
cgggatttttagggtgttggcaggccggta

SEQ ID NO: 489760 - DNA, 30 bp, Artificial Sequence
  Synthetic oligonucleotide
gagttctcgtaggtgcgttacggtccggta

SEQ ID NO: 489761 - DNA, 30 bp, Artificial Sequence
  Synthetic oligonucleotide
attcttataagaatcacttgccaagcggta

SEQ ID NO: 489762 - DNA, 30 bp, Artificial Sequence
  Synthetic oligonucleotide
gaaatgcgcagaataacatgcggcgcggta

SEQ ID NO: 489763 - DNA, 30 bp, Artificial Sequence
  Synthetic oligonucleotide
agtattcaaaatcggacgacgcatgcggta

SEQ ID NO: 489764 - DNA, 30 bp, Artificial Sequence
  Synthetic oligonucleotide
acagcatacgagatgacttatcctgcggta

SEQ ID NO: 489765 - DNA, 30 bp, Artificial Sequence
  Synthetic oligonucleotide
ctacccgcttggtattggtcctgtgcggta

SEQ ID NO: 489766 - DNA, 30 bp, Artificial Sequence
  Synthetic oligonucleotide
tatatagtgcggtggtagccaacatcggta

SEQ ID NO: 489767 - DNA, 30 bp, Artificial Sequence
  Synthetic oligonucleotide
gccccttagcagggcagaccatgatcggta

SEQ ID NO: 489768 - DNA, 30 bp, Artificial Sequence
  Synthetic oligonucleotide
ctcattgcaccttgttaggagacgtcggta

SEQ ID NO: 489769 - DNA, 30 bp, Artificial Sequence
  Synthetic oligonucleotide
ggcgttcaacgggagtctatgaattcggta

SEQ ID NO: 489770 - DNA, 30 bp, Artificial Sequence
  Synthetic oligonucleotide
gcccagcggccgatataatggacttcggta

SEQ ID NO: 489771 - DNA, 30 bp, Artificial Sequence
  Synthetic oligonucleotide
taacgtgcgcggcgacagcccgtaagggta

SEQ ID NO: 489772 - DNA, 30 bp, Artificial Sequence
  Synthetic oligonucleotide
tgaaatcaacaacaggattatgacagggta

SEQ ID NO: 489773 - DNA, 30 bp, Artificial Sequence
  Synthetic oligonucleotide
ttctatagagggcccgacataagcagggta

SEQ ID NO: 489774 - DNA, 30 bp, Artificial Sequence
  Synthetic oligonucleotide
tgcgggatttattagaagtaatgcagggta

SEQ ID NO: 489775 - DNA, 30 bp, Artificial Sequence
  Synthetic oligonucleotide
gaaatcaatgggtcgttgttagagagggta

SEQ ID NO: 489776 - DNA, 30 bp, Artificial Sequence
  Synthetic oligonucleotide
agcagcacctgcctgttacattagagggta

SEQ ID NO: 489777 - DNA, 30 bp, Artificial Sequence
  Synthetic oligonucleotide
ttataaatacctctctgctttgcgagggta

SEQ ID NO: 489778 - DNA, 30 bp, Artificial Sequence
  Synthetic oligonucleotide
gaaccctgacactatagatgcgggagggta

SEQ ID NO: 489779 - DNA, 30 bp, Artificial Sequence
  Synthetic oligonucleotide
tctgggtctgggcgggtcggggggagggta

SEQ ID NO: 489780 - DNA, 30 bp, Artificial Sequence
  Synthetic oligonucleotide
tgtgtcagcttacagatccaattgagggta

SEQ ID NO: 489781 - DNA, 30 bp, Artificial Sequence
  Synthetic oligonucleotide
gttccgatacactggcccttgaatagggta

SEQ ID NO: 489782 - DNA, 30 bp, Artificial Sequence
  Synthetic oligonucleotide
tgagtagtaggaacgccggtgactagggta

SEQ ID NO: 489783 - DNA, 30 bp, Artificial Sequence
  Synthetic oligonucleotide
aaactcaaaccaagtaatgagcgtagggta

SEQ ID NO: 489784 - DNA, 30 bp, Artificial Sequence
  Synthetic oligonucleotide
gggtgcttcataagcacctctgttagggta

SEQ ID NO: 489785 - DNA, 30 bp, Artificial Sequence
  Synthetic oligonucleotide
gctttcattggtccaaatccgtcacgggta

SEQ ID NO: 489786 - DNA, 30 bp, Artificial Sequence
  Synthetic oligonucleotide
aactcatcacgacgcccgctgttacgggta

SEQ ID NO: 489787 - DNA, 30 bp, Artificial Sequence
  Synthetic oligonucleotide
ctgtggggggcttataaatgtggccgggta

SEQ ID NO: 489788 - DNA, 30 bp, Artificial Sequence
  Synthetic oligonucleotide
ggagttcttacgcgatccactaggcgggta

SEQ ID NO: 489789 - DNA, 30 bp, Artificial Sequence
  Synthetic oligonucleotide
ctattgacataccacctggatagaggggta

SEQ ID NO: 489790 - DNA, 30 bp, Artificial Sequence
  Synthetic oligonucleotide
agcggcttaccccgatagagtcgcggggta

SEQ ID NO: 489791 - DNA, 30 bp, Artificial Sequence
  Synthetic oligonucleotide
gcagttcaccggagtggaccgttcggggta

SEQ ID NO: 489792 - DNA, 30 bp, Artificial Sequence
  Synthetic oligonucleotide
ctgtggtttcgtatactgagatggggggta

SEQ ID NO: 489793 - DNA, 30 bp, Artificial Sequence
  Synthetic oligonucleotide
ggaaagcgaaacgcgagcgattggggggta

SEQ ID NO: 489794 - DNA, 30 bp, Artificial Sequence
  Synthetic oligonucleotide
gggtttataagctataacaaaatatgggta

SEQ ID NO: 489795 - DNA, 30 bp, Artificial Sequence
  Synthetic oligonucleotide
caactgccctaaggcttctacccctgggta

SEQ ID NO: 489796 - DNA, 30 bp, Artificial Sequence
  Synthetic oligonucleotide
gacccgaacccactttagtgatggtgggta

SEQ ID NO: 489797 - DNA, 30 bp, Artificial Sequence
  Synthetic oligonucleotide
tcagtttcgacagtatttcttcgttgggta

SEQ ID NO: 489798 - DNA, 30 bp, Artificial Sequence
  Synthetic oligonucleotide
ccgaagggtactcgttgtgcttaaatggta

SEQ ID NO: 489799 - DNA, 30 bp, Artificial Sequence
  Synthetic oligonucleotide
ttgtaatttcccgggcataggcacatggta

SEQ ID NO: 489800 - DNA, 30 bp, Artificial Sequence
  Synthetic oligonucleotide
cccgaccggtgtgtgtcgctgcagatggta

SEQ ID NO: 489801 - DNA, 30 bp, Artificial Sequence
  Synthetic oligonucleotide
cgctgatatgtggattcgttcctgatggta

SEQ ID NO: 489802 - DNA, 30 bp, Artificial Sequence
  Synthetic oligonucleotide
attcccctagctatgagagatcctatggta

SEQ ID NO: 489803 - DNA, 30 bp, Artificial Sequence
  Synthetic oligonucleotide
taagtttgatgtctccaatttagtatggta

SEQ ID NO: 489804 - DNA, 30 bp, Artificial Sequence
  Synthetic oligonucleotide
ccaagtattaattgaaacgttgaactggta

SEQ ID NO: 489805 - DNA, 30 bp, Artificial Sequence
  Synthetic oligonucleotide
acacctatgccggacagaaacctcctggta

SEQ ID NO: 489806 - DNA, 30 bp, Artificial Sequence
  Synthetic oligonucleotide
gaaacgcaagcgtgcgaagtaacgctggta

SEQ ID NO: 489807 - DNA, 30 bp, Artificial Sequence
  Synthetic oligonucleotide
ggccacggacgaataatggagacgctggta

SEQ ID NO: 489808 - DNA, 30 bp, Artificial Sequence
  Synthetic oligonucleotide
tggagccgacgcatctctatgagtctggta

SEQ ID NO: 489809 - DNA, 30 bp, Artificial Sequence
  Synthetic oligonucleotide
tatccagacgtaaaaatccctaaagtggta

SEQ ID NO: 489810 - DNA, 30 bp, Artificial Sequence
  Synthetic oligonucleotide
ggaatccggtattacatctgtgcagtggta

SEQ ID NO: 489811 - DNA, 30 bp, Artificial Sequence
  Synthetic oligonucleotide
ctgtagttatttaggactgtgttagtggta

SEQ ID NO: 489812 - DNA, 30 bp, Artificial Sequence
  Synthetic oligonucleotide
gctgcgtgaagttatgtgggagtcgtggta

SEQ ID NO: 489813 - DNA, 30 bp, Artificial Sequence
  Synthetic oligonucleotide
gcggggcggtgggtctcggactcggtggta

SEQ ID NO: 489814 - DNA, 30 bp, Artificial Sequence
  Synthetic oligonucleotide
actcgtggcataagtggtttcagggtggta

SEQ ID NO: 489815 - DNA, 30 bp, Artificial Sequence
  Synthetic oligonucleotide
tttattatactaaagaaggtggatgtggta

SEQ ID NO: 489816 - DNA, 30 bp, Artificial Sequence
  Synthetic oligonucleotide
tacacacccggagggaaaccgcctgtggta

SEQ ID NO: 489817 - DNA, 30 bp, Artificial Sequence
  Synthetic oligonucleotide
aactttgaactctacatatttgttgtggta

SEQ ID NO: 489818 - DNA, 30 bp, Artificial Sequence
  Synthetic oligonucleotide
gcgctatgattcttaccatcgggattggta

SEQ ID NO: 489819 - DNA, 30 bp, Artificial Sequence
  Synthetic oligonucleotide
ggtattgtagccctaagctaggccttggta

SEQ ID NO: 489820 - DNA, 30 bp, Artificial Sequence
  Synthetic oligonucleotide
tgccgtttcaacggtttaataacgttggta

SEQ ID NO: 489821 - DNA, 30 bp, Artificial Sequence
  Synthetic oligonucleotide
cacctggatatcgtttgacaagggttggta

SEQ ID NO: 489822 - DNA, 30 bp, Artificial Sequence
  Synthetic oligonucleotide
atgcgtatcaaatagtatcatcatttggta

SEQ ID NO: 489823 - DNA, 30 bp, Artificial Sequence
  Synthetic oligonucleotide
tcttttatgacgcggtctgcagatttggta

SEQ ID NO: 489824 - DNA, 30 bp, Artificial Sequence
  Synthetic oligonucleotide
attagaatcgagccgtcttgagatttggta

SEQ ID NO: 489825 - DNA, 30 bp, Artificial Sequence
  Synthetic oligonucleotide
aagttccccgcggctgcagccagtttggta

SEQ ID NO: 489826 - DNA, 30 bp, Artificial Sequence
  Synthetic oligonucleotide
ggtcatgcagaccagtataggtgtttggta

SEQ ID NO: 489827 - DNA, 30 bp, Artificial Sequence
  Synthetic oligonucleotide
ctctcgttttggacagaatccattttggta

SEQ ID NO: 489828 - DNA, 30 bp, Artificial Sequence
  Synthetic oligonucleotide
gaacaaagcgtcagccggggagttttggta

SEQ ID NO: 489829 - DNA, 30 bp, Artificial Sequence
  Synthetic oligonucleotide
gatgcaatgtagggaatgtcatgaaatgta

SEQ ID NO: 489830 - DNA, 30 bp, Artificial Sequence
  Synthetic oligonucleotide
attaaatgtagttaggagctctgaaatgta

SEQ ID NO: 489831 - DNA, 30 bp, Artificial Sequence
  Synthetic oligonucleotide
taggtggcagtcctagccggaaggaatgta

SEQ ID NO: 489832 - DNA, 30 bp, Artificial Sequence
  Synthetic oligonucleotide
gttatggatctcgacccatgacgtaatgta

SEQ ID NO: 489833 - DNA, 30 bp, Artificial Sequence
  Synthetic oligonucleotide
ataagctttggaattatggacgttaatgta

SEQ ID NO: 489834 - DNA, 30 bp, Artificial Sequence
  Synthetic oligonucleotide
ggataggcccttaggctagagtttaatgta

SEQ ID NO: 489835 - DNA, 30 bp, Artificial Sequence
  Synthetic oligonucleotide
tatgagttcaatacttccggggaacatgta

SEQ ID NO: 489836 - DNA, 30 bp, Artificial Sequence
  Synthetic oligonucleotide
gagctaaaacatcttagagaagcacatgta

SEQ ID NO: 489837 - DNA, 30 bp, Artificial Sequence
  Synthetic oligonucleotide
tcctagatcgaagtcccaagctcacatgta

SEQ ID NO: 489838 - DNA, 30 bp, Artificial Sequence
  Synthetic oligonucleotide
ttgcttcttgctccctaaagggaccatgta

SEQ ID NO: 489839 - DNA, 30 bp, Artificial Sequence
  Synthetic oligonucleotide
tattcgtattaccctgttacgaagcatgta

SEQ ID NO: 489840 - DNA, 30 bp, Artificial Sequence
  Synthetic oligonucleotide
tctacggccttcggagtgtagcggcatgta

SEQ ID NO: 489841 - DNA, 30 bp, Artificial Sequence
  Synthetic oligonucleotide
gacgctgtaagtcatggaggtaatcatgta

SEQ ID NO: 489842 - DNA, 30 bp, Artificial Sequence
  Synthetic oligonucleotide
gggtttgacagcaacgtctgatttcatgta

SEQ ID NO: 489843 - DNA, 30 bp, Artificial Sequence
  Synthetic oligonucleotide
tagaggaccctgcttaagaattgcgatgta

SEQ ID NO: 489844 - DNA, 30 bp, Artificial Sequence
  Synthetic oligonucleotide
gtatgacgacagcgcgaatctttcgatgta

SEQ ID NO: 489845 - DNA, 30 bp, Artificial Sequence
  Synthetic oligonucleotide
tctacttttttgtataagcacaaggatgta

SEQ ID NO: 489846 - DNA, 30 bp, Artificial Sequence
  Synthetic oligonucleotide
catatagtgcccacaagtgatgctgatgta

SEQ ID NO: 489847 - DNA, 30 bp, Artificial Sequence
  Synthetic oligonucleotide
ggcccaaggatcaccgcaatagcatatgta

SEQ ID NO: 489848 - DNA, 30 bp, Artificial Sequence
  Synthetic oligonucleotide
gatagaatgttgtggtcatcgttatatgta

SEQ ID NO: 489849 - DNA, 30 bp, Artificial Sequence
  Synthetic oligonucleotide
aacctttaccccggcacgttggactatgta

SEQ ID NO: 489850 - DNA, 29 bp, Artificial Sequence
  Synthetic oligonucleotide
aatccacttaccaatgttaatgctatgta

SEQ ID NO: 489851 - DNA, 30 bp, Artificial Sequence
  Synthetic oligonucleotide
ttccacctcaataataatccatgctatgta

SEQ ID NO: 489852 - DNA, 30 bp, Artificial Sequence
  Synthetic oligonucleotide
agtcaacactagggaccagcatagtatgta

SEQ ID NO: 489853 - DNA, 30 bp, Artificial Sequence
  Synthetic oligonucleotide
ttgacgtagtgtcctggctcatacactgta

SEQ ID NO: 489854 - DNA, 30 bp, Artificial Sequence
  Synthetic oligonucleotide
gtctctcaccaagggtgcattgtcactgta

SEQ ID NO: 489855 - DNA, 30 bp, Artificial Sequence
  Synthetic oligonucleotide
ttctgacgacgtcgggatggagagactgta

SEQ ID NO: 489856 - DNA, 30 bp, Artificial Sequence
  Synthetic oligonucleotide
tattgatagacctacaacggagcgactgta

SEQ ID NO: 489857 - DNA, 30 bp, Artificial Sequence
  Synthetic oligonucleotide
ttggtattcccgcaaatgtcgatgactgta

SEQ ID NO: 489858 - DNA, 30 bp, Artificial Sequence
  Synthetic oligonucleotide
tgaataagtatcacgtcgcaaagtactgta

SEQ ID NO: 489859 - DNA, 29 bp, Artificial Sequence
  Synthetic oligonucleotide
ttggcaactgcttgatcgggtgtactgta

SEQ ID NO: 489860 - DNA, 30 bp, Artificial Sequence
  Synthetic oligonucleotide
aattgcgccagcttattaagagaacctgta

SEQ ID NO: 489861 - DNA, 30 bp, Artificial Sequence
  Synthetic oligonucleotide
ctaggcctttagtaaacaggcagacctgta

SEQ ID NO: 489862 - DNA, 30 bp, Artificial Sequence
  Synthetic oligonucleotide
aacgcagcacttacaagcactcgacctgta

SEQ ID NO: 489863 - DNA, 30 bp, Artificial Sequence
  Synthetic oligonucleotide
attttatccctaccgtcataacgtcctgta

SEQ ID NO: 489864 - DNA, 30 bp, Artificial Sequence
  Synthetic oligonucleotide
agtgatgctgtctgcacattccttcctgta

SEQ ID NO: 489865 - DNA, 30 bp, Artificial Sequence
  Synthetic oligonucleotide
accgaactatccatcttcggcgcagctgta

SEQ ID NO: 489866 - DNA, 30 bp, Artificial Sequence
  Synthetic oligonucleotide
aaaagcctttgaattttcgaagtcgctgta

SEQ ID NO: 489867 - DNA, 30 bp, Artificial Sequence
  Synthetic oligonucleotide
tgaaaagtacgcagttccgtcgcggctgta

SEQ ID NO: 489868 - DNA, 30 bp, Artificial Sequence
  Synthetic oligonucleotide
tagtgattatagtatagatgcgcatctgta

SEQ ID NO: 489869 - DNA, 30 bp, Artificial Sequence
  Synthetic oligonucleotide
tattattgcgaggacatataggtatctgta

SEQ ID NO: 489870 - DNA, 30 bp, Artificial Sequence
  Synthetic oligonucleotide
ggattctcgttttgacatatatcctctgta

SEQ ID NO: 489871 - DNA, 30 bp, Artificial Sequence
  Synthetic oligonucleotide
gcctcactatctcctctcttcggctctgta

SEQ ID NO: 489872 - DNA, 30 bp, Artificial Sequence
  Synthetic oligonucleotide
gaccgtagcccgacgtcttgtagttctgta

SEQ ID NO: 489873 - DNA, 30 bp, Artificial Sequence
  Synthetic oligonucleotide
aacagacgcatgacgcattgacgttctgta

SEQ ID NO: 489874 - DNA, 30 bp, Artificial Sequence
  Synthetic oligonucleotide
ttgtaaggatcgtaagcaacacaaagtgta

SEQ ID NO: 489875 - DNA, 30 bp, Artificial Sequence
  Synthetic oligonucleotide
acgccaacgcgttggtccgagcaaagtgta

SEQ ID NO: 489876 - DNA, 30 bp, Artificial Sequence
  Synthetic oligonucleotide
cagcatccggtgagacgcactttcagtgta

SEQ ID NO: 489877 - DNA, 30 bp, Artificial Sequence
  Synthetic oligonucleotide
cactaacggccccccatattcttgagtgta

SEQ ID NO: 489878 - DNA, 30 bp, Artificial Sequence
  Synthetic oligonucleotide
gtgaatgccgtcaatggtacgcggcgtgta

SEQ ID NO: 489879 - DNA, 30 bp, Artificial Sequence
  Synthetic oligonucleotide
ttaaattattaagacccgcagtggcgtgta

SEQ ID NO: 489880 - DNA, 30 bp, Artificial Sequence
  Synthetic oligonucleotide
gaccatgaaatggtacttggaactcgtgta

SEQ ID NO: 489881 - DNA, 30 bp, Artificial Sequence
  Synthetic oligonucleotide
gctcgatctctaagttatcggcctcgtgta

SEQ ID NO: 489882 - DNA, 30 bp, Artificial Sequence
  Synthetic oligonucleotide
gccggcgagaggaaactcgcggttcgtgta

SEQ ID NO: 489883 - DNA, 30 bp, Artificial Sequence
  Synthetic oligonucleotide
gcaaggtgcgtgacaaaggaagtaggtgta

SEQ ID NO: 489884 - DNA, 30 bp, Artificial Sequence
  Synthetic oligonucleotide
aacacccgcatgttacagtagcacggtgta

SEQ ID NO: 489885 - DNA, 30 bp, Artificial Sequence
  Synthetic oligonucleotide
tatctatatagtagataggataccggtgta

SEQ ID NO: 489886 - DNA, 30 bp, Artificial Sequence
  Synthetic oligonucleotide
ggtatatatccaaattgtgtggcgggtgta

SEQ ID NO: 489887 - DNA, 30 bp, Artificial Sequence
  Synthetic oligonucleotide
aactttcacccggtggataataatggtgta

SEQ ID NO: 489888 - DNA, 30 bp, Artificial Sequence
  Synthetic oligonucleotide
gcagcgaactctgtccgggttgactgtgta

SEQ ID NO: 489889 - DNA, 30 bp, Artificial Sequence
  Synthetic oligonucleotide
cgttaatctaaatagctctggagctgtgta

SEQ ID NO: 489890 - DNA, 30 bp, Artificial Sequence
  Synthetic oligonucleotide
attgcatgaatgtgccatagtatctgtgta

SEQ ID NO: 489891 - DNA, 30 bp, Artificial Sequence
  Synthetic oligonucleotide
gagacacagcctggaaacttttagtgtgta

SEQ ID NO: 489892 - DNA, 30 bp, Artificial Sequence
  Synthetic oligonucleotide
aatgtcaaatatcatatttgaaggtgtgta

SEQ ID NO: 489893 - DNA, 30 bp, Artificial Sequence
  Synthetic oligonucleotide
aaaggtccttagaaagtaatcccttgtgta

SEQ ID NO: 489894 - DNA, 30 bp, Artificial Sequence
  Synthetic oligonucleotide
aataacgtcaatagaggccatcaaattgta

SEQ ID NO: 489895 - DNA, 30 bp, Artificial Sequence
  Synthetic oligonucleotide
accggtgcgtcgcgagtctaataaattgta

SEQ ID NO: 489896 - DNA, 30 bp, Artificial Sequence
  Synthetic oligonucleotide
atgggctgtttgtaaccgaagcccattgta

SEQ ID NO: 489897 - DNA, 30 bp, Artificial Sequence
  Synthetic oligonucleotide
gcagaaacctgcaataggacgcgcattgta

SEQ ID NO: 489898 - DNA, 30 bp, Artificial Sequence
  Synthetic oligonucleotide
cgtgcatccagtccggatttttcgattgta

SEQ ID NO: 489899 - DNA, 30 bp, Artificial Sequence
  Synthetic oligonucleotide
tatagttgtttaattgtttgccaacttgta

SEQ ID NO: 489900 - DNA, 30 bp, Artificial Sequence
  Synthetic oligonucleotide
caacggctaattcagaggcgaagacttgta

SEQ ID NO: 489901 - DNA, 30 bp, Artificial Sequence
  Synthetic oligonucleotide
cgggtgtagatttatgtgtttcagcttgta

SEQ ID NO: 489902 - DNA, 30 bp, Artificial Sequence
  Synthetic oligonucleotide
aaatttagatattgcagattggagcttgta

SEQ ID NO: 489903 - DNA, 30 bp, Artificial Sequence
  Synthetic oligonucleotide
ttgacccgataccgggtacgagcgcttgta

SEQ ID NO: 489904 - DNA, 30 bp, Artificial Sequence
  Synthetic oligonucleotide
ggaaaataattcaaagcgctatggcttgta

SEQ ID NO: 489905 - DNA, 30 bp, Artificial Sequence
  Synthetic oligonucleotide
ggattgttgcaagaaagatcagttcttgta

SEQ ID NO: 489906 - DNA, 30 bp, Artificial Sequence
  Synthetic oligonucleotide
ctttgtcagggcaatcatgcatgagttgta

SEQ ID NO: 489907 - DNA, 30 bp, Artificial Sequence
  Synthetic oligonucleotide
taaacagctgcaacagggcggatagttgta

SEQ ID NO: 489908 - DNA, 30 bp, Artificial Sequence
  Synthetic oligonucleotide
tgatgtgatctaggcgtagcgctagttgta

SEQ ID NO: 489909 - DNA, 30 bp, Artificial Sequence
  Synthetic oligonucleotide
gagagtttcatttagttagttctagttgta

SEQ ID NO: 489910 - DNA, 30 bp, Artificial Sequence
  Synthetic oligonucleotide
ttatccaacgactgcgccttccgcgttgta

SEQ ID NO: 489911 - DNA, 30 bp, Artificial Sequence
  Synthetic oligonucleotide
tctacgctgccagttagttttcgcgttgta

SEQ ID NO: 489912 - DNA, 30 bp, Artificial Sequence
  Synthetic oligonucleotide
tccacgctttgcgcaatcacaggcgttgta

SEQ ID NO: 489913 - DNA, 30 bp, Artificial Sequence
  Synthetic oligonucleotide
atgtgagtcaggcatctcaccgcggttgta

SEQ ID NO: 489914 - DNA, 30 bp, Artificial Sequence
  Synthetic oligonucleotide
gatattaacgtacacaagcagcgggttgta

SEQ ID NO: 489915 - DNA, 30 bp, Artificial Sequence
  Synthetic oligonucleotide
taggaatgaataccctgtagaaattttgta

SEQ ID NO: 489916 - DNA, 30 bp, Artificial Sequence
  Synthetic oligonucleotide
ggatgccgacatttggcagcagattttgta

SEQ ID NO: 489917 - DNA, 30 bp, Artificial Sequence
  Synthetic oligonucleotide
ccccgccctctgccaaggggcgattttgta

SEQ ID NO: 489918 - DNA, 30 bp, Artificial Sequence
  Synthetic oligonucleotide
tggctcttcagtgtcgcggaccgttttgta

SEQ ID NO: 489919 - DNA, 30 bp, Artificial Sequence
  Synthetic oligonucleotide
cccccaaacttaacttcaccattttttgta

SEQ ID NO: 489920 - DNA, 30 bp, Artificial Sequence
  Synthetic oligonucleotide
gaacgatgctgtttgggaatcttttttgta

SEQ ID NO: 489921 - DNA, 30 bp, Artificial Sequence
  Synthetic oligonucleotide
ggaacttatgatccccgctggcgcaaatta

SEQ ID NO: 489922 - DNA, 30 bp, Artificial Sequence
  Synthetic oligonucleotide
tatttatgtgcgcgcccaatcatcaaatta

SEQ ID NO: 489923 - DNA, 30 bp, Artificial Sequence
  Synthetic oligonucleotide
tatctacggggactaaactgttagaaatta

SEQ ID NO: 489924 - DNA, 30 bp, Artificial Sequence
  Synthetic oligonucleotide
aattctcacccaattctgtaggggaaatta

SEQ ID NO: 489925 - DNA, 30 bp, Artificial Sequence
  Synthetic oligonucleotide
agcctggaaaaccgaaatgcctataaatta

SEQ ID NO: 489926 - DNA, 30 bp, Artificial Sequence
  Synthetic oligonucleotide
gaaccttgagacgtaaagcaccttaaatta

SEQ ID NO: 489927 - DNA, 30 bp, Artificial Sequence
  Synthetic oligonucleotide
gggaatgaacggtagatagataaacaatta

SEQ ID NO: 489928 - DNA, 30 bp, Artificial Sequence
  Synthetic oligonucleotide
cgaacatgaatgctttttcttttccaatta

SEQ ID NO: 489929 - DNA, 30 bp, Artificial Sequence
  Synthetic oligonucleotide
aaacaccagttatgtgcggacaagcaatta

SEQ ID NO: 489930 - DNA, 30 bp, Artificial Sequence
  Synthetic oligonucleotide
ggcagtgtaattaatagatcggggcaatta

SEQ ID NO: 489931 - DNA, 30 bp, Artificial Sequence
  Synthetic oligonucleotide
tccgaaggcccgcgtataattagtcaatta

SEQ ID NO: 489932 - DNA, 30 bp, Artificial Sequence
  Synthetic oligonucleotide
tgtaggttctacacttttatacgtcaatta

SEQ ID NO: 489933 - DNA, 30 bp, Artificial Sequence
  Synthetic oligonucleotide
gccgccgtctatgctcgctaatgtcaatta

SEQ ID NO: 489934 - DNA, 30 bp, Artificial Sequence
  Synthetic oligonucleotide
tttaactatggaactatagatcttcaatta

SEQ ID NO: 489935 - DNA, 30 bp, Artificial Sequence
  Synthetic oligonucleotide
ctaatacgccggtgtgtttttgttcaatta

SEQ ID NO: 489936 - DNA, 30 bp, Artificial Sequence
  Synthetic oligonucleotide
agtgtatcgtctgcatagcccaaagaatta

SEQ ID NO: 489937 - DNA, 30 bp, Artificial Sequence
  Synthetic oligonucleotide
gatggcagctaaaagctctcaggagaatta

SEQ ID NO: 489938 - DNA, 30 bp, Artificial Sequence
  Synthetic oligonucleotide
gacacgcgttgatctaaggggaccgaatta

SEQ ID NO: 489939 - DNA, 30 bp, Artificial Sequence
  Synthetic oligonucleotide
aatattgtcagggggtagaataaggaatta

SEQ ID NO: 489940 - DNA, 30 bp, Artificial Sequence
  Synthetic oligonucleotide
attgaatgcacagcggcctatccggaatta

SEQ ID NO: 489941 - DNA, 30 bp, Artificial Sequence
  Synthetic oligonucleotide
tttatgacgctaatgcggaacagggaatta

SEQ ID NO: 489942 - DNA, 30 bp, Artificial Sequence
  Synthetic oligonucleotide
ttgttgtatatcaacagtgagttggaatta

SEQ ID NO: 489943 - DNA, 30 bp, Artificial Sequence
  Synthetic oligonucleotide
tacttaaagcggatggccgacgatgaatta

SEQ ID NO: 489944 - DNA, 30 bp, Artificial Sequence
  Synthetic oligonucleotide
gctatacccttcggtagtggttatgaatta

SEQ ID NO: 489945 - DNA, 30 bp, Artificial Sequence
  Synthetic oligonucleotide
ttcaccaaagatagtgtaggacgtgaatta

SEQ ID NO: 489946 - DNA, 30 bp, Artificial Sequence
  Synthetic oligonucleotide
gtctggaatgagtcatgtaccggtgaatta

SEQ ID NO: 489947 - DNA, 30 bp, Artificial Sequence
  Synthetic oligonucleotide
atagtatttcgcattacaatctcataatta

SEQ ID NO: 489948 - DNA, 30 bp, Artificial Sequence
  Synthetic oligonucleotide
ccactcgatggtacggtgccgctataatta

SEQ ID NO: 489949 - DNA, 30 bp, Artificial Sequence
  Synthetic oligonucleotide
ttcagaatttaggcgttgcaagtataatta

SEQ ID NO: 489950 - DNA, 30 bp, Artificial Sequence
  Synthetic oligonucleotide
aactggcacgcagcaggacattactaatta

SEQ ID NO: 489951 - DNA, 30 bp, Artificial Sequence
  Synthetic oligonucleotide
ctatcgcctacaagacgacagcgctaatta

SEQ ID NO: 489952 - DNA, 30 bp, Artificial Sequence
  Synthetic oligonucleotide
tccaagtgggaataaaaggattcgtaatta

SEQ ID NO: 489953 - DNA, 30 bp, Artificial Sequence
  Synthetic oligonucleotide
acgaaacagttaaggtgaaggccttaatta

SEQ ID NO: 489954 - DNA, 30 bp, Artificial Sequence
  Synthetic oligonucleotide
gtggccgcggcatacatcgcgatttaatta

SEQ ID NO: 489955 - DNA, 30 bp, Artificial Sequence
  Synthetic oligonucleotide
cagcttaatgtaggaaatatcggaacatta

SEQ ID NO: 489956 - DNA, 30 bp, Artificial Sequence
  Synthetic oligonucleotide
agtattagtaccaaatagtggctaacatta

SEQ ID NO: 489957 - DNA, 30 bp, Artificial Sequence
  Synthetic oligonucleotide
cttcacgagtaatagccgcggcacacatta

SEQ ID NO: 489958 - DNA, 30 bp, Artificial Sequence
  Synthetic oligonucleotide
agaaggttatcgggtacaaaatacacatta

SEQ ID NO: 489959 - DNA, 30 bp, Artificial Sequence
  Synthetic oligonucleotide
gcacagttacagcacaggtcacgcacatta

SEQ ID NO: 489960 - DNA, 30 bp, Artificial Sequence
  Synthetic oligonucleotide
aatagttatcgcgacaaaagagtcacatta

SEQ ID NO: 489961 - DNA, 30 bp, Artificial Sequence
  Synthetic oligonucleotide
acacgcaccggagatttctaggagacatta

SEQ ID NO: 489962 - DNA, 30 bp, Artificial Sequence
  Synthetic oligonucleotide
ttcacgacaagattgatcataagtacatta

SEQ ID NO: 489963 - DNA, 30 bp, Artificial Sequence
  Synthetic oligonucleotide
gccgtttgcttggtcatctatggtacatta

SEQ ID NO: 489964 - DNA, 30 bp, Artificial Sequence
  Synthetic oligonucleotide
gatttgaccccctaaatggggtgtacatta

SEQ ID NO: 489965 - DNA, 30 bp, Artificial Sequence
  Synthetic oligonucleotide
gtatttaccttaggtaagcagataccatta

SEQ ID NO: 489966 - DNA, 30 bp, Artificial Sequence
  Synthetic oligonucleotide
cccctttaagttctgggcttttacccatta

SEQ ID NO: 489967 - DNA, 30 bp, Artificial Sequence
  Synthetic oligonucleotide
gttcgacgcaccataaatacgcggccatta

SEQ ID NO: 489968 - DNA, 30 bp, Artificial Sequence
  Synthetic oligonucleotide
cgaagatgggtatggccgtaggggccatta

SEQ ID NO: 489969 - DNA, 30 bp, Artificial Sequence
  Synthetic oligonucleotide
tgtccgcgtctggccttctttggtccatta

SEQ ID NO: 489970 - DNA, 30 bp, Artificial Sequence
  Synthetic oligonucleotide
ttagacttcaaggtacaaatggacgcatta

SEQ ID NO: 489971 - DNA, 30 bp, Artificial Sequence
  Synthetic oligonucleotide
tgtgcggggtcatctctacccgccgcatta

SEQ ID NO: 489972 - DNA, 30 bp, Artificial Sequence
  Synthetic oligonucleotide
caggaactgagattggccgtaccggcatta

SEQ ID NO: 489973 - DNA, 30 bp, Artificial Sequence
  Synthetic oligonucleotide
tctgggctgtctgttatagatgcggcatta

SEQ ID NO: 489974 - DNA, 30 bp, Artificial Sequence
  Synthetic oligonucleotide
gagaaggtaccctagaatcaaagggcatta

SEQ ID NO: 489975 - DNA, 30 bp, Artificial Sequence
  Synthetic oligonucleotide
aatatgggtttggattaccgggatgcatta

SEQ ID NO: 489976 - DNA, 30 bp, Artificial Sequence
  Synthetic oligonucleotide
atttaatcatttaaacaccttattgcatta

SEQ ID NO: 489977 - DNA, 30 bp, Artificial Sequence
  Synthetic oligonucleotide
gaaatcacggccacgccggttgaatcatta

SEQ ID NO: 489978 - DNA, 31 bp, Artificial Sequence
  Synthetic oligonucleotide
ggtaatatggggaaacgcacgaacatcatta

SEQ ID NO: 489979 - DNA, 30 bp, Artificial Sequence
  Synthetic oligonucleotide
ttatttttgccgaagaattgccagtcatta

SEQ ID NO: 489980 - DNA, 30 bp, Artificial Sequence
  Synthetic oligonucleotide
agattcgttctgtgtcgcaggaggtcatta

SEQ ID NO: 489981 - DNA, 30 bp, Artificial Sequence
  Synthetic oligonucleotide
ctgttaaactcagtatagccgtggtcatta

SEQ ID NO: 489982 - DNA, 30 bp, Artificial Sequence
  Synthetic oligonucleotide
agtcagatgctgtacgctgttatgtcatta

SEQ ID NO: 489983 - DNA, 30 bp, Artificial Sequence
  Synthetic oligonucleotide
tacgttgattttcgttgcagaaattcatta

SEQ ID NO: 489984 - DNA, 30 bp, Artificial Sequence
  Synthetic oligonucleotide
tactttggtatgtatttcctagattcatta

SEQ ID NO: 489985 - DNA, 30 bp, Artificial Sequence
  Synthetic oligonucleotide
gcacagtctagtttaaaagcttgaagatta

SEQ ID NO: 489986 - DNA, 30 bp, Artificial Sequence
  Synthetic oligonucleotide
cgcacggatgtatatcagaccctaagatta

SEQ ID NO: 489987 - DNA, 30 bp, Artificial Sequence
  Synthetic oligonucleotide
gcccaacgggtaattctgatcttaagatta

SEQ ID NO: 489988 - DNA, 30 bp, Artificial Sequence
  Synthetic oligonucleotide
agatatagaatggttatctttagcagatta

SEQ ID NO: 489989 - DNA, 30 bp, Artificial Sequence
  Synthetic oligonucleotide
tcgggagggacatccgtgtcttagagatta

SEQ ID NO: 489990 - DNA, 30 bp, Artificial Sequence
  Synthetic oligonucleotide
ggtgtgcgctggcaggccacgtcacgatta

SEQ ID NO: 489991 - DNA, 30 bp, Artificial Sequence
  Synthetic oligonucleotide
ttcgctgcacgaataccacacagacgatta

SEQ ID NO: 489992 - DNA, 30 bp, Artificial Sequence
  Synthetic oligonucleotide
tggtatatctgtaggggcctggtccgatta

SEQ ID NO: 489993 - DNA, 30 bp, Artificial Sequence
  Synthetic oligonucleotide
tggcagcattattagactttggtccgatta

SEQ ID NO: 489994 - DNA, 30 bp, Artificial Sequence
  Synthetic oligonucleotide
attatcggcgtgaaacggttggggcgatta

SEQ ID NO: 489995 - DNA, 30 bp, Artificial Sequence
  Synthetic oligonucleotide
tccgcaaaaatcggaataactatgcgatta

SEQ ID NO: 489996 - DNA, 30 bp, Artificial Sequence
  Synthetic oligonucleotide
caagtggaaaagataaagacagtgcgatta

SEQ ID NO: 489997 - DNA, 30 bp, Artificial Sequence
  Synthetic oligonucleotide
tcacgattccgcagcaaaatgtatcgatta

SEQ ID NO: 489998 - DNA, 30 bp, Artificial Sequence
  Synthetic oligonucleotide
gtgagacagccttgcacctttgcaggatta

SEQ ID NO: 489999 - DNA, 30 bp, Artificial Sequence
  Synthetic oligonucleotide
ggaaactcacgggtattctgacacggatta

SEQ ID NO: 490000 - DNA, 30 bp, Artificial Sequence
  Synthetic oligonucleotide
tggcagtacttgcaccttacgtagggatta

SEQ ID NO: 490001 - DNA, 30 bp, Artificial Sequence
  Synthetic oligonucleotide
tggttgaagatctgcagctagaggggatta

SEQ ID NO: 490002 - DNA, 30 bp, Artificial Sequence
  Synthetic oligonucleotide
aacagtaacgcgatttcctaggtgggatta

SEQ ID NO: 490003 - DNA, 30 bp, Artificial Sequence
  Synthetic oligonucleotide
gtagactcatcaagatacaagactggatta

SEQ ID NO: 490004 - DNA, 30 bp, Artificial Sequence
  Synthetic oligonucleotide
atccttggcccgccgcttgtatggtgatta

SEQ ID NO: 490005 - DNA, 31 bp, Artificial Sequence
  Synthetic oligonucleotide
tgttatcaaggaaaatagataaagttgatta

SEQ ID NO: 490006 - DNA, 30 bp, Artificial Sequence
  Synthetic oligonucleotide
agtttccgggatctttatagcggttgatta

SEQ ID NO: 490007 - DNA, 30 bp, Artificial Sequence
  Synthetic oligonucleotide
gttctgatagcggaaggtcagcacatatta

SEQ ID NO: 490008 - DNA, 30 bp, Artificial Sequence
  Synthetic oligonucleotide
taagcgtgtaatcgttcatagaccatatta

SEQ ID NO: 490009 - DNA, 30 bp, Artificial Sequence
  Synthetic oligonucleotide
gatttcggtggaacgtagtcgcccatatta

SEQ ID NO: 490010 - DNA, 30 bp, Artificial Sequence
  Synthetic oligonucleotide
atatagtaaagcatgacgcacgccatatta

SEQ ID NO: 490011 - DNA, 30 bp, Artificial Sequence
  Synthetic oligonucleotide
gcatttgtttcgtttaattacctcatatta

SEQ ID NO: 490012 - DNA, 30 bp, Artificial Sequence
  Synthetic oligonucleotide
gctgactcagtagaaatgtagacgatatta

SEQ ID NO: 490013 - DNA, 30 bp, Artificial Sequence
  Synthetic oligonucleotide
cctggcagacgttctcgccatgcgatatta

SEQ ID NO: 490014 - DNA, 30 bp, Artificial Sequence
  Synthetic oligonucleotide
gaacttcgcgacgaaggaatcgatatatta

SEQ ID NO: 490015 - DNA, 30 bp, Artificial Sequence
  Synthetic oligonucleotide
ggggccctaacagaaattcaatatatatta

SEQ ID NO: 490016 - DNA, 30 bp, Artificial Sequence
  Synthetic oligonucleotide
cagcagtagcttgataggagacttatatta

SEQ ID NO: 490017 - DNA, 30 bp, Artificial Sequence
  Synthetic oligonucleotide
cttttacatgtgcttggcccgcgactatta

SEQ ID NO: 490018 - DNA, 30 bp, Artificial Sequence
  Synthetic oligonucleotide
tagtgtacatgtattgtaagacacctatta

SEQ ID NO: 490019 - DNA, 30 bp, Artificial Sequence
  Synthetic oligonucleotide
cgcaagttttcggatggcgtgagcctatta

SEQ ID NO: 490020 - DNA, 30 bp, Artificial Sequence
  Synthetic oligonucleotide
tattcgtcatacgcccacataaggctatta

SEQ ID NO: 490021 - DNA, 30 bp, Artificial Sequence
  Synthetic oligonucleotide
ttatatttgcatctctccggcgctctatta

SEQ ID NO: 490022 - DNA, 30 bp, Artificial Sequence
  Synthetic oligonucleotide
ccccgtaaatgcgctcaatactgtctatta

SEQ ID NO: 490023 - DNA, 30 bp, Artificial Sequence
  Synthetic oligonucleotide
gaaccctgtctggccggtgatgcagtatta

SEQ ID NO: 490024 - DNA, 30 bp, Artificial Sequence
  Synthetic oligonucleotide
gaccgctgtgtgggtgattatatcgtatta

SEQ ID NO: 490025 - DNA, 30 bp, Artificial Sequence
  Synthetic oligonucleotide
ggttgttaataaggcccatgagcggtatta

SEQ ID NO: 490026 - DNA, 30 bp, Artificial Sequence
  Synthetic oligonucleotide
aatccgggcacggattccaactcggtatta

SEQ ID NO: 490027 - DNA, 30 bp, Artificial Sequence
  Synthetic oligonucleotide
acgtagaaccgtcgtgatcatagggtatta

SEQ ID NO: 490028 - DNA, 30 bp, Artificial Sequence
  Synthetic oligonucleotide
aggacattataacatcttcatgatgtatta

SEQ ID NO: 490029 - DNA, 29 bp, Artificial Sequence
  Synthetic oligonucleotide
gcaaaactcgtgatagcacttcgttatta

SEQ ID NO: 490030 - DNA, 30 bp, Artificial Sequence
  Synthetic oligonucleotide
tattaatctcagctataaataaggttatta

SEQ ID NO: 490031 - DNA, 30 bp, Artificial Sequence
  Synthetic oligonucleotide
ggcgcagcagaccccctacatttgttatta

SEQ ID NO: 490032 - DNA, 30 bp, Artificial Sequence
  Synthetic oligonucleotide
tcgtccagtataatttgggtccatttatta

SEQ ID NO: 490033 - DNA, 30 bp, Artificial Sequence
  Synthetic oligonucleotide
aatctattcccgtgtttcgagtatttatta

SEQ ID NO: 490034 - DNA, 29 bp, Artificial Sequence
  Synthetic oligonucleotide
tgttagattgacagactataggtttatta

SEQ ID NO: 490035 - DNA, 30 bp, Artificial Sequence
  Synthetic oligonucleotide
actagcttgttgagagcgtactttttatta

SEQ ID NO: 490036 - DNA, 30 bp, Artificial Sequence
  Synthetic oligonucleotide
acggacggacggataagcgacccaaactta

SEQ ID NO: 490037 - DNA, 30 bp, Artificial Sequence
  Synthetic oligonucleotide
tgctcgcgcagtaatcgtttcgcaaactta

SEQ ID NO: 490038 - DNA, 30 bp, Artificial Sequence
  Synthetic oligonucleotide
atctcgctccggcgtgaattaataaactta

SEQ ID NO: 490039 - DNA, 30 bp, Artificial Sequence
  Synthetic oligonucleotide
ttaatattcatatatgaccgaagcaactta

SEQ ID NO: 490040 - DNA, 30 bp, Artificial Sequence
  Synthetic oligonucleotide
ttatttctggttgcccaaaggaggaactta

SEQ ID NO: 490041 - DNA, 30 bp, Artificial Sequence
  Synthetic oligonucleotide
ggctcggctttgtacgctaattggaactta

SEQ ID NO: 490042 - DNA, 30 bp, Artificial Sequence
  Synthetic oligonucleotide
aaattaactctttccgcggtaattaactta

SEQ ID NO: 490043 - DNA, 30 bp, Artificial Sequence
  Synthetic oligonucleotide
gtacaatggtgcatcacgcacatacactta

SEQ ID NO: 490044 - DNA, 30 bp, Artificial Sequence
  Synthetic oligonucleotide
ctcggtataggtactcacgctgggcactta

SEQ ID NO: 490045 - DNA, 30 bp, Artificial Sequence
  Synthetic oligonucleotide
gcgccgacagcacatggccgtgggcactta

SEQ ID NO: 490046 - DNA, 30 bp, Artificial Sequence
  Synthetic oligonucleotide
tacaaagcatacgtcacatcagtgcactta

SEQ ID NO: 490047 - DNA, 30 bp, Artificial Sequence
  Synthetic oligonucleotide
atgtaaaatggttcaacgtatggtcactta

SEQ ID NO: 490048 - DNA, 30 bp, Artificial Sequence
  Synthetic oligonucleotide
ttctcccgttagtcagtaggaacagactta

SEQ ID NO: 490049 - DNA, 30 bp, Artificial Sequence
  Synthetic oligonucleotide
agcaaagtaagatctgttatgttagactta

SEQ ID NO: 490050 - DNA, 30 bp, Artificial Sequence
  Synthetic oligonucleotide
ttctgagctcacagactttttgtcgactta

SEQ ID NO: 490051 - DNA, 30 bp, Artificial Sequence
  Synthetic oligonucleotide
ctgggtaacctgtgtacccgtggggactta

SEQ ID NO: 490052 - DNA, 30 bp, Artificial Sequence
  Synthetic oligonucleotide
caagagtcccgcgggccggtgctggactta

SEQ ID NO: 490053 - DNA, 30 bp, Artificial Sequence
  Synthetic oligonucleotide
agggtactcctggtcctctgttcatactta

SEQ ID NO: 490054 - DNA, 30 bp, Artificial Sequence
  Synthetic oligonucleotide
aaaataccggtttgtagatgttggtactta

SEQ ID NO: 490055 - DNA, 30 bp, Artificial Sequence
  Synthetic oligonucleotide
tatccggggatgcctgggacaacaacctta

SEQ ID NO: 490056 - DNA, 30 bp, Artificial Sequence
  Synthetic oligonucleotide
ctccgagttcacattgaggatttaacctta

SEQ ID NO: 490057 - DNA, 30 bp, Artificial Sequence
  Synthetic oligonucleotide
ttggatttctggaggtctgtcctcacctta

SEQ ID NO: 490058 - DNA, 31 bp, Artificial Sequence
  Synthetic oligonucleotide
ggaaagcgacggagctaggcccttcacctta

SEQ ID NO: 490059 - DNA, 30 bp, Artificial Sequence
  Synthetic oligonucleotide
acccacttagggaccccttgtgttacctta

SEQ ID NO: 490060 - DNA, 30 bp, Artificial Sequence
  Synthetic oligonucleotide
tggcttctaggccggcctataataccctta

SEQ ID NO: 490061 - DNA, 30 bp, Artificial Sequence
  Synthetic oligonucleotide
aattcgtatgcatctttgataggcccctta

SEQ ID NO: 490062 - DNA, 30 bp, Artificial Sequence
  Synthetic oligonucleotide
tatagatgacgagttacagaagtcccctta

SEQ ID NO: 490063 - DNA, 30 bp, Artificial Sequence
  Synthetic oligonucleotide
agggcatgtaccgaatatttggtcccctta

SEQ ID NO: 490064 - DNA, 30 bp, Artificial Sequence
  Synthetic oligonucleotide
tcaaaaaccgtgatgatacagttcccctta

SEQ ID NO: 490065 - DNA, 30 bp, Artificial Sequence
  Synthetic oligonucleotide
attgtgcaaatacggattcaggagccctta

SEQ ID NO: 490066 - DNA, 30 bp, Artificial Sequence
  Synthetic oligonucleotide
accaatagttatacagccgccttgccctta

SEQ ID NO: 490067 - DNA, 30 bp, Artificial Sequence
  Synthetic oligonucleotide
tatgtacgtgtgaactattctattccctta

SEQ ID NO: 490068 - DNA, 30 bp, Artificial Sequence
  Synthetic oligonucleotide
aactcccagtggtttgggacttttccctta

SEQ ID NO: 490069 - DNA, 30 bp, Artificial Sequence
  Synthetic oligonucleotide
ccgcttctatgtttgctcccaaaagcctta

SEQ ID NO: 490070 - DNA, 30 bp, Artificial Sequence
  Synthetic oligonucleotide
gctttttacggcaaagcgcttaaagcctta

SEQ ID NO: 490071 - DNA, 30 bp, Artificial Sequence
  Synthetic oligonucleotide
aacaagtccttcggtatgctgatagcctta

SEQ ID NO: 490072 - DNA, 30 bp, Artificial Sequence
  Synthetic oligonucleotide
tacctctcaggaaatttagcagggtcctta

SEQ ID NO: 490073 - DNA, 30 bp, Artificial Sequence
  Synthetic oligonucleotide
tggcccctataggacattgattggtcctta

SEQ ID NO: 490074 - DNA, 30 bp, Artificial Sequence
  Synthetic oligonucleotide
atacttttgacattgggatttttgtcctta

SEQ ID NO: 490075 - DNA, 30 bp, Artificial Sequence
  Synthetic oligonucleotide
gggggcttaccgagcgaagggtccagctta

SEQ ID NO: 490076 - DNA, 30 bp, Artificial Sequence
  Synthetic oligonucleotide
gggagtccacagcgcgttacgcagagctta

SEQ ID NO: 490077 - DNA, 30 bp, Artificial Sequence
  Synthetic oligonucleotide
attttcatttccaacaaggaaatgagctta

SEQ ID NO: 490078 - DNA, 30 bp, Artificial Sequence
  Synthetic oligonucleotide
ctatcttctgggccataagaaattagctta

SEQ ID NO: 490079 - DNA, 30 bp, Artificial Sequence
  Synthetic oligonucleotide
cgcgcattgtgcgagactcctaaccgctta

SEQ ID NO: 490080 - DNA, 30 bp, Artificial Sequence
  Synthetic oligonucleotide
ctatccgggcgggccgattgcccccgctta

SEQ ID NO: 490081 - DNA, 29 bp, Artificial Sequence
  Synthetic oligonucleotide
cacggcgtcataatgtgagccatcgctta

SEQ ID NO: 490082 - DNA, 31 bp, Artificial Sequence
  Synthetic oligonucleotide
agagttctgagcaactgaattaggtcgctta

SEQ ID NO: 490083 - DNA, 30 bp, Artificial Sequence
  Synthetic oligonucleotide
ttcttcgcgcctgatggtagccagggctta

SEQ ID NO: 490084 - DNA, 30 bp, Artificial Sequence
  Synthetic oligonucleotide
taatgccagaggaggaaggccactggctta

SEQ ID NO: 490085 - DNA, 30 bp, Artificial Sequence
  Synthetic oligonucleotide
gatgctatggcatgtcatttaacatgctta

SEQ ID NO: 490086 - DNA, 30 bp, Artificial Sequence
  Synthetic oligonucleotide
cctgcagggtttctgcgaacactctgctta

SEQ ID NO: 490087 - DNA, 30 bp, Artificial Sequence
  Synthetic oligonucleotide
tctttttcgggctgccttcagttctgctta

SEQ ID NO: 490088 - DNA, 30 bp, Artificial Sequence
  Synthetic oligonucleotide
tgctaaagcttcgattggaataggtgctta

SEQ ID NO: 490089 - DNA, 30 bp, Artificial Sequence
  Synthetic oligonucleotide
aatggaatacctctgtgcttcggttgctta

SEQ ID NO: 490090 - DNA, 30 bp, Artificial Sequence
  Synthetic oligonucleotide
attaccaaataacacgggagaatttgctta

SEQ ID NO: 490091 - DNA, 30 bp, Artificial Sequence
  Synthetic oligonucleotide
ccagatggtatgctgctttcactttgctta

SEQ ID NO: 490092 - DNA, 30 bp, Artificial Sequence
  Synthetic oligonucleotide
cagcaaagcaacagccttgttgtttgctta

SEQ ID NO: 490093 - DNA, 30 bp, Artificial Sequence
  Synthetic oligonucleotide
cacattgtaaataaagaggctgcaatctta

SEQ ID NO: 490094 - DNA, 30 bp, Artificial Sequence
  Synthetic oligonucleotide
attctaacacatgcggcaacgtgcatctta

SEQ ID NO: 490095 - DNA, 30 bp, Artificial Sequence
  Synthetic oligonucleotide
atctagcctgcaagtggtttgcagatctta

SEQ ID NO: 490096 - DNA, 30 bp, Artificial Sequence
  Synthetic oligonucleotide
cgtcaccgaaaaaaggtcaatccgatctta

SEQ ID NO: 490097 - DNA, 30 bp, Artificial Sequence
  Synthetic oligonucleotide
gttccttgtctacggggaacagctatctta

SEQ ID NO: 490098 - DNA, 30 bp, Artificial Sequence
  Synthetic oligonucleotide
gatgatttatcttttatagggtgtatctta

SEQ ID NO: 490099 - DNA, 30 bp, Artificial Sequence
  Synthetic oligonucleotide
gtgcttatttctaaagaagtacttatctta

SEQ ID NO: 490100 - DNA, 30 bp, Artificial Sequence
  Synthetic oligonucleotide
ttagtgcaccggagaagtctagaactctta

SEQ ID NO: 490101 - DNA, 30 bp, Artificial Sequence
  Synthetic oligonucleotide
tccatagaaaatctataaggcgcgctctta

SEQ ID NO: 490102 - DNA, 30 bp, Artificial Sequence
  Synthetic oligonucleotide
ctctctatctgcttttttctagtgctctta

SEQ ID NO: 490103 - DNA, 30 bp, Artificial Sequence
  Synthetic oligonucleotide
aaagcggcgcagaatgatataactctctta

SEQ ID NO: 490104 - DNA, 30 bp, Artificial Sequence
  Synthetic oligonucleotide
ttctttttgctagtatcagccagtctctta

SEQ ID NO: 490105 - DNA, 30 bp, Artificial Sequence
  Synthetic oligonucleotide
tatcaagccggatcctacgcgccagtctta

SEQ ID NO: 490106 - DNA, 30 bp, Artificial Sequence
  Synthetic oligonucleotide
tagattctgtctgttaaccgtttagtctta

SEQ ID NO: 490107 - DNA, 30 bp, Artificial Sequence
  Synthetic oligonucleotide
gcccgcgatcaggccgatcgtatcgtctta

SEQ ID NO: 490108 - DNA, 30 bp, Artificial Sequence
  Synthetic oligonucleotide
gggcttacttcagccgcagtggaggtctta

SEQ ID NO: 490109 - DNA, 30 bp, Artificial Sequence
  Synthetic oligonucleotide
tcccaaatatgtttggagggcacggtctta

SEQ ID NO: 490110 - DNA, 30 bp, Artificial Sequence
  Synthetic oligonucleotide
aatgcctaagaccgtgcagtcgcggtctta

SEQ ID NO: 490111 - DNA, 30 bp, Artificial Sequence
  Synthetic oligonucleotide
attttccgctgagggtgcttgtcggtctta

SEQ ID NO: 490112 - DNA, 30 bp, Artificial Sequence
  Synthetic oligonucleotide
ccatccccactggtccttataagggtctta

SEQ ID NO: 490113 - DNA, 30 bp, Artificial Sequence
  Synthetic oligonucleotide
caatccctcgatgaagttcggggtgtctta

SEQ ID NO: 490114 - DNA, 30 bp, Artificial Sequence
  Synthetic oligonucleotide
tatcttcgttgaaaattacttattgtctta

SEQ ID NO: 490115 - DNA, 30 bp, Artificial Sequence
  Synthetic oligonucleotide
atttacggccggtttccgcccacattctta

SEQ ID NO: 490116 - DNA, 30 bp, Artificial Sequence
  Synthetic oligonucleotide
gccttcggacaatattgcttttccttctta

SEQ ID NO: 490117 - DNA, 30 bp, Artificial Sequence
  Synthetic oligonucleotide
aactcttttttcagttgacatgagttctta

SEQ ID NO: 490118 - DNA, 30 bp, Artificial Sequence
  Synthetic oligonucleotide
gtccgttttatcaggtccttctagttctta

SEQ ID NO: 490119 - DNA, 30 bp, Artificial Sequence
  Synthetic oligonucleotide
aagtctctgtccagaaagacgcggttctta

SEQ ID NO: 490120 - DNA, 30 bp, Artificial Sequence
  Synthetic oligonucleotide
gggtccaagtacccttggactgggttctta

SEQ ID NO: 490121 - DNA, 30 bp, Artificial Sequence
  Synthetic oligonucleotide
aacactattggttgttgagcctggttctta

SEQ ID NO: 490122 - DNA, 30 bp, Artificial Sequence
  Synthetic oligonucleotide
tttttgaaatatttaggtcttgatttctta

SEQ ID NO: 490123 - DNA, 30 bp, Artificial Sequence
  Synthetic oligonucleotide
cgtttacaacacgcatctcgatatttctta

SEQ ID NO: 490124 - DNA, 30 bp, Artificial Sequence
  Synthetic oligonucleotide
ttcttttgacagaattacaaaggtttctta

SEQ ID NO: 490125 - DNA, 30 bp, Artificial Sequence
  Synthetic oligonucleotide
gcgccgtcagcccgggaatgatttttctta

SEQ ID NO: 490126 - DNA, 30 bp, Artificial Sequence
  Synthetic oligonucleotide
aagcgacgtcctgcgaggctttttttctta

SEQ ID NO: 490127 - DNA, 30 bp, Artificial Sequence
  Synthetic oligonucleotide
actactggtgcacgcgcactctcaaagtta

SEQ ID NO: 490128 - DNA, 30 bp, Artificial Sequence
  Synthetic oligonucleotide
ttgttaatcctgacttgcgcacacaagtta

SEQ ID NO: 490129 - DNA, 30 bp, Artificial Sequence
  Synthetic oligonucleotide
catattaaccttcccaggtcgcacaagtta

SEQ ID NO: 490130 - DNA, 30 bp, Artificial Sequence
  Synthetic oligonucleotide
tttgcaaacatttcatactgcgacaagtta

SEQ ID NO: 490131 - DNA, 30 bp, Artificial Sequence
  Synthetic oligonucleotide
catctttatatgactgacccgctcaagtta

SEQ ID NO: 490132 - DNA, 30 bp, Artificial Sequence
  Synthetic oligonucleotide
gctctcgcgggttcgtggctgttcaagtta

SEQ ID NO: 490133 - DNA, 30 bp, Artificial Sequence
  Synthetic oligonucleotide
gtgcttccttagatgcagagccggaagtta

SEQ ID NO: 490134 - DNA, 30 bp, Artificial Sequence
  Synthetic oligonucleotide
gacatggtgcgtaggcataacgtgaagtta

SEQ ID NO: 490135 - DNA, 30 bp, Artificial Sequence
  Synthetic oligonucleotide
ggcagacggtatatggtaacggataagtta

SEQ ID NO: 490136 - DNA, 30 bp, Artificial Sequence
  Synthetic oligonucleotide
tagtctgattgcagcgcagtttataagtta

SEQ ID NO: 490137 - DNA, 30 bp, Artificial Sequence
  Synthetic oligonucleotide
cagtttgtgcccgggcagcatggtaagtta

SEQ ID NO: 490138 - DNA, 30 bp, Artificial Sequence
  Synthetic oligonucleotide
ggcaataacgctacgtaactgcttaagtta

SEQ ID NO: 490139 - DNA, 25 bp, Artificial Sequence
  Synthetic oligonucleotide
gactgtcacgcgacccaaacagtta

SEQ ID NO: 490140 - DNA, 30 bp, Artificial Sequence
  Synthetic oligonucleotide
tatgtgtgaagtagtggacccaaacagtta

SEQ ID NO: 490141 - DNA, 30 bp, Artificial Sequence
  Synthetic oligonucleotide
tacaagatgaattttatagtttgacagtta

SEQ ID NO: 490142 - DNA, 30 bp, Artificial Sequence
  Synthetic oligonucleotide
cgttcgctgaaattccaaataatacagtta

SEQ ID NO: 490143 - DNA, 30 bp, Artificial Sequence
  Synthetic oligonucleotide
ttaccgatgataaggtataaaaaccagtta

SEQ ID NO: 490144 - DNA, 30 bp, Artificial Sequence
  Synthetic oligonucleotide
tttataactatggcatgtaagacccagtta

SEQ ID NO: 490145 - DNA, 30 bp, Artificial Sequence
  Synthetic oligonucleotide
tcattttctagacattcgagaagccagtta

SEQ ID NO: 490146 - DNA, 30 bp, Artificial Sequence
  Synthetic oligonucleotide
tctacataaaggcgctctaggtgccagtta

SEQ ID NO: 490147 - DNA, 30 bp, Artificial Sequence
  Synthetic oligonucleotide
gatatgcgagcgactctatggtcgcagtta

SEQ ID NO: 490148 - DNA, 30 bp, Artificial Sequence
  Synthetic oligonucleotide
acagagtctgagagtgcataaattcagtta

SEQ ID NO: 490149 - DNA, 30 bp, Artificial Sequence
  Synthetic oligonucleotide
tatacgagcgagatgggatctcttcagtta

SEQ ID NO: 490150 - DNA, 30 bp, Artificial Sequence
  Synthetic oligonucleotide
tgcattagagaattaacgccggtagagtta

SEQ ID NO: 490151 - DNA, 30 bp, Artificial Sequence
  Synthetic oligonucleotide
gagagtgtttttttacgtcaattagagtta

SEQ ID NO: 490152 - DNA, 30 bp, Artificial Sequence
  Synthetic oligonucleotide
ttttgatggttttggcggcgcaccgagtta

SEQ ID NO: 490153 - DNA, 35 bp, Artificial Sequence
  Synthetic oligonucleotide
tatagtagcaggcagtgatgggtggttgcgagtta

SEQ ID NO: 490154 - DNA, 30 bp, Artificial Sequence
  Synthetic oligonucleotide
gtctggcagactgcatggacggctgagtta

SEQ ID NO: 490155 - DNA, 30 bp, Artificial Sequence
  Synthetic oligonucleotide
gccgagtcgacgaagcatattaaatagtta

SEQ ID NO: 490156 - DNA, 30 bp, Artificial Sequence
  Synthetic oligonucleotide
ttgaagctaggcatagcggaatcatagtta

SEQ ID NO: 490157 - DNA, 30 bp, Artificial Sequence
  Synthetic oligonucleotide
ggatcataatgcctaaatacatcatagtta

SEQ ID NO: 490158 - DNA, 30 bp, Artificial Sequence
  Synthetic oligonucleotide
ctagattcattggtgacacgcccttagtta

SEQ ID NO: 490159 - DNA, 30 bp, Artificial Sequence
  Synthetic oligonucleotide
ctcgctcaggtttaagggcacctttagtta

SEQ ID NO: 490160 - DNA, 30 bp, Artificial Sequence
  Synthetic oligonucleotide
tattccaagttcttgctggataaaacgtta

SEQ ID NO: 490161 - DNA, 30 bp, Artificial Sequence
  Synthetic oligonucleotide
cataattaatttaacaaggggcaaacgtta

SEQ ID NO: 490162 - DNA, 30 bp, Artificial Sequence
  Synthetic oligonucleotide
gccatcgcggaagtaactgccgaaacgtta

SEQ ID NO: 490163 - DNA, 30 bp, Artificial Sequence
  Synthetic oligonucleotide
ttccgaatgttaactataaggaccacgtta

SEQ ID NO: 490164 - DNA, 30 bp, Artificial Sequence
  Synthetic oligonucleotide
gtatgagctaacctgtacgtgggtacgtta

SEQ ID NO: 490165 - DNA, 30 bp, Artificial Sequence
  Synthetic oligonucleotide
caacatatctgacacaacttaccaccgtta

SEQ ID NO: 490166 - DNA, 30 bp, Artificial Sequence
  Synthetic oligonucleotide
ttatagatttacaagcgagatcgaccgtta

SEQ ID NO: 490167 - DNA, 30 bp, Artificial Sequence
  Synthetic oligonucleotide
tagttgccgctaaaaaggcagataccgtta

SEQ ID NO: 490168 - DNA, 30 bp, Artificial Sequence
  Synthetic oligonucleotide
aaggtagtttagggcgtattttacccgtta

SEQ ID NO: 490169 - DNA, 30 bp, Artificial Sequence
  Synthetic oligonucleotide
cactggactaataagtgcaagcagccgtta

SEQ ID NO: 490170 - DNA, 30 bp, Artificial Sequence
  Synthetic oligonucleotide
taaatcgatcgcggttttgtcagtccgtta

SEQ ID NO: 490171 - DNA, 30 bp, Artificial Sequence
  Synthetic oligonucleotide
ggcatgtggcgcttgaccccgtgtccgtta

SEQ ID NO: 490172 - DNA, 30 bp, Artificial Sequence
  Synthetic oligonucleotide
gattacaaaacgaccgtgtattcagcgtta

SEQ ID NO: 490173 - DNA, 30 bp, Artificial Sequence
  Synthetic oligonucleotide
acgtcttctattcaaatacgtcgagcgtta

SEQ ID NO: 490174 - DNA, 30 bp, Artificial Sequence
  Synthetic oligonucleotide
ctgaccaggtcacgcagccaaagcgcgtta

SEQ ID NO: 490175 - DNA, 30 bp, Artificial Sequence
  Synthetic oligonucleotide
aaattaaacctaggtctaagaagggcgtta

SEQ ID NO: 490176 - DNA, 30 bp, Artificial Sequence
  Synthetic oligonucleotide
cccggataatatccctcaacgagggcgtta

SEQ ID NO: 490177 - DNA, 30 bp, Artificial Sequence
  Synthetic oligonucleotide
ggtattgtgttaccagctaaggctgcgtta

SEQ ID NO: 490178 - DNA, 30 bp, Artificial Sequence
  Synthetic oligonucleotide
ggacggagtacgggttacgttgtatcgtta

SEQ ID NO: 490179 - DNA, 30 bp, Artificial Sequence
  Synthetic oligonucleotide
cgtcgtcaagaacgaagttaccactcgtta

SEQ ID NO: 490180 - DNA, 30 bp, Artificial Sequence
  Synthetic oligonucleotide
cgtcgctttgtgacacgttggacctcgtta

SEQ ID NO: 490181 - DNA, 30 bp, Artificial Sequence
  Synthetic oligonucleotide
cgggatacaacgagccctggttgttcgtta

SEQ ID NO: 490182 - DNA, 30 bp, Artificial Sequence
  Synthetic oligonucleotide
tactagctattctaaagtatagtttcgtta

SEQ ID NO: 490183 - DNA, 30 bp, Artificial Sequence
  Synthetic oligonucleotide
gaatgtctagatttggagaccgccaggtta

SEQ ID NO: 490184 - DNA, 30 bp, Artificial Sequence
  Synthetic oligonucleotide
aattacttatgttgacgtcatgccaggtta

SEQ ID NO: 490185 - DNA, 30 bp, Artificial Sequence
  Synthetic oligonucleotide
gcaatacactgcgcactttctccgaggtta

SEQ ID NO: 490186 - DNA, 30 bp, Artificial Sequence
  Synthetic oligonucleotide
tagtggccaggtaccatgcaaaataggtta

SEQ ID NO: 490187 - DNA, 30 bp, Artificial Sequence
  Synthetic oligonucleotide
aaaccggaggcctctcctcttcataggtta

SEQ ID NO: 490188 - DNA, 30 bp, Artificial Sequence
  Synthetic oligonucleotide
tagtaaagtagttttttcttatctaggtta

SEQ ID NO: 490189 - DNA, 30 bp, Artificial Sequence
  Synthetic oligonucleotide
taatgtacaggacgtaattgcattaggtta

SEQ ID NO: 490190 - DNA, 30 bp, Artificial Sequence
  Synthetic oligonucleotide
tatgggagatgcattacgactcttaggtta

SEQ ID NO: 490191 - DNA, 30 bp, Artificial Sequence
  Synthetic oligonucleotide
tgcggtctaattgattataaacgacggtta

SEQ ID NO: 490192 - DNA, 30 bp, Artificial Sequence
  Synthetic oligonucleotide
cgatccaacgaccgcacaggtgtccggtta

SEQ ID NO: 490193 - DNA, 30 bp, Artificial Sequence
  Synthetic oligonucleotide
agtcggccaggtagcccccgtgggcggtta

SEQ ID NO: 490194 - DNA, 30 bp, Artificial Sequence
  Synthetic oligonucleotide
atgcaatgaacatgcccacatattcggtta

SEQ ID NO: 490195 - DNA, 30 bp, Artificial Sequence
  Synthetic oligonucleotide
ggcgatagcttagcgcctgtaatagggtta

SEQ ID NO: 490196 - DNA, 30 bp, Artificial Sequence
  Synthetic oligonucleotide
tgttttatatagatgcgcattgtagggtta

SEQ ID NO: 490197 - DNA, 30 bp, Artificial Sequence
  Synthetic oligonucleotide
acgactaagagttctatgagtgacgggtta

SEQ ID NO: 490198 - DNA, 29 bp, Artificial Sequence
  Synthetic oligonucleotide
ggccctccacgtgcagtccgggcgggtta

SEQ ID NO: 490199 - DNA, 30 bp, Artificial Sequence
  Synthetic oligonucleotide
aattttttgtatcgcgatttttgcgggtta

SEQ ID NO: 490200 - DNA, 30 bp, Artificial Sequence
  Synthetic oligonucleotide
catgagggtttgcattacctgctcgggtta

SEQ ID NO: 490201 - DNA, 30 bp, Artificial Sequence
  Synthetic oligonucleotide
atggtctctgtgagaacattgcaggggtta

SEQ ID NO: 490202 - DNA, 30 bp, Artificial Sequence
  Synthetic oligonucleotide
aatttagttacaatcaccaaaacggggtta

SEQ ID NO: 490203 - DNA, 30 bp, Artificial Sequence
  Synthetic oligonucleotide
ccgtgcccgtttggaacttaaatggggtta

SEQ ID NO: 490204 - DNA, 30 bp, Artificial Sequence
  Synthetic oligonucleotide
ggcagcgggctccaggggatttatgggtta

SEQ ID NO: 490205 - DNA, 30 bp, Artificial Sequence
  Synthetic oligonucleotide
caaagcacctgcatgaagcgggtatggtta

SEQ ID NO: 490206 - DNA, 30 bp, Artificial Sequence
  Synthetic oligonucleotide
cagaaccgaaattttttaaaccgctggtta

SEQ ID NO: 490207 - DNA, 30 bp, Artificial Sequence
  Synthetic oligonucleotide
gttgtagcactacggcgtaatgtctggtta

SEQ ID NO: 490208 - DNA, 30 bp, Artificial Sequence
  Synthetic oligonucleotide
ggtaatgttaggtcgagtctacagtggtta

SEQ ID NO: 490209 - DNA, 30 bp, Artificial Sequence
  Synthetic oligonucleotide
acatggacgtgcaaatacaagccgtggtta

SEQ ID NO: 490210 - DNA, 30 bp, Artificial Sequence
  Synthetic oligonucleotide
gttgtccctacgtgaacgtgtccttggtta

SEQ ID NO: 490211 - DNA, 30 bp, Artificial Sequence
  Synthetic oligonucleotide
tctttttgtacatttgaacacggttggtta

SEQ ID NO: 490212 - DNA, 30 bp, Artificial Sequence
  Synthetic oligonucleotide
atttcacctaaggggcgtttctgttggtta

SEQ ID NO: 490213 - DNA, 30 bp, Artificial Sequence
  Synthetic oligonucleotide
cgtaaattcgttcgggttgttgggatgtta

SEQ ID NO: 490214 - DNA, 30 bp, Artificial Sequence
  Synthetic oligonucleotide
cgaatagggaaacagtgtgtcactatgtta

SEQ ID NO: 490215 - DNA, 30 bp, Artificial Sequence
  Synthetic oligonucleotide
cagtttagtggatgatccttttctatgtta

SEQ ID NO: 490216 - DNA, 30 bp, Artificial Sequence
  Synthetic oligonucleotide
gacctagggtgatgtacgtgcgaactgtta

SEQ ID NO: 490217 - DNA, 30 bp, Artificial Sequence
  Synthetic oligonucleotide
atgtttcgcgagctgtatagctcactgtta

SEQ ID NO: 490218 - DNA, 30 bp, Artificial Sequence
  Synthetic oligonucleotide
gcatacatgtgcgttcgacaaagcctgtta

SEQ ID NO: 490219 - DNA, 30 bp, Artificial Sequence
  Synthetic oligonucleotide
acaagggcagatagacggtcgttcctgtta

SEQ ID NO: 490220 - DNA, 30 bp, Artificial Sequence
  Synthetic oligonucleotide
atatgaatgatgactaatttgatgctgtta

SEQ ID NO: 490221 - DNA, 30 bp, Artificial Sequence
  Synthetic oligonucleotide
tagcgacccacagatggccctcttctgtta

SEQ ID NO: 490222 - DNA, 30 bp, Artificial Sequence
  Synthetic oligonucleotide
atctagtgattgtgatactcgtcagtgtta

SEQ ID NO: 490223 - DNA, 30 bp, Artificial Sequence
  Synthetic oligonucleotide
agagctaaagaggtctaccccaacgtgtta

SEQ ID NO: 490224 - DNA, 30 bp, Artificial Sequence
  Synthetic oligonucleotide
attgcaggatcctgcctctcattggtgtta

SEQ ID NO: 490225 - DNA, 30 bp, Artificial Sequence
  Synthetic oligonucleotide
gctgtgtcctggaccgttctttatgtgtta

SEQ ID NO: 490226 - DNA, 30 bp, Artificial Sequence
  Synthetic oligonucleotide
cttcgtgatcgctatataagactattgtta

SEQ ID NO: 490227 - DNA, 30 bp, Artificial Sequence
  Synthetic oligonucleotide
tggttatagtgattatatacgctattgtta

SEQ ID NO: 490228 - DNA, 30 bp, Artificial Sequence
  Synthetic oligonucleotide
aatccacatgtgccaattactgtattgtta

SEQ ID NO: 490229 - DNA, 30 bp, Artificial Sequence
  Synthetic oligonucleotide
ggcattgcgtatttagaacaggacttgtta

SEQ ID NO: 490230 - DNA, 30 bp, Artificial Sequence
  Synthetic oligonucleotide
agtctttcctcaaactgtgatgacttgtta

SEQ ID NO: 490231 - DNA, 30 bp, Artificial Sequence
  Synthetic oligonucleotide
gtaaagagtacccgcagaattgtcttgtta

SEQ ID NO: 490232 - DNA, 30 bp, Artificial Sequence
  Synthetic oligonucleotide
agattgaagcggtcccgttcctcgttgtta

SEQ ID NO: 490233 - DNA, 30 bp, Artificial Sequence
  Synthetic oligonucleotide
tcttctttgaaacaacttgaccatttgtta

SEQ ID NO: 490234 - DNA, 30 bp, Artificial Sequence
  Synthetic oligonucleotide
aacagtttaagcagccacctaagtttgtta

SEQ ID NO: 490235 - DNA, 30 bp, Artificial Sequence
  Synthetic oligonucleotide
gcccgtcctcgtaactaggatgcaaattta

SEQ ID NO: 490236 - DNA, 30 bp, Artificial Sequence
  Synthetic oligonucleotide
acaggaaactgagaatcaattttaaattta

SEQ ID NO: 490237 - DNA, 30 bp, Artificial Sequence
  Synthetic oligonucleotide
ctgttataggggcctttagctaacaattta

SEQ ID NO: 490238 - DNA, 30 bp, Artificial Sequence
  Synthetic oligonucleotide
tgtaggagctcctctccgccgcacaattta

SEQ ID NO: 490239 - DNA, 30 bp, Artificial Sequence
  Synthetic oligonucleotide
ttgtccactcggtatatttctcacaattta

SEQ ID NO: 490240 - DNA, 30 bp, Artificial Sequence
  Synthetic oligonucleotide
gccaatcgtgtgagtcactcatgcaattta

SEQ ID NO: 490241 - DNA, 30 bp, Artificial Sequence
  Synthetic oligonucleotide
ggatttcccacgatacacttaaagaattta

SEQ ID NO: 490242 - DNA, 30 bp, Artificial Sequence
  Synthetic oligonucleotide
caccctatcctttaagctctgtagaattta

SEQ ID NO: 490243 - DNA, 30 bp, Artificial Sequence
  Synthetic oligonucleotide
taaaatcggtctctcgtagtgacgaattta

SEQ ID NO: 490244 - DNA, 30 bp, Artificial Sequence
  Synthetic oligonucleotide
ccttagctgtataagatgacttcgaattta

SEQ ID NO: 490245 - DNA, 30 bp, Artificial Sequence
  Synthetic oligonucleotide
actttttgatacggcgtagattggaattta

SEQ ID NO: 490246 - DNA, 30 bp, Artificial Sequence
  Synthetic oligonucleotide
aaacgttgctacgatgatatcgtgaattta

SEQ ID NO: 490247 - DNA, 30 bp, Artificial Sequence
  Synthetic oligonucleotide
ctagcgacgttttgagtggcattgaattta

SEQ ID NO: 490248 - DNA, 30 bp, Artificial Sequence
  Synthetic oligonucleotide
gatatttaactgcatccttggcctaattta

SEQ ID NO: 490249 - DNA, 30 bp, Artificial Sequence
  Synthetic oligonucleotide
atttacagtcaatagcagggagttaattta

SEQ ID NO: 490250 - DNA, 30 bp, Artificial Sequence
  Synthetic oligonucleotide
gcacaatagttttatcgaggtagacattta

SEQ ID NO: 490251 - DNA, 30 bp, Artificial Sequence
  Synthetic oligonucleotide
taatatgggttaccagtaattaaccattta

SEQ ID NO: 490252 - DNA, 30 bp, Artificial Sequence
  Synthetic oligonucleotide
gaccccctgagcccattgacagggcattta

SEQ ID NO: 490253 - DNA, 30 bp, Artificial Sequence
  Synthetic oligonucleotide
aagactcaccagtgctcatggttgcattta

SEQ ID NO: 490254 - DNA, 30 bp, Artificial Sequence
  Synthetic oligonucleotide
tcgtcattgccctgggcaatagatcattta

SEQ ID NO: 490255 - DNA, 30 bp, Artificial Sequence
  Synthetic oligonucleotide
ttagtctatcgcattaggtctgatcattta

SEQ ID NO: 490256 - DNA, 30 bp, Artificial Sequence
  Synthetic oligonucleotide
ttcaaataagaaatttgttcctttcattta

SEQ ID NO: 490257 - DNA, 30 bp, Artificial Sequence
  Synthetic oligonucleotide
caggtctacaaggttccgaccatagattta

SEQ ID NO: 490258 - DNA, 30 bp, Artificial Sequence
  Synthetic oligonucleotide
cccatcgactgacccccagggggcgattta

SEQ ID NO: 490259 - DNA, 30 bp, Artificial Sequence
  Synthetic oligonucleotide
ttttttccggcaggtgagctcctcgattta

SEQ ID NO: 490260 - DNA, 30 bp, Artificial Sequence
  Synthetic oligonucleotide
aggcgtccggtgactactaagaaggattta

SEQ ID NO: 490261 - DNA, 30 bp, Artificial Sequence
  Synthetic oligonucleotide
cgactaggtttagaaggccatagggattta

SEQ ID NO: 490262 - DNA, 30 bp, Artificial Sequence
  Synthetic oligonucleotide
gcggcacggtttagctctctactggattta

SEQ ID NO: 490263 - DNA, 31 bp, Artificial Sequence
  Synthetic oligonucleotide
cagtcataacctttgaacgggaaatgattta

SEQ ID NO: 490264 - DNA, 30 bp, Artificial Sequence
  Synthetic oligonucleotide
actcccaaatgttttgtcacggatgattta

SEQ ID NO: 490265 - DNA, 30 bp, Artificial Sequence
  Synthetic oligonucleotide
ggaattttcatacggcaagaagttgattta

SEQ ID NO: 490266 - DNA, 30 bp, Artificial Sequence
  Synthetic oligonucleotide
accaacgaaaaagaatccgccatatattta

SEQ ID NO: 490267 - DNA, 30 bp, Artificial Sequence
  Synthetic oligonucleotide
taagtgcagtggacctgaccattatattta

SEQ ID NO: 490268 - DNA, 30 bp, Artificial Sequence
  Synthetic oligonucleotide
caggtgaaatgcctggtcatatactattta

SEQ ID NO: 490269 - DNA, 30 bp, Artificial Sequence
  Synthetic oligonucleotide
ttacctgtagtcaacgctcggacctattta

SEQ ID NO: 490270 - DNA, 30 bp, Artificial Sequence
  Synthetic oligonucleotide
gttataagcacactcggttgggcgtattta

SEQ ID NO: 490271 - DNA, 30 bp, Artificial Sequence
  Synthetic oligonucleotide
gtttgttgcgcgccgcccaagcattattta

SEQ ID NO: 490272 - DNA, 30 bp, Artificial Sequence
  Synthetic oligonucleotide
ttatcgagtaaatggtgataatattattta

SEQ ID NO: 490273 - DNA, 30 bp, Artificial Sequence
  Synthetic oligonucleotide
catagcgccgagaccccgaggggttattta

SEQ ID NO: 490274 - DNA, 30 bp, Artificial Sequence
  Synthetic oligonucleotide
acctgatgggatcttatattcgtttattta

SEQ ID NO: 490275 - DNA, 30 bp, Artificial Sequence
  Synthetic oligonucleotide
gttcaaactggcataagtcttccaacttta

SEQ ID NO: 490276 - DNA, 30 bp, Artificial Sequence
  Synthetic oligonucleotide
agcactttaattcggtaggtttcaacttta

SEQ ID NO: 490277 - DNA, 30 bp, Artificial Sequence
  Synthetic oligonucleotide
tcgcacggaccctcggatgcacccacttta

SEQ ID NO: 490278 - DNA, 30 bp, Artificial Sequence
  Synthetic oligonucleotide
ccatagtagtccccactggaacgcacttta

SEQ ID NO: 490279 - DNA, 30 bp, Artificial Sequence
  Synthetic oligonucleotide
gcaatctgccgggggggggaacagacttta

SEQ ID NO: 490280 - DNA, 30 bp, Artificial Sequence
  Synthetic oligonucleotide
taggtatcgtatatgtgacagcggacttta

SEQ ID NO: 490281 - DNA, 30 bp, Artificial Sequence
  Synthetic oligonucleotide
tgggattacactgctcactggcggacttta

SEQ ID NO: 490282 - DNA, 30 bp, Artificial Sequence
  Synthetic oligonucleotide
cattttgggcgcaatacagaatggacttta

SEQ ID NO: 490283 - DNA, 30 bp, Artificial Sequence
  Synthetic oligonucleotide
cacgataatacaagtgatcataaaccttta

SEQ ID NO: 490284 - DNA, 30 bp, Artificial Sequence
  Synthetic oligonucleotide
ccgatatccgcaaagtccccagaaccttta

SEQ ID NO: 490285 - DNA, 30 bp, Artificial Sequence
  Synthetic oligonucleotide
ggatgaaggtttgtaagtacataaccttta

SEQ ID NO: 490286 - DNA, 30 bp, Artificial Sequence
  Synthetic oligonucleotide
acactttatcatgctgtataaagaccttta

SEQ ID NO: 490287 - DNA, 30 bp, Artificial Sequence
  Synthetic oligonucleotide
actgaatcgctatttaacaaggtaccttta

SEQ ID NO: 490288 - DNA, 30 bp, Artificial Sequence
  Synthetic oligonucleotide
tttctctatctgtaaccaggccacccttta

SEQ ID NO: 490289 - DNA, 30 bp, Artificial Sequence
  Synthetic oligonucleotide
ttggcaactatgacgactagttgcccttta

SEQ ID NO: 490290 - DNA, 30 bp, Artificial Sequence
  Synthetic oligonucleotide
atatcatttttccaatattggctcccttta

SEQ ID NO: 490291 - DNA, 30 bp, Artificial Sequence
  Synthetic oligonucleotide
gagagaccgttattcaagtaatagccttta

SEQ ID NO: 490292 - DNA, 30 bp, Artificial Sequence
  Synthetic oligonucleotide
taagaagtcttctcgccatgttggccttta

SEQ ID NO: 490293 - DNA, 30 bp, Artificial Sequence
  Synthetic oligonucleotide
gacataagagactggtatttaactccttta

SEQ ID NO: 490294 - DNA, 30 bp, Artificial Sequence
  Synthetic oligonucleotide
gtcagtacaaacatctgtgtgagtccttta

SEQ ID NO: 490295 - DNA, 30 bp, Artificial Sequence
  Synthetic oligonucleotide
cttactggactttctgctgatggagcttta

SEQ ID NO: 490296 - DNA, 30 bp, Artificial Sequence
  Synthetic oligonucleotide
aatccaggcctggttggtaacatagcttta

SEQ ID NO: 490297 - DNA, 30 bp, Artificial Sequence
  Synthetic oligonucleotide
accccctgatcaaggcctaccttagcttta

SEQ ID NO: 490298 - DNA, 30 bp, Artificial Sequence
  Synthetic oligonucleotide
tagcacattatttaaaggtggaacgcttta

SEQ ID NO: 490299 - DNA, 30 bp, Artificial Sequence
  Synthetic oligonucleotide
atattttccggatcctgtaaaagcgcttta

SEQ ID NO: 490300 - DNA, 30 bp, Artificial Sequence
  Synthetic oligonucleotide
ctgcgcggactcgagtataaaacggcttta

SEQ ID NO: 490301 - DNA, 30 bp, Artificial Sequence
  Synthetic oligonucleotide
atatcaggcagcatttcgttaacggcttta

SEQ ID NO: 490302 - DNA, 30 bp, Artificial Sequence
  Synthetic oligonucleotide
gggctgtagagctctgggagaggggcttta

SEQ ID NO: 490303 - DNA, 30 bp, Artificial Sequence
  Synthetic oligonucleotide
gctgattgaagggtagtttcacaatcttta

SEQ ID NO: 490304 - DNA, 30 bp, Artificial Sequence
  Synthetic oligonucleotide
gagtggcaacaggtgaggaccacctcttta

SEQ ID NO: 490305 - DNA, 30 bp, Artificial Sequence
  Synthetic oligonucleotide
gtttataaacgcttgttctgatgctcttta

SEQ ID NO: 490306 - DNA, 30 bp, Artificial Sequence
  Synthetic oligonucleotide
actcgtccccgcggaccgcgcccgtcttta

SEQ ID NO: 490307 - DNA, 30 bp, Artificial Sequence
  Synthetic oligonucleotide
gccgtgttagtcgaattatctgcgtcttta

SEQ ID NO: 490308 - DNA, 30 bp, Artificial Sequence
  Synthetic oligonucleotide
gtggatagtatattagtaaataggtcttta

SEQ ID NO: 490309 - DNA, 30 bp, Artificial Sequence
  Synthetic oligonucleotide
cgtcaaattaatagttatttttattcttta

SEQ ID NO: 490310 - DNA, 30 bp, Artificial Sequence
  Synthetic oligonucleotide
gtctctatgtatgcttagttctcttcttta

SEQ ID NO: 490311 - DNA, 30 bp, Artificial Sequence
  Synthetic oligonucleotide
gctattgaaaacgacatcaagatttcttta

SEQ ID NO: 490312 - DNA, 30 bp, Artificial Sequence
  Synthetic oligonucleotide
cgcgacgccgtggcataaggtgtttcttta

SEQ ID NO: 490313 - DNA, 30 bp, Artificial Sequence
  Synthetic oligonucleotide
aatttcatgatcagggctgggtaaagttta

SEQ ID NO: 490314 - DNA, 30 bp, Artificial Sequence
  Synthetic oligonucleotide
catgaaattcctcatcaggtcggaagttta

SEQ ID NO: 490315 - DNA, 30 bp, Artificial Sequence
  Synthetic oligonucleotide
tgaatttcagaatacctcggttgaagttta

SEQ ID NO: 490316 - DNA, 30 bp, Artificial Sequence
  Synthetic oligonucleotide
ttccgatgatagaaactcgtacccagttta

SEQ ID NO: 490317 - DNA, 30 bp, Artificial Sequence
  Synthetic oligonucleotide
atcgggctgtgatacgcgtctcatagttta

SEQ ID NO: 490318 - DNA, 30 bp, Artificial Sequence
  Synthetic oligonucleotide
gctcctcgctatgcctataacgctagttta

SEQ ID NO: 490319 - DNA, 30 bp, Artificial Sequence
  Synthetic oligonucleotide
aatattcatttactcttctgggaacgttta

SEQ ID NO: 490320 - DNA, 30 bp, Artificial Sequence
  Synthetic oligonucleotide
gaggagcacaccaatgacgtcccccgttta

SEQ ID NO: 490321 - DNA, 30 bp, Artificial Sequence
  Synthetic oligonucleotide
aggaagtgtgccctcgtcggcgcccgttta

SEQ ID NO: 490322 - DNA, 30 bp, Artificial Sequence
  Synthetic oligonucleotide
aaacagagtcctgtaatgacggcccgttta

SEQ ID NO: 490323 - DNA, 30 bp, Artificial Sequence
  Synthetic oligonucleotide
atttctattaattcttctacttcccgttta

SEQ ID NO: 490324 - DNA, 30 bp, Artificial Sequence
  Synthetic oligonucleotide
actatgcataaatagactttaaggcgttta

SEQ ID NO: 490325 - DNA, 30 bp, Artificial Sequence
  Synthetic oligonucleotide
tgtctattaacaaaaccggtaaaaggttta

SEQ ID NO: 490326 - DNA, 30 bp, Artificial Sequence
  Synthetic oligonucleotide
atcacggtccctcaattaatatcaggttta

SEQ ID NO: 490327 - DNA, 28 bp, Artificial Sequence
  Synthetic oligonucleotide
cagctaattccttctttcccgaggttta

SEQ ID NO: 490328 - DNA, 30 bp, Artificial Sequence
  Synthetic oligonucleotide
gtgcttttcagcgtattaggacacggttta

SEQ ID NO: 490329 - DNA, 30 bp, Artificial Sequence
  Synthetic oligonucleotide
ctgtctcagtggtcatcttgtcagggttta

SEQ ID NO: 490330 - DNA, 30 bp, Artificial Sequence
  Synthetic oligonucleotide
gtatatcaacgggcagggtaatggggttta

SEQ ID NO: 490331 - DNA, 30 bp, Artificial Sequence
  Synthetic oligonucleotide
ctattcaccactgcctggagtgatggttta

SEQ ID NO: 490332 - DNA, 30 bp, Artificial Sequence
  Synthetic oligonucleotide
tgcacatagtctaagcctgacgaatgttta

SEQ ID NO: 490333 - DNA, 30 bp, Artificial Sequence
  Synthetic oligonucleotide
tagattgtgatcgtgatagacgcatgttta

SEQ ID NO: 490334 - DNA, 30 bp, Artificial Sequence
  Synthetic oligonucleotide
gacatcctattcgacaccgaaagatgttta

SEQ ID NO: 490335 - DNA, 30 bp, Artificial Sequence
  Synthetic oligonucleotide
aacatctgaaagttaatttactgatgttta

SEQ ID NO: 490336 - DNA, 30 bp, Artificial Sequence
  Synthetic oligonucleotide
ggttcagggggccgcgggtttatatgttta

SEQ ID NO: 490337 - DNA, 30 bp, Artificial Sequence
  Synthetic oligonucleotide
gttcgtagaatgtatccatgcaactgttta

SEQ ID NO: 490338 - DNA, 30 bp, Artificial Sequence
  Synthetic oligonucleotide
gtatgttggattagttgcgagtactgttta

SEQ ID NO: 490339 - DNA, 30 bp, Artificial Sequence
  Synthetic oligonucleotide
gctaacagatgctctcaactcatctgttta

SEQ ID NO: 490340 - DNA, 30 bp, Artificial Sequence
  Synthetic oligonucleotide
gtacacgaatattgattctacaagtgttta

SEQ ID NO: 490341 - DNA, 30 bp, Artificial Sequence
  Synthetic oligonucleotide
cggccggatgtcagagtgctcaggtgttta

SEQ ID NO: 490342 - DNA, 30 bp, Artificial Sequence
  Synthetic oligonucleotide
gcttaagaatgtgcttggttacggtgttta

SEQ ID NO: 490343 - DNA, 30 bp, Artificial Sequence
  Synthetic oligonucleotide
tagaaaactgacatcagggtggggtgttta

SEQ ID NO: 490344 - DNA, 30 bp, Artificial Sequence
  Synthetic oligonucleotide
tccccttagttccactgtacttggtgttta

SEQ ID NO: 490345 - DNA, 30 bp, Artificial Sequence
  Synthetic oligonucleotide
aagatcgaccctgtttcgatttggtgttta

SEQ ID NO: 490346 - DNA, 30 bp, Artificial Sequence
  Synthetic oligonucleotide
ctatttcctaacatcgtgtatctgtgttta

SEQ ID NO: 490347 - DNA, 30 bp, Artificial Sequence
  Synthetic oligonucleotide
aagctatggtcctaataatgcttgtgttta

SEQ ID NO: 490348 - DNA, 30 bp, Artificial Sequence
  Synthetic oligonucleotide
ctagtagcgcattgaggtgcaaattgttta

SEQ ID NO: 490349 - DNA, 30 bp, Artificial Sequence
  Synthetic oligonucleotide
taggccggactcttttatagagtttgttta

SEQ ID NO: 490350 - DNA, 30 bp, Artificial Sequence
  Synthetic oligonucleotide
atgcgcatcatgttgatgccgtaaatttta

SEQ ID NO: 490351 - DNA, 30 bp, Artificial Sequence
  Synthetic oligonucleotide
gcatgattgcgcgccaagagtgcaatttta

SEQ ID NO: 490352 - DNA, 30 bp, Artificial Sequence
  Synthetic oligonucleotide
tactaaaatgatgtataaaaccgaatttta

SEQ ID NO: 490353 - DNA, 30 bp, Artificial Sequence
  Synthetic oligonucleotide
tttaattttatcaagtgtatgcacatttta

SEQ ID NO: 490354 - DNA, 30 bp, Artificial Sequence
  Synthetic oligonucleotide
agcagaaatactaaatacgcatacatttta

SEQ ID NO: 490355 - DNA, 30 bp, Artificial Sequence
  Synthetic oligonucleotide
ggatctttcaagccccgacagagcatttta

SEQ ID NO: 490356 - DNA, 31 bp, Artificial Sequence
  Synthetic oligonucleotide
attcttctggagtatacaggcagtcatttta

SEQ ID NO: 490357 - DNA, 30 bp, Artificial Sequence
  Synthetic oligonucleotide
attaccgtctgttttccttggttcatttta

SEQ ID NO: 490358 - DNA, 30 bp, Artificial Sequence
  Synthetic oligonucleotide
tcaaccagctccccgatggttttcatttta

SEQ ID NO: 490359 - DNA, 30 bp, Artificial Sequence
  Synthetic oligonucleotide
tccttggtgcgctgaaaatctcagatttta

SEQ ID NO: 490360 - DNA, 30 bp, Artificial Sequence
  Synthetic oligonucleotide
accgatctcagaatcgggggggggatttta

SEQ ID NO: 490361 - DNA, 30 bp, Artificial Sequence
  Synthetic oligonucleotide
aatggggtaattttacgtgttctgatttta

SEQ ID NO: 490362 - DNA, 30 bp, Artificial Sequence
  Synthetic oligonucleotide
atgtagcaagatagggtacgggctatttta

SEQ ID NO: 490363 - DNA, 30 bp, Artificial Sequence
  Synthetic oligonucleotide
gcgtgttcagttttggtagaaattatttta

SEQ ID NO: 490364 - DNA, 30 bp, Artificial Sequence
  Synthetic oligonucleotide
tgtactgaccaggcacggtattttatttta

SEQ ID NO: 490365 - DNA, 30 bp, Artificial Sequence
  Synthetic oligonucleotide
gaccaaccgacagggtgggacgcactttta

SEQ ID NO: 490366 - DNA, 30 bp, Artificial Sequence
  Synthetic oligonucleotide
gcatgatcagggtgtagtgtcgcactttta

SEQ ID NO: 490367 - DNA, 30 bp, Artificial Sequence
  Synthetic oligonucleotide
tatctccttggtgagtcgcttaacctttta

SEQ ID NO: 490368 - DNA, 30 bp, Artificial Sequence
  Synthetic oligonucleotide
cagtcattctcgcttagtacacacctttta

SEQ ID NO: 490369 - DNA, 30 bp, Artificial Sequence
  Synthetic oligonucleotide
gtatcttgcgggtccgccgatcccctttta

SEQ ID NO: 490370 - DNA, 30 bp, Artificial Sequence
  Synthetic oligonucleotide
atcggattaccgatgtgcggcgccctttta

SEQ ID NO: 490371 - DNA, 30 bp, Artificial Sequence
  Synthetic oligonucleotide
catccgtcaatgcgcctttcaggcctttta

SEQ ID NO: 490372 - DNA, 30 bp, Artificial Sequence
  Synthetic oligonucleotide
atggcctaaagccattatatttgcctttta

SEQ ID NO: 490373 - DNA, 30 bp, Artificial Sequence
  Synthetic oligonucleotide
tagccttctgtttggggcatccagctttta

SEQ ID NO: 490374 - DNA, 30 bp, Artificial Sequence
  Synthetic oligonucleotide
ggggactcaaagtcccaatgggcgctttta

SEQ ID NO: 490375 - DNA, 30 bp, Artificial Sequence
  Synthetic oligonucleotide
taccagttcgcgtacaagctggtgctttta

SEQ ID NO: 490376 - DNA, 30 bp, Artificial Sequence
  Synthetic oligonucleotide
gtcgcagtttaactcggttgcactctttta

SEQ ID NO: 490377 - DNA, 30 bp, Artificial Sequence
  Synthetic oligonucleotide
ataacgtcgttttctgcttaggctctttta

SEQ ID NO: 490378 - DNA, 30 bp, Artificial Sequence
  Synthetic oligonucleotide
aaaatggctccctggccgatacttctttta

SEQ ID NO: 490379 - DNA, 30 bp, Artificial Sequence
  Synthetic oligonucleotide
tatggtattccttcgcgtatcccagtttta

SEQ ID NO: 490380 - DNA, 30 bp, Artificial Sequence
  Synthetic oligonucleotide
aagaaccaactggccatgtatttagtttta

SEQ ID NO: 490381 - DNA, 30 bp, Artificial Sequence
  Synthetic oligonucleotide
tcggaactaaaaacgttgtgattcgtttta

SEQ ID NO: 490382 - DNA, 30 bp, Artificial Sequence
  Synthetic oligonucleotide
gacgtggtgaccggaactccatgggtttta

SEQ ID NO: 490383 - DNA, 30 bp, Artificial Sequence
  Synthetic oligonucleotide
tctatataaggtagtttccccttggtttta

SEQ ID NO: 490384 - DNA, 30 bp, Artificial Sequence
  Synthetic oligonucleotide
ccaacctttgaagacaaaaaatatgtttta

SEQ ID NO: 490385 - DNA, 30 bp, Artificial Sequence
  Synthetic oligonucleotide
gctgctattcagtaccgtgcctatgtttta

SEQ ID NO: 490386 - DNA, 30 bp, Artificial Sequence
  Synthetic oligonucleotide
cacggggttacttacagtatatgtgtttta

SEQ ID NO: 490387 - DNA, 30 bp, Artificial Sequence
  Synthetic oligonucleotide
attcagccactacaaggttgatttgtttta

SEQ ID NO: 490388 - DNA, 29 bp, Artificial Sequence
  Synthetic oligonucleotide
ctcaactgctcaaatcgtaggtattttta

SEQ ID NO: 490389 - DNA, 30 bp, Artificial Sequence
  Synthetic oligonucleotide
aaccgctatgtaatgatatatgtattttta

SEQ ID NO: 490390 - DNA, 30 bp, Artificial Sequence
  Synthetic oligonucleotide
tggatatgtgacatgtccgcgaccttttta

SEQ ID NO: 490391 - DNA, 30 bp, Artificial Sequence
  Synthetic oligonucleotide
tgtagtaaatttaggtatcctcgcttttta

SEQ ID NO: 490392 - DNA, 30 bp, Artificial Sequence
  Synthetic oligonucleotide
atttcgacctgatgccgctatggcttttta

SEQ ID NO: 490393 - DNA, 30 bp, Artificial Sequence
  Synthetic oligonucleotide
taagggggttgtcgcttaggcgtcttttta

SEQ ID NO: 490394 - DNA, 31 bp, Artificial Sequence
  Synthetic oligonucleotide
tgtccttacatctgcgttccgcacgttttta

SEQ ID NO: 490395 - DNA, 30 bp, Artificial Sequence
  Synthetic oligonucleotide
atttagatcaagcttgtctagcggttttta

SEQ ID NO: 490396 - DNA, 30 bp, Artificial Sequence
  Synthetic oligonucleotide
tacggaattgagcgcttggctaatttttta

SEQ ID NO: 490397 - DNA, 30 bp, Artificial Sequence
  Synthetic oligonucleotide
gtacaccctggtcacgactagcatttttta

SEQ ID NO: 490398 - DNA, 30 bp, Artificial Sequence
  Synthetic oligonucleotide
acataccgctgtgaagttgtcactttttta

SEQ ID NO: 490399 - DNA, 30 bp, Artificial Sequence
  Synthetic oligonucleotide
tttctccgaacacttggtagccgtttttta

SEQ ID NO: 490400 - DNA, 30 bp, Artificial Sequence
  Synthetic oligonucleotide
ttactggtactgccaacacgtacaaaaaac

SEQ ID NO: 490401 - DNA, 30 bp, Artificial Sequence
  Synthetic oligonucleotide
cgctgatccagcccaccagtacccaaaaac

SEQ ID NO: 490402 - DNA, 30 bp, Artificial Sequence
  Synthetic oligonucleotide
gaggtgactgatatcctccctcgcaaaaac

SEQ ID NO: 490403 - DNA, 30 bp, Artificial Sequence
  Synthetic oligonucleotide
gtaaagtttaaaacttgtggcgtcaaaaac

SEQ ID NO: 490404 - DNA, 30 bp, Artificial Sequence
  Synthetic oligonucleotide
tttatcaaaagttaattgagggtgaaaaac

SEQ ID NO: 490405 - DNA, 30 bp, Artificial Sequence
  Synthetic oligonucleotide
gtattccattcgttccagtggggtaaaaac

SEQ ID NO: 490406 - DNA, 30 bp, Artificial Sequence
  Synthetic oligonucleotide
ttgtagccaggtatcacgcaacaacaaaac

SEQ ID NO: 490407 - DNA, 30 bp, Artificial Sequence
  Synthetic oligonucleotide
gttttatagcctccccaccgggaacaaaac

SEQ ID NO: 490408 - DNA, 30 bp, Artificial Sequence
  Synthetic oligonucleotide
cggttacactagaccttgcgcagacaaaac

SEQ ID NO: 490409 - DNA, 30 bp, Artificial Sequence
  Synthetic oligonucleotide
tacgccgggtcgctcggctttgcccaaaac

SEQ ID NO: 490410 - DNA, 30 bp, Artificial Sequence
  Synthetic oligonucleotide
tgaaatttcatgaatattgaaaggcaaaac

SEQ ID NO: 490411 - DNA, 30 bp, Artificial Sequence
  Synthetic oligonucleotide
tgtatacacggtggttgttggcttcaaaac

SEQ ID NO: 490412 - DNA, 30 bp, Artificial Sequence
  Synthetic oligonucleotide
cggtgtccgcattgcaagtgtaaagaaaac

SEQ ID NO: 490413 - DNA, 30 bp, Artificial Sequence
  Synthetic oligonucleotide
gcagatgttcatttcttactaacagaaaac

SEQ ID NO: 490414 - DNA, 30 bp, Artificial Sequence
  Synthetic oligonucleotide
tagtccttgcactggagagcgtgagaaaac

SEQ ID NO: 490415 - DNA, 30 bp, Artificial Sequence
  Synthetic oligonucleotide
tactatgcccgggggcagattgtagaaaac

SEQ ID NO: 490416 - DNA, 30 bp, Artificial Sequence
  Synthetic oligonucleotide
attatgctctgtaccactaaaactgaaaac

SEQ ID NO: 490417 - DNA, 30 bp, Artificial Sequence
  Synthetic oligonucleotide
tgcgcatgttcaatcggagaggctgaaaac

SEQ ID NO: 490418 - DNA, 30 bp, Artificial Sequence
  Synthetic oligonucleotide
ttcgcgggttccagcttcgcgtcataaaac

SEQ ID NO: 490419 - DNA, 30 bp, Artificial Sequence
  Synthetic oligonucleotide
gtctgttgctgagagtacatgctataaaac

SEQ ID NO: 490420 - DNA, 30 bp, Artificial Sequence
  Synthetic oligonucleotide
gccgacgggtgtacgcaaccgttataaaac

SEQ ID NO: 490421 - DNA, 30 bp, Artificial Sequence
  Synthetic oligonucleotide
taaccttttaggccaactcctttataaaac

SEQ ID NO: 490422 - DNA, 30 bp, Artificial Sequence
  Synthetic oligonucleotide
ttttccggggtcgccggagccacctaaaac

SEQ ID NO: 490423 - DNA, 30 bp, Artificial Sequence
  Synthetic oligonucleotide
gcgtttaggtggtaagtgggcgcctaaaac

SEQ ID NO: 490424 - DNA, 30 bp, Artificial Sequence
  Synthetic oligonucleotide
ggcgtttggtcagatgcctcaagctaaaac

SEQ ID NO: 490425 - DNA, 30 bp, Artificial Sequence
  Synthetic oligonucleotide
gtggttcgcgatgcgccggtattctaaaac

SEQ ID NO: 490426 - DNA, 30 bp, Artificial Sequence
  Synthetic oligonucleotide
aaccttagtttaccgtactatccgtaaaac

SEQ ID NO: 490427 - DNA, 30 bp, Artificial Sequence
  Synthetic oligonucleotide
aatccagcgtttttgttcagatcttaaaac

SEQ ID NO: 490428 - DNA, 30 bp, Artificial Sequence
  Synthetic oligonucleotide
tccagagcaagtttaacgcagagttaaaac

SEQ ID NO: 490429 - DNA, 30 bp, Artificial Sequence
  Synthetic oligonucleotide
accgatagccgaaggtacatttccacaaac

SEQ ID NO: 490430 - DNA, 30 bp, Artificial Sequence
  Synthetic oligonucleotide
atgctatgtatacccattctcctcacaaac

SEQ ID NO: 490431 - DNA, 30 bp, Artificial Sequence
  Synthetic oligonucleotide
tgtagtgcgatgttactctgccagacaaac

SEQ ID NO: 490432 - DNA, 30 bp, Artificial Sequence
  Synthetic oligonucleotide
tgaaatacgtaatagaatgagacgacaaac

SEQ ID NO: 490433 - DNA, 30 bp, Artificial Sequence
  Synthetic oligonucleotide
atcgagaaccctaaaatctagactacaaac

SEQ ID NO: 490434 - DNA, 30 bp, Artificial Sequence
  Synthetic oligonucleotide
tgttaccgcttgcagccactagccccaaac

SEQ ID NO: 490435 - DNA, 30 bp, Artificial Sequence
  Synthetic oligonucleotide
gattactttccacgaaggtcgtccccaaac

SEQ ID NO: 490436 - DNA, 30 bp, Artificial Sequence
  Synthetic oligonucleotide
gtattggccgtgtaactgatgcggccaaac

SEQ ID NO: 490437 - DNA, 30 bp, Artificial Sequence
  Synthetic oligonucleotide
aatacatcgtaaaccgtacggcatccaaac

SEQ ID NO: 490438 - DNA, 30 bp, Artificial Sequence
  Synthetic oligonucleotide
aagttgtcggagctatgccttcatccaaac

SEQ ID NO: 490439 - DNA, 30 bp, Artificial Sequence
  Synthetic oligonucleotide
gaacagttgatattgccttgcaaagcaaac

SEQ ID NO: 490440 - DNA, 30 bp, Artificial Sequence
  Synthetic oligonucleotide
ttgcatggttatctgtaacgataagcaaac

SEQ ID NO: 490441 - DNA, 30 bp, Artificial Sequence
  Synthetic oligonucleotide
gcgccctcgtcgtttttggtataagcaaac

SEQ ID NO: 490442 - DNA, 30 bp, Artificial Sequence
  Synthetic oligonucleotide
gcaccagacggtttagctatttcagcaaac

SEQ ID NO: 490443 - DNA, 30 bp, Artificial Sequence
  Synthetic oligonucleotide
ttatgtaccctgagctggaatggagcaaac

SEQ ID NO: 490444 - DNA, 30 bp, Artificial Sequence
  Synthetic oligonucleotide
taacttctgtggtgtgctcacatagcaaac

SEQ ID NO: 490445 - DNA, 30 bp, Artificial Sequence
  Synthetic oligonucleotide
agagaagtatgaaagcacgacgaggcaaac

SEQ ID NO: 490446 - DNA, 30 bp, Artificial Sequence
  Synthetic oligonucleotide
aacgcttatagttttgtagtaagggcaaac

SEQ ID NO: 490447 - DNA, 30 bp, Artificial Sequence
  Synthetic oligonucleotide
gccgttaatgcaccgcggttatgggcaaac

SEQ ID NO: 490448 - DNA, 30 bp, Artificial Sequence
  Synthetic oligonucleotide
acgtgactgggttctgccgctatggcaaac

SEQ ID NO: 490449 - DNA, 30 bp, Artificial Sequence
  Synthetic oligonucleotide
taacggcgctatagtggcaagaatgcaaac

SEQ ID NO: 490450 - DNA, 30 bp, Artificial Sequence
  Synthetic oligonucleotide
cacctgatctcgtgtcatataccatcaaac

SEQ ID NO: 490451 - DNA, 30 bp, Artificial Sequence
  Synthetic oligonucleotide
ctacccaaggtaacccacgcagactcaaac

SEQ ID NO: 490452 - DNA, 31 bp, Artificial Sequence
  Synthetic oligonucleotide
aatatgcccgggtcccgcaagagtttcaaac

SEQ ID NO: 490453 - DNA, 30 bp, Artificial Sequence
  Synthetic oligonucleotide
ggatctagccgcgtgtagagtttaagaaac

SEQ ID NO: 490454 - DNA, 30 bp, Artificial Sequence
  Synthetic oligonucleotide
gttctcttcttgggagtccatttcagaaac

SEQ ID NO: 490455 - DNA, 30 bp, Artificial Sequence
  Synthetic oligonucleotide
gcccggccacaatcccatgtttggagaaac

SEQ ID NO: 490456 - DNA, 29 bp, Artificial Sequence
  Synthetic oligonucleotide
tttgaggacgtgcatttaaatatagaaac

SEQ ID NO: 490457 - DNA, 30 bp, Artificial Sequence
  Synthetic oligonucleotide
ctttcataagacccaaggctatttagaaac

SEQ ID NO: 490458 - DNA, 30 bp, Artificial Sequence
  Synthetic oligonucleotide
tgagaactgggattgatttcttcccgaaac

SEQ ID NO: 490459 - DNA, 30 bp, Artificial Sequence
  Synthetic oligonucleotide
tagttagtacactcgaggtctcatcgaaac

SEQ ID NO: 490460 - DNA, 30 bp, Artificial Sequence
  Synthetic oligonucleotide
tttttcacgtcaagcgagatttacggaaac

SEQ ID NO: 490461 - DNA, 30 bp, Artificial Sequence
  Synthetic oligonucleotide
gagtactaacgctaaggagaatccggaaac

SEQ ID NO: 490462 - DNA, 30 bp, Artificial Sequence
  Synthetic oligonucleotide
gatcctttatctcttggtgtaggcggaaac

SEQ ID NO: 490463 - DNA, 30 bp, Artificial Sequence
  Synthetic oligonucleotide
gttccgcgtcctaatttggtatgcggaaac

SEQ ID NO: 490464 - DNA, 30 bp, Artificial Sequence
  Synthetic oligonucleotide
aactcctgctagttgaatgcaatcggaaac

SEQ ID NO: 490465 - DNA, 30 bp, Artificial Sequence
  Synthetic oligonucleotide
gtgccatagatgctgtgttggatgggaaac

SEQ ID NO: 490466 - DNA, 30 bp, Artificial Sequence
  Synthetic oligonucleotide
acttgtaacgcatgcgagccattgggaaac

SEQ ID NO: 490467 - DNA, 30 bp, Artificial Sequence
  Synthetic oligonucleotide
gaaatgcattgaatggcggcccgtggaaac

SEQ ID NO: 490468 - DNA, 30 bp, Artificial Sequence
  Synthetic oligonucleotide
atggtaactagtaattccgcatttggaaac

SEQ ID NO: 490469 - DNA, 30 bp, Artificial Sequence
  Synthetic oligonucleotide
gattagacatactcgggcgtcgcatgaaac

SEQ ID NO: 490470 - DNA, 30 bp, Artificial Sequence
  Synthetic oligonucleotide
tttgcaccctcggaacctcttctatgaaac

SEQ ID NO: 490471 - DNA, 30 bp, Artificial Sequence
  Synthetic oligonucleotide
gatccccttaaacctgctatcgtatgaaac

SEQ ID NO: 490472 - DNA, 30 bp, Artificial Sequence
  Synthetic oligonucleotide
aattccggtaacgtacccccaccctgaaac

SEQ ID NO: 490473 - DNA, 30 bp, Artificial Sequence
  Synthetic oligonucleotide
gccacttgtgagctgctcttggggtgaaac

SEQ ID NO: 490474 - DNA, 29 bp, Artificial Sequence
  Synthetic oligonucleotide
gcatatattgttttccggtagcttgaaac

SEQ ID NO: 490475 - DNA, 30 bp, Artificial Sequence
  Synthetic oligonucleotide
ataagggtaaggtttttgtagtcttgaaac

SEQ ID NO: 490476 - DNA, 30 bp, Artificial Sequence
  Synthetic oligonucleotide
taaaactttaagacgagcaaccgttgaaac

SEQ ID NO: 490477 - DNA, 30 bp, Artificial Sequence
  Synthetic oligonucleotide
tatgaagctgtgaacttttgagtaataaac

SEQ ID NO: 490478 - DNA, 30 bp, Artificial Sequence
  Synthetic oligonucleotide
cagatttttaaaaggaacccatccataaac

SEQ ID NO: 490479 - DNA, 30 bp, Artificial Sequence
  Synthetic oligonucleotide
tattattcagacggtgctatttccataaac

SEQ ID NO: 490480 - DNA, 30 bp, Artificial Sequence
  Synthetic oligonucleotide
gcagctgtttcaaattggcgaacgataaac

SEQ ID NO: 490481 - DNA, 30 bp, Artificial Sequence
  Synthetic oligonucleotide
aattccagactaccagaaatagcgataaac

SEQ ID NO: 490482 - DNA, 30 bp, Artificial Sequence
  Synthetic oligonucleotide
gtgcgagttatcggctacgcccttataaac

SEQ ID NO: 490483 - DNA, 30 bp, Artificial Sequence
  Synthetic oligonucleotide
gagaccgatcaaatctgaggcgaactaaac

SEQ ID NO: 490484 - DNA, 30 bp, Artificial Sequence
  Synthetic oligonucleotide
ttttgggcataaggtcgatcaagactaaac

SEQ ID NO: 490485 - DNA, 30 bp, Artificial Sequence
  Synthetic oligonucleotide
gtaatcggttgcgggcgttatagactaaac

SEQ ID NO: 490486 - DNA, 30 bp, Artificial Sequence
  Synthetic oligonucleotide
attgatatccgtcggtacttagtcctaaac

SEQ ID NO: 490487 - DNA, 30 bp, Artificial Sequence
  Synthetic oligonucleotide
aaatcgtctgatccgtcagaatagctaaac

SEQ ID NO: 490488 - DNA, 30 bp, Artificial Sequence
  Synthetic oligonucleotide
tatgggtcccttgcctataaacggctaaac

SEQ ID NO: 490489 - DNA, 30 bp, Artificial Sequence
  Synthetic oligonucleotide
aagaatgttttcccttcaatctctctaaac

SEQ ID NO: 490490 - DNA, 30 bp, Artificial Sequence
  Synthetic oligonucleotide
atctctttccttcagcgaaggtccgtaaac

SEQ ID NO: 490491 - DNA, 30 bp, Artificial Sequence
  Synthetic oligonucleotide
tagtagctagctagtcttttataattaaac

SEQ ID NO: 490492 - DNA, 30 bp, Artificial Sequence
  Synthetic oligonucleotide
agatctggatctagtttcggtagattaaac

SEQ ID NO: 490493 - DNA, 30 bp, Artificial Sequence
  Synthetic oligonucleotide
agttgaagcttgatatcttgagcgttaaac

SEQ ID NO: 490494 - DNA, 30 bp, Artificial Sequence
  Synthetic oligonucleotide
atcggccgacaacagttctggaatttaaac

SEQ ID NO: 490495 - DNA, 30 bp, Artificial Sequence
  Synthetic oligonucleotide
tttgagtttcttctttcgactgctttaaac

SEQ ID NO: 490496 - DNA, 30 bp, Artificial Sequence
  Synthetic oligonucleotide
ctctctttctgcggtctggctggtttaaac

SEQ ID NO: 490497 - DNA, 30 bp, Artificial Sequence
  Synthetic oligonucleotide
ttgcgaccttcagcccagcgagaaaacaac

SEQ ID NO: 490498 - DNA, 29 bp, Artificial Sequence
  Synthetic oligonucleotide
aaactggctgttcaccccattaaaacaac

SEQ ID NO: 490499 - DNA, 30 bp, Artificial Sequence
  Synthetic oligonucleotide
acccgaatcaacgaaccttggccaaacaac

SEQ ID NO: 490500 - DNA, 30 bp, Artificial Sequence
  Synthetic oligonucleotide
agtggcattccctaatgacgcgcaaacaac

SEQ ID NO: 490501 - DNA, 30 bp, Artificial Sequence
  Synthetic oligonucleotide
ttggaatgaacaacagttgttttaaacaac

SEQ ID NO: 490502 - DNA, 30 bp, Artificial Sequence
  Synthetic oligonucleotide
agatattgtcaaatgtggaaggacaacaac

SEQ ID NO: 490503 - DNA, 31 bp, Artificial Sequence
  Synthetic oligonucleotide
atttccggctaccaacgaaatacataacaac

SEQ ID NO: 490504 - DNA, 30 bp, Artificial Sequence
  Synthetic oligonucleotide
tcgcgggcgcgtcgcagagattctaacaac

SEQ ID NO: 490505 - DNA, 30 bp, Artificial Sequence
  Synthetic oligonucleotide
tgtgagttttttcttactggcggtaacaac

SEQ ID NO: 490506 - DNA, 30 bp, Artificial Sequence
  Synthetic oligonucleotide
gggagtactcgaccttccggacttaacaac

SEQ ID NO: 490507 - DNA, 30 bp, Artificial Sequence
  Synthetic oligonucleotide
tccagtcggcatatgtattgagcccacaac

SEQ ID NO: 490508 - DNA, 30 bp, Artificial Sequence
  Synthetic oligonucleotide
ctccggcgggtacctatcggacatcacaac

SEQ ID NO: 490509 - DNA, 30 bp, Artificial Sequence
  Synthetic oligonucleotide
acatttgtcaaatgtacagttaaagacaac

SEQ ID NO: 490510 - DNA, 30 bp, Artificial Sequence
  Synthetic oligonucleotide
ttggggtctagcccgcccatcgcagacaac

SEQ ID NO: 490511 - DNA, 30 bp, Artificial Sequence
  Synthetic oligonucleotide
attcgccctgactgcatgtctgtagacaac

SEQ ID NO: 490512 - DNA, 30 bp, Artificial Sequence
  Synthetic oligonucleotide
taaccattgtacttgtcatacttagacaac

SEQ ID NO: 490513 - DNA, 30 bp, Artificial Sequence
  Synthetic oligonucleotide
caactacgtatcccaacgggtcgcgacaac

SEQ ID NO: 490514 - DNA, 30 bp, Artificial Sequence
  Synthetic oligonucleotide
catagcttccaagatatcattttcgacaac

SEQ ID NO: 490515 - DNA, 30 bp, Artificial Sequence
  Synthetic oligonucleotide
gaggtttacgtagagattgggatggacaac

SEQ ID NO: 490516 - DNA, 30 bp, Artificial Sequence
  Synthetic oligonucleotide
ggcgcttttgggagggccagatatgacaac

SEQ ID NO: 490517 - DNA, 30 bp, Artificial Sequence
  Synthetic oligonucleotide
gttcagttgggcctatcccagggttacaac

SEQ ID NO: 490518 - DNA, 30 bp, Artificial Sequence
  Synthetic oligonucleotide
ttagaaataacgccgaaacaccagaccaac

SEQ ID NO: 490519 - DNA, 30 bp, Artificial Sequence
  Synthetic oligonucleotide
gcgtttgatcgaaagggcttcgagaccaac

SEQ ID NO: 490520 - DNA, 30 bp, Artificial Sequence
  Synthetic oligonucleotide
gatgttgtggttatgactctgacacccaac

SEQ ID NO: 490521 - DNA, 30 bp, Artificial Sequence
  Synthetic oligonucleotide
gcccgcagtacgtccgtgcaactacccaac

SEQ ID NO: 490522 - DNA, 30 bp, Artificial Sequence
  Synthetic oligonucleotide
tttgtaaaaggcctcggaaccttccccaac

SEQ ID NO: 490523 - DNA, 30 bp, Artificial Sequence
  Synthetic oligonucleotide
caaggattttatggacctcagcagcccaac

SEQ ID NO: 490524 - DNA, 30 bp, Artificial Sequence
  Synthetic oligonucleotide
tattcacaattgcagtgtttaaaagccaac

SEQ ID NO: 490525 - DNA, 30 bp, Artificial Sequence
  Synthetic oligonucleotide
tagccatttcacgtgcttaagaaagccaac

SEQ ID NO: 490526 - DNA, 30 bp, Artificial Sequence
  Synthetic oligonucleotide
ctcaatcctattgacgtttaagcagccaac

SEQ ID NO: 490527 - DNA, 30 bp, Artificial Sequence
  Synthetic oligonucleotide
attcgcccacatacaaaagttcgggccaac

SEQ ID NO: 490528 - DNA, 30 bp, Artificial Sequence
  Synthetic oligonucleotide
gcatgtggatggagaacttccccatccaac

SEQ ID NO: 490529 - DNA, 30 bp, Artificial Sequence
  Synthetic oligonucleotide
ttgctagcgacagttggaacgatatccaac

SEQ ID NO: 490530 - DNA, 30 bp, Artificial Sequence
  Synthetic oligonucleotide
ggataccatcctatgcccgttcaaagcaac

SEQ ID NO: 490531 - DNA, 30 bp, Artificial Sequence
  Synthetic oligonucleotide
gtcatatggaagcaggcccggttaagcaac

SEQ ID NO: 490532 - DNA, 30 bp, Artificial Sequence
  Synthetic oligonucleotide
attaattggaccgctcattgcaagagcaac

SEQ ID NO: 490533 - DNA, 30 bp, Artificial Sequence
  Synthetic oligonucleotide
tataagtttataaccgcttacctgagcaac

SEQ ID NO: 490534 - DNA, 30 bp, Artificial Sequence
  Synthetic oligonucleotide
ctcgtgcggcaagtagggttgcgtagcaac

SEQ ID NO: 490535 - DNA, 30 bp, Artificial Sequence
  Synthetic oligonucleotide
aaatctcttggaatcttcatcggtagcaac

SEQ ID NO: 490536 - DNA, 30 bp, Artificial Sequence
  Synthetic oligonucleotide
ttatgacttttattcccgcttggtagcaac

SEQ ID NO: 490537 - DNA, 30 bp, Artificial Sequence
  Synthetic oligonucleotide
aaacggttcctacacccgactgcccgcaac

SEQ ID NO: 490538 - DNA, 30 bp, Artificial Sequence
  Synthetic oligonucleotide
ctcaccactaactaggggttatgccgcaac

SEQ ID NO: 490539 - DNA, 30 bp, Artificial Sequence
  Synthetic oligonucleotide
gctcaaatgattagggagttcctccgcaac

SEQ ID NO: 490540 - DNA, 30 bp, Artificial Sequence
  Synthetic oligonucleotide
gttgtgcctacccataatttgcatcgcaac

SEQ ID NO: 490541 - DNA, 30 bp, Artificial Sequence
  Synthetic oligonucleotide
ggaatcactgttagaggctgctatcgcaac

SEQ ID NO: 490542 - DNA, 30 bp, Artificial Sequence
  Synthetic oligonucleotide
tatagccatgaatattcagtactcggcaac

SEQ ID NO: 490543 - DNA, 30 bp, Artificial Sequence
  Synthetic oligonucleotide
aaatttcagggacctgcccgcgcgggcaac

SEQ ID NO: 490544 - DNA, 30 bp, Artificial Sequence
  Synthetic oligonucleotide
aatacagtctctttggaagtatgtggcaac

SEQ ID NO: 490545 - DNA, 30 bp, Artificial Sequence
  Synthetic oligonucleotide
gtaccatttgtaagaaacagcgttggcaac

SEQ ID NO: 490546 - DNA, 30 bp, Artificial Sequence
  Synthetic oligonucleotide
agcataattgggtagcaatagtaatgcaac

SEQ ID NO: 490547 - DNA, 30 bp, Artificial Sequence
  Synthetic oligonucleotide
ttctaaggggatttaggctgtgggtgcaac

SEQ ID NO: 490548 - DNA, 30 bp, Artificial Sequence
  Synthetic oligonucleotide
ttacagcacaagttaggaaggggttgcaac

SEQ ID NO: 490549 - DNA, 30 bp, Artificial Sequence
  Synthetic oligonucleotide
tacccgtctccctaacttaagtgaatcaac

SEQ ID NO: 490550 - DNA, 30 bp, Artificial Sequence
  Synthetic oligonucleotide
ctcacttcccttgcttaacgtggcatcaac

SEQ ID NO: 490551 - DNA, 30 bp, Artificial Sequence
  Synthetic oligonucleotide
taaacggaatgaagggttattatgatcaac

SEQ ID NO: 490552 - DNA, 30 bp, Artificial Sequence
  Synthetic oligonucleotide
tgctacctctcgttgtagagtagcctcaac

SEQ ID NO: 490553 - DNA, 30 bp, Artificial Sequence
  Synthetic oligonucleotide
cttgcacccgttttgaagtaccggctcaac

SEQ ID NO: 490554 - DNA, 30 bp, Artificial Sequence
  Synthetic oligonucleotide
cttaagggagggccggaaagcgggctcaac

SEQ ID NO: 490555 - DNA, 30 bp, Artificial Sequence
  Synthetic oligonucleotide
tatatggggtgcacccccttttaagtcaac

SEQ ID NO: 490556 - DNA, 30 bp, Artificial Sequence
  Synthetic oligonucleotide
tagcagccggcgacagtccttgaggtcaac

SEQ ID NO: 490557 - DNA, 30 bp, Artificial Sequence
  Synthetic oligonucleotide
tgcagagtagttactgagtactcggtcaac

SEQ ID NO: 490558 - DNA, 30 bp, Artificial Sequence
  Synthetic oligonucleotide
aaatgtggcacaggccgttctcctgtcaac

SEQ ID NO: 490559 - DNA, 30 bp, Artificial Sequence
  Synthetic oligonucleotide
tagtggtagaggcaacagaagtgtgtcaac

SEQ ID NO: 490560 - DNA, 30 bp, Artificial Sequence
  Synthetic oligonucleotide
ccaagcaggtacttacgtacggttgtcaac

SEQ ID NO: 490561 - DNA, 30 bp, Artificial Sequence
  Synthetic oligonucleotide
tgttgtttatgttctgcgatcttattcaac

SEQ ID NO: 490562 - DNA, 30 bp, Artificial Sequence
  Synthetic oligonucleotide
gtttaaactatttggcagctttgcttcaac

SEQ ID NO: 490563 - DNA, 30 bp, Artificial Sequence
  Synthetic oligonucleotide
gccaggggtcgacactctcaatagttcaac

SEQ ID NO: 490564 - DNA, 30 bp, Artificial Sequence
  Synthetic oligonucleotide
gtgacatagctgatcctattcatgaagaac

SEQ ID NO: 490565 - DNA, 30 bp, Artificial Sequence
  Synthetic oligonucleotide
gcaggaatccgccaccagcgtaataagaac

SEQ ID NO: 490566 - DNA, 30 bp, Artificial Sequence
  Synthetic oligonucleotide
gagccggatcaaatcttaaactataagaac

SEQ ID NO: 490567 - DNA, 30 bp, Artificial Sequence
  Synthetic oligonucleotide
gaatgttaaatcaattgtcttcgtaagaac

SEQ ID NO: 490568 - DNA, 30 bp, Artificial Sequence
  Synthetic oligonucleotide
gagccacggtctccctgcgagaagcagaac

SEQ ID NO: 490569 - DNA, 30 bp, Artificial Sequence
  Synthetic oligonucleotide
tcctaatctaggtacctcctgaggcagaac

SEQ ID NO: 490570 - DNA, 30 bp, Artificial Sequence
  Synthetic oligonucleotide
tgtatgaatgcggcgctagattctcagaac

SEQ ID NO: 490571 - DNA, 30 bp, Artificial Sequence
  Synthetic oligonucleotide
atggcttctatatatctttttgttcagaac

SEQ ID NO: 490572 - DNA, 30 bp, Artificial Sequence
  Synthetic oligonucleotide
tatttactgatggaggtcggtcctgagaac

SEQ ID NO: 490573 - DNA, 30 bp, Artificial Sequence
  Synthetic oligonucleotide
agtcccatttataatattccagctgagaac

SEQ ID NO: 490574 - DNA, 30 bp, Artificial Sequence
  Synthetic oligonucleotide
gtggctcttcatcagggtcttgaatagaac

SEQ ID NO: 490575 - DNA, 30 bp, Artificial Sequence
  Synthetic oligonucleotide
ccgccccggcacagtatgctagcgtagaac

SEQ ID NO: 490576 - DNA, 30 bp, Artificial Sequence
  Synthetic oligonucleotide
ataccccacagaatgcgtggcggttagaac

SEQ ID NO: 490577 - DNA, 30 bp, Artificial Sequence
  Synthetic oligonucleotide
aatacatcaggtcggatgcggttttagaac

SEQ ID NO: 490578 - DNA, 30 bp, Artificial Sequence
  Synthetic oligonucleotide
caataccaagggaggcaaagaggaacgaac

SEQ ID NO: 490579 - DNA, 30 bp, Artificial Sequence
  Synthetic oligonucleotide
aaagtgcggttctaattatttggaacgaac

SEQ ID NO: 490580 - DNA, 30 bp, Artificial Sequence
  Synthetic oligonucleotide
agggcacaatactatcggtgacccacgaac

SEQ ID NO: 490581 - DNA, 30 bp, Artificial Sequence
  Synthetic oligonucleotide
gtccccataggaaaggctgtgaggacgaac

SEQ ID NO: 490582 - DNA, 30 bp, Artificial Sequence
  Synthetic oligonucleotide
accatgtcctgtatgtcctactatacgaac

SEQ ID NO: 490583 - DNA, 30 bp, Artificial Sequence
  Synthetic oligonucleotide
taaggccgaaggggaatcgggccaccgaac

SEQ ID NO: 490584 - DNA, 30 bp, Artificial Sequence
  Synthetic oligonucleotide
tgaatttgggcttggattgcggcaccgaac

SEQ ID NO: 490585 - DNA, 30 bp, Artificial Sequence
  Synthetic oligonucleotide
tttgtaaactccatccggaatatgccgaac

SEQ ID NO: 490586 - DNA, 30 bp, Artificial Sequence
  Synthetic oligonucleotide
gaatccgtgtataggtacatcctgccgaac

SEQ ID NO: 490587 - DNA, 30 bp, Artificial Sequence
  Synthetic oligonucleotide
atttccaataggggaaattcgcatccgaac

SEQ ID NO: 490588 - DNA, 30 bp, Artificial Sequence
  Synthetic oligonucleotide
acatttcttttccaattgactagagcgaac

SEQ ID NO: 490589 - DNA, 30 bp, Artificial Sequence
  Synthetic oligonucleotide
ttggagtgacgagtattttagcgagcgaac

SEQ ID NO: 490590 - DNA, 30 bp, Artificial Sequence
  Synthetic oligonucleotide
tgctagctagccagttacacgctagcgaac

SEQ ID NO: 490591 - DNA, 30 bp, Artificial Sequence
  Synthetic oligonucleotide
ggatcaggtgataggattgacgtagcgaac

SEQ ID NO: 490592 - DNA, 30 bp, Artificial Sequence
  Synthetic oligonucleotide
gcaggttcaaggactagggttaccgcgaac

SEQ ID NO: 490593 - DNA, 30 bp, Artificial Sequence
  Synthetic oligonucleotide
gatccgccaacgccgtcgcgtcccgcgaac

SEQ ID NO: 490594 - DNA, 30 bp, Artificial Sequence
  Synthetic oligonucleotide
gatcgcgtcgtctagggcccgacggcgaac

SEQ ID NO: 490595 - DNA, 30 bp, Artificial Sequence
  Synthetic oligonucleotide
cgcatttggtgaccccattttggggcgaac

SEQ ID NO: 490596 - DNA, 30 bp, Artificial Sequence
  Synthetic oligonucleotide
agccggtaatacacgttcctcgtggcgaac

SEQ ID NO: 490597 - DNA, 30 bp, Artificial Sequence
  Synthetic oligonucleotide
ttgagcggatccgctttgcggtatgcgaac

SEQ ID NO: 490598 - DNA, 30 bp, Artificial Sequence
  Synthetic oligonucleotide
ttcgccaccctacgatctcgggttgcgaac

SEQ ID NO: 490599 - DNA, 30 bp, Artificial Sequence
  Synthetic oligonucleotide
ggtgtttactgccgcttcacctgatcgaac

SEQ ID NO: 490600 - DNA, 30 bp, Artificial Sequence
  Synthetic oligonucleotide
tattttaggttgacttatggaacctcgaac

SEQ ID NO: 490601 - DNA, 30 bp, Artificial Sequence
  Synthetic oligonucleotide
gagttcagggtgacgcgtttcacctcgaac

SEQ ID NO: 490602 - DNA, 30 bp, Artificial Sequence
  Synthetic oligonucleotide
attccgatctttaccggtttcaagtcgaac

SEQ ID NO: 490603 - DNA, 30 bp, Artificial Sequence
  Synthetic oligonucleotide
ttgggcccccttccctaagagctgtcgaac

SEQ ID NO: 490604 - DNA, 30 bp, Artificial Sequence
  Synthetic oligonucleotide
ctagataacataggacaggcgcgcaggaac

SEQ ID NO: 490605 - DNA, 30 bp, Artificial Sequence
  Synthetic oligonucleotide
tcaacgccctgtaagaagttgatcaggaac

SEQ ID NO: 490606 - DNA, 30 bp, Artificial Sequence
  Synthetic oligonucleotide
tttataccacttcaagggtttaagaggaac

SEQ ID NO: 490607 - DNA, 30 bp, Artificial Sequence
  Synthetic oligonucleotide
aatgttccggtgcggctcctttggaggaac

SEQ ID NO: 490608 - DNA, 30 bp, Artificial Sequence
  Synthetic oligonucleotide
aaaagatcggggttgttacgctataggaac

SEQ ID NO: 490609 - DNA, 30 bp, Artificial Sequence
  Synthetic oligonucleotide
actctggacgattatttagcatctaggaac

SEQ ID NO: 490610 - DNA, 30 bp, Artificial Sequence
  Synthetic oligonucleotide
agtcgatctcgctgaggacacagccggaac

SEQ ID NO: 490611 - DNA, 30 bp, Artificial Sequence
  Synthetic oligonucleotide
gcatcatgtgtggaccttggagttcggaac

SEQ ID NO: 490612 - DNA, 30 bp, Artificial Sequence
  Synthetic oligonucleotide
tcctacgtcaaggcctcggtttttcggaac

SEQ ID NO: 490613 - DNA, 30 bp, Artificial Sequence
  Synthetic oligonucleotide
tcgtattctctagatatttataaagggaac

SEQ ID NO: 490614 - DNA, 30 bp, Artificial Sequence
  Synthetic oligonucleotide
ttttggggcctggccgcctacaacgggaac

SEQ ID NO: 490615 - DNA, 30 bp, Artificial Sequence
  Synthetic oligonucleotide
tgatatggagtcgtaggcgggcaggggaac

SEQ ID NO: 490616 - DNA, 30 bp, Artificial Sequence
  Synthetic oligonucleotide
gggggttaagttttacacggataggggaac

SEQ ID NO: 490617 - DNA, 30 bp, Artificial Sequence
  Synthetic oligonucleotide
ctcgagtttattataccggcctcggggaac

SEQ ID NO: 490618 - DNA, 30 bp, Artificial Sequence
  Synthetic oligonucleotide
aaatataatggagactgacacactgggaac

SEQ ID NO: 490619 - DNA, 30 bp, Artificial Sequence
  Synthetic oligonucleotide
cataagaagactttctggtgatgtgggaac

SEQ ID NO: 490620 - DNA, 30 bp, Artificial Sequence
  Synthetic oligonucleotide
ggtactatgttcaccagcccacagtggaac

SEQ ID NO: 490621 - DNA, 30 bp, Artificial Sequence
  Synthetic oligonucleotide
ttgtgggtcgtatcaccttcaatgtggaac

SEQ ID NO: 490622 - DNA, 30 bp, Artificial Sequence
  Synthetic oligonucleotide
gtgttcagtgacccatccggaacttggaac

SEQ ID NO: 490623 - DNA, 30 bp, Artificial Sequence
  Synthetic oligonucleotide
gtctgtgaactagcgtcgtgctcttggaac

SEQ ID NO: 490624 - DNA, 30 bp, Artificial Sequence
  Synthetic oligonucleotide
aaagatttgcgacattcctcgatttggaac

SEQ ID NO: 490625 - DNA, 30 bp, Artificial Sequence
  Synthetic oligonucleotide
ttgagttgagtctcgtttgggataatgaac

SEQ ID NO: 490626 - DNA, 30 bp, Artificial Sequence
  Synthetic oligonucleotide
aaattacttaggaaaaggatctggatgaac

SEQ ID NO: 490627 - DNA, 30 bp, Artificial Sequence
  Synthetic oligonucleotide
ctatcttttccaatttggatccctatgaac

SEQ ID NO: 490628 - DNA, 30 bp, Artificial Sequence
  Synthetic oligonucleotide
cctaacctccgtcggcatcagattctgaac

SEQ ID NO: 490629 - DNA, 30 bp, Artificial Sequence
  Synthetic oligonucleotide
cctttaacagtgcggagtttctttctgaac

SEQ ID NO: 490630 - DNA, 30 bp, Artificial Sequence
  Synthetic oligonucleotide
gtacaatgaacgggcgttgatgcagtgaac

SEQ ID NO: 490631 - DNA, 30 bp, Artificial Sequence
  Synthetic oligonucleotide
ccggtggagtctcccacggtggtagtgaac

SEQ ID NO: 490632 - DNA, 30 bp, Artificial Sequence
  Synthetic oligonucleotide
cgattctggcactggcgcccaatcgtgaac

SEQ ID NO: 490633 - DNA, 30 bp, Artificial Sequence
  Synthetic oligonucleotide
ataaaacgtgaagcagcacgagcattgaac

SEQ ID NO: 490634 - DNA, 30 bp, Artificial Sequence
  Synthetic oligonucleotide
agttctcatccttattccctttcattgaac

SEQ ID NO: 490635 - DNA, 30 bp, Artificial Sequence
  Synthetic oligonucleotide
gggttcttgaacacagccggtgtcttgaac

SEQ ID NO: 490636 - DNA, 30 bp, Artificial Sequence
  Synthetic oligonucleotide
gttaccttggtgcatttattgttcttgaac

SEQ ID NO: 490637 - DNA, 30 bp, Artificial Sequence
  Synthetic oligonucleotide
cacatgtgcccgcggtgtactgtgttgaac

SEQ ID NO: 490638 - DNA, 30 bp, Artificial Sequence
  Synthetic oligonucleotide
agtccagggaattttccggaagatttgaac

SEQ ID NO: 490639 - DNA, 30 bp, Artificial Sequence
  Synthetic oligonucleotide
attgggcgcagcatgagctgtcgtttgaac

SEQ ID NO: 490640 - DNA, 30 bp, Artificial Sequence
  Synthetic oligonucleotide
gaaactggttgatttgctaatggaaataac

SEQ ID NO: 490641 - DNA, 30 bp, Artificial Sequence
  Synthetic oligonucleotide
ggtgctcttaggtaatatcgattaaataac

SEQ ID NO: 490642 - DNA, 30 bp, Artificial Sequence
  Synthetic oligonucleotide
atcctacctcaaacctggtcatccaataac

SEQ ID NO: 490643 - DNA, 30 bp, Artificial Sequence
  Synthetic oligonucleotide
gctgggggggagacgcaggggggcaataac

SEQ ID NO: 490644 - DNA, 30 bp, Artificial Sequence
  Synthetic oligonucleotide
gctaactggttatcagatattctgaataac

SEQ ID NO: 490645 - DNA, 30 bp, Artificial Sequence
  Synthetic oligonucleotide
tatttcatccaaccaacaccacgacataac

SEQ ID NO: 490646 - DNA, 30 bp, Artificial Sequence
  Synthetic oligonucleotide
gttctggacgcacggtcagtacgacataac

SEQ ID NO: 490647 - DNA, 30 bp, Artificial Sequence
  Synthetic oligonucleotide
gcataccgcagacatcactgcggacataac

SEQ ID NO: 490648 - DNA, 30 bp, Artificial Sequence
  Synthetic oligonucleotide
tgttagagatcgcacagattagtccataac

SEQ ID NO: 490649 - DNA, 30 bp, Artificial Sequence
  Synthetic oligonucleotide
atttatcaacaggtttagcaaaatcataac

SEQ ID NO: 490650 - DNA, 30 bp, Artificial Sequence
  Synthetic oligonucleotide
gcttaaggatagtattagttgaatcataac

SEQ ID NO: 490651 - DNA, 30 bp, Artificial Sequence
  Synthetic oligonucleotide
gacatatattgcctttagatatatcataac

SEQ ID NO: 490652 - DNA, 30 bp, Artificial Sequence
  Synthetic oligonucleotide
gaaggactgtggactttaaactgtcataac

SEQ ID NO: 490653 - DNA, 30 bp, Artificial Sequence
  Synthetic oligonucleotide
tgtctgggacgatcccatcctgaagataac

SEQ ID NO: 490654 - DNA, 30 bp, Artificial Sequence
  Synthetic oligonucleotide
cggcgcctacacacgatgaagaacgataac

SEQ ID NO: 490655 - DNA, 30 bp, Artificial Sequence
  Synthetic oligonucleotide
tatctgaggagctactagttacacgataac

SEQ ID NO: 490656 - DNA, 30 bp, Artificial Sequence
  Synthetic oligonucleotide
agttttgggaccagcgaaagaaaggataac

SEQ ID NO: 490657 - DNA, 30 bp, Artificial Sequence
  Synthetic oligonucleotide
gacgcagttagatactcttccgatgataac

SEQ ID NO: 490658 - DNA, 30 bp, Artificial Sequence
  Synthetic oligonucleotide
tttttagggaaacacataatccctgataac

SEQ ID NO: 490659 - DNA, 30 bp, Artificial Sequence
  Synthetic oligonucleotide
agcagcaggtcagtagtatcgatgtataac

SEQ ID NO: 490660 - DNA, 30 bp, Artificial Sequence
  Synthetic oligonucleotide
ggttgaaatgtcagacggtgtccttataac

SEQ ID NO: 490661 - DNA, 30 bp, Artificial Sequence
  Synthetic oligonucleotide
attattggtggtatactaaagtcttataac

SEQ ID NO: 490662 - DNA, 30 bp, Artificial Sequence
  Synthetic oligonucleotide
ttcgcaaagcgcatagcattgagttataac

SEQ ID NO: 490663 - DNA, 30 bp, Artificial Sequence
  Synthetic oligonucleotide
taagaagtgtcattgaccaatgtttataac

SEQ ID NO: 490664 - DNA, 30 bp, Artificial Sequence
  Synthetic oligonucleotide
catggtcgtaggcactataggttaactaac

SEQ ID NO: 490665 - DNA, 30 bp, Artificial Sequence
  Synthetic oligonucleotide
agttattcatgttgggttcgaactactaac

SEQ ID NO: 490666 - DNA, 30 bp, Artificial Sequence
  Synthetic oligonucleotide
gagttaagctggttcgtaaatgctactaac

SEQ ID NO: 490667 - DNA, 30 bp, Artificial Sequence
  Synthetic oligonucleotide
tattgtatgtcgaattcaaattaacctaac

SEQ ID NO: 490668 - DNA, 30 bp, Artificial Sequence
  Synthetic oligonucleotide
gcgtagtgtgcgacatttcatgtacctaac

SEQ ID NO: 490669 - DNA, 30 bp, Artificial Sequence
  Synthetic oligonucleotide
aaaatcagacagcgtttgtaggcgcctaac

SEQ ID NO: 490670 - DNA, 30 bp, Artificial Sequence
  Synthetic oligonucleotide
actcgcgacgccctgacagttcttcctaac

SEQ ID NO: 490671 - DNA, 30 bp, Artificial Sequence
  Synthetic oligonucleotide
ttcggccaatccgtatttttataagctaac

SEQ ID NO: 490672 - DNA, 30 bp, Artificial Sequence
  Synthetic oligonucleotide
ttcagcggtaataaaatgcggcaggctaac

SEQ ID NO: 490673 - DNA, 30 bp, Artificial Sequence
  Synthetic oligonucleotide
ttactagtccgttacggacagtgtgctaac

SEQ ID NO: 490674 - DNA, 30 bp, Artificial Sequence
  Synthetic oligonucleotide
cattggagtagcaagcttgagcttgctaac

SEQ ID NO: 490675 - DNA, 30 bp, Artificial Sequence
  Synthetic oligonucleotide
tggctatacacactggtcataacatctaac

SEQ ID NO: 490676 - DNA, 30 bp, Artificial Sequence
  Synthetic oligonucleotide
cgatcttttgatgggggtgtcatctctaac

SEQ ID NO: 490677 - DNA, 30 bp, Artificial Sequence
  Synthetic oligonucleotide
aactatgctcgcgggcgtcctttctctaac

SEQ ID NO: 490678 - DNA, 30 bp, Artificial Sequence
  Synthetic oligonucleotide
ttcgacacaattttttttcgttcgtctaac

SEQ ID NO: 490679 - DNA, 30 bp, Artificial Sequence
  Synthetic oligonucleotide
gtgaatcgttagctgaccgataggtctaac

SEQ ID NO: 490680 - DNA, 30 bp, Artificial Sequence
  Synthetic oligonucleotide
cctaggcagctaccttctggttattctaac

SEQ ID NO: 490681 - DNA, 30 bp, Artificial Sequence
  Synthetic oligonucleotide
cctccaaaaagcacttgtcggggttctaac

SEQ ID NO: 490682 - DNA, 30 bp, Artificial Sequence
  Synthetic oligonucleotide
taagagatgcctaatgcggatctttctaac

SEQ ID NO: 490683 - DNA, 30 bp, Artificial Sequence
  Synthetic oligonucleotide
ggagattttagatcctccagcggaagtaac

SEQ ID NO: 490684 - DNA, 28 bp, Artificial Sequence
  Synthetic oligonucleotide
gccgacgctgccgcttttcggaagtaac

SEQ ID NO: 490685 - DNA, 30 bp, Artificial Sequence
  Synthetic oligonucleotide
gtctaaggtagatcgctcccagacagtaac

SEQ ID NO: 490686 - DNA, 30 bp, Artificial Sequence
  Synthetic oligonucleotide
ggactttgcatggcgcggtggcccagtaac

SEQ ID NO: 490687 - DNA, 30 bp, Artificial Sequence
  Synthetic oligonucleotide
gttgatctatgaacgcagaaaatcagtaac

SEQ ID NO: 490688 - DNA, 30 bp, Artificial Sequence
  Synthetic oligonucleotide
gatttgtaggattgctcctaaatcagtaac

SEQ ID NO: 490689 - DNA, 30 bp, Artificial Sequence
  Synthetic oligonucleotide
ccgcttttgaggacagaagggcagagtaac

SEQ ID NO: 490690 - DNA, 30 bp, Artificial Sequence
  Synthetic oligonucleotide
aaggacaccacttactatgtggcgagtaac

SEQ ID NO: 490691 - DNA, 30 bp, Artificial Sequence
  Synthetic oligonucleotide
ggaaagcgtttcaaagacgcgactagtaac

SEQ ID NO: 490692 - DNA, 30 bp, Artificial Sequence
  Synthetic oligonucleotide
atcaacgtcgcttgcgtgaccacacgtaac

SEQ ID NO: 490693 - DNA, 30 bp, Artificial Sequence
  Synthetic oligonucleotide
gatgtatcctccacaaagcgtatacgtaac

SEQ ID NO: 490694 - DNA, 30 bp, Artificial Sequence
  Synthetic oligonucleotide
accacctgaaccgttttctacgagcgtaac

SEQ ID NO: 490695 - DNA, 30 bp, Artificial Sequence
  Synthetic oligonucleotide
attgattaatgactcaagcacccgcgtaac

SEQ ID NO: 490696 - DNA, 30 bp, Artificial Sequence
  Synthetic oligonucleotide
gcaacgtttacctggcatcgacgtcgtaac

SEQ ID NO: 490697 - DNA, 30 bp, Artificial Sequence
  Synthetic oligonucleotide
gagctacttccgttgcgagcttgtcgtaac

SEQ ID NO: 490698 - DNA, 30 bp, Artificial Sequence
  Synthetic oligonucleotide
cacgtaattgcgggggcctttgtcggtaac

SEQ ID NO: 490699 - DNA, 30 bp, Artificial Sequence
  Synthetic oligonucleotide
gctgctgacttagatgtaatgtcatgtaac

SEQ ID NO: 490700 - DNA, 30 bp, Artificial Sequence
  Synthetic oligonucleotide
aaccgattgtattcttgtctgtcatgtaac

SEQ ID NO: 490701 - DNA, 30 bp, Artificial Sequence
  Synthetic oligonucleotide
gtcatttcactctagcggtttaaaattaac

SEQ ID NO: 490702 - DNA, 30 bp, Artificial Sequence
  Synthetic oligonucleotide
tctgtgatttctcgctgagaagaaattaac

SEQ ID NO: 490703 - DNA, 30 bp, Artificial Sequence
  Synthetic oligonucleotide
aatcggttttacggatttgagcgaattaac

SEQ ID NO: 490704 - DNA, 30 bp, Artificial Sequence
  Synthetic oligonucleotide
actgcagccctctgtggtatgcgcattaac

SEQ ID NO: 490705 - DNA, 30 bp, Artificial Sequence
  Synthetic oligonucleotide
aatgtatacgcgcggacgcggatcattaac

SEQ ID NO: 490706 - DNA, 30 bp, Artificial Sequence
  Synthetic oligonucleotide
aatagtacccatcgcggtgagttgattaac

SEQ ID NO: 490707 - DNA, 30 bp, Artificial Sequence
  Synthetic oligonucleotide
tattcagacggtgctggcgcagctattaac

SEQ ID NO: 490708 - DNA, 30 bp, Artificial Sequence
  Synthetic oligonucleotide
aatccattctgatgaccatcgtctattaac

SEQ ID NO: 490709 - DNA, 30 bp, Artificial Sequence
  Synthetic oligonucleotide
atagctggtacgtcgaggtatagtattaac

SEQ ID NO: 490710 - DNA, 30 bp, Artificial Sequence
  Synthetic oligonucleotide
ttagcacagctctacggcggatgtattaac

SEQ ID NO: 490711 - DNA, 29 bp, Artificial Sequence
  Synthetic oligonucleotide
tgggtcgtaaagtaatttgggttattaac

SEQ ID NO: 490712 - DNA, 30 bp, Artificial Sequence
  Synthetic oligonucleotide
cccctgacgggtcgtgctaattttattaac

SEQ ID NO: 490713 - DNA, 30 bp, Artificial Sequence
  Synthetic oligonucleotide
ctattagtcttcctaaattgaccacttaac

SEQ ID NO: 490714 - DNA, 30 bp, Artificial Sequence
  Synthetic oligonucleotide
tgctttcaggtatgtagttcacgacttaac

SEQ ID NO: 490715 - DNA, 30 bp, Artificial Sequence
  Synthetic oligonucleotide
aagatcgcgactttagcactatagcttaac

SEQ ID NO: 490716 - DNA, 30 bp, Artificial Sequence
  Synthetic oligonucleotide
gcaattagatcacgtgtgtagacgcttaac

SEQ ID NO: 490717 - DNA, 30 bp, Artificial Sequence
  Synthetic oligonucleotide
ctattcacaatcctgccggaaaatcttaac

SEQ ID NO: 490718 - DNA, 30 bp, Artificial Sequence
  Synthetic oligonucleotide
aataacgttcgtccctgtagaaacgttaac

SEQ ID NO: 490719 - DNA, 30 bp, Artificial Sequence
  Synthetic oligonucleotide
gccttaaggccaagttggcgaaacgttaac

SEQ ID NO: 490720 - DNA, 30 bp, Artificial Sequence
  Synthetic oligonucleotide
ttttcatagacgagacaataggacgttaac

SEQ ID NO: 490721 - DNA, 30 bp, Artificial Sequence
  Synthetic oligonucleotide
tctaccagctattcttgagggtccgttaac

SEQ ID NO: 490722 - DNA, 30 bp, Artificial Sequence
  Synthetic oligonucleotide
caagagctgtatacggccaaagtcgttaac

SEQ ID NO: 490723 - DNA, 30 bp, Artificial Sequence
  Synthetic oligonucleotide
aagatggctacccatggatggcttgttaac

SEQ ID NO: 490724 - DNA, 30 bp, Artificial Sequence
  Synthetic oligonucleotide
agtgagcttttaacccccatgtttgttaac

SEQ ID NO: 490725 - DNA, 30 bp, Artificial Sequence
  Synthetic oligonucleotide
gacttgcattgcttagccgtagaatttaac

SEQ ID NO: 490726 - DNA, 30 bp, Artificial Sequence
  Synthetic oligonucleotide
acgcaggcatgcttaaaccaccgatttaac

SEQ ID NO: 490727 - DNA, 30 bp, Artificial Sequence
  Synthetic oligonucleotide
cacgtttatataacgtgcgcacactttaac

SEQ ID NO: 490728 - DNA, 30 bp, Artificial Sequence
  Synthetic oligonucleotide
ttccgtacaaatgcccccgtggagtttaac

SEQ ID NO: 490729 - DNA, 30 bp, Artificial Sequence
  Synthetic oligonucleotide
gctaaacacttagcgcactgttagtttaac

SEQ ID NO: 490730 - DNA, 30 bp, Artificial Sequence
  Synthetic oligonucleotide
tgatatgaaagaccattgcagcggtttaac

SEQ ID NO: 490731 - DNA, 30 bp, Artificial Sequence
  Synthetic oligonucleotide
tgccttactattctttcactcttgtttaac

SEQ ID NO: 490732 - DNA, 30 bp, Artificial Sequence
  Synthetic oligonucleotide
ttcagcacgccatccaaacggtattttaac

SEQ ID NO: 490733 - DNA, 30 bp, Artificial Sequence
  Synthetic oligonucleotide
aattcactcctagacagataccaaaaacac

SEQ ID NO: 490734 - DNA, 30 bp, Artificial Sequence
  Synthetic oligonucleotide
caagtgctccaaattgccgacaacaaacac

SEQ ID NO: 490735 - DNA, 30 bp, Artificial Sequence
  Synthetic oligonucleotide
tgtcgcaatacagcgttcaagatcaaacac

SEQ ID NO: 490736 - DNA, 30 bp, Artificial Sequence
  Synthetic oligonucleotide
gacgcgtacgtttgcaccatagtcaaacac

SEQ ID NO: 490737 - DNA, 30 bp, Artificial Sequence
  Synthetic oligonucleotide
gattcggtgatatctagtatccggaaacac

SEQ ID NO: 490738 - DNA, 30 bp, Artificial Sequence
  Synthetic oligonucleotide
gtttggttcttcaatctagttaataaacac

SEQ ID NO: 490739 - DNA, 30 bp, Artificial Sequence
  Synthetic oligonucleotide
agaattcgcaggattgggtaatagcaacac

SEQ ID NO: 490740 - DNA, 30 bp, Artificial Sequence
  Synthetic oligonucleotide
cgcagcttgaacactagtagagggcaacac

SEQ ID NO: 490741 - DNA, 30 bp, Artificial Sequence
  Synthetic oligonucleotide
accagttcacagtcttcggtcctgcaacac

SEQ ID NO: 490742 - DNA, 39 bp, Artificial Sequence
  Synthetic oligonucleotide
taatacggttatccaagctctgttgtttttgtgcaacac

SEQ ID NO: 490743 - DNA, 30 bp, Artificial Sequence
  Synthetic oligonucleotide
tgacttcggtcatgtctatcggatgaacac

SEQ ID NO: 490744 - DNA, 30 bp, Artificial Sequence
  Synthetic oligonucleotide
gatctacagatagggcaaccatctgaacac

SEQ ID NO: 490745 - DNA, 30 bp, Artificial Sequence
  Synthetic oligonucleotide
aatgtaattattaaaacagcggcgtaacac

SEQ ID NO: 490746 - DNA, 30 bp, Artificial Sequence
  Synthetic oligonucleotide
ctgaggtcttatgaggtgtaccggtaacac

SEQ ID NO: 490747 - DNA, 30 bp, Artificial Sequence
  Synthetic oligonucleotide
gtttcactaaccaattccgcttggtaacac

SEQ ID NO: 490748 - DNA, 30 bp, Artificial Sequence
  Synthetic oligonucleotide
gttacattacgacagtatgggctgtaacac

SEQ ID NO: 490749 - DNA, 27 bp, Artificial Sequence
  Synthetic oligonucleotide
gacgggtagtttgcgagagcttaacac

SEQ ID NO: 490750 - DNA, 30 bp, Artificial Sequence
  Synthetic oligonucleotide
taagtacgccggcagtaacgagacacacac

SEQ ID NO: 490751 - DNA, 30 bp, Artificial Sequence
  Synthetic oligonucleotide
atcatcacgcgcacatgttggcccacacac

SEQ ID NO: 490752 - DNA, 30 bp, Artificial Sequence
  Synthetic oligonucleotide
tgttctccgtgctctttagggaagacacac

SEQ ID NO: 490753 - DNA, 30 bp, Artificial Sequence
  Synthetic oligonucleotide
ttaagtgccgtaacacggcgtactacacac

SEQ ID NO: 490754 - DNA, 30 bp, Artificial Sequence
  Synthetic oligonucleotide
aattgttgtagaagaagctttggtacacac

SEQ ID NO: 490755 - DNA, 30 bp, Artificial Sequence
  Synthetic oligonucleotide
gtgcaaataattaggccgcaatttacacac

SEQ ID NO: 490756 - DNA, 30 bp, Artificial Sequence
  Synthetic oligonucleotide
ggtgtctggtttgcaagggctacggcacac

SEQ ID NO: 490757 - DNA, 30 bp, Artificial Sequence
  Synthetic oligonucleotide
gtatttacatgtaatctaacaccggcacac

SEQ ID NO: 490758 - DNA, 30 bp, Artificial Sequence
  Synthetic oligonucleotide
gcgactaccagcaggtaccagtcggcacac

SEQ ID NO: 490759 - DNA, 30 bp, Artificial Sequence
  Synthetic oligonucleotide
gaatcaatcatccccatgatgggggcacac

SEQ ID NO: 490760 - DNA, 30 bp, Artificial Sequence
  Synthetic oligonucleotide
atggacggaccgttcgactaattggcacac

SEQ ID NO: 490761 - DNA, 30 bp, Artificial Sequence
  Synthetic oligonucleotide
aaggtgggagcatttgacgcagatgcacac

SEQ ID NO: 490762 - DNA, 30 bp, Artificial Sequence
  Synthetic oligonucleotide
tacttctagttggttattggtgatgcacac

SEQ ID NO: 490763 - DNA, 30 bp, Artificial Sequence
  Synthetic oligonucleotide
gcctttttcaaaaatacagtctatgcacac

SEQ ID NO: 490764 - DNA, 30 bp, Artificial Sequence
  Synthetic oligonucleotide
gatcagtatctcctctcataggtatcacac

SEQ ID NO: 490765 - DNA, 30 bp, Artificial Sequence
  Synthetic oligonucleotide
tcgatctcttcgcgtaccgcgttatcacac

SEQ ID NO: 490766 - DNA, 30 bp, Artificial Sequence
  Synthetic oligonucleotide
atctttagcgaaaatatatcaggctcacac

SEQ ID NO: 490767 - DNA, 30 bp, Artificial Sequence
  Synthetic oligonucleotide
ggttcgatgcaaatgtcgttagtctcacac

SEQ ID NO: 490768 - DNA, 30 bp, Artificial Sequence
  Synthetic oligonucleotide
tgtctctataacgcttatacctagtcacac

SEQ ID NO: 490769 - DNA, 30 bp, Artificial Sequence
  Synthetic oligonucleotide
aggaaatttctttcagttctcgcttcacac

SEQ ID NO: 490770 - DNA, 30 bp, Artificial Sequence
  Synthetic oligonucleotide
atttgaataactcaattcgctcgtagacac

SEQ ID NO: 490771 - DNA, 30 bp, Artificial Sequence
  Synthetic oligonucleotide
aattgtgagcaatgatcccgacaacgacac

SEQ ID NO: 490772 - DNA, 30 bp, Artificial Sequence
  Synthetic oligonucleotide
agttcgtggccagtggtttacgaacgacac

SEQ ID NO: 490773 - DNA, 30 bp, Artificial Sequence
  Synthetic oligonucleotide
gttttggccgtgtcactggatcagcgacac

SEQ ID NO: 490774 - DNA, 30 bp, Artificial Sequence
  Synthetic oligonucleotide
tatgcagtgacgagactaccgtagcgacac

SEQ ID NO: 490775 - DNA, 30 bp, Artificial Sequence
  Synthetic oligonucleotide
ggccgcatgtcggcggccgtcataggacac

SEQ ID NO: 490776 - DNA, 30 bp, Artificial Sequence
  Synthetic oligonucleotide
ggacccagctcgcattgagagcccggacac

SEQ ID NO: 490777 - DNA, 30 bp, Artificial Sequence
  Synthetic oligonucleotide
gttccgccgccaactcgttatttcggacac

SEQ ID NO: 490778 - DNA, 30 bp, Artificial Sequence
  Synthetic oligonucleotide
cgttgttcgtagtttttttgcctgggacac

SEQ ID NO: 490779 - DNA, 30 bp, Artificial Sequence
  Synthetic oligonucleotide
agcctcacgttacgttgctgtgatggacac

SEQ ID NO: 490780 - DNA, 30 bp, Artificial Sequence
  Synthetic oligonucleotide
tgaccatgcccggaggcaaggcctggacac

SEQ ID NO: 490781 - DNA, 30 bp, Artificial Sequence
  Synthetic oligonucleotide
ggttcatagcaattacccctaattggacac

SEQ ID NO: 490782 - DNA, 30 bp, Artificial Sequence
  Synthetic oligonucleotide
tctgtacccggctactacatatttggacac

SEQ ID NO: 490783 - DNA, 30 bp, Artificial Sequence
  Synthetic oligonucleotide
acgcagtccaacagttactttaaatgacac

SEQ ID NO: 490784 - DNA, 30 bp, Artificial Sequence
  Synthetic oligonucleotide
tgtattagaacacgcatgcaaagctgacac

SEQ ID NO: 490785 - DNA, 30 bp, Artificial Sequence
  Synthetic oligonucleotide
tatgttttacaaatccctacgctctgacac

SEQ ID NO: 490786 - DNA, 30 bp, Artificial Sequence
  Synthetic oligonucleotide
aaactaatgcagactcttacattctgacac

SEQ ID NO: 490787 - DNA, 30 bp, Artificial Sequence
  Synthetic oligonucleotide
gataagtgcagccgggtagcccgttgacac

SEQ ID NO: 490788 - DNA, 30 bp, Artificial Sequence
  Synthetic oligonucleotide
caatgatttaaggcgcggtatatttgacac

SEQ ID NO: 490789 - DNA, 30 bp, Artificial Sequence
  Synthetic oligonucleotide
cccgaaacattcatgtcacagttttgacac

SEQ ID NO: 490790 - DNA, 30 bp, Artificial Sequence
  Synthetic oligonucleotide
ccctccaaaccgcctgtgatacaaatacac

SEQ ID NO: 490791 - DNA, 30 bp, Artificial Sequence
  Synthetic oligonucleotide
aaaagtgtcgcgttaagcccataaatacac

SEQ ID NO: 490792 - DNA, 30 bp, Artificial Sequence
  Synthetic oligonucleotide
cgtccgtagaacggaccgcagctgatacac

SEQ ID NO: 490793 - DNA, 30 bp, Artificial Sequence
  Synthetic oligonucleotide
cagtccataactctgtacctatttatacac

SEQ ID NO: 490794 - DNA, 30 bp, Artificial Sequence
  Synthetic oligonucleotide
gtaaagccgttgatgtatataagactacac

SEQ ID NO: 490795 - DNA, 30 bp, Artificial Sequence
  Synthetic oligonucleotide
atctatcttcgttacttgcgtgtactacac

SEQ ID NO: 490796 - DNA, 30 bp, Artificial Sequence
  Synthetic oligonucleotide
cagtgaaaatgtgttttaggaaacctacac

SEQ ID NO: 490797 - DNA, 30 bp, Artificial Sequence
  Synthetic oligonucleotide
ttaaacgccgcactggtcacacccctacac

SEQ ID NO: 490798 - DNA, 30 bp, Artificial Sequence
  Synthetic oligonucleotide
aatctaggcagctatgtcctcatgctacac

SEQ ID NO: 490799 - DNA, 30 bp, Artificial Sequence
  Synthetic oligonucleotide
aactggggataactgagtctaacagtacac

SEQ ID NO: 490800 - DNA, 30 bp, Artificial Sequence
  Synthetic oligonucleotide
gacccgattaacttccgcgtcagagtacac

SEQ ID NO: 490801 - DNA, 30 bp, Artificial Sequence
  Synthetic oligonucleotide
ttgccggtcccagaattggctagcgtacac

SEQ ID NO: 490802 - DNA, 30 bp, Artificial Sequence
  Synthetic oligonucleotide
actaaacttatcgctacttggatcgtacac

SEQ ID NO: 490803 - DNA, 30 bp, Artificial Sequence
  Synthetic oligonucleotide
acgcagcattagagcaggctattcgtacac

SEQ ID NO: 490804 - DNA, 30 bp, Artificial Sequence
  Synthetic oligonucleotide
ttaattttcgctataatcctttgggtacac

SEQ ID NO: 490805 - DNA, 30 bp, Artificial Sequence
  Synthetic oligonucleotide
tctcgtatccggggtcaccattggttacac

SEQ ID NO: 490806 - DNA, 30 bp, Artificial Sequence
  Synthetic oligonucleotide
ctgagttgactaaaagtagagcatttacac

SEQ ID NO: 490807 - DNA, 30 bp, Artificial Sequence
  Synthetic oligonucleotide
agctccgagtaggtacaccccggtttacac

SEQ ID NO: 490808 - DNA, 30 bp, Artificial Sequence
  Synthetic oligonucleotide
tcgaaacagcattctgtccgcgtcaaccac

SEQ ID NO: 490809 - DNA, 30 bp, Artificial Sequence
  Synthetic oligonucleotide
aagcacctgcacacctgaagcgagaaccac

SEQ ID NO: 490810 - DNA, 30 bp, Artificial Sequence
  Synthetic oligonucleotide
agctcgcgtgcttgtggcccacggaaccac

SEQ ID NO: 490811 - DNA, 30 bp, Artificial Sequence
  Synthetic oligonucleotide
aagttccatatcaacgatctgggtaaccac

SEQ ID NO: 490812 - DNA, 30 bp, Artificial Sequence
  Synthetic oligonucleotide
attatagtaagcggggagttaattaaccac

SEQ ID NO: 490813 - DNA, 30 bp, Artificial Sequence
  Synthetic oligonucleotide
tgtccttgattattttactgttttaaccac

SEQ ID NO: 490814 - DNA, 30 bp, Artificial Sequence
  Synthetic oligonucleotide
gcaaaggtcaggtacaattttgtacaccac

SEQ ID NO: 490815 - DNA, 30 bp, Artificial Sequence
  Synthetic oligonucleotide
cagagatatcagcagagtgtagtccaccac

SEQ ID NO: 490816 - DNA, 30 bp, Artificial Sequence
  Synthetic oligonucleotide
gctttctctgaaatcatataagcgcaccac

SEQ ID NO: 490817 - DNA, 30 bp, Artificial Sequence
  Synthetic oligonucleotide
gtttgctaagtgacggaccactggcaccac

SEQ ID NO: 490818 - DNA, 30 bp, Artificial Sequence
  Synthetic oligonucleotide
taaagatcttaatatggacgctggcaccac

SEQ ID NO: 490819 - DNA, 30 bp, Artificial Sequence
  Synthetic oligonucleotide
gattgtattccacattggagatcagaccac

SEQ ID NO: 490820 - DNA, 30 bp, Artificial Sequence
  Synthetic oligonucleotide
aacattgtgtttcgagaagcaggagaccac

SEQ ID NO: 490821 - DNA, 30 bp, Artificial Sequence
  Synthetic oligonucleotide
gcctaatgtgctcagactcgccacgaccac

SEQ ID NO: 490822 - DNA, 30 bp, Artificial Sequence
  Synthetic oligonucleotide
ggcgcaggctttcggtagtctaccgaccac

SEQ ID NO: 490823 - DNA, 30 bp, Artificial Sequence
  Synthetic oligonucleotide
gagtcctccagattcacactcatggaccac

SEQ ID NO: 490824 - DNA, 30 bp, Artificial Sequence
  Synthetic oligonucleotide
ttaagggattgctagtcttaaaatgaccac

SEQ ID NO: 490825 - DNA, 30 bp, Artificial Sequence
  Synthetic oligonucleotide
tccagttgtgctgctattctagctgaccac

SEQ ID NO: 490826 - DNA, 30 bp, Artificial Sequence
  Synthetic oligonucleotide
tcaaatgttccatatcgtatgggtgaccac

SEQ ID NO: 490827 - DNA, 30 bp, Artificial Sequence
  Synthetic oligonucleotide
cttctctcgtggatcggcaccgttgaccac

SEQ ID NO: 490828 - DNA, 30 bp, Artificial Sequence
  Synthetic oligonucleotide
tttatgtgggtctatgtcgactttgaccac

SEQ ID NO: 490829 - DNA, 30 bp, Artificial Sequence
  Synthetic oligonucleotide
agagtcagtggggtgtggtcgaagtaccac

SEQ ID NO: 490830 - DNA, 30 bp, Artificial Sequence
  Synthetic oligonucleotide
actgtaagctgatagtagcctaagtaccac

SEQ ID NO: 490831 - DNA, 30 bp, Artificial Sequence
  Synthetic oligonucleotide
cgcaggctttgcccagtcccaacaacccac

SEQ ID NO: 490832 - DNA, 30 bp, Artificial Sequence
  Synthetic oligonucleotide
aaaccacttgtcatggcaaaaaacacccac

SEQ ID NO: 490833 - DNA, 30 bp, Artificial Sequence
  Synthetic oligonucleotide
cccttccttgttgcgtttgtcgacacccac

SEQ ID NO: 490834 - DNA, 30 bp, Artificial Sequence
  Synthetic oligonucleotide
tgtgagagggcttcttggaagcggacccac

SEQ ID NO: 490835 - DNA, 30 bp, Artificial Sequence
  Synthetic oligonucleotide
tcgtgctctggccgcctaccactgacccac

SEQ ID NO: 490836 - DNA, 28 bp, Artificial Sequence
  Synthetic oligonucleotide
cctattaacgtggtcggggttgacccac

SEQ ID NO: 490837 - DNA, 30 bp, Artificial Sequence
  Synthetic oligonucleotide
gggtacggctatctgcacaggtaaccccac

SEQ ID NO: 490838 - DNA, 30 bp, Artificial Sequence
  Synthetic oligonucleotide
actccagcatgtatgaaacaagctccccac

SEQ ID NO: 490839 - DNA, 30 bp, Artificial Sequence
  Synthetic oligonucleotide
gctgtgaagactagacactggctagcccac

SEQ ID NO: 490840 - DNA, 30 bp, Artificial Sequence
  Synthetic oligonucleotide
ctaacttgtgggcccctagttcatgcccac

SEQ ID NO: 490841 - DNA, 30 bp, Artificial Sequence
  Synthetic oligonucleotide
ttcataaaagtgagacaccgtgaatcccac

SEQ ID NO: 490842 - DNA, 30 bp, Artificial Sequence
  Synthetic oligonucleotide
tgatacatgtacgcggcttatttctcccac

SEQ ID NO: 490843 - DNA, 30 bp, Artificial Sequence
  Synthetic oligonucleotide
agtacacgcaaaggtgtatcgtagtcccac

SEQ ID NO: 490844 - DNA, 30 bp, Artificial Sequence
  Synthetic oligonucleotide
agtggatcgtggtaaaaaccacgttcccac

SEQ ID NO: 490845 - DNA, 30 bp, Artificial Sequence
  Synthetic oligonucleotide
acacacatgtattattgttttttttcccac

SEQ ID NO: 490846 - DNA, 30 bp, Artificial Sequence
  Synthetic oligonucleotide
actgcccttgtctttgaaggctaaagccac

SEQ ID NO: 490847 - DNA, 30 bp, Artificial Sequence
  Synthetic oligonucleotide
agccaggagaagggtgcttcaataagccac

SEQ ID NO: 490848 - DNA, 30 bp, Artificial Sequence
  Synthetic oligonucleotide
tcgggagaggcagcaccgtagggcagccac

SEQ ID NO: 490849 - DNA, 30 bp, Artificial Sequence
  Synthetic oligonucleotide
attagctagtccacatctgcttcgagccac

SEQ ID NO: 490850 - DNA, 30 bp, Artificial Sequence
  Synthetic oligonucleotide
cctgggagatgtcgtcggacacggagccac

SEQ ID NO: 490851 - DNA, 30 bp, Artificial Sequence
  Synthetic oligonucleotide
acctttgacggacgcacaattgtgagccac

SEQ ID NO: 490852 - DNA, 30 bp, Artificial Sequence
  Synthetic oligonucleotide
gccacttcagattcctgtccagttagccac

SEQ ID NO: 490853 - DNA, 30 bp, Artificial Sequence
  Synthetic oligonucleotide
tagcgcatagaagctgaagccgtacgccac

SEQ ID NO: 490854 - DNA, 30 bp, Artificial Sequence
  Synthetic oligonucleotide
caaaagtttatgagtttaggtggccgccac

SEQ ID NO: 490855 - DNA, 30 bp, Artificial Sequence
  Synthetic oligonucleotide
tactacggtcttggagaagcacttcgccac

SEQ ID NO: 490856 - DNA, 30 bp, Artificial Sequence
  Synthetic oligonucleotide
gcggcacggcaaatacacgacgaaggccac

SEQ ID NO: 490857 - DNA, 30 bp, Artificial Sequence
  Synthetic oligonucleotide
agggggtttaaaaacgggagttgcggccac

SEQ ID NO: 490858 - DNA, 30 bp, Artificial Sequence
  Synthetic oligonucleotide
cttggcagtaaaccagaacagttgggccac

SEQ ID NO: 490859 - DNA, 30 bp, Artificial Sequence
  Synthetic oligonucleotide
cttgcccccgcacgactctaggttggccac

SEQ ID NO: 490860 - DNA, 30 bp, Artificial Sequence
  Synthetic oligonucleotide
agtatacgagtgcctcttccgagatgccac

SEQ ID NO: 490861 - DNA, 30 bp, Artificial Sequence
  Synthetic oligonucleotide
gcactcacataattccgacgttgatgccac

SEQ ID NO: 490862 - DNA, 30 bp, Artificial Sequence
  Synthetic oligonucleotide
atgtttgctcaggcaatcctaacctgccac

SEQ ID NO: 490863 - DNA, 30 bp, Artificial Sequence
  Synthetic oligonucleotide
ttgattaaaggcaggcctctgccctgccac

SEQ ID NO: 490864 - DNA, 30 bp, Artificial Sequence
  Synthetic oligonucleotide
ccgctttctttatagtggacagcctgccac

SEQ ID NO: 490865 - DNA, 30 bp, Artificial Sequence
  Synthetic oligonucleotide
gtccgcattatggccggtgcagtctgccac

SEQ ID NO: 490866 - DNA, 30 bp, Artificial Sequence
  Synthetic oligonucleotide
cctttagcatatgcaggcggggtctgccac

SEQ ID NO: 490867 - DNA, 30 bp, Artificial Sequence
  Synthetic oligonucleotide
gggtacgggccaagggcgtcattctgccac

SEQ ID NO: 490868 - DNA, 30 bp, Artificial Sequence
  Synthetic oligonucleotide
tgcacctacaaactaagcgttgagtgccac

SEQ ID NO: 490869 - DNA, 30 bp, Artificial Sequence
  Synthetic oligonucleotide
tccggcgcttccattcctatggtgtgccac

SEQ ID NO: 490870 - DNA, 30 bp, Artificial Sequence
  Synthetic oligonucleotide
actccctagattcgagtgctgtggatccac

SEQ ID NO: 490871 - DNA, 30 bp, Artificial Sequence
  Synthetic oligonucleotide
gcaacctagtagccgcgtatttgtatccac

SEQ ID NO: 490872 - DNA, 30 bp, Artificial Sequence
  Synthetic oligonucleotide
cacccctacactagggtacgtaagctccac

SEQ ID NO: 490873 - DNA, 30 bp, Artificial Sequence
  Synthetic oligonucleotide
ccactccgccccgtgtgatggcttctccac

SEQ ID NO: 490874 - DNA, 30 bp, Artificial Sequence
  Synthetic oligonucleotide
gagagggtctctggccgtaacgcagtccac

SEQ ID NO: 490875 - DNA, 30 bp, Artificial Sequence
  Synthetic oligonucleotide
agtggatagaccttatctgcaacggtccac

SEQ ID NO: 490876 - DNA, 30 bp, Artificial Sequence
  Synthetic oligonucleotide
cttccgtgtccttactgaccccttgtccac

SEQ ID NO: 490877 - DNA, 30 bp, Artificial Sequence
  Synthetic oligonucleotide
aagcctaggattcctccacgcccattccac

SEQ ID NO: 490878 - DNA, 30 bp, Artificial Sequence
  Synthetic oligonucleotide
tgtatatgtaaccactcccgcagattccac

SEQ ID NO: 490879 - DNA, 30 bp, Artificial Sequence
  Synthetic oligonucleotide
tcgttgagaaacacccggactagattccac

SEQ ID NO: 490880 - DNA, 30 bp, Artificial Sequence
  Synthetic oligonucleotide
ttatgatgtttgagtcgccaatagttccac

SEQ ID NO: 490881 - DNA, 30 bp, Artificial Sequence
  Synthetic oligonucleotide
aatcacttctcgtctggtgtattgttccac

SEQ ID NO: 490882 - DNA, 30 bp, Artificial Sequence
  Synthetic oligonucleotide
ttagcagcattgtataagcgaagtttccac

SEQ ID NO: 490883 - DNA, 30 bp, Artificial Sequence
  Synthetic oligonucleotide
tctagtattccgtgattggtagttttccac

SEQ ID NO: 490884 - DNA, 30 bp, Artificial Sequence
  Synthetic oligonucleotide
gtggtcgcattgtgcaacaactttaagcac

SEQ ID NO: 490885 - DNA, 30 bp, Artificial Sequence
  Synthetic oligonucleotide
tgaccggtgggacaatcaaggcagcagcac

SEQ ID NO: 490886 - DNA, 30 bp, Artificial Sequence
  Synthetic oligonucleotide
ctcctgcacgtcttgttacgacgtcagcac

SEQ ID NO: 490887 - DNA, 30 bp, Artificial Sequence
  Synthetic oligonucleotide
agcttagaccctatggcggcccgtcagcac

SEQ ID NO: 490888 - DNA, 30 bp, Artificial Sequence
  Synthetic oligonucleotide
tacattcagccatcgcagttaatagagcac

SEQ ID NO: 490889 - DNA, 30 bp, Artificial Sequence
  Synthetic oligonucleotide
gacttagtctattgtaaggatgtcgagcac

SEQ ID NO: 490890 - DNA, 30 bp, Artificial Sequence
  Synthetic oligonucleotide
ggtttaattctttactgacgactggagcac

SEQ ID NO: 490891 - DNA, 30 bp, Artificial Sequence
  Synthetic oligonucleotide
agctgttcggtacctcctgaattggagcac

SEQ ID NO: 490892 - DNA, 30 bp, Artificial Sequence
  Synthetic oligonucleotide
ttctcaggcgcggccatagggcgtgagcac

SEQ ID NO: 490893 - DNA, 30 bp, Artificial Sequence
  Synthetic oligonucleotide
gaccctacgattcaacgatgtgttgagcac

SEQ ID NO: 490894 - DNA, 30 bp, Artificial Sequence
  Synthetic oligonucleotide
gctgatcgccaagcagcggtcgtatagcac

SEQ ID NO: 490895 - DNA, 30 bp, Artificial Sequence
  Synthetic oligonucleotide
ggttctgttgtttccagtacagcgtagcac

SEQ ID NO: 490896 - DNA, 30 bp, Artificial Sequence
  Synthetic oligonucleotide
gctttaacgcaccaccatctggggtagcac

SEQ ID NO: 490897 - DNA, 30 bp, Artificial Sequence
  Synthetic oligonucleotide
cgcggtttgttgttggctgccggttagcac

SEQ ID NO: 490898 - DNA, 30 bp, Artificial Sequence
  Synthetic oligonucleotide
attattggtattaggcagttcaaaacgcac

SEQ ID NO: 490899 - DNA, 30 bp, Artificial Sequence
  Synthetic oligonucleotide
tatgtgagcgtttaagccctttagacgcac

SEQ ID NO: 490900 - DNA, 30 bp, Artificial Sequence
  Synthetic oligonucleotide
acaacttttacctacgctagccggacgcac

SEQ ID NO: 490901 - DNA, 30 bp, Artificial Sequence
  Synthetic oligonucleotide
atggtaggatctggcggtcacgggacgcac

SEQ ID NO: 490902 - DNA, 30 bp, Artificial Sequence
  Synthetic oligonucleotide
gtgttcggagcgacaccagcaatgacgcac

SEQ ID NO: 490903 - DNA, 30 bp, Artificial Sequence
  Synthetic oligonucleotide
ggaaatctggatactcgatggtatacgcac

SEQ ID NO: 490904 - DNA, 30 bp, Artificial Sequence
  Synthetic oligonucleotide
tttattctacacaacaaccacagtacgcac

SEQ ID NO: 490905 - DNA, 30 bp, Artificial Sequence
  Synthetic oligonucleotide
taatggggtcccggatacgtggaaccgcac

SEQ ID NO: 490906 - DNA, 30 bp, Artificial Sequence
  Synthetic oligonucleotide
ctgcgaagtcgcagcggatcgcgaccgcac

SEQ ID NO: 490907 - DNA, 30 bp, Artificial Sequence
  Synthetic oligonucleotide
tcatgactccataattgtgcggcgccgcac

SEQ ID NO: 490908 - DNA, 30 bp, Artificial Sequence
  Synthetic oligonucleotide
gttgaagaaaattaagaaaacaggccgcac

SEQ ID NO: 490909 - DNA, 30 bp, Artificial Sequence
  Synthetic oligonucleotide
gatattctggtgctcgacaatctgccgcac

SEQ ID NO: 490910 - DNA, 29 bp, Artificial Sequence
  Synthetic oligonucleotide
agttaccagcgtctagagacacagcgcac

SEQ ID NO: 490911 - DNA, 30 bp, Artificial Sequence
  Synthetic oligonucleotide
aaggaagggcgttcagacgggagagcgcac

SEQ ID NO: 490912 - DNA, 30 bp, Artificial Sequence
  Synthetic oligonucleotide
tttcttactgcctaacagaaaaaggcgcac

SEQ ID NO: 490913 - DNA, 30 bp, Artificial Sequence
  Synthetic oligonucleotide
cccgatgaggccatggacccatcggcgcac

SEQ ID NO: 490914 - DNA, 30 bp, Artificial Sequence
  Synthetic oligonucleotide
tttgttctacaggtgtcgccccgggcgcac

SEQ ID NO: 490915 - DNA, 30 bp, Artificial Sequence
  Synthetic oligonucleotide
gtggccagtgcgacactcaacttggcgcac

SEQ ID NO: 490916 - DNA, 30 bp, Artificial Sequence
  Synthetic oligonucleotide
ctgcagtaaccgtaacgccccgctgcgcac

SEQ ID NO: 490917 - DNA, 30 bp, Artificial Sequence
  Synthetic oligonucleotide
tacgccgatgcttttagtatgtcatcgcac

SEQ ID NO: 490918 - DNA, 30 bp, Artificial Sequence
  Synthetic oligonucleotide
gtttagatagaatagtctaggggatcgcac

SEQ ID NO: 490919 - DNA, 30 bp, Artificial Sequence
  Synthetic oligonucleotide
tttactagcgtagattgccacctatcgcac

SEQ ID NO: 490920 - DNA, 30 bp, Artificial Sequence
  Synthetic oligonucleotide
ttaagatacagagtatcaacaatgtcgcac

SEQ ID NO: 490921 - DNA, 30 bp, Artificial Sequence
  Synthetic oligonucleotide
atgggtgccatgtacggttatcgcaggcac

SEQ ID NO: 490922 - DNA, 30 bp, Artificial Sequence
  Synthetic oligonucleotide
acaggtggtttacgaccagcggagaggcac

SEQ ID NO: 490923 - DNA, 30 bp, Artificial Sequence
  Synthetic oligonucleotide
gatcccatcagcttacgcatgtggaggcac

SEQ ID NO: 490924 - DNA, 30 bp, Artificial Sequence
  Synthetic oligonucleotide
actaaccactcgtctaacgcaactaggcac

SEQ ID NO: 490925 - DNA, 30 bp, Artificial Sequence
  Synthetic oligonucleotide
agtccggtgaagctcagtcagctacggcac

SEQ ID NO: 490926 - DNA, 30 bp, Artificial Sequence
  Synthetic oligonucleotide
tccgacaaacactccgacgccttacggcac

SEQ ID NO: 490927 - DNA, 30 bp, Artificial Sequence
  Synthetic oligonucleotide
aatccgcttataacctttcaagaccggcac

SEQ ID NO: 490928 - DNA, 30 bp, Artificial Sequence
  Synthetic oligonucleotide
tatccggacggccgttttggagaccggcac

SEQ ID NO: 490929 - DNA, 30 bp, Artificial Sequence
  Synthetic oligonucleotide
tacgtactaccatgattgatgctccggcac

SEQ ID NO: 490930 - DNA, 30 bp, Artificial Sequence
  Synthetic oligonucleotide
gaccacgagaaatccgagctggtccggcac

SEQ ID NO: 490931 - DNA, 30 bp, Artificial Sequence
  Synthetic oligonucleotide
acctttagatccgggtgttaaatgcggcac

SEQ ID NO: 490932 - DNA, 30 bp, Artificial Sequence
  Synthetic oligonucleotide
gattgagcatgacccatgacttgagggcac

SEQ ID NO: 490933 - DNA, 30 bp, Artificial Sequence
  Synthetic oligonucleotide
caatcaactgtttcctatatgatcgggcac

SEQ ID NO: 490934 - DNA, 30 bp, Artificial Sequence
  Synthetic oligonucleotide
tgattaagagccgcctttacaaaggggcac

SEQ ID NO: 490935 - DNA, 30 bp, Artificial Sequence
  Synthetic oligonucleotide
accgcatggctgtataacatacaggggcac

SEQ ID NO: 490936 - DNA, 30 bp, Artificial Sequence
  Synthetic oligonucleotide
cgtaaggaaatccatcccgcagaggggcac

SEQ ID NO: 490937 - DNA, 30 bp, Artificial Sequence
  Synthetic oligonucleotide
tcagacaccaggtaaaacttcactgggcac

SEQ ID NO: 490938 - DNA, 30 bp, Artificial Sequence
  Synthetic oligonucleotide
aaaagggagggccgctacagagcatggcac

SEQ ID NO: 490939 - DNA, 30 bp, Artificial Sequence
  Synthetic oligonucleotide
gccgggaggctttacttaacaaagtggcac

SEQ ID NO: 490940 - DNA, 30 bp, Artificial Sequence
  Synthetic oligonucleotide
tacgttttacgctgcaatttgatgtggcac

SEQ ID NO: 490941 - DNA, 30 bp, Artificial Sequence
  Synthetic oligonucleotide
tattagttacgagccaagtctttgtggcac

SEQ ID NO: 490942 - DNA, 30 bp, Artificial Sequence
  Synthetic oligonucleotide
ctgtcggctcttagacggtagttttggcac

SEQ ID NO: 490943 - DNA, 30 bp, Artificial Sequence
  Synthetic oligonucleotide
gagcgggaaagaatcccagacataatgcac

SEQ ID NO: 490944 - DNA, 30 bp, Artificial Sequence
  Synthetic oligonucleotide
tgggtaattcttcaaaaggcttcgatgcac

SEQ ID NO: 490945 - DNA, 30 bp, Artificial Sequence
  Synthetic oligonucleotide
ccgtaaagtctcttaatcagccggatgcac

SEQ ID NO: 490946 - DNA, 30 bp, Artificial Sequence
  Synthetic oligonucleotide
tggtccccggacacaaaattgcatatgcac

SEQ ID NO: 490947 - DNA, 30 bp, Artificial Sequence
  Synthetic oligonucleotide
gttgtactgctctcgggcctgatactgcac

SEQ ID NO: 490948 - DNA, 30 bp, Artificial Sequence
  Synthetic oligonucleotide
cagccttcttacgcaactacgtaagtgcac

SEQ ID NO: 490949 - DNA, 30 bp, Artificial Sequence
  Synthetic oligonucleotide
cccgttttagggtcgctaacaacagtgcac

SEQ ID NO: 490950 - DNA, 30 bp, Artificial Sequence
  Synthetic oligonucleotide
gagcttcgtagagtaatatctgccgtgcac

SEQ ID NO: 490951 - DNA, 30 bp, Artificial Sequence
  Synthetic oligonucleotide
ccgggccgttagaaactagcggaggtgcac

SEQ ID NO: 490952 - DNA, 30 bp, Artificial Sequence
  Synthetic oligonucleotide
gcagtgccatggaactcgctgagtgtgcac

SEQ ID NO: 490953 - DNA, 30 bp, Artificial Sequence
  Synthetic oligonucleotide
gctagttggtctcatctttctcttgtgcac

SEQ ID NO: 490954 - DNA, 30 bp, Artificial Sequence
  Synthetic oligonucleotide
gttacgtcatccgctatgtagtaattgcac

SEQ ID NO: 490955 - DNA, 30 bp, Artificial Sequence
  Synthetic oligonucleotide
cacaagttgactatctggtgtacattgcac

SEQ ID NO: 490956 - DNA, 30 bp, Artificial Sequence
  Synthetic oligonucleotide
cgtaagggccatggacacgggggattgcac

SEQ ID NO: 490957 - DNA, 30 bp, Artificial Sequence
  Synthetic oligonucleotide
ccaaataccgcaagacaggtctgattgcac

SEQ ID NO: 490958 - DNA, 30 bp, Artificial Sequence
  Synthetic oligonucleotide
aggcagtagcttgcctgggcgggcttgcac

SEQ ID NO: 490959 - DNA, 30 bp, Artificial Sequence
  Synthetic oligonucleotide
gttcactatctagtgcgcctaaagttgcac

SEQ ID NO: 490960 - DNA, 30 bp, Artificial Sequence
  Synthetic oligonucleotide
gccatttcgtggcgtaagcaggcgttgcac

SEQ ID NO: 490961 - DNA, 30 bp, Artificial Sequence
  Synthetic oligonucleotide
aatacattgccggagactagtcctttgcac

SEQ ID NO: 490962 - DNA, 30 bp, Artificial Sequence
  Synthetic oligonucleotide
gaacctagcacatgtggggctgaaaatcac

SEQ ID NO: 490963 - DNA, 30 bp, Artificial Sequence
  Synthetic oligonucleotide
tgtagaaatggcgtctccgagcccaatcac

SEQ ID NO: 490964 - DNA, 30 bp, Artificial Sequence
  Synthetic oligonucleotide
gttctcagtatatttttcttatgcaatcac

SEQ ID NO: 490965 - DNA, 30 bp, Artificial Sequence
  Synthetic oligonucleotide
tctgcagacagagacgttattctgaatcac

SEQ ID NO: 490966 - DNA, 30 bp, Artificial Sequence
  Synthetic oligonucleotide
attccatcagaggatagtcaaaataatcac

SEQ ID NO: 490967 - DNA, 30 bp, Artificial Sequence
  Synthetic oligonucleotide
ctatcttaaatcagacatgcatataatcac

SEQ ID NO: 490968 - DNA, 30 bp, Artificial Sequence
  Synthetic oligonucleotide
gcgctttattagcgacaacggtctaatcac

SEQ ID NO: 490969 - DNA, 30 bp, Artificial Sequence
  Synthetic oligonucleotide
atatttggccgctgagattggcttaatcac

SEQ ID NO: 490970 - DNA, 30 bp, Artificial Sequence
  Synthetic oligonucleotide
atgataagctagggtacattggttaatcac

SEQ ID NO: 490971 - DNA, 30 bp, Artificial Sequence
  Synthetic oligonucleotide
ctaatttatttccgaattacgaaacatcac

SEQ ID NO: 490972 - DNA, 30 bp, Artificial Sequence
  Synthetic oligonucleotide
aatcatgaagattctgggggtggacatcac

SEQ ID NO: 490973 - DNA, 30 bp, Artificial Sequence
  Synthetic oligonucleotide
cgtatctggcggacccatcccgcagatcac

SEQ ID NO: 490974 - DNA, 30 bp, Artificial Sequence
  Synthetic oligonucleotide
ttgtaggacgatagggattttttggatcac

SEQ ID NO: 490975 - DNA, 30 bp, Artificial Sequence
  Synthetic oligonucleotide
gattaggtccatgggttgcctaatgatcac

SEQ ID NO: 490976 - DNA, 30 bp, Artificial Sequence
  Synthetic oligonucleotide
cctggcggcaccaaatggaaagatgatcac

SEQ ID NO: 490977 - DNA, 30 bp, Artificial Sequence
  Synthetic oligonucleotide
ggatgattatgaatagttaactatgatcac

SEQ ID NO: 490978 - DNA, 30 bp, Artificial Sequence
  Synthetic oligonucleotide
gggcctgtgctgggtatgggcccatatcac

SEQ ID NO: 490979 - DNA, 29 bp, Artificial Sequence
  Synthetic oligonucleotide
gcagcgaattccagtagattgattatcac

SEQ ID NO: 490980 - DNA, 30 bp, Artificial Sequence
  Synthetic oligonucleotide
taactcgtccagcgactttgcccaactcac

SEQ ID NO: 490981 - DNA, 30 bp, Artificial Sequence
  Synthetic oligonucleotide
cccaagtctgttagatcgtctagaactcac

SEQ ID NO: 490982 - DNA, 30 bp, Artificial Sequence
  Synthetic oligonucleotide
ctgctatgatgcgcgtcgtgcagtactcac

SEQ ID NO: 490983 - DNA, 30 bp, Artificial Sequence
  Synthetic oligonucleotide
cgcacgcatataccgggaggggcacctcac

SEQ ID NO: 490984 - DNA, 30 bp, Artificial Sequence
  Synthetic oligonucleotide
gtgaacgtctttgtatgcaagagacctcac

SEQ ID NO: 490985 - DNA, 30 bp, Artificial Sequence
  Synthetic oligonucleotide
agcagtagaggctatatacacaaccctcac

SEQ ID NO: 490986 - DNA, 30 bp, Artificial Sequence
  Synthetic oligonucleotide
atcaatgccggagagctaggcaagcctcac

SEQ ID NO: 490987 - DNA, 30 bp, Artificial Sequence
  Synthetic oligonucleotide
agggtatgttatccctctggactcgctcac

SEQ ID NO: 490988 - DNA, 30 bp, Artificial Sequence
  Synthetic oligonucleotide
tgggggccaggggacacggtacaggctcac

SEQ ID NO: 490989 - DNA, 30 bp, Artificial Sequence
  Synthetic oligonucleotide
attgactttaattgagaataggaggctcac

SEQ ID NO: 490990 - DNA, 30 bp, Artificial Sequence
  Synthetic oligonucleotide
atttaatatctgcgcttgttcccggctcac

SEQ ID NO: 490991 - DNA, 30 bp, Artificial Sequence
  Synthetic oligonucleotide
tccctactggactgccctattcgggctcac

SEQ ID NO: 490992 - DNA, 30 bp, Artificial Sequence
  Synthetic oligonucleotide
ttactcttgcgcggtcagatgtgtgctcac

SEQ ID NO: 490993 - DNA, 30 bp, Artificial Sequence
  Synthetic oligonucleotide
ggccccggctggggatcgcctccatctcac

SEQ ID NO: 490994 - DNA, 30 bp, Artificial Sequence
  Synthetic oligonucleotide
agatgcctagcacatgtcaaccgatctcac

SEQ ID NO: 490995 - DNA, 30 bp, Artificial Sequence
  Synthetic oligonucleotide
tttaatatacatccgctaggtatgtctcac

SEQ ID NO: 490996 - DNA, 30 bp, Artificial Sequence
  Synthetic oligonucleotide
ggcctgaaactcagcaatttgaattctcac

SEQ ID NO: 490997 - DNA, 30 bp, Artificial Sequence
  Synthetic oligonucleotide
atacatcgaattgccatgtcgacttctcac

SEQ ID NO: 490998 - DNA, 30 bp, Artificial Sequence
  Synthetic oligonucleotide
ggaattttgaaagtcgtctcgtcttctcac

SEQ ID NO: 490999 - DNA, 30 bp, Artificial Sequence
  Synthetic oligonucleotide
ctctgtttacgcggatttctgggaagtcac

SEQ ID NO: 491000 - DNA, 30 bp, Artificial Sequence
  Synthetic oligonucleotide
aaaggtgataacctccacgtgctaagtcac

SEQ ID NO: 491001 - DNA, 30 bp, Artificial Sequence
  Synthetic oligonucleotide
gtcctaggtctgaaggtcacaaagagtcac

SEQ ID NO: 491002 - DNA, 30 bp, Artificial Sequence
  Synthetic oligonucleotide
cgccattctggcggccatagccctagtcac

SEQ ID NO: 491003 - DNA, 30 bp, Artificial Sequence
  Synthetic oligonucleotide
catctgtaagtctgcgggcaaacacgtcac

SEQ ID NO: 491004 - DNA, 30 bp, Artificial Sequence
  Synthetic oligonucleotide
gcagctccatagggaagacgaacacgtcac

SEQ ID NO: 491005 - DNA, 30 bp, Artificial Sequence
  Synthetic oligonucleotide
cagtggtgcaaaataatcacgggacgtcac

SEQ ID NO: 491006 - DNA, 30 bp, Artificial Sequence
  Synthetic oligonucleotide
ctctgttaagaaagatagtattgacgtcac

SEQ ID NO: 491007 - DNA, 30 bp, Artificial Sequence
  Synthetic oligonucleotide
ttcggtggcctgctgacacgggcccgtcac

SEQ ID NO: 491008 - DNA, 30 bp, Artificial Sequence
  Synthetic oligonucleotide
cggtgtcttacaatctcgtccaaaggtcac

SEQ ID NO: 491009 - DNA, 30 bp, Artificial Sequence
  Synthetic oligonucleotide
gctggacgtgctgctttactagcaggtcac

SEQ ID NO: 491010 - DNA, 30 bp, Artificial Sequence
  Synthetic oligonucleotide
gattgttatacacctactctagcaggtcac

SEQ ID NO: 491011 - DNA, 30 bp, Artificial Sequence
  Synthetic oligonucleotide
caggttctttacttacggccaagaggtcac

SEQ ID NO: 491012 - DNA, 30 bp, Artificial Sequence
  Synthetic oligonucleotide
ggaatgaggccttcgcgaggggtaggtcac

SEQ ID NO: 491013 - DNA, 30 bp, Artificial Sequence
  Synthetic oligonucleotide
gaattaagtctcatagtcgtgtagggtcac

SEQ ID NO: 491014 - DNA, 30 bp, Artificial Sequence
  Synthetic oligonucleotide
acattcatagcatattgttcttagggtcac

SEQ ID NO: 491015 - DNA, 30 bp, Artificial Sequence
  Synthetic oligonucleotide
agtgatgtccaggggggttgacggggtcac

SEQ ID NO: 491016 - DNA, 30 bp, Artificial Sequence
  Synthetic oligonucleotide
ttagggatagaatgtcgtcggctgggtcac

SEQ ID NO: 491017 - DNA, 30 bp, Artificial Sequence
  Synthetic oligonucleotide
atggagcccgtggccgaaaccaactgtcac

SEQ ID NO: 491018 - DNA, 30 bp, Artificial Sequence
  Synthetic oligonucleotide
cataatgttgaacccgcatacggctgtcac

SEQ ID NO: 491019 - DNA, 30 bp, Artificial Sequence
  Synthetic oligonucleotide
ataggcatttggttcaccacaaagtgtcac

SEQ ID NO: 491020 - DNA, 30 bp, Artificial Sequence
  Synthetic oligonucleotide
gttaactaacaagagtcctggtcgtgtcac

SEQ ID NO: 491021 - DNA, 30 bp, Artificial Sequence
  Synthetic oligonucleotide
gagaaaatactggcacagtcttaaattcac

SEQ ID NO: 491022 - DNA, 30 bp, Artificial Sequence
  Synthetic oligonucleotide
tttcaagaatgctgacgctagtacattcac

SEQ ID NO: 491023 - DNA, 30 bp, Artificial Sequence
  Synthetic oligonucleotide
gttatcggtcttggtgacacgtacattcac

SEQ ID NO: 491024 - DNA, 30 bp, Artificial Sequence
  Synthetic oligonucleotide
gaataatcacgcgcaggtagcttgattcac

SEQ ID NO: 491025 - DNA, 30 bp, Artificial Sequence
  Synthetic oligonucleotide
tgcaaaatagcgaagacttgtaagcttcac

SEQ ID NO: 491026 - DNA, 30 bp, Artificial Sequence
  Synthetic oligonucleotide
ccactatgaagacacctggtaagtcttcac

SEQ ID NO: 491027 - DNA, 30 bp, Artificial Sequence
  Synthetic oligonucleotide
gaaataacttttgggtacaaaaaggttcac

SEQ ID NO: 491028 - DNA, 30 bp, Artificial Sequence
  Synthetic oligonucleotide
gcaggcttctatctctatcagacggttcac

SEQ ID NO: 491029 - DNA, 30 bp, Artificial Sequence
  Synthetic oligonucleotide
attatggtgtggtaatttgtgtcggttcac

SEQ ID NO: 491030 - DNA, 30 bp, Artificial Sequence
  Synthetic oligonucleotide
gcagtgttgcaatgcgggcccttatttcac

SEQ ID NO: 491031 - DNA, 30 bp, Artificial Sequence
  Synthetic oligonucleotide
tttgggtcagcgtcttcaggaaactttcac

SEQ ID NO: 491032 - DNA, 30 bp, Artificial Sequence
  Synthetic oligonucleotide
ctagtccagcatccacccgtgctctttcac

SEQ ID NO: 491033 - DNA, 30 bp, Artificial Sequence
  Synthetic oligonucleotide
ggcgtatgaggatttattttcatgtttcac

SEQ ID NO: 491034 - DNA, 30 bp, Artificial Sequence
  Synthetic oligonucleotide
tcgctgctaagtcgaggctcttcaaaagac

SEQ ID NO: 491035 - DNA, 34 bp, Artificial Sequence
  Synthetic oligonucleotide
gatactagaccaccacgtatccatcagaaaagac

SEQ ID NO: 491036 - DNA, 34 bp, Artificial Sequence
  Synthetic oligonucleotide
gacactagaccaccacgtgtccatcagaaaagac

SEQ ID NO: 491037 - DNA, 33 bp, Artificial Sequence
  Synthetic oligonucleotide
atactagaccaccacgtgtccatcagaaaagac

SEQ ID NO: 491038 - DNA, 34 bp, Artificial Sequence
  Synthetic oligonucleotide
gatactagaccacctcgtgtccatcagaaaagac

SEQ ID NO: 491039 - DNA, 34 bp, Artificial Sequence
  Synthetic oligonucleotide
gatactagaccaccacgtgtccttcagaaaagac

SEQ ID NO: 491040 - DNA, 34 bp, Artificial Sequence
  Synthetic oligonucleotide
gatactagaccaccacgtgtccatctgaaaagac

SEQ ID NO: 491041 - DNA, 30 bp, Artificial Sequence
  Synthetic oligonucleotide
gatttccaggcggagtttcatatgaaagac

SEQ ID NO: 491042 - DNA, 30 bp, Artificial Sequence
  Synthetic oligonucleotide
cagcccgtattcgtcccatctgtgaaagac

SEQ ID NO: 491043 - DNA, 30 bp, Artificial Sequence
  Synthetic oligonucleotide
ggatgtaggttgcagggatgatctaaagac

SEQ ID NO: 491044 - DNA, 30 bp, Artificial Sequence
  Synthetic oligonucleotide
tttggctctcgtcgaagcaaacgtaaagac

SEQ ID NO: 491045 - DNA, 34 bp, Artificial Sequence
  Synthetic oligonucleotide
gatactagaccaccacgtgtccatcagacaagac

SEQ ID NO: 491046 - DNA, 30 bp, Artificial Sequence
  Synthetic oligonucleotide
ctaagtttttaaaacttacacgcccaagac

SEQ ID NO: 491047 - DNA, 34 bp, Artificial Sequence
  Synthetic oligonucleotide
gatactagaccaccacgtgtccatcaaagaagac

SEQ ID NO: 491048 - DNA, 30 bp, Artificial Sequence
  Synthetic oligonucleotide
gatatgcaacggtatttcagataagaagac

SEQ ID NO: 491049 - DNA, 34 bp, Artificial Sequence
  Synthetic oligonucleotide
gatactagaccaccacgtgtccatcacagaagac

SEQ ID NO: 491050 - DNA, 30 bp, Artificial Sequence
  Synthetic oligonucleotide
gggtttatctactctcttaatgaggaagac

SEQ ID NO: 491051 - DNA, 30 bp, Artificial Sequence
  Synthetic oligonucleotide
gagtggggtctacagtatgccgttgaagac

SEQ ID NO: 491052 - DNA, 30 bp, Artificial Sequence
  Synthetic oligonucleotide
cgattttcatttatggatggggttgaagac

SEQ ID NO: 491053 - DNA, 29 bp, Artificial Sequence
  Synthetic oligonucleotide
gagtgctctaatgcgcggccatataagac

SEQ ID NO: 491054 - DNA, 30 bp, Artificial Sequence
  Synthetic oligonucleotide
gtatctcacccccatcgggggcagtaagac

SEQ ID NO: 491055 - DNA, 30 bp, Artificial Sequence
  Synthetic oligonucleotide
ttttgaagtatcggtagttgaacgtaagac

SEQ ID NO: 491056 - DNA, 30 bp, Artificial Sequence
  Synthetic oligonucleotide
tatctgcccccgttacggagagggtaagac

SEQ ID NO: 491057 - DNA, 30 bp, Artificial Sequence
  Synthetic oligonucleotide
aacggaagagcaccagaggaactgtaagac

SEQ ID NO: 491058 - DNA, 30 bp, Artificial Sequence
  Synthetic oligonucleotide
atgacaatttatcggagccttttttaagac

SEQ ID NO: 491059 - DNA, 30 bp, Artificial Sequence
  Synthetic oligonucleotide
ggactacatcgcaggatctgcccaacagac

SEQ ID NO: 491060 - DNA, 30 bp, Artificial Sequence
  Synthetic oligonucleotide
ttccggcggcgcatgcctgagcgaacagac

SEQ ID NO: 491061 - DNA, 30 bp, Artificial Sequence
  Synthetic oligonucleotide
tgtgaggctcaaacgcgctgacgcacagac

SEQ ID NO: 491062 - DNA, 30 bp, Artificial Sequence
  Synthetic oligonucleotide
acttaatagtgatacctgggtttcacagac

SEQ ID NO: 491063 - DNA, 30 bp, Artificial Sequence
  Synthetic oligonucleotide
acttaaaggtgggctgatgtgcagacagac

SEQ ID NO: 491064 - DNA, 30 bp, Artificial Sequence
  Synthetic oligonucleotide
tgtcaggtctagtaggtgattgtgacagac

SEQ ID NO: 491065 - DNA, 30 bp, Artificial Sequence
  Synthetic oligonucleotide
tcggggaggtgtgcccttcatttgacagac

SEQ ID NO: 491066 - DNA, 30 bp, Artificial Sequence
  Synthetic oligonucleotide
ctctggacacagctattgtcgattacagac

SEQ ID NO: 491067 - DNA, 30 bp, Artificial Sequence
  Synthetic oligonucleotide
gacaacgactagactcggtttccgccagac

SEQ ID NO: 491068 - DNA, 30 bp, Artificial Sequence
  Synthetic oligonucleotide
tagcgtaccggacaccactcgtcgccagac

SEQ ID NO: 491069 - DNA, 30 bp, Artificial Sequence
  Synthetic oligonucleotide
gctaggatcactaccgtgcgggcagcagac

SEQ ID NO: 491070 - DNA, 30 bp, Artificial Sequence
  Synthetic oligonucleotide
cgggacttaattcagaccacctgcgcagac

SEQ ID NO: 491071 - DNA, 30 bp, Artificial Sequence
  Synthetic oligonucleotide
tagaatacgggcagctctgaattggcagac

SEQ ID NO: 491072 - DNA, 30 bp, Artificial Sequence
  Synthetic oligonucleotide
ttctaaggtactatggctattactgcagac

SEQ ID NO: 491073 - DNA, 30 bp, Artificial Sequence
  Synthetic oligonucleotide
ctgttgtaggccccctacagcggatcagac

SEQ ID NO: 491074 - DNA, 30 bp, Artificial Sequence
  Synthetic oligonucleotide
tacgatagaggatttgctgtgcactcagac

SEQ ID NO: 491075 - DNA, 30 bp, Artificial Sequence
  Synthetic oligonucleotide
ctgacgctcccatctggagggagctcagac

SEQ ID NO: 491076 - DNA, 30 bp, Artificial Sequence
  Synthetic oligonucleotide
ctttagtccagctctgactagcgctcagac

SEQ ID NO: 491077 - DNA, 30 bp, Artificial Sequence
  Synthetic oligonucleotide
agtctcacccctaaaatttgtatctcagac

SEQ ID NO: 491078 - DNA, 30 bp, Artificial Sequence
  Synthetic oligonucleotide
gtatcacccatgcggcacacaaggtcagac

SEQ ID NO: 491079 - DNA, 30 bp, Artificial Sequence
  Synthetic oligonucleotide
gagaaattttgcagcggagctcggtcagac

SEQ ID NO: 491080 - DNA, 30 bp, Artificial Sequence
  Synthetic oligonucleotide
tatgcacgggccttgcgggacgattcagac

SEQ ID NO: 491081 - DNA, 30 bp, Artificial Sequence
  Synthetic oligonucleotide
gccaaggtttagccgtggctcgacagagac

SEQ ID NO: 491082 - DNA, 30 bp, Artificial Sequence
  Synthetic oligonucleotide
cttctagactacagtcatacagccagagac

SEQ ID NO: 491083 - DNA, 30 bp, Artificial Sequence
  Synthetic oligonucleotide
ggctatctctctggagggattgtcagagac

SEQ ID NO: 491084 - DNA, 30 bp, Artificial Sequence
  Synthetic oligonucleotide
aaagtttaggcgcagcccaaacggagagac

SEQ ID NO: 491085 - DNA, 30 bp, Artificial Sequence
  Synthetic oligonucleotide
gccttcgcgtgttagcgacgcttgagagac

SEQ ID NO: 491086 - DNA, 30 bp, Artificial Sequence
  Synthetic oligonucleotide
ttcgccagcaacatcatcgaacgtagagac

SEQ ID NO: 491087 - DNA, 30 bp, Artificial Sequence
  Synthetic oligonucleotide
ggtgcttcagaacgcacagtcattagagac

SEQ ID NO: 491088 - DNA, 30 bp, Artificial Sequence
  Synthetic oligonucleotide
gattacaaagagtagcctcgtactcgagac

SEQ ID NO: 491089 - DNA, 30 bp, Artificial Sequence
  Synthetic oligonucleotide
acccccctccgcccattgtgtcaaggagac

SEQ ID NO: 491090 - DNA, 30 bp, Artificial Sequence
  Synthetic oligonucleotide
aaaaggggttgggcatactctataggagac

SEQ ID NO: 491091 - DNA, 30 bp, Artificial Sequence
  Synthetic oligonucleotide
gcagtcagcgtgagggcgattgacggagac

SEQ ID NO: 491092 - DNA, 30 bp, Artificial Sequence
  Synthetic oligonucleotide
gaccattttgtgtgacgtcgacgcggagac

SEQ ID NO: 491093 - DNA, 30 bp, Artificial Sequence
  Synthetic oligonucleotide
ctacatacatttccttgaggcatcggagac

SEQ ID NO: 491094 - DNA, 30 bp, Artificial Sequence
  Synthetic oligonucleotide
tgatatatatcagcacccgcatcgggagac

SEQ ID NO: 491095 - DNA, 30 bp, Artificial Sequence
  Synthetic oligonucleotide
tctactctcgctggggacctctctggagac

SEQ ID NO: 491096 - DNA, 30 bp, Artificial Sequence
  Synthetic oligonucleotide
gcgatgtagcactcgcgtttgtttggagac

SEQ ID NO: 491097 - DNA, 30 bp, Artificial Sequence
  Synthetic oligonucleotide
acgccgggaagagtgattacgcgatgagac

SEQ ID NO: 491098 - DNA, 30 bp, Artificial Sequence
  Synthetic oligonucleotide
ctctcttggtgaggtgtttctttctgagac

SEQ ID NO: 491099 - DNA, 30 bp, Artificial Sequence
  Synthetic oligonucleotide
ggtagaaggggccattggacctggtgagac

SEQ ID NO: 491100 - DNA, 30 bp, Artificial Sequence
  Synthetic oligonucleotide
ggtgcgggcgcatatcaattgctgtgagac

SEQ ID NO: 491101 - DNA, 30 bp, Artificial Sequence
  Synthetic oligonucleotide
gagtggatgtcaaggcaatacacttgagac

SEQ ID NO: 491102 - DNA, 30 bp, Artificial Sequence
  Synthetic oligonucleotide
ggctatcctcagcattcgctttcaatagac

SEQ ID NO: 491103 - DNA, 30 bp, Artificial Sequence
  Synthetic oligonucleotide
tcgtaagtaagggaaaccctttgcatagac

SEQ ID NO: 491104 - DNA, 30 bp, Artificial Sequence
  Synthetic oligonucleotide
gaagtttagtttgactggagcttcatagac

SEQ ID NO: 491105 - DNA, 30 bp, Artificial Sequence
  Synthetic oligonucleotide
gtctagattcgtctggcacagttcatagac

SEQ ID NO: 491106 - DNA, 30 bp, Artificial Sequence
  Synthetic oligonucleotide
ttgacccctgtggtaggtcccttgatagac

SEQ ID NO: 491107 - DNA, 30 bp, Artificial Sequence
  Synthetic oligonucleotide
gaatgttatgttggtgggcgccatatagac

SEQ ID NO: 491108 - DNA, 30 bp, Artificial Sequence
  Synthetic oligonucleotide
gcaattacacgtggagctggccttatagac

SEQ ID NO: 491109 - DNA, 30 bp, Artificial Sequence
  Synthetic oligonucleotide
ggccgggctttccgggtaacctgactagac

SEQ ID NO: 491110 - DNA, 30 bp, Artificial Sequence
  Synthetic oligonucleotide
cacattataggggacgcttggttcctagac

SEQ ID NO: 491111 - DNA, 30 bp, Artificial Sequence
  Synthetic oligonucleotide
caactcctctatacgggggtcctgctagac

SEQ ID NO: 491112 - DNA, 30 bp, Artificial Sequence
  Synthetic oligonucleotide
gctaaaaagttcgctaattgattgctagac

SEQ ID NO: 491113 - DNA, 30 bp, Artificial Sequence
  Synthetic oligonucleotide
aagaataacgattggttgcctttgctagac

SEQ ID NO: 491114 - DNA, 30 bp, Artificial Sequence
  Synthetic oligonucleotide
tctaatgtttggattcttgatgttctagac

SEQ ID NO: 491115 - DNA, 30 bp, Artificial Sequence
  Synthetic oligonucleotide
tatgtttggtaaaaatgtgtcacagtagac

SEQ ID NO: 491116 - DNA, 30 bp, Artificial Sequence
  Synthetic oligonucleotide
atcctcaacaatcccgcgaggttcgtagac

SEQ ID NO: 491117 - DNA, 30 bp, Artificial Sequence
  Synthetic oligonucleotide
agcactgacgctgggagaaagactgtagac

SEQ ID NO: 491118 - DNA, 30 bp, Artificial Sequence
  Synthetic oligonucleotide
cacacaagaacggcgtaacccaaattagac

SEQ ID NO: 491119 - DNA, 30 bp, Artificial Sequence
  Synthetic oligonucleotide
tagtccctgcgctactgcacagaattagac

SEQ ID NO: 491120 - DNA, 30 bp, Artificial Sequence
  Synthetic oligonucleotide
ctccactgtaaccaccctaaccgattagac

SEQ ID NO: 491121 - DNA, 31 bp, Artificial Sequence
  Synthetic oligonucleotide
tgtagcattcagctcgcttatcggattagac

SEQ ID NO: 491122 - DNA, 30 bp, Artificial Sequence
  Synthetic oligonucleotide
gcatttcttgtcgcaggggtactattagac

SEQ ID NO: 491123 - DNA, 30 bp, Artificial Sequence
  Synthetic oligonucleotide
gttttcgcgatactatctgttaagttagac

SEQ ID NO: 491124 - DNA, 30 bp, Artificial Sequence
  Synthetic oligonucleotide
tgaattgtcgtactggcaagctagttagac

SEQ ID NO: 491125 - DNA, 30 bp, Artificial Sequence
  Synthetic oligonucleotide
gatgtcagatctacggagtagaatttagac

SEQ ID NO: 491126 - DNA, 30 bp, Artificial Sequence
  Synthetic oligonucleotide
tgacgttgaagctaatttgtcgttttagac

SEQ ID NO: 491127 - DNA, 30 bp, Artificial Sequence
  Synthetic oligonucleotide
agagatattagctagcttatagcaaacgac

SEQ ID NO: 491128 - DNA, 30 bp, Artificial Sequence
  Synthetic oligonucleotide
ggagatcggaggtcccctaggataaacgac

SEQ ID NO: 491129 - DNA, 30 bp, Artificial Sequence
  Synthetic oligonucleotide
cacctcttggtgaggcactaggccaacgac

SEQ ID NO: 491130 - DNA, 30 bp, Artificial Sequence
  Synthetic oligonucleotide
gtaccctagtctgctagagcagtcaacgac

SEQ ID NO: 491131 - DNA, 30 bp, Artificial Sequence
  Synthetic oligonucleotide
gagtcttgcggcatggtcgtaatgaacgac

SEQ ID NO: 491132 - DNA, 30 bp, Artificial Sequence
  Synthetic oligonucleotide
aagtagcgttactgattgaataataacgac

SEQ ID NO: 491133 - DNA, 31 bp, Artificial Sequence
  Synthetic oligonucleotide
cgttctggcattatcgggataaactaacgac

SEQ ID NO: 491134 - DNA, 30 bp, Artificial Sequence
  Synthetic oligonucleotide
gctgatgacggatgaagaatcgttaacgac

SEQ ID NO: 491135 - DNA, 30 bp, Artificial Sequence
  Synthetic oligonucleotide
gggtcaacaacagcgcgcacagaacacgac

SEQ ID NO: 491136 - DNA, 30 bp, Artificial Sequence
  Synthetic oligonucleotide
tggacgaatacatcctacgctaagcacgac

SEQ ID NO: 491137 - DNA, 30 bp, Artificial Sequence
  Synthetic oligonucleotide
gttagattccgtactatgagacagcacgac

SEQ ID NO: 491138 - DNA, 30 bp, Artificial Sequence
  Synthetic oligonucleotide
atagtcgttgtggggttatgagcgcacgac

SEQ ID NO: 491139 - DNA, 30 bp, Artificial Sequence
  Synthetic oligonucleotide
tttttagaccgctcgcacaaagcagacgac

SEQ ID NO: 491140 - DNA, 30 bp, Artificial Sequence
  Synthetic oligonucleotide
ccaatgattcgtagtgcggtccccgacgac

SEQ ID NO: 491141 - DNA, 30 bp, Artificial Sequence
  Synthetic oligonucleotide
gtgcagaatggcgttcctggcgtggacgac

SEQ ID NO: 491142 - DNA, 30 bp, Artificial Sequence
  Synthetic oligonucleotide
tcctagaacagtttaagtgtgaatgacgac

SEQ ID NO: 491143 - DNA, 30 bp, Artificial Sequence
  Synthetic oligonucleotide
ctcgccagttgatgacgtctagctgacgac

SEQ ID NO: 491144 - DNA, 30 bp, Artificial Sequence
  Synthetic oligonucleotide
ccaggaatcgggctacagaggtctgacgac

SEQ ID NO: 491145 - DNA, 30 bp, Artificial Sequence
  Synthetic oligonucleotide
tgggcgcgtgtattacacgctatctacgac

SEQ ID NO: 491146 - DNA, 30 bp, Artificial Sequence
  Synthetic oligonucleotide
atgactctatcgtgagtttaaaagtacgac

SEQ ID NO: 491147 - DNA, 30 bp, Artificial Sequence
  Synthetic oligonucleotide
aagtatggttctgaaatcatcaagtacgac

SEQ ID NO: 491148 - DNA, 30 bp, Artificial Sequence
  Synthetic oligonucleotide
gcgcgaagactttgtcgacacaggtacgac

SEQ ID NO: 491149 - DNA, 30 bp, Artificial Sequence
  Synthetic oligonucleotide
aagtctatgctcgcccgtctgctgtacgac

SEQ ID NO: 491150 - DNA, 29 bp, Artificial Sequence
  Synthetic oligonucleotide
agaatacggcgaagctgttttcttacgac

SEQ ID NO: 491151 - DNA, 30 bp, Artificial Sequence
  Synthetic oligonucleotide
cgcttaacgtcaaggaaacgacgttacgac

SEQ ID NO: 491152 - DNA, 30 bp, Artificial Sequence
  Synthetic oligonucleotide
ggaggatgtgttaggcgcagcatttacgac

SEQ ID NO: 491153 - DNA, 30 bp, Artificial Sequence
  Synthetic oligonucleotide
gctcgccactgcgaacaattctaaaccgac

SEQ ID NO: 491154 - DNA, 30 bp, Artificial Sequence
  Synthetic oligonucleotide
tactaagtttcaggggtacaccgcaccgac

SEQ ID NO: 491155 - DNA, 30 bp, Artificial Sequence
  Synthetic oligonucleotide
ggcactgggggaccttagtctctcaccgac

SEQ ID NO: 491156 - DNA, 30 bp, Artificial Sequence
  Synthetic oligonucleotide
ttacgttgcacacggtaaatcactaccgac

SEQ ID NO: 491157 - DNA, 30 bp, Artificial Sequence
  Synthetic oligonucleotide
ggcaaagacgataacagcggtcttaccgac

SEQ ID NO: 491158 - DNA, 30 bp, Artificial Sequence
  Synthetic oligonucleotide
gtactcgaccaggggtggttataacccgac

SEQ ID NO: 491159 - DNA, 30 bp, Artificial Sequence
  Synthetic oligonucleotide
agaacgatatttaggtgtggtcgacccgac

SEQ ID NO: 491160 - DNA, 30 bp, Artificial Sequence
  Synthetic oligonucleotide
tcttcgttttccgatgttgttactcccgac

SEQ ID NO: 491161 - DNA, 30 bp, Artificial Sequence
  Synthetic oligonucleotide
gtcaagtagtcgggtctttcgattcccgac

SEQ ID NO: 491162 - DNA, 30 bp, Artificial Sequence
  Synthetic oligonucleotide
tctgtagatgctagctttcatgccgccgac

SEQ ID NO: 491163 - DNA, 30 bp, Artificial Sequence
  Synthetic oligonucleotide
ttaatttggttaacgctagtgtccgccgac

SEQ ID NO: 491164 - DNA, 30 bp, Artificial Sequence
  Synthetic oligonucleotide
acattatcataaccgccacatgtcgccgac

SEQ ID NO: 491165 - DNA, 30 bp, Artificial Sequence
  Synthetic oligonucleotide
tgcttaatatggtaccaaaagtgggccgac

SEQ ID NO: 491166 - DNA, 30 bp, Artificial Sequence
  Synthetic oligonucleotide
atgcgtacggtcaagcggccttgggccgac

SEQ ID NO: 491167 - DNA, 30 bp, Artificial Sequence
  Synthetic oligonucleotide
ctgatacggcgccgcacagaatatgccgac

SEQ ID NO: 491168 - DNA, 30 bp, Artificial Sequence
  Synthetic oligonucleotide
ccgtcgagtcttccttcggagcaatccgac

SEQ ID NO: 491169 - DNA, 30 bp, Artificial Sequence
  Synthetic oligonucleotide
agggcggcctacaggacggggtcatccgac

SEQ ID NO: 491170 - DNA, 30 bp, Artificial Sequence
  Synthetic oligonucleotide
tcgaacgggctttatgagatccgttccgac

SEQ ID NO: 491171 - DNA, 30 bp, Artificial Sequence
  Synthetic oligonucleotide
ggtccgggggagacaatatgggacagcgac

SEQ ID NO: 491172 - DNA, 30 bp, Artificial Sequence
  Synthetic oligonucleotide
ccggtaataccgtaataattgatgagcgac

SEQ ID NO: 491173 - DNA, 30 bp, Artificial Sequence
  Synthetic oligonucleotide
aagggggcgtgggcaacgacgcctagcgac

SEQ ID NO: 491174 - DNA, 30 bp, Artificial Sequence
  Synthetic oligonucleotide
cttcgcgttgctaggcccaaacgtagcgac

SEQ ID NO: 491175 - DNA, 30 bp, Artificial Sequence
  Synthetic oligonucleotide
ggagtttgacgttcgaggacgcgtagcgac

SEQ ID NO: 491176 - DNA, 30 bp, Artificial Sequence
  Synthetic oligonucleotide
cgagaccaagcaatcagaagcaaacgcgac

SEQ ID NO: 491177 - DNA, 30 bp, Artificial Sequence
  Synthetic oligonucleotide
gcttcttcagaccaattttgatcacgcgac

SEQ ID NO: 491178 - DNA, 30 bp, Artificial Sequence
  Synthetic oligonucleotide
gcgcagcgaaggcgtgttatgtcgcgcgac

SEQ ID NO: 491179 - DNA, 30 bp, Artificial Sequence
  Synthetic oligonucleotide
ttcgttggatgggagctgatacgaggcgac

SEQ ID NO: 491180 - DNA, 30 bp, Artificial Sequence
  Synthetic oligonucleotide
gcaagtgagtccggcccggggcttggcgac

SEQ ID NO: 491181 - DNA, 30 bp, Artificial Sequence
  Synthetic oligonucleotide
aatcgctatgtcctacaacgttgatgcgac

SEQ ID NO: 491182 - DNA, 30 bp, Artificial Sequence
  Synthetic oligonucleotide
tggggacgagacagtcgaacaacgtgcgac

SEQ ID NO: 491183 - DNA, 30 bp, Artificial Sequence
  Synthetic oligonucleotide
tgttatttccgggatttgatacgttgcgac

SEQ ID NO: 491184 - DNA, 30 bp, Artificial Sequence
  Synthetic oligonucleotide
catttagcgcgacctctgttcagtatcgac

SEQ ID NO: 491185 - DNA, 30 bp, Artificial Sequence
  Synthetic oligonucleotide
acaggtcatacggcgaatcgctttatcgac

SEQ ID NO: 491186 - DNA, 30 bp, Artificial Sequence
  Synthetic oligonucleotide
tgaccagcagctcaatggtgcctactcgac

SEQ ID NO: 491187 - DNA, 30 bp, Artificial Sequence
  Synthetic oligonucleotide
ccctgtagatggcagcctgctcctctcgac

SEQ ID NO: 491188 - DNA, 30 bp, Artificial Sequence
  Synthetic oligonucleotide
gtaaaaaataattggaggtttcaagtcgac

SEQ ID NO: 491189 - DNA, 30 bp, Artificial Sequence
  Synthetic oligonucleotide
cgactttctttttgcagcggaaccgtcgac

SEQ ID NO: 491190 - DNA, 30 bp, Artificial Sequence
  Synthetic oligonucleotide
gttaaaggacaaggagcaaccttcgtcgac

SEQ ID NO: 491191 - DNA, 30 bp, Artificial Sequence
  Synthetic oligonucleotide
agattaggcaaactttgagaacgggtcgac

SEQ ID NO: 491192 - DNA, 30 bp, Artificial Sequence
  Synthetic oligonucleotide
ttaagtgataagcttgtgtcaactgtcgac

SEQ ID NO: 491193 - DNA, 30 bp, Artificial Sequence
  Synthetic oligonucleotide
gaaatagatcattagcacctagttgtcgac

SEQ ID NO: 491194 - DNA, 30 bp, Artificial Sequence
  Synthetic oligonucleotide
acccattccaaggtaatagattacttcgac

SEQ ID NO: 491195 - DNA, 30 bp, Artificial Sequence
  Synthetic oligonucleotide
ccttacggctaactggactgctagttcgac

SEQ ID NO: 491196 - DNA, 30 bp, Artificial Sequence
  Synthetic oligonucleotide
tgacccaccagtccgtcctaagggttcgac

SEQ ID NO: 491197 - DNA, 30 bp, Artificial Sequence
  Synthetic oligonucleotide
aggctacttttataagttatccaaaaggac

SEQ ID NO: 491198 - DNA, 30 bp, Artificial Sequence
  Synthetic oligonucleotide
gccgggtggcgtgtagcttcagaaaaggac

SEQ ID NO: 491199 - DNA, 30 bp, Artificial Sequence
  Synthetic oligonucleotide
tgccccggtggttttaataactaaaaggac

SEQ ID NO: 491200 - DNA, 34 bp, Artificial Sequence
  Synthetic oligonucleotide
gatactagaccaccacgtgtccatcacaaaggac

SEQ ID NO: 491201 - DNA, 34 bp, Artificial Sequence
  Synthetic oligonucleotide
gatactagaccaccacgtgtccatccgaaaggac

SEQ ID NO: 491202 - DNA, 30 bp, Artificial Sequence
  Synthetic oligonucleotide
ctctatgaacccctatgtgggggaaaggac

SEQ ID NO: 491203 - DNA, 30 bp, Artificial Sequence
  Synthetic oligonucleotide
ttctttactggcggcggtagtagcaaggac

SEQ ID NO: 491204 - DNA, 30 bp, Artificial Sequence
  Synthetic oligonucleotide
gaccgacgatagaccctatagtaacaggac

SEQ ID NO: 491205 - DNA, 30 bp, Artificial Sequence
  Synthetic oligonucleotide
ggcgccgtcactggtggggtttgacaggac

SEQ ID NO: 491206 - DNA, 30 bp, Artificial Sequence
  Synthetic oligonucleotide
tggtgtcttgagtgatcaaatcaccaggac

SEQ ID NO: 491207 - DNA, 30 bp, Artificial Sequence
  Synthetic oligonucleotide
tttcaatctacttatcgtaaccatcaggac

SEQ ID NO: 491208 - DNA, 30 bp, Artificial Sequence
  Synthetic oligonucleotide
atagttctagtgtgggtagagactcaggac

SEQ ID NO: 491209 - DNA, 30 bp, Artificial Sequence
  Synthetic oligonucleotide
gtgacagtctgagtgactgtgactcaggac

SEQ ID NO: 491210 - DNA, 30 bp, Artificial Sequence
  Synthetic oligonucleotide
accaacccctcccggctgttgactcaggac

SEQ ID NO: 491211 - DNA, 30 bp, Artificial Sequence
  Synthetic oligonucleotide
gcttagatcgtacctgcaggtactcaggac

SEQ ID NO: 491212 - DNA, 29 bp, Artificial Sequence
  Synthetic oligonucleotide
gtgagtgtttttgacgtagaagtcaggac

SEQ ID NO: 491213 - DNA, 30 bp, Artificial Sequence
  Synthetic oligonucleotide
gatcggggcgacccctggccttttcaggac

SEQ ID NO: 491214 - DNA, 30 bp, Artificial Sequence
  Synthetic oligonucleotide
gtgagagttagtcatcttagaagagaggac

SEQ ID NO: 491215 - DNA, 30 bp, Artificial Sequence
  Synthetic oligonucleotide
ggggagctggcttcgtccccaggagaggac

SEQ ID NO: 491216 - DNA, 30 bp, Artificial Sequence
  Synthetic oligonucleotide
cctatttacccgcaacgattcggagaggac

SEQ ID NO: 491217 - DNA, 30 bp, Artificial Sequence
  Synthetic oligonucleotide
ctcgagaggtcatggggccctcacgaggac

SEQ ID NO: 491218 - DNA, 30 bp, Artificial Sequence
  Synthetic oligonucleotide
taatttaccgcgtgtatgacgtatgaggac

SEQ ID NO: 491219 - DNA, 30 bp, Artificial Sequence
  Synthetic oligonucleotide
tctgttctttacccgaggtggcttgaggac

SEQ ID NO: 491220 - DNA, 30 bp, Artificial Sequence
  Synthetic oligonucleotide
ttatccgaatcggaaatttatcttgaggac

SEQ ID NO: 491221 - DNA, 30 bp, Artificial Sequence
  Synthetic oligonucleotide
ttacccgtacgacagagtctatgataggac

SEQ ID NO: 491222 - DNA, 30 bp, Artificial Sequence
  Synthetic oligonucleotide
aggcatctcggaacgctcgcatactaggac

SEQ ID NO: 491223 - DNA, 30 bp, Artificial Sequence
  Synthetic oligonucleotide
gataaaacctatggtaccacgagctaggac

SEQ ID NO: 491224 - DNA, 30 bp, Artificial Sequence
  Synthetic oligonucleotide
ctcttttccttttcgcgaatactctaggac

SEQ ID NO: 491225 - DNA, 30 bp, Artificial Sequence
  Synthetic oligonucleotide
ttgacgcgctatgtccgcgtctagtaggac

SEQ ID NO: 491226 - DNA, 30 bp, Artificial Sequence
  Synthetic oligonucleotide
gccaatgacggttttgtcgattagtaggac

SEQ ID NO: 491227 - DNA, 30 bp, Artificial Sequence
  Synthetic oligonucleotide
aataagttctaatcttaaaaaatgtaggac

SEQ ID NO: 491228 - DNA, 30 bp, Artificial Sequence
  Synthetic oligonucleotide
ctctactctactattcaccggacaacggac

SEQ ID NO: 491229 - DNA, 30 bp, Artificial Sequence
  Synthetic oligonucleotide
gaaaagtccgcgctttcggcaacgacggac

SEQ ID NO: 491230 - DNA, 30 bp, Artificial Sequence
  Synthetic oligonucleotide
ccagcgggcggtaatgtctcaccgacggac

SEQ ID NO: 491231 - DNA, 30 bp, Artificial Sequence
  Synthetic oligonucleotide
agtcggccacgtttaggcaggctgacggac

SEQ ID NO: 491232 - DNA, 30 bp, Artificial Sequence
  Synthetic oligonucleotide
gtgggctacgtgcattaactgctaccggac

SEQ ID NO: 491233 - DNA, 30 bp, Artificial Sequence
  Synthetic oligonucleotide
attattatagcgatgcgggaggtaccggac

SEQ ID NO: 491234 - DNA, 30 bp, Artificial Sequence
  Synthetic oligonucleotide
cacggccatggccggtaccaagggccggac

SEQ ID NO: 491235 - DNA, 30 bp, Artificial Sequence
  Synthetic oligonucleotide
gtttccggctcccaatctatcgtgccggac

SEQ ID NO: 491236 - DNA, 30 bp, Artificial Sequence
  Synthetic oligonucleotide
ttgacaaagtgtctgatgaggtatccggac

SEQ ID NO: 491237 - DNA, 30 bp, Artificial Sequence
  Synthetic oligonucleotide
atgtcgtagaatatggctttcaaggcggac

SEQ ID NO: 491238 - DNA, 30 bp, Artificial Sequence
  Synthetic oligonucleotide
tctggcccaaagcgtcgagccagggcggac

SEQ ID NO: 491239 - DNA, 30 bp, Artificial Sequence
  Synthetic oligonucleotide
actctgtcctcgacagttttccatgcggac

SEQ ID NO: 491240 - DNA, 30 bp, Artificial Sequence
  Synthetic oligonucleotide
aatgtaatcttggggtggctgtaatcggac

SEQ ID NO: 491241 - DNA, 30 bp, Artificial Sequence
  Synthetic oligonucleotide
tgctagttatctaatcgggctagatcggac

SEQ ID NO: 491242 - DNA, 30 bp, Artificial Sequence
  Synthetic oligonucleotide
taaagcaccaggcggtaatacgcgtcggac

SEQ ID NO: 491243 - DNA, 30 bp, Artificial Sequence
  Synthetic oligonucleotide
gctatcagaaggccgtggtgggcgtcggac

SEQ ID NO: 491244 - DNA, 30 bp, Artificial Sequence
  Synthetic oligonucleotide
gatggcagatcagatcattccaggtcggac

SEQ ID NO: 491245 - DNA, 30 bp, Artificial Sequence
  Synthetic oligonucleotide
agactttccatcataagttagcggtcggac

SEQ ID NO: 491246 - DNA, 30 bp, Artificial Sequence
  Synthetic oligonucleotide
ctcgcttcccagatggtgtggaattcggac

SEQ ID NO: 491247 - DNA, 30 bp, Artificial Sequence
  Synthetic oligonucleotide
cttacaaagccgatggtcagcccttcggac

SEQ ID NO: 491248 - DNA, 30 bp, Artificial Sequence
  Synthetic oligonucleotide
aatttgcgtgaacacgcacagacaagggac

SEQ ID NO: 491249 - DNA, 30 bp, Artificial Sequence
  Synthetic oligonucleotide
ctcgtcgtgtactcacccccggcaagggac

SEQ ID NO: 491250 - DNA, 30 bp, Artificial Sequence
  Synthetic oligonucleotide
atccccttatgtctacggtcagttagggac

SEQ ID NO: 491251 - DNA, 30 bp, Artificial Sequence
  Synthetic oligonucleotide
ggagccttttggcggtaagacgaacgggac

SEQ ID NO: 491252 - DNA, 30 bp, Artificial Sequence
  Synthetic oligonucleotide
ttggcgggaactgttcttttccgacgggac

SEQ ID NO: 491253 - DNA, 30 bp, Artificial Sequence
  Synthetic oligonucleotide
agcatgcgcagctccaagatcccccgggac

SEQ ID NO: 491254 - DNA, 30 bp, Artificial Sequence
  Synthetic oligonucleotide
gactcttatgaacagaataggttccgggac

SEQ ID NO: 491255 - DNA, 30 bp, Artificial Sequence
  Synthetic oligonucleotide
acaggcacttgccaaatcgccgagcgggac

SEQ ID NO: 491256 - DNA, 30 bp, Artificial Sequence
  Synthetic oligonucleotide
gtcacagacgatgcacacagcattcgggac

SEQ ID NO: 491257 - DNA, 30 bp, Artificial Sequence
  Synthetic oligonucleotide
agacactaaatgctggctcgctaaggggac

SEQ ID NO: 491258 - DNA, 30 bp, Artificial Sequence
  Synthetic oligonucleotide
agctcagcgtgctggccagcacgaggggac

SEQ ID NO: 491259 - DNA, 30 bp, Artificial Sequence
  Synthetic oligonucleotide
gagatttattgaaagttgctcctaggggac

SEQ ID NO: 491260 - DNA, 30 bp, Artificial Sequence
  Synthetic oligonucleotide
gagctttggaccgtaacctcagtaggggac

SEQ ID NO: 491261 - DNA, 30 bp, Artificial Sequence
  Synthetic oligonucleotide
gtctactgcaggtattcccggctcggggac

SEQ ID NO: 491262 - DNA, 30 bp, Artificial Sequence
  Synthetic oligonucleotide
atgctcaatatctctacaccaaagggggac

SEQ ID NO: 491263 - DNA, 30 bp, Artificial Sequence
  Synthetic oligonucleotide
cctgttactatggacgcgtcgaatggggac

SEQ ID NO: 491264 - DNA, 30 bp, Artificial Sequence
  Synthetic oligonucleotide
ccgctcatagttgagacgttggatggggac

SEQ ID NO: 491265 - DNA, 30 bp, Artificial Sequence
  Synthetic oligonucleotide
gcccaatggggtgctgaacctcaatgggac

SEQ ID NO: 491266 - DNA, 30 bp, Artificial Sequence
  Synthetic oligonucleotide
aaggaatgtggacggcgagtcagttgggac

SEQ ID NO: 491267 - DNA, 30 bp, Artificial Sequence
  Synthetic oligonucleotide
ccatgggatttacgtctcgcgggttgggac

SEQ ID NO: 491268 - DNA, 30 bp, Artificial Sequence
  Synthetic oligonucleotide
atttatttcattccatgtgtaaaaatggac

SEQ ID NO: 491269 - DNA, 30 bp, Artificial Sequence
  Synthetic oligonucleotide
gtcatttgcaaacctcattatgaaatggac

SEQ ID NO: 491270 - DNA, 30 bp, Artificial Sequence
  Synthetic oligonucleotide
agtatgaagaagggtatgagcgtaatggac

SEQ ID NO: 491271 - DNA, 30 bp, Artificial Sequence
  Synthetic oligonucleotide
taacctcgcaaacacgacaaaaggatggac

SEQ ID NO: 491272 - DNA, 30 bp, Artificial Sequence
  Synthetic oligonucleotide
atttggtaaacgttgctatgccgcctggac

SEQ ID NO: 491273 - DNA, 30 bp, Artificial Sequence
  Synthetic oligonucleotide
ttagacctttactaccagaataagctggac

SEQ ID NO: 491274 - DNA, 30 bp, Artificial Sequence
  Synthetic oligonucleotide
gcatcggggtattgggcggagacgctggac

SEQ ID NO: 491275 - DNA, 30 bp, Artificial Sequence
  Synthetic oligonucleotide
aaaaacgtttggccatttgcctttctggac

SEQ ID NO: 491276 - DNA, 30 bp, Artificial Sequence
  Synthetic oligonucleotide
tcataagcacgcgacagggcaccagtggac

SEQ ID NO: 491277 - DNA, 30 bp, Artificial Sequence
  Synthetic oligonucleotide
gtctcgctcataatctttacgcacgtggac

SEQ ID NO: 491278 - DNA, 30 bp, Artificial Sequence
  Synthetic oligonucleotide
gtttacgtgtttgctagtaacaccgtggac

SEQ ID NO: 491279 - DNA, 30 bp, Artificial Sequence
  Synthetic oligonucleotide
agatcttagcccttcttgaaagtcgtggac

SEQ ID NO: 491280 - DNA, 30 bp, Artificial Sequence
  Synthetic oligonucleotide
gcggcctttacggtggcgaatgaggtggac

SEQ ID NO: 491281 - DNA, 30 bp, Artificial Sequence
  Synthetic oligonucleotide
aaacagtaccctggttctgaagcggtggac

SEQ ID NO: 491282 - DNA, 30 bp, Artificial Sequence
  Synthetic oligonucleotide
attcggtgcttgtatactccctcattggac

SEQ ID NO: 491283 - DNA, 30 bp, Artificial Sequence
  Synthetic oligonucleotide
gggattcttttgctatcctgatagttggac

SEQ ID NO: 491284 - DNA, 30 bp, Artificial Sequence
  Synthetic oligonucleotide
acatggtaaaagcggcaagtacatttggac

SEQ ID NO: 491285 - DNA, 30 bp, Artificial Sequence
  Synthetic oligonucleotide
tgaaaaaggcatgcggtaggaggtttggac

SEQ ID NO: 491286 - DNA, 30 bp, Artificial Sequence
  Synthetic oligonucleotide
ttccgaagcaatattttaggcgtcaatgac

SEQ ID NO: 491287 - DNA, 30 bp, Artificial Sequence
  Synthetic oligonucleotide
agggattagttaaagagtcgcatgaatgac

SEQ ID NO: 491288 - DNA, 30 bp, Artificial Sequence
  Synthetic oligonucleotide
agtttttgggatcacaagccgatgaatgac

SEQ ID NO: 491289 - DNA, 30 bp, Artificial Sequence
  Synthetic oligonucleotide
gagtattacattagaatggcatataatgac

SEQ ID NO: 491290 - DNA, 30 bp, Artificial Sequence
  Synthetic oligonucleotide
ttttggaccacaatcttttggtctaatgac

SEQ ID NO: 491291 - DNA, 30 bp, Artificial Sequence
  Synthetic oligonucleotide
atcatcgcacaatctattcgggttaatgac

SEQ ID NO: 491292 - DNA, 30 bp, Artificial Sequence
  Synthetic oligonucleotide
gcctaactgtttgttgccgcttttaatgac

SEQ ID NO: 491293 - DNA, 30 bp, Artificial Sequence
  Synthetic oligonucleotide
tgccgttatacgcgtcgttgtctacatgac

SEQ ID NO: 491294 - DNA, 30 bp, Artificial Sequence
  Synthetic oligonucleotide
ctttctgtcacgtcgggtgagagccatgac

SEQ ID NO: 491295 - DNA, 30 bp, Artificial Sequence
  Synthetic oligonucleotide
aattcttcggcgccaacgggcgtccatgac

SEQ ID NO: 491296 - DNA, 30 bp, Artificial Sequence
  Synthetic oligonucleotide
actattctatattcttctcaatagcatgac

SEQ ID NO: 491297 - DNA, 30 bp, Artificial Sequence
  Synthetic oligonucleotide
aaccagtgacattgctacattttgcatgac

SEQ ID NO: 491298 - DNA, 31 bp, Artificial Sequence
  Synthetic oligonucleotide
gacacccgacacgagtccctccgctcatgac

SEQ ID NO: 491299 - DNA, 30 bp, Artificial Sequence
  Synthetic oligonucleotide
cggagcgaattccgatgcagatcagatgac

SEQ ID NO: 491300 - DNA, 30 bp, Artificial Sequence
  Synthetic oligonucleotide
gattatgtgtggtaacgatccaacgatgac

SEQ ID NO: 491301 - DNA, 30 bp, Artificial Sequence
  Synthetic oligonucleotide
ctgtcatcagtgacactgtccgcggatgac

SEQ ID NO: 491302 - DNA, 30 bp, Artificial Sequence
  Synthetic oligonucleotide
aacttattagttcgcctctggatggatgac

SEQ ID NO: 491303 - DNA, 30 bp, Artificial Sequence
  Synthetic oligonucleotide
tctcccttgtggcctgtacaagatgatgac

SEQ ID NO: 491304 - DNA, 30 bp, Artificial Sequence
  Synthetic oligonucleotide
gattttaagagtccggtccagtatgatgac

SEQ ID NO: 491305 - DNA, 28 bp, Artificial Sequence
  Synthetic oligonucleotide
gcagttagttaactcactacgatatgac

SEQ ID NO: 491306 - DNA, 30 bp, Artificial Sequence
  Synthetic oligonucleotide
attagcagcgcactgatccagcagtatgac

SEQ ID NO: 491307 - DNA, 30 bp, Artificial Sequence
  Synthetic oligonucleotide
tttataggagctaaagtgtgttggtatgac

SEQ ID NO: 491308 - DNA, 30 bp, Artificial Sequence
  Synthetic oligonucleotide
tgttcaaatgcaggcattccggattatgac

SEQ ID NO: 491309 - DNA, 30 bp, Artificial Sequence
  Synthetic oligonucleotide
tattgattcaataagacgccctgttatgac

SEQ ID NO: 491310 - DNA, 30 bp, Artificial Sequence
  Synthetic oligonucleotide
ttacattcaaatcgcgttgtttgttatgac

SEQ ID NO: 491311 - DNA, 30 bp, Artificial Sequence
  Synthetic oligonucleotide
tcaccgcattgagtgagttcgtgaactgac

SEQ ID NO: 491312 - DNA, 30 bp, Artificial Sequence
  Synthetic oligonucleotide
gttcaacgtcttgtgtgagacgtgactgac

SEQ ID NO: 491313 - DNA, 30 bp, Artificial Sequence
  Synthetic oligonucleotide
gacttagattagaggtagtctgtgactgac

SEQ ID NO: 491314 - DNA, 30 bp, Artificial Sequence
  Synthetic oligonucleotide
cagtgcgtacgcagtaatcaggttactgac

SEQ ID NO: 491315 - DNA, 30 bp, Artificial Sequence
  Synthetic oligonucleotide
gcgcataggggagtaggtcatatacctgac

SEQ ID NO: 491316 - DNA, 30 bp, Artificial Sequence
  Synthetic oligonucleotide
ccggatctcacttagttaaagagcgctgac

SEQ ID NO: 491317 - DNA, 30 bp, Artificial Sequence
  Synthetic oligonucleotide
gataaaccaatgaccttaacagaggctgac

SEQ ID NO: 491318 - DNA, 30 bp, Artificial Sequence
  Synthetic oligonucleotide
aaatggacggcccttctaaggcgggctgac

SEQ ID NO: 491319 - DNA, 30 bp, Artificial Sequence
  Synthetic oligonucleotide
gatttcaggttagggcctatacaatctgac

SEQ ID NO: 491320 - DNA, 30 bp, Artificial Sequence
  Synthetic oligonucleotide
acccagccattgaaatgagtttgatctgac

SEQ ID NO: 491321 - DNA, 30 bp, Artificial Sequence
  Synthetic oligonucleotide
gcaaaagtaagacactcaatattatctgac

SEQ ID NO: 491322 - DNA, 30 bp, Artificial Sequence
  Synthetic oligonucleotide
gatctgaccactatgaagcggaactctgac

SEQ ID NO: 491323 - DNA, 30 bp, Artificial Sequence
  Synthetic oligonucleotide
gccatcagtgttgagttcaactactctgac

SEQ ID NO: 491324 - DNA, 30 bp, Artificial Sequence
  Synthetic oligonucleotide
gtaaaatcttagtattgattcgtgtctgac

SEQ ID NO: 491325 - DNA, 30 bp, Artificial Sequence
  Synthetic oligonucleotide
aagcctgttatgagtttatgggtgtctgac

SEQ ID NO: 491326 - DNA, 30 bp, Artificial Sequence
  Synthetic oligonucleotide
taaaacgacgcatcaggaggccattctgac

SEQ ID NO: 491327 - DNA, 30 bp, Artificial Sequence
  Synthetic oligonucleotide
taaacaagtttcacggtttgttattctgac

SEQ ID NO: 491328 - DNA, 30 bp, Artificial Sequence
  Synthetic oligonucleotide
atcctccggatgtctgtcaagggttctgac

SEQ ID NO: 491329 - DNA, 30 bp, Artificial Sequence
  Synthetic oligonucleotide
tagaaacttgagggcgcatcactttctgac

SEQ ID NO: 491330 - DNA, 30 bp, Artificial Sequence
  Synthetic oligonucleotide
agatcaccgcagatatcacagggcagtgac

SEQ ID NO: 491331 - DNA, 30 bp, Artificial Sequence
  Synthetic oligonucleotide
taacacggggacttagttccatgccgtgac

SEQ ID NO: 491332 - DNA, 30 bp, Artificial Sequence
  Synthetic oligonucleotide
cctacgcactgccgctcctctataggtgac

SEQ ID NO: 491333 - DNA, 30 bp, Artificial Sequence
  Synthetic oligonucleotide
caataggattacgggtatctgttaggtgac

SEQ ID NO: 491334 - DNA, 30 bp, Artificial Sequence
  Synthetic oligonucleotide
ggcctggcggagttccaggtgtctggtgac

SEQ ID NO: 491335 - DNA, 30 bp, Artificial Sequence
  Synthetic oligonucleotide
caggtcagaaatcaccgggttctatgtgac

SEQ ID NO: 491336 - DNA, 30 bp, Artificial Sequence
  Synthetic oligonucleotide
ttaatctatttttgtggctcctcgtgtgac

SEQ ID NO: 491337 - DNA, 30 bp, Artificial Sequence
  Synthetic oligonucleotide
attaagatagggagattgtagctgtgtgac

SEQ ID NO: 491338 - DNA, 30 bp, Artificial Sequence
  Synthetic oligonucleotide
aatattattttatctgacacacgttgtgac

SEQ ID NO: 491339 - DNA, 30 bp, Artificial Sequence
  Synthetic oligonucleotide
cgtagttaaggccggttgtgggtttgtgac

SEQ ID NO: 491340 - DNA, 30 bp, Artificial Sequence
  Synthetic oligonucleotide
ttttcatagatggtcggcacattttgtgac

SEQ ID NO: 491341 - DNA, 30 bp, Artificial Sequence
  Synthetic oligonucleotide
gtctttttttagcttcagtgtgcaattgac

SEQ ID NO: 491342 - DNA, 30 bp, Artificial Sequence
  Synthetic oligonucleotide
atattccgtcctcccatgatcagaattgac

SEQ ID NO: 491343 - DNA, 30 bp, Artificial Sequence
  Synthetic oligonucleotide
ccccagcgtccagattgtcttcatattgac

SEQ ID NO: 491344 - DNA, 30 bp, Artificial Sequence
  Synthetic oligonucleotide
acttatcgtactcattttagttatattgac

SEQ ID NO: 491345 - DNA, 30 bp, Artificial Sequence
  Synthetic oligonucleotide
taacttccgtagctctagcatagacttgac

SEQ ID NO: 491346 - DNA, 30 bp, Artificial Sequence
  Synthetic oligonucleotide
tttgttaccaatacgatatctggccttgac

SEQ ID NO: 491347 - DNA, 30 bp, Artificial Sequence
  Synthetic oligonucleotide
gtatagtaggcgaccgcgtcgggtcttgac

SEQ ID NO: 491348 - DNA, 30 bp, Artificial Sequence
  Synthetic oligonucleotide
gtcatttcaatctaatattttatagttgac

SEQ ID NO: 491349 - DNA, 30 bp, Artificial Sequence
  Synthetic oligonucleotide
atcggttattgcagactggcgtacgttgac

SEQ ID NO: 491350 - DNA, 30 bp, Artificial Sequence
  Synthetic oligonucleotide
gctctgctcgatcaatgtggctcggttgac

SEQ ID NO: 491351 - DNA, 30 bp, Artificial Sequence
  Synthetic oligonucleotide
cgcatacctaacaagggcaagttatttgac

SEQ ID NO: 491352 - DNA, 30 bp, Artificial Sequence
  Synthetic oligonucleotide
ttgagttccgggtggtacttttactttgac

SEQ ID NO: 491353 - DNA, 30 bp, Artificial Sequence
  Synthetic oligonucleotide
gcttggggcttgtagtagggcacctttgac

SEQ ID NO: 491354 - DNA, 30 bp, Artificial Sequence
  Synthetic oligonucleotide
attagcaatgttaatggtacggagtttgac

SEQ ID NO: 491355 - DNA, 30 bp, Artificial Sequence
  Synthetic oligonucleotide
ggagcgcctaatcacgcggggtggtttgac

SEQ ID NO: 491356 - DNA, 30 bp, Artificial Sequence
  Synthetic oligonucleotide
ggggtatttcaaaatggccgttattttgac

SEQ ID NO: 491357 - DNA, 30 bp, Artificial Sequence
  Synthetic oligonucleotide
ggttaagtacgaagcttgataaaaaaatac

SEQ ID NO: 491358 - DNA, 30 bp, Artificial Sequence
  Synthetic oligonucleotide
tgttcttatatggatgctagaagcaaatac

SEQ ID NO: 491359 - DNA, 30 bp, Artificial Sequence
  Synthetic oligonucleotide
atttattatggtgcgcatacatgcaaatac

SEQ ID NO: 491360 - DNA, 30 bp, Artificial Sequence
  Synthetic oligonucleotide
atgaacagcaggtaagactggtagaaatac

SEQ ID NO: 491361 - DNA, 30 bp, Artificial Sequence
  Synthetic oligonucleotide
catattactatacccttttgtccgaaatac

SEQ ID NO: 491362 - DNA, 30 bp, Artificial Sequence
  Synthetic oligonucleotide
cggcagggtatttctcgggtttggaaatac

SEQ ID NO: 491363 - DNA, 30 bp, Artificial Sequence
  Synthetic oligonucleotide
tatgggtaaccgtatccaggctttaaatac

SEQ ID NO: 491364 - DNA, 30 bp, Artificial Sequence
  Synthetic oligonucleotide
tgtagtttgatggccacaagggcacaatac

SEQ ID NO: 491365 - DNA, 30 bp, Artificial Sequence
  Synthetic oligonucleotide
acggatcactcaaggccaactagacaatac

SEQ ID NO: 491366 - DNA, 30 bp, Artificial Sequence
  Synthetic oligonucleotide
cttgttcgcaactaaggaaggaaccaatac

SEQ ID NO: 491367 - DNA, 30 bp, Artificial Sequence
  Synthetic oligonucleotide
ccagatgtctagtcgttgggcggccaatac

SEQ ID NO: 491368 - DNA, 30 bp, Artificial Sequence
  Synthetic oligonucleotide
gtctcttgtttctaacgccggttccaatac

SEQ ID NO: 491369 - DNA, 30 bp, Artificial Sequence
  Synthetic oligonucleotide
aacccgatgtcatttgacgtcaatcaatac

SEQ ID NO: 491370 - DNA, 30 bp, Artificial Sequence
  Synthetic oligonucleotide
tttggcgaaaccttctccgatagtcaatac

SEQ ID NO: 491371 - DNA, 30 bp, Artificial Sequence
  Synthetic oligonucleotide
gtaccaaacctgatttgattaattcaatac

SEQ ID NO: 491372 - DNA, 30 bp, Artificial Sequence
  Synthetic oligonucleotide
gagaaattgttagtcacggtacttcaatac

SEQ ID NO: 491373 - DNA, 30 bp, Artificial Sequence
  Synthetic oligonucleotide
tagattctatgtaagcagtattttcaatac

SEQ ID NO: 491374 - DNA, 30 bp, Artificial Sequence
  Synthetic oligonucleotide
aatgacaagatatacaataaaaaagaatac

SEQ ID NO: 491375 - DNA, 30 bp, Artificial Sequence
  Synthetic oligonucleotide
tcacacacctcaggggacgagatagaatac

SEQ ID NO: 491376 - DNA, 29 bp, Artificial Sequence
  Synthetic oligonucleotide
tgaaggtaaggttaattatattagaatac

SEQ ID NO: 491377 - DNA, 30 bp, Artificial Sequence
  Synthetic oligonucleotide
ttcaagtgtatatggtagggttccgaatac

SEQ ID NO: 491378 - DNA, 31 bp, Artificial Sequence
  Synthetic oligonucleotide
ttgacacttgtggtacatcctttcggaatac

SEQ ID NO: 491379 - DNA, 30 bp, Artificial Sequence
  Synthetic oligonucleotide
catcaaaggtaccagtgtaatagggaatac

SEQ ID NO: 491380 - DNA, 30 bp, Artificial Sequence
  Synthetic oligonucleotide
cgggtcatgaattgcgatcgcatggaatac

SEQ ID NO: 491381 - DNA, 30 bp, Artificial Sequence
  Synthetic oligonucleotide
ccagttacagggttaaggtgcgatgaatac

SEQ ID NO: 491382 - DNA, 30 bp, Artificial Sequence
  Synthetic oligonucleotide
gagtgattgtataaatccaagtttgaatac

SEQ ID NO: 491383 - DNA, 30 bp, Artificial Sequence
  Synthetic oligonucleotide
caatatatggtttcgagcgaggaataatac

SEQ ID NO: 491384 - DNA, 30 bp, Artificial Sequence
  Synthetic oligonucleotide
tccacatggcgcaacgcgaatggctaatac

SEQ ID NO: 491385 - DNA, 30 bp, Artificial Sequence
  Synthetic oligonucleotide
taaagcctctctgaacattagttctaatac

SEQ ID NO: 491386 - DNA, 30 bp, Artificial Sequence
  Synthetic oligonucleotide
ttttaaagctattgtcagaatcagtaatac

SEQ ID NO: 491387 - DNA, 30 bp, Artificial Sequence
  Synthetic oligonucleotide
ggggtactaccttgccgcggcgcgtaatac

SEQ ID NO: 491388 - DNA, 30 bp, Artificial Sequence
  Synthetic oligonucleotide
ggagacaatccaggaaactgttcgtaatac

SEQ ID NO: 491389 - DNA, 30 bp, Artificial Sequence
  Synthetic oligonucleotide
atcgtaagacggttaccgccggggtaatac

SEQ ID NO: 491390 - DNA, 30 bp, Artificial Sequence
  Synthetic oligonucleotide
caaccccgagaggggtcgctgatgtaatac

SEQ ID NO: 491391 - DNA, 30 bp, Artificial Sequence
  Synthetic oligonucleotide
agccgggtgtaggagccgattaattaatac

SEQ ID NO: 491392 - DNA, 30 bp, Artificial Sequence
  Synthetic oligonucleotide
catcaggatactgggctacaatattaatac

SEQ ID NO: 491393 - DNA, 30 bp, Artificial Sequence
  Synthetic oligonucleotide
tgtaagccagcacacggtagcacttaatac

SEQ ID NO: 491394 - DNA, 30 bp, Artificial Sequence
  Synthetic oligonucleotide
tgtcaatatttgaacatcacaatttaatac

SEQ ID NO: 491395 - DNA, 30 bp, Artificial Sequence
  Synthetic oligonucleotide
cgctgctctgcttattagagtatttaatac

SEQ ID NO: 491396 - DNA, 29 bp, Artificial Sequence
  Synthetic oligonucleotide
gttttgatctggactacctgagaacatac

SEQ ID NO: 491397 - DNA, 30 bp, Artificial Sequence
  Synthetic oligonucleotide
cgcgacaatgtccacgcttgtcagacatac

SEQ ID NO: 491398 - DNA, 30 bp, Artificial Sequence
  Synthetic oligonucleotide
gagtggtaccgtgggttcaagttgacatac

SEQ ID NO: 491399 - DNA, 30 bp, Artificial Sequence
  Synthetic oligonucleotide
attcaaatcacaacagcagggagtacatac

SEQ ID NO: 491400 - DNA, 30 bp, Artificial Sequence
  Synthetic oligonucleotide
gaggactaggacggtgatgggagaccatac

SEQ ID NO: 491401 - DNA, 30 bp, Artificial Sequence
  Synthetic oligonucleotide
taaagtagtttgtagcgcacgcgaccatac

SEQ ID NO: 491402 - DNA, 30 bp, Artificial Sequence
  Synthetic oligonucleotide
gtcttgcggaggcttgtatcgtgaccatac

SEQ ID NO: 491403 - DNA, 30 bp, Artificial Sequence
  Synthetic oligonucleotide
tattcaccgaagtaagaaactagcccatac

SEQ ID NO: 491404 - DNA, 30 bp, Artificial Sequence
  Synthetic oligonucleotide
cgatcacggtggttcgtgattacgccatac

SEQ ID NO: 491405 - DNA, 30 bp, Artificial Sequence
  Synthetic oligonucleotide
gaccaacccggtaccggttttaggccatac

SEQ ID NO: 491406 - DNA, 30 bp, Artificial Sequence
  Synthetic oligonucleotide
cttagtccgtttgtaaaatgtaatccatac

SEQ ID NO: 491407 - DNA, 30 bp, Artificial Sequence
  Synthetic oligonucleotide
tgatggtagattgacgtaaaaggtccatac

SEQ ID NO: 491408 - DNA, 30 bp, Artificial Sequence
  Synthetic oligonucleotide
caacaacgactgcaatatgggaaagcatac

SEQ ID NO: 491409 - DNA, 30 bp, Artificial Sequence
  Synthetic oligonucleotide
gaatttcagcacggggtctttgcagcatac

SEQ ID NO: 491410 - DNA, 30 bp, Artificial Sequence
  Synthetic oligonucleotide
aaatggtcgccttgcacgcataacgcatac

SEQ ID NO: 491411 - DNA, 30 bp, Artificial Sequence
  Synthetic oligonucleotide
aataatattaaagcccgtaagcccgcatac

SEQ ID NO: 491412 - DNA, 30 bp, Artificial Sequence
  Synthetic oligonucleotide
aatactgttcgctaatgtgttctcgcatac

SEQ ID NO: 491413 - DNA, 30 bp, Artificial Sequence
  Synthetic oligonucleotide
tgaagcagcacgcgaacacagggggcatac

SEQ ID NO: 491414 - DNA, 30 bp, Artificial Sequence
  Synthetic oligonucleotide
tgaaaggactagattcatgttggggcatac

SEQ ID NO: 491415 - DNA, 30 bp, Artificial Sequence
  Synthetic oligonucleotide
cacatgacctttgttactcagctggcatac

SEQ ID NO: 491416 - DNA, 30 bp, Artificial Sequence
  Synthetic oligonucleotide
tgacaagctatctaacgcaggttggcatac

SEQ ID NO: 491417 - DNA, 30 bp, Artificial Sequence
  Synthetic oligonucleotide
gaccgtctcgcttgacctggcgcctcatac

SEQ ID NO: 491418 - DNA, 30 bp, Artificial Sequence
  Synthetic oligonucleotide
actgaataggtcgaagatgtttcctcatac

SEQ ID NO: 491419 - DNA, 30 bp, Artificial Sequence
  Synthetic oligonucleotide
cattcgagtgtcagttgcagatagtcatac

SEQ ID NO: 491420 - DNA, 30 bp, Artificial Sequence
  Synthetic oligonucleotide
actctcagtacgctagactgatattcatac

SEQ ID NO: 491421 - DNA, 30 bp, Artificial Sequence
  Synthetic oligonucleotide
ttctctttcgccaatgtaaggcagagatac

SEQ ID NO: 491422 - DNA, 30 bp, Artificial Sequence
  Synthetic oligonucleotide
gtagcaggttaccctactgaatgtagatac

SEQ ID NO: 491423 - DNA, 30 bp, Artificial Sequence
  Synthetic oligonucleotide
tttggtcgtgcccgtccgctaaaacgatac

SEQ ID NO: 491424 - DNA, 30 bp, Artificial Sequence
  Synthetic oligonucleotide
tatgagacaatgcctatgtgcagacgatac

SEQ ID NO: 491425 - DNA, 30 bp, Artificial Sequence
  Synthetic oligonucleotide
agtgtttcctactgacaaatcttacgatac

SEQ ID NO: 491426 - DNA, 30 bp, Artificial Sequence
  Synthetic oligonucleotide
gcgcatagggaattttttaacgaccgatac

SEQ ID NO: 491427 - DNA, 30 bp, Artificial Sequence
  Synthetic oligonucleotide
gcgggtgccacccagagtcccacccgatac

SEQ ID NO: 491428 - DNA, 30 bp, Artificial Sequence
  Synthetic oligonucleotide
atccaagcccacctatggtattaaggatac

SEQ ID NO: 491429 - DNA, 30 bp, Artificial Sequence
  Synthetic oligonucleotide
gatcccgcatagaacaaccgccgaggatac

SEQ ID NO: 491430 - DNA, 30 bp, Artificial Sequence
  Synthetic oligonucleotide
cggagacctagccatcttgggctaggatac

SEQ ID NO: 491431 - DNA, 30 bp, Artificial Sequence
  Synthetic oligonucleotide
ttaaagccgagaggccattagacgggatac

SEQ ID NO: 491432 - DNA, 30 bp, Artificial Sequence
  Synthetic oligonucleotide
ttcaactttaattattagctagcgggatac

SEQ ID NO: 491433 - DNA, 30 bp, Artificial Sequence
  Synthetic oligonucleotide
tacagcttttagttgtctagctcgggatac

SEQ ID NO: 491434 - DNA, 30 bp, Artificial Sequence
  Synthetic oligonucleotide
agactggccttactggcgtatggatgatac

SEQ ID NO: 491435 - DNA, 30 bp, Artificial Sequence
  Synthetic oligonucleotide
gcagctgtcacgcgttttaatgtgtgatac

SEQ ID NO: 491436 - DNA, 30 bp, Artificial Sequence
  Synthetic oligonucleotide
gttgcaaagcgtagaagggcccattgatac

SEQ ID NO: 491437 - DNA, 30 bp, Artificial Sequence
  Synthetic oligonucleotide
ggttctcctatttctgacacggaaatatac

SEQ ID NO: 491438 - DNA, 30 bp, Artificial Sequence
  Synthetic oligonucleotide
aatgtgagtcctttcctgtgcataatatac

SEQ ID NO: 491439 - DNA, 30 bp, Artificial Sequence
  Synthetic oligonucleotide
ccccttccttacaagcttaacttcatatac

SEQ ID NO: 491440 - DNA, 30 bp, Artificial Sequence
  Synthetic oligonucleotide
ccacggcatcacgggcaacgcgggatatac

SEQ ID NO: 491441 - DNA, 29 bp, Artificial Sequence
  Synthetic oligonucleotide
gagtcagtttcatatgttggatgatatac

SEQ ID NO: 491442 - DNA, 30 bp, Artificial Sequence
  Synthetic oligonucleotide
tgcatactttattcttcttagttgatatac

SEQ ID NO: 491443 - DNA, 30 bp, Artificial Sequence
  Synthetic oligonucleotide
ccccatcgaaccatggtcgcaaatatatac

SEQ ID NO: 491444 - DNA, 30 bp, Artificial Sequence
  Synthetic oligonucleotide
gggtacggccgttatatacagcatatatac

SEQ ID NO: 491445 - DNA, 30 bp, Artificial Sequence
  Synthetic oligonucleotide
cttagtctttgtcgataccaagatatatac

SEQ ID NO: 491446 - DNA, 30 bp, Artificial Sequence
  Synthetic oligonucleotide
tcttatatatccggaggggaatatatatac

SEQ ID NO: 491447 - DNA, 30 bp, Artificial Sequence
  Synthetic oligonucleotide
ggctccagctctcctgaccgaactatatac

SEQ ID NO: 491448 - DNA, 30 bp, Artificial Sequence
  Synthetic oligonucleotide
cgcttatttatgatcgcgaatcgactatac

SEQ ID NO: 491449 - DNA, 30 bp, Artificial Sequence
  Synthetic oligonucleotide
atccgtggctttcgtgctcacgacctatac

SEQ ID NO: 491450 - DNA, 30 bp, Artificial Sequence
  Synthetic oligonucleotide
ttgtctcgagctcccttctctgacctatac

SEQ ID NO: 491451 - DNA, 30 bp, Artificial Sequence
  Synthetic oligonucleotide
attgtcatcacgcatctgggttacctatac

SEQ ID NO: 491452 - DNA, 30 bp, Artificial Sequence
  Synthetic oligonucleotide
tacgctgaaacggttgcagttggcctatac

SEQ ID NO: 491453 - DNA, 30 bp, Artificial Sequence
  Synthetic oligonucleotide
tagactcgcggataggacaccttcctatac

SEQ ID NO: 491454 - DNA, 30 bp, Artificial Sequence
  Synthetic oligonucleotide
cgtcactgtttcccgtttgcacagctatac

SEQ ID NO: 491455 - DNA, 30 bp, Artificial Sequence
  Synthetic oligonucleotide
tccatcatatacgtttacaccgcagtatac

SEQ ID NO: 491456 - DNA, 30 bp, Artificial Sequence
  Synthetic oligonucleotide
gtgtattttcggataattgagggagtatac

SEQ ID NO: 491457 - DNA, 30 bp, Artificial Sequence
  Synthetic oligonucleotide
cccgcctgataagtataaaccctagtatac

SEQ ID NO: 491458 - DNA, 30 bp, Artificial Sequence
  Synthetic oligonucleotide
aaaaatcgggataattgggcgttagtatac

SEQ ID NO: 491459 - DNA, 30 bp, Artificial Sequence
  Synthetic oligonucleotide
gaaagagctgttaccccggagctcgtatac

SEQ ID NO: 491460 - DNA, 30 bp, Artificial Sequence
  Synthetic oligonucleotide
tggccccaccgatgtgaaaggcgggtatac

SEQ ID NO: 491461 - DNA, 30 bp, Artificial Sequence
  Synthetic oligonucleotide
tttggtcgttatcggccatgcgatgtatac

SEQ ID NO: 491462 - DNA, 30 bp, Artificial Sequence
  Synthetic oligonucleotide
aaagccatggactcagcttgcattgtatac

SEQ ID NO: 491463 - DNA, 30 bp, Artificial Sequence
  Synthetic oligonucleotide
atgtgtatacgaaagtagactatcttatac

SEQ ID NO: 491464 - DNA, 30 bp, Artificial Sequence
  Synthetic oligonucleotide
tgacggccatacaacccttgtctcttatac

SEQ ID NO: 491465 - DNA, 30 bp, Artificial Sequence
  Synthetic oligonucleotide
acccttatggtatacgtaccggtgttatac

SEQ ID NO: 491466 - DNA, 30 bp, Artificial Sequence
  Synthetic oligonucleotide
ggtggcgtaagccgaagtctcattttatac

SEQ ID NO: 491467 - DNA, 30 bp, Artificial Sequence
  Synthetic oligonucleotide
gtccacatagtgagcagttatcttttatac

SEQ ID NO: 491468 - DNA, 30 bp, Artificial Sequence
  Synthetic oligonucleotide
agatgattagacccgacacgtgtaaactac

SEQ ID NO: 491469 - DNA, 30 bp, Artificial Sequence
  Synthetic oligonucleotide
ctctgtctagagattggtcgctacaactac

SEQ ID NO: 491470 - DNA, 30 bp, Artificial Sequence
  Synthetic oligonucleotide
tagggcgcaaggaaaaccagtgtgaactac

SEQ ID NO: 491471 - DNA, 30 bp, Artificial Sequence
  Synthetic oligonucleotide
tatatgttaaatccttcaaagaataactac

SEQ ID NO: 491472 - DNA, 30 bp, Artificial Sequence
  Synthetic oligonucleotide
tatcagcaaattagctaatctactaactac

SEQ ID NO: 491473 - DNA, 30 bp, Artificial Sequence
  Synthetic oligonucleotide
gccgtctaagcgcaacacgcgcttaactac

SEQ ID NO: 491474 - DNA, 30 bp, Artificial Sequence
  Synthetic oligonucleotide
ttcccgcgcattgagtacaccctacactac

SEQ ID NO: 491475 - DNA, 30 bp, Artificial Sequence
  Synthetic oligonucleotide
tctgttgacaggatcataatactccactac

SEQ ID NO: 491476 - DNA, 30 bp, Artificial Sequence
  Synthetic oligonucleotide
tcaagccgggtgatataccccatgcactac

SEQ ID NO: 491477 - DNA, 30 bp, Artificial Sequence
  Synthetic oligonucleotide
cctagcagcacgtgagtactctatcactac

SEQ ID NO: 491478 - DNA, 30 bp, Artificial Sequence
  Synthetic oligonucleotide
tcataggtttctagtggtacgtcagactac

SEQ ID NO: 491479 - DNA, 30 bp, Artificial Sequence
  Synthetic oligonucleotide
aataagaattctgctaggattcgcgactac

SEQ ID NO: 491480 - DNA, 30 bp, Artificial Sequence
  Synthetic oligonucleotide
acataatctggataccttcggggcgactac

SEQ ID NO: 491481 - DNA, 30 bp, Artificial Sequence
  Synthetic oligonucleotide
gaaataaaggtattttgggcttatgactac

SEQ ID NO: 491482 - DNA, 30 bp, Artificial Sequence
  Synthetic oligonucleotide
tgaagcatcagtctggttgatgctgactac

SEQ ID NO: 491483 - DNA, 30 bp, Artificial Sequence
  Synthetic oligonucleotide
gacccgtgtttttaaacagaaggtgactac

SEQ ID NO: 491484 - DNA, 30 bp, Artificial Sequence
  Synthetic oligonucleotide
tgtacatcactaaatgctctcaaatactac

SEQ ID NO: 491485 - DNA, 30 bp, Artificial Sequence
  Synthetic oligonucleotide
tttcattcgaattatgtcattgaatactac

SEQ ID NO: 491486 - DNA, 30 bp, Artificial Sequence
  Synthetic oligonucleotide
tttctttatttgtaggtcgggccatactac

SEQ ID NO: 491487 - DNA, 30 bp, Artificial Sequence
  Synthetic oligonucleotide
ctcccgtcttagaccagctacccctactac

SEQ ID NO: 491488 - DNA, 30 bp, Artificial Sequence
  Synthetic oligonucleotide
cacgccacgggaataaagtgacattactac

SEQ ID NO: 491489 - DNA, 30 bp, Artificial Sequence
  Synthetic oligonucleotide
tactattccacacacacccgagtttactac

SEQ ID NO: 491490 - DNA, 30 bp, Artificial Sequence
  Synthetic oligonucleotide
agcccttacgctacatctgaccaaacctac

SEQ ID NO: 491491 - DNA, 30 bp, Artificial Sequence
  Synthetic oligonucleotide
ctctgggggaacgtcggcttaatcacctac

SEQ ID NO: 491492 - DNA, 30 bp, Artificial Sequence
  Synthetic oligonucleotide
gaggttttgagtttacgtaactagacctac

SEQ ID NO: 491493 - DNA, 30 bp, Artificial Sequence
  Synthetic oligonucleotide
cttcatttcttaattaggacacggacctac

SEQ ID NO: 491494 - DNA, 30 bp, Artificial Sequence
  Synthetic oligonucleotide
cacgcttaagcggtgtgagcactgacctac

SEQ ID NO: 491495 - DNA, 30 bp, Artificial Sequence
  Synthetic oligonucleotide
ttttaccgtaacctaaagtcactgacctac

SEQ ID NO: 491496 - DNA, 30 bp, Artificial Sequence
  Synthetic oligonucleotide
cattagacgtttgtttagtcgtttacctac

SEQ ID NO: 491497 - DNA, 30 bp, Artificial Sequence
  Synthetic oligonucleotide
cccctacctaacatcacatgaacaccctac

SEQ ID NO: 491498 - DNA, 30 bp, Artificial Sequence
  Synthetic oligonucleotide
gcaatcaccgcgtcataattgcgaccctac

SEQ ID NO: 491499 - DNA, 30 bp, Artificial Sequence
  Synthetic oligonucleotide
tgatactaaggcgggtgtgctggaccctac

SEQ ID NO: 491500 - DNA, 30 bp, Artificial Sequence
  Synthetic oligonucleotide
ccgtgtatctggccaagcggcgggccctac

SEQ ID NO: 491501 - DNA, 30 bp, Artificial Sequence
  Synthetic oligonucleotide
aaacttccaatgtgatcgcgtgctccctac

SEQ ID NO: 491502 - DNA, 30 bp, Artificial Sequence
  Synthetic oligonucleotide
aaaccgataccatcgccccgataagcctac

SEQ ID NO: 491503 - DNA, 30 bp, Artificial Sequence
  Synthetic oligonucleotide
tgaactgggagtagggccccatgcgcctac

SEQ ID NO: 491504 - DNA, 30 bp, Artificial Sequence
  Synthetic oligonucleotide
cgtgtgagtagttcttccgtcacctcctac

SEQ ID NO: 491505 - DNA, 30 bp, Artificial Sequence
  Synthetic oligonucleotide
ctcgccgccatgatcggaaagatctcctac

SEQ ID NO: 491506 - DNA, 30 bp, Artificial Sequence
  Synthetic oligonucleotide
tagagaaatgcagttaggataaggtcctac

SEQ ID NO: 491507 - DNA, 30 bp, Artificial Sequence
  Synthetic oligonucleotide
gaatgttttcaagacgcctcatgaagctac

SEQ ID NO: 491508 - DNA, 30 bp, Artificial Sequence
  Synthetic oligonucleotide
taaaacaccgccttgcggtgcttaagctac

SEQ ID NO: 491509 - DNA, 30 bp, Artificial Sequence
  Synthetic oligonucleotide
gaaccttaggcctggaatatccagagctac

SEQ ID NO: 491510 - DNA, 30 bp, Artificial Sequence
  Synthetic oligonucleotide
ttgattaggtcaccagcaaagcatagctac

SEQ ID NO: 491511 - DNA, 30 bp, Artificial Sequence
  Synthetic oligonucleotide
cggacctgatgccgggtgactaaacgctac

SEQ ID NO: 491512 - DNA, 30 bp, Artificial Sequence
  Synthetic oligonucleotide
cgtcttccgagaagcagcaatacacgctac

SEQ ID NO: 491513 - DNA, 30 bp, Artificial Sequence
  Synthetic oligonucleotide
atgttgtccgggtgagtccacgcacgctac

SEQ ID NO: 491514 - DNA, 30 bp, Artificial Sequence
  Synthetic oligonucleotide
gagcgcatatcctgtatagctcgacgctac

SEQ ID NO: 491515 - DNA, 30 bp, Artificial Sequence
  Synthetic oligonucleotide
cggagatgtatgtttggtatcgcccgctac

SEQ ID NO: 491516 - DNA, 30 bp, Artificial Sequence
  Synthetic oligonucleotide
ggtggcaagcattggacatgggcccgctac

SEQ ID NO: 491517 - DNA, 30 bp, Artificial Sequence
  Synthetic oligonucleotide
ttgccggcgggtggaattcgtagaggctac

SEQ ID NO: 491518 - DNA, 30 bp, Artificial Sequence
  Synthetic oligonucleotide
gagcgggtctaaaggcgtaacaagggctac

SEQ ID NO: 491519 - DNA, 30 bp, Artificial Sequence
  Synthetic oligonucleotide
gagtcgctgcgatatcttccgtcgggctac

SEQ ID NO: 491520 - DNA, 30 bp, Artificial Sequence
  Synthetic oligonucleotide
cctggaaattagccttttgtacttggctac

SEQ ID NO: 491521 - DNA, 30 bp, Artificial Sequence
  Synthetic oligonucleotide
actagccatctactcgactttgtgtgctac

SEQ ID NO: 491522 - DNA, 30 bp, Artificial Sequence
  Synthetic oligonucleotide
atcagggacaaagacgagtcctaaatctac

SEQ ID NO: 491523 - DNA, 30 bp, Artificial Sequence
  Synthetic oligonucleotide
aataacctgtgcatccctttcagaatctac

SEQ ID NO: 491524 - DNA, 30 bp, Artificial Sequence
  Synthetic oligonucleotide
ctttaaatgtaaataaacattgtaatctac

SEQ ID NO: 491525 - DNA, 30 bp, Artificial Sequence
  Synthetic oligonucleotide
catgtaataatcaaaaagcttctcatctac

SEQ ID NO: 491526 - DNA, 30 bp, Artificial Sequence
  Synthetic oligonucleotide
gtagaaggcaatgtaacagtccagatctac

SEQ ID NO: 491527 - DNA, 30 bp, Artificial Sequence
  Synthetic oligonucleotide
ctaagccagtaagaagactatgagatctac

SEQ ID NO: 491528 - DNA, 30 bp, Artificial Sequence
  Synthetic oligonucleotide
atctcatctcaatttctagtttttatctac

SEQ ID NO: 491529 - DNA, 30 bp, Artificial Sequence
  Synthetic oligonucleotide
gagtttactaacttcgcataagaactctac

SEQ ID NO: 491530 - DNA, 30 bp, Artificial Sequence
  Synthetic oligonucleotide
gttcatataatttcgtaccaggacctctac

SEQ ID NO: 491531 - DNA, 30 bp, Artificial Sequence
  Synthetic oligonucleotide
agtgtaccgggccccggccgaggcctctac

SEQ ID NO: 491532 - DNA, 30 bp, Artificial Sequence
  Synthetic oligonucleotide
ttacaagggccttttctgagatggctctac

SEQ ID NO: 491533 - DNA, 30 bp, Artificial Sequence
  Synthetic oligonucleotide
aggttttagaaattgcaaatctgtctctac

SEQ ID NO: 491534 - DNA, 30 bp, Artificial Sequence
  Synthetic oligonucleotide
ccacccggaaaaatactacggtttctctac

SEQ ID NO: 491535 - DNA, 30 bp, Artificial Sequence
  Synthetic oligonucleotide
agatttttgggcgcgcaagcacacgtctac

SEQ ID NO: 491536 - DNA, 30 bp, Artificial Sequence
  Synthetic oligonucleotide
cagaaacaaaatgcggtagatacggtctac

SEQ ID NO: 491537 - DNA, 30 bp, Artificial Sequence
  Synthetic oligonucleotide
tcacttgcctgttcgtaatctggggtctac

SEQ ID NO: 491538 - DNA, 30 bp, Artificial Sequence
  Synthetic oligonucleotide
cgctagctgggatagacatgtagtgtctac

SEQ ID NO: 491539 - DNA, 30 bp, Artificial Sequence
  Synthetic oligonucleotide
aaacgggcggtctttgtctagtcattctac

SEQ ID NO: 491540 - DNA, 30 bp, Artificial Sequence
  Synthetic oligonucleotide
tgcgctcgacgcttttgcggcggattctac

SEQ ID NO: 491541 - DNA, 30 bp, Artificial Sequence
  Synthetic oligonucleotide
agccaatcgcttgcaccgcgtatattctac

SEQ ID NO: 491542 - DNA, 30 bp, Artificial Sequence
  Synthetic oligonucleotide
ccacgaaagctgacagtagtcttgttctac

SEQ ID NO: 491543 - DNA, 30 bp, Artificial Sequence
  Synthetic oligonucleotide
tttgcatgaaccagagttttcttgttctac

SEQ ID NO: 491544 - DNA, 30 bp, Artificial Sequence
  Synthetic oligonucleotide
tggaggtcatttaatataggaattttctac

SEQ ID NO: 491545 - DNA, 30 bp, Artificial Sequence
  Synthetic oligonucleotide
cgatactacgctggctcgggctacaagtac

SEQ ID NO: 491546 - DNA, 27 bp, Artificial Sequence
  Synthetic oligonucleotide
ataattggaggctttggtacgaagtac

SEQ ID NO: 491547 - DNA, 31 bp, Artificial Sequence
  Synthetic oligonucleotide
gtatgtgatgtctaggggcccggggaagtac

SEQ ID NO: 491548 - DNA, 30 bp, Artificial Sequence
  Synthetic oligonucleotide
tatttccagaccttcggagggtataagtac

SEQ ID NO: 491549 - DNA, 30 bp, Artificial Sequence
  Synthetic oligonucleotide
gtttctgtcctagttaccccgactaagtac

SEQ ID NO: 491550 - DNA, 30 bp, Artificial Sequence
  Synthetic oligonucleotide
acctttttttccggccgtgcggctaagtac

SEQ ID NO: 491551 - DNA, 30 bp, Artificial Sequence
  Synthetic oligonucleotide
acttgattgacatatcgttttgctaagtac

SEQ ID NO: 491552 - DNA, 30 bp, Artificial Sequence
  Synthetic oligonucleotide
gccctgcgcatcggagttaggccccagtac

SEQ ID NO: 491553 - DNA, 30 bp, Artificial Sequence
  Synthetic oligonucleotide
tcgctaggagacctaatgctaggccagtac

SEQ ID NO: 491554 - DNA, 30 bp, Artificial Sequence
  Synthetic oligonucleotide
gcacaggtccctcagcttatggggcagtac

SEQ ID NO: 491555 - DNA, 30 bp, Artificial Sequence
  Synthetic oligonucleotide
tttgggtcaccttgtgccaagcgtcagtac

SEQ ID NO: 491556 - DNA, 30 bp, Artificial Sequence
  Synthetic oligonucleotide
ggtaggaatatttgacgatgtattcagtac

SEQ ID NO: 491557 - DNA, 30 bp, Artificial Sequence
  Synthetic oligonucleotide
ggctatagggcaatttacttttcagagtac

SEQ ID NO: 491558 - DNA, 30 bp, Artificial Sequence
  Synthetic oligonucleotide
tttataaactccggctggagctgggagtac

SEQ ID NO: 491559 - DNA, 30 bp, Artificial Sequence
  Synthetic oligonucleotide
aaacggagatgtatcgcgagaatggagtac

SEQ ID NO: 491560 - DNA, 30 bp, Artificial Sequence
  Synthetic oligonucleotide
ttggggcatacgacagcggaactggagtac

SEQ ID NO: 491561 - DNA, 30 bp, Artificial Sequence
  Synthetic oligonucleotide
gatctacgttcagcttcacgcctggagtac

SEQ ID NO: 491562 - DNA, 30 bp, Artificial Sequence
  Synthetic oligonucleotide
gtcctatggccgccctgctgttatgagtac

SEQ ID NO: 491563 - DNA, 30 bp, Artificial Sequence
  Synthetic oligonucleotide
gtcaacaaagcgtaagttcggcctgagtac

SEQ ID NO: 491564 - DNA, 30 bp, Artificial Sequence
  Synthetic oligonucleotide
gtctgtagtagggctaagaagcgctagtac

SEQ ID NO: 491565 - DNA, 30 bp, Artificial Sequence
  Synthetic oligonucleotide
atactatttttctcctcgaggaggtagtac

SEQ ID NO: 491566 - DNA, 30 bp, Artificial Sequence
  Synthetic oligonucleotide
ctcccgcagacaacagcatgttcttagtac

SEQ ID NO: 491567 - DNA, 30 bp, Artificial Sequence
  Synthetic oligonucleotide
gccttaattggtgaattgtcctgttagtac

SEQ ID NO: 491568 - DNA, 30 bp, Artificial Sequence
  Synthetic oligonucleotide
aacaatacgcctgacaataccaaaacgtac

SEQ ID NO: 491569 - DNA, 30 bp, Artificial Sequence
  Synthetic oligonucleotide
ttgactaacggggtgccgtaggcaacgtac

SEQ ID NO: 491570 - DNA, 30 bp, Artificial Sequence
  Synthetic oligonucleotide
tctatagtataagagttgatgctcacgtac

SEQ ID NO: 491571 - DNA, 30 bp, Artificial Sequence
  Synthetic oligonucleotide
aagtcaacgtcactaactgattggacgtac

SEQ ID NO: 491572 - DNA, 30 bp, Artificial Sequence
  Synthetic oligonucleotide
ggtcagcattatcgaagtggttcaccgtac

SEQ ID NO: 491573 - DNA, 30 bp, Artificial Sequence
  Synthetic oligonucleotide
tatgcaggttaatacgagcgaatcccgtac

SEQ ID NO: 491574 - DNA, 30 bp, Artificial Sequence
  Synthetic oligonucleotide
tatttgagaacagccagcgtaaaagcgtac

SEQ ID NO: 491575 - DNA, 30 bp, Artificial Sequence
  Synthetic oligonucleotide
ggacaagaaaagttataaaagaaagcgtac

SEQ ID NO: 491576 - DNA, 30 bp, Artificial Sequence
  Synthetic oligonucleotide
ctgagttgggaggcgtttgcaaacgcgtac

SEQ ID NO: 491577 - DNA, 30 bp, Artificial Sequence
  Synthetic oligonucleotide
actggggttgattcatcacaagacgcgtac

SEQ ID NO: 491578 - DNA, 30 bp, Artificial Sequence
  Synthetic oligonucleotide
ttttttcgtagtatatgacaaaaggcgtac

SEQ ID NO: 491579 - DNA, 30 bp, Artificial Sequence
  Synthetic oligonucleotide
gagaccgtcacaattggcttgatggcgtac

SEQ ID NO: 491580 - DNA, 30 bp, Artificial Sequence
  Synthetic oligonucleotide
agggagtctggaatgtgcttatatgcgtac

SEQ ID NO: 491581 - DNA, 30 bp, Artificial Sequence
  Synthetic oligonucleotide
aaaactaaaattgtaggaccgcgtgcgtac

SEQ ID NO: 491582 - DNA, 30 bp, Artificial Sequence
  Synthetic oligonucleotide
cttatatatatcagcgtcacttcctcgtac

SEQ ID NO: 491583 - DNA, 30 bp, Artificial Sequence
  Synthetic oligonucleotide
tagttgaagattgcgtatcgtgtctcgtac

SEQ ID NO: 491584 - DNA, 30 bp, Artificial Sequence
  Synthetic oligonucleotide
gaatctaacccgctaacttcatgttcgtac

SEQ ID NO: 491585 - DNA, 30 bp, Artificial Sequence
  Synthetic oligonucleotide
aacaagggcgctctatttaaattttcgtac

SEQ ID NO: 491586 - DNA, 30 bp, Artificial Sequence
  Synthetic oligonucleotide
gtgcaagcacaaagatcttgcacaaggtac

SEQ ID NO: 491587 - DNA, 30 bp, Artificial Sequence
  Synthetic oligonucleotide
cccgctatgcgggccaaggccctaaggtac

SEQ ID NO: 491588 - DNA, 29 bp, Artificial Sequence
  Synthetic oligonucleotide
ttagacagattgcctttacgaagaggtac

SEQ ID NO: 491589 - DNA, 30 bp, Artificial Sequence
  Synthetic oligonucleotide
tcaggatccaggagaaccgatgctaggtac

SEQ ID NO: 491590 - DNA, 30 bp, Artificial Sequence
  Synthetic oligonucleotide
tgcgctaattcttccccttaaagtaggtac

SEQ ID NO: 491591 - DNA, 30 bp, Artificial Sequence
  Synthetic oligonucleotide
gccactatgtttagttttacctttaggtac

SEQ ID NO: 491592 - DNA, 30 bp, Artificial Sequence
  Synthetic oligonucleotide
gagccccggaggagctgtttaacccggtac

SEQ ID NO: 491593 - DNA, 30 bp, Artificial Sequence
  Synthetic oligonucleotide
ctgaccagttgcctgttcaggacccggtac

SEQ ID NO: 491594 - DNA, 30 bp, Artificial Sequence
  Synthetic oligonucleotide
gacactgaaactagtgagtcatatcggtac

SEQ ID NO: 491595 - DNA, 30 bp, Artificial Sequence
  Synthetic oligonucleotide
agtcttcgagttaagagcccgggtcggtac

SEQ ID NO: 491596 - DNA, 30 bp, Artificial Sequence
  Synthetic oligonucleotide
tcggcattattacaatttatagttcggtac

SEQ ID NO: 491597 - DNA, 30 bp, Artificial Sequence
  Synthetic oligonucleotide
gttctcattctgtgatattaccgagggtac

SEQ ID NO: 491598 - DNA, 30 bp, Artificial Sequence
  Synthetic oligonucleotide
tcaagcgtgtcgttttctttcatagggtac

SEQ ID NO: 491599 - DNA, 30 bp, Artificial Sequence
  Synthetic oligonucleotide
ataaccgcgacgaacgcatagaacgggtac

SEQ ID NO: 491600 - DNA, 30 bp, Artificial Sequence
  Synthetic oligonucleotide
accggcgtcgtttgcaaggtacatgggtac

SEQ ID NO: 491601 - DNA, 30 bp, Artificial Sequence
  Synthetic oligonucleotide
cccgaccttgacgtagaaatacttgggtac

SEQ ID NO: 491602 - DNA, 30 bp, Artificial Sequence
  Synthetic oligonucleotide
aactcctttcgttctggttctgaatggtac

SEQ ID NO: 491603 - DNA, 30 bp, Artificial Sequence
  Synthetic oligonucleotide
accggagccacattgctgagagtatggtac

SEQ ID NO: 491604 - DNA, 30 bp, Artificial Sequence
  Synthetic oligonucleotide
ggtatatagtccacgaaggcagactggtac

SEQ ID NO: 491605 - DNA, 30 bp, Artificial Sequence
  Synthetic oligonucleotide
ctggagtatcgtacacggagatgttggtac

SEQ ID NO: 491606 - DNA, 30 bp, Artificial Sequence
  Synthetic oligonucleotide
tatgttaactggcgcatctgcctttggtac

SEQ ID NO: 491607 - DNA, 30 bp, Artificial Sequence
  Synthetic oligonucleotide
cttaactttggtttaacgtaacaaatgtac

SEQ ID NO: 491608 - DNA, 30 bp, Artificial Sequence
  Synthetic oligonucleotide
aagaccagccccaaacactcctgaatgtac

SEQ ID NO: 491609 - DNA, 30 bp, Artificial Sequence
  Synthetic oligonucleotide
ggttcatgtaccttatcagggtgcatgtac

SEQ ID NO: 491610 - DNA, 30 bp, Artificial Sequence
  Synthetic oligonucleotide
atcgccagtaagctcaacgtgctcatgtac

SEQ ID NO: 491611 - DNA, 30 bp, Artificial Sequence
  Synthetic oligonucleotide
tgtaatatttcaccctcatcggggatgtac

SEQ ID NO: 491612 - DNA, 30 bp, Artificial Sequence
  Synthetic oligonucleotide
acttagaaggtacccagcctatatatgtac

SEQ ID NO: 491613 - DNA, 30 bp, Artificial Sequence
  Synthetic oligonucleotide
acttctgtgtcagaccacttcctactgtac

SEQ ID NO: 491614 - DNA, 30 bp, Artificial Sequence
  Synthetic oligonucleotide
atgcaggtactgggttcatatatcctgtac

SEQ ID NO: 491615 - DNA, 30 bp, Artificial Sequence
  Synthetic oligonucleotide
tgtcggagacatgtacgtcgggggctgtac

SEQ ID NO: 491616 - DNA, 30 bp, Artificial Sequence
  Synthetic oligonucleotide
agagaaaggtgatgattaatgagtctgtac

SEQ ID NO: 491617 - DNA, 30 bp, Artificial Sequence
  Synthetic oligonucleotide
gacaataaggatattgatatcatagtgtac

SEQ ID NO: 491618 - DNA, 30 bp, Artificial Sequence
  Synthetic oligonucleotide
acgaactcagcatgttaaaacttagtgtac

SEQ ID NO: 491619 - DNA, 30 bp, Artificial Sequence
  Synthetic oligonucleotide
tagcactgctcgttacgctcttaggtgtac

SEQ ID NO: 491620 - DNA, 30 bp, Artificial Sequence
  Synthetic oligonucleotide
atatagtctcctttaggatgatcggtgtac

SEQ ID NO: 491621 - DNA, 30 bp, Artificial Sequence
  Synthetic oligonucleotide
atattccctttacaccaagctatggtgtac

SEQ ID NO: 491622 - DNA, 30 bp, Artificial Sequence
  Synthetic oligonucleotide
ggaagtgttgcaaacctggtactggtgtac

SEQ ID NO: 491623 - DNA, 30 bp, Artificial Sequence
  Synthetic oligonucleotide
tggggtaacctatcggcagaataattgtac

SEQ ID NO: 491624 - DNA, 30 bp, Artificial Sequence
  Synthetic oligonucleotide
tccagtggaaatgtaagatagttattgtac

SEQ ID NO: 491625 - DNA, 30 bp, Artificial Sequence
  Synthetic oligonucleotide
ccggttcccgtaacgatgcacatcttgtac

SEQ ID NO: 491626 - DNA, 30 bp, Artificial Sequence
  Synthetic oligonucleotide
taagatctaaagacctatatcatcttgtac

SEQ ID NO: 491627 - DNA, 30 bp, Artificial Sequence
  Synthetic oligonucleotide
aaatacgcatcagtcatctcacatttgtac

SEQ ID NO: 491628 - DNA, 30 bp, Artificial Sequence
  Synthetic oligonucleotide
cgtctgtgtgagttcgcggaatcaaattac

SEQ ID NO: 491629 - DNA, 30 bp, Artificial Sequence
  Synthetic oligonucleotide
tcatattaatgtccgcaggccttaaattac

SEQ ID NO: 491630 - DNA, 30 bp, Artificial Sequence
  Synthetic oligonucleotide
aatactctagcaaatatttgtaacaattac

SEQ ID NO: 491631 - DNA, 30 bp, Artificial Sequence
  Synthetic oligonucleotide
ctcaacgtcccactcaaaaaatacaattac

SEQ ID NO: 491632 - DNA, 30 bp, Artificial Sequence
  Synthetic oligonucleotide
gttatcttgacccgaataaggggcaattac

SEQ ID NO: 491633 - DNA, 30 bp, Artificial Sequence
  Synthetic oligonucleotide
ttaggatgtcttggttttcgctgcaattac

SEQ ID NO: 491634 - DNA, 30 bp, Artificial Sequence
  Synthetic oligonucleotide
ttgcgcagtcatatccgtgcactcaattac

SEQ ID NO: 491635 - DNA, 30 bp, Artificial Sequence
  Synthetic oligonucleotide
tgaaatagtttcagcaggccgcagaattac

SEQ ID NO: 491636 - DNA, 30 bp, Artificial Sequence
  Synthetic oligonucleotide
ccattacatcaaaacgcgatggagaattac

SEQ ID NO: 491637 - DNA, 30 bp, Artificial Sequence
  Synthetic oligonucleotide
gtaatctcacgtgttcaggggcataattac

SEQ ID NO: 491638 - DNA, 30 bp, Artificial Sequence
  Synthetic oligonucleotide
aaatgcaagatgatttgtactggtaattac

SEQ ID NO: 491639 - DNA, 30 bp, Artificial Sequence
  Synthetic oligonucleotide
atatagttatgatttgtatcggcacattac

SEQ ID NO: 491640 - DNA, 30 bp, Artificial Sequence
  Synthetic oligonucleotide
gtacttaaaaatctactatcgtcgcattac

SEQ ID NO: 491641 - DNA, 30 bp, Artificial Sequence
  Synthetic oligonucleotide
acacccgaattaacccgtcgcgggcattac

SEQ ID NO: 491642 - DNA, 30 bp, Artificial Sequence
  Synthetic oligonucleotide
tagccaatatgactacatcagtaagattac

SEQ ID NO: 491643 - DNA, 30 bp, Artificial Sequence
  Synthetic oligonucleotide
ttagattgacccgggcatgtacccgattac

SEQ ID NO: 491644 - DNA, 30 bp, Artificial Sequence
  Synthetic oligonucleotide
cactacttgcaagcagtatagtaatattac

SEQ ID NO: 491645 - DNA, 30 bp, Artificial Sequence
  Synthetic oligonucleotide
gcagtttgatgtatcgcaagagtatattac

SEQ ID NO: 491646 - DNA, 30 bp, Artificial Sequence
  Synthetic oligonucleotide
gggtcagttagaacgtattagttctattac

SEQ ID NO: 491647 - DNA, 30 bp, Artificial Sequence
  Synthetic oligonucleotide
ccttatacaccggtctgtgttttgtattac

SEQ ID NO: 491648 - DNA, 30 bp, Artificial Sequence
  Synthetic oligonucleotide
gtccgtccgaaagagccggacggttattac

SEQ ID NO: 491649 - DNA, 30 bp, Artificial Sequence
  Synthetic oligonucleotide
tatagaccgtttgcacatggatgttattac

SEQ ID NO: 491650 - DNA, 30 bp, Artificial Sequence
  Synthetic oligonucleotide
catataagcttgtaaagtcattaaacttac

SEQ ID NO: 491651 - DNA, 30 bp, Artificial Sequence
  Synthetic oligonucleotide
gcggatccgggtttgaaaccaggaacttac

SEQ ID NO: 491652 - DNA, 30 bp, Artificial Sequence
  Synthetic oligonucleotide
gacgtccctgggtgccgctgtgacacttac

SEQ ID NO: 491653 - DNA, 30 bp, Artificial Sequence
  Synthetic oligonucleotide
tagaagcaagcaacactcgtccggacttac

SEQ ID NO: 491654 - DNA, 30 bp, Artificial Sequence
  Synthetic oligonucleotide
atcagcacgcctgcgattaacgctacttac

SEQ ID NO: 491655 - DNA, 30 bp, Artificial Sequence
  Synthetic oligonucleotide
gtaattctggaggccatcatcgggccttac

SEQ ID NO: 491656 - DNA, 30 bp, Artificial Sequence
  Synthetic oligonucleotide
ctgtctgggaagaaaggtcgttggccttac

SEQ ID NO: 491657 - DNA, 30 bp, Artificial Sequence
  Synthetic oligonucleotide
gtccatgttacccattgcatttatccttac

SEQ ID NO: 491658 - DNA, 30 bp, Artificial Sequence
  Synthetic oligonucleotide
tgggtgccctaagcttccttgtaagcttac

SEQ ID NO: 491659 - DNA, 30 bp, Artificial Sequence
  Synthetic oligonucleotide
tttaatcgtgattttgaatctccagcttac

SEQ ID NO: 491660 - DNA, 30 bp, Artificial Sequence
  Synthetic oligonucleotide
gcccagtttctactgggtcacagtgcttac

SEQ ID NO: 491661 - DNA, 30 bp, Artificial Sequence
  Synthetic oligonucleotide
gcacgcatgccaaaatagagttttgcttac

SEQ ID NO: 491662 - DNA, 30 bp, Artificial Sequence
  Synthetic oligonucleotide
tgcgtacgcaggaagacttaagcatcttac

SEQ ID NO: 491663 - DNA, 30 bp, Artificial Sequence
  Synthetic oligonucleotide
cggcaaagcctgttttgtcacgcatcttac

SEQ ID NO: 491664 - DNA, 30 bp, Artificial Sequence
  Synthetic oligonucleotide
gctttttggggcaggtattgccagtcttac

SEQ ID NO: 491665 - DNA, 30 bp, Artificial Sequence
  Synthetic oligonucleotide
aagagtctactgcgagcatcattttcttac

SEQ ID NO: 491666 - DNA, 30 bp, Artificial Sequence
  Synthetic oligonucleotide
taggttttgtcctggccggccaccagttac

SEQ ID NO: 491667 - DNA, 30 bp, Artificial Sequence
  Synthetic oligonucleotide
acaacagattacatgggtagggcgagttac

SEQ ID NO: 491668 - DNA, 30 bp, Artificial Sequence
  Synthetic oligonucleotide
gtaacccttggcttatccatctggagttac

SEQ ID NO: 491669 - DNA, 30 bp, Artificial Sequence
  Synthetic oligonucleotide
aaagcggtaaacttctcgtttctgagttac

SEQ ID NO: 491670 - DNA, 30 bp, Artificial Sequence
  Synthetic oligonucleotide
aggtagtaaatatctggcagcagtagttac

SEQ ID NO: 491671 - DNA, 30 bp, Artificial Sequence
  Synthetic oligonucleotide
aacgaatttttccactgctgcagtagttac

SEQ ID NO: 491672 - DNA, 30 bp, Artificial Sequence
  Synthetic oligonucleotide
gtggacttaacttctaggggacttagttac

SEQ ID NO: 491673 - DNA, 30 bp, Artificial Sequence
  Synthetic oligonucleotide
gttcaccgaagagttattgagaaacgttac

SEQ ID NO: 491674 - DNA, 30 bp, Artificial Sequence
  Synthetic oligonucleotide
gatggtgtttgcgttgtgagtaaacgttac

SEQ ID NO: 491675 - DNA, 30 bp, Artificial Sequence
  Synthetic oligonucleotide
ttgccggttatggtactccaataacgttac

SEQ ID NO: 491676 - DNA, 30 bp, Artificial Sequence
  Synthetic oligonucleotide
ttaaaaatgcgggtacgttactgacgttac

SEQ ID NO: 491677 - DNA, 30 bp, Artificial Sequence
  Synthetic oligonucleotide
agagacggatcgctttaaccttaccgttac

SEQ ID NO: 491678 - DNA, 30 bp, Artificial Sequence
  Synthetic oligonucleotide
ctcagacccccacagcaagcaccccgttac

SEQ ID NO: 491679 - DNA, 30 bp, Artificial Sequence
  Synthetic oligonucleotide
ttagcttcagatttagttggcagccgttac

SEQ ID NO: 491680 - DNA, 30 bp, Artificial Sequence
  Synthetic oligonucleotide
atattttcctcgaccatttactgccgttac

SEQ ID NO: 491681 - DNA, 30 bp, Artificial Sequence
  Synthetic oligonucleotide
cccattccccggccgccacttatccgttac

SEQ ID NO: 491682 - DNA, 30 bp, Artificial Sequence
  Synthetic oligonucleotide
gcaactaacggctcgaggagctctcgttac

SEQ ID NO: 491683 - DNA, 30 bp, Artificial Sequence
  Synthetic oligonucleotide
gagtaattcacagtgcatagaattcgttac

SEQ ID NO: 491684 - DNA, 30 bp, Artificial Sequence
  Synthetic oligonucleotide
tagttcagtactgactagcggttaggttac

SEQ ID NO: 491685 - DNA, 30 bp, Artificial Sequence
  Synthetic oligonucleotide
tactatgctaatttaggcgtactcggttac

SEQ ID NO: 491686 - DNA, 30 bp, Artificial Sequence
  Synthetic oligonucleotide
ggagcgggtcccataatttggaagggttac

SEQ ID NO: 491687 - DNA, 30 bp, Artificial Sequence
  Synthetic oligonucleotide
ttggttcgccttggtggtggctggggttac

SEQ ID NO: 491688 - DNA, 30 bp, Artificial Sequence
  Synthetic oligonucleotide
gatcctacatagcttggttttatgggttac

SEQ ID NO: 491689 - DNA, 30 bp, Artificial Sequence
  Synthetic oligonucleotide
gttaacggcgcagtagcggatgttggttac

SEQ ID NO: 491690 - DNA, 30 bp, Artificial Sequence
  Synthetic oligonucleotide
aagtgaatttgctttcggagggaatgttac

SEQ ID NO: 491691 - DNA, 30 bp, Artificial Sequence
  Synthetic oligonucleotide
ctatccgacgaccgtggcgaaccctgttac

SEQ ID NO: 491692 - DNA, 31 bp, Artificial Sequence
  Synthetic oligonucleotide
ggcatggcggaggggccgctaaagctgttac

SEQ ID NO: 491693 - DNA, 30 bp, Artificial Sequence
  Synthetic oligonucleotide
taatccatcgagtaaagtacgctctgttac

SEQ ID NO: 491694 - DNA, 30 bp, Artificial Sequence
  Synthetic oligonucleotide
taaaaatacagtggcttaccgcagtgttac

SEQ ID NO: 491695 - DNA, 30 bp, Artificial Sequence
  Synthetic oligonucleotide
gctcacgatcggttcgttgcagattgttac

SEQ ID NO: 491696 - DNA, 30 bp, Artificial Sequence
  Synthetic oligonucleotide
tttggtttgtctttgtagcgtctttgttac

SEQ ID NO: 491697 - DNA, 30 bp, Artificial Sequence
  Synthetic oligonucleotide
acatggggtagacgcattcctaagatttac

SEQ ID NO: 491698 - DNA, 30 bp, Artificial Sequence
  Synthetic oligonucleotide
agattctcatagcgtcccttacagatttac

SEQ ID NO: 491699 - DNA, 30 bp, Artificial Sequence
  Synthetic oligonucleotide
gctaacggtgagaaattgcctcagatttac

SEQ ID NO: 491700 - DNA, 30 bp, Artificial Sequence
  Synthetic oligonucleotide
ggttttttcgacgttactaggtcgatttac

SEQ ID NO: 491701 - DNA, 30 bp, Artificial Sequence
  Synthetic oligonucleotide
actggggtggtcttatgtagtgtgatttac

SEQ ID NO: 491702 - DNA, 30 bp, Artificial Sequence
  Synthetic oligonucleotide
gacctacattgtctttgtatagctatttac

SEQ ID NO: 491703 - DNA, 30 bp, Artificial Sequence
  Synthetic oligonucleotide
tggtaatcgccgcctgtaatatctatttac

SEQ ID NO: 491704 - DNA, 30 bp, Artificial Sequence
  Synthetic oligonucleotide
gcagcattgtgagatgctcagtgtatttac

SEQ ID NO: 491705 - DNA, 30 bp, Artificial Sequence
  Synthetic oligonucleotide
acaaaaagagccggttttccctttatttac

SEQ ID NO: 491706 - DNA, 30 bp, Artificial Sequence
  Synthetic oligonucleotide
ttttcgtgatgtgcagagagttttatttac

SEQ ID NO: 491707 - DNA, 30 bp, Artificial Sequence
  Synthetic oligonucleotide
acgatcacagcggtcgattgttttatttac

SEQ ID NO: 491708 - DNA, 30 bp, Artificial Sequence
  Synthetic oligonucleotide
aggacaactgtaaagccgtccaaactttac

SEQ ID NO: 491709 - DNA, 30 bp, Artificial Sequence
  Synthetic oligonucleotide
gcaaagtccgagctttaagggaacctttac

SEQ ID NO: 491710 - DNA, 30 bp, Artificial Sequence
  Synthetic oligonucleotide
gcctattcccacctcggtatcaccctttac

SEQ ID NO: 491711 - DNA, 30 bp, Artificial Sequence
  Synthetic oligonucleotide
acttatccgggccggggggtgtccctttac

SEQ ID NO: 491712 - DNA, 30 bp, Artificial Sequence
  Synthetic oligonucleotide
tttaaagaccccaatggatccgagctttac

SEQ ID NO: 491713 - DNA, 30 bp, Artificial Sequence
  Synthetic oligonucleotide
atgaattgtcaaccgctaatggagctttac

SEQ ID NO: 491714 - DNA, 30 bp, Artificial Sequence
  Synthetic oligonucleotide
cttgcggggtttaagtaggtctacgtttac

SEQ ID NO: 491715 - DNA, 30 bp, Artificial Sequence
  Synthetic oligonucleotide
agccttgtagaatgacgtgccgtcgtttac

SEQ ID NO: 491716 - DNA, 30 bp, Artificial Sequence
  Synthetic oligonucleotide
tttccggactagttaacgtaccaggtttac

SEQ ID NO: 491717 - DNA, 30 bp, Artificial Sequence
  Synthetic oligonucleotide
ggcaccatttagtggatgtagctggtttac

SEQ ID NO: 491718 - DNA, 30 bp, Artificial Sequence
  Synthetic oligonucleotide
gtggtttgttaatacatcgtagttgtttac

SEQ ID NO: 491719 - DNA, 30 bp, Artificial Sequence
  Synthetic oligonucleotide
ctataagcctcattggagcattcattttac

SEQ ID NO: 491720 - DNA, 30 bp, Artificial Sequence
  Synthetic oligonucleotide
tcgtagtcaccgcacacagggaacttttac

SEQ ID NO: 491721 - DNA, 30 bp, Artificial Sequence
  Synthetic oligonucleotide
cgcttggggatccgccaacaagagttttac

SEQ ID NO: 491722 - DNA, 30 bp, Artificial Sequence
  Synthetic oligonucleotide
cgcaccgtaacgccaatcaggtcgttttac

SEQ ID NO: 491723 - DNA, 30 bp, Artificial Sequence
  Synthetic oligonucleotide
aaggaacctgaagttctccggaggttttac

SEQ ID NO: 491724 - DNA, 30 bp, Artificial Sequence
  Synthetic oligonucleotide
ttacggatatattgagaacgactgttttac

SEQ ID NO: 491725 - DNA, 30 bp, Artificial Sequence
  Synthetic oligonucleotide
gagtcgtcgtatggaatcatttatttttac

SEQ ID NO: 491726 - DNA, 30 bp, Artificial Sequence
  Synthetic oligonucleotide
tttaattgagactagcactaaattttttac

SEQ ID NO: 491727 - DNA, 30 bp, Artificial Sequence
  Synthetic oligonucleotide
gctgttggacatgttgcctatattttttac

SEQ ID NO: 491728 - DNA, 30 bp, Artificial Sequence
  Synthetic oligonucleotide
ctatacaagttgcgtgataacaaaaaaacc

SEQ ID NO: 491729 - DNA, 30 bp, Artificial Sequence
  Synthetic oligonucleotide
ccgatggcccccattccctcgccaaaaacc

SEQ ID NO: 491730 - DNA, 30 bp, Artificial Sequence
  Synthetic oligonucleotide
tctgttcggtggatgcacaagctgaaaacc

SEQ ID NO: 491731 - DNA, 30 bp, Artificial Sequence
  Synthetic oligonucleotide
gggcgtacgcttcagtcttgagataaaacc

SEQ ID NO: 491732 - DNA, 30 bp, Artificial Sequence
  Synthetic oligonucleotide
gatttgattcgtactcctagctgtaaaacc

SEQ ID NO: 491733 - DNA, 30 bp, Artificial Sequence
  Synthetic oligonucleotide
tgggatctttcaatgcgtagcattaaaacc

SEQ ID NO: 491734 - DNA, 30 bp, Artificial Sequence
  Synthetic oligonucleotide
ctgagtgtgactgcaggtaggatacaaacc

SEQ ID NO: 491735 - DNA, 30 bp, Artificial Sequence
  Synthetic oligonucleotide
ctatcctttctttgacggtatctacaaacc

SEQ ID NO: 491736 - DNA, 30 bp, Artificial Sequence
  Synthetic oligonucleotide
tatgcagcagatgagtagcttggccaaacc

SEQ ID NO: 491737 - DNA, 30 bp, Artificial Sequence
  Synthetic oligonucleotide
aaccactatcctgacataacgcctcaaacc

SEQ ID NO: 491738 - DNA, 30 bp, Artificial Sequence
  Synthetic oligonucleotide
tttaccgggaaagaggttaatcgtcaaacc

SEQ ID NO: 491739 - DNA, 30 bp, Artificial Sequence
  Synthetic oligonucleotide
ctgggttaactgcgcttccgcagagaaacc

SEQ ID NO: 491740 - DNA, 30 bp, Artificial Sequence
  Synthetic oligonucleotide
gccatgggatatccgcagttcagagaaacc

SEQ ID NO: 491741 - DNA, 30 bp, Artificial Sequence
  Synthetic oligonucleotide
gctgtataatgggtggaagcatacgaaacc

SEQ ID NO: 491742 - DNA, 30 bp, Artificial Sequence
  Synthetic oligonucleotide
ctttatggaatccagcatcggtacgaaacc

SEQ ID NO: 491743 - DNA, 30 bp, Artificial Sequence
  Synthetic oligonucleotide
gtggcacgcggccagatgattccggaaacc

SEQ ID NO: 491744 - DNA, 30 bp, Artificial Sequence
  Synthetic oligonucleotide
atttatcgagtccggacgcatggtgaaacc

SEQ ID NO: 491745 - DNA, 30 bp, Artificial Sequence
  Synthetic oligonucleotide
tcagtttgcccagcttttggttgtgaaacc

SEQ ID NO: 491746 - DNA, 30 bp, Artificial Sequence
  Synthetic oligonucleotide
tgtgatatcgtaatgctagcggttgaaacc

SEQ ID NO: 491747 - DNA, 30 bp, Artificial Sequence
  Synthetic oligonucleotide
ttacaattttgcacgaggtactaataaacc

SEQ ID NO: 491748 - DNA, 30 bp, Artificial Sequence
  Synthetic oligonucleotide
tcatcggttttagatatatagagataaacc

SEQ ID NO: 491749 - DNA, 30 bp, Artificial Sequence
  Synthetic oligonucleotide
tattcaatagtaaaggatcaaagctaaacc

SEQ ID NO: 491750 - DNA, 30 bp, Artificial Sequence
  Synthetic oligonucleotide
gttttttaaaagaactgagagttttaaacc

SEQ ID NO: 491751 - DNA, 30 bp, Artificial Sequence
  Synthetic oligonucleotide
gacagtttactgaaaaggttcacaacaacc

SEQ ID NO: 491752 - DNA, 30 bp, Artificial Sequence
  Synthetic oligonucleotide
tattcggcccattagttgctccacacaacc

SEQ ID NO: 491753 - DNA, 30 bp, Artificial Sequence
  Synthetic oligonucleotide
acagtcggtctagtatctttgctcacaacc

SEQ ID NO: 491754 - DNA, 30 bp, Artificial Sequence
  Synthetic oligonucleotide
ttatgttgaatcttcttggaggcgacaacc

SEQ ID NO: 491755 - DNA, 30 bp, Artificial Sequence
  Synthetic oligonucleotide
aaaatcatcctagaagcgcatgttacaacc

SEQ ID NO: 491756 - DNA, 30 bp, Artificial Sequence
  Synthetic oligonucleotide
agacagtgctgcaagatttataacccaacc

SEQ ID NO: 491757 - DNA, 30 bp, Artificial Sequence
  Synthetic oligonucleotide
tggagctattggtgtggcacagccccaacc

SEQ ID NO: 491758 - DNA, 30 bp, Artificial Sequence
  Synthetic oligonucleotide
ttattcgccccccgagttgatccagcaacc

SEQ ID NO: 491759 - DNA, 30 bp, Artificial Sequence
  Synthetic oligonucleotide
aagttccatatacgtgcttttgcagcaacc

SEQ ID NO: 491760 - DNA, 30 bp, Artificial Sequence
  Synthetic oligonucleotide
ttatccgtaaatgcagtaggttcagcaacc

SEQ ID NO: 491761 - DNA, 30 bp, Artificial Sequence
  Synthetic oligonucleotide
atttttcgttatccccaactgatagcaacc

SEQ ID NO: 491762 - DNA, 30 bp, Artificial Sequence
  Synthetic oligonucleotide
ccgtcacaggcctggttcacgcgcgcaacc

SEQ ID NO: 491763 - DNA, 30 bp, Artificial Sequence
  Synthetic oligonucleotide
taaagtcttcatctagattgactcgcaacc

SEQ ID NO: 491764 - DNA, 30 bp, Artificial Sequence
  Synthetic oligonucleotide
agggtcattctcggtgggaagaaggcaacc

SEQ ID NO: 491765 - DNA, 30 bp, Artificial Sequence
  Synthetic oligonucleotide
attgcgtcgcagaaagataatcgggcaacc

SEQ ID NO: 491766 - DNA, 30 bp, Artificial Sequence
  Synthetic oligonucleotide
gggattgttgctggcctcgcgtgggcaacc

SEQ ID NO: 491767 - DNA, 30 bp, Artificial Sequence
  Synthetic oligonucleotide
cgccgcagcagtaaaccgcgccgatcaacc

SEQ ID NO: 491768 - DNA, 30 bp, Artificial Sequence
  Synthetic oligonucleotide
tgccttaggggagaaaacttttcctcaacc

SEQ ID NO: 491769 - DNA, 30 bp, Artificial Sequence
  Synthetic oligonucleotide
ggttgaattcctataaagactaggtcaacc

SEQ ID NO: 491770 - DNA, 30 bp, Artificial Sequence
  Synthetic oligonucleotide
gagaggtcatttgccggatgcgcttcaacc

SEQ ID NO: 491771 - DNA, 30 bp, Artificial Sequence
  Synthetic oligonucleotide
tggatatagagacgacagaggttttcaacc

SEQ ID NO: 491772 - DNA, 30 bp, Artificial Sequence
  Synthetic oligonucleotide
aagtatttagtccatcgagtgacaagaacc

SEQ ID NO: 491773 - DNA, 30 bp, Artificial Sequence
  Synthetic oligonucleotide
gaaaggtcataggccgggtaaataagaacc

SEQ ID NO: 491774 - DNA, 30 bp, Artificial Sequence
  Synthetic oligonucleotide
ttaaggggcacggtgtatccgaagagaacc

SEQ ID NO: 491775 - DNA, 30 bp, Artificial Sequence
  Synthetic oligonucleotide
aagagacaggacgacactaaatcgagaacc

SEQ ID NO: 491776 - DNA, 30 bp, Artificial Sequence
  Synthetic oligonucleotide
gtcggccgtacaattgattgcaggagaacc

SEQ ID NO: 491777 - DNA, 30 bp, Artificial Sequence
  Synthetic oligonucleotide
ttacaggttgtttcttaattagtgagaacc

SEQ ID NO: 491778 - DNA, 30 bp, Artificial Sequence
  Synthetic oligonucleotide
gttaattacttcgtggtttgatgccgaacc

SEQ ID NO: 491779 - DNA, 30 bp, Artificial Sequence
  Synthetic oligonucleotide
tacacgtagggtgcgctctcccagcgaacc

SEQ ID NO: 491780 - DNA, 30 bp, Artificial Sequence
  Synthetic oligonucleotide
ggggtagtatgagttcgtaagtcgcgaacc

SEQ ID NO: 491781 - DNA, 30 bp, Artificial Sequence
  Synthetic oligonucleotide
gtttggatccatgacacctagaatcgaacc

SEQ ID NO: 491782 - DNA, 30 bp, Artificial Sequence
  Synthetic oligonucleotide
gtcgagtattttaacctcgtcaccggaacc

SEQ ID NO: 491783 - DNA, 30 bp, Artificial Sequence
  Synthetic oligonucleotide
cacctgggttggatggacgcatagggaacc

SEQ ID NO: 491784 - DNA, 30 bp, Artificial Sequence
  Synthetic oligonucleotide
actggtctcgggctgttagattttggaacc

SEQ ID NO: 491785 - DNA, 30 bp, Artificial Sequence
  Synthetic oligonucleotide
tctctatgggtcaaggtgttcatgtgaacc

SEQ ID NO: 491786 - DNA, 30 bp, Artificial Sequence
  Synthetic oligonucleotide
cccacttgtgcaagtacgcgcgcttgaacc

SEQ ID NO: 491787 - DNA, 30 bp, Artificial Sequence
  Synthetic oligonucleotide
cttacacggtttgtaactgaaggttgaacc

SEQ ID NO: 491788 - DNA, 30 bp, Artificial Sequence
  Synthetic oligonucleotide
cggagtaaaggtttctgggttctaataacc

SEQ ID NO: 491789 - DNA, 30 bp, Artificial Sequence
  Synthetic oligonucleotide
gcgattctcccgtgagggatatctataacc

SEQ ID NO: 491790 - DNA, 31 bp, Artificial Sequence
  Synthetic oligonucleotide
tgacagcctccgggataacattgcactaacc

SEQ ID NO: 491791 - DNA, 30 bp, Artificial Sequence
  Synthetic oligonucleotide
ataaaattcacgtctacaatcggcctaacc

SEQ ID NO: 491792 - DNA, 30 bp, Artificial Sequence
  Synthetic oligonucleotide
aatcgcggggaattgacggaatatctaacc

SEQ ID NO: 491793 - DNA, 30 bp, Artificial Sequence
  Synthetic oligonucleotide
tcgtctctatcaaggatgatatatctaacc

SEQ ID NO: 491794 - DNA, 30 bp, Artificial Sequence
  Synthetic oligonucleotide
acttaaccggatgaaccaccctctctaacc

SEQ ID NO: 491795 - DNA, 30 bp, Artificial Sequence
  Synthetic oligonucleotide
ggtatcccgaaaaattgatgtagtctaacc

SEQ ID NO: 491796 - DNA, 30 bp, Artificial Sequence
  Synthetic oligonucleotide
acttacgtggtagggagtcgttgtctaacc

SEQ ID NO: 491797 - DNA, 30 bp, Artificial Sequence
  Synthetic oligonucleotide
cttgggttcttgaaactaaagattctaacc

SEQ ID NO: 491798 - DNA, 30 bp, Artificial Sequence
  Synthetic oligonucleotide
cgtactagtttaataggccgccgagtaacc

SEQ ID NO: 491799 - DNA, 30 bp, Artificial Sequence
  Synthetic oligonucleotide
gcaaattcctgcttacaagtcggagtaacc

SEQ ID NO: 491800 - DNA, 30 bp, Artificial Sequence
  Synthetic oligonucleotide
gtggttttcaaacgtgcccagttagtaacc

SEQ ID NO: 491801 - DNA, 30 bp, Artificial Sequence
  Synthetic oligonucleotide
cgccctatgttctatattaatcacgtaacc

SEQ ID NO: 491802 - DNA, 30 bp, Artificial Sequence
  Synthetic oligonucleotide
aacctacgcttcaatctgaagaaggtaacc

SEQ ID NO: 491803 - DNA, 30 bp, Artificial Sequence
  Synthetic oligonucleotide
atttatttactccgagcggtgagtgtaacc

SEQ ID NO: 491804 - DNA, 30 bp, Artificial Sequence
  Synthetic oligonucleotide
acacctgtgttaagggtacgatcattaacc

SEQ ID NO: 491805 - DNA, 30 bp, Artificial Sequence
  Synthetic oligonucleotide
ctcgtttaaagtggatgatatagattaacc

SEQ ID NO: 491806 - DNA, 30 bp, Artificial Sequence
  Synthetic oligonucleotide
gatttgacaccttaacatgcatgattaacc

SEQ ID NO: 491807 - DNA, 30 bp, Artificial Sequence
  Synthetic oligonucleotide
ccagcgttgacctcgcattattgattaacc

SEQ ID NO: 491808 - DNA, 30 bp, Artificial Sequence
  Synthetic oligonucleotide
gctccatcttggcacaaaagtatattaacc

SEQ ID NO: 491809 - DNA, 30 bp, Artificial Sequence
  Synthetic oligonucleotide
ataaaacctaaagacttaggtatattaacc

SEQ ID NO: 491810 - DNA, 30 bp, Artificial Sequence
  Synthetic oligonucleotide
gggccggaggattctgccatgctattaacc

SEQ ID NO: 491811 - DNA, 30 bp, Artificial Sequence
  Synthetic oligonucleotide
cgcagcggggcatgaaagcccgtcttaacc

SEQ ID NO: 491812 - DNA, 30 bp, Artificial Sequence
  Synthetic oligonucleotide
ttttgggtaagcgctataggatcgttaacc

SEQ ID NO: 491813 - DNA, 30 bp, Artificial Sequence
  Synthetic oligonucleotide
atctcggccaggtatgttacctcgttaacc

SEQ ID NO: 491814 - DNA, 30 bp, Artificial Sequence
  Synthetic oligonucleotide
atccgaacttcgtgtaactccatgttaacc

SEQ ID NO: 491815 - DNA, 30 bp, Artificial Sequence
  Synthetic oligonucleotide
ataatataggtagtggcgcattatttaacc

SEQ ID NO: 491816 - DNA, 30 bp, Artificial Sequence
  Synthetic oligonucleotide
gtttacaagtaaacttatacaagtttaacc

SEQ ID NO: 491817 - DNA, 30 bp, Artificial Sequence
  Synthetic oligonucleotide
gagattgtacctatcgcggtagttttaacc

SEQ ID NO: 491818 - DNA, 30 bp, Artificial Sequence
  Synthetic oligonucleotide
tattccagcgtgttagttagttgaaacacc

SEQ ID NO: 491819 - DNA, 30 bp, Artificial Sequence
  Synthetic oligonucleotide
gacctcattcatccgcaaaacctaaacacc

SEQ ID NO: 491820 - DNA, 30 bp, Artificial Sequence
  Synthetic oligonucleotide
ccgatccaggagagggcgcgcagcaacacc

SEQ ID NO: 491821 - DNA, 30 bp, Artificial Sequence
  Synthetic oligonucleotide
gtgagccttgagtacaaggggtgcaacacc

SEQ ID NO: 491822 - DNA, 30 bp, Artificial Sequence
  Synthetic oligonucleotide
gtcgcagggtaagattaatgcatcaacacc

SEQ ID NO: 491823 - DNA, 30 bp, Artificial Sequence
  Synthetic oligonucleotide
ggaagccgttgagtacagatgctcaacacc

SEQ ID NO: 491824 - DNA, 30 bp, Artificial Sequence
  Synthetic oligonucleotide
gggaatcctatggcacctagggggaacacc

SEQ ID NO: 491825 - DNA, 30 bp, Artificial Sequence
  Synthetic oligonucleotide
gcatttgtaggacgtagctaaaataacacc

SEQ ID NO: 491826 - DNA, 30 bp, Artificial Sequence
  Synthetic oligonucleotide
gttgatgccggcggccactcacaccacacc

SEQ ID NO: 491827 - DNA, 30 bp, Artificial Sequence
  Synthetic oligonucleotide
tatagcaatcggctattttgaatccacacc

SEQ ID NO: 491828 - DNA, 30 bp, Artificial Sequence
  Synthetic oligonucleotide
gccagttgttggatagaccagaggcacacc

SEQ ID NO: 491829 - DNA, 30 bp, Artificial Sequence
  Synthetic oligonucleotide
gctatccgggggaggtgaggatttcacacc

SEQ ID NO: 491830 - DNA, 30 bp, Artificial Sequence
  Synthetic oligonucleotide
atctattgggcatccggtcgacgagacacc

SEQ ID NO: 491831 - DNA, 30 bp, Artificial Sequence
  Synthetic oligonucleotide
tttccaatgctcagctagctcggcgacacc

SEQ ID NO: 491832 - DNA, 30 bp, Artificial Sequence
  Synthetic oligonucleotide
tccatctaccgaccaatcttgatggacacc

SEQ ID NO: 491833 - DNA, 30 bp, Artificial Sequence
  Synthetic oligonucleotide
gacaaaaccaatcagaattgtctggacacc

SEQ ID NO: 491834 - DNA, 30 bp, Artificial Sequence
  Synthetic oligonucleotide
taagtgccaatataataggctattgacacc

SEQ ID NO: 491835 - DNA, 30 bp, Artificial Sequence
  Synthetic oligonucleotide
gttatgagacgcaatcagtattaatacacc

SEQ ID NO: 491836 - DNA, 30 bp, Artificial Sequence
  Synthetic oligonucleotide
agcatgctgattgtaaagaagttatacacc

SEQ ID NO: 491837 - DNA, 30 bp, Artificial Sequence
  Synthetic oligonucleotide
catcaggcatctctagtcatggcctacacc

SEQ ID NO: 491838 - DNA, 30 bp, Artificial Sequence
  Synthetic oligonucleotide
ggttatttgttcagctgacggacgtacacc

SEQ ID NO: 491839 - DNA, 30 bp, Artificial Sequence
  Synthetic oligonucleotide
ctttggatgtggcaaggagttcgttacacc

SEQ ID NO: 491840 - DNA, 30 bp, Artificial Sequence
  Synthetic oligonucleotide
atccaagtctagttcgggacgtgaaccacc

SEQ ID NO: 491841 - DNA, 30 bp, Artificial Sequence
  Synthetic oligonucleotide
actctaagacgcggttttcatggcaccacc

SEQ ID NO: 491842 - DNA, 30 bp, Artificial Sequence
  Synthetic oligonucleotide
tccgtcatgtctttctcattatcgaccacc

SEQ ID NO: 491843 - DNA, 30 bp, Artificial Sequence
  Synthetic oligonucleotide
aaggagcagctgatcactttgctgaccacc

SEQ ID NO: 491844 - DNA, 30 bp, Artificial Sequence
  Synthetic oligonucleotide
gaactcctggcccagatatttaataccacc

SEQ ID NO: 491845 - DNA, 30 bp, Artificial Sequence
  Synthetic oligonucleotide
acctgccctctatacgaagcctttaccacc

SEQ ID NO: 491846 - DNA, 30 bp, Artificial Sequence
  Synthetic oligonucleotide
aatatttcagttcgagagatgtcgcccacc

SEQ ID NO: 491847 - DNA, 30 bp, Artificial Sequence
  Synthetic oligonucleotide
atctacaccaggcgatgcattgttcccacc

SEQ ID NO: 491848 - DNA, 30 bp, Artificial Sequence
  Synthetic oligonucleotide
cagaatgtgaataactttaagctagccacc

SEQ ID NO: 491849 - DNA, 30 bp, Artificial Sequence
  Synthetic oligonucleotide
agcaggaatgcgtctgcaattaacgccacc

SEQ ID NO: 491850 - DNA, 30 bp, Artificial Sequence
  Synthetic oligonucleotide
ctttcgatttcattcagtcttaacgccacc

SEQ ID NO: 491851 - DNA, 30 bp, Artificial Sequence
  Synthetic oligonucleotide
attaaaggggtaagattatatgacgccacc

SEQ ID NO: 491852 - DNA, 30 bp, Artificial Sequence
  Synthetic oligonucleotide
ccacattcgacgccccgacaaaccgccacc

SEQ ID NO: 491853 - DNA, 30 bp, Artificial Sequence
  Synthetic oligonucleotide
tgtggtattaacattgtcgccaccgccacc

SEQ ID NO: 491854 - DNA, 30 bp, Artificial Sequence
  Synthetic oligonucleotide
tcatacttaggtagcatgcagacggccacc

SEQ ID NO: 491855 - DNA, 30 bp, Artificial Sequence
  Synthetic oligonucleotide
ccctctgtagaaggtagattcggtgccacc

SEQ ID NO: 491856 - DNA, 30 bp, Artificial Sequence
  Synthetic oligonucleotide
ctccgccaagaatcgcagtcgcggtccacc

SEQ ID NO: 491857 - DNA, 30 bp, Artificial Sequence
  Synthetic oligonucleotide
tttttgtacaccgcgctgttgtattccacc

SEQ ID NO: 491858 - DNA, 30 bp, Artificial Sequence
  Synthetic oligonucleotide
acttttaaagatttctaattcggcagcacc

SEQ ID NO: 491859 - DNA, 30 bp, Artificial Sequence
  Synthetic oligonucleotide
gagcagcagaatcctggctccgtcagcacc

SEQ ID NO: 491860 - DNA, 30 bp, Artificial Sequence
  Synthetic oligonucleotide
ctcctcaacggaggtcatatccggagcacc

SEQ ID NO: 491861 - DNA, 30 bp, Artificial Sequence
  Synthetic oligonucleotide
atgcatctaagggaatttacgcaacgcacc

SEQ ID NO: 491862 - DNA, 30 bp, Artificial Sequence
  Synthetic oligonucleotide
tgataatccctatggggattataacgcacc

SEQ ID NO: 491863 - DNA, 30 bp, Artificial Sequence
  Synthetic oligonucleotide
gcgacagcctgtcaccgaggcggacgcacc

SEQ ID NO: 491864 - DNA, 30 bp, Artificial Sequence
  Synthetic oligonucleotide
catataccggtattatatcgggaccgcacc

SEQ ID NO: 491865 - DNA, 30 bp, Artificial Sequence
  Synthetic oligonucleotide
tcagatatctgataactggttatccgcacc

SEQ ID NO: 491866 - DNA, 30 bp, Artificial Sequence
  Synthetic oligonucleotide
actccacgcggtgtctgctgacggcgcacc

SEQ ID NO: 491867 - DNA, 30 bp, Artificial Sequence
  Synthetic oligonucleotide
tagtcatagcccccatttcgccgcggcacc

SEQ ID NO: 491868 - DNA, 30 bp, Artificial Sequence
  Synthetic oligonucleotide
ggaacagctggggcgcctttttgcggcacc

SEQ ID NO: 491869 - DNA, 30 bp, Artificial Sequence
  Synthetic oligonucleotide
ttgcttgcggcgtgagacctcctcggcacc

SEQ ID NO: 491870 - DNA, 30 bp, Artificial Sequence
  Synthetic oligonucleotide
ctaatgggcccggcgcgcatgcagggcacc

SEQ ID NO: 491871 - DNA, 30 bp, Artificial Sequence
  Synthetic oligonucleotide
aactcaatggcccatattcagcatggcacc

SEQ ID NO: 491872 - DNA, 30 bp, Artificial Sequence
  Synthetic oligonucleotide
tcccagagttccgcatgatttgatggcacc

SEQ ID NO: 491873 - DNA, 28 bp, Artificial Sequence
  Synthetic oligonucleotide
cctaatggagccgataggagactgcacc

SEQ ID NO: 491874 - DNA, 30 bp, Artificial Sequence
  Synthetic oligonucleotide
ggcccaagtctgatctgaaatccgtgcacc

SEQ ID NO: 491875 - DNA, 30 bp, Artificial Sequence
  Synthetic oligonucleotide
agaatcgcactttatcaggtgccaatcacc

SEQ ID NO: 491876 - DNA, 30 bp, Artificial Sequence
  Synthetic oligonucleotide
ttaaaggacacgtagcgctgtggaatcacc

SEQ ID NO: 491877 - DNA, 30 bp, Artificial Sequence
  Synthetic oligonucleotide
caatatcgtaagtcgccctgcaggatcacc

SEQ ID NO: 491878 - DNA, 30 bp, Artificial Sequence
  Synthetic oligonucleotide
ctaaacgttttagtttacgcctctatcacc

SEQ ID NO: 491879 - DNA, 30 bp, Artificial Sequence
  Synthetic oligonucleotide
taatgcatgttttgcagtgagggtatcacc

SEQ ID NO: 491880 - DNA, 30 bp, Artificial Sequence
  Synthetic oligonucleotide
gtttgggaactcgggtttaaaccactcacc

SEQ ID NO: 491881 - DNA, 30 bp, Artificial Sequence
  Synthetic oligonucleotide
ggagttattggagtattatcgccactcacc

SEQ ID NO: 491882 - DNA, 30 bp, Artificial Sequence
  Synthetic oligonucleotide
ggcgcccgaaatacgcgaaaagcactcacc

SEQ ID NO: 491883 - DNA, 30 bp, Artificial Sequence
  Synthetic oligonucleotide
tggccctatacatccgcctaacgactcacc

SEQ ID NO: 491884 - DNA, 30 bp, Artificial Sequence
  Synthetic oligonucleotide
cttatttctatgataagtcgtatactcacc

SEQ ID NO: 491885 - DNA, 30 bp, Artificial Sequence
  Synthetic oligonucleotide
cagctcaaagttatagtttacaacctcacc

SEQ ID NO: 491886 - DNA, 30 bp, Artificial Sequence
  Synthetic oligonucleotide
gcaagtctacgcccggtataagggctcacc

SEQ ID NO: 491887 - DNA, 30 bp, Artificial Sequence
  Synthetic oligonucleotide
gattttacaagaacatacccttttctcacc

SEQ ID NO: 491888 - DNA, 30 bp, Artificial Sequence
  Synthetic oligonucleotide
atgtagttgcttgtaaacgccggagtcacc

SEQ ID NO: 491889 - DNA, 30 bp, Artificial Sequence
  Synthetic oligonucleotide
tatacttcttgtctctaacgcggggtcacc

SEQ ID NO: 491890 - DNA, 30 bp, Artificial Sequence
  Synthetic oligonucleotide
ggtctagcggcagggtgggtactggtcacc

SEQ ID NO: 491891 - DNA, 30 bp, Artificial Sequence
  Synthetic oligonucleotide
atctagttattatctggtactagtgtcacc

SEQ ID NO: 491892 - DNA, 30 bp, Artificial Sequence
  Synthetic oligonucleotide
cgcaagggtttatccccgcaaggattcacc

SEQ ID NO: 491893 - DNA, 30 bp, Artificial Sequence
  Synthetic oligonucleotide
atgtgggaaatcgatcttatcgacttcacc

SEQ ID NO: 491894 - DNA, 30 bp, Artificial Sequence
  Synthetic oligonucleotide
agtctggggagctatttaaaatacttcacc

SEQ ID NO: 491895 - DNA, 30 bp, Artificial Sequence
  Synthetic oligonucleotide
gcaggtggcactataagtggtcagttcacc

SEQ ID NO: 491896 - DNA, 30 bp, Artificial Sequence
  Synthetic oligonucleotide
gacttatggtagtatttgggtatgttcacc

SEQ ID NO: 491897 - DNA, 30 bp, Artificial Sequence
  Synthetic oligonucleotide
aggtgtaaacgcggccctataattttcacc

SEQ ID NO: 491898 - DNA, 30 bp, Artificial Sequence
  Synthetic oligonucleotide
cgtctaaacgagtttaaaatgcttttcacc

SEQ ID NO: 491899 - DNA, 30 bp, Artificial Sequence
  Synthetic oligonucleotide
tagcctaccaactttgggggcgtcaagacc

SEQ ID NO: 491900 - DNA, 30 bp, Artificial Sequence
  Synthetic oligonucleotide
ctccgtgtttcatctgaatgcaagaagacc

SEQ ID NO: 491901 - DNA, 30 bp, Artificial Sequence
  Synthetic oligonucleotide
gttctatgttttcccgggttggagaagacc

SEQ ID NO: 491902 - DNA, 30 bp, Artificial Sequence
  Synthetic oligonucleotide
gtgcacccagaaccgctttttgcacagacc

SEQ ID NO: 491903 - DNA, 30 bp, Artificial Sequence
  Synthetic oligonucleotide
gaggtaccgccgtgtaacccacgccagacc

SEQ ID NO: 491904 - DNA, 30 bp, Artificial Sequence
  Synthetic oligonucleotide
gctaatatctgagcgttgtgcggccagacc

SEQ ID NO: 491905 - DNA, 30 bp, Artificial Sequence
  Synthetic oligonucleotide
tagtaatgagaagtccatcccaagcagacc

SEQ ID NO: 491906 - DNA, 30 bp, Artificial Sequence
  Synthetic oligonucleotide
ccaggcgaacgttatatcttaaatcagacc

SEQ ID NO: 491907 - DNA, 30 bp, Artificial Sequence
  Synthetic oligonucleotide
gaagttgccgccggcctgaattgtcagacc

SEQ ID NO: 491908 - DNA, 30 bp, Artificial Sequence
  Synthetic oligonucleotide
gagaaaccctgagcttttagctttcagacc

SEQ ID NO: 491909 - DNA, 30 bp, Artificial Sequence
  Synthetic oligonucleotide
atatgcattgtagatgtggttatggagacc

SEQ ID NO: 491910 - DNA, 30 bp, Artificial Sequence
  Synthetic oligonucleotide
acagggctgcagctatccgtttcatagacc

SEQ ID NO: 491911 - DNA, 30 bp, Artificial Sequence
  Synthetic oligonucleotide
atcagtaggacgagcctagggttatagacc

SEQ ID NO: 491912 - DNA, 30 bp, Artificial Sequence
  Synthetic oligonucleotide
ttccaatccggaggtcttcggctctagacc

SEQ ID NO: 491913 - DNA, 30 bp, Artificial Sequence
  Synthetic oligonucleotide
tttttacacgctatgtatatcacttagacc

SEQ ID NO: 491914 - DNA, 30 bp, Artificial Sequence
  Synthetic oligonucleotide
gactaggctggttatgcttaaagttagacc

SEQ ID NO: 491915 - DNA, 30 bp, Artificial Sequence
  Synthetic oligonucleotide
attttgagcgacgccgtgtatacaacgacc

SEQ ID NO: 491916 - DNA, 30 bp, Artificial Sequence
  Synthetic oligonucleotide
cattctaagggaaggccagtctccacgacc

SEQ ID NO: 491917 - DNA, 30 bp, Artificial Sequence
  Synthetic oligonucleotide
ctaaaattgagcttttagtggacaccgacc

SEQ ID NO: 491918 - DNA, 30 bp, Artificial Sequence
  Synthetic oligonucleotide
tgcggcagcggcgtgctgttctcaccgacc

SEQ ID NO: 491919 - DNA, 30 bp, Artificial Sequence
  Synthetic oligonucleotide
aacatgatgcaactggaatccaaggcgacc

SEQ ID NO: 491920 - DNA, 30 bp, Artificial Sequence
  Synthetic oligonucleotide
aaattaatccagtaagcttggagggcgacc

SEQ ID NO: 491921 - DNA, 30 bp, Artificial Sequence
  Synthetic oligonucleotide
taatacgcagtaacatgataccatgcgacc

SEQ ID NO: 491922 - DNA, 30 bp, Artificial Sequence
  Synthetic oligonucleotide
atactcataactgagccatacagatcgacc

SEQ ID NO: 491923 - DNA, 30 bp, Artificial Sequence
  Synthetic oligonucleotide
acccgtgactaccaccatggtgactcgacc

SEQ ID NO: 491924 - DNA, 30 bp, Artificial Sequence
  Synthetic oligonucleotide
tattgctctaatggagatgtctcctcgacc

SEQ ID NO: 491925 - DNA, 30 bp, Artificial Sequence
  Synthetic oligonucleotide
atagactcttcataggcttcttgctcgacc

SEQ ID NO: 491926 - DNA, 30 bp, Artificial Sequence
  Synthetic oligonucleotide
ataaagggcggcaaatctctacggtcgacc

SEQ ID NO: 491927 - DNA, 30 bp, Artificial Sequence
  Synthetic oligonucleotide
gcttctcgactactggctgagatgtcgacc

SEQ ID NO: 491928 - DNA, 30 bp, Artificial Sequence
  Synthetic oligonucleotide
tttatgtgcgtagcccggaccccaaggacc

SEQ ID NO: 491929 - DNA, 30 bp, Artificial Sequence
  Synthetic oligonucleotide
gtcctctattcactcggataaggaaggacc

SEQ ID NO: 491930 - DNA, 30 bp, Artificial Sequence
  Synthetic oligonucleotide
atttcgtgcaagcacattcacgtaaggacc

SEQ ID NO: 491931 - DNA, 30 bp, Artificial Sequence
  Synthetic oligonucleotide
gtaggcgattccggatgatctgtcaggacc

SEQ ID NO: 491932 - DNA, 30 bp, Artificial Sequence
  Synthetic oligonucleotide
gacgcatggtgctagagtggaacgaggacc

SEQ ID NO: 491933 - DNA, 30 bp, Artificial Sequence
  Synthetic oligonucleotide
atggtattcacctggtaggactggaggacc

SEQ ID NO: 491934 - DNA, 30 bp, Artificial Sequence
  Synthetic oligonucleotide
agcacggggttgtcttcccatttgaggacc

SEQ ID NO: 491935 - DNA, 30 bp, Artificial Sequence
  Synthetic oligonucleotide
ggactgtggctggcggagggttgtaggacc

SEQ ID NO: 491936 - DNA, 30 bp, Artificial Sequence
  Synthetic oligonucleotide
tctagcaagaatgataagccgccacggacc

SEQ ID NO: 491937 - DNA, 30 bp, Artificial Sequence
  Synthetic oligonucleotide
ttgaactacggcacttgcctttgacggacc

SEQ ID NO: 491938 - DNA, 30 bp, Artificial Sequence
  Synthetic oligonucleotide
acgacctggcggggttctttgcaccggacc

SEQ ID NO: 491939 - DNA, 30 bp, Artificial Sequence
  Synthetic oligonucleotide
tcgcgcgtttatctggtgtgagaccggacc

SEQ ID NO: 491940 - DNA, 30 bp, Artificial Sequence
  Synthetic oligonucleotide
atagctcatgagtggcaggtcacccggacc

SEQ ID NO: 491941 - DNA, 30 bp, Artificial Sequence
  Synthetic oligonucleotide
gatacaagtgcatgcggtcccggccggacc

SEQ ID NO: 491942 - DNA, 30 bp, Artificial Sequence
  Synthetic oligonucleotide
tactccaaaggtttattgtacgtgcggacc

SEQ ID NO: 491943 - DNA, 30 bp, Artificial Sequence
  Synthetic oligonucleotide
gcttaacgtgctaataccttcattcggacc

SEQ ID NO: 491944 - DNA, 30 bp, Artificial Sequence
  Synthetic oligonucleotide
gtatcaaggtcacgcgctaatatagggacc

SEQ ID NO: 491945 - DNA, 30 bp, Artificial Sequence
  Synthetic oligonucleotide
gagataatgtatcatatcgctctagggacc

SEQ ID NO: 491946 - DNA, 30 bp, Artificial Sequence
  Synthetic oligonucleotide
gtggttgcccccggaccgatttaggggacc

SEQ ID NO: 491947 - DNA, 30 bp, Artificial Sequence
  Synthetic oligonucleotide
agcagctgagccatgtacaattcggggacc

SEQ ID NO: 491948 - DNA, 30 bp, Artificial Sequence
  Synthetic oligonucleotide
tggcgagatttccgcgtcggaaatgggacc

SEQ ID NO: 491949 - DNA, 30 bp, Artificial Sequence
  Synthetic oligonucleotide
caatctttattgtccgtgaaaacctggacc

SEQ ID NO: 491950 - DNA, 30 bp, Artificial Sequence
  Synthetic oligonucleotide
cttaggcaacgccgactttatatctggacc

SEQ ID NO: 491951 - DNA, 30 bp, Artificial Sequence
  Synthetic oligonucleotide
caagacggcagacaatccaatcggtggacc

SEQ ID NO: 491952 - DNA, 30 bp, Artificial Sequence
  Synthetic oligonucleotide
taaaaagcgctagcgactgtggaaatgacc

SEQ ID NO: 491953 - DNA, 30 bp, Artificial Sequence
  Synthetic oligonucleotide
cccctgggttgattttgctgcataatgacc

SEQ ID NO: 491954 - DNA, 30 bp, Artificial Sequence
  Synthetic oligonucleotide
gcttgtggcgtcaaagcggtctgcatgacc

SEQ ID NO: 491955 - DNA, 30 bp, Artificial Sequence
  Synthetic oligonucleotide
aatctaaaaacgttagggcgtagcctgacc

SEQ ID NO: 491956 - DNA, 30 bp, Artificial Sequence
  Synthetic oligonucleotide
agatggcaggtcgggggtcagctcctgacc

SEQ ID NO: 491957 - DNA, 30 bp, Artificial Sequence
  Synthetic oligonucleotide
gacgctcgaggacaaccttttgtcctgacc

SEQ ID NO: 491958 - DNA, 30 bp, Artificial Sequence
  Synthetic oligonucleotide
ttcttagatgcagaagtggtggaagtgacc

SEQ ID NO: 491959 - DNA, 30 bp, Artificial Sequence
  Synthetic oligonucleotide
ttttagatcttcgtctgtgtaggagtgacc

SEQ ID NO: 491960 - DNA, 30 bp, Artificial Sequence
  Synthetic oligonucleotide
cgtctagctaataaactagtttgagtgacc

SEQ ID NO: 491961 - DNA, 30 bp, Artificial Sequence
  Synthetic oligonucleotide
tcaattctccggccagcaacgcgcgtgacc

SEQ ID NO: 491962 - DNA, 30 bp, Artificial Sequence
  Synthetic oligonucleotide
ttaggatatgagggggatttaccggtgacc

SEQ ID NO: 491963 - DNA, 30 bp, Artificial Sequence
  Synthetic oligonucleotide
ttctatgggaccgcgaagctctatgtgacc

SEQ ID NO: 491964 - DNA, 30 bp, Artificial Sequence
  Synthetic oligonucleotide
taggtagcatgagcgaccagattcttgacc

SEQ ID NO: 491965 - DNA, 30 bp, Artificial Sequence
  Synthetic oligonucleotide
aatcaaataatagcaactaaagagttgacc

SEQ ID NO: 491966 - DNA, 30 bp, Artificial Sequence
  Synthetic oligonucleotide
gagtccgttatcaaccgaaaaaaaaatacc

SEQ ID NO: 491967 - DNA, 30 bp, Artificial Sequence
  Synthetic oligonucleotide
tataacgctaagtgctgtactcaaaatacc

SEQ ID NO: 491968 - DNA, 30 bp, Artificial Sequence
  Synthetic oligonucleotide
caagtctatgctcgacttggattaaatacc

SEQ ID NO: 491969 - DNA, 30 bp, Artificial Sequence
  Synthetic oligonucleotide
cgccaggatactgtcattctatgtaatacc

SEQ ID NO: 491970 - DNA, 30 bp, Artificial Sequence
  Synthetic oligonucleotide
gagtcatcaaatgctcttatcgttaatacc

SEQ ID NO: 491971 - DNA, 30 bp, Artificial Sequence
  Synthetic oligonucleotide
gaatacggcttcctttcggtaaaccatacc

SEQ ID NO: 491972 - DNA, 30 bp, Artificial Sequence
  Synthetic oligonucleotide
acgtctgcgtcgtgacagggctaccatacc

SEQ ID NO: 491973 - DNA, 30 bp, Artificial Sequence
  Synthetic oligonucleotide
tcaattttatctggcttcgatggccatacc

SEQ ID NO: 491974 - DNA, 30 bp, Artificial Sequence
  Synthetic oligonucleotide
tatccgctcaaaagtgctactcgagatacc

SEQ ID NO: 491975 - DNA, 30 bp, Artificial Sequence
  Synthetic oligonucleotide
caacgaggtacacctcgttgcctagatacc

SEQ ID NO: 491976 - DNA, 30 bp, Artificial Sequence
  Synthetic oligonucleotide
tgtgcttgtgtaggttgcggaatcgatacc

SEQ ID NO: 491977 - DNA, 30 bp, Artificial Sequence
  Synthetic oligonucleotide
gaaccgtctcaacgctatcgttcggatacc

SEQ ID NO: 491978 - DNA, 30 bp, Artificial Sequence
  Synthetic oligonucleotide
aaggtcatagatttcccggcaactgatacc

SEQ ID NO: 491979 - DNA, 30 bp, Artificial Sequence
  Synthetic oligonucleotide
ggtcattattgtacggtaaagtctgatacc

SEQ ID NO: 491980 - DNA, 30 bp, Artificial Sequence
  Synthetic oligonucleotide
gttatagcccaggaggtaaaaatatatacc

SEQ ID NO: 491981 - DNA, 30 bp, Artificial Sequence
  Synthetic oligonucleotide
ctccttcacggtgctatcagggactatacc

SEQ ID NO: 491982 - DNA, 30 bp, Artificial Sequence
  Synthetic oligonucleotide
acttgaaggaggtcgactaaaggctatacc

SEQ ID NO: 491983 - DNA, 30 bp, Artificial Sequence
  Synthetic oligonucleotide
atatataacacagattaccatatctatacc

SEQ ID NO: 491984 - DNA, 30 bp, Artificial Sequence
  Synthetic oligonucleotide
acaccgcaacgtgcaaaaagggtctatacc

SEQ ID NO: 491985 - DNA, 30 bp, Artificial Sequence
  Synthetic oligonucleotide
cagtcccaatcacgcaaaaagaattatacc

SEQ ID NO: 491986 - DNA, 30 bp, Artificial Sequence
  Synthetic oligonucleotide
atttgtaccaggaatctgcaactttatacc

SEQ ID NO: 491987 - DNA, 30 bp, Artificial Sequence
  Synthetic oligonucleotide
ggttctgtcaggttcggtggcatgactacc

SEQ ID NO: 491988 - DNA, 30 bp, Artificial Sequence
  Synthetic oligonucleotide
ctatcactgtgccttttaacgctgactacc

SEQ ID NO: 491989 - DNA, 30 bp, Artificial Sequence
  Synthetic oligonucleotide
aatgcccacccaagcggagtcaaacctacc

SEQ ID NO: 491990 - DNA, 30 bp, Artificial Sequence
  Synthetic oligonucleotide
cttgatatctcaattctttagcgacctacc

SEQ ID NO: 491991 - DNA, 30 bp, Artificial Sequence
  Synthetic oligonucleotide
aaggctggagagccatttatggcccctacc

SEQ ID NO: 491992 - DNA, 30 bp, Artificial Sequence
  Synthetic oligonucleotide
gtgacgcgcggaatattgagaagtcctacc

SEQ ID NO: 491993 - DNA, 30 bp, Artificial Sequence
  Synthetic oligonucleotide
atagaatgtatcgtttattaacacgctacc

SEQ ID NO: 491994 - DNA, 30 bp, Artificial Sequence
  Synthetic oligonucleotide
tgctgggttatttgccccagcaaggctacc

SEQ ID NO: 491995 - DNA, 30 bp, Artificial Sequence
  Synthetic oligonucleotide
gagctcatatgtccttacggtcgatctacc

SEQ ID NO: 491996 - DNA, 30 bp, Artificial Sequence
  Synthetic oligonucleotide
aacgcggacatatagtaagatttatctacc

SEQ ID NO: 491997 - DNA, 30 bp, Artificial Sequence
  Synthetic oligonucleotide
ggattgttgcagtgcatacttttctctacc

SEQ ID NO: 491998 - DNA, 30 bp, Artificial Sequence
  Synthetic oligonucleotide
gcaggctcggtattgacgttatagtctacc

SEQ ID NO: 491999 - DNA, 30 bp, Artificial Sequence
  Synthetic oligonucleotide
ttgattcattactactttgtcaggtctacc

SEQ ID NO: 492000 - DNA, 30 bp, Artificial Sequence
  Synthetic oligonucleotide
ttagcaggtattccggtcgaagggtctacc

SEQ ID NO: 492001 - DNA, 30 bp, Artificial Sequence
  Synthetic oligonucleotide
cgcgaaggagaaagctgcactgggtctacc

SEQ ID NO: 492002 - DNA, 30 bp, Artificial Sequence
  Synthetic oligonucleotide
acgaccggttggcattcaacctgttctacc

SEQ ID NO: 492003 - DNA, 30 bp, Artificial Sequence
  Synthetic oligonucleotide
gcgcacctaactcgcgcgcgcagcagtacc

SEQ ID NO: 492004 - DNA, 30 bp, Artificial Sequence
  Synthetic oligonucleotide
aagcttaattatctgattcgttcgagtacc

SEQ ID NO: 492005 - DNA, 30 bp, Artificial Sequence
  Synthetic oligonucleotide
tggccactctctatatgtgttgttagtacc

SEQ ID NO: 492006 - DNA, 30 bp, Artificial Sequence
  Synthetic oligonucleotide
ggcaggcaggagaaaatagagagacgtacc

SEQ ID NO: 492007 - DNA, 30 bp, Artificial Sequence
  Synthetic oligonucleotide
agtttaaccgtgatgctttacggacgtacc

SEQ ID NO: 492008 - DNA, 30 bp, Artificial Sequence
  Synthetic oligonucleotide
agtatattttatgtgtatgcggaccgtacc

SEQ ID NO: 492009 - DNA, 30 bp, Artificial Sequence
  Synthetic oligonucleotide
gtcagcccaacagaacaggggttccgtacc

SEQ ID NO: 492010 - DNA, 30 bp, Artificial Sequence
  Synthetic oligonucleotide
ggaaggatcgtggatgcgcaggagcgtacc

SEQ ID NO: 492011 - DNA, 30 bp, Artificial Sequence
  Synthetic oligonucleotide
agatccaatatatagttctttcggcgtacc

SEQ ID NO: 492012 - DNA, 31 bp, Artificial Sequence
  Synthetic oligonucleotide
agcgcagcccgtttctccgtagttgcgtacc

SEQ ID NO: 492013 - DNA, 30 bp, Artificial Sequence
  Synthetic oligonucleotide
aacttccgtaggggaccaattgtcggtacc

SEQ ID NO: 492014 - DNA, 30 bp, Artificial Sequence
  Synthetic oligonucleotide
tagtcacagcccttagatgagttcggtacc

SEQ ID NO: 492015 - DNA, 30 bp, Artificial Sequence
  Synthetic oligonucleotide
gggtgatgaacgtcttttgagcagggtacc

SEQ ID NO: 492016 - DNA, 30 bp, Artificial Sequence
  Synthetic oligonucleotide
gcctaaccatcgttattaaagatgggtacc

SEQ ID NO: 492017 - DNA, 30 bp, Artificial Sequence
  Synthetic oligonucleotide
gacccacctctattgagtcccgtgggtacc

SEQ ID NO: 492018 - DNA, 30 bp, Artificial Sequence
  Synthetic oligonucleotide
ctatagaataggtttcgatgtagtggtacc

SEQ ID NO: 492019 - DNA, 30 bp, Artificial Sequence
  Synthetic oligonucleotide
gcgcggctattacccaggtaacgtggtacc

SEQ ID NO: 492020 - DNA, 30 bp, Artificial Sequence
  Synthetic oligonucleotide
gaccaagacctttattggctctttggtacc

SEQ ID NO: 492021 - DNA, 30 bp, Artificial Sequence
  Synthetic oligonucleotide
catggctagactttaacaacgttatgtacc

SEQ ID NO: 492022 - DNA, 30 bp, Artificial Sequence
  Synthetic oligonucleotide
tatgtgttaagcgagcctggacactgtacc

SEQ ID NO: 492023 - DNA, 30 bp, Artificial Sequence
  Synthetic oligonucleotide
tagactatcttttcaggtagctactgtacc

SEQ ID NO: 492024 - DNA, 30 bp, Artificial Sequence
  Synthetic oligonucleotide
ttatactatgttaacctgttgtagtgtacc

SEQ ID NO: 492025 - DNA, 30 bp, Artificial Sequence
  Synthetic oligonucleotide
gggggtgttttaggcgggcagcggtgtacc

SEQ ID NO: 492026 - DNA, 30 bp, Artificial Sequence
  Synthetic oligonucleotide
tgaggtgccgcgacactgcctagcattacc

SEQ ID NO: 492027 - DNA, 30 bp, Artificial Sequence
  Synthetic oligonucleotide
gccctgatgggcttggggcacctgattacc

SEQ ID NO: 492028 - DNA, 30 bp, Artificial Sequence
  Synthetic oligonucleotide
tcagaagagttccggtggctcggtattacc

SEQ ID NO: 492029 - DNA, 30 bp, Artificial Sequence
  Synthetic oligonucleotide
tttgttataggggctcgaaggcttattacc

SEQ ID NO: 492030 - DNA, 30 bp, Artificial Sequence
  Synthetic oligonucleotide
tcaacgctcaatcgaggcaatcatcttacc

SEQ ID NO: 492031 - DNA, 30 bp, Artificial Sequence
  Synthetic oligonucleotide
gcgcagtacatcgcaggcgacccagttacc

SEQ ID NO: 492032 - DNA, 30 bp, Artificial Sequence
  Synthetic oligonucleotide
tatctgcgctttatcggttaagtcgttacc

SEQ ID NO: 492033 - DNA, 30 bp, Artificial Sequence
  Synthetic oligonucleotide
tatcctttgcgccagccaagacttgttacc

SEQ ID NO: 492034 - DNA, 30 bp, Artificial Sequence
  Synthetic oligonucleotide
cggtggagtgcacctccaagtaaatttacc

SEQ ID NO: 492035 - DNA, 30 bp, Artificial Sequence
  Synthetic oligonucleotide
aatatgggatgtgctttcttaacatttacc

SEQ ID NO: 492036 - DNA, 30 bp, Artificial Sequence
  Synthetic oligonucleotide
gactgcgaccaatagtaacgctgatttacc

SEQ ID NO: 492037 - DNA, 30 bp, Artificial Sequence
  Synthetic oligonucleotide
gttccaaagtacgtagttgtatactttacc

SEQ ID NO: 492038 - DNA, 30 bp, Artificial Sequence
  Synthetic oligonucleotide
taaaattctgtaactttagtccagtttacc

SEQ ID NO: 492039 - DNA, 30 bp, Artificial Sequence
  Synthetic oligonucleotide
agcgcacagttaccgggcaaactgtttacc

SEQ ID NO: 492040 - DNA, 30 bp, Artificial Sequence
  Synthetic oligonucleotide
tccaggatctctaatctcggttcttttacc

SEQ ID NO: 492041 - DNA, 30 bp, Artificial Sequence
  Synthetic oligonucleotide
aaccgaccttacccacctcctcaaaaaccc

SEQ ID NO: 492042 - DNA, 30 bp, Artificial Sequence
  Synthetic oligonucleotide
tccctcggtatagcaagggtttccaaaccc

SEQ ID NO: 492043 - DNA, 30 bp, Artificial Sequence
  Synthetic oligonucleotide
ggttgcgcttatgggcaccactcgaaaccc

SEQ ID NO: 492044 - DNA, 30 bp, Artificial Sequence
  Synthetic oligonucleotide
atcgacagcccggtattaaaaaataaaccc

SEQ ID NO: 492045 - DNA, 30 bp, Artificial Sequence
  Synthetic oligonucleotide
ggttccccttatagctttccaaataaaccc

SEQ ID NO: 492046 - DNA, 30 bp, Artificial Sequence
  Synthetic oligonucleotide
tctatgtcacaggaggagcttgataaaccc

SEQ ID NO: 492047 - DNA, 30 bp, Artificial Sequence
  Synthetic oligonucleotide
gggggtgaatatctcgtcaactttaaaccc

SEQ ID NO: 492048 - DNA, 30 bp, Artificial Sequence
  Synthetic oligonucleotide
tacacgtctaacgtgaacctgagtcaaccc

SEQ ID NO: 492049 - DNA, 30 bp, Artificial Sequence
  Synthetic oligonucleotide
atgcaaaaggtttttcgttcacaagaaccc

SEQ ID NO: 492050 - DNA, 30 bp, Artificial Sequence
  Synthetic oligonucleotide
gattactctaggatctgatattgagaaccc

SEQ ID NO: 492051 - DNA, 30 bp, Artificial Sequence
  Synthetic oligonucleotide
tagttcgacgatattgttagagtcgaaccc

SEQ ID NO: 492052 - DNA, 30 bp, Artificial Sequence
  Synthetic oligonucleotide
tccgggaaacagatccctgtcccggaaccc

SEQ ID NO: 492053 - DNA, 30 bp, Artificial Sequence
  Synthetic oligonucleotide
cccatatgcaatcaggggacgttggaaccc

SEQ ID NO: 492054 - DNA, 30 bp, Artificial Sequence
  Synthetic oligonucleotide
tgagctggacctacgccgtctcttgaaccc

SEQ ID NO: 492055 - DNA, 30 bp, Artificial Sequence
  Synthetic oligonucleotide
tggagcggttagtatgccaagcactaaccc

SEQ ID NO: 492056 - DNA, 30 bp, Artificial Sequence
  Synthetic oligonucleotide
gatgtccgattctacatttatttgtaaccc

SEQ ID NO: 492057 - DNA, 30 bp, Artificial Sequence
  Synthetic oligonucleotide
ttcccttacgcgccccggatgcattaaccc

SEQ ID NO: 492058 - DNA, 30 bp, Artificial Sequence
  Synthetic oligonucleotide
ttcttttacccttgtggtcgggcttaaccc

SEQ ID NO: 492059 - DNA, 30 bp, Artificial Sequence
  Synthetic oligonucleotide
caaaacagcctcagggtgttgtgttaaccc

SEQ ID NO: 492060 - DNA, 31 bp, Artificial Sequence
  Synthetic oligonucleotide
ctgggcctacgctgtaaccaacggaacaccc

SEQ ID NO: 492061 - DNA, 30 bp, Artificial Sequence
  Synthetic oligonucleotide
aaacgttgatccggcgcgaatggaacaccc

SEQ ID NO: 492062 - DNA, 30 bp, Artificial Sequence
  Synthetic oligonucleotide
aacaaactggtgcggtatcgtctcccaccc

SEQ ID NO: 492063 - DNA, 30 bp, Artificial Sequence
  Synthetic oligonucleotide
aaccgctacaatttgtctcttaggccaccc

SEQ ID NO: 492064 - DNA, 30 bp, Artificial Sequence
  Synthetic oligonucleotide
taacgtacggttacgtggcgagtgccaccc

SEQ ID NO: 492065 - DNA, 30 bp, Artificial Sequence
  Synthetic oligonucleotide
ttttgttccaaattggccaactatccaccc

SEQ ID NO: 492066 - DNA, 30 bp, Artificial Sequence
  Synthetic oligonucleotide
ggcagcgtcgtagctaggctgcctccaccc

SEQ ID NO: 492067 - DNA, 30 bp, Artificial Sequence
  Synthetic oligonucleotide
gagattgggcgccatgccccagttccaccc

SEQ ID NO: 492068 - DNA, 30 bp, Artificial Sequence
  Synthetic oligonucleotide
actagggctaaacatgcatagggcgcaccc

SEQ ID NO: 492069 - DNA, 30 bp, Artificial Sequence
  Synthetic oligonucleotide
gaatgaaagcacccaagcacgttggcaccc

SEQ ID NO: 492070 - DNA, 30 bp, Artificial Sequence
  Synthetic oligonucleotide
cgtcacctctactttggcgggcctgcaccc

SEQ ID NO: 492071 - DNA, 30 bp, Artificial Sequence
  Synthetic oligonucleotide
tcactaataaacacccacggtagatcaccc

SEQ ID NO: 492072 - DNA, 30 bp, Artificial Sequence
  Synthetic oligonucleotide
cacgcagagattttttactcaatgtcaccc

SEQ ID NO: 492073 - DNA, 30 bp, Artificial Sequence
  Synthetic oligonucleotide
tgaagggcagcgtgaggactcggttcaccc

SEQ ID NO: 492074 - DNA, 30 bp, Artificial Sequence
  Synthetic oligonucleotide
attagatatgtatttgttgagccaagaccc

SEQ ID NO: 492075 - DNA, 30 bp, Artificial Sequence
  Synthetic oligonucleotide
tcaatgtccatacctaccaaagcaagaccc

SEQ ID NO: 492076 - DNA, 30 bp, Artificial Sequence
  Synthetic oligonucleotide
aatagtcgacggcactgttgtttaagaccc

SEQ ID NO: 492077 - DNA, 30 bp, Artificial Sequence
  Synthetic oligonucleotide
gacgggtcttcctttacttccatgagaccc

SEQ ID NO: 492078 - DNA, 30 bp, Artificial Sequence
  Synthetic oligonucleotide
accgaaacctatttttggtcaattagaccc

SEQ ID NO: 492079 - DNA, 30 bp, Artificial Sequence
  Synthetic oligonucleotide
agcggaattgcgagcgttcaacgacgaccc

SEQ ID NO: 492080 - DNA, 30 bp, Artificial Sequence
  Synthetic oligonucleotide
agcatatgtccttgtacaactggacgaccc

SEQ ID NO: 492081 - DNA, 30 bp, Artificial Sequence
  Synthetic oligonucleotide
tttcttccctaatttcctcattaccgaccc

SEQ ID NO: 492082 - DNA, 30 bp, Artificial Sequence
  Synthetic oligonucleotide
ttgtctgttgggataatacgaggccgaccc

SEQ ID NO: 492083 - DNA, 30 bp, Artificial Sequence
  Synthetic oligonucleotide
ggccaaacctttgtcattttctgccgaccc

SEQ ID NO: 492084 - DNA, 30 bp, Artificial Sequence
  Synthetic oligonucleotide
attagaggcgtgtttggttagatgcgaccc

SEQ ID NO: 492085 - DNA, 30 bp, Artificial Sequence
  Synthetic oligonucleotide
gctttaaacgggcgcctagtaagtcgaccc

SEQ ID NO: 492086 - DNA, 30 bp, Artificial Sequence
  Synthetic oligonucleotide
gtacccggcagtgccgaggtccaaggaccc

SEQ ID NO: 492087 - DNA, 30 bp, Artificial Sequence
  Synthetic oligonucleotide
ccagattttctcttacgctcatcaggaccc

SEQ ID NO: 492088 - DNA, 30 bp, Artificial Sequence
  Synthetic oligonucleotide
cccgcagacggagtgtcaccaagaggaccc

SEQ ID NO: 492089 - DNA, 30 bp, Artificial Sequence
  Synthetic oligonucleotide
aaatatgtactcaaacgacgtatcggaccc

SEQ ID NO: 492090 - DNA, 30 bp, Artificial Sequence
  Synthetic oligonucleotide
taatctctattgcaccaaacaacgggaccc

SEQ ID NO: 492091 - DNA, 30 bp, Artificial Sequence
  Synthetic oligonucleotide
atctcgtatcatcggagcactcgtggaccc

SEQ ID NO: 492092 - DNA, 30 bp, Artificial Sequence
  Synthetic oligonucleotide
tatgcaagtgctgtgcctctttgtggaccc

SEQ ID NO: 492093 - DNA, 30 bp, Artificial Sequence
  Synthetic oligonucleotide
ggtggagatgctctggtaatgcaatgaccc

SEQ ID NO: 492094 - DNA, 30 bp, Artificial Sequence
  Synthetic oligonucleotide
ttcagcgatcggggatccccaacttgaccc

SEQ ID NO: 492095 - DNA, 30 bp, Artificial Sequence
  Synthetic oligonucleotide
cgactgagagtttcaaatttaatttgaccc

SEQ ID NO: 492096 - DNA, 30 bp, Artificial Sequence
  Synthetic oligonucleotide
tttagaatctgggtacggcagtagataccc

SEQ ID NO: 492097 - DNA, 30 bp, Artificial Sequence
  Synthetic oligonucleotide
accattcatctagagtagtaagggataccc

SEQ ID NO: 492098 - DNA, 30 bp, Artificial Sequence
  Synthetic oligonucleotide
tacaaacagctcggcattcaaaatctaccc

SEQ ID NO: 492099 - DNA, 30 bp, Artificial Sequence
  Synthetic oligonucleotide
cggccggctttctttcgtcggcgagtaccc

SEQ ID NO: 492100 - DNA, 30 bp, Artificial Sequence
  Synthetic oligonucleotide
ctgcttcgtctttacggttcagtagtaccc

SEQ ID NO: 492101 - DNA, 30 bp, Artificial Sequence
  Synthetic oligonucleotide
ccagcatgctactcacgcagtgacgtaccc

SEQ ID NO: 492102 - DNA, 30 bp, Artificial Sequence
  Synthetic oligonucleotide
tatatacatcgtgatatatcaggggtaccc

SEQ ID NO: 492103 - DNA, 30 bp, Artificial Sequence
  Synthetic oligonucleotide
tactgggaactaggaaggtatggggtaccc

SEQ ID NO: 492104 - DNA, 30 bp, Artificial Sequence
  Synthetic oligonucleotide
tagtggaaagtttcattctggaatgtaccc

SEQ ID NO: 492105 - DNA, 30 bp, Artificial Sequence
  Synthetic oligonucleotide
ctcgttggcggaagcaacggtcatgtaccc

SEQ ID NO: 492106 - DNA, 30 bp, Artificial Sequence
  Synthetic oligonucleotide
gcgttattaggtcggatattacctgtaccc

SEQ ID NO: 492107 - DNA, 30 bp, Artificial Sequence
  Synthetic oligonucleotide
gaaacgcatatatcaaggatctcgttaccc

SEQ ID NO: 492108 - DNA, 30 bp, Artificial Sequence
  Synthetic oligonucleotide
taaatggtgatcagccagaacatgttaccc

SEQ ID NO: 492109 - DNA, 30 bp, Artificial Sequence
  Synthetic oligonucleotide
cgttggctttgtatgaaattatctttaccc

SEQ ID NO: 492110 - DNA, 30 bp, Artificial Sequence
  Synthetic oligonucleotide
taatcgattgtggaggtggcctctttaccc

SEQ ID NO: 492111 - DNA, 30 bp, Artificial Sequence
  Synthetic oligonucleotide
cgaagatgggtatattccactgaaaacccc

SEQ ID NO: 492112 - DNA, 30 bp, Artificial Sequence
  Synthetic oligonucleotide
cgccttacatgttataatcagctaaacccc

SEQ ID NO: 492113 - DNA, 30 bp, Artificial Sequence
  Synthetic oligonucleotide
aaagtgtcatcgttcgtgctatgcaacccc

SEQ ID NO: 492114 - DNA, 30 bp, Artificial Sequence
  Synthetic oligonucleotide
gacagattagtgagagtatcttgcaacccc

SEQ ID NO: 492115 - DNA, 30 bp, Artificial Sequence
  Synthetic oligonucleotide
tgttgtggagggctcgggcgggcgaacccc

SEQ ID NO: 492116 - DNA, 30 bp, Artificial Sequence
  Synthetic oligonucleotide
aagttcgtgaagacaggggctaggaacccc

SEQ ID NO: 492117 - DNA, 30 bp, Artificial Sequence
  Synthetic oligonucleotide
tgttggctatagcgttaacccctgaacccc

SEQ ID NO: 492118 - DNA, 30 bp, Artificial Sequence
  Synthetic oligonucleotide
ccttttcgggggttgcagaaacaacacccc

SEQ ID NO: 492119 - DNA, 30 bp, Artificial Sequence
  Synthetic oligonucleotide
tctttcctggttgaaaggagaccacacccc

SEQ ID NO: 492120 - DNA, 30 bp, Artificial Sequence
  Synthetic oligonucleotide
gtatcctcccctggacgtagcccacacccc

SEQ ID NO: 492121 - DNA, 30 bp, Artificial Sequence
  Synthetic oligonucleotide
atccagataacccgacaaccactacacccc

SEQ ID NO: 492122 - DNA, 30 bp, Artificial Sequence
  Synthetic oligonucleotide
gcagtcttctaaggatccgcgacgcacccc

SEQ ID NO: 492123 - DNA, 30 bp, Artificial Sequence
  Synthetic oligonucleotide
ttagttcggagcaatggggcgccgcacccc

SEQ ID NO: 492124 - DNA, 30 bp, Artificial Sequence
  Synthetic oligonucleotide
cggcgggcgatccagggcgaataggacccc

SEQ ID NO: 492125 - DNA, 30 bp, Artificial Sequence
  Synthetic oligonucleotide
atatctcatatcttcaggcagtaggacccc

SEQ ID NO: 492126 - DNA, 30 bp, Artificial Sequence
  Synthetic oligonucleotide
ggcgacccgcaacggggacaacgggacccc

SEQ ID NO: 492127 - DNA, 30 bp, Artificial Sequence
  Synthetic oligonucleotide
gcaaagggacggtagggtggacatgacccc

SEQ ID NO: 492128 - DNA, 30 bp, Artificial Sequence
  Synthetic oligonucleotide
atgtaccagctcggcttctgctttgacccc

SEQ ID NO: 492129 - DNA, 30 bp, Artificial Sequence
  Synthetic oligonucleotide
gttgtccgactctggccattaaaatacccc

SEQ ID NO: 492130 - DNA, 30 bp, Artificial Sequence
  Synthetic oligonucleotide
aaattaaccccgcggacctaatgatacccc

SEQ ID NO: 492131 - DNA, 30 bp, Artificial Sequence
  Synthetic oligonucleotide
tacccaagtttgggacgttgggtatacccc

SEQ ID NO: 492132 - DNA, 40 bp, Artificial Sequence
  Synthetic oligonucleotide
ccggccatttccacgtacaggatgttcgcaggcctacccc

SEQ ID NO: 492133 - DNA, 29 bp, Artificial Sequence
  Synthetic oligonucleotide
aaattctcgtctaaccaagatattacccc

SEQ ID NO: 492134 - DNA, 30 bp, Artificial Sequence
  Synthetic oligonucleotide
aggcctaatgttgggataaggacttacccc

SEQ ID NO: 492135 - DNA, 30 bp, Artificial Sequence
  Synthetic oligonucleotide
ggaaggatctactgttgtatatcttacccc

SEQ ID NO: 492136 - DNA, 30 bp, Artificial Sequence
  Synthetic oligonucleotide
attgctccccatcaataaggaatttacccc

SEQ ID NO: 492137 - DNA, 30 bp, Artificial Sequence
  Synthetic oligonucleotide
ggtataggtgaatgacatttcttcaccccc

SEQ ID NO: 492138 - DNA, 30 bp, Artificial Sequence
  Synthetic oligonucleotide
ggattcttctatacgtctaatttgaccccc

SEQ ID NO: 492139 - DNA, 30 bp, Artificial Sequence
  Synthetic oligonucleotide
tagatgtttctgcagctaaacgctaccccc

SEQ ID NO: 492140 - DNA, 30 bp, Artificial Sequence
  Synthetic oligonucleotide
attggttattgcgggaccccagttaccccc

SEQ ID NO: 492141 - DNA, 30 bp, Artificial Sequence
  Synthetic oligonucleotide
gggttatagctccagtggagctttaccccc

SEQ ID NO: 492142 - DNA, 30 bp, Artificial Sequence
  Synthetic oligonucleotide
attcgctttactacaggctagtgtcccccc

SEQ ID NO: 492143 - DNA, 30 bp, Artificial Sequence
  Synthetic oligonucleotide
agaggttatggggtacctggactagccccc

SEQ ID NO: 492144 - DNA, 30 bp, Artificial Sequence
  Synthetic oligonucleotide
gctctccacagcgatgaaattttagccccc

SEQ ID NO: 492145 - DNA, 30 bp, Artificial Sequence
  Synthetic oligonucleotide
aagcgttggtcgcattcactgcgatccccc

SEQ ID NO: 492146 - DNA, 30 bp, Artificial Sequence
  Synthetic oligonucleotide
cgcgcgagcaacctctgatatatatccccc

SEQ ID NO: 492147 - DNA, 30 bp, Artificial Sequence
  Synthetic oligonucleotide
gccttggtagacgcacccggcaactccccc

SEQ ID NO: 492148 - DNA, 30 bp, Artificial Sequence
  Synthetic oligonucleotide
cttgcgatcagtggcatcattaactccccc

SEQ ID NO: 492149 - DNA, 30 bp, Artificial Sequence
  Synthetic oligonucleotide
gccaagcggtagcgttcgtgggcgtccccc

SEQ ID NO: 492150 - DNA, 30 bp, Artificial Sequence
  Synthetic oligonucleotide
aaaacccatgctcacacgttgcggtccccc

SEQ ID NO: 492151 - DNA, 30 bp, Artificial Sequence
  Synthetic oligonucleotide
ttcagggggtccgctgtacttttgtccccc

SEQ ID NO: 492152 - DNA, 30 bp, Artificial Sequence
  Synthetic oligonucleotide
gatttccgacggttgaagaaaaattccccc

SEQ ID NO: 492153 - DNA, 30 bp, Artificial Sequence
  Synthetic oligonucleotide
tagatgtcaagccgttatgatcattccccc

SEQ ID NO: 492154 - DNA, 30 bp, Artificial Sequence
  Synthetic oligonucleotide
ttgtgtgtccgtagtcgcttcatttccccc

SEQ ID NO: 492155 - DNA, 30 bp, Artificial Sequence
  Synthetic oligonucleotide
cagcgcccggcgctgtagggtgtttccccc

SEQ ID NO: 492156 - DNA, 30 bp, Artificial Sequence
  Synthetic oligonucleotide
gatataatttccaatcttaaaaagagcccc

SEQ ID NO: 492157 - DNA, 30 bp, Artificial Sequence
  Synthetic oligonucleotide
taagttacggcattggggggaatgagcccc

SEQ ID NO: 492158 - DNA, 30 bp, Artificial Sequence
  Synthetic oligonucleotide
ctgcgcttgagcgttgcattgcgacgcccc

SEQ ID NO: 492159 - DNA, 30 bp, Artificial Sequence
  Synthetic oligonucleotide
ggatacactgaattttggtagcatcgcccc

SEQ ID NO: 492160 - DNA, 30 bp, Artificial Sequence
  Synthetic oligonucleotide
aaagtattttcaactcaggatggaggcccc

SEQ ID NO: 492161 - DNA, 30 bp, Artificial Sequence
  Synthetic oligonucleotide
gttcggagaaggtatgacatatgaggcccc

SEQ ID NO: 492162 - DNA, 30 bp, Artificial Sequence
  Synthetic oligonucleotide
tccgcaaatgtctgtgggttcataggcccc

SEQ ID NO: 492163 - DNA, 30 bp, Artificial Sequence
  Synthetic oligonucleotide
gggcgttgagaggagcaccgtgacggcccc

SEQ ID NO: 492164 - DNA, 30 bp, Artificial Sequence
  Synthetic oligonucleotide
caggctcggggcagaatttcggccggcccc

SEQ ID NO: 492165 - DNA, 30 bp, Artificial Sequence
  Synthetic oligonucleotide
gcaaccttcttaaatggtagccggggcccc

SEQ ID NO: 492166 - DNA, 30 bp, Artificial Sequence
  Synthetic oligonucleotide
gccggatgtagatgcatagccttatgcccc

SEQ ID NO: 492167 - DNA, 30 bp, Artificial Sequence
  Synthetic oligonucleotide
ttggcgtggtcttctggatccccgtgcccc

SEQ ID NO: 492168 - DNA, 30 bp, Artificial Sequence
  Synthetic oligonucleotide
gtatgtaaaaccagttacatgacttgcccc

SEQ ID NO: 492169 - DNA, 30 bp, Artificial Sequence
  Synthetic oligonucleotide
ggtaactgattacaggtactccaaatcccc

SEQ ID NO: 492170 - DNA, 30 bp, Artificial Sequence
  Synthetic oligonucleotide
attcggagagtagtatatcgcataatcccc

SEQ ID NO: 492171 - DNA, 30 bp, Artificial Sequence
  Synthetic oligonucleotide
gacttgtatgggggggatgttctaatcccc

SEQ ID NO: 492172 - DNA, 30 bp, Artificial Sequence
  Synthetic oligonucleotide
tttttggggaaaaccaggcgaagactcccc

SEQ ID NO: 492173 - DNA, 30 bp, Artificial Sequence
  Synthetic oligonucleotide
ctccgggcggtctccatgataagtctcccc

SEQ ID NO: 492174 - DNA, 30 bp, Artificial Sequence
  Synthetic oligonucleotide
ttgaattaatacgcagtcatgcaagtcccc

SEQ ID NO: 492175 - DNA, 30 bp, Artificial Sequence
  Synthetic oligonucleotide
atgccttctgtcgcacgtctaagcgtcccc

SEQ ID NO: 492176 - DNA, 30 bp, Artificial Sequence
  Synthetic oligonucleotide
atttgatccccatacaaaccttttgtcccc

SEQ ID NO: 492177 - DNA, 30 bp, Artificial Sequence
  Synthetic oligonucleotide
aactcccctatcatccgtcgttaattcccc

SEQ ID NO: 492178 - DNA, 30 bp, Artificial Sequence
  Synthetic oligonucleotide
gggtggttttgcgttcgcaaccgattcccc

SEQ ID NO: 492179 - DNA, 30 bp, Artificial Sequence
  Synthetic oligonucleotide
gacgatccagctttggacattttcttcccc

SEQ ID NO: 492180 - DNA, 30 bp, Artificial Sequence
  Synthetic oligonucleotide
gattaagttggatttcgtatacagttcccc

SEQ ID NO: 492181 - DNA, 30 bp, Artificial Sequence
  Synthetic oligonucleotide
tataaaaagtacctataggtattaaagccc

SEQ ID NO: 492182 - DNA, 30 bp, Artificial Sequence
  Synthetic oligonucleotide
gtttactggtcacggactaagacgaagccc

SEQ ID NO: 492183 - DNA, 30 bp, Artificial Sequence
  Synthetic oligonucleotide
taaggaagcgacagatcggtatgacagccc

SEQ ID NO: 492184 - DNA, 30 bp, Artificial Sequence
  Synthetic oligonucleotide
aggtgaaagtcacgaaaagggcggcagccc

SEQ ID NO: 492185 - DNA, 30 bp, Artificial Sequence
  Synthetic oligonucleotide
cagaattgaattcctattctgtaagagccc

SEQ ID NO: 492186 - DNA, 30 bp, Artificial Sequence
  Synthetic oligonucleotide
tacattttcacccaataatccgacgagccc

SEQ ID NO: 492187 - DNA, 30 bp, Artificial Sequence
  Synthetic oligonucleotide
accgttctcagccctgggcggctcgagccc

SEQ ID NO: 492188 - DNA, 30 bp, Artificial Sequence
  Synthetic oligonucleotide
tcctagtcttatctagctaagggggagccc

SEQ ID NO: 492189 - DNA, 30 bp, Artificial Sequence
  Synthetic oligonucleotide
gtagacgcgtgtagagctaattgggagccc

SEQ ID NO: 492190 - DNA, 31 bp, Artificial Sequence
  Synthetic oligonucleotide
gttccttgggagcccattgggaattgagccc

SEQ ID NO: 492191 - DNA, 30 bp, Artificial Sequence
  Synthetic oligonucleotide
gattgaaggtgagctccgggagagacgccc

SEQ ID NO: 492192 - DNA, 30 bp, Artificial Sequence
  Synthetic oligonucleotide
ctaggtttcatggcgcgctaagggacgccc

SEQ ID NO: 492193 - DNA, 30 bp, Artificial Sequence
  Synthetic oligonucleotide
caccccgattatctcggacatacgccgccc

SEQ ID NO: 492194 - DNA, 30 bp, Artificial Sequence
  Synthetic oligonucleotide
tcgtctggtgacggtaagtcgtttccgccc

SEQ ID NO: 492195 - DNA, 30 bp, Artificial Sequence
  Synthetic oligonucleotide
tcccctaggattgggctttccccagcgccc

SEQ ID NO: 492196 - DNA, 30 bp, Artificial Sequence
  Synthetic oligonucleotide
tttatgagttggttcttcactagagcgccc

SEQ ID NO: 492197 - DNA, 30 bp, Artificial Sequence
  Synthetic oligonucleotide
gtagcagggacttttcagcgctaggcgccc

SEQ ID NO: 492198 - DNA, 30 bp, Artificial Sequence
  Synthetic oligonucleotide
ctgagaccgcggcatagtaagtagtcgccc

SEQ ID NO: 492199 - DNA, 30 bp, Artificial Sequence
  Synthetic oligonucleotide
taagcgacttcctctgccatgatgtcgccc

SEQ ID NO: 492200 - DNA, 30 bp, Artificial Sequence
  Synthetic oligonucleotide
gccaaggccaatgattccggctaaaggccc

SEQ ID NO: 492201 - DNA, 30 bp, Artificial Sequence
  Synthetic oligonucleotide
tccggtttggtattatgagagtaaaggccc

SEQ ID NO: 492202 - DNA, 30 bp, Artificial Sequence
  Synthetic oligonucleotide
aacgccctgaacagttactttcgcaggccc

SEQ ID NO: 492203 - DNA, 30 bp, Artificial Sequence
  Synthetic oligonucleotide
caccgttggctctaataagaactcaggccc

SEQ ID NO: 492204 - DNA, 30 bp, Artificial Sequence
  Synthetic oligonucleotide
taatagtcttcttaaagtcacaggaggccc

SEQ ID NO: 492205 - DNA, 30 bp, Artificial Sequence
  Synthetic oligonucleotide
attttccgtactcgagaagataggaggccc

SEQ ID NO: 492206 - DNA, 30 bp, Artificial Sequence
  Synthetic oligonucleotide
gattggagtgtgtgatgtccagtgaggccc

SEQ ID NO: 492207 - DNA, 30 bp, Artificial Sequence
  Synthetic oligonucleotide
ggtaatagccttgttctttacaataggccc

SEQ ID NO: 492208 - DNA, 30 bp, Artificial Sequence
  Synthetic oligonucleotide
tctccacatacgtatatcgggcctaggccc

SEQ ID NO: 492209 - DNA, 30 bp, Artificial Sequence
  Synthetic oligonucleotide
accctatggcccggacgactatcacggccc

SEQ ID NO: 492210 - DNA, 30 bp, Artificial Sequence
  Synthetic oligonucleotide
gttatttcagatctttccgcgaggcggccc

SEQ ID NO: 492211 - DNA, 30 bp, Artificial Sequence
  Synthetic oligonucleotide
ttcccccagcagcacccggagggcgggccc

SEQ ID NO: 492212 - DNA, 30 bp, Artificial Sequence
  Synthetic oligonucleotide
tttaaagatcgaacaccttatgcggggccc

SEQ ID NO: 492213 - DNA, 30 bp, Artificial Sequence
  Synthetic oligonucleotide
taaacacgggtctcgagcaagcgtgggccc

SEQ ID NO: 492214 - DNA, 30 bp, Artificial Sequence
  Synthetic oligonucleotide
ctcaatgcgcccatcaaaacatcatggccc

SEQ ID NO: 492215 - DNA, 30 bp, Artificial Sequence
  Synthetic oligonucleotide
acatcgcaatgcaggggtaccatatggccc

SEQ ID NO: 492216 - DNA, 30 bp, Artificial Sequence
  Synthetic oligonucleotide
ttacgtactttcgctgacttgcactggccc

SEQ ID NO: 492217 - DNA, 30 bp, Artificial Sequence
  Synthetic oligonucleotide
gtcaatgaatgaggttcatgagactggccc

SEQ ID NO: 492218 - DNA, 30 bp, Artificial Sequence
  Synthetic oligonucleotide
cttttccgacaagcggcatacgacatgccc

SEQ ID NO: 492219 - DNA, 30 bp, Artificial Sequence
  Synthetic oligonucleotide
gcagcggatgtggatgcgcattagatgccc

SEQ ID NO: 492220 - DNA, 30 bp, Artificial Sequence
  Synthetic oligonucleotide
ccctttggatctgcatgacgaacgatgccc

SEQ ID NO: 492221 - DNA, 30 bp, Artificial Sequence
  Synthetic oligonucleotide
ctagcccccggggggaaatgcttgatgccc

SEQ ID NO: 492222 - DNA, 30 bp, Artificial Sequence
  Synthetic oligonucleotide
cgcaaagcgtcgaatcctgggggtctgccc

SEQ ID NO: 492223 - DNA, 30 bp, Artificial Sequence
  Synthetic oligonucleotide
ttgtcgtaaacctcgcttggtacagtgccc

SEQ ID NO: 492224 - DNA, 30 bp, Artificial Sequence
  Synthetic oligonucleotide
cccgcgcatcactcatctcaaatagtgccc

SEQ ID NO: 492225 - DNA, 30 bp, Artificial Sequence
  Synthetic oligonucleotide
taaccccgacttcgtgctcagagcgtgccc

SEQ ID NO: 492226 - DNA, 30 bp, Artificial Sequence
  Synthetic oligonucleotide
atattcttaggcaccgtcaaattcgtgccc

SEQ ID NO: 492227 - DNA, 30 bp, Artificial Sequence
  Synthetic oligonucleotide
ttctttcgttatctcaagtaacttgtgccc

SEQ ID NO: 492228 - DNA, 30 bp, Artificial Sequence
  Synthetic oligonucleotide
gctaatctaacacaaatcttcgttgtgccc

SEQ ID NO: 492229 - DNA, 30 bp, Artificial Sequence
  Synthetic oligonucleotide
caataaagcgacggaggtagggtattgccc

SEQ ID NO: 492230 - DNA, 30 bp, Artificial Sequence
  Synthetic oligonucleotide
actctccaatttctgtatcgaagaaatccc

SEQ ID NO: 492231 - DNA, 30 bp, Artificial Sequence
  Synthetic oligonucleotide
ggatataattatcgtatgggcagaaatccc

SEQ ID NO: 492232 - DNA, 30 bp, Artificial Sequence
  Synthetic oligonucleotide
cagaacccttggttggggtgctgcaatccc

SEQ ID NO: 492233 - DNA, 30 bp, Artificial Sequence
  Synthetic oligonucleotide
cttcccgggcatttctagaaaggacatccc

SEQ ID NO: 492234 - DNA, 30 bp, Artificial Sequence
  Synthetic oligonucleotide
tcagttaacttagcctcgctaacccatccc

SEQ ID NO: 492235 - DNA, 30 bp, Artificial Sequence
  Synthetic oligonucleotide
ggtcgaaatatgcgacttagggtccatccc

SEQ ID NO: 492236 - DNA, 30 bp, Artificial Sequence
  Synthetic oligonucleotide
acacccttaacgtatgcaggtgtccatccc

SEQ ID NO: 492237 - DNA, 30 bp, Artificial Sequence
  Synthetic oligonucleotide
ttcgacgccagcattcgtgctggagatccc

SEQ ID NO: 492238 - DNA, 30 bp, Artificial Sequence
  Synthetic oligonucleotide
agagctacgtcctacgggaatatagatccc

SEQ ID NO: 492239 - DNA, 30 bp, Artificial Sequence
  Synthetic oligonucleotide
tgcggtaggaaactattgacgaaggatccc

SEQ ID NO: 492240 - DNA, 30 bp, Artificial Sequence
  Synthetic oligonucleotide
ccagtttgtacggccgccgaggaggatccc

SEQ ID NO: 492241 - DNA, 30 bp, Artificial Sequence
  Synthetic oligonucleotide
gagttaatgtctaacgacggaattgatccc

SEQ ID NO: 492242 - DNA, 30 bp, Artificial Sequence
  Synthetic oligonucleotide
gattccccaggtgtcaaccgttaatatccc

SEQ ID NO: 492243 - DNA, 30 bp, Artificial Sequence
  Synthetic oligonucleotide
ccattagacttagcatcagacgtatatccc

SEQ ID NO: 492244 - DNA, 30 bp, Artificial Sequence
  Synthetic oligonucleotide
accgtacgtattgttacgtaattatatccc

SEQ ID NO: 492245 - DNA, 30 bp, Artificial Sequence
  Synthetic oligonucleotide
aaaatataccactagaaccctttatatccc

SEQ ID NO: 492246 - DNA, 30 bp, Artificial Sequence
  Synthetic oligonucleotide
gtactgaacacaaatagggtgttctatccc

SEQ ID NO: 492247 - DNA, 30 bp, Artificial Sequence
  Synthetic oligonucleotide
gtgaccgcttcggtctgcttgtagactccc

SEQ ID NO: 492248 - DNA, 30 bp, Artificial Sequence
  Synthetic oligonucleotide
gccgtgtcatagaacgggtctaatactccc

SEQ ID NO: 492249 - DNA, 30 bp, Artificial Sequence
  Synthetic oligonucleotide
agtccccgcggagttatgacgcctactccc

SEQ ID NO: 492250 - DNA, 30 bp, Artificial Sequence
  Synthetic oligonucleotide
gtatgacacaatgcgtttcggattactccc

SEQ ID NO: 492251 - DNA, 30 bp, Artificial Sequence
  Synthetic oligonucleotide
cgccaggggatcctgcctagagaacctccc

SEQ ID NO: 492252 - DNA, 30 bp, Artificial Sequence
  Synthetic oligonucleotide
cacatatgggagaggaaaaatttccctccc

SEQ ID NO: 492253 - DNA, 30 bp, Artificial Sequence
  Synthetic oligonucleotide
tatgtggggtaagagcacgaagaggctccc

SEQ ID NO: 492254 - DNA, 30 bp, Artificial Sequence
  Synthetic oligonucleotide
accgccccgcatgcgccttcaagggctccc

SEQ ID NO: 492255 - DNA, 30 bp, Artificial Sequence
  Synthetic oligonucleotide
ggagtacttggttactggtaggactctccc

SEQ ID NO: 492256 - DNA, 30 bp, Artificial Sequence
  Synthetic oligonucleotide
gattattagaatgaggcaatgaaaagtccc

SEQ ID NO: 492257 - DNA, 30 bp, Artificial Sequence
  Synthetic oligonucleotide
agtttttttcgaaggccgtgtagcagtccc

SEQ ID NO: 492258 - DNA, 30 bp, Artificial Sequence
  Synthetic oligonucleotide
acaagttattgtttggatcacatcagtccc

SEQ ID NO: 492259 - DNA, 30 bp, Artificial Sequence
  Synthetic oligonucleotide
tgaggcaagatactcctggttaggagtccc

SEQ ID NO: 492260 - DNA, 30 bp, Artificial Sequence
  Synthetic oligonucleotide
gttagggtactgtataaaactcctagtccc

SEQ ID NO: 492261 - DNA, 30 bp, Artificial Sequence
  Synthetic oligonucleotide
ccccgagcatcacttacgttagtacgtccc

SEQ ID NO: 492262 - DNA, 30 bp, Artificial Sequence
  Synthetic oligonucleotide
gttcacggatttcgccccaggcagcgtccc

SEQ ID NO: 492263 - DNA, 30 bp, Artificial Sequence
  Synthetic oligonucleotide
gtacactcgattagtgttcccgcgcgtccc

SEQ ID NO: 492264 - DNA, 30 bp, Artificial Sequence
  Synthetic oligonucleotide
catactcagcggccaactggcaggcgtccc

SEQ ID NO: 492265 - DNA, 30 bp, Artificial Sequence
  Synthetic oligonucleotide
tctacgctggttacttttatcttaggtccc

SEQ ID NO: 492266 - DNA, 30 bp, Artificial Sequence
  Synthetic oligonucleotide
gctgtccagtatgatcccctcaacggtccc

SEQ ID NO: 492267 - DNA, 30 bp, Artificial Sequence
  Synthetic oligonucleotide
aatttaccagataagggctggctgtgtccc

SEQ ID NO: 492268 - DNA, 30 bp, Artificial Sequence
  Synthetic oligonucleotide
caggcagaggcggagccttcaaattgtccc

SEQ ID NO: 492269 - DNA, 30 bp, Artificial Sequence
  Synthetic oligonucleotide
gaccttcggcatgccttcgctcattgtccc

SEQ ID NO: 492270 - DNA, 30 bp, Artificial Sequence
  Synthetic oligonucleotide
ggcaaccactttaactaccggggttgtccc

SEQ ID NO: 492271 - DNA, 30 bp, Artificial Sequence
  Synthetic oligonucleotide
gctgtatttgcttttgcaatactttgtccc

SEQ ID NO: 492272 - DNA, 30 bp, Artificial Sequence
  Synthetic oligonucleotide
ttattttcaatctgactgcattgcattccc

SEQ ID NO: 492273 - DNA, 30 bp, Artificial Sequence
  Synthetic oligonucleotide
gtactgtggttattcagatggaagattccc

SEQ ID NO: 492274 - DNA, 30 bp, Artificial Sequence
  Synthetic oligonucleotide
atccaatctactttattagatgtgattccc

SEQ ID NO: 492275 - DNA, 30 bp, Artificial Sequence
  Synthetic oligonucleotide
gaccacagaccgcagtcggggactattccc

SEQ ID NO: 492276 - DNA, 30 bp, Artificial Sequence
  Synthetic oligonucleotide
actttaggattgtacaggaaagttattccc

SEQ ID NO: 492277 - DNA, 30 bp, Artificial Sequence
  Synthetic oligonucleotide
tgaaggggcagtgtagtgagaacacttccc

SEQ ID NO: 492278 - DNA, 30 bp, Artificial Sequence
  Synthetic oligonucleotide
ctctttataaacacggcacatttccttccc

SEQ ID NO: 492279 - DNA, 30 bp, Artificial Sequence
  Synthetic oligonucleotide
ggtagttcgtcaaaggccaccttcgttccc

SEQ ID NO: 492280 - DNA, 30 bp, Artificial Sequence
  Synthetic oligonucleotide
cgtataggaacaccggtagaatcggttccc

SEQ ID NO: 492281 - DNA, 30 bp, Artificial Sequence
  Synthetic oligonucleotide
tttccctcacgtgcgagtattggggttccc

SEQ ID NO: 492282 - DNA, 30 bp, Artificial Sequence
  Synthetic oligonucleotide
atatggtttactgcgcaggtcactgttccc

SEQ ID NO: 492283 - DNA, 30 bp, Artificial Sequence
  Synthetic oligonucleotide
ataataactcgctgagtccaatgatttccc

SEQ ID NO: 492284 - DNA, 30 bp, Artificial Sequence
  Synthetic oligonucleotide
acaggccgggttttgacggagacctttccc

SEQ ID NO: 492285 - DNA, 30 bp, Artificial Sequence
  Synthetic oligonucleotide
cagaagtagggggctatctcccggtttccc

SEQ ID NO: 492286 - DNA, 30 bp, Artificial Sequence
  Synthetic oligonucleotide
ggagtgttatgccatcctaggttgtttccc

SEQ ID NO: 492287 - DNA, 30 bp, Artificial Sequence
  Synthetic oligonucleotide
ggaatggtagttacgttattagacaaagcc

SEQ ID NO: 492288 - DNA, 30 bp, Artificial Sequence
  Synthetic oligonucleotide
gaataatctttcagtatgaaaatcaaagcc

SEQ ID NO: 492289 - DNA, 30 bp, Artificial Sequence
  Synthetic oligonucleotide
ttggcgttatctgggtttgatcagaaagcc

SEQ ID NO: 492290 - DNA, 30 bp, Artificial Sequence
  Synthetic oligonucleotide
ggacataggtagatgtcagtaggtaaagcc

SEQ ID NO: 492291 - DNA, 30 bp, Artificial Sequence
  Synthetic oligonucleotide
tcctgttactagttaaattcatttaaagcc

SEQ ID NO: 492292 - DNA, 30 bp, Artificial Sequence
  Synthetic oligonucleotide
gtttatttcttacaacctatgggacaagcc

SEQ ID NO: 492293 - DNA, 30 bp, Artificial Sequence
  Synthetic oligonucleotide
gggagcttttttacctacgtgaaccaagcc

SEQ ID NO: 492294 - DNA, 30 bp, Artificial Sequence
  Synthetic oligonucleotide
aaattcattttcttttccgctggccaagcc

SEQ ID NO: 492295 - DNA, 30 bp, Artificial Sequence
  Synthetic oligonucleotide
agttacccgtttgcgggggcactccaagcc

SEQ ID NO: 492296 - DNA, 30 bp, Artificial Sequence
  Synthetic oligonucleotide
tacacttgacgcaaccttagattccaagcc

SEQ ID NO: 492297 - DNA, 30 bp, Artificial Sequence
  Synthetic oligonucleotide
aaatagatggctctggatgctaagcaagcc

SEQ ID NO: 492298 - DNA, 30 bp, Artificial Sequence
  Synthetic oligonucleotide
taaacaaagaccaggattacgacgcaagcc

SEQ ID NO: 492299 - DNA, 30 bp, Artificial Sequence
  Synthetic oligonucleotide
gatggcgtggtgacttaagggacgcaagcc

SEQ ID NO: 492300 - DNA, 30 bp, Artificial Sequence
  Synthetic oligonucleotide
caactagttcccgctgcaacttcgcaagcc

SEQ ID NO: 492301 - DNA, 30 bp, Artificial Sequence
  Synthetic oligonucleotide
tgatggttgcgcgtccgcttgcggcaagcc

SEQ ID NO: 492302 - DNA, 30 bp, Artificial Sequence
  Synthetic oligonucleotide
ccacgcagtctaatacgccttcggcaagcc

SEQ ID NO: 492303 - DNA, 30 bp, Artificial Sequence
  Synthetic oligonucleotide
attccgcgcccccaagtgtcattgcaagcc

SEQ ID NO: 492304 - DNA, 30 bp, Artificial Sequence
  Synthetic oligonucleotide
gtgaaaggcgcgactctatagactcaagcc

SEQ ID NO: 492305 - DNA, 30 bp, Artificial Sequence
  Synthetic oligonucleotide
tgtgttgaagtacctcataggactcaagcc

SEQ ID NO: 492306 - DNA, 30 bp, Artificial Sequence
  Synthetic oligonucleotide
gggcctgtcctgggtattgaacgtcaagcc

SEQ ID NO: 492307 - DNA, 30 bp, Artificial Sequence
  Synthetic oligonucleotide
ccgcggctaattctcatttcctgtcaagcc

SEQ ID NO: 492308 - DNA, 30 bp, Artificial Sequence
  Synthetic oligonucleotide
catgcgcgccaagtggcccgtattcaagcc

SEQ ID NO: 492309 - DNA, 30 bp, Artificial Sequence
  Synthetic oligonucleotide
cctcccggatgagtccgtcaaacagaagcc

SEQ ID NO: 492310 - DNA, 30 bp, Artificial Sequence
  Synthetic oligonucleotide
tatctcccactccatagctcgtgcgaagcc

SEQ ID NO: 492311 - DNA, 30 bp, Artificial Sequence
  Synthetic oligonucleotide
ttgtcacagactgtattcccgtatgaagcc

SEQ ID NO: 492312 - DNA, 30 bp, Artificial Sequence
  Synthetic oligonucleotide
taactattgcctgtccggcccagtgaagcc

SEQ ID NO: 492313 - DNA, 30 bp, Artificial Sequence
  Synthetic oligonucleotide
cgttaccccaacggggcagcaggataagcc

SEQ ID NO: 492314 - DNA, 30 bp, Artificial Sequence
  Synthetic oligonucleotide
gatgcccgcgctatccaatatggataagcc

SEQ ID NO: 492315 - DNA, 30 bp, Artificial Sequence
  Synthetic oligonucleotide
ttgacttagtgcagtggggtcgcgtaagcc

SEQ ID NO: 492316 - DNA, 30 bp, Artificial Sequence
  Synthetic oligonucleotide
aatttgcggagccgaggtatcagttaagcc

SEQ ID NO: 492317 - DNA, 30 bp, Artificial Sequence
  Synthetic oligonucleotide
tgcagcggacatgacgaggggtctacagcc

SEQ ID NO: 492318 - DNA, 30 bp, Artificial Sequence
  Synthetic oligonucleotide
aaattaggcagccacacaaaacacccagcc

SEQ ID NO: 492319 - DNA, 30 bp, Artificial Sequence
  Synthetic oligonucleotide
gtaccttccgcttccagggcccccccagcc

SEQ ID NO: 492320 - DNA, 30 bp, Artificial Sequence
  Synthetic oligonucleotide
gagatgttgtggagagctgccctgccagcc

SEQ ID NO: 492321 - DNA, 30 bp, Artificial Sequence
  Synthetic oligonucleotide
atttcgggatatctggtttccaatccagcc

SEQ ID NO: 492322 - DNA, 30 bp, Artificial Sequence
  Synthetic oligonucleotide
gagatagatagtgttcatttgcaagcagcc

SEQ ID NO: 492323 - DNA, 30 bp, Artificial Sequence
  Synthetic oligonucleotide
gccaatctactattcttcggggaagcagcc

SEQ ID NO: 492324 - DNA, 30 bp, Artificial Sequence
  Synthetic oligonucleotide
gtattggtcactgtaccttgctacgcagcc

SEQ ID NO: 492325 - DNA, 30 bp, Artificial Sequence
  Synthetic oligonucleotide
tcacggggaaatccggagtcgtacgcagcc

SEQ ID NO: 492326 - DNA, 30 bp, Artificial Sequence
  Synthetic oligonucleotide
taaagataggtcctttatcaaaccgcagcc

SEQ ID NO: 492327 - DNA, 30 bp, Artificial Sequence
  Synthetic oligonucleotide
cgcaaagcgcgtcggtccacgtccgcagcc

SEQ ID NO: 492328 - DNA, 30 bp, Artificial Sequence
  Synthetic oligonucleotide
ggttcgcaggtgttgaacctacgcgcagcc

SEQ ID NO: 492329 - DNA, 30 bp, Artificial Sequence
  Synthetic oligonucleotide
aaagcatcaggtaccccacagtgggcagcc

SEQ ID NO: 492330 - DNA, 30 bp, Artificial Sequence
  Synthetic oligonucleotide
attggcaaacagcgcagagagcaatcagcc

SEQ ID NO: 492331 - DNA, 30 bp, Artificial Sequence
  Synthetic oligonucleotide
aatctcggaagttaaagggcttgatcagcc

SEQ ID NO: 492332 - DNA, 30 bp, Artificial Sequence
  Synthetic oligonucleotide
gtatcgatgttacctgtatgcgactcagcc

SEQ ID NO: 492333 - DNA, 30 bp, Artificial Sequence
  Synthetic oligonucleotide
catgttttcctttggcgcttagcgtcagcc

SEQ ID NO: 492334 - DNA, 30 bp, Artificial Sequence
  Synthetic oligonucleotide
gtattggtgaaacaggctgcatcttcagcc

SEQ ID NO: 492335 - DNA, 30 bp, Artificial Sequence
  Synthetic oligonucleotide
gattctgtgacttgggtttttctttcagcc

SEQ ID NO: 492336 - DNA, 30 bp, Artificial Sequence
  Synthetic oligonucleotide
ctccgggtggccaaaagtttcttaagagcc

SEQ ID NO: 492337 - DNA, 30 bp, Artificial Sequence
  Synthetic oligonucleotide
cggcagcttggctcatcctgaaacagagcc

SEQ ID NO: 492338 - DNA, 30 bp, Artificial Sequence
  Synthetic oligonucleotide
agtcacctgagatggttctcctatagagcc

SEQ ID NO: 492339 - DNA, 30 bp, Artificial Sequence
  Synthetic oligonucleotide
attcttcaaagttattacatctgtagagcc

SEQ ID NO: 492340 - DNA, 30 bp, Artificial Sequence
  Synthetic oligonucleotide
gacggagacgctcgtggatgccttagagcc

SEQ ID NO: 492341 - DNA, 30 bp, Artificial Sequence
  Synthetic oligonucleotide
ggaggtaaaagatgcgcttcgtttagagcc

SEQ ID NO: 492342 - DNA, 30 bp, Artificial Sequence
  Synthetic oligonucleotide
ctgtcggaatcgccagcgagttgacgagcc

SEQ ID NO: 492343 - DNA, 30 bp, Artificial Sequence
  Synthetic oligonucleotide
agggtccggaaagtaagtaaggtgcgagcc

SEQ ID NO: 492344 - DNA, 30 bp, Artificial Sequence
  Synthetic oligonucleotide
tatctcacggtctgcgtgtcagatcgagcc

SEQ ID NO: 492345 - DNA, 30 bp, Artificial Sequence
  Synthetic oligonucleotide
aagattacaggcaacaaactcgttcgagcc

SEQ ID NO: 492346 - DNA, 30 bp, Artificial Sequence
  Synthetic oligonucleotide
caaacgcactccgttgataatatcggagcc

SEQ ID NO: 492347 - DNA, 30 bp, Artificial Sequence
  Synthetic oligonucleotide
ggcatttattaatgttaaaacaatggagcc

SEQ ID NO: 492348 - DNA, 30 bp, Artificial Sequence
  Synthetic oligonucleotide
tactttattgctgacgtgcgtaatggagcc

SEQ ID NO: 492349 - DNA, 30 bp, Artificial Sequence
  Synthetic oligonucleotide
tccgttgccgcccgcgtaaatcatggagcc

SEQ ID NO: 492350 - DNA, 30 bp, Artificial Sequence
  Synthetic oligonucleotide
aaatcctacaccatatcctctcatggagcc

SEQ ID NO: 492351 - DNA, 30 bp, Artificial Sequence
  Synthetic oligonucleotide
cgttgaagatcaccgcgtaaagttggagcc

SEQ ID NO: 492352 - DNA, 30 bp, Artificial Sequence
  Synthetic oligonucleotide
ttgcgagctcgggctaattttgtatgagcc

SEQ ID NO: 492353 - DNA, 30 bp, Artificial Sequence
  Synthetic oligonucleotide
agaatctgtctcttgtgggagtgctgagcc

SEQ ID NO: 492354 - DNA, 30 bp, Artificial Sequence
  Synthetic oligonucleotide
atttgcctcatatttgttattgtgtgagcc

SEQ ID NO: 492355 - DNA, 30 bp, Artificial Sequence
  Synthetic oligonucleotide
aattcaggacggataaacttgagttgagcc

SEQ ID NO: 492356 - DNA, 30 bp, Artificial Sequence
  Synthetic oligonucleotide
gaactactcgtttagtccagataaatagcc

SEQ ID NO: 492357 - DNA, 30 bp, Artificial Sequence
  Synthetic oligonucleotide
gcacttttaattagcgtcctcggcatagcc

SEQ ID NO: 492358 - DNA, 30 bp, Artificial Sequence
  Synthetic oligonucleotide
ctagctttgtgtgtaccattggggatagcc

SEQ ID NO: 492359 - DNA, 30 bp, Artificial Sequence
  Synthetic oligonucleotide
ccccctgcgagcgttaactcatctatagcc

SEQ ID NO: 492360 - DNA, 30 bp, Artificial Sequence
  Synthetic oligonucleotide
ggacgtgcacgggctcagggatttatagcc

SEQ ID NO: 492361 - DNA, 30 bp, Artificial Sequence
  Synthetic oligonucleotide
ctgtaaccctttggagaaggaaaactagcc

SEQ ID NO: 492362 - DNA, 30 bp, Artificial Sequence
  Synthetic oligonucleotide
ttagttgatcggcagtaatgtcacctagcc

SEQ ID NO: 492363 - DNA, 30 bp, Artificial Sequence
  Synthetic oligonucleotide
cttcaaaggcgtcatcactactacctagcc

SEQ ID NO: 492364 - DNA, 30 bp, Artificial Sequence
  Synthetic oligonucleotide
gttttagcgctaactctggggttagtagcc

SEQ ID NO: 492365 - DNA, 30 bp, Artificial Sequence
  Synthetic oligonucleotide
tctcaactgatgcatagggaaaccgtagcc

SEQ ID NO: 492366 - DNA, 29 bp, Artificial Sequence
  Synthetic oligonucleotide
aaagatcggatgactcagtaaccgtagcc

SEQ ID NO: 492367 - DNA, 30 bp, Artificial Sequence
  Synthetic oligonucleotide
tcagatctatacagactacctcccgtagcc

SEQ ID NO: 492368 - DNA, 30 bp, Artificial Sequence
  Synthetic oligonucleotide
taacaaggccttccaggtttaaaggtagcc

SEQ ID NO: 492369 - DNA, 30 bp, Artificial Sequence
  Synthetic oligonucleotide
ccggcccgaacgttggagccttgggtagcc

SEQ ID NO: 492370 - DNA, 30 bp, Artificial Sequence
  Synthetic oligonucleotide
gctctaaggtcgcgtacaggtgttgtagcc

SEQ ID NO: 492371 - DNA, 30 bp, Artificial Sequence
  Synthetic oligonucleotide
gtgccgtgtaagcaggtttgctgattagcc

SEQ ID NO: 492372 - DNA, 30 bp, Artificial Sequence
  Synthetic oligonucleotide
ttacacgtgggtacgtcccgaaatttagcc

SEQ ID NO: 492373 - DNA, 30 bp, Artificial Sequence
  Synthetic oligonucleotide
gggcggcgaattcgaggctggcctttagcc

SEQ ID NO: 492374 - DNA, 30 bp, Artificial Sequence
  Synthetic oligonucleotide
tgtacctctgttgcccgtattcctttagcc

SEQ ID NO: 492375 - DNA, 30 bp, Artificial Sequence
  Synthetic oligonucleotide
caacttagagtggacagtcggtgtttagcc

SEQ ID NO: 492376 - DNA, 30 bp, Artificial Sequence
  Synthetic oligonucleotide
ccaacttcatgctggttgtggtttttagcc

SEQ ID NO: 492377 - DNA, 30 bp, Artificial Sequence
  Synthetic oligonucleotide
ctgcaacaaagtacctctcggtaaaacgcc

SEQ ID NO: 492378 - DNA, 30 bp, Artificial Sequence
  Synthetic oligonucleotide
cctttgtcaggcacatcagcggcaaacgcc

SEQ ID NO: 492379 - DNA, 30 bp, Artificial Sequence
  Synthetic oligonucleotide
ctgcaaggggtattctaaataggaaacgcc

SEQ ID NO: 492380 - DNA, 30 bp, Artificial Sequence
  Synthetic oligonucleotide
gacaaggctcgtcacgggtgagtaaacgcc

SEQ ID NO: 492381 - DNA, 30 bp, Artificial Sequence
  Synthetic oligonucleotide
atccccatacgcgaagagggcttaaacgcc

SEQ ID NO: 492382 - DNA, 30 bp, Artificial Sequence
  Synthetic oligonucleotide
tgccctggtgaagcaccctgaatcaacgcc

SEQ ID NO: 492383 - DNA, 30 bp, Artificial Sequence
  Synthetic oligonucleotide
ctctgcatgacctggcgtccagagaacgcc

SEQ ID NO: 492384 - DNA, 30 bp, Artificial Sequence
  Synthetic oligonucleotide
caacacagtggcgtagcctaccggaacgcc

SEQ ID NO: 492385 - DNA, 30 bp, Artificial Sequence
  Synthetic oligonucleotide
ggtggaccccaaattctaatataacacgcc

SEQ ID NO: 492386 - DNA, 30 bp, Artificial Sequence
  Synthetic oligonucleotide
tttaccaggatgcaggccacggtacacgcc

SEQ ID NO: 492387 - DNA, 30 bp, Artificial Sequence
  Synthetic oligonucleotide
ccagcgatgcagctactgcaaagccacgcc

SEQ ID NO: 492388 - DNA, 30 bp, Artificial Sequence
  Synthetic oligonucleotide
gcgggacaccattctgcccatgtgcacgcc

SEQ ID NO: 492389 - DNA, 30 bp, Artificial Sequence
  Synthetic oligonucleotide
acaatatatcgctctcgcggagatcacgcc

SEQ ID NO: 492390 - DNA, 30 bp, Artificial Sequence
  Synthetic oligonucleotide
acagaactcttgaccagtttgtatcacgcc

SEQ ID NO: 492391 - DNA, 30 bp, Artificial Sequence
  Synthetic oligonucleotide
cagcgtgatctataagattcatcagacgcc

SEQ ID NO: 492392 - DNA, 30 bp, Artificial Sequence
  Synthetic oligonucleotide
caggggtagacgcgaaggatagccgacgcc

SEQ ID NO: 492393 - DNA, 30 bp, Artificial Sequence
  Synthetic oligonucleotide
gttcagcgaacaccttatcagggcgacgcc

SEQ ID NO: 492394 - DNA, 30 bp, Artificial Sequence
  Synthetic oligonucleotide
aattttggggcaggcgaacatatcgacgcc

SEQ ID NO: 492395 - DNA, 30 bp, Artificial Sequence
  Synthetic oligonucleotide
aggctcgatgtctaataatccttcgacgcc

SEQ ID NO: 492396 - DNA, 30 bp, Artificial Sequence
  Synthetic oligonucleotide
tagagttgtatatgcggtacacaggacgcc

SEQ ID NO: 492397 - DNA, 30 bp, Artificial Sequence
  Synthetic oligonucleotide
aattgaggggccgctaagtactcggacgcc

SEQ ID NO: 492398 - DNA, 30 bp, Artificial Sequence
  Synthetic oligonucleotide
cagtattcccgcacatgaagttcggacgcc

SEQ ID NO: 492399 - DNA, 31 bp, Artificial Sequence
  Synthetic oligonucleotide
tgtttgcgatgttccagctctgtgggacgcc

SEQ ID NO: 492400 - DNA, 30 bp, Artificial Sequence
  Synthetic oligonucleotide
ttgcctagtccgagcgtaccgcatgacgcc

SEQ ID NO: 492401 - DNA, 30 bp, Artificial Sequence
  Synthetic oligonucleotide
gttccccgttctgtaaactcagatgacgcc

SEQ ID NO: 492402 - DNA, 30 bp, Artificial Sequence
  Synthetic oligonucleotide
atgctctctaagcctgagtaaattgacgcc

SEQ ID NO: 492403 - DNA, 30 bp, Artificial Sequence
  Synthetic oligonucleotide
agcgccatccgcgcgccgtccgcgtacgcc

SEQ ID NO: 492404 - DNA, 30 bp, Artificial Sequence
  Synthetic oligonucleotide
actccaatagtggagttgcttcgtaccgcc

SEQ ID NO: 492405 - DNA, 30 bp, Artificial Sequence
  Synthetic oligonucleotide
gagttcccggcgggaccgggcaaacccgcc

SEQ ID NO: 492406 - DNA, 30 bp, Artificial Sequence
  Synthetic oligonucleotide
gcaggccattatcatcatgccagacccgcc

SEQ ID NO: 492407 - DNA, 30 bp, Artificial Sequence
  Synthetic oligonucleotide
ggaatataacgcttctgatagtgacccgcc

SEQ ID NO: 492408 - DNA, 30 bp, Artificial Sequence
  Synthetic oligonucleotide
gtccgataccgcatatttcgtatagccgcc

SEQ ID NO: 492409 - DNA, 30 bp, Artificial Sequence
  Synthetic oligonucleotide
ctcatcaccgctgcatgctgtactgccgcc

SEQ ID NO: 492410 - DNA, 30 bp, Artificial Sequence
  Synthetic oligonucleotide
aatcctgctaaaggacgataattgtccgcc

SEQ ID NO: 492411 - DNA, 30 bp, Artificial Sequence
  Synthetic oligonucleotide
ctgggtaacgcgcaacactaatattccgcc

SEQ ID NO: 492412 - DNA, 30 bp, Artificial Sequence
  Synthetic oligonucleotide
gttgtgacggtatggcgatcttgttccgcc

SEQ ID NO: 492413 - DNA, 30 bp, Artificial Sequence
  Synthetic oligonucleotide
aggttactcgtcatgaacagcatttccgcc

SEQ ID NO: 492414 - DNA, 30 bp, Artificial Sequence
  Synthetic oligonucleotide
gccggattcctatatgaactcctttccgcc

SEQ ID NO: 492415 - DNA, 30 bp, Artificial Sequence
  Synthetic oligonucleotide
gggtgccagggacatttcgggtccagcgcc

SEQ ID NO: 492416 - DNA, 30 bp, Artificial Sequence
  Synthetic oligonucleotide
gatttctatagtgtggataaaagtagcgcc

SEQ ID NO: 492417 - DNA, 30 bp, Artificial Sequence
  Synthetic oligonucleotide
gcaagtactcttgtgatgaccagtagcgcc

SEQ ID NO: 492418 - DNA, 30 bp, Artificial Sequence
  Synthetic oligonucleotide
ttagatggtagaagctttcgtatacgcgcc

SEQ ID NO: 492419 - DNA, 30 bp, Artificial Sequence
  Synthetic oligonucleotide
tgtgtccgatctttggtggcccgccgcgcc

SEQ ID NO: 492420 - DNA, 30 bp, Artificial Sequence
  Synthetic oligonucleotide
ggggcatgcgcgtgtttaatgactcgcgcc

SEQ ID NO: 492421 - DNA, 30 bp, Artificial Sequence
  Synthetic oligonucleotide
ggtcaaggtcgcaattcttcagaaggcgcc

SEQ ID NO: 492422 - DNA, 30 bp, Artificial Sequence
  Synthetic oligonucleotide
tgcgctcagagttgccgagaatacggcgcc

SEQ ID NO: 492423 - DNA, 30 bp, Artificial Sequence
  Synthetic oligonucleotide
gggtagcggttagtgtggtataccggcgcc

SEQ ID NO: 492424 - DNA, 30 bp, Artificial Sequence
  Synthetic oligonucleotide
atagtctctgatcaatcatttccgggcgcc

SEQ ID NO: 492425 - DNA, 30 bp, Artificial Sequence
  Synthetic oligonucleotide
tgctgaaacattacgaacgcttcgggcgcc

SEQ ID NO: 492426 - DNA, 30 bp, Artificial Sequence
  Synthetic oligonucleotide
gaagcaagtagaaatctgatgattatcgcc

SEQ ID NO: 492427 - DNA, 30 bp, Artificial Sequence
  Synthetic oligonucleotide
actttctattcgcagattggtcaactcgcc

SEQ ID NO: 492428 - DNA, 30 bp, Artificial Sequence
  Synthetic oligonucleotide
gtcgggcttatattcacagcagacctcgcc

SEQ ID NO: 492429 - DNA, 30 bp, Artificial Sequence
  Synthetic oligonucleotide
gtcaaggaggatatcagttctcgcctcgcc

SEQ ID NO: 492430 - DNA, 30 bp, Artificial Sequence
  Synthetic oligonucleotide
gtctacactagacgcattaggacgctcgcc

SEQ ID NO: 492431 - DNA, 30 bp, Artificial Sequence
  Synthetic oligonucleotide
gtgttttaggcaacacctgccaaagtcgcc

SEQ ID NO: 492432 - DNA, 30 bp, Artificial Sequence
  Synthetic oligonucleotide
tgtgattgagcacgaagggacatagtcgcc

SEQ ID NO: 492433 - DNA, 30 bp, Artificial Sequence
  Synthetic oligonucleotide
agtacagcaaacggcccaatgggcgtcgcc

SEQ ID NO: 492434 - DNA, 30 bp, Artificial Sequence
  Synthetic oligonucleotide
ttgggagtcgtgggggtaaacccattcgcc

SEQ ID NO: 492435 - DNA, 30 bp, Artificial Sequence
  Synthetic oligonucleotide
tttgtacctaaaaggtttaataacttcgcc

SEQ ID NO: 492436 - DNA, 30 bp, Artificial Sequence
  Synthetic oligonucleotide
tttagagttcgatgaggagaggtcttcgcc

SEQ ID NO: 492437 - DNA, 30 bp, Artificial Sequence
  Synthetic oligonucleotide
gggtgcccagttaggatctcatcgttcgcc

SEQ ID NO: 492438 - DNA, 30 bp, Artificial Sequence
  Synthetic oligonucleotide
tgtgatgctgggcctccggggtcaaaggcc

SEQ ID NO: 492439 - DNA, 30 bp, Artificial Sequence
  Synthetic oligonucleotide
tttgggtctagcacataagactgaaaggcc

SEQ ID NO: 492440 - DNA, 30 bp, Artificial Sequence
  Synthetic oligonucleotide
ctcccgttagtgaggtagacaaccaaggcc

SEQ ID NO: 492441 - DNA, 30 bp, Artificial Sequence
  Synthetic oligonucleotide
gaccagcccttgtcacttccaggcaaggcc

SEQ ID NO: 492442 - DNA, 30 bp, Artificial Sequence
  Synthetic oligonucleotide
gcatttcggcgtgccgtatggcagaaggcc

SEQ ID NO: 492443 - DNA, 30 bp, Artificial Sequence
  Synthetic oligonucleotide
ctatatatacaaggttaagtttataaggcc

SEQ ID NO: 492444 - DNA, 30 bp, Artificial Sequence
  Synthetic oligonucleotide
tctactgatccgccaggttccaaccaggcc

SEQ ID NO: 492445 - DNA, 30 bp, Artificial Sequence
  Synthetic oligonucleotide
gcagggctgtgattagactatttgcaggcc

SEQ ID NO: 492446 - DNA, 30 bp, Artificial Sequence
  Synthetic oligonucleotide
ggagcgcctaaccagttgggggctcaggcc

SEQ ID NO: 492447 - DNA, 30 bp, Artificial Sequence
  Synthetic oligonucleotide
aatccatatgaaccatatgaagttcaggcc

SEQ ID NO: 492448 - DNA, 30 bp, Artificial Sequence
  Synthetic oligonucleotide
taatccgtggtaataagactattagaggcc

SEQ ID NO: 492449 - DNA, 30 bp, Artificial Sequence
  Synthetic oligonucleotide
agtacagttcaattttagcttttagaggcc

SEQ ID NO: 492450 - DNA, 30 bp, Artificial Sequence
  Synthetic oligonucleotide
acgaagtggacgcggcatcttaaggaggcc

SEQ ID NO: 492451 - DNA, 30 bp, Artificial Sequence
  Synthetic oligonucleotide
caggcctcatgcgttagactgacggaggcc

SEQ ID NO: 492452 - DNA, 30 bp, Artificial Sequence
  Synthetic oligonucleotide
ggagaccccagtaagaaagcctgggaggcc

SEQ ID NO: 492453 - DNA, 30 bp, Artificial Sequence
  Synthetic oligonucleotide
acataacaggcctgcgctgcatatgaggcc

SEQ ID NO: 492454 - DNA, 30 bp, Artificial Sequence
  Synthetic oligonucleotide
agcgctctagcaccattagtgtctgaggcc

SEQ ID NO: 492455 - DNA, 30 bp, Artificial Sequence
  Synthetic oligonucleotide
gtttccgtggtgggtcgttgcggtgaggcc

SEQ ID NO: 492456 - DNA, 30 bp, Artificial Sequence
  Synthetic oligonucleotide
tgtaatgcgcagctgagagtcgaataggcc

SEQ ID NO: 492457 - DNA, 30 bp, Artificial Sequence
  Synthetic oligonucleotide
gaaagcccacgccctgacgtgtggtaggcc

SEQ ID NO: 492458 - DNA, 30 bp, Artificial Sequence
  Synthetic oligonucleotide
ctgtccgtaatgcgctttaaccattaggcc

SEQ ID NO: 492459 - DNA, 30 bp, Artificial Sequence
  Synthetic oligonucleotide
ctgacacatgagacagggggcatttaggcc

SEQ ID NO: 492460 - DNA, 30 bp, Artificial Sequence
  Synthetic oligonucleotide
gcaggacagatacctgcccatgtaacggcc

SEQ ID NO: 492461 - DNA, 30 bp, Artificial Sequence
  Synthetic oligonucleotide
agtcatacatgtatgaaagagtacacggcc

SEQ ID NO: 492462 - DNA, 30 bp, Artificial Sequence
  Synthetic oligonucleotide
tagatttaacttcctgactactggacggcc

SEQ ID NO: 492463 - DNA, 30 bp, Artificial Sequence
  Synthetic oligonucleotide
acggggcggcgggggggcttcactacggcc

SEQ ID NO: 492464 - DNA, 30 bp, Artificial Sequence
  Synthetic oligonucleotide
ggacggcacgccgctattacgtaaccggcc

SEQ ID NO: 492465 - DNA, 30 bp, Artificial Sequence
  Synthetic oligonucleotide
ccgctatacttagcgcagagcccaccggcc

SEQ ID NO: 492466 - DNA, 30 bp, Artificial Sequence
  Synthetic oligonucleotide
gtccgagtattatactccactagaccggcc

SEQ ID NO: 492467 - DNA, 30 bp, Artificial Sequence
  Synthetic oligonucleotide
gttcatgactagtttgataactgaccggcc

SEQ ID NO: 492468 - DNA, 30 bp, Artificial Sequence
  Synthetic oligonucleotide
cttttttgtccagaccgagcgaggccggcc

SEQ ID NO: 492469 - DNA, 30 bp, Artificial Sequence
  Synthetic oligonucleotide
acgggagggggagacagtttggttccggcc

SEQ ID NO: 492470 - DNA, 30 bp, Artificial Sequence
  Synthetic oligonucleotide
ccccgttagtatctccgtaaattagcggcc

SEQ ID NO: 492471 - DNA, 30 bp, Artificial Sequence
  Synthetic oligonucleotide
ggcagtatattatagtgggtgatcgcggcc

SEQ ID NO: 492472 - DNA, 30 bp, Artificial Sequence
  Synthetic oligonucleotide
agtggttcaagggaaagtgcccaggcggcc

SEQ ID NO: 492473 - DNA, 30 bp, Artificial Sequence
  Synthetic oligonucleotide
aaggcttagtggtgtggtgtcttggcggcc

SEQ ID NO: 492474 - DNA, 30 bp, Artificial Sequence
  Synthetic oligonucleotide
acttcgtctttcacccgcttgactgcggcc

SEQ ID NO: 492475 - DNA, 30 bp, Artificial Sequence
  Synthetic oligonucleotide
gccaattctgacagacacggataatcggcc

SEQ ID NO: 492476 - DNA, 30 bp, Artificial Sequence
  Synthetic oligonucleotide
agggttacggatggcaacgaagtatcggcc

SEQ ID NO: 492477 - DNA, 30 bp, Artificial Sequence
  Synthetic oligonucleotide
cccagtgccggataagcgccaggaagggcc

SEQ ID NO: 492478 - DNA, 30 bp, Artificial Sequence
  Synthetic oligonucleotide
gaccagtggcgaaattgatgtggaagggcc

SEQ ID NO: 492479 - DNA, 30 bp, Artificial Sequence
  Synthetic oligonucleotide
tagtacaacgctacagggcccctaagggcc

SEQ ID NO: 492480 - DNA, 31 bp, Artificial Sequence
  Synthetic oligonucleotide
ctctgtcgaagttcgccttactgatagggcc

SEQ ID NO: 492481 - DNA, 30 bp, Artificial Sequence
  Synthetic oligonucleotide
cctatcatcctgactgcctgtactagggcc

SEQ ID NO: 492482 - DNA, 30 bp, Artificial Sequence
  Synthetic oligonucleotide
gccgtgctcctcgcctgggtgcctagggcc

SEQ ID NO: 492483 - DNA, 30 bp, Artificial Sequence
  Synthetic oligonucleotide
gtgggccgcggagacccgccgaaacgggcc

SEQ ID NO: 492484 - DNA, 30 bp, Artificial Sequence
  Synthetic oligonucleotide
tgggacaacggcgtactcagtacacgggcc

SEQ ID NO: 492485 - DNA, 30 bp, Artificial Sequence
  Synthetic oligonucleotide
gatgtgatgcctttcagcgcgggacgggcc

SEQ ID NO: 492486 - DNA, 30 bp, Artificial Sequence
  Synthetic oligonucleotide
aggccgcagtattatacacactgacgggcc

SEQ ID NO: 492487 - DNA, 30 bp, Artificial Sequence
  Synthetic oligonucleotide
ggccatgaagtgttttggccccaccgggcc

SEQ ID NO: 492488 - DNA, 30 bp, Artificial Sequence
  Synthetic oligonucleotide
gggtgtgatggtactgcaggggaccgggcc

SEQ ID NO: 492489 - DNA, 30 bp, Artificial Sequence
  Synthetic oligonucleotide
gcccggtatcgccggccttccagtcgggcc

SEQ ID NO: 492490 - DNA, 30 bp, Artificial Sequence
  Synthetic oligonucleotide
ggcgcgtttaaacgtttaagtccaggggcc

SEQ ID NO: 492491 - DNA, 30 bp, Artificial Sequence
  Synthetic oligonucleotide
ataggcatttgcaaagtgcagcggggggcc

SEQ ID NO: 492492 - DNA, 30 bp, Artificial Sequence
  Synthetic oligonucleotide
aatcctgaactaaagcgtgtcgggggggcc

SEQ ID NO: 492493 - DNA, 30 bp, Artificial Sequence
  Synthetic oligonucleotide
ttataacgcgcgtgcgtcaggctgggggcc

SEQ ID NO: 492494 - DNA, 30 bp, Artificial Sequence
  Synthetic oligonucleotide
taccctatatataggacaaaagaatgggcc

SEQ ID NO: 492495 - DNA, 30 bp, Artificial Sequence
  Synthetic oligonucleotide
tttccatgatgtgataagtttatatgggcc

SEQ ID NO: 492496 - DNA, 30 bp, Artificial Sequence
  Synthetic oligonucleotide
atacaactcctcagcgtttatttatgggcc

SEQ ID NO: 492497 - DNA, 30 bp, Artificial Sequence
  Synthetic oligonucleotide
cactctcatatagagggaggatcctgggcc

SEQ ID NO: 492498 - DNA, 30 bp, Artificial Sequence
  Synthetic oligonucleotide
aacaattttcaaacaaattgtttctgggcc

SEQ ID NO: 492499 - DNA, 30 bp, Artificial Sequence
  Synthetic oligonucleotide
aggtaagcacaccctgttgttttctgggcc

SEQ ID NO: 492500 - DNA, 30 bp, Artificial Sequence
  Synthetic oligonucleotide
gattacaccaattctgaatacttgtgggcc

SEQ ID NO: 492501 - DNA, 30 bp, Artificial Sequence
  Synthetic oligonucleotide
gaggcctgatatgccgtggcataaatggcc

SEQ ID NO: 492502 - DNA, 30 bp, Artificial Sequence
  Synthetic oligonucleotide
actgtgggcacgctgcggtacctactggcc

SEQ ID NO: 492503 - DNA, 30 bp, Artificial Sequence
  Synthetic oligonucleotide
tgtgtgattcttcacgccctgaacctggcc

SEQ ID NO: 492504 - DNA, 30 bp, Artificial Sequence
  Synthetic oligonucleotide
accaggccactgggaccgatactcctggcc

SEQ ID NO: 492505 - DNA, 30 bp, Artificial Sequence
  Synthetic oligonucleotide
aaagtcagaaggaaaaggggttcgctggcc

SEQ ID NO: 492506 - DNA, 30 bp, Artificial Sequence
  Synthetic oligonucleotide
ctcaagcccaaccctggattgtatctggcc

SEQ ID NO: 492507 - DNA, 30 bp, Artificial Sequence
  Synthetic oligonucleotide
aaaacttttcgacattggagcggagtggcc

SEQ ID NO: 492508 - DNA, 30 bp, Artificial Sequence
  Synthetic oligonucleotide
atttcctaccggtagacggacaacgtggcc

SEQ ID NO: 492509 - DNA, 30 bp, Artificial Sequence
  Synthetic oligonucleotide
agcctgacgcccgccccccaagacgtggcc

SEQ ID NO: 492510 - DNA, 30 bp, Artificial Sequence
  Synthetic oligonucleotide
atgttctctacgcttgtagaagacgtggcc

SEQ ID NO: 492511 - DNA, 30 bp, Artificial Sequence
  Synthetic oligonucleotide
gggcaggtgggcagccttgggaccgtggcc

SEQ ID NO: 492512 - DNA, 30 bp, Artificial Sequence
  Synthetic oligonucleotide
ggatcagcgcgcagccaacaatgcgtggcc

SEQ ID NO: 492513 - DNA, 30 bp, Artificial Sequence
  Synthetic oligonucleotide
ttcgaacccgtgcactagtggatattggcc

SEQ ID NO: 492514 - DNA, 30 bp, Artificial Sequence
  Synthetic oligonucleotide
cgcaggggtcaattcgctcgaacgttggcc

SEQ ID NO: 492515 - DNA, 30 bp, Artificial Sequence
  Synthetic oligonucleotide
ttatttttcaaaatttattgggggttggcc

SEQ ID NO: 492516 - DNA, 30 bp, Artificial Sequence
  Synthetic oligonucleotide
cccgggagggaaggtgtttacatgttggcc

SEQ ID NO: 492517 - DNA, 30 bp, Artificial Sequence
  Synthetic oligonucleotide
ttttctctaacgctgaacgtcttgttggcc

SEQ ID NO: 492518 - DNA, 30 bp, Artificial Sequence
  Synthetic oligonucleotide
ccaaatctatagtagttagcgtttttggcc

SEQ ID NO: 492519 - DNA, 30 bp, Artificial Sequence
  Synthetic oligonucleotide
tcggcatcggtgaaagcaggcaaaaatgcc

SEQ ID NO: 492520 - DNA, 30 bp, Artificial Sequence
  Synthetic oligonucleotide
tcaccgggcagacgagcagggtcaaatgcc

SEQ ID NO: 492521 - DNA, 30 bp, Artificial Sequence
  Synthetic oligonucleotide
cgaacgtagcgctaattacgacgaaatgcc

SEQ ID NO: 492522 - DNA, 30 bp, Artificial Sequence
  Synthetic oligonucleotide
gttgtgctctacatgtttgctctcaatgcc

SEQ ID NO: 492523 - DNA, 30 bp, Artificial Sequence
  Synthetic oligonucleotide
ggcctgaaaactaactctattttcaatgcc

SEQ ID NO: 492524 - DNA, 30 bp, Artificial Sequence
  Synthetic oligonucleotide
agtctgtaagctggcaatctaaagaatgcc

SEQ ID NO: 492525 - DNA, 30 bp, Artificial Sequence
  Synthetic oligonucleotide
atacacgggttttggagagtaatgaatgcc

SEQ ID NO: 492526 - DNA, 30 bp, Artificial Sequence
  Synthetic oligonucleotide
aatagtaaaatcactggattgcgtaatgcc

SEQ ID NO: 492527 - DNA, 30 bp, Artificial Sequence
  Synthetic oligonucleotide
tgtatattttagtatctagatgcacatgcc

SEQ ID NO: 492528 - DNA, 30 bp, Artificial Sequence
  Synthetic oligonucleotide
aatttccacagcgaccccggcttacatgcc

SEQ ID NO: 492529 - DNA, 30 bp, Artificial Sequence
  Synthetic oligonucleotide
acgcagcacgtctagacgaggtagcatgcc

SEQ ID NO: 492530 - DNA, 30 bp, Artificial Sequence
  Synthetic oligonucleotide
gcccttaccggaaagagatttcctcatgcc

SEQ ID NO: 492531 - DNA, 30 bp, Artificial Sequence
  Synthetic oligonucleotide
tacgtccaaacttccaacatgggcgatgcc

SEQ ID NO: 492532 - DNA, 30 bp, Artificial Sequence
  Synthetic oligonucleotide
atacttggtttatttacacgctgcgatgcc

SEQ ID NO: 492533 - DNA, 30 bp, Artificial Sequence
  Synthetic oligonucleotide
cactcacggtgggagtctagctaggatgcc

SEQ ID NO: 492534 - DNA, 30 bp, Artificial Sequence
  Synthetic oligonucleotide
ttattgctgatcccaacgcattgtgatgcc

SEQ ID NO: 492535 - DNA, 30 bp, Artificial Sequence
  Synthetic oligonucleotide
cgcactcctggaagcctctgcattgatgcc

SEQ ID NO: 492536 - DNA, 30 bp, Artificial Sequence
  Synthetic oligonucleotide
atggttccaagaggagttgggcttgatgcc

SEQ ID NO: 492537 - DNA, 30 bp, Artificial Sequence
  Synthetic oligonucleotide
gaatcccgcggctaggacagtttatatgcc

SEQ ID NO: 492538 - DNA, 30 bp, Artificial Sequence
  Synthetic oligonucleotide
tttgtagtggattgcaatgcatactatgcc

SEQ ID NO: 492539 - DNA, 30 bp, Artificial Sequence
  Synthetic oligonucleotide
attgtttgaaggtcgatttcatgctatgcc

SEQ ID NO: 492540 - DNA, 30 bp, Artificial Sequence
  Synthetic oligonucleotide
tgtgcgggcatatatggagtattctatgcc

SEQ ID NO: 492541 - DNA, 30 bp, Artificial Sequence
  Synthetic oligonucleotide
ttgccgggattggtaaataaagtgtatgcc

SEQ ID NO: 492542 - DNA, 30 bp, Artificial Sequence
  Synthetic oligonucleotide
ttcaacccgctgccagctggacacactgcc

SEQ ID NO: 492543 - DNA, 30 bp, Artificial Sequence
  Synthetic oligonucleotide
cagcttgtatgcgggatgtataggactgcc

SEQ ID NO: 492544 - DNA, 30 bp, Artificial Sequence
  Synthetic oligonucleotide
actcatctacgctgacggacggatactgcc

SEQ ID NO: 492545 - DNA, 30 bp, Artificial Sequence
  Synthetic oligonucleotide
tttgatgacaaaacggactgcattactgcc

SEQ ID NO: 492546 - DNA, 30 bp, Artificial Sequence
  Synthetic oligonucleotide
taatagcattggagttggtcacaacctgcc

SEQ ID NO: 492547 - DNA, 30 bp, Artificial Sequence
  Synthetic oligonucleotide
aattatagatgggagatggcgcggcctgcc

SEQ ID NO: 492548 - DNA, 30 bp, Artificial Sequence
  Synthetic oligonucleotide
tgcagttttaaacataataccgcagctgcc

SEQ ID NO: 492549 - DNA, 30 bp, Artificial Sequence
  Synthetic oligonucleotide
ggaatagctagtccaataaggatcgctgcc

SEQ ID NO: 492550 - DNA, 30 bp, Artificial Sequence
  Synthetic oligonucleotide
cagcaggtaaggctgacaactagggctgcc

SEQ ID NO: 492551 - DNA, 30 bp, Artificial Sequence
  Synthetic oligonucleotide
tgtcccacatggtatcacacgggggctgcc

SEQ ID NO: 492552 - DNA, 30 bp, Artificial Sequence
  Synthetic oligonucleotide
catataatatccggcatagccggtgctgcc

SEQ ID NO: 492553 - DNA, 30 bp, Artificial Sequence
  Synthetic oligonucleotide
cgtccagtttttccttgtctgattgctgcc

SEQ ID NO: 492554 - DNA, 30 bp, Artificial Sequence
  Synthetic oligonucleotide
gaattgcgtctcccatagcaaaattctgcc

SEQ ID NO: 492555 - DNA, 30 bp, Artificial Sequence
  Synthetic oligonucleotide
tcctacacgacggaaccgggtaattctgcc

SEQ ID NO: 492556 - DNA, 30 bp, Artificial Sequence
  Synthetic oligonucleotide
accacggtgcgcgcacagataataagtgcc

SEQ ID NO: 492557 - DNA, 30 bp, Artificial Sequence
  Synthetic oligonucleotide
gtgtgaggcataactagttcacgcagtgcc

SEQ ID NO: 492558 - DNA, 30 bp, Artificial Sequence
  Synthetic oligonucleotide
gcgatgcactgagtagacgcactcagtgcc

SEQ ID NO: 492559 - DNA, 30 bp, Artificial Sequence
  Synthetic oligonucleotide
ctagcacagacacatataacgtttagtgcc

SEQ ID NO: 492560 - DNA, 30 bp, Artificial Sequence
  Synthetic oligonucleotide
aaacggtaggcaacaggaggctaacgtgcc

SEQ ID NO: 492561 - DNA, 30 bp, Artificial Sequence
  Synthetic oligonucleotide
acagacaggcaactctatagttaacgtgcc

SEQ ID NO: 492562 - DNA, 30 bp, Artificial Sequence
  Synthetic oligonucleotide
gaaactttgtctagacactttgtacgtgcc

SEQ ID NO: 492563 - DNA, 30 bp, Artificial Sequence
  Synthetic oligonucleotide
taactgggaccctcctgtggattacgtgcc

SEQ ID NO: 492564 - DNA, 30 bp, Artificial Sequence
  Synthetic oligonucleotide
tgattttgacgcaaaagataatagcgtgcc

SEQ ID NO: 492565 - DNA, 30 bp, Artificial Sequence
  Synthetic oligonucleotide
cggggtcaatggtggagtgcgacgcgtgcc

SEQ ID NO: 492566 - DNA, 30 bp, Artificial Sequence
  Synthetic oligonucleotide
aacactccacagggcctttcatatcgtgcc

SEQ ID NO: 492567 - DNA, 30 bp, Artificial Sequence
  Synthetic oligonucleotide
tgcgcgcgttcaagcagactaacaggtgcc

SEQ ID NO: 492568 - DNA, 30 bp, Artificial Sequence
  Synthetic oligonucleotide
gcgagtaaaacgcgcgtacacctaggtgcc

SEQ ID NO: 492569 - DNA, 30 bp, Artificial Sequence
  Synthetic oligonucleotide
agaaagaaatttacaaagatgaacggtgcc

SEQ ID NO: 492570 - DNA, 30 bp, Artificial Sequence
  Synthetic oligonucleotide
gatacggatgtgtaagggtctcccggtgcc

SEQ ID NO: 492571 - DNA, 30 bp, Artificial Sequence
  Synthetic oligonucleotide
tgtttaggacatgttctatctgccggtgcc

SEQ ID NO: 492572 - DNA, 30 bp, Artificial Sequence
  Synthetic oligonucleotide
tatacaagaccggggattacctgcggtgcc

SEQ ID NO: 492573 - DNA, 30 bp, Artificial Sequence
  Synthetic oligonucleotide
ctttgacgtttgaagatatcatctggtgcc

SEQ ID NO: 492574 - DNA, 30 bp, Artificial Sequence
  Synthetic oligonucleotide
attaagtcaccccgtctggagtcctgtgcc

SEQ ID NO: 492575 - DNA, 30 bp, Artificial Sequence
  Synthetic oligonucleotide
atgtggggccgagtgccccagacttgtgcc

SEQ ID NO: 492576 - DNA, 30 bp, Artificial Sequence
  Synthetic oligonucleotide
ttcggttaccaccgaggggagtctattgcc

SEQ ID NO: 492577 - DNA, 30 bp, Artificial Sequence
  Synthetic oligonucleotide
cttcagtcaggctcctcacaggaacttgcc

SEQ ID NO: 492578 - DNA, 30 bp, Artificial Sequence
  Synthetic oligonucleotide
tttctcgcggtccatgatcacgtacttgcc

SEQ ID NO: 492579 - DNA, 30 bp, Artificial Sequence
  Synthetic oligonucleotide
cagctgctgaacacacgtagagtgcttgcc

SEQ ID NO: 492580 - DNA, 30 bp, Artificial Sequence
  Synthetic oligonucleotide
aagaagcgtatctcacactagggtcttgcc

SEQ ID NO: 492581 - DNA, 30 bp, Artificial Sequence
  Synthetic oligonucleotide
tttctcggttccacgaagggcgttcttgcc

SEQ ID NO: 492582 - DNA, 30 bp, Artificial Sequence
  Synthetic oligonucleotide
gagagttaactaatgtactttcaagttgcc

SEQ ID NO: 492583 - DNA, 30 bp, Artificial Sequence
  Synthetic oligonucleotide
ccgcttcctcagctttacccggaagttgcc

SEQ ID NO: 492584 - DNA, 30 bp, Artificial Sequence
  Synthetic oligonucleotide
cggagcgacagccagctttggttagttgcc

SEQ ID NO: 492585 - DNA, 30 bp, Artificial Sequence
  Synthetic oligonucleotide
tcttggcaacgggccaggccgatggttgcc

SEQ ID NO: 492586 - DNA, 30 bp, Artificial Sequence
  Synthetic oligonucleotide
attgctcatcataggactcagcgatttgcc

SEQ ID NO: 492587 - DNA, 30 bp, Artificial Sequence
  Synthetic oligonucleotide
gcacctcatagttggggaggtatatttgcc

SEQ ID NO: 492588 - DNA, 30 bp, Artificial Sequence
  Synthetic oligonucleotide
ccaaatccgcccgagttaatttcctttgcc

SEQ ID NO: 492589 - DNA, 30 bp, Artificial Sequence
  Synthetic oligonucleotide
gcagggaaagcttagttggactgctttgcc

SEQ ID NO: 492590 - DNA, 30 bp, Artificial Sequence
  Synthetic oligonucleotide
attttctattgccacgagacgctgtttgcc

SEQ ID NO: 492591 - DNA, 30 bp, Artificial Sequence
  Synthetic oligonucleotide
aataatggaccggaaattcgatgaaaatcc

SEQ ID NO: 492592 - DNA, 30 bp, Artificial Sequence
  Synthetic oligonucleotide
ttaggcagtccgaaacacatattaaaatcc

SEQ ID NO: 492593 - DNA, 30 bp, Artificial Sequence
  Synthetic oligonucleotide
actctaaggtatcccaccccgttcaaatcc

SEQ ID NO: 492594 - DNA, 30 bp, Artificial Sequence
  Synthetic oligonucleotide
cggccagggcgctaaccctccctgaaatcc

SEQ ID NO: 492595 - DNA, 30 bp, Artificial Sequence
  Synthetic oligonucleotide
tatacgaacatgcaggcgtgccctaaatcc

SEQ ID NO: 492596 - DNA, 30 bp, Artificial Sequence
  Synthetic oligonucleotide
ttttagttacatacgtggattagtaaatcc

SEQ ID NO: 492597 - DNA, 30 bp, Artificial Sequence
  Synthetic oligonucleotide
taaaaccctcatgctcgatccatccaatcc

SEQ ID NO: 492598 - DNA, 30 bp, Artificial Sequence
  Synthetic oligonucleotide
atcggcgttatggaagcaggaatgcaatcc

SEQ ID NO: 492599 - DNA, 30 bp, Artificial Sequence
  Synthetic oligonucleotide
tcccagtgccgaagtgccggactgcaatcc

SEQ ID NO: 492600 - DNA, 30 bp, Artificial Sequence
  Synthetic oligonucleotide
cctatgtgcgtatggcacaggaatcaatcc

SEQ ID NO: 492601 - DNA, 30 bp, Artificial Sequence
  Synthetic oligonucleotide
ttaagctttccgcgataccgtaatcaatcc

SEQ ID NO: 492602 - DNA, 30 bp, Artificial Sequence
  Synthetic oligonucleotide
gtgtctgttgtcctcgtagtaggtcaatcc

SEQ ID NO: 492603 - DNA, 30 bp, Artificial Sequence
  Synthetic oligonucleotide
tagctagagattctgtttggggtcgaatcc

SEQ ID NO: 492604 - DNA, 30 bp, Artificial Sequence
  Synthetic oligonucleotide
tatactccggagcaaatataaacggaatcc

SEQ ID NO: 492605 - DNA, 30 bp, Artificial Sequence
  Synthetic oligonucleotide
cggtccaaagtgttgcatatcagggaatcc

SEQ ID NO: 492606 - DNA, 30 bp, Artificial Sequence
  Synthetic oligonucleotide
ggctgtaggatggacttttagtgggaatcc

SEQ ID NO: 492607 - DNA, 30 bp, Artificial Sequence
  Synthetic oligonucleotide
gttatgtatgaggttatcggcagtgaatcc

SEQ ID NO: 492608 - DNA, 30 bp, Artificial Sequence
  Synthetic oligonucleotide
catgccggaggtgggatccagagtgaatcc

SEQ ID NO: 492609 - DNA, 30 bp, Artificial Sequence
  Synthetic oligonucleotide
tcccctttgcttatcccgccaagataatcc

SEQ ID NO: 492610 - DNA, 30 bp, Artificial Sequence
  Synthetic oligonucleotide
aacctccccgaccagcggaaccactaatcc

SEQ ID NO: 492611 - DNA, 30 bp, Artificial Sequence
  Synthetic oligonucleotide
cgcttgggggccggtcgcatgacctaatcc

SEQ ID NO: 492612 - DNA, 30 bp, Artificial Sequence
  Synthetic oligonucleotide
ttctgagatagccagcctctacggtaatcc

SEQ ID NO: 492613 - DNA, 30 bp, Artificial Sequence
  Synthetic oligonucleotide
tattttaatgtacgttcagccgattaatcc

SEQ ID NO: 492614 - DNA, 30 bp, Artificial Sequence
  Synthetic oligonucleotide
ccacagtaagaccgttcacaaagaacatcc

SEQ ID NO: 492615 - DNA, 30 bp, Artificial Sequence
  Synthetic oligonucleotide
taactatcggagttccagtatctcacatcc

SEQ ID NO: 492616 - DNA, 30 bp, Artificial Sequence
  Synthetic oligonucleotide
tctcataatctctgctgctgtgcgacatcc

SEQ ID NO: 492617 - DNA, 30 bp, Artificial Sequence
  Synthetic oligonucleotide
ggcatcgcagtacactcgcgcatgacatcc

SEQ ID NO: 492618 - DNA, 30 bp, Artificial Sequence
  Synthetic oligonucleotide
atttattcatcaaacctgaacactacatcc

SEQ ID NO: 492619 - DNA, 30 bp, Artificial Sequence
  Synthetic oligonucleotide
agctggattacttacgccatttgtacatcc

SEQ ID NO: 492620 - DNA, 30 bp, Artificial Sequence
  Synthetic oligonucleotide
tcgtggcagtctgggttagtttttacatcc

SEQ ID NO: 492621 - DNA, 30 bp, Artificial Sequence
  Synthetic oligonucleotide
actcttctaacgctgttactgggcccatcc

SEQ ID NO: 492622 - DNA, 30 bp, Artificial Sequence
  Synthetic oligonucleotide
gttccgaaagcaaacaaactaccgccatcc

SEQ ID NO: 492623 - DNA, 30 bp, Artificial Sequence
  Synthetic oligonucleotide
taattcactttgaatttggcaattccatcc

SEQ ID NO: 492624 - DNA, 30 bp, Artificial Sequence
  Synthetic oligonucleotide
agtcggaagacgcttgagagcagggcatcc

SEQ ID NO: 492625 - DNA, 30 bp, Artificial Sequence
  Synthetic oligonucleotide
aaatacagaatagcagtctgtcgtgcatcc

SEQ ID NO: 492626 - DNA, 30 bp, Artificial Sequence
  Synthetic oligonucleotide
agttttttcgatgtttgctttagctcatcc

SEQ ID NO: 492627 - DNA, 30 bp, Artificial Sequence
  Synthetic oligonucleotide
aaagatgtccgaccctggggcctctcatcc

SEQ ID NO: 492628 - DNA, 30 bp, Artificial Sequence
  Synthetic oligonucleotide
gcaggtttgttgttagtgatacggtcatcc

SEQ ID NO: 492629 - DNA, 30 bp, Artificial Sequence
  Synthetic oligonucleotide
ttgaggtgatgcaagacaggagaaagatcc

SEQ ID NO: 492630 - DNA, 30 bp, Artificial Sequence
  Synthetic oligonucleotide
gcattgagttccgtttatttaaacagatcc

SEQ ID NO: 492631 - DNA, 30 bp, Artificial Sequence
  Synthetic oligonucleotide
tgttatcatcggtgttcttctcggagatcc

SEQ ID NO: 492632 - DNA, 30 bp, Artificial Sequence
  Synthetic oligonucleotide
ggtcattcggccatccgtcgagggagatcc

SEQ ID NO: 492633 - DNA, 30 bp, Artificial Sequence
  Synthetic oligonucleotide
gttatgtagcttccccgtttattacgatcc

SEQ ID NO: 492634 - DNA, 30 bp, Artificial Sequence
  Synthetic oligonucleotide
gaaactcgctatactttaccactccgatcc

SEQ ID NO: 492635 - DNA, 30 bp, Artificial Sequence
  Synthetic oligonucleotide
aaaggtacatattagttgacttcgcgatcc

SEQ ID NO: 492636 - DNA, 30 bp, Artificial Sequence
  Synthetic oligonucleotide
atccgtagtccttagggcgaatatcgatcc

SEQ ID NO: 492637 - DNA, 30 bp, Artificial Sequence
  Synthetic oligonucleotide
gcacaccagatgtatactaagggtcgatcc

SEQ ID NO: 492638 - DNA, 30 bp, Artificial Sequence
  Synthetic oligonucleotide
atgcgcaaagagattcctgacgacggatcc

SEQ ID NO: 492639 - DNA, 30 bp, Artificial Sequence
  Synthetic oligonucleotide
gacactttccacgacataagttccggatcc

SEQ ID NO: 492640 - DNA, 30 bp, Artificial Sequence
  Synthetic oligonucleotide
tcccttccagcgtaacgttggtagggatcc

SEQ ID NO: 492641 - DNA, 30 bp, Artificial Sequence
  Synthetic oligonucleotide
tttagcaacagggggtttaatccgggatcc

SEQ ID NO: 492642 - DNA, 30 bp, Artificial Sequence
  Synthetic oligonucleotide
cacatatgcctagaacgtggccggggatcc

SEQ ID NO: 492643 - DNA, 30 bp, Artificial Sequence
  Synthetic oligonucleotide
agataaacagacagaccgaataatggatcc

SEQ ID NO: 492644 - DNA, 30 bp, Artificial Sequence
  Synthetic oligonucleotide
aataaaacgttgactagtcccccatgatcc

SEQ ID NO: 492645 - DNA, 30 bp, Artificial Sequence
  Synthetic oligonucleotide
acttcaccccccatccctcgcagatgatcc

SEQ ID NO: 492646 - DNA, 30 bp, Artificial Sequence
  Synthetic oligonucleotide
gcggggatctgtgggcaccctagatgatcc

SEQ ID NO: 492647 - DNA, 30 bp, Artificial Sequence
  Synthetic oligonucleotide
atttctgagacttcttatcgaggttgatcc

SEQ ID NO: 492648 - DNA, 30 bp, Artificial Sequence
  Synthetic oligonucleotide
catagcttacgtaagcagcaaggaatatcc

SEQ ID NO: 492649 - DNA, 30 bp, Artificial Sequence
  Synthetic oligonucleotide
atagtcttccgtctcggggaagacctatcc

SEQ ID NO: 492650 - DNA, 30 bp, Artificial Sequence
  Synthetic oligonucleotide
catttactagttgacgcccactagctatcc

SEQ ID NO: 492651 - DNA, 30 bp, Artificial Sequence
  Synthetic oligonucleotide
ggtacccgcattatgtggcaacctctatcc

SEQ ID NO: 492652 - DNA, 30 bp, Artificial Sequence
  Synthetic oligonucleotide
gatgtttgaatgagcattctgtgtctatcc

SEQ ID NO: 492653 - DNA, 30 bp, Artificial Sequence
  Synthetic oligonucleotide
ctaatgcagctatgatcttatcaagtatcc

SEQ ID NO: 492654 - DNA, 30 bp, Artificial Sequence
  Synthetic oligonucleotide
tgttgactcaaaggtacgcggtacgtatcc

SEQ ID NO: 492655 - DNA, 30 bp, Artificial Sequence
  Synthetic oligonucleotide
ggcaggacacaggctctggattacgtatcc

SEQ ID NO: 492656 - DNA, 30 bp, Artificial Sequence
  Synthetic oligonucleotide
ctaaaaagtacccaaactgattgcgtatcc

SEQ ID NO: 492657 - DNA, 30 bp, Artificial Sequence
  Synthetic oligonucleotide
gaaggagcgagcccacggggtctcgtatcc

SEQ ID NO: 492658 - DNA, 30 bp, Artificial Sequence
  Synthetic oligonucleotide
acgtcggttgatgtcgttaaagaggtatcc

SEQ ID NO: 492659 - DNA, 30 bp, Artificial Sequence
  Synthetic oligonucleotide
gcgattatattccaactgacagaggtatcc

SEQ ID NO: 492660 - DNA, 30 bp, Artificial Sequence
  Synthetic oligonucleotide
tggtttccatgaggaatctaataggtatcc

SEQ ID NO: 492661 - DNA, 30 bp, Artificial Sequence
  Synthetic oligonucleotide
acatggcctccctttgccgtggcggtatcc

SEQ ID NO: 492662 - DNA, 30 bp, Artificial Sequence
  Synthetic oligonucleotide
gagtcacgcggtagcttatacagggtatcc

SEQ ID NO: 492663 - DNA, 30 bp, Artificial Sequence
  Synthetic oligonucleotide
tggtaacccagcaatagggagggggtatcc

SEQ ID NO: 492664 - DNA, 30 bp, Artificial Sequence
  Synthetic oligonucleotide
ttaacctgagggtgtaccctggaattatcc

SEQ ID NO: 492665 - DNA, 30 bp, Artificial Sequence
  Synthetic oligonucleotide
aagagtcgacgtccgtgttgagacttatcc

SEQ ID NO: 492666 - DNA, 30 bp, Artificial Sequence
  Synthetic oligonucleotide
aaactaggtaggtaataggcgtacttatcc

SEQ ID NO: 492667 - DNA, 30 bp, Artificial Sequence
  Synthetic oligonucleotide
ttagtgttgagtccgtgcacgaccttatcc

SEQ ID NO: 492668 - DNA, 30 bp, Artificial Sequence
  Synthetic oligonucleotide
catctcagagaaccagggccgttcttatcc

SEQ ID NO: 492669 - DNA, 30 bp, Artificial Sequence
  Synthetic oligonucleotide
caagctatatgattgtggttgcagttatcc

SEQ ID NO: 492670 - DNA, 30 bp, Artificial Sequence
  Synthetic oligonucleotide
tccataaaataaggttaacctgatttatcc

SEQ ID NO: 492671 - DNA, 30 bp, Artificial Sequence
  Synthetic oligonucleotide
cagatggtcgcccagcgaagcgttttatcc

SEQ ID NO: 492672 - DNA, 30 bp, Artificial Sequence
  Synthetic oligonucleotide
atgttcccataggtatccaatttaaactcc

SEQ ID NO: 492673 - DNA, 30 bp, Artificial Sequence
  Synthetic oligonucleotide
gtacctcttcccagcgccgatgagaactcc

SEQ ID NO: 492674 - DNA, 30 bp, Artificial Sequence
  Synthetic oligonucleotide
gtagaagctcgcaaagagtataaccactcc

SEQ ID NO: 492675 - DNA, 30 bp, Artificial Sequence
  Synthetic oligonucleotide
ccgtagcaggctatttgacgttaccactcc

SEQ ID NO: 492676 - DNA, 30 bp, Artificial Sequence
  Synthetic oligonucleotide
cgctacaggataatcacatagaaagactcc

SEQ ID NO: 492677 - DNA, 30 bp, Artificial Sequence
  Synthetic oligonucleotide
ccagcagacgttttagtacaactagactcc

SEQ ID NO: 492678 - DNA, 30 bp, Artificial Sequence
  Synthetic oligonucleotide
tctgtgaacctatgggcgttgctagactcc

SEQ ID NO: 492679 - DNA, 30 bp, Artificial Sequence
  Synthetic oligonucleotide
gcaggcaaatgtgacagcctaagcgactcc

SEQ ID NO: 492680 - DNA, 30 bp, Artificial Sequence
  Synthetic oligonucleotide
ttacgaccgtttagtataactgcggactcc

SEQ ID NO: 492681 - DNA, 30 bp, Artificial Sequence
  Synthetic oligonucleotide
aatgggataaaggtattacgtttggactcc

SEQ ID NO: 492682 - DNA, 30 bp, Artificial Sequence
  Synthetic oligonucleotide
gggtctagtagcggctaatcgcatgactcc

SEQ ID NO: 492683 - DNA, 30 bp, Artificial Sequence
  Synthetic oligonucleotide
ttctttggttttaaagtaagcgctgactcc

SEQ ID NO: 492684 - DNA, 30 bp, Artificial Sequence
  Synthetic oligonucleotide
aaatgaacttttggtttattccaatactcc

SEQ ID NO: 492685 - DNA, 30 bp, Artificial Sequence
  Synthetic oligonucleotide
aatatatgacgtacggcgaggcccacctcc

SEQ ID NO: 492686 - DNA, 30 bp, Artificial Sequence
  Synthetic oligonucleotide
cttcaatcgcgctgcattctgaaaccctcc

SEQ ID NO: 492687 - DNA, 30 bp, Artificial Sequence
  Synthetic oligonucleotide
ctcgactgccctgtggttttgcaaccctcc

SEQ ID NO: 492688 - DNA, 30 bp, Artificial Sequence
  Synthetic oligonucleotide
ctgtgagaaatcaagccatctttaccctcc

SEQ ID NO: 492689 - DNA, 30 bp, Artificial Sequence
  Synthetic oligonucleotide
ttcactctgatgtacctgttcttcccctcc

SEQ ID NO: 492690 - DNA, 31 bp, Artificial Sequence
  Synthetic oligonucleotide
tgggcaatcggcgcggcaatgcgggccctcc

SEQ ID NO: 492691 - DNA, 30 bp, Artificial Sequence
  Synthetic oligonucleotide
gacgtcgcctggtatgaaggacatccctcc

SEQ ID NO: 492692 - DNA, 30 bp, Artificial Sequence
  Synthetic oligonucleotide
ctgacgacgccgcgcggggaaggtccctcc

SEQ ID NO: 492693 - DNA, 30 bp, Artificial Sequence
  Synthetic oligonucleotide
ataaatcacccgagcagtaattacgcctcc

SEQ ID NO: 492694 - DNA, 30 bp, Artificial Sequence
  Synthetic oligonucleotide
gagtacagaagccgcgctggttacgcctcc

SEQ ID NO: 492695 - DNA, 30 bp, Artificial Sequence
  Synthetic oligonucleotide
cggaggacaaggcattggtaccagtcctcc

SEQ ID NO: 492696 - DNA, 30 bp, Artificial Sequence
  Synthetic oligonucleotide
gcgttctggccacgcattgcttcaagctcc

SEQ ID NO: 492697 - DNA, 30 bp, Artificial Sequence
  Synthetic oligonucleotide
ttatctgaagtatcgttatgaggaagctcc

SEQ ID NO: 492698 - DNA, 30 bp, Artificial Sequence
  Synthetic oligonucleotide
gggttcttgtagtacttccgggacagctcc

SEQ ID NO: 492699 - DNA, 30 bp, Artificial Sequence
  Synthetic oligonucleotide
gctttccatagagtaggctcttcgagctcc

SEQ ID NO: 492700 - DNA, 30 bp, Artificial Sequence
  Synthetic oligonucleotide
ctttagcacacgagttggcacgctagctcc

SEQ ID NO: 492701 - DNA, 30 bp, Artificial Sequence
  Synthetic oligonucleotide
ggtactagtcgtccagaccatggtagctcc

SEQ ID NO: 492702 - DNA, 30 bp, Artificial Sequence
  Synthetic oligonucleotide
cctgaaggatggccagcggtgcaacgctcc

SEQ ID NO: 492703 - DNA, 30 bp, Artificial Sequence
  Synthetic oligonucleotide
aagtttctgcaacctggcatagaccgctcc

SEQ ID NO: 492704 - DNA, 30 bp, Artificial Sequence
  Synthetic oligonucleotide
tgggtgtcaggcggctctgtcgggcgctcc

SEQ ID NO: 492705 - DNA, 30 bp, Artificial Sequence
  Synthetic oligonucleotide
attaaatggtaaatgggcaccgatcgctcc

SEQ ID NO: 492706 - DNA, 30 bp, Artificial Sequence
  Synthetic oligonucleotide
attaaatggtaaatgggcacctatcgctcc

SEQ ID NO: 492707 - DNA, 30 bp, Artificial Sequence
  Synthetic oligonucleotide
tatggcgcagacgtttagcgcgtaggctcc

SEQ ID NO: 492708 - DNA, 30 bp, Artificial Sequence
  Synthetic oligonucleotide
aattgtaggtactaaccatgttacggctcc

SEQ ID NO: 492709 - DNA, 30 bp, Artificial Sequence
  Synthetic oligonucleotide
gtcaacctcctcgaaatccgagagggctcc

SEQ ID NO: 492710 - DNA, 30 bp, Artificial Sequence
  Synthetic oligonucleotide
tggacaccgaggtagcagggacggggctcc

SEQ ID NO: 492711 - DNA, 30 bp, Artificial Sequence
  Synthetic oligonucleotide
tcgttgttttgagctcttcggcggggctcc

SEQ ID NO: 492712 - DNA, 30 bp, Artificial Sequence
  Synthetic oligonucleotide
cttctcacgaaaagggaacaatggggctcc

SEQ ID NO: 492713 - DNA, 30 bp, Artificial Sequence
  Synthetic oligonucleotide
gggcaacggggccattagtagaatggctcc

SEQ ID NO: 492714 - DNA, 30 bp, Artificial Sequence
  Synthetic oligonucleotide
gttttctgcacgttctggtggctatgctcc

SEQ ID NO: 492715 - DNA, 30 bp, Artificial Sequence
  Synthetic oligonucleotide
tgacaactcacggaaacgttatcctgctcc

SEQ ID NO: 492716 - DNA, 30 bp, Artificial Sequence
  Synthetic oligonucleotide
tgcagtggggactatacggagttctgctcc

SEQ ID NO: 492717 - DNA, 30 bp, Artificial Sequence
  Synthetic oligonucleotide
ccccgacatcagctgagtaaagagtgctcc

SEQ ID NO: 492718 - DNA, 30 bp, Artificial Sequence
  Synthetic oligonucleotide
gcagacaaaacaggaccgctatggtgctcc

SEQ ID NO: 492719 - DNA, 30 bp, Artificial Sequence
  Synthetic oligonucleotide
ggttctgataggcgggcagctaattgctcc

SEQ ID NO: 492720 - DNA, 30 bp, Artificial Sequence
  Synthetic oligonucleotide
tatgcagacgcgctcgatgaaatttgctcc

SEQ ID NO: 492721 - DNA, 30 bp, Artificial Sequence
  Synthetic oligonucleotide
tagaagcaggattccgcaaaacgaatctcc

SEQ ID NO: 492722 - DNA, 30 bp, Artificial Sequence
  Synthetic oligonucleotide
aacccgggctaacgctctaccggaatctcc

SEQ ID NO: 492723 - DNA, 30 bp, Artificial Sequence
  Synthetic oligonucleotide
gagagggggtctgacggacccataatctcc

SEQ ID NO: 492724 - DNA, 30 bp, Artificial Sequence
  Synthetic oligonucleotide
gggttcgtccgttactattaacccatctcc

SEQ ID NO: 492725 - DNA, 30 bp, Artificial Sequence
  Synthetic oligonucleotide
ccgcttccttgggagggttctgcgatctcc

SEQ ID NO: 492726 - DNA, 30 bp, Artificial Sequence
  Synthetic oligonucleotide
ccatgatcctctaagaaattgtggatctcc

SEQ ID NO: 492727 - DNA, 30 bp, Artificial Sequence
  Synthetic oligonucleotide
cgtattttcgaactcgggattagtatctcc

SEQ ID NO: 492728 - DNA, 30 bp, Artificial Sequence
  Synthetic oligonucleotide
gacgagtaacggagtctacaacgtatctcc

SEQ ID NO: 492729 - DNA, 30 bp, Artificial Sequence
  Synthetic oligonucleotide
aatactggcccgcgcagtgcggccctctcc

SEQ ID NO: 492730 - DNA, 30 bp, Artificial Sequence
  Synthetic oligonucleotide
gcttctcgtattaccatatagttcgtctcc

SEQ ID NO: 492731 - DNA, 30 bp, Artificial Sequence
  Synthetic oligonucleotide
tttttaggctctatacggccgcaggtctcc

SEQ ID NO: 492732 - DNA, 30 bp, Artificial Sequence
  Synthetic oligonucleotide
ctggttaatgagaccgctccatcggtctcc

SEQ ID NO: 492733 - DNA, 30 bp, Artificial Sequence
  Synthetic oligonucleotide
atgcggactagacgacgaagaaacttctcc

SEQ ID NO: 492734 - DNA, 30 bp, Artificial Sequence
  Synthetic oligonucleotide
gggtatgagacagttatagataacttctcc

SEQ ID NO: 492735 - DNA, 30 bp, Artificial Sequence
  Synthetic oligonucleotide
ctctgaagtgaaccacacatagatttctcc

SEQ ID NO: 492736 - DNA, 30 bp, Artificial Sequence
  Synthetic oligonucleotide
gctgactgagtgcacataattacaaagtcc

SEQ ID NO: 492737 - DNA, 30 bp, Artificial Sequence
  Synthetic oligonucleotide
tcatctataacgctgatcgctgcaaagtcc

SEQ ID NO: 492738 - DNA, 30 bp, Artificial Sequence
  Synthetic oligonucleotide
tcacttcctcagagtgatgcgggaaagtcc

SEQ ID NO: 492739 - DNA, 30 bp, Artificial Sequence
  Synthetic oligonucleotide
agcgtggggaagcgtacgttcgacaagtcc

SEQ ID NO: 492740 - DNA, 30 bp, Artificial Sequence
  Synthetic oligonucleotide
atccgaggttctccttctttaaccaagtcc

SEQ ID NO: 492741 - DNA, 30 bp, Artificial Sequence
  Synthetic oligonucleotide
gagtgtagcgactgcgcccagggcaagtcc

SEQ ID NO: 492742 - DNA, 30 bp, Artificial Sequence
  Synthetic oligonucleotide
atcgtacatgcgtctatggacgctaagtcc

SEQ ID NO: 492743 - DNA, 30 bp, Artificial Sequence
  Synthetic oligonucleotide
tgtgggtgtgatggtatgttccttaagtcc

SEQ ID NO: 492744 - DNA, 30 bp, Artificial Sequence
  Synthetic oligonucleotide
gttattttatcggatggcaccaaacagtcc

SEQ ID NO: 492745 - DNA, 30 bp, Artificial Sequence
  Synthetic oligonucleotide
attaaagcttagagcgacctcgtacagtcc

SEQ ID NO: 492746 - DNA, 30 bp, Artificial Sequence
  Synthetic oligonucleotide
aattgggaggaactccagggatagcagtcc

SEQ ID NO: 492747 - DNA, 30 bp, Artificial Sequence
  Synthetic oligonucleotide
ggagcaaactggttcgcagacattcagtcc

SEQ ID NO: 492748 - DNA, 30 bp, Artificial Sequence
  Synthetic oligonucleotide
cacttcgtgcgagtcgcgcaaggagagtcc

SEQ ID NO: 492749 - DNA, 30 bp, Artificial Sequence
  Synthetic oligonucleotide
tgtttgttatcccgaggtctacccgagtcc

SEQ ID NO: 492750 - DNA, 30 bp, Artificial Sequence
  Synthetic oligonucleotide
ttataactgccgcgttggtgttgggagtcc

SEQ ID NO: 492751 - DNA, 30 bp, Artificial Sequence
  Synthetic oligonucleotide
tggactgttagcgtctgtgttgatgagtcc

SEQ ID NO: 492752 - DNA, 30 bp, Artificial Sequence
  Synthetic oligonucleotide
tatcattcatgacttctttcttaatagtcc

SEQ ID NO: 492753 - DNA, 30 bp, Artificial Sequence
  Synthetic oligonucleotide
cggggatggcgcctaagtacatagtagtcc

SEQ ID NO: 492754 - DNA, 30 bp, Artificial Sequence
  Synthetic oligonucleotide
ggaatattcgcgcaattctagcgttagtcc

SEQ ID NO: 492755 - DNA, 30 bp, Artificial Sequence
  Synthetic oligonucleotide
aaaaatgttgtgactgtgaggtaaacgtcc

SEQ ID NO: 492756 - DNA, 30 bp, Artificial Sequence
  Synthetic oligonucleotide
atcggtatttggttgttcatgctcacgtcc

SEQ ID NO: 492757 - DNA, 30 bp, Artificial Sequence
  Synthetic oligonucleotide
ttaattgcagtgcggtcccccgcgacgtcc

SEQ ID NO: 492758 - DNA, 30 bp, Artificial Sequence
  Synthetic oligonucleotide
ggaagtacttccactggaatcactacgtcc

SEQ ID NO: 492759 - DNA, 30 bp, Artificial Sequence
  Synthetic oligonucleotide
gcagaacggccttcctcctccagcgcgtcc

SEQ ID NO: 492760 - DNA, 30 bp, Artificial Sequence
  Synthetic oligonucleotide
tgttctgaatacgttaaacaaacggcgtcc

SEQ ID NO: 492761 - DNA, 30 bp, Artificial Sequence
  Synthetic oligonucleotide
atagctgcacacggtgcgtaacttgcgtcc

SEQ ID NO: 492762 - DNA, 30 bp, Artificial Sequence
  Synthetic oligonucleotide
ctaagtgggtagagggttgcggtctcgtcc

SEQ ID NO: 492763 - DNA, 30 bp, Artificial Sequence
  Synthetic oligonucleotide
tgcaaagtctttgtcgacttacagtcgtcc

SEQ ID NO: 492764 - DNA, 30 bp, Artificial Sequence
  Synthetic oligonucleotide
ggaatttcgtcccctttgacgcaaaggtcc

SEQ ID NO: 492765 - DNA, 30 bp, Artificial Sequence
  Synthetic oligonucleotide
agcgttccatctgaggagaggcacaggtcc

SEQ ID NO: 492766 - DNA, 30 bp, Artificial Sequence
  Synthetic oligonucleotide
agtcccgtcccgatggacgattacaggtcc

SEQ ID NO: 492767 - DNA, 30 bp, Artificial Sequence
  Synthetic oligonucleotide
aatcttgggcacacaacgttagtcaggtcc

SEQ ID NO: 492768 - DNA, 30 bp, Artificial Sequence
  Synthetic oligonucleotide
aatgaggtttgagcagcaattcggaggtcc

SEQ ID NO: 492769 - DNA, 30 bp, Artificial Sequence
  Synthetic oligonucleotide
gttagacttgagacatcgggatttaggtcc

SEQ ID NO: 492770 - DNA, 30 bp, Artificial Sequence
  Synthetic oligonucleotide
agcaggccgcttccgtaagtttttaggtcc

SEQ ID NO: 492771 - DNA, 30 bp, Artificial Sequence
  Synthetic oligonucleotide
aaatgggccggcgctcacggagtacggtcc

SEQ ID NO: 492772 - DNA, 30 bp, Artificial Sequence
  Synthetic oligonucleotide
tgagaggcaggattgtcctgacgccggtcc

SEQ ID NO: 492773 - DNA, 30 bp, Artificial Sequence
  Synthetic oligonucleotide
tgttaatgatttcgcttttgccgccggtcc

SEQ ID NO: 492774 - DNA, 30 bp, Artificial Sequence
  Synthetic oligonucleotide
aagaggcccggcgcaactaaaggccggtcc

SEQ ID NO: 492775 - DNA, 30 bp, Artificial Sequence
  Synthetic oligonucleotide
ggtatgtacttgttaccagagcccgggtcc

SEQ ID NO: 492776 - DNA, 30 bp, Artificial Sequence
  Synthetic oligonucleotide
aaacgacgtctggggtaggttcgcgggtcc

SEQ ID NO: 492777 - DNA, 30 bp, Artificial Sequence
  Synthetic oligonucleotide
tttttgagcgaagggagattcgcggggtcc

SEQ ID NO: 492778 - DNA, 30 bp, Artificial Sequence
  Synthetic oligonucleotide
gatcggatcgggggcgcccgagatgggtcc

SEQ ID NO: 492779 - DNA, 30 bp, Artificial Sequence
  Synthetic oligonucleotide
acgcatccgaccatagcacagactgggtcc

SEQ ID NO: 492780 - DNA, 30 bp, Artificial Sequence
  Synthetic oligonucleotide
gacgcgtaaagagtcatcctaatatggtcc

SEQ ID NO: 492781 - DNA, 30 bp, Artificial Sequence
  Synthetic oligonucleotide
taatatcaatctgcgatctatatatggtcc

SEQ ID NO: 492782 - DNA, 30 bp, Artificial Sequence
  Synthetic oligonucleotide
aattaaatgcctaccgcgcccgcgtggtcc

SEQ ID NO: 492783 - DNA, 30 bp, Artificial Sequence
  Synthetic oligonucleotide
tatatcgccaattttgaagcagtgtggtcc

SEQ ID NO: 492784 - DNA, 30 bp, Artificial Sequence
  Synthetic oligonucleotide
agttgatttgtgctcgcgagggtgtggtcc

SEQ ID NO: 492785 - DNA, 30 bp, Artificial Sequence
  Synthetic oligonucleotide
gccaatattgattgctatattatttggtcc

SEQ ID NO: 492786 - DNA, 30 bp, Artificial Sequence
  Synthetic oligonucleotide
gaaaaggattaacatacggtgccaatgtcc

SEQ ID NO: 492787 - DNA, 30 bp, Artificial Sequence
  Synthetic oligonucleotide
acactcccgcagaactgcatagtaatgtcc

SEQ ID NO: 492788 - DNA, 30 bp, Artificial Sequence
  Synthetic oligonucleotide
tataggcacttttttacccgtgacatgtcc

SEQ ID NO: 492789 - DNA, 30 bp, Artificial Sequence
  Synthetic oligonucleotide
gtgcgattgcgaagcgtggatgggatgtcc

SEQ ID NO: 492790 - DNA, 30 bp, Artificial Sequence
  Synthetic oligonucleotide
aatgattcgataagacgcggcaaactgtcc

SEQ ID NO: 492791 - DNA, 30 bp, Artificial Sequence
  Synthetic oligonucleotide
atcttgattgaggctgtggctagactgtcc

SEQ ID NO: 492792 - DNA, 30 bp, Artificial Sequence
  Synthetic oligonucleotide
actatatcaatgcacaaccacgtactgtcc

SEQ ID NO: 492793 - DNA, 30 bp, Artificial Sequence
  Synthetic oligonucleotide
tattttcgcacgggtttatgctatctgtcc

SEQ ID NO: 492794 - DNA, 30 bp, Artificial Sequence
  Synthetic oligonucleotide
caccagctaacttgcatttatagtctgtcc

SEQ ID NO: 492795 - DNA, 30 bp, Artificial Sequence
  Synthetic oligonucleotide
ttcttgtctctccgttacagtattctgtcc

SEQ ID NO: 492796 - DNA, 30 bp, Artificial Sequence
  Synthetic oligonucleotide
tgcagggattcgtttacccataacgtgtcc

SEQ ID NO: 492797 - DNA, 30 bp, Artificial Sequence
  Synthetic oligonucleotide
ggagtcacgagatacgatttgcacgtgtcc

SEQ ID NO: 492798 - DNA, 30 bp, Artificial Sequence
  Synthetic oligonucleotide
agatgaaagcggtggcgtttgcatgtgtcc

SEQ ID NO: 492799 - DNA, 30 bp, Artificial Sequence
  Synthetic oligonucleotide
ttcctaacccccccgtccttctttgtgtcc

SEQ ID NO: 492800 - DNA, 30 bp, Artificial Sequence
  Synthetic oligonucleotide
gttgagacattgaagaggccgtttgtgtcc

SEQ ID NO: 492801 - DNA, 30 bp, Artificial Sequence
  Synthetic oligonucleotide
tcgtgcattttagttgtttcactattgtcc

SEQ ID NO: 492802 - DNA, 30 bp, Artificial Sequence
  Synthetic oligonucleotide
acgtgacttgtattaacccgtgtattgtcc

SEQ ID NO: 492803 - DNA, 30 bp, Artificial Sequence
  Synthetic oligonucleotide
gaccccgttcgtccgcccactgagttgtcc

SEQ ID NO: 492804 - DNA, 30 bp, Artificial Sequence
  Synthetic oligonucleotide
cagctgtattttgccacgtcatccaattcc

SEQ ID NO: 492805 - DNA, 30 bp, Artificial Sequence
  Synthetic oligonucleotide
agtttccacctaagctacacccgcaattcc

SEQ ID NO: 492806 - DNA, 30 bp, Artificial Sequence
  Synthetic oligonucleotide
taaactcgatgcgatctgaggcagaattcc

SEQ ID NO: 492807 - DNA, 30 bp, Artificial Sequence
  Synthetic oligonucleotide
ttctatgtggtataatgtagtgataattcc

SEQ ID NO: 492808 - DNA, 30 bp, Artificial Sequence
  Synthetic oligonucleotide
ttgctactggataggctcagccgacattcc

SEQ ID NO: 492809 - DNA, 30 bp, Artificial Sequence
  Synthetic oligonucleotide
cttccgtgcgttaaattagctttacattcc

SEQ ID NO: 492810 - DNA, 30 bp, Artificial Sequence
  Synthetic oligonucleotide
gtatctaggtgggtatcattaagccattcc

SEQ ID NO: 492811 - DNA, 30 bp, Artificial Sequence
  Synthetic oligonucleotide
ataaatgccctatgatgagcgatgcattcc

SEQ ID NO: 492812 - DNA, 30 bp, Artificial Sequence
  Synthetic oligonucleotide
taactggactcgtacgtgcggtgagattcc

SEQ ID NO: 492813 - DNA, 30 bp, Artificial Sequence
  Synthetic oligonucleotide
gcggtagatagtgagtgaccagacgattcc

SEQ ID NO: 492814 - DNA, 30 bp, Artificial Sequence
  Synthetic oligonucleotide
gatttgatattatttgactttgaggattcc

SEQ ID NO: 492815 - DNA, 30 bp, Artificial Sequence
  Synthetic oligonucleotide
gcggagcttagctaacgagaggttgattcc

SEQ ID NO: 492816 - DNA, 30 bp, Artificial Sequence
  Synthetic oligonucleotide
tgaccttacgtgaaagccctatttgattcc

SEQ ID NO: 492817 - DNA, 30 bp, Artificial Sequence
  Synthetic oligonucleotide
atattattgacgtagagctttaaatattcc

SEQ ID NO: 492818 - DNA, 30 bp, Artificial Sequence
  Synthetic oligonucleotide
gaagtcctaccctaggtcagaatatattcc

SEQ ID NO: 492819 - DNA, 30 bp, Artificial Sequence
  Synthetic oligonucleotide
cgggtcctgtggggccactagttatattcc

SEQ ID NO: 492820 - DNA, 30 bp, Artificial Sequence
  Synthetic oligonucleotide
ccttcattcgagccgcttgctccctattcc

SEQ ID NO: 492821 - DNA, 30 bp, Artificial Sequence
  Synthetic oligonucleotide
gactacagagcaggttttgtagtctattcc

SEQ ID NO: 492822 - DNA, 30 bp, Artificial Sequence
  Synthetic oligonucleotide
ggaaatgtatccgtggtaacgttctattcc

SEQ ID NO: 492823 - DNA, 30 bp, Artificial Sequence
  Synthetic oligonucleotide
ggcaccggggtcggacatactgggtattcc

SEQ ID NO: 492824 - DNA, 30 bp, Artificial Sequence
  Synthetic oligonucleotide
caaggatctcctgatctttgttggtattcc

SEQ ID NO: 492825 - DNA, 30 bp, Artificial Sequence
  Synthetic oligonucleotide
catttcccggctctaattactgattattcc

SEQ ID NO: 492826 - DNA, 30 bp, Artificial Sequence
  Synthetic oligonucleotide
cgtttgttcgccctaccggaacgttattcc

SEQ ID NO: 492827 - DNA, 30 bp, Artificial Sequence
  Synthetic oligonucleotide
gtaccaattaaaagcgctaaggtttattcc

SEQ ID NO: 492828 - DNA, 30 bp, Artificial Sequence
  Synthetic oligonucleotide
tatctgtaaaagcgacgttaaagaacttcc

SEQ ID NO: 492829 - DNA, 30 bp, Artificial Sequence
  Synthetic oligonucleotide
aaccgattaacgggtaaggacttaacttcc

SEQ ID NO: 492830 - DNA, 30 bp, Artificial Sequence
  Synthetic oligonucleotide
ttcccacggccaaacagccaagagacttcc

SEQ ID NO: 492831 - DNA, 30 bp, Artificial Sequence
  Synthetic oligonucleotide
ccacagcggaagagcctgtcggagacttcc

SEQ ID NO: 492832 - DNA, 30 bp, Artificial Sequence
  Synthetic oligonucleotide
ctagtaatagagtaggcgacggggacttcc

SEQ ID NO: 492833 - DNA, 30 bp, Artificial Sequence
  Synthetic oligonucleotide
taatttcggaccatctgctaagttacttcc

SEQ ID NO: 492834 - DNA, 30 bp, Artificial Sequence
  Synthetic oligonucleotide
gcgccggctttagacttggtcgcaccttcc

SEQ ID NO: 492835 - DNA, 30 bp, Artificial Sequence
  Synthetic oligonucleotide
atcctcggtgtgtttcatacgggaccttcc

SEQ ID NO: 492836 - DNA, 30 bp, Artificial Sequence
  Synthetic oligonucleotide
ggatccatgacaattctgccgcacccttcc

SEQ ID NO: 492837 - DNA, 30 bp, Artificial Sequence
  Synthetic oligonucleotide
cttaatttccgaaggatcgattccccttcc

SEQ ID NO: 492838 - DNA, 30 bp, Artificial Sequence
  Synthetic oligonucleotide
aatgaactgcggatcccggttgtcccttcc

SEQ ID NO: 492839 - DNA, 30 bp, Artificial Sequence
  Synthetic oligonucleotide
gagcgatcatggtgagtctccaagccttcc

SEQ ID NO: 492840 - DNA, 31 bp, Artificial Sequence
  Synthetic oligonucleotide
tttttgctgtttcggaaccaatattccttcc

SEQ ID NO: 492841 - DNA, 30 bp, Artificial Sequence
  Synthetic oligonucleotide
ctcaaccggaggacgcagttagaagcttcc

SEQ ID NO: 492842 - DNA, 29 bp, Artificial Sequence
  Synthetic oligonucleotide
ttagtatgacgtagcggggaccagcttcc

SEQ ID NO: 492843 - DNA, 30 bp, Artificial Sequence
  Synthetic oligonucleotide
cacactcgtggctaactccagttcgcttcc

SEQ ID NO: 492844 - DNA, 30 bp, Artificial Sequence
  Synthetic oligonucleotide
ctcgcgcgaagtcgaaggttgaaatcttcc

SEQ ID NO: 492845 - DNA, 30 bp, Artificial Sequence
  Synthetic oligonucleotide
ccagaggtttggtaccatattacatcttcc

SEQ ID NO: 492846 - DNA, 30 bp, Artificial Sequence
  Synthetic oligonucleotide
cgccatctgatggcgctgaagatctcttcc

SEQ ID NO: 492847 - DNA, 30 bp, Artificial Sequence
  Synthetic oligonucleotide
cccgtcgcagaaggatggtatctctcttcc

SEQ ID NO: 492848 - DNA, 30 bp, Artificial Sequence
  Synthetic oligonucleotide
ttgttcggatttattgaggttcagtcttcc

SEQ ID NO: 492849 - DNA, 30 bp, Artificial Sequence
  Synthetic oligonucleotide
ccgatgcacgaacatgctgcatggtcttcc

SEQ ID NO: 492850 - DNA, 30 bp, Artificial Sequence
  Synthetic oligonucleotide
tggacctgctcttgcagggccttgtcttcc

SEQ ID NO: 492851 - DNA, 30 bp, Artificial Sequence
  Synthetic oligonucleotide
ctggctctgacaggagaagagacttcttcc

SEQ ID NO: 492852 - DNA, 30 bp, Artificial Sequence
  Synthetic oligonucleotide
caaaactcaatgcacctttggttttcttcc

SEQ ID NO: 492853 - DNA, 30 bp, Artificial Sequence
  Synthetic oligonucleotide
ttccaggttttaaacgtttcgtcaagttcc

SEQ ID NO: 492854 - DNA, 30 bp, Artificial Sequence
  Synthetic oligonucleotide
tattttcaagaggggtattcaagaagttcc

SEQ ID NO: 492855 - DNA, 30 bp, Artificial Sequence
  Synthetic oligonucleotide
caaaagtatggcctttagtccgacagttcc

SEQ ID NO: 492856 - DNA, 30 bp, Artificial Sequence
  Synthetic oligonucleotide
accagaggttggaaggacccgaagagttcc

SEQ ID NO: 492857 - DNA, 30 bp, Artificial Sequence
  Synthetic oligonucleotide
gaatttgggtgattaattaggtagagttcc

SEQ ID NO: 492858 - DNA, 30 bp, Artificial Sequence
  Synthetic oligonucleotide
tactatagcgggataaggtgtaatagttcc

SEQ ID NO: 492859 - DNA, 30 bp, Artificial Sequence
  Synthetic oligonucleotide
ttacagtcaatataacacgttgatagttcc

SEQ ID NO: 492860 - DNA, 30 bp, Artificial Sequence
  Synthetic oligonucleotide
gaataatccaatgggccgtgaactagttcc

SEQ ID NO: 492861 - DNA, 30 bp, Artificial Sequence
  Synthetic oligonucleotide
gccattaaggcctctgcgtttaaacgttcc

SEQ ID NO: 492862 - DNA, 30 bp, Artificial Sequence
  Synthetic oligonucleotide
ccggggacgtccccatagcgtcaacgttcc

SEQ ID NO: 492863 - DNA, 30 bp, Artificial Sequence
  Synthetic oligonucleotide
catgtacgccaggaaccaaatacacgttcc

SEQ ID NO: 492864 - DNA, 30 bp, Artificial Sequence
  Synthetic oligonucleotide
gaaccatacgatcaaacatacgcccgttcc

SEQ ID NO: 492865 - DNA, 30 bp, Artificial Sequence
  Synthetic oligonucleotide
gcaaattcggaacccggagcattccgttcc

SEQ ID NO: 492866 - DNA, 30 bp, Artificial Sequence
  Synthetic oligonucleotide
gtccgacgcttctttaggtaaaatcgttcc

SEQ ID NO: 492867 - DNA, 30 bp, Artificial Sequence
  Synthetic oligonucleotide
aatattaatagcatttgcttcaatcgttcc

SEQ ID NO: 492868 - DNA, 30 bp, Artificial Sequence
  Synthetic oligonucleotide
tcttttagaacttaaggcgtaggtcgttcc

SEQ ID NO: 492869 - DNA, 30 bp, Artificial Sequence
  Synthetic oligonucleotide
gaagctgaacgctacctttgttgtcgttcc

SEQ ID NO: 492870 - DNA, 30 bp, Artificial Sequence
  Synthetic oligonucleotide
tgcccctaggggaagaggccgcagggttcc

SEQ ID NO: 492871 - DNA, 30 bp, Artificial Sequence
  Synthetic oligonucleotide
tactgatagttatgacggccacggggttcc

SEQ ID NO: 492872 - DNA, 30 bp, Artificial Sequence
  Synthetic oligonucleotide
ggttttatccataagtgaagagggggttcc

SEQ ID NO: 492873 - DNA, 30 bp, Artificial Sequence
  Synthetic oligonucleotide
gatatgtgggactcagcatctactggttcc

SEQ ID NO: 492874 - DNA, 30 bp, Artificial Sequence
  Synthetic oligonucleotide
tattatccattgtaaccagctgctggttcc

SEQ ID NO: 492875 - DNA, 30 bp, Artificial Sequence
  Synthetic oligonucleotide
tcttaagtaactcaggggccgccctgttcc

SEQ ID NO: 492876 - DNA, 30 bp, Artificial Sequence
  Synthetic oligonucleotide
aagtctatttcccaactgcagtcctgttcc

SEQ ID NO: 492877 - DNA, 30 bp, Artificial Sequence
  Synthetic oligonucleotide
cggtaacatgccgcgtatgtaaattgttcc

SEQ ID NO: 492878 - DNA, 30 bp, Artificial Sequence
  Synthetic oligonucleotide
tgaaaattacggacagtttcaatttgttcc

SEQ ID NO: 492879 - DNA, 30 bp, Artificial Sequence
  Synthetic oligonucleotide
ccggatcgggcgtgtcggctagacatttcc

SEQ ID NO: 492880 - DNA, 30 bp, Artificial Sequence
  Synthetic oligonucleotide
ggcgaccacacaacggtggcaatcatttcc

SEQ ID NO: 492881 - DNA, 30 bp, Artificial Sequence
  Synthetic oligonucleotide
tagattaattacagtgtattgatgatttcc

SEQ ID NO: 492882 - DNA, 30 bp, Artificial Sequence
  Synthetic oligonucleotide
gacagtttgcgactggcgcgcttgatttcc

SEQ ID NO: 492883 - DNA, 30 bp, Artificial Sequence
  Synthetic oligonucleotide
gggccccacagagggcccaatactatttcc

SEQ ID NO: 492884 - DNA, 30 bp, Artificial Sequence
  Synthetic oligonucleotide
gggtcccacattttgagggttcctatttcc

SEQ ID NO: 492885 - DNA, 30 bp, Artificial Sequence
  Synthetic oligonucleotide
actgaaaggccagaccttttcggtatttcc

SEQ ID NO: 492886 - DNA, 30 bp, Artificial Sequence
  Synthetic oligonucleotide
atctcagctactaggcagacgtgtatttcc

SEQ ID NO: 492887 - DNA, 30 bp, Artificial Sequence
  Synthetic oligonucleotide
gttgaaacgcaaaggatgcctggactttcc

SEQ ID NO: 492888 - DNA, 30 bp, Artificial Sequence
  Synthetic oligonucleotide
acttacttaaattccgcaatcatactttcc

SEQ ID NO: 492889 - DNA, 30 bp, Artificial Sequence
  Synthetic oligonucleotide
gttggatctactggtaggcggttactttcc

SEQ ID NO: 492890 - DNA, 30 bp, Artificial Sequence
  Synthetic oligonucleotide
tagactcgttcgtacagactccacctttcc

SEQ ID NO: 492891 - DNA, 30 bp, Artificial Sequence
  Synthetic oligonucleotide
aatcgccgtggcaacagaaacgtcctttcc

SEQ ID NO: 492892 - DNA, 28 bp, Artificial Sequence
  Synthetic oligonucleotide
aggtactgtatcgtcggcagggctttcc

SEQ ID NO: 492893 - DNA, 28 bp, Artificial Sequence
  Synthetic oligonucleotide
tctatgggcaatgtgcgactgtctttcc

SEQ ID NO: 492894 - DNA, 30 bp, Artificial Sequence
  Synthetic oligonucleotide
cactattaagtgattccccatgaagtttcc

SEQ ID NO: 492895 - DNA, 30 bp, Artificial Sequence
  Synthetic oligonucleotide
ggtacgccgtataatttactcacagtttcc

SEQ ID NO: 492896 - DNA, 30 bp, Artificial Sequence
  Synthetic oligonucleotide
ttatgtatccataagtccagattagtttcc

SEQ ID NO: 492897 - DNA, 30 bp, Artificial Sequence
  Synthetic oligonucleotide
cttgcaggtgtattcggtttgaccgtttcc

SEQ ID NO: 492898 - DNA, 31 bp, Artificial Sequence
  Synthetic oligonucleotide
aggaattcctacagtgcccgacgtcgtttcc

SEQ ID NO: 492899 - DNA, 30 bp, Artificial Sequence
  Synthetic oligonucleotide
tatgttgcaggcctttgaaaacaggtttcc

SEQ ID NO: 492900 - DNA, 30 bp, Artificial Sequence
  Synthetic oligonucleotide
ttgaaacccacataaagatgtattgtttcc

SEQ ID NO: 492901 - DNA, 30 bp, Artificial Sequence
  Synthetic oligonucleotide
atattgtgcagcgtaaaagtcgttgtttcc

SEQ ID NO: 492902 - DNA, 30 bp, Artificial Sequence
  Synthetic oligonucleotide
catgattcgcttggaactcctaccttttcc

SEQ ID NO: 492903 - DNA, 30 bp, Artificial Sequence
  Synthetic oligonucleotide
tggttggtacggccgatttcagccttttcc

SEQ ID NO: 492904 - DNA, 30 bp, Artificial Sequence
  Synthetic oligonucleotide
gaagccattgagattccgcctatcttttcc

SEQ ID NO: 492905 - DNA, 30 bp, Artificial Sequence
  Synthetic oligonucleotide
tataattttcgcatttcggttatgttttcc

SEQ ID NO: 492906 - DNA, 30 bp, Artificial Sequence
  Synthetic oligonucleotide
tcagcatgtaagatgtacgtgtatttttcc

SEQ ID NO: 492907 - DNA, 30 bp, Artificial Sequence
  Synthetic oligonucleotide
tgcatggacaatagcggcacagctttttcc

SEQ ID NO: 492908 - DNA, 30 bp, Artificial Sequence
  Synthetic oligonucleotide
gtaagggttgttgaagccggtccaaaaagc

SEQ ID NO: 492909 - DNA, 30 bp, Artificial Sequence
  Synthetic oligonucleotide
taattgcagtatcatttaccatgaaaaagc

SEQ ID NO: 492910 - DNA, 30 bp, Artificial Sequence
  Synthetic oligonucleotide
ctgattcggccgcgctgagtaaacaaaagc

SEQ ID NO: 492911 - DNA, 30 bp, Artificial Sequence
  Synthetic oligonucleotide
tccgtggaataaaccgtaaaagggaaaagc

SEQ ID NO: 492912 - DNA, 30 bp, Artificial Sequence
  Synthetic oligonucleotide
ggtccattttccttatgtatgtggaaaagc

SEQ ID NO: 492913 - DNA, 30 bp, Artificial Sequence
  Synthetic oligonucleotide
tactctgtaaaaatccttacataccaaagc

SEQ ID NO: 492914 - DNA, 30 bp, Artificial Sequence
  Synthetic oligonucleotide
cttgctgtgtgttcacatagcctgcaaagc

SEQ ID NO: 492915 - DNA, 29 bp, Artificial Sequence
  Synthetic oligonucleotide
cttttcatacattgatgctcgtagaaagc

SEQ ID NO: 492916 - DNA, 30 bp, Artificial Sequence
  Synthetic oligonucleotide
gatggtacgtcgtatattttctcggaaagc

SEQ ID NO: 492917 - DNA, 30 bp, Artificial Sequence
  Synthetic oligonucleotide
cacttcaccgccgtttggtttagtgaaagc

SEQ ID NO: 492918 - DNA, 30 bp, Artificial Sequence
  Synthetic oligonucleotide
gtggcaaaacgggcgctatatcttgaaagc

SEQ ID NO: 492919 - DNA, 30 bp, Artificial Sequence
  Synthetic oligonucleotide
attaagagtggtaggcagctgggataaagc

SEQ ID NO: 492920 - DNA, 30 bp, Artificial Sequence
  Synthetic oligonucleotide
ccaaccttatctgcgggcaactgataaagc

SEQ ID NO: 492921 - DNA, 30 bp, Artificial Sequence
  Synthetic oligonucleotide
cgcgcatgctagctattatgatactaaagc

SEQ ID NO: 492922 - DNA, 30 bp, Artificial Sequence
  Synthetic oligonucleotide
cattgtatcatggttcccgtactctaaagc

SEQ ID NO: 492923 - DNA, 31 bp, Artificial Sequence
  Synthetic oligonucleotide
tttctcctgaatggcgttgagagagtaaagc

SEQ ID NO: 492924 - DNA, 30 bp, Artificial Sequence
  Synthetic oligonucleotide
gacagggaataatagctcgtttggtaaagc

SEQ ID NO: 492925 - DNA, 30 bp, Artificial Sequence
  Synthetic oligonucleotide
cctcttagacacttcgtatactattaaagc

SEQ ID NO: 492926 - DNA, 30 bp, Artificial Sequence
  Synthetic oligonucleotide
ggtgaatgagtgaggatggacgtttaaagc

SEQ ID NO: 492927 - DNA, 30 bp, Artificial Sequence
  Synthetic oligonucleotide
tagtaactactggtggaaaatgtttaaagc

SEQ ID NO: 492928 - DNA, 30 bp, Artificial Sequence
  Synthetic oligonucleotide
caaccctcaccgttgtggcgtaaaacaagc

SEQ ID NO: 492929 - DNA, 30 bp, Artificial Sequence
  Synthetic oligonucleotide
tgaccagcgacgtaaatcccaagcacaagc

SEQ ID NO: 492930 - DNA, 30 bp, Artificial Sequence
  Synthetic oligonucleotide
gtaattatttattttcgtacgacgacaagc

SEQ ID NO: 492931 - DNA, 30 bp, Artificial Sequence
  Synthetic oligonucleotide
cggcctgtgtcatgcagcaaggtgacaagc

SEQ ID NO: 492932 - DNA, 30 bp, Artificial Sequence
  Synthetic oligonucleotide
gcctctttgctatcattcgatggtacaagc

SEQ ID NO: 492933 - DNA, 30 bp, Artificial Sequence
  Synthetic oligonucleotide
acacctatggcgcaatgtttgttaccaagc

SEQ ID NO: 492934 - DNA, 30 bp, Artificial Sequence
  Synthetic oligonucleotide
tgacaaattgttgtgggtaaataagcaagc

SEQ ID NO: 492935 - DNA, 30 bp, Artificial Sequence
  Synthetic oligonucleotide
atcactattacgcctatttccggagcaagc

SEQ ID NO: 492936 - DNA, 30 bp, Artificial Sequence
  Synthetic oligonucleotide
tgtggtcaggcatactccgtaaacgcaagc

SEQ ID NO: 492937 - DNA, 30 bp, Artificial Sequence
  Synthetic oligonucleotide
gggggatactaatgcccatgccccgcaagc

SEQ ID NO: 492938 - DNA, 30 bp, Artificial Sequence
  Synthetic oligonucleotide
tattcatcccgttgtcatagcgaggcaagc

SEQ ID NO: 492939 - DNA, 30 bp, Artificial Sequence
  Synthetic oligonucleotide
ttcaaagttgttacatttggttaggcaagc

SEQ ID NO: 492940 - DNA, 30 bp, Artificial Sequence
  Synthetic oligonucleotide
aagcaggcacgtagctacagctgggcaagc

SEQ ID NO: 492941 - DNA, 31 bp, Artificial Sequence
  Synthetic oligonucleotide
atatgaagtatccgcaatgtttcgtgcaagc

SEQ ID NO: 492942 - DNA, 30 bp, Artificial Sequence
  Synthetic oligonucleotide
cattagctgcatcgtatgtatatctcaagc

SEQ ID NO: 492943 - DNA, 30 bp, Artificial Sequence
  Synthetic oligonucleotide
gcagtcttgtacttcgtggtgatgtcaagc

SEQ ID NO: 492944 - DNA, 29 bp, Artificial Sequence
  Synthetic oligonucleotide
ccgcagcggattatgaacagaattcaagc

SEQ ID NO: 492945 - DNA, 30 bp, Artificial Sequence
  Synthetic oligonucleotide
gtacactagaacgtggctgtcgattcaagc

SEQ ID NO: 492946 - DNA, 30 bp, Artificial Sequence
  Synthetic oligonucleotide
ataaagctggttgatgacccggtttcaagc

SEQ ID NO: 492947 - DNA, 30 bp, Artificial Sequence
  Synthetic oligonucleotide
aacatgtctccttgctagtgatgaagaagc

SEQ ID NO: 492948 - DNA, 30 bp, Artificial Sequence
  Synthetic oligonucleotide
aagcaccgcagcatggttacctccagaagc

SEQ ID NO: 492949 - DNA, 31 bp, Artificial Sequence
  Synthetic oligonucleotide
aaggaccgcggcgtctctacaagctagaagc

SEQ ID NO: 492950 - DNA, 30 bp, Artificial Sequence
  Synthetic oligonucleotide
atagaagcacctagaggccttggccgaagc

SEQ ID NO: 492951 - DNA, 30 bp, Artificial Sequence
  Synthetic oligonucleotide
cgtgcaagtatgactgagtgtgggcgaagc

SEQ ID NO: 492952 - DNA, 30 bp, Artificial Sequence
  Synthetic oligonucleotide
agttatggctctgacacgaaacctcgaagc

SEQ ID NO: 492953 - DNA, 30 bp, Artificial Sequence
  Synthetic oligonucleotide
aacggtgcctgactataaaagtttcgaagc

SEQ ID NO: 492954 - DNA, 30 bp, Artificial Sequence
  Synthetic oligonucleotide
gggattcaattactagaacgcgaaggaagc

SEQ ID NO: 492955 - DNA, 30 bp, Artificial Sequence
  Synthetic oligonucleotide
ggaagacgaagagagcaggacaacggaagc

SEQ ID NO: 492956 - DNA, 30 bp, Artificial Sequence
  Synthetic oligonucleotide
taaacagattttttttcagaccacggaagc

SEQ ID NO: 492957 - DNA, 30 bp, Artificial Sequence
  Synthetic oligonucleotide
aatgtttaaagggtaaattttaccggaagc

SEQ ID NO: 492958 - DNA, 30 bp, Artificial Sequence
  Synthetic oligonucleotide
ggttcgactactacggcactttgtggaagc

SEQ ID NO: 492959 - DNA, 30 bp, Artificial Sequence
  Synthetic oligonucleotide
aggcagcactgttgcgtaagataatgaagc

SEQ ID NO: 492960 - DNA, 30 bp, Artificial Sequence
  Synthetic oligonucleotide
ttttctggttcaaatgtctaatgctgaagc

SEQ ID NO: 492961 - DNA, 30 bp, Artificial Sequence
  Synthetic oligonucleotide
tgcaccgaattcagtccccagctctgaagc

SEQ ID NO: 492962 - DNA, 30 bp, Artificial Sequence
  Synthetic oligonucleotide
tacaaatgagtctatttcaatgtctgaagc

SEQ ID NO: 492963 - DNA, 30 bp, Artificial Sequence
  Synthetic oligonucleotide
ggtatgactgccgcttaattccagtgaagc

SEQ ID NO: 492964 - DNA, 30 bp, Artificial Sequence
  Synthetic oligonucleotide
ctaagacacgggacagcccacgcgtgaagc

SEQ ID NO: 492965 - DNA, 30 bp, Artificial Sequence
  Synthetic oligonucleotide
catcggcttactatctgtaagggttgaagc

SEQ ID NO: 492966 - DNA, 30 bp, Artificial Sequence
  Synthetic oligonucleotide
ttccaatctcttgtaggtcttggttgaagc

SEQ ID NO: 492967 - DNA, 30 bp, Artificial Sequence
  Synthetic oligonucleotide
aacgacagatttaagggtgtattttgaagc

SEQ ID NO: 492968 - DNA, 30 bp, Artificial Sequence
  Synthetic oligonucleotide
cttcctgtttagacataggagcgaataagc

SEQ ID NO: 492969 - DNA, 30 bp, Artificial Sequence
  Synthetic oligonucleotide
ccttaacgagacttgaaaactcacataagc

SEQ ID NO: 492970 - DNA, 30 bp, Artificial Sequence
  Synthetic oligonucleotide
tgattctaactaatagtgtgtatcataagc

SEQ ID NO: 492971 - DNA, 30 bp, Artificial Sequence
  Synthetic oligonucleotide
attcttaggacgaccaagaacgtcataagc

SEQ ID NO: 492972 - DNA, 30 bp, Artificial Sequence
  Synthetic oligonucleotide
aggttaatgttattggggagtacgataagc

SEQ ID NO: 492973 - DNA, 30 bp, Artificial Sequence
  Synthetic oligonucleotide
gcaagcttttactaccatgcgctgataagc

SEQ ID NO: 492974 - DNA, 30 bp, Artificial Sequence
  Synthetic oligonucleotide
aggtgaccataagcggtcggggctataagc

SEQ ID NO: 492975 - DNA, 30 bp, Artificial Sequence
  Synthetic oligonucleotide
cccaagaggcggaccgttaggagcctaagc

SEQ ID NO: 492976 - DNA, 30 bp, Artificial Sequence
  Synthetic oligonucleotide
ttcgccttgagatgttgcagtgtcctaagc

SEQ ID NO: 492977 - DNA, 30 bp, Artificial Sequence
  Synthetic oligonucleotide
gccatataagcaccagcgctattgctaagc

SEQ ID NO: 492978 - DNA, 30 bp, Artificial Sequence
  Synthetic oligonucleotide
ttgagggtaaggacgcatctccatctaagc

SEQ ID NO: 492979 - DNA, 30 bp, Artificial Sequence
  Synthetic oligonucleotide
gaccgcagtaggagagtgaccagtctaagc

SEQ ID NO: 492980 - DNA, 30 bp, Artificial Sequence
  Synthetic oligonucleotide
ccgactgctagggaccgactctttctaagc

SEQ ID NO: 492981 - DNA, 30 bp, Artificial Sequence
  Synthetic oligonucleotide
ctccgagcgtcccatataagtatagtaagc

SEQ ID NO: 492982 - DNA, 30 bp, Artificial Sequence
  Synthetic oligonucleotide
cctgacgcacgtacgcttttgaacgtaagc

SEQ ID NO: 492983 - DNA, 30 bp, Artificial Sequence
  Synthetic oligonucleotide
agtgaatggtgtaggtagcagctcgtaagc

SEQ ID NO: 492984 - DNA, 30 bp, Artificial Sequence
  Synthetic oligonucleotide
tctgtagtattcaggcaaaaaagggtaagc

SEQ ID NO: 492985 - DNA, 30 bp, Artificial Sequence
  Synthetic oligonucleotide
acctcaggttctgtccgacacagtgtaagc

SEQ ID NO: 492986 - DNA, 30 bp, Artificial Sequence
  Synthetic oligonucleotide
ttgctgggtgcaaacgcgtcttcattaagc

SEQ ID NO: 492987 - DNA, 30 bp, Artificial Sequence
  Synthetic oligonucleotide
ctttttagtttattccgatatatattaagc

SEQ ID NO: 492988 - DNA, 30 bp, Artificial Sequence
  Synthetic oligonucleotide
cgaacaccgatagtgacgcgggtcttaagc

SEQ ID NO: 492989 - DNA, 30 bp, Artificial Sequence
  Synthetic oligonucleotide
tcgctggcctatcctagatcctagttaagc

SEQ ID NO: 492990 - DNA, 30 bp, Artificial Sequence
  Synthetic oligonucleotide
ttaatacggtaattccatggtgttttaagc

SEQ ID NO: 492991 - DNA, 30 bp, Artificial Sequence
  Synthetic oligonucleotide
attgaggcgccgggacgccactggaacagc

SEQ ID NO: 492992 - DNA, 30 bp, Artificial Sequence
  Synthetic oligonucleotide
agcagatttgttgtgattattcctaacagc

SEQ ID NO: 492993 - DNA, 30 bp, Artificial Sequence
  Synthetic oligonucleotide
tctatctttaacctagccgcgcgtaacagc

SEQ ID NO: 492994 - DNA, 30 bp, Artificial Sequence
  Synthetic oligonucleotide
caagtcacctaagcgtcggtgtttaacagc

SEQ ID NO: 492995 - DNA, 30 bp, Artificial Sequence
  Synthetic oligonucleotide
ctcacattcccgaccgtatgctgccacagc

SEQ ID NO: 492996 - DNA, 30 bp, Artificial Sequence
  Synthetic oligonucleotide
gactcccttatagaagtctgggttcacagc

SEQ ID NO: 492997 - DNA, 30 bp, Artificial Sequence
  Synthetic oligonucleotide
ggagcactggtattattactaatagacagc

SEQ ID NO: 492998 - DNA, 30 bp, Artificial Sequence
  Synthetic oligonucleotide
gatctttcgcgaatcctgtcgtcggacagc

SEQ ID NO: 492999 - DNA, 30 bp, Artificial Sequence
  Synthetic oligonucleotide
gcgctcttaactttaaagcaacgggacagc

SEQ ID NO: 493000 - DNA, 30 bp, Artificial Sequence
  Synthetic oligonucleotide
ccatgggccataccgcctccagtggacagc

SEQ ID NO: 493001 - DNA, 30 bp, Artificial Sequence
  Synthetic oligonucleotide
tttatccaatttgaaatatgtgactacagc

SEQ ID NO: 493002 - DNA, 30 bp, Artificial Sequence
  Synthetic oligonucleotide
cagcagtacgtcccatcgcgatagtacagc

SEQ ID NO: 493003 - DNA, 30 bp, Artificial Sequence
  Synthetic oligonucleotide
cgggcaagggcagctgatcgttcgtacagc

SEQ ID NO: 493004 - DNA, 30 bp, Artificial Sequence
  Synthetic oligonucleotide
cacctctatcgttattttggtcggtacagc

SEQ ID NO: 493005 - DNA, 30 bp, Artificial Sequence
  Synthetic oligonucleotide
aatacgggcgttttatgaaacgcacccagc

SEQ ID NO: 493006 - DNA, 30 bp, Artificial Sequence
  Synthetic oligonucleotide
agcggctacgtacagaactgatcacccagc

SEQ ID NO: 493007 - DNA, 30 bp, Artificial Sequence
  Synthetic oligonucleotide
acacagcacaaagcataacaccaccccagc

SEQ ID NO: 493008 - DNA, 30 bp, Artificial Sequence
  Synthetic oligonucleotide
agctagggtgacgaccggctgtaccccagc

SEQ ID NO: 493009 - DNA, 30 bp, Artificial Sequence
  Synthetic oligonucleotide
acgtaaacatggtcgttcccatgccccagc

SEQ ID NO: 493010 - DNA, 30 bp, Artificial Sequence
  Synthetic oligonucleotide
cggtttttagtgaaacatccacctcccagc

SEQ ID NO: 493011 - DNA, 30 bp, Artificial Sequence
  Synthetic oligonucleotide
ttttaacatagggccgacgtcgtagccagc

SEQ ID NO: 493012 - DNA, 30 bp, Artificial Sequence
  Synthetic oligonucleotide
cacaactataatcgagattttgtcgccagc

SEQ ID NO: 493013 - DNA, 30 bp, Artificial Sequence
  Synthetic oligonucleotide
ttgaattacgaccacgggtggccgtccagc

SEQ ID NO: 493014 - DNA, 30 bp, Artificial Sequence
  Synthetic oligonucleotide
attacaagcttatgggagaatcattccagc

SEQ ID NO: 493015 - DNA, 30 bp, Artificial Sequence
  Synthetic oligonucleotide
tcttcatgtattgggctacatggaagcagc

SEQ ID NO: 493016 - DNA, 30 bp, Artificial Sequence
  Synthetic oligonucleotide
aatattaaagtacctggcatcttaagcagc

SEQ ID NO: 493017 - DNA, 30 bp, Artificial Sequence
  Synthetic oligonucleotide
tataagatatgtaaatgttccaatagcagc

SEQ ID NO: 493018 - DNA, 30 bp, Artificial Sequence
  Synthetic oligonucleotide
cctgctatctggtggtggcgacgacgcagc

SEQ ID NO: 493019 - DNA, 30 bp, Artificial Sequence
  Synthetic oligonucleotide
cttatggggtattttagacacgaccgcagc

SEQ ID NO: 493020 - DNA, 30 bp, Artificial Sequence
  Synthetic oligonucleotide
tggagagcgatttgcgattctggtcgcagc

SEQ ID NO: 493021 - DNA, 30 bp, Artificial Sequence
  Synthetic oligonucleotide
ttctgggtcttcttaactcggtttcgcagc

SEQ ID NO: 493022 - DNA, 30 bp, Artificial Sequence
  Synthetic oligonucleotide
ctgttaatattattcacatataaaggcagc

SEQ ID NO: 493023 - DNA, 30 bp, Artificial Sequence
  Synthetic oligonucleotide
tatagtgagcatatacttgcttaatgcagc

SEQ ID NO: 493024 - DNA, 30 bp, Artificial Sequence
  Synthetic oligonucleotide
tagacgtcgacgtacgggtgcagatgcagc

SEQ ID NO: 493025 - DNA, 30 bp, Artificial Sequence
  Synthetic oligonucleotide
acacacttaactggttaacagctctgcagc

SEQ ID NO: 493026 - DNA, 30 bp, Artificial Sequence
  Synthetic oligonucleotide
ttgcagcatgcaggtcaagccccgtgcagc

SEQ ID NO: 493027 - DNA, 30 bp, Artificial Sequence
  Synthetic oligonucleotide
attgtcatatagaagaaacctttgtgcagc

SEQ ID NO: 493028 - DNA, 30 bp, Artificial Sequence
  Synthetic oligonucleotide
actttgtaccggttggatcagtcttgcagc

SEQ ID NO: 493029 - DNA, 30 bp, Artificial Sequence
  Synthetic oligonucleotide
gcgctaagcactaatgttcagctttgcagc

SEQ ID NO: 493030 - DNA, 30 bp, Artificial Sequence
  Synthetic oligonucleotide
agagggttcgatggtaaccgtagcatcagc

SEQ ID NO: 493031 - DNA, 30 bp, Artificial Sequence
  Synthetic oligonucleotide
tatccggcagtggccgtagcgctcatcagc

SEQ ID NO: 493032 - DNA, 30 bp, Artificial Sequence
  Synthetic oligonucleotide
gccgggactccttctgggcgatggatcagc

SEQ ID NO: 493033 - DNA, 30 bp, Artificial Sequence
  Synthetic oligonucleotide
gctccacggagcgaggtattccgtatcagc

SEQ ID NO: 493034 - DNA, 29 bp, Artificial Sequence
  Synthetic oligonucleotide
gtaatggttcaagacacgggaagctcagc

SEQ ID NO: 493035 - DNA, 30 bp, Artificial Sequence
  Synthetic oligonucleotide
gtttatagtttagttcctgagcagctcagc

SEQ ID NO: 493036 - DNA, 30 bp, Artificial Sequence
  Synthetic oligonucleotide
aagataagcgcgcctgatatgcatctcagc

SEQ ID NO: 493037 - DNA, 30 bp, Artificial Sequence
  Synthetic oligonucleotide
actcatttcggactctgggtatttctcagc

SEQ ID NO: 493038 - DNA, 30 bp, Artificial Sequence
  Synthetic oligonucleotide
gtttcttttacttctaacaagcaggtcagc

SEQ ID NO: 493039 - DNA, 30 bp, Artificial Sequence
  Synthetic oligonucleotide
gttcttccaaagacgacggacgacttcagc

SEQ ID NO: 493040 - DNA, 30 bp, Artificial Sequence
  Synthetic oligonucleotide
ggtggcatcgggtacatttagtgcttcagc

SEQ ID NO: 493041 - DNA, 29 bp, Artificial Sequence
  Synthetic oligonucleotide
ggaaccttaaatgtctggggttcttcagc

SEQ ID NO: 493042 - DNA, 30 bp, Artificial Sequence
  Synthetic oligonucleotide
ttgcaagatgtatagtccttcccgttcagc

SEQ ID NO: 493043 - DNA, 30 bp, Artificial Sequence
  Synthetic oligonucleotide
aatcgccgtggggacggagtcttgttcagc

SEQ ID NO: 493044 - DNA, 30 bp, Artificial Sequence
  Synthetic oligonucleotide
caagacaccaaccgccacgatattttcagc

SEQ ID NO: 493045 - DNA, 30 bp, Artificial Sequence
  Synthetic oligonucleotide
gtgtgacattcctgcaaaacctcaaagagc

SEQ ID NO: 493046 - DNA, 30 bp, Artificial Sequence
  Synthetic oligonucleotide
aggcatctggaggtagtgatttgaaagagc

SEQ ID NO: 493047 - DNA, 30 bp, Artificial Sequence
  Synthetic oligonucleotide
atcgggcagcaatcttcctctcccaagagc

SEQ ID NO: 493048 - DNA, 30 bp, Artificial Sequence
  Synthetic oligonucleotide
tccggaacctgcgtcttcttattgaagagc

SEQ ID NO: 493049 - DNA, 30 bp, Artificial Sequence
  Synthetic oligonucleotide
ggtgcttaggcagcgggcaaatataagagc

SEQ ID NO: 493050 - DNA, 30 bp, Artificial Sequence
  Synthetic oligonucleotide
gctttatgcgacgcggacgcactacagagc

SEQ ID NO: 493051 - DNA, 30 bp, Artificial Sequence
  Synthetic oligonucleotide
tcgctatctgctgtctaaaaacagcagagc

SEQ ID NO: 493052 - DNA, 30 bp, Artificial Sequence
  Synthetic oligonucleotide
gatcactgacctcacttgggcacgcagagc

SEQ ID NO: 493053 - DNA, 30 bp, Artificial Sequence
  Synthetic oligonucleotide
tatatgcaggccgcaagtcttgttcagagc

SEQ ID NO: 493054 - DNA, 30 bp, Artificial Sequence
  Synthetic oligonucleotide
aaacatggagggattcatgttctatagagc

SEQ ID NO: 493055 - DNA, 30 bp, Artificial Sequence
  Synthetic oligonucleotide
acgcctctaacagtcatgactggctagagc

SEQ ID NO: 493056 - DNA, 30 bp, Artificial Sequence
  Synthetic oligonucleotide
tcagcctcacgtagaaggcctccgtagagc

SEQ ID NO: 493057 - DNA, 30 bp, Artificial Sequence
  Synthetic oligonucleotide
cagccttatggtcacaagcgtatgtagagc

SEQ ID NO: 493058 - DNA, 30 bp, Artificial Sequence
  Synthetic oligonucleotide
attgttccctacacaggaagtgtgtagagc

SEQ ID NO: 493059 - DNA, 30 bp, Artificial Sequence
  Synthetic oligonucleotide
ataagacagcatctcggtactcgttagagc

SEQ ID NO: 493060 - DNA, 30 bp, Artificial Sequence
  Synthetic oligonucleotide
tatatgcaaagtcgcattgctacaacgagc

SEQ ID NO: 493061 - DNA, 30 bp, Artificial Sequence
  Synthetic oligonucleotide
cgctctcagcatgaggtaaacggtacgagc

SEQ ID NO: 493062 - DNA, 30 bp, Artificial Sequence
  Synthetic oligonucleotide
tcaatgggaggtgataccgggggtacgagc

SEQ ID NO: 493063 - DNA, 30 bp, Artificial Sequence
  Synthetic oligonucleotide
gtacgcgcagcctctacgtagcagccgagc

SEQ ID NO: 493064 - DNA, 30 bp, Artificial Sequence
  Synthetic oligonucleotide
gatccgtacgcaggttgagctgagccgagc

SEQ ID NO: 493065 - DNA, 30 bp, Artificial Sequence
  Synthetic oligonucleotide
ttgtttttccgaagtaatccgcatccgagc

SEQ ID NO: 493066 - DNA, 30 bp, Artificial Sequence
  Synthetic oligonucleotide
tgttctgacggtgcgctgccaacggcgagc

SEQ ID NO: 493067 - DNA, 30 bp, Artificial Sequence
  Synthetic oligonucleotide
gaagcaccgtttctgtcttacaaatcgagc

SEQ ID NO: 493068 - DNA, 29 bp, Artificial Sequence
  Synthetic oligonucleotide
ccttgcgtggcttgatgtttctatcgagc

SEQ ID NO: 493069 - DNA, 30 bp, Artificial Sequence
  Synthetic oligonucleotide
tcaggagactcagtgccgcagtaaaggagc

SEQ ID NO: 493070 - DNA, 30 bp, Artificial Sequence
  Synthetic oligonucleotide
tgtatatttacctgcggtagagacaggagc

SEQ ID NO: 493071 - DNA, 30 bp, Artificial Sequence
  Synthetic oligonucleotide
tcatgtggagtttaagtaaaacgcaggagc

SEQ ID NO: 493072 - DNA, 30 bp, Artificial Sequence
  Synthetic oligonucleotide
tgtcacgaagacattcgtttgcagaggagc

SEQ ID NO: 493073 - DNA, 30 bp, Artificial Sequence
  Synthetic oligonucleotide
aattagcgcaatagtctatttcataggagc

SEQ ID NO: 493074 - DNA, 30 bp, Artificial Sequence
  Synthetic oligonucleotide
gagagcgatcaaatatcgatagataggagc

SEQ ID NO: 493075 - DNA, 30 bp, Artificial Sequence
  Synthetic oligonucleotide
gaactggtagccaggtcaaagacacggagc

SEQ ID NO: 493076 - DNA, 30 bp, Artificial Sequence
  Synthetic oligonucleotide
cttagtagtattgcggacaaatgacggagc

SEQ ID NO: 493077 - DNA, 30 bp, Artificial Sequence
  Synthetic oligonucleotide
ggtctattggttcgtatttccgtccggagc

SEQ ID NO: 493078 - DNA, 30 bp, Artificial Sequence
  Synthetic oligonucleotide
gaatgtacgccatccggacgcgtccggagc

SEQ ID NO: 493079 - DNA, 30 bp, Artificial Sequence
  Synthetic oligonucleotide
cctcgtattggcatagattaatgagggagc

SEQ ID NO: 493080 - DNA, 30 bp, Artificial Sequence
  Synthetic oligonucleotide
ccagcgtctccttaactttgcatagggagc

SEQ ID NO: 493081 - DNA, 30 bp, Artificial Sequence
  Synthetic oligonucleotide
cctccgcgcgtaagcgcaacccatgggagc

SEQ ID NO: 493082 - DNA, 30 bp, Artificial Sequence
  Synthetic oligonucleotide
ccgtatttttactcagtgagctatgggagc

SEQ ID NO: 493083 - DNA, 30 bp, Artificial Sequence
  Synthetic oligonucleotide
cgctgacagttccattacagaactgggagc

SEQ ID NO: 493084 - DNA, 30 bp, Artificial Sequence
  Synthetic oligonucleotide
taccgtggctattggaatggaagtgggagc

SEQ ID NO: 493085 - DNA, 30 bp, Artificial Sequence
  Synthetic oligonucleotide
cgggtcactttcccctaaaaccgtgggagc

SEQ ID NO: 493086 - DNA, 30 bp, Artificial Sequence
  Synthetic oligonucleotide
aattcgtggattctgaggtatcttgggagc

SEQ ID NO: 493087 - DNA, 30 bp, Artificial Sequence
  Synthetic oligonucleotide
atcggaaaccatctctcattagttgggagc

SEQ ID NO: 493088 - DNA, 30 bp, Artificial Sequence
  Synthetic oligonucleotide
ccaatctggcggcacggcacattatggagc

SEQ ID NO: 493089 - DNA, 30 bp, Artificial Sequence
  Synthetic oligonucleotide
atatgtcgatctatgggatcgacctggagc

SEQ ID NO: 493090 - DNA, 30 bp, Artificial Sequence
  Synthetic oligonucleotide
cacacgtactgggtactacatgcctggagc

SEQ ID NO: 493091 - DNA, 30 bp, Artificial Sequence
  Synthetic oligonucleotide
attgatagacacaacgctccgtagtggagc

SEQ ID NO: 493092 - DNA, 30 bp, Artificial Sequence
  Synthetic oligonucleotide
accacactctcttagatgtgtatttggagc

SEQ ID NO: 493093 - DNA, 30 bp, Artificial Sequence
  Synthetic oligonucleotide
ggtgcataggtaaggtcccgagcaatgagc

SEQ ID NO: 493094 - DNA, 30 bp, Artificial Sequence
  Synthetic oligonucleotide
taccctgggtaggacgcgctctacatgagc

SEQ ID NO: 493095 - DNA, 30 bp, Artificial Sequence
  Synthetic oligonucleotide
attgcatttatcacggcggtgttcatgagc

SEQ ID NO: 493096 - DNA, 30 bp, Artificial Sequence
  Synthetic oligonucleotide
aaatcattaggctttttaagcgcgatgagc

SEQ ID NO: 493097 - DNA, 30 bp, Artificial Sequence
  Synthetic oligonucleotide
tgaaaaggggactcatattttgatatgagc

SEQ ID NO: 493098 - DNA, 30 bp, Artificial Sequence
  Synthetic oligonucleotide
ctagcacaacggaaggatactagtatgagc

SEQ ID NO: 493099 - DNA, 30 bp, Artificial Sequence
  Synthetic oligonucleotide
ggtttgttgggcacgcacgttctcctgagc

SEQ ID NO: 493100 - DNA, 30 bp, Artificial Sequence
  Synthetic oligonucleotide
cagcgaatctcacattggaattgtctgagc

SEQ ID NO: 493101 - DNA, 30 bp, Artificial Sequence
  Synthetic oligonucleotide
aatataatttcgtatttggagcaagtgagc

SEQ ID NO: 493102 - DNA, 30 bp, Artificial Sequence
  Synthetic oligonucleotide
taattctcggcgtagtaccatgaagtgagc

SEQ ID NO: 493103 - DNA, 30 bp, Artificial Sequence
  Synthetic oligonucleotide
agtagtagctccaagtaccatacagtgagc

SEQ ID NO: 493104 - DNA, 30 bp, Artificial Sequence
  Synthetic oligonucleotide
ccgggtaataggtcataatccccggtgagc

SEQ ID NO: 493105 - DNA, 30 bp, Artificial Sequence
  Synthetic oligonucleotide
aatctacccactcaggctcagtcggtgagc

SEQ ID NO: 493106 - DNA, 30 bp, Artificial Sequence
  Synthetic oligonucleotide
aatgaaaaccatacggagaagctggtgagc

SEQ ID NO: 493107 - DNA, 30 bp, Artificial Sequence
  Synthetic oligonucleotide
ccattcccttatccttgtattttcttgagc

SEQ ID NO: 493108 - DNA, 30 bp, Artificial Sequence
  Synthetic oligonucleotide
tcttttgttccttcaccaatgtcgttgagc

SEQ ID NO: 493109 - DNA, 30 bp, Artificial Sequence
  Synthetic oligonucleotide
acagacgtagccaactactttatgttgagc

SEQ ID NO: 493110 - DNA, 30 bp, Artificial Sequence
  Synthetic oligonucleotide
aattaatatgtcacaaccgtcttgttgagc

SEQ ID NO: 493111 - DNA, 30 bp, Artificial Sequence
  Synthetic oligonucleotide
aacatttttctgtgtgaaggaaacaatagc

SEQ ID NO: 493112 - DNA, 30 bp, Artificial Sequence
  Synthetic oligonucleotide
cattcgtgtcttaagtttcaatccaatagc

SEQ ID NO: 493113 - DNA, 30 bp, Artificial Sequence
  Synthetic oligonucleotide
gaagttcccctatcgttgtttcggaatagc

SEQ ID NO: 493114 - DNA, 30 bp, Artificial Sequence
  Synthetic oligonucleotide
ctgatgctcgacgaactattctataatagc

SEQ ID NO: 493115 - DNA, 30 bp, Artificial Sequence
  Synthetic oligonucleotide
cttttaagccgcgacggttgtcgccatagc

SEQ ID NO: 493116 - DNA, 30 bp, Artificial Sequence
  Synthetic oligonucleotide
attttaacgcacacgagtaagatccatagc

SEQ ID NO: 493117 - DNA, 30 bp, Artificial Sequence
  Synthetic oligonucleotide
tttgcaaagcgtgcgcgcagattgcatagc

SEQ ID NO: 493118 - DNA, 30 bp, Artificial Sequence
  Synthetic oligonucleotide
gttctactgtccgagttttggttgcatagc

SEQ ID NO: 493119 - DNA, 30 bp, Artificial Sequence
  Synthetic oligonucleotide
accccgcaactcagtatcatcgaagatagc

SEQ ID NO: 493120 - DNA, 30 bp, Artificial Sequence
  Synthetic oligonucleotide
aaggtttgatagccgcactcctccgatagc

SEQ ID NO: 493121 - DNA, 30 bp, Artificial Sequence
  Synthetic oligonucleotide
gacaacatcgctgcttggagcggcgatagc

SEQ ID NO: 493122 - DNA, 30 bp, Artificial Sequence
  Synthetic oligonucleotide
ggtatcgcatagagactgccgctcgatagc

SEQ ID NO: 493123 - DNA, 30 bp, Artificial Sequence
  Synthetic oligonucleotide
gcccgctatgtagcagaacgtccggatagc

SEQ ID NO: 493124 - DNA, 30 bp, Artificial Sequence
  Synthetic oligonucleotide
ggatatatctttattttagaatatgatagc

SEQ ID NO: 493125 - DNA, 30 bp, Artificial Sequence
  Synthetic oligonucleotide
ctcttcatgcttggcgcgctcaaatatagc

SEQ ID NO: 493126 - DNA, 30 bp, Artificial Sequence
  Synthetic oligonucleotide
cggtatattgtttattgtgaacactatagc

SEQ ID NO: 493127 - DNA, 30 bp, Artificial Sequence
  Synthetic oligonucleotide
gcccaaacagccaagataagagagtatagc

SEQ ID NO: 493128 - DNA, 30 bp, Artificial Sequence
  Synthetic oligonucleotide
attgaattaatccgtgaccgctggtatagc

SEQ ID NO: 493129 - DNA, 30 bp, Artificial Sequence
  Synthetic oligonucleotide
atatttgtattgatcacatgggaaactagc

SEQ ID NO: 493130 - DNA, 30 bp, Artificial Sequence
  Synthetic oligonucleotide
tccgctaccgccctatggcatgaaactagc

SEQ ID NO: 493131 - DNA, 30 bp, Artificial Sequence
  Synthetic oligonucleotide
cttggggggcgacagctactgctaactagc

SEQ ID NO: 493132 - DNA, 30 bp, Artificial Sequence
  Synthetic oligonucleotide
acactataagaacggcgatggtgacctagc

SEQ ID NO: 493133 - DNA, 30 bp, Artificial Sequence
  Synthetic oligonucleotide
gcctgaggactttgtacgtagccgcctagc

SEQ ID NO: 493134 - DNA, 30 bp, Artificial Sequence
  Synthetic oligonucleotide
agccagcgagacttgtgctcaaaagctagc

SEQ ID NO: 493135 - DNA, 30 bp, Artificial Sequence
  Synthetic oligonucleotide
cttcaagcgaaacaagatttagacgctagc

SEQ ID NO: 493136 - DNA, 30 bp, Artificial Sequence
  Synthetic oligonucleotide
aaacctttaccctgcttataggtcgctagc

SEQ ID NO: 493137 - DNA, 30 bp, Artificial Sequence
  Synthetic oligonucleotide
gtccatttgcttcgcatcgcagctgctagc

SEQ ID NO: 493138 - DNA, 30 bp, Artificial Sequence
  Synthetic oligonucleotide
ccagcatatcgcatacgctatagctctagc

SEQ ID NO: 493139 - DNA, 30 bp, Artificial Sequence
  Synthetic oligonucleotide
ccatggttcaactccgcaccactgtctagc

SEQ ID NO: 493140 - DNA, 30 bp, Artificial Sequence
  Synthetic oligonucleotide
gttgtatagcggacatcctagtgttctagc

SEQ ID NO: 493141 - DNA, 30 bp, Artificial Sequence
  Synthetic oligonucleotide
gtcaagaaacgctcttgtccgccaagtagc

SEQ ID NO: 493142 - DNA, 30 bp, Artificial Sequence
  Synthetic oligonucleotide
cattctgacgcgtataatcggagcagtagc

SEQ ID NO: 493143 - DNA, 30 bp, Artificial Sequence
  Synthetic oligonucleotide
gccaggcaggccttttgattttgcagtagc

SEQ ID NO: 493144 - DNA, 30 bp, Artificial Sequence
  Synthetic oligonucleotide
cggccgctccacagggcctatcaacgtagc

SEQ ID NO: 493145 - DNA, 30 bp, Artificial Sequence
  Synthetic oligonucleotide
ggcggtagggttacacttaactcacgtagc

SEQ ID NO: 493146 - DNA, 30 bp, Artificial Sequence
  Synthetic oligonucleotide
tagtatgtagattatccgcgccagcgtagc

SEQ ID NO: 493147 - DNA, 30 bp, Artificial Sequence
  Synthetic oligonucleotide
atcctcgaggcgtaaaacgccatgcgtagc

SEQ ID NO: 493148 - DNA, 30 bp, Artificial Sequence
  Synthetic oligonucleotide
ggattatcacggattcgcccttgaggtagc

SEQ ID NO: 493149 - DNA, 30 bp, Artificial Sequence
  Synthetic oligonucleotide
gtccaagtagtattggactccaacggtagc

SEQ ID NO: 493150 - DNA, 30 bp, Artificial Sequence
  Synthetic oligonucleotide
gaaaaatacataatagaggttggcggtagc

SEQ ID NO: 493151 - DNA, 30 bp, Artificial Sequence
  Synthetic oligonucleotide
ccatttagttacatgaggacactcggtagc

SEQ ID NO: 493152 - DNA, 29 bp, Artificial Sequence
  Synthetic oligonucleotide
ttgtgggccggtagtggggtaggggtagc

SEQ ID NO: 493153 - DNA, 30 bp, Artificial Sequence
  Synthetic oligonucleotide
aggctgcacgatacaccaaacgtgggtagc

SEQ ID NO: 493154 - DNA, 30 bp, Artificial Sequence
  Synthetic oligonucleotide
aggggtgcgcaaggcgaaggaattggtagc

SEQ ID NO: 493155 - DNA, 30 bp, Artificial Sequence
  Synthetic oligonucleotide
gatcagatgctctcgtaacgccttggtagc

SEQ ID NO: 493156 - DNA, 30 bp, Artificial Sequence
  Synthetic oligonucleotide
atatactttacagcgatttaaaaatgtagc

SEQ ID NO: 493157 - DNA, 30 bp, Artificial Sequence
  Synthetic oligonucleotide
gacctgtagccaaaaagtgagacctgtagc

SEQ ID NO: 493158 - DNA, 30 bp, Artificial Sequence
  Synthetic oligonucleotide
aagctgtacattgcgaagggcggctgtagc

SEQ ID NO: 493159 - DNA, 30 bp, Artificial Sequence
  Synthetic oligonucleotide
tcgctccggcaaccgacaagaaattgtagc

SEQ ID NO: 493160 - DNA, 30 bp, Artificial Sequence
  Synthetic oligonucleotide
aatcccagagcgccggtgatctgcattagc

SEQ ID NO: 493161 - DNA, 30 bp, Artificial Sequence
  Synthetic oligonucleotide
tactaggttcgctggatcaccagtattagc

SEQ ID NO: 493162 - DNA, 30 bp, Artificial Sequence
  Synthetic oligonucleotide
aaatagggctgactcggtcccgcacttagc

SEQ ID NO: 493163 - DNA, 30 bp, Artificial Sequence
  Synthetic oligonucleotide
gagtacagaattcgatccggggcacttagc

SEQ ID NO: 493164 - DNA, 30 bp, Artificial Sequence
  Synthetic oligonucleotide
gtttcattatgtcgttcgggtcaccttagc

SEQ ID NO: 493165 - DNA, 30 bp, Artificial Sequence
  Synthetic oligonucleotide
catcgtttgggccatgtaggtttccttagc

SEQ ID NO: 493166 - DNA, 30 bp, Artificial Sequence
  Synthetic oligonucleotide
tgcaggcccactacctgcgctggagttagc

SEQ ID NO: 493167 - DNA, 30 bp, Artificial Sequence
  Synthetic oligonucleotide
ggatgctagcgtgtaaaattacacgttagc

SEQ ID NO: 493168 - DNA, 30 bp, Artificial Sequence
  Synthetic oligonucleotide
agtccttaggtcggggcagagatggttagc

SEQ ID NO: 493169 - DNA, 30 bp, Artificial Sequence
  Synthetic oligonucleotide
ttcgatggagacagcgttactttggttagc

SEQ ID NO: 493170 - DNA, 30 bp, Artificial Sequence
  Synthetic oligonucleotide
aaaatgactatctggtacaagtaatttagc

SEQ ID NO: 493171 - DNA, 30 bp, Artificial Sequence
  Synthetic oligonucleotide
aataggtgcagctagtagcatcgatttagc

SEQ ID NO: 493172 - DNA, 30 bp, Artificial Sequence
  Synthetic oligonucleotide
atgcggcctacaggccccggggactttagc

SEQ ID NO: 493173 - DNA, 30 bp, Artificial Sequence
  Synthetic oligonucleotide
ggcacttgaccgcagcttggtgggtttagc

SEQ ID NO: 493174 - DNA, 30 bp, Artificial Sequence
  Synthetic oligonucleotide
ccggtgccatttagagtacacatgtttagc

SEQ ID NO: 493175 - DNA, 30 bp, Artificial Sequence
  Synthetic oligonucleotide
cccgcacgattccgtgctgaaccttttagc

SEQ ID NO: 493176 - DNA, 30 bp, Artificial Sequence
  Synthetic oligonucleotide
attatatctggcgtttctaagtaaaaacgc

SEQ ID NO: 493177 - DNA, 30 bp, Artificial Sequence
  Synthetic oligonucleotide
gatctgtctcaggactatatgagaaaacgc

SEQ ID NO: 493178 - DNA, 30 bp, Artificial Sequence
  Synthetic oligonucleotide
gggagctacgtcaggagcaacagcaaacgc

SEQ ID NO: 493179 - DNA, 30 bp, Artificial Sequence
  Synthetic oligonucleotide
acaaagtcattttgtcacgggatcaaacgc

SEQ ID NO: 493180 - DNA, 30 bp, Artificial Sequence
  Synthetic oligonucleotide
gtactatgtttttccttgtgtgcgaaacgc

SEQ ID NO: 493181 - DNA, 30 bp, Artificial Sequence
  Synthetic oligonucleotide
gcggtcgcccgtctcggcattcataaacgc

SEQ ID NO: 493182 - DNA, 30 bp, Artificial Sequence
  Synthetic oligonucleotide
tttgattgtgttcggaaattcagacaacgc

SEQ ID NO: 493183 - DNA, 30 bp, Artificial Sequence
  Synthetic oligonucleotide
gcctacgttcgcatttcgtgaacgcaacgc

SEQ ID NO: 493184 - DNA, 30 bp, Artificial Sequence
  Synthetic oligonucleotide
gcatctatactactcggtgttggtcaacgc

SEQ ID NO: 493185 - DNA, 30 bp, Artificial Sequence
  Synthetic oligonucleotide
tctcaggtaaatagatcctcagtagaacgc

SEQ ID NO: 493186 - DNA, 30 bp, Artificial Sequence
  Synthetic oligonucleotide
cgtattgctagacccatggccgtagaacgc

SEQ ID NO: 493187 - DNA, 30 bp, Artificial Sequence
  Synthetic oligonucleotide
agtgccaccgtaacgtattccttagaacgc

SEQ ID NO: 493188 - DNA, 30 bp, Artificial Sequence
  Synthetic oligonucleotide
agcatatggtctcccttgccgtgcgaacgc

SEQ ID NO: 493189 - DNA, 30 bp, Artificial Sequence
  Synthetic oligonucleotide
tgactgaacgccgaatacgcgtgcgaacgc

SEQ ID NO: 493190 - DNA, 30 bp, Artificial Sequence
  Synthetic oligonucleotide
gtgtggtcttgccgccatcagtatgaacgc

SEQ ID NO: 493191 - DNA, 30 bp, Artificial Sequence
  Synthetic oligonucleotide
atacatgccgccacgttagggcttgaacgc

SEQ ID NO: 493192 - DNA, 30 bp, Artificial Sequence
  Synthetic oligonucleotide
aaatggtccttttaggaatgtttaacacgc

SEQ ID NO: 493193 - DNA, 30 bp, Artificial Sequence
  Synthetic oligonucleotide
ttccagcggctggttcgcctcaacacacgc

SEQ ID NO: 493194 - DNA, 30 bp, Artificial Sequence
  Synthetic oligonucleotide
gtggcctcctttagcctggtgtgcacacgc

SEQ ID NO: 493195 - DNA, 30 bp, Artificial Sequence
  Synthetic oligonucleotide
ttatattattacgccatgggtgagacacgc

SEQ ID NO: 493196 - DNA, 30 bp, Artificial Sequence
  Synthetic oligonucleotide
aactcgacacgtttaaagtcggcgacacgc

SEQ ID NO: 493197 - DNA, 30 bp, Artificial Sequence
  Synthetic oligonucleotide
ccaaattatagatcctgggattggacacgc

SEQ ID NO: 493198 - DNA, 30 bp, Artificial Sequence
  Synthetic oligonucleotide
gatgacttatatatgctactctttacacgc

SEQ ID NO: 493199 - DNA, 30 bp, Artificial Sequence
  Synthetic oligonucleotide
gccgccgcccacgattccgcgtttacacgc

SEQ ID NO: 493200 - DNA, 30 bp, Artificial Sequence
  Synthetic oligonucleotide
ctgtcggatgacggcagctggagcccacgc

SEQ ID NO: 493201 - DNA, 30 bp, Artificial Sequence
  Synthetic oligonucleotide
ttcgtgcgccagggaaacgaagcgccacgc

SEQ ID NO: 493202 - DNA, 30 bp, Artificial Sequence
  Synthetic oligonucleotide
agctccagaatgcagcctgattcgccacgc

SEQ ID NO: 493203 - DNA, 30 bp, Artificial Sequence
  Synthetic oligonucleotide
aacgccgcctcgcctcaccacgtgccacgc

SEQ ID NO: 493204 - DNA, 30 bp, Artificial Sequence
  Synthetic oligonucleotide
cgtaatgttttttatctcaatgctccacgc

SEQ ID NO: 493205 - DNA, 30 bp, Artificial Sequence
  Synthetic oligonucleotide
ggggcccagcgtcaaacgtccagtccacgc

SEQ ID NO: 493206 - DNA, 30 bp, Artificial Sequence
  Synthetic oligonucleotide
acgtcattacagctcctcgttgaagcacgc

SEQ ID NO: 493207 - DNA, 30 bp, Artificial Sequence
  Synthetic oligonucleotide
aaacgactgtaatcgtagggggacgcacgc

SEQ ID NO: 493208 - DNA, 30 bp, Artificial Sequence
  Synthetic oligonucleotide
atgtaaaaagttgtgccgcggtgcgcacgc

SEQ ID NO: 493209 - DNA, 30 bp, Artificial Sequence
  Synthetic oligonucleotide
tttcccccgggtccacaccgcagggcacgc

SEQ ID NO: 493210 - DNA, 30 bp, Artificial Sequence
  Synthetic oligonucleotide
aattatttagacacgctgagtggtgcacgc

SEQ ID NO: 493211 - DNA, 30 bp, Artificial Sequence
  Synthetic oligonucleotide
tcccatacgggcagtaggaatattgcacgc

SEQ ID NO: 493212 - DNA, 30 bp, Artificial Sequence
  Synthetic oligonucleotide
ttgaccaagtcaatagataggtcctcacgc

SEQ ID NO: 493213 - DNA, 30 bp, Artificial Sequence
  Synthetic oligonucleotide
accagacagtccgttttacatggctcacgc

SEQ ID NO: 493214 - DNA, 30 bp, Artificial Sequence
  Synthetic oligonucleotide
ggtttcgccccccaaactgttaagtcacgc

SEQ ID NO: 493215 - DNA, 30 bp, Artificial Sequence
  Synthetic oligonucleotide
gtttgaacagcgattgtcgctacaagacgc

SEQ ID NO: 493216 - DNA, 30 bp, Artificial Sequence
  Synthetic oligonucleotide
taccatgaagatgggagattttcaagacgc

SEQ ID NO: 493217 - DNA, 30 bp, Artificial Sequence
  Synthetic oligonucleotide
tgcgtcactcagtaattcagtgtaagacgc

SEQ ID NO: 493218 - DNA, 30 bp, Artificial Sequence
  Synthetic oligonucleotide
tttgcaatcctgtagatggcaagcagacgc

SEQ ID NO: 493219 - DNA, 30 bp, Artificial Sequence
  Synthetic oligonucleotide
tgttaagacggagtcagaatgtgcagacgc

SEQ ID NO: 493220 - DNA, 30 bp, Artificial Sequence
  Synthetic oligonucleotide
caataggccgtggcggtttaacggagacgc

SEQ ID NO: 493221 - DNA, 30 bp, Artificial Sequence
  Synthetic oligonucleotide
tcactagagccgaaggttattgggagacgc

SEQ ID NO: 493222 - DNA, 30 bp, Artificial Sequence
  Synthetic oligonucleotide
gcatgagcgaaattcaggccatggagacgc

SEQ ID NO: 493223 - DNA, 30 bp, Artificial Sequence
  Synthetic oligonucleotide
atgcgggcattactggctagctggagacgc

SEQ ID NO: 493224 - DNA, 30 bp, Artificial Sequence
  Synthetic oligonucleotide
acgtaatagcaggttgcaaatctgagacgc

SEQ ID NO: 493225 - DNA, 30 bp, Artificial Sequence
  Synthetic oligonucleotide
gatcggtacgtgggtgctcaagtgagacgc

SEQ ID NO: 493226 - DNA, 30 bp, Artificial Sequence
  Synthetic oligonucleotide
atcgatttgggagagtggaacgtgagacgc

SEQ ID NO: 493227 - DNA, 30 bp, Artificial Sequence
  Synthetic oligonucleotide
tcactccaagacaaggtctttgctagacgc

SEQ ID NO: 493228 - DNA, 30 bp, Artificial Sequence
  Synthetic oligonucleotide
tcctactcccgggccagcacatctagacgc

SEQ ID NO: 493229 - DNA, 30 bp, Artificial Sequence
  Synthetic oligonucleotide
gagttacaagtacagggcatcagtagacgc

SEQ ID NO: 493230 - DNA, 30 bp, Artificial Sequence
  Synthetic oligonucleotide
tgtttcgttaaggatggagcatttagacgc

SEQ ID NO: 493231 - DNA, 30 bp, Artificial Sequence
  Synthetic oligonucleotide
tagcaagtctttactctacccctacgacgc

SEQ ID NO: 493232 - DNA, 30 bp, Artificial Sequence
  Synthetic oligonucleotide
gtcgggggagttaactggaaaagccgacgc

SEQ ID NO: 493233 - DNA, 30 bp, Artificial Sequence
  Synthetic oligonucleotide
tacgccgtcgttagtttcagaagccgacgc

SEQ ID NO: 493234 - DNA, 30 bp, Artificial Sequence
  Synthetic oligonucleotide
ctccgggctgatgagttagtccagcgacgc

SEQ ID NO: 493235 - DNA, 30 bp, Artificial Sequence
  Synthetic oligonucleotide
gcattacgcggcaaaacgtggtagcgacgc

SEQ ID NO: 493236 - DNA, 30 bp, Artificial Sequence
  Synthetic oligonucleotide
gacggtggtaaactgtctatgtagcgacgc

SEQ ID NO: 493237 - DNA, 30 bp, Artificial Sequence
  Synthetic oligonucleotide
atacatcgggtcaatctctcatggcgacgc

SEQ ID NO: 493238 - DNA, 30 bp, Artificial Sequence
  Synthetic oligonucleotide
gggtttctcaccctactgataatgcgacgc

SEQ ID NO: 493239 - DNA, 30 bp, Artificial Sequence
  Synthetic oligonucleotide
ccgagataacttacagcgttggttcgacgc

SEQ ID NO: 493240 - DNA, 30 bp, Artificial Sequence
  Synthetic oligonucleotide
ccaaggtattgccagatatttgcaggacgc

SEQ ID NO: 493241 - DNA, 30 bp, Artificial Sequence
  Synthetic oligonucleotide
cgtaatggtcttgggtaggtaggaggacgc

SEQ ID NO: 493242 - DNA, 30 bp, Artificial Sequence
  Synthetic oligonucleotide
tgtcgccggccaccaattgaccacggacgc

SEQ ID NO: 493243 - DNA, 30 bp, Artificial Sequence
  Synthetic oligonucleotide
gtctcctgtcacctggcgttgtacggacgc

SEQ ID NO: 493244 - DNA, 30 bp, Artificial Sequence
  Synthetic oligonucleotide
agtgtggagatttttgaccgaagcggacgc

SEQ ID NO: 493245 - DNA, 30 bp, Artificial Sequence
  Synthetic oligonucleotide
gcattctacacaagggcagactgcggacgc

SEQ ID NO: 493246 - DNA, 30 bp, Artificial Sequence
  Synthetic oligonucleotide
tatggttaggcagtggtaagcatcggacgc

SEQ ID NO: 493247 - DNA, 30 bp, Artificial Sequence
  Synthetic oligonucleotide
ccaaaccacggttcgccacgaaagggacgc

SEQ ID NO: 493248 - DNA, 30 bp, Artificial Sequence
  Synthetic oligonucleotide
aatagttcagcctaccgcaagacgggacgc

SEQ ID NO: 493249 - DNA, 30 bp, Artificial Sequence
  Synthetic oligonucleotide
gcatgctaccggtccaggaagtggggacgc

SEQ ID NO: 493250 - DNA, 30 bp, Artificial Sequence
  Synthetic oligonucleotide
acagggagaagattcttccagtggggacgc

SEQ ID NO: 493251 - DNA, 30 bp, Artificial Sequence
  Synthetic oligonucleotide
ctctgcgtcttgtaatcaggtctgggacgc

SEQ ID NO: 493252 - DNA, 30 bp, Artificial Sequence
  Synthetic oligonucleotide
cgacaacgtgttctgcgcgtattgggacgc

SEQ ID NO: 493253 - DNA, 30 bp, Artificial Sequence
  Synthetic oligonucleotide
gttgaaatcccttcttccctgtatggacgc

SEQ ID NO: 493254 - DNA, 30 bp, Artificial Sequence
  Synthetic oligonucleotide
gatcagtacgattgtttgtgcggtggacgc

SEQ ID NO: 493255 - DNA, 30 bp, Artificial Sequence
  Synthetic oligonucleotide
accaggaatcaatggggacttaaatgacgc

SEQ ID NO: 493256 - DNA, 30 bp, Artificial Sequence
  Synthetic oligonucleotide
gtggagtactaggtaagcaggcaatgacgc

SEQ ID NO: 493257 - DNA, 30 bp, Artificial Sequence
  Synthetic oligonucleotide
acggtgaggcccacgtgcctagaatgacgc

SEQ ID NO: 493258 - DNA, 31 bp, Artificial Sequence
  Synthetic oligonucleotide
cctcggcagaccggccctttgtacatgacgc

SEQ ID NO: 493259 - DNA, 30 bp, Artificial Sequence
  Synthetic oligonucleotide
cagaggcgatgttagtagcaatcatgacgc

SEQ ID NO: 493260 - DNA, 30 bp, Artificial Sequence
  Synthetic oligonucleotide
acaagggatacccggatgagcggatgacgc

SEQ ID NO: 493261 - DNA, 30 bp, Artificial Sequence
  Synthetic oligonucleotide
ctggaccctgataaatggaagctatgacgc

SEQ ID NO: 493262 - DNA, 30 bp, Artificial Sequence
  Synthetic oligonucleotide
gcaaattcaacgtttaaaggaagctgacgc

SEQ ID NO: 493263 - DNA, 30 bp, Artificial Sequence
  Synthetic oligonucleotide
gccagtcgttcgttttcgctaacttgacgc

SEQ ID NO: 493264 - DNA, 30 bp, Artificial Sequence
  Synthetic oligonucleotide
tcatctcgataagtctctgacacttgacgc

SEQ ID NO: 493265 - DNA, 30 bp, Artificial Sequence
  Synthetic oligonucleotide
agtctcagaaatgttctcaagtcttgacgc

SEQ ID NO: 493266 - DNA, 30 bp, Artificial Sequence
  Synthetic oligonucleotide
ctagggacgagaggcgggggccgttgacgc

SEQ ID NO: 493267 - DNA, 30 bp, Artificial Sequence
  Synthetic oligonucleotide
tgaatcgcagtgtagtcagtccgaatacgc

SEQ ID NO: 493268 - DNA, 30 bp, Artificial Sequence
  Synthetic oligonucleotide
aactaatcacagttgtgtccctacatacgc

SEQ ID NO: 493269 - DNA, 30 bp, Artificial Sequence
  Synthetic oligonucleotide
gattctcatgctagcggctagcggatacgc

SEQ ID NO: 493270 - DNA, 30 bp, Artificial Sequence
  Synthetic oligonucleotide
ctgattttgtgttgtaggagatggatacgc

SEQ ID NO: 493271 - DNA, 30 bp, Artificial Sequence
  Synthetic oligonucleotide
atcacctggttggatggttacgatatacgc

SEQ ID NO: 493272 - DNA, 30 bp, Artificial Sequence
  Synthetic oligonucleotide
aaggctcgttagccacagggaacactacgc

SEQ ID NO: 493273 - DNA, 30 bp, Artificial Sequence
  Synthetic oligonucleotide
tttagcggctgtacattccagacgctacgc

SEQ ID NO: 493274 - DNA, 30 bp, Artificial Sequence
  Synthetic oligonucleotide
gaaagggtttgtaaggaaattctgctacgc

SEQ ID NO: 493275 - DNA, 30 bp, Artificial Sequence
  Synthetic oligonucleotide
aatatattaggtgttattagttctctacgc

SEQ ID NO: 493276 - DNA, 30 bp, Artificial Sequence
  Synthetic oligonucleotide
caaacgtcatagtcaactcctcgcgtacgc

SEQ ID NO: 493277 - DNA, 30 bp, Artificial Sequence
  Synthetic oligonucleotide
tgaaatatttggaactttacgttcgtacgc

SEQ ID NO: 493278 - DNA, 30 bp, Artificial Sequence
  Synthetic oligonucleotide
gccggacatctggctccacgctcggtacgc

SEQ ID NO: 493279 - DNA, 30 bp, Artificial Sequence
  Synthetic oligonucleotide
tggctagatgtctggattgggcatgtacgc

SEQ ID NO: 493280 - DNA, 30 bp, Artificial Sequence
  Synthetic oligonucleotide
taaccggatacataaacggtcgatgtacgc

SEQ ID NO: 493281 - DNA, 30 bp, Artificial Sequence
  Synthetic oligonucleotide
gcggcgtgttcgtcggcggtatttgtacgc

SEQ ID NO: 493282 - DNA, 30 bp, Artificial Sequence
  Synthetic oligonucleotide
ttgtacatttgagacgtggtgtttgtacgc

SEQ ID NO: 493283 - DNA, 30 bp, Artificial Sequence
  Synthetic oligonucleotide
gttacttgtatttgtcagatcaaattacgc

SEQ ID NO: 493284 - DNA, 30 bp, Artificial Sequence
  Synthetic oligonucleotide
atcgagacgcagacatttttccaattacgc

SEQ ID NO: 493285 - DNA, 30 bp, Artificial Sequence
  Synthetic oligonucleotide
tgcaacatccgtggccgttgcacattacgc

SEQ ID NO: 493286 - DNA, 30 bp, Artificial Sequence
  Synthetic oligonucleotide
gagtgtgattcaaatcatggctgattacgc

SEQ ID NO: 493287 - DNA, 30 bp, Artificial Sequence
  Synthetic oligonucleotide
gcagttatgaggtatttccagcacttacgc

SEQ ID NO: 493288 - DNA, 30 bp, Artificial Sequence
  Synthetic oligonucleotide
aatcaagtgtcgagtacgcagtgcttacgc

SEQ ID NO: 493289 - DNA, 30 bp, Artificial Sequence
  Synthetic oligonucleotide
catggggcctgtgcctttgcagcgttacgc

SEQ ID NO: 493290 - DNA, 30 bp, Artificial Sequence
  Synthetic oligonucleotide
gtcacggggatccgcagacagaggttacgc

SEQ ID NO: 493291 - DNA, 30 bp, Artificial Sequence
  Synthetic oligonucleotide
tctctggcatattcttcataaggtttacgc

SEQ ID NO: 493292 - DNA, 30 bp, Artificial Sequence
  Synthetic oligonucleotide
atatatcaagtaagtctagatgttttacgc

SEQ ID NO: 493293 - DNA, 30 bp, Artificial Sequence
  Synthetic oligonucleotide
ggtgagacctgccgtggtagatttttacgc

SEQ ID NO: 493294 - DNA, 30 bp, Artificial Sequence
  Synthetic oligonucleotide
actgaaagactacgcccgggaacaaaccgc

SEQ ID NO: 493295 - DNA, 30 bp, Artificial Sequence
  Synthetic oligonucleotide
tatctggccctattgcgcactgtaaaccgc

SEQ ID NO: 493296 - DNA, 30 bp, Artificial Sequence
  Synthetic oligonucleotide
ttccagaccattgggcgaaatgacaaccgc

SEQ ID NO: 493297 - DNA, 30 bp, Artificial Sequence
  Synthetic oligonucleotide
ctgaacggggggggtagcttaaccaaccgc

SEQ ID NO: 493298 - DNA, 30 bp, Artificial Sequence
  Synthetic oligonucleotide
gcatctttatatctttttacatgtaaccgc

SEQ ID NO: 493299 - DNA, 30 bp, Artificial Sequence
  Synthetic oligonucleotide
ggatcggacagatggagttaaagacaccgc

SEQ ID NO: 493300 - DNA, 30 bp, Artificial Sequence
  Synthetic oligonucleotide
ctgggttcccttgttaaaagtagacaccgc

SEQ ID NO: 493301 - DNA, 30 bp, Artificial Sequence
  Synthetic oligonucleotide
ccggggcggaaatacgtagtaatgcaccgc

SEQ ID NO: 493302 - DNA, 30 bp, Artificial Sequence
  Synthetic oligonucleotide
gaatcagacctcggtaaattttgtcaccgc

SEQ ID NO: 493303 - DNA, 30 bp, Artificial Sequence
  Synthetic oligonucleotide
ggccacttaagcctgtcgtggtgcgaccgc

SEQ ID NO: 493304 - DNA, 30 bp, Artificial Sequence
  Synthetic oligonucleotide
ccctccggtatcattcaagtggtcgaccgc

SEQ ID NO: 493305 - DNA, 30 bp, Artificial Sequence
  Synthetic oligonucleotide
agcagcaataatctacacctttatgaccgc

SEQ ID NO: 493306 - DNA, 30 bp, Artificial Sequence
  Synthetic oligonucleotide
gtgtatgccctccatggcatatgtgaccgc

SEQ ID NO: 493307 - DNA, 30 bp, Artificial Sequence
  Synthetic oligonucleotide
gaaatcaagatggagggaacgttctaccgc

SEQ ID NO: 493308 - DNA, 30 bp, Artificial Sequence
  Synthetic oligonucleotide
ggaaactggagagcagctttggtttaccgc

SEQ ID NO: 493309 - DNA, 30 bp, Artificial Sequence
  Synthetic oligonucleotide
agtgccccctctaagggcggtacaacccgc

SEQ ID NO: 493310 - DNA, 30 bp, Artificial Sequence
  Synthetic oligonucleotide
gtcctagttaccgaggacataagaacccgc

SEQ ID NO: 493311 - DNA, 30 bp, Artificial Sequence
  Synthetic oligonucleotide
gttgtagaagatcctcctcggaagacccgc

SEQ ID NO: 493312 - DNA, 30 bp, Artificial Sequence
  Synthetic oligonucleotide
aatccggttgcgtcgtgggtttaaccccgc

SEQ ID NO: 493313 - DNA, 30 bp, Artificial Sequence
  Synthetic oligonucleotide
atttactgagtatctggttgtcgaccccgc

SEQ ID NO: 493314 - DNA, 30 bp, Artificial Sequence
  Synthetic oligonucleotide
aacccggatccgacaggtttacgcccccgc

SEQ ID NO: 493315 - DNA, 30 bp, Artificial Sequence
  Synthetic oligonucleotide
tttaggaccagctagaggaagatcccccgc

SEQ ID NO: 493316 - DNA, 30 bp, Artificial Sequence
  Synthetic oligonucleotide
gcagcgtttttcgtgtgagcccatccccgc

SEQ ID NO: 493317 - DNA, 30 bp, Artificial Sequence
  Synthetic oligonucleotide
ttcactcaacttagggtcatctcggcccgc

SEQ ID NO: 493318 - DNA, 30 bp, Artificial Sequence
  Synthetic oligonucleotide
aaaacactctgagccgcggtcaatgcccgc

SEQ ID NO: 493319 - DNA, 30 bp, Artificial Sequence
  Synthetic oligonucleotide
tggacgatttgtagagatttacgcagccgc

SEQ ID NO: 493320 - DNA, 30 bp, Artificial Sequence
  Synthetic oligonucleotide
aacaaggatgatgcgtctttctgcagccgc

SEQ ID NO: 493321 - DNA, 30 bp, Artificial Sequence
  Synthetic oligonucleotide
aataacacactgccacggtcttatagccgc

SEQ ID NO: 493322 - DNA, 30 bp, Artificial Sequence
  Synthetic oligonucleotide
ttcactatagaaccagcgggttgacgccgc

SEQ ID NO: 493323 - DNA, 30 bp, Artificial Sequence
  Synthetic oligonucleotide
ctgcaagggccggggagtccattacgccgc

SEQ ID NO: 493324 - DNA, 30 bp, Artificial Sequence
  Synthetic oligonucleotide
gcttggccatacacaagatatgagcgccgc

SEQ ID NO: 493325 - DNA, 30 bp, Artificial Sequence
  Synthetic oligonucleotide
gcagaatagccgtggattttggtgcgccgc

SEQ ID NO: 493326 - DNA, 30 bp, Artificial Sequence
  Synthetic oligonucleotide
tgcatggcgagttgtggatatgacggccgc

SEQ ID NO: 493327 - DNA, 29 bp, Artificial Sequence
  Synthetic oligonucleotide
caacggagcacggcacaaccggcggccgc

SEQ ID NO: 493328 - DNA, 30 bp, Artificial Sequence
  Synthetic oligonucleotide
gtccactgttgcagcgttgacaggggccgc

SEQ ID NO: 493329 - DNA, 30 bp, Artificial Sequence
  Synthetic oligonucleotide
tagcaaaacccattgaaggttttgggccgc

SEQ ID NO: 493330 - DNA, 30 bp, Artificial Sequence
  Synthetic oligonucleotide
taggagcacgcgggccaaggtattggccgc

SEQ ID NO: 493331 - DNA, 30 bp, Artificial Sequence
  Synthetic oligonucleotide
gtagcggctaattactttgcctcctgccgc

SEQ ID NO: 493332 - DNA, 30 bp, Artificial Sequence
  Synthetic oligonucleotide
agtggggagtacaatgttgtctagtgccgc

SEQ ID NO: 493333 - DNA, 30 bp, Artificial Sequence
  Synthetic oligonucleotide
aaatcttgtaatgaagcttgccattgccgc

SEQ ID NO: 493334 - DNA, 29 bp, Artificial Sequence
  Synthetic oligonucleotide
ttggacggaaaattgcctgttattgccgc

SEQ ID NO: 493335 - DNA, 30 bp, Artificial Sequence
  Synthetic oligonucleotide
ttgaaatggtgagcagttctatcaatccgc

SEQ ID NO: 493336 - DNA, 30 bp, Artificial Sequence
  Synthetic oligonucleotide
accctcagttttcgcttaccgaagatccgc

SEQ ID NO: 493337 - DNA, 30 bp, Artificial Sequence
  Synthetic oligonucleotide
ttacaagtcgtccggcaccagtggatccgc

SEQ ID NO: 493338 - DNA, 30 bp, Artificial Sequence
  Synthetic oligonucleotide
tttgtaaactgggggctccaggcactccgc

SEQ ID NO: 493339 - DNA, 30 bp, Artificial Sequence
  Synthetic oligonucleotide
gcagctgcatcggaaaaggacgccctccgc

SEQ ID NO: 493340 - DNA, 30 bp, Artificial Sequence
  Synthetic oligonucleotide
cgggaaatgagctccttcttagagctccgc

SEQ ID NO: 493341 - DNA, 30 bp, Artificial Sequence
  Synthetic oligonucleotide
ccaatcagttccgggcaatgagggctccgc

SEQ ID NO: 493342 - DNA, 30 bp, Artificial Sequence
  Synthetic oligonucleotide
aatcctgttgtaagaattacagccgtccgc

SEQ ID NO: 493343 - DNA, 30 bp, Artificial Sequence
  Synthetic oligonucleotide
ttcagctaagttagcacatttaaggtccgc

SEQ ID NO: 493344 - DNA, 30 bp, Artificial Sequence
  Synthetic oligonucleotide
ggccgcaagggcctcaaaccctgggtccgc

SEQ ID NO: 493345 - DNA, 30 bp, Artificial Sequence
  Synthetic oligonucleotide
cccctgtcagtaacgcgtcacagtgtccgc

SEQ ID NO: 493346 - DNA, 30 bp, Artificial Sequence
  Synthetic oligonucleotide
gcctacgttagttgtggggttcaattccgc

SEQ ID NO: 493347 - DNA, 30 bp, Artificial Sequence
  Synthetic oligonucleotide
aagacagggactatggctcgatttttccgc

SEQ ID NO: 493348 - DNA, 30 bp, Artificial Sequence
  Synthetic oligonucleotide
gataattttgcgacatgtttgccaaagcgc

SEQ ID NO: 493349 - DNA, 30 bp, Artificial Sequence
  Synthetic oligonucleotide
tgagaccttcgacgcccccgtgcaaagcgc

SEQ ID NO: 493350 - DNA, 30 bp, Artificial Sequence
  Synthetic oligonucleotide
tgagatactgcgctagattgacacaagcgc

SEQ ID NO: 493351 - DNA, 30 bp, Artificial Sequence
  Synthetic oligonucleotide
cccgagttatatgcccgcacaactaagcgc

SEQ ID NO: 493352 - DNA, 30 bp, Artificial Sequence
  Synthetic oligonucleotide
agagcgctgtgtggatacacgcgtaagcgc

SEQ ID NO: 493353 - DNA, 30 bp, Artificial Sequence
  Synthetic oligonucleotide
cccctcgtgtcgacgccatatcaccagcgc

SEQ ID NO: 493354 - DNA, 30 bp, Artificial Sequence
  Synthetic oligonucleotide
gcccgggtttttattgtgaacgaccagcgc

SEQ ID NO: 493355 - DNA, 30 bp, Artificial Sequence
  Synthetic oligonucleotide
gtcctggagtgtaggccaagcacccagcgc

SEQ ID NO: 493356 - DNA, 30 bp, Artificial Sequence
  Synthetic oligonucleotide
gctgggtcccccagccggggagcccagcgc

SEQ ID NO: 493357 - DNA, 30 bp, Artificial Sequence
  Synthetic oligonucleotide
tgtccctgatgtggaatggagcagcagcgc

SEQ ID NO: 493358 - DNA, 30 bp, Artificial Sequence
  Synthetic oligonucleotide
atcttcagccaagctcgctacacgcagcgc

SEQ ID NO: 493359 - DNA, 30 bp, Artificial Sequence
  Synthetic oligonucleotide
tcgcacggttggctcaatgtttacgagcgc

SEQ ID NO: 493360 - DNA, 30 bp, Artificial Sequence
  Synthetic oligonucleotide
acggttttgcgttcgtagtgggccgagcgc

SEQ ID NO: 493361 - DNA, 30 bp, Artificial Sequence
  Synthetic oligonucleotide
ttaggcctcggtggggttgcgtccgagcgc

SEQ ID NO: 493362 - DNA, 30 bp, Artificial Sequence
  Synthetic oligonucleotide
aaagatctggggagcgtgcaataggagcgc

SEQ ID NO: 493363 - DNA, 30 bp, Artificial Sequence
  Synthetic oligonucleotide
ctgttggcacatcgcggtatatatgagcgc

SEQ ID NO: 493364 - DNA, 29 bp, Artificial Sequence
  Synthetic oligonucleotide
acccgtcctcatggacaacgaattagcgc

SEQ ID NO: 493365 - DNA, 30 bp, Artificial Sequence
  Synthetic oligonucleotide
tcaattcatcaggaggccctaggttagcgc

SEQ ID NO: 493366 - DNA, 30 bp, Artificial Sequence
  Synthetic oligonucleotide
ttactgagcggtcacctgcaggtcacgcgc

SEQ ID NO: 493367 - DNA, 30 bp, Artificial Sequence
  Synthetic oligonucleotide
ggccttagagactcgggtgaaaagacgcgc

SEQ ID NO: 493368 - DNA, 30 bp, Artificial Sequence
  Synthetic oligonucleotide
gggagacttgtacccgtaagtaggacgcgc

SEQ ID NO: 493369 - DNA, 30 bp, Artificial Sequence
  Synthetic oligonucleotide
aatcgttgaggtcgcgccgcggggacgcgc

SEQ ID NO: 493370 - DNA, 30 bp, Artificial Sequence
  Synthetic oligonucleotide
atggctcctgcaatctattaatctacgcgc

SEQ ID NO: 493371 - DNA, 30 bp, Artificial Sequence
  Synthetic oligonucleotide
gaatataattgtcacgcagtatacccgcgc

SEQ ID NO: 493372 - DNA, 30 bp, Artificial Sequence
  Synthetic oligonucleotide
taacgtcgtttagtttttaaaagcccgcgc

SEQ ID NO: 493373 - DNA, 30 bp, Artificial Sequence
  Synthetic oligonucleotide
agcaaccattgctaactgagcgggccgcgc

SEQ ID NO: 493374 - DNA, 30 bp, Artificial Sequence
  Synthetic oligonucleotide
gcgggggtgtgagtgtacgtaaaagcgcgc

SEQ ID NO: 493375 - DNA, 30 bp, Artificial Sequence
  Synthetic oligonucleotide
tacgcagccaactcgacggaaacagcgcgc

SEQ ID NO: 493376 - DNA, 30 bp, Artificial Sequence
  Synthetic oligonucleotide
tacacgaattcgaatatgacaatcgcgcgc

SEQ ID NO: 493377 - DNA, 30 bp, Artificial Sequence
  Synthetic oligonucleotide
tttgagccgcagtagaagttaacggcgcgc

SEQ ID NO: 493378 - DNA, 30 bp, Artificial Sequence
  Synthetic oligonucleotide
ctaagcactatccgcctttatttggcgcgc

SEQ ID NO: 493379 - DNA, 30 bp, Artificial Sequence
  Synthetic oligonucleotide
ttgagtggggtctgcaaattacatgcgcgc

SEQ ID NO: 493380 - DNA, 30 bp, Artificial Sequence
  Synthetic oligonucleotide
gaaaatttgtctcgttggcagcattcgcgc

SEQ ID NO: 493381 - DNA, 30 bp, Artificial Sequence
  Synthetic oligonucleotide
gataaataaatgacatagacagtaaggcgc

SEQ ID NO: 493382 - DNA, 30 bp, Artificial Sequence
  Synthetic oligonucleotide
aaatccaactgattattgtaggtaaggcgc

SEQ ID NO: 493383 - DNA, 30 bp, Artificial Sequence
  Synthetic oligonucleotide
tgcgatgagtacttcagttagagcaggcgc

SEQ ID NO: 493384 - DNA, 30 bp, Artificial Sequence
  Synthetic oligonucleotide
gcagccatatttctcgcttaaattaggcgc

SEQ ID NO: 493385 - DNA, 30 bp, Artificial Sequence
  Synthetic oligonucleotide
gacagtttcccccatcattttatacggcgc

SEQ ID NO: 493386 - DNA, 30 bp, Artificial Sequence
  Synthetic oligonucleotide
tcatcgccacagcggtgagctgcgcggcgc

SEQ ID NO: 493387 - DNA, 30 bp, Artificial Sequence
  Synthetic oligonucleotide
tgctgaagttacctttctaggttgcggcgc

SEQ ID NO: 493388 - DNA, 30 bp, Artificial Sequence
  Synthetic oligonucleotide
ctcacggtcagtaagctgtggtctcggcgc

SEQ ID NO: 493389 - DNA, 30 bp, Artificial Sequence
  Synthetic oligonucleotide
gcaccgtcttaattccgatctcgtcggcgc

SEQ ID NO: 493390 - DNA, 30 bp, Artificial Sequence
  Synthetic oligonucleotide
aagaacagtcgcctctttaagcaagggcgc

SEQ ID NO: 493391 - DNA, 30 bp, Artificial Sequence
  Synthetic oligonucleotide
acgcagcggaacaagttaatccgcgggcgc

SEQ ID NO: 493392 - DNA, 30 bp, Artificial Sequence
  Synthetic oligonucleotide
attaataaacggggcctgcttctcgggcgc

SEQ ID NO: 493393 - DNA, 30 bp, Artificial Sequence
  Synthetic oligonucleotide
gcagtttacagatggttggctgctgggcgc

SEQ ID NO: 493394 - DNA, 30 bp, Artificial Sequence
  Synthetic oligonucleotide
gaggtatagcatgtggtttttgtatggcgc

SEQ ID NO: 493395 - DNA, 30 bp, Artificial Sequence
  Synthetic oligonucleotide
gtattctcaaagctaaagcagtactggcgc

SEQ ID NO: 493396 - DNA, 30 bp, Artificial Sequence
  Synthetic oligonucleotide
cgtaaggcgcaggcccttgttcgctggcgc

SEQ ID NO: 493397 - DNA, 30 bp, Artificial Sequence
  Synthetic oligonucleotide
gggctgttaaatcccctttaccggtggcgc

SEQ ID NO: 493398 - DNA, 30 bp, Artificial Sequence
  Synthetic oligonucleotide
caaacagtatttaccggtcgcctgtggcgc

SEQ ID NO: 493399 - DNA, 30 bp, Artificial Sequence
  Synthetic oligonucleotide
cagaacaccttagttctagaggaaatgcgc

SEQ ID NO: 493400 - DNA, 30 bp, Artificial Sequence
  Synthetic oligonucleotide
tgcaacgccttaacatcaggttaaatgcgc

SEQ ID NO: 493401 - DNA, 30 bp, Artificial Sequence
  Synthetic oligonucleotide
acagccgccacgtaaatgacgcgaatgcgc

SEQ ID NO: 493402 - DNA, 30 bp, Artificial Sequence
  Synthetic oligonucleotide
ccagcgcagaccaggtaagagggaatgcgc

SEQ ID NO: 493403 - DNA, 30 bp, Artificial Sequence
  Synthetic oligonucleotide
acaactatcgggatcaacatataactgcgc

SEQ ID NO: 493404 - DNA, 30 bp, Artificial Sequence
  Synthetic oligonucleotide
gccctcgcgtttcatcatagtgccctgcgc

SEQ ID NO: 493405 - DNA, 30 bp, Artificial Sequence
  Synthetic oligonucleotide
cacatggtgtcaacgtgagtagagctgcgc

SEQ ID NO: 493406 - DNA, 30 bp, Artificial Sequence
  Synthetic oligonucleotide
tatttcgattttcctgctattgcgctgcgc

SEQ ID NO: 493407 - DNA, 30 bp, Artificial Sequence
  Synthetic oligonucleotide
gtccatgtatgactggtacacgtgctgcgc

SEQ ID NO: 493408 - DNA, 30 bp, Artificial Sequence
  Synthetic oligonucleotide
atagggaagccggattacaacacagtgcgc

SEQ ID NO: 493409 - DNA, 30 bp, Artificial Sequence
  Synthetic oligonucleotide
gatctctacactcgactggctaccgtgcgc

SEQ ID NO: 493410 - DNA, 30 bp, Artificial Sequence
  Synthetic oligonucleotide
tagtattaatagttgatgtaggccgtgcgc

SEQ ID NO: 493411 - DNA, 30 bp, Artificial Sequence
  Synthetic oligonucleotide
tggataatgtccccatggttaaccttgcgc

SEQ ID NO: 493412 - DNA, 30 bp, Artificial Sequence
  Synthetic oligonucleotide
aatacgctcgctgtgggtgacttcttgcgc

SEQ ID NO: 493413 - DNA, 30 bp, Artificial Sequence
  Synthetic oligonucleotide
attaaatgccctttttcttgtgagttgcgc

SEQ ID NO: 493414 - DNA, 30 bp, Artificial Sequence
  Synthetic oligonucleotide
cgcagcggagcagggccttggattttgcgc

SEQ ID NO: 493415 - DNA, 30 bp, Artificial Sequence
  Synthetic oligonucleotide
gcagacgatatgtcccaacctgccaatcgc

SEQ ID NO: 493416 - DNA, 30 bp, Artificial Sequence
  Synthetic oligonucleotide
gaagctcgaaactctttagatccacatcgc

SEQ ID NO: 493417 - DNA, 30 bp, Artificial Sequence
  Synthetic oligonucleotide
gctctgttgccctggtatcatgcacatcgc

SEQ ID NO: 493418 - DNA, 30 bp, Artificial Sequence
  Synthetic oligonucleotide
cttatgtgattatataatagaagacatcgc

SEQ ID NO: 493419 - DNA, 30 bp, Artificial Sequence
  Synthetic oligonucleotide
aaattccttgtatttagtcgcaaccatcgc

SEQ ID NO: 493420 - DNA, 30 bp, Artificial Sequence
  Synthetic oligonucleotide
actttcgtagttagttttctgaggcatcgc

SEQ ID NO: 493421 - DNA, 30 bp, Artificial Sequence
  Synthetic oligonucleotide
atgtcaccaaaggattacgttgtgcatcgc

SEQ ID NO: 493422 - DNA, 30 bp, Artificial Sequence
  Synthetic oligonucleotide
agctcttttagaaagaagacacctcatcgc

SEQ ID NO: 493423 - DNA, 30 bp, Artificial Sequence
  Synthetic oligonucleotide
gtccagccagcaactttaccgttagatcgc

SEQ ID NO: 493424 - DNA, 30 bp, Artificial Sequence
  Synthetic oligonucleotide
ttatggaccgttaaagccgtacccgatcgc

SEQ ID NO: 493425 - DNA, 30 bp, Artificial Sequence
  Synthetic oligonucleotide
ttatcctattccgcgaatgagatggatcgc

SEQ ID NO: 493426 - DNA, 30 bp, Artificial Sequence
  Synthetic oligonucleotide
tattatggcgttacccaagcgcatgatcgc

SEQ ID NO: 493427 - DNA, 30 bp, Artificial Sequence
  Synthetic oligonucleotide
cactattgtaatatagctacggcgtatcgc

SEQ ID NO: 493428 - DNA, 30 bp, Artificial Sequence
  Synthetic oligonucleotide
gcaggggcattattctctcaaatgtatcgc

SEQ ID NO: 493429 - DNA, 30 bp, Artificial Sequence
  Synthetic oligonucleotide
gggccagcggaagctccatatgcttatcgc

SEQ ID NO: 493430 - DNA, 30 bp, Artificial Sequence
  Synthetic oligonucleotide
agatcccttcctcagccatactgaactcgc

SEQ ID NO: 493431 - DNA, 30 bp, Artificial Sequence
  Synthetic oligonucleotide
gctactgtcacggatgattgcaccactcgc

SEQ ID NO: 493432 - DNA, 30 bp, Artificial Sequence
  Synthetic oligonucleotide
gggttggaatcatgtccttaatatactcgc

SEQ ID NO: 493433 - DNA, 30 bp, Artificial Sequence
  Synthetic oligonucleotide
gcacagcgagactcaagtcagtttactcgc

SEQ ID NO: 493434 - DNA, 30 bp, Artificial Sequence
  Synthetic oligonucleotide
ttcgagccagcgagcataaatgcacctcgc

SEQ ID NO: 493435 - DNA, 30 bp, Artificial Sequence
  Synthetic oligonucleotide
gattacaaattaactcttgcagatcctcgc

SEQ ID NO: 493436 - DNA, 30 bp, Artificial Sequence
  Synthetic oligonucleotide
acgctgtcgtgcgggcgtgccaaggctcgc

SEQ ID NO: 493437 - DNA, 30 bp, Artificial Sequence
  Synthetic oligonucleotide
ggtccacgtagtcataagtgtatggctcgc

SEQ ID NO: 493438 - DNA, 30 bp, Artificial Sequence
  Synthetic oligonucleotide
catatggcagcgatcaagtacagtgctcgc

SEQ ID NO: 493439 - DNA, 30 bp, Artificial Sequence
  Synthetic oligonucleotide
cagtaaatgacacggtctggcttatctcgc

SEQ ID NO: 493440 - DNA, 30 bp, Artificial Sequence
  Synthetic oligonucleotide
taaaagataaaaatatacccctgcagtcgc

SEQ ID NO: 493441 - DNA, 30 bp, Artificial Sequence
  Synthetic oligonucleotide
actcatccgagagccgcaacagcgagtcgc

SEQ ID NO: 493442 - DNA, 30 bp, Artificial Sequence
  Synthetic oligonucleotide
aatgacttgatggagtctgtcgctagtcgc

SEQ ID NO: 493443 - DNA, 30 bp, Artificial Sequence
  Synthetic oligonucleotide
aggtttcgctcatacgcttgcagacgtcgc

SEQ ID NO: 493444 - DNA, 30 bp, Artificial Sequence
  Synthetic oligonucleotide
acagccgctatatatcggtaatcccgtcgc

SEQ ID NO: 493445 - DNA, 30 bp, Artificial Sequence
  Synthetic oligonucleotide
caggacccgctcattcactggttgcgtcgc

SEQ ID NO: 493446 - DNA, 30 bp, Artificial Sequence
  Synthetic oligonucleotide
gaccaggtctggcagggtgagggtcgtcgc

SEQ ID NO: 493447 - DNA, 30 bp, Artificial Sequence
  Synthetic oligonucleotide
ggtgttacgatggcggaggcggcaggtcgc

SEQ ID NO: 493448 - DNA, 30 bp, Artificial Sequence
  Synthetic oligonucleotide
agaagataatgatactctcctagaggtcgc

SEQ ID NO: 493449 - DNA, 30 bp, Artificial Sequence
  Synthetic oligonucleotide
ctgtctggttaatttttatgatacggtcgc

SEQ ID NO: 493450 - DNA, 30 bp, Artificial Sequence
  Synthetic oligonucleotide
gccccataaaaggaaaagccagccggtcgc

SEQ ID NO: 493451 - DNA, 30 bp, Artificial Sequence
  Synthetic oligonucleotide
gggccacaaaggtcggcccaggcgggtcgc

SEQ ID NO: 493452 - DNA, 30 bp, Artificial Sequence
  Synthetic oligonucleotide
atcctttggacttgacgtaattgatgtcgc

SEQ ID NO: 493453 - DNA, 30 bp, Artificial Sequence
  Synthetic oligonucleotide
aaccttagatctgtcctccgctcgtgtcgc

SEQ ID NO: 493454 - DNA, 30 bp, Artificial Sequence
  Synthetic oligonucleotide
tcatcactgagaatcacatccttttgtcgc

SEQ ID NO: 493455 - DNA, 30 bp, Artificial Sequence
  Synthetic oligonucleotide
gttcacttacattctctcacacccattcgc

SEQ ID NO: 493456 - DNA, 30 bp, Artificial Sequence
  Synthetic oligonucleotide
gtgtattttgattatagtggcttcattcgc

SEQ ID NO: 493457 - DNA, 30 bp, Artificial Sequence
  Synthetic oligonucleotide
tttgtagtgaggcgtcttgattttattcgc

SEQ ID NO: 493458 - DNA, 30 bp, Artificial Sequence
  Synthetic oligonucleotide
tactatgcgataccatctatattccttcgc

SEQ ID NO: 493459 - DNA, 30 bp, Artificial Sequence
  Synthetic oligonucleotide
tcgcagcacaagtccgaggaggatcttcgc

SEQ ID NO: 493460 - DNA, 30 bp, Artificial Sequence
  Synthetic oligonucleotide
acatttaccaaaaagttgttgaaagttcgc

SEQ ID NO: 493461 - DNA, 30 bp, Artificial Sequence
  Synthetic oligonucleotide
gcatctaacaaagtggtgattaatgttcgc

SEQ ID NO: 493462 - DNA, 30 bp, Artificial Sequence
  Synthetic oligonucleotide
catgcttctgcgattgtaacgcaatttcgc

SEQ ID NO: 493463 - DNA, 30 bp, Artificial Sequence
  Synthetic oligonucleotide
ccattatagtcgctgcgaagtgaatttcgc

SEQ ID NO: 493464 - DNA, 30 bp, Artificial Sequence
  Synthetic oligonucleotide
gctgactgacacaagtcccctccgtttcgc

SEQ ID NO: 493465 - DNA, 30 bp, Artificial Sequence
  Synthetic oligonucleotide
gttcgcctgtcagcgggaaattgttttcgc

SEQ ID NO: 493466 - DNA, 30 bp, Artificial Sequence
  Synthetic oligonucleotide
cgactcattccccttttttttggaaaaggc

SEQ ID NO: 493467 - DNA, 30 bp, Artificial Sequence
  Synthetic oligonucleotide
atcctggttacattggataaaatcaaaggc

SEQ ID NO: 493468 - DNA, 30 bp, Artificial Sequence
  Synthetic oligonucleotide
tatttgtagtatggacgctgctttaaaggc

SEQ ID NO: 493469 - DNA, 30 bp, Artificial Sequence
  Synthetic oligonucleotide
gagctcgggatccctgggattacccaaggc

SEQ ID NO: 493470 - DNA, 30 bp, Artificial Sequence
  Synthetic oligonucleotide
taagtgaggaccagactgtgatcccaaggc

SEQ ID NO: 493471 - DNA, 30 bp, Artificial Sequence
  Synthetic oligonucleotide
ctcggggagggccacttggatgcgcaaggc

SEQ ID NO: 493472 - DNA, 30 bp, Artificial Sequence
  Synthetic oligonucleotide
ggttccatcgcgcagcgacctgatcaaggc

SEQ ID NO: 493473 - DNA, 30 bp, Artificial Sequence
  Synthetic oligonucleotide
ttagcggccctctatgcatagaacgaaggc

SEQ ID NO: 493474 - DNA, 30 bp, Artificial Sequence
  Synthetic oligonucleotide
ctgataggcgtagaggcatcacaggaaggc

SEQ ID NO: 493475 - DNA, 30 bp, Artificial Sequence
  Synthetic oligonucleotide
tgggtcctagttagaatacggccggaaggc

SEQ ID NO: 493476 - DNA, 30 bp, Artificial Sequence
  Synthetic oligonucleotide
agcatcccctgcagctagcagtgggaaggc

SEQ ID NO: 493477 - DNA, 30 bp, Artificial Sequence
  Synthetic oligonucleotide
tacactttcatacctagtgtaggtgaaggc

SEQ ID NO: 493478 - DNA, 30 bp, Artificial Sequence
  Synthetic oligonucleotide
ggaggccgacccgaatccgaagcataaggc

SEQ ID NO: 493479 - DNA, 30 bp, Artificial Sequence
  Synthetic oligonucleotide
aacgctgccggagcagatgataagtaaggc

SEQ ID NO: 493480 - DNA, 30 bp, Artificial Sequence
  Synthetic oligonucleotide
gtcccacgattgcgcccgtttaagtaaggc

SEQ ID NO: 493481 - DNA, 30 bp, Artificial Sequence
  Synthetic oligonucleotide
gaggcagcattaggtatgcagtagtaaggc

SEQ ID NO: 493482 - DNA, 30 bp, Artificial Sequence
  Synthetic oligonucleotide
tgttcatatttatccggcgctgtgtaaggc

SEQ ID NO: 493483 - DNA, 30 bp, Artificial Sequence
  Synthetic oligonucleotide
ttccaggggagctggtgctgaggttaaggc

SEQ ID NO: 493484 - DNA, 30 bp, Artificial Sequence
  Synthetic oligonucleotide
taatatcagtttcaatttatgggttaaggc

SEQ ID NO: 493485 - DNA, 30 bp, Artificial Sequence
  Synthetic oligonucleotide
cgacccatagacgccttacgattttaaggc

SEQ ID NO: 493486 - DNA, 29 bp, Artificial Sequence
  Synthetic oligonucleotide
ggacggtcctgggtaggttatccacaggc

SEQ ID NO: 493487 - DNA, 30 bp, Artificial Sequence
  Synthetic oligonucleotide
ccccggttgactcatgtcaccagcacaggc

SEQ ID NO: 493488 - DNA, 30 bp, Artificial Sequence
  Synthetic oligonucleotide
cagttcttagatacgacggttaggacaggc

SEQ ID NO: 493489 - DNA, 30 bp, Artificial Sequence
  Synthetic oligonucleotide
aggcccttggtgtgagccccaccaccaggc

SEQ ID NO: 493490 - DNA, 30 bp, Artificial Sequence
  Synthetic oligonucleotide
agtaggacatttctttgaaaagcaccaggc

SEQ ID NO: 493491 - DNA, 30 bp, Artificial Sequence
  Synthetic oligonucleotide
ctacagtattttttgtaggccgcaccaggc

SEQ ID NO: 493492 - DNA, 30 bp, Artificial Sequence
  Synthetic oligonucleotide
ctttgagtaccggtaagcctcggaccaggc

SEQ ID NO: 493493 - DNA, 30 bp, Artificial Sequence
  Synthetic oligonucleotide
atgtggctggtacccggtgtattaccaggc

SEQ ID NO: 493494 - DNA, 30 bp, Artificial Sequence
  Synthetic oligonucleotide
cacgcacagcgttggtattaagtgccaggc

SEQ ID NO: 493495 - DNA, 30 bp, Artificial Sequence
  Synthetic oligonucleotide
cttataaatctgctagcgtttggtccaggc

SEQ ID NO: 493496 - DNA, 30 bp, Artificial Sequence
  Synthetic oligonucleotide
tgggggctcaggtccactgtgcacgcaggc

SEQ ID NO: 493497 - DNA, 30 bp, Artificial Sequence
  Synthetic oligonucleotide
cagcgtatttttaagacttgccgcgcaggc

SEQ ID NO: 493498 - DNA, 30 bp, Artificial Sequence
  Synthetic oligonucleotide
tgccgacggtgtttagggacaggcgcaggc

SEQ ID NO: 493499 - DNA, 30 bp, Artificial Sequence
  Synthetic oligonucleotide
cccattctacgggtcgtcgtaatcgcaggc

SEQ ID NO: 493500 - DNA, 30 bp, Artificial Sequence
  Synthetic oligonucleotide
gccccatgatccgcaagaaagcatgcaggc

SEQ ID NO: 493501 - DNA, 30 bp, Artificial Sequence
  Synthetic oligonucleotide
aaaaccaatgtactgtcacgcacatcaggc

SEQ ID NO: 493502 - DNA, 30 bp, Artificial Sequence
  Synthetic oligonucleotide
cacgcggcttattacgggtcctcatcaggc

SEQ ID NO: 493503 - DNA, 30 bp, Artificial Sequence
  Synthetic oligonucleotide
taaagagcgacaggcagcagattctcaggc

SEQ ID NO: 493504 - DNA, 30 bp, Artificial Sequence
  Synthetic oligonucleotide
cctaactcaaatctacctgatgcgtcaggc

SEQ ID NO: 493505 - DNA, 30 bp, Artificial Sequence
  Synthetic oligonucleotide
gctgtctatacaggactctgatattcaggc

SEQ ID NO: 493506 - DNA, 30 bp, Artificial Sequence
  Synthetic oligonucleotide
ctaatacaaagatctgttatacgttcaggc

SEQ ID NO: 493507 - DNA, 30 bp, Artificial Sequence
  Synthetic oligonucleotide
cagattcttgttaggagcataacaagaggc

SEQ ID NO: 493508 - DNA, 30 bp, Artificial Sequence
  Synthetic oligonucleotide
gtaataaccccgtgtatggttcggagaggc

SEQ ID NO: 493509 - DNA, 30 bp, Artificial Sequence
  Synthetic oligonucleotide
taaaacgagggtcacgcaggtagtagaggc

SEQ ID NO: 493510 - DNA, 25 bp, Artificial Sequence
  Synthetic oligonucleotide
agtgcgcagtgtcatatgtagaggc

SEQ ID NO: 493511 - DNA, 30 bp, Artificial Sequence
  Synthetic oligonucleotide
agaacgagacgctatacccatgaacgaggc

SEQ ID NO: 493512 - DNA, 30 bp, Artificial Sequence
  Synthetic oligonucleotide
catttcccttagcgaagtttcgcacgaggc

SEQ ID NO: 493513 - DNA, 30 bp, Artificial Sequence
  Synthetic oligonucleotide
actgctggacggtgacgcgcctaccgaggc

SEQ ID NO: 493514 - DNA, 30 bp, Artificial Sequence
  Synthetic oligonucleotide
aacggagccgttaccttgggcgcccgaggc

SEQ ID NO: 493515 - DNA, 30 bp, Artificial Sequence
  Synthetic oligonucleotide
actccccaggatcccgatattgggcgaggc

SEQ ID NO: 493516 - DNA, 30 bp, Artificial Sequence
  Synthetic oligonucleotide
atggttggggcagctattcagctgcgaggc

SEQ ID NO: 493517 - DNA, 30 bp, Artificial Sequence
  Synthetic oligonucleotide
agggtcgatgaggcgtaacctggtcgaggc

SEQ ID NO: 493518 - DNA, 30 bp, Artificial Sequence
  Synthetic oligonucleotide
cagtagtcactactgatgtggataggaggc

SEQ ID NO: 493519 - DNA, 30 bp, Artificial Sequence
  Synthetic oligonucleotide
ctgagggctgtcgacgatgtggtaggaggc

SEQ ID NO: 493520 - DNA, 30 bp, Artificial Sequence
  Synthetic oligonucleotide
cctttaaggttcgaggggctatcgggaggc

SEQ ID NO: 493521 - DNA, 30 bp, Artificial Sequence
  Synthetic oligonucleotide
ggtgcagggccacagcctttaaggggaggc

SEQ ID NO: 493522 - DNA, 30 bp, Artificial Sequence
  Synthetic oligonucleotide
aatactggcacagacgtagtggtgggaggc

SEQ ID NO: 493523 - DNA, 30 bp, Artificial Sequence
  Synthetic oligonucleotide
atgtttgacagtacacgtcaaccatgaggc

SEQ ID NO: 493524 - DNA, 29 bp, Artificial Sequence
  Synthetic oligonucleotide
aatgtatcagttgtatttttccatgaggc

SEQ ID NO: 493525 - DNA, 30 bp, Artificial Sequence
  Synthetic oligonucleotide
tgaaacaatggttgtcgacgcagatgaggc

SEQ ID NO: 493526 - DNA, 30 bp, Artificial Sequence
  Synthetic oligonucleotide
ttgctgacctgggcgctcaagccgtgaggc

SEQ ID NO: 493527 - DNA, 30 bp, Artificial Sequence
  Synthetic oligonucleotide
gaatgatgtggaaggtcaatctattgaggc

SEQ ID NO: 493528 - DNA, 30 bp, Artificial Sequence
  Synthetic oligonucleotide
tttcagaatataacggcgtatacttgaggc

SEQ ID NO: 493529 - DNA, 30 bp, Artificial Sequence
  Synthetic oligonucleotide
taggacggctcttttttttgtacttgaggc

SEQ ID NO: 493530 - DNA, 30 bp, Artificial Sequence
  Synthetic oligonucleotide
ggctagaccatgggtattagtatttgaggc

SEQ ID NO: 493531 - DNA, 30 bp, Artificial Sequence
  Synthetic oligonucleotide
ctcacaatagtttgcacactataaataggc

SEQ ID NO: 493532 - DNA, 30 bp, Artificial Sequence
  Synthetic oligonucleotide
tatttttattgggctctcacatgaataggc

SEQ ID NO: 493533 - DNA, 30 bp, Artificial Sequence
  Synthetic oligonucleotide
aataggtaggtgattagggttttaataggc

SEQ ID NO: 493534 - DNA, 30 bp, Artificial Sequence
  Synthetic oligonucleotide
aactggtccggtcgctagctagcgataggc

SEQ ID NO: 493535 - DNA, 30 bp, Artificial Sequence
  Synthetic oligonucleotide
aaaaattctcaatcagattggatgataggc

SEQ ID NO: 493536 - DNA, 30 bp, Artificial Sequence
  Synthetic oligonucleotide
acctatggggcaggcagtcctgctataggc

SEQ ID NO: 493537 - DNA, 30 bp, Artificial Sequence
  Synthetic oligonucleotide
tggactcagaattggcacagatctataggc

SEQ ID NO: 493538 - DNA, 30 bp, Artificial Sequence
  Synthetic oligonucleotide
ggcactcggcataagggatcggttataggc

SEQ ID NO: 493539 - DNA, 30 bp, Artificial Sequence
  Synthetic oligonucleotide
caggggttatccgcccagttctgactaggc

SEQ ID NO: 493540 - DNA, 30 bp, Artificial Sequence
  Synthetic oligonucleotide
taggttgtttggttgcgtacagtgctaggc

SEQ ID NO: 493541 - DNA, 30 bp, Artificial Sequence
  Synthetic oligonucleotide
gggatgccaaatgtatttgtcaatctaggc

SEQ ID NO: 493542 - DNA, 30 bp, Artificial Sequence
  Synthetic oligonucleotide
gctcctttcaataatgcatagcgtctaggc

SEQ ID NO: 493543 - DNA, 30 bp, Artificial Sequence
  Synthetic oligonucleotide
tccgtgtccttcgccttcagtaacgtaggc

SEQ ID NO: 493544 - DNA, 30 bp, Artificial Sequence
  Synthetic oligonucleotide
tctacgtggcttagcgctgcagtcgtaggc

SEQ ID NO: 493545 - DNA, 30 bp, Artificial Sequence
  Synthetic oligonucleotide
atcggagaagcctttggtacccaggtaggc

SEQ ID NO: 493546 - DNA, 30 bp, Artificial Sequence
  Synthetic oligonucleotide
gatgtccgaaatggatatatcgaggtaggc

SEQ ID NO: 493547 - DNA, 30 bp, Artificial Sequence
  Synthetic oligonucleotide
gccttgtacatgatatttataagggtaggc

SEQ ID NO: 493548 - DNA, 30 bp, Artificial Sequence
  Synthetic oligonucleotide
agatggcaattcctacagggatttgtaggc

SEQ ID NO: 493549 - DNA, 30 bp, Artificial Sequence
  Synthetic oligonucleotide
taggcctgtgtaaactttgtctaattaggc

SEQ ID NO: 493550 - DNA, 30 bp, Artificial Sequence
  Synthetic oligonucleotide
taccagttgttgatacgctggacattaggc

SEQ ID NO: 493551 - DNA, 30 bp, Artificial Sequence
  Synthetic oligonucleotide
aacccggttccgagggctcacaacttaggc

SEQ ID NO: 493552 - DNA, 30 bp, Artificial Sequence
  Synthetic oligonucleotide
tctgtacctgccaggaccggtcgtttaggc

SEQ ID NO: 493553 - DNA, 30 bp, Artificial Sequence
  Synthetic oligonucleotide
cggcgttatgactcacatttatataacggc

SEQ ID NO: 493554 - DNA, 30 bp, Artificial Sequence
  Synthetic oligonucleotide
gccgggaacgaaatgctagcttctaacggc

SEQ ID NO: 493555 - DNA, 30 bp, Artificial Sequence
  Synthetic oligonucleotide
tactgtgaccctgatgatgggagtaacggc

SEQ ID NO: 493556 - DNA, 30 bp, Artificial Sequence
  Synthetic oligonucleotide
ggtccggtatgtttagcgaggcttaacggc

SEQ ID NO: 493557 - DNA, 30 bp, Artificial Sequence
  Synthetic oligonucleotide
gtagttttgcaggtctaagaacgacacggc

SEQ ID NO: 493558 - DNA, 30 bp, Artificial Sequence
  Synthetic oligonucleotide
gaggttacatacggacgtagacgccacggc

SEQ ID NO: 493559 - DNA, 30 bp, Artificial Sequence
  Synthetic oligonucleotide
aaatctgccggagagacgcatacgcacggc

SEQ ID NO: 493560 - DNA, 29 bp, Artificial Sequence
  Synthetic oligonucleotide
cagggctttccagccagggtcgtcacggc

SEQ ID NO: 493561 - DNA, 30 bp, Artificial Sequence
  Synthetic oligonucleotide
gtttaaggactgagactccggaccgacggc

SEQ ID NO: 493562 - DNA, 30 bp, Artificial Sequence
  Synthetic oligonucleotide
atttataacatagcttactaacatgacggc

SEQ ID NO: 493563 - DNA, 30 bp, Artificial Sequence
  Synthetic oligonucleotide
agagacttgccgcagtccatacatgacggc

SEQ ID NO: 493564 - DNA, 30 bp, Artificial Sequence
  Synthetic oligonucleotide
tttgcaagcaggccgttgatgggtgacggc

SEQ ID NO: 493565 - DNA, 30 bp, Artificial Sequence
  Synthetic oligonucleotide
aggtcggcaaagccacgtggctgatacggc

SEQ ID NO: 493566 - DNA, 30 bp, Artificial Sequence
  Synthetic oligonucleotide
agatgaaggtaaccactcggacgctacggc

SEQ ID NO: 493567 - DNA, 30 bp, Artificial Sequence
  Synthetic oligonucleotide
tataatatggactatttagtggtctacggc

SEQ ID NO: 493568 - DNA, 30 bp, Artificial Sequence
  Synthetic oligonucleotide
gtcaacgtccggggggtctgttggtacggc

SEQ ID NO: 493569 - DNA, 30 bp, Artificial Sequence
  Synthetic oligonucleotide
aatacacctccctccattgtattttacggc

SEQ ID NO: 493570 - DNA, 30 bp, Artificial Sequence
  Synthetic oligonucleotide
ttacctgttctcagcgggtccaaaaccggc

SEQ ID NO: 493571 - DNA, 30 bp, Artificial Sequence
  Synthetic oligonucleotide
gcaagaatccgatggggattgcacaccggc

SEQ ID NO: 493572 - DNA, 30 bp, Artificial Sequence
  Synthetic oligonucleotide
aacaagccaaaacccacgtgcgcgaccggc

SEQ ID NO: 493573 - DNA, 30 bp, Artificial Sequence
  Synthetic oligonucleotide
agtgtcaggtgggcgtttctgttgaccggc

SEQ ID NO: 493574 - DNA, 30 bp, Artificial Sequence
  Synthetic oligonucleotide
cagtagcatgacgacactaggggtaccggc

SEQ ID NO: 493575 - DNA, 30 bp, Artificial Sequence
  Synthetic oligonucleotide
actccaacgacaaaatttacaaaacccggc

SEQ ID NO: 493576 - DNA, 30 bp, Artificial Sequence
  Synthetic oligonucleotide
catctacgcataagggagcctaaacccggc

SEQ ID NO: 493577 - DNA, 30 bp, Artificial Sequence
  Synthetic oligonucleotide
ttgctctaggttggcaggtctgcgcccggc

SEQ ID NO: 493578 - DNA, 30 bp, Artificial Sequence
  Synthetic oligonucleotide
tgcctgagctagtgccgagtactgcccggc

SEQ ID NO: 493579 - DNA, 30 bp, Artificial Sequence
  Synthetic oligonucleotide
gcagtcccgtgcttgcacagtaatcccggc

SEQ ID NO: 493580 - DNA, 30 bp, Artificial Sequence
  Synthetic oligonucleotide
aagtatatggggaataattcctctgccggc

SEQ ID NO: 493581 - DNA, 30 bp, Artificial Sequence
  Synthetic oligonucleotide
cattaagggattgagaaagctagatccggc

SEQ ID NO: 493582 - DNA, 30 bp, Artificial Sequence
  Synthetic oligonucleotide
gccaggaacatcttcagtaggagaagcggc

SEQ ID NO: 493583 - DNA, 30 bp, Artificial Sequence
  Synthetic oligonucleotide
acttgcatgtggtgctccgacggaagcggc

SEQ ID NO: 493584 - DNA, 30 bp, Artificial Sequence
  Synthetic oligonucleotide
cgcccagcgtaaatagcgcgtataagcggc

SEQ ID NO: 493585 - DNA, 30 bp, Artificial Sequence
  Synthetic oligonucleotide
gcctcgctaggttcgtcattgtaccgcggc

SEQ ID NO: 493586 - DNA, 30 bp, Artificial Sequence
  Synthetic oligonucleotide
caacgtccagccgtcgccaactgccgcggc

SEQ ID NO: 493587 - DNA, 30 bp, Artificial Sequence
  Synthetic oligonucleotide
ccgcgccagcatatcattaataggcgcggc

SEQ ID NO: 493588 - DNA, 30 bp, Artificial Sequence
  Synthetic oligonucleotide
gtactcggagagggaacacgacggcgcggc

SEQ ID NO: 493589 - DNA, 30 bp, Artificial Sequence
  Synthetic oligonucleotide
tatagcgagcaccttggggggaccggcggc

SEQ ID NO: 493590 - DNA, 30 bp, Artificial Sequence
  Synthetic oligonucleotide
aatgttgtatcgggcaactcaatcggcggc

SEQ ID NO: 493591 - DNA, 30 bp, Artificial Sequence
  Synthetic oligonucleotide
gtcaataaatttccaccggcctggggcggc

SEQ ID NO: 493592 - DNA, 30 bp, Artificial Sequence
  Synthetic oligonucleotide
ggctatacttgccgaagtaagcctggcggc

SEQ ID NO: 493593 - DNA, 30 bp, Artificial Sequence
  Synthetic oligonucleotide
gtaatgtccccgacgggggagcgtggcggc

SEQ ID NO: 493594 - DNA, 30 bp, Artificial Sequence
  Synthetic oligonucleotide
aacctgttgggaaggtttcgcattggcggc

SEQ ID NO: 493595 - DNA, 30 bp, Artificial Sequence
  Synthetic oligonucleotide
cggggccacgctgtacatagtaactgcggc

SEQ ID NO: 493596 - DNA, 30 bp, Artificial Sequence
  Synthetic oligonucleotide
tcaacagtaagtgacagaacacactgcggc

SEQ ID NO: 493597 - DNA, 30 bp, Artificial Sequence
  Synthetic oligonucleotide
ggggccgcttatgatttttgctcttgcggc

SEQ ID NO: 493598 - DNA, 30 bp, Artificial Sequence
  Synthetic oligonucleotide
ctcggagcgactacagattgtctttgcggc

SEQ ID NO: 493599 - DNA, 30 bp, Artificial Sequence
  Synthetic oligonucleotide
attcttatccgaaagttccttacaatcggc

SEQ ID NO: 493600 - DNA, 30 bp, Artificial Sequence
  Synthetic oligonucleotide
caaggcgtcgacgcaaccggaataatcggc

SEQ ID NO: 493601 - DNA, 30 bp, Artificial Sequence
  Synthetic oligonucleotide
aaacatttggtctcatcaactgccatcggc

SEQ ID NO: 493602 - DNA, 30 bp, Artificial Sequence
  Synthetic oligonucleotide
ttcttaaaatcgcgtcagtcgaagatcggc

SEQ ID NO: 493603 - DNA, 30 bp, Artificial Sequence
  Synthetic oligonucleotide
gtaagcccttcggtagggcaggggatcggc

SEQ ID NO: 493604 - DNA, 30 bp, Artificial Sequence
  Synthetic oligonucleotide
tcaggcctaggggtttggcttctgatcggc

SEQ ID NO: 493605 - DNA, 30 bp, Artificial Sequence
  Synthetic oligonucleotide
gtttctgaatagattcagtcgcatatcggc

SEQ ID NO: 493606 - DNA, 30 bp, Artificial Sequence
  Synthetic oligonucleotide
caatacaaagcacgcaacccccgtatcggc

SEQ ID NO: 493607 - DNA, 30 bp, Artificial Sequence
  Synthetic oligonucleotide
tgccgctttgtacagatctacctactcggc

SEQ ID NO: 493608 - DNA, 30 bp, Artificial Sequence
  Synthetic oligonucleotide
aagatggctaccttgcattgtcgcgtcggc

SEQ ID NO: 493609 - DNA, 30 bp, Artificial Sequence
  Synthetic oligonucleotide
gatcgcgttgagaggtgtcgaatggtcggc

SEQ ID NO: 493610 - DNA, 30 bp, Artificial Sequence
  Synthetic oligonucleotide
gccttaaagcacccccactgatgcttcggc

SEQ ID NO: 493611 - DNA, 30 bp, Artificial Sequence
  Synthetic oligonucleotide
ttaatgcgtaggacagaccgaaagttcggc

SEQ ID NO: 493612 - DNA, 30 bp, Artificial Sequence
  Synthetic oligonucleotide
tgatgtgggagtcctaggaatcagttcggc

SEQ ID NO: 493613 - DNA, 30 bp, Artificial Sequence
  Synthetic oligonucleotide
atctgtgactttaaattgtcgactttcggc

SEQ ID NO: 493614 - DNA, 30 bp, Artificial Sequence
  Synthetic oligonucleotide
ggatccaacggctgcgtcgtgattttcggc

SEQ ID NO: 493615 - DNA, 30 bp, Artificial Sequence
  Synthetic oligonucleotide
gtactgacgtgcttaatgtatattttcggc

SEQ ID NO: 493616 - DNA, 30 bp, Artificial Sequence
  Synthetic oligonucleotide
aattgttcacgtcaactaatgtttttcggc

SEQ ID NO: 493617 - DNA, 30 bp, Artificial Sequence
  Synthetic oligonucleotide
atttgaggtaaaatggtagaacgaaagggc

SEQ ID NO: 493618 - DNA, 30 bp, Artificial Sequence
  Synthetic oligonucleotide
tgaccaggacacgtggtctattacaagggc

SEQ ID NO: 493619 - DNA, 30 bp, Artificial Sequence
  Synthetic oligonucleotide
aaaataggtggtggtttacgctgtaagggc

SEQ ID NO: 493620 - DNA, 30 bp, Artificial Sequence
  Synthetic oligonucleotide
ttaatcggcctacaaggtctttcacagggc

SEQ ID NO: 493621 - DNA, 30 bp, Artificial Sequence
  Synthetic oligonucleotide
tttgtctcgctgcaggaaaaaagacagggc

SEQ ID NO: 493622 - DNA, 30 bp, Artificial Sequence
  Synthetic oligonucleotide
cggtgggcgtatcagaatcaaggacagggc

SEQ ID NO: 493623 - DNA, 30 bp, Artificial Sequence
  Synthetic oligonucleotide
gaagcgcgacaagcccttagttcccagggc

SEQ ID NO: 493624 - DNA, 30 bp, Artificial Sequence
  Synthetic oligonucleotide
agtttgatgtgggacgacctcagccagggc

SEQ ID NO: 493625 - DNA, 30 bp, Artificial Sequence
  Synthetic oligonucleotide
ttgctagtcagtgctatgtgctgtcagggc

SEQ ID NO: 493626 - DNA, 30 bp, Artificial Sequence
  Synthetic oligonucleotide
atattttgcgagtatcgcccggtcgagggc

SEQ ID NO: 493627 - DNA, 30 bp, Artificial Sequence
  Synthetic oligonucleotide
gggatagtaggcgaatgcttaccggagggc

SEQ ID NO: 493628 - DNA, 30 bp, Artificial Sequence
  Synthetic oligonucleotide
gattcgaaagccctcgcgttgcgggagggc

SEQ ID NO: 493629 - DNA, 30 bp, Artificial Sequence
  Synthetic oligonucleotide
ctcgcctgtttttttctgtccatggagggc

SEQ ID NO: 493630 - DNA, 30 bp, Artificial Sequence
  Synthetic oligonucleotide
agattgggtagcccagccccctttgagggc

SEQ ID NO: 493631 - DNA, 30 bp, Artificial Sequence
  Synthetic oligonucleotide
tggtcttcctacggaagccctcaatagggc

SEQ ID NO: 493632 - DNA, 30 bp, Artificial Sequence
  Synthetic oligonucleotide
agcttgtgaagctgtcgccagaactagggc

SEQ ID NO: 493633 - DNA, 30 bp, Artificial Sequence
  Synthetic oligonucleotide
gtgtgactatcagtcaactaaccctagggc

SEQ ID NO: 493634 - DNA, 30 bp, Artificial Sequence
  Synthetic oligonucleotide
tacggtgatcaatctcttatacgctagggc

SEQ ID NO: 493635 - DNA, 30 bp, Artificial Sequence
  Synthetic oligonucleotide
cgcacactgagagctgcctaggcttagggc

SEQ ID NO: 493636 - DNA, 30 bp, Artificial Sequence
  Synthetic oligonucleotide
cattccgtgccagggggcctcgtttagggc

SEQ ID NO: 493637 - DNA, 30 bp, Artificial Sequence
  Synthetic oligonucleotide
cgcgaaatagtttgtcgaacacaaacgggc

SEQ ID NO: 493638 - DNA, 30 bp, Artificial Sequence
  Synthetic oligonucleotide
tgctaaatcttgctcatccggtcaacgggc

SEQ ID NO: 493639 - DNA, 30 bp, Artificial Sequence
  Synthetic oligonucleotide
cttgacgtgcgttcatggaatgatacgggc

SEQ ID NO: 493640 - DNA, 30 bp, Artificial Sequence
  Synthetic oligonucleotide
cagcctttgacccgtaagttgcaaccgggc

SEQ ID NO: 493641 - DNA, 30 bp, Artificial Sequence
  Synthetic oligonucleotide
tatgagttactcctttcacccaacccgggc

SEQ ID NO: 493642 - DNA, 30 bp, Artificial Sequence
  Synthetic oligonucleotide
atccgtctgcgaagtacatgcacgccgggc

SEQ ID NO: 493643 - DNA, 30 bp, Artificial Sequence
  Synthetic oligonucleotide
cgaaggttctctcgcagcacctcgccgggc

SEQ ID NO: 493644 - DNA, 30 bp, Artificial Sequence
  Synthetic oligonucleotide
ttatccaaacgggcctaaagggtagcgggc

SEQ ID NO: 493645 - DNA, 30 bp, Artificial Sequence
  Synthetic oligonucleotide
gcctcgtgggttttctagcatacggcgggc

SEQ ID NO: 493646 - DNA, 30 bp, Artificial Sequence
  Synthetic oligonucleotide
ggcgagcttccgaggcgatgcccggcgggc

SEQ ID NO: 493647 - DNA, 30 bp, Artificial Sequence
  Synthetic oligonucleotide
agcatagtttgacgacgcttcagggcgggc

SEQ ID NO: 493648 - DNA, 30 bp, Artificial Sequence
  Synthetic oligonucleotide
ccagcatctgagctagttctttgatcgggc

SEQ ID NO: 493649 - DNA, 30 bp, Artificial Sequence
  Synthetic oligonucleotide
gccttggtaccccgggctgggatatcgggc

SEQ ID NO: 493650 - DNA, 30 bp, Artificial Sequence
  Synthetic oligonucleotide
cgccagcgtccgcgactcattttatcgggc

SEQ ID NO: 493651 - DNA, 30 bp, Artificial Sequence
  Synthetic oligonucleotide
gacagggttttagatgcatttttatcgggc

SEQ ID NO: 493652 - DNA, 30 bp, Artificial Sequence
  Synthetic oligonucleotide
taccaggtgcggaagcccagcgcgtcgggc

SEQ ID NO: 493653 - DNA, 30 bp, Artificial Sequence
  Synthetic oligonucleotide
ataggcatgcgcctggagaggcaaaggggc

SEQ ID NO: 493654 - DNA, 30 bp, Artificial Sequence
  Synthetic oligonucleotide
attaggatacgcggtcgcctgtaaaggggc

SEQ ID NO: 493655 - DNA, 30 bp, Artificial Sequence
  Synthetic oligonucleotide
gcccccgattactttaagtctctcaggggc

SEQ ID NO: 493656 - DNA, 30 bp, Artificial Sequence
  Synthetic oligonucleotide
gcaaaaaactggagggaggtgccgaggggc

SEQ ID NO: 493657 - DNA, 30 bp, Artificial Sequence
  Synthetic oligonucleotide
aaatacctgtcccaccattggtctaggggc

SEQ ID NO: 493658 - DNA, 30 bp, Artificial Sequence
  Synthetic oligonucleotide
tatgcgcgtgcgccatgaaatggtaggggc

SEQ ID NO: 493659 - DNA, 30 bp, Artificial Sequence
  Synthetic oligonucleotide
agaaggtatggacccgctggggaacggggc

SEQ ID NO: 493660 - DNA, 30 bp, Artificial Sequence
  Synthetic oligonucleotide
gaacagtcaggcccgacatatatacggggc

SEQ ID NO: 493661 - DNA, 30 bp, Artificial Sequence
  Synthetic oligonucleotide
tgcccagtccccccacgaaagtcgcggggc

SEQ ID NO: 493662 - DNA, 30 bp, Artificial Sequence
  Synthetic oligonucleotide
ggcaggaacgccgagtttaagaggcggggc

SEQ ID NO: 493663 - DNA, 30 bp, Artificial Sequence
  Synthetic oligonucleotide
ttcagacgttctaccctcgcaagtcggggc

SEQ ID NO: 493664 - DNA, 30 bp, Artificial Sequence
  Synthetic oligonucleotide
ggaggaggtaaagactgacaggttcggggc

SEQ ID NO: 493665 - DNA, 30 bp, Artificial Sequence
  Synthetic oligonucleotide
gcaggggtacccgaatggatgtttcggggc

SEQ ID NO: 493666 - DNA, 30 bp, Artificial Sequence
  Synthetic oligonucleotide
cgaactattgctttcgaacgaagcgggggc

SEQ ID NO: 493667 - DNA, 26 bp, Artificial Sequence
  Synthetic oligonucleotide
ctacaccataacgtgtaagcgggggc

SEQ ID NO: 493668 - DNA, 30 bp, Artificial Sequence
  Synthetic oligonucleotide
gtatcatccatgtatatggccgtcgggggc

SEQ ID NO: 493669 - DNA, 31 bp, Artificial Sequence
  Synthetic oligonucleotide
atcggaaaatttacgggaattatatgggggc

SEQ ID NO: 493670 - DNA, 30 bp, Artificial Sequence
  Synthetic oligonucleotide
cttagacacgccccctagagagctgggggc

SEQ ID NO: 493671 - DNA, 30 bp, Artificial Sequence
  Synthetic oligonucleotide
cattgggcggccagagagacccgctggggc

SEQ ID NO: 493672 - DNA, 30 bp, Artificial Sequence
  Synthetic oligonucleotide
gtcttgaagcgcttgtgcgacttctggggc

SEQ ID NO: 493673 - DNA, 30 bp, Artificial Sequence
  Synthetic oligonucleotide
ttaacgtcccgcttggatttccggtggggc

SEQ ID NO: 493674 - DNA, 30 bp, Artificial Sequence
  Synthetic oligonucleotide
aaaacatgtttggggggaaactccatgggc

SEQ ID NO: 493675 - DNA, 30 bp, Artificial Sequence
  Synthetic oligonucleotide
gtatttcgattgtttaataatttcatgggc

SEQ ID NO: 493676 - DNA, 30 bp, Artificial Sequence
  Synthetic oligonucleotide
tcgcacagttccctcaacaactagatgggc

SEQ ID NO: 493677 - DNA, 30 bp, Artificial Sequence
  Synthetic oligonucleotide
aaactcagcagggagcttctgtcgatgggc

SEQ ID NO: 493678 - DNA, 26 bp, Artificial Sequence
  Synthetic oligonucleotide
aagggtggaatttccgtgggatgggc

SEQ ID NO: 493679 - DNA, 30 bp, Artificial Sequence
  Synthetic oligonucleotide
acgaccactagcggtctttagcatatgggc

SEQ ID NO: 493680 - DNA, 30 bp, Artificial Sequence
  Synthetic oligonucleotide
tatccacgcggatcgcgacgccctatgggc

SEQ ID NO: 493681 - DNA, 30 bp, Artificial Sequence
  Synthetic oligonucleotide
gaccatatacctgtaaatgcacgtatgggc

SEQ ID NO: 493682 - DNA, 30 bp, Artificial Sequence
  Synthetic oligonucleotide
agcacaccgattgctcgctgcagactgggc

SEQ ID NO: 493683 - DNA, 30 bp, Artificial Sequence
  Synthetic oligonucleotide
aagttccggatgtgacagctcctactgggc

SEQ ID NO: 493684 - DNA, 30 bp, Artificial Sequence
  Synthetic oligonucleotide
ggtcaaccgcacttatgactgaagctgggc

SEQ ID NO: 493685 - DNA, 30 bp, Artificial Sequence
  Synthetic oligonucleotide
taatgaagttttaagctgcatcatctgggc

SEQ ID NO: 493686 - DNA, 30 bp, Artificial Sequence
  Synthetic oligonucleotide
tcccggtgtgggaacttaacacgagtgggc

SEQ ID NO: 493687 - DNA, 30 bp, Artificial Sequence
  Synthetic oligonucleotide
tatgtatgtaggcttgctaagagggtgggc

SEQ ID NO: 493688 - DNA, 30 bp, Artificial Sequence
  Synthetic oligonucleotide
ttctggccgcacaataaaatacctttgggc

SEQ ID NO: 493689 - DNA, 30 bp, Artificial Sequence
  Synthetic oligonucleotide
tacataacgcctcgtccaagagttttgggc

SEQ ID NO: 493690 - DNA, 30 bp, Artificial Sequence
  Synthetic oligonucleotide
ttgggcaaacatgcggtcggttttttgggc

SEQ ID NO: 493691 - DNA, 30 bp, Artificial Sequence
  Synthetic oligonucleotide
gcttttaattatccatccgtaccaaatggc

SEQ ID NO: 493692 - DNA, 30 bp, Artificial Sequence
  Synthetic oligonucleotide
ttcattgggatcttattgaccaagaatggc

SEQ ID NO: 493693 - DNA, 30 bp, Artificial Sequence
  Synthetic oligonucleotide
actaatttaggaaaagctctacggaatggc

SEQ ID NO: 493694 - DNA, 30 bp, Artificial Sequence
  Synthetic oligonucleotide
aaaattcctggtacctgtgaaactaatggc

SEQ ID NO: 493695 - DNA, 30 bp, Artificial Sequence
  Synthetic oligonucleotide
ccataaataccgtagtgtggatctaatggc

SEQ ID NO: 493696 - DNA, 30 bp, Artificial Sequence
  Synthetic oligonucleotide
tggctattggttttggcaagccttaatggc

SEQ ID NO: 493697 - DNA, 30 bp, Artificial Sequence
  Synthetic oligonucleotide
caattttttcatcgtggctgttaccatggc

SEQ ID NO: 493698 - DNA, 30 bp, Artificial Sequence
  Synthetic oligonucleotide
actgttcggctagcggttctatgagatggc

SEQ ID NO: 493699 - DNA, 30 bp, Artificial Sequence
  Synthetic oligonucleotide
tgttctgtctcctaaacgacgcaggatggc

SEQ ID NO: 493700 - DNA, 30 bp, Artificial Sequence
  Synthetic oligonucleotide
gtaaagatcacagcccggaggcaggatggc

SEQ ID NO: 493701 - DNA, 30 bp, Artificial Sequence
  Synthetic oligonucleotide
tatgagggcgagaggttgctccctgatggc

SEQ ID NO: 493702 - DNA, 30 bp, Artificial Sequence
  Synthetic oligonucleotide
ttttgttagggtcaaagcagaggtgatggc

SEQ ID NO: 493703 - DNA, 30 bp, Artificial Sequence
  Synthetic oligonucleotide
tacacagccacgaaggattcttaatatggc

SEQ ID NO: 493704 - DNA, 30 bp, Artificial Sequence
  Synthetic oligonucleotide
attatgggtgaaagacgaggaatctatggc

SEQ ID NO: 493705 - DNA, 30 bp, Artificial Sequence
  Synthetic oligonucleotide
acgggcgactctgtcgccgcggggtatggc

SEQ ID NO: 493706 - DNA, 30 bp, Artificial Sequence
  Synthetic oligonucleotide
ttaaaatgagcaagatccttaacttatggc

SEQ ID NO: 493707 - DNA, 30 bp, Artificial Sequence
  Synthetic oligonucleotide
cactccacccataggcacaagttttatggc

SEQ ID NO: 493708 - DNA, 30 bp, Artificial Sequence
  Synthetic oligonucleotide
gtattgcagcggctggtataaaaaactggc

SEQ ID NO: 493709 - DNA, 30 bp, Artificial Sequence
  Synthetic oligonucleotide
cttaatggattctggcaagcaaagactggc

SEQ ID NO: 493710 - DNA, 27 bp, Artificial Sequence
  Synthetic oligonucleotide
cgctattcagtcaatccatggactggc

SEQ ID NO: 493711 - DNA, 30 bp, Artificial Sequence
  Synthetic oligonucleotide
ggccgcacgggtctatcggcctgacctggc

SEQ ID NO: 493712 - DNA, 30 bp, Artificial Sequence
  Synthetic oligonucleotide
acttttttggcttggtctagaagcgctggc

SEQ ID NO: 493713 - DNA, 30 bp, Artificial Sequence
  Synthetic oligonucleotide
gcattggatatgttctataccggcgctggc

SEQ ID NO: 493714 - DNA, 30 bp, Artificial Sequence
  Synthetic oligonucleotide
gcgacaaaccttttaagggttatcgctggc

SEQ ID NO: 493715 - DNA, 30 bp, Artificial Sequence
  Synthetic oligonucleotide
attgaaagtcgagtagagcgcaatgctggc

SEQ ID NO: 493716 - DNA, 30 bp, Artificial Sequence
  Synthetic oligonucleotide
ccatccagttctggctaggccagtgctggc

SEQ ID NO: 493717 - DNA, 30 bp, Artificial Sequence
  Synthetic oligonucleotide
ctcccgcggttgctgtgagtatttgctggc

SEQ ID NO: 493718 - DNA, 30 bp, Artificial Sequence
  Synthetic oligonucleotide
gttggatgatcccgctccgcgctatctggc

SEQ ID NO: 493719 - DNA, 30 bp, Artificial Sequence
  Synthetic oligonucleotide
ggagcgctgatgcctatcaggctatctggc

SEQ ID NO: 493720 - DNA, 30 bp, Artificial Sequence
  Synthetic oligonucleotide
ctagattcggccgaaggccatttatctggc

SEQ ID NO: 493721 - DNA, 30 bp, Artificial Sequence
  Synthetic oligonucleotide
gcttcggcctcagccgaatcaatctctggc

SEQ ID NO: 493722 - DNA, 30 bp, Artificial Sequence
  Synthetic oligonucleotide
attcgtttttgcaaaattactatctctggc

SEQ ID NO: 493723 - DNA, 30 bp, Artificial Sequence
  Synthetic oligonucleotide
gaccccgccaggggtatttatgggtctggc

SEQ ID NO: 493724 - DNA, 30 bp, Artificial Sequence
  Synthetic oligonucleotide
cgccgtaccgagttatattaacattctggc

SEQ ID NO: 493725 - DNA, 30 bp, Artificial Sequence
  Synthetic oligonucleotide
acataaagttcctatagtagaagcagtggc

SEQ ID NO: 493726 - DNA, 30 bp, Artificial Sequence
  Synthetic oligonucleotide
tgattcccgcacgtgacaccattcagtggc

SEQ ID NO: 493727 - DNA, 30 bp, Artificial Sequence
  Synthetic oligonucleotide
atctgtccccgggtgatataccctagtggc

SEQ ID NO: 493728 - DNA, 30 bp, Artificial Sequence
  Synthetic oligonucleotide
atgcgagcggataaatatcggtcccgtggc

SEQ ID NO: 493729 - DNA, 30 bp, Artificial Sequence
  Synthetic oligonucleotide
tatatctctcccgggctcggccagcgtggc

SEQ ID NO: 493730 - DNA, 30 bp, Artificial Sequence
  Synthetic oligonucleotide
cctggtcctatttaaatgctcccgcgtggc

SEQ ID NO: 493731 - DNA, 30 bp, Artificial Sequence
  Synthetic oligonucleotide
gatctttatcgtgtataggttatgcgtggc

SEQ ID NO: 493732 - DNA, 30 bp, Artificial Sequence
  Synthetic oligonucleotide
tgtcacagcagacttggttctggaggtggc

SEQ ID NO: 493733 - DNA, 30 bp, Artificial Sequence
  Synthetic oligonucleotide
atttaacgtcgttaaggtttagtaggtggc

SEQ ID NO: 493734 - DNA, 30 bp, Artificial Sequence
  Synthetic oligonucleotide
ccgagctcgtctttattcgtaaacggtggc

SEQ ID NO: 493735 - DNA, 30 bp, Artificial Sequence
  Synthetic oligonucleotide
agtggtatatgcgctgacccaggcggtggc

SEQ ID NO: 493736 - DNA, 30 bp, Artificial Sequence
  Synthetic oligonucleotide
gcactcgtacgaataacgttattcggtggc

SEQ ID NO: 493737 - DNA, 30 bp, Artificial Sequence
  Synthetic oligonucleotide
agggtcattcagaatcccatttcgggtggc

SEQ ID NO: 493738 - DNA, 30 bp, Artificial Sequence
  Synthetic oligonucleotide
cacaatcaccccgtgtaaaaacggggtggc

SEQ ID NO: 493739 - DNA, 30 bp, Artificial Sequence
  Synthetic oligonucleotide
atatcagattgtgattatactaatggtggc

SEQ ID NO: 493740 - DNA, 30 bp, Artificial Sequence
  Synthetic oligonucleotide
gtggaagagccaataggtgtgtatggtggc

SEQ ID NO: 493741 - DNA, 30 bp, Artificial Sequence
  Synthetic oligonucleotide
gtgcggccggtgttttttttgcttggtggc

SEQ ID NO: 493742 - DNA, 30 bp, Artificial Sequence
  Synthetic oligonucleotide
tacgttaagacagacgcgtcagttggtggc

SEQ ID NO: 493743 - DNA, 30 bp, Artificial Sequence
  Synthetic oligonucleotide
gatattagttgagataccgcgcaatgtggc

SEQ ID NO: 493744 - DNA, 30 bp, Artificial Sequence
  Synthetic oligonucleotide
taccgatctttgggtccatatcaatgtggc

SEQ ID NO: 493745 - DNA, 30 bp, Artificial Sequence
  Synthetic oligonucleotide
gcagccagaattgaatgcgtacagtgtggc

SEQ ID NO: 493746 - DNA, 30 bp, Artificial Sequence
  Synthetic oligonucleotide
aactctatctcatttacatccgagtgtggc

SEQ ID NO: 493747 - DNA, 30 bp, Artificial Sequence
  Synthetic oligonucleotide
aatggaggggctcctgggagggtttgtggc

SEQ ID NO: 493748 - DNA, 30 bp, Artificial Sequence
  Synthetic oligonucleotide
gtttggtcctctatggtacttggaattggc

SEQ ID NO: 493749 - DNA, 30 bp, Artificial Sequence
  Synthetic oligonucleotide
tatatatatttgttcacagatataattggc

SEQ ID NO: 493750 - DNA, 31 bp, Artificial Sequence
  Synthetic oligonucleotide
atctctatttttgcgcgataagttaattggc

SEQ ID NO: 493751 - DNA, 30 bp, Artificial Sequence
  Synthetic oligonucleotide
gaaatcgcacgctaggtgcttaacattggc

SEQ ID NO: 493752 - DNA, 30 bp, Artificial Sequence
  Synthetic oligonucleotide
ttcggcacatagcgccacatcgctattggc

SEQ ID NO: 493753 - DNA, 30 bp, Artificial Sequence
  Synthetic oligonucleotide
tcccgagaatgtacatcatctcgtattggc

SEQ ID NO: 493754 - DNA, 30 bp, Artificial Sequence
  Synthetic oligonucleotide
aagccaccgccttggggtgttagccttggc

SEQ ID NO: 493755 - DNA, 30 bp, Artificial Sequence
  Synthetic oligonucleotide
gcaggacccggttgatacagtcagcttggc

SEQ ID NO: 493756 - DNA, 30 bp, Artificial Sequence
  Synthetic oligonucleotide
tccttagattcggaggttgtttgtcttggc

SEQ ID NO: 493757 - DNA, 30 bp, Artificial Sequence
  Synthetic oligonucleotide
gccaatagaaccattcaagcctttcttggc

SEQ ID NO: 493758 - DNA, 30 bp, Artificial Sequence
  Synthetic oligonucleotide
gggctccgagagaactatacagcggttggc

SEQ ID NO: 493759 - DNA, 30 bp, Artificial Sequence
  Synthetic oligonucleotide
ataaagactcccgcgtacggccgggttggc

SEQ ID NO: 493760 - DNA, 30 bp, Artificial Sequence
  Synthetic oligonucleotide
cgcagctaagagtgaagggatagtgttggc

SEQ ID NO: 493761 - DNA, 30 bp, Artificial Sequence
  Synthetic oligonucleotide
acatatttttcccctgcgcagcaatttggc

SEQ ID NO: 493762 - DNA, 30 bp, Artificial Sequence
  Synthetic oligonucleotide
tgagctgcgactaaccgctgaggctttggc

SEQ ID NO: 493763 - DNA, 30 bp, Artificial Sequence
  Synthetic oligonucleotide
gctacacccgtatgaaacgcagtgtttggc

SEQ ID NO: 493764 - DNA, 30 bp, Artificial Sequence
  Synthetic oligonucleotide
ggtgcggtcggcctattttcggtttttggc

SEQ ID NO: 493765 - DNA, 30 bp, Artificial Sequence
  Synthetic oligonucleotide
ggcaagtaccgtcctctcaggccgaaatgc

SEQ ID NO: 493766 - DNA, 30 bp, Artificial Sequence
  Synthetic oligonucleotide
attgtcctaggggaaagttagtctaaatgc

SEQ ID NO: 493767 - DNA, 30 bp, Artificial Sequence
  Synthetic oligonucleotide
gcgtttttagcggtaatgtgaggtaaatgc

SEQ ID NO: 493768 - DNA, 30 bp, Artificial Sequence
  Synthetic oligonucleotide
tttttccacacctgaaaacggggtaaatgc

SEQ ID NO: 493769 - DNA, 30 bp, Artificial Sequence
  Synthetic oligonucleotide
gaaatgtcacttgcactcaggccgcaatgc

SEQ ID NO: 493770 - DNA, 30 bp, Artificial Sequence
  Synthetic oligonucleotide
tatcccggcgtcaaaaatgatgggcaatgc

SEQ ID NO: 493771 - DNA, 30 bp, Artificial Sequence
  Synthetic oligonucleotide
attttagccgtctggtcggagtaagaatgc

SEQ ID NO: 493772 - DNA, 30 bp, Artificial Sequence
  Synthetic oligonucleotide
agatttagtcctaagtttagtcgagaatgc

SEQ ID NO: 493773 - DNA, 30 bp, Artificial Sequence
  Synthetic oligonucleotide
cgtaggaacgcattgcagatgaaggaatgc

SEQ ID NO: 493774 - DNA, 30 bp, Artificial Sequence
  Synthetic oligonucleotide
gctactgcacaaggctcaagcatggaatgc

SEQ ID NO: 493775 - DNA, 30 bp, Artificial Sequence
  Synthetic oligonucleotide
acgatcaagttacggcagattcttgaatgc

SEQ ID NO: 493776 - DNA, 30 bp, Artificial Sequence
  Synthetic oligonucleotide
tccggaacagccgcaattcttagataatgc

SEQ ID NO: 493777 - DNA, 30 bp, Artificial Sequence
  Synthetic oligonucleotide
tgcgctgcagtaaagattaaagactaatgc

SEQ ID NO: 493778 - DNA, 30 bp, Artificial Sequence
  Synthetic oligonucleotide
gagtatgagttctgactgcatacctaatgc

SEQ ID NO: 493779 - DNA, 30 bp, Artificial Sequence
  Synthetic oligonucleotide
taagcgccgcatcgctcgggtaagtaatgc

SEQ ID NO: 493780 - DNA, 30 bp, Artificial Sequence
  Synthetic oligonucleotide
aaaattcgatctctgtatggatggtaatgc

SEQ ID NO: 493781 - DNA, 30 bp, Artificial Sequence
  Synthetic oligonucleotide
tggttactattgtcacgtcagatgacatgc

SEQ ID NO: 493782 - DNA, 30 bp, Artificial Sequence
  Synthetic oligonucleotide
caggccccgttcgctaggttgtgaccatgc

SEQ ID NO: 493783 - DNA, 30 bp, Artificial Sequence
  Synthetic oligonucleotide
ggccgttattagtactcggcgcaagcatgc

SEQ ID NO: 493784 - DNA, 30 bp, Artificial Sequence
  Synthetic oligonucleotide
taacgccgacgcgacagggcacgcgcatgc

SEQ ID NO: 493785 - DNA, 30 bp, Artificial Sequence
  Synthetic oligonucleotide
agattatctgatgtacaagcattggcatgc

SEQ ID NO: 493786 - DNA, 30 bp, Artificial Sequence
  Synthetic oligonucleotide
tctggacctgatttgacggtggcatcatgc

SEQ ID NO: 493787 - DNA, 30 bp, Artificial Sequence
  Synthetic oligonucleotide
gatccttcagactcaccttagcactcatgc

SEQ ID NO: 493788 - DNA, 30 bp, Artificial Sequence
  Synthetic oligonucleotide
ccggcacccaaggttcttgacttctcatgc

SEQ ID NO: 493789 - DNA, 30 bp, Artificial Sequence
  Synthetic oligonucleotide
acgctcgattctatggcacttatgtcatgc

SEQ ID NO: 493790 - DNA, 30 bp, Artificial Sequence
  Synthetic oligonucleotide
agcaacctggaagtagcagctatttcatgc

SEQ ID NO: 493791 - DNA, 30 bp, Artificial Sequence
  Synthetic oligonucleotide
ttactatgtaccacagcgactataagatgc

SEQ ID NO: 493792 - DNA, 30 bp, Artificial Sequence
  Synthetic oligonucleotide
tgctttgtttccggacactacgtaagatgc

SEQ ID NO: 493793 - DNA, 30 bp, Artificial Sequence
  Synthetic oligonucleotide
taatgatatggagttaagcgcttcagatgc

SEQ ID NO: 493794 - DNA, 30 bp, Artificial Sequence
  Synthetic oligonucleotide
ttagaacttgaatatcaggactggagatgc

SEQ ID NO: 493795 - DNA, 30 bp, Artificial Sequence
  Synthetic oligonucleotide
attcccttgtaagcttttggattgagatgc

SEQ ID NO: 493796 - DNA, 30 bp, Artificial Sequence
  Synthetic oligonucleotide
actcgacgcagtcggcaggttaaacgatgc

SEQ ID NO: 493797 - DNA, 30 bp, Artificial Sequence
  Synthetic oligonucleotide
ggaagtgtagggtttttgtcagaccgatgc

SEQ ID NO: 493798 - DNA, 30 bp, Artificial Sequence
  Synthetic oligonucleotide
taagtaggaattggatacatctatcgatgc

SEQ ID NO: 493799 - DNA, 30 bp, Artificial Sequence
  Synthetic oligonucleotide
aatgtatagggctcagtttaacttcgatgc

SEQ ID NO: 493800 - DNA, 30 bp, Artificial Sequence
  Synthetic oligonucleotide
gctttgtcgtaaaattgttcggacggatgc

SEQ ID NO: 493801 - DNA, 30 bp, Artificial Sequence
  Synthetic oligonucleotide
atgatcacgccaagagctccgtccggatgc

SEQ ID NO: 493802 - DNA, 30 bp, Artificial Sequence
  Synthetic oligonucleotide
ggggtaaggaggcatcagcgtacgggatgc

SEQ ID NO: 493803 - DNA, 30 bp, Artificial Sequence
  Synthetic oligonucleotide
ttcagaggggtacgtctgtccgggggatgc

SEQ ID NO: 493804 - DNA, 30 bp, Artificial Sequence
  Synthetic oligonucleotide
cggatatctcagacccagccaatgggatgc

SEQ ID NO: 493805 - DNA, 30 bp, Artificial Sequence
  Synthetic oligonucleotide
attaggtgatagatactgagatatggatgc

SEQ ID NO: 493806 - DNA, 30 bp, Artificial Sequence
  Synthetic oligonucleotide
tttttgattgctttgatatcatttggatgc

SEQ ID NO: 493807 - DNA, 30 bp, Artificial Sequence
  Synthetic oligonucleotide
actgcaaaaaacggaataaaacaatgatgc

SEQ ID NO: 493808 - DNA, 30 bp, Artificial Sequence
  Synthetic oligonucleotide
cattgcagtacatacaaaataccatgatgc

SEQ ID NO: 493809 - DNA, 30 bp, Artificial Sequence
  Synthetic oligonucleotide
gtgataaccccggtaagtcaggcatgatgc

SEQ ID NO: 493810 - DNA, 31 bp, Artificial Sequence
  Synthetic oligonucleotide
cggctcctcttttgtattacgttcatgatgc

SEQ ID NO: 493811 - DNA, 30 bp, Artificial Sequence
  Synthetic oligonucleotide
aaaacctactgtcggcggtctaactgatgc

SEQ ID NO: 493812 - DNA, 30 bp, Artificial Sequence
  Synthetic oligonucleotide
aaggctgaagcagctgacttattctgatgc

SEQ ID NO: 493813 - DNA, 30 bp, Artificial Sequence
  Synthetic oligonucleotide
ttcccacgaacaggtcattgaagttgatgc

SEQ ID NO: 493814 - DNA, 30 bp, Artificial Sequence
  Synthetic oligonucleotide
ggattgtaataacctatatgtgaaatatgc

SEQ ID NO: 493815 - DNA, 30 bp, Artificial Sequence
  Synthetic oligonucleotide
gcctcgtactaccgcggaatcataatatgc

SEQ ID NO: 493816 - DNA, 30 bp, Artificial Sequence
  Synthetic oligonucleotide
tgattgggcggctcagttgccgccatatgc

SEQ ID NO: 493817 - DNA, 30 bp, Artificial Sequence
  Synthetic oligonucleotide
gatttatactggcacaggttcaagatatgc

SEQ ID NO: 493818 - DNA, 30 bp, Artificial Sequence
  Synthetic oligonucleotide
gtggacgtcctctgtagaaactggatatgc

SEQ ID NO: 493819 - DNA, 30 bp, Artificial Sequence
  Synthetic oligonucleotide
aaaaacccgacaaggatctgcatgatatgc

SEQ ID NO: 493820 - DNA, 30 bp, Artificial Sequence
  Synthetic oligonucleotide
aatctcactgcaccctgattacgtatatgc

SEQ ID NO: 493821 - DNA, 30 bp, Artificial Sequence
  Synthetic oligonucleotide
gtgccgcttagaagacccgcttgtatatgc

SEQ ID NO: 493822 - DNA, 30 bp, Artificial Sequence
  Synthetic oligonucleotide
tagacagtcattgaacacacaattatatgc

SEQ ID NO: 493823 - DNA, 30 bp, Artificial Sequence
  Synthetic oligonucleotide
tttactagtataatgtgaagttaactatgc

SEQ ID NO: 493824 - DNA, 30 bp, Artificial Sequence
  Synthetic oligonucleotide
tttaccgttagaagcaccagttacctatgc

SEQ ID NO: 493825 - DNA, 30 bp, Artificial Sequence
  Synthetic oligonucleotide
agtagagtggccccaaaactgaggctatgc

SEQ ID NO: 493826 - DNA, 30 bp, Artificial Sequence
  Synthetic oligonucleotide
agtcgtcggtacgtttgccagtcagtatgc

SEQ ID NO: 493827 - DNA, 30 bp, Artificial Sequence
  Synthetic oligonucleotide
ttaaagcgcacgtaaagtagaagagtatgc

SEQ ID NO: 493828 - DNA, 30 bp, Artificial Sequence
  Synthetic oligonucleotide
tagccactgacgcggtaggtttgagtatgc

SEQ ID NO: 493829 - DNA, 30 bp, Artificial Sequence
  Synthetic oligonucleotide
ggcttcttcttaaggtcctttaaggtatgc

SEQ ID NO: 493830 - DNA, 30 bp, Artificial Sequence
  Synthetic oligonucleotide
agcacacgtgacgggggagcgcgggtatgc

SEQ ID NO: 493831 - DNA, 30 bp, Artificial Sequence
  Synthetic oligonucleotide
tttgaccggtttaaacgcgccccattatgc

SEQ ID NO: 493832 - DNA, 30 bp, Artificial Sequence
  Synthetic oligonucleotide
agtgacagtgtatagaatcctagattatgc

SEQ ID NO: 493833 - DNA, 30 bp, Artificial Sequence
  Synthetic oligonucleotide
aatttacaaccagtaacaaggggattatgc

SEQ ID NO: 493834 - DNA, 30 bp, Artificial Sequence
  Synthetic oligonucleotide
gtttcaaaaatttagaaggatgacttatgc

SEQ ID NO: 493835 - DNA, 30 bp, Artificial Sequence
  Synthetic oligonucleotide
accgcccaccctagtttgatcatgttatgc

SEQ ID NO: 493836 - DNA, 30 bp, Artificial Sequence
  Synthetic oligonucleotide
ttttgcgtaggacgcataactgatttatgc

SEQ ID NO: 493837 - DNA, 30 bp, Artificial Sequence
  Synthetic oligonucleotide
gggccaggcacgatcagtgaatctttatgc

SEQ ID NO: 493838 - DNA, 30 bp, Artificial Sequence
  Synthetic oligonucleotide
gagggtcaccagcatcagatctaaaactgc

SEQ ID NO: 493839 - DNA, 30 bp, Artificial Sequence
  Synthetic oligonucleotide
ttagcacatcgacgggaggcggtaaactgc

SEQ ID NO: 493840 - DNA, 30 bp, Artificial Sequence
  Synthetic oligonucleotide
ggcatccagcgttatcgatctctcaactgc

SEQ ID NO: 493841 - DNA, 30 bp, Artificial Sequence
  Synthetic oligonucleotide
gggtgacgataagacgcttgattcaactgc

SEQ ID NO: 493842 - DNA, 30 bp, Artificial Sequence
  Synthetic oligonucleotide
ggaatgcgagacctaccgctagcgaactgc

SEQ ID NO: 493843 - DNA, 30 bp, Artificial Sequence
  Synthetic oligonucleotide
cctctagtgatgtcttcatcgtggaactgc

SEQ ID NO: 493844 - DNA, 30 bp, Artificial Sequence
  Synthetic oligonucleotide
tggccgcggcgtacagtgtaagttaactgc

SEQ ID NO: 493845 - DNA, 30 bp, Artificial Sequence
  Synthetic oligonucleotide
agaatgtatcggatttgtccaggccactgc

SEQ ID NO: 493846 - DNA, 30 bp, Artificial Sequence
  Synthetic oligonucleotide
ggttagcgggggcggtcgcacccgcactgc

SEQ ID NO: 493847 - DNA, 30 bp, Artificial Sequence
  Synthetic oligonucleotide
ggttaacaagcctacattagatcgcactgc

SEQ ID NO: 493848 - DNA, 30 bp, Artificial Sequence
  Synthetic oligonucleotide
acaatttttcgacgcggaccgcggcactgc

SEQ ID NO: 493849 - DNA, 30 bp, Artificial Sequence
  Synthetic oligonucleotide
gatatatctgagacttgtcttagtcactgc

SEQ ID NO: 493850 - DNA, 30 bp, Artificial Sequence
  Synthetic oligonucleotide
gcagcatttctgagggcgcgaaaagactgc

SEQ ID NO: 493851 - DNA, 30 bp, Artificial Sequence
  Synthetic oligonucleotide
taaatagatcaatcgctcggcgcagactgc

SEQ ID NO: 493852 - DNA, 30 bp, Artificial Sequence
  Synthetic oligonucleotide
gcagtgtcaccccttatatgggtagactgc

SEQ ID NO: 493853 - DNA, 30 bp, Artificial Sequence
  Synthetic oligonucleotide
ggtttagaaagcgaatttgttttagactgc

SEQ ID NO: 493854 - DNA, 30 bp, Artificial Sequence
  Synthetic oligonucleotide
tacgctggttccggcataaccgacgactgc

SEQ ID NO: 493855 - DNA, 30 bp, Artificial Sequence
  Synthetic oligonucleotide
ggttaccctgcgcggctgaattaggactgc

SEQ ID NO: 493856 - DNA, 30 bp, Artificial Sequence
  Synthetic oligonucleotide
tgcagtcgtagccgggttattgcggactgc

SEQ ID NO: 493857 - DNA, 30 bp, Artificial Sequence
  Synthetic oligonucleotide
aacatgatacttaacattatgtcggactgc

SEQ ID NO: 493858 - DNA, 30 bp, Artificial Sequence
  Synthetic oligonucleotide
tatttatacttgccgttatttagggactgc

SEQ ID NO: 493859 - DNA, 30 bp, Artificial Sequence
  Synthetic oligonucleotide
cacgaacatgggtcctcatcccatgactgc

SEQ ID NO: 493860 - DNA, 30 bp, Artificial Sequence
  Synthetic oligonucleotide
ctgtgacccattgccggactctgtgactgc

SEQ ID NO: 493861 - DNA, 30 bp, Artificial Sequence
  Synthetic oligonucleotide
gtttatagcgtcggagttaagtttgactgc

SEQ ID NO: 493862 - DNA, 30 bp, Artificial Sequence
  Synthetic oligonucleotide
tattattgtatctctggggtgtagtactgc

SEQ ID NO: 493863 - DNA, 30 bp, Artificial Sequence
  Synthetic oligonucleotide
ctctatactataaattcgggtatgtactgc

SEQ ID NO: 493864 - DNA, 30 bp, Artificial Sequence
  Synthetic oligonucleotide
aaatccgtttttattagaggaaaaacctgc

SEQ ID NO: 493865 - DNA, 30 bp, Artificial Sequence
  Synthetic oligonucleotide
gtgaaaaacctttaatcggttatcacctgc

SEQ ID NO: 493866 - DNA, 30 bp, Artificial Sequence
  Synthetic oligonucleotide
aggggggtcaactgccgatgccggccctgc

SEQ ID NO: 493867 - DNA, 30 bp, Artificial Sequence
  Synthetic oligonucleotide
atttatcgagtgatccggtacaatccctgc

SEQ ID NO: 493868 - DNA, 30 bp, Artificial Sequence
  Synthetic oligonucleotide
atgacttgcatcatagccaggggtccctgc

SEQ ID NO: 493869 - DNA, 30 bp, Artificial Sequence
  Synthetic oligonucleotide
cgggcacgccgggccacagcacaagcctgc

SEQ ID NO: 493870 - DNA, 30 bp, Artificial Sequence
  Synthetic oligonucleotide
ggttggtaggccggggatttctatgcctgc

SEQ ID NO: 493871 - DNA, 30 bp, Artificial Sequence
  Synthetic oligonucleotide
ttggatattcaccggtatactcgtgcctgc

SEQ ID NO: 493872 - DNA, 30 bp, Artificial Sequence
  Synthetic oligonucleotide
gaatccacaccggtgctttactactcctgc

SEQ ID NO: 493873 - DNA, 30 bp, Artificial Sequence
  Synthetic oligonucleotide
ggttctgtgggggttccagaaatctcctgc

SEQ ID NO: 493874 - DNA, 30 bp, Artificial Sequence
  Synthetic oligonucleotide
tgcggtatcttttcttcccgaagttcctgc

SEQ ID NO: 493875 - DNA, 30 bp, Artificial Sequence
  Synthetic oligonucleotide
ggccctcttttactctagcctccaagctgc

SEQ ID NO: 493876 - DNA, 30 bp, Artificial Sequence
  Synthetic oligonucleotide
gggtttagtcggggcgggagggtcagctgc

SEQ ID NO: 493877 - DNA, 30 bp, Artificial Sequence
  Synthetic oligonucleotide
attgactctaaagtgtaatattagagctgc

SEQ ID NO: 493878 - DNA, 30 bp, Artificial Sequence
  Synthetic oligonucleotide
gggcaagtttaccaccctggaccgagctgc

SEQ ID NO: 493879 - DNA, 30 bp, Artificial Sequence
  Synthetic oligonucleotide
ccgtttgaaacttagccctcttcgagctgc

SEQ ID NO: 493880 - DNA, 30 bp, Artificial Sequence
  Synthetic oligonucleotide
taatagatccaagctaccctacggagctgc

SEQ ID NO: 493881 - DNA, 30 bp, Artificial Sequence
  Synthetic oligonucleotide
aatgactggctcaagcagtgtacacgctgc

SEQ ID NO: 493882 - DNA, 30 bp, Artificial Sequence
  Synthetic oligonucleotide
ccaaaactttgatgcgtggcaagccgctgc

SEQ ID NO: 493883 - DNA, 30 bp, Artificial Sequence
  Synthetic oligonucleotide
tgggatgagttgttggccacggcgcgctgc

SEQ ID NO: 493884 - DNA, 30 bp, Artificial Sequence
  Synthetic oligonucleotide
gctaccgggtattttggtagggcgcgctgc

SEQ ID NO: 493885 - DNA, 30 bp, Artificial Sequence
  Synthetic oligonucleotide
atcggcccctaaaggggccatagtcgctgc

SEQ ID NO: 493886 - DNA, 30 bp, Artificial Sequence
  Synthetic oligonucleotide
cattgtttctacctgttacatacgggctgc

SEQ ID NO: 493887 - DNA, 30 bp, Artificial Sequence
  Synthetic oligonucleotide
ttttaagttgtagccagaccttgatgctgc

SEQ ID NO: 493888 - DNA, 30 bp, Artificial Sequence
  Synthetic oligonucleotide
agggcatgcttttcgcattcgctatgctgc

SEQ ID NO: 493889 - DNA, 30 bp, Artificial Sequence
  Synthetic oligonucleotide
cgtacttgacgtacctgtttgctgtgctgc

SEQ ID NO: 493890 - DNA, 30 bp, Artificial Sequence
  Synthetic oligonucleotide
tttgatttagcttcgtcaacgccttgctgc

SEQ ID NO: 493891 - DNA, 30 bp, Artificial Sequence
  Synthetic oligonucleotide
gatgtatcacgcagccttcatgaaatctgc

SEQ ID NO: 493892 - DNA, 30 bp, Artificial Sequence
  Synthetic oligonucleotide
taaattttacaccgagtgggttccatctgc

SEQ ID NO: 493893 - DNA, 30 bp, Artificial Sequence
  Synthetic oligonucleotide
agggaaaacccagaaaaatccatgatctgc

SEQ ID NO: 493894 - DNA, 30 bp, Artificial Sequence
  Synthetic oligonucleotide
gagtggtctgtaccgcgactgcctatctgc

SEQ ID NO: 493895 - DNA, 30 bp, Artificial Sequence
  Synthetic oligonucleotide
aattaggctcatcagcgcggcaccctctgc

SEQ ID NO: 493896 - DNA, 30 bp, Artificial Sequence
  Synthetic oligonucleotide
ggaaaccggtgtctcgtcgggtgcctctgc

SEQ ID NO: 493897 - DNA, 30 bp, Artificial Sequence
  Synthetic oligonucleotide
gagctctccaagggatattgtatcctctgc

SEQ ID NO: 493898 - DNA, 30 bp, Artificial Sequence
  Synthetic oligonucleotide
attgaggattctcagcggctctctctctgc

SEQ ID NO: 493899 - DNA, 30 bp, Artificial Sequence
  Synthetic oligonucleotide
ataacttcgcgtagcgaagtttgagtctgc

SEQ ID NO: 493900 - DNA, 30 bp, Artificial Sequence
  Synthetic oligonucleotide
gttagcctccttacttacatgctggtctgc

SEQ ID NO: 493901 - DNA, 30 bp, Artificial Sequence
  Synthetic oligonucleotide
gtaaggtcgaaattttggtggcatgtctgc

SEQ ID NO: 493902 - DNA, 30 bp, Artificial Sequence
  Synthetic oligonucleotide
ttcccctcactaggaaattattggttctgc

SEQ ID NO: 493903 - DNA, 30 bp, Artificial Sequence
  Synthetic oligonucleotide
gttcacagcctatgtgcagacagtttctgc

SEQ ID NO: 493904 - DNA, 30 bp, Artificial Sequence
  Synthetic oligonucleotide
aagccgtttttacggacaagctaaaagtgc

SEQ ID NO: 493905 - DNA, 30 bp, Artificial Sequence
  Synthetic oligonucleotide
tcaccctttgatgaattagaaataaagtgc

SEQ ID NO: 493906 - DNA, 30 bp, Artificial Sequence
  Synthetic oligonucleotide
ctgcggaccgtgacgttctgcaccaagtgc

SEQ ID NO: 493907 - DNA, 30 bp, Artificial Sequence
  Synthetic oligonucleotide
tctttaaaggcctagtgcacgttgaagtgc

SEQ ID NO: 493908 - DNA, 30 bp, Artificial Sequence
  Synthetic oligonucleotide
ccgagcctgggctcgcccttcaaacagtgc

SEQ ID NO: 493909 - DNA, 30 bp, Artificial Sequence
  Synthetic oligonucleotide
ctagcgacacggtttcctttcatccagtgc

SEQ ID NO: 493910 - DNA, 30 bp, Artificial Sequence
  Synthetic oligonucleotide
gttcacgtcccgattcgaaggtagcagtgc

SEQ ID NO: 493911 - DNA, 30 bp, Artificial Sequence
  Synthetic oligonucleotide
agagtctctaactaaagtatgtcgcagtgc

SEQ ID NO: 493912 - DNA, 30 bp, Artificial Sequence
  Synthetic oligonucleotide
accgtggtaatagggtacgcagctcagtgc

SEQ ID NO: 493913 - DNA, 30 bp, Artificial Sequence
  Synthetic oligonucleotide
cttacggctttgaccaagtagggtcagtgc

SEQ ID NO: 493914 - DNA, 30 bp, Artificial Sequence
  Synthetic oligonucleotide
agcagacacgctgagccggtgtgtcagtgc

SEQ ID NO: 493915 - DNA, 30 bp, Artificial Sequence
  Synthetic oligonucleotide
tagtagtcttccattcgccttccagagtgc

SEQ ID NO: 493916 - DNA, 30 bp, Artificial Sequence
  Synthetic oligonucleotide
agcaatgtaattgctaagtcttacgagtgc

SEQ ID NO: 493917 - DNA, 30 bp, Artificial Sequence
  Synthetic oligonucleotide
tttgggtctaccggatccaaagtatagtgc

SEQ ID NO: 493918 - DNA, 30 bp, Artificial Sequence
  Synthetic oligonucleotide
gggcaaactggacgcaggctgcagtagtgc

SEQ ID NO: 493919 - DNA, 30 bp, Artificial Sequence
  Synthetic oligonucleotide
ggttgctgtaaaagttaagtcggttagtgc

SEQ ID NO: 493920 - DNA, 30 bp, Artificial Sequence
  Synthetic oligonucleotide
ctggaaattcttatgcactagggttagtgc

SEQ ID NO: 493921 - DNA, 30 bp, Artificial Sequence
  Synthetic oligonucleotide
tgagcatatcgaactcgaaatatttagtgc

SEQ ID NO: 493922 - DNA, 30 bp, Artificial Sequence
  Synthetic oligonucleotide
ggtgaaaagattgggatgttttaaacgtgc

SEQ ID NO: 493923 - DNA, 30 bp, Artificial Sequence
  Synthetic oligonucleotide
atctttaggtattgtctggatcgcacgtgc

SEQ ID NO: 493924 - DNA, 30 bp, Artificial Sequence
  Synthetic oligonucleotide
gtgttccatgatacaccgctcagtacgtgc

SEQ ID NO: 493925 - DNA, 30 bp, Artificial Sequence
  Synthetic oligonucleotide
gactggactcagttatctatctgtacgtgc

SEQ ID NO: 493926 - DNA, 30 bp, Artificial Sequence
  Synthetic oligonucleotide
atttaagcagcttgtggtatcacaccgtgc

SEQ ID NO: 493927 - DNA, 30 bp, Artificial Sequence
  Synthetic oligonucleotide
ataatttaatccgtttgacgggtcccgtgc

SEQ ID NO: 493928 - DNA, 30 bp, Artificial Sequence
  Synthetic oligonucleotide
gctaacagtgtaagcaatttctggccgtgc

SEQ ID NO: 493929 - DNA, 30 bp, Artificial Sequence
  Synthetic oligonucleotide
aaagttcaggatgagcatgtgtggccgtgc

SEQ ID NO: 493930 - DNA, 30 bp, Artificial Sequence
  Synthetic oligonucleotide
cggcgggggttcactagggtcgcagcgtgc

SEQ ID NO: 493931 - DNA, 30 bp, Artificial Sequence
  Synthetic oligonucleotide
tacctcaggtaatgaaagcacagagcgtgc

SEQ ID NO: 493932 - DNA, 30 bp, Artificial Sequence
  Synthetic oligonucleotide
cgtcacacaagcgcatacctacgcgcgtgc

SEQ ID NO: 493933 - DNA, 30 bp, Artificial Sequence
  Synthetic oligonucleotide
ctcagctggatagtcgcagcatgcgcgtgc

SEQ ID NO: 493934 - DNA, 30 bp, Artificial Sequence
  Synthetic oligonucleotide
acatccgcctctcggctacaagaggcgtgc

SEQ ID NO: 493935 - DNA, 30 bp, Artificial Sequence
  Synthetic oligonucleotide
ttatcttgcggggtggttgcagaatcgtgc

SEQ ID NO: 493936 - DNA, 30 bp, Artificial Sequence
  Synthetic oligonucleotide
tttacccgccacggctatctcgcatcgtgc

SEQ ID NO: 493937 - DNA, 30 bp, Artificial Sequence
  Synthetic oligonucleotide
caagcctattcaaggtctgtcagatcgtgc

SEQ ID NO: 493938 - DNA, 30 bp, Artificial Sequence
  Synthetic oligonucleotide
aatatcaacactgggaagcagccttcgtgc

SEQ ID NO: 493939 - DNA, 30 bp, Artificial Sequence
  Synthetic oligonucleotide
gtcgcggctataacctcacccgcgaggtgc

SEQ ID NO: 493940 - DNA, 30 bp, Artificial Sequence
  Synthetic oligonucleotide
tgcggcacctccttaaacccctgtaggtgc

SEQ ID NO: 493941 - DNA, 30 bp, Artificial Sequence
  Synthetic oligonucleotide
gctaaccttcggagggagttagttaggtgc

SEQ ID NO: 493942 - DNA, 30 bp, Artificial Sequence
  Synthetic oligonucleotide
cgagcggataatcacaaagactttaggtgc

SEQ ID NO: 493943 - DNA, 30 bp, Artificial Sequence
  Synthetic oligonucleotide
tctcttaattcccctgactgcgcacggtgc

SEQ ID NO: 493944 - DNA, 30 bp, Artificial Sequence
  Synthetic oligonucleotide
gtaagttttgcctgtatgtcagtacggtgc

SEQ ID NO: 493945 - DNA, 30 bp, Artificial Sequence
  Synthetic oligonucleotide
tctacgtagtagcccgtcgtttagcggtgc

SEQ ID NO: 493946 - DNA, 30 bp, Artificial Sequence
  Synthetic oligonucleotide
tcacgagttatggtggaactctctcggtgc

SEQ ID NO: 493947 - DNA, 30 bp, Artificial Sequence
  Synthetic oligonucleotide
cgattgatttttcaccgtggacaagggtgc

SEQ ID NO: 493948 - DNA, 30 bp, Artificial Sequence
  Synthetic oligonucleotide
aaacagttgagtcaaaaagcgtaagggtgc

SEQ ID NO: 493949 - DNA, 30 bp, Artificial Sequence
  Synthetic oligonucleotide
aaccaaatggaatgccgcctagacgggtgc

SEQ ID NO: 493950 - DNA, 30 bp, Artificial Sequence
  Synthetic oligonucleotide
gcttacacccggtttggtaccgacgggtgc

SEQ ID NO: 493951 - DNA, 30 bp, Artificial Sequence
  Synthetic oligonucleotide
agggcaaacgagtaggaaaaaagggggtgc

SEQ ID NO: 493952 - DNA, 30 bp, Artificial Sequence
  Synthetic oligonucleotide
attttgtacagttcctacgcgcagtggtgc

SEQ ID NO: 493953 - DNA, 30 bp, Artificial Sequence
  Synthetic oligonucleotide
cacctatttgtccgaagcgttacgtggtgc

SEQ ID NO: 493954 - DNA, 30 bp, Artificial Sequence
  Synthetic oligonucleotide
tgtatgcccgtttaccgtactaggtggtgc

SEQ ID NO: 493955 - DNA, 30 bp, Artificial Sequence
  Synthetic oligonucleotide
tacccggcaggcgtttggcgagtgtggtgc

SEQ ID NO: 493956 - DNA, 30 bp, Artificial Sequence
  Synthetic oligonucleotide
tatttgtgtatacagagctactattggtgc

SEQ ID NO: 493957 - DNA, 30 bp, Artificial Sequence
  Synthetic oligonucleotide
ccagggtagagggggtgtgaccgtatgtgc

SEQ ID NO: 493958 - DNA, 30 bp, Artificial Sequence
  Synthetic oligonucleotide
tatcgagagggcatgtattttgccctgtgc

SEQ ID NO: 493959 - DNA, 30 bp, Artificial Sequence
  Synthetic oligonucleotide
catgctgagcaaaaacttagcacgctgtgc

SEQ ID NO: 493960 - DNA, 30 bp, Artificial Sequence
  Synthetic oligonucleotide
tcgctcgctgctctaacatggctagtgtgc

SEQ ID NO: 493961 - DNA, 30 bp, Artificial Sequence
  Synthetic oligonucleotide
aaaatgacgcatataacggacttcgtgtgc

SEQ ID NO: 493962 - DNA, 30 bp, Artificial Sequence
  Synthetic oligonucleotide
attcatccttgactacctttcaaggtgtgc

SEQ ID NO: 493963 - DNA, 31 bp, Artificial Sequence
  Synthetic oligonucleotide
gactcaatatgtgatgcgacaagaggtgtgc

SEQ ID NO: 493964 - DNA, 30 bp, Artificial Sequence
  Synthetic oligonucleotide
gtcgcgttctagggtccgccggctgtgtgc

SEQ ID NO: 493965 - DNA, 30 bp, Artificial Sequence
  Synthetic oligonucleotide
aactccgacggtcaacgcaacaaattgtgc

SEQ ID NO: 493966 - DNA, 30 bp, Artificial Sequence
  Synthetic oligonucleotide
tcttaacgcccatatgcgcccccattgtgc

SEQ ID NO: 493967 - DNA, 30 bp, Artificial Sequence
  Synthetic oligonucleotide
agaggcggccgctgagatattggattgtgc

SEQ ID NO: 493968 - DNA, 30 bp, Artificial Sequence
  Synthetic oligonucleotide
gtaggttgtaggcatatagttttattgtgc

SEQ ID NO: 493969 - DNA, 30 bp, Artificial Sequence
  Synthetic oligonucleotide
aacgcgccgataaggctctggcccttgtgc

SEQ ID NO: 493970 - DNA, 30 bp, Artificial Sequence
  Synthetic oligonucleotide
ttaagattaatgaagcaggacctcttgtgc

SEQ ID NO: 493971 - DNA, 30 bp, Artificial Sequence
  Synthetic oligonucleotide
gaagctacgcgatcggcactgactttgtgc

SEQ ID NO: 493972 - DNA, 30 bp, Artificial Sequence
  Synthetic oligonucleotide
tcggctcctttgggacgctgctgtttgtgc

SEQ ID NO: 493973 - DNA, 30 bp, Artificial Sequence
  Synthetic oligonucleotide
gactgttgccggctaatgttaaaaaattgc

SEQ ID NO: 493974 - DNA, 30 bp, Artificial Sequence
  Synthetic oligonucleotide
acctcctttccggtcagaagtaaaaattgc

SEQ ID NO: 493975 - DNA, 30 bp, Artificial Sequence
  Synthetic oligonucleotide
tactcttatagcatggattgtcgaaattgc

SEQ ID NO: 493976 - DNA, 30 bp, Artificial Sequence
  Synthetic oligonucleotide
atcatgacgattggtgtttcacccaattgc

SEQ ID NO: 493977 - DNA, 30 bp, Artificial Sequence
  Synthetic oligonucleotide
tatttccagaccgtttaccatggtaattgc

SEQ ID NO: 493978 - DNA, 30 bp, Artificial Sequence
  Synthetic oligonucleotide
gttattgcctagttggttatacatcattgc

SEQ ID NO: 493979 - DNA, 30 bp, Artificial Sequence
  Synthetic oligonucleotide
taccccaggcccgctcgggcaactcattgc

SEQ ID NO: 493980 - DNA, 30 bp, Artificial Sequence
  Synthetic oligonucleotide
ttaaaaaaaggttcttacatctaggattgc

SEQ ID NO: 493981 - DNA, 30 bp, Artificial Sequence
  Synthetic oligonucleotide
ttcttggctggcggggcctaggtggattgc

SEQ ID NO: 493982 - DNA, 30 bp, Artificial Sequence
  Synthetic oligonucleotide
tagtgtctgctgagagtagtgcttgattgc

SEQ ID NO: 493983 - DNA, 30 bp, Artificial Sequence
  Synthetic oligonucleotide
ttgccattttgccgtgaaagtaaatattgc

SEQ ID NO: 493984 - DNA, 30 bp, Artificial Sequence
  Synthetic oligonucleotide
ggtcctttaggagttcctcttcaatattgc

SEQ ID NO: 493985 - DNA, 30 bp, Artificial Sequence
  Synthetic oligonucleotide
cgcgcagtatcggccttcaatacatattgc

SEQ ID NO: 493986 - DNA, 30 bp, Artificial Sequence
  Synthetic oligonucleotide
tctgctctcagctagagagtgtgatattgc

SEQ ID NO: 493987 - DNA, 30 bp, Artificial Sequence
  Synthetic oligonucleotide
gtttacaataggtagagcgcagcctattgc

SEQ ID NO: 493988 - DNA, 30 bp, Artificial Sequence
  Synthetic oligonucleotide
tacaagctttggtggctaaatctgtattgc

SEQ ID NO: 493989 - DNA, 30 bp, Artificial Sequence
  Synthetic oligonucleotide
gcaggaacactactgctcactggttattgc

SEQ ID NO: 493990 - DNA, 30 bp, Artificial Sequence
  Synthetic oligonucleotide
aggtcacgcaatcatgagaagctttattgc

SEQ ID NO: 493991 - DNA, 30 bp, Artificial Sequence
  Synthetic oligonucleotide
cactgattcgtctgtggaacaataacttgc

SEQ ID NO: 493992 - DNA, 30 bp, Artificial Sequence
  Synthetic oligonucleotide
aaatacggatgatgtatggcactaacttgc

SEQ ID NO: 493993 - DNA, 30 bp, Artificial Sequence
  Synthetic oligonucleotide
aaagtcccgatctttttgacttacacttgc

SEQ ID NO: 493994 - DNA, 30 bp, Artificial Sequence
  Synthetic oligonucleotide
actcgcggctgtcaaagtaactggacttgc

SEQ ID NO: 493995 - DNA, 30 bp, Artificial Sequence
  Synthetic oligonucleotide
ttccgcatgatttgtacgtcaggtacttgc

SEQ ID NO: 493996 - DNA, 30 bp, Artificial Sequence
  Synthetic oligonucleotide
gtaataagatccgctagccatggtacttgc

SEQ ID NO: 493997 - DNA, 30 bp, Artificial Sequence
  Synthetic oligonucleotide
acacgagatcacggcaaggaaccaccttgc

SEQ ID NO: 493998 - DNA, 30 bp, Artificial Sequence
  Synthetic oligonucleotide
aagacctacataattttttgttcaccttgc

SEQ ID NO: 493999 - DNA, 30 bp, Artificial Sequence
  Synthetic oligonucleotide
tcactcacgctcgggggtacccgaccttgc

SEQ ID NO: 494000 - DNA, 30 bp, Artificial Sequence
  Synthetic oligonucleotide
ttccgtgccttaagacgcaagctcccttgc

SEQ ID NO: 494001 - DNA, 30 bp, Artificial Sequence
  Synthetic oligonucleotide
atcctctaccgcgcggcgagattcccttgc

SEQ ID NO: 494002 - DNA, 30 bp, Artificial Sequence
  Synthetic oligonucleotide
taaatagttaaaataagcgccgaagcttgc

SEQ ID NO: 494003 - DNA, 30 bp, Artificial Sequence
  Synthetic oligonucleotide
caacggtatccggtaagcggcggagcttgc

SEQ ID NO: 494004 - DNA, 30 bp, Artificial Sequence
  Synthetic oligonucleotide
caagtttttcaagatatgtaattagcttgc

SEQ ID NO: 494005 - DNA, 30 bp, Artificial Sequence
  Synthetic oligonucleotide
gtaactctctaatagaggttacgcgcttgc

SEQ ID NO: 494006 - DNA, 30 bp, Artificial Sequence
  Synthetic oligonucleotide
gccaacttaaggcctcaattgatcgcttgc

SEQ ID NO: 494007 - DNA, 30 bp, Artificial Sequence
  Synthetic oligonucleotide
agcaaatgtatgtgagtaacccatgcttgc

SEQ ID NO: 494008 - DNA, 31 bp, Artificial Sequence
  Synthetic oligonucleotide
ctttataatgggttttcaaaatattgcttgc

SEQ ID NO: 494009 - DNA, 30 bp, Artificial Sequence
  Synthetic oligonucleotide
gcgcaagcgacggctgtacacagctcttgc

SEQ ID NO: 494010 - DNA, 30 bp, Artificial Sequence
  Synthetic oligonucleotide
catgtacattcgcagtgtctgacgtcttgc

SEQ ID NO: 494011 - DNA, 30 bp, Artificial Sequence
  Synthetic oligonucleotide
agtataggtgtaacgaagtcgacttcttgc

SEQ ID NO: 494012 - DNA, 30 bp, Artificial Sequence
  Synthetic oligonucleotide
gtccgcacacgaatgagtacgagttcttgc

SEQ ID NO: 494013 - DNA, 30 bp, Artificial Sequence
  Synthetic oligonucleotide
tgccaaagtcgccgggtttttggttcttgc

SEQ ID NO: 494014 - DNA, 30 bp, Artificial Sequence
  Synthetic oligonucleotide
aaacacaattgcagtcagtcgatgagttgc

SEQ ID NO: 494015 - DNA, 30 bp, Artificial Sequence
  Synthetic oligonucleotide
gcaatacttgtgctctacagagatagttgc

SEQ ID NO: 494016 - DNA, 30 bp, Artificial Sequence
  Synthetic oligonucleotide
tccctgcctccagtcgtgctgactagttgc

SEQ ID NO: 494017 - DNA, 30 bp, Artificial Sequence
  Synthetic oligonucleotide
agaacccaagctcctcgctgcagtagttgc

SEQ ID NO: 494018 - DNA, 30 bp, Artificial Sequence
  Synthetic oligonucleotide
gggattaatagggtcggcaaccgtagttgc

SEQ ID NO: 494019 - DNA, 30 bp, Artificial Sequence
  Synthetic oligonucleotide
ccaaaaggggttattcccgtgccccgttgc

SEQ ID NO: 494020 - DNA, 30 bp, Artificial Sequence
  Synthetic oligonucleotide
gttggcaacgggcttcctcattcgcgttgc

SEQ ID NO: 494021 - DNA, 30 bp, Artificial Sequence
  Synthetic oligonucleotide
gtgtaacggtgacggtgtagggtgcgttgc

SEQ ID NO: 494022 - DNA, 30 bp, Artificial Sequence
  Synthetic oligonucleotide
acggttcgaactaggatgacacaaggttgc

SEQ ID NO: 494023 - DNA, 30 bp, Artificial Sequence
  Synthetic oligonucleotide
ggtcctggtaatttgaggcgccaaggttgc

SEQ ID NO: 494024 - DNA, 30 bp, Artificial Sequence
  Synthetic oligonucleotide
gctgatgcaccgaacggtactgtcggttgc

SEQ ID NO: 494025 - DNA, 30 bp, Artificial Sequence
  Synthetic oligonucleotide
atacggcccggtggagttaatcagggttgc

SEQ ID NO: 494026 - DNA, 30 bp, Artificial Sequence
  Synthetic oligonucleotide
tggcttatccaacccggctatgtgggttgc

SEQ ID NO: 494027 - DNA, 30 bp, Artificial Sequence
  Synthetic oligonucleotide
ccagctaccccatatactgtgtttggttgc

SEQ ID NO: 494028 - DNA, 30 bp, Artificial Sequence
  Synthetic oligonucleotide
cgtgcatggtagaggggtgttcgatgttgc

SEQ ID NO: 494029 - DNA, 30 bp, Artificial Sequence
  Synthetic oligonucleotide
gcactacgcacagccgccacatcttgttgc

SEQ ID NO: 494030 - DNA, 30 bp, Artificial Sequence
  Synthetic oligonucleotide
ggtcttggtctgctagccatacgttgttgc

SEQ ID NO: 494031 - DNA, 30 bp, Artificial Sequence
  Synthetic oligonucleotide
tttagtgcataatgcgcacatgcaatttgc

SEQ ID NO: 494032 - DNA, 30 bp, Artificial Sequence
  Synthetic oligonucleotide
tgttgcgagcacaagcgtgttctaatttgc

SEQ ID NO: 494033 - DNA, 30 bp, Artificial Sequence
  Synthetic oligonucleotide
atttagataccatattccgtagtcatttgc

SEQ ID NO: 494034 - DNA, 30 bp, Artificial Sequence
  Synthetic oligonucleotide
cagcgcactcatccagagccatcgatttgc

SEQ ID NO: 494035 - DNA, 30 bp, Artificial Sequence
  Synthetic oligonucleotide
tcagatgtaggcataaagcatgatatttgc

SEQ ID NO: 494036 - DNA, 30 bp, Artificial Sequence
  Synthetic oligonucleotide
cctatgtgtgttggataatgctatatttgc

SEQ ID NO: 494037 - DNA, 30 bp, Artificial Sequence
  Synthetic oligonucleotide
acacccttttattaataaagggtgctttgc

SEQ ID NO: 494038 - DNA, 30 bp, Artificial Sequence
  Synthetic oligonucleotide
atcttccagatgataggtccgagtctttgc

SEQ ID NO: 494039 - DNA, 30 bp, Artificial Sequence
  Synthetic oligonucleotide
ctggacgacaggtgcgaacgggttctttgc

SEQ ID NO: 494040 - DNA, 30 bp, Artificial Sequence
  Synthetic oligonucleotide
cttttggtaccactctcccgggttctttgc

SEQ ID NO: 494041 - DNA, 30 bp, Artificial Sequence
  Synthetic oligonucleotide
acattttagtcagggtgggaccgagtttgc

SEQ ID NO: 494042 - DNA, 30 bp, Artificial Sequence
  Synthetic oligonucleotide
atttgatggatctatagtgtatgagtttgc

SEQ ID NO: 494043 - DNA, 30 bp, Artificial Sequence
  Synthetic oligonucleotide
ctgtattagagtaggggtaaattcgtttgc

SEQ ID NO: 494044 - DNA, 30 bp, Artificial Sequence
  Synthetic oligonucleotide
gtttattatcagctggaccagtgggtttgc

SEQ ID NO: 494045 - DNA, 30 bp, Artificial Sequence
  Synthetic oligonucleotide
gtgtaatttgcgctcagctattatgtttgc

SEQ ID NO: 494046 - DNA, 30 bp, Artificial Sequence
  Synthetic oligonucleotide
ctggcggctagcctggtatgaggtgtttgc

SEQ ID NO: 494047 - DNA, 30 bp, Artificial Sequence
  Synthetic oligonucleotide
aatacgtcaaggaattccgtacttgtttgc

SEQ ID NO: 494048 - DNA, 30 bp, Artificial Sequence
  Synthetic oligonucleotide
ttgttttcggacataacggagtttgtttgc

SEQ ID NO: 494049 - DNA, 29 bp, Artificial Sequence
  Synthetic oligonucleotide
ttaattcgatgcgaggaccgaaattttgc

SEQ ID NO: 494050 - DNA, 30 bp, Artificial Sequence
  Synthetic oligonucleotide
agattgatttattatttcctgccattttgc

SEQ ID NO: 494051 - DNA, 29 bp, Artificial Sequence
  Synthetic oligonucleotide
cttaatttggctttttataattattttgc

SEQ ID NO: 494052 - DNA, 30 bp, Artificial Sequence
  Synthetic oligonucleotide
gaaaaggcaccgaaaaaagatcgcttttgc

SEQ ID NO: 494053 - DNA, 30 bp, Artificial Sequence
  Synthetic oligonucleotide
ctattagatgtagaagcacaatcgttttgc

SEQ ID NO: 494054 - DNA, 30 bp, Artificial Sequence
  Synthetic oligonucleotide
tgacatcctttacaaaatattaggttttgc

SEQ ID NO: 494055 - DNA, 30 bp, Artificial Sequence
  Synthetic oligonucleotide
gtgcattctgacggtgttgccactttttgc

SEQ ID NO: 494056 - DNA, 30 bp, Artificial Sequence
  Synthetic oligonucleotide
ctccctttacattgtgaagcaattttttgc

SEQ ID NO: 494057 - DNA, 30 bp, Artificial Sequence
  Synthetic oligonucleotide
caaaggggcagattcggggtaaccaaaatc

SEQ ID NO: 494058 - DNA, 30 bp, Artificial Sequence
  Synthetic oligonucleotide
tgcattccggggaggggggttaccaaaatc

SEQ ID NO: 494059 - DNA, 29 bp, Artificial Sequence
  Synthetic oligonucleotide
ctacaatatgcctccgctggctcaaaatc

SEQ ID NO: 494060 - DNA, 30 bp, Artificial Sequence
  Synthetic oligonucleotide
acatatatttgtttttctatgacgaaaatc

SEQ ID NO: 494061 - DNA, 30 bp, Artificial Sequence
  Synthetic oligonucleotide
atctcttttgatagcaggcatatgaaaatc

SEQ ID NO: 494062 - DNA, 30 bp, Artificial Sequence
  Synthetic oligonucleotide
tcgggatacgactataagtttcataaaatc

SEQ ID NO: 494063 - DNA, 30 bp, Artificial Sequence
  Synthetic oligonucleotide
tacggtagtttcgcgtggattgataaaatc

SEQ ID NO: 494064 - DNA, 30 bp, Artificial Sequence
  Synthetic oligonucleotide
tgattgcatcggtagcttgtttgacaaatc

SEQ ID NO: 494065 - DNA, 30 bp, Artificial Sequence
  Synthetic oligonucleotide
catctgagagtcgtggtattgtaccaaatc

SEQ ID NO: 494066 - DNA, 30 bp, Artificial Sequence
  Synthetic oligonucleotide
acccgatcttcggaactaattctccaaatc

SEQ ID NO: 494067 - DNA, 30 bp, Artificial Sequence
  Synthetic oligonucleotide
gggattcgtttatatcattccgggcaaatc

SEQ ID NO: 494068 - DNA, 30 bp, Artificial Sequence
  Synthetic oligonucleotide
tccttcaccgtttgacatcgactgcaaatc

SEQ ID NO: 494069 - DNA, 30 bp, Artificial Sequence
  Synthetic oligonucleotide
attaacctcacgctagccggcgatcaaatc

SEQ ID NO: 494070 - DNA, 30 bp, Artificial Sequence
  Synthetic oligonucleotide
gaggacgttagtaggtacgcgggtcaaatc

SEQ ID NO: 494071 - DNA, 30 bp, Artificial Sequence
  Synthetic oligonucleotide
ggtatacataaatggacgccggttcaaatc

SEQ ID NO: 494072 - DNA, 30 bp, Artificial Sequence
  Synthetic oligonucleotide
ctctcatagatacgttcgtgactagaaatc

SEQ ID NO: 494073 - DNA, 30 bp, Artificial Sequence
  Synthetic oligonucleotide
aaaatagctgaaacggccggtgtagaaatc

SEQ ID NO: 494074 - DNA, 30 bp, Artificial Sequence
  Synthetic oligonucleotide
ggccaaaggttggggtccgtgaaataaatc

SEQ ID NO: 494075 - DNA, 30 bp, Artificial Sequence
  Synthetic oligonucleotide
tttattaggtcctgtcatatgcaataaatc

SEQ ID NO: 494076 - DNA, 30 bp, Artificial Sequence
  Synthetic oligonucleotide
tgatataaattgattttttttggataaatc

SEQ ID NO: 494077 - DNA, 30 bp, Artificial Sequence
  Synthetic oligonucleotide
cagtcattaaaggaagctggtttataaatc

SEQ ID NO: 494078 - DNA, 30 bp, Artificial Sequence
  Synthetic oligonucleotide
aactaaattagttcagacccattgtaaatc

SEQ ID NO: 494079 - DNA, 30 bp, Artificial Sequence
  Synthetic oligonucleotide
atccatctcctgcattgcgcgagttaaatc

SEQ ID NO: 494080 - DNA, 30 bp, Artificial Sequence
  Synthetic oligonucleotide
ttcaataccatcatcgggtacctttaaatc

SEQ ID NO: 494081 - DNA, 30 bp, Artificial Sequence
  Synthetic oligonucleotide
ttcataaaactgcccagcagagaaacaatc

SEQ ID NO: 494082 - DNA, 30 bp, Artificial Sequence
  Synthetic oligonucleotide
atccatgatgccggatgcccaagaacaatc

SEQ ID NO: 494083 - DNA, 30 bp, Artificial Sequence
  Synthetic oligonucleotide
ggcagcgaccactagcatcaacgaacaatc

SEQ ID NO: 494084 - DNA, 30 bp, Artificial Sequence
  Synthetic oligonucleotide
atttcaactccccgcactgggcgcacaatc

SEQ ID NO: 494085 - DNA, 30 bp, Artificial Sequence
  Synthetic oligonucleotide
cctcttaggcgggtgttccgtacgacaatc

SEQ ID NO: 494086 - DNA, 30 bp, Artificial Sequence
  Synthetic oligonucleotide
gttgtaggttatagcgaccggccgacaatc

SEQ ID NO: 494087 - DNA, 30 bp, Artificial Sequence
  Synthetic oligonucleotide
agtgccattacgcagcacccgacgccaatc

SEQ ID NO: 494088 - DNA, 30 bp, Artificial Sequence
  Synthetic oligonucleotide
ctccatgtccattacgcacgccgtccaatc

SEQ ID NO: 494089 - DNA, 30 bp, Artificial Sequence
  Synthetic oligonucleotide
gaagacccttgcggaccggttgacgcaatc

SEQ ID NO: 494090 - DNA, 30 bp, Artificial Sequence
  Synthetic oligonucleotide
caattgacaagtattcaccaaaccgcaatc

SEQ ID NO: 494091 - DNA, 30 bp, Artificial Sequence
  Synthetic oligonucleotide
tgtgtgcggtaaggttatagtaccgcaatc

SEQ ID NO: 494092 - DNA, 30 bp, Artificial Sequence
  Synthetic oligonucleotide
cgagcgtctaatacgagtggagaggcaatc

SEQ ID NO: 494093 - DNA, 30 bp, Artificial Sequence
  Synthetic oligonucleotide
aatcagtttgtgcttgggtagaatgcaatc

SEQ ID NO: 494094 - DNA, 30 bp, Artificial Sequence
  Synthetic oligonucleotide
gagtgtgccttgggggggccatgatcaatc

SEQ ID NO: 494095 - DNA, 30 bp, Artificial Sequence
  Synthetic oligonucleotide
gcgcgaaagtattgatctagcatatcaatc

SEQ ID NO: 494096 - DNA, 30 bp, Artificial Sequence
  Synthetic oligonucleotide
aaccgtggttcacttctaggttactcaatc

SEQ ID NO: 494097 - DNA, 30 bp, Artificial Sequence
  Synthetic oligonucleotide
gagagagcattcgcggccgcagcctcaatc

SEQ ID NO: 494098 - DNA, 30 bp, Artificial Sequence
  Synthetic oligonucleotide
tttggcgaataacgcagaatttcctcaatc

SEQ ID NO: 494099 - DNA, 30 bp, Artificial Sequence
  Synthetic oligonucleotide
gaccgcttacggggtttacagttctcaatc

SEQ ID NO: 494100 - DNA, 30 bp, Artificial Sequence
  Synthetic oligonucleotide
gaggtcgcggccgggcatttgttctcaatc

SEQ ID NO: 494101 - DNA, 30 bp, Artificial Sequence
  Synthetic oligonucleotide
ataattcatggttgccgtgtacggtcaatc

SEQ ID NO: 494102 - DNA, 30 bp, Artificial Sequence
  Synthetic oligonucleotide
tcgctcagagaactaagaagtcgttcaatc

SEQ ID NO: 494103 - DNA, 30 bp, Artificial Sequence
  Synthetic oligonucleotide
ctcaattactcttaagccccctgaagaatc

SEQ ID NO: 494104 - DNA, 30 bp, Artificial Sequence
  Synthetic oligonucleotide
tgagtcgataggagctccattctaagaatc

SEQ ID NO: 494105 - DNA, 30 bp, Artificial Sequence
  Synthetic oligonucleotide
gagaatatgctaattgctcggtccagaatc

SEQ ID NO: 494106 - DNA, 30 bp, Artificial Sequence
  Synthetic oligonucleotide
aaaaagataattttattaagagtcagaatc

SEQ ID NO: 494107 - DNA, 30 bp, Artificial Sequence
  Synthetic oligonucleotide
cataccaagtgcatagtccatcgtagaatc

SEQ ID NO: 494108 - DNA, 30 bp, Artificial Sequence
  Synthetic oligonucleotide
ccatgtatatatgcatgtggcgttagaatc

SEQ ID NO: 494109 - DNA, 30 bp, Artificial Sequence
  Synthetic oligonucleotide
ctgctataagttatcgggtaaacgcgaatc

SEQ ID NO: 494110 - DNA, 30 bp, Artificial Sequence
  Synthetic oligonucleotide
cagggggtgcttcaaggtcggtcgcgaatc

SEQ ID NO: 494111 - DNA, 30 bp, Artificial Sequence
  Synthetic oligonucleotide
ataaggacacgacctggctcttcaggaatc

SEQ ID NO: 494112 - DNA, 30 bp, Artificial Sequence
  Synthetic oligonucleotide
ctgatttggactgtgttctgagtaggaatc

SEQ ID NO: 494113 - DNA, 30 bp, Artificial Sequence
  Synthetic oligonucleotide
cgacggtgtagttggagggcgttaggaatc

SEQ ID NO: 494114 - DNA, 30 bp, Artificial Sequence
  Synthetic oligonucleotide
gagtgtctccaaaggatcccgcccggaatc

SEQ ID NO: 494115 - DNA, 30 bp, Artificial Sequence
  Synthetic oligonucleotide
tttgagtagtcccacgatactcccggaatc

SEQ ID NO: 494116 - DNA, 30 bp, Artificial Sequence
  Synthetic oligonucleotide
taccaatttcgcatgcacttcatcggaatc

SEQ ID NO: 494117 - DNA, 30 bp, Artificial Sequence
  Synthetic oligonucleotide
gccccagggatctcgtaattactgggaatc

SEQ ID NO: 494118 - DNA, 30 bp, Artificial Sequence
  Synthetic oligonucleotide
atccgttaacgggacgaagtgtatggaatc

SEQ ID NO: 494119 - DNA, 30 bp, Artificial Sequence
  Synthetic oligonucleotide
ttcacggcagatagaatttctgttggaatc

SEQ ID NO: 494120 - DNA, 30 bp, Artificial Sequence
  Synthetic oligonucleotide
gatttggtagggcaaacatgttaatgaatc

SEQ ID NO: 494121 - DNA, 30 bp, Artificial Sequence
  Synthetic oligonucleotide
acaccggagtgatcatgttaaacatgaatc

SEQ ID NO: 494122 - DNA, 30 bp, Artificial Sequence
  Synthetic oligonucleotide
gtaggctatgttgataaggttggatgaatc

SEQ ID NO: 494123 - DNA, 30 bp, Artificial Sequence
  Synthetic oligonucleotide
tcgtaccacctgtcaattgttttatgaatc

SEQ ID NO: 494124 - DNA, 30 bp, Artificial Sequence
  Synthetic oligonucleotide
gagtatgtttccccggacacactgtgaatc

SEQ ID NO: 494125 - DNA, 30 bp, Artificial Sequence
  Synthetic oligonucleotide
gtgcggattaatactagaccttattgaatc

SEQ ID NO: 494126 - DNA, 30 bp, Artificial Sequence
  Synthetic oligonucleotide
ttcaatgattacggcgacagaatttgaatc

SEQ ID NO: 494127 - DNA, 30 bp, Artificial Sequence
  Synthetic oligonucleotide
ccacttctgcgggctataatgttttgaatc

SEQ ID NO: 494128 - DNA, 30 bp, Artificial Sequence
  Synthetic oligonucleotide
tactcacgagaagccgtgtatgaaataatc

SEQ ID NO: 494129 - DNA, 30 bp, Artificial Sequence
  Synthetic oligonucleotide
ctaccagggcgggggtggcgtagaataatc

SEQ ID NO: 494130 - DNA, 30 bp, Artificial Sequence
  Synthetic oligonucleotide
aagtcccgcttaatcaaatctcccataatc

SEQ ID NO: 494131 - DNA, 30 bp, Artificial Sequence
  Synthetic oligonucleotide
tagctctgttctaggccttggaatataatc

SEQ ID NO: 494132 - DNA, 30 bp, Artificial Sequence
  Synthetic oligonucleotide
catttgcttactctgactttacgtataatc

SEQ ID NO: 494133 - DNA, 30 bp, Artificial Sequence
  Synthetic oligonucleotide
taagttcttaagatacgtctagaactaatc

SEQ ID NO: 494134 - DNA, 30 bp, Artificial Sequence
  Synthetic oligonucleotide
actgtattttcctgctggccgggactaatc

SEQ ID NO: 494135 - DNA, 30 bp, Artificial Sequence
  Synthetic oligonucleotide
caatttgccctttgggatgtttcgctaatc

SEQ ID NO: 494136 - DNA, 30 bp, Artificial Sequence
  Synthetic oligonucleotide
gagtagaccatcatcctgatagaagtaatc

SEQ ID NO: 494137 - DNA, 30 bp, Artificial Sequence
  Synthetic oligonucleotide
ctgtacggcaacaggtctaaagttgtaatc

SEQ ID NO: 494138 - DNA, 30 bp, Artificial Sequence
  Synthetic oligonucleotide
aatataaacctctaagaggtacaattaatc

SEQ ID NO: 494139 - DNA, 30 bp, Artificial Sequence
  Synthetic oligonucleotide
agacagtctgcttgtcgactgcgcttaatc

SEQ ID NO: 494140 - DNA, 30 bp, Artificial Sequence
  Synthetic oligonucleotide
gcaggtaccccaggccggggaggcttaatc

SEQ ID NO: 494141 - DNA, 30 bp, Artificial Sequence
  Synthetic oligonucleotide
cgctcgcgcggataccacggggggttaatc

SEQ ID NO: 494142 - DNA, 30 bp, Artificial Sequence
  Synthetic oligonucleotide
gcagattgtatttgcaacgcccatttaatc

SEQ ID NO: 494143 - DNA, 30 bp, Artificial Sequence
  Synthetic oligonucleotide
tagaaggagtcgatctcttaaactttaatc

SEQ ID NO: 494144 - DNA, 30 bp, Artificial Sequence
  Synthetic oligonucleotide
ttctttctcatagggaggtttactttaatc

SEQ ID NO: 494145 - DNA, 30 bp, Artificial Sequence
  Synthetic oligonucleotide
ctagcgtataatttgggtatttgtttaatc

SEQ ID NO: 494146 - DNA, 30 bp, Artificial Sequence
  Synthetic oligonucleotide
gaacacctgtgggtggacgtggttttaatc

SEQ ID NO: 494147 - DNA, 30 bp, Artificial Sequence
  Synthetic oligonucleotide
aaacacccttgcgaatttcatacaaacatc

SEQ ID NO: 494148 - DNA, 30 bp, Artificial Sequence
  Synthetic oligonucleotide
tctcgctacttcagggtgagtaacaacatc

SEQ ID NO: 494149 - DNA, 30 bp, Artificial Sequence
  Synthetic oligonucleotide
atttgagattgttattcaatgattaacatc

SEQ ID NO: 494150 - DNA, 30 bp, Artificial Sequence
  Synthetic oligonucleotide
ctttgcgtgacgaggagaaatcttaacatc

SEQ ID NO: 494151 - DNA, 30 bp, Artificial Sequence
  Synthetic oligonucleotide
gttatccgagacgatacaagcgttaacatc

SEQ ID NO: 494152 - DNA, 30 bp, Artificial Sequence
  Synthetic oligonucleotide
tatagtccatcccctcattgccgacacatc

SEQ ID NO: 494153 - DNA, 30 bp, Artificial Sequence
  Synthetic oligonucleotide
tccgtaacttgggaacacgcaggacacatc

SEQ ID NO: 494154 - DNA, 30 bp, Artificial Sequence
  Synthetic oligonucleotide
caagattcccctattaccatttgacacatc

SEQ ID NO: 494155 - DNA, 30 bp, Artificial Sequence
  Synthetic oligonucleotide
tataatagaggcgcaatgaagttacacatc

SEQ ID NO: 494156 - DNA, 30 bp, Artificial Sequence
  Synthetic oligonucleotide
aatacaagggctacgagtttagaccacatc

SEQ ID NO: 494157 - DNA, 30 bp, Artificial Sequence
  Synthetic oligonucleotide
gatgctaaggtctcccgaccggagcacatc

SEQ ID NO: 494158 - DNA, 30 bp, Artificial Sequence
  Synthetic oligonucleotide
gacgggtagccgatttgttagaggcacatc

SEQ ID NO: 494159 - DNA, 30 bp, Artificial Sequence
  Synthetic oligonucleotide
tgtgatatatggtacactggtactcacatc

SEQ ID NO: 494160 - DNA, 30 bp, Artificial Sequence
  Synthetic oligonucleotide
gtcggaatttagcccaaaagttgtcacatc

SEQ ID NO: 494161 - DNA, 30 bp, Artificial Sequence
  Synthetic oligonucleotide
ggccctgctaatcactacattgttcacatc

SEQ ID NO: 494162 - DNA, 30 bp, Artificial Sequence
  Synthetic oligonucleotide
gaggggctcagccactggttgacagacatc

SEQ ID NO: 494163 - DNA, 30 bp, Artificial Sequence
  Synthetic oligonucleotide
cacggactgggaccgtagggaccggacatc

SEQ ID NO: 494164 - DNA, 30 bp, Artificial Sequence
  Synthetic oligonucleotide
caaattatataccctaggatttgtgacatc

SEQ ID NO: 494165 - DNA, 30 bp, Artificial Sequence
  Synthetic oligonucleotide
atcctaaacactcgaacgtataaatacatc

SEQ ID NO: 494166 - DNA, 30 bp, Artificial Sequence
  Synthetic oligonucleotide
cgtcattaaattctctggcggccgtacatc

SEQ ID NO: 494167 - DNA, 30 bp, Artificial Sequence
  Synthetic oligonucleotide
tttacagcgatgtgttaaagcttgtacatc

SEQ ID NO: 494168 - DNA, 30 bp, Artificial Sequence
  Synthetic oligonucleotide
accagccactatatcgttatagtttacatc

SEQ ID NO: 494169 - DNA, 30 bp, Artificial Sequence
  Synthetic oligonucleotide
gagatttggagaatgtgagctaagaccatc

SEQ ID NO: 494170 - DNA, 30 bp, Artificial Sequence
  Synthetic oligonucleotide
gctgggtaaggtctcttataaacgaccatc

SEQ ID NO: 494171 - DNA, 30 bp, Artificial Sequence
  Synthetic oligonucleotide
ctcgaggatctcccaaaacagtggaccatc

SEQ ID NO: 494172 - DNA, 30 bp, Artificial Sequence
  Synthetic oligonucleotide
tgccgtagattatgagtagatactaccatc

SEQ ID NO: 494173 - DNA, 30 bp, Artificial Sequence
  Synthetic oligonucleotide
gacatcgtgtttggtacgacataagccatc

SEQ ID NO: 494174 - DNA, 30 bp, Artificial Sequence
  Synthetic oligonucleotide
aagaatatataagtccaaggaaccgccatc

SEQ ID NO: 494175 - DNA, 30 bp, Artificial Sequence
  Synthetic oligonucleotide
aatggccgatattatggaggccgggccatc

SEQ ID NO: 494176 - DNA, 30 bp, Artificial Sequence
  Synthetic oligonucleotide
tttaagaattccgaaatagtcgctgccatc

SEQ ID NO: 494177 - DNA, 30 bp, Artificial Sequence
  Synthetic oligonucleotide
tttaaggtggcttaatccactaaatccatc

SEQ ID NO: 494178 - DNA, 30 bp, Artificial Sequence
  Synthetic oligonucleotide
ggctacccacgcaaacagcgatcctccatc

SEQ ID NO: 494179 - DNA, 30 bp, Artificial Sequence
  Synthetic oligonucleotide
gtttaatagttatccgtcaacgtctccatc

SEQ ID NO: 494180 - DNA, 30 bp, Artificial Sequence
  Synthetic oligonucleotide
tgaatgagcaaagatgctgtcgcaagcatc

SEQ ID NO: 494181 - DNA, 30 bp, Artificial Sequence
  Synthetic oligonucleotide
ttccaggttgtttcccgatcggcaagcatc

SEQ ID NO: 494182 - DNA, 30 bp, Artificial Sequence
  Synthetic oligonucleotide
attccgggtactggtattatcagaagcatc

SEQ ID NO: 494183 - DNA, 30 bp, Artificial Sequence
  Synthetic oligonucleotide
aatctgcgttgctcgcaaagcaacagcatc

SEQ ID NO: 494184 - DNA, 30 bp, Artificial Sequence
  Synthetic oligonucleotide
cggcaaagtgttgctattgtgtggagcatc

SEQ ID NO: 494185 - DNA, 30 bp, Artificial Sequence
  Synthetic oligonucleotide
ttgtgcagcaaactgcttagctctagcatc

SEQ ID NO: 494186 - DNA, 30 bp, Artificial Sequence
  Synthetic oligonucleotide
ataatggaggatcggtcatactttagcatc

SEQ ID NO: 494187 - DNA, 30 bp, Artificial Sequence
  Synthetic oligonucleotide
catttggaccgcagagggaatgaacgcatc

SEQ ID NO: 494188 - DNA, 30 bp, Artificial Sequence
  Synthetic oligonucleotide
ggtaagcataatcagtacccagcacgcatc

SEQ ID NO: 494189 - DNA, 30 bp, Artificial Sequence
  Synthetic oligonucleotide
gagttatgcttaccattgttctcacgcatc

SEQ ID NO: 494190 - DNA, 30 bp, Artificial Sequence
  Synthetic oligonucleotide
aattcggggttattttaatagggacgcatc

SEQ ID NO: 494191 - DNA, 30 bp, Artificial Sequence
  Synthetic oligonucleotide
tcgttctggtcatcgatcagtttacgcatc

SEQ ID NO: 494192 - DNA, 30 bp, Artificial Sequence
  Synthetic oligonucleotide
gtgtgcagaagctatctatgtaggcgcatc

SEQ ID NO: 494193 - DNA, 30 bp, Artificial Sequence
  Synthetic oligonucleotide
gactcaatgctcaggttggtatatcgcatc

SEQ ID NO: 494194 - DNA, 30 bp, Artificial Sequence
  Synthetic oligonucleotide
ggtaatatacgcctcggcgttactcgcatc

SEQ ID NO: 494195 - DNA, 30 bp, Artificial Sequence
  Synthetic oligonucleotide
tggtggggcgtccatcagtggggaggcatc

SEQ ID NO: 494196 - DNA, 30 bp, Artificial Sequence
  Synthetic oligonucleotide
gttcgggagagcctgtgtgatcgcggcatc

SEQ ID NO: 494197 - DNA, 30 bp, Artificial Sequence
  Synthetic oligonucleotide
aatgccatgcccgtactggcgtttggcatc

SEQ ID NO: 494198 - DNA, 30 bp, Artificial Sequence
  Synthetic oligonucleotide
tttaactgcgtcggcgctatcacatgcatc

SEQ ID NO: 494199 - DNA, 30 bp, Artificial Sequence
  Synthetic oligonucleotide
agatgcggccgccacctagcggcatgcatc

SEQ ID NO: 494200 - DNA, 30 bp, Artificial Sequence
  Synthetic oligonucleotide
aggacgcgtggatatgcacttgcgtgcatc

SEQ ID NO: 494201 - DNA, 30 bp, Artificial Sequence
  Synthetic oligonucleotide
taatttggcgacaaattctaactttgcatc

SEQ ID NO: 494202 - DNA, 30 bp, Artificial Sequence
  Synthetic oligonucleotide
tgcattgtggatagtgataggtcaatcatc

SEQ ID NO: 494203 - DNA, 30 bp, Artificial Sequence
  Synthetic oligonucleotide
tctttttacggtagcgattgatcgatcatc

SEQ ID NO: 494204 - DNA, 30 bp, Artificial Sequence
  Synthetic oligonucleotide
cctaggcacaaaaacgccttccaactcatc

SEQ ID NO: 494205 - DNA, 30 bp, Artificial Sequence
  Synthetic oligonucleotide
tcagggaaataaattgtcgagcaactcatc

SEQ ID NO: 494206 - DNA, 30 bp, Artificial Sequence
  Synthetic oligonucleotide
atccttcatgatcccgaatatgaactcatc

SEQ ID NO: 494207 - DNA, 30 bp, Artificial Sequence
  Synthetic oligonucleotide
aaaagcagtttctatcctggagcactcatc

SEQ ID NO: 494208 - DNA, 30 bp, Artificial Sequence
  Synthetic oligonucleotide
ggttgtccccgtaatgatgaattactcatc

SEQ ID NO: 494209 - DNA, 30 bp, Artificial Sequence
  Synthetic oligonucleotide
tgtctgtagattatagtacccctcctcatc

SEQ ID NO: 494210 - DNA, 30 bp, Artificial Sequence
  Synthetic oligonucleotide
atatcatctcacgcgggcgaatgagtcatc

SEQ ID NO: 494211 - DNA, 30 bp, Artificial Sequence
  Synthetic oligonucleotide
aaggatcatatcgatgcttcagccgtcatc

SEQ ID NO: 494212 - DNA, 30 bp, Artificial Sequence
  Synthetic oligonucleotide
cccgaccgggcgcctgtagaactggtcatc

SEQ ID NO: 494213 - DNA, 30 bp, Artificial Sequence
  Synthetic oligonucleotide
ccggttcgaaggtttactgtccgtgtcatc

SEQ ID NO: 494214 - DNA, 30 bp, Artificial Sequence
  Synthetic oligonucleotide
gggttgggcctggtgcggtggaaattcatc

SEQ ID NO: 494215 - DNA, 30 bp, Artificial Sequence
  Synthetic oligonucleotide
ggcggtagataatcagtagcttacttcatc

SEQ ID NO: 494216 - DNA, 30 bp, Artificial Sequence
  Synthetic oligonucleotide
gatgtctcgcatttcagctggcgcttcatc

SEQ ID NO: 494217 - DNA, 30 bp, Artificial Sequence
  Synthetic oligonucleotide
ttcaattcagttttcccaaggatcttcatc

SEQ ID NO: 494218 - DNA, 30 bp, Artificial Sequence
  Synthetic oligonucleotide
gaattggcccaaatgttctggaggttcatc

SEQ ID NO: 494219 - DNA, 30 bp, Artificial Sequence
  Synthetic oligonucleotide
aaagtgctaactattgtgtggatgttcatc

SEQ ID NO: 494220 - DNA, 30 bp, Artificial Sequence
  Synthetic oligonucleotide
caatggttcagcatgatagaaaatttcatc

SEQ ID NO: 494221 - DNA, 30 bp, Artificial Sequence
  Synthetic oligonucleotide
agcggtttcgggctgcgtacgacaaagatc

SEQ ID NO: 494222 - DNA, 30 bp, Artificial Sequence
  Synthetic oligonucleotide
tgctttgctaatataaatgttcagaagatc

SEQ ID NO: 494223 - DNA, 30 bp, Artificial Sequence
  Synthetic oligonucleotide
ggaactgcctttcctatttccgcgaagatc

SEQ ID NO: 494224 - DNA, 30 bp, Artificial Sequence
  Synthetic oligonucleotide
gcacgcatgctaggaatccgtgggaagatc

SEQ ID NO: 494225 - DNA, 30 bp, Artificial Sequence
  Synthetic oligonucleotide
agaattttctgacagtgcaacaaacagatc

SEQ ID NO: 494226 - DNA, 30 bp, Artificial Sequence
  Synthetic oligonucleotide
gtgatctgcaaaaggcctgtagtacagatc

SEQ ID NO: 494227 - DNA, 30 bp, Artificial Sequence
  Synthetic oligonucleotide
gcttcgaatagccgcaattacttacagatc

SEQ ID NO: 494228 - DNA, 30 bp, Artificial Sequence
  Synthetic oligonucleotide
ttattacgtgtggcccgtgacgcccagatc

SEQ ID NO: 494229 - DNA, 30 bp, Artificial Sequence
  Synthetic oligonucleotide
atttatggtcgaaattatactgcgcagatc

SEQ ID NO: 494230 - DNA, 30 bp, Artificial Sequence
  Synthetic oligonucleotide
cgcgaggatcatcggcgtcctcggcagatc

SEQ ID NO: 494231 - DNA, 30 bp, Artificial Sequence
  Synthetic oligonucleotide
acaaacagaccccagtatcctttggagatc

SEQ ID NO: 494232 - DNA, 30 bp, Artificial Sequence
  Synthetic oligonucleotide
tatgtacgaaccctagctcaaattgagatc

SEQ ID NO: 494233 - DNA, 30 bp, Artificial Sequence
  Synthetic oligonucleotide
gattatctattccattacttatcatagatc

SEQ ID NO: 494234 - DNA, 30 bp, Artificial Sequence
  Synthetic oligonucleotide
ccgcggcgtatcgtgttcgtaagctagatc

SEQ ID NO: 494235 - DNA, 30 bp, Artificial Sequence
  Synthetic oligonucleotide
gtgccgtaacgcatctgcgcccagtagatc

SEQ ID NO: 494236 - DNA, 30 bp, Artificial Sequence
  Synthetic oligonucleotide
ggacgggcattgtctgtgcgtatgtagatc

SEQ ID NO: 494237 - DNA, 30 bp, Artificial Sequence
  Synthetic oligonucleotide
agtataaattctctgtactacctgtagatc

SEQ ID NO: 494238 - DNA, 30 bp, Artificial Sequence
  Synthetic oligonucleotide
gatagcagctaacgacgtaatcgttagatc

SEQ ID NO: 494239 - DNA, 30 bp, Artificial Sequence
  Synthetic oligonucleotide
gattttcacaaagataggccaaggacgatc

SEQ ID NO: 494240 - DNA, 30 bp, Artificial Sequence
  Synthetic oligonucleotide
gaaggtccggtttcccattagcggacgatc

SEQ ID NO: 494241 - DNA, 30 bp, Artificial Sequence
  Synthetic oligonucleotide
aaaatcgagcagtccgatcgggaaccgatc

SEQ ID NO: 494242 - DNA, 30 bp, Artificial Sequence
  Synthetic oligonucleotide
ccgtatgctcaatcgcgagcagacccgatc

SEQ ID NO: 494243 - DNA, 30 bp, Artificial Sequence
  Synthetic oligonucleotide
aataatgtctggatcaaagacattccgatc

SEQ ID NO: 494244 - DNA, 30 bp, Artificial Sequence
  Synthetic oligonucleotide
tttatcgcttgtcgggtttagtcagcgatc

SEQ ID NO: 494245 - DNA, 30 bp, Artificial Sequence
  Synthetic oligonucleotide
tataagcaacatgggaggacacgggcgatc

SEQ ID NO: 494246 - DNA, 30 bp, Artificial Sequence
  Synthetic oligonucleotide
ggaccagtggttaagctgtgccatgcgatc

SEQ ID NO: 494247 - DNA, 30 bp, Artificial Sequence
  Synthetic oligonucleotide
gtcccttcttgcgataataagctctcgatc

SEQ ID NO: 494248 - DNA, 30 bp, Artificial Sequence
  Synthetic oligonucleotide
tttataaaatgggattggatttattcgatc

SEQ ID NO: 494249 - DNA, 30 bp, Artificial Sequence
  Synthetic oligonucleotide
ttcctcactggttggaagtgaatttcgatc

SEQ ID NO: 494250 - DNA, 30 bp, Artificial Sequence
  Synthetic oligonucleotide
gatcgccccccatgttcatgattttcgatc

SEQ ID NO: 494251 - DNA, 29 bp, Artificial Sequence
  Synthetic oligonucleotide
cacggagcgatctattgaaacaaaggatc

SEQ ID NO: 494252 - DNA, 30 bp, Artificial Sequence
  Synthetic oligonucleotide
cattcgtcctaatcaagggagacaaggatc

SEQ ID NO: 494253 - DNA, 30 bp, Artificial Sequence
  Synthetic oligonucleotide
gggccatgcaaccaatcccgtgtaaggatc

SEQ ID NO: 494254 - DNA, 30 bp, Artificial Sequence
  Synthetic oligonucleotide
ttgtgtagtcgcttattcataatcaggatc

SEQ ID NO: 494255 - DNA, 30 bp, Artificial Sequence
  Synthetic oligonucleotide
tcagatgctgcttcagatttaatcaggatc

SEQ ID NO: 494256 - DNA, 30 bp, Artificial Sequence
  Synthetic oligonucleotide
actcggcctatatcctgggaaaggaggatc

SEQ ID NO: 494257 - DNA, 30 bp, Artificial Sequence
  Synthetic oligonucleotide
gttcgggtcaaacgaccctgaactaggatc

SEQ ID NO: 494258 - DNA, 30 bp, Artificial Sequence
  Synthetic oligonucleotide
acaatctacatgttggttttgggtaggatc

SEQ ID NO: 494259 - DNA, 30 bp, Artificial Sequence
  Synthetic oligonucleotide
gcctcaccctcgcaagcgatgggacggatc

SEQ ID NO: 494260 - DNA, 30 bp, Artificial Sequence
  Synthetic oligonucleotide
gctttgctccatggtcctgagggccggatc

SEQ ID NO: 494261 - DNA, 30 bp, Artificial Sequence
  Synthetic oligonucleotide
actatatctaagtatgttgttgcgcggatc

SEQ ID NO: 494262 - DNA, 30 bp, Artificial Sequence
  Synthetic oligonucleotide
taggggtatggagagcaatccacagggatc

SEQ ID NO: 494263 - DNA, 30 bp, Artificial Sequence
  Synthetic oligonucleotide
agtctgtgggtattagggaggcccgggatc

SEQ ID NO: 494264 - DNA, 30 bp, Artificial Sequence
  Synthetic oligonucleotide
atgtctgtgaacgcaaagatcacggggatc

SEQ ID NO: 494265 - DNA, 30 bp, Artificial Sequence
  Synthetic oligonucleotide
ggtgtatcctacggcagcttagcggggatc

SEQ ID NO: 494266 - DNA, 30 bp, Artificial Sequence
  Synthetic oligonucleotide
cgagtacgttatagggacgaaagggggatc

SEQ ID NO: 494267 - DNA, 30 bp, Artificial Sequence
  Synthetic oligonucleotide
ttaatgattttatctgtggatcgggggatc

SEQ ID NO: 494268 - DNA, 30 bp, Artificial Sequence
  Synthetic oligonucleotide
cttctctctcgccctgacagcgctgggatc

SEQ ID NO: 494269 - DNA, 30 bp, Artificial Sequence
  Synthetic oligonucleotide
ggcattctttgacattacgtccttgggatc

SEQ ID NO: 494270 - DNA, 30 bp, Artificial Sequence
  Synthetic oligonucleotide
aataacgaagattttgataaagcatggatc

SEQ ID NO: 494271 - DNA, 30 bp, Artificial Sequence
  Synthetic oligonucleotide
gataatcggggcgtagacttcgcaatgatc

SEQ ID NO: 494272 - DNA, 30 bp, Artificial Sequence
  Synthetic oligonucleotide
gcatctttaatgttacgtccggcaatgatc

SEQ ID NO: 494273 - DNA, 30 bp, Artificial Sequence
  Synthetic oligonucleotide
ccacaccgtcacgaggggcgcagaatgatc

SEQ ID NO: 494274 - DNA, 30 bp, Artificial Sequence
  Synthetic oligonucleotide
ctacaccacttattgatatcaaagctgatc

SEQ ID NO: 494275 - DNA, 30 bp, Artificial Sequence
  Synthetic oligonucleotide
tcagggctaagtgcagcataaatgctgatc

SEQ ID NO: 494276 - DNA, 30 bp, Artificial Sequence
  Synthetic oligonucleotide
gcgacgagagaccgtaggctcgctctgatc

SEQ ID NO: 494277 - DNA, 30 bp, Artificial Sequence
  Synthetic oligonucleotide
tttcattagcaaacgccgatacgtctgatc

SEQ ID NO: 494278 - DNA, 30 bp, Artificial Sequence
  Synthetic oligonucleotide
ggtcaaatctatttactcgacgccgtgatc

SEQ ID NO: 494279 - DNA, 30 bp, Artificial Sequence
  Synthetic oligonucleotide
tcttgtccagagtgatagactgccgtgatc

SEQ ID NO: 494280 - DNA, 30 bp, Artificial Sequence
  Synthetic oligonucleotide
gtcaccattccacatagacttatggtgatc

SEQ ID NO: 494281 - DNA, 30 bp, Artificial Sequence
  Synthetic oligonucleotide
ccgtaaactgctggtacgcacaatgtgatc

SEQ ID NO: 494282 - DNA, 30 bp, Artificial Sequence
  Synthetic oligonucleotide
caacctttcgttccagaaaccgctgtgatc

SEQ ID NO: 494283 - DNA, 30 bp, Artificial Sequence
  Synthetic oligonucleotide
ttcagctgtagtaccgtggcttaattgatc

SEQ ID NO: 494284 - DNA, 30 bp, Artificial Sequence
  Synthetic oligonucleotide
ctttgcttaccagcggcttgaatattgatc

SEQ ID NO: 494285 - DNA, 30 bp, Artificial Sequence
  Synthetic oligonucleotide
cgaacaccacgcgtgccagtcatattgatc

SEQ ID NO: 494286 - DNA, 30 bp, Artificial Sequence
  Synthetic oligonucleotide
actttcttataggagatattcctattgatc

SEQ ID NO: 494287 - DNA, 30 bp, Artificial Sequence
  Synthetic oligonucleotide
gtagggtagtcttggcgagccgccttgatc

SEQ ID NO: 494288 - DNA, 30 bp, Artificial Sequence
  Synthetic oligonucleotide
cctaagtgggtctgggcgcttagcttgatc

SEQ ID NO: 494289 - DNA, 30 bp, Artificial Sequence
  Synthetic oligonucleotide
gagtgtcttgcgcagtgttcacgcttgatc

SEQ ID NO: 494290 - DNA, 30 bp, Artificial Sequence
  Synthetic oligonucleotide
aaatagctcatatcctcaatataaaatatc

SEQ ID NO: 494291 - DNA, 30 bp, Artificial Sequence
  Synthetic oligonucleotide
gagagtttacttcacaagaaatcaaatatc

SEQ ID NO: 494292 - DNA, 30 bp, Artificial Sequence
  Synthetic oligonucleotide
gcaaacgtccataaaacggccgtcaatatc

SEQ ID NO: 494293 - DNA, 30 bp, Artificial Sequence
  Synthetic oligonucleotide
acataattcattaacatgtgcttcaatatc

SEQ ID NO: 494294 - DNA, 30 bp, Artificial Sequence
  Synthetic oligonucleotide
agccgctcttgaaagtaccctttcaatatc

SEQ ID NO: 494295 - DNA, 30 bp, Artificial Sequence
  Synthetic oligonucleotide
acttgagagcttactttcgtaaagaatatc

SEQ ID NO: 494296 - DNA, 30 bp, Artificial Sequence
  Synthetic oligonucleotide
aaactgcgctgtcattatcgccggaatatc

SEQ ID NO: 494297 - DNA, 30 bp, Artificial Sequence
  Synthetic oligonucleotide
attgagacagccatgctatgttctaatatc

SEQ ID NO: 494298 - DNA, 30 bp, Artificial Sequence
  Synthetic oligonucleotide
tcgttttcctaagaccgttaccttaatatc

SEQ ID NO: 494299 - DNA, 30 bp, Artificial Sequence
  Synthetic oligonucleotide
gttgaaatagcgggcaaggcatttaatatc

SEQ ID NO: 494300 - DNA, 30 bp, Artificial Sequence
  Synthetic oligonucleotide
taattccctccaccggctgtcacacatatc

SEQ ID NO: 494301 - DNA, 30 bp, Artificial Sequence
  Synthetic oligonucleotide
gaacaggttcatgtctgaagcagacatatc

SEQ ID NO: 494302 - DNA, 30 bp, Artificial Sequence
  Synthetic oligonucleotide
ggtgacgggcttcagtacagattacatatc

SEQ ID NO: 494303 - DNA, 30 bp, Artificial Sequence
  Synthetic oligonucleotide
gtcatgtcctaatcactccgtgagcatatc

SEQ ID NO: 494304 - DNA, 30 bp, Artificial Sequence
  Synthetic oligonucleotide
cgctagcatgattgcagacggtagcatatc

SEQ ID NO: 494305 - DNA, 30 bp, Artificial Sequence
  Synthetic oligonucleotide
atctttagtctggcctgttatgtgcatatc

SEQ ID NO: 494306 - DNA, 30 bp, Artificial Sequence
  Synthetic oligonucleotide
aaagtattaatccttagatcttctcatatc

SEQ ID NO: 494307 - DNA, 30 bp, Artificial Sequence
  Synthetic oligonucleotide
tgttgcccgctttcaatccatcgtcatatc

SEQ ID NO: 494308 - DNA, 30 bp, Artificial Sequence
  Synthetic oligonucleotide
gtgattggactggcgttttgttaagatatc

SEQ ID NO: 494309 - DNA, 30 bp, Artificial Sequence
  Synthetic oligonucleotide
tttgaccataatgtctgcatttcagatatc

SEQ ID NO: 494310 - DNA, 30 bp, Artificial Sequence
  Synthetic oligonucleotide
gcggtttctaatagaaagatcggagatatc

SEQ ID NO: 494311 - DNA, 30 bp, Artificial Sequence
  Synthetic oligonucleotide
gttaaattccccttcgcgcttcacgatatc

SEQ ID NO: 494312 - DNA, 30 bp, Artificial Sequence
  Synthetic oligonucleotide
ctgcataagtttggaccgagacatgatatc

SEQ ID NO: 494313 - DNA, 30 bp, Artificial Sequence
  Synthetic oligonucleotide
gttctttgtccagactttgcatctgatatc

SEQ ID NO: 494314 - DNA, 30 bp, Artificial Sequence
  Synthetic oligonucleotide
gtagttattcttgagctagtaattgatatc

SEQ ID NO: 494315 - DNA, 30 bp, Artificial Sequence
  Synthetic oligonucleotide
cacctcgggtgcggactcagcgaatatatc

SEQ ID NO: 494316 - DNA, 30 bp, Artificial Sequence
  Synthetic oligonucleotide
cacatttattattgcggtgtcacatatatc

SEQ ID NO: 494317 - DNA, 30 bp, Artificial Sequence
  Synthetic oligonucleotide
gtctagataaggctcgtcctcatatatatc

SEQ ID NO: 494318 - DNA, 30 bp, Artificial Sequence
  Synthetic oligonucleotide
attcttgtacactcccacagagcgtatatc

SEQ ID NO: 494319 - DNA, 30 bp, Artificial Sequence
  Synthetic oligonucleotide
agtgactccagtttgaggtctgggtatatc

SEQ ID NO: 494320 - DNA, 30 bp, Artificial Sequence
  Synthetic oligonucleotide
gctagtcctaccttactgtgctggtatatc

SEQ ID NO: 494321 - DNA, 30 bp, Artificial Sequence
  Synthetic oligonucleotide
aaaccatgaaagtcaatccgtataactatc

SEQ ID NO: 494322 - DNA, 30 bp, Artificial Sequence
  Synthetic oligonucleotide
gaacgtaaggggtattttatacggactatc

SEQ ID NO: 494323 - DNA, 30 bp, Artificial Sequence
  Synthetic oligonucleotide
agccaagttctcgcccgcttatggactatc

SEQ ID NO: 494324 - DNA, 30 bp, Artificial Sequence
  Synthetic oligonucleotide
ttcaacgactttacgcgtaggaatactatc

SEQ ID NO: 494325 - DNA, 30 bp, Artificial Sequence
  Synthetic oligonucleotide
aaattgatatgattacttgaaggccctatc

SEQ ID NO: 494326 - DNA, 30 bp, Artificial Sequence
  Synthetic oligonucleotide
gatctcttgatctcaaggtattcgcctatc

SEQ ID NO: 494327 - DNA, 30 bp, Artificial Sequence
  Synthetic oligonucleotide
aaaaatagtcttcgtagtgtccggcctatc

SEQ ID NO: 494328 - DNA, 30 bp, Artificial Sequence
  Synthetic oligonucleotide
taagtcggctaagaaagcttttatcctatc

SEQ ID NO: 494329 - DNA, 30 bp, Artificial Sequence
  Synthetic oligonucleotide
ggacagctaactgaccaaagggaagctatc

SEQ ID NO: 494330 - DNA, 30 bp, Artificial Sequence
  Synthetic oligonucleotide
gtacggatttttattaatacggcagctatc

SEQ ID NO: 494331 - DNA, 30 bp, Artificial Sequence
  Synthetic oligonucleotide
aggctttcccgcagcggacttctagctatc

SEQ ID NO: 494332 - DNA, 30 bp, Artificial Sequence
  Synthetic oligonucleotide
cgggattcccggtagcataagttagctatc

SEQ ID NO: 494333 - DNA, 29 bp, Artificial Sequence
  Synthetic oligonucleotide
gagggaggtctgatcagcgtttagctatc

SEQ ID NO: 494334 - DNA, 30 bp, Artificial Sequence
  Synthetic oligonucleotide
ctatattatgcctacgaagaagacgctatc

SEQ ID NO: 494335 - DNA, 30 bp, Artificial Sequence
  Synthetic oligonucleotide
aacccgttcgcgggggactctgcggctatc

SEQ ID NO: 494336 - DNA, 30 bp, Artificial Sequence
  Synthetic oligonucleotide
tgtaagccctcgcctaaccgctcggctatc

SEQ ID NO: 494337 - DNA, 30 bp, Artificial Sequence
  Synthetic oligonucleotide
taattcgtagccttagttggttgggctatc

SEQ ID NO: 494338 - DNA, 30 bp, Artificial Sequence
  Synthetic oligonucleotide
cacagctgatgcacggatctgggatctatc

SEQ ID NO: 494339 - DNA, 30 bp, Artificial Sequence
  Synthetic oligonucleotide
gtatcttgggtaccatcatagtcctctatc

SEQ ID NO: 494340 - DNA, 30 bp, Artificial Sequence
  Synthetic oligonucleotide
ggttactgaaggagcgctacagagtctatc

SEQ ID NO: 494341 - DNA, 30 bp, Artificial Sequence
  Synthetic oligonucleotide
gcggacaacgagcaataaagtgattctatc

SEQ ID NO: 494342 - DNA, 30 bp, Artificial Sequence
  Synthetic oligonucleotide
tagttaagccttcagtcgctgttttctatc

SEQ ID NO: 494343 - DNA, 30 bp, Artificial Sequence
  Synthetic oligonucleotide
ggagacagggtacctcgatagcccagtatc

SEQ ID NO: 494344 - DNA, 30 bp, Artificial Sequence
  Synthetic oligonucleotide
ataccgctaccggagcgaatattcagtatc

SEQ ID NO: 494345 - DNA, 30 bp, Artificial Sequence
  Synthetic oligonucleotide
agctgtttacttgcaatgcggatgagtatc

SEQ ID NO: 494346 - DNA, 30 bp, Artificial Sequence
  Synthetic oligonucleotide
gttgatgcttttagtcacgtgtttagtatc

SEQ ID NO: 494347 - DNA, 30 bp, Artificial Sequence
  Synthetic oligonucleotide
gttatcgttttataagtcagataacgtatc

SEQ ID NO: 494348 - DNA, 30 bp, Artificial Sequence
  Synthetic oligonucleotide
accggattgacgcaggataggggacgtatc

SEQ ID NO: 494349 - DNA, 30 bp, Artificial Sequence
  Synthetic oligonucleotide
cggacaaacaatgtattggagtgacgtatc

SEQ ID NO: 494350 - DNA, 30 bp, Artificial Sequence
  Synthetic oligonucleotide
ggcagaatatatgtatggttcctacgtatc

SEQ ID NO: 494351 - DNA, 30 bp, Artificial Sequence
  Synthetic oligonucleotide
gaaacggagtactctacagaaaaccgtatc

SEQ ID NO: 494352 - DNA, 30 bp, Artificial Sequence
  Synthetic oligonucleotide
ggttaagaaggggttggttctccccgtatc

SEQ ID NO: 494353 - DNA, 30 bp, Artificial Sequence
  Synthetic oligonucleotide
tccagcttaaggtagacagtccgccgtatc

SEQ ID NO: 494354 - DNA, 30 bp, Artificial Sequence
  Synthetic oligonucleotide
ctttttcacgtgcttcacggttggcgtatc

SEQ ID NO: 494355 - DNA, 30 bp, Artificial Sequence
  Synthetic oligonucleotide
gatagcgtgcgttgattcttgggtcgtatc

SEQ ID NO: 494356 - DNA, 30 bp, Artificial Sequence
  Synthetic oligonucleotide
cagtcaggtttaagctaccaccaaggtatc

SEQ ID NO: 494357 - DNA, 30 bp, Artificial Sequence
  Synthetic oligonucleotide
ccatgtatgtacatgtttttctcaggtatc

SEQ ID NO: 494358 - DNA, 30 bp, Artificial Sequence
  Synthetic oligonucleotide
gtccactgaggactgacgtaaacgggtatc

SEQ ID NO: 494359 - DNA, 30 bp, Artificial Sequence
  Synthetic oligonucleotide
ggagcctctaatcgtatcggtacgggtatc

SEQ ID NO: 494360 - DNA, 30 bp, Artificial Sequence
  Synthetic oligonucleotide
catctagctataagactctaagcgggtatc

SEQ ID NO: 494361 - DNA, 30 bp, Artificial Sequence
  Synthetic oligonucleotide
aagtcggacactcgggtgtgcgcgggtatc

SEQ ID NO: 494362 - DNA, 30 bp, Artificial Sequence
  Synthetic oligonucleotide
gtttgaataggctggaagtggtggggtatc

SEQ ID NO: 494363 - DNA, 30 bp, Artificial Sequence
  Synthetic oligonucleotide
gtgatagacgcccgcaaccaatcatgtatc

SEQ ID NO: 494364 - DNA, 30 bp, Artificial Sequence
  Synthetic oligonucleotide
gtaaatgttatctggggtagccgatgtatc

SEQ ID NO: 494365 - DNA, 30 bp, Artificial Sequence
  Synthetic oligonucleotide
gttagggtggatatgccgccatgatgtatc

SEQ ID NO: 494366 - DNA, 30 bp, Artificial Sequence
  Synthetic oligonucleotide
taagcaatatgtgctattggcttatgtatc

SEQ ID NO: 494367 - DNA, 30 bp, Artificial Sequence
  Synthetic oligonucleotide
gggggaagtatctcccctggttcctgtatc

SEQ ID NO: 494368 - DNA, 30 bp, Artificial Sequence
  Synthetic oligonucleotide
ccgtagatgagcaggtcacagatctgtatc

SEQ ID NO: 494369 - DNA, 30 bp, Artificial Sequence
  Synthetic oligonucleotide
ttttttggcctagaataagtggtttgtatc

SEQ ID NO: 494370 - DNA, 30 bp, Artificial Sequence
  Synthetic oligonucleotide
gcgtgctcgtctgtcacctcgcaaattatc

SEQ ID NO: 494371 - DNA, 30 bp, Artificial Sequence
  Synthetic oligonucleotide
tgtctgcgacaaggacgagacgacattatc

SEQ ID NO: 494372 - DNA, 30 bp, Artificial Sequence
  Synthetic oligonucleotide
cacatgccttaacggtcgtttcgcattatc

SEQ ID NO: 494373 - DNA, 30 bp, Artificial Sequence
  Synthetic oligonucleotide
cccatggtatacacgcccacatgcattatc

SEQ ID NO: 494374 - DNA, 30 bp, Artificial Sequence
  Synthetic oligonucleotide
gggtcttaaggtgctgacgcccagattatc

SEQ ID NO: 494375 - DNA, 30 bp, Artificial Sequence
  Synthetic oligonucleotide
aatattggtaaatcggaaaggggtattatc

SEQ ID NO: 494376 - DNA, 30 bp, Artificial Sequence
  Synthetic oligonucleotide
agctccgcgagctagtcatattttattatc

SEQ ID NO: 494377 - DNA, 30 bp, Artificial Sequence
  Synthetic oligonucleotide
tagatattaatttgcgcgctaatacttatc

SEQ ID NO: 494378 - DNA, 30 bp, Artificial Sequence
  Synthetic oligonucleotide
gcatgctccgtgctactgcccttacttatc

SEQ ID NO: 494379 - DNA, 30 bp, Artificial Sequence
  Synthetic oligonucleotide
gacattatgtctctggtcagtctccttatc

SEQ ID NO: 494380 - DNA, 30 bp, Artificial Sequence
  Synthetic oligonucleotide
ctctcagcttcccccccctagtatcttatc

SEQ ID NO: 494381 - DNA, 30 bp, Artificial Sequence
  Synthetic oligonucleotide
gacccgttaataagtactccttatcttatc

SEQ ID NO: 494382 - DNA, 31 bp, Artificial Sequence
  Synthetic oligonucleotide
cgcgctccggggaattggaagtcctcttatc

SEQ ID NO: 494383 - DNA, 30 bp, Artificial Sequence
  Synthetic oligonucleotide
cgtccagtgctcattaaatgagctcttatc

SEQ ID NO: 494384 - DNA, 30 bp, Artificial Sequence
  Synthetic oligonucleotide
gtgacaggcgcattagcattaggtcttatc

SEQ ID NO: 494385 - DNA, 30 bp, Artificial Sequence
  Synthetic oligonucleotide
gacagatgagtctaagtcgttcttcttatc

SEQ ID NO: 494386 - DNA, 30 bp, Artificial Sequence
  Synthetic oligonucleotide
ccccgggacaggatatatatcaccgttatc

SEQ ID NO: 494387 - DNA, 29 bp, Artificial Sequence
  Synthetic oligonucleotide
cgtcttccatcgggccccgaatcgttatc

SEQ ID NO: 494388 - DNA, 30 bp, Artificial Sequence
  Synthetic oligonucleotide
ctttggttgaacctgagaagaatggttatc

SEQ ID NO: 494389 - DNA, 30 bp, Artificial Sequence
  Synthetic oligonucleotide
aataactttaatcatatcgtgcttgttatc

SEQ ID NO: 494390 - DNA, 30 bp, Artificial Sequence
  Synthetic oligonucleotide
gtttcgctgaaaagtttcgccgaatttatc

SEQ ID NO: 494391 - DNA, 30 bp, Artificial Sequence
  Synthetic oligonucleotide
cccgccgatggtggcccggcaggatttatc

SEQ ID NO: 494392 - DNA, 30 bp, Artificial Sequence
  Synthetic oligonucleotide
gcaggatttgatttccaaacgagctttatc

SEQ ID NO: 494393 - DNA, 30 bp, Artificial Sequence
  Synthetic oligonucleotide
caccatcgtttttgggataaaggctttatc

SEQ ID NO: 494394 - DNA, 30 bp, Artificial Sequence
  Synthetic oligonucleotide
ttgaatcggatagccgcatatccgtttatc

SEQ ID NO: 494395 - DNA, 30 bp, Artificial Sequence
  Synthetic oligonucleotide
gagtgcatgcctcaagactcagggtttatc

SEQ ID NO: 494396 - DNA, 29 bp, Artificial Sequence
  Synthetic oligonucleotide
atatattctcccttttcgaatattttatc

SEQ ID NO: 494397 - DNA, 30 bp, Artificial Sequence
  Synthetic oligonucleotide
atatgtgtgccgaagctgcgatattttatc

SEQ ID NO: 494398 - DNA, 30 bp, Artificial Sequence
  Synthetic oligonucleotide
ttaaaaactaggccgataagtacttttatc

SEQ ID NO: 494399 - DNA, 30 bp, Artificial Sequence
  Synthetic oligonucleotide
aatgtgatcccagcttcacagagttttatc

SEQ ID NO: 494400 - DNA, 30 bp, Artificial Sequence
  Synthetic oligonucleotide
agataaatccgagattatcctcgttttatc

SEQ ID NO: 494401 - DNA, 30 bp, Artificial Sequence
  Synthetic oligonucleotide
ggtttaggcaccgcgggtagcctaaaactc

SEQ ID NO: 494402 - DNA, 30 bp, Artificial Sequence
  Synthetic oligonucleotide
cgttctccgccccattaaatgaccaaactc

SEQ ID NO: 494403 - DNA, 30 bp, Artificial Sequence
  Synthetic oligonucleotide
atttagccgttcattacttataccaaactc

SEQ ID NO: 494404 - DNA, 30 bp, Artificial Sequence
  Synthetic oligonucleotide
ggaccggcggggcttttgaccttgaaactc

SEQ ID NO: 494405 - DNA, 30 bp, Artificial Sequence
  Synthetic oligonucleotide
aaatgatgcacggatgtaaagattaaactc

SEQ ID NO: 494406 - DNA, 30 bp, Artificial Sequence
  Synthetic oligonucleotide
gtgctgatgggcgtggcgccagggcaactc

SEQ ID NO: 494407 - DNA, 30 bp, Artificial Sequence
  Synthetic oligonucleotide
agttcgtccaaggtcgggaaatggcaactc

SEQ ID NO: 494408 - DNA, 30 bp, Artificial Sequence
  Synthetic oligonucleotide
atctcgcctcgtaaatattcggctcaactc

SEQ ID NO: 494409 - DNA, 30 bp, Artificial Sequence
  Synthetic oligonucleotide
ataagtacgtgatacgtttcggctcaactc

SEQ ID NO: 494410 - DNA, 30 bp, Artificial Sequence
  Synthetic oligonucleotide
atgatggatgaagcttttatgtttcaactc

SEQ ID NO: 494411 - DNA, 30 bp, Artificial Sequence
  Synthetic oligonucleotide
gctggttgcaatgaaacaggttttcaactc

SEQ ID NO: 494412 - DNA, 30 bp, Artificial Sequence
  Synthetic oligonucleotide
cgtgtagttcttgatataaaacaagaactc

SEQ ID NO: 494413 - DNA, 30 bp, Artificial Sequence
  Synthetic oligonucleotide
atccgggcagtgaaggggagttgagaactc

SEQ ID NO: 494414 - DNA, 30 bp, Artificial Sequence
  Synthetic oligonucleotide
tccgattgatgaagagagaatcgcgaactc

SEQ ID NO: 494415 - DNA, 30 bp, Artificial Sequence
  Synthetic oligonucleotide
aaattttgccggacatcgagtcgcgaactc

SEQ ID NO: 494416 - DNA, 30 bp, Artificial Sequence
  Synthetic oligonucleotide
aacaacggcgtttatatgggtacggaactc

SEQ ID NO: 494417 - DNA, 30 bp, Artificial Sequence
  Synthetic oligonucleotide
cgcgaatgagagattcgggaactggaactc

SEQ ID NO: 494418 - DNA, 30 bp, Artificial Sequence
  Synthetic oligonucleotide
cgttcggccctctatatcgtacctgaactc

SEQ ID NO: 494419 - DNA, 30 bp, Artificial Sequence
  Synthetic oligonucleotide
gggtgcatctattcgttcgggtaataactc

SEQ ID NO: 494420 - DNA, 30 bp, Artificial Sequence
  Synthetic oligonucleotide
ttccattgaatgtacacgacctgataactc

SEQ ID NO: 494421 - DNA, 30 bp, Artificial Sequence
  Synthetic oligonucleotide
tgtattattattttaaaaattagctaactc

SEQ ID NO: 494422 - DNA, 30 bp, Artificial Sequence
  Synthetic oligonucleotide
tcctaatcgtcaagtatgataatctaactc

SEQ ID NO: 494423 - DNA, 30 bp, Artificial Sequence
  Synthetic oligonucleotide
taatatcgttagttgaacgtctattaactc

SEQ ID NO: 494424 - DNA, 30 bp, Artificial Sequence
  Synthetic oligonucleotide
ctaactcattattagtacgatgtttaactc

SEQ ID NO: 494425 - DNA, 30 bp, Artificial Sequence
  Synthetic oligonucleotide
acccggatgaacgggggcagagtaacactc

SEQ ID NO: 494426 - DNA, 30 bp, Artificial Sequence
  Synthetic oligonucleotide
agtgggattgtaaatctagaaactacactc

SEQ ID NO: 494427 - DNA, 30 bp, Artificial Sequence
  Synthetic oligonucleotide
atataatactgctgctgtgtgcgtacactc

SEQ ID NO: 494428 - DNA, 30 bp, Artificial Sequence
  Synthetic oligonucleotide
aatcgaccaatggggtttgtcgtaccactc

SEQ ID NO: 494429 - DNA, 30 bp, Artificial Sequence
  Synthetic oligonucleotide
aatggcccttgcagcaagccttccccactc

SEQ ID NO: 494430 - DNA, 30 bp, Artificial Sequence
  Synthetic oligonucleotide
gcgtacccgcccgcttttcactgcccactc

SEQ ID NO: 494431 - DNA, 30 bp, Artificial Sequence
  Synthetic oligonucleotide
atttggtcaggacttgaggtttacgcactc

SEQ ID NO: 494432 - DNA, 30 bp, Artificial Sequence
  Synthetic oligonucleotide
gtgtattactggtatcgccccggggcactc

SEQ ID NO: 494433 - DNA, 30 bp, Artificial Sequence
  Synthetic oligonucleotide
atgatggagaatgagcgcagaaatgcactc

SEQ ID NO: 494434 - DNA, 30 bp, Artificial Sequence
  Synthetic oligonucleotide
tgtaaatgaatcctccactgatgtgcactc

SEQ ID NO: 494435 - DNA, 30 bp, Artificial Sequence
  Synthetic oligonucleotide
aatctaaagaaaaagatattgtttgcactc

SEQ ID NO: 494436 - DNA, 30 bp, Artificial Sequence
  Synthetic oligonucleotide
ggagttaggagttctacgggggcctcactc

SEQ ID NO: 494437 - DNA, 30 bp, Artificial Sequence
  Synthetic oligonucleotide
aatcccggtataataaagggctcctcactc

SEQ ID NO: 494438 - DNA, 30 bp, Artificial Sequence
  Synthetic oligonucleotide
ctccaatcacgtgctcaataaaagtcactc

SEQ ID NO: 494439 - DNA, 30 bp, Artificial Sequence
  Synthetic oligonucleotide
gaatcagtgggggacatgtcctagtcactc

SEQ ID NO: 494440 - DNA, 30 bp, Artificial Sequence
  Synthetic oligonucleotide
gttaggcaaggaatagggtggtagtcactc

SEQ ID NO: 494441 - DNA, 30 bp, Artificial Sequence
  Synthetic oligonucleotide
gcaaattgcggcctcccagagagttcactc

SEQ ID NO: 494442 - DNA, 30 bp, Artificial Sequence
  Synthetic oligonucleotide
ggaacatgggtctgaggcggggtttcactc

SEQ ID NO: 494443 - DNA, 30 bp, Artificial Sequence
  Synthetic oligonucleotide
catgtggttgtactcctcatacaaagactc

SEQ ID NO: 494444 - DNA, 30 bp, Artificial Sequence
  Synthetic oligonucleotide
cgattggttgaagtcgtttgttaaagactc

SEQ ID NO: 494445 - DNA, 30 bp, Artificial Sequence
  Synthetic oligonucleotide
aggccgacccacactgacgaagcaagactc

SEQ ID NO: 494446 - DNA, 30 bp, Artificial Sequence
  Synthetic oligonucleotide
cggtttctctgggcaccatgggccagactc

SEQ ID NO: 494447 - DNA, 30 bp, Artificial Sequence
  Synthetic oligonucleotide
gactgcatcgcaaatgggacccggagactc

SEQ ID NO: 494448 - DNA, 30 bp, Artificial Sequence
  Synthetic oligonucleotide
atgccgtctgaaagcgtattaaaaggactc

SEQ ID NO: 494449 - DNA, 30 bp, Artificial Sequence
  Synthetic oligonucleotide
ggagaggttacggaaaggtttgccggactc

SEQ ID NO: 494450 - DNA, 30 bp, Artificial Sequence
  Synthetic oligonucleotide
tttaatgggacttttagataatgcggactc

SEQ ID NO: 494451 - DNA, 30 bp, Artificial Sequence
  Synthetic oligonucleotide
gtgcctatgaatttgctttggctcggactc

SEQ ID NO: 494452 - DNA, 30 bp, Artificial Sequence
  Synthetic oligonucleotide
tgtacgtcaaaggacgctagcaatggactc

SEQ ID NO: 494453 - DNA, 30 bp, Artificial Sequence
  Synthetic oligonucleotide
tactaaagacgcgagatttttgaatgactc

SEQ ID NO: 494454 - DNA, 30 bp, Artificial Sequence
  Synthetic oligonucleotide
gtcatgcagctaaaacccgttctctgactc

SEQ ID NO: 494455 - DNA, 30 bp, Artificial Sequence
  Synthetic oligonucleotide
cgttagttaccacacaacgttatgtgactc

SEQ ID NO: 494456 - DNA, 30 bp, Artificial Sequence
  Synthetic oligonucleotide
tgacccagccggaaagcactcttgtgactc

SEQ ID NO: 494457 - DNA, 30 bp, Artificial Sequence
  Synthetic oligonucleotide
tcataagaatcgtcgtaatatgattgactc

SEQ ID NO: 494458 - DNA, 30 bp, Artificial Sequence
  Synthetic oligonucleotide
tctgtgacatgggggtttacatattgactc

SEQ ID NO: 494459 - DNA, 30 bp, Artificial Sequence
  Synthetic oligonucleotide
tccataacatcccttcttttaacaatactc

SEQ ID NO: 494460 - DNA, 30 bp, Artificial Sequence
  Synthetic oligonucleotide
tgattgtattatgatatcggcgtaatactc

SEQ ID NO: 494461 - DNA, 30 bp, Artificial Sequence
  Synthetic oligonucleotide
tgagattaaggagctgtagcattaatactc

SEQ ID NO: 494462 - DNA, 30 bp, Artificial Sequence
  Synthetic oligonucleotide
gtctgtgctcttagctagtcgtacatactc

SEQ ID NO: 494463 - DNA, 30 bp, Artificial Sequence
  Synthetic oligonucleotide
cagcggaagttgggtcatatagccatactc

SEQ ID NO: 494464 - DNA, 30 bp, Artificial Sequence
  Synthetic oligonucleotide
tagagattatggtggatactatggatactc

SEQ ID NO: 494465 - DNA, 30 bp, Artificial Sequence
  Synthetic oligonucleotide
cgccagctatgtgacactaaagtgatactc

SEQ ID NO: 494466 - DNA, 30 bp, Artificial Sequence
  Synthetic oligonucleotide
aaaataaattaaccttcgaggtatatactc

SEQ ID NO: 494467 - DNA, 30 bp, Artificial Sequence
  Synthetic oligonucleotide
tttcgctactctcccgcgaacgctatactc

SEQ ID NO: 494468 - DNA, 30 bp, Artificial Sequence
  Synthetic oligonucleotide
tattctatggagctcgattagtctatactc

SEQ ID NO: 494469 - DNA, 30 bp, Artificial Sequence
  Synthetic oligonucleotide
ttaccagatcatactactcctccgctactc

SEQ ID NO: 494470 - DNA, 30 bp, Artificial Sequence
  Synthetic oligonucleotide
gctataaaaatctatctatctaggctactc

SEQ ID NO: 494471 - DNA, 30 bp, Artificial Sequence
  Synthetic oligonucleotide
gacgcttacccctgttcctaagatctactc

SEQ ID NO: 494472 - DNA, 30 bp, Artificial Sequence
  Synthetic oligonucleotide
tacgctcagttttacgcatgcagagtactc

SEQ ID NO: 494473 - DNA, 30 bp, Artificial Sequence
  Synthetic oligonucleotide
aaatgatgtcgctgttcaggagaggtactc

SEQ ID NO: 494474 - DNA, 30 bp, Artificial Sequence
  Synthetic oligonucleotide
aacagctaatgagaacaggcaactgtactc

SEQ ID NO: 494475 - DNA, 30 bp, Artificial Sequence
  Synthetic oligonucleotide
atctcatacttggtggtgaaaggtgtactc

SEQ ID NO: 494476 - DNA, 30 bp, Artificial Sequence
  Synthetic oligonucleotide
cctctgctatcaatgccgattaaattactc

SEQ ID NO: 494477 - DNA, 30 bp, Artificial Sequence
  Synthetic oligonucleotide
agtaatcacctttaaggatgtgaattactc

SEQ ID NO: 494478 - DNA, 30 bp, Artificial Sequence
  Synthetic oligonucleotide
taaagcgcacgttaaaattccgatttactc

SEQ ID NO: 494479 - DNA, 30 bp, Artificial Sequence
  Synthetic oligonucleotide
ttaatgaaagactattgccattatttactc

SEQ ID NO: 494480 - DNA, 30 bp, Artificial Sequence
  Synthetic oligonucleotide
gagggtagcgtgcgaggacttacaaacctc

SEQ ID NO: 494481 - DNA, 30 bp, Artificial Sequence
  Synthetic oligonucleotide
ggcctcgtaacccgttccacaatcaacctc

SEQ ID NO: 494482 - DNA, 30 bp, Artificial Sequence
  Synthetic oligonucleotide
ccgcctttgacagatgttttcccgaacctc

SEQ ID NO: 494483 - DNA, 30 bp, Artificial Sequence
  Synthetic oligonucleotide
tctttatctccatgttttactttgaacctc

SEQ ID NO: 494484 - DNA, 30 bp, Artificial Sequence
  Synthetic oligonucleotide
aggattccgaaggcacaatgttgtaacctc

SEQ ID NO: 494485 - DNA, 30 bp, Artificial Sequence
  Synthetic oligonucleotide
ttttggtgtttcccaagtgaacaacacctc

SEQ ID NO: 494486 - DNA, 30 bp, Artificial Sequence
  Synthetic oligonucleotide
ctccgagtaaattctgtcccagtacacctc

SEQ ID NO: 494487 - DNA, 30 bp, Artificial Sequence
  Synthetic oligonucleotide
tcgtttttatctatgtaggaacgccacctc

SEQ ID NO: 494488 - DNA, 30 bp, Artificial Sequence
  Synthetic oligonucleotide
ggctcctcttatgggcggcggcctcacctc

SEQ ID NO: 494489 - DNA, 30 bp, Artificial Sequence
  Synthetic oligonucleotide
cataatatccaggtaatgtaaggtcacctc

SEQ ID NO: 494490 - DNA, 30 bp, Artificial Sequence
  Synthetic oligonucleotide
cgagataagtgggtattctatcgcgacctc

SEQ ID NO: 494491 - DNA, 30 bp, Artificial Sequence
  Synthetic oligonucleotide
ggtattacgtataaacttggatcggacctc

SEQ ID NO: 494492 - DNA, 30 bp, Artificial Sequence
  Synthetic oligonucleotide
ttacggcttgaagggttatcaaaatacctc

SEQ ID NO: 494493 - DNA, 30 bp, Artificial Sequence
  Synthetic oligonucleotide
gtccactgaaagtaccaacgtttgaccctc

SEQ ID NO: 494494 - DNA, 30 bp, Artificial Sequence
  Synthetic oligonucleotide
aactgataacgtctggcttacttacccctc

SEQ ID NO: 494495 - DNA, 30 bp, Artificial Sequence
  Synthetic oligonucleotide
agaattagccgtagtgctccacaccccctc

SEQ ID NO: 494496 - DNA, 30 bp, Artificial Sequence
  Synthetic oligonucleotide
ttataagggcattcgcggatctcccccctc

SEQ ID NO: 494497 - DNA, 30 bp, Artificial Sequence
  Synthetic oligonucleotide
gagttgcccgaggatagctttcggcccctc

SEQ ID NO: 494498 - DNA, 30 bp, Artificial Sequence
  Synthetic oligonucleotide
ttgtaacgcgctaggaatcagtggcccctc

SEQ ID NO: 494499 - DNA, 30 bp, Artificial Sequence
  Synthetic oligonucleotide
ccgacaaagcctttacctgcaacggccctc

SEQ ID NO: 494500 - DNA, 30 bp, Artificial Sequence
  Synthetic oligonucleotide
caaattataggtatatacggtagggccctc

SEQ ID NO: 494501 - DNA, 30 bp, Artificial Sequence
  Synthetic oligonucleotide
tttatggcctgcctatgattatgggccctc

SEQ ID NO: 494502 - DNA, 29 bp, Artificial Sequence
  Synthetic oligonucleotide
ccgcgtccactaactttgacgctgccctc

SEQ ID NO: 494503 - DNA, 30 bp, Artificial Sequence
  Synthetic oligonucleotide
ggaacttttgtcaagacggatgctgccctc

SEQ ID NO: 494504 - DNA, 30 bp, Artificial Sequence
  Synthetic oligonucleotide
aattgttccttctgttgtctaccatccctc

SEQ ID NO: 494505 - DNA, 30 bp, Artificial Sequence
  Synthetic oligonucleotide
acggatttttcgaatatataactatccctc

SEQ ID NO: 494506 - DNA, 30 bp, Artificial Sequence
  Synthetic oligonucleotide
ttaccccgcgatcccacgctatgttccctc

SEQ ID NO: 494507 - DNA, 30 bp, Artificial Sequence
  Synthetic oligonucleotide
attccgcacgttcagagagagtgttccctc

SEQ ID NO: 494508 - DNA, 30 bp, Artificial Sequence
  Synthetic oligonucleotide
gtaaagtttaatgcttgttatctttccctc

SEQ ID NO: 494509 - DNA, 30 bp, Artificial Sequence
  Synthetic oligonucleotide
ttcgccggagcggacgctagtgaaagcctc

SEQ ID NO: 494510 - DNA, 30 bp, Artificial Sequence
  Synthetic oligonucleotide
gttggcctcgtgattcatcacggaagcctc

SEQ ID NO: 494511 - DNA, 30 bp, Artificial Sequence
  Synthetic oligonucleotide
aacatatgcaaacgctttgccctaagcctc

SEQ ID NO: 494512 - DNA, 30 bp, Artificial Sequence
  Synthetic oligonucleotide
ctatgttgtgatattatgggggtaagcctc

SEQ ID NO: 494513 - DNA, 30 bp, Artificial Sequence
  Synthetic oligonucleotide
gaaacattcttgttgtagccccgcagcctc

SEQ ID NO: 494514 - DNA, 30 bp, Artificial Sequence
  Synthetic oligonucleotide
tccgaccctacccttcatactcgcagcctc

SEQ ID NO: 494515 - DNA, 30 bp, Artificial Sequence
  Synthetic oligonucleotide
gaacagttcataggatatactccgagcctc

SEQ ID NO: 494516 - DNA, 30 bp, Artificial Sequence
  Synthetic oligonucleotide
acatttgtcaacacactggacggtagcctc

SEQ ID NO: 494517 - DNA, 30 bp, Artificial Sequence
  Synthetic oligonucleotide
cggacagcatgatatactgtcccacgcctc

SEQ ID NO: 494518 - DNA, 30 bp, Artificial Sequence
  Synthetic oligonucleotide
gaccccctctatttctcagacatccgcctc

SEQ ID NO: 494519 - DNA, 30 bp, Artificial Sequence
  Synthetic oligonucleotide
cgcggaagcaattcgcacatgctgcgcctc

SEQ ID NO: 494520 - DNA, 30 bp, Artificial Sequence
  Synthetic oligonucleotide
ggggggagaataaaccgaggcgtgcgcctc

SEQ ID NO: 494521 - DNA, 30 bp, Artificial Sequence
  Synthetic oligonucleotide
aaaaggcacgccgcgaaggaccaaggcctc

SEQ ID NO: 494522 - DNA, 30 bp, Artificial Sequence
  Synthetic oligonucleotide
caccgcagaagcaatgaagattaaggcctc

SEQ ID NO: 494523 - DNA, 30 bp, Artificial Sequence
  Synthetic oligonucleotide
gcaaactgccgtttattccaaacaggcctc

SEQ ID NO: 494524 - DNA, 30 bp, Artificial Sequence
  Synthetic oligonucleotide
ggacctttacgaggtgtactatcgggcctc

SEQ ID NO: 494525 - DNA, 30 bp, Artificial Sequence
  Synthetic oligonucleotide
ctgctcacacatcgggttggccggggcctc

SEQ ID NO: 494526 - DNA, 30 bp, Artificial Sequence
  Synthetic oligonucleotide
aaccacgaacgtggcccgctccggggcctc

SEQ ID NO: 494527 - DNA, 30 bp, Artificial Sequence
  Synthetic oligonucleotide
aatcgcacaaatcggtcaacccttggcctc

SEQ ID NO: 494528 - DNA, 30 bp, Artificial Sequence
  Synthetic oligonucleotide
atatctcatgggctatacaatacatgcctc

SEQ ID NO: 494529 - DNA, 30 bp, Artificial Sequence
  Synthetic oligonucleotide
ttttttggcttctgattacagagatgcctc

SEQ ID NO: 494530 - DNA, 30 bp, Artificial Sequence
  Synthetic oligonucleotide
gccggaagttggcagatgaccatctgcctc

SEQ ID NO: 494531 - DNA, 30 bp, Artificial Sequence
  Synthetic oligonucleotide
tgctgggatccgaggcttttttattgcctc

SEQ ID NO: 494532 - DNA, 30 bp, Artificial Sequence
  Synthetic oligonucleotide
ctggtccgttgcttgaggtccgacatcctc

SEQ ID NO: 494533 - DNA, 30 bp, Artificial Sequence
  Synthetic oligonucleotide
aagagttcttcagtcccagtcgccatcctc

SEQ ID NO: 494534 - DNA, 30 bp, Artificial Sequence
  Synthetic oligonucleotide
gatcccatccgggattctatctaactcctc

SEQ ID NO: 494535 - DNA, 30 bp, Artificial Sequence
  Synthetic oligonucleotide
gttagttagcgtcacaggtggggactcctc

SEQ ID NO: 494536 - DNA, 30 bp, Artificial Sequence
  Synthetic oligonucleotide
attaacaacgacgggctacagagcctcctc

SEQ ID NO: 494537 - DNA, 30 bp, Artificial Sequence
  Synthetic oligonucleotide
ttgatcaccgatcaagcgtaatttctcctc

SEQ ID NO: 494538 - DNA, 30 bp, Artificial Sequence
  Synthetic oligonucleotide
agctacattttcaacacgcggacagtcctc

SEQ ID NO: 494539 - DNA, 30 bp, Artificial Sequence
  Synthetic oligonucleotide
actgatacattgcgcggtcgcttagtcctc

SEQ ID NO: 494540 - DNA, 30 bp, Artificial Sequence
  Synthetic oligonucleotide
actgcttttcaggcagcacaaagggtcctc

SEQ ID NO: 494541 - DNA, 30 bp, Artificial Sequence
  Synthetic oligonucleotide
gagaaccgttatatgtctgggcgggtcctc

SEQ ID NO: 494542 - DNA, 30 bp, Artificial Sequence
  Synthetic oligonucleotide
tacacgttaagaggaaacgttcgtgtcctc

SEQ ID NO: 494543 - DNA, 30 bp, Artificial Sequence
  Synthetic oligonucleotide
tccccgctcttattgtcggatgtattcctc

SEQ ID NO: 494544 - DNA, 30 bp, Artificial Sequence
  Synthetic oligonucleotide
cagctgtcgtttcatactacgcagttcctc

SEQ ID NO: 494545 - DNA, 30 bp, Artificial Sequence
  Synthetic oligonucleotide
cctgaggttatagcactgtaagaaaagctc

SEQ ID NO: 494546 - DNA, 30 bp, Artificial Sequence
  Synthetic oligonucleotide
gtcgacgcaaggactttacatgtaaagctc

SEQ ID NO: 494547 - DNA, 30 bp, Artificial Sequence
  Synthetic oligonucleotide
tgcagttcgataaggatagcaacgaagctc

SEQ ID NO: 494548 - DNA, 30 bp, Artificial Sequence
  Synthetic oligonucleotide
ggatagggactgatgcctttcaggaagctc

SEQ ID NO: 494549 - DNA, 30 bp, Artificial Sequence
  Synthetic oligonucleotide
gcaatagactgttaagcgcgactgaagctc

SEQ ID NO: 494550 - DNA, 30 bp, Artificial Sequence
  Synthetic oligonucleotide
gaaggaattgacctttgccgcactaagctc

SEQ ID NO: 494551 - DNA, 30 bp, Artificial Sequence
  Synthetic oligonucleotide
agctttcttctactcggatgctgtaagctc

SEQ ID NO: 494552 - DNA, 30 bp, Artificial Sequence
  Synthetic oligonucleotide
ggtaatacgcttgtacttcttgcacagctc

SEQ ID NO: 494553 - DNA, 30 bp, Artificial Sequence
  Synthetic oligonucleotide
ccgggtagtaacgaagcctgcgtacagctc

SEQ ID NO: 494554 - DNA, 30 bp, Artificial Sequence
  Synthetic oligonucleotide
gacttagatactgtttgtccccagcagctc

SEQ ID NO: 494555 - DNA, 30 bp, Artificial Sequence
  Synthetic oligonucleotide
ggcgccaattctaatcggactgagcagctc

SEQ ID NO: 494556 - DNA, 30 bp, Artificial Sequence
  Synthetic oligonucleotide
cttaatcttacatatcgctacggtcagctc

SEQ ID NO: 494557 - DNA, 30 bp, Artificial Sequence
  Synthetic oligonucleotide
ctccacaacaggcattccacgcgagagctc

SEQ ID NO: 494558 - DNA, 30 bp, Artificial Sequence
  Synthetic oligonucleotide
tttgaccaagcctgttgcaagagcgagctc

SEQ ID NO: 494559 - DNA, 30 bp, Artificial Sequence
  Synthetic oligonucleotide
tcaccagttctgtttggacttcgcgagctc

SEQ ID NO: 494560 - DNA, 30 bp, Artificial Sequence
  Synthetic oligonucleotide
cttttaccatatctccagaactgggagctc

SEQ ID NO: 494561 - DNA, 30 bp, Artificial Sequence
  Synthetic oligonucleotide
cgtctggataccacaaggattatggagctc

SEQ ID NO: 494562 - DNA, 30 bp, Artificial Sequence
  Synthetic oligonucleotide
taatgcggggaggatatggcttatgagctc

SEQ ID NO: 494563 - DNA, 30 bp, Artificial Sequence
  Synthetic oligonucleotide
gcccagggttggtttaacaactaatagctc

SEQ ID NO: 494564 - DNA, 29 bp, Artificial Sequence
  Synthetic oligonucleotide
gcaacaggtgtgacgctggaagatagctc

SEQ ID NO: 494565 - DNA, 30 bp, Artificial Sequence
  Synthetic oligonucleotide
aactgacgtgggtattcgacgggctagctc

SEQ ID NO: 494566 - DNA, 30 bp, Artificial Sequence
  Synthetic oligonucleotide
atccctgtactaaaacgcggccagtagctc

SEQ ID NO: 494567 - DNA, 30 bp, Artificial Sequence
  Synthetic oligonucleotide
ccaggactggaacgcagccttgaaacgctc

SEQ ID NO: 494568 - DNA, 30 bp, Artificial Sequence
  Synthetic oligonucleotide
actgacggagcacaaccttatagaacgctc

SEQ ID NO: 494569 - DNA, 30 bp, Artificial Sequence
  Synthetic oligonucleotide
ctgtttctgtctggtcgcggtcgaacgctc

SEQ ID NO: 494570 - DNA, 30 bp, Artificial Sequence
  Synthetic oligonucleotide
gaataaaggaggataccggcgcagacgctc

SEQ ID NO: 494571 - DNA, 30 bp, Artificial Sequence
  Synthetic oligonucleotide
atctaagatccttgaagaattcgtacgctc

SEQ ID NO: 494572 - DNA, 30 bp, Artificial Sequence
  Synthetic oligonucleotide
attcagcaactagaaccgctcgttacgctc

SEQ ID NO: 494573 - DNA, 30 bp, Artificial Sequence
  Synthetic oligonucleotide
cccgacatatgagggacttcgcccccgctc

SEQ ID NO: 494574 - DNA, 30 bp, Artificial Sequence
  Synthetic oligonucleotide
ttactctcgcgacgcgtcttgtcgccgctc

SEQ ID NO: 494575 - DNA, 30 bp, Artificial Sequence
  Synthetic oligonucleotide
gctgagaggcgatataacgaacacgcgctc

SEQ ID NO: 494576 - DNA, 30 bp, Artificial Sequence
  Synthetic oligonucleotide
gtaaaaagggcacccgaacacgacgcgctc

SEQ ID NO: 494577 - DNA, 30 bp, Artificial Sequence
  Synthetic oligonucleotide
tgtcagatacgtccagggttgtccgcgctc

SEQ ID NO: 494578 - DNA, 30 bp, Artificial Sequence
  Synthetic oligonucleotide
ccgctatcgatcagcagcgacttcgcgctc

SEQ ID NO: 494579 - DNA, 30 bp, Artificial Sequence
  Synthetic oligonucleotide
cacgggggcggtttttggacagcggcgctc

SEQ ID NO: 494580 - DNA, 30 bp, Artificial Sequence
  Synthetic oligonucleotide
tttggcacgattcccgcgattacatcgctc

SEQ ID NO: 494581 - DNA, 30 bp, Artificial Sequence
  Synthetic oligonucleotide
gtccgaacccatttatggtcgcggtcgctc

SEQ ID NO: 494582 - DNA, 30 bp, Artificial Sequence
  Synthetic oligonucleotide
tcaatgtgagtagtctcgacgcgttcgctc

SEQ ID NO: 494583 - DNA, 30 bp, Artificial Sequence
  Synthetic oligonucleotide
ctttataaaaagcctagcgtagaaaggctc

SEQ ID NO: 494584 - DNA, 30 bp, Artificial Sequence
  Synthetic oligonucleotide
gccactgtcagactatacattaacaggctc

SEQ ID NO: 494585 - DNA, 30 bp, Artificial Sequence
  Synthetic oligonucleotide
agttttctatacctgatgccccagaggctc

SEQ ID NO: 494586 - DNA, 30 bp, Artificial Sequence
  Synthetic oligonucleotide
gaaagggttaagaaggttccattgaggctc

SEQ ID NO: 494587 - DNA, 30 bp, Artificial Sequence
  Synthetic oligonucleotide
agaaatgcttcctagggataggataggctc

SEQ ID NO: 494588 - DNA, 30 bp, Artificial Sequence
  Synthetic oligonucleotide
tccattggggcgtgtggatgtgaccggctc

SEQ ID NO: 494589 - DNA, 30 bp, Artificial Sequence
  Synthetic oligonucleotide
ttcccaaaatatcagcggcgtacgcggctc

SEQ ID NO: 494590 - DNA, 30 bp, Artificial Sequence
  Synthetic oligonucleotide
tgctattattggatgtggcgtccgcggctc

SEQ ID NO: 494591 - DNA, 30 bp, Artificial Sequence
  Synthetic oligonucleotide
accggctactttttcgccttagcgcggctc

SEQ ID NO: 494592 - DNA, 30 bp, Artificial Sequence
  Synthetic oligonucleotide
agcgcatttaacaatgggccggaagggctc

SEQ ID NO: 494593 - DNA, 30 bp, Artificial Sequence
  Synthetic oligonucleotide
gcgcaggcgaaaaagaccttatcagggctc

SEQ ID NO: 494594 - DNA, 30 bp, Artificial Sequence
  Synthetic oligonucleotide
gccatccctgtcatggaaatgagcgggctc

SEQ ID NO: 494595 - DNA, 30 bp, Artificial Sequence
  Synthetic oligonucleotide
gatgtatttaagagatgacatgcggggctc

SEQ ID NO: 494596 - DNA, 30 bp, Artificial Sequence
  Synthetic oligonucleotide
tcgcagcgctatgggcgcgggggggggctc

SEQ ID NO: 494597 - DNA, 30 bp, Artificial Sequence
  Synthetic oligonucleotide
cccggatgacactgggtagagctatggctc

SEQ ID NO: 494598 - DNA, 30 bp, Artificial Sequence
  Synthetic oligonucleotide
ctttattaccatgagctgtagtggtggctc

SEQ ID NO: 494599 - DNA, 29 bp, Artificial Sequence
  Synthetic oligonucleotide
cttgaacataagcagctgtcgaaatgctc

SEQ ID NO: 494600 - DNA, 30 bp, Artificial Sequence
  Synthetic oligonucleotide
ggtgctaaacgaaagcttcacgcaatgctc

SEQ ID NO: 494601 - DNA, 30 bp, Artificial Sequence
  Synthetic oligonucleotide
cttattcacatgcggatttaaaatatgctc

SEQ ID NO: 494602 - DNA, 30 bp, Artificial Sequence
  Synthetic oligonucleotide
tcgcgtacttatcttaggacgtggctgctc

SEQ ID NO: 494603 - DNA, 30 bp, Artificial Sequence
  Synthetic oligonucleotide
ttgcaggaataaattgtcggcactctgctc

SEQ ID NO: 494604 - DNA, 30 bp, Artificial Sequence
  Synthetic oligonucleotide
ctaaaccccgaaagcccggttgtcgtgctc

SEQ ID NO: 494605 - DNA, 30 bp, Artificial Sequence
  Synthetic oligonucleotide
caccctgcgtgtcattcgcaaggggtgctc

SEQ ID NO: 494606 - DNA, 30 bp, Artificial Sequence
  Synthetic oligonucleotide
aaatatcactttttaatctccaaaaatctc

SEQ ID NO: 494607 - DNA, 30 bp, Artificial Sequence
  Synthetic oligonucleotide
taagtcttgaggagtcccgagaacaatctc

SEQ ID NO: 494608 - DNA, 30 bp, Artificial Sequence
  Synthetic oligonucleotide
ttcagttcggaacgtcgcagaatcaatctc

SEQ ID NO: 494609 - DNA, 30 bp, Artificial Sequence
  Synthetic oligonucleotide
gcagctttagtaatcgctttatcgaatctc

SEQ ID NO: 494610 - DNA, 30 bp, Artificial Sequence
  Synthetic oligonucleotide
gcctcggttgtcgagcggacaatgaatctc

SEQ ID NO: 494611 - DNA, 30 bp, Artificial Sequence
  Synthetic oligonucleotide
gcatactcactacgcgtaaggctgaatctc

SEQ ID NO: 494612 - DNA, 30 bp, Artificial Sequence
  Synthetic oligonucleotide
gacgtagttgcgatgatgtcaggtaatctc

SEQ ID NO: 494613 - DNA, 30 bp, Artificial Sequence
  Synthetic oligonucleotide
agctcgagtctataagtgtcctttaatctc

SEQ ID NO: 494614 - DNA, 30 bp, Artificial Sequence
  Synthetic oligonucleotide
tcccaaatatcggccccaagacgccatctc

SEQ ID NO: 494615 - DNA, 30 bp, Artificial Sequence
  Synthetic oligonucleotide
gaagtcattcatgggtactgggtccatctc

SEQ ID NO: 494616 - DNA, 30 bp, Artificial Sequence
  Synthetic oligonucleotide
gaaagtgtaattcggattagagagcatctc

SEQ ID NO: 494617 - DNA, 30 bp, Artificial Sequence
  Synthetic oligonucleotide
tataatacgtctccaggcgacgaagatctc

SEQ ID NO: 494618 - DNA, 30 bp, Artificial Sequence
  Synthetic oligonucleotide
gttactttcacaagcaaagatttcgatctc

SEQ ID NO: 494619 - DNA, 30 bp, Artificial Sequence
  Synthetic oligonucleotide
gcaaatgatgcgccaaacatccctgatctc

SEQ ID NO: 494620 - DNA, 30 bp, Artificial Sequence
  Synthetic oligonucleotide
cagatttgccccttttagatggcatatctc

SEQ ID NO: 494621 - DNA, 30 bp, Artificial Sequence
  Synthetic oligonucleotide
tagtatttattgcccttggtgtgatatctc

SEQ ID NO: 494622 - DNA, 30 bp, Artificial Sequence
  Synthetic oligonucleotide
atccttgcaactgctacatcaatatatctc

SEQ ID NO: 494623 - DNA, 30 bp, Artificial Sequence
  Synthetic oligonucleotide
agttcatcagttttctaagttcagtatctc

SEQ ID NO: 494624 - DNA, 30 bp, Artificial Sequence
  Synthetic oligonucleotide
accgcataaggatccatcttattgtatctc

SEQ ID NO: 494625 - DNA, 30 bp, Artificial Sequence
  Synthetic oligonucleotide
ggcccccatgcgaacctagtatattatctc

SEQ ID NO: 494626 - DNA, 30 bp, Artificial Sequence
  Synthetic oligonucleotide
gtacagtgtagagcgacgaagtgttatctc

SEQ ID NO: 494627 - DNA, 30 bp, Artificial Sequence
  Synthetic oligonucleotide
aatatatatccctaacatggacaaactctc

SEQ ID NO: 494628 - DNA, 30 bp, Artificial Sequence
  Synthetic oligonucleotide
ggggagcaggcaggccaggggataactctc

SEQ ID NO: 494629 - DNA, 30 bp, Artificial Sequence
  Synthetic oligonucleotide
tgatccgaagttatctaataagagactctc

SEQ ID NO: 494630 - DNA, 30 bp, Artificial Sequence
  Synthetic oligonucleotide
aaagactttatgggatagagcagacctctc

SEQ ID NO: 494631 - DNA, 30 bp, Artificial Sequence
  Synthetic oligonucleotide
gcaagggagtttccatagactttacctctc

SEQ ID NO: 494632 - DNA, 30 bp, Artificial Sequence
  Synthetic oligonucleotide
ttcccaaaaacatattggttctaccctctc

SEQ ID NO: 494633 - DNA, 30 bp, Artificial Sequence
  Synthetic oligonucleotide
agttataattactttccaggatagcctctc

SEQ ID NO: 494634 - DNA, 30 bp, Artificial Sequence
  Synthetic oligonucleotide
tgaggatgggtaagctgaacatcagctctc

SEQ ID NO: 494635 - DNA, 30 bp, Artificial Sequence
  Synthetic oligonucleotide
gaggccgcagtatcaggataattagctctc

SEQ ID NO: 494636 - DNA, 30 bp, Artificial Sequence
  Synthetic oligonucleotide
aatgcaaggaacttctcaggtgacgctctc

SEQ ID NO: 494637 - DNA, 30 bp, Artificial Sequence
  Synthetic oligonucleotide
atttctgcgagacgcgaaatccgggctctc

SEQ ID NO: 494638 - DNA, 30 bp, Artificial Sequence
  Synthetic oligonucleotide
taaaagaatcgtccgcactagcgggctctc

SEQ ID NO: 494639 - DNA, 30 bp, Artificial Sequence
  Synthetic oligonucleotide
gtagaacacttacctattttgaatgctctc

SEQ ID NO: 494640 - DNA, 30 bp, Artificial Sequence
  Synthetic oligonucleotide
tatatagtagaacatacaaggcgtgctctc

SEQ ID NO: 494641 - DNA, 30 bp, Artificial Sequence
  Synthetic oligonucleotide
tagggagttagaattggattcaaatctctc

SEQ ID NO: 494642 - DNA, 30 bp, Artificial Sequence
  Synthetic oligonucleotide
tactggactattgtggcatttcgttctctc

SEQ ID NO: 494643 - DNA, 30 bp, Artificial Sequence
  Synthetic oligonucleotide
ggcggttactacaggcatacattttctctc

SEQ ID NO: 494644 - DNA, 30 bp, Artificial Sequence
  Synthetic oligonucleotide
aataggcacaagtagcacttcacaagtctc

SEQ ID NO: 494645 - DNA, 30 bp, Artificial Sequence
  Synthetic oligonucleotide
tgattcactgtatatacgtacgagagtctc

SEQ ID NO: 494646 - DNA, 30 bp, Artificial Sequence
  Synthetic oligonucleotide
tgaggttgtagtgccacttattggagtctc

SEQ ID NO: 494647 - DNA, 30 bp, Artificial Sequence
  Synthetic oligonucleotide
acccctttcttgcactcgttccctagtctc

SEQ ID NO: 494648 - DNA, 30 bp, Artificial Sequence
  Synthetic oligonucleotide
tgggacacaacagaggggacaattagtctc

SEQ ID NO: 494649 - DNA, 30 bp, Artificial Sequence
  Synthetic oligonucleotide
gagtcacggagagaactcgtccaacgtctc

SEQ ID NO: 494650 - DNA, 30 bp, Artificial Sequence
  Synthetic oligonucleotide
aagtctcctggccatacgaaagtccgtctc

SEQ ID NO: 494651 - DNA, 30 bp, Artificial Sequence
  Synthetic oligonucleotide
gtagttggacaataggcgccttaaggtctc

SEQ ID NO: 494652 - DNA, 30 bp, Artificial Sequence
  Synthetic oligonucleotide
gggtacaagcgctgcggagggcccggtctc

SEQ ID NO: 494653 - DNA, 30 bp, Artificial Sequence
  Synthetic oligonucleotide
aaatccggattgataagatcaccgggtctc

SEQ ID NO: 494654 - DNA, 30 bp, Artificial Sequence
  Synthetic oligonucleotide
gatcgcgtcacaaatccggagtttggtctc

SEQ ID NO: 494655 - DNA, 30 bp, Artificial Sequence
  Synthetic oligonucleotide
taggagcgaaaacgacccccagcatgtctc

SEQ ID NO: 494656 - DNA, 30 bp, Artificial Sequence
  Synthetic oligonucleotide
ttctgcatgtacacttaggcgttatgtctc

SEQ ID NO: 494657 - DNA, 30 bp, Artificial Sequence
  Synthetic oligonucleotide
ggaaagaagctccaggtctccttctgtctc

SEQ ID NO: 494658 - DNA, 30 bp, Artificial Sequence
  Synthetic oligonucleotide
ggaagtatcagcggattctcgtggtgtctc

SEQ ID NO: 494659 - DNA, 30 bp, Artificial Sequence
  Synthetic oligonucleotide
aaggtttcgctatgaaatctgatgtgtctc

SEQ ID NO: 494660 - DNA, 30 bp, Artificial Sequence
  Synthetic oligonucleotide
gaggacaataaacacgccgggtggattctc

SEQ ID NO: 494661 - DNA, 30 bp, Artificial Sequence
  Synthetic oligonucleotide
tgtatgcgtttcttgagtggtactattctc

SEQ ID NO: 494662 - DNA, 30 bp, Artificial Sequence
  Synthetic oligonucleotide
tccaatatttccatttctgtccaacttctc

SEQ ID NO: 494663 - DNA, 30 bp, Artificial Sequence
  Synthetic oligonucleotide
tcctagcaataacagacgtaggagcttctc

SEQ ID NO: 494664 - DNA, 30 bp, Artificial Sequence
  Synthetic oligonucleotide
ctacttagactgaagagccgagtgcttctc

SEQ ID NO: 494665 - DNA, 30 bp, Artificial Sequence
  Synthetic oligonucleotide
ttagaaattcccacgcccgtcagagttctc

SEQ ID NO: 494666 - DNA, 30 bp, Artificial Sequence
  Synthetic oligonucleotide
cttggaaacgtgcaggtcgaattagttctc

SEQ ID NO: 494667 - DNA, 30 bp, Artificial Sequence
  Synthetic oligonucleotide
aaaaggtttctggcgtttcatatcgttctc

SEQ ID NO: 494668 - DNA, 30 bp, Artificial Sequence
  Synthetic oligonucleotide
cttcgtccgcaaattaacgcacgtgttctc

SEQ ID NO: 494669 - DNA, 30 bp, Artificial Sequence
  Synthetic oligonucleotide
ttcgtcaaggttacccaacagatctttctc

SEQ ID NO: 494670 - DNA, 30 bp, Artificial Sequence
  Synthetic oligonucleotide
aatccacagcaataggatcgtcagtttctc

SEQ ID NO: 494671 - DNA, 30 bp, Artificial Sequence
  Synthetic oligonucleotide
gggaaccgtaccagttggcaaacgtttctc

SEQ ID NO: 494672 - DNA, 30 bp, Artificial Sequence
  Synthetic oligonucleotide
gcatcacaccttgcgtgctatgggtttctc

SEQ ID NO: 494673 - DNA, 30 bp, Artificial Sequence
  Synthetic oligonucleotide
ccctaatgtgccgggcctggtgggtttctc

SEQ ID NO: 494674 - DNA, 30 bp, Artificial Sequence
  Synthetic oligonucleotide
gggatcttgaccacccactgtgggtttctc

SEQ ID NO: 494675 - DNA, 30 bp, Artificial Sequence
  Synthetic oligonucleotide
tgcaaaagggccttcaactgtagttttctc

SEQ ID NO: 494676 - DNA, 30 bp, Artificial Sequence
  Synthetic oligonucleotide
gtctgctttttgtaagatactcaaaaagtc

SEQ ID NO: 494677 - DNA, 30 bp, Artificial Sequence
  Synthetic oligonucleotide
gccctcgacttttgacgtcggtacaaagtc

SEQ ID NO: 494678 - DNA, 30 bp, Artificial Sequence
  Synthetic oligonucleotide
ccgtattggtattttcagagaatcaaagtc

SEQ ID NO: 494679 - DNA, 30 bp, Artificial Sequence
  Synthetic oligonucleotide
acccactttggggatggtgccttcaaagtc

SEQ ID NO: 494680 - DNA, 30 bp, Artificial Sequence
  Synthetic oligonucleotide
atcaatcgatccggtatgacgccgaaagtc

SEQ ID NO: 494681 - DNA, 30 bp, Artificial Sequence
  Synthetic oligonucleotide
gccctaaccctctttaagcctgggaaagtc

SEQ ID NO: 494682 - DNA, 30 bp, Artificial Sequence
  Synthetic oligonucleotide
tatttcttcgatgcctgtaggatgaaagtc

SEQ ID NO: 494683 - DNA, 30 bp, Artificial Sequence
  Synthetic oligonucleotide
cagtatcgcctacgttaggtaggtaaagtc

SEQ ID NO: 494684 - DNA, 30 bp, Artificial Sequence
  Synthetic oligonucleotide
ctcagcaggtatcatggctcttcacaagtc

SEQ ID NO: 494685 - DNA, 30 bp, Artificial Sequence
  Synthetic oligonucleotide
agctgatttataaccaccgatggccaagtc

SEQ ID NO: 494686 - DNA, 30 bp, Artificial Sequence
  Synthetic oligonucleotide
tattaatagcttgctgctgcatctcaagtc

SEQ ID NO: 494687 - DNA, 30 bp, Artificial Sequence
  Synthetic oligonucleotide
tctctaacatgaattgtccgcgaagaagtc

SEQ ID NO: 494688 - DNA, 30 bp, Artificial Sequence
  Synthetic oligonucleotide
aaaggatgggcagcaatagaccccgaagtc

SEQ ID NO: 494689 - DNA, 30 bp, Artificial Sequence
  Synthetic oligonucleotide
atactgacgatcactttcgcataggaagtc

SEQ ID NO: 494690 - DNA, 30 bp, Artificial Sequence
  Synthetic oligonucleotide
attccatatagttttctactgcatgaagtc

SEQ ID NO: 494691 - DNA, 30 bp, Artificial Sequence
  Synthetic oligonucleotide
gtgcgtttactcctcgtgcagattgaagtc

SEQ ID NO: 494692 - DNA, 30 bp, Artificial Sequence
  Synthetic oligonucleotide
caacttaggatctaaccatgatgataagtc

SEQ ID NO: 494693 - DNA, 30 bp, Artificial Sequence
  Synthetic oligonucleotide
gcttcttggacatagatctactagtaagtc

SEQ ID NO: 494694 - DNA, 30 bp, Artificial Sequence
  Synthetic oligonucleotide
cgtagggacgcgctagacatttggtaagtc

SEQ ID NO: 494695 - DNA, 30 bp, Artificial Sequence
  Synthetic oligonucleotide
atatatacaccgtgggttaatcattaagtc

SEQ ID NO: 494696 - DNA, 30 bp, Artificial Sequence
  Synthetic oligonucleotide
gctcaatgctcaggttcacgatattaagtc

SEQ ID NO: 494697 - DNA, 30 bp, Artificial Sequence
  Synthetic oligonucleotide
ctgacatgtcgggcgtagctacgttaagtc

SEQ ID NO: 494698 - DNA, 30 bp, Artificial Sequence
  Synthetic oligonucleotide
aatactcccttaccattggggttttaagtc

SEQ ID NO: 494699 - DNA, 30 bp, Artificial Sequence
  Synthetic oligonucleotide
gcaatatcgaagacggactcaaatacagtc

SEQ ID NO: 494700 - DNA, 30 bp, Artificial Sequence
  Synthetic oligonucleotide
aaccttgtatataagtgtgcgtctacagtc

SEQ ID NO: 494701 - DNA, 30 bp, Artificial Sequence
  Synthetic oligonucleotide
cgcgagtttgccgcagctcactacccagtc

SEQ ID NO: 494702 - DNA, 30 bp, Artificial Sequence
  Synthetic oligonucleotide
ccaactatctatcgaccacagggcccagtc

SEQ ID NO: 494703 - DNA, 30 bp, Artificial Sequence
  Synthetic oligonucleotide
aattcccggctggaaggaccgtggccagtc

SEQ ID NO: 494704 - DNA, 30 bp, Artificial Sequence
  Synthetic oligonucleotide
tgccgtagttacgatgaggcagacgcagtc

SEQ ID NO: 494705 - DNA, 30 bp, Artificial Sequence
  Synthetic oligonucleotide
actccaggctgtatcattcggttcgcagtc

SEQ ID NO: 494706 - DNA, 30 bp, Artificial Sequence
  Synthetic oligonucleotide
agcagctagtactttcgtggttaggcagtc

SEQ ID NO: 494707 - DNA, 30 bp, Artificial Sequence
  Synthetic oligonucleotide
ttacccgaatcccggcacttgattgcagtc

SEQ ID NO: 494708 - DNA, 30 bp, Artificial Sequence
  Synthetic oligonucleotide
tgtcaaaccagaatattgttccaatcagtc

SEQ ID NO: 494709 - DNA, 30 bp, Artificial Sequence
  Synthetic oligonucleotide
gaccccggtcctaaggctaccacatcagtc

SEQ ID NO: 494710 - DNA, 30 bp, Artificial Sequence
  Synthetic oligonucleotide
tttcgccgagtggtctgggcccgctcagtc

SEQ ID NO: 494711 - DNA, 30 bp, Artificial Sequence
  Synthetic oligonucleotide
taaaaacgtaggacgaccggtaggtcagtc

SEQ ID NO: 494712 - DNA, 30 bp, Artificial Sequence
  Synthetic oligonucleotide
ttccctgcgcagtctggttacacaagagtc

SEQ ID NO: 494713 - DNA, 30 bp, Artificial Sequence
  Synthetic oligonucleotide
gagagattgtcacgccacagtcagagagtc

SEQ ID NO: 494714 - DNA, 30 bp, Artificial Sequence
  Synthetic oligonucleotide
atgcccgccccttgtttctcactgagagtc

SEQ ID NO: 494715 - DNA, 30 bp, Artificial Sequence
  Synthetic oligonucleotide
tattctttactgggcatatttaatagagtc

SEQ ID NO: 494716 - DNA, 30 bp, Artificial Sequence
  Synthetic oligonucleotide
tgggctaactaccgtattgccggtagagtc

SEQ ID NO: 494717 - DNA, 30 bp, Artificial Sequence
  Synthetic oligonucleotide
cgtgtgtatcgtggctaggagccacgagtc

SEQ ID NO: 494718 - DNA, 30 bp, Artificial Sequence
  Synthetic oligonucleotide
atagcgcaggagtcactcacctaccgagtc

SEQ ID NO: 494719 - DNA, 30 bp, Artificial Sequence
  Synthetic oligonucleotide
aagcttcctcagggattaacgtaccgagtc

SEQ ID NO: 494720 - DNA, 30 bp, Artificial Sequence
  Synthetic oligonucleotide
gggcgcgtaaccacgcttgcagagcgagtc

SEQ ID NO: 494721 - DNA, 30 bp, Artificial Sequence
  Synthetic oligonucleotide
gatcttctgctacgccctgaggacggagtc

SEQ ID NO: 494722 - DNA, 30 bp, Artificial Sequence
  Synthetic oligonucleotide
tatccttggcaatgaacactgtacggagtc

SEQ ID NO: 494723 - DNA, 30 bp, Artificial Sequence
  Synthetic oligonucleotide
ttgatggcagcttctgaagtacagggagtc

SEQ ID NO: 494724 - DNA, 30 bp, Artificial Sequence
  Synthetic oligonucleotide
atggttgatacgtcgcacaggactggagtc

SEQ ID NO: 494725 - DNA, 30 bp, Artificial Sequence
  Synthetic oligonucleotide
cccatttgagtatcgattattagaatagtc

SEQ ID NO: 494726 - DNA, 30 bp, Artificial Sequence
  Synthetic oligonucleotide
gcggttttgctgtcgcggaaagtaatagtc

SEQ ID NO: 494727 - DNA, 30 bp, Artificial Sequence
  Synthetic oligonucleotide
aatcttgagttagtatattcattaatagtc

SEQ ID NO: 494728 - DNA, 30 bp, Artificial Sequence
  Synthetic oligonucleotide
ggaaggcgcagtatgttgagtaacatagtc

SEQ ID NO: 494729 - DNA, 30 bp, Artificial Sequence
  Synthetic oligonucleotide
gagtggtcttgatgtattcggtccatagtc

SEQ ID NO: 494730 - DNA, 30 bp, Artificial Sequence
  Synthetic oligonucleotide
gcgcgtcatgctcgggtatccggcatagtc

SEQ ID NO: 494731 - DNA, 30 bp, Artificial Sequence
  Synthetic oligonucleotide
tggggactgggccattaaacctatatagtc

SEQ ID NO: 494732 - DNA, 30 bp, Artificial Sequence
  Synthetic oligonucleotide
aaccccggagattccggcgtccctatagtc

SEQ ID NO: 494733 - DNA, 30 bp, Artificial Sequence
  Synthetic oligonucleotide
cagtggggggatatacctcggcttatagtc

SEQ ID NO: 494734 - DNA, 30 bp, Artificial Sequence
  Synthetic oligonucleotide
aatggttcatgagcagggtgtgttatagtc

SEQ ID NO: 494735 - DNA, 30 bp, Artificial Sequence
  Synthetic oligonucleotide
gatccaatagattttgtaaattgactagtc

SEQ ID NO: 494736 - DNA, 30 bp, Artificial Sequence
  Synthetic oligonucleotide
ccgactgccgcaacttaacccctgctagtc

SEQ ID NO: 494737 - DNA, 30 bp, Artificial Sequence
  Synthetic oligonucleotide
gaccggggcccacctaagctgcatctagtc

SEQ ID NO: 494738 - DNA, 30 bp, Artificial Sequence
  Synthetic oligonucleotide
ctttcatttgatattcacgattttctagtc

SEQ ID NO: 494739 - DNA, 30 bp, Artificial Sequence
  Synthetic oligonucleotide
aatcctgcgggaagatgttccaaagtagtc

SEQ ID NO: 494740 - DNA, 30 bp, Artificial Sequence
  Synthetic oligonucleotide
ctaaattaagtcgcataatccgcagtagtc

SEQ ID NO: 494741 - DNA, 30 bp, Artificial Sequence
  Synthetic oligonucleotide
cttgcgagttattatatccactcagtagtc

SEQ ID NO: 494742 - DNA, 30 bp, Artificial Sequence
  Synthetic oligonucleotide
ctgcacgcagtggccctactgggcgtagtc

SEQ ID NO: 494743 - DNA, 30 bp, Artificial Sequence
  Synthetic oligonucleotide
ttcactacttcgcccataaactaggtagtc

SEQ ID NO: 494744 - DNA, 30 bp, Artificial Sequence
  Synthetic oligonucleotide
ggatataaggtccctagcagttttgtagtc

SEQ ID NO: 494745 - DNA, 30 bp, Artificial Sequence
  Synthetic oligonucleotide
ggttgagttccaacggtaacatccttagtc

SEQ ID NO: 494746 - DNA, 30 bp, Artificial Sequence
  Synthetic oligonucleotide
agagttgaagtacctcccgcatgcttagtc

SEQ ID NO: 494747 - DNA, 30 bp, Artificial Sequence
  Synthetic oligonucleotide
ctcttgtcgactaaaggagcgtgcttagtc

SEQ ID NO: 494748 - DNA, 30 bp, Artificial Sequence
  Synthetic oligonucleotide
taatacatatatttttaagggttcttagtc

SEQ ID NO: 494749 - DNA, 30 bp, Artificial Sequence
  Synthetic oligonucleotide
gaccaagttgtcaggacacactggttagtc

SEQ ID NO: 494750 - DNA, 30 bp, Artificial Sequence
  Synthetic oligonucleotide
taggacgtaaatgacagccctcatttagtc

SEQ ID NO: 494751 - DNA, 30 bp, Artificial Sequence
  Synthetic oligonucleotide
atagatagggatcggatagtgtgtttagtc

SEQ ID NO: 494752 - DNA, 30 bp, Artificial Sequence
  Synthetic oligonucleotide
gtgaagcgttaatctaggtagaataacgtc

SEQ ID NO: 494753 - DNA, 30 bp, Artificial Sequence
  Synthetic oligonucleotide
cagcgcaccctgttagtcacaggtaacgtc

SEQ ID NO: 494754 - DNA, 30 bp, Artificial Sequence
  Synthetic oligonucleotide
ttagcgccgatttggcgtaacggccacgtc

SEQ ID NO: 494755 - DNA, 30 bp, Artificial Sequence
  Synthetic oligonucleotide
gtacaaggggccgccaagagcctgcacgtc

SEQ ID NO: 494756 - DNA, 30 bp, Artificial Sequence
  Synthetic oligonucleotide
aaataacatgtggttctgtcttgagacgtc

SEQ ID NO: 494757 - DNA, 30 bp, Artificial Sequence
  Synthetic oligonucleotide
tcgcattacgtttcgggaaggcccgacgtc

SEQ ID NO: 494758 - DNA, 30 bp, Artificial Sequence
  Synthetic oligonucleotide
taccgactaccgcacgtcctggtcgacgtc

SEQ ID NO: 494759 - DNA, 30 bp, Artificial Sequence
  Synthetic oligonucleotide
aaagtcaccgtcgtcttggtagcggacgtc

SEQ ID NO: 494760 - DNA, 30 bp, Artificial Sequence
  Synthetic oligonucleotide
gggggggccgaagtcgcgtcacgggacgtc

SEQ ID NO: 494761 - DNA, 30 bp, Artificial Sequence
  Synthetic oligonucleotide
gtctgatgcagggcttaacgtggatacgtc

SEQ ID NO: 494762 - DNA, 30 bp, Artificial Sequence
  Synthetic oligonucleotide
aaaataaacgtaccacactttttatacgtc

SEQ ID NO: 494763 - DNA, 30 bp, Artificial Sequence
  Synthetic oligonucleotide
tatatgacatgaagacggcagtattacgtc

SEQ ID NO: 494764 - DNA, 30 bp, Artificial Sequence
  Synthetic oligonucleotide
ctcgcaatcgatccggtctttagttacgtc

SEQ ID NO: 494765 - DNA, 30 bp, Artificial Sequence
  Synthetic oligonucleotide
atctcgtgaaaacttaggggtctttacgtc

SEQ ID NO: 494766 - DNA, 30 bp, Artificial Sequence
  Synthetic oligonucleotide
aattttcaagtctaaaaggatttttacgtc

SEQ ID NO: 494767 - DNA, 30 bp, Artificial Sequence
  Synthetic oligonucleotide
gagacgagaggctccttgggagcgaccgtc

SEQ ID NO: 494768 - DNA, 30 bp, Artificial Sequence
  Synthetic oligonucleotide
gcataaagggtctgcaaaggcttacccgtc

SEQ ID NO: 494769 - DNA, 30 bp, Artificial Sequence
  Synthetic oligonucleotide
gtggggtgagtagcactacagggccccgtc

SEQ ID NO: 494770 - DNA, 30 bp, Artificial Sequence
  Synthetic oligonucleotide
cagccctttatatagggtaccgtccccgtc

SEQ ID NO: 494771 - DNA, 30 bp, Artificial Sequence
  Synthetic oligonucleotide
acggtggactttaaaaggcccgggcccgtc

SEQ ID NO: 494772 - DNA, 30 bp, Artificial Sequence
  Synthetic oligonucleotide
gtcaccacgaacgggcatgacagcgccgtc

SEQ ID NO: 494773 - DNA, 30 bp, Artificial Sequence
  Synthetic oligonucleotide
attgaccagtgggggggttgactatccgtc

SEQ ID NO: 494774 - DNA, 30 bp, Artificial Sequence
  Synthetic oligonucleotide
ttcagtttcttttttgatcttccctccgtc

SEQ ID NO: 494775 - DNA, 30 bp, Artificial Sequence
  Synthetic oligonucleotide
tgacgtgtgccaattgtagagcacagcgtc

SEQ ID NO: 494776 - DNA, 30 bp, Artificial Sequence
  Synthetic oligonucleotide
caagtggtcaattctgacgacgacagcgtc

SEQ ID NO: 494777 - DNA, 30 bp, Artificial Sequence
  Synthetic oligonucleotide
aaaggctgaacatgttttacgttcagcgtc

SEQ ID NO: 494778 - DNA, 30 bp, Artificial Sequence
  Synthetic oligonucleotide
aagcgtcttttcattaattgcttgagcgtc

SEQ ID NO: 494779 - DNA, 30 bp, Artificial Sequence
  Synthetic oligonucleotide
tacaggttgtaccgaaacgcaaatagcgtc

SEQ ID NO: 494780 - DNA, 30 bp, Artificial Sequence
  Synthetic oligonucleotide
gagttactctaaatccagccttatagcgtc

SEQ ID NO: 494781 - DNA, 30 bp, Artificial Sequence
  Synthetic oligonucleotide
gatcacgcctagtgcttccgagttagcgtc

SEQ ID NO: 494782 - DNA, 30 bp, Artificial Sequence
  Synthetic oligonucleotide
acacgccatacaaattttaggacacgcgtc

SEQ ID NO: 494783 - DNA, 30 bp, Artificial Sequence
  Synthetic oligonucleotide
tccatgcatccaacggtccgtaaccgcgtc

SEQ ID NO: 494784 - DNA, 30 bp, Artificial Sequence
  Synthetic oligonucleotide
gttgatgcgtggcctaattaggtccgcgtc

SEQ ID NO: 494785 - DNA, 30 bp, Artificial Sequence
  Synthetic oligonucleotide
cgcgtgtaagcgccgggatcccagcgcgtc

SEQ ID NO: 494786 - DNA, 30 bp, Artificial Sequence
  Synthetic oligonucleotide
gatatcagcgaacactctgtcattcgcgtc

SEQ ID NO: 494787 - DNA, 30 bp, Artificial Sequence
  Synthetic oligonucleotide
ctatgattccaatgcaacgcggaaggcgtc

SEQ ID NO: 494788 - DNA, 30 bp, Artificial Sequence
  Synthetic oligonucleotide
atgcagatgaggcaggctggcgcaggcgtc

SEQ ID NO: 494789 - DNA, 30 bp, Artificial Sequence
  Synthetic oligonucleotide
aattgtaagcgggggtatctggacggcgtc

SEQ ID NO: 494790 - DNA, 30 bp, Artificial Sequence
  Synthetic oligonucleotide
cggaccccaaagattcaccaagtgggcgtc

SEQ ID NO: 494791 - DNA, 30 bp, Artificial Sequence
  Synthetic oligonucleotide
gataatcttgccatgagcggcagtggcgtc

SEQ ID NO: 494792 - DNA, 30 bp, Artificial Sequence
  Synthetic oligonucleotide
gagtatcgtgtcgcgccgtggtgtggcgtc

SEQ ID NO: 494793 - DNA, 30 bp, Artificial Sequence
  Synthetic oligonucleotide
acagagacgtgaagagatcacaacatcgtc

SEQ ID NO: 494794 - DNA, 30 bp, Artificial Sequence
  Synthetic oligonucleotide
gagtattgtccctttattggcaatatcgtc

SEQ ID NO: 494795 - DNA, 30 bp, Artificial Sequence
  Synthetic oligonucleotide
ggcactaaaaatcagaggagactactcgtc

SEQ ID NO: 494796 - DNA, 30 bp, Artificial Sequence
  Synthetic oligonucleotide
ggttgacgtacactgttctcccggctcgtc

SEQ ID NO: 494797 - DNA, 30 bp, Artificial Sequence
  Synthetic oligonucleotide
agatcattagtatcacggctgggagtcgtc

SEQ ID NO: 494798 - DNA, 30 bp, Artificial Sequence
  Synthetic oligonucleotide
tgcgggcaggtccgggccggtgcggtcgtc

SEQ ID NO: 494799 - DNA, 30 bp, Artificial Sequence
  Synthetic oligonucleotide
ttatctgaatccaatgttccgagtgtcgtc

SEQ ID NO: 494800 - DNA, 30 bp, Artificial Sequence
  Synthetic oligonucleotide
tgtcaccaggacccacacggctggttcgtc

SEQ ID NO: 494801 - DNA, 30 bp, Artificial Sequence
  Synthetic oligonucleotide
acggcagagctaagggtgacgcatttcgtc

SEQ ID NO: 494802 - DNA, 30 bp, Artificial Sequence
  Synthetic oligonucleotide
cttggaccttacgtcaaaaagcaaaaggtc

SEQ ID NO: 494803 - DNA, 30 bp, Artificial Sequence
  Synthetic oligonucleotide
ttctttcaaaggcagtctggacgaaaggtc

SEQ ID NO: 494804 - DNA, 30 bp, Artificial Sequence
  Synthetic oligonucleotide
atcttataatcgatcttagcacccaaggtc

SEQ ID NO: 494805 - DNA, 30 bp, Artificial Sequence
  Synthetic oligonucleotide
gatttagtttacctattagcgtgcaaggtc

SEQ ID NO: 494806 - DNA, 30 bp, Artificial Sequence
  Synthetic oligonucleotide
tggtgcactctgtataaacccttcaaggtc

SEQ ID NO: 494807 - DNA, 30 bp, Artificial Sequence
  Synthetic oligonucleotide
tgatttactgtgagggagcataataaggtc

SEQ ID NO: 494808 - DNA, 30 bp, Artificial Sequence
  Synthetic oligonucleotide
gacgtcgcagaatgacctgtacataaggtc

SEQ ID NO: 494809 - DNA, 30 bp, Artificial Sequence
  Synthetic oligonucleotide
agactatctaataacaacaaacgtaaggtc

SEQ ID NO: 494810 - DNA, 30 bp, Artificial Sequence
  Synthetic oligonucleotide
gtgaactgcttatgaggaccggttaaggtc

SEQ ID NO: 494811 - DNA, 30 bp, Artificial Sequence
  Synthetic oligonucleotide
tgatatatggtaggccggtgtagacaggtc

SEQ ID NO: 494812 - DNA, 30 bp, Artificial Sequence
  Synthetic oligonucleotide
actgcgctagacgttgataagggacaggtc

SEQ ID NO: 494813 - DNA, 30 bp, Artificial Sequence
  Synthetic oligonucleotide
aataatgggtagtagtagtgtatacaggtc

SEQ ID NO: 494814 - DNA, 30 bp, Artificial Sequence
  Synthetic oligonucleotide
aaagtgcctattcgtccgacggagcaggtc

SEQ ID NO: 494815 - DNA, 30 bp, Artificial Sequence
  Synthetic oligonucleotide
tgatctagggtttactctagagggcaggtc

SEQ ID NO: 494816 - DNA, 30 bp, Artificial Sequence
  Synthetic oligonucleotide
gttccttcggtagctcgttggtggcaggtc

SEQ ID NO: 494817 - DNA, 30 bp, Artificial Sequence
  Synthetic oligonucleotide
gtgaacgacataaacctgtaatttcaggtc

SEQ ID NO: 494818 - DNA, 30 bp, Artificial Sequence
  Synthetic oligonucleotide
cttcccccggcatttgccgtgtttcaggtc

SEQ ID NO: 494819 - DNA, 30 bp, Artificial Sequence
  Synthetic oligonucleotide
gtgcagatggcctcaggaatcaacgaggtc

SEQ ID NO: 494820 - DNA, 30 bp, Artificial Sequence
  Synthetic oligonucleotide
acggtactgactagtagtctcagtgaggtc

SEQ ID NO: 494821 - DNA, 30 bp, Artificial Sequence
  Synthetic oligonucleotide
ctgaggacgtggtagattggaaaataggtc

SEQ ID NO: 494822 - DNA, 30 bp, Artificial Sequence
  Synthetic oligonucleotide
ctaacccttaggatgaagcgtgaataggtc

SEQ ID NO: 494823 - DNA, 30 bp, Artificial Sequence
  Synthetic oligonucleotide
caacggacaattggatcgccgcagtaggtc

SEQ ID NO: 494824 - DNA, 30 bp, Artificial Sequence
  Synthetic oligonucleotide
acccctccgacaatgtggaactcgtaggtc

SEQ ID NO: 494825 - DNA, 30 bp, Artificial Sequence
  Synthetic oligonucleotide
ggagtataattgtcttgtcgggcttaggtc

SEQ ID NO: 494826 - DNA, 30 bp, Artificial Sequence
  Synthetic oligonucleotide
gttttaacgagaaagacctgtctttaggtc

SEQ ID NO: 494827 - DNA, 30 bp, Artificial Sequence
  Synthetic oligonucleotide
aaaggactataactatatggggacacggtc

SEQ ID NO: 494828 - DNA, 30 bp, Artificial Sequence
  Synthetic oligonucleotide
ttcaatttactagcatgtgttcagacggtc

SEQ ID NO: 494829 - DNA, 30 bp, Artificial Sequence
  Synthetic oligonucleotide
ttcggacgaggataaggtccggtgacggtc

SEQ ID NO: 494830 - DNA, 30 bp, Artificial Sequence
  Synthetic oligonucleotide
tcaacacactattaagtccgttctacggtc

SEQ ID NO: 494831 - DNA, 30 bp, Artificial Sequence
  Synthetic oligonucleotide
gtcgcaatgaagcgtgaagcctggccggtc

SEQ ID NO: 494832 - DNA, 30 bp, Artificial Sequence
  Synthetic oligonucleotide
atgctacgtcaacagaagggcatgccggtc

SEQ ID NO: 494833 - DNA, 30 bp, Artificial Sequence
  Synthetic oligonucleotide
ggttagaaaggtgccgcaccagcagcggtc

SEQ ID NO: 494834 - DNA, 30 bp, Artificial Sequence
  Synthetic oligonucleotide
cataataacggggagtttattgtcgcggtc

SEQ ID NO: 494835 - DNA, 30 bp, Artificial Sequence
  Synthetic oligonucleotide
gaccgtcttcgggttattgatgctgcggtc

SEQ ID NO: 494836 - DNA, 30 bp, Artificial Sequence
  Synthetic oligonucleotide
gttcttttcccgtcacaaagataatcggtc

SEQ ID NO: 494837 - DNA, 30 bp, Artificial Sequence
  Synthetic oligonucleotide
tccaagttttgggactcaatgacctcggtc

SEQ ID NO: 494838 - DNA, 30 bp, Artificial Sequence
  Synthetic oligonucleotide
atagttcttgtacaagacgctggctcggtc

SEQ ID NO: 494839 - DNA, 30 bp, Artificial Sequence
  Synthetic oligonucleotide
gattgtccaagaggcccgctagagtcggtc

SEQ ID NO: 494840 - DNA, 30 bp, Artificial Sequence
  Synthetic oligonucleotide
ggaattcgacagctacgacctggttcggtc

SEQ ID NO: 494841 - DNA, 30 bp, Artificial Sequence
  Synthetic oligonucleotide
ttacgcgtctcccccttacgttgaagggtc

SEQ ID NO: 494842 - DNA, 30 bp, Artificial Sequence
  Synthetic oligonucleotide
gccataccccgcgtccccccctacagggtc

SEQ ID NO: 494843 - DNA, 30 bp, Artificial Sequence
  Synthetic oligonucleotide
ggttttctgaggatcctgcccaatagggtc

SEQ ID NO: 494844 - DNA, 30 bp, Artificial Sequence
  Synthetic oligonucleotide
ttcgagaggaagcattttcactttagggtc

SEQ ID NO: 494845 - DNA, 30 bp, Artificial Sequence
  Synthetic oligonucleotide
tctggggtgcaggggacctctggacgggtc

SEQ ID NO: 494846 - DNA, 30 bp, Artificial Sequence
  Synthetic oligonucleotide
cagcctatatcggtcggtctccaccgggtc

SEQ ID NO: 494847 - DNA, 30 bp, Artificial Sequence
  Synthetic oligonucleotide
aagaaagtcatcaagaacttttctcgggtc

SEQ ID NO: 494848 - DNA, 30 bp, Artificial Sequence
  Synthetic oligonucleotide
ctactataaaagtgcgttcatacaggggtc

SEQ ID NO: 494849 - DNA, 30 bp, Artificial Sequence
  Synthetic oligonucleotide
tggtggaggcccttcgggtgtccgggggtc

SEQ ID NO: 494850 - DNA, 30 bp, Artificial Sequence
  Synthetic oligonucleotide
gaggtgaccgtaatgcgaaccaatggggtc

SEQ ID NO: 494851 - DNA, 30 bp, Artificial Sequence
  Synthetic oligonucleotide
tggtttacgcgatagttacgtaagtgggtc

SEQ ID NO: 494852 - DNA, 30 bp, Artificial Sequence
  Synthetic oligonucleotide
tagcccctcactattcagtccgcgtgggtc

SEQ ID NO: 494853 - DNA, 30 bp, Artificial Sequence
  Synthetic oligonucleotide
aaattgctccccaaaagatattattgggtc

SEQ ID NO: 494854 - DNA, 30 bp, Artificial Sequence
  Synthetic oligonucleotide
ctgtggtccgactctataacaagttgggtc

SEQ ID NO: 494855 - DNA, 30 bp, Artificial Sequence
  Synthetic oligonucleotide
tgctcaacagacttccaacgaggttgggtc

SEQ ID NO: 494856 - DNA, 30 bp, Artificial Sequence
  Synthetic oligonucleotide
tgctactaggccacccttagtggttgggtc

SEQ ID NO: 494857 - DNA, 30 bp, Artificial Sequence
  Synthetic oligonucleotide
cggatattgttcgcacagccacgaatggtc

SEQ ID NO: 494858 - DNA, 30 bp, Artificial Sequence
  Synthetic oligonucleotide
gaaaattcatcttggtagcggggaatggtc

SEQ ID NO: 494859 - DNA, 30 bp, Artificial Sequence
  Synthetic oligonucleotide
ctacagccacgctcgttgtgagggatggtc

SEQ ID NO: 494860 - DNA, 30 bp, Artificial Sequence
  Synthetic oligonucleotide
ttgggggatactcaaacacttagactggtc

SEQ ID NO: 494861 - DNA, 30 bp, Artificial Sequence
  Synthetic oligonucleotide
ggcagagaccaaatcttaggtcgactggtc

SEQ ID NO: 494862 - DNA, 30 bp, Artificial Sequence
  Synthetic oligonucleotide
gttttagccatcagtccttgaaggctggtc

SEQ ID NO: 494863 - DNA, 30 bp, Artificial Sequence
  Synthetic oligonucleotide
agtatcctagcactcgtgaggtggctggtc

SEQ ID NO: 494864 - DNA, 30 bp, Artificial Sequence
  Synthetic oligonucleotide
cctagccagtgattattgtcattgctggtc

SEQ ID NO: 494865 - DNA, 30 bp, Artificial Sequence
  Synthetic oligonucleotide
gccggtctcaaacggagccagattctggtc

SEQ ID NO: 494866 - DNA, 30 bp, Artificial Sequence
  Synthetic oligonucleotide
ctgcaaaatagagaacgagtcgttctggtc

SEQ ID NO: 494867 - DNA, 30 bp, Artificial Sequence
  Synthetic oligonucleotide
tgcttcgttctttacgatgcgctagtggtc

SEQ ID NO: 494868 - DNA, 30 bp, Artificial Sequence
  Synthetic oligonucleotide
tttagatcacctgtcgataagcacgtggtc

SEQ ID NO: 494869 - DNA, 30 bp, Artificial Sequence
  Synthetic oligonucleotide
atcgttaaggcattatggcgaaaggtggtc

SEQ ID NO: 494870 - DNA, 30 bp, Artificial Sequence
  Synthetic oligonucleotide
ttaataggatcattatagtgcacggtggtc

SEQ ID NO: 494871 - DNA, 30 bp, Artificial Sequence
  Synthetic oligonucleotide
ccgccttcggcgtctaggtatgcggtggtc

SEQ ID NO: 494872 - DNA, 30 bp, Artificial Sequence
  Synthetic oligonucleotide
gaaaactgtgaccaatacttcagtgtggtc

SEQ ID NO: 494873 - DNA, 30 bp, Artificial Sequence
  Synthetic oligonucleotide
ttaatgagattagttgtattgaaattggtc

SEQ ID NO: 494874 - DNA, 30 bp, Artificial Sequence
  Synthetic oligonucleotide
ttgcgaaagcgccggtaggcatcattggtc

SEQ ID NO: 494875 - DNA, 30 bp, Artificial Sequence
  Synthetic oligonucleotide
aatgagagcagcgtgtctctgttattggtc

SEQ ID NO: 494876 - DNA, 30 bp, Artificial Sequence
  Synthetic oligonucleotide
gcccggtttccgatagaaatcgtcttggtc

SEQ ID NO: 494877 - DNA, 30 bp, Artificial Sequence
  Synthetic oligonucleotide
tccagaccgtcctaccgttggtcgttggtc

SEQ ID NO: 494878 - DNA, 30 bp, Artificial Sequence
  Synthetic oligonucleotide
ctctccatggcgtagataagcctgttggtc

SEQ ID NO: 494879 - DNA, 30 bp, Artificial Sequence
  Synthetic oligonucleotide
tagttaatcagggtcagatggcgtttggtc

SEQ ID NO: 494880 - DNA, 30 bp, Artificial Sequence
  Synthetic oligonucleotide
ttctgaaatggactcaaaagtgttttggtc

SEQ ID NO: 494881 - DNA, 30 bp, Artificial Sequence
  Synthetic oligonucleotide
aatactaagaattttgtcgctgcaaatgtc

SEQ ID NO: 494882 - DNA, 30 bp, Artificial Sequence
  Synthetic oligonucleotide
attcctcggtgtcccccgctccgaaatgtc

SEQ ID NO: 494883 - DNA, 30 bp, Artificial Sequence
  Synthetic oligonucleotide
aagagtggaggagaaaacgtcggaaatgtc

SEQ ID NO: 494884 - DNA, 30 bp, Artificial Sequence
  Synthetic oligonucleotide
accttaatgcacgcagggttcgtcaatgtc

SEQ ID NO: 494885 - DNA, 30 bp, Artificial Sequence
  Synthetic oligonucleotide
attcccctacgtcggcgcccggtgaatgtc

SEQ ID NO: 494886 - DNA, 30 bp, Artificial Sequence
  Synthetic oligonucleotide
aagtcagtggtaaacttcggggataatgtc

SEQ ID NO: 494887 - DNA, 30 bp, Artificial Sequence
  Synthetic oligonucleotide
tgtctatttggggaggccactgctaatgtc

SEQ ID NO: 494888 - DNA, 30 bp, Artificial Sequence
  Synthetic oligonucleotide
ccccaatgttaaggtccgtggtctaatgtc

SEQ ID NO: 494889 - DNA, 30 bp, Artificial Sequence
  Synthetic oligonucleotide
ttgttaactgagaatacctgttttaatgtc

SEQ ID NO: 494890 - DNA, 30 bp, Artificial Sequence
  Synthetic oligonucleotide
cgttttcttcaaccgtggcgacgacatgtc

SEQ ID NO: 494891 - DNA, 30 bp, Artificial Sequence
  Synthetic oligonucleotide
tggggctatcttaacaggtcacaccatgtc

SEQ ID NO: 494892 - DNA, 30 bp, Artificial Sequence
  Synthetic oligonucleotide
tctatagagatgtagtggagtgaagatgtc

SEQ ID NO: 494893 - DNA, 30 bp, Artificial Sequence
  Synthetic oligonucleotide
ttggaaacgaagcatcacacgtacgatgtc

SEQ ID NO: 494894 - DNA, 30 bp, Artificial Sequence
  Synthetic oligonucleotide
aactctccagttaaatccgacacggatgtc

SEQ ID NO: 494895 - DNA, 30 bp, Artificial Sequence
  Synthetic oligonucleotide
atttaattccgtgacttatgctgggatgtc

SEQ ID NO: 494896 - DNA, 30 bp, Artificial Sequence
  Synthetic oligonucleotide
ataaaggtttggtttaggtagtaatatgtc

SEQ ID NO: 494897 - DNA, 30 bp, Artificial Sequence
  Synthetic oligonucleotide
gtcttctccgtgacatcacgtagatatgtc

SEQ ID NO: 494898 - DNA, 29 bp, Artificial Sequence
  Synthetic oligonucleotide
tggattacttacgttataaccgatatgtc

SEQ ID NO: 494899 - DNA, 30 bp, Artificial Sequence
  Synthetic oligonucleotide
acggcttctccgtaagccaagaattatgtc

SEQ ID NO: 494900 - DNA, 30 bp, Artificial Sequence
  Synthetic oligonucleotide
gttattctagtcctctaggaaccttatgtc

SEQ ID NO: 494901 - DNA, 30 bp, Artificial Sequence
  Synthetic oligonucleotide
gagtagcgcatagtcaggtttttttatgtc

SEQ ID NO: 494902 - DNA, 30 bp, Artificial Sequence
  Synthetic oligonucleotide
catgtgcgattgtgatcagctcggactgtc

SEQ ID NO: 494903 - DNA, 30 bp, Artificial Sequence
  Synthetic oligonucleotide
cgccccccggtagacattaccattactgtc

SEQ ID NO: 494904 - DNA, 30 bp, Artificial Sequence
  Synthetic oligonucleotide
tgtacttgccgtgacagaaatccacctgtc

SEQ ID NO: 494905 - DNA, 30 bp, Artificial Sequence
  Synthetic oligonucleotide
caccaaagaatcccttcatacggacctgtc

SEQ ID NO: 494906 - DNA, 30 bp, Artificial Sequence
  Synthetic oligonucleotide
ttttggctattgcaacgctatcggcctgtc

SEQ ID NO: 494907 - DNA, 30 bp, Artificial Sequence
  Synthetic oligonucleotide
tttaacaagctgttacagaacgacgctgtc

SEQ ID NO: 494908 - DNA, 30 bp, Artificial Sequence
  Synthetic oligonucleotide
gtcagtttggtatgaagttctaccgctgtc

SEQ ID NO: 494909 - DNA, 30 bp, Artificial Sequence
  Synthetic oligonucleotide
agcacgaccgcgacagagctttgcgctgtc

SEQ ID NO: 494910 - DNA, 30 bp, Artificial Sequence
  Synthetic oligonucleotide
cacagacggcaggcaataattcctgctgtc

SEQ ID NO: 494911 - DNA, 30 bp, Artificial Sequence
  Synthetic oligonucleotide
catttatctgccgcacttccgcgatctgtc

SEQ ID NO: 494912 - DNA, 30 bp, Artificial Sequence
  Synthetic oligonucleotide
acaacgccgtcagctcccgcgaagtctgtc

SEQ ID NO: 494913 - DNA, 30 bp, Artificial Sequence
  Synthetic oligonucleotide
gcccctttagggtataaattgttgtctgtc

SEQ ID NO: 494914 - DNA, 30 bp, Artificial Sequence
  Synthetic oligonucleotide
catttccatcgtcaatatattatttctgtc

SEQ ID NO: 494915 - DNA, 30 bp, Artificial Sequence
  Synthetic oligonucleotide
cctacggccgactcgggaggagtccgtgtc

SEQ ID NO: 494916 - DNA, 30 bp, Artificial Sequence
  Synthetic oligonucleotide
cgtcggccacgtgcgttcactgtccgtgtc

SEQ ID NO: 494917 - DNA, 30 bp, Artificial Sequence
  Synthetic oligonucleotide
ttcgtttggaaagaatacaaactgcgtgtc

SEQ ID NO: 494918 - DNA, 30 bp, Artificial Sequence
  Synthetic oligonucleotide
cgatcgaaagcctcggtcgattgtcgtgtc

SEQ ID NO: 494919 - DNA, 30 bp, Artificial Sequence
  Synthetic oligonucleotide
taagtatctgcgtctgacggagcaggtgtc

SEQ ID NO: 494920 - DNA, 30 bp, Artificial Sequence
  Synthetic oligonucleotide
ttagtttacttatatcagctgttaggtgtc

SEQ ID NO: 494921 - DNA, 30 bp, Artificial Sequence
  Synthetic oligonucleotide
gccaacgcatctaatctctattgcggtgtc

SEQ ID NO: 494922 - DNA, 30 bp, Artificial Sequence
  Synthetic oligonucleotide
atacagttcgctggtaagaaccagggtgtc

SEQ ID NO: 494923 - DNA, 30 bp, Artificial Sequence
  Synthetic oligonucleotide
tatatatgcgaacggttgacctcgggtgtc

SEQ ID NO: 494924 - DNA, 30 bp, Artificial Sequence
  Synthetic oligonucleotide
gtactgatagtgcctgatgcttcgggtgtc

SEQ ID NO: 494925 - DNA, 30 bp, Artificial Sequence
  Synthetic oligonucleotide
gtcattgtggccctgtggaacgtgggtgtc

SEQ ID NO: 494926 - DNA, 30 bp, Artificial Sequence
  Synthetic oligonucleotide
gtgggtccggcgtgccaggataactgtgtc

SEQ ID NO: 494927 - DNA, 30 bp, Artificial Sequence
  Synthetic oligonucleotide
ttagggtcgctcgacaaacatcactgtgtc

SEQ ID NO: 494928 - DNA, 30 bp, Artificial Sequence
  Synthetic oligonucleotide
aaagttaccataaaataggcactctgtgtc

SEQ ID NO: 494929 - DNA, 30 bp, Artificial Sequence
  Synthetic oligonucleotide
gcaagctccatgttgttttcgcagtgtgtc

SEQ ID NO: 494930 - DNA, 30 bp, Artificial Sequence
  Synthetic oligonucleotide
acagcttccaaagtatcgcgtacgtgtgtc

SEQ ID NO: 494931 - DNA, 30 bp, Artificial Sequence
  Synthetic oligonucleotide
cctactcaaggcgcaactgaaatgtgtgtc

SEQ ID NO: 494932 - DNA, 30 bp, Artificial Sequence
  Synthetic oligonucleotide
gatttaattacgtatgcgtacacttgtgtc

SEQ ID NO: 494933 - DNA, 30 bp, Artificial Sequence
  Synthetic oligonucleotide
tggttaatacctcggttaagagtttgtgtc

SEQ ID NO: 494934 - DNA, 30 bp, Artificial Sequence
  Synthetic oligonucleotide
aatgactcaaatagcctccagttttgtgtc

SEQ ID NO: 494935 - DNA, 30 bp, Artificial Sequence
  Synthetic oligonucleotide
aggaccatctttgcttgccaaataattgtc

SEQ ID NO: 494936 - DNA, 30 bp, Artificial Sequence
  Synthetic oligonucleotide
cgcggcccttagggtaccgtatggattgtc

SEQ ID NO: 494937 - DNA, 30 bp, Artificial Sequence
  Synthetic oligonucleotide
gcggctcagtttcacgatatcgtgattgtc

SEQ ID NO: 494938 - DNA, 30 bp, Artificial Sequence
  Synthetic oligonucleotide
catagttgaacgcgggcgatatatattgtc

SEQ ID NO: 494939 - DNA, 30 bp, Artificial Sequence
  Synthetic oligonucleotide
agacctggcgttcatcatccaggacttgtc

SEQ ID NO: 494940 - DNA, 30 bp, Artificial Sequence
  Synthetic oligonucleotide
gtgcatatactgctggctcagggacttgtc

SEQ ID NO: 494941 - DNA, 30 bp, Artificial Sequence
  Synthetic oligonucleotide
tgagaatcgcccccaaaataacgccttgtc

SEQ ID NO: 494942 - DNA, 30 bp, Artificial Sequence
  Synthetic oligonucleotide
agtcacagaggcgctggatgccatcttgtc

SEQ ID NO: 494943 - DNA, 30 bp, Artificial Sequence
  Synthetic oligonucleotide
atacatactctgccgcgcggaggagttgtc

SEQ ID NO: 494944 - DNA, 30 bp, Artificial Sequence
  Synthetic oligonucleotide
agttcggcgtttcgttgcaagcccgttgtc

SEQ ID NO: 494945 - DNA, 30 bp, Artificial Sequence
  Synthetic oligonucleotide
atagtccctgtcgcatcctgggccgttgtc

SEQ ID NO: 494946 - DNA, 30 bp, Artificial Sequence
  Synthetic oligonucleotide
cagcaggcgaaaactacgttttgcgttgtc

SEQ ID NO: 494947 - DNA, 30 bp, Artificial Sequence
  Synthetic oligonucleotide
gctttaagctcctttgtgcgagaatttgtc

SEQ ID NO: 494948 - DNA, 30 bp, Artificial Sequence
  Synthetic oligonucleotide
cgattacgtttaagcggtactgtatttgtc

SEQ ID NO: 494949 - DNA, 30 bp, Artificial Sequence
  Synthetic oligonucleotide
tgggggcagcaaaaccgaagatattttgtc

SEQ ID NO: 494950 - DNA, 30 bp, Artificial Sequence
  Synthetic oligonucleotide
gcatatagttaatgtttgagaaaaaaattc

SEQ ID NO: 494951 - DNA, 30 bp, Artificial Sequence
  Synthetic oligonucleotide
agtgttatcgaaggcctcgtacaaaaattc

SEQ ID NO: 494952 - DNA, 30 bp, Artificial Sequence
  Synthetic oligonucleotide
gtctgagcgcccccgtcatgcggaaaattc

SEQ ID NO: 494953 - DNA, 30 bp, Artificial Sequence
  Synthetic oligonucleotide
agcccagatctatactcgagtatcaaattc

SEQ ID NO: 494954 - DNA, 30 bp, Artificial Sequence
  Synthetic oligonucleotide
tacttagtgggcgacgagtaacagaaattc

SEQ ID NO: 494955 - DNA, 30 bp, Artificial Sequence
  Synthetic oligonucleotide
ggccagttatgataggttaatttgaaattc

SEQ ID NO: 494956 - DNA, 30 bp, Artificial Sequence
  Synthetic oligonucleotide
gcactctcgaagggtttaaaaactaaattc

SEQ ID NO: 494957 - DNA, 30 bp, Artificial Sequence
  Synthetic oligonucleotide
ccagattttgttctcagagcgattaaattc

SEQ ID NO: 494958 - DNA, 30 bp, Artificial Sequence
  Synthetic oligonucleotide
aatccgacgcttctgccggacatacaattc

SEQ ID NO: 494959 - DNA, 30 bp, Artificial Sequence
  Synthetic oligonucleotide
gctaccaacaagttacttgagctccaattc

SEQ ID NO: 494960 - DNA, 30 bp, Artificial Sequence
  Synthetic oligonucleotide
tttcattctgcgtttttgaacaaagaattc

SEQ ID NO: 494961 - DNA, 30 bp, Artificial Sequence
  Synthetic oligonucleotide
aaaaattaaacctggaagatcagagaattc

SEQ ID NO: 494962 - DNA, 30 bp, Artificial Sequence
  Synthetic oligonucleotide
cttgaattcgtatagttaggatgagaattc

SEQ ID NO: 494963 - DNA, 30 bp, Artificial Sequence
  Synthetic oligonucleotide
tttagccgtttaatctgttacttagaattc

SEQ ID NO: 494964 - DNA, 30 bp, Artificial Sequence
  Synthetic oligonucleotide
ctgcgagctcataataaacgcagcgaattc

SEQ ID NO: 494965 - DNA, 30 bp, Artificial Sequence
  Synthetic oligonucleotide
cccctgcaccgggaagcattagttgaattc

SEQ ID NO: 494966 - DNA, 30 bp, Artificial Sequence
  Synthetic oligonucleotide
cagcgagattgccattctaatgaataattc

SEQ ID NO: 494967 - DNA, 30 bp, Artificial Sequence
  Synthetic oligonucleotide
tctataagacgccggaccctttcataattc

SEQ ID NO: 494968 - DNA, 30 bp, Artificial Sequence
  Synthetic oligonucleotide
gtattatcccgatcgggataattataattc

SEQ ID NO: 494969 - DNA, 30 bp, Artificial Sequence
  Synthetic oligonucleotide
atgcagggtatcttgatactgttataattc

SEQ ID NO: 494970 - DNA, 30 bp, Artificial Sequence
  Synthetic oligonucleotide
gatgcaagaaaagggagtaaaaactaattc

SEQ ID NO: 494971 - DNA, 30 bp, Artificial Sequence
  Synthetic oligonucleotide
ccctactggccaccgtggaaaccctaattc

SEQ ID NO: 494972 - DNA, 30 bp, Artificial Sequence
  Synthetic oligonucleotide
aagatgtctgcaccgtccacgacgtaattc

SEQ ID NO: 494973 - DNA, 30 bp, Artificial Sequence
  Synthetic oligonucleotide
gatgaggacacgttttggcctaggtaattc

SEQ ID NO: 494974 - DNA, 30 bp, Artificial Sequence
  Synthetic oligonucleotide
gagaggcatgctttgaaaggcataacattc

SEQ ID NO: 494975 - DNA, 30 bp, Artificial Sequence
  Synthetic oligonucleotide
tgtcttttgcgtattttcggtaacacattc

SEQ ID NO: 494976 - DNA, 30 bp, Artificial Sequence
  Synthetic oligonucleotide
atgactccaagtggtcccaaaaccacattc

SEQ ID NO: 494977 - DNA, 30 bp, Artificial Sequence
  Synthetic oligonucleotide
gccagcctccttgtcttacgtatcacattc

SEQ ID NO: 494978 - DNA, 30 bp, Artificial Sequence
  Synthetic oligonucleotide
ttcgtcctgaggctcgtagctaggacattc

SEQ ID NO: 494979 - DNA, 30 bp, Artificial Sequence
  Synthetic oligonucleotide
ttattccggcgagctgatccctatacattc

SEQ ID NO: 494980 - DNA, 30 bp, Artificial Sequence
  Synthetic oligonucleotide
gtatgaaaggcttcttgggacgctacattc

SEQ ID NO: 494981 - DNA, 30 bp, Artificial Sequence
  Synthetic oligonucleotide
actagcagcatgaagttccaacgtacattc

SEQ ID NO: 494982 - DNA, 30 bp, Artificial Sequence
  Synthetic oligonucleotide
atacgttgagggtacccattcgaaccattc

SEQ ID NO: 494983 - DNA, 30 bp, Artificial Sequence
  Synthetic oligonucleotide
tgggctgttctgaatttgacggtcccattc

SEQ ID NO: 494984 - DNA, 30 bp, Artificial Sequence
  Synthetic oligonucleotide
cgtattgcgttggccaagtgtgggccattc

SEQ ID NO: 494985 - DNA, 30 bp, Artificial Sequence
  Synthetic oligonucleotide
tggagacgcttatgcatcatgcaagcattc

SEQ ID NO: 494986 - DNA, 28 bp, Artificial Sequence
  Synthetic oligonucleotide
gagccacgtgcgatgcggtatagcattc

SEQ ID NO: 494987 - DNA, 30 bp, Artificial Sequence
  Synthetic oligonucleotide
tccgacttgaatttctacttcgaggcattc

SEQ ID NO: 494988 - DNA, 30 bp, Artificial Sequence
  Synthetic oligonucleotide
gcacttgccggtggagacgacacggcattc

SEQ ID NO: 494989 - DNA, 30 bp, Artificial Sequence
  Synthetic oligonucleotide
aatgcatagctgtaacgcgattaatcattc

SEQ ID NO: 494990 - DNA, 30 bp, Artificial Sequence
  Synthetic oligonucleotide
atttcccacacgcagcctagtggatcattc

SEQ ID NO: 494991 - DNA, 30 bp, Artificial Sequence
  Synthetic oligonucleotide
gtaagatttaatcattccggtagctcattc

SEQ ID NO: 494992 - DNA, 30 bp, Artificial Sequence
  Synthetic oligonucleotide
ctaactgggactggtatagaaggctcattc

SEQ ID NO: 494993 - DNA, 30 bp, Artificial Sequence
  Synthetic oligonucleotide
cagttctttcggggtttgcacgtctcattc

SEQ ID NO: 494994 - DNA, 30 bp, Artificial Sequence
  Synthetic oligonucleotide
cagcagttagttattaagccctgttcattc

SEQ ID NO: 494995 - DNA, 30 bp, Artificial Sequence
  Synthetic oligonucleotide
tgaggcgcgttgtaataactctccagattc

SEQ ID NO: 494996 - DNA, 30 bp, Artificial Sequence
  Synthetic oligonucleotide
cgatactgtgtttcgtgaggcggcagattc

SEQ ID NO: 494997 - DNA, 30 bp, Artificial Sequence
  Synthetic oligonucleotide
tagatgcgattttgcgaccacctcagattc

SEQ ID NO: 494998 - DNA, 30 bp, Artificial Sequence
  Synthetic oligonucleotide
catattgtaccccggggtcttccgagattc

SEQ ID NO: 494999 - DNA, 30 bp, Artificial Sequence
  Synthetic oligonucleotide
tatgtatagcccagaagcccatggagattc

SEQ ID NO: 495000 - DNA, 30 bp, Artificial Sequence
  Synthetic oligonucleotide
gttgagcggtcgcagctatagcaacgattc

SEQ ID NO: 495001 - DNA, 30 bp, Artificial Sequence
  Synthetic oligonucleotide
atccagctacgcacctgcatgccacgattc

SEQ ID NO: 495002 - DNA, 30 bp, Artificial Sequence
  Synthetic oligonucleotide
agagatggatgattaacatccagacgattc

SEQ ID NO: 495003 - DNA, 30 bp, Artificial Sequence
  Synthetic oligonucleotide
gatccggcgctgcgtggagcccgtcgattc

SEQ ID NO: 495004 - DNA, 30 bp, Artificial Sequence
  Synthetic oligonucleotide
tagtccggtgaccacgctttctaaggattc

SEQ ID NO: 495005 - DNA, 30 bp, Artificial Sequence
  Synthetic oligonucleotide
cttttattctttaaatctgtgccaggattc

SEQ ID NO: 495006 - DNA, 30 bp, Artificial Sequence
  Synthetic oligonucleotide
cgcaggataggacatgcaggagcaggattc

SEQ ID NO: 495007 - DNA, 30 bp, Artificial Sequence
  Synthetic oligonucleotide
taatttatagcgatagagacctcaggattc

SEQ ID NO: 495008 - DNA, 30 bp, Artificial Sequence
  Synthetic oligonucleotide
tataaaatacgcacagatgcgccgggattc

SEQ ID NO: 495009 - DNA, 30 bp, Artificial Sequence
  Synthetic oligonucleotide
aaaacgtaattgactacttacgctggattc

SEQ ID NO: 495010 - DNA, 30 bp, Artificial Sequence
  Synthetic oligonucleotide
gactttaagtgaagcggtcgtggttgattc

SEQ ID NO: 495011 - DNA, 30 bp, Artificial Sequence
  Synthetic oligonucleotide
gatgttactgctgaggcggagatttgattc

SEQ ID NO: 495012 - DNA, 30 bp, Artificial Sequence
  Synthetic oligonucleotide
atccccgtcgtcgattcgatcaaaatattc

SEQ ID NO: 495013 - DNA, 30 bp, Artificial Sequence
  Synthetic oligonucleotide
cggagcacgcgttagggaaagtgcatattc

SEQ ID NO: 495014 - DNA, 30 bp, Artificial Sequence
  Synthetic oligonucleotide
taccggcagtgacctatggtagtgatattc

SEQ ID NO: 495015 - DNA, 30 bp, Artificial Sequence
  Synthetic oligonucleotide
cgagtttgccaggtttcacctttgatattc

SEQ ID NO: 495016 - DNA, 30 bp, Artificial Sequence
  Synthetic oligonucleotide
ctagtcagaaggatatggattcatatattc

SEQ ID NO: 495017 - DNA, 30 bp, Artificial Sequence
  Synthetic oligonucleotide
tttgagtgcgacttcacaaatgctatattc

SEQ ID NO: 495018 - DNA, 30 bp, Artificial Sequence
  Synthetic oligonucleotide
acgattcaattctaacgcggggcactattc

SEQ ID NO: 495019 - DNA, 30 bp, Artificial Sequence
  Synthetic oligonucleotide
gttaggcataggtactgaaggatactattc

SEQ ID NO: 495020 - DNA, 30 bp, Artificial Sequence
  Synthetic oligonucleotide
ggatccttctcctctcacggtcacctattc

SEQ ID NO: 495021 - DNA, 30 bp, Artificial Sequence
  Synthetic oligonucleotide
tattacagcgcgcctctgcagcggctattc

SEQ ID NO: 495022 - DNA, 30 bp, Artificial Sequence
  Synthetic oligonucleotide
cctatattttaagtccaagggtggctattc

SEQ ID NO: 495023 - DNA, 30 bp, Artificial Sequence
  Synthetic oligonucleotide
gcagccgcgcgggcctctattgctctattc

SEQ ID NO: 495024 - DNA, 30 bp, Artificial Sequence
  Synthetic oligonucleotide
ctttgagacgctggcagcgtaggtctattc

SEQ ID NO: 495025 - DNA, 30 bp, Artificial Sequence
  Synthetic oligonucleotide
aaagaataaagtggctgcagtgccgtattc

SEQ ID NO: 495026 - DNA, 30 bp, Artificial Sequence
  Synthetic oligonucleotide
aagccccctatattctggatcgaggtattc

SEQ ID NO: 495027 - DNA, 30 bp, Artificial Sequence
  Synthetic oligonucleotide
tattcagatgcccggagagtcagggtattc

SEQ ID NO: 495028 - DNA, 30 bp, Artificial Sequence
  Synthetic oligonucleotide
tgtcactagatacaggtcggacgggtattc

SEQ ID NO: 495029 - DNA, 30 bp, Artificial Sequence
  Synthetic oligonucleotide
gtagaattacatgcacgccagcctgtattc

SEQ ID NO: 495030 - DNA, 30 bp, Artificial Sequence
  Synthetic oligonucleotide
acggttttggataaaggctcaggtgtattc

SEQ ID NO: 495031 - DNA, 30 bp, Artificial Sequence
  Synthetic oligonucleotide
ctgtttccaaatctatattgtacattattc

SEQ ID NO: 495032 - DNA, 30 bp, Artificial Sequence
  Synthetic oligonucleotide
aagatttgcagtgtgtgggaatcattattc

SEQ ID NO: 495033 - DNA, 30 bp, Artificial Sequence
  Synthetic oligonucleotide
agtccttttctccttaggtttatcttattc

SEQ ID NO: 495034 - DNA, 30 bp, Artificial Sequence
  Synthetic oligonucleotide
ggtaggatttgatttgtttttcagttattc

SEQ ID NO: 495035 - DNA, 30 bp, Artificial Sequence
  Synthetic oligonucleotide
tttttgtttatgtttcaggtatagttattc

SEQ ID NO: 495036 - DNA, 30 bp, Artificial Sequence
  Synthetic oligonucleotide
tagaaggtccatatctaaatagggttattc

SEQ ID NO: 495037 - DNA, 30 bp, Artificial Sequence
  Synthetic oligonucleotide
ggttcgcggtatggtttgtgtactttattc

SEQ ID NO: 495038 - DNA, 30 bp, Artificial Sequence
  Synthetic oligonucleotide
aaaagtggcatctggctaattactttattc

SEQ ID NO: 495039 - DNA, 30 bp, Artificial Sequence
  Synthetic oligonucleotide
ctgcagtgaattcagttctcacctttattc

SEQ ID NO: 495040 - DNA, 30 bp, Artificial Sequence
  Synthetic oligonucleotide
gccgggcagacacaatactcccctttattc

SEQ ID NO: 495041 - DNA, 30 bp, Artificial Sequence
  Synthetic oligonucleotide
cgcagcccagtaactcctatgcgtttattc

SEQ ID NO: 495042 - DNA, 30 bp, Artificial Sequence
  Synthetic oligonucleotide
gtattagttgggatgagtaaaaccaacttc

SEQ ID NO: 495043 - DNA, 30 bp, Artificial Sequence
  Synthetic oligonucleotide
taatgggcatttttgacgcgcgccaacttc

SEQ ID NO: 495044 - DNA, 30 bp, Artificial Sequence
  Synthetic oligonucleotide
aagttctatcgtatccaccaatagaacttc

SEQ ID NO: 495045 - DNA, 30 bp, Artificial Sequence
  Synthetic oligonucleotide
aatacactatgatgtttcctatggaacttc

SEQ ID NO: 495046 - DNA, 30 bp, Artificial Sequence
  Synthetic oligonucleotide
tcaagtaccaactgcagatactggaacttc

SEQ ID NO: 495047 - DNA, 30 bp, Artificial Sequence
  Synthetic oligonucleotide
gaagcagattgtaaataaaaatctaacttc

SEQ ID NO: 495048 - DNA, 30 bp, Artificial Sequence
  Synthetic oligonucleotide
tgaccattgtcttgtattcagagtaacttc

SEQ ID NO: 495049 - DNA, 30 bp, Artificial Sequence
  Synthetic oligonucleotide
tctgtgtaatgagctgatatttgacacttc

SEQ ID NO: 495050 - DNA, 30 bp, Artificial Sequence
  Synthetic oligonucleotide
accttttccgagtgttgaccaccgcacttc

SEQ ID NO: 495051 - DNA, 30 bp, Artificial Sequence
  Synthetic oligonucleotide
acggcagaggcctacacatgcccgcacttc

SEQ ID NO: 495052 - DNA, 30 bp, Artificial Sequence
  Synthetic oligonucleotide
cagccagcagaatagcggtatgggcacttc

SEQ ID NO: 495053 - DNA, 30 bp, Artificial Sequence
  Synthetic oligonucleotide
cgagactacagaaaggagcagggtcacttc

SEQ ID NO: 495054 - DNA, 30 bp, Artificial Sequence
  Synthetic oligonucleotide
aatcgtggtgtgttgaagctatttcacttc

SEQ ID NO: 495055 - DNA, 30 bp, Artificial Sequence
  Synthetic oligonucleotide
atttgatttaacgactcgtcgttagacttc

SEQ ID NO: 495056 - DNA, 30 bp, Artificial Sequence
  Synthetic oligonucleotide
gaaaatgtccacgtgtcatcttcggacttc

SEQ ID NO: 495057 - DNA, 30 bp, Artificial Sequence
  Synthetic oligonucleotide
ctacccctatcgggctcgggcgtggacttc

SEQ ID NO: 495058 - DNA, 30 bp, Artificial Sequence
  Synthetic oligonucleotide
gaggcaaactatttagtttaacagtacttc

SEQ ID NO: 495059 - DNA, 30 bp, Artificial Sequence
  Synthetic oligonucleotide
gaaagtaagacggtatgatcccgttacttc

SEQ ID NO: 495060 - DNA, 30 bp, Artificial Sequence
  Synthetic oligonucleotide
gacagcactgacgagtccgggtcaaccttc

SEQ ID NO: 495061 - DNA, 28 bp, Artificial Sequence
  Synthetic oligonucleotide
ttctcctagcaacgttggtctcaccttc

SEQ ID NO: 495062 - DNA, 30 bp, Artificial Sequence
  Synthetic oligonucleotide
ctttacctgtacacctattcatcgaccttc

SEQ ID NO: 495063 - DNA, 30 bp, Artificial Sequence
  Synthetic oligonucleotide
gttttctcgatagccacccgctcgaccttc

SEQ ID NO: 495064 - DNA, 30 bp, Artificial Sequence
  Synthetic oligonucleotide
tcaaacgtatcggctagggtgtcccccttc

SEQ ID NO: 495065 - DNA, 30 bp, Artificial Sequence
  Synthetic oligonucleotide
cattgtgtctggccgcgatgttcccccttc

SEQ ID NO: 495066 - DNA, 30 bp, Artificial Sequence
  Synthetic oligonucleotide
cacaccgcgcccgtacgtgcatgcgccttc

SEQ ID NO: 495067 - DNA, 30 bp, Artificial Sequence
  Synthetic oligonucleotide
gaagggcctaatctgatctacggtgccttc

SEQ ID NO: 495068 - DNA, 30 bp, Artificial Sequence
  Synthetic oligonucleotide
gccagagggggcgttgacaataaatccttc

SEQ ID NO: 495069 - DNA, 30 bp, Artificial Sequence
  Synthetic oligonucleotide
tcgcacgaatgatgttgtcgctcatccttc

SEQ ID NO: 495070 - DNA, 30 bp, Artificial Sequence
  Synthetic oligonucleotide
gcctcatgataatcatgctggccctccttc

SEQ ID NO: 495071 - DNA, 30 bp, Artificial Sequence
  Synthetic oligonucleotide
ggcgtccgtttataacggattgtctccttc

SEQ ID NO: 495072 - DNA, 30 bp, Artificial Sequence
  Synthetic oligonucleotide
agcaggaaccgggcgcctgcatggtccttc

SEQ ID NO: 495073 - DNA, 30 bp, Artificial Sequence
  Synthetic oligonucleotide
aaattatcgctggctgggaccaattccttc

SEQ ID NO: 495074 - DNA, 30 bp, Artificial Sequence
  Synthetic oligonucleotide
ccggcaaggaatgagctataacattccttc

SEQ ID NO: 495075 - DNA, 30 bp, Artificial Sequence
  Synthetic oligonucleotide
ggggtcacgccgcttgaagcgtgttccttc

SEQ ID NO: 495076 - DNA, 30 bp, Artificial Sequence
  Synthetic oligonucleotide
gtcttattcggagttgggctggaaagcttc

SEQ ID NO: 495077 - DNA, 30 bp, Artificial Sequence
  Synthetic oligonucleotide
cataacactacaccgacgtaggcaagcttc

SEQ ID NO: 495078 - DNA, 30 bp, Artificial Sequence
  Synthetic oligonucleotide
gtgaagtagcgggtgagctgcacgagcttc

SEQ ID NO: 495079 - DNA, 30 bp, Artificial Sequence
  Synthetic oligonucleotide
ttgtcttgcagtccgttacttgaacgcttc

SEQ ID NO: 495080 - DNA, 30 bp, Artificial Sequence
  Synthetic oligonucleotide
gttagggaccgagccagacccttacgcttc

SEQ ID NO: 495081 - DNA, 30 bp, Artificial Sequence
  Synthetic oligonucleotide
gattatatcatctatagcaaggtccgcttc

SEQ ID NO: 495082 - DNA, 30 bp, Artificial Sequence
  Synthetic oligonucleotide
ggtctatttacgcttggtcctctgggcttc

SEQ ID NO: 495083 - DNA, 30 bp, Artificial Sequence
  Synthetic oligonucleotide
atgtcttgggggtaagtcttagtgggcttc

SEQ ID NO: 495084 - DNA, 30 bp, Artificial Sequence
  Synthetic oligonucleotide
tgccagcagatgtaatggtctactggcttc

SEQ ID NO: 495085 - DNA, 30 bp, Artificial Sequence
  Synthetic oligonucleotide
gggacacgctgtccaggttcaattggcttc

SEQ ID NO: 495086 - DNA, 30 bp, Artificial Sequence
  Synthetic oligonucleotide
tatacgacgctatgtccagtgattggcttc

SEQ ID NO: 495087 - DNA, 30 bp, Artificial Sequence
  Synthetic oligonucleotide
tccgaaacggtgcactcttgtaaatgcttc

SEQ ID NO: 495088 - DNA, 30 bp, Artificial Sequence
  Synthetic oligonucleotide
ttatagaatcacatgttaactctatgcttc

SEQ ID NO: 495089 - DNA, 30 bp, Artificial Sequence
  Synthetic oligonucleotide
ttaatttcaaatatacagacaatctgcttc

SEQ ID NO: 495090 - DNA, 30 bp, Artificial Sequence
  Synthetic oligonucleotide
cccaaagtgatatggcccgatatctgcttc

SEQ ID NO: 495091 - DNA, 30 bp, Artificial Sequence
  Synthetic oligonucleotide
gtagtgttctcgtggaggcgaaattgcttc

SEQ ID NO: 495092 - DNA, 30 bp, Artificial Sequence
  Synthetic oligonucleotide
gtgacaggatttgtacaacatacttgcttc

SEQ ID NO: 495093 - DNA, 30 bp, Artificial Sequence
  Synthetic oligonucleotide
tagatgttgcacgcaaattttatttgcttc

SEQ ID NO: 495094 - DNA, 30 bp, Artificial Sequence
  Synthetic oligonucleotide
agccatcaacagtccctatttgagatcttc

SEQ ID NO: 495095 - DNA, 30 bp, Artificial Sequence
  Synthetic oligonucleotide
gcgtgctagtcacaactgcctactatcttc

SEQ ID NO: 495096 - DNA, 30 bp, Artificial Sequence
  Synthetic oligonucleotide
tcgggcctatcccaataaagatttatcttc

SEQ ID NO: 495097 - DNA, 30 bp, Artificial Sequence
  Synthetic oligonucleotide
cttgttgtccagacgaatcgaagactcttc

SEQ ID NO: 495098 - DNA, 30 bp, Artificial Sequence
  Synthetic oligonucleotide
gacatcaatgcacacggacagtggctcttc

SEQ ID NO: 495099 - DNA, 30 bp, Artificial Sequence
  Synthetic oligonucleotide
ggtaagcgtttgcagctcagaggtctcttc

SEQ ID NO: 495100 - DNA, 30 bp, Artificial Sequence
  Synthetic oligonucleotide
cagccgcgtactatcagcaagtttctcttc

SEQ ID NO: 495101 - DNA, 30 bp, Artificial Sequence
  Synthetic oligonucleotide
tcaaattaaacagtattagcagcagtcttc

SEQ ID NO: 495102 - DNA, 30 bp, Artificial Sequence
  Synthetic oligonucleotide
ccagtgtccaaggaggtcgatgcagtcttc

SEQ ID NO: 495103 - DNA, 30 bp, Artificial Sequence
  Synthetic oligonucleotide
tgtttctcgagtgcaaaggtctgagtcttc

SEQ ID NO: 495104 - DNA, 30 bp, Artificial Sequence
  Synthetic oligonucleotide
taggacgtaggcagtgactgaaaggtcttc

SEQ ID NO: 495105 - DNA, 30 bp, Artificial Sequence
  Synthetic oligonucleotide
attttgccgggggtcaattgggtggtcttc

SEQ ID NO: 495106 - DNA, 30 bp, Artificial Sequence
  Synthetic oligonucleotide
gtttaatcattcgggtacaaacgtgtcttc

SEQ ID NO: 495107 - DNA, 30 bp, Artificial Sequence
  Synthetic oligonucleotide
agcgcagcactgattccatcggcattcttc

SEQ ID NO: 495108 - DNA, 30 bp, Artificial Sequence
  Synthetic oligonucleotide
tccttccaacgggcccggcttttattcttc

SEQ ID NO: 495109 - DNA, 30 bp, Artificial Sequence
  Synthetic oligonucleotide
gatggcagaatggagtaggagggcttcttc

SEQ ID NO: 495110 - DNA, 30 bp, Artificial Sequence
  Synthetic oligonucleotide
ttacaagaaaaatagctatcaggtttcttc

SEQ ID NO: 495111 - DNA, 30 bp, Artificial Sequence
  Synthetic oligonucleotide
ggcggtaatatttcggggttcctaaagttc

SEQ ID NO: 495112 - DNA, 30 bp, Artificial Sequence
  Synthetic oligonucleotide
aattcgcggcggggactctaaggcaagttc

SEQ ID NO: 495113 - DNA, 30 bp, Artificial Sequence
  Synthetic oligonucleotide
gccattaatctggcccttccaatcaagttc

SEQ ID NO: 495114 - DNA, 30 bp, Artificial Sequence
  Synthetic oligonucleotide
ccgcattactgtagcgctcgtttcaagttc

SEQ ID NO: 495115 - DNA, 30 bp, Artificial Sequence
  Synthetic oligonucleotide
aatatctcctaacataaaccaggtaagttc

SEQ ID NO: 495116 - DNA, 30 bp, Artificial Sequence
  Synthetic oligonucleotide
gcagtactctatgctcgaatcgttaagttc

SEQ ID NO: 495117 - DNA, 30 bp, Artificial Sequence
  Synthetic oligonucleotide
gccccgccagcaatccacgcccgccagttc

SEQ ID NO: 495118 - DNA, 30 bp, Artificial Sequence
  Synthetic oligonucleotide
tttacggtataacacttaggtatccagttc

SEQ ID NO: 495119 - DNA, 30 bp, Artificial Sequence
  Synthetic oligonucleotide
tgtcgtttgccggaactgattcagcagttc

SEQ ID NO: 495120 - DNA, 30 bp, Artificial Sequence
  Synthetic oligonucleotide
tcaacacaactgatctaaagtaacgagttc

SEQ ID NO: 495121 - DNA, 30 bp, Artificial Sequence
  Synthetic oligonucleotide
atttaaatagtgaacccggagcgcgagttc

SEQ ID NO: 495122 - DNA, 30 bp, Artificial Sequence
  Synthetic oligonucleotide
gttgattttagagtctgggccaaggagttc

SEQ ID NO: 495123 - DNA, 30 bp, Artificial Sequence
  Synthetic oligonucleotide
gctcccactgtccagtgataaggggagttc

SEQ ID NO: 495124 - DNA, 30 bp, Artificial Sequence
  Synthetic oligonucleotide
aagcaggactatctcgtttacatggagttc

SEQ ID NO: 495125 - DNA, 30 bp, Artificial Sequence
  Synthetic oligonucleotide
acacttattttgccacagaaaactgagttc

SEQ ID NO: 495126 - DNA, 30 bp, Artificial Sequence
  Synthetic oligonucleotide
taacattaatttatacgaaagtcatagttc

SEQ ID NO: 495127 - DNA, 30 bp, Artificial Sequence
  Synthetic oligonucleotide
gcaccatcagtcaagctcgcgatatagttc

SEQ ID NO: 495128 - DNA, 30 bp, Artificial Sequence
  Synthetic oligonucleotide
gagtgtggtagtgaacataatctatagttc

SEQ ID NO: 495129 - DNA, 30 bp, Artificial Sequence
  Synthetic oligonucleotide
tataatctctgcttgcattaggactagttc

SEQ ID NO: 495130 - DNA, 30 bp, Artificial Sequence
  Synthetic oligonucleotide
gtcttccaaccaaagctttgattctagttc

SEQ ID NO: 495131 - DNA, 30 bp, Artificial Sequence
  Synthetic oligonucleotide
ttcgaggttcgtgtaactctttggtagttc

SEQ ID NO: 495132 - DNA, 30 bp, Artificial Sequence
  Synthetic oligonucleotide
attggttcccacggttgcgcgggttagttc

SEQ ID NO: 495133 - DNA, 30 bp, Artificial Sequence
  Synthetic oligonucleotide
cggttccctttatggagcgttgacacgttc

SEQ ID NO: 495134 - DNA, 30 bp, Artificial Sequence
  Synthetic oligonucleotide
aggagaacgcgatagccagctatcacgttc

SEQ ID NO: 495135 - DNA, 30 bp, Artificial Sequence
  Synthetic oligonucleotide
caagtccctagacgcttcaaccagacgttc

SEQ ID NO: 495136 - DNA, 30 bp, Artificial Sequence
  Synthetic oligonucleotide
agtttgtagcattaccgcttatgtacgttc

SEQ ID NO: 495137 - DNA, 30 bp, Artificial Sequence
  Synthetic oligonucleotide
ataagtccccaaccttttccgtttacgttc

SEQ ID NO: 495138 - DNA, 30 bp, Artificial Sequence
  Synthetic oligonucleotide
gataaggatttatgtcacacgggaccgttc

SEQ ID NO: 495139 - DNA, 30 bp, Artificial Sequence
  Synthetic oligonucleotide
aatcgatatgagcaagaactggacccgttc

SEQ ID NO: 495140 - DNA, 30 bp, Artificial Sequence
  Synthetic oligonucleotide
aatgcgttgaccagacggagttgcccgttc

SEQ ID NO: 495141 - DNA, 30 bp, Artificial Sequence
  Synthetic oligonucleotide
actgcactgacagtagaacaagagccgttc

SEQ ID NO: 495142 - DNA, 30 bp, Artificial Sequence
  Synthetic oligonucleotide
cccgggtaattactgcagactttgccgttc

SEQ ID NO: 495143 - DNA, 30 bp, Artificial Sequence
  Synthetic oligonucleotide
aggcaacaacggaagcttgagcctccgttc

SEQ ID NO: 495144 - DNA, 30 bp, Artificial Sequence
  Synthetic oligonucleotide
ctactgatgcaacgtgcttagagtccgttc

SEQ ID NO: 495145 - DNA, 30 bp, Artificial Sequence
  Synthetic oligonucleotide
gatatcgtctggcgaacttagaacgcgttc

SEQ ID NO: 495146 - DNA, 30 bp, Artificial Sequence
  Synthetic oligonucleotide
tttgtccgcagttgtattccctccgcgttc

SEQ ID NO: 495147 - DNA, 30 bp, Artificial Sequence
  Synthetic oligonucleotide
tgtcgcttagacaggccacgggactcgttc

SEQ ID NO: 495148 - DNA, 30 bp, Artificial Sequence
  Synthetic oligonucleotide
tgctcctgttggcggcaaaaatactcgttc

SEQ ID NO: 495149 - DNA, 30 bp, Artificial Sequence
  Synthetic oligonucleotide
cttggtttatatatgtcactcagctcgttc

SEQ ID NO: 495150 - DNA, 30 bp, Artificial Sequence
  Synthetic oligonucleotide
cgacgggggggccatcgtggcgggaggttc

SEQ ID NO: 495151 - DNA, 30 bp, Artificial Sequence
  Synthetic oligonucleotide
tttctggacggtaggtgcggattacggttc

SEQ ID NO: 495152 - DNA, 30 bp, Artificial Sequence
  Synthetic oligonucleotide
gattctaggcagtttaagaacgagcggttc

SEQ ID NO: 495153 - DNA, 30 bp, Artificial Sequence
  Synthetic oligonucleotide
tccgggatacgctaacatttacggcggttc

SEQ ID NO: 495154 - DNA, 30 bp, Artificial Sequence
  Synthetic oligonucleotide
ttactgaccggaagggccggtcatcggttc

SEQ ID NO: 495155 - DNA, 30 bp, Artificial Sequence
  Synthetic oligonucleotide
gcgctacggatgcattgaaccgctcggttc

SEQ ID NO: 495156 - DNA, 30 bp, Artificial Sequence
  Synthetic oligonucleotide
tgaggacccgcttgggttcagagtcggttc

SEQ ID NO: 495157 - DNA, 30 bp, Artificial Sequence
  Synthetic oligonucleotide
agaaagttataaatcattaagattcggttc

SEQ ID NO: 495158 - DNA, 30 bp, Artificial Sequence
  Synthetic oligonucleotide
gcaaacactcggcgctaatgaatcgggttc

SEQ ID NO: 495159 - DNA, 30 bp, Artificial Sequence
  Synthetic oligonucleotide
ttcaagtctttggtgcggcccttcgggttc

SEQ ID NO: 495160 - DNA, 30 bp, Artificial Sequence
  Synthetic oligonucleotide
gtggcgatggaggggtcatccaaggggttc

SEQ ID NO: 495161 - DNA, 30 bp, Artificial Sequence
  Synthetic oligonucleotide
ttatggctagcgatccccttttgggggttc

SEQ ID NO: 495162 - DNA, 30 bp, Artificial Sequence
  Synthetic oligonucleotide
ctacgggtataattgggggcctgtgggttc

SEQ ID NO: 495163 - DNA, 30 bp, Artificial Sequence
  Synthetic oligonucleotide
tgctaccgagtgaaagggatcggctggttc

SEQ ID NO: 495164 - DNA, 30 bp, Artificial Sequence
  Synthetic oligonucleotide
ggtgggtggatagggccgcaggcgtggttc

SEQ ID NO: 495165 - DNA, 30 bp, Artificial Sequence
  Synthetic oligonucleotide
gaagccagtaattgcaacaccgggtggttc

SEQ ID NO: 495166 - DNA, 30 bp, Artificial Sequence
  Synthetic oligonucleotide
aagcgtatacttcccaaactcgggtggttc

SEQ ID NO: 495167 - DNA, 30 bp, Artificial Sequence
  Synthetic oligonucleotide
actgcgcataactgctcttccctgtggttc

SEQ ID NO: 495168 - DNA, 30 bp, Artificial Sequence
  Synthetic oligonucleotide
gaaagtcgatgctcaattactgattggttc

SEQ ID NO: 495169 - DNA, 30 bp, Artificial Sequence
  Synthetic oligonucleotide
aatttaagatacgtttattctcgttggttc

SEQ ID NO: 495170 - DNA, 30 bp, Artificial Sequence
  Synthetic oligonucleotide
aagtataggtcgcagatatctttttggttc

SEQ ID NO: 495171 - DNA, 30 bp, Artificial Sequence
  Synthetic oligonucleotide
aggagcggtcggtatggttaaaaaatgttc

SEQ ID NO: 495172 - DNA, 30 bp, Artificial Sequence
  Synthetic oligonucleotide
cgattactgttagcacattgttgaatgttc

SEQ ID NO: 495173 - DNA, 30 bp, Artificial Sequence
  Synthetic oligonucleotide
cattaaggtggactgccattttgaatgttc

SEQ ID NO: 495174 - DNA, 30 bp, Artificial Sequence
  Synthetic oligonucleotide
aattgacggctctatttacctcacatgttc

SEQ ID NO: 495175 - DNA, 30 bp, Artificial Sequence
  Synthetic oligonucleotide
tttaagaaaacaacacggggaatcatgttc

SEQ ID NO: 495176 - DNA, 30 bp, Artificial Sequence
  Synthetic oligonucleotide
tttttgataacgggccgctaccatatgttc

SEQ ID NO: 495177 - DNA, 30 bp, Artificial Sequence
  Synthetic oligonucleotide
ttactatgcgcttatatgatatctatgttc

SEQ ID NO: 495178 - DNA, 30 bp, Artificial Sequence
  Synthetic oligonucleotide
gcctggggcgttgggtaattaattatgttc

SEQ ID NO: 495179 - DNA, 30 bp, Artificial Sequence
  Synthetic oligonucleotide
tgaattgtataaccagacctgcggctgttc

SEQ ID NO: 495180 - DNA, 30 bp, Artificial Sequence
  Synthetic oligonucleotide
ccgtcgtaatgtattagcataatgctgttc

SEQ ID NO: 495181 - DNA, 30 bp, Artificial Sequence
  Synthetic oligonucleotide
gcataatcacagtccgcatatcatctgttc

SEQ ID NO: 495182 - DNA, 30 bp, Artificial Sequence
  Synthetic oligonucleotide
accgctcaattctgtgtttctgatctgttc

SEQ ID NO: 495183 - DNA, 30 bp, Artificial Sequence
  Synthetic oligonucleotide
gtctaagtatggtgatactaaactctgttc

SEQ ID NO: 495184 - DNA, 30 bp, Artificial Sequence
  Synthetic oligonucleotide
catgctccaggccagaccaccggtctgttc

SEQ ID NO: 495185 - DNA, 30 bp, Artificial Sequence
  Synthetic oligonucleotide
gcaatacaaagaccctaggactttctgttc

SEQ ID NO: 495186 - DNA, 30 bp, Artificial Sequence
  Synthetic oligonucleotide
tacgaaagtactagacgatcgcgagtgttc

SEQ ID NO: 495187 - DNA, 30 bp, Artificial Sequence
  Synthetic oligonucleotide
gaatctatagtcagctggaaacgcgtgttc

SEQ ID NO: 495188 - DNA, 30 bp, Artificial Sequence
  Synthetic oligonucleotide
acaattgtaggtgaagtggacttcgtgttc

SEQ ID NO: 495189 - DNA, 30 bp, Artificial Sequence
  Synthetic oligonucleotide
ggctgtaagtcgcttcatacgtaggtgttc

SEQ ID NO: 495190 - DNA, 30 bp, Artificial Sequence
  Synthetic oligonucleotide
caatatgcccgtttccgcgggccggtgttc

SEQ ID NO: 495191 - DNA, 30 bp, Artificial Sequence
  Synthetic oligonucleotide
acggtcggtggggtaggcatgccggtgttc

SEQ ID NO: 495192 - DNA, 30 bp, Artificial Sequence
  Synthetic oligonucleotide
ttccttacgccaacgtggccaggggtgttc

SEQ ID NO: 495193 - DNA, 30 bp, Artificial Sequence
  Synthetic oligonucleotide
gtatttgaaacccgcgcctcgggtgtgttc

SEQ ID NO: 495194 - DNA, 30 bp, Artificial Sequence
  Synthetic oligonucleotide
cttcagttaagtacagtgcattgtgtgttc

SEQ ID NO: 495195 - DNA, 30 bp, Artificial Sequence
  Synthetic oligonucleotide
agtgtacttacacgggcagagattgtgttc

SEQ ID NO: 495196 - DNA, 30 bp, Artificial Sequence
  Synthetic oligonucleotide
gcactattcggcgcccaatcaagattgttc

SEQ ID NO: 495197 - DNA, 31 bp, Artificial Sequence
  Synthetic oligonucleotide
gtcagtagatgccagtcatcaaggattgttc

SEQ ID NO: 495198 - DNA, 30 bp, Artificial Sequence
  Synthetic oligonucleotide
tccactatcttgagagaacatttgttgttc

SEQ ID NO: 495199 - DNA, 30 bp, Artificial Sequence
  Synthetic oligonucleotide
ttttgcatacaagatacaggacatttgttc

SEQ ID NO: 495200 - DNA, 30 bp, Artificial Sequence
  Synthetic oligonucleotide
tggttttgttatggcatgcctcatttgttc

SEQ ID NO: 495201 - DNA, 30 bp, Artificial Sequence
  Synthetic oligonucleotide
cgtttacaaagggaatgtaaacgtttgttc

SEQ ID NO: 495202 - DNA, 30 bp, Artificial Sequence
  Synthetic oligonucleotide
cattgaatcataagggtgtatattttgttc

SEQ ID NO: 495203 - DNA, 30 bp, Artificial Sequence
  Synthetic oligonucleotide
tctcaaacgcagcatgcacctaaaaatttc

SEQ ID NO: 495204 - DNA, 30 bp, Artificial Sequence
  Synthetic oligonucleotide
tagcgacaggtcagtgttcaacgaaatttc

SEQ ID NO: 495205 - DNA, 30 bp, Artificial Sequence
  Synthetic oligonucleotide
tcttacagaatatttagagtaggaaatttc

SEQ ID NO: 495206 - DNA, 30 bp, Artificial Sequence
  Synthetic oligonucleotide
gtaacccctcagaatggactactaaatttc

SEQ ID NO: 495207 - DNA, 30 bp, Artificial Sequence
  Synthetic oligonucleotide
atatcaatgcgtttaagcaaggacaatttc

SEQ ID NO: 495208 - DNA, 30 bp, Artificial Sequence
  Synthetic oligonucleotide
gttgtcacaacgatatgagtgacgaatttc

SEQ ID NO: 495209 - DNA, 30 bp, Artificial Sequence
  Synthetic oligonucleotide
gtacttcatgatgtctaatacatgaatttc

SEQ ID NO: 495210 - DNA, 30 bp, Artificial Sequence
  Synthetic oligonucleotide
ggcgagggagcagcaacacgctataatttc

SEQ ID NO: 495211 - DNA, 30 bp, Artificial Sequence
  Synthetic oligonucleotide
ttatcattgtacggcttgtgtattaatttc

SEQ ID NO: 495212 - DNA, 30 bp, Artificial Sequence
  Synthetic oligonucleotide
tggggtaagcgtgccgagctctttaatttc

SEQ ID NO: 495213 - DNA, 30 bp, Artificial Sequence
  Synthetic oligonucleotide
agtactctcctaagtttccgttttaatttc

SEQ ID NO: 495214 - DNA, 30 bp, Artificial Sequence
  Synthetic oligonucleotide
taagaccggtgtctgtgatgttaacatttc

SEQ ID NO: 495215 - DNA, 30 bp, Artificial Sequence
  Synthetic oligonucleotide
attcgcacattgtcttagttggtacatttc

SEQ ID NO: 495216 - DNA, 30 bp, Artificial Sequence
  Synthetic oligonucleotide
gctatagaagctcagcgtatataccatttc

SEQ ID NO: 495217 - DNA, 30 bp, Artificial Sequence
  Synthetic oligonucleotide
tttcaatgcgggtcagagggttgccatttc

SEQ ID NO: 495218 - DNA, 30 bp, Artificial Sequence
  Synthetic oligonucleotide
ttagagaggttccttactggttgccatttc

SEQ ID NO: 495219 - DNA, 30 bp, Artificial Sequence
  Synthetic oligonucleotide
atctagtcagagctttgtaaacagcatttc

SEQ ID NO: 495220 - DNA, 30 bp, Artificial Sequence
  Synthetic oligonucleotide
ggttttgttcgtcttgcataaggtcatttc

SEQ ID NO: 495221 - DNA, 30 bp, Artificial Sequence
  Synthetic oligonucleotide
taattttgcctctttgcactgccagatttc

SEQ ID NO: 495222 - DNA, 30 bp, Artificial Sequence
  Synthetic oligonucleotide
gagtaccggactctgactttgaaggatttc

SEQ ID NO: 495223 - DNA, 30 bp, Artificial Sequence
  Synthetic oligonucleotide
ggccaattcattggtggatgccaggatttc

SEQ ID NO: 495224 - DNA, 30 bp, Artificial Sequence
  Synthetic oligonucleotide
gcataccatgcaaccgacttgctggatttc

SEQ ID NO: 495225 - DNA, 30 bp, Artificial Sequence
  Synthetic oligonucleotide
ctcaacccaagtgttaggtcatctgatttc

SEQ ID NO: 495226 - DNA, 30 bp, Artificial Sequence
  Synthetic oligonucleotide
ataccgtttgagatgcggttggaatatttc

SEQ ID NO: 495227 - DNA, 30 bp, Artificial Sequence
  Synthetic oligonucleotide
tggaatacccgcgcacgcccagtatatttc

SEQ ID NO: 495228 - DNA, 30 bp, Artificial Sequence
  Synthetic oligonucleotide
attttgttgatagggaagtgggcgtatttc

SEQ ID NO: 495229 - DNA, 30 bp, Artificial Sequence
  Synthetic oligonucleotide
ctaggtatagaatagatttgagattatttc

SEQ ID NO: 495230 - DNA, 30 bp, Artificial Sequence
  Synthetic oligonucleotide
gatggtcgctcgtggagtagctcttatttc

SEQ ID NO: 495231 - DNA, 30 bp, Artificial Sequence
  Synthetic oligonucleotide
aagtctatattcttggctgataaaactttc

SEQ ID NO: 495232 - DNA, 30 bp, Artificial Sequence
  Synthetic oligonucleotide
ggatttttaaaaagcaagagatacactttc

SEQ ID NO: 495233 - DNA, 30 bp, Artificial Sequence
  Synthetic oligonucleotide
atgcggagttcagtatgacgctgcactttc

SEQ ID NO: 495234 - DNA, 30 bp, Artificial Sequence
  Synthetic oligonucleotide
cggtctcagcgacctgtaaataagactttc

SEQ ID NO: 495235 - DNA, 30 bp, Artificial Sequence
  Synthetic oligonucleotide
tagtgcatgtcaccttgcaggctgactttc

SEQ ID NO: 495236 - DNA, 30 bp, Artificial Sequence
  Synthetic oligonucleotide
ccgtaatccgctgcggtctgtttgactttc

SEQ ID NO: 495237 - DNA, 30 bp, Artificial Sequence
  Synthetic oligonucleotide
ctataaatacgtcagcacaagacacctttc

SEQ ID NO: 495238 - DNA, 30 bp, Artificial Sequence
  Synthetic oligonucleotide
gctgcggctagcaccgggggtacccctttc

SEQ ID NO: 495239 - DNA, 30 bp, Artificial Sequence
  Synthetic oligonucleotide
tagatgttatgggtcgaacttagccctttc

SEQ ID NO: 495240 - DNA, 30 bp, Artificial Sequence
  Synthetic oligonucleotide
atttagatgctgatggtatacttgcctttc

SEQ ID NO: 495241 - DNA, 30 bp, Artificial Sequence
  Synthetic oligonucleotide
atcatatagctactgtaaatttatcctttc

SEQ ID NO: 495242 - DNA, 30 bp, Artificial Sequence
  Synthetic oligonucleotide
ccttatatggtccgaaatggctcagctttc

SEQ ID NO: 495243 - DNA, 30 bp, Artificial Sequence
  Synthetic oligonucleotide
acctgcgccagcaaagagcataacgctttc

SEQ ID NO: 495244 - DNA, 30 bp, Artificial Sequence
  Synthetic oligonucleotide
ggtctgggtctagccgactggtacgctttc

SEQ ID NO: 495245 - DNA, 30 bp, Artificial Sequence
  Synthetic oligonucleotide
agttccatgtgatccaggaaagccgctttc

SEQ ID NO: 495246 - DNA, 30 bp, Artificial Sequence
  Synthetic oligonucleotide
tctcgtatttatacgtagatgtaggctttc

SEQ ID NO: 495247 - DNA, 30 bp, Artificial Sequence
  Synthetic oligonucleotide
actgccagtacctgccggatactggctttc

SEQ ID NO: 495248 - DNA, 30 bp, Artificial Sequence
  Synthetic oligonucleotide
ttaaataagatcatgagacttgtggctttc

SEQ ID NO: 495249 - DNA, 30 bp, Artificial Sequence
  Synthetic oligonucleotide
gtgtatgggtacagatttgaaagtgctttc

SEQ ID NO: 495250 - DNA, 30 bp, Artificial Sequence
  Synthetic oligonucleotide
gcgggatagttcgctaacgcttttgctttc

SEQ ID NO: 495251 - DNA, 30 bp, Artificial Sequence
  Synthetic oligonucleotide
ctcccgagtagcgagactatggcctctttc

SEQ ID NO: 495252 - DNA, 30 bp, Artificial Sequence
  Synthetic oligonucleotide
aaaccagcaaatagcgcgtctaggtctttc

SEQ ID NO: 495253 - DNA, 30 bp, Artificial Sequence
  Synthetic oligonucleotide
attcttgggcatcaggtctttaggtctttc

SEQ ID NO: 495254 - DNA, 30 bp, Artificial Sequence
  Synthetic oligonucleotide
cgcgaatctgcgtctctaccagggtctttc

SEQ ID NO: 495255 - DNA, 30 bp, Artificial Sequence
  Synthetic oligonucleotide
ttatttgttgccccgggggacagttctttc

SEQ ID NO: 495256 - DNA, 30 bp, Artificial Sequence
  Synthetic oligonucleotide
tttctcaggagctgtcgggaataaagtttc

SEQ ID NO: 495257 - DNA, 30 bp, Artificial Sequence
  Synthetic oligonucleotide
ggaagcctttatcgtttgtacagcagtttc

SEQ ID NO: 495258 - DNA, 30 bp, Artificial Sequence
  Synthetic oligonucleotide
aattaatctaacggtcggatcgtcagtttc

SEQ ID NO: 495259 - DNA, 30 bp, Artificial Sequence
  Synthetic oligonucleotide
atagggattctccggggcctaaagagtttc

SEQ ID NO: 495260 - DNA, 30 bp, Artificial Sequence
  Synthetic oligonucleotide
ttgaccataacgcaactggccgcgagtttc

SEQ ID NO: 495261 - DNA, 30 bp, Artificial Sequence
  Synthetic oligonucleotide
ttacaaaccggtttagttttggttagtttc

SEQ ID NO: 495262 - DNA, 30 bp, Artificial Sequence
  Synthetic oligonucleotide
accgtattaatattcgcaggtacacgtttc

SEQ ID NO: 495263 - DNA, 30 bp, Artificial Sequence
  Synthetic oligonucleotide
aagcttaataggagtactttttcacgtttc

SEQ ID NO: 495264 - DNA, 30 bp, Artificial Sequence
  Synthetic oligonucleotide
tgctcctaggggagtaatccaatacgtttc

SEQ ID NO: 495265 - DNA, 30 bp, Artificial Sequence
  Synthetic oligonucleotide
ggaatattgtagccgtaacaaaaccgtttc

SEQ ID NO: 495266 - DNA, 30 bp, Artificial Sequence
  Synthetic oligonucleotide
atttctgcatggggcgtagcgcagcgtttc

SEQ ID NO: 495267 - DNA, 30 bp, Artificial Sequence
  Synthetic oligonucleotide
gaatacgcgggctacctcttcgaaggtttc

SEQ ID NO: 495268 - DNA, 30 bp, Artificial Sequence
  Synthetic oligonucleotide
accggagattggtcttacaatagaggtttc

SEQ ID NO: 495269 - DNA, 30 bp, Artificial Sequence
  Synthetic oligonucleotide
ttcgcggttgaaacgactcttagaggtttc

SEQ ID NO: 495270 - DNA, 30 bp, Artificial Sequence
  Synthetic oligonucleotide
ttagtttcaattacggatgattacggtttc

SEQ ID NO: 495271 - DNA, 30 bp, Artificial Sequence
  Synthetic oligonucleotide
gagtcctctaacgtgcttttcagcggtttc

SEQ ID NO: 495272 - DNA, 30 bp, Artificial Sequence
  Synthetic oligonucleotide
aagttacacgtttatgggatgcatggtttc

SEQ ID NO: 495273 - DNA, 30 bp, Artificial Sequence
  Synthetic oligonucleotide
ccgtggggcagctctcagcggccatgtttc

SEQ ID NO: 495274 - DNA, 30 bp, Artificial Sequence
  Synthetic oligonucleotide
ggctgagtgacaggtctcagggtatgtttc

SEQ ID NO: 495275 - DNA, 30 bp, Artificial Sequence
  Synthetic oligonucleotide
gttagcgacgcaacgacgtgaccgtgtttc

SEQ ID NO: 495276 - DNA, 30 bp, Artificial Sequence
  Synthetic oligonucleotide
gctcgtatcttcccagaaaatctaattttc

SEQ ID NO: 495277 - DNA, 30 bp, Artificial Sequence
  Synthetic oligonucleotide
caacttattggggccaccggcggcattttc

SEQ ID NO: 495278 - DNA, 30 bp, Artificial Sequence
  Synthetic oligonucleotide
cgctggttctcacagtggacttgcattttc

SEQ ID NO: 495279 - DNA, 30 bp, Artificial Sequence
  Synthetic oligonucleotide
tggaattctcaaccgccattaaagattttc

SEQ ID NO: 495280 - DNA, 30 bp, Artificial Sequence
  Synthetic oligonucleotide
caggaggccctgagcccgcatacgattttc

SEQ ID NO: 495281 - DNA, 30 bp, Artificial Sequence
  Synthetic oligonucleotide
gtgatgtctttatatccaatagaccttttc

SEQ ID NO: 495282 - DNA, 30 bp, Artificial Sequence
  Synthetic oligonucleotide
gaacccagtccgaaccacccgcggcttttc

SEQ ID NO: 495283 - DNA, 30 bp, Artificial Sequence
  Synthetic oligonucleotide
tacgaggaagagcatcacaatcggcttttc

SEQ ID NO: 495284 - DNA, 31 bp, Artificial Sequence
  Synthetic oligonucleotide
caccactggcagggcgctctgagatcttttc

SEQ ID NO: 495285 - DNA, 30 bp, Artificial Sequence
  Synthetic oligonucleotide
taattctagtctgtcttttactcagttttc

SEQ ID NO: 495286 - DNA, 30 bp, Artificial Sequence
  Synthetic oligonucleotide
acgcgttaaaattctgatcaatgagttttc

SEQ ID NO: 495287 - DNA, 30 bp, Artificial Sequence
  Synthetic oligonucleotide
ttcacgttcttgcgcttgttaatagttttc

SEQ ID NO: 495288 - DNA, 30 bp, Artificial Sequence
  Synthetic oligonucleotide
ggggggcttgcctctattcgtttagttttc

SEQ ID NO: 495289 - DNA, 30 bp, Artificial Sequence
  Synthetic oligonucleotide
gctcttgcctagacagcactgagcgttttc

SEQ ID NO: 495290 - DNA, 30 bp, Artificial Sequence
  Synthetic oligonucleotide
gttataaagccccgtttgtagtgcgttttc

SEQ ID NO: 495291 - DNA, 30 bp, Artificial Sequence
  Synthetic oligonucleotide
aaaattaggcgggaggaatattcggttttc

SEQ ID NO: 495292 - DNA, 30 bp, Artificial Sequence
  Synthetic oligonucleotide
aaaacggcgcttagactctttaatgttttc

SEQ ID NO: 495293 - DNA, 30 bp, Artificial Sequence
  Synthetic oligonucleotide
aaggatcccctaatgtttacctgatttttc

SEQ ID NO: 495294 - DNA, 30 bp, Artificial Sequence
  Synthetic oligonucleotide
atgggttcattaatttcggctaagtttttc

SEQ ID NO: 495295 - DNA, 30 bp, Artificial Sequence
  Synthetic oligonucleotide
gggggaatagccgtagcaatttcttttttc

SEQ ID NO: 495296 - DNA, 30 bp, Artificial Sequence
  Synthetic oligonucleotide
tgtatagatccgggatctatgttttttttc

SEQ ID NO: 495297 - DNA, 30 bp, Artificial Sequence
  Synthetic oligonucleotide
tccagggtgatgcccgaatgagaaaaaaag

SEQ ID NO: 495298 - DNA, 30 bp, Artificial Sequence
  Synthetic oligonucleotide
tttctgttgaaacagtatcgggacaaaaag

SEQ ID NO: 495299 - DNA, 30 bp, Artificial Sequence
  Synthetic oligonucleotide
cttctatttactttgacgtaagctaaaaag

SEQ ID NO: 495300 - DNA, 30 bp, Artificial Sequence
  Synthetic oligonucleotide
cccccgccagactctaggggtccgcaaaag

SEQ ID NO: 495301 - DNA, 30 bp, Artificial Sequence
  Synthetic oligonucleotide
agattctgaaccggttggaccggtcaaaag

SEQ ID NO: 495302 - DNA, 30 bp, Artificial Sequence
  Synthetic oligonucleotide
cgtacatgtgatgatgcaagccgagaaaag

SEQ ID NO: 495303 - DNA, 30 bp, Artificial Sequence
  Synthetic oligonucleotide
tatttatgaaatgatttttgtggagaaaag

SEQ ID NO: 495304 - DNA, 30 bp, Artificial Sequence
  Synthetic oligonucleotide
ggttacaatcatgggtgtcgaagggaaaag

SEQ ID NO: 495305 - DNA, 30 bp, Artificial Sequence
  Synthetic oligonucleotide
aatcagtctgatgcagaccaaattgaaaag

SEQ ID NO: 495306 - DNA, 30 bp, Artificial Sequence
  Synthetic oligonucleotide
ccagaaaggatctttgaagcctcataaaag

SEQ ID NO: 495307 - DNA, 30 bp, Artificial Sequence
  Synthetic oligonucleotide
atggcgcattcttttagtgccagataaaag

SEQ ID NO: 495308 - DNA, 30 bp, Artificial Sequence
  Synthetic oligonucleotide
atacgtttgtatagcggttgggtataaaag

SEQ ID NO: 495309 - DNA, 30 bp, Artificial Sequence
  Synthetic oligonucleotide
ggtctttaccatataaggttcaactaaaag

SEQ ID NO: 495310 - DNA, 30 bp, Artificial Sequence
  Synthetic oligonucleotide
tgcaaccacaggatcacaaaaggctaaaag

SEQ ID NO: 495311 - DNA, 30 bp, Artificial Sequence
  Synthetic oligonucleotide
atcctgcatgccccgttatccatctaaaag

SEQ ID NO: 495312 - DNA, 30 bp, Artificial Sequence
  Synthetic oligonucleotide
gctcgtggtgtgccaaaatccgggtaaaag

SEQ ID NO: 495313 - DNA, 30 bp, Artificial Sequence
  Synthetic oligonucleotide
tcccctcctaacctggccatagattaaaag

SEQ ID NO: 495314 - DNA, 29 bp, Artificial Sequence
  Synthetic oligonucleotide
caagggccttctcacatcgcccaacaaag

SEQ ID NO: 495315 - DNA, 30 bp, Artificial Sequence
  Synthetic oligonucleotide
cacgccctgatcataacctctgcaacaaag

SEQ ID NO: 495316 - DNA, 30 bp, Artificial Sequence
  Synthetic oligonucleotide
taagttttatgggccgaattcggaacaaag

SEQ ID NO: 495317 - DNA, 30 bp, Artificial Sequence
  Synthetic oligonucleotide
cttggccaagactcaggtgagcagacaaag

SEQ ID NO: 495318 - DNA, 30 bp, Artificial Sequence
  Synthetic oligonucleotide
accctgttgcgacacgccttgggaccaaag

SEQ ID NO: 495319 - DNA, 30 bp, Artificial Sequence
  Synthetic oligonucleotide
ttagttattctcccgggggagatcccaaag

SEQ ID NO: 495320 - DNA, 30 bp, Artificial Sequence
  Synthetic oligonucleotide
ttctgtggggcactaagtttaaatccaaag

SEQ ID NO: 495321 - DNA, 30 bp, Artificial Sequence
  Synthetic oligonucleotide
cgttgtaaaaggaatggaagttctccaaag

SEQ ID NO: 495322 - DNA, 30 bp, Artificial Sequence
  Synthetic oligonucleotide
aacacgatccgtcagatcttaggtccaaag

SEQ ID NO: 495323 - DNA, 30 bp, Artificial Sequence
  Synthetic oligonucleotide
ccagatccgcttattgtgccttaagcaaag

SEQ ID NO: 495324 - DNA, 30 bp, Artificial Sequence
  Synthetic oligonucleotide
tatttggagcgctctatcttgtcagcaaag

SEQ ID NO: 495325 - DNA, 30 bp, Artificial Sequence
  Synthetic oligonucleotide
cccggaaaattgtgctaacgcagagcaaag

SEQ ID NO: 495326 - DNA, 30 bp, Artificial Sequence
  Synthetic oligonucleotide
tgcgtcgagtgtctcacagttattgcaaag

SEQ ID NO: 495327 - DNA, 31 bp, Artificial Sequence
  Synthetic oligonucleotide
aaatagctttggacattgcgacgaatcaaag

SEQ ID NO: 495328 - DNA, 30 bp, Artificial Sequence
  Synthetic oligonucleotide
ttatgagcgtcccctttgggacactcaaag

SEQ ID NO: 495329 - DNA, 30 bp, Artificial Sequence
  Synthetic oligonucleotide
tgcgagtctttctaggtgggctactcaaag

SEQ ID NO: 495330 - DNA, 30 bp, Artificial Sequence
  Synthetic oligonucleotide
gtaactgtacctgtcaggggtgcctcaaag

SEQ ID NO: 495331 - DNA, 30 bp, Artificial Sequence
  Synthetic oligonucleotide
gtcactgacgtggtaattttatcctcaaag

SEQ ID NO: 495332 - DNA, 30 bp, Artificial Sequence
  Synthetic oligonucleotide
gtacattggtgtgtgacgttcgagtcaaag

SEQ ID NO: 495333 - DNA, 30 bp, Artificial Sequence
  Synthetic oligonucleotide
aactaattctggacgcacatgtagtcaaag

SEQ ID NO: 495334 - DNA, 30 bp, Artificial Sequence
  Synthetic oligonucleotide
ttatgccatatacgcgtgctagtttcaaag

SEQ ID NO: 495335 - DNA, 30 bp, Artificial Sequence
  Synthetic oligonucleotide
aaccgcgtgccagctgtttaattttcaaag

SEQ ID NO: 495336 - DNA, 30 bp, Artificial Sequence
  Synthetic oligonucleotide
cctccatgcggctttttataataaagaaag

SEQ ID NO: 495337 - DNA, 30 bp, Artificial Sequence
  Synthetic oligonucleotide
gttttgatgtttctacgcgggtaaagaaag

SEQ ID NO: 495338 - DNA, 30 bp, Artificial Sequence
  Synthetic oligonucleotide
atgtcacgctggattatttgagtaagaaag

SEQ ID NO: 495339 - DNA, 30 bp, Artificial Sequence
  Synthetic oligonucleotide
gatttataatgttgcttctattccagaaag

SEQ ID NO: 495340 - DNA, 30 bp, Artificial Sequence
  Synthetic oligonucleotide
ggtgatttcataattgttggttgcagaaag

SEQ ID NO: 495341 - DNA, 30 bp, Artificial Sequence
  Synthetic oligonucleotide
gcaacgctcagcccgccacggtctagaaag

SEQ ID NO: 495342 - DNA, 30 bp, Artificial Sequence
  Synthetic oligonucleotide
ttattctgtggaccgtgcctttctagaaag

SEQ ID NO: 495343 - DNA, 30 bp, Artificial Sequence
  Synthetic oligonucleotide
tccgttcaatttggacatttgcggcgaaag

SEQ ID NO: 495344 - DNA, 30 bp, Artificial Sequence
  Synthetic oligonucleotide
tgtagataaacccatatgattgtaggaaag

SEQ ID NO: 495345 - DNA, 30 bp, Artificial Sequence
  Synthetic oligonucleotide
aaacgcaccgcctatccgagtattggaaag

SEQ ID NO: 495346 - DNA, 30 bp, Artificial Sequence
  Synthetic oligonucleotide
gtgggtgatggcgccttccatgaatgaaag

SEQ ID NO: 495347 - DNA, 30 bp, Artificial Sequence
  Synthetic oligonucleotide
gtataaccctcagcgtggcactagtgaaag

SEQ ID NO: 495348 - DNA, 30 bp, Artificial Sequence
  Synthetic oligonucleotide
gcactttaaccctgttcacagcattgaaag

SEQ ID NO: 495349 - DNA, 30 bp, Artificial Sequence
  Synthetic oligonucleotide
aattgcaggcttgaacgcgctcaaataaag

SEQ ID NO: 495350 - DNA, 30 bp, Artificial Sequence
  Synthetic oligonucleotide
cgtatttttagttattctttaatactaaag

SEQ ID NO: 495351 - DNA, 30 bp, Artificial Sequence
  Synthetic oligonucleotide
cggcctgggcggtcacactctaggctaaag

SEQ ID NO: 495352 - DNA, 30 bp, Artificial Sequence
  Synthetic oligonucleotide
gcaccaacagagcagctttgctggctaaag

SEQ ID NO: 495353 - DNA, 30 bp, Artificial Sequence
  Synthetic oligonucleotide
aaactcaggtccaggttgtttatgctaaag

SEQ ID NO: 495354 - DNA, 30 bp, Artificial Sequence
  Synthetic oligonucleotide
tctggaccggttttcgttacaactctaaag

SEQ ID NO: 495355 - DNA, 30 bp, Artificial Sequence
  Synthetic oligonucleotide
agacgccgctacgagtctgttacagtaaag

SEQ ID NO: 495356 - DNA, 30 bp, Artificial Sequence
  Synthetic oligonucleotide
tgtatgtctatgtggggctatgcagtaaag

SEQ ID NO: 495357 - DNA, 30 bp, Artificial Sequence
  Synthetic oligonucleotide
aatttttcctatggagctaaaagagtaaag

SEQ ID NO: 495358 - DNA, 30 bp, Artificial Sequence
  Synthetic oligonucleotide
cctattacggaaatgacgcgcctcgtaaag

SEQ ID NO: 495359 - DNA, 30 bp, Artificial Sequence
  Synthetic oligonucleotide
tcgtgggtcccgatggtttagacggtaaag

SEQ ID NO: 495360 - DNA, 30 bp, Artificial Sequence
  Synthetic oligonucleotide
tgcccgttggggtgtgtactaaatgtaaag

SEQ ID NO: 495361 - DNA, 30 bp, Artificial Sequence
  Synthetic oligonucleotide
ttatctgctgtctcggcatggtttgtaaag

SEQ ID NO: 495362 - DNA, 30 bp, Artificial Sequence
  Synthetic oligonucleotide
aggggatcgcagcgccctcagaacttaaag

SEQ ID NO: 495363 - DNA, 30 bp, Artificial Sequence
  Synthetic oligonucleotide
gtcttacagttctgattctgagagttaaag

SEQ ID NO: 495364 - DNA, 30 bp, Artificial Sequence
  Synthetic oligonucleotide
aatcgctcttcttgagacacggcgttaaag

SEQ ID NO: 495365 - DNA, 30 bp, Artificial Sequence
  Synthetic oligonucleotide
gttgctacgcagatttctacggcgttaaag

SEQ ID NO: 495366 - DNA, 30 bp, Artificial Sequence
  Synthetic oligonucleotide
gacgcgttggatccagcttcttcgttaaag

SEQ ID NO: 495367 - DNA, 30 bp, Artificial Sequence
  Synthetic oligonucleotide
actatctacgtgccttcagatcatttaaag

SEQ ID NO: 495368 - DNA, 30 bp, Artificial Sequence
  Synthetic oligonucleotide
tataatgtccaaatggtacgggctttaaag

SEQ ID NO: 495369 - DNA, 30 bp, Artificial Sequence
  Synthetic oligonucleotide
tatccctgcccaattatggcgattttaaag

SEQ ID NO: 495370 - DNA, 30 bp, Artificial Sequence
  Synthetic oligonucleotide
gccgagttttctctctcggttggaaacaag

SEQ ID NO: 495371 - DNA, 30 bp, Artificial Sequence
  Synthetic oligonucleotide
cgagccaacctgtcctatatgtcccacaag

SEQ ID NO: 495372 - DNA, 30 bp, Artificial Sequence
  Synthetic oligonucleotide
acgctgtcttgggggcaacaaggccacaag

SEQ ID NO: 495373 - DNA, 30 bp, Artificial Sequence
  Synthetic oligonucleotide
caactttatatcgaaactgtcgtccacaag

SEQ ID NO: 495374 - DNA, 30 bp, Artificial Sequence
  Synthetic oligonucleotide
tccagaagtaggacttgggtgtatcacaag

SEQ ID NO: 495375 - DNA, 30 bp, Artificial Sequence
  Synthetic oligonucleotide
tctcgccagcgctgggacgctctagacaag

SEQ ID NO: 495376 - DNA, 30 bp, Artificial Sequence
  Synthetic oligonucleotide
cctccattcccgatatcaggcagcgacaag

SEQ ID NO: 495377 - DNA, 30 bp, Artificial Sequence
  Synthetic oligonucleotide
cgtcacagctgaaaagatggattcgacaag

SEQ ID NO: 495378 - DNA, 30 bp, Artificial Sequence
  Synthetic oligonucleotide
taataacacattttttaagtcttcgacaag

SEQ ID NO: 495379 - DNA, 30 bp, Artificial Sequence
  Synthetic oligonucleotide
cggaataagaggaaagccgtaaaggacaag

SEQ ID NO: 495380 - DNA, 30 bp, Artificial Sequence
  Synthetic oligonucleotide
attagtgggtttagtagattaagggacaag

SEQ ID NO: 495381 - DNA, 30 bp, Artificial Sequence
  Synthetic oligonucleotide
cctatgagatatcggtgtcactcatacaag

SEQ ID NO: 495382 - DNA, 30 bp, Artificial Sequence
  Synthetic oligonucleotide
cggcccatttcatcctatactaagtacaag

SEQ ID NO: 495383 - DNA, 30 bp, Artificial Sequence
  Synthetic oligonucleotide
acttcgtagaagcgcacacggtagtacaag

SEQ ID NO: 495384 - DNA, 30 bp, Artificial Sequence
  Synthetic oligonucleotide
ttctggggcagtaatcttgacacttacaag

SEQ ID NO: 495385 - DNA, 30 bp, Artificial Sequence
  Synthetic oligonucleotide
gaagaagggtggatacgcgcgtgaaccaag

SEQ ID NO: 495386 - DNA, 30 bp, Artificial Sequence
  Synthetic oligonucleotide
gtttactgactaatgcaacttgtaaccaag

SEQ ID NO: 495387 - DNA, 30 bp, Artificial Sequence
  Synthetic oligonucleotide
cacgagctgggaggcgatcatcctaccaag

SEQ ID NO: 495388 - DNA, 30 bp, Artificial Sequence
  Synthetic oligonucleotide
cacgcggaattgtgtcgctattgacccaag

SEQ ID NO: 495389 - DNA, 30 bp, Artificial Sequence
  Synthetic oligonucleotide
aacaaatgtagtgcccgggcttgtcccaag

SEQ ID NO: 495390 - DNA, 30 bp, Artificial Sequence
  Synthetic oligonucleotide
aactctgggcgtgcaggactggcagccaag

SEQ ID NO: 495391 - DNA, 30 bp, Artificial Sequence
  Synthetic oligonucleotide
tgtgcgctttgctctcgggaaatagccaag

SEQ ID NO: 495392 - DNA, 30 bp, Artificial Sequence
  Synthetic oligonucleotide
tgcctctcaagggtaattcggttggccaag

SEQ ID NO: 495393 - DNA, 30 bp, Artificial Sequence
  Synthetic oligonucleotide
tatgggcgttccgcctcgagggatgccaag

SEQ ID NO: 495394 - DNA, 30 bp, Artificial Sequence
  Synthetic oligonucleotide
tgacacctatactccaaattttatgccaag

SEQ ID NO: 495395 - DNA, 30 bp, Artificial Sequence
  Synthetic oligonucleotide
aaatgtacgcacatgttaatctaatccaag

SEQ ID NO: 495396 - DNA, 30 bp, Artificial Sequence
  Synthetic oligonucleotide
ttaatcgggagcccgactaatgggtccaag

SEQ ID NO: 495397 - DNA, 30 bp, Artificial Sequence
  Synthetic oligonucleotide
gggttaaccggtggaatctgcggttccaag

SEQ ID NO: 495398 - DNA, 30 bp, Artificial Sequence
  Synthetic oligonucleotide
acctatttgtacgtggtaaacaacagcaag

SEQ ID NO: 495399 - DNA, 30 bp, Artificial Sequence
  Synthetic oligonucleotide
tcgcaggcatgctgtggggacaccagcaag

SEQ ID NO: 495400 - DNA, 30 bp, Artificial Sequence
  Synthetic oligonucleotide
taagacgagcctcagcgctggactagcaag

SEQ ID NO: 495401 - DNA, 30 bp, Artificial Sequence
  Synthetic oligonucleotide
gtggtactgcagcctgcaagttgtagcaag

SEQ ID NO: 495402 - DNA, 30 bp, Artificial Sequence
  Synthetic oligonucleotide
ggaacgcaacggataccaaatcgacgcaag

SEQ ID NO: 495403 - DNA, 30 bp, Artificial Sequence
  Synthetic oligonucleotide
tagaaggcgacacctctgcttggacgcaag

SEQ ID NO: 495404 - DNA, 30 bp, Artificial Sequence
  Synthetic oligonucleotide
cgtccctgttcgaaattcctggtacgcaag

SEQ ID NO: 495405 - DNA, 30 bp, Artificial Sequence
  Synthetic oligonucleotide
tgacctgggatgggactaaaaacgcgcaag

SEQ ID NO: 495406 - DNA, 30 bp, Artificial Sequence
  Synthetic oligonucleotide
gaagccgtcagcgacccatcggatcgcaag

SEQ ID NO: 495407 - DNA, 30 bp, Artificial Sequence
  Synthetic oligonucleotide
gtagaagttccatgacattgcactcgcaag

SEQ ID NO: 495408 - DNA, 30 bp, Artificial Sequence
  Synthetic oligonucleotide
atctgtggttaatggttcaattgtcgcaag

SEQ ID NO: 495409 - DNA, 30 bp, Artificial Sequence
  Synthetic oligonucleotide
taatgaaaagtactgcggtattgtcgcaag

SEQ ID NO: 495410 - DNA, 30 bp, Artificial Sequence
  Synthetic oligonucleotide
agagattcgaaaatcaaccctagtggcaag

SEQ ID NO: 495411 - DNA, 30 bp, Artificial Sequence
  Synthetic oligonucleotide
gacgggctgcaaatggtgtgccaatgcaag

SEQ ID NO: 495412 - DNA, 30 bp, Artificial Sequence
  Synthetic oligonucleotide
cagcactatttttagacaccgtcatgcaag

SEQ ID NO: 495413 - DNA, 30 bp, Artificial Sequence
  Synthetic oligonucleotide
gatggatcttactaacaatccatctgcaag

SEQ ID NO: 495414 - DNA, 30 bp, Artificial Sequence
  Synthetic oligonucleotide
cctgcccctgggtataaggcacggtgcaag

SEQ ID NO: 495415 - DNA, 30 bp, Artificial Sequence
  Synthetic oligonucleotide
agacttgcaggcaccagcgcagggtgcaag

SEQ ID NO: 495416 - DNA, 30 bp, Artificial Sequence
  Synthetic oligonucleotide
gtgagtataggtagaagctttcgttgcaag

SEQ ID NO: 495417 - DNA, 30 bp, Artificial Sequence
  Synthetic oligonucleotide
ttctatgtaaatggatatgttttttgcaag

SEQ ID NO: 495418 - DNA, 30 bp, Artificial Sequence
  Synthetic oligonucleotide
tgtacataacggtagtaggagataatcaag

SEQ ID NO: 495419 - DNA, 30 bp, Artificial Sequence
  Synthetic oligonucleotide
tctgacattgcagtggcagcgaccatcaag

SEQ ID NO: 495420 - DNA, 30 bp, Artificial Sequence
  Synthetic oligonucleotide
cccatcatcggtcagcagcacccgatcaag

SEQ ID NO: 495421 - DNA, 30 bp, Artificial Sequence
  Synthetic oligonucleotide
caataaatcgaggccgatcaaatgatcaag

SEQ ID NO: 495422 - DNA, 30 bp, Artificial Sequence
  Synthetic oligonucleotide
caaaaggccgttttaggctaaactatcaag

SEQ ID NO: 495423 - DNA, 30 bp, Artificial Sequence
  Synthetic oligonucleotide
aagtctcaggctaaatttgatggtatcaag

SEQ ID NO: 495424 - DNA, 30 bp, Artificial Sequence
  Synthetic oligonucleotide
ccactgggcttccggacgcgttgtatcaag

SEQ ID NO: 495425 - DNA, 30 bp, Artificial Sequence
  Synthetic oligonucleotide
tataattgactctaatagacaattatcaag

SEQ ID NO: 495426 - DNA, 30 bp, Artificial Sequence
  Synthetic oligonucleotide
cttgcacaatacggatccgatttactcaag

SEQ ID NO: 495427 - DNA, 30 bp, Artificial Sequence
  Synthetic oligonucleotide
gaatgagactacttgagccattgtctcaag

SEQ ID NO: 495428 - DNA, 30 bp, Artificial Sequence
  Synthetic oligonucleotide
agcataatgtacataaccgtgggagtcaag

SEQ ID NO: 495429 - DNA, 30 bp, Artificial Sequence
  Synthetic oligonucleotide
tgcatattaaggggcctaggcagcgtcaag

SEQ ID NO: 495430 - DNA, 30 bp, Artificial Sequence
  Synthetic oligonucleotide
cggtgagccttcgaagctattgtcgtcaag

SEQ ID NO: 495431 - DNA, 30 bp, Artificial Sequence
  Synthetic oligonucleotide
taaagtactatgaccgggatactggtcaag

SEQ ID NO: 495432 - DNA, 30 bp, Artificial Sequence
  Synthetic oligonucleotide
agggttgcgcagcaacggttattggtcaag

SEQ ID NO: 495433 - DNA, 30 bp, Artificial Sequence
  Synthetic oligonucleotide
cagctcttgagattagaatcaggtgtcaag

SEQ ID NO: 495434 - DNA, 30 bp, Artificial Sequence
  Synthetic oligonucleotide
gcacctaaagttaattatggttaattcaag

SEQ ID NO: 495435 - DNA, 30 bp, Artificial Sequence
  Synthetic oligonucleotide
cttcgtagtccttctttactggacttcaag

SEQ ID NO: 495436 - DNA, 30 bp, Artificial Sequence
  Synthetic oligonucleotide
gcggacacatccctgaagggggagttcaag

SEQ ID NO: 495437 - DNA, 30 bp, Artificial Sequence
  Synthetic oligonucleotide
gccttctttcgttctctgaaattgaagaag

SEQ ID NO: 495438 - DNA, 30 bp, Artificial Sequence
  Synthetic oligonucleotide
atcttgtatcttgtccggtgcaaacagaag

SEQ ID NO: 495439 - DNA, 30 bp, Artificial Sequence
  Synthetic oligonucleotide
taatttgactcatgttgatcagcacagaag

SEQ ID NO: 495440 - DNA, 30 bp, Artificial Sequence
  Synthetic oligonucleotide
tctcaggagatgcagacacagtcgcagaag

SEQ ID NO: 495441 - DNA, 30 bp, Artificial Sequence
  Synthetic oligonucleotide
agtgatacgctccgagcactgggtcagaag

SEQ ID NO: 495442 - DNA, 30 bp, Artificial Sequence
  Synthetic oligonucleotide
atttgattactgatactcacacttcagaag

SEQ ID NO: 495443 - DNA, 30 bp, Artificial Sequence
  Synthetic oligonucleotide
gggatatctgatggtaaagtacttcagaag

SEQ ID NO: 495444 - DNA, 30 bp, Artificial Sequence
  Synthetic oligonucleotide
caaaggtagcaaatcaccaatagtgagaag

SEQ ID NO: 495445 - DNA, 30 bp, Artificial Sequence
  Synthetic oligonucleotide
aggtgttgcatgtgacgcgtcgcatagaag

SEQ ID NO: 495446 - DNA, 30 bp, Artificial Sequence
  Synthetic oligonucleotide
gttgggcgttcattttagtagcactagaag

SEQ ID NO: 495447 - DNA, 30 bp, Artificial Sequence
  Synthetic oligonucleotide
gaagcgctcccgagagtccggagctagaag

SEQ ID NO: 495448 - DNA, 30 bp, Artificial Sequence
  Synthetic oligonucleotide
ctctcaccaggcgttcattatctctagaag

SEQ ID NO: 495449 - DNA, 30 bp, Artificial Sequence
  Synthetic oligonucleotide
tggataaaccatccgacacggttctagaag

SEQ ID NO: 495450 - DNA, 30 bp, Artificial Sequence
  Synthetic oligonucleotide
gcaagcagtacaacttgcacctggtagaag

SEQ ID NO: 495451 - DNA, 30 bp, Artificial Sequence
  Synthetic oligonucleotide
gtatctgacttgggtgaagcgtggtagaag

SEQ ID NO: 495452 - DNA, 30 bp, Artificial Sequence
  Synthetic oligonucleotide
ggccctagggttttagcgaccgcaacgaag

SEQ ID NO: 495453 - DNA, 31 bp, Artificial Sequence
  Synthetic oligonucleotide
tgcgtgagttacttgaaggcaggcaacgaag

SEQ ID NO: 495454 - DNA, 30 bp, Artificial Sequence
  Synthetic oligonucleotide
tataaactttgtccggtagtcttaacgaag

SEQ ID NO: 495455 - DNA, 30 bp, Artificial Sequence
  Synthetic oligonucleotide
ggttcttgtttaaggctcggttacacgaag

SEQ ID NO: 495456 - DNA, 30 bp, Artificial Sequence
  Synthetic oligonucleotide
gcctttgggttccaaacggggcgcacgaag

SEQ ID NO: 495457 - DNA, 30 bp, Artificial Sequence
  Synthetic oligonucleotide
atttgagccgaaatggctcgccagacgaag

SEQ ID NO: 495458 - DNA, 30 bp, Artificial Sequence
  Synthetic oligonucleotide
ctccggttacctgaccggccttgtacgaag

SEQ ID NO: 495459 - DNA, 30 bp, Artificial Sequence
  Synthetic oligonucleotide
ctcaagaggtgggcacgggccagcccgaag

SEQ ID NO: 495460 - DNA, 30 bp, Artificial Sequence
  Synthetic oligonucleotide
tgcacgaatattaggttgtcagtcccgaag

SEQ ID NO: 495461 - DNA, 30 bp, Artificial Sequence
  Synthetic oligonucleotide
aaaatggcggctcactgttacaatccgaag

SEQ ID NO: 495462 - DNA, 30 bp, Artificial Sequence
  Synthetic oligonucleotide
accgctctaaaagaccctttatatccgaag

SEQ ID NO: 495463 - DNA, 30 bp, Artificial Sequence
  Synthetic oligonucleotide
aatggacctaaattacgtggcactccgaag

SEQ ID NO: 495464 - DNA, 30 bp, Artificial Sequence
  Synthetic oligonucleotide
tttttctgtattcacagtgctagagcgaag

SEQ ID NO: 495465 - DNA, 30 bp, Artificial Sequence
  Synthetic oligonucleotide
cagttttggggaccactctaggtagcgaag

SEQ ID NO: 495466 - DNA, 30 bp, Artificial Sequence
  Synthetic oligonucleotide
ttttacgacaaggttccagctatcgcgaag

SEQ ID NO: 495467 - DNA, 30 bp, Artificial Sequence
  Synthetic oligonucleotide
cggcctagaagtagcatgtgtatcgcgaag

SEQ ID NO: 495468 - DNA, 30 bp, Artificial Sequence
  Synthetic oligonucleotide
tcggggcatggtgaggacccggaggcgaag

SEQ ID NO: 495469 - DNA, 30 bp, Artificial Sequence
  Synthetic oligonucleotide
gtctagacgctagctcactctcgggcgaag

SEQ ID NO: 495470 - DNA, 30 bp, Artificial Sequence
  Synthetic oligonucleotide
gttcaactcgcgcacgatattcatgcgaag

SEQ ID NO: 495471 - DNA, 30 bp, Artificial Sequence
  Synthetic oligonucleotide
cagcgcacccgctgatggattctatcgaag

SEQ ID NO: 495472 - DNA, 30 bp, Artificial Sequence
  Synthetic oligonucleotide
ggttgtacagcaacctgaacggtctcgaag

SEQ ID NO: 495473 - DNA, 30 bp, Artificial Sequence
  Synthetic oligonucleotide
cttagtttcaaacaagacgtaccttcgaag

SEQ ID NO: 495474 - DNA, 30 bp, Artificial Sequence
  Synthetic oligonucleotide
tcccctgtggatcctcatgtggtaaggaag

SEQ ID NO: 495475 - DNA, 30 bp, Artificial Sequence
  Synthetic oligonucleotide
ctgtattattattttagagctttaaggaag

SEQ ID NO: 495476 - DNA, 30 bp, Artificial Sequence
  Synthetic oligonucleotide
tcgcgtcaatttgatagattgcccaggaag

SEQ ID NO: 495477 - DNA, 30 bp, Artificial Sequence
  Synthetic oligonucleotide
caacgaatataaggtgacacctccaggaag

SEQ ID NO: 495478 - DNA, 30 bp, Artificial Sequence
  Synthetic oligonucleotide
aggggaacgagagtaagtaaaatgaggaag

SEQ ID NO: 495479 - DNA, 30 bp, Artificial Sequence
  Synthetic oligonucleotide
agctagttccgagttatcctgaaccggaag

SEQ ID NO: 495480 - DNA, 30 bp, Artificial Sequence
  Synthetic oligonucleotide
gcaactagcttggactctttgagccggaag

SEQ ID NO: 495481 - DNA, 30 bp, Artificial Sequence
  Synthetic oligonucleotide
gtattgactcgatctaccagttgccggaag

SEQ ID NO: 495482 - DNA, 30 bp, Artificial Sequence
  Synthetic oligonucleotide
gactcatctgacgtaatctctatagggaag

SEQ ID NO: 495483 - DNA, 30 bp, Artificial Sequence
  Synthetic oligonucleotide
gtccggctttgttttgtcgggggggggaag

SEQ ID NO: 495484 - DNA, 30 bp, Artificial Sequence
  Synthetic oligonucleotide
gggttaagaggtcaccggtacggtgggaag

SEQ ID NO: 495485 - DNA, 30 bp, Artificial Sequence
  Synthetic oligonucleotide
cgaagctgaacgttactgttactatggaag

SEQ ID NO: 495486 - DNA, 30 bp, Artificial Sequence
  Synthetic oligonucleotide
atgcctatgtacgtgttgccgttatggaag

SEQ ID NO: 495487 - DNA, 30 bp, Artificial Sequence
  Synthetic oligonucleotide
attttatgcatgtattgaagttgctggaag

SEQ ID NO: 495488 - DNA, 30 bp, Artificial Sequence
  Synthetic oligonucleotide
gtttccacgcttcctcaacagcagtggaag

SEQ ID NO: 495489 - DNA, 30 bp, Artificial Sequence
  Synthetic oligonucleotide
cacactactacaccggccacggtgtggaag

SEQ ID NO: 495490 - DNA, 30 bp, Artificial Sequence
  Synthetic oligonucleotide
gacgagtttctgtttgcacgttcttggaag

SEQ ID NO: 495491 - DNA, 30 bp, Artificial Sequence
  Synthetic oligonucleotide
tacaagttcgttaacattcccagttggaag

SEQ ID NO: 495492 - DNA, 30 bp, Artificial Sequence
  Synthetic oligonucleotide
tttccgttgggaggtaattacaaaatgaag

SEQ ID NO: 495493 - DNA, 30 bp, Artificial Sequence
  Synthetic oligonucleotide
aacccacgcatcacaatgaatcaaatgaag

SEQ ID NO: 495494 - DNA, 30 bp, Artificial Sequence
  Synthetic oligonucleotide
aagtgtgtgaggtctgtagagataatgaag

SEQ ID NO: 495495 - DNA, 30 bp, Artificial Sequence
  Synthetic oligonucleotide
cttattttggtcatagactattgcatgaag

SEQ ID NO: 495496 - DNA, 30 bp, Artificial Sequence
  Synthetic oligonucleotide
atgcaggggagcataaaatttctcatgaag

SEQ ID NO: 495497 - DNA, 30 bp, Artificial Sequence
  Synthetic oligonucleotide
taatatttagcggtacggccattcatgaag

SEQ ID NO: 495498 - DNA, 30 bp, Artificial Sequence
  Synthetic oligonucleotide
cggacgattcgtcctgcgaccgagatgaag

SEQ ID NO: 495499 - DNA, 30 bp, Artificial Sequence
  Synthetic oligonucleotide
ctgtatgttgaccatttagcctagatgaag

SEQ ID NO: 495500 - DNA, 30 bp, Artificial Sequence
  Synthetic oligonucleotide
tcgacgcagacattcacctcgagtatgaag

SEQ ID NO: 495501 - DNA, 30 bp, Artificial Sequence
  Synthetic oligonucleotide
aagactccgcatggtcaatcaacactgaag

SEQ ID NO: 495502 - DNA, 30 bp, Artificial Sequence
  Synthetic oligonucleotide
tgttttattcaaggtgaatcccccctgaag

SEQ ID NO: 495503 - DNA, 30 bp, Artificial Sequence
  Synthetic oligonucleotide
cgtcggggacgtgagtgacggccgctgaag

SEQ ID NO: 495504 - DNA, 30 bp, Artificial Sequence
  Synthetic oligonucleotide
ccagcaacgaagatggactgccatctgaag

SEQ ID NO: 495505 - DNA, 30 bp, Artificial Sequence
  Synthetic oligonucleotide
tgcggtgagacactgacgcccgcagtgaag

SEQ ID NO: 495506 - DNA, 30 bp, Artificial Sequence
  Synthetic oligonucleotide
ctaagctccagtataggggtcagagtgaag

SEQ ID NO: 495507 - DNA, 30 bp, Artificial Sequence
  Synthetic oligonucleotide
ctgcccaaggactggtctacctgagtgaag

SEQ ID NO: 495508 - DNA, 30 bp, Artificial Sequence
  Synthetic oligonucleotide
tgtctttgaaattgctcgagttgggtgaag

SEQ ID NO: 495509 - DNA, 30 bp, Artificial Sequence
  Synthetic oligonucleotide
tttcctacggctaaaatgtgtttggtgaag

SEQ ID NO: 495510 - DNA, 30 bp, Artificial Sequence
  Synthetic oligonucleotide
attcgccaacaacgtttctatgatgtgaag

SEQ ID NO: 495511 - DNA, 30 bp, Artificial Sequence
  Synthetic oligonucleotide
aataggcactatctgactgattctgtgaag

SEQ ID NO: 495512 - DNA, 30 bp, Artificial Sequence
  Synthetic oligonucleotide
agagtattagacgccaattcacaattgaag

SEQ ID NO: 495513 - DNA, 30 bp, Artificial Sequence
  Synthetic oligonucleotide
tcagccgtaggggcgcgtatggtattgaag

SEQ ID NO: 495514 - DNA, 30 bp, Artificial Sequence
  Synthetic oligonucleotide
tttgagcatattttttatccgcacttgaag

SEQ ID NO: 495515 - DNA, 30 bp, Artificial Sequence
  Synthetic oligonucleotide
gatttgtcgttggaggcgtcaagcttgaag

SEQ ID NO: 495516 - DNA, 30 bp, Artificial Sequence
  Synthetic oligonucleotide
taagtaggcgaacgttaggcatcgttgaag

SEQ ID NO: 495517 - DNA, 30 bp, Artificial Sequence
  Synthetic oligonucleotide
gatgcaatacccaatgttctacggttgaag

SEQ ID NO: 495518 - DNA, 30 bp, Artificial Sequence
  Synthetic oligonucleotide
gagcacccgctgggaacgagttctttgaag

SEQ ID NO: 495519 - DNA, 30 bp, Artificial Sequence
  Synthetic oligonucleotide
tcggtcaatgactagtactgagttttgaag

SEQ ID NO: 495520 - DNA, 30 bp, Artificial Sequence
  Synthetic oligonucleotide
aaggggttggctgctatatatgttttgaag

SEQ ID NO: 495521 - DNA, 30 bp, Artificial Sequence
  Synthetic oligonucleotide
gataccgtacgagcccacagaaaaaataag

SEQ ID NO: 495522 - DNA, 30 bp, Artificial Sequence
  Synthetic oligonucleotide
ggacagccccgcttatttgaaagaaataag

SEQ ID NO: 495523 - DNA, 30 bp, Artificial Sequence
  Synthetic oligonucleotide
atccgcctttccggctcgtgaggtaataag

SEQ ID NO: 495524 - DNA, 30 bp, Artificial Sequence
  Synthetic oligonucleotide
taaatcgttgacgttatctacggtaataag

SEQ ID NO: 495525 - DNA, 30 bp, Artificial Sequence
  Synthetic oligonucleotide
gtgcgagactgtacaggactcgcacataag

SEQ ID NO: 495526 - DNA, 30 bp, Artificial Sequence
  Synthetic oligonucleotide
gagcatcacttcatgatgccggcacataag

SEQ ID NO: 495527 - DNA, 30 bp, Artificial Sequence
  Synthetic oligonucleotide
gagtggttttgaatgatattagcgcataag

SEQ ID NO: 495528 - DNA, 30 bp, Artificial Sequence
  Synthetic oligonucleotide
cccaccttgaataattaacggtggcataag

SEQ ID NO: 495529 - DNA, 30 bp, Artificial Sequence
  Synthetic oligonucleotide
ttttgacgttccatgcatacgatgcataag

SEQ ID NO: 495530 - DNA, 30 bp, Artificial Sequence
  Synthetic oligonucleotide
ggggtgttcgttgagaaaatgggtcataag

SEQ ID NO: 495531 - DNA, 30 bp, Artificial Sequence
  Synthetic oligonucleotide
gtgatcgtaagaacgcaggcataagataag

SEQ ID NO: 495532 - DNA, 30 bp, Artificial Sequence
  Synthetic oligonucleotide
ctttctcgggagcatagggattcggataag

SEQ ID NO: 495533 - DNA, 31 bp, Artificial Sequence
  Synthetic oligonucleotide
aattccgtagaatattctttttatcactaag

SEQ ID NO: 495534 - DNA, 30 bp, Artificial Sequence
  Synthetic oligonucleotide
aagcttgagcggttccacgacccgactaag

SEQ ID NO: 495535 - DNA, 30 bp, Artificial Sequence
  Synthetic oligonucleotide
tgggaaccgctaatctttgagagtactaag

SEQ ID NO: 495536 - DNA, 30 bp, Artificial Sequence
  Synthetic oligonucleotide
aaggtgttccgtggaattaattttactaag

SEQ ID NO: 495537 - DNA, 30 bp, Artificial Sequence
  Synthetic oligonucleotide
aaatattctcaagggggtcacaaacctaag

SEQ ID NO: 495538 - DNA, 30 bp, Artificial Sequence
  Synthetic oligonucleotide
aacctaaatgcccgagataattgacctaag

SEQ ID NO: 495539 - DNA, 30 bp, Artificial Sequence
  Synthetic oligonucleotide
attgccgctacgggttcatgctcccctaag

SEQ ID NO: 495540 - DNA, 30 bp, Artificial Sequence
  Synthetic oligonucleotide
tgtgtagaatagttggtcaacatcgctaag

SEQ ID NO: 495541 - DNA, 30 bp, Artificial Sequence
  Synthetic oligonucleotide
taatgacacgttaacggcgcaactgctaag

SEQ ID NO: 495542 - DNA, 30 bp, Artificial Sequence
  Synthetic oligonucleotide
cagtgcagcagggtacaaaaccctgctaag

SEQ ID NO: 495543 - DNA, 30 bp, Artificial Sequence
  Synthetic oligonucleotide
tcaaaggatttagacggagttagtgctaag

SEQ ID NO: 495544 - DNA, 30 bp, Artificial Sequence
  Synthetic oligonucleotide
gatagacagcagtacgggaataaaagtaag

SEQ ID NO: 495545 - DNA, 30 bp, Artificial Sequence
  Synthetic oligonucleotide
ttagtagtgagccgctgacctccaagtaag

SEQ ID NO: 495546 - DNA, 30 bp, Artificial Sequence
  Synthetic oligonucleotide
attatatgggtgtgctgtgtgtacagtaag

SEQ ID NO: 495547 - DNA, 30 bp, Artificial Sequence
  Synthetic oligonucleotide
atcatgtatgaatgactaaattccagtaag

SEQ ID NO: 495548 - DNA, 30 bp, Artificial Sequence
  Synthetic oligonucleotide
aagcagctatgctgtcaaaatcgcagtaag

SEQ ID NO: 495549 - DNA, 30 bp, Artificial Sequence
  Synthetic oligonucleotide
ggtatcaaacgtggctgtatatgcagtaag

SEQ ID NO: 495550 - DNA, 30 bp, Artificial Sequence
  Synthetic oligonucleotide
aagtgcattctatagggtagtccgagtaag

SEQ ID NO: 495551 - DNA, 30 bp, Artificial Sequence
  Synthetic oligonucleotide
tcaagtacgcaatcactaccatggagtaag

SEQ ID NO: 495552 - DNA, 30 bp, Artificial Sequence
  Synthetic oligonucleotide
taatgttctgttgcagtattattgagtaag

SEQ ID NO: 495553 - DNA, 30 bp, Artificial Sequence
  Synthetic oligonucleotide
atatatactagctctcatagtttgagtaag

SEQ ID NO: 495554 - DNA, 30 bp, Artificial Sequence
  Synthetic oligonucleotide
attttatgtgccgatgtaacaggacgtaag

SEQ ID NO: 495555 - DNA, 30 bp, Artificial Sequence
  Synthetic oligonucleotide
aatgcgtctgcgctattacacggccgtaag

SEQ ID NO: 495556 - DNA, 30 bp, Artificial Sequence
  Synthetic oligonucleotide
cgactccatcatgagatgagcacgcgtaag

SEQ ID NO: 495557 - DNA, 30 bp, Artificial Sequence
  Synthetic oligonucleotide
gggctcaaaccctggtcacccactcgtaag

SEQ ID NO: 495558 - DNA, 30 bp, Artificial Sequence
  Synthetic oligonucleotide
aatttaatgtaacgttttcttggtcgtaag

SEQ ID NO: 495559 - DNA, 30 bp, Artificial Sequence
  Synthetic oligonucleotide
tatgtagattctgagaacgccaaaggtaag

SEQ ID NO: 495560 - DNA, 30 bp, Artificial Sequence
  Synthetic oligonucleotide
cttgtaggccaatctgctgaacaaggtaag

SEQ ID NO: 495561 - DNA, 30 bp, Artificial Sequence
  Synthetic oligonucleotide
gtacgtgttacgtaggtagctgagggtaag

SEQ ID NO: 495562 - DNA, 30 bp, Artificial Sequence
  Synthetic oligonucleotide
tagaggctatccaagttaagggatggtaag

SEQ ID NO: 495563 - DNA, 30 bp, Artificial Sequence
  Synthetic oligonucleotide
gagtcgcaggcgtggtttccaccgtgtaag

SEQ ID NO: 495564 - DNA, 30 bp, Artificial Sequence
  Synthetic oligonucleotide
ccatacaaagaatatatcagaccgtgtaag

SEQ ID NO: 495565 - DNA, 30 bp, Artificial Sequence
  Synthetic oligonucleotide
cttagtaggcatgcagcgcggtgaattaag

SEQ ID NO: 495566 - DNA, 30 bp, Artificial Sequence
  Synthetic oligonucleotide
acgatgacactaacgacgcatcgcattaag

SEQ ID NO: 495567 - DNA, 30 bp, Artificial Sequence
  Synthetic oligonucleotide
aaatttatattggtagccgaagctattaag

SEQ ID NO: 495568 - DNA, 30 bp, Artificial Sequence
  Synthetic oligonucleotide
ctgggacacgtgcggggggtagttattaag

SEQ ID NO: 495569 - DNA, 30 bp, Artificial Sequence
  Synthetic oligonucleotide
gatttatacaagcagtataactttattaag

SEQ ID NO: 495570 - DNA, 30 bp, Artificial Sequence
  Synthetic oligonucleotide
attctacgtcttaaccgacagacacttaag

SEQ ID NO: 495571 - DNA, 30 bp, Artificial Sequence
  Synthetic oligonucleotide
gaaccactaagggttctgaggcgccttaag

SEQ ID NO: 495572 - DNA, 30 bp, Artificial Sequence
  Synthetic oligonucleotide
aaacgctcagtcactttagtcactcttaag

SEQ ID NO: 495573 - DNA, 30 bp, Artificial Sequence
  Synthetic oligonucleotide
ttagtgtatcgtccgcagcgaaaagttaag

SEQ ID NO: 495574 - DNA, 30 bp, Artificial Sequence
  Synthetic oligonucleotide
gggtgcgcagttgaacgagtataagttaag

SEQ ID NO: 495575 - DNA, 30 bp, Artificial Sequence
  Synthetic oligonucleotide
agagcggcatgtaaaacttgtgcagttaag

SEQ ID NO: 495576 - DNA, 30 bp, Artificial Sequence
  Synthetic oligonucleotide
acctgggatatagacgaagagaaggttaag

SEQ ID NO: 495577 - DNA, 30 bp, Artificial Sequence
  Synthetic oligonucleotide
gtttgctaagagtttttagagggggttaag

SEQ ID NO: 495578 - DNA, 30 bp, Artificial Sequence
  Synthetic oligonucleotide
ggcaccgtctcgatgcagttaaaatttaag

SEQ ID NO: 495579 - DNA, 30 bp, Artificial Sequence
  Synthetic oligonucleotide
gggtcatttcataccttgcaagcatttaag

SEQ ID NO: 495580 - DNA, 30 bp, Artificial Sequence
  Synthetic oligonucleotide
taagatcttcttttgaggcatatatttaag

SEQ ID NO: 495581 - DNA, 30 bp, Artificial Sequence
  Synthetic oligonucleotide
gctctaagaaacacacgtggctgctttaag

SEQ ID NO: 495582 - DNA, 30 bp, Artificial Sequence
  Synthetic oligonucleotide
actattgaacactgcggcagtatctttaag

SEQ ID NO: 495583 - DNA, 30 bp, Artificial Sequence
  Synthetic oligonucleotide
tgtacttgcgccgtagcatgactgtttaag

SEQ ID NO: 495584 - DNA, 30 bp, Artificial Sequence
  Synthetic oligonucleotide
ttgaggttgcacggtgggatcttttttaag

SEQ ID NO: 495585 - DNA, 30 bp, Artificial Sequence
  Synthetic oligonucleotide
tcaatggtttggctattataaagaaaacag

SEQ ID NO: 495586 - DNA, 30 bp, Artificial Sequence
  Synthetic oligonucleotide
aggtgtgacccgtgcgagggtaacaaacag

SEQ ID NO: 495587 - DNA, 30 bp, Artificial Sequence
  Synthetic oligonucleotide
tgaaccgggttgtccaagtgatctaaacag

SEQ ID NO: 495588 - DNA, 30 bp, Artificial Sequence
  Synthetic oligonucleotide
gtttggatgacagcaccacatattaaacag

SEQ ID NO: 495589 - DNA, 30 bp, Artificial Sequence
  Synthetic oligonucleotide
gagtgaacgaggtttaaaggtatacaacag

SEQ ID NO: 495590 - DNA, 30 bp, Artificial Sequence
  Synthetic oligonucleotide
atagcgaggcactgtctctggaagcaacag

SEQ ID NO: 495591 - DNA, 30 bp, Artificial Sequence
  Synthetic oligonucleotide
ggagtttgactttgaggttcgccgcaacag

SEQ ID NO: 495592 - DNA, 31 bp, Artificial Sequence
  Synthetic oligonucleotide
ttcgactggaagattgtaacactatcaacag

SEQ ID NO: 495593 - DNA, 30 bp, Artificial Sequence
  Synthetic oligonucleotide
gataattccgctctgtttcgaagtcaacag

SEQ ID NO: 495594 - DNA, 30 bp, Artificial Sequence
  Synthetic oligonucleotide
cttcataagtggagaagtcagcaggaacag

SEQ ID NO: 495595 - DNA, 30 bp, Artificial Sequence
  Synthetic oligonucleotide
accagatctccggtaagggttttggaacag

SEQ ID NO: 495596 - DNA, 30 bp, Artificial Sequence
  Synthetic oligonucleotide
accactgctctggcgcggccttgataacag

SEQ ID NO: 495597 - DNA, 30 bp, Artificial Sequence
  Synthetic oligonucleotide
gacgacgcccccgcgaggggctcctaacag

SEQ ID NO: 495598 - DNA, 30 bp, Artificial Sequence
  Synthetic oligonucleotide
cggttacgtgtagtcagtgtagagtaacag

SEQ ID NO: 495599 - DNA, 30 bp, Artificial Sequence
  Synthetic oligonucleotide
aaggcaagggcctcgggggtagtgtaacag

SEQ ID NO: 495600 - DNA, 30 bp, Artificial Sequence
  Synthetic oligonucleotide
aggtgggcaaccacgaggagatacacacag

SEQ ID NO: 495601 - DNA, 30 bp, Artificial Sequence
  Synthetic oligonucleotide
aatatccagtgtaagatctaaaatacacag

SEQ ID NO: 495602 - DNA, 30 bp, Artificial Sequence
  Synthetic oligonucleotide
gtaatgttactatttctttgaaatacacag

SEQ ID NO: 495603 - DNA, 30 bp, Artificial Sequence
  Synthetic oligonucleotide
accacttttaggattaaaaaatgaccacag

SEQ ID NO: 495604 - DNA, 30 bp, Artificial Sequence
  Synthetic oligonucleotide
atgtttgaacaaggccatgacgcgccacag

SEQ ID NO: 495605 - DNA, 30 bp, Artificial Sequence
  Synthetic oligonucleotide
cttgtttggaggacgtacgccccagcacag

SEQ ID NO: 495606 - DNA, 30 bp, Artificial Sequence
  Synthetic oligonucleotide
tagattctatttcgcgataagctagcacag

SEQ ID NO: 495607 - DNA, 30 bp, Artificial Sequence
  Synthetic oligonucleotide
cccatacacactgttaggacctacgcacag

SEQ ID NO: 495608 - DNA, 30 bp, Artificial Sequence
  Synthetic oligonucleotide
cctcgtcggcccgcgcccgctctggcacag

SEQ ID NO: 495609 - DNA, 30 bp, Artificial Sequence
  Synthetic oligonucleotide
aaaatgcttcggttagcacaccctgcacag

SEQ ID NO: 495610 - DNA, 30 bp, Artificial Sequence
  Synthetic oligonucleotide
cctcagacacgctgcactcgaagtgcacag

SEQ ID NO: 495611 - DNA, 30 bp, Artificial Sequence
  Synthetic oligonucleotide
tgctaattctggttggtaggtggctcacag

SEQ ID NO: 495612 - DNA, 30 bp, Artificial Sequence
  Synthetic oligonucleotide
attcccgcgtcgcggtaaatggattcacag

SEQ ID NO: 495613 - DNA, 30 bp, Artificial Sequence
  Synthetic oligonucleotide
agtcgcagatggcaggagataccaagacag

SEQ ID NO: 495614 - DNA, 30 bp, Artificial Sequence
  Synthetic oligonucleotide
cagttccagatccatccagttttgagacag

SEQ ID NO: 495615 - DNA, 30 bp, Artificial Sequence
  Synthetic oligonucleotide
aggtaactgaacgcgcaaggctctagacag

SEQ ID NO: 495616 - DNA, 29 bp, Artificial Sequence
  Synthetic oligonucleotide
gctggtgttgccacgcgatgccacgacag

SEQ ID NO: 495617 - DNA, 30 bp, Artificial Sequence
  Synthetic oligonucleotide
ggtaatgaggtttgttgactaatacgacag

SEQ ID NO: 495618 - DNA, 30 bp, Artificial Sequence
  Synthetic oligonucleotide
gacgagctccggccagaccatgggcgacag

SEQ ID NO: 495619 - DNA, 30 bp, Artificial Sequence
  Synthetic oligonucleotide
aaccgggatcgcgccgcagaaggcggacag

SEQ ID NO: 495620 - DNA, 30 bp, Artificial Sequence
  Synthetic oligonucleotide
atgaaggtttggacaccgtgcacgggacag

SEQ ID NO: 495621 - DNA, 30 bp, Artificial Sequence
  Synthetic oligonucleotide
ggccttcctatttgatgtgtagggggacag

SEQ ID NO: 495622 - DNA, 30 bp, Artificial Sequence
  Synthetic oligonucleotide
cccgcacacggacgcgacaggccatgacag

SEQ ID NO: 495623 - DNA, 30 bp, Artificial Sequence
  Synthetic oligonucleotide
ttttagggtctgtagtaattaatatgacag

SEQ ID NO: 495624 - DNA, 30 bp, Artificial Sequence
  Synthetic oligonucleotide
agacttggtagatgtggcccctacatacag

SEQ ID NO: 495625 - DNA, 30 bp, Artificial Sequence
  Synthetic oligonucleotide
aagttctgcacataatgtcgaagcatacag

SEQ ID NO: 495626 - DNA, 30 bp, Artificial Sequence
  Synthetic oligonucleotide
tgcaaatttgcgaagaaggaacggatacag

SEQ ID NO: 495627 - DNA, 30 bp, Artificial Sequence
  Synthetic oligonucleotide
gctacattccagacggcacaatggatacag

SEQ ID NO: 495628 - DNA, 30 bp, Artificial Sequence
  Synthetic oligonucleotide
atatattcgcagcacgcctggtggatacag

SEQ ID NO: 495629 - DNA, 30 bp, Artificial Sequence
  Synthetic oligonucleotide
tctatgaggacagcaatgtttagtatacag

SEQ ID NO: 495630 - DNA, 30 bp, Artificial Sequence
  Synthetic oligonucleotide
gcatgcatggggacggcagcggaactacag

SEQ ID NO: 495631 - DNA, 30 bp, Artificial Sequence
  Synthetic oligonucleotide
gaacctcatgttggcttattttaactacag

SEQ ID NO: 495632 - DNA, 30 bp, Artificial Sequence
  Synthetic oligonucleotide
cgccttcggtgccgccaggtaccgctacag

SEQ ID NO: 495633 - DNA, 30 bp, Artificial Sequence
  Synthetic oligonucleotide
cattactgaaattcaagacggtggctacag

SEQ ID NO: 495634 - DNA, 30 bp, Artificial Sequence
  Synthetic oligonucleotide
ttataatgttaaaatgtgaatcgtctacag

SEQ ID NO: 495635 - DNA, 30 bp, Artificial Sequence
  Synthetic oligonucleotide
gttgaaaatttacgtaagcacatattacag

SEQ ID NO: 495636 - DNA, 30 bp, Artificial Sequence
  Synthetic oligonucleotide
agcaaggataccaagctcgttaacttacag

SEQ ID NO: 495637 - DNA, 30 bp, Artificial Sequence
  Synthetic oligonucleotide
tgcgatttggacccgccgaagagcttacag

SEQ ID NO: 495638 - DNA, 30 bp, Artificial Sequence
  Synthetic oligonucleotide
tcagtctattatacctttcattcgttacag

SEQ ID NO: 495639 - DNA, 30 bp, Artificial Sequence
  Synthetic oligonucleotide
aaataccaaattaattcaagaaatttacag

SEQ ID NO: 495640 - DNA, 30 bp, Artificial Sequence
  Synthetic oligonucleotide
acagaaggcccgaccattgcttttttacag

SEQ ID NO: 495641 - DNA, 30 bp, Artificial Sequence
  Synthetic oligonucleotide
attcagtgccttgactgtcaaataaaccag

SEQ ID NO: 495642 - DNA, 30 bp, Artificial Sequence
  Synthetic oligonucleotide
tcgtaggacgcagggcaattgtcgaaccag

SEQ ID NO: 495643 - DNA, 30 bp, Artificial Sequence
  Synthetic oligonucleotide
tttatgtttttattcacctcctaacaccag

SEQ ID NO: 495644 - DNA, 30 bp, Artificial Sequence
  Synthetic oligonucleotide
cgtcggttctgctgggtgccaagccaccag

SEQ ID NO: 495645 - DNA, 30 bp, Artificial Sequence
  Synthetic oligonucleotide
gccccgagggctccgcgtcggggagaccag

SEQ ID NO: 495646 - DNA, 30 bp, Artificial Sequence
  Synthetic oligonucleotide
acggttttccatcccaagcactgggaccag

SEQ ID NO: 495647 - DNA, 30 bp, Artificial Sequence
  Synthetic oligonucleotide
cgggctaccggtggcgaaaaaatgtaccag

SEQ ID NO: 495648 - DNA, 30 bp, Artificial Sequence
  Synthetic oligonucleotide
actccatacagcctgtgtgggatgtaccag

SEQ ID NO: 495649 - DNA, 30 bp, Artificial Sequence
  Synthetic oligonucleotide
ggattagcatgcaactggttatttacccag

SEQ ID NO: 495650 - DNA, 30 bp, Artificial Sequence
  Synthetic oligonucleotide
tgacacagggcaataccgtttcgtccccag

SEQ ID NO: 495651 - DNA, 30 bp, Artificial Sequence
  Synthetic oligonucleotide
tatacattagtgagctaccgttttccccag

SEQ ID NO: 495652 - DNA, 30 bp, Artificial Sequence
  Synthetic oligonucleotide
cttgataccgcaaatgtcacggtagcccag

SEQ ID NO: 495653 - DNA, 30 bp, Artificial Sequence
  Synthetic oligonucleotide
tatgagtacggatggcagtggcgcgcccag

SEQ ID NO: 495654 - DNA, 30 bp, Artificial Sequence
  Synthetic oligonucleotide
gaaataatactttggtatcattgggcccag

SEQ ID NO: 495655 - DNA, 30 bp, Artificial Sequence
  Synthetic oligonucleotide
ttatacgcaccagagagcgtaggatcccag

SEQ ID NO: 495656 - DNA, 30 bp, Artificial Sequence
  Synthetic oligonucleotide
cccccgacccttcgcatggcgacgtcccag

SEQ ID NO: 495657 - DNA, 31 bp, Artificial Sequence
  Synthetic oligonucleotide
ctgacggtatggtccctcggaagggtcccag

SEQ ID NO: 495658 - DNA, 30 bp, Artificial Sequence
  Synthetic oligonucleotide
ccgttacagtgatttgcttggctgtcccag

SEQ ID NO: 495659 - DNA, 30 bp, Artificial Sequence
  Synthetic oligonucleotide
taggtccttgtcagcatacattgttcccag

SEQ ID NO: 495660 - DNA, 30 bp, Artificial Sequence
  Synthetic oligonucleotide
tcatccggggatctgtgtcattaaagccag

SEQ ID NO: 495661 - DNA, 30 bp, Artificial Sequence
  Synthetic oligonucleotide
catgggctggcgtcggttgccggaagccag

SEQ ID NO: 495662 - DNA, 30 bp, Artificial Sequence
  Synthetic oligonucleotide
gcacaggcggtacatcagttgggaagccag

SEQ ID NO: 495663 - DNA, 30 bp, Artificial Sequence
  Synthetic oligonucleotide
gtgttcccggatctttaccaatagagccag

SEQ ID NO: 495664 - DNA, 30 bp, Artificial Sequence
  Synthetic oligonucleotide
atgtaatgagcagaccagagtcatagccag

SEQ ID NO: 495665 - DNA, 30 bp, Artificial Sequence
  Synthetic oligonucleotide
tctatagctctctcagttgctgttagccag

SEQ ID NO: 495666 - DNA, 30 bp, Artificial Sequence
  Synthetic oligonucleotide
gtcatagtatatgtaaggacgtgacgccag

SEQ ID NO: 495667 - DNA, 30 bp, Artificial Sequence
  Synthetic oligonucleotide
atgaagatgacaagagacaattcccgccag

SEQ ID NO: 495668 - DNA, 29 bp, Artificial Sequence
  Synthetic oligonucleotide
aaagtgactgcgactgtctaaagcgccag

SEQ ID NO: 495669 - DNA, 30 bp, Artificial Sequence
  Synthetic oligonucleotide
gtgtgaccgttgattggtccagcgcgccag

SEQ ID NO: 495670 - DNA, 30 bp, Artificial Sequence
  Synthetic oligonucleotide
atgactagctccgctgagttataaggccag

SEQ ID NO: 495671 - DNA, 30 bp, Artificial Sequence
  Synthetic oligonucleotide
acagcggcgagcctgctactttcaggccag

SEQ ID NO: 495672 - DNA, 30 bp, Artificial Sequence
  Synthetic oligonucleotide
gcgcagctttgtgcccgtcgaagaggccag

SEQ ID NO: 495673 - DNA, 30 bp, Artificial Sequence
  Synthetic oligonucleotide
ccgtggcgcggctgctagcgtttaggccag

SEQ ID NO: 495674 - DNA, 30 bp, Artificial Sequence
  Synthetic oligonucleotide
aaactcttgtcgagcggagaacacggccag

SEQ ID NO: 495675 - DNA, 30 bp, Artificial Sequence
  Synthetic oligonucleotide
gctctatctcaatggaagatgagcggccag

SEQ ID NO: 495676 - DNA, 30 bp, Artificial Sequence
  Synthetic oligonucleotide
tattcaacagtcggcacatgtgtgggccag

SEQ ID NO: 495677 - DNA, 30 bp, Artificial Sequence
  Synthetic oligonucleotide
ttgtcgaaataccattggtgcactggccag

SEQ ID NO: 495678 - DNA, 30 bp, Artificial Sequence
  Synthetic oligonucleotide
ttcgtgacatagcaaagtccagctggccag

SEQ ID NO: 495679 - DNA, 30 bp, Artificial Sequence
  Synthetic oligonucleotide
gtagcgtcatcatatgtgcacatgtgccag

SEQ ID NO: 495680 - DNA, 30 bp, Artificial Sequence
  Synthetic oligonucleotide
gctgaccgtttggtacggagaccactccag

SEQ ID NO: 495681 - DNA, 30 bp, Artificial Sequence
  Synthetic oligonucleotide
gttccgtgagtcgccgccaagtccctccag

SEQ ID NO: 495682 - DNA, 30 bp, Artificial Sequence
  Synthetic oligonucleotide
cgaggtattggggtcaacttattcctccag

SEQ ID NO: 495683 - DNA, 30 bp, Artificial Sequence
  Synthetic oligonucleotide
acttgcactggtaagcatggtaggctccag

SEQ ID NO: 495684 - DNA, 30 bp, Artificial Sequence
  Synthetic oligonucleotide
attttggtcatttggtacttatgggtccag

SEQ ID NO: 495685 - DNA, 30 bp, Artificial Sequence
  Synthetic oligonucleotide
aaaattatcggtaactaccgaaaattccag

SEQ ID NO: 495686 - DNA, 30 bp, Artificial Sequence
  Synthetic oligonucleotide
aaatgtccttatagttagggtgaaaagcag

SEQ ID NO: 495687 - DNA, 30 bp, Artificial Sequence
  Synthetic oligonucleotide
agatttagaaacgacgtgtgttgaaagcag

SEQ ID NO: 495688 - DNA, 30 bp, Artificial Sequence
  Synthetic oligonucleotide
attgatacaacttacaactcccacaagcag

SEQ ID NO: 495689 - DNA, 30 bp, Artificial Sequence
  Synthetic oligonucleotide
tatgtaacgtgaagcgtgcagtccaagcag

SEQ ID NO: 495690 - DNA, 30 bp, Artificial Sequence
  Synthetic oligonucleotide
gcctctcgccgcgtacactcagggaagcag

SEQ ID NO: 495691 - DNA, 30 bp, Artificial Sequence
  Synthetic oligonucleotide
tgaaacgacaatgctgcctgtccacagcag

SEQ ID NO: 495692 - DNA, 31 bp, Artificial Sequence
  Synthetic oligonucleotide
gccgtcaactctatagtactctgcacagcag

SEQ ID NO: 495693 - DNA, 30 bp, Artificial Sequence
  Synthetic oligonucleotide
gcccctgcgattgttaatcaagagcagcag

SEQ ID NO: 495694 - DNA, 30 bp, Artificial Sequence
  Synthetic oligonucleotide
tgaaccggcactgatcttcagtcgcagcag

SEQ ID NO: 495695 - DNA, 30 bp, Artificial Sequence
  Synthetic oligonucleotide
cccattgagcgagccgatacgtcgcagcag

SEQ ID NO: 495696 - DNA, 30 bp, Artificial Sequence
  Synthetic oligonucleotide
aatgcctaaggaagtagtgtcatgcagcag

SEQ ID NO: 495697 - DNA, 30 bp, Artificial Sequence
  Synthetic oligonucleotide
ccgtctagccactgcgcaagtgcagagcag

SEQ ID NO: 495698 - DNA, 30 bp, Artificial Sequence
  Synthetic oligonucleotide
attttggttgtggtttaactattagagcag

SEQ ID NO: 495699 - DNA, 30 bp, Artificial Sequence
  Synthetic oligonucleotide
atcctcagagagttcctgcaaaaggagcag

SEQ ID NO: 495700 - DNA, 30 bp, Artificial Sequence
  Synthetic oligonucleotide
gaaggattcatcattggatggacggagcag

SEQ ID NO: 495701 - DNA, 30 bp, Artificial Sequence
  Synthetic oligonucleotide
gaaacaaaaatgactgtttacaaatagcag

SEQ ID NO: 495702 - DNA, 30 bp, Artificial Sequence
  Synthetic oligonucleotide
tccagtcaacggacatttggttcatagcag

SEQ ID NO: 495703 - DNA, 30 bp, Artificial Sequence
  Synthetic oligonucleotide
atggatatttcattgttcagactctagcag

SEQ ID NO: 495704 - DNA, 30 bp, Artificial Sequence
  Synthetic oligonucleotide
cgctttgacacgccagctgctttctagcag

SEQ ID NO: 495705 - DNA, 30 bp, Artificial Sequence
  Synthetic oligonucleotide
caaaactatggtgtatattgcacgtagcag

SEQ ID NO: 495706 - DNA, 30 bp, Artificial Sequence
  Synthetic oligonucleotide
gacctattaactgtgcattgcacttagcag

SEQ ID NO: 495707 - DNA, 30 bp, Artificial Sequence
  Synthetic oligonucleotide
aacccagcagtggtttagcattcttagcag

SEQ ID NO: 495708 - DNA, 30 bp, Artificial Sequence
  Synthetic oligonucleotide
ttggtaatggacactagggtgcgttagcag

SEQ ID NO: 495709 - DNA, 30 bp, Artificial Sequence
  Synthetic oligonucleotide
tattaatcttggtgagagcaaaccacgcag

SEQ ID NO: 495710 - DNA, 30 bp, Artificial Sequence
  Synthetic oligonucleotide
catatattaagtgttctgtacagcacgcag

SEQ ID NO: 495711 - DNA, 30 bp, Artificial Sequence
  Synthetic oligonucleotide
atcgcgcggaaagttccaaaagagacgcag

SEQ ID NO: 495712 - DNA, 30 bp, Artificial Sequence
  Synthetic oligonucleotide
acctcaatctttattacaggtacgacgcag

SEQ ID NO: 495713 - DNA, 30 bp, Artificial Sequence
  Synthetic oligonucleotide
gaaggttgcagggtttaaaatccgacgcag

SEQ ID NO: 495714 - DNA, 30 bp, Artificial Sequence
  Synthetic oligonucleotide
tatatgtatgtcacaacgtacgggacgcag

SEQ ID NO: 495715 - DNA, 30 bp, Artificial Sequence
  Synthetic oligonucleotide
gggcaaaagcctaatagccaaatgacgcag

SEQ ID NO: 495716 - DNA, 30 bp, Artificial Sequence
  Synthetic oligonucleotide
ccaatccagggtaacagcaagatgacgcag

SEQ ID NO: 495717 - DNA, 30 bp, Artificial Sequence
  Synthetic oligonucleotide
actgctaaagcgttacgtgttctgacgcag

SEQ ID NO: 495718 - DNA, 30 bp, Artificial Sequence
  Synthetic oligonucleotide
gatgtacggcatatccgccttttgacgcag

SEQ ID NO: 495719 - DNA, 30 bp, Artificial Sequence
  Synthetic oligonucleotide
tctcggccttagtcatcggcatatacgcag

SEQ ID NO: 495720 - DNA, 30 bp, Artificial Sequence
  Synthetic oligonucleotide
ccctgaatgttgcgtatgcagactacgcag

SEQ ID NO: 495721 - DNA, 30 bp, Artificial Sequence
  Synthetic oligonucleotide
tcagtaccgcgttcatggtatgttacgcag

SEQ ID NO: 495722 - DNA, 30 bp, Artificial Sequence
  Synthetic oligonucleotide
gcacggcagcgtagtttttacgggccgcag

SEQ ID NO: 495723 - DNA, 30 bp, Artificial Sequence
  Synthetic oligonucleotide
cgacaagtttggggtgtctagtggccgcag

SEQ ID NO: 495724 - DNA, 30 bp, Artificial Sequence
  Synthetic oligonucleotide
tgagggggcagcgggttataatctccgcag

SEQ ID NO: 495725 - DNA, 30 bp, Artificial Sequence
  Synthetic oligonucleotide
tgccctttactgcccccatggcttccgcag

SEQ ID NO: 495726 - DNA, 30 bp, Artificial Sequence
  Synthetic oligonucleotide
cacagtcttcaaacctagccagccgcgcag

SEQ ID NO: 495727 - DNA, 30 bp, Artificial Sequence
  Synthetic oligonucleotide
tacactcaagcccgccagtttgtcgcgcag

SEQ ID NO: 495728 - DNA, 30 bp, Artificial Sequence
  Synthetic oligonucleotide
ttctaatgaaaggtttgttagggggcgcag

SEQ ID NO: 495729 - DNA, 30 bp, Artificial Sequence
  Synthetic oligonucleotide
cacgcgggttgtttattcttggtggcgcag

SEQ ID NO: 495730 - DNA, 30 bp, Artificial Sequence
  Synthetic oligonucleotide
aaactctcaaccctggaattataatcgcag

SEQ ID NO: 495731 - DNA, 30 bp, Artificial Sequence
  Synthetic oligonucleotide
taggggtatggtctccttgattgatcgcag

SEQ ID NO: 495732 - DNA, 30 bp, Artificial Sequence
  Synthetic oligonucleotide
tggcgcgcaatgcggcccaattactcgcag

SEQ ID NO: 495733 - DNA, 30 bp, Artificial Sequence
  Synthetic oligonucleotide
tgggttgtatgtcgtagcttgggttcgcag

SEQ ID NO: 495734 - DNA, 30 bp, Artificial Sequence
  Synthetic oligonucleotide
tggctggttcattgtgaattgggaaggcag

SEQ ID NO: 495735 - DNA, 30 bp, Artificial Sequence
  Synthetic oligonucleotide
ggacgctttctcgtcttccgtttgaggcag

SEQ ID NO: 495736 - DNA, 30 bp, Artificial Sequence
  Synthetic oligonucleotide
gtttttggcgacggtggggatactaggcag

SEQ ID NO: 495737 - DNA, 30 bp, Artificial Sequence
  Synthetic oligonucleotide
aaaatgatgtgtatactgctccgacggcag

SEQ ID NO: 495738 - DNA, 30 bp, Artificial Sequence
  Synthetic oligonucleotide
aatagcaaccgtgctgttcattggcggcag

SEQ ID NO: 495739 - DNA, 30 bp, Artificial Sequence
  Synthetic oligonucleotide
actgtccttgtaagattctgtcatcggcag

SEQ ID NO: 495740 - DNA, 30 bp, Artificial Sequence
  Synthetic oligonucleotide
tgtttggacacaacaacggggcttcggcag

SEQ ID NO: 495741 - DNA, 30 bp, Artificial Sequence
  Synthetic oligonucleotide
cgagctaattatgggtcacgtacagggcag

SEQ ID NO: 495742 - DNA, 30 bp, Artificial Sequence
  Synthetic oligonucleotide
ctgctacgcggcctttgagaatgagggcag

SEQ ID NO: 495743 - DNA, 30 bp, Artificial Sequence
  Synthetic oligonucleotide
gggtaggacgaggtcgcaacaggtgggcag

SEQ ID NO: 495744 - DNA, 30 bp, Artificial Sequence
  Synthetic oligonucleotide
gttgcaccagccacagtgcgaacatggcag

SEQ ID NO: 495745 - DNA, 30 bp, Artificial Sequence
  Synthetic oligonucleotide
tttttgtgatactgtggcgtagcctggcag

SEQ ID NO: 495746 - DNA, 30 bp, Artificial Sequence
  Synthetic oligonucleotide
gactgatatattgctgtatacggctggcag

SEQ ID NO: 495747 - DNA, 30 bp, Artificial Sequence
  Synthetic oligonucleotide
gcactgattcggggaaaatcccggtggcag

SEQ ID NO: 495748 - DNA, 30 bp, Artificial Sequence
  Synthetic oligonucleotide
gtccccttgtgggggcacagtctgtggcag

SEQ ID NO: 495749 - DNA, 30 bp, Artificial Sequence
  Synthetic oligonucleotide
attttgattcgtcactgcctgacttggcag

SEQ ID NO: 495750 - DNA, 30 bp, Artificial Sequence
  Synthetic oligonucleotide
ccctggtctcctgctgcggatcggatgcag

SEQ ID NO: 495751 - DNA, 30 bp, Artificial Sequence
  Synthetic oligonucleotide
ttaggatgtagaatgtttacagtgatgcag

SEQ ID NO: 495752 - DNA, 30 bp, Artificial Sequence
  Synthetic oligonucleotide
ggtatcgccagcggattgcatgttatgcag

SEQ ID NO: 495753 - DNA, 25 bp, Artificial Sequence
  Synthetic oligonucleotide
tctcctctgcacactttgactgcag

SEQ ID NO: 495754 - DNA, 30 bp, Artificial Sequence
  Synthetic oligonucleotide
ctggattttaagatgactgacgtactgcag

SEQ ID NO: 495755 - DNA, 30 bp, Artificial Sequence
  Synthetic oligonucleotide
tgatagagctaaatgttccgacacctgcag

SEQ ID NO: 495756 - DNA, 30 bp, Artificial Sequence
  Synthetic oligonucleotide
ggactgctgatgtgcctgtagagcctgcag

SEQ ID NO: 495757 - DNA, 30 bp, Artificial Sequence
  Synthetic oligonucleotide
gctgtaacaccaaaagcttgtctgctgcag

SEQ ID NO: 495758 - DNA, 30 bp, Artificial Sequence
  Synthetic oligonucleotide
tcttctacagagtctaccaacgtagtgcag

SEQ ID NO: 495759 - DNA, 30 bp, Artificial Sequence
  Synthetic oligonucleotide
tctgcccacggcctgctagtgcccgtgcag

SEQ ID NO: 495760 - DNA, 30 bp, Artificial Sequence
  Synthetic oligonucleotide
agttgctgcgcactcaacacaaaattgcag

SEQ ID NO: 495761 - DNA, 30 bp, Artificial Sequence
  Synthetic oligonucleotide
attctgtcagcgacacgctctatcttgcag

SEQ ID NO: 495762 - DNA, 30 bp, Artificial Sequence
  Synthetic oligonucleotide
tgcatgctatgcaacatttcgcagttgcag

SEQ ID NO: 495763 - DNA, 30 bp, Artificial Sequence
  Synthetic oligonucleotide
taaacatcgttatcgcagttcctgttgcag

SEQ ID NO: 495764 - DNA, 30 bp, Artificial Sequence
  Synthetic oligonucleotide
ttgactattgaacacgagccctctttgcag

SEQ ID NO: 495765 - DNA, 30 bp, Artificial Sequence
  Synthetic oligonucleotide
gacccccgaaggggcagaggtggtttgcag

SEQ ID NO: 495766 - DNA, 30 bp, Artificial Sequence
  Synthetic oligonucleotide
gatcaacttgtcctcaccaatgttttgcag

SEQ ID NO: 495767 - DNA, 30 bp, Artificial Sequence
  Synthetic oligonucleotide
acatggatctcggttgcaaattaaaatcag

SEQ ID NO: 495768 - DNA, 30 bp, Artificial Sequence
  Synthetic oligonucleotide
ttttacagctcgtgacgaagtagcaatcag

SEQ ID NO: 495769 - DNA, 30 bp, Artificial Sequence
  Synthetic oligonucleotide
gaatgtacgccttaagttctttcgaatcag

SEQ ID NO: 495770 - DNA, 30 bp, Artificial Sequence
  Synthetic oligonucleotide
cacgctgctaatcatcggaaccataatcag

SEQ ID NO: 495771 - DNA, 30 bp, Artificial Sequence
  Synthetic oligonucleotide
attcatttaatactttagttatataatcag

SEQ ID NO: 495772 - DNA, 30 bp, Artificial Sequence
  Synthetic oligonucleotide
ttttcacgttggagtccaacgagtaatcag

SEQ ID NO: 495773 - DNA, 30 bp, Artificial Sequence
  Synthetic oligonucleotide
actctttctttaggcatctctcgtcatcag

SEQ ID NO: 495774 - DNA, 30 bp, Artificial Sequence
  Synthetic oligonucleotide
gaaataggcctgtcaatagatatcgatcag

SEQ ID NO: 495775 - DNA, 30 bp, Artificial Sequence
  Synthetic oligonucleotide
attcctgattcgttatggtcgttggatcag

SEQ ID NO: 495776 - DNA, 30 bp, Artificial Sequence
  Synthetic oligonucleotide
cgccaatggtaatggtagactggatatcag

SEQ ID NO: 495777 - DNA, 30 bp, Artificial Sequence
  Synthetic oligonucleotide
agtctacagtatgtttattattgatatcag

SEQ ID NO: 495778 - DNA, 30 bp, Artificial Sequence
  Synthetic oligonucleotide
tttatagggcaccgatgcgtgttatatcag

SEQ ID NO: 495779 - DNA, 30 bp, Artificial Sequence
  Synthetic oligonucleotide
aacgcggccttaagcaccccctagtatcag

SEQ ID NO: 495780 - DNA, 30 bp, Artificial Sequence
  Synthetic oligonucleotide
gcatctctactcctccgcgaccaaactcag

SEQ ID NO: 495781 - DNA, 30 bp, Artificial Sequence
  Synthetic oligonucleotide
ccggcccggcgcgcttggcgtggcactcag

SEQ ID NO: 495782 - DNA, 30 bp, Artificial Sequence
  Synthetic oligonucleotide
gactgaggaagggcttcttgacctactcag

SEQ ID NO: 495783 - DNA, 30 bp, Artificial Sequence
  Synthetic oligonucleotide
gagtgccagctaatacctcaaagacctcag

SEQ ID NO: 495784 - DNA, 30 bp, Artificial Sequence
  Synthetic oligonucleotide
taagggacaataattttttccggccctcag

SEQ ID NO: 495785 - DNA, 30 bp, Artificial Sequence
  Synthetic oligonucleotide
ttcgagactctttatattatagtggctcag

SEQ ID NO: 495786 - DNA, 30 bp, Artificial Sequence
  Synthetic oligonucleotide
tttaggactaccagcccactgaaatctcag

SEQ ID NO: 495787 - DNA, 30 bp, Artificial Sequence
  Synthetic oligonucleotide
gtgcaggcacctaactatatcgcatctcag

SEQ ID NO: 495788 - DNA, 30 bp, Artificial Sequence
  Synthetic oligonucleotide
attgacgctaaactctagatcttctctcag

SEQ ID NO: 495789 - DNA, 30 bp, Artificial Sequence
  Synthetic oligonucleotide
ctgatgagccactccttagttagcagtcag

SEQ ID NO: 495790 - DNA, 30 bp, Artificial Sequence
  Synthetic oligonucleotide
agggcggctctatggcgtaggtgcagtcag

SEQ ID NO: 495791 - DNA, 30 bp, Artificial Sequence
  Synthetic oligonucleotide
attccggcaccgcgtgtccacgcacgtcag

SEQ ID NO: 495792 - DNA, 30 bp, Artificial Sequence
  Synthetic oligonucleotide
ttatttttgggccaagtatttcgccgtcag

SEQ ID NO: 495793 - DNA, 30 bp, Artificial Sequence
  Synthetic oligonucleotide
taaggccacatataacctaccttaggtcag

SEQ ID NO: 495794 - DNA, 30 bp, Artificial Sequence
  Synthetic oligonucleotide
acttttgttgcctaacgatagcacggtcag

SEQ ID NO: 495795 - DNA, 30 bp, Artificial Sequence
  Synthetic oligonucleotide
ttaaatgacgacggatattactgcggtcag

SEQ ID NO: 495796 - DNA, 30 bp, Artificial Sequence
  Synthetic oligonucleotide
tgcactgatccctctgtaactaggggtcag

SEQ ID NO: 495797 - DNA, 30 bp, Artificial Sequence
  Synthetic oligonucleotide
tagtgacactgtagcatggctgaatgtcag

SEQ ID NO: 495798 - DNA, 30 bp, Artificial Sequence
  Synthetic oligonucleotide
aatgatgggcgtacgacatgaacatgtcag

SEQ ID NO: 495799 - DNA, 30 bp, Artificial Sequence
  Synthetic oligonucleotide
tgcttataggccttgaggctcaggtgtcag

SEQ ID NO: 495800 - DNA, 30 bp, Artificial Sequence
  Synthetic oligonucleotide
tgttccttcattagccactagaacattcag

SEQ ID NO: 495801 - DNA, 30 bp, Artificial Sequence
  Synthetic oligonucleotide
ttctaccaactaagggacttgttgattcag

SEQ ID NO: 495802 - DNA, 30 bp, Artificial Sequence
  Synthetic oligonucleotide
aacaaaagatgctgattaccgacgcttcag

SEQ ID NO: 495803 - DNA, 30 bp, Artificial Sequence
  Synthetic oligonucleotide
tagcattaaaccaacgcagtagggcttcag

SEQ ID NO: 495804 - DNA, 30 bp, Artificial Sequence
  Synthetic oligonucleotide
agtgtgcccggcattgcaggctgtcttcag

SEQ ID NO: 495805 - DNA, 30 bp, Artificial Sequence
  Synthetic oligonucleotide
gatattatgtattgatactcaattcttcag

SEQ ID NO: 495806 - DNA, 30 bp, Artificial Sequence
  Synthetic oligonucleotide
ctctacaatctttcgagttaataagttcag

SEQ ID NO: 495807 - DNA, 30 bp, Artificial Sequence
  Synthetic oligonucleotide
gtgatcaccgggcacatacgggacgttcag

SEQ ID NO: 495808 - DNA, 30 bp, Artificial Sequence
  Synthetic oligonucleotide
gattcgtagcggatattggagcgcgttcag

SEQ ID NO: 495809 - DNA, 30 bp, Artificial Sequence
  Synthetic oligonucleotide
tattggacccctcgtgcttttatcgttcag

SEQ ID NO: 495810 - DNA, 30 bp, Artificial Sequence
  Synthetic oligonucleotide
aattgcgggaagcacatgagcagggttcag

SEQ ID NO: 495811 - DNA, 30 bp, Artificial Sequence
  Synthetic oligonucleotide
gagtaagcgcgactgatgtagaaatttcag

SEQ ID NO: 495812 - DNA, 30 bp, Artificial Sequence
  Synthetic oligonucleotide
tagggcgccttgggggtcgcaacatttcag

SEQ ID NO: 495813 - DNA, 30 bp, Artificial Sequence
  Synthetic oligonucleotide
gcacttcgcaatgacgatatgcgatttcag

SEQ ID NO: 495814 - DNA, 26 bp, Artificial Sequence
  Synthetic oligonucleotide
acggaacattataccgcggctttcag

SEQ ID NO: 495815 - DNA, 30 bp, Artificial Sequence
  Synthetic oligonucleotide
ctcatcttctgggcagcctttacgtttcag

SEQ ID NO: 495816 - DNA, 30 bp, Artificial Sequence
  Synthetic oligonucleotide
catcggatggttatgtaaagggcttttcag

SEQ ID NO: 495817 - DNA, 30 bp, Artificial Sequence
  Synthetic oligonucleotide
atagcagcctcaggtccatgttcttttcag

SEQ ID NO: 495818 - DNA, 30 bp, Artificial Sequence
  Synthetic oligonucleotide
aatttatgtcgtaagggacccctttttcag

SEQ ID NO: 495819 - DNA, 30 bp, Artificial Sequence
  Synthetic oligonucleotide
ctggtaaccctcttttttttagaaaaagag

SEQ ID NO: 495820 - DNA, 30 bp, Artificial Sequence
  Synthetic oligonucleotide
tccgggggtatacatgtccgagcaaaagag

SEQ ID NO: 495821 - DNA, 30 bp, Artificial Sequence
  Synthetic oligonucleotide
agcatctaagaacgtgcaacactcaaagag

SEQ ID NO: 495822 - DNA, 30 bp, Artificial Sequence
  Synthetic oligonucleotide
cggtggtggatctggttggccgcgaaagag

SEQ ID NO: 495823 - DNA, 30 bp, Artificial Sequence
  Synthetic oligonucleotide
cagtccgaatgtcagacaggtggtaaagag

SEQ ID NO: 495824 - DNA, 30 bp, Artificial Sequence
  Synthetic oligonucleotide
gtagtttgtgaactattcttatgtaaagag

SEQ ID NO: 495825 - DNA, 30 bp, Artificial Sequence
  Synthetic oligonucleotide
ggacctcaaggtgctggtatggttaaagag

SEQ ID NO: 495826 - DNA, 30 bp, Artificial Sequence
  Synthetic oligonucleotide
gtcaagggcataaggtgaactcgacaagag

SEQ ID NO: 495827 - DNA, 30 bp, Artificial Sequence
  Synthetic oligonucleotide
taggtctttgtttttacgtggttgcaagag

SEQ ID NO: 495828 - DNA, 30 bp, Artificial Sequence
  Synthetic oligonucleotide
ctcggagtgtcagtttagcttgcagaagag

SEQ ID NO: 495829 - DNA, 30 bp, Artificial Sequence
  Synthetic oligonucleotide
cccacagattcatggtctcttgtcgaagag

SEQ ID NO: 495830 - DNA, 30 bp, Artificial Sequence
  Synthetic oligonucleotide
atcaacgggtgacacagtacgtcggaagag

SEQ ID NO: 495831 - DNA, 30 bp, Artificial Sequence
  Synthetic oligonucleotide
ccgccgctccaacaatcgatagtggaagag

SEQ ID NO: 495832 - DNA, 30 bp, Artificial Sequence
  Synthetic oligonucleotide
tttccacgtgttagtccgggggcataagag

SEQ ID NO: 495833 - DNA, 30 bp, Artificial Sequence
  Synthetic oligonucleotide
tggtcttgcagctaaggagagaactaagag

SEQ ID NO: 495834 - DNA, 30 bp, Artificial Sequence
  Synthetic oligonucleotide
gatattgccgcaaaaaggattttctaagag

SEQ ID NO: 495835 - DNA, 30 bp, Artificial Sequence
  Synthetic oligonucleotide
tacgatgggttgtcgcgcaagtcttaagag

SEQ ID NO: 495836 - DNA, 30 bp, Artificial Sequence
  Synthetic oligonucleotide
cgatttcaataggcccaggtcgaaacagag

SEQ ID NO: 495837 - DNA, 30 bp, Artificial Sequence
  Synthetic oligonucleotide
gcacgaaattcaggaagatcagcaccagag

SEQ ID NO: 495838 - DNA, 30 bp, Artificial Sequence
  Synthetic oligonucleotide
cacgagttgaaacgctgatttctaccagag

SEQ ID NO: 495839 - DNA, 30 bp, Artificial Sequence
  Synthetic oligonucleotide
ctttcgtctgggcgagggaaaggcccagag

SEQ ID NO: 495840 - DNA, 30 bp, Artificial Sequence
  Synthetic oligonucleotide
taggatccgctgtatagtcgaacagcagag

SEQ ID NO: 495841 - DNA, 30 bp, Artificial Sequence
  Synthetic oligonucleotide
ggcagttacctgctgacccggccagcagag

SEQ ID NO: 495842 - DNA, 30 bp, Artificial Sequence
  Synthetic oligonucleotide
atacctttgtcaagctgtcctaacgcagag

SEQ ID NO: 495843 - DNA, 30 bp, Artificial Sequence
  Synthetic oligonucleotide
aaagggtggctaactcgattgtacgcagag

SEQ ID NO: 495844 - DNA, 30 bp, Artificial Sequence
  Synthetic oligonucleotide
aaccccaggggacgataaccgggcgcagag

SEQ ID NO: 495845 - DNA, 30 bp, Artificial Sequence
  Synthetic oligonucleotide
aggctattggtcacttcacttggcgcagag

SEQ ID NO: 495846 - DNA, 30 bp, Artificial Sequence
  Synthetic oligonucleotide
tgcggttctcaaaaaagatccggggcagag

SEQ ID NO: 495847 - DNA, 30 bp, Artificial Sequence
  Synthetic oligonucleotide
agaagacgggtgcttacggacgctgcagag

SEQ ID NO: 495848 - DNA, 30 bp, Artificial Sequence
  Synthetic oligonucleotide
gcgattcaaaatcaattcgacgttgcagag

SEQ ID NO: 495849 - DNA, 30 bp, Artificial Sequence
  Synthetic oligonucleotide
gccttatttgtagcgtcacaggcaagagag

SEQ ID NO: 495850 - DNA, 30 bp, Artificial Sequence
  Synthetic oligonucleotide
atcccttatatgggaatcgaccatagagag

SEQ ID NO: 495851 - DNA, 30 bp, Artificial Sequence
  Synthetic oligonucleotide
ttttgattgtccgctttatagcagcgagag

SEQ ID NO: 495852 - DNA, 30 bp, Artificial Sequence
  Synthetic oligonucleotide
tcagctgatagttgtagcagtcacggagag

SEQ ID NO: 495853 - DNA, 30 bp, Artificial Sequence
  Synthetic oligonucleotide
attcaccggaataattctcggcccggagag

SEQ ID NO: 495854 - DNA, 30 bp, Artificial Sequence
  Synthetic oligonucleotide
acagctttccaggtttttattggcggagag

SEQ ID NO: 495855 - DNA, 30 bp, Artificial Sequence
  Synthetic oligonucleotide
gtttccgataaagtcacaaatcatggagag

SEQ ID NO: 495856 - DNA, 30 bp, Artificial Sequence
  Synthetic oligonucleotide
ctcagcgcgggttcgcccatcgatggagag

SEQ ID NO: 495857 - DNA, 30 bp, Artificial Sequence
  Synthetic oligonucleotide
tgggtttccagttatagcgtcatatgagag

SEQ ID NO: 495858 - DNA, 30 bp, Artificial Sequence
  Synthetic oligonucleotide
cgccgggagacggttaacctcttatgagag

SEQ ID NO: 495859 - DNA, 30 bp, Artificial Sequence
  Synthetic oligonucleotide
gcctcgtcttatcgagaccctaagtgagag

SEQ ID NO: 495860 - DNA, 30 bp, Artificial Sequence
  Synthetic oligonucleotide
cagctgtagaggtcccgagggcagtgagag

SEQ ID NO: 495861 - DNA, 30 bp, Artificial Sequence
  Synthetic oligonucleotide
gcagttcacggtgcagcggtcatgtgagag

SEQ ID NO: 495862 - DNA, 30 bp, Artificial Sequence
  Synthetic oligonucleotide
cgcaaaacgcgctttactatccattgagag

SEQ ID NO: 495863 - DNA, 30 bp, Artificial Sequence
  Synthetic oligonucleotide
tatagagttctgttttcgcaactttgagag

SEQ ID NO: 495864 - DNA, 30 bp, Artificial Sequence
  Synthetic oligonucleotide
agactttctcacctggcgcaaacaatagag

SEQ ID NO: 495865 - DNA, 30 bp, Artificial Sequence
  Synthetic oligonucleotide
ccaagcgtcgcttttgccgcagtaatagag

SEQ ID NO: 495866 - DNA, 30 bp, Artificial Sequence
  Synthetic oligonucleotide
cggttcctacggatacgtagcacgatagag

SEQ ID NO: 495867 - DNA, 30 bp, Artificial Sequence
  Synthetic oligonucleotide
agaaagcggctgttccgccacagtatagag

SEQ ID NO: 495868 - DNA, 30 bp, Artificial Sequence
  Synthetic oligonucleotide
gttggcaacgccaaccgaccggttatagag

SEQ ID NO: 495869 - DNA, 30 bp, Artificial Sequence
  Synthetic oligonucleotide
aaatatggttcatcgagaaactttatagag

SEQ ID NO: 495870 - DNA, 30 bp, Artificial Sequence
  Synthetic oligonucleotide
tgcagacatggttcccgtgactaactagag

SEQ ID NO: 495871 - DNA, 30 bp, Artificial Sequence
  Synthetic oligonucleotide
ttggttctttagtgactgcttcgtctagag

SEQ ID NO: 495872 - DNA, 30 bp, Artificial Sequence
  Synthetic oligonucleotide
gattttaatagctattcgggacacgtagag

SEQ ID NO: 495873 - DNA, 30 bp, Artificial Sequence
  Synthetic oligonucleotide
aaagctgttccagtgacgcccttcgtagag

SEQ ID NO: 495874 - DNA, 30 bp, Artificial Sequence
  Synthetic oligonucleotide
accacaataccgtactcaagcaatgtagag

SEQ ID NO: 495875 - DNA, 30 bp, Artificial Sequence
  Synthetic oligonucleotide
ttgctaacgtttttagtttatgctgtagag

SEQ ID NO: 495876 - DNA, 30 bp, Artificial Sequence
  Synthetic oligonucleotide
ggtacgactctcagggtcgcgagtgtagag

SEQ ID NO: 495877 - DNA, 30 bp, Artificial Sequence
  Synthetic oligonucleotide
caaggtcccaggctcgaggtaaagttagag

SEQ ID NO: 495878 - DNA, 30 bp, Artificial Sequence
  Synthetic oligonucleotide
gcgaggccgatcgattctcagtgtttagag

SEQ ID NO: 495879 - DNA, 30 bp, Artificial Sequence
  Synthetic oligonucleotide
ctggatgtcttacgctcggtaaagaacgag

SEQ ID NO: 495880 - DNA, 30 bp, Artificial Sequence
  Synthetic oligonucleotide
aatcgttgcgttgcaactcgtaggaacgag

SEQ ID NO: 495881 - DNA, 30 bp, Artificial Sequence
  Synthetic oligonucleotide
attatatgggaagggagcacattgaacgag

SEQ ID NO: 495882 - DNA, 30 bp, Artificial Sequence
  Synthetic oligonucleotide
ctcaattatggggcaatcgtgtctaacgag

SEQ ID NO: 495883 - DNA, 30 bp, Artificial Sequence
  Synthetic oligonucleotide
cctcgaacacaagttgcagaatgtaacgag

SEQ ID NO: 495884 - DNA, 30 bp, Artificial Sequence
  Synthetic oligonucleotide
ttctattcagatctaaccagcatacacgag

SEQ ID NO: 495885 - DNA, 30 bp, Artificial Sequence
  Synthetic oligonucleotide
gattcgtcttagagcacccagcggcacgag

SEQ ID NO: 495886 - DNA, 30 bp, Artificial Sequence
  Synthetic oligonucleotide
agaatgcaaagaccgagcgctcggcacgag

SEQ ID NO: 495887 - DNA, 30 bp, Artificial Sequence
  Synthetic oligonucleotide
gagccaattgattgaccataatatcacgag

SEQ ID NO: 495888 - DNA, 30 bp, Artificial Sequence
  Synthetic oligonucleotide
ctttccgtggataggggggcacaagacgag

SEQ ID NO: 495889 - DNA, 35 bp, Artificial Sequence
  Synthetic oligonucleotide
catgcccatcaaaagaataagcgggcgcagacgag

SEQ ID NO: 495890 - DNA, 30 bp, Artificial Sequence
  Synthetic oligonucleotide
ctattttcggactgcgatgaggcagacgag

SEQ ID NO: 495891 - DNA, 30 bp, Artificial Sequence
  Synthetic oligonucleotide
aaggcctgaaaactggctgagttagacgag

SEQ ID NO: 495892 - DNA, 30 bp, Artificial Sequence
  Synthetic oligonucleotide
agattgcagctgttttctcgctaggacgag

SEQ ID NO: 495893 - DNA, 30 bp, Artificial Sequence
  Synthetic oligonucleotide
aaaggcggtcacgaacaagcgagtgacgag

SEQ ID NO: 495894 - DNA, 30 bp, Artificial Sequence
  Synthetic oligonucleotide
cgatcgccggctatcaccgcgcactacgag

SEQ ID NO: 495895 - DNA, 30 bp, Artificial Sequence
  Synthetic oligonucleotide
gtgtcgtcctccccgtactaggactacgag

SEQ ID NO: 495896 - DNA, 30 bp, Artificial Sequence
  Synthetic oligonucleotide
gcatgtacaatacaatttggggcgtacgag

SEQ ID NO: 495897 - DNA, 30 bp, Artificial Sequence
  Synthetic oligonucleotide
gagcggtgtggggcagcgttggcttacgag

SEQ ID NO: 495898 - DNA, 30 bp, Artificial Sequence
  Synthetic oligonucleotide
gcggatcatgactgactcagcagttacgag

SEQ ID NO: 495899 - DNA, 30 bp, Artificial Sequence
  Synthetic oligonucleotide
gttggacatccgagtgtgtataacaccgag

SEQ ID NO: 495900 - DNA, 30 bp, Artificial Sequence
  Synthetic oligonucleotide
taaaaaggttggtcggttctagacaccgag

SEQ ID NO: 495901 - DNA, 30 bp, Artificial Sequence
  Synthetic oligonucleotide
aatctttttagtcgtactgtttggaccgag

SEQ ID NO: 495902 - DNA, 30 bp, Artificial Sequence
  Synthetic oligonucleotide
gggattttatagattgctctccttaccgag

SEQ ID NO: 495903 - DNA, 30 bp, Artificial Sequence
  Synthetic oligonucleotide
ggtgacgtaaacgcacattgaggacccgag

SEQ ID NO: 495904 - DNA, 30 bp, Artificial Sequence
  Synthetic oligonucleotide
atgtcggcacgagaggttaccttacccgag

SEQ ID NO: 495905 - DNA, 30 bp, Artificial Sequence
  Synthetic oligonucleotide
gaaaggaggaaaaaaaccataggccccgag

SEQ ID NO: 495906 - DNA, 30 bp, Artificial Sequence
  Synthetic oligonucleotide
caaaaaattttaccgtattatgatcccgag

SEQ ID NO: 495907 - DNA, 30 bp, Artificial Sequence
  Synthetic oligonucleotide
aaattcactcggatttgatccattcccgag

SEQ ID NO: 495908 - DNA, 30 bp, Artificial Sequence
  Synthetic oligonucleotide
ctaggactacgactgtttctagacgccgag

SEQ ID NO: 495909 - DNA, 30 bp, Artificial Sequence
  Synthetic oligonucleotide
caaaccagcgcggcaccagcgaccgccgag

SEQ ID NO: 495910 - DNA, 30 bp, Artificial Sequence
  Synthetic oligonucleotide
ccttggaaggggactactcaagctagcgag

SEQ ID NO: 495911 - DNA, 30 bp, Artificial Sequence
  Synthetic oligonucleotide
ctatagggacctgtgatgtcgtaacgcgag

SEQ ID NO: 495912 - DNA, 30 bp, Artificial Sequence
  Synthetic oligonucleotide
tgttggcgcctcgggttagcatgtcgcgag

SEQ ID NO: 495913 - DNA, 30 bp, Artificial Sequence
  Synthetic oligonucleotide
tccatttgacggcgttgggaaattcgcgag

SEQ ID NO: 495914 - DNA, 30 bp, Artificial Sequence
  Synthetic oligonucleotide
aacttcttttaacatcccggttagggcgag

SEQ ID NO: 495915 - DNA, 30 bp, Artificial Sequence
  Synthetic oligonucleotide
aatacccgggcgcctaccgacgggggcgag

SEQ ID NO: 495916 - DNA, 30 bp, Artificial Sequence
  Synthetic oligonucleotide
gaaggggacgcagtagtaaaagaatgcgag

SEQ ID NO: 495917 - DNA, 30 bp, Artificial Sequence
  Synthetic oligonucleotide
gatcagccaataattggggttttatgcgag

SEQ ID NO: 495918 - DNA, 30 bp, Artificial Sequence
  Synthetic oligonucleotide
ttatggaattgaaccgactcatcgtgcgag

SEQ ID NO: 495919 - DNA, 30 bp, Artificial Sequence
  Synthetic oligonucleotide
aattcgaatcatctcgatgaagtgtgcgag

SEQ ID NO: 495920 - DNA, 30 bp, Artificial Sequence
  Synthetic oligonucleotide
ttttgcgtattaatgatctaaatttgcgag

SEQ ID NO: 495921 - DNA, 30 bp, Artificial Sequence
  Synthetic oligonucleotide
gaccaaggaggtgcaagccgccgtatcgag

SEQ ID NO: 495922 - DNA, 30 bp, Artificial Sequence
  Synthetic oligonucleotide
attactttgatctgagtgagcgaactcgag

SEQ ID NO: 495923 - DNA, 30 bp, Artificial Sequence
  Synthetic oligonucleotide
gtcgcttttgcgacgctctcgttactcgag

SEQ ID NO: 495924 - DNA, 30 bp, Artificial Sequence
  Synthetic oligonucleotide
cggctgttactaccgacggccgccctcgag

SEQ ID NO: 495925 - DNA, 30 bp, Artificial Sequence
  Synthetic oligonucleotide
caatagttggccctcgaagcttggctcgag

SEQ ID NO: 495926 - DNA, 30 bp, Artificial Sequence
  Synthetic oligonucleotide
gatcggattcgccaaccgcgtcgattcgag

SEQ ID NO: 495927 - DNA, 30 bp, Artificial Sequence
  Synthetic oligonucleotide
tcggggtatacctgttgtttttccttcgag

SEQ ID NO: 495928 - DNA, 30 bp, Artificial Sequence
  Synthetic oligonucleotide
atcttagaagcagtctttaaagctttcgag

SEQ ID NO: 495929 - DNA, 30 bp, Artificial Sequence
  Synthetic oligonucleotide
tgacgcagacccctaaagagggtcaaggag

SEQ ID NO: 495930 - DNA, 30 bp, Artificial Sequence
  Synthetic oligonucleotide
tatctgctgcctgtgaaacattagaaggag

SEQ ID NO: 495931 - DNA, 30 bp, Artificial Sequence
  Synthetic oligonucleotide
attcattttgctattttcgggccgcaggag

SEQ ID NO: 495932 - DNA, 30 bp, Artificial Sequence
  Synthetic oligonucleotide
actggacgagaaagacgcggaattcaggag

SEQ ID NO: 495933 - DNA, 30 bp, Artificial Sequence
  Synthetic oligonucleotide
gggtttgaatgtcgggatgcggctgaggag

SEQ ID NO: 495934 - DNA, 30 bp, Artificial Sequence
  Synthetic oligonucleotide
tacttaatccggtcccgaatgcaaacggag

SEQ ID NO: 495935 - DNA, 30 bp, Artificial Sequence
  Synthetic oligonucleotide
tgttttgcatgtgtttgacccgggacggag

SEQ ID NO: 495936 - DNA, 30 bp, Artificial Sequence
  Synthetic oligonucleotide
tactctctccgtttaacgtgacgaccggag

SEQ ID NO: 495937 - DNA, 30 bp, Artificial Sequence
  Synthetic oligonucleotide
aatgatcctcgtgtgttatttactccggag

SEQ ID NO: 495938 - DNA, 30 bp, Artificial Sequence
  Synthetic oligonucleotide
tccactcagcgcgccggtcagggtccggag

SEQ ID NO: 495939 - DNA, 30 bp, Artificial Sequence
  Synthetic oligonucleotide
ggcagcactatccaagatccgcgagcggag

SEQ ID NO: 495940 - DNA, 30 bp, Artificial Sequence
  Synthetic oligonucleotide
gaggcgcggcgtgttattccacacgcggag

SEQ ID NO: 495941 - DNA, 30 bp, Artificial Sequence
  Synthetic oligonucleotide
taaaatacgctaaaagcaatggacgcggag

SEQ ID NO: 495942 - DNA, 30 bp, Artificial Sequence
  Synthetic oligonucleotide
tctgagtcaatttataagctggacgcggag

SEQ ID NO: 495943 - DNA, 30 bp, Artificial Sequence
  Synthetic oligonucleotide
atacttgctgatgcggtagactcatcggag

SEQ ID NO: 495944 - DNA, 30 bp, Artificial Sequence
  Synthetic oligonucleotide
acctctgatgaattcgcgttgggatcggag

SEQ ID NO: 495945 - DNA, 30 bp, Artificial Sequence
  Synthetic oligonucleotide
tagtgatagggatccatacgcttatcggag

SEQ ID NO: 495946 - DNA, 30 bp, Artificial Sequence
  Synthetic oligonucleotide
gaccctgggacctcccgctaatagtcggag

SEQ ID NO: 495947 - DNA, 30 bp, Artificial Sequence
  Synthetic oligonucleotide
gaaacccgtttagagcgggtcgcttcggag

SEQ ID NO: 495948 - DNA, 30 bp, Artificial Sequence
  Synthetic oligonucleotide
taggatcatattggcccacacatttcggag

SEQ ID NO: 495949 - DNA, 30 bp, Artificial Sequence
  Synthetic oligonucleotide
gcgcgttataagtttcgggctttttcggag

SEQ ID NO: 495950 - DNA, 30 bp, Artificial Sequence
  Synthetic oligonucleotide
gggtcggcgcggtctcaaaggggaagggag

SEQ ID NO: 495951 - DNA, 30 bp, Artificial Sequence
  Synthetic oligonucleotide
tggccatccaggaggcgaatccacagggag

SEQ ID NO: 495952 - DNA, 30 bp, Artificial Sequence
  Synthetic oligonucleotide
gataacagggattcgctttataggagggag

SEQ ID NO: 495953 - DNA, 30 bp, Artificial Sequence
  Synthetic oligonucleotide
cgagccgtcggagggaaaaagctgagggag

SEQ ID NO: 495954 - DNA, 30 bp, Artificial Sequence
  Synthetic oligonucleotide
tgtaagtccgtatgatcactcttgagggag

SEQ ID NO: 495955 - DNA, 30 bp, Artificial Sequence
  Synthetic oligonucleotide
agcatcgcacgtgctggctcaccacgggag

SEQ ID NO: 495956 - DNA, 30 bp, Artificial Sequence
  Synthetic oligonucleotide
tgtttgactgacaggtcgcctttacgggag

SEQ ID NO: 495957 - DNA, 30 bp, Artificial Sequence
  Synthetic oligonucleotide
ttatgaccaaagactgtattactccgggag

SEQ ID NO: 495958 - DNA, 30 bp, Artificial Sequence
  Synthetic oligonucleotide
tttaagaccagggaagcccgcgcgcgggag

SEQ ID NO: 495959 - DNA, 30 bp, Artificial Sequence
  Synthetic oligonucleotide
acacgcaatagcacccagttctatcgggag

SEQ ID NO: 495960 - DNA, 30 bp, Artificial Sequence
  Synthetic oligonucleotide
atcgatgagtaagacccgtctcgtcgggag

SEQ ID NO: 495961 - DNA, 30 bp, Artificial Sequence
  Synthetic oligonucleotide
tttgagacctaggaggcggagtgtcgggag

SEQ ID NO: 495962 - DNA, 30 bp, Artificial Sequence
  Synthetic oligonucleotide
ctatattcgagacatcagcaaccaggggag

SEQ ID NO: 495963 - DNA, 30 bp, Artificial Sequence
  Synthetic oligonucleotide
ggcgttctccccggctggtcgctaggggag

SEQ ID NO: 495964 - DNA, 30 bp, Artificial Sequence
  Synthetic oligonucleotide
tgtatgggtgcggtgcacgtacggggggag

SEQ ID NO: 495965 - DNA, 30 bp, Artificial Sequence
  Synthetic oligonucleotide
agcattatttagttattagcccaatgggag

SEQ ID NO: 495966 - DNA, 30 bp, Artificial Sequence
  Synthetic oligonucleotide
atttattgcggaactgtggcacattgggag

SEQ ID NO: 495967 - DNA, 30 bp, Artificial Sequence
  Synthetic oligonucleotide
tggcatgtccgataaggcagcgtcatggag

SEQ ID NO: 495968 - DNA, 30 bp, Artificial Sequence
  Synthetic oligonucleotide
gggggcgtccggcagcgggaaccgatggag

SEQ ID NO: 495969 - DNA, 30 bp, Artificial Sequence
  Synthetic oligonucleotide
tcgtcgactacgccggttgggactatggag

SEQ ID NO: 495970 - DNA, 30 bp, Artificial Sequence
  Synthetic oligonucleotide
gcttctacctccaaatttgtgcctatggag

SEQ ID NO: 495971 - DNA, 30 bp, Artificial Sequence
  Synthetic oligonucleotide
aaattatagcaagaggtgtgtgcactggag

SEQ ID NO: 495972 - DNA, 30 bp, Artificial Sequence
  Synthetic oligonucleotide
ggatctcccgtatgagtcttgacgctggag

SEQ ID NO: 495973 - DNA, 30 bp, Artificial Sequence
  Synthetic oligonucleotide
tccgcgggacacaattgcgttccgctggag

SEQ ID NO: 495974 - DNA, 30 bp, Artificial Sequence
  Synthetic oligonucleotide
gggtagggtcgtagcatgggcggtctggag

SEQ ID NO: 495975 - DNA, 30 bp, Artificial Sequence
  Synthetic oligonucleotide
agttgagcgagaagtgtttgccttctggag

SEQ ID NO: 495976 - DNA, 30 bp, Artificial Sequence
  Synthetic oligonucleotide
cccgtgatgcaacgcaaagattgcgtggag

SEQ ID NO: 495977 - DNA, 30 bp, Artificial Sequence
  Synthetic oligonucleotide
ggcgtctgtttgggtgttgttctcgtggag

SEQ ID NO: 495978 - DNA, 30 bp, Artificial Sequence
  Synthetic oligonucleotide
acaataagtaatgccaaagggtcggtggag

SEQ ID NO: 495979 - DNA, 30 bp, Artificial Sequence
  Synthetic oligonucleotide
ttgccctgttatcgcaacactcttgtggag

SEQ ID NO: 495980 - DNA, 30 bp, Artificial Sequence
  Synthetic oligonucleotide
acccactctaatgcataagtgcgattggag

SEQ ID NO: 495981 - DNA, 29 bp, Artificial Sequence
  Synthetic oligonucleotide
aaatctccgacggtcttaggttattggag

SEQ ID NO: 495982 - DNA, 30 bp, Artificial Sequence
  Synthetic oligonucleotide
ctgagtgtccgacgtttaaagacgttggag

SEQ ID NO: 495983 - DNA, 30 bp, Artificial Sequence
  Synthetic oligonucleotide
ctcaaacagttttattttttaaggttggag

SEQ ID NO: 495984 - DNA, 30 bp, Artificial Sequence
  Synthetic oligonucleotide
atttaggacggcagggctcaggctaatgag

SEQ ID NO: 495985 - DNA, 30 bp, Artificial Sequence
  Synthetic oligonucleotide
tgtatacgtgcctgcagatacagtaatgag

SEQ ID NO: 495986 - DNA, 30 bp, Artificial Sequence
  Synthetic oligonucleotide
aagctcaaatgggtgatgcatacacatgag

SEQ ID NO: 495987 - DNA, 30 bp, Artificial Sequence
  Synthetic oligonucleotide
accggctcagtatgactagctgcacatgag

SEQ ID NO: 495988 - DNA, 30 bp, Artificial Sequence
  Synthetic oligonucleotide
gggcagtgggttatcggccccgtacatgag

SEQ ID NO: 495989 - DNA, 30 bp, Artificial Sequence
  Synthetic oligonucleotide
gggtagtgtataggtgggagggagcatgag

SEQ ID NO: 495990 - DNA, 30 bp, Artificial Sequence
  Synthetic oligonucleotide
gttatattttctcggcacggcgggcatgag

SEQ ID NO: 495991 - DNA, 30 bp, Artificial Sequence
  Synthetic oligonucleotide
gaaaggatcttttgggttctgttgcatgag

SEQ ID NO: 495992 - DNA, 30 bp, Artificial Sequence
  Synthetic oligonucleotide
ctgtactggccatagccaccaagtcatgag

SEQ ID NO: 495993 - DNA, 30 bp, Artificial Sequence
  Synthetic oligonucleotide
aattgtgcatgcgggctgctacaggatgag

SEQ ID NO: 495994 - DNA, 30 bp, Artificial Sequence
  Synthetic oligonucleotide
ggttttccttagttgttgtggtgggatgag

SEQ ID NO: 495995 - DNA, 30 bp, Artificial Sequence
  Synthetic oligonucleotide
atctattaccgatgcgtcaaggatgatgag

SEQ ID NO: 495996 - DNA, 30 bp, Artificial Sequence
  Synthetic oligonucleotide
gtagtatcctaaatattcattattgatgag

SEQ ID NO: 495997 - DNA, 30 bp, Artificial Sequence
  Synthetic oligonucleotide
gctctggcattcttaattagtaaatatgag

SEQ ID NO: 495998 - DNA, 30 bp, Artificial Sequence
  Synthetic oligonucleotide
aagttcatggtacgcagactaacatatgag

SEQ ID NO: 495999 - DNA, 30 bp, Artificial Sequence
  Synthetic oligonucleotide
cgaggacatctgtttggccgtccgtatgag

SEQ ID NO: 496000 - DNA, 30 bp, Artificial Sequence
  Synthetic oligonucleotide
atacgtatttgctaagcacaattttatgag

SEQ ID NO: 496001 - DNA, 30 bp, Artificial Sequence
  Synthetic oligonucleotide
ccccggcacctgtgtagtttggtcactgag

SEQ ID NO: 496002 - DNA, 30 bp, Artificial Sequence
  Synthetic oligonucleotide
aaccaagcccgatgcgtgtattagactgag

SEQ ID NO: 496003 - DNA, 30 bp, Artificial Sequence
  Synthetic oligonucleotide
atttttgcttcattatctattgggcctgag

SEQ ID NO: 496004 - DNA, 30 bp, Artificial Sequence
  Synthetic oligonucleotide
tgggtatggccctgccgacgagtgcctgag

SEQ ID NO: 496005 - DNA, 30 bp, Artificial Sequence
  Synthetic oligonucleotide
gatatgaggtactttacttctgctcctgag

SEQ ID NO: 496006 - DNA, 30 bp, Artificial Sequence
  Synthetic oligonucleotide
gatttcgtttgtcataatctcgacgctgag

SEQ ID NO: 496007 - DNA, 30 bp, Artificial Sequence
  Synthetic oligonucleotide
ttaggggtatatttaacccgcagggctgag

SEQ ID NO: 496008 - DNA, 30 bp, Artificial Sequence
  Synthetic oligonucleotide
caaccggtaagcttaggtttatgatctgag

SEQ ID NO: 496009 - DNA, 30 bp, Artificial Sequence
  Synthetic oligonucleotide
atagttggtgcgtcgccaactaaaagtgag

SEQ ID NO: 496010 - DNA, 30 bp, Artificial Sequence
  Synthetic oligonucleotide
ggtgttaagaggcaccgctaatccagtgag

SEQ ID NO: 496011 - DNA, 30 bp, Artificial Sequence
  Synthetic oligonucleotide
ctcgggctgtcggaaatttaaaggagtgag

SEQ ID NO: 496012 - DNA, 30 bp, Artificial Sequence
  Synthetic oligonucleotide
atggagagcattatttcaggcgcacgtgag

SEQ ID NO: 496013 - DNA, 30 bp, Artificial Sequence
  Synthetic oligonucleotide
ttctgcaggcgtgttttaatttccggtgag

SEQ ID NO: 496014 - DNA, 30 bp, Artificial Sequence
  Synthetic oligonucleotide
actcacccattaaaacgcggtaagtgtgag

SEQ ID NO: 496015 - DNA, 30 bp, Artificial Sequence
  Synthetic oligonucleotide
tttgctccacttgcgtagtatacttgtgag

SEQ ID NO: 496016 - DNA, 30 bp, Artificial Sequence
  Synthetic oligonucleotide
tcaagtttctgacattttgggtacattgag

SEQ ID NO: 496017 - DNA, 30 bp, Artificial Sequence
  Synthetic oligonucleotide
gccaggccgatcttaggactcagcattgag

SEQ ID NO: 496018 - DNA, 30 bp, Artificial Sequence
  Synthetic oligonucleotide
atttctttagaaattaccggtggtattgag

SEQ ID NO: 496019 - DNA, 30 bp, Artificial Sequence
  Synthetic oligonucleotide
aaccatattaaaacttgctcgtcacttgag

SEQ ID NO: 496020 - DNA, 30 bp, Artificial Sequence
  Synthetic oligonucleotide
gagtgcacgtaaagactcgggtgacttgag

SEQ ID NO: 496021 - DNA, 30 bp, Artificial Sequence
  Synthetic oligonucleotide
ctacccagacgtttgggtatggtagttgag

SEQ ID NO: 496022 - DNA, 30 bp, Artificial Sequence
  Synthetic oligonucleotide
ttaggcacctccgcccgcaacactgttgag

SEQ ID NO: 496023 - DNA, 30 bp, Artificial Sequence
  Synthetic oligonucleotide
cagttggcaatgttgctcctcaaatttgag

SEQ ID NO: 496024 - DNA, 30 bp, Artificial Sequence
  Synthetic oligonucleotide
ataatgattctttccacgtgtgactttgag

SEQ ID NO: 496025 - DNA, 30 bp, Artificial Sequence
  Synthetic oligonucleotide
taggagaagtatgtaaaggagctctttgag

SEQ ID NO: 496026 - DNA, 30 bp, Artificial Sequence
  Synthetic oligonucleotide
gcagcacttgtatacatacatgattttgag

SEQ ID NO: 496027 - DNA, 30 bp, Artificial Sequence
  Synthetic oligonucleotide
tgcacctgttttgctcggatcttttttgag

SEQ ID NO: 496028 - DNA, 30 bp, Artificial Sequence
  Synthetic oligonucleotide
tagttaaaatgagaattacatcctaaatag

SEQ ID NO: 496029 - DNA, 30 bp, Artificial Sequence
  Synthetic oligonucleotide
acgcatatggccgaataagctgaacaatag

SEQ ID NO: 496030 - DNA, 30 bp, Artificial Sequence
  Synthetic oligonucleotide
gttttgtaggatacagcgtcgtaacaatag

SEQ ID NO: 496031 - DNA, 30 bp, Artificial Sequence
  Synthetic oligonucleotide
ttttcgagaggcaggtatgaatagcaatag

SEQ ID NO: 496032 - DNA, 30 bp, Artificial Sequence
  Synthetic oligonucleotide
aatctgctgttttctgatactgcgcaatag

SEQ ID NO: 496033 - DNA, 30 bp, Artificial Sequence
  Synthetic oligonucleotide
ctcctgttaggtgtcgctgcagacgaatag

SEQ ID NO: 496034 - DNA, 30 bp, Artificial Sequence
  Synthetic oligonucleotide
ttaactaggagtgactgcaatcccgaatag

SEQ ID NO: 496035 - DNA, 30 bp, Artificial Sequence
  Synthetic oligonucleotide
atgtattgtatgtgcgtccagtccgaatag

SEQ ID NO: 496036 - DNA, 30 bp, Artificial Sequence
  Synthetic oligonucleotide
aatccggttatcttactccatcatgaatag

SEQ ID NO: 496037 - DNA, 30 bp, Artificial Sequence
  Synthetic oligonucleotide
ttcataggcaataatgatcgtaaataatag

SEQ ID NO: 496038 - DNA, 30 bp, Artificial Sequence
  Synthetic oligonucleotide
ttcctggtggatgtagaatcgttgtaatag

SEQ ID NO: 496039 - DNA, 30 bp, Artificial Sequence
  Synthetic oligonucleotide
tcttatggggaggctcattatttgtaatag

SEQ ID NO: 496040 - DNA, 30 bp, Artificial Sequence
  Synthetic oligonucleotide
gcggcattaagagtgcgatcaccttaatag

SEQ ID NO: 496041 - DNA, 30 bp, Artificial Sequence
  Synthetic oligonucleotide
cgggttagttttactacccggggaacatag

SEQ ID NO: 496042 - DNA, 30 bp, Artificial Sequence
  Synthetic oligonucleotide
aatctgtcgtgtacaaaaaccgatacatag

SEQ ID NO: 496043 - DNA, 30 bp, Artificial Sequence
  Synthetic oligonucleotide
cgggaacctgcatttatattagctacatag

SEQ ID NO: 496044 - DNA, 30 bp, Artificial Sequence
  Synthetic oligonucleotide
tataccttttagtgcgcttggattacatag

SEQ ID NO: 496045 - DNA, 30 bp, Artificial Sequence
  Synthetic oligonucleotide
tgaaccgagaagaccgctcaagcaccatag

SEQ ID NO: 496046 - DNA, 30 bp, Artificial Sequence
  Synthetic oligonucleotide
ttgaatagtggggctctattagcaccatag

SEQ ID NO: 496047 - DNA, 30 bp, Artificial Sequence
  Synthetic oligonucleotide
taaggccgtgatgtggtggagctaccatag

SEQ ID NO: 496048 - DNA, 30 bp, Artificial Sequence
  Synthetic oligonucleotide
cattggtattactgacggctgtacccatag

SEQ ID NO: 496049 - DNA, 30 bp, Artificial Sequence
  Synthetic oligonucleotide
cggaataggcaaagtgcgctaagcccatag

SEQ ID NO: 496050 - DNA, 30 bp, Artificial Sequence
  Synthetic oligonucleotide
gcggaatttttcagtattcccggcccatag

SEQ ID NO: 496051 - DNA, 30 bp, Artificial Sequence
  Synthetic oligonucleotide
gcgccagccaagagggtctgtcagccatag

SEQ ID NO: 496052 - DNA, 30 bp, Artificial Sequence
  Synthetic oligonucleotide
ggacttgggtttcataaccgtgggccatag

SEQ ID NO: 496053 - DNA, 30 bp, Artificial Sequence
  Synthetic oligonucleotide
gctcacgacttagttgggagcgatccatag

SEQ ID NO: 496054 - DNA, 30 bp, Artificial Sequence
  Synthetic oligonucleotide
tttatccccgaagtagacgcgtgagcatag

SEQ ID NO: 496055 - DNA, 30 bp, Artificial Sequence
  Synthetic oligonucleotide
ccacctgcgcgtgcggacattcccgcatag

SEQ ID NO: 496056 - DNA, 30 bp, Artificial Sequence
  Synthetic oligonucleotide
atgacgctagggctattctttgaggcatag

SEQ ID NO: 496057 - DNA, 30 bp, Artificial Sequence
  Synthetic oligonucleotide
caccgacccaattctctgttaatggcatag

SEQ ID NO: 496058 - DNA, 30 bp, Artificial Sequence
  Synthetic oligonucleotide
actcaggggcactgttgatatctggcatag

SEQ ID NO: 496059 - DNA, 30 bp, Artificial Sequence
  Synthetic oligonucleotide
aattaggccggaataaaggcctctgcatag

SEQ ID NO: 496060 - DNA, 30 bp, Artificial Sequence
  Synthetic oligonucleotide
ttttatgtacagcggtaacgtcaatcatag

SEQ ID NO: 496061 - DNA, 30 bp, Artificial Sequence
  Synthetic oligonucleotide
aatcccacgaacccgagacgctatagatag

SEQ ID NO: 496062 - DNA, 30 bp, Artificial Sequence
  Synthetic oligonucleotide
attatattacgcgtgcagttggaaggatag

SEQ ID NO: 496063 - DNA, 30 bp, Artificial Sequence
  Synthetic oligonucleotide
aatactactactactcgcgaagcaggatag

SEQ ID NO: 496064 - DNA, 30 bp, Artificial Sequence
  Synthetic oligonucleotide
atctcataggtttaaaattagttaggatag

SEQ ID NO: 496065 - DNA, 30 bp, Artificial Sequence
  Synthetic oligonucleotide
gttgctggcggtaagcaggcagggatatag

SEQ ID NO: 496066 - DNA, 30 bp, Artificial Sequence
  Synthetic oligonucleotide
ctaagtaattatttcttattatagctatag

SEQ ID NO: 496067 - DNA, 30 bp, Artificial Sequence
  Synthetic oligonucleotide
ggacttgtccctacgaaagggggtctatag

SEQ ID NO: 496068 - DNA, 30 bp, Artificial Sequence
  Synthetic oligonucleotide
aatgagacaagcgaattaacacaagtatag

SEQ ID NO: 496069 - DNA, 30 bp, Artificial Sequence
  Synthetic oligonucleotide
atgacggctctattaatgtagcgagtatag

SEQ ID NO: 496070 - DNA, 30 bp, Artificial Sequence
  Synthetic oligonucleotide
accagcgttctatggtggtaaggtgtatag

SEQ ID NO: 496071 - DNA, 30 bp, Artificial Sequence
  Synthetic oligonucleotide
tatcagctcgcgaactccgcagcattatag

SEQ ID NO: 496072 - DNA, 30 bp, Artificial Sequence
  Synthetic oligonucleotide
cacgatatgatacgctgacaggtcttatag

SEQ ID NO: 496073 - DNA, 30 bp, Artificial Sequence
  Synthetic oligonucleotide
aatttagttaatattagccaagcgttatag

SEQ ID NO: 496074 - DNA, 30 bp, Artificial Sequence
  Synthetic oligonucleotide
gtgtttgttttgctctaaatgaggttatag

SEQ ID NO: 496075 - DNA, 30 bp, Artificial Sequence
  Synthetic oligonucleotide
tagtgtctgcttctaattgcgcggttatag

SEQ ID NO: 496076 - DNA, 30 bp, Artificial Sequence
  Synthetic oligonucleotide
ggttaggtcgattgcttcaaaaatttatag

SEQ ID NO: 496077 - DNA, 30 bp, Artificial Sequence
  Synthetic oligonucleotide
tgagggaccgtgtaactggcccttttatag

SEQ ID NO: 496078 - DNA, 30 bp, Artificial Sequence
  Synthetic oligonucleotide
tagctctgatttgatcccgtccgaaactag

SEQ ID NO: 496079 - DNA, 30 bp, Artificial Sequence
  Synthetic oligonucleotide
aactcgtgtgagagtttcattctaaactag

SEQ ID NO: 496080 - DNA, 30 bp, Artificial Sequence
  Synthetic oligonucleotide
gatatactagtctaaggagctaacaactag

SEQ ID NO: 496081 - DNA, 30 bp, Artificial Sequence
  Synthetic oligonucleotide
aaggactcagagatttgccctggcaactag

SEQ ID NO: 496082 - DNA, 30 bp, Artificial Sequence
  Synthetic oligonucleotide
ggcacaccccttgggggccagcgccactag

SEQ ID NO: 496083 - DNA, 30 bp, Artificial Sequence
  Synthetic oligonucleotide
aatatacaagcgtagaacaagtccgactag

SEQ ID NO: 496084 - DNA, 30 bp, Artificial Sequence
  Synthetic oligonucleotide
gactcgttctctcgctgtgacccggactag

SEQ ID NO: 496085 - DNA, 30 bp, Artificial Sequence
  Synthetic oligonucleotide
tcgcagcaaacgtgaagtataccctactag

SEQ ID NO: 496086 - DNA, 30 bp, Artificial Sequence
  Synthetic oligonucleotide
attcgggccattgatgcgtcctgctactag

SEQ ID NO: 496087 - DNA, 30 bp, Artificial Sequence
  Synthetic oligonucleotide
tcctatcgatctggttcataaatttactag

SEQ ID NO: 496088 - DNA, 30 bp, Artificial Sequence
  Synthetic oligonucleotide
ttaggtgaggttcgaattcgtcaaacctag

SEQ ID NO: 496089 - DNA, 30 bp, Artificial Sequence
  Synthetic oligonucleotide
tttgtcacatatcaatgcgattaaacctag

SEQ ID NO: 496090 - DNA, 30 bp, Artificial Sequence
  Synthetic oligonucleotide
cactatgccgcacactccataagagcctag

SEQ ID NO: 496091 - DNA, 30 bp, Artificial Sequence
  Synthetic oligonucleotide
ttgatctctatgattttctctctcgcctag

SEQ ID NO: 496092 - DNA, 30 bp, Artificial Sequence
  Synthetic oligonucleotide
aagacatttcgttcagatatttgtgcctag

SEQ ID NO: 496093 - DNA, 30 bp, Artificial Sequence
  Synthetic oligonucleotide
tagaaacgcagacgagtgcacctctcctag

SEQ ID NO: 496094 - DNA, 30 bp, Artificial Sequence
  Synthetic oligonucleotide
tgcctcaaagttagttgagcgaagtcctag

SEQ ID NO: 496095 - DNA, 30 bp, Artificial Sequence
  Synthetic oligonucleotide
gaggacgcggcgattattcaccggtcctag

SEQ ID NO: 496096 - DNA, 30 bp, Artificial Sequence
  Synthetic oligonucleotide
taagacctgagtggccgacactattcctag

SEQ ID NO: 496097 - DNA, 30 bp, Artificial Sequence
  Synthetic oligonucleotide
atagcgccctgcgacttgtaaatttcctag

SEQ ID NO: 496098 - DNA, 30 bp, Artificial Sequence
  Synthetic oligonucleotide
atgctttcgttttagtcaatcgtttcctag

SEQ ID NO: 496099 - DNA, 30 bp, Artificial Sequence
  Synthetic oligonucleotide
atagattaatggaccggcatttaaagctag

SEQ ID NO: 496100 - DNA, 30 bp, Artificial Sequence
  Synthetic oligonucleotide
taccgctgggaaaacggtaattcaagctag

SEQ ID NO: 496101 - DNA, 30 bp, Artificial Sequence
  Synthetic oligonucleotide
gttagcgcaggatcaaagcttgggagctag

SEQ ID NO: 496102 - DNA, 30 bp, Artificial Sequence
  Synthetic oligonucleotide
atgcagcacgcctatgatagtaatagctag

SEQ ID NO: 496103 - DNA, 30 bp, Artificial Sequence
  Synthetic oligonucleotide
cgtcgacaataggactggagcccacgctag

SEQ ID NO: 496104 - DNA, 30 bp, Artificial Sequence
  Synthetic oligonucleotide
ttacacggagcctagttttggctccgctag

SEQ ID NO: 496105 - DNA, 30 bp, Artificial Sequence
  Synthetic oligonucleotide
aagggtgggtgtgcgggggaggatcgctag

SEQ ID NO: 496106 - DNA, 30 bp, Artificial Sequence
  Synthetic oligonucleotide
tcatagacaaagaatcattgggatcgctag

SEQ ID NO: 496107 - DNA, 30 bp, Artificial Sequence
  Synthetic oligonucleotide
tcattagtggactagcgatagtatcgctag

SEQ ID NO: 496108 - DNA, 30 bp, Artificial Sequence
  Synthetic oligonucleotide
agcacactcgaacgcttaaaatcgggctag

SEQ ID NO: 496109 - DNA, 30 bp, Artificial Sequence
  Synthetic oligonucleotide
ttctcggaccacgaattccaaacctgctag

SEQ ID NO: 496110 - DNA, 30 bp, Artificial Sequence
  Synthetic oligonucleotide
gaggtcggaacacctatacttgcctgctag

SEQ ID NO: 496111 - DNA, 30 bp, Artificial Sequence
  Synthetic oligonucleotide
acgaaacgcgcgcttacccagtgttgctag

SEQ ID NO: 496112 - DNA, 30 bp, Artificial Sequence
  Synthetic oligonucleotide
gagtgtgtatgatagggcacgtacatctag

SEQ ID NO: 496113 - DNA, 29 bp, Artificial Sequence
  Synthetic oligonucleotide
gataaatttgatggatttaatatatctag

SEQ ID NO: 496114 - DNA, 30 bp, Artificial Sequence
  Synthetic oligonucleotide
ggcccgctatgaggatgttagggcctctag

SEQ ID NO: 496115 - DNA, 30 bp, Artificial Sequence
  Synthetic oligonucleotide
aatgccccttctaggcaattatctctctag

SEQ ID NO: 496116 - DNA, 30 bp, Artificial Sequence
  Synthetic oligonucleotide
tccaaacctgttatgggatcttttctctag

SEQ ID NO: 496117 - DNA, 30 bp, Artificial Sequence
  Synthetic oligonucleotide
aatgatgagcaaatcttctaattcgtctag

SEQ ID NO: 496118 - DNA, 30 bp, Artificial Sequence
  Synthetic oligonucleotide
gcactagaaactgaaggattgaaggtctag

SEQ ID NO: 496119 - DNA, 30 bp, Artificial Sequence
  Synthetic oligonucleotide
cagaccagattattgtaccacagtgtctag

SEQ ID NO: 496120 - DNA, 30 bp, Artificial Sequence
  Synthetic oligonucleotide
gaatgagatcggctctttgaaggattctag

SEQ ID NO: 496121 - DNA, 30 bp, Artificial Sequence
  Synthetic oligonucleotide
tgcaaattgcgttggtatgtgcacttctag

SEQ ID NO: 496122 - DNA, 30 bp, Artificial Sequence
  Synthetic oligonucleotide
aatcccggggccacaatcgcagggttctag

SEQ ID NO: 496123 - DNA, 30 bp, Artificial Sequence
  Synthetic oligonucleotide
gaagtgacagtactttattcccatttctag

SEQ ID NO: 496124 - DNA, 30 bp, Artificial Sequence
  Synthetic oligonucleotide
gggtacggtagagtatgatggtttttctag

SEQ ID NO: 496125 - DNA, 30 bp, Artificial Sequence
  Synthetic oligonucleotide
ggactcttacctgcatattaggtaaagtag

SEQ ID NO: 496126 - DNA, 30 bp, Artificial Sequence
  Synthetic oligonucleotide
ctgctgtttttataagtgggttttaagtag

SEQ ID NO: 496127 - DNA, 30 bp, Artificial Sequence
  Synthetic oligonucleotide
attcgtggattcgtcaaaagcggagagtag

SEQ ID NO: 496128 - DNA, 30 bp, Artificial Sequence
  Synthetic oligonucleotide
aggtattcctttttacgcataacatagtag

SEQ ID NO: 496129 - DNA, 30 bp, Artificial Sequence
  Synthetic oligonucleotide
gacgaacgccagccgggacaatcatagtag

SEQ ID NO: 496130 - DNA, 30 bp, Artificial Sequence
  Synthetic oligonucleotide
attaggtggaatcgctgttatagatagtag

SEQ ID NO: 496131 - DNA, 30 bp, Artificial Sequence
  Synthetic oligonucleotide
gaatgtctggaggctcacaccaactagtag

SEQ ID NO: 496132 - DNA, 30 bp, Artificial Sequence
  Synthetic oligonucleotide
gcggtgccggtacctcacccaacctagtag

SEQ ID NO: 496133 - DNA, 30 bp, Artificial Sequence
  Synthetic oligonucleotide
caattataacacggctaaggcttctagtag

SEQ ID NO: 496134 - DNA, 30 bp, Artificial Sequence
  Synthetic oligonucleotide
ttctcataactgcgcgcagcgaggtagtag

SEQ ID NO: 496135 - DNA, 30 bp, Artificial Sequence
  Synthetic oligonucleotide
gagctgacgcctacttattggcggtagtag

SEQ ID NO: 496136 - DNA, 30 bp, Artificial Sequence
  Synthetic oligonucleotide
tgtcgtgtctgtctacacctaaattagtag

SEQ ID NO: 496137 - DNA, 30 bp, Artificial Sequence
  Synthetic oligonucleotide
tatgattccattaggcagcctaacacgtag

SEQ ID NO: 496138 - DNA, 30 bp, Artificial Sequence
  Synthetic oligonucleotide
ggaattaatgacccggttacagacacgtag

SEQ ID NO: 496139 - DNA, 30 bp, Artificial Sequence
  Synthetic oligonucleotide
tagaattctaactcaggtagatacacgtag

SEQ ID NO: 496140 - DNA, 30 bp, Artificial Sequence
  Synthetic oligonucleotide
cttcgtgacgtaaccttcgcgggcacgtag

SEQ ID NO: 496141 - DNA, 30 bp, Artificial Sequence
  Synthetic oligonucleotide
gtccgtgtagaccgcatacacttcacgtag

SEQ ID NO: 496142 - DNA, 30 bp, Artificial Sequence
  Synthetic oligonucleotide
atgtgttcggcaccgtaatgatttacgtag

SEQ ID NO: 496143 - DNA, 30 bp, Artificial Sequence
  Synthetic oligonucleotide
cgcagtatggcatggggtccataaccgtag

SEQ ID NO: 496144 - DNA, 30 bp, Artificial Sequence
  Synthetic oligonucleotide
ctcttctgatcgcttagcgacttaccgtag

SEQ ID NO: 496145 - DNA, 30 bp, Artificial Sequence
  Synthetic oligonucleotide
ctgacggccggtggcgggatcctcccgtag

SEQ ID NO: 496146 - DNA, 30 bp, Artificial Sequence
  Synthetic oligonucleotide
ctcatcaccccatgcgtcggcaggccgtag

SEQ ID NO: 496147 - DNA, 30 bp, Artificial Sequence
  Synthetic oligonucleotide
caactggacacacgatggccgtctccgtag

SEQ ID NO: 496148 - DNA, 30 bp, Artificial Sequence
  Synthetic oligonucleotide
ccggttctagtgcaaaaatttgaagcgtag

SEQ ID NO: 496149 - DNA, 30 bp, Artificial Sequence
  Synthetic oligonucleotide
agtatactgtaacttatagtaaccgcgtag

SEQ ID NO: 496150 - DNA, 30 bp, Artificial Sequence
  Synthetic oligonucleotide
gtccggacgatgccggtgcgtatcgcgtag

SEQ ID NO: 496151 - DNA, 31 bp, Artificial Sequence
  Synthetic oligonucleotide
gccatctttgcaatcacggaaccctgcgtag

SEQ ID NO: 496152 - DNA, 30 bp, Artificial Sequence
  Synthetic oligonucleotide
ttgggaggtttttaaccttgttgtgcgtag

SEQ ID NO: 496153 - DNA, 30 bp, Artificial Sequence
  Synthetic oligonucleotide
agatgcactggacggtaagagaaatcgtag

SEQ ID NO: 496154 - DNA, 30 bp, Artificial Sequence
  Synthetic oligonucleotide
taacgcgcccgctagacacatcactcgtag

SEQ ID NO: 496155 - DNA, 30 bp, Artificial Sequence
  Synthetic oligonucleotide
tgattactggcgtaatctttctcctcgtag

SEQ ID NO: 496156 - DNA, 30 bp, Artificial Sequence
  Synthetic oligonucleotide
ctctggctttggtatagtcctttgtcgtag

SEQ ID NO: 496157 - DNA, 30 bp, Artificial Sequence
  Synthetic oligonucleotide
gtacttgttctggtccgtccgggttcgtag

SEQ ID NO: 496158 - DNA, 30 bp, Artificial Sequence
  Synthetic oligonucleotide
gccctgtatgcgggtcaactggtaaggtag

SEQ ID NO: 496159 - DNA, 30 bp, Artificial Sequence
  Synthetic oligonucleotide
gtgctagtagtttttgaactcttaaggtag

SEQ ID NO: 496160 - DNA, 30 bp, Artificial Sequence
  Synthetic oligonucleotide
aactcttgacaatccactgctaacaggtag

SEQ ID NO: 496161 - DNA, 30 bp, Artificial Sequence
  Synthetic oligonucleotide
atatcggttggccgactattggacaggtag

SEQ ID NO: 496162 - DNA, 30 bp, Artificial Sequence
  Synthetic oligonucleotide
tgtcagtacgggaacggctccggcaggtag

SEQ ID NO: 496163 - DNA, 30 bp, Artificial Sequence
  Synthetic oligonucleotide
atcaaccatctctttattctgggcaggtag

SEQ ID NO: 496164 - DNA, 30 bp, Artificial Sequence
  Synthetic oligonucleotide
tttgggtctgtagcatgaagactcaggtag

SEQ ID NO: 496165 - DNA, 29 bp, Artificial Sequence
  Synthetic oligonucleotide
accccggttacctagggatcatccggtag

SEQ ID NO: 496166 - DNA, 30 bp, Artificial Sequence
  Synthetic oligonucleotide
aggaaggactgcacacactcgcggcggtag

SEQ ID NO: 496167 - DNA, 30 bp, Artificial Sequence
  Synthetic oligonucleotide
tgttgacacagattatcggaagcagggtag

SEQ ID NO: 496168 - DNA, 30 bp, Artificial Sequence
  Synthetic oligonucleotide
gtggcccctgtatactcaggcgcagggtag

SEQ ID NO: 496169 - DNA, 30 bp, Artificial Sequence
  Synthetic oligonucleotide
gatatgagcatttttttgctatgagggtag

SEQ ID NO: 496170 - DNA, 30 bp, Artificial Sequence
  Synthetic oligonucleotide
gctctcagcgggctctcctataacgggtag

SEQ ID NO: 496171 - DNA, 30 bp, Artificial Sequence
  Synthetic oligonucleotide
gggtagccttgtaagtaccaagtggggtag

SEQ ID NO: 496172 - DNA, 30 bp, Artificial Sequence
  Synthetic oligonucleotide
cgttttctcttatttgactttaatgggtag

SEQ ID NO: 496173 - DNA, 30 bp, Artificial Sequence
  Synthetic oligonucleotide
tctacggatcgggggcaggaaaagtggtag

SEQ ID NO: 496174 - DNA, 30 bp, Artificial Sequence
  Synthetic oligonucleotide
ctaacgatagggtgtacacgccgttggtag

SEQ ID NO: 496175 - DNA, 30 bp, Artificial Sequence
  Synthetic oligonucleotide
gtcagagtggcgaatactagcgtttggtag

SEQ ID NO: 496176 - DNA, 30 bp, Artificial Sequence
  Synthetic oligonucleotide
acaccatagtggacaggtgggccaatgtag

SEQ ID NO: 496177 - DNA, 30 bp, Artificial Sequence
  Synthetic oligonucleotide
cccacagtacctacggagccaataatgtag

SEQ ID NO: 496178 - DNA, 30 bp, Artificial Sequence
  Synthetic oligonucleotide
aagcacggacttgatcgcgctataatgtag

SEQ ID NO: 496179 - DNA, 30 bp, Artificial Sequence
  Synthetic oligonucleotide
tggcttctcgagaagcctgcacggatgtag

SEQ ID NO: 496180 - DNA, 30 bp, Artificial Sequence
  Synthetic oligonucleotide
tttggggatttgctaagctgctggatgtag

SEQ ID NO: 496181 - DNA, 30 bp, Artificial Sequence
  Synthetic oligonucleotide
gtttacatataggtctctggccctatgtag

SEQ ID NO: 496182 - DNA, 30 bp, Artificial Sequence
  Synthetic oligonucleotide
taagcgcctctgcacgtcggcaccctgtag

SEQ ID NO: 496183 - DNA, 30 bp, Artificial Sequence
  Synthetic oligonucleotide
gatatcaacgggctccattactccctgtag

SEQ ID NO: 496184 - DNA, 30 bp, Artificial Sequence
  Synthetic oligonucleotide
gtcattttctcacggcgccgcggcctgtag

SEQ ID NO: 496185 - DNA, 30 bp, Artificial Sequence
  Synthetic oligonucleotide
tgcttttattgcatatttaaagaagtgtag

SEQ ID NO: 496186 - DNA, 30 bp, Artificial Sequence
  Synthetic oligonucleotide
cgcgtttgtaagacctccggggtagtgtag

SEQ ID NO: 496187 - DNA, 30 bp, Artificial Sequence
  Synthetic oligonucleotide
ttcattcagaaaatgatctcctctgtgtag

SEQ ID NO: 496188 - DNA, 30 bp, Artificial Sequence
  Synthetic oligonucleotide
ccggacaagccccactctaaccgtgtgtag

SEQ ID NO: 496189 - DNA, 30 bp, Artificial Sequence
  Synthetic oligonucleotide
catcgctgtcggaccttacggtacttgtag

SEQ ID NO: 496190 - DNA, 30 bp, Artificial Sequence
  Synthetic oligonucleotide
attcgctagcaattcgtaaacaccttgtag

SEQ ID NO: 496191 - DNA, 30 bp, Artificial Sequence
  Synthetic oligonucleotide
ccactccaccggctttgcctgtgcttgtag

SEQ ID NO: 496192 - DNA, 30 bp, Artificial Sequence
  Synthetic oligonucleotide
atctctgcccggctctatttcaagttgtag

SEQ ID NO: 496193 - DNA, 30 bp, Artificial Sequence
  Synthetic oligonucleotide
aggatttctttggttagctattcgttgtag

SEQ ID NO: 496194 - DNA, 30 bp, Artificial Sequence
  Synthetic oligonucleotide
agttggtaattgctttcaggtcggttgtag

SEQ ID NO: 496195 - DNA, 30 bp, Artificial Sequence
  Synthetic oligonucleotide
tcccgcgacgcactacgctcgattttgtag

SEQ ID NO: 496196 - DNA, 30 bp, Artificial Sequence
  Synthetic oligonucleotide
ggtccgagaggcggattatttgcgaattag

SEQ ID NO: 496197 - DNA, 30 bp, Artificial Sequence
  Synthetic oligonucleotide
gtgcagtcgccagttaacccttaacattag

SEQ ID NO: 496198 - DNA, 30 bp, Artificial Sequence
  Synthetic oligonucleotide
taggacggggtcagatattggtgacattag

SEQ ID NO: 496199 - DNA, 30 bp, Artificial Sequence
  Synthetic oligonucleotide
aatctgcgcaatgaggaatcggagcattag

SEQ ID NO: 496200 - DNA, 30 bp, Artificial Sequence
  Synthetic oligonucleotide
gcgacggtgacgttgcaacgaactcattag

SEQ ID NO: 496201 - DNA, 30 bp, Artificial Sequence
  Synthetic oligonucleotide
ctcccatgtaggtcgtataatcctcattag

SEQ ID NO: 496202 - DNA, 30 bp, Artificial Sequence
  Synthetic oligonucleotide
ggttagggatctcctcgggttggtcattag

SEQ ID NO: 496203 - DNA, 30 bp, Artificial Sequence
  Synthetic oligonucleotide
atgtgtgttgttggatcaaagtaagattag

SEQ ID NO: 496204 - DNA, 30 bp, Artificial Sequence
  Synthetic oligonucleotide
ggacttgggtcgaacagattggcagattag

SEQ ID NO: 496205 - DNA, 31 bp, Artificial Sequence
  Synthetic oligonucleotide
taccgacggcactctaattgtgtgagattag

SEQ ID NO: 496206 - DNA, 30 bp, Artificial Sequence
  Synthetic oligonucleotide
cccgcctacttagataccaccctagattag

SEQ ID NO: 496207 - DNA, 30 bp, Artificial Sequence
  Synthetic oligonucleotide
caaataccttggcaggattcagtctattag

SEQ ID NO: 496208 - DNA, 30 bp, Artificial Sequence
  Synthetic oligonucleotide
ctctgaacgtgttcatacttgcattattag

SEQ ID NO: 496209 - DNA, 30 bp, Artificial Sequence
  Synthetic oligonucleotide
aagttttgagagtcgctccgcgattattag

SEQ ID NO: 496210 - DNA, 31 bp, Artificial Sequence
  Synthetic oligonucleotide
ttgttgaacatgtccatcggagcgcacttag

SEQ ID NO: 496211 - DNA, 30 bp, Artificial Sequence
  Synthetic oligonucleotide
tgggatcataacatccatggaatcacttag

SEQ ID NO: 496212 - DNA, 30 bp, Artificial Sequence
  Synthetic oligonucleotide
ttgggtctttcaatcacgtatcgtacttag

SEQ ID NO: 496213 - DNA, 30 bp, Artificial Sequence
  Synthetic oligonucleotide
aggcatgcagcgggcgtaccttcgccttag

SEQ ID NO: 496214 - DNA, 30 bp, Artificial Sequence
  Synthetic oligonucleotide
accggaggcgcatttattaggtatccttag

SEQ ID NO: 496215 - DNA, 30 bp, Artificial Sequence
  Synthetic oligonucleotide
aaacgacaccgcgccgttccagacgcttag

SEQ ID NO: 496216 - DNA, 30 bp, Artificial Sequence
  Synthetic oligonucleotide
aggagcgttcaccccatcagcggcgcttag

SEQ ID NO: 496217 - DNA, 30 bp, Artificial Sequence
  Synthetic oligonucleotide
gaaagattttcttattcaccgggggcttag

SEQ ID NO: 496218 - DNA, 30 bp, Artificial Sequence
  Synthetic oligonucleotide
cacttttatcagagggcacgcagatcttag

SEQ ID NO: 496219 - DNA, 30 bp, Artificial Sequence
  Synthetic oligonucleotide
gccaagatattagtctaacgaggatcttag

SEQ ID NO: 496220 - DNA, 30 bp, Artificial Sequence
  Synthetic oligonucleotide
ctatagtctatggctagcctactatcttag

SEQ ID NO: 496221 - DNA, 30 bp, Artificial Sequence
  Synthetic oligonucleotide
ggggtcttagatcatatatcatcctcttag

SEQ ID NO: 496222 - DNA, 30 bp, Artificial Sequence
  Synthetic oligonucleotide
taaatctgcgcacttttttaaggctcttag

SEQ ID NO: 496223 - DNA, 30 bp, Artificial Sequence
  Synthetic oligonucleotide
agtccagaatatgcctttttggggtcttag

SEQ ID NO: 496224 - DNA, 30 bp, Artificial Sequence
  Synthetic oligonucleotide
agcagacaataatatcttgatagttcttag

SEQ ID NO: 496225 - DNA, 30 bp, Artificial Sequence
  Synthetic oligonucleotide
aatcttcgagtgtgctaacactaaagttag

SEQ ID NO: 496226 - DNA, 30 bp, Artificial Sequence
  Synthetic oligonucleotide
ggaatgcgtcaccacaggtttcgcagttag

SEQ ID NO: 496227 - DNA, 30 bp, Artificial Sequence
  Synthetic oligonucleotide
gtggcctaactggctgggtacatcagttag

SEQ ID NO: 496228 - DNA, 30 bp, Artificial Sequence
  Synthetic oligonucleotide
gtaagtggggtcctcagattagatagttag

SEQ ID NO: 496229 - DNA, 30 bp, Artificial Sequence
  Synthetic oligonucleotide
tgacgtagtactctcacgtcaactagttag

SEQ ID NO: 496230 - DNA, 30 bp, Artificial Sequence
  Synthetic oligonucleotide
gaaagttaacattaagcgattggtagttag

SEQ ID NO: 496231 - DNA, 30 bp, Artificial Sequence
  Synthetic oligonucleotide
cgtctcgtcgttcgtagcacccaccgttag

SEQ ID NO: 496232 - DNA, 30 bp, Artificial Sequence
  Synthetic oligonucleotide
ttcctcgttctttcacggtgcaagcgttag

SEQ ID NO: 496233 - DNA, 30 bp, Artificial Sequence
  Synthetic oligonucleotide
tataatcggacgggataccataagcgttag

SEQ ID NO: 496234 - DNA, 30 bp, Artificial Sequence
  Synthetic oligonucleotide
aaattgaaaaatcaagggacggagcgttag

SEQ ID NO: 496235 - DNA, 30 bp, Artificial Sequence
  Synthetic oligonucleotide
aagtcgggggacgcacacgatccgcgttag

SEQ ID NO: 496236 - DNA, 30 bp, Artificial Sequence
  Synthetic oligonucleotide
gaacaaagtgctacacgccccaggcgttag

SEQ ID NO: 496237 - DNA, 30 bp, Artificial Sequence
  Synthetic oligonucleotide
acctaatgggtccacattattaatcgttag

SEQ ID NO: 496238 - DNA, 30 bp, Artificial Sequence
  Synthetic oligonucleotide
gaaagcctaaaattgtttttagaaggttag

SEQ ID NO: 496239 - DNA, 30 bp, Artificial Sequence
  Synthetic oligonucleotide
aatcacgccgcaaacgaaccaactggttag

SEQ ID NO: 496240 - DNA, 30 bp, Artificial Sequence
  Synthetic oligonucleotide
ctccttaaatcgagccacggtcttggttag

SEQ ID NO: 496241 - DNA, 30 bp, Artificial Sequence
  Synthetic oligonucleotide
attcgactcgctgttttaacctgatgttag

SEQ ID NO: 496242 - DNA, 30 bp, Artificial Sequence
  Synthetic oligonucleotide
tagatgaggcagtccggctgtttatgttag

SEQ ID NO: 496243 - DNA, 30 bp, Artificial Sequence
  Synthetic oligonucleotide
gctcatttgacatggagacgcacctgttag

SEQ ID NO: 496244 - DNA, 30 bp, Artificial Sequence
  Synthetic oligonucleotide
aaaaacgatgtgcgttagaagatctgttag

SEQ ID NO: 496245 - DNA, 30 bp, Artificial Sequence
  Synthetic oligonucleotide
gtaattgtataagttttctccaagtgttag

SEQ ID NO: 496246 - DNA, 30 bp, Artificial Sequence
  Synthetic oligonucleotide
ctgtacccaatctataatcgtccgtgttag

SEQ ID NO: 496247 - DNA, 30 bp, Artificial Sequence
  Synthetic oligonucleotide
cgatcatctctctggttactattgtgttag

SEQ ID NO: 496248 - DNA, 30 bp, Artificial Sequence
  Synthetic oligonucleotide
gcttgacttaaattgtaggggtcttgttag

SEQ ID NO: 496249 - DNA, 30 bp, Artificial Sequence
  Synthetic oligonucleotide
tatctaagttgattatgataattttgttag

SEQ ID NO: 496250 - DNA, 30 bp, Artificial Sequence
  Synthetic oligonucleotide
tattagtacacgtgaacgtgacgcatttag

SEQ ID NO: 496251 - DNA, 30 bp, Artificial Sequence
  Synthetic oligonucleotide
ttgagcttgagctcatggcggtatatttag

SEQ ID NO: 496252 - DNA, 30 bp, Artificial Sequence
  Synthetic oligonucleotide
gactctgtcaatggaccttgtgttatttag

SEQ ID NO: 496253 - DNA, 30 bp, Artificial Sequence
  Synthetic oligonucleotide
atatctgctggtcaccactcaccactttag

SEQ ID NO: 496254 - DNA, 30 bp, Artificial Sequence
  Synthetic oligonucleotide
ctatcaaggtgtgccttgcgcagcctttag

SEQ ID NO: 496255 - DNA, 30 bp, Artificial Sequence
  Synthetic oligonucleotide
gtttattcgtcaagggttaaggtcctttag

SEQ ID NO: 496256 - DNA, 30 bp, Artificial Sequence
  Synthetic oligonucleotide
ttggagtctttttatcaactaaagctttag

SEQ ID NO: 496257 - DNA, 30 bp, Artificial Sequence
  Synthetic oligonucleotide
taccgttttgtttacgcgagaaaagtttag

SEQ ID NO: 496258 - DNA, 30 bp, Artificial Sequence
  Synthetic oligonucleotide
catggtaatgcagtgtggagtatagtttag

SEQ ID NO: 496259 - DNA, 30 bp, Artificial Sequence
  Synthetic oligonucleotide
gggggagggactaggatcgtattagtttag

SEQ ID NO: 496260 - DNA, 30 bp, Artificial Sequence
  Synthetic oligonucleotide
gatcgtgtttcttccacctttttagtttag

SEQ ID NO: 496261 - DNA, 30 bp, Artificial Sequence
  Synthetic oligonucleotide
atatggaggaaagtaaatgttcaggtttag

SEQ ID NO: 496262 - DNA, 30 bp, Artificial Sequence
  Synthetic oligonucleotide
aacggtcaggtttaaaatctgactgtttag

SEQ ID NO: 496263 - DNA, 30 bp, Artificial Sequence
  Synthetic oligonucleotide
agttcttgttcgtagccacggtgtgtttag

SEQ ID NO: 496264 - DNA, 30 bp, Artificial Sequence
  Synthetic oligonucleotide
cgccgccacactcctattatgtaattttag

SEQ ID NO: 496265 - DNA, 30 bp, Artificial Sequence
  Synthetic oligonucleotide
tttgttttgtatagagtgcccggattttag

SEQ ID NO: 496266 - DNA, 30 bp, Artificial Sequence
  Synthetic oligonucleotide
aattacatttatggatctccgttcttttag

SEQ ID NO: 496267 - DNA, 30 bp, Artificial Sequence
  Synthetic oligonucleotide
tattcaccatgtcgtcagccctagttttag

SEQ ID NO: 496268 - DNA, 30 bp, Artificial Sequence
  Synthetic oligonucleotide
tttgaaaataacgagttcgtggggttttag

SEQ ID NO: 496269 - DNA, 30 bp, Artificial Sequence
  Synthetic oligonucleotide
agcattcagtaacgtatagcagtgttttag

SEQ ID NO: 496270 - DNA, 30 bp, Artificial Sequence
  Synthetic oligonucleotide
catgcacagtacaacgttcacgtgttttag

SEQ ID NO: 496271 - DNA, 30 bp, Artificial Sequence
  Synthetic oligonucleotide
tatcattttaaacggtaataacatttttag

SEQ ID NO: 496272 - DNA, 30 bp, Artificial Sequence
  Synthetic oligonucleotide
gttatttgaccccggggtggtcatttttag

SEQ ID NO: 496273 - DNA, 30 bp, Artificial Sequence
  Synthetic oligonucleotide
cattaccaccaatcatctagttttttttag

SEQ ID NO: 496274 - DNA, 30 bp, Artificial Sequence
  Synthetic oligonucleotide
ttgaccagcggctcgccccccgacaaaacg

SEQ ID NO: 496275 - DNA, 30 bp, Artificial Sequence
  Synthetic oligonucleotide
atgtatgaaggatcgatcgcttcgaaaacg

SEQ ID NO: 496276 - DNA, 30 bp, Artificial Sequence
  Synthetic oligonucleotide
gtaactgtacaatccagaaaacggaaaacg

SEQ ID NO: 496277 - DNA, 30 bp, Artificial Sequence
  Synthetic oligonucleotide
ttattcatgtagacttgtgaaattaaaacg

SEQ ID NO: 496278 - DNA, 30 bp, Artificial Sequence
  Synthetic oligonucleotide
gtccgcttgcgtgttatatagattaaaacg

SEQ ID NO: 496279 - DNA, 30 bp, Artificial Sequence
  Synthetic oligonucleotide
tatacatgaaaatgcgacacacaacaaacg

SEQ ID NO: 496280 - DNA, 30 bp, Artificial Sequence
  Synthetic oligonucleotide
acgctgtatccgcgggagcgcagacaaacg

SEQ ID NO: 496281 - DNA, 30 bp, Artificial Sequence
  Synthetic oligonucleotide
gcgcgtatgtcccgctatagtctacaaacg

SEQ ID NO: 496282 - DNA, 30 bp, Artificial Sequence
  Synthetic oligonucleotide
cggtataatatcagtcgcttatggcaaacg

SEQ ID NO: 496283 - DNA, 30 bp, Artificial Sequence
  Synthetic oligonucleotide
agcgttggccattacgccacgttgcaaacg

SEQ ID NO: 496284 - DNA, 30 bp, Artificial Sequence
  Synthetic oligonucleotide
agtcgcagcgtgtagagaactactcaaacg

SEQ ID NO: 496285 - DNA, 30 bp, Artificial Sequence
  Synthetic oligonucleotide
aatgggataaaacggattgtccctcaaacg

SEQ ID NO: 496286 - DNA, 30 bp, Artificial Sequence
  Synthetic oligonucleotide
aagcgcgaggcggcagtacgttctcaaacg

SEQ ID NO: 496287 - DNA, 30 bp, Artificial Sequence
  Synthetic oligonucleotide
cggtatgcgtaaaagatgtaaccagaaacg

SEQ ID NO: 496288 - DNA, 30 bp, Artificial Sequence
  Synthetic oligonucleotide
cggctccgattccatcgccagccagaaacg

SEQ ID NO: 496289 - DNA, 30 bp, Artificial Sequence
  Synthetic oligonucleotide
caagtgccactacaccgtacaagagaaacg

SEQ ID NO: 496290 - DNA, 30 bp, Artificial Sequence
  Synthetic oligonucleotide
aacagtttcgtacctctctgggacgaaacg

SEQ ID NO: 496291 - DNA, 30 bp, Artificial Sequence
  Synthetic oligonucleotide
taggttgtcgtaaagacctaagtggaaacg

SEQ ID NO: 496292 - DNA, 30 bp, Artificial Sequence
  Synthetic oligonucleotide
ctgttgccggcagcagcaactgctgaaacg

SEQ ID NO: 496293 - DNA, 30 bp, Artificial Sequence
  Synthetic oligonucleotide
atctatggatatgatacgggtgtataaacg

SEQ ID NO: 496294 - DNA, 30 bp, Artificial Sequence
  Synthetic oligonucleotide
ggctcaaacgcctggcgcttgagctaaacg

SEQ ID NO: 496295 - DNA, 30 bp, Artificial Sequence
  Synthetic oligonucleotide
gattacatgatcgttgatctttagtaaacg

SEQ ID NO: 496296 - DNA, 30 bp, Artificial Sequence
  Synthetic oligonucleotide
tagtgatataggacgcacacttattaaacg

SEQ ID NO: 496297 - DNA, 30 bp, Artificial Sequence
  Synthetic oligonucleotide
tactgcgcgttaaaccgcctccaaacaacg

SEQ ID NO: 496298 - DNA, 30 bp, Artificial Sequence
  Synthetic oligonucleotide
tgtcagcaataacggcggcacgaaacaacg

SEQ ID NO: 496299 - DNA, 30 bp, Artificial Sequence
  Synthetic oligonucleotide
agttcgtgacgtccacgtcatgaaacaacg

SEQ ID NO: 496300 - DNA, 30 bp, Artificial Sequence
  Synthetic oligonucleotide
gagtatccgtccccgtccttcgcaacaacg

SEQ ID NO: 496301 - DNA, 30 bp, Artificial Sequence
  Synthetic oligonucleotide
aatgcgcgttcctctgactccgtaacaacg

SEQ ID NO: 496302 - DNA, 30 bp, Artificial Sequence
  Synthetic oligonucleotide
gtcaaggccgtcaggacattggtaacaacg

SEQ ID NO: 496303 - DNA, 30 bp, Artificial Sequence
  Synthetic oligonucleotide
ctcaaatttcaatgcgagcgttgcacaacg

SEQ ID NO: 496304 - DNA, 30 bp, Artificial Sequence
  Synthetic oligonucleotide
taatgaccaacgcccatgggcccaccaacg

SEQ ID NO: 496305 - DNA, 30 bp, Artificial Sequence
  Synthetic oligonucleotide
accatgagggctaaaacccggaaagcaacg

SEQ ID NO: 496306 - DNA, 30 bp, Artificial Sequence
  Synthetic oligonucleotide
ttgaggttgagaacgggaagttcagcaacg

SEQ ID NO: 496307 - DNA, 30 bp, Artificial Sequence
  Synthetic oligonucleotide
catgttcaaggagtttaatctatagcaacg

SEQ ID NO: 496308 - DNA, 30 bp, Artificial Sequence
  Synthetic oligonucleotide
tggggcgcacaattcaatgctgacgcaacg

SEQ ID NO: 496309 - DNA, 30 bp, Artificial Sequence
  Synthetic oligonucleotide
aaaactttaaggtagaagtcggccgcaacg

SEQ ID NO: 496310 - DNA, 30 bp, Artificial Sequence
  Synthetic oligonucleotide
gcgaaattatggatgcagaaaagcgcaacg

SEQ ID NO: 496311 - DNA, 30 bp, Artificial Sequence
  Synthetic oligonucleotide
aggtccaccaagcgagaagcacgcgcaacg

SEQ ID NO: 496312 - DNA, 30 bp, Artificial Sequence
  Synthetic oligonucleotide
tactttcgttagacgcaagatacggcaacg

SEQ ID NO: 496313 - DNA, 30 bp, Artificial Sequence
  Synthetic oligonucleotide
ggtacctaaatggtttgtccccatgcaacg

SEQ ID NO: 496314 - DNA, 30 bp, Artificial Sequence
  Synthetic oligonucleotide
ggaatctcaaaccttctacccgttgcaacg

SEQ ID NO: 496315 - DNA, 30 bp, Artificial Sequence
  Synthetic oligonucleotide
aatacttccaaagtaaggggaggatcaacg

SEQ ID NO: 496316 - DNA, 30 bp, Artificial Sequence
  Synthetic oligonucleotide
gcagacctgcgtggagggagatcctcaacg

SEQ ID NO: 496317 - DNA, 30 bp, Artificial Sequence
  Synthetic oligonucleotide
cttttacggcagctccgtctggtctcaacg

SEQ ID NO: 496318 - DNA, 30 bp, Artificial Sequence
  Synthetic oligonucleotide
tgcagctgtttcgttagtttcgagagaacg

SEQ ID NO: 496319 - DNA, 30 bp, Artificial Sequence
  Synthetic oligonucleotide
tcctgcctccgccgtatacaggcgagaacg

SEQ ID NO: 496320 - DNA, 30 bp, Artificial Sequence
  Synthetic oligonucleotide
ggcacggggtataaccttagatgacgaacg

SEQ ID NO: 496321 - DNA, 30 bp, Artificial Sequence
  Synthetic oligonucleotide
gcgtgacctccacttgagcttagccgaacg

SEQ ID NO: 496322 - DNA, 30 bp, Artificial Sequence
  Synthetic oligonucleotide
tcgtgacctccacttgagcttagccgaacg

SEQ ID NO: 496323 - DNA, 30 bp, Artificial Sequence
  Synthetic oligonucleotide
cgacgccaagccgtcgtgaagcgaggaacg

SEQ ID NO: 496324 - DNA, 30 bp, Artificial Sequence
  Synthetic oligonucleotide
attttaacactccgctgaatcctcggaacg

SEQ ID NO: 496325 - DNA, 30 bp, Artificial Sequence
  Synthetic oligonucleotide
acctactggtacacggttctccagggaacg

SEQ ID NO: 496326 - DNA, 30 bp, Artificial Sequence
  Synthetic oligonucleotide
tggtaggcagtagactcgcgtgcgggaacg

SEQ ID NO: 496327 - DNA, 30 bp, Artificial Sequence
  Synthetic oligonucleotide
ccgggaagaagctgtgcgttccatggaacg

SEQ ID NO: 496328 - DNA, 30 bp, Artificial Sequence
  Synthetic oligonucleotide
tcttacgatcgcaaggaataacgtggaacg

SEQ ID NO: 496329 - DNA, 30 bp, Artificial Sequence
  Synthetic oligonucleotide
gtgcgccacgcgcccgggtagcgtggaacg

SEQ ID NO: 496330 - DNA, 30 bp, Artificial Sequence
  Synthetic oligonucleotide
ttcacctttcagggaacccacggtggaacg

SEQ ID NO: 496331 - DNA, 30 bp, Artificial Sequence
  Synthetic oligonucleotide
aatatcgtacagattttactgtaatgaacg

SEQ ID NO: 496332 - DNA, 30 bp, Artificial Sequence
  Synthetic oligonucleotide
gcgcggggtgaacagttactgccgtgaacg

SEQ ID NO: 496333 - DNA, 30 bp, Artificial Sequence
  Synthetic oligonucleotide
ctccgtgagttgaccagattgcggtgaacg

SEQ ID NO: 496334 - DNA, 30 bp, Artificial Sequence
  Synthetic oligonucleotide
ttcggggcacttcagcgtcgttattgaacg

SEQ ID NO: 496335 - DNA, 30 bp, Artificial Sequence
  Synthetic oligonucleotide
atttcgcgtaattaagtgggtatttgaacg

SEQ ID NO: 496336 - DNA, 30 bp, Artificial Sequence
  Synthetic oligonucleotide
taccgtgaaagtgggccaggagtttgaacg

SEQ ID NO: 496337 - DNA, 30 bp, Artificial Sequence
  Synthetic oligonucleotide
gttagcttgacttttacaagagcaataacg

SEQ ID NO: 496338 - DNA, 30 bp, Artificial Sequence
  Synthetic oligonucleotide
gtattggtttgcacttaagtatgaataacg

SEQ ID NO: 496339 - DNA, 30 bp, Artificial Sequence
  Synthetic oligonucleotide
cgagctagtggaatgcggtgtgcgataacg

SEQ ID NO: 496340 - DNA, 30 bp, Artificial Sequence
  Synthetic oligonucleotide
tgacttcagactacacgtatatccctaacg

SEQ ID NO: 496341 - DNA, 30 bp, Artificial Sequence
  Synthetic oligonucleotide
cgatttcctagtgtcagtttggcagtaacg

SEQ ID NO: 496342 - DNA, 30 bp, Artificial Sequence
  Synthetic oligonucleotide
actgggaataggacagcacgtcaggtaacg

SEQ ID NO: 496343 - DNA, 30 bp, Artificial Sequence
  Synthetic oligonucleotide
ttcccgggtaccaattagaagccggtaacg

SEQ ID NO: 496344 - DNA, 30 bp, Artificial Sequence
  Synthetic oligonucleotide
ccaactggacgtgaaggttgcggggtaacg

SEQ ID NO: 496345 - DNA, 30 bp, Artificial Sequence
  Synthetic oligonucleotide
aacatcctggttagggctgaaaatgtaacg

SEQ ID NO: 496346 - DNA, 30 bp, Artificial Sequence
  Synthetic oligonucleotide
atctggttgactcgatcccatcttgtaacg

SEQ ID NO: 496347 - DNA, 29 bp, Artificial Sequence
  Synthetic oligonucleotide
atccatgatgtgtcatgcgttaattaacg

SEQ ID NO: 496348 - DNA, 30 bp, Artificial Sequence
  Synthetic oligonucleotide
gtttgcctaacgtagcccttattattaacg

SEQ ID NO: 496349 - DNA, 30 bp, Artificial Sequence
  Synthetic oligonucleotide
cggccagatagattttgtactttattaacg

SEQ ID NO: 496350 - DNA, 30 bp, Artificial Sequence
  Synthetic oligonucleotide
ggttatcgtccgtccggacggcagttaacg

SEQ ID NO: 496351 - DNA, 30 bp, Artificial Sequence
  Synthetic oligonucleotide
ttgcgaaaatgggatctcacaccgttaacg

SEQ ID NO: 496352 - DNA, 30 bp, Artificial Sequence
  Synthetic oligonucleotide
ttatcttagttcttggcgaacgatttaacg

SEQ ID NO: 496353 - DNA, 30 bp, Artificial Sequence
  Synthetic oligonucleotide
agaacaggatggggagtcacgcgtttaacg

SEQ ID NO: 496354 - DNA, 30 bp, Artificial Sequence
  Synthetic oligonucleotide
taattttgtagtctacgcgcgccaaacacg

SEQ ID NO: 496355 - DNA, 30 bp, Artificial Sequence
  Synthetic oligonucleotide
ttgttgaatttatacggaatcgcaaacacg

SEQ ID NO: 496356 - DNA, 30 bp, Artificial Sequence
  Synthetic oligonucleotide
aatcttgcacaggttaaacccgtaaacacg

SEQ ID NO: 496357 - DNA, 30 bp, Artificial Sequence
  Synthetic oligonucleotide
tgtcgtcatactagggaacgctcacacacg

SEQ ID NO: 496358 - DNA, 30 bp, Artificial Sequence
  Synthetic oligonucleotide
tacgcctgcaacgaaccgacggaccacacg

SEQ ID NO: 496359 - DNA, 30 bp, Artificial Sequence
  Synthetic oligonucleotide
aggtgatgcatataaactccgtctcacacg

SEQ ID NO: 496360 - DNA, 30 bp, Artificial Sequence
  Synthetic oligonucleotide
ccacgcctgcaaacggcctaggtagacacg

SEQ ID NO: 496361 - DNA, 30 bp, Artificial Sequence
  Synthetic oligonucleotide
tgccggacacgcggatccggaccggacacg

SEQ ID NO: 496362 - DNA, 30 bp, Artificial Sequence
  Synthetic oligonucleotide
cgagtgtgtacgttacaggtgcgggacacg

SEQ ID NO: 496363 - DNA, 29 bp, Artificial Sequence
  Synthetic oligonucleotide
ttccccccgttactatggactatgacacg

SEQ ID NO: 496364 - DNA, 30 bp, Artificial Sequence
  Synthetic oligonucleotide
gaagcatcccaggcagttttcatatacacg

SEQ ID NO: 496365 - DNA, 30 bp, Artificial Sequence
  Synthetic oligonucleotide
cccgaggggagaccacgtctctcctacacg

SEQ ID NO: 496366 - DNA, 30 bp, Artificial Sequence
  Synthetic oligonucleotide
tttctgctgtacagtgttcacctctacacg

SEQ ID NO: 496367 - DNA, 30 bp, Artificial Sequence
  Synthetic oligonucleotide
taggccttcagctgcccctcgaagtacacg

SEQ ID NO: 496368 - DNA, 30 bp, Artificial Sequence
  Synthetic oligonucleotide
ttcgaaatcaggccggcgtgtaggtacacg

SEQ ID NO: 496369 - DNA, 30 bp, Artificial Sequence
  Synthetic oligonucleotide
aaacgccaacgttgttaggaactaaccacg

SEQ ID NO: 496370 - DNA, 30 bp, Artificial Sequence
  Synthetic oligonucleotide
ttgcaaagtagttcgaggttaaacaccacg

SEQ ID NO: 496371 - DNA, 30 bp, Artificial Sequence
  Synthetic oligonucleotide
tgttgcattatggggaagatatggaccacg

SEQ ID NO: 496372 - DNA, 30 bp, Artificial Sequence
  Synthetic oligonucleotide
gaccacgtgtttcgttaacacgcacccacg

SEQ ID NO: 496373 - DNA, 30 bp, Artificial Sequence
  Synthetic oligonucleotide
atttgaccaagccattgagtttgacccacg

SEQ ID NO: 496374 - DNA, 30 bp, Artificial Sequence
  Synthetic oligonucleotide
ttgcagctagtactgagccacatccccacg

SEQ ID NO: 496375 - DNA, 30 bp, Artificial Sequence
  Synthetic oligonucleotide
gtttgcgtcagtagtaggccaaagcccacg

SEQ ID NO: 496376 - DNA, 30 bp, Artificial Sequence
  Synthetic oligonucleotide
cggagtcacttactggagccctggcccacg

SEQ ID NO: 496377 - DNA, 30 bp, Artificial Sequence
  Synthetic oligonucleotide
tgactcgagccgcgttttgccgaagccacg

SEQ ID NO: 496378 - DNA, 30 bp, Artificial Sequence
  Synthetic oligonucleotide
tgcacgtggtattttttatgagtagccacg

SEQ ID NO: 496379 - DNA, 30 bp, Artificial Sequence
  Synthetic oligonucleotide
tatagctcgttggtgtgttgagtagccacg

SEQ ID NO: 496380 - DNA, 30 bp, Artificial Sequence
  Synthetic oligonucleotide
ggctgcctatcgtagagattagacgccacg

SEQ ID NO: 496381 - DNA, 30 bp, Artificial Sequence
  Synthetic oligonucleotide
cttagtgctatgcttacaacatacgccacg

SEQ ID NO: 496382 - DNA, 30 bp, Artificial Sequence
  Synthetic oligonucleotide
ccccttatcagtggtaatagcccggccacg

SEQ ID NO: 496383 - DNA, 30 bp, Artificial Sequence
  Synthetic oligonucleotide
acacgagagcttgcgacgcggcctgccacg

SEQ ID NO: 496384 - DNA, 30 bp, Artificial Sequence
  Synthetic oligonucleotide
acagagggcttctgggtgtggcaatccacg

SEQ ID NO: 496385 - DNA, 30 bp, Artificial Sequence
  Synthetic oligonucleotide
agacagcacctttgtgtcttcggatccacg

SEQ ID NO: 496386 - DNA, 30 bp, Artificial Sequence
  Synthetic oligonucleotide
gttcggtcaccccatacggagctgtccacg

SEQ ID NO: 496387 - DNA, 31 bp, Artificial Sequence
  Synthetic oligonucleotide
tattcttgtggcttttttcacttattccacg

SEQ ID NO: 496388 - DNA, 30 bp, Artificial Sequence
  Synthetic oligonucleotide
ctactagttatctatacacctggaagcacg

SEQ ID NO: 496389 - DNA, 30 bp, Artificial Sequence
  Synthetic oligonucleotide
acaatttatatgagtagttgtaccagcacg

SEQ ID NO: 496390 - DNA, 30 bp, Artificial Sequence
  Synthetic oligonucleotide
gacctctttctcaatatgttcgatagcacg

SEQ ID NO: 496391 - DNA, 30 bp, Artificial Sequence
  Synthetic oligonucleotide
caaagtacaggttcatgcttctgacgcacg

SEQ ID NO: 496392 - DNA, 30 bp, Artificial Sequence
  Synthetic oligonucleotide
gactccttgaaccagcccattatccgcacg

SEQ ID NO: 496393 - DNA, 30 bp, Artificial Sequence
  Synthetic oligonucleotide
gaggttccaacgggtcagttcacgcgcacg

SEQ ID NO: 496394 - DNA, 30 bp, Artificial Sequence
  Synthetic oligonucleotide
agccccgcagcgtgtcaagcgcaaggcacg

SEQ ID NO: 496395 - DNA, 31 bp, Artificial Sequence
  Synthetic oligonucleotide
gtcgtgcgcatgtttcgtgacgccaggcacg

SEQ ID NO: 496396 - DNA, 30 bp, Artificial Sequence
  Synthetic oligonucleotide
tcgcctggttatgtacatggtcccggcacg

SEQ ID NO: 496397 - DNA, 30 bp, Artificial Sequence
  Synthetic oligonucleotide
gtttgactttagtacagctttagcggcacg

SEQ ID NO: 496398 - DNA, 30 bp, Artificial Sequence
  Synthetic oligonucleotide
gttaggtgctacggccgcaatggcggcacg

SEQ ID NO: 496399 - DNA, 30 bp, Artificial Sequence
  Synthetic oligonucleotide
agacgccgactacagttaacacctggcacg

SEQ ID NO: 496400 - DNA, 30 bp, Artificial Sequence
  Synthetic oligonucleotide
gcagtttatgttgatggcagaggtggcacg

SEQ ID NO: 496401 - DNA, 30 bp, Artificial Sequence
  Synthetic oligonucleotide
gaccaacgattcaaagtcacatgtggcacg

SEQ ID NO: 496402 - DNA, 30 bp, Artificial Sequence
  Synthetic oligonucleotide
accacggcggtaagcgcgcgaggatgcacg

SEQ ID NO: 496403 - DNA, 30 bp, Artificial Sequence
  Synthetic oligonucleotide
gtaaaaatctcccctttttaaatatgcacg

SEQ ID NO: 496404 - DNA, 30 bp, Artificial Sequence
  Synthetic oligonucleotide
agccaacgtggggcttgaggccaaatcacg

SEQ ID NO: 496405 - DNA, 30 bp, Artificial Sequence
  Synthetic oligonucleotide
caattggcctttatctttatagccatcacg

SEQ ID NO: 496406 - DNA, 30 bp, Artificial Sequence
  Synthetic oligonucleotide
ggagcagggagccggatcctcatcatcacg

SEQ ID NO: 496407 - DNA, 30 bp, Artificial Sequence
  Synthetic oligonucleotide
gcatacaggtactgcacgaagcgtatcacg

SEQ ID NO: 496408 - DNA, 30 bp, Artificial Sequence
  Synthetic oligonucleotide
agatttcggcgtttccgccgtaaactcacg

SEQ ID NO: 496409 - DNA, 30 bp, Artificial Sequence
  Synthetic oligonucleotide
agaggccatcacttggaagtcagtctcacg

SEQ ID NO: 496410 - DNA, 30 bp, Artificial Sequence
  Synthetic oligonucleotide
gtgagacttttgatgctctcgggtctcacg

SEQ ID NO: 496411 - DNA, 30 bp, Artificial Sequence
  Synthetic oligonucleotide
tgcgttaagtgcgcgggggtcattctcacg

SEQ ID NO: 496412 - DNA, 30 bp, Artificial Sequence
  Synthetic oligonucleotide
gtcttctgttagcctagtatttttctcacg

SEQ ID NO: 496413 - DNA, 30 bp, Artificial Sequence
  Synthetic oligonucleotide
gaactacgatacgtgtccgacgtagtcacg

SEQ ID NO: 496414 - DNA, 30 bp, Artificial Sequence
  Synthetic oligonucleotide
tgatagacgccgtatacactgttggtcacg

SEQ ID NO: 496415 - DNA, 30 bp, Artificial Sequence
  Synthetic oligonucleotide
atctccttccttatacgcagtttggtcacg

SEQ ID NO: 496416 - DNA, 30 bp, Artificial Sequence
  Synthetic oligonucleotide
caacctgatcattgtgatcaggccttcacg

SEQ ID NO: 496417 - DNA, 30 bp, Artificial Sequence
  Synthetic oligonucleotide
gcctggcggttaatgtttaataagttcacg

SEQ ID NO: 496418 - DNA, 30 bp, Artificial Sequence
  Synthetic oligonucleotide
tacacaggactcagaccgcgtaggttcacg

SEQ ID NO: 496419 - DNA, 30 bp, Artificial Sequence
  Synthetic oligonucleotide
ctttcatccggtttaatcgccaatttcacg

SEQ ID NO: 496420 - DNA, 30 bp, Artificial Sequence
  Synthetic oligonucleotide
ataagaaccaaattatctcgtaatttcacg

SEQ ID NO: 496421 - DNA, 30 bp, Artificial Sequence
  Synthetic oligonucleotide
cctgggactagagacagcaacagtttcacg

SEQ ID NO: 496422 - DNA, 30 bp, Artificial Sequence
  Synthetic oligonucleotide
tttgaccccaggtatacgcttattttcacg

SEQ ID NO: 496423 - DNA, 30 bp, Artificial Sequence
  Synthetic oligonucleotide
ggaatccagtatatttgccacgttttcacg

SEQ ID NO: 496424 - DNA, 30 bp, Artificial Sequence
  Synthetic oligonucleotide
cacacctttctcttgtctacgataaagacg

SEQ ID NO: 496425 - DNA, 30 bp, Artificial Sequence
  Synthetic oligonucleotide
acaggttttacgcctgtagcgttaaagacg

SEQ ID NO: 496426 - DNA, 30 bp, Artificial Sequence
  Synthetic oligonucleotide
gctctccttctgtatctggtacccaagacg

SEQ ID NO: 496427 - DNA, 30 bp, Artificial Sequence
  Synthetic oligonucleotide
atgcgtcgaaacattgctagtcataagacg

SEQ ID NO: 496428 - DNA, 30 bp, Artificial Sequence
  Synthetic oligonucleotide
cgataagtgacgcgattccgcgtacagacg

SEQ ID NO: 496429 - DNA, 30 bp, Artificial Sequence
  Synthetic oligonucleotide
ggcttacgcgagtcggggcaaggccagacg

SEQ ID NO: 496430 - DNA, 30 bp, Artificial Sequence
  Synthetic oligonucleotide
agcatatatgttgtaggcccgcagcagacg

SEQ ID NO: 496431 - DNA, 31 bp, Artificial Sequence
  Synthetic oligonucleotide
aaagacacaggattaacgatctgggcagacg

SEQ ID NO: 496432 - DNA, 30 bp, Artificial Sequence
  Synthetic oligonucleotide
gaattttggtaggggccgtctgtgcagacg

SEQ ID NO: 496433 - DNA, 30 bp, Artificial Sequence
  Synthetic oligonucleotide
gtttgcctttgtgttttcagcttgcagacg

SEQ ID NO: 496434 - DNA, 30 bp, Artificial Sequence
  Synthetic oligonucleotide
acgtgacatgagggtgttaaaggtcagacg

SEQ ID NO: 496435 - DNA, 30 bp, Artificial Sequence
  Synthetic oligonucleotide
tttaaccagtcttagctagattgtcagacg

SEQ ID NO: 496436 - DNA, 30 bp, Artificial Sequence
  Synthetic oligonucleotide
ggctttgccttccgttcccgcatagagacg

SEQ ID NO: 496437 - DNA, 30 bp, Artificial Sequence
  Synthetic oligonucleotide
tggcccggtcttatatgggagcatgagacg

SEQ ID NO: 496438 - DNA, 30 bp, Artificial Sequence
  Synthetic oligonucleotide
gacgcaggacccccgttagtgtaatagacg

SEQ ID NO: 496439 - DNA, 30 bp, Artificial Sequence
  Synthetic oligonucleotide
gtaacaaggtcccagattcggttctagacg

SEQ ID NO: 496440 - DNA, 30 bp, Artificial Sequence
  Synthetic oligonucleotide
ctgtccagttagggccattttacgtagacg

SEQ ID NO: 496441 - DNA, 30 bp, Artificial Sequence
  Synthetic oligonucleotide
ctagaaaaattatgtctgcgtcattagacg

SEQ ID NO: 496442 - DNA, 30 bp, Artificial Sequence
  Synthetic oligonucleotide
acagttttataccctccgacaccttagacg

SEQ ID NO: 496443 - DNA, 30 bp, Artificial Sequence
  Synthetic oligonucleotide
caggataagggtctggcgatgggttagacg

SEQ ID NO: 496444 - DNA, 30 bp, Artificial Sequence
  Synthetic oligonucleotide
gcgcagcccactgcagttagcgtttagacg

SEQ ID NO: 496445 - DNA, 30 bp, Artificial Sequence
  Synthetic oligonucleotide
actagcgggatgctccaactcttttagacg

SEQ ID NO: 496446 - DNA, 30 bp, Artificial Sequence
  Synthetic oligonucleotide
gttgaagtatggaacgggccgtcaacgacg

SEQ ID NO: 496447 - DNA, 30 bp, Artificial Sequence
  Synthetic oligonucleotide
ttgtccttgacagacgcatggtgaacgacg

SEQ ID NO: 496448 - DNA, 30 bp, Artificial Sequence
  Synthetic oligonucleotide
gctcaccgtggaacacgatgaacgacgacg

SEQ ID NO: 496449 - DNA, 30 bp, Artificial Sequence
  Synthetic oligonucleotide
catgcgaatgaccgctgcacactgacgacg

SEQ ID NO: 496450 - DNA, 30 bp, Artificial Sequence
  Synthetic oligonucleotide
gggcaatccgtttaggcagcaaatacgacg

SEQ ID NO: 496451 - DNA, 30 bp, Artificial Sequence
  Synthetic oligonucleotide
tctctaccgtgccataagaaacctacgacg

SEQ ID NO: 496452 - DNA, 30 bp, Artificial Sequence
  Synthetic oligonucleotide
tgctggtacgtctctagtaactcagcgacg

SEQ ID NO: 496453 - DNA, 30 bp, Artificial Sequence
  Synthetic oligonucleotide
gccgcattgattgtccacaaattagcgacg

SEQ ID NO: 496454 - DNA, 30 bp, Artificial Sequence
  Synthetic oligonucleotide
atcgcgggctagtctacagggcatgcgacg

SEQ ID NO: 496455 - DNA, 30 bp, Artificial Sequence
  Synthetic oligonucleotide
aaccactgtggcagccgtcccttatcgacg

SEQ ID NO: 496456 - DNA, 30 bp, Artificial Sequence
  Synthetic oligonucleotide
gacatcgccatttggatctatggctcgacg

SEQ ID NO: 496457 - DNA, 30 bp, Artificial Sequence
  Synthetic oligonucleotide
gtggcttccgtcggcccaatacggtcgacg

SEQ ID NO: 496458 - DNA, 30 bp, Artificial Sequence
  Synthetic oligonucleotide
tcgtcatgcggttgtttattgtattcgacg

SEQ ID NO: 496459 - DNA, 30 bp, Artificial Sequence
  Synthetic oligonucleotide
ccatattctaagactctgccaacaaggacg

SEQ ID NO: 496460 - DNA, 30 bp, Artificial Sequence
  Synthetic oligonucleotide
taggtatcattatatgaacctagaaggacg

SEQ ID NO: 496461 - DNA, 30 bp, Artificial Sequence
  Synthetic oligonucleotide
ttttaaataacaagcggcggcaataggacg

SEQ ID NO: 496462 - DNA, 30 bp, Artificial Sequence
  Synthetic oligonucleotide
gttctgaggcagacaaggatttgccggacg

SEQ ID NO: 496463 - DNA, 30 bp, Artificial Sequence
  Synthetic oligonucleotide
aatatttcccatctggtattggagcggacg

SEQ ID NO: 496464 - DNA, 30 bp, Artificial Sequence
  Synthetic oligonucleotide
tacgtagcacgcgggcccaacactcggacg

SEQ ID NO: 496465 - DNA, 30 bp, Artificial Sequence
  Synthetic oligonucleotide
gctacgctgtatagttgtccgggtcggacg

SEQ ID NO: 496466 - DNA, 30 bp, Artificial Sequence
  Synthetic oligonucleotide
acgctgccgattggtgcgacgaaagggacg

SEQ ID NO: 496467 - DNA, 30 bp, Artificial Sequence
  Synthetic oligonucleotide
gcgcgtccgggtcgaacctttccagggacg

SEQ ID NO: 496468 - DNA, 30 bp, Artificial Sequence
  Synthetic oligonucleotide
tcaggcggtgccccgggtgtcgcggggacg

SEQ ID NO: 496469 - DNA, 30 bp, Artificial Sequence
  Synthetic oligonucleotide
ctttgtccagatatagacccactggggacg

SEQ ID NO: 496470 - DNA, 30 bp, Artificial Sequence
  Synthetic oligonucleotide
tgttgtgtgttaggtatttgtgttgggacg

SEQ ID NO: 496471 - DNA, 30 bp, Artificial Sequence
  Synthetic oligonucleotide
aagtcagtaggttttttcaaggaaatgacg

SEQ ID NO: 496472 - DNA, 30 bp, Artificial Sequence
  Synthetic oligonucleotide
atatctatttgataatcagtaatcatgacg

SEQ ID NO: 496473 - DNA, 30 bp, Artificial Sequence
  Synthetic oligonucleotide
tatgatgatcgtgtgaactcgcggatgacg

SEQ ID NO: 496474 - DNA, 30 bp, Artificial Sequence
  Synthetic oligonucleotide
gtctgtctgcacgtcgccaacgatatgacg

SEQ ID NO: 496475 - DNA, 30 bp, Artificial Sequence
  Synthetic oligonucleotide
caacatacacatagccactcctgtatgacg

SEQ ID NO: 496476 - DNA, 30 bp, Artificial Sequence
  Synthetic oligonucleotide
gcccgacaggcagttcgctaaattatgacg

SEQ ID NO: 496477 - DNA, 30 bp, Artificial Sequence
  Synthetic oligonucleotide
gcatggtcagagcttattcgcctcctgacg

SEQ ID NO: 496478 - DNA, 30 bp, Artificial Sequence
  Synthetic oligonucleotide
cgtaggccttatatgttattaaggctgacg

SEQ ID NO: 496479 - DNA, 30 bp, Artificial Sequence
  Synthetic oligonucleotide
cgaagcacaaaatacgtccatgggctgacg

SEQ ID NO: 496480 - DNA, 30 bp, Artificial Sequence
  Synthetic oligonucleotide
atcgcaagtacgtggttgggtggtctgacg

SEQ ID NO: 496481 - DNA, 30 bp, Artificial Sequence
  Synthetic oligonucleotide
aatatcagacacaataacagtaacgtgacg

SEQ ID NO: 496482 - DNA, 30 bp, Artificial Sequence
  Synthetic oligonucleotide
aagctcaagatctgtacactacgcgtgacg

SEQ ID NO: 496483 - DNA, 30 bp, Artificial Sequence
  Synthetic oligonucleotide
agtactttacgaagactatcctaattgacg

SEQ ID NO: 496484 - DNA, 30 bp, Artificial Sequence
  Synthetic oligonucleotide
ggtttgcggacaagttagtaaacattgacg

SEQ ID NO: 496485 - DNA, 30 bp, Artificial Sequence
  Synthetic oligonucleotide
caacctccaagatgattgtatagattgacg

SEQ ID NO: 496486 - DNA, 30 bp, Artificial Sequence
  Synthetic oligonucleotide
gcgagtcggatcccggggtctatattgacg

SEQ ID NO: 496487 - DNA, 30 bp, Artificial Sequence
  Synthetic oligonucleotide
tatacaaagtctgttgactgtctattgacg

SEQ ID NO: 496488 - DNA, 30 bp, Artificial Sequence
  Synthetic oligonucleotide
gcgtcgaatgcgcgtttatacgtattgacg

SEQ ID NO: 496489 - DNA, 31 bp, Artificial Sequence
  Synthetic oligonucleotide
ctccaggacagcaggacagtgtagcttgacg

SEQ ID NO: 496490 - DNA, 30 bp, Artificial Sequence
  Synthetic oligonucleotide
ggaagtgtactctccattctttgcttgacg

SEQ ID NO: 496491 - DNA, 30 bp, Artificial Sequence
  Synthetic oligonucleotide
cactgtctaaatgttagcaacttcttgacg

SEQ ID NO: 496492 - DNA, 30 bp, Artificial Sequence
  Synthetic oligonucleotide
ctgttttgggagataccgaggacgttgacg

SEQ ID NO: 496493 - DNA, 30 bp, Artificial Sequence
  Synthetic oligonucleotide
ggatgttcagcaggtgatctctcgttgacg

SEQ ID NO: 496494 - DNA, 30 bp, Artificial Sequence
  Synthetic oligonucleotide
ctgtaccatgagagaggaaaggtgttgacg

SEQ ID NO: 496495 - DNA, 30 bp, Artificial Sequence
  Synthetic oligonucleotide
tatacattgaggcagcctaaataaaatacg

SEQ ID NO: 496496 - DNA, 30 bp, Artificial Sequence
  Synthetic oligonucleotide
atttcatatgttttgcaaagtttgaatacg

SEQ ID NO: 496497 - DNA, 30 bp, Artificial Sequence
  Synthetic oligonucleotide
ttccaactcgcgtcgacatgcagtaatacg

SEQ ID NO: 496498 - DNA, 30 bp, Artificial Sequence
  Synthetic oligonucleotide
agcgtgggtcgggtcggcaccgttaatacg

SEQ ID NO: 496499 - DNA, 30 bp, Artificial Sequence
  Synthetic oligonucleotide
actcggcgcacgtgaaacctctcacatacg

SEQ ID NO: 496500 - DNA, 30 bp, Artificial Sequence
  Synthetic oligonucleotide
tcgttaagctggcttcagtagagacatacg

SEQ ID NO: 496501 - DNA, 30 bp, Artificial Sequence
  Synthetic oligonucleotide
actatatagctggaatggacgggccatacg

SEQ ID NO: 496502 - DNA, 30 bp, Artificial Sequence
  Synthetic oligonucleotide
ccgttttgtggaagcagtaataagcatacg

SEQ ID NO: 496503 - DNA, 30 bp, Artificial Sequence
  Synthetic oligonucleotide
atcgtgtttgtgaaacacattgcgcatacg

SEQ ID NO: 496504 - DNA, 30 bp, Artificial Sequence
  Synthetic oligonucleotide
gattgttgcaccttcctatgtgttcatacg

SEQ ID NO: 496505 - DNA, 30 bp, Artificial Sequence
  Synthetic oligonucleotide
cagtgacgcaaagagatttgcgcagatacg

SEQ ID NO: 496506 - DNA, 30 bp, Artificial Sequence
  Synthetic oligonucleotide
gtcttacaagcacctttgtatagcgatacg

SEQ ID NO: 496507 - DNA, 30 bp, Artificial Sequence
  Synthetic oligonucleotide
gtgaacgcttcacctgtagataaggatacg

SEQ ID NO: 496508 - DNA, 30 bp, Artificial Sequence
  Synthetic oligonucleotide
cgggactcgcgcctgtcggttaaggatacg

SEQ ID NO: 496509 - DNA, 30 bp, Artificial Sequence
  Synthetic oligonucleotide
ctccgtttcgttaattttttgctggatacg

SEQ ID NO: 496510 - DNA, 30 bp, Artificial Sequence
  Synthetic oligonucleotide
tttgaacttgctcaaacgtacgtggatacg

SEQ ID NO: 496511 - DNA, 30 bp, Artificial Sequence
  Synthetic oligonucleotide
agctgcgtactgaagcacagcgtatatacg

SEQ ID NO: 496512 - DNA, 30 bp, Artificial Sequence
  Synthetic oligonucleotide
caaaaaaacattcctatgggcctctatacg

SEQ ID NO: 496513 - DNA, 30 bp, Artificial Sequence
  Synthetic oligonucleotide
atttttacgactgggacagaccagtatacg

SEQ ID NO: 496514 - DNA, 30 bp, Artificial Sequence
  Synthetic oligonucleotide
tgcaggacataattactaacttagtatacg

SEQ ID NO: 496515 - DNA, 30 bp, Artificial Sequence
  Synthetic oligonucleotide
aaatacacattggcacaatcagtgtatacg

SEQ ID NO: 496516 - DNA, 30 bp, Artificial Sequence
  Synthetic oligonucleotide
aattggttattttggtaacttatttatacg

SEQ ID NO: 496517 - DNA, 30 bp, Artificial Sequence
  Synthetic oligonucleotide
actcgttactctgttgaaaggttttatacg

SEQ ID NO: 496518 - DNA, 30 bp, Artificial Sequence
  Synthetic oligonucleotide
tattttggttgaatagggggtttttatacg

SEQ ID NO: 496519 - DNA, 30 bp, Artificial Sequence
  Synthetic oligonucleotide
attcctgtaaacgcaatgcgcgaaactacg

SEQ ID NO: 496520 - DNA, 30 bp, Artificial Sequence
  Synthetic oligonucleotide
aattttcgattttgtcggaggctgactacg

SEQ ID NO: 496521 - DNA, 30 bp, Artificial Sequence
  Synthetic oligonucleotide
aatctgctggagaacggttgatgtactacg

SEQ ID NO: 496522 - DNA, 30 bp, Artificial Sequence
  Synthetic oligonucleotide
agaggtaatgcctcaacgggcccacctacg

SEQ ID NO: 496523 - DNA, 30 bp, Artificial Sequence
  Synthetic oligonucleotide
gcgtttttgatgcgctttgcccggcctacg

SEQ ID NO: 496524 - DNA, 30 bp, Artificial Sequence
  Synthetic oligonucleotide
gtgtggaaattaagggcgacgcacgctacg

SEQ ID NO: 496525 - DNA, 30 bp, Artificial Sequence
  Synthetic oligonucleotide
aattatggtaacatacagtactccgctacg

SEQ ID NO: 496526 - DNA, 30 bp, Artificial Sequence
  Synthetic oligonucleotide
cattgtggacccgttcaccgtagggctacg

SEQ ID NO: 496527 - DNA, 30 bp, Artificial Sequence
  Synthetic oligonucleotide
tccagtcacgcagtctccaagggggctacg

SEQ ID NO: 496528 - DNA, 30 bp, Artificial Sequence
  Synthetic oligonucleotide
tgtggctttagtcagtgtgggctatctacg

SEQ ID NO: 496529 - DNA, 30 bp, Artificial Sequence
  Synthetic oligonucleotide
ggcatccacacaatgcgggaattgtctacg

SEQ ID NO: 496530 - DNA, 30 bp, Artificial Sequence
  Synthetic oligonucleotide
ctatatcataaattcggcaaatattctacg

SEQ ID NO: 496531 - DNA, 30 bp, Artificial Sequence
  Synthetic oligonucleotide
tcgagtgtatgcgcggcccctgtaagtacg

SEQ ID NO: 496532 - DNA, 30 bp, Artificial Sequence
  Synthetic oligonucleotide
tggcagcacgcgatttgaatcttaagtacg

SEQ ID NO: 496533 - DNA, 30 bp, Artificial Sequence
  Synthetic oligonucleotide
gacccgggtttgtcagcgccaaacagtacg

SEQ ID NO: 496534 - DNA, 30 bp, Artificial Sequence
  Synthetic oligonucleotide
atataatcgatgtaaaagaggaagagtacg

SEQ ID NO: 496535 - DNA, 30 bp, Artificial Sequence
  Synthetic oligonucleotide
aatcacccttaactcaaataatagagtacg

SEQ ID NO: 496536 - DNA, 30 bp, Artificial Sequence
  Synthetic oligonucleotide
tgaacgcagggacccccatgtacgagtacg

SEQ ID NO: 496537 - DNA, 30 bp, Artificial Sequence
  Synthetic oligonucleotide
gctgtttgcctacgcgtgtagcaccgtacg

SEQ ID NO: 496538 - DNA, 30 bp, Artificial Sequence
  Synthetic oligonucleotide
cacttttcgcccggtacgaggtaccgtacg

SEQ ID NO: 496539 - DNA, 30 bp, Artificial Sequence
  Synthetic oligonucleotide
gagaccgcgatgcgggccaggttccgtacg

SEQ ID NO: 496540 - DNA, 30 bp, Artificial Sequence
  Synthetic oligonucleotide
tataaatatatctaagtacgcacgcgtacg

SEQ ID NO: 496541 - DNA, 30 bp, Artificial Sequence
  Synthetic oligonucleotide
tgctagataagcagttcaggtggtcgtacg

SEQ ID NO: 496542 - DNA, 30 bp, Artificial Sequence
  Synthetic oligonucleotide
tatatgtgggggtaaagttcttgtcgtacg

SEQ ID NO: 496543 - DNA, 30 bp, Artificial Sequence
  Synthetic oligonucleotide
gtagataggcctatgttaatacagggtacg

SEQ ID NO: 496544 - DNA, 30 bp, Artificial Sequence
  Synthetic oligonucleotide
agatcaatttgtcgactcagtacgggtacg

SEQ ID NO: 496545 - DNA, 30 bp, Artificial Sequence
  Synthetic oligonucleotide
ttccccatacgtggggcccgatcgggtacg

SEQ ID NO: 496546 - DNA, 30 bp, Artificial Sequence
  Synthetic oligonucleotide
ctaagatccaaatgaaagtctcctggtacg

SEQ ID NO: 496547 - DNA, 30 bp, Artificial Sequence
  Synthetic oligonucleotide
gggccacacatacgcacctgttaatgtacg

SEQ ID NO: 496548 - DNA, 30 bp, Artificial Sequence
  Synthetic oligonucleotide
caggtatatacctacccggtcttatgtacg

SEQ ID NO: 496549 - DNA, 30 bp, Artificial Sequence
  Synthetic oligonucleotide
tctatagtgagtagtcgatattcctgtacg

SEQ ID NO: 496550 - DNA, 30 bp, Artificial Sequence
  Synthetic oligonucleotide
tctcagacgttgggctttagagtgtgtacg

SEQ ID NO: 496551 - DNA, 30 bp, Artificial Sequence
  Synthetic oligonucleotide
atcgctatatcgtcagtctaaatttgtacg

SEQ ID NO: 496552 - DNA, 30 bp, Artificial Sequence
  Synthetic oligonucleotide
agttggtttctataggtagtcaagattacg

SEQ ID NO: 496553 - DNA, 30 bp, Artificial Sequence
  Synthetic oligonucleotide
ggggatgttacgtcttttgtactgattacg

SEQ ID NO: 496554 - DNA, 30 bp, Artificial Sequence
  Synthetic oligonucleotide
taaatttgcttttctcaaaccttacttacg

SEQ ID NO: 496555 - DNA, 30 bp, Artificial Sequence
  Synthetic oligonucleotide
taaaacagcttttgttcgcggccccttacg

SEQ ID NO: 496556 - DNA, 30 bp, Artificial Sequence
  Synthetic oligonucleotide
tttcccgtctggattagtccaatccttacg

SEQ ID NO: 496557 - DNA, 30 bp, Artificial Sequence
  Synthetic oligonucleotide
ggagggtgtctcgtcaaactcatccttacg

SEQ ID NO: 496558 - DNA, 30 bp, Artificial Sequence
  Synthetic oligonucleotide
tgtatcgaggaagcacacaggctccttacg

SEQ ID NO: 496559 - DNA, 30 bp, Artificial Sequence
  Synthetic oligonucleotide
atgttacgataacgacgtagaccgcttacg

SEQ ID NO: 496560 - DNA, 30 bp, Artificial Sequence
  Synthetic oligonucleotide
ttcaggtacctagccgaccttaggcttacg

SEQ ID NO: 496561 - DNA, 30 bp, Artificial Sequence
  Synthetic oligonucleotide
agatctgaagccggagcccacgctcttacg

SEQ ID NO: 496562 - DNA, 30 bp, Artificial Sequence
  Synthetic oligonucleotide
tgtgatggcagaacgtacatccgtcttacg

SEQ ID NO: 496563 - DNA, 30 bp, Artificial Sequence
  Synthetic oligonucleotide
ctcgggggtagacactctttgggtcttacg

SEQ ID NO: 496564 - DNA, 30 bp, Artificial Sequence
  Synthetic oligonucleotide
gattgacattaggtatcaggggttcttacg

SEQ ID NO: 496565 - DNA, 30 bp, Artificial Sequence
  Synthetic oligonucleotide
tggccggcaagtgaagtggacatcgttacg

SEQ ID NO: 496566 - DNA, 30 bp, Artificial Sequence
  Synthetic oligonucleotide
ggtaaccacgtgatcctacgtatggttacg

SEQ ID NO: 496567 - DNA, 30 bp, Artificial Sequence
  Synthetic oligonucleotide
tactacgtccaagggcacgttactgttacg

SEQ ID NO: 496568 - DNA, 30 bp, Artificial Sequence
  Synthetic oligonucleotide
tagatgtgacgggcccgtatacttgttacg

SEQ ID NO: 496569 - DNA, 30 bp, Artificial Sequence
  Synthetic oligonucleotide
gaatccgatgttatatgccgagcatttacg

SEQ ID NO: 496570 - DNA, 30 bp, Artificial Sequence
  Synthetic oligonucleotide
gaatactagttcgtcagaaagtactttacg

SEQ ID NO: 496571 - DNA, 30 bp, Artificial Sequence
  Synthetic oligonucleotide
tgaatttaaaaaacgaattatctctttacg

SEQ ID NO: 496572 - DNA, 30 bp, Artificial Sequence
  Synthetic oligonucleotide
gaccaacccatacgagtttgacggtttacg

SEQ ID NO: 496573 - DNA, 30 bp, Artificial Sequence
  Synthetic oligonucleotide
tgcgatgttgcaggatgcaggtattttacg

SEQ ID NO: 496574 - DNA, 30 bp, Artificial Sequence
  Synthetic oligonucleotide
ttgagtacacatagttgtaatatttttacg

SEQ ID NO: 496575 - DNA, 31 bp, Artificial Sequence
  Synthetic oligonucleotide
accaagagtatccccaataagatgcaaaccg

SEQ ID NO: 496576 - DNA, 30 bp, Artificial Sequence
  Synthetic oligonucleotide
acggtttcgtacttctaaccaatgaaaccg

SEQ ID NO: 496577 - DNA, 30 bp, Artificial Sequence
  Synthetic oligonucleotide
gaaacgcttggtccgacgactgaacaaccg

SEQ ID NO: 496578 - DNA, 30 bp, Artificial Sequence
  Synthetic oligonucleotide
gcacgtgattgccactaatggtgccaaccg

SEQ ID NO: 496579 - DNA, 30 bp, Artificial Sequence
  Synthetic oligonucleotide
agtaaataggtgcaggtcggccacgaaccg

SEQ ID NO: 496580 - DNA, 30 bp, Artificial Sequence
  Synthetic oligonucleotide
gaaccacgctgtgggattcgtcccgaaccg

SEQ ID NO: 496581 - DNA, 30 bp, Artificial Sequence
  Synthetic oligonucleotide
acctatccctcgcacggggcggtcgaaccg

SEQ ID NO: 496582 - DNA, 30 bp, Artificial Sequence
  Synthetic oligonucleotide
tacgtccttcatatcgcaaacttggaaccg

SEQ ID NO: 496583 - DNA, 30 bp, Artificial Sequence
  Synthetic oligonucleotide
tttgccttctcgcttgaaatgcatgaaccg

SEQ ID NO: 496584 - DNA, 30 bp, Artificial Sequence
  Synthetic oligonucleotide
cacgcgctgacgtacagcgtgcctgaaccg

SEQ ID NO: 496585 - DNA, 30 bp, Artificial Sequence
  Synthetic oligonucleotide
ttatgttttaggatggcccatattgaaccg

SEQ ID NO: 496586 - DNA, 30 bp, Artificial Sequence
  Synthetic oligonucleotide
cgcattacgggtgcagattcgaactaaccg

SEQ ID NO: 496587 - DNA, 30 bp, Artificial Sequence
  Synthetic oligonucleotide
cctgtccaggaggtctaagcattttaaccg

SEQ ID NO: 496588 - DNA, 30 bp, Artificial Sequence
  Synthetic oligonucleotide
gaccggcagtacggtcatcacagaacaccg

SEQ ID NO: 496589 - DNA, 30 bp, Artificial Sequence
  Synthetic oligonucleotide
gtatgccccaggggtaccaatcttacaccg

SEQ ID NO: 496590 - DNA, 30 bp, Artificial Sequence
  Synthetic oligonucleotide
atcgagcggcatcaggttacgacgccaccg

SEQ ID NO: 496591 - DNA, 30 bp, Artificial Sequence
  Synthetic oligonucleotide
gcattgaatgtgattcatttgaggccaccg

SEQ ID NO: 496592 - DNA, 30 bp, Artificial Sequence
  Synthetic oligonucleotide
tccgtttttcgtgataccgatgggccaccg

SEQ ID NO: 496593 - DNA, 30 bp, Artificial Sequence
  Synthetic oligonucleotide
ctaatctaacgctttcgcagcctgccaccg

SEQ ID NO: 496594 - DNA, 30 bp, Artificial Sequence
  Synthetic oligonucleotide
aacccgtacctatattcggcgcaagcaccg

SEQ ID NO: 496595 - DNA, 31 bp, Artificial Sequence
  Synthetic oligonucleotide
cttgcatatcgtccggcgacatgacgcaccg

SEQ ID NO: 496596 - DNA, 30 bp, Artificial Sequence
  Synthetic oligonucleotide
tttcattgactaccgatggcatacgcaccg

SEQ ID NO: 496597 - DNA, 30 bp, Artificial Sequence
  Synthetic oligonucleotide
cggctgccggtccgccgagatatcgcaccg

SEQ ID NO: 496598 - DNA, 30 bp, Artificial Sequence
  Synthetic oligonucleotide
cgcggttcagactcgtttgcataggcaccg

SEQ ID NO: 496599 - DNA, 30 bp, Artificial Sequence
  Synthetic oligonucleotide
ttccagtacacaacaggtcccccggcaccg

SEQ ID NO: 496600 - DNA, 30 bp, Artificial Sequence
  Synthetic oligonucleotide
tgtcagggctaacagagatcgcgggcaccg

SEQ ID NO: 496601 - DNA, 30 bp, Artificial Sequence
  Synthetic oligonucleotide
aagtttagctgaacgcatctagtggcaccg

SEQ ID NO: 496602 - DNA, 30 bp, Artificial Sequence
  Synthetic oligonucleotide
ttattgttaagtacctcaaaggtggcaccg

SEQ ID NO: 496603 - DNA, 30 bp, Artificial Sequence
  Synthetic oligonucleotide
gtcgcactcaaatggttggatcttgcaccg

SEQ ID NO: 496604 - DNA, 30 bp, Artificial Sequence
  Synthetic oligonucleotide
gaaagaggggctcgacgcagaggatcaccg

SEQ ID NO: 496605 - DNA, 30 bp, Artificial Sequence
  Synthetic oligonucleotide
gacaaaggacgcatacggctatgatcaccg

SEQ ID NO: 496606 - DNA, 30 bp, Artificial Sequence
  Synthetic oligonucleotide
aatgacgtttggagacccgctgtgtcaccg

SEQ ID NO: 496607 - DNA, 30 bp, Artificial Sequence
  Synthetic oligonucleotide
tccggtgaaattttaaatagaatttcaccg

SEQ ID NO: 496608 - DNA, 30 bp, Artificial Sequence
  Synthetic oligonucleotide
ggtggtcatgtgaataggtatcacagaccg

SEQ ID NO: 496609 - DNA, 30 bp, Artificial Sequence
  Synthetic oligonucleotide
ctctgttccgtcgtgcttagttccagaccg

SEQ ID NO: 496610 - DNA, 30 bp, Artificial Sequence
  Synthetic oligonucleotide
ctcttctatacgtagcttattcgcagaccg

SEQ ID NO: 496611 - DNA, 29 bp, Artificial Sequence
  Synthetic oligonucleotide
taatcgcgcttgcacgtcccgcgagaccg

SEQ ID NO: 496612 - DNA, 30 bp, Artificial Sequence
  Synthetic oligonucleotide
ggtcaggggcaggagagtcgattgagaccg

SEQ ID NO: 496613 - DNA, 30 bp, Artificial Sequence
  Synthetic oligonucleotide
cactggtctttaccgccaggcggtagaccg

SEQ ID NO: 496614 - DNA, 30 bp, Artificial Sequence
  Synthetic oligonucleotide
tagtcattcgtagggaaggtcccacgaccg

SEQ ID NO: 496615 - DNA, 30 bp, Artificial Sequence
  Synthetic oligonucleotide
actccttagctcgacctgactgcacgaccg

SEQ ID NO: 496616 - DNA, 30 bp, Artificial Sequence
  Synthetic oligonucleotide
gtatttgctgactttttgccccagcgaccg

SEQ ID NO: 496617 - DNA, 30 bp, Artificial Sequence
  Synthetic oligonucleotide
ggccagttacttgggcctgcaaatcgaccg

SEQ ID NO: 496618 - DNA, 30 bp, Artificial Sequence
  Synthetic oligonucleotide
ttgcatttgttcgaacctcagagaggaccg

SEQ ID NO: 496619 - DNA, 30 bp, Artificial Sequence
  Synthetic oligonucleotide
ccccctaactttagttgtgcgttgggaccg

SEQ ID NO: 496620 - DNA, 30 bp, Artificial Sequence
  Synthetic oligonucleotide
ctagcgtagtacgtatgtctggtatgaccg

SEQ ID NO: 496621 - DNA, 30 bp, Artificial Sequence
  Synthetic oligonucleotide
ctccgtcctttctggtttaatccctgaccg

SEQ ID NO: 496622 - DNA, 30 bp, Artificial Sequence
  Synthetic oligonucleotide
ccccatgcggcgcaatacgggaagtgaccg

SEQ ID NO: 496623 - DNA, 30 bp, Artificial Sequence
  Synthetic oligonucleotide
cggcgaagggagaacagcgatctttgaccg

SEQ ID NO: 496624 - DNA, 30 bp, Artificial Sequence
  Synthetic oligonucleotide
aaaatttacaccgtcacgctgaaaataccg

SEQ ID NO: 496625 - DNA, 30 bp, Artificial Sequence
  Synthetic oligonucleotide
gtcaaatattatcgcaggtgaggaataccg

SEQ ID NO: 496626 - DNA, 31 bp, Artificial Sequence
  Synthetic oligonucleotide
gcgtccttttgcgtccttgatagagataccg

SEQ ID NO: 496627 - DNA, 30 bp, Artificial Sequence
  Synthetic oligonucleotide
aattgagtaaacgctcacaacgcgataccg

SEQ ID NO: 496628 - DNA, 30 bp, Artificial Sequence
  Synthetic oligonucleotide
tttttcactaagacgtaagaaggtataccg

SEQ ID NO: 496629 - DNA, 30 bp, Artificial Sequence
  Synthetic oligonucleotide
tgacgaccagttggtagtcatcgactaccg

SEQ ID NO: 496630 - DNA, 30 bp, Artificial Sequence
  Synthetic oligonucleotide
ctcggagtctctacaccagcgtgactaccg

SEQ ID NO: 496631 - DNA, 30 bp, Artificial Sequence
  Synthetic oligonucleotide
ctaggaagaataccgcagatgtgactaccg

SEQ ID NO: 496632 - DNA, 30 bp, Artificial Sequence
  Synthetic oligonucleotide
catttagggtcaagacgtctagacctaccg

SEQ ID NO: 496633 - DNA, 30 bp, Artificial Sequence
  Synthetic oligonucleotide
gggtgtgccagggcagcgggtaaagtaccg

SEQ ID NO: 496634 - DNA, 30 bp, Artificial Sequence
  Synthetic oligonucleotide
aaataaatttggggccgctgtgacgtaccg

SEQ ID NO: 496635 - DNA, 30 bp, Artificial Sequence
  Synthetic oligonucleotide
cggcagctacgctccatcgccgcggtaccg

SEQ ID NO: 496636 - DNA, 30 bp, Artificial Sequence
  Synthetic oligonucleotide
tcaacatcgggtaacaggcacggattaccg

SEQ ID NO: 496637 - DNA, 30 bp, Artificial Sequence
  Synthetic oligonucleotide
tgtgtttctcctgcgcaactctgattaccg

SEQ ID NO: 496638 - DNA, 30 bp, Artificial Sequence
  Synthetic oligonucleotide
cggtttttccatttaggatgtgggttaccg

SEQ ID NO: 496639 - DNA, 30 bp, Artificial Sequence
  Synthetic oligonucleotide
tagctttcacgagtaactctgatgttaccg

SEQ ID NO: 496640 - DNA, 30 bp, Artificial Sequence
  Synthetic oligonucleotide
gtgttgacggggtaaacaagatgtttaccg

SEQ ID NO: 496641 - DNA, 30 bp, Artificial Sequence
  Synthetic oligonucleotide
gaggagcatatgtacgcgggtgtaaacccg

SEQ ID NO: 496642 - DNA, 30 bp, Artificial Sequence
  Synthetic oligonucleotide
ctatatattagtttgatacgacctaacccg

SEQ ID NO: 496643 - DNA, 30 bp, Artificial Sequence
  Synthetic oligonucleotide
tgggagataattggcggacgtctgcacccg

SEQ ID NO: 496644 - DNA, 30 bp, Artificial Sequence
  Synthetic oligonucleotide
gcccacggaaacatagttggtactcacccg

SEQ ID NO: 496645 - DNA, 30 bp, Artificial Sequence
  Synthetic oligonucleotide
cgccgttggtcttatgtatggacagacccg

SEQ ID NO: 496646 - DNA, 30 bp, Artificial Sequence
  Synthetic oligonucleotide
gcccatttaataaggtaaagcgaggacccg

SEQ ID NO: 496647 - DNA, 30 bp, Artificial Sequence
  Synthetic oligonucleotide
gcactcccaaacgggcgcggagtggacccg

SEQ ID NO: 496648 - DNA, 30 bp, Artificial Sequence
  Synthetic oligonucleotide
gctggactctcccgagtgctacatgacccg

SEQ ID NO: 496649 - DNA, 30 bp, Artificial Sequence
  Synthetic oligonucleotide
ctctagctaatatccagttacctatacccg

SEQ ID NO: 496650 - DNA, 30 bp, Artificial Sequence
  Synthetic oligonucleotide
atcatgacgagtcgtaataggtcctacccg

SEQ ID NO: 496651 - DNA, 30 bp, Artificial Sequence
  Synthetic oligonucleotide
gaatttaagagtcgataatccacgaccccg

SEQ ID NO: 496652 - DNA, 30 bp, Artificial Sequence
  Synthetic oligonucleotide
tatccgcaccgcccgtaaggcaggaccccg

SEQ ID NO: 496653 - DNA, 30 bp, Artificial Sequence
  Synthetic oligonucleotide
tcgttaatacgcgggtgaacatctaccccg

SEQ ID NO: 496654 - DNA, 30 bp, Artificial Sequence
  Synthetic oligonucleotide
tgtcgtacgatcaggggtattagacccccg

SEQ ID NO: 496655 - DNA, 30 bp, Artificial Sequence
  Synthetic oligonucleotide
ttatcatcacgtttttttttacagcccccg

SEQ ID NO: 496656 - DNA, 30 bp, Artificial Sequence
  Synthetic oligonucleotide
aattggtattacccattcacttaagccccg

SEQ ID NO: 496657 - DNA, 30 bp, Artificial Sequence
  Synthetic oligonucleotide
gcggttaaatccgcttttgctcgcgccccg

SEQ ID NO: 496658 - DNA, 29 bp, Artificial Sequence
  Synthetic oligonucleotide
atattgtttttggtgtcaggcaggccccg

SEQ ID NO: 496659 - DNA, 30 bp, Artificial Sequence
  Synthetic oligonucleotide
cgatgttgggcctgaccagggtaggccccg

SEQ ID NO: 496660 - DNA, 30 bp, Artificial Sequence
  Synthetic oligonucleotide
tgatgagtccagtccgcgtaagatgccccg

SEQ ID NO: 496661 - DNA, 30 bp, Artificial Sequence
  Synthetic oligonucleotide
gagacttcatccggagttatctaatccccg

SEQ ID NO: 496662 - DNA, 30 bp, Artificial Sequence
  Synthetic oligonucleotide
tttctgatggaagcgatatgaccatccccg

SEQ ID NO: 496663 - DNA, 30 bp, Artificial Sequence
  Synthetic oligonucleotide
ccggctgcaggcaaggtcctatcttccccg

SEQ ID NO: 496664 - DNA, 30 bp, Artificial Sequence
  Synthetic oligonucleotide
tgtccataacgctgcaaggattgaagcccg

SEQ ID NO: 496665 - DNA, 30 bp, Artificial Sequence
  Synthetic oligonucleotide
gccatcgcaagtgtgttcatgggcagcccg

SEQ ID NO: 496666 - DNA, 30 bp, Artificial Sequence
  Synthetic oligonucleotide
ggcagcatggatttggtttttaagagcccg

SEQ ID NO: 496667 - DNA, 30 bp, Artificial Sequence
  Synthetic oligonucleotide
tggcaagggattatgttgtatgggagcccg

SEQ ID NO: 496668 - DNA, 30 bp, Artificial Sequence
  Synthetic oligonucleotide
aatgagtgtgccatcttagagacgcgcccg

SEQ ID NO: 496669 - DNA, 30 bp, Artificial Sequence
  Synthetic oligonucleotide
ttattacccaaatcggcaataaggcgcccg

SEQ ID NO: 496670 - DNA, 30 bp, Artificial Sequence
  Synthetic oligonucleotide
gcaagctcgggtatgtttattgggcgcccg

SEQ ID NO: 496671 - DNA, 30 bp, Artificial Sequence
  Synthetic oligonucleotide
aactttgacgcgttaactaggcatcgcccg

SEQ ID NO: 496672 - DNA, 30 bp, Artificial Sequence
  Synthetic oligonucleotide
gttccattacaaatcggctgaggcggcccg

SEQ ID NO: 496673 - DNA, 30 bp, Artificial Sequence
  Synthetic oligonucleotide
gctgcccacgtgaccgaaaattcgggcccg

SEQ ID NO: 496674 - DNA, 30 bp, Artificial Sequence
  Synthetic oligonucleotide
cgcactgcacgagaccaacacttgggcccg

SEQ ID NO: 496675 - DNA, 30 bp, Artificial Sequence
  Synthetic oligonucleotide
aattgactgagcatcgctgcgtatggcccg

SEQ ID NO: 496676 - DNA, 30 bp, Artificial Sequence
  Synthetic oligonucleotide
cgcagcgttcgtcatctacgagggtgcccg

SEQ ID NO: 496677 - DNA, 30 bp, Artificial Sequence
  Synthetic oligonucleotide
gaaatttcgtccgaaatgtagtgttgcccg

SEQ ID NO: 496678 - DNA, 29 bp, Artificial Sequence
  Synthetic oligonucleotide
gagccaccgccttcaggcgcggaatcccg

SEQ ID NO: 496679 - DNA, 30 bp, Artificial Sequence
  Synthetic oligonucleotide
atgtgtcctcggtccttcgtttgcatcccg

SEQ ID NO: 496680 - DNA, 30 bp, Artificial Sequence
  Synthetic oligonucleotide
tgcacggaattattggcacgagatatcccg

SEQ ID NO: 496681 - DNA, 30 bp, Artificial Sequence
  Synthetic oligonucleotide
ggctacaaagttatccaggcggcactcccg

SEQ ID NO: 496682 - DNA, 30 bp, Artificial Sequence
  Synthetic oligonucleotide
tagaaggaatcgctgcccggatccctcccg

SEQ ID NO: 496683 - DNA, 30 bp, Artificial Sequence
  Synthetic oligonucleotide
ttacagacaagtttcggaaagtccctcccg

SEQ ID NO: 496684 - DNA, 30 bp, Artificial Sequence
  Synthetic oligonucleotide
ggttaagaggtttcgtgttctcggctcccg

SEQ ID NO: 496685 - DNA, 30 bp, Artificial Sequence
  Synthetic oligonucleotide
cgcgtacacggtttgaacctgattctcccg

SEQ ID NO: 496686 - DNA, 30 bp, Artificial Sequence
  Synthetic oligonucleotide
cgctttctgcatccttgtctgagagtcccg

SEQ ID NO: 496687 - DNA, 30 bp, Artificial Sequence
  Synthetic oligonucleotide
tttcgcagaaaccggaagtcttgagtcccg

SEQ ID NO: 496688 - DNA, 30 bp, Artificial Sequence
  Synthetic oligonucleotide
tttctggatatgccaagtcggatagtcccg

SEQ ID NO: 496689 - DNA, 30 bp, Artificial Sequence
  Synthetic oligonucleotide
aaaagcatcttctatgattgctacgtcccg

SEQ ID NO: 496690 - DNA, 30 bp, Artificial Sequence
  Synthetic oligonucleotide
ttattacatagataggcggcaagattcccg

SEQ ID NO: 496691 - DNA, 30 bp, Artificial Sequence
  Synthetic oligonucleotide
gcggggcacgcaaaaccgacaggcttcccg

SEQ ID NO: 496692 - DNA, 30 bp, Artificial Sequence
  Synthetic oligonucleotide
caacggagggtcaaatcgaataagttcccg

SEQ ID NO: 496693 - DNA, 30 bp, Artificial Sequence
  Synthetic oligonucleotide
cttcttttgctaccgccgttcccgttcccg

SEQ ID NO: 496694 - DNA, 30 bp, Artificial Sequence
  Synthetic oligonucleotide
gagtgccggcaaaacaggctagtgttcccg

SEQ ID NO: 496695 - DNA, 30 bp, Artificial Sequence
  Synthetic oligonucleotide
atagtatgccaactaggtttatctttcccg

SEQ ID NO: 496696 - DNA, 30 bp, Artificial Sequence
  Synthetic oligonucleotide
gcacgtatggcgcgaaggcggcccaagccg

SEQ ID NO: 496697 - DNA, 30 bp, Artificial Sequence
  Synthetic oligonucleotide
tcacgcgttctgggcacgaacctcaagccg

SEQ ID NO: 496698 - DNA, 30 bp, Artificial Sequence
  Synthetic oligonucleotide
gccacacgtagcattcagtctatgaagccg

SEQ ID NO: 496699 - DNA, 30 bp, Artificial Sequence
  Synthetic oligonucleotide
aggtgatctacggcattttcacaacagccg

SEQ ID NO: 496700 - DNA, 30 bp, Artificial Sequence
  Synthetic oligonucleotide
cataattgaagcgttgggccggtacagccg

SEQ ID NO: 496701 - DNA, 30 bp, Artificial Sequence
  Synthetic oligonucleotide
gtacggacccactccttcgaaaggcagccg

SEQ ID NO: 496702 - DNA, 30 bp, Artificial Sequence
  Synthetic oligonucleotide
tacccaagcctagtttgcccggggcagccg

SEQ ID NO: 496703 - DNA, 30 bp, Artificial Sequence
  Synthetic oligonucleotide
cttatagtctgctaaggactgatgcagccg

SEQ ID NO: 496704 - DNA, 30 bp, Artificial Sequence
  Synthetic oligonucleotide
ccggtctgcttgggtgagatgcaagagccg

SEQ ID NO: 496705 - DNA, 30 bp, Artificial Sequence
  Synthetic oligonucleotide
ttacatgtagccaccggtaacagagagccg

SEQ ID NO: 496706 - DNA, 30 bp, Artificial Sequence
  Synthetic oligonucleotide
taggtcaccctctacaattggccggagccg

SEQ ID NO: 496707 - DNA, 30 bp, Artificial Sequence
  Synthetic oligonucleotide
acacagggatacgtaacctaccttgagccg

SEQ ID NO: 496708 - DNA, 30 bp, Artificial Sequence
  Synthetic oligonucleotide
cgccgatagaatgtagcagggtttgagccg

SEQ ID NO: 496709 - DNA, 30 bp, Artificial Sequence
  Synthetic oligonucleotide
cgcaaggaaaacagtatttgaccgtagccg

SEQ ID NO: 496710 - DNA, 30 bp, Artificial Sequence
  Synthetic oligonucleotide
ttgttgttacgtttccacctcccgtagccg

SEQ ID NO: 496711 - DNA, 30 bp, Artificial Sequence
  Synthetic oligonucleotide
cattttaaattgtcacgtcggcggtagccg

SEQ ID NO: 496712 - DNA, 30 bp, Artificial Sequence
  Synthetic oligonucleotide
gagggtcaccacggcacctactattagccg

SEQ ID NO: 496713 - DNA, 30 bp, Artificial Sequence
  Synthetic oligonucleotide
tctctgaatttccctgtacgtgtaacgccg

SEQ ID NO: 496714 - DNA, 30 bp, Artificial Sequence
  Synthetic oligonucleotide
acgccacgcacggtgcgcaattacacgccg

SEQ ID NO: 496715 - DNA, 30 bp, Artificial Sequence
  Synthetic oligonucleotide
aaatggtaaggctttggatctggcacgccg

SEQ ID NO: 496716 - DNA, 30 bp, Artificial Sequence
  Synthetic oligonucleotide
ggcaggacggctctgaagataaagacgccg

SEQ ID NO: 496717 - DNA, 30 bp, Artificial Sequence
  Synthetic oligonucleotide
aagaccgggcattaatggatactgacgccg

SEQ ID NO: 496718 - DNA, 30 bp, Artificial Sequence
  Synthetic oligonucleotide
ttttcatttgaggtgaagcgccatccgccg

SEQ ID NO: 496719 - DNA, 30 bp, Artificial Sequence
  Synthetic oligonucleotide
tggtgcgggaaataccacgcgagtccgccg

SEQ ID NO: 496720 - DNA, 30 bp, Artificial Sequence
  Synthetic oligonucleotide
ttgcactgggtcgggtttacgcacgcgccg

SEQ ID NO: 496721 - DNA, 30 bp, Artificial Sequence
  Synthetic oligonucleotide
tgcacgggcacgacgtctcgagacgcgccg

SEQ ID NO: 496722 - DNA, 30 bp, Artificial Sequence
  Synthetic oligonucleotide
agtatgagcagtgcaaacgcagcggcgccg

SEQ ID NO: 496723 - DNA, 30 bp, Artificial Sequence
  Synthetic oligonucleotide
ttaaagtctacggtgtcgcgtattgcgccg

SEQ ID NO: 496724 - DNA, 30 bp, Artificial Sequence
  Synthetic oligonucleotide
ttttgaattttgtagatcggacttgcgccg

SEQ ID NO: 496725 - DNA, 30 bp, Artificial Sequence
  Synthetic oligonucleotide
agttttccggttagacttgggcaatcgccg

SEQ ID NO: 496726 - DNA, 30 bp, Artificial Sequence
  Synthetic oligonucleotide
ccttatgtgcactaataaactaacaggccg

SEQ ID NO: 496727 - DNA, 30 bp, Artificial Sequence
  Synthetic oligonucleotide
tgtctactatcggcgaacaatgataggccg

SEQ ID NO: 496728 - DNA, 30 bp, Artificial Sequence
  Synthetic oligonucleotide
ttatatcacttactatacgatacacggccg

SEQ ID NO: 496729 - DNA, 30 bp, Artificial Sequence
  Synthetic oligonucleotide
tcctcccccccgggaggctgaatacggccg

SEQ ID NO: 496730 - DNA, 30 bp, Artificial Sequence
  Synthetic oligonucleotide
caaattgggggcgagtatcctggccggccg

SEQ ID NO: 496731 - DNA, 30 bp, Artificial Sequence
  Synthetic oligonucleotide
gaaacgcccgtggtaaggagatatcggccg

SEQ ID NO: 496732 - DNA, 30 bp, Artificial Sequence
  Synthetic oligonucleotide
caaccatcggtggtttaaacatccgggccg

SEQ ID NO: 496733 - DNA, 30 bp, Artificial Sequence
  Synthetic oligonucleotide
ataaattctatgcgcgcaggtaaggggccg

SEQ ID NO: 496734 - DNA, 30 bp, Artificial Sequence
  Synthetic oligonucleotide
cgaccgagctcttaacgcttttatgggccg

SEQ ID NO: 496735 - DNA, 30 bp, Artificial Sequence
  Synthetic oligonucleotide
agacctacggcggaggacacaccatggccg

SEQ ID NO: 496736 - DNA, 30 bp, Artificial Sequence
  Synthetic oligonucleotide
atggagatggtcgacacaaaattctggccg

SEQ ID NO: 496737 - DNA, 30 bp, Artificial Sequence
  Synthetic oligonucleotide
tttgtaccgcgggctgctggtaagtggccg

SEQ ID NO: 496738 - DNA, 30 bp, Artificial Sequence
  Synthetic oligonucleotide
taccatgcaaggcccggcataataatgccg

SEQ ID NO: 496739 - DNA, 30 bp, Artificial Sequence
  Synthetic oligonucleotide
tagcgagggccgaatgtatctgacatgccg

SEQ ID NO: 496740 - DNA, 30 bp, Artificial Sequence
  Synthetic oligonucleotide
gcagcagtcatgcagagtgacagactgccg

SEQ ID NO: 496741 - DNA, 30 bp, Artificial Sequence
  Synthetic oligonucleotide
acccggtcggtactcctcttgcaagtgccg

SEQ ID NO: 496742 - DNA, 30 bp, Artificial Sequence
  Synthetic oligonucleotide
ggtggctttgaccagacccgctaagtgccg

SEQ ID NO: 496743 - DNA, 30 bp, Artificial Sequence
  Synthetic oligonucleotide
tacctgtaatggtgtggaggtacagtgccg

SEQ ID NO: 496744 - DNA, 30 bp, Artificial Sequence
  Synthetic oligonucleotide
atttcttagtcttaagttagacacgtgccg

SEQ ID NO: 496745 - DNA, 30 bp, Artificial Sequence
  Synthetic oligonucleotide
attccacaatttttcgccaatcacgtgccg

SEQ ID NO: 496746 - DNA, 30 bp, Artificial Sequence
  Synthetic oligonucleotide
gtttaggtagtgggcgaagctgtggtgccg

SEQ ID NO: 496747 - DNA, 30 bp, Artificial Sequence
  Synthetic oligonucleotide
gtctatttacacgattatatctatgtgccg

SEQ ID NO: 496748 - DNA, 30 bp, Artificial Sequence
  Synthetic oligonucleotide
gcagcagtcacttaatagttcagattgccg

SEQ ID NO: 496749 - DNA, 30 bp, Artificial Sequence
  Synthetic oligonucleotide
gaccattgagtgataccaaaggacttgccg

SEQ ID NO: 496750 - DNA, 30 bp, Artificial Sequence
  Synthetic oligonucleotide
aatttctaggataactatattcgcttgccg

SEQ ID NO: 496751 - DNA, 30 bp, Artificial Sequence
  Synthetic oligonucleotide
aaatgatcttttagctacgcaggaaatccg

SEQ ID NO: 496752 - DNA, 30 bp, Artificial Sequence
  Synthetic oligonucleotide
ccgagtgaaggcaatctcccaaccaatccg

SEQ ID NO: 496753 - DNA, 30 bp, Artificial Sequence
  Synthetic oligonucleotide
ttacttcggtaaggttgaactttcaatccg

SEQ ID NO: 496754 - DNA, 30 bp, Artificial Sequence
  Synthetic oligonucleotide
gctcttgcacgcttaatgtcaaggaatccg

SEQ ID NO: 496755 - DNA, 30 bp, Artificial Sequence
  Synthetic oligonucleotide
atttttctcgagtaaacctacactaatccg

SEQ ID NO: 496756 - DNA, 30 bp, Artificial Sequence
  Synthetic oligonucleotide
gttgtatttagatacagcatgtgtaatccg

SEQ ID NO: 496757 - DNA, 30 bp, Artificial Sequence
  Synthetic oligonucleotide
gcgcaaccaaccctatgcgtttttaatccg

SEQ ID NO: 496758 - DNA, 30 bp, Artificial Sequence
  Synthetic oligonucleotide
ggttattagaggtgacggctcggccatccg

SEQ ID NO: 496759 - DNA, 30 bp, Artificial Sequence
  Synthetic oligonucleotide
ctgtaaggccttccaatgatgtgccatccg

SEQ ID NO: 496760 - DNA, 30 bp, Artificial Sequence
  Synthetic oligonucleotide
ttagccgttagcacgcagtttctcgatccg

SEQ ID NO: 496761 - DNA, 30 bp, Artificial Sequence
  Synthetic oligonucleotide
agcaattgagatgtgggcgaagtcgatccg

SEQ ID NO: 496762 - DNA, 30 bp, Artificial Sequence
  Synthetic oligonucleotide
actacagctatacggagttcggaatatccg

SEQ ID NO: 496763 - DNA, 30 bp, Artificial Sequence
  Synthetic oligonucleotide
gaccagacagacccctggctgccgtatccg

SEQ ID NO: 496764 - DNA, 30 bp, Artificial Sequence
  Synthetic oligonucleotide
agaagccttctgcgcacgcggtggtatccg

SEQ ID NO: 496765 - DNA, 30 bp, Artificial Sequence
  Synthetic oligonucleotide
tcgttttctgaccatctcccgtcttatccg

SEQ ID NO: 496766 - DNA, 30 bp, Artificial Sequence
  Synthetic oligonucleotide
cgcctccggcacgacataacgggccctccg

SEQ ID NO: 496767 - DNA, 30 bp, Artificial Sequence
  Synthetic oligonucleotide
ctgggctacctgcaacgcaggaatcctccg

SEQ ID NO: 496768 - DNA, 30 bp, Artificial Sequence
  Synthetic oligonucleotide
ctttaaaacaataaggactgtcatcctccg

SEQ ID NO: 496769 - DNA, 30 bp, Artificial Sequence
  Synthetic oligonucleotide
tggtggagtcatacgtaactgtttcctccg

SEQ ID NO: 496770 - DNA, 30 bp, Artificial Sequence
  Synthetic oligonucleotide
cttttgtcatgcctcgatatataagctccg

SEQ ID NO: 496771 - DNA, 30 bp, Artificial Sequence
  Synthetic oligonucleotide
cataatgggggtgctgcacaaggcgctccg

SEQ ID NO: 496772 - DNA, 30 bp, Artificial Sequence
  Synthetic oligonucleotide
gagtaagtagagcattgtgttatcgctccg

SEQ ID NO: 496773 - DNA, 30 bp, Artificial Sequence
  Synthetic oligonucleotide
gcacgcagtcagagtgtgaacaaggctccg

SEQ ID NO: 496774 - DNA, 30 bp, Artificial Sequence
  Synthetic oligonucleotide
gatcctattaagtgtcgcacccatgctccg

SEQ ID NO: 496775 - DNA, 30 bp, Artificial Sequence
  Synthetic oligonucleotide
tgtagacattgcaagagagaatcttctccg

SEQ ID NO: 496776 - DNA, 30 bp, Artificial Sequence
  Synthetic oligonucleotide
cattacgatacgtagcagacaagttctccg

SEQ ID NO: 496777 - DNA, 30 bp, Artificial Sequence
  Synthetic oligonucleotide
agattgaggaggctacagcgagtaagtccg

SEQ ID NO: 496778 - DNA, 30 bp, Artificial Sequence
  Synthetic oligonucleotide
gacaacctggggagctctacggatagtccg

SEQ ID NO: 496779 - DNA, 30 bp, Artificial Sequence
  Synthetic oligonucleotide
actaatgcagcttcttgagaaatacgtccg

SEQ ID NO: 496780 - DNA, 30 bp, Artificial Sequence
  Synthetic oligonucleotide
ttcctacttgcttggagtaacgtaggtccg

SEQ ID NO: 496781 - DNA, 30 bp, Artificial Sequence
  Synthetic oligonucleotide
aatcgggctatttgaagtcgctacggtccg

SEQ ID NO: 496782 - DNA, 30 bp, Artificial Sequence
  Synthetic oligonucleotide
gttgtttaactgagatattagaggggtccg

SEQ ID NO: 496783 - DNA, 30 bp, Artificial Sequence
  Synthetic oligonucleotide
gattcagcatacccgtcggcaatgggtccg

SEQ ID NO: 496784 - DNA, 30 bp, Artificial Sequence
  Synthetic oligonucleotide
aattagaaaattgggtagattagtggtccg

SEQ ID NO: 496785 - DNA, 30 bp, Artificial Sequence
  Synthetic oligonucleotide
ggaggcgaacttctgccgggaccgtgtccg

SEQ ID NO: 496786 - DNA, 30 bp, Artificial Sequence
  Synthetic oligonucleotide
ggggataatctattagcttttcaaattccg

SEQ ID NO: 496787 - DNA, 30 bp, Artificial Sequence
  Synthetic oligonucleotide
attgcggtggctaacctgcttgacattccg

SEQ ID NO: 496788 - DNA, 30 bp, Artificial Sequence
  Synthetic oligonucleotide
gattccaatgggtttggccataggattccg

SEQ ID NO: 496789 - DNA, 30 bp, Artificial Sequence
  Synthetic oligonucleotide
ttcgcctcggaaggaactgtccatattccg

SEQ ID NO: 496790 - DNA, 30 bp, Artificial Sequence
  Synthetic oligonucleotide
tgcaggtctttgtactccataactattccg

SEQ ID NO: 496791 - DNA, 30 bp, Artificial Sequence
  Synthetic oligonucleotide
aacggtaagctaagggggaagccgcttccg

SEQ ID NO: 496792 - DNA, 30 bp, Artificial Sequence
  Synthetic oligonucleotide
gtacttggtgttcggcccggatttcttccg

SEQ ID NO: 496793 - DNA, 30 bp, Artificial Sequence
  Synthetic oligonucleotide
ctctgctttagctgattttagcaagttccg

SEQ ID NO: 496794 - DNA, 30 bp, Artificial Sequence
  Synthetic oligonucleotide
gtaagtgccatagccccttctatagttccg

SEQ ID NO: 496795 - DNA, 30 bp, Artificial Sequence
  Synthetic oligonucleotide
attagcgatgcgactcggcgggtcgttccg

SEQ ID NO: 496796 - DNA, 30 bp, Artificial Sequence
  Synthetic oligonucleotide
ttagttgcatctccgtaatgaacggttccg

SEQ ID NO: 496797 - DNA, 30 bp, Artificial Sequence
  Synthetic oligonucleotide
tggggcaggaacttgggtataggggttccg

SEQ ID NO: 496798 - DNA, 30 bp, Artificial Sequence
  Synthetic oligonucleotide
caccgcatagcgacacggagctttgttccg

SEQ ID NO: 496799 - DNA, 30 bp, Artificial Sequence
  Synthetic oligonucleotide
tatttctgcagcaattgctacgaatttccg

SEQ ID NO: 496800 - DNA, 30 bp, Artificial Sequence
  Synthetic oligonucleotide
gttgcatcggtatgaccagtcgcctttccg

SEQ ID NO: 496801 - DNA, 30 bp, Artificial Sequence
  Synthetic oligonucleotide
tgaactagagcctgccgaacgcgctttccg

SEQ ID NO: 496802 - DNA, 29 bp, Artificial Sequence
  Synthetic oligonucleotide
gttgataccgagggtaaggagagtttccg

SEQ ID NO: 496803 - DNA, 30 bp, Artificial Sequence
  Synthetic oligonucleotide
ttcttagctggaccgagcaacgacaaagcg

SEQ ID NO: 496804 - DNA, 30 bp, Artificial Sequence
  Synthetic oligonucleotide
ggaatccaccgattagcacgtgtcaaagcg

SEQ ID NO: 496805 - DNA, 30 bp, Artificial Sequence
  Synthetic oligonucleotide
cttaaccattgacaatccgctttcaaagcg

SEQ ID NO: 496806 - DNA, 30 bp, Artificial Sequence
  Synthetic oligonucleotide
ggtcacgcaacagctcgaagcgagaaagcg

SEQ ID NO: 496807 - DNA, 30 bp, Artificial Sequence
  Synthetic oligonucleotide
gaacacacaagcactgggttttagaaagcg

SEQ ID NO: 496808 - DNA, 30 bp, Artificial Sequence
  Synthetic oligonucleotide
atttattgagttatacacgggcataaagcg

SEQ ID NO: 496809 - DNA, 31 bp, Artificial Sequence
  Synthetic oligonucleotide
atataaaatacgccgacgactttataaagcg

SEQ ID NO: 496810 - DNA, 30 bp, Artificial Sequence
  Synthetic oligonucleotide
tctccattgcctaccagccgctgtaaagcg

SEQ ID NO: 496811 - DNA, 30 bp, Artificial Sequence
  Synthetic oligonucleotide
attcacacaattggacactcgattaaagcg

SEQ ID NO: 496812 - DNA, 30 bp, Artificial Sequence
  Synthetic oligonucleotide
tcagtgattgaggatccgcggtggcaagcg

SEQ ID NO: 496813 - DNA, 30 bp, Artificial Sequence
  Synthetic oligonucleotide
cgtcaacatacgcatacaggacgagaagcg

SEQ ID NO: 496814 - DNA, 30 bp, Artificial Sequence
  Synthetic oligonucleotide
aatcatctaccccgggggagacgggaagcg

SEQ ID NO: 496815 - DNA, 30 bp, Artificial Sequence
  Synthetic oligonucleotide
ttatcttccatggtgtaaagtatggaagcg

SEQ ID NO: 496816 - DNA, 30 bp, Artificial Sequence
  Synthetic oligonucleotide
atgttgtaatcatatacataggaataagcg

SEQ ID NO: 496817 - DNA, 30 bp, Artificial Sequence
  Synthetic oligonucleotide
ttatttcaaattgtaccaagtacataagcg

SEQ ID NO: 496818 - DNA, 30 bp, Artificial Sequence
  Synthetic oligonucleotide
cacaagacgcaattgacttccaactaagcg

SEQ ID NO: 496819 - DNA, 30 bp, Artificial Sequence
  Synthetic oligonucleotide
cccatgataaaccctcccgctcactaagcg

SEQ ID NO: 496820 - DNA, 30 bp, Artificial Sequence
  Synthetic oligonucleotide
tggcgccgcagaaccggccgcagctaagcg

SEQ ID NO: 496821 - DNA, 30 bp, Artificial Sequence
  Synthetic oligonucleotide
gctgtaacgtgccacagggcatgctaagcg

SEQ ID NO: 496822 - DNA, 30 bp, Artificial Sequence
  Synthetic oligonucleotide
tccgagaactaccctcagttcaggtaagcg

SEQ ID NO: 496823 - DNA, 30 bp, Artificial Sequence
  Synthetic oligonucleotide
gccagctactgatgcgtgagacgttaagcg

SEQ ID NO: 496824 - DNA, 30 bp, Artificial Sequence
  Synthetic oligonucleotide
tcgctacaatcgcgttgaccttcaacagcg

SEQ ID NO: 496825 - DNA, 30 bp, Artificial Sequence
  Synthetic oligonucleotide
gatgaattttcgcgtgcgcacgtcacagcg

SEQ ID NO: 496826 - DNA, 30 bp, Artificial Sequence
  Synthetic oligonucleotide
gaaatagattcaaggttgtccttcacagcg

SEQ ID NO: 496827 - DNA, 30 bp, Artificial Sequence
  Synthetic oligonucleotide
atttaaagcacgcgaaatggtttcacagcg

SEQ ID NO: 496828 - DNA, 30 bp, Artificial Sequence
  Synthetic oligonucleotide
cctacgtattttaatataggtatgacagcg

SEQ ID NO: 496829 - DNA, 30 bp, Artificial Sequence
  Synthetic oligonucleotide
agtacttgagtttacggatgcactacagcg

SEQ ID NO: 496830 - DNA, 30 bp, Artificial Sequence
  Synthetic oligonucleotide
tatacgggtttgatgttacgccagccagcg

SEQ ID NO: 496831 - DNA, 30 bp, Artificial Sequence
  Synthetic oligonucleotide
atgccctagtcgcaattcatttggccagcg

SEQ ID NO: 496832 - DNA, 30 bp, Artificial Sequence
  Synthetic oligonucleotide
tttaatggtgtgtgtgacgccctgccagcg

SEQ ID NO: 496833 - DNA, 30 bp, Artificial Sequence
  Synthetic oligonucleotide
tggggcttcatgacttgatcgcgcgcagcg

SEQ ID NO: 496834 - DNA, 31 bp, Artificial Sequence
  Synthetic oligonucleotide
aagtgacaggttctcgcgttcaatcgcagcg

SEQ ID NO: 496835 - DNA, 30 bp, Artificial Sequence
  Synthetic oligonucleotide
gcaaggttctccggggggtgacaggcagcg

SEQ ID NO: 496836 - DNA, 30 bp, Artificial Sequence
  Synthetic oligonucleotide
catgaccgcaaatcacgtttggaggcagcg

SEQ ID NO: 496837 - DNA, 30 bp, Artificial Sequence
  Synthetic oligonucleotide
gactcataccacaggttcattacggcagcg

SEQ ID NO: 496838 - DNA, 30 bp, Artificial Sequence
  Synthetic oligonucleotide
tgttcggaacaaatgctctgtctggcagcg

SEQ ID NO: 496839 - DNA, 30 bp, Artificial Sequence
  Synthetic oligonucleotide
gtgctgtcaaattcagcgggtttggcagcg

SEQ ID NO: 496840 - DNA, 30 bp, Artificial Sequence
  Synthetic oligonucleotide
tatctatgaacgaggcacgccaaatcagcg

SEQ ID NO: 496841 - DNA, 30 bp, Artificial Sequence
  Synthetic oligonucleotide
tagtctcggcagccgtgtaagcaatcagcg

SEQ ID NO: 496842 - DNA, 30 bp, Artificial Sequence
  Synthetic oligonucleotide
tatacgaatcggtctgtgatcgaatcagcg

SEQ ID NO: 496843 - DNA, 30 bp, Artificial Sequence
  Synthetic oligonucleotide
gtcgcccctcgcgttagcgactcatcagcg

SEQ ID NO: 496844 - DNA, 30 bp, Artificial Sequence
  Synthetic oligonucleotide
ttgtcagaccagctttatcgtatatcagcg

SEQ ID NO: 496845 - DNA, 30 bp, Artificial Sequence
  Synthetic oligonucleotide
agcgccaccgtctgtacgttacagtcagcg

SEQ ID NO: 496846 - DNA, 30 bp, Artificial Sequence
  Synthetic oligonucleotide
ttgatatgtaaaacgaattagtagtcagcg

SEQ ID NO: 496847 - DNA, 30 bp, Artificial Sequence
  Synthetic oligonucleotide
gatcggagaatagcaaccgcggattcagcg

SEQ ID NO: 496848 - DNA, 30 bp, Artificial Sequence
  Synthetic oligonucleotide
ggcagcgctcggattgaagcttccagagcg

SEQ ID NO: 496849 - DNA, 30 bp, Artificial Sequence
  Synthetic oligonucleotide
tacgcttagtctcggctaccgtaccgagcg

SEQ ID NO: 496850 - DNA, 30 bp, Artificial Sequence
  Synthetic oligonucleotide
tatccggactcagtgtcttgttttcgagcg

SEQ ID NO: 496851 - DNA, 30 bp, Artificial Sequence
  Synthetic oligonucleotide
ctcaagccactacggtcaaagaccggagcg

SEQ ID NO: 496852 - DNA, 30 bp, Artificial Sequence
  Synthetic oligonucleotide
gacgcgcagcttcagtccatacgtggagcg

SEQ ID NO: 496853 - DNA, 30 bp, Artificial Sequence
  Synthetic oligonucleotide
ttcactcatggtgattttcgccttggagcg

SEQ ID NO: 496854 - DNA, 30 bp, Artificial Sequence
  Synthetic oligonucleotide
gccggtcaccctaaaaattcgatatgagcg

SEQ ID NO: 496855 - DNA, 30 bp, Artificial Sequence
  Synthetic oligonucleotide
ctgttaagttataactgtttcgcaatagcg

SEQ ID NO: 496856 - DNA, 30 bp, Artificial Sequence
  Synthetic oligonucleotide
gtccgcgtaggcgggtcccaagggatagcg

SEQ ID NO: 496857 - DNA, 30 bp, Artificial Sequence
  Synthetic oligonucleotide
tttttgtaaaaagtgtaggagtgactagcg

SEQ ID NO: 496858 - DNA, 30 bp, Artificial Sequence
  Synthetic oligonucleotide
gtattttcaggcgtaattttatacctagcg

SEQ ID NO: 496859 - DNA, 30 bp, Artificial Sequence
  Synthetic oligonucleotide
caatggacagctataacgcgttacctagcg

SEQ ID NO: 496860 - DNA, 30 bp, Artificial Sequence
  Synthetic oligonucleotide
gctctctacagctttagggcctatctagcg

SEQ ID NO: 496861 - DNA, 30 bp, Artificial Sequence
  Synthetic oligonucleotide
cgtttgaggggacttaaaagttaagtagcg

SEQ ID NO: 496862 - DNA, 30 bp, Artificial Sequence
  Synthetic oligonucleotide
attgttctcctccctctggacatagtagcg

SEQ ID NO: 496863 - DNA, 30 bp, Artificial Sequence
  Synthetic oligonucleotide
gacagcccgtagctacctaaggtagtagcg

SEQ ID NO: 496864 - DNA, 30 bp, Artificial Sequence
  Synthetic oligonucleotide
gagtaggcgttatagcgtacgcgcgtagcg

SEQ ID NO: 496865 - DNA, 30 bp, Artificial Sequence
  Synthetic oligonucleotide
acacagcgcctagcagggcatttcgtagcg

SEQ ID NO: 496866 - DNA, 30 bp, Artificial Sequence
  Synthetic oligonucleotide
aaccctaaccacgtcgctctaggggtagcg

SEQ ID NO: 496867 - DNA, 30 bp, Artificial Sequence
  Synthetic oligonucleotide
acggtaccgtgcggcataacgcctgtagcg

SEQ ID NO: 496868 - DNA, 30 bp, Artificial Sequence
  Synthetic oligonucleotide
agtcgttacgttgccgtggcgcctgtagcg

SEQ ID NO: 496869 - DNA, 30 bp, Artificial Sequence
  Synthetic oligonucleotide
attcccttcaaggtgtaattgttattagcg

SEQ ID NO: 496870 - DNA, 30 bp, Artificial Sequence
  Synthetic oligonucleotide
gaccgcgagcagcgttgtgcaacgttagcg

SEQ ID NO: 496871 - DNA, 30 bp, Artificial Sequence
  Synthetic oligonucleotide
gttcattttgagatcttctgcaggttagcg

SEQ ID NO: 496872 - DNA, 30 bp, Artificial Sequence
  Synthetic oligonucleotide
cttgccaccatgcgagctcgactgttagcg

SEQ ID NO: 496873 - DNA, 30 bp, Artificial Sequence
  Synthetic oligonucleotide
ttgaatttctctagcccaccgtggaacgcg

SEQ ID NO: 496874 - DNA, 30 bp, Artificial Sequence
  Synthetic oligonucleotide
ccgaaaaagcccggggttggttggaacgcg

SEQ ID NO: 496875 - DNA, 30 bp, Artificial Sequence
  Synthetic oligonucleotide
cctgccttcatgtgactttctatgaacgcg

SEQ ID NO: 496876 - DNA, 30 bp, Artificial Sequence
  Synthetic oligonucleotide
ctggcacttttcgagtcgaggtttaacgcg

SEQ ID NO: 496877 - DNA, 30 bp, Artificial Sequence
  Synthetic oligonucleotide
gagctttttccctggttccggcaacacgcg

SEQ ID NO: 496878 - DNA, 30 bp, Artificial Sequence
  Synthetic oligonucleotide
aatcgttgagcgcggtcacagccacacgcg

SEQ ID NO: 496879 - DNA, 30 bp, Artificial Sequence
  Synthetic oligonucleotide
ggcaccaacactcgcgattatatacacgcg

SEQ ID NO: 496880 - DNA, 30 bp, Artificial Sequence
  Synthetic oligonucleotide
tagccgctggaatgctttctcatccacgcg

SEQ ID NO: 496881 - DNA, 30 bp, Artificial Sequence
  Synthetic oligonucleotide
ctcgctcaagtgctgccactgcatcacgcg

SEQ ID NO: 496882 - DNA, 30 bp, Artificial Sequence
  Synthetic oligonucleotide
gccattctataggatagcgatagtcacgcg

SEQ ID NO: 496883 - DNA, 30 bp, Artificial Sequence
  Synthetic oligonucleotide
tcctctcggcatattcatgacgaagacgcg

SEQ ID NO: 496884 - DNA, 30 bp, Artificial Sequence
  Synthetic oligonucleotide
ttcgtacattagcgtgccaaacgagacgcg

SEQ ID NO: 496885 - DNA, 30 bp, Artificial Sequence
  Synthetic oligonucleotide
accacgactctctggagtttagtagacgcg

SEQ ID NO: 496886 - DNA, 30 bp, Artificial Sequence
  Synthetic oligonucleotide
gctaggggaattgttaataggttagacgcg

SEQ ID NO: 496887 - DNA, 30 bp, Artificial Sequence
  Synthetic oligonucleotide
ctcagtattgaccgaaggcaagacgacgcg

SEQ ID NO: 496888 - DNA, 30 bp, Artificial Sequence
  Synthetic oligonucleotide
gatcctctgggtagcacgtcggacgacgcg

SEQ ID NO: 496889 - DNA, 30 bp, Artificial Sequence
  Synthetic oligonucleotide
ataacaatccgaaagcgggcacgcgacgcg

SEQ ID NO: 496890 - DNA, 30 bp, Artificial Sequence
  Synthetic oligonucleotide
tatctgtgaggtttaagtccgcaggacgcg

SEQ ID NO: 496891 - DNA, 30 bp, Artificial Sequence
  Synthetic oligonucleotide
cttcgagtccgctgtagcaggtgggacgcg

SEQ ID NO: 496892 - DNA, 30 bp, Artificial Sequence
  Synthetic oligonucleotide
catcatggttgcccgaatagacatgacgcg

SEQ ID NO: 496893 - DNA, 30 bp, Artificial Sequence
  Synthetic oligonucleotide
ccccaggacgggagtctcgaggatgacgcg

SEQ ID NO: 496894 - DNA, 30 bp, Artificial Sequence
  Synthetic oligonucleotide
gtgcaatgtccgccagaccctattgacgcg

SEQ ID NO: 496895 - DNA, 30 bp, Artificial Sequence
  Synthetic oligonucleotide
gatttaccgaactattgacccacatacgcg

SEQ ID NO: 496896 - DNA, 30 bp, Artificial Sequence
  Synthetic oligonucleotide
agtatctgctaggacatctcttactacgcg

SEQ ID NO: 496897 - DNA, 30 bp, Artificial Sequence
  Synthetic oligonucleotide
tcatattgcgcgaattgggcaggctacgcg

SEQ ID NO: 496898 - DNA, 30 bp, Artificial Sequence
  Synthetic oligonucleotide
tgcgtgtaagtttactcccgtttgtacgcg

SEQ ID NO: 496899 - DNA, 30 bp, Artificial Sequence
  Synthetic oligonucleotide
acggttatagtagcgttcataaattacgcg

SEQ ID NO: 496900 - DNA, 30 bp, Artificial Sequence
  Synthetic oligonucleotide
gtattgtgtagatcagatcgtgcttacgcg

SEQ ID NO: 496901 - DNA, 30 bp, Artificial Sequence
  Synthetic oligonucleotide
cgaccgcagatgctgctaccgtgttacgcg

SEQ ID NO: 496902 - DNA, 30 bp, Artificial Sequence
  Synthetic oligonucleotide
ggaccgtttaccccgcccgattgaaccgcg

SEQ ID NO: 496903 - DNA, 30 bp, Artificial Sequence
  Synthetic oligonucleotide
gttatgttttgatagtcagcgcgcaccgcg

SEQ ID NO: 496904 - DNA, 30 bp, Artificial Sequence
  Synthetic oligonucleotide
aacctgccccacgggctttattggaccgcg

SEQ ID NO: 496905 - DNA, 30 bp, Artificial Sequence
  Synthetic oligonucleotide
gacagactccatcagatcgaggtgaccgcg

SEQ ID NO: 496906 - DNA, 30 bp, Artificial Sequence
  Synthetic oligonucleotide
gtgccttcatgcgggtcgtgtagtaccgcg

SEQ ID NO: 496907 - DNA, 30 bp, Artificial Sequence
  Synthetic oligonucleotide
tattgtaccttttcaatacagcccgccgcg

SEQ ID NO: 496908 - DNA, 30 bp, Artificial Sequence
  Synthetic oligonucleotide
acccgcggttcttgcaatagtcgatccgcg

SEQ ID NO: 496909 - DNA, 30 bp, Artificial Sequence
  Synthetic oligonucleotide
gactgaatcaaactccggggttgatccgcg

SEQ ID NO: 496910 - DNA, 30 bp, Artificial Sequence
  Synthetic oligonucleotide
agtacgttgcctgctcaagtggtatccgcg

SEQ ID NO: 496911 - DNA, 30 bp, Artificial Sequence
  Synthetic oligonucleotide
agtcttggattaggacgtgtgatgtccgcg

SEQ ID NO: 496912 - DNA, 30 bp, Artificial Sequence
  Synthetic oligonucleotide
gaatcccaacatatagctgcctattccgcg

SEQ ID NO: 496913 - DNA, 30 bp, Artificial Sequence
  Synthetic oligonucleotide
gtctctgagcgcttgtcatttcaaagcgcg

SEQ ID NO: 496914 - DNA, 30 bp, Artificial Sequence
  Synthetic oligonucleotide
gggcgtccaaggtcgcacaggggcagcgcg

SEQ ID NO: 496915 - DNA, 30 bp, Artificial Sequence
  Synthetic oligonucleotide
atgaatatcccaatgttcaaggcacgcgcg

SEQ ID NO: 496916 - DNA, 30 bp, Artificial Sequence
  Synthetic oligonucleotide
aaaagtgtctaacaggcgcaggcccgcgcg

SEQ ID NO: 496917 - DNA, 30 bp, Artificial Sequence
  Synthetic oligonucleotide
gaataactggttgggagaatgcggcgcgcg

SEQ ID NO: 496918 - DNA, 30 bp, Artificial Sequence
  Synthetic oligonucleotide
gttttccattcctctcccaaatgtcgcgcg

SEQ ID NO: 496919 - DNA, 30 bp, Artificial Sequence
  Synthetic oligonucleotide
gtatttaaatggtttgaagttgtaggcgcg

SEQ ID NO: 496920 - DNA, 30 bp, Artificial Sequence
  Synthetic oligonucleotide
gggttgggacgataatacctacgcggcgcg

SEQ ID NO: 496921 - DNA, 30 bp, Artificial Sequence
  Synthetic oligonucleotide
tgactcatccctgcatcatgaggcggcgcg

SEQ ID NO: 496922 - DNA, 30 bp, Artificial Sequence
  Synthetic oligonucleotide
caccattttcctgtatttaggctcggcgcg

SEQ ID NO: 496923 - DNA, 30 bp, Artificial Sequence
  Synthetic oligonucleotide
ataatactggtttatacagttcagggcgcg

SEQ ID NO: 496924 - DNA, 30 bp, Artificial Sequence
  Synthetic oligonucleotide
gcaccaataggcagcggtcgtccgggcgcg

SEQ ID NO: 496925 - DNA, 30 bp, Artificial Sequence
  Synthetic oligonucleotide
tttctgaaataagtgtcatgcgaaatcgcg

SEQ ID NO: 496926 - DNA, 30 bp, Artificial Sequence
  Synthetic oligonucleotide
tacagctttgcactcatcacgccaatcgcg

SEQ ID NO: 496927 - DNA, 30 bp, Artificial Sequence
  Synthetic oligonucleotide
ttgcattccaatgacccagtccgaatcgcg

SEQ ID NO: 496928 - DNA, 30 bp, Artificial Sequence
  Synthetic oligonucleotide
gtcgatacctcaattccacaagtaatcgcg

SEQ ID NO: 496929 - DNA, 30 bp, Artificial Sequence
  Synthetic oligonucleotide
atccgacttagcgggcgcatggccatcgcg

SEQ ID NO: 496930 - DNA, 30 bp, Artificial Sequence
  Synthetic oligonucleotide
atttgcaattagcagcaccatttcatcgcg

SEQ ID NO: 496931 - DNA, 30 bp, Artificial Sequence
  Synthetic oligonucleotide
gcgcttcgatatgaatttaagtgtatcgcg

SEQ ID NO: 496932 - DNA, 30 bp, Artificial Sequence
  Synthetic oligonucleotide
gtttcggatacgcggctgccaacactcgcg

SEQ ID NO: 496933 - DNA, 30 bp, Artificial Sequence
  Synthetic oligonucleotide
atattatgaaggatggtaattgcgctcgcg

SEQ ID NO: 496934 - DNA, 30 bp, Artificial Sequence
  Synthetic oligonucleotide
agtgattgtattagcgagagagttctcgcg

SEQ ID NO: 496935 - DNA, 30 bp, Artificial Sequence
  Synthetic oligonucleotide
gccgtttcaaataaggggcctagcttcgcg

SEQ ID NO: 496936 - DNA, 30 bp, Artificial Sequence
  Synthetic oligonucleotide
cattcattggatcgttcccgcatcttcgcg

SEQ ID NO: 496937 - DNA, 30 bp, Artificial Sequence
  Synthetic oligonucleotide
ctttaaaggctccaatgcggtacaaaggcg

SEQ ID NO: 496938 - DNA, 30 bp, Artificial Sequence
  Synthetic oligonucleotide
taaccctcgccttattatgtagtaaaggcg

SEQ ID NO: 496939 - DNA, 30 bp, Artificial Sequence
  Synthetic oligonucleotide
gggtactctactggcaactctaacaaggcg

SEQ ID NO: 496940 - DNA, 30 bp, Artificial Sequence
  Synthetic oligonucleotide
ttctaacgtgttagagttggttccaaggcg

SEQ ID NO: 496941 - DNA, 30 bp, Artificial Sequence
  Synthetic oligonucleotide
tccccgtttgggattacctttaataaggcg

SEQ ID NO: 496942 - DNA, 30 bp, Artificial Sequence
  Synthetic oligonucleotide
ctccttcacctgtgaacgcgcctacaggcg

SEQ ID NO: 496943 - DNA, 30 bp, Artificial Sequence
  Synthetic oligonucleotide
tcgagctctagctctcggagacggcaggcg

SEQ ID NO: 496944 - DNA, 30 bp, Artificial Sequence
  Synthetic oligonucleotide
gtcgccttctgcgctacggctgtgcaggcg

SEQ ID NO: 496945 - DNA, 30 bp, Artificial Sequence
  Synthetic oligonucleotide
ggcagccatgttgttttgatacttcaggcg

SEQ ID NO: 496946 - DNA, 30 bp, Artificial Sequence
  Synthetic oligonucleotide
tgccctagaacgcccatgctttttcaggcg

SEQ ID NO: 496947 - DNA, 30 bp, Artificial Sequence
  Synthetic oligonucleotide
aatgatattttgggcgcctctcaagaggcg

SEQ ID NO: 496948 - DNA, 30 bp, Artificial Sequence
  Synthetic oligonucleotide
tccattaccctgtagttaggcaatgaggcg

SEQ ID NO: 496949 - DNA, 30 bp, Artificial Sequence
  Synthetic oligonucleotide
atgcgccgcatcgaaattctccatgaggcg

SEQ ID NO: 496950 - DNA, 30 bp, Artificial Sequence
  Synthetic oligonucleotide
tggatctggtgctcaaatgtgcatgaggcg

SEQ ID NO: 496951 - DNA, 30 bp, Artificial Sequence
  Synthetic oligonucleotide
tatacgttagccggccgccaccttgaggcg

SEQ ID NO: 496952 - DNA, 30 bp, Artificial Sequence
  Synthetic oligonucleotide
agcacaccaatgatggctttggcataggcg

SEQ ID NO: 496953 - DNA, 30 bp, Artificial Sequence
  Synthetic oligonucleotide
aacgtcgacggcaagcgccggctctaggcg

SEQ ID NO: 496954 - DNA, 30 bp, Artificial Sequence
  Synthetic oligonucleotide
ggacacgaccttgcagaatgtaggtaggcg

SEQ ID NO: 496955 - DNA, 30 bp, Artificial Sequence
  Synthetic oligonucleotide
taaaagtctgcaccactacgccattaggcg

SEQ ID NO: 496956 - DNA, 30 bp, Artificial Sequence
  Synthetic oligonucleotide
cacgcagcaacgtggtttccgcatacggcg

SEQ ID NO: 496957 - DNA, 30 bp, Artificial Sequence
  Synthetic oligonucleotide
ttgaaccgattccgttcggatgccccggcg

SEQ ID NO: 496958 - DNA, 30 bp, Artificial Sequence
  Synthetic oligonucleotide
agcaaaccaggaagggatgacatgccggcg

SEQ ID NO: 496959 - DNA, 30 bp, Artificial Sequence
  Synthetic oligonucleotide
ggcgcaggtcgggggctatatatgccggcg

SEQ ID NO: 496960 - DNA, 30 bp, Artificial Sequence
  Synthetic oligonucleotide
aaggattaaatggcatacggatagtcggcg

SEQ ID NO: 496961 - DNA, 30 bp, Artificial Sequence
  Synthetic oligonucleotide
cgcagatctgcaatttcatagttgtcggcg

SEQ ID NO: 496962 - DNA, 30 bp, Artificial Sequence
  Synthetic oligonucleotide
gggatagagcattcgtgtattgattcggcg

SEQ ID NO: 496963 - DNA, 30 bp, Artificial Sequence
  Synthetic oligonucleotide
cgaaagtgaccaataaggcatggaagggcg

SEQ ID NO: 496964 - DNA, 30 bp, Artificial Sequence
  Synthetic oligonucleotide
gcctgcccaatctaatgatagtacagggcg

SEQ ID NO: 496965 - DNA, 30 bp, Artificial Sequence
  Synthetic oligonucleotide
tgatattgtggcacgccgcttgccagggcg

SEQ ID NO: 496966 - DNA, 30 bp, Artificial Sequence
  Synthetic oligonucleotide
cgcctctttcgctccgcatattagagggcg

SEQ ID NO: 496967 - DNA, 30 bp, Artificial Sequence
  Synthetic oligonucleotide
gagcgactttgtactcgaggggggagggcg

SEQ ID NO: 496968 - DNA, 30 bp, Artificial Sequence
  Synthetic oligonucleotide
gaggaaaccagttagaaacaatggagggcg

SEQ ID NO: 496969 - DNA, 30 bp, Artificial Sequence
  Synthetic oligonucleotide
ggtctgtgttcgccctgcaagcctagggcg

SEQ ID NO: 496970 - DNA, 30 bp, Artificial Sequence
  Synthetic oligonucleotide
tttttgccgtgtgtctataagcttagggcg

SEQ ID NO: 496971 - DNA, 30 bp, Artificial Sequence
  Synthetic oligonucleotide
ttaatttttgatagtatagcagcccgggcg

SEQ ID NO: 496972 - DNA, 30 bp, Artificial Sequence
  Synthetic oligonucleotide
atcttgggcggaccgcagctgttccgggcg

SEQ ID NO: 496973 - DNA, 30 bp, Artificial Sequence
  Synthetic oligonucleotide
tggggcataaaaaagggaccgcggcgggcg

SEQ ID NO: 496974 - DNA, 30 bp, Artificial Sequence
  Synthetic oligonucleotide
gttgttccgcccccgccagtacatcgggcg

SEQ ID NO: 496975 - DNA, 31 bp, Artificial Sequence
  Synthetic oligonucleotide
ggacgcgcacaataacgctagtcgaggggcg

SEQ ID NO: 496976 - DNA, 30 bp, Artificial Sequence
  Synthetic oligonucleotide
cgctctttacagcgatggccatacggggcg

SEQ ID NO: 496977 - DNA, 30 bp, Artificial Sequence
  Synthetic oligonucleotide
gaacgggttgggtgggtgtccaagggggcg

SEQ ID NO: 496978 - DNA, 30 bp, Artificial Sequence
  Synthetic oligonucleotide
gggtcgggatgctaggtaccgaagggggcg

SEQ ID NO: 496979 - DNA, 30 bp, Artificial Sequence
  Synthetic oligonucleotide
tattgaatcaaggcaaatatagcgggggcg

SEQ ID NO: 496980 - DNA, 30 bp, Artificial Sequence
  Synthetic oligonucleotide
actgaggtgattcagattggaagtggggcg

SEQ ID NO: 496981 - DNA, 30 bp, Artificial Sequence
  Synthetic oligonucleotide
aattcaccagggttgtataaatgtggggcg

SEQ ID NO: 496982 - DNA, 30 bp, Artificial Sequence
  Synthetic oligonucleotide
gtcttatgacacggtatgccgtcatgggcg

SEQ ID NO: 496983 - DNA, 30 bp, Artificial Sequence
  Synthetic oligonucleotide
tactcgcgacgggtccagcccaagtgggcg

SEQ ID NO: 496984 - DNA, 30 bp, Artificial Sequence
  Synthetic oligonucleotide
gatttgaccgcgtgcatgcgaacgtgggcg

SEQ ID NO: 496985 - DNA, 30 bp, Artificial Sequence
  Synthetic oligonucleotide
acttgtgtattcctagtcagtccgtgggcg

SEQ ID NO: 496986 - DNA, 26 bp, Artificial Sequence
  Synthetic oligonucleotide
cggggggggcccaaccggcttgggcg

SEQ ID NO: 496987 - DNA, 30 bp, Artificial Sequence
  Synthetic oligonucleotide
ttttgcgaactggagccacccgtttgggcg

SEQ ID NO: 496988 - DNA, 30 bp, Artificial Sequence
  Synthetic oligonucleotide
agatacactagcgtctttgtccccatggcg

SEQ ID NO: 496989 - DNA, 30 bp, Artificial Sequence
  Synthetic oligonucleotide
ctcttatgattcctatcacatatcatggcg

SEQ ID NO: 496990 - DNA, 30 bp, Artificial Sequence
  Synthetic oligonucleotide
acgtacacgactcataacttttggatggcg

SEQ ID NO: 496991 - DNA, 30 bp, Artificial Sequence
  Synthetic oligonucleotide
ttcgaccggtattggacatcaatgatggcg

SEQ ID NO: 496992 - DNA, 30 bp, Artificial Sequence
  Synthetic oligonucleotide
aattttagtaaacagccttgacgtatggcg

SEQ ID NO: 496993 - DNA, 30 bp, Artificial Sequence
  Synthetic oligonucleotide
tggggtctcaaacaacacttaaatctggcg

SEQ ID NO: 496994 - DNA, 30 bp, Artificial Sequence
  Synthetic oligonucleotide
gagtttattattctgttgagaactctggcg

SEQ ID NO: 496995 - DNA, 30 bp, Artificial Sequence
  Synthetic oligonucleotide
aagcagccaatgacggtagcatctgtggcg

SEQ ID NO: 496996 - DNA, 30 bp, Artificial Sequence
  Synthetic oligonucleotide
atggataatagaggttcgctactcttggcg

SEQ ID NO: 496997 - DNA, 30 bp, Artificial Sequence
  Synthetic oligonucleotide
aagttcatggctgcaggacacgagttggcg

SEQ ID NO: 496998 - DNA, 30 bp, Artificial Sequence
  Synthetic oligonucleotide
gtgttggccagtacgtcgcgttcgttggcg

SEQ ID NO: 496999 - DNA, 30 bp, Artificial Sequence
  Synthetic oligonucleotide
tgcgggcaaccacgcactgatgggttggcg

SEQ ID NO: 497000 - DNA, 30 bp, Artificial Sequence
  Synthetic oligonucleotide
tgttccagcgaaagcagttacattttggcg

SEQ ID NO: 497001 - DNA, 30 bp, Artificial Sequence
  Synthetic oligonucleotide
ataggggtatgtgctgaacgcataaatgcg

SEQ ID NO: 497002 - DNA, 30 bp, Artificial Sequence
  Synthetic oligonucleotide
tactagtcgcaggcgcaactcctaaatgcg

SEQ ID NO: 497003 - DNA, 30 bp, Artificial Sequence
  Synthetic oligonucleotide
aacctggccatatgtcgcaagggcaatgcg

SEQ ID NO: 497004 - DNA, 30 bp, Artificial Sequence
  Synthetic oligonucleotide
aagacccaatcttgtacaatggggaatgcg

SEQ ID NO: 497005 - DNA, 30 bp, Artificial Sequence
  Synthetic oligonucleotide
ttctgttgctgtcgagagtcatctaatgcg

SEQ ID NO: 497006 - DNA, 30 bp, Artificial Sequence
  Synthetic oligonucleotide
agcaataacacagccgctctgagtaatgcg

SEQ ID NO: 497007 - DNA, 30 bp, Artificial Sequence
  Synthetic oligonucleotide
aaaacatcggtggtatatatcattaatgcg

SEQ ID NO: 497008 - DNA, 30 bp, Artificial Sequence
  Synthetic oligonucleotide
tattctttttcctgcctttttttacatgcg

SEQ ID NO: 497009 - DNA, 29 bp, Artificial Sequence
  Synthetic oligonucleotide
ttatcttgtctacttgatgaacccatgcg

SEQ ID NO: 497010 - DNA, 30 bp, Artificial Sequence
  Synthetic oligonucleotide
ggaactttagggtgcggggctgctgatgcg

SEQ ID NO: 497011 - DNA, 30 bp, Artificial Sequence
  Synthetic oligonucleotide
cgattgggatccctaacgcacgttgatgcg

SEQ ID NO: 497012 - DNA, 30 bp, Artificial Sequence
  Synthetic oligonucleotide
ggcatcccactctttacaatgggttatgcg

SEQ ID NO: 497013 - DNA, 30 bp, Artificial Sequence
  Synthetic oligonucleotide
cctacatagtatccggggacgaccactgcg

SEQ ID NO: 497014 - DNA, 30 bp, Artificial Sequence
  Synthetic oligonucleotide
aaggtgacggatgacgagaccatgcctgcg

SEQ ID NO: 497015 - DNA, 30 bp, Artificial Sequence
  Synthetic oligonucleotide
atacgtaagcatgggcgctttagtcctgcg

SEQ ID NO: 497016 - DNA, 30 bp, Artificial Sequence
  Synthetic oligonucleotide
tttaaacagggtggtcggatggcagctgcg

SEQ ID NO: 497017 - DNA, 30 bp, Artificial Sequence
  Synthetic oligonucleotide
aatggaggtacctagcgtatacgcgctgcg

SEQ ID NO: 497018 - DNA, 30 bp, Artificial Sequence
  Synthetic oligonucleotide
atttctctcgattggatggacttcgctgcg

SEQ ID NO: 497019 - DNA, 30 bp, Artificial Sequence
  Synthetic oligonucleotide
tgggcgaaagactttctttccggggctgcg

SEQ ID NO: 497020 - DNA, 30 bp, Artificial Sequence
  Synthetic oligonucleotide
atactcggctgttgaagctaatcatctgcg

SEQ ID NO: 497021 - DNA, 30 bp, Artificial Sequence
  Synthetic oligonucleotide
gaagaaattgagcctctctcaagatctgcg

SEQ ID NO: 497022 - DNA, 30 bp, Artificial Sequence
  Synthetic oligonucleotide
attgacttaccccggcggttaacctctgcg

SEQ ID NO: 497023 - DNA, 30 bp, Artificial Sequence
  Synthetic oligonucleotide
ttgccatttccgtattgtggcacgtctgcg

SEQ ID NO: 497024 - DNA, 30 bp, Artificial Sequence
  Synthetic oligonucleotide
gaataatcaagaggatgaacctgttctgcg

SEQ ID NO: 497025 - DNA, 30 bp, Artificial Sequence
  Synthetic oligonucleotide
ctttatagcgctacatccgtttgttctgcg

SEQ ID NO: 497026 - DNA, 30 bp, Artificial Sequence
  Synthetic oligonucleotide
ctgaaattagtggaacactcggtttctgcg

SEQ ID NO: 497027 - DNA, 30 bp, Artificial Sequence
  Synthetic oligonucleotide
taccaagacgtatgtgggcggaccagtgcg

SEQ ID NO: 497028 - DNA, 30 bp, Artificial Sequence
  Synthetic oligonucleotide
gtggccatcctttccgcacctatcagtgcg

SEQ ID NO: 497029 - DNA, 30 bp, Artificial Sequence
  Synthetic oligonucleotide
ctaagcccaggaataggaggctaacgtgcg

SEQ ID NO: 497030 - DNA, 30 bp, Artificial Sequence
  Synthetic oligonucleotide
aaatttcgtcttttgttgtctacacgtgcg

SEQ ID NO: 497031 - DNA, 30 bp, Artificial Sequence
  Synthetic oligonucleotide
ccagtctcccgtagacaaagctgccgtgcg

SEQ ID NO: 497032 - DNA, 30 bp, Artificial Sequence
  Synthetic oligonucleotide
tcaagattatgctactgagtgcatcgtgcg

SEQ ID NO: 497033 - DNA, 30 bp, Artificial Sequence
  Synthetic oligonucleotide
acggcggctgccgagggccagcttcgtgcg

SEQ ID NO: 497034 - DNA, 30 bp, Artificial Sequence
  Synthetic oligonucleotide
gcacgcaatcctattccattcaagggtgcg

SEQ ID NO: 497035 - DNA, 30 bp, Artificial Sequence
  Synthetic oligonucleotide
tgcttcacgtaccaatctcggtggggtgcg

SEQ ID NO: 497036 - DNA, 40 bp, Artificial Sequence
  Synthetic oligonucleotide
gcattggtaggccggggggtcccgcccaggttctggtgcg

SEQ ID NO: 497037 - DNA, 40 bp, Artificial Sequence
  Synthetic oligonucleotide
gcattggtaggccggggggtcccgcaccggttctggtgcg

SEQ ID NO: 497038 - DNA, 40 bp, Artificial Sequence
  Synthetic oligonucleotide
gcattggtaggccggggggtccctccccggttctggtgcg

SEQ ID NO: 497039 - DNA, 30 bp, Artificial Sequence
  Synthetic oligonucleotide
agtctggtacagcgaccgagcggtggtgcg

SEQ ID NO: 497040 - DNA, 30 bp, Artificial Sequence
  Synthetic oligonucleotide
gccgatcgtaagcacgcgtcatgatgtgcg

SEQ ID NO: 497041 - DNA, 30 bp, Artificial Sequence
  Synthetic oligonucleotide
cgcatgtagcactccgcgaaacgctgtgcg

SEQ ID NO: 497042 - DNA, 30 bp, Artificial Sequence
  Synthetic oligonucleotide
gatgctgcgcttgagaaagatcagtgtgcg

SEQ ID NO: 497043 - DNA, 30 bp, Artificial Sequence
  Synthetic oligonucleotide
atttaagagcgggtacgcatgtcttgtgcg

SEQ ID NO: 497044 - DNA, 30 bp, Artificial Sequence
  Synthetic oligonucleotide
tgatggactctgcacacggtcttttgtgcg

SEQ ID NO: 497045 - DNA, 30 bp, Artificial Sequence
  Synthetic oligonucleotide
gcgagtgtaggaatcaatcgaccaattgcg

SEQ ID NO: 497046 - DNA, 30 bp, Artificial Sequence
  Synthetic oligonucleotide
taatgacaaattcccggcacgcagattgcg

SEQ ID NO: 497047 - DNA, 30 bp, Artificial Sequence
  Synthetic oligonucleotide
gcggtggtcttattcccaaacacgattgcg

SEQ ID NO: 497048 - DNA, 30 bp, Artificial Sequence
  Synthetic oligonucleotide
gggctaaatcgcgcttgaacgcttattgcg

SEQ ID NO: 497049 - DNA, 30 bp, Artificial Sequence
  Synthetic oligonucleotide
tttaatcaggtgaagaattgggttattgcg

SEQ ID NO: 497050 - DNA, 30 bp, Artificial Sequence
  Synthetic oligonucleotide
ctgccttatgagcggcggtataaacttgcg

SEQ ID NO: 497051 - DNA, 30 bp, Artificial Sequence
  Synthetic oligonucleotide
tgatgtgtaggtttactcatctaccttgcg

SEQ ID NO: 497052 - DNA, 32 bp, Artificial Sequence
  Synthetic oligonucleotide
tttgttgtgtaggtttactactctaccttgcg

SEQ ID NO: 497053 - DNA, 30 bp, Artificial Sequence
  Synthetic oligonucleotide
tgatgtttaggtttactcctctaccttgcg

SEQ ID NO: 497054 - DNA, 30 bp, Artificial Sequence
  Synthetic oligonucleotide
actctattttaaagctagaactcggttgcg

SEQ ID NO: 497055 - DNA, 30 bp, Artificial Sequence
  Synthetic oligonucleotide
atttgtcactcaacatcgagagatgttgcg

SEQ ID NO: 497056 - DNA, 30 bp, Artificial Sequence
  Synthetic oligonucleotide
gttgacccacgctcaggaacatatgttgcg

SEQ ID NO: 497057 - DNA, 30 bp, Artificial Sequence
  Synthetic oligonucleotide
aactcggatgagagattagtagctgttgcg

SEQ ID NO: 497058 - DNA, 30 bp, Artificial Sequence
  Synthetic oligonucleotide
gggaacccgcaatctcggtagggtgttgcg

SEQ ID NO: 497059 - DNA, 30 bp, Artificial Sequence
  Synthetic oligonucleotide
ctagtcgcgggttttgctcaacagtttgcg

SEQ ID NO: 497060 - DNA, 30 bp, Artificial Sequence
  Synthetic oligonucleotide
tcgtttaacgagccgacaccaagttttgcg

SEQ ID NO: 497061 - DNA, 30 bp, Artificial Sequence
  Synthetic oligonucleotide
ggcaggcggacgccgttggccagttttgcg

SEQ ID NO: 497062 - DNA, 30 bp, Artificial Sequence
  Synthetic oligonucleotide
taaccgactccccattctcgttacaaatcg

SEQ ID NO: 497063 - DNA, 30 bp, Artificial Sequence
  Synthetic oligonucleotide
tttgatatgcattggcctcgaattaaatcg

SEQ ID NO: 497064 - DNA, 30 bp, Artificial Sequence
  Synthetic oligonucleotide
gtatggggtcttctgctagaaccacaatcg

SEQ ID NO: 497065 - DNA, 30 bp, Artificial Sequence
  Synthetic oligonucleotide
aattcaaattaggcatttgcgttgcaatcg

SEQ ID NO: 497066 - DNA, 30 bp, Artificial Sequence
  Synthetic oligonucleotide
gtttatggaagggcacgactaaacgaatcg

SEQ ID NO: 497067 - DNA, 30 bp, Artificial Sequence
  Synthetic oligonucleotide
tacgagctccaaattgacataacggaatcg

SEQ ID NO: 497068 - DNA, 30 bp, Artificial Sequence
  Synthetic oligonucleotide
tttactaggagtcccatggtgacggaatcg

SEQ ID NO: 497069 - DNA, 30 bp, Artificial Sequence
  Synthetic oligonucleotide
cgcgcacacacttcacgaaactcggaatcg

SEQ ID NO: 497070 - DNA, 30 bp, Artificial Sequence
  Synthetic oligonucleotide
tttactcctatcagcctcatggctgaatcg

SEQ ID NO: 497071 - DNA, 30 bp, Artificial Sequence
  Synthetic oligonucleotide
gctttctggcttttcgcattaccctaatcg

SEQ ID NO: 497072 - DNA, 30 bp, Artificial Sequence
  Synthetic oligonucleotide
ttatttgtcgaacgttaggagttctaatcg

SEQ ID NO: 497073 - DNA, 30 bp, Artificial Sequence
  Synthetic oligonucleotide
ctaatcacttcagtgacgaagtcgtaatcg

SEQ ID NO: 497074 - DNA, 30 bp, Artificial Sequence
  Synthetic oligonucleotide
agtgccgtctcgtcggtatctgccacatcg

SEQ ID NO: 497075 - DNA, 30 bp, Artificial Sequence
  Synthetic oligonucleotide
gaaaacgcgctacgctgaaaatagacatcg

SEQ ID NO: 497076 - DNA, 30 bp, Artificial Sequence
  Synthetic oligonucleotide
aaacctagcacgggtaccatgaatacatcg

SEQ ID NO: 497077 - DNA, 30 bp, Artificial Sequence
  Synthetic oligonucleotide
ttgggtatgtggtcccacaaacgtacatcg

SEQ ID NO: 497078 - DNA, 30 bp, Artificial Sequence
  Synthetic oligonucleotide
aaatcctttacataccatgtaaagccatcg

SEQ ID NO: 497079 - DNA, 30 bp, Artificial Sequence
  Synthetic oligonucleotide
atcgtcgggggagtccagccaaaagcatcg

SEQ ID NO: 497080 - DNA, 30 bp, Artificial Sequence
  Synthetic oligonucleotide
tcgggggagattagggaaactacagcatcg

SEQ ID NO: 497081 - DNA, 30 bp, Artificial Sequence
  Synthetic oligonucleotide
caaacgcctgacgaggaggtaatggcatcg

SEQ ID NO: 497082 - DNA, 30 bp, Artificial Sequence
  Synthetic oligonucleotide
agctaccccaaccgaatggttgtggcatcg

SEQ ID NO: 497083 - DNA, 30 bp, Artificial Sequence
  Synthetic oligonucleotide
acttcattgatggcgcgaacaaatgcatcg

SEQ ID NO: 497084 - DNA, 30 bp, Artificial Sequence
  Synthetic oligonucleotide
actaagttaattgctttcaacgctgcatcg

SEQ ID NO: 497085 - DNA, 30 bp, Artificial Sequence
  Synthetic oligonucleotide
tttgtgtgatacgccgttgtacgtgcatcg

SEQ ID NO: 497086 - DNA, 30 bp, Artificial Sequence
  Synthetic oligonucleotide
ggacacgtactaaaaaaaagttggtcatcg

SEQ ID NO: 497087 - DNA, 30 bp, Artificial Sequence
  Synthetic oligonucleotide
catccgccgtataacactagactttcatcg

SEQ ID NO: 497088 - DNA, 30 bp, Artificial Sequence
  Synthetic oligonucleotide
ataacgcagcttcatagggatagaagatcg

SEQ ID NO: 497089 - DNA, 30 bp, Artificial Sequence
  Synthetic oligonucleotide
ttgtgacgtcacagtaaaagacgcagatcg

SEQ ID NO: 497090 - DNA, 30 bp, Artificial Sequence
  Synthetic oligonucleotide
gacttgtagttcaaggtacataagagatcg

SEQ ID NO: 497091 - DNA, 30 bp, Artificial Sequence
  Synthetic oligonucleotide
tggctgtaaatccacttgatcgggagatcg

SEQ ID NO: 497092 - DNA, 30 bp, Artificial Sequence
  Synthetic oligonucleotide
tagagtaaccgccgagaacgtaatagatcg

SEQ ID NO: 497093 - DNA, 30 bp, Artificial Sequence
  Synthetic oligonucleotide
caacaacgaatcgctatagtatcacgatcg

SEQ ID NO: 497094 - DNA, 30 bp, Artificial Sequence
  Synthetic oligonucleotide
gcgtctctctcgacggctgaccgccgatcg

SEQ ID NO: 497095 - DNA, 30 bp, Artificial Sequence
  Synthetic oligonucleotide
ggaagcttttatttggtaaagctgcgatcg

SEQ ID NO: 497096 - DNA, 30 bp, Artificial Sequence
  Synthetic oligonucleotide
gggcgtatcgattcagctgattttcgatcg

SEQ ID NO: 497097 - DNA, 30 bp, Artificial Sequence
  Synthetic oligonucleotide
gcacgctgtgaaaaacattgttttcgatcg

SEQ ID NO: 497098 - DNA, 30 bp, Artificial Sequence
  Synthetic oligonucleotide
aacacgcatgctgtatcattcgcaggatcg

SEQ ID NO: 497099 - DNA, 30 bp, Artificial Sequence
  Synthetic oligonucleotide
tgacagtagcgtgcggtcgacgagggatcg

SEQ ID NO: 497100 - DNA, 30 bp, Artificial Sequence
  Synthetic oligonucleotide
gcctgtattgttgccgacatagtatgatcg

SEQ ID NO: 497101 - DNA, 30 bp, Artificial Sequence
  Synthetic oligonucleotide
gaatccgctgtcgtagtctgatcgtgatcg

SEQ ID NO: 497102 - DNA, 30 bp, Artificial Sequence
  Synthetic oligonucleotide
ggcttttagaatcggtaagtcccaatatcg

SEQ ID NO: 497103 - DNA, 30 bp, Artificial Sequence
  Synthetic oligonucleotide
gcgacttgagtcatcgagattttaatatcg

SEQ ID NO: 497104 - DNA, 30 bp, Artificial Sequence
  Synthetic oligonucleotide
gaaacatcggctgttcatagcttcatatcg

SEQ ID NO: 497105 - DNA, 30 bp, Artificial Sequence
  Synthetic oligonucleotide
ccataaaaaggtgcttcacgtggtctatcg

SEQ ID NO: 497106 - DNA, 30 bp, Artificial Sequence
  Synthetic oligonucleotide
cctattacgtgaaattgaacaagagtatcg

SEQ ID NO: 497107 - DNA, 30 bp, Artificial Sequence
  Synthetic oligonucleotide
aacacgattgtcgatactctggtagtatcg

SEQ ID NO: 497108 - DNA, 30 bp, Artificial Sequence
  Synthetic oligonucleotide
ttttttcacagctactaaatctccgtatcg

SEQ ID NO: 497109 - DNA, 30 bp, Artificial Sequence
  Synthetic oligonucleotide
gcatcgatagcgcggacccggtcggtatcg

SEQ ID NO: 497110 - DNA, 30 bp, Artificial Sequence
  Synthetic oligonucleotide
atctggaccagggggctctcgcctgtatcg

SEQ ID NO: 497111 - DNA, 30 bp, Artificial Sequence
  Synthetic oligonucleotide
ttcattcccgcggcactggtaattgtatcg

SEQ ID NO: 497112 - DNA, 30 bp, Artificial Sequence
  Synthetic oligonucleotide
caattataataaacgggggctgcattatcg

SEQ ID NO: 497113 - DNA, 30 bp, Artificial Sequence
  Synthetic oligonucleotide
aatcctgtaaagtatatgattactttatcg

SEQ ID NO: 497114 - DNA, 30 bp, Artificial Sequence
  Synthetic oligonucleotide
atcatcctcctctcggcctgaataaactcg

SEQ ID NO: 497115 - DNA, 30 bp, Artificial Sequence
  Synthetic oligonucleotide
taatctcctcgcaaagggggcttggactcg

SEQ ID NO: 497116 - DNA, 30 bp, Artificial Sequence
  Synthetic oligonucleotide
caatgaggggtcagggtcaaatgatactcg

SEQ ID NO: 497117 - DNA, 30 bp, Artificial Sequence
  Synthetic oligonucleotide
agtgtttcggcaaccgaggggttatactcg

SEQ ID NO: 497118 - DNA, 30 bp, Artificial Sequence
  Synthetic oligonucleotide
gaatccgcagcttgagctaactgctactcg

SEQ ID NO: 497119 - DNA, 30 bp, Artificial Sequence
  Synthetic oligonucleotide
aagcgtctaaagaggttttttttttactcg

SEQ ID NO: 497120 - DNA, 30 bp, Artificial Sequence
  Synthetic oligonucleotide
cccttttctagactgggtgagacgacctcg

SEQ ID NO: 497121 - DNA, 30 bp, Artificial Sequence
  Synthetic oligonucleotide
gagaacggcacgctatgcccggatacctcg

SEQ ID NO: 497122 - DNA, 30 bp, Artificial Sequence
  Synthetic oligonucleotide
cccacccgtaaaaaacagacccacccctcg

SEQ ID NO: 497123 - DNA, 30 bp, Artificial Sequence
  Synthetic oligonucleotide
ggtactggttgatatttttcgctcccctcg

SEQ ID NO: 497124 - DNA, 30 bp, Artificial Sequence
  Synthetic oligonucleotide
acaatgcgagaagcgatgacgtcagcctcg

SEQ ID NO: 497125 - DNA, 30 bp, Artificial Sequence
  Synthetic oligonucleotide
cttggtactctgaggcatcgtggagcctcg

SEQ ID NO: 497126 - DNA, 30 bp, Artificial Sequence
  Synthetic oligonucleotide
cagcgcgagagaagttgcacctgagcctcg

SEQ ID NO: 497127 - DNA, 30 bp, Artificial Sequence
  Synthetic oligonucleotide
tgcaccgacgcggcatctcgtcccgcctcg

SEQ ID NO: 497128 - DNA, 30 bp, Artificial Sequence
  Synthetic oligonucleotide
gacaggttcaccgacgctccccgcgcctcg

SEQ ID NO: 497129 - DNA, 30 bp, Artificial Sequence
  Synthetic oligonucleotide
tgcccgtacatgaactgacttatcgcctcg

SEQ ID NO: 497130 - DNA, 30 bp, Artificial Sequence
  Synthetic oligonucleotide
aatgcaccacccgagcaaatcactgcctcg

SEQ ID NO: 497131 - DNA, 30 bp, Artificial Sequence
  Synthetic oligonucleotide
ctggcactttgaaggcgagttgaatcctcg

SEQ ID NO: 497132 - DNA, 30 bp, Artificial Sequence
  Synthetic oligonucleotide
ttttttataatagtaggtccgacatcctcg

SEQ ID NO: 497133 - DNA, 30 bp, Artificial Sequence
  Synthetic oligonucleotide
agaaccggaacctcgaagtgagactcctcg

SEQ ID NO: 497134 - DNA, 30 bp, Artificial Sequence
  Synthetic oligonucleotide
cctgctcgatagatagtctctacctcctcg

SEQ ID NO: 497135 - DNA, 30 bp, Artificial Sequence
  Synthetic oligonucleotide
ggtggggagacaacggtgagagcctcctcg

SEQ ID NO: 497136 - DNA, 30 bp, Artificial Sequence
  Synthetic oligonucleotide
ttcctggttacggtgctttattgctcctcg

SEQ ID NO: 497137 - DNA, 30 bp, Artificial Sequence
  Synthetic oligonucleotide
gccgtgttacaagtacatgcgctgtcctcg

SEQ ID NO: 497138 - DNA, 30 bp, Artificial Sequence
  Synthetic oligonucleotide
taaccgtgctttcccttaaagagaagctcg

SEQ ID NO: 497139 - DNA, 30 bp, Artificial Sequence
  Synthetic oligonucleotide
aaatataattgggcatgggtgttaagctcg

SEQ ID NO: 497140 - DNA, 30 bp, Artificial Sequence
  Synthetic oligonucleotide
aattataacggatccttcagttccagctcg

SEQ ID NO: 497141 - DNA, 30 bp, Artificial Sequence
  Synthetic oligonucleotide
gcacggactccttgaaacaatttcagctcg

SEQ ID NO: 497142 - DNA, 30 bp, Artificial Sequence
  Synthetic oligonucleotide
ctcgatgttcagttcagaatgcttagctcg

SEQ ID NO: 497143 - DNA, 30 bp, Artificial Sequence
  Synthetic oligonucleotide
cttaagagtcctggatcaggggttagctcg

SEQ ID NO: 497144 - DNA, 30 bp, Artificial Sequence
  Synthetic oligonucleotide
tttaacagcagcttctgagcactacgctcg

SEQ ID NO: 497145 - DNA, 30 bp, Artificial Sequence
  Synthetic oligonucleotide
atccattcaagttaccggtcgaagcgctcg

SEQ ID NO: 497146 - DNA, 30 bp, Artificial Sequence
  Synthetic oligonucleotide
acatgttgttgaagactgagatctcgctcg

SEQ ID NO: 497147 - DNA, 30 bp, Artificial Sequence
  Synthetic oligonucleotide
ggacgtaatgcgatagttattggtcgctcg

SEQ ID NO: 497148 - DNA, 30 bp, Artificial Sequence
  Synthetic oligonucleotide
cgccggggatcgtagggctgatgcggctcg

SEQ ID NO: 497149 - DNA, 30 bp, Artificial Sequence
  Synthetic oligonucleotide
tattttacgggctgagatttcctcggctcg

SEQ ID NO: 497150 - DNA, 30 bp, Artificial Sequence
  Synthetic oligonucleotide
gtgatggggccggtccgctaagtcggctcg

SEQ ID NO: 497151 - DNA, 30 bp, Artificial Sequence
  Synthetic oligonucleotide
agggtaggtacagcaccaactttcggctcg

SEQ ID NO: 497152 - DNA, 30 bp, Artificial Sequence
  Synthetic oligonucleotide
agttttacgacagcatcgtgctggggctcg

SEQ ID NO: 497153 - DNA, 30 bp, Artificial Sequence
  Synthetic oligonucleotide
gttgcaagcatacggaacgacaaaatctcg

SEQ ID NO: 497154 - DNA, 31 bp, Artificial Sequence
  Synthetic oligonucleotide
acatggcatgacggcaggttaccccatctcg

SEQ ID NO: 497155 - DNA, 30 bp, Artificial Sequence
  Synthetic oligonucleotide
tctaggtctcagcctacgcacgtcatctcg

SEQ ID NO: 497156 - DNA, 30 bp, Artificial Sequence
  Synthetic oligonucleotide
gttattatggatttttaacattcagtctcg

SEQ ID NO: 497157 - DNA, 30 bp, Artificial Sequence
  Synthetic oligonucleotide
gatgttattactcagtacgtgcgagtctcg

SEQ ID NO: 497158 - DNA, 30 bp, Artificial Sequence
  Synthetic oligonucleotide
acgcgcaaacggaggtaaattcttgtctcg

SEQ ID NO: 497159 - DNA, 30 bp, Artificial Sequence
  Synthetic oligonucleotide
ccacaaggacatgacgcaggtaccttctcg

SEQ ID NO: 497160 - DNA, 30 bp, Artificial Sequence
  Synthetic oligonucleotide
ccgctcaccttgtgtagcggccccttctcg

SEQ ID NO: 497161 - DNA, 30 bp, Artificial Sequence
  Synthetic oligonucleotide
agccggcccaaaaaacaacttgggttctcg

SEQ ID NO: 497162 - DNA, 30 bp, Artificial Sequence
  Synthetic oligonucleotide
aatttcatgtgatcgctaacaaatttctcg

SEQ ID NO: 497163 - DNA, 30 bp, Artificial Sequence
  Synthetic oligonucleotide
atatatatatgggagtcgggttgtttctcg

SEQ ID NO: 497164 - DNA, 30 bp, Artificial Sequence
  Synthetic oligonucleotide
ctgataatccgtcccatgttgtttttctcg

SEQ ID NO: 497165 - DNA, 30 bp, Artificial Sequence
  Synthetic oligonucleotide
acgaatagtccctcggccgaaagcaagtcg

SEQ ID NO: 497166 - DNA, 30 bp, Artificial Sequence
  Synthetic oligonucleotide
cgtagatgggtttgagacccatataagtcg

SEQ ID NO: 497167 - DNA, 30 bp, Artificial Sequence
  Synthetic oligonucleotide
atttgcctaggactgtcgccgactaagtcg

SEQ ID NO: 497168 - DNA, 30 bp, Artificial Sequence
  Synthetic oligonucleotide
ttctaggtagtcgcaactgatggtaagtcg

SEQ ID NO: 497169 - DNA, 30 bp, Artificial Sequence
  Synthetic oligonucleotide
tatacaattatgtttcatttggttcagtcg

SEQ ID NO: 497170 - DNA, 30 bp, Artificial Sequence
  Synthetic oligonucleotide
attgcgtgaatgaaaggatggaaagagtcg

SEQ ID NO: 497171 - DNA, 30 bp, Artificial Sequence
  Synthetic oligonucleotide
atacgctgagggcaggttcatacggagtcg

SEQ ID NO: 497172 - DNA, 30 bp, Artificial Sequence
  Synthetic oligonucleotide
tgtttgacgcttcgggcgacattggagtcg

SEQ ID NO: 497173 - DNA, 30 bp, Artificial Sequence
  Synthetic oligonucleotide
tatattactggagtccggcattattagtcg

SEQ ID NO: 497174 - DNA, 30 bp, Artificial Sequence
  Synthetic oligonucleotide
acaatcaccgccaatgctcgggtttagtcg

SEQ ID NO: 497175 - DNA, 30 bp, Artificial Sequence
  Synthetic oligonucleotide
cttctaggggacgcaggcgtacctccgtcg

SEQ ID NO: 497176 - DNA, 30 bp, Artificial Sequence
  Synthetic oligonucleotide
caatgtgcttttatgatgtcggtagcgtcg

SEQ ID NO: 497177 - DNA, 30 bp, Artificial Sequence
  Synthetic oligonucleotide
ctacactcgggctgcagctacaccgcgtcg

SEQ ID NO: 497178 - DNA, 30 bp, Artificial Sequence
  Synthetic oligonucleotide
gaattcaaaatcactccagttatggcgtcg

SEQ ID NO: 497179 - DNA, 30 bp, Artificial Sequence
  Synthetic oligonucleotide
taaagagggtctgcgcaatcgggatcgtcg

SEQ ID NO: 497180 - DNA, 30 bp, Artificial Sequence
  Synthetic oligonucleotide
gcggatcgcagtgggacgatcgtatcgtcg

SEQ ID NO: 497181 - DNA, 30 bp, Artificial Sequence
  Synthetic oligonucleotide
tagaatgagctctgtggcttcgtttcgtcg

SEQ ID NO: 497182 - DNA, 30 bp, Artificial Sequence
  Synthetic oligonucleotide
agtccgccaactgccgcttctatgaggtcg

SEQ ID NO: 497183 - DNA, 30 bp, Artificial Sequence
  Synthetic oligonucleotide
agggtaaaccccatggatccggtgaggtcg

SEQ ID NO: 497184 - DNA, 30 bp, Artificial Sequence
  Synthetic oligonucleotide
ctttacaaaaaattcgtgtcatctaggtcg

SEQ ID NO: 497185 - DNA, 30 bp, Artificial Sequence
  Synthetic oligonucleotide
tctcgtatgtatagaaggagtcaccggtcg

SEQ ID NO: 497186 - DNA, 30 bp, Artificial Sequence
  Synthetic oligonucleotide
cagctttgtcccaatcgtctcacgcggtcg

SEQ ID NO: 497187 - DNA, 30 bp, Artificial Sequence
  Synthetic oligonucleotide
tatcattgccgctgtacatcattagggtcg

SEQ ID NO: 497188 - DNA, 30 bp, Artificial Sequence
  Synthetic oligonucleotide
gcgtagtaagaatggacccccaaggggtcg

SEQ ID NO: 497189 - DNA, 30 bp, Artificial Sequence
  Synthetic oligonucleotide
aattaatcgtccagccagataagggggtcg

SEQ ID NO: 497190 - DNA, 30 bp, Artificial Sequence
  Synthetic oligonucleotide
ggtataagtaggttaaggacttcctggtcg

SEQ ID NO: 497191 - DNA, 30 bp, Artificial Sequence
  Synthetic oligonucleotide
ttttccataaatttgcaagacgtctggtcg

SEQ ID NO: 497192 - DNA, 30 bp, Artificial Sequence
  Synthetic oligonucleotide
gacctaggtcctatccgcccgccttggtcg

SEQ ID NO: 497193 - DNA, 30 bp, Artificial Sequence
  Synthetic oligonucleotide
aatattggagattatttgtgactttggtcg

SEQ ID NO: 497194 - DNA, 30 bp, Artificial Sequence
  Synthetic oligonucleotide
aagctccgttgagtgctgttatgaatgtcg

SEQ ID NO: 497195 - DNA, 31 bp, Artificial Sequence
  Synthetic oligonucleotide
ttagccagagtccgcggcggacgtcatgtcg

SEQ ID NO: 497196 - DNA, 30 bp, Artificial Sequence
  Synthetic oligonucleotide
ttcggagagacgaaatcaagccggctgtcg

SEQ ID NO: 497197 - DNA, 30 bp, Artificial Sequence
  Synthetic oligonucleotide
tatcttcacgttgcatgaattgacgtgtcg

SEQ ID NO: 497198 - DNA, 30 bp, Artificial Sequence
  Synthetic oligonucleotide
atttctggtggccacgacacaatcgtgtcg

SEQ ID NO: 497199 - DNA, 30 bp, Artificial Sequence
  Synthetic oligonucleotide
gggcgattagccccagagaatgtggtgtcg

SEQ ID NO: 497200 - DNA, 30 bp, Artificial Sequence
  Synthetic oligonucleotide
ttttgcttgtttggacagcccttggtgtcg

SEQ ID NO: 497201 - DNA, 30 bp, Artificial Sequence
  Synthetic oligonucleotide
ttccttgccggtccgacgggtgttgtgtcg

SEQ ID NO: 497202 - DNA, 30 bp, Artificial Sequence
  Synthetic oligonucleotide
ccagccaaaggaaccggcaaccccttgtcg

SEQ ID NO: 497203 - DNA, 30 bp, Artificial Sequence
  Synthetic oligonucleotide
caggacggacgtagtgcggtatttttgtcg

SEQ ID NO: 497204 - DNA, 30 bp, Artificial Sequence
  Synthetic oligonucleotide
aaataacactaggttgcaacgcaaaattcg

SEQ ID NO: 497205 - DNA, 30 bp, Artificial Sequence
  Synthetic oligonucleotide
gctggttattagtgaacataacgtaattcg

SEQ ID NO: 497206 - DNA, 30 bp, Artificial Sequence
  Synthetic oligonucleotide
agatgccactgactattcgcacgtaattcg

SEQ ID NO: 497207 - DNA, 30 bp, Artificial Sequence
  Synthetic oligonucleotide
cgatacttttctggcagaaacgaacattcg

SEQ ID NO: 497208 - DNA, 30 bp, Artificial Sequence
  Synthetic oligonucleotide
tgtggaatgtggacatgggtgtgacattcg

SEQ ID NO: 497209 - DNA, 30 bp, Artificial Sequence
  Synthetic oligonucleotide
ggatgtgtcaagcacagtatgctacattcg

SEQ ID NO: 497210 - DNA, 30 bp, Artificial Sequence
  Synthetic oligonucleotide
aggccgaggggaaagtaacgacaccattcg

SEQ ID NO: 497211 - DNA, 30 bp, Artificial Sequence
  Synthetic oligonucleotide
gcagaccggtatatttggcacggccattcg

SEQ ID NO: 497212 - DNA, 30 bp, Artificial Sequence
  Synthetic oligonucleotide
gccagtggagttctcggccacctagattcg

SEQ ID NO: 497213 - DNA, 30 bp, Artificial Sequence
  Synthetic oligonucleotide
agaagtgaggcgtgagatgtctcggattcg

SEQ ID NO: 497214 - DNA, 30 bp, Artificial Sequence
  Synthetic oligonucleotide
atttaagatatagtagcaacttcggattcg

SEQ ID NO: 497215 - DNA, 30 bp, Artificial Sequence
  Synthetic oligonucleotide
actgctgagcgccggggcatgcgggattcg

SEQ ID NO: 497216 - DNA, 30 bp, Artificial Sequence
  Synthetic oligonucleotide
aaagttcagctcgggatctcacgctattcg

SEQ ID NO: 497217 - DNA, 30 bp, Artificial Sequence
  Synthetic oligonucleotide
gaagtgtgcttgtcttggctggccacttcg

SEQ ID NO: 497218 - DNA, 30 bp, Artificial Sequence
  Synthetic oligonucleotide
agcgcggcacgagactaggtcaggacttcg

SEQ ID NO: 497219 - DNA, 30 bp, Artificial Sequence
  Synthetic oligonucleotide
ccccgtaattgcttgcgtgtttttccttcg

SEQ ID NO: 497220 - DNA, 30 bp, Artificial Sequence
  Synthetic oligonucleotide
taggaactaacgccatgggaacaagcttcg

SEQ ID NO: 497221 - DNA, 30 bp, Artificial Sequence
  Synthetic oligonucleotide
cggggccaggctctattagatgaatcttcg

SEQ ID NO: 497222 - DNA, 30 bp, Artificial Sequence
  Synthetic oligonucleotide
agcggtaaaggtctgctataacgatcttcg

SEQ ID NO: 497223 - DNA, 30 bp, Artificial Sequence
  Synthetic oligonucleotide
ggcagtaaggaaattgccaacgattcttcg

SEQ ID NO: 497224 - DNA, 30 bp, Artificial Sequence
  Synthetic oligonucleotide
cggtggaacgtgctcttagcgttttcttcg

SEQ ID NO: 497225 - DNA, 30 bp, Artificial Sequence
  Synthetic oligonucleotide
ttaaagtaaccacttgccgacagcagttcg

SEQ ID NO: 497226 - DNA, 30 bp, Artificial Sequence
  Synthetic oligonucleotide
tttttggtcttttcgacgctaaagagttcg

SEQ ID NO: 497227 - DNA, 30 bp, Artificial Sequence
  Synthetic oligonucleotide
agcattctacgcgctgcacgttcgagttcg

SEQ ID NO: 497228 - DNA, 30 bp, Artificial Sequence
  Synthetic oligonucleotide
agctacgttcgcggatcgtttcaacgttcg

SEQ ID NO: 497229 - DNA, 30 bp, Artificial Sequence
  Synthetic oligonucleotide
gcgtgcccgcgctcacgtttagaacgttcg

SEQ ID NO: 497230 - DNA, 30 bp, Artificial Sequence
  Synthetic oligonucleotide
agagtaacttaggtttggcatccgcgttcg

SEQ ID NO: 497231 - DNA, 30 bp, Artificial Sequence
  Synthetic oligonucleotide
tgttaaaagcgacgtttttcctttcgttcg

SEQ ID NO: 497232 - DNA, 30 bp, Artificial Sequence
  Synthetic oligonucleotide
gcggcacgatactctagcttttttggttcg

SEQ ID NO: 497233 - DNA, 30 bp, Artificial Sequence
  Synthetic oligonucleotide
cgcggcgatgtacaactgactggatgttcg

SEQ ID NO: 497234 - DNA, 30 bp, Artificial Sequence
  Synthetic oligonucleotide
atacagtattatgtacaaaacctctgttcg

SEQ ID NO: 497235 - DNA, 30 bp, Artificial Sequence
  Synthetic oligonucleotide
gggtcagggtgcccggccagacagtgttcg

SEQ ID NO: 497236 - DNA, 30 bp, Artificial Sequence
  Synthetic oligonucleotide
tcggggtgaataccctatctctagtgttcg

SEQ ID NO: 497237 - DNA, 30 bp, Artificial Sequence
  Synthetic oligonucleotide
tgttcttctttttcgagataccgaatttcg

SEQ ID NO: 497238 - DNA, 30 bp, Artificial Sequence
  Synthetic oligonucleotide
gtaaaactttcacacctgtctaccatttcg

SEQ ID NO: 497239 - DNA, 30 bp, Artificial Sequence
  Synthetic oligonucleotide
ggaaccgggggatcgttgtgtcgcatttcg

SEQ ID NO: 497240 - DNA, 30 bp, Artificial Sequence
  Synthetic oligonucleotide
aaggtacgcgggagggatcctttcatttcg

SEQ ID NO: 497241 - DNA, 30 bp, Artificial Sequence
  Synthetic oligonucleotide
taaagtttgcttacaaccgcatcgatttcg

SEQ ID NO: 497242 - DNA, 30 bp, Artificial Sequence
  Synthetic oligonucleotide
ggcgaaaggtatacacactcgaacctttcg

SEQ ID NO: 497243 - DNA, 30 bp, Artificial Sequence
  Synthetic oligonucleotide
attctgctcttccttcgtttcgtcctttcg

SEQ ID NO: 497244 - DNA, 30 bp, Artificial Sequence
  Synthetic oligonucleotide
aaaaagtatacgaaagagccacctctttcg

SEQ ID NO: 497245 - DNA, 31 bp, Artificial Sequence
  Synthetic oligonucleotide
tatttcgcccacgtatgggacctgagtttcg

SEQ ID NO: 497246 - DNA, 30 bp, Artificial Sequence
  Synthetic oligonucleotide
atatacctataacgggtgcttacggtttcg

SEQ ID NO: 497247 - DNA, 30 bp, Artificial Sequence
  Synthetic oligonucleotide
taccgattgacctcgcgccctagtgtttcg

SEQ ID NO: 497248 - DNA, 30 bp, Artificial Sequence
  Synthetic oligonucleotide
gtcgtgtgtcgcctatgcgctacattttcg

SEQ ID NO: 497249 - DNA, 30 bp, Artificial Sequence
  Synthetic oligonucleotide
cttgctcggaatcgtagcattcgattttcg

SEQ ID NO: 497250 - DNA, 30 bp, Artificial Sequence
  Synthetic oligonucleotide
gaagataatgcaagtagggatcgcttttcg

SEQ ID NO: 497251 - DNA, 30 bp, Artificial Sequence
  Synthetic oligonucleotide
cttttgcaaatcggaatgtcgtgtttttcg

SEQ ID NO: 497252 - DNA, 30 bp, Artificial Sequence
  Synthetic oligonucleotide
tttattctgtggccgtgagttcaaaaaagg

SEQ ID NO: 497253 - DNA, 30 bp, Artificial Sequence
  Synthetic oligonucleotide
tatcaagtattatgacgctaaccaaaaagg

SEQ ID NO: 497254 - DNA, 30 bp, Artificial Sequence
  Synthetic oligonucleotide
tcgtacatgctagaagcaagatcaaaaagg

SEQ ID NO: 497255 - DNA, 30 bp, Artificial Sequence
  Synthetic oligonucleotide
gacagggtactaatacaatagtcaaaaagg

SEQ ID NO: 497256 - DNA, 30 bp, Artificial Sequence
  Synthetic oligonucleotide
ggtcctaatgtcgtgcgttctagaaaaagg

SEQ ID NO: 497257 - DNA, 30 bp, Artificial Sequence
  Synthetic oligonucleotide
gaccagtcaactttctgtttgcgaaaaagg

SEQ ID NO: 497258 - DNA, 30 bp, Artificial Sequence
  Synthetic oligonucleotide
agtcagttgccaacgcatttatccaaaagg

SEQ ID NO: 497259 - DNA, 30 bp, Artificial Sequence
  Synthetic oligonucleotide
gtcgaggtgccctggtaacgcggcaaaagg

SEQ ID NO: 497260 - DNA, 30 bp, Artificial Sequence
  Synthetic oligonucleotide
agtagttgcgataattagaaccggaaaagg

SEQ ID NO: 497261 - DNA, 30 bp, Artificial Sequence
  Synthetic oligonucleotide
ttgtaggtatccaatggtactactaaaagg

SEQ ID NO: 497262 - DNA, 30 bp, Artificial Sequence
  Synthetic oligonucleotide
gatcaaagattctcgcaataaccacaaagg

SEQ ID NO: 497263 - DNA, 30 bp, Artificial Sequence
  Synthetic oligonucleotide
aaatattcagacagctcgttttcacaaagg

SEQ ID NO: 497264 - DNA, 30 bp, Artificial Sequence
  Synthetic oligonucleotide
gtagttgcgcttcacatggcgctacaaagg

SEQ ID NO: 497265 - DNA, 30 bp, Artificial Sequence
  Synthetic oligonucleotide
ctgcttctttgacgtttgtccttacaaagg

SEQ ID NO: 497266 - DNA, 30 bp, Artificial Sequence
  Synthetic oligonucleotide
ttaagctgcggagtgcctgtacgccaaagg

SEQ ID NO: 497267 - DNA, 30 bp, Artificial Sequence
  Synthetic oligonucleotide
tatatcacgcagttcccaacctatcaaagg

SEQ ID NO: 497268 - DNA, 30 bp, Artificial Sequence
  Synthetic oligonucleotide
aggatccgcacctgttaggtacctcaaagg

SEQ ID NO: 497269 - DNA, 30 bp, Artificial Sequence
  Synthetic oligonucleotide
aattttggcacctactatgctcgtcaaagg

SEQ ID NO: 497270 - DNA, 30 bp, Artificial Sequence
  Synthetic oligonucleotide
ctacaaatctggcgttactccggtcaaagg

SEQ ID NO: 497271 - DNA, 30 bp, Artificial Sequence
  Synthetic oligonucleotide
ttactgtcgcttagctttaaaattcaaagg

SEQ ID NO: 497272 - DNA, 30 bp, Artificial Sequence
  Synthetic oligonucleotide
aagcaaaaatgccatcttgaacttcaaagg

SEQ ID NO: 497273 - DNA, 30 bp, Artificial Sequence
  Synthetic oligonucleotide
atccccttataacggtgtcctttcgaaagg

SEQ ID NO: 497274 - DNA, 30 bp, Artificial Sequence
  Synthetic oligonucleotide
atgagttagtttgatatttcttaggaaagg

SEQ ID NO: 497275 - DNA, 30 bp, Artificial Sequence
  Synthetic oligonucleotide
ttgtaggtggtgccttatcgcactgaaagg

SEQ ID NO: 497276 - DNA, 30 bp, Artificial Sequence
  Synthetic oligonucleotide
gttattcctcgtgaccccctagctgaaagg

SEQ ID NO: 497277 - DNA, 30 bp, Artificial Sequence
  Synthetic oligonucleotide
cgtgctttgtcgactggctgtctataaagg

SEQ ID NO: 497278 - DNA, 30 bp, Artificial Sequence
  Synthetic oligonucleotide
tctgtcttatgttgtgaacgccggtaaagg

SEQ ID NO: 497279 - DNA, 30 bp, Artificial Sequence
  Synthetic oligonucleotide
gcaaccgggtcgtttagtaaggggtaaagg

SEQ ID NO: 497280 - DNA, 30 bp, Artificial Sequence
  Synthetic oligonucleotide
gacagacgcgctaccttcgtggattaaagg

SEQ ID NO: 497281 - DNA, 30 bp, Artificial Sequence
  Synthetic oligonucleotide
agagtgtataacactcgatcgttttaaagg

SEQ ID NO: 497282 - DNA, 30 bp, Artificial Sequence
  Synthetic oligonucleotide
ctagatattgacgttttgactgtaacaagg

SEQ ID NO: 497283 - DNA, 30 bp, Artificial Sequence
  Synthetic oligonucleotide
tcaccttgccctgcaaccaaacacacaagg

SEQ ID NO: 497284 - DNA, 30 bp, Artificial Sequence
  Synthetic oligonucleotide
gaagtttaccggagcacttgacggacaagg

SEQ ID NO: 497285 - DNA, 30 bp, Artificial Sequence
  Synthetic oligonucleotide
ttgagattaggatgtatctacaatacaagg

SEQ ID NO: 497286 - DNA, 30 bp, Artificial Sequence
  Synthetic oligonucleotide
cttcccggtcccgcgtaagcacctacaagg

SEQ ID NO: 497287 - DNA, 30 bp, Artificial Sequence
  Synthetic oligonucleotide
ttagcttggcaataggtatcagtaccaagg

SEQ ID NO: 497288 - DNA, 30 bp, Artificial Sequence
  Synthetic oligonucleotide
ttgacgcgagcccccaggaagaccccaagg

SEQ ID NO: 497289 - DNA, 30 bp, Artificial Sequence
  Synthetic oligonucleotide
gtgcaaagatgagagggatcgcccccaagg

SEQ ID NO: 497290 - DNA, 30 bp, Artificial Sequence
  Synthetic oligonucleotide
tggttcttcgcgcagctgttctggccaagg

SEQ ID NO: 497291 - DNA, 30 bp, Artificial Sequence
  Synthetic oligonucleotide
actctcttcatatctcggcgtacagcaagg

SEQ ID NO: 497292 - DNA, 30 bp, Artificial Sequence
  Synthetic oligonucleotide
tattaagcatcatgcgatagactagcaagg

SEQ ID NO: 497293 - DNA, 30 bp, Artificial Sequence
  Synthetic oligonucleotide
gatatctgagaccagcaaaagaacgcaagg

SEQ ID NO: 497294 - DNA, 30 bp, Artificial Sequence
  Synthetic oligonucleotide
tgccaagcatcgttcctaattgacgcaagg

SEQ ID NO: 497295 - DNA, 30 bp, Artificial Sequence
  Synthetic oligonucleotide
actagagcactttgggaccaaagcgcaagg

SEQ ID NO: 497296 - DNA, 30 bp, Artificial Sequence
  Synthetic oligonucleotide
aataggttcaagtgtgtgttagtcgcaagg

SEQ ID NO: 497297 - DNA, 30 bp, Artificial Sequence
  Synthetic oligonucleotide
attacctgcatgagtgaatctttggcaagg

SEQ ID NO: 497298 - DNA, 30 bp, Artificial Sequence
  Synthetic oligonucleotide
cagcctgaggaaagctgcttcactgcaagg

SEQ ID NO: 497299 - DNA, 30 bp, Artificial Sequence
  Synthetic oligonucleotide
ggagtacttgccggcccacggggtgcaagg

SEQ ID NO: 497300 - DNA, 30 bp, Artificial Sequence
  Synthetic oligonucleotide
cctcatactagcaggaatatccttgcaagg

SEQ ID NO: 497301 - DNA, 30 bp, Artificial Sequence
  Synthetic oligonucleotide
taatcacaacacttaagctgttaatcaagg

SEQ ID NO: 497302 - DNA, 30 bp, Artificial Sequence
  Synthetic oligonucleotide
gcaccacgagcctgttttatcagctcaagg

SEQ ID NO: 497303 - DNA, 30 bp, Artificial Sequence
  Synthetic oligonucleotide
cggcgcagttaataattcttgccgtcaagg

SEQ ID NO: 497304 - DNA, 29 bp, Artificial Sequence
  Synthetic oligonucleotide
gagagctctctcggcacagagcgtcaagg

SEQ ID NO: 497305 - DNA, 30 bp, Artificial Sequence
  Synthetic oligonucleotide
acggctctacaagatccgccacgaagaagg

SEQ ID NO: 497306 - DNA, 30 bp, Artificial Sequence
  Synthetic oligonucleotide
gcctgaatctgcacccttacaataagaagg

SEQ ID NO: 497307 - DNA, 30 bp, Artificial Sequence
  Synthetic oligonucleotide
attcggtcacgtagatgctataccagaagg

SEQ ID NO: 497308 - DNA, 30 bp, Artificial Sequence
  Synthetic oligonucleotide
cggagtttaatatgcgtcggaatgagaagg

SEQ ID NO: 497309 - DNA, 30 bp, Artificial Sequence
  Synthetic oligonucleotide
gtagtctctgcttctgacacgcttagaagg

SEQ ID NO: 497310 - DNA, 30 bp, Artificial Sequence
  Synthetic oligonucleotide
tgccacattgtaatcctttatcgacgaagg

SEQ ID NO: 497311 - DNA, 30 bp, Artificial Sequence
  Synthetic oligonucleotide
gggaggtaattttattttgggggacgaagg

SEQ ID NO: 497312 - DNA, 30 bp, Artificial Sequence
  Synthetic oligonucleotide
ctcgtctatgaactgcgaaagccaggaagg

SEQ ID NO: 497313 - DNA, 30 bp, Artificial Sequence
  Synthetic oligonucleotide
tggattagtacacacgtctgcataggaagg

SEQ ID NO: 497314 - DNA, 30 bp, Artificial Sequence
  Synthetic oligonucleotide
tgcagaatcccgaagggattttgcggaagg

SEQ ID NO: 497315 - DNA, 30 bp, Artificial Sequence
  Synthetic oligonucleotide
aattgctaattaaacgtgtcggtgggaagg

SEQ ID NO: 497316 - DNA, 30 bp, Artificial Sequence
  Synthetic oligonucleotide
caagcgagcacctttctttaaaatggaagg

SEQ ID NO: 497317 - DNA, 30 bp, Artificial Sequence
  Synthetic oligonucleotide
tacagtggcaacgtgagcacctctggaagg

SEQ ID NO: 497318 - DNA, 30 bp, Artificial Sequence
  Synthetic oligonucleotide
cagtaccacttgaacatcaggtttggaagg

SEQ ID NO: 497319 - DNA, 30 bp, Artificial Sequence
  Synthetic oligonucleotide
ggaggaggtgaaattcacagggcgtgaagg

SEQ ID NO: 497320 - DNA, 30 bp, Artificial Sequence
  Synthetic oligonucleotide
ccttccccctgaagagcacacggttgaagg

SEQ ID NO: 497321 - DNA, 31 bp, Artificial Sequence
  Synthetic oligonucleotide
atcaggataacaatcgtggtagatttgaagg

SEQ ID NO: 497322 - DNA, 30 bp, Artificial Sequence
  Synthetic oligonucleotide
tctcctcagggggtaccccctaaaataagg

SEQ ID NO: 497323 - DNA, 30 bp, Artificial Sequence
  Synthetic oligonucleotide
acgtcttttggcaggcatgagggtataagg

SEQ ID NO: 497324 - DNA, 30 bp, Artificial Sequence
  Synthetic oligonucleotide
ggggcctacacgggcgtatctgttataagg

SEQ ID NO: 497325 - DNA, 30 bp, Artificial Sequence
  Synthetic oligonucleotide
tatcgttagcacctcaattgctgagtaagg

SEQ ID NO: 497326 - DNA, 30 bp, Artificial Sequence
  Synthetic oligonucleotide
atcgcaaagccaacttccagtctagtaagg

SEQ ID NO: 497327 - DNA, 30 bp, Artificial Sequence
  Synthetic oligonucleotide
ttttgttaattttagtttttacacgtaagg

SEQ ID NO: 497328 - DNA, 30 bp, Artificial Sequence
  Synthetic oligonucleotide
gcataccagggcttgatcacaattgtaagg

SEQ ID NO: 497329 - DNA, 30 bp, Artificial Sequence
  Synthetic oligonucleotide
aataaatctgggtcgacgcactttgtaagg

SEQ ID NO: 497330 - DNA, 30 bp, Artificial Sequence
  Synthetic oligonucleotide
aataaaaagtggaaaaaagcggaattaagg

SEQ ID NO: 497331 - DNA, 30 bp, Artificial Sequence
  Synthetic oligonucleotide
attctcggaagttggcccgcccgcttaagg

SEQ ID NO: 497332 - DNA, 30 bp, Artificial Sequence
  Synthetic oligonucleotide
tcaaccaacggcgcggggcagctcttaagg

SEQ ID NO: 497333 - DNA, 30 bp, Artificial Sequence
  Synthetic oligonucleotide
aagttagcgattttcggaacgctcttaagg

SEQ ID NO: 497334 - DNA, 30 bp, Artificial Sequence
  Synthetic oligonucleotide
tttgtggacgcgcaggcaatgttgttaagg

SEQ ID NO: 497335 - DNA, 30 bp, Artificial Sequence
  Synthetic oligonucleotide
ttatggcgtagaattttacccgatttaagg

SEQ ID NO: 497336 - DNA, 30 bp, Artificial Sequence
  Synthetic oligonucleotide
cgactgctcttcgggtggtcccgtttaagg

SEQ ID NO: 497337 - DNA, 30 bp, Artificial Sequence
  Synthetic oligonucleotide
agatctttgcccggttttttgcacaacagg

SEQ ID NO: 497338 - DNA, 30 bp, Artificial Sequence
  Synthetic oligonucleotide
gaggccttgaggcctcagtaggacaacagg

SEQ ID NO: 497339 - DNA, 30 bp, Artificial Sequence
  Synthetic oligonucleotide
aattgtagtccacatagcgcggtcaacagg

SEQ ID NO: 497340 - DNA, 30 bp, Artificial Sequence
  Synthetic oligonucleotide
aatttgttgtctactcagcgagcgaacagg

SEQ ID NO: 497341 - DNA, 30 bp, Artificial Sequence
  Synthetic oligonucleotide
ccttcccgactcatgttgcgcggacacagg

SEQ ID NO: 497342 - DNA, 30 bp, Artificial Sequence
  Synthetic oligonucleotide
aggagggtccttttgggtgaaccgcacagg

SEQ ID NO: 497343 - DNA, 30 bp, Artificial Sequence
  Synthetic oligonucleotide
ttacataaccgttggcgtataacggacagg

SEQ ID NO: 497344 - DNA, 30 bp, Artificial Sequence
  Synthetic oligonucleotide
ttctttttaatggttcatgcagtggacagg

SEQ ID NO: 497345 - DNA, 30 bp, Artificial Sequence
  Synthetic oligonucleotide
aattggcacatatcttccgtcgtggacagg

SEQ ID NO: 497346 - DNA, 30 bp, Artificial Sequence
  Synthetic oligonucleotide
tttggggaggtagttgtatcgccatacagg

SEQ ID NO: 497347 - DNA, 30 bp, Artificial Sequence
  Synthetic oligonucleotide
cagcagagacaagggtctgggggttacagg

SEQ ID NO: 497348 - DNA, 30 bp, Artificial Sequence
  Synthetic oligonucleotide
tatgtgaacgacggaccaagcctttacagg

SEQ ID NO: 497349 - DNA, 30 bp, Artificial Sequence
  Synthetic oligonucleotide
ggttcggacttggaccggtgtcacaccagg

SEQ ID NO: 497350 - DNA, 30 bp, Artificial Sequence
  Synthetic oligonucleotide
tgaaagagtgggacattctatctcaccagg

SEQ ID NO: 497351 - DNA, 30 bp, Artificial Sequence
  Synthetic oligonucleotide
gtcgcatctatctggggtgtcgaacccagg

SEQ ID NO: 497352 - DNA, 30 bp, Artificial Sequence
  Synthetic oligonucleotide
gagctccgattacggccaacgacacccagg

SEQ ID NO: 497353 - DNA, 30 bp, Artificial Sequence
  Synthetic oligonucleotide
gacccaggtgtgtaacatgcatcacccagg

SEQ ID NO: 497354 - DNA, 30 bp, Artificial Sequence
  Synthetic oligonucleotide
tcgcgcgccactagcgggcatggacccagg

SEQ ID NO: 497355 - DNA, 30 bp, Artificial Sequence
  Synthetic oligonucleotide
tatctaatttgcggaccgcactaccccagg

SEQ ID NO: 497356 - DNA, 30 bp, Artificial Sequence
  Synthetic oligonucleotide
ccgattttgataagtatactcgcagccagg

SEQ ID NO: 497357 - DNA, 30 bp, Artificial Sequence
  Synthetic oligonucleotide
gaattcagggtagtgcgcagtacggccagg

SEQ ID NO: 497358 - DNA, 30 bp, Artificial Sequence
  Synthetic oligonucleotide
ggatcaattacaagtttaagctaatccagg

SEQ ID NO: 497359 - DNA, 30 bp, Artificial Sequence
  Synthetic oligonucleotide
cagcgtttagagggttttgggtggtccagg

SEQ ID NO: 497360 - DNA, 30 bp, Artificial Sequence
  Synthetic oligonucleotide
tacaaagcatggagccattgcgcttccagg

SEQ ID NO: 497361 - DNA, 30 bp, Artificial Sequence
  Synthetic oligonucleotide
cattctactacgtgttattgtctttccagg

SEQ ID NO: 497362 - DNA, 30 bp, Artificial Sequence
  Synthetic oligonucleotide
ataattattaagagtgggcacccaagcagg

SEQ ID NO: 497363 - DNA, 30 bp, Artificial Sequence
  Synthetic oligonucleotide
gtgtggccaggggacagtcgagtcagcagg

SEQ ID NO: 497364 - DNA, 30 bp, Artificial Sequence
  Synthetic oligonucleotide
gagtcctacaccggggacattcgacgcagg

SEQ ID NO: 497365 - DNA, 30 bp, Artificial Sequence
  Synthetic oligonucleotide
cgcgaacatgcgttatataggatacgcagg

SEQ ID NO: 497366 - DNA, 30 bp, Artificial Sequence
  Synthetic oligonucleotide
cgatgacgcgccgtctccgcggggcgcagg

SEQ ID NO: 497367 - DNA, 30 bp, Artificial Sequence
  Synthetic oligonucleotide
taatctgcgcgcgatctaatgtatcgcagg

SEQ ID NO: 497368 - DNA, 30 bp, Artificial Sequence
  Synthetic oligonucleotide
actggggtaaccaactattcttgtcgcagg

SEQ ID NO: 497369 - DNA, 30 bp, Artificial Sequence
  Synthetic oligonucleotide
atgggttgatatggttagggtttaggcagg

SEQ ID NO: 497370 - DNA, 30 bp, Artificial Sequence
  Synthetic oligonucleotide
acccaccggtgggttttccagcccggcagg

SEQ ID NO: 497371 - DNA, 30 bp, Artificial Sequence
  Synthetic oligonucleotide
gtaccgcggtaggacagggtccgcggcagg

SEQ ID NO: 497372 - DNA, 30 bp, Artificial Sequence
  Synthetic oligonucleotide
cgcgtaaacgccctgatggacatcggcagg

SEQ ID NO: 497373 - DNA, 30 bp, Artificial Sequence
  Synthetic oligonucleotide
tcgctctgacgagacctccgcacgggcagg

SEQ ID NO: 497374 - DNA, 30 bp, Artificial Sequence
  Synthetic oligonucleotide
tagcttcgctcccccatagttgcgggcagg

SEQ ID NO: 497375 - DNA, 30 bp, Artificial Sequence
  Synthetic oligonucleotide
gcccccgaccattagttcgtctggggcagg

SEQ ID NO: 497376 - DNA, 30 bp, Artificial Sequence
  Synthetic oligonucleotide
ccgggtggtataacctggaggaatggcagg

SEQ ID NO: 497377 - DNA, 30 bp, Artificial Sequence
  Synthetic oligonucleotide
gagggaaaatctgccatgtgtgaatgcagg

SEQ ID NO: 497378 - DNA, 30 bp, Artificial Sequence
  Synthetic oligonucleotide
aatttactaattgtcacgtggcgatgcagg

SEQ ID NO: 497379 - DNA, 30 bp, Artificial Sequence
  Synthetic oligonucleotide
gcaagcgaattttgaatcgggttatgcagg

SEQ ID NO: 497380 - DNA, 30 bp, Artificial Sequence
  Synthetic oligonucleotide
cacgagaccggtcttagcgggcggtgcagg

SEQ ID NO: 497381 - DNA, 30 bp, Artificial Sequence
  Synthetic oligonucleotide
cccattatgaattaaatgtggtgttgcagg

SEQ ID NO: 497382 - DNA, 30 bp, Artificial Sequence
  Synthetic oligonucleotide
atggttgtatgagtcggcggacgaatcagg

SEQ ID NO: 497383 - DNA, 30 bp, Artificial Sequence
  Synthetic oligonucleotide
ataatgactacatgtgaagctggcatcagg

SEQ ID NO: 497384 - DNA, 30 bp, Artificial Sequence
  Synthetic oligonucleotide
gtaaatacccgctctattgtagtcatcagg

SEQ ID NO: 497385 - DNA, 30 bp, Artificial Sequence
  Synthetic oligonucleotide
taaagtgacgctaattgaccagagatcagg

SEQ ID NO: 497386 - DNA, 30 bp, Artificial Sequence
  Synthetic oligonucleotide
gacaagtttgcggagatgagcggtatcagg

SEQ ID NO: 497387 - DNA, 30 bp, Artificial Sequence
  Synthetic oligonucleotide
acgttctacggagcaacttcgtttatcagg

SEQ ID NO: 497388 - DNA, 30 bp, Artificial Sequence
  Synthetic oligonucleotide
caacccccccccagtggttagtaactcagg

SEQ ID NO: 497389 - DNA, 30 bp, Artificial Sequence
  Synthetic oligonucleotide
gggcatcgatgaaataccattgcactcagg

SEQ ID NO: 497390 - DNA, 30 bp, Artificial Sequence
  Synthetic oligonucleotide
gaagattgggctcgtcttcataccctcagg

SEQ ID NO: 497391 - DNA, 30 bp, Artificial Sequence
  Synthetic oligonucleotide
ggcaatagcgttgcttgattaagtctcagg

SEQ ID NO: 497392 - DNA, 30 bp, Artificial Sequence
  Synthetic oligonucleotide
agggagtcgaataattccatagaggtcagg

SEQ ID NO: 497393 - DNA, 30 bp, Artificial Sequence
  Synthetic oligonucleotide
agagccgtgaccttattactacgggtcagg

SEQ ID NO: 497394 - DNA, 30 bp, Artificial Sequence
  Synthetic oligonucleotide
ttactggtaagagccgatgcgtcattcagg

SEQ ID NO: 497395 - DNA, 30 bp, Artificial Sequence
  Synthetic oligonucleotide
ttgcgcagccgtgatactgaagatttcagg

SEQ ID NO: 497396 - DNA, 30 bp, Artificial Sequence
  Synthetic oligonucleotide
ttggtgattattgaacaacttcctttcagg

SEQ ID NO: 497397 - DNA, 30 bp, Artificial Sequence
  Synthetic oligonucleotide
ggggtccaccctcatggccccggtttcagg

SEQ ID NO: 497398 - DNA, 30 bp, Artificial Sequence
  Synthetic oligonucleotide
gcacttcatgtggttctcatttcaaagagg

SEQ ID NO: 497399 - DNA, 30 bp, Artificial Sequence
  Synthetic oligonucleotide
accaacatctggtatagtcacttcaagagg

SEQ ID NO: 497400 - DNA, 30 bp, Artificial Sequence
  Synthetic oligonucleotide
gctacatgcgaatctcagcattcgaagagg

SEQ ID NO: 497401 - DNA, 30 bp, Artificial Sequence
  Synthetic oligonucleotide
aaatacagggattgttcaggctggaagagg

SEQ ID NO: 497402 - DNA, 30 bp, Artificial Sequence
  Synthetic oligonucleotide
agacgaaatgtacaacctgtaaataagagg

SEQ ID NO: 497403 - DNA, 30 bp, Artificial Sequence
  Synthetic oligonucleotide
tgtgtagaatattgcggtcaagaacagagg

SEQ ID NO: 497404 - DNA, 30 bp, Artificial Sequence
  Synthetic oligonucleotide
gaagcggtcactctgcgattcaagcagagg

SEQ ID NO: 497405 - DNA, 29 bp, Artificial Sequence
  Synthetic oligonucleotide
tttttccaatttatctgggtgcagagagg

SEQ ID NO: 497406 - DNA, 30 bp, Artificial Sequence
  Synthetic oligonucleotide
atacgcaggccgtccgcagtggccgagagg

SEQ ID NO: 497407 - DNA, 30 bp, Artificial Sequence
  Synthetic oligonucleotide
gtgtgcctcgcactatccccctaggagagg

SEQ ID NO: 497408 - DNA, 30 bp, Artificial Sequence
  Synthetic oligonucleotide
ctctgtcgaaggtgcttgtggctggagagg

SEQ ID NO: 497409 - DNA, 30 bp, Artificial Sequence
  Synthetic oligonucleotide
gcaacctacgtaggtttgtaactgtagagg

SEQ ID NO: 497410 - DNA, 30 bp, Artificial Sequence
  Synthetic oligonucleotide
gtttacgcctagacactcggaaccacgagg

SEQ ID NO: 497411 - DNA, 30 bp, Artificial Sequence
  Synthetic oligonucleotide
attcggagtggctgcgaattcttgacgagg

SEQ ID NO: 497412 - DNA, 30 bp, Artificial Sequence
  Synthetic oligonucleotide
attggccgacaagtaggcagcacaccgagg

SEQ ID NO: 497413 - DNA, 30 bp, Artificial Sequence
  Synthetic oligonucleotide
aaattgagacggggggcacgcagcccgagg

SEQ ID NO: 497414 - DNA, 30 bp, Artificial Sequence
  Synthetic oligonucleotide
acagtggctctggcacttcggttcccgagg

SEQ ID NO: 497415 - DNA, 30 bp, Artificial Sequence
  Synthetic oligonucleotide
agcaaccccgaggcttacaatgcgccgagg

SEQ ID NO: 497416 - DNA, 30 bp, Artificial Sequence
  Synthetic oligonucleotide
ttgtgttcggaagtgatgacaatgccgagg

SEQ ID NO: 497417 - DNA, 30 bp, Artificial Sequence
  Synthetic oligonucleotide
aggtggtttagacctctggatagagcgagg

SEQ ID NO: 497418 - DNA, 30 bp, Artificial Sequence
  Synthetic oligonucleotide
gtgcacttcttcacctgcaggtgagcgagg

SEQ ID NO: 497419 - DNA, 30 bp, Artificial Sequence
  Synthetic oligonucleotide
gtttgacgtggaaccaggaccggcgcgagg

SEQ ID NO: 497420 - DNA, 30 bp, Artificial Sequence
  Synthetic oligonucleotide
ggcaaggcctgataggtaaggttttcgagg

SEQ ID NO: 497421 - DNA, 30 bp, Artificial Sequence
  Synthetic oligonucleotide
gtaagtttttgggtcccatggataaggagg

SEQ ID NO: 497422 - DNA, 30 bp, Artificial Sequence
  Synthetic oligonucleotide
tgcagccgaggcatccaacagatcaggagg

SEQ ID NO: 497423 - DNA, 30 bp, Artificial Sequence
  Synthetic oligonucleotide
tgtcctagaaggtgtgccgacgggaggagg

SEQ ID NO: 497424 - DNA, 30 bp, Artificial Sequence
  Synthetic oligonucleotide
aaagcgtggcttgaatgcattttgaggagg

SEQ ID NO: 497425 - DNA, 30 bp, Artificial Sequence
  Synthetic oligonucleotide
aatcggtacagcattagtgcgactaggagg

SEQ ID NO: 497426 - DNA, 30 bp, Artificial Sequence
  Synthetic oligonucleotide
acgcaaatccacgtagcgttggaacggagg

SEQ ID NO: 497427 - DNA, 30 bp, Artificial Sequence
  Synthetic oligonucleotide
catgaggcacgtgacgccctctaacggagg

SEQ ID NO: 497428 - DNA, 30 bp, Artificial Sequence
  Synthetic oligonucleotide
ttttatcggtgatgcttcgaacagcggagg

SEQ ID NO: 497429 - DNA, 30 bp, Artificial Sequence
  Synthetic oligonucleotide
tgaagtaatttggcgcagtgtaatcggagg

SEQ ID NO: 497430 - DNA, 30 bp, Artificial Sequence
  Synthetic oligonucleotide
ggtcgttaaagtccctcctagcctcggagg

SEQ ID NO: 497431 - DNA, 30 bp, Artificial Sequence
  Synthetic oligonucleotide
ttgattgaatgtgaccgtgggaaagggagg

SEQ ID NO: 497432 - DNA, 30 bp, Artificial Sequence
  Synthetic oligonucleotide
ttgcgtcgcgcacctggacttaaagggagg

SEQ ID NO: 497433 - DNA, 30 bp, Artificial Sequence
  Synthetic oligonucleotide
tcgacttcagtaagcgcgacaacagggagg

SEQ ID NO: 497434 - DNA, 30 bp, Artificial Sequence
  Synthetic oligonucleotide
cgcggcggtactacttggtttgcagggagg

SEQ ID NO: 497435 - DNA, 30 bp, Artificial Sequence
  Synthetic oligonucleotide
gtgacgtagtccagctcggaatgcgggagg

SEQ ID NO: 497436 - DNA, 30 bp, Artificial Sequence
  Synthetic oligonucleotide
gtggagacagacttcgtagcatgggggagg

SEQ ID NO: 497437 - DNA, 30 bp, Artificial Sequence
  Synthetic oligonucleotide
ctgcttttgccccccgtagtacgtgggagg

SEQ ID NO: 497438 - DNA, 30 bp, Artificial Sequence
  Synthetic oligonucleotide
cgcgagcttctccctatatgacaatggagg

SEQ ID NO: 497439 - DNA, 30 bp, Artificial Sequence
  Synthetic oligonucleotide
aaataggagtcgacacgggccggctggagg

SEQ ID NO: 497440 - DNA, 30 bp, Artificial Sequence
  Synthetic oligonucleotide
aaaattgttcacacggccgtcatctggagg

SEQ ID NO: 497441 - DNA, 30 bp, Artificial Sequence
  Synthetic oligonucleotide
taattcgataagggacctgccacgtggagg

SEQ ID NO: 497442 - DNA, 30 bp, Artificial Sequence
  Synthetic oligonucleotide
aggtatctagtgggggatgataaaatgagg

SEQ ID NO: 497443 - DNA, 30 bp, Artificial Sequence
  Synthetic oligonucleotide
gctccagtatcgtggtggaagggaatgagg

SEQ ID NO: 497444 - DNA, 30 bp, Artificial Sequence
  Synthetic oligonucleotide
atccttaaactcccaggtgtgtgaatgagg

SEQ ID NO: 497445 - DNA, 30 bp, Artificial Sequence
  Synthetic oligonucleotide
agtgttcccttgcgaaggtctctaatgagg

SEQ ID NO: 497446 - DNA, 30 bp, Artificial Sequence
  Synthetic oligonucleotide
gtgggaatacagcctcacgttttcatgagg

SEQ ID NO: 497447 - DNA, 30 bp, Artificial Sequence
  Synthetic oligonucleotide
atttagcttgaatcagtttataatatgagg

SEQ ID NO: 497448 - DNA, 30 bp, Artificial Sequence
  Synthetic oligonucleotide
cactcaggattaaccggaaggaccctgagg

SEQ ID NO: 497449 - DNA, 30 bp, Artificial Sequence
  Synthetic oligonucleotide
gacactggcgatcggcgcggccccctgagg

SEQ ID NO: 497450 - DNA, 30 bp, Artificial Sequence
  Synthetic oligonucleotide
gtgtagcatgtacccaactcctgtctgagg

SEQ ID NO: 497451 - DNA, 30 bp, Artificial Sequence
  Synthetic oligonucleotide
gcctccatataagttccttgctttctgagg

SEQ ID NO: 497452 - DNA, 30 bp, Artificial Sequence
  Synthetic oligonucleotide
accttcaatcaggagccccgtgaagtgagg

SEQ ID NO: 497453 - DNA, 30 bp, Artificial Sequence
  Synthetic oligonucleotide
taggtatttaaccaggataatggagtgagg

SEQ ID NO: 497454 - DNA, 30 bp, Artificial Sequence
  Synthetic oligonucleotide
taattctgtgcaattggggacgtagtgagg

SEQ ID NO: 497455 - DNA, 30 bp, Artificial Sequence
  Synthetic oligonucleotide
ctctatgccacgtggctctggtacgtgagg

SEQ ID NO: 497456 - DNA, 30 bp, Artificial Sequence
  Synthetic oligonucleotide
aatccgtttcattgtggaaaattcgtgagg

SEQ ID NO: 497457 - DNA, 30 bp, Artificial Sequence
  Synthetic oligonucleotide
aggcaggtcgtaacgcgcagtcgggtgagg

SEQ ID NO: 497458 - DNA, 30 bp, Artificial Sequence
  Synthetic oligonucleotide
aatgtttatcattccttcagattggtgagg

SEQ ID NO: 497459 - DNA, 30 bp, Artificial Sequence
  Synthetic oligonucleotide
ggcaacctgcagagcttcaaaggattgagg

SEQ ID NO: 497460 - DNA, 30 bp, Artificial Sequence
  Synthetic oligonucleotide
cagcctgttatgtctaacttatggttgagg

SEQ ID NO: 497461 - DNA, 30 bp, Artificial Sequence
  Synthetic oligonucleotide
cccgccggctgccacggactggaaaatagg

SEQ ID NO: 497462 - DNA, 30 bp, Artificial Sequence
  Synthetic oligonucleotide
gaaaccaactaaacacggtgtataaatagg

SEQ ID NO: 497463 - DNA, 30 bp, Artificial Sequence
  Synthetic oligonucleotide
ctctacgctggggctttggttcccaatagg

SEQ ID NO: 497464 - DNA, 30 bp, Artificial Sequence
  Synthetic oligonucleotide
tgtcacagcattcctgacgtgtccaatagg

SEQ ID NO: 497465 - DNA, 30 bp, Artificial Sequence
  Synthetic oligonucleotide
gataatagtactctttaatcgatcaatagg

SEQ ID NO: 497466 - DNA, 30 bp, Artificial Sequence
  Synthetic oligonucleotide
ctcgaatgttcacatctcaatgcgaatagg

SEQ ID NO: 497467 - DNA, 30 bp, Artificial Sequence
  Synthetic oligonucleotide
gctttatgacgtgctcgagtctcgaatagg

SEQ ID NO: 497468 - DNA, 30 bp, Artificial Sequence
  Synthetic oligonucleotide
tagtcgcaggccttgactgagaggaatagg

SEQ ID NO: 497469 - DNA, 30 bp, Artificial Sequence
  Synthetic oligonucleotide
tacaatcttttgaccagtctatataatagg

SEQ ID NO: 497470 - DNA, 30 bp, Artificial Sequence
  Synthetic oligonucleotide
tcttacccgatcggcttttacggtaatagg

SEQ ID NO: 497471 - DNA, 30 bp, Artificial Sequence
  Synthetic oligonucleotide
cccgggacgtgagacccgatcggacatagg

SEQ ID NO: 497472 - DNA, 30 bp, Artificial Sequence
  Synthetic oligonucleotide
gccctatttaccacgtcatctattcatagg

SEQ ID NO: 497473 - DNA, 30 bp, Artificial Sequence
  Synthetic oligonucleotide
atgaccccgtcgccgaacctctaagatagg

SEQ ID NO: 497474 - DNA, 30 bp, Artificial Sequence
  Synthetic oligonucleotide
cgcttggtgtgtagcgctcgcctagatagg

SEQ ID NO: 497475 - DNA, 30 bp, Artificial Sequence
  Synthetic oligonucleotide
gcgtaccttccccgtttagtcacggatagg

SEQ ID NO: 497476 - DNA, 30 bp, Artificial Sequence
  Synthetic oligonucleotide
tgcagcttaacgtatcagtataatgatagg

SEQ ID NO: 497477 - DNA, 30 bp, Artificial Sequence
  Synthetic oligonucleotide
ggtaaaacgtaggcctttacttggtatagg

SEQ ID NO: 497478 - DNA, 30 bp, Artificial Sequence
  Synthetic oligonucleotide
gtgttttggcgattagcctctaattatagg

SEQ ID NO: 497479 - DNA, 30 bp, Artificial Sequence
  Synthetic oligonucleotide
tgacataggacgcagatgccagcttatagg

SEQ ID NO: 497480 - DNA, 30 bp, Artificial Sequence
  Synthetic oligonucleotide
cagctggccgtgtagttactcttaactagg

SEQ ID NO: 497481 - DNA, 30 bp, Artificial Sequence
  Synthetic oligonucleotide
tactcaaatcgtaaggggtattacactagg

SEQ ID NO: 497482 - DNA, 30 bp, Artificial Sequence
  Synthetic oligonucleotide
agttttccggtctctgctaaggtcactagg

SEQ ID NO: 497483 - DNA, 30 bp, Artificial Sequence
  Synthetic oligonucleotide
ccaagctagctgtctcgcataaggactagg

SEQ ID NO: 497484 - DNA, 30 bp, Artificial Sequence
  Synthetic oligonucleotide
agttagatgggacacagggggcctactagg

SEQ ID NO: 497485 - DNA, 30 bp, Artificial Sequence
  Synthetic oligonucleotide
tccgcttaacaaagcggggttcctactagg

SEQ ID NO: 497486 - DNA, 30 bp, Artificial Sequence
  Synthetic oligonucleotide
atcaaagtagcgggttacaaatgtactagg

SEQ ID NO: 497487 - DNA, 30 bp, Artificial Sequence
  Synthetic oligonucleotide
cgggaatatacgcaaactacctttactagg

SEQ ID NO: 497488 - DNA, 30 bp, Artificial Sequence
  Synthetic oligonucleotide
cctaatttaggacgctgtgagtcacctagg

SEQ ID NO: 497489 - DNA, 30 bp, Artificial Sequence
  Synthetic oligonucleotide
ccctatgtaatatggttctgaggacctagg

SEQ ID NO: 497490 - DNA, 30 bp, Artificial Sequence
  Synthetic oligonucleotide
aagttgaaactgggtgcacacttacctagg

SEQ ID NO: 497491 - DNA, 30 bp, Artificial Sequence
  Synthetic oligonucleotide
gcggggtcttacagtcactgcctcgctagg

SEQ ID NO: 497492 - DNA, 30 bp, Artificial Sequence
  Synthetic oligonucleotide
atttatgcgaaaagtcctcatacggctagg

SEQ ID NO: 497493 - DNA, 30 bp, Artificial Sequence
  Synthetic oligonucleotide
gagcaacttcttgtaattgttgtctctagg

SEQ ID NO: 497494 - DNA, 30 bp, Artificial Sequence
  Synthetic oligonucleotide
ggacgttcgcacacttgggatacgtctagg

SEQ ID NO: 497495 - DNA, 30 bp, Artificial Sequence
  Synthetic oligonucleotide
ctttgataatcttgatcatagtcttctagg

SEQ ID NO: 497496 - DNA, 30 bp, Artificial Sequence
  Synthetic oligonucleotide
taatatggtcagatgcattagctttctagg

SEQ ID NO: 497497 - DNA, 30 bp, Artificial Sequence
  Synthetic oligonucleotide
ggctgtggtacggtggtgtactaaagtagg

SEQ ID NO: 497498 - DNA, 30 bp, Artificial Sequence
  Synthetic oligonucleotide
gggttttccaggttggcggagacaagtagg

SEQ ID NO: 497499 - DNA, 30 bp, Artificial Sequence
  Synthetic oligonucleotide
gcatgagggtattcggtactcgtaagtagg

SEQ ID NO: 497500 - DNA, 30 bp, Artificial Sequence
  Synthetic oligonucleotide
ccccggtctgaaacagacgcttgcagtagg

SEQ ID NO: 497501 - DNA, 30 bp, Artificial Sequence
  Synthetic oligonucleotide
ttttggaaaattatagtgtatcctagtagg

SEQ ID NO: 497502 - DNA, 30 bp, Artificial Sequence
  Synthetic oligonucleotide
tctttggacgacgtcctacggcaacgtagg

SEQ ID NO: 497503 - DNA, 30 bp, Artificial Sequence
  Synthetic oligonucleotide
catgacgcacatagccagtcacgacgtagg

SEQ ID NO: 497504 - DNA, 30 bp, Artificial Sequence
  Synthetic oligonucleotide
agcgtgtccttgccggcgacacgccgtagg

SEQ ID NO: 497505 - DNA, 30 bp, Artificial Sequence
  Synthetic oligonucleotide
ccttcctgtacctccgcgtactaaggtagg

SEQ ID NO: 497506 - DNA, 30 bp, Artificial Sequence
  Synthetic oligonucleotide
ttttcgttcacaataatgcgcgcaggtagg

SEQ ID NO: 497507 - DNA, 30 bp, Artificial Sequence
  Synthetic oligonucleotide
gcacagcaccatcctacaaagtacggtagg

SEQ ID NO: 497508 - DNA, 30 bp, Artificial Sequence
  Synthetic oligonucleotide
ttttccgtaacttggtttttttccggtagg

SEQ ID NO: 497509 - DNA, 30 bp, Artificial Sequence
  Synthetic oligonucleotide
gcgttcattgtgttgggttattggggtagg

SEQ ID NO: 497510 - DNA, 30 bp, Artificial Sequence
  Synthetic oligonucleotide
gcatgtcgtggaagcaactctctgggtagg

SEQ ID NO: 497511 - DNA, 30 bp, Artificial Sequence
  Synthetic oligonucleotide
gcagacctttttatctggaggatgtgtagg

SEQ ID NO: 497512 - DNA, 30 bp, Artificial Sequence
  Synthetic oligonucleotide
acatcatggatgggaatagataattgtagg

SEQ ID NO: 497513 - DNA, 30 bp, Artificial Sequence
  Synthetic oligonucleotide
acctgttacgtgtagttgggcgcttgtagg

SEQ ID NO: 497514 - DNA, 30 bp, Artificial Sequence
  Synthetic oligonucleotide
gtctccaaggggtattttagtggaattagg

SEQ ID NO: 497515 - DNA, 30 bp, Artificial Sequence
  Synthetic oligonucleotide
aaactattattttctgggggcgccattagg

SEQ ID NO: 497516 - DNA, 30 bp, Artificial Sequence
  Synthetic oligonucleotide
gaggtaaaggcgcttatccacggcattagg

SEQ ID NO: 497517 - DNA, 30 bp, Artificial Sequence
  Synthetic oligonucleotide
ttgacggggccaacccaacggtatattagg

SEQ ID NO: 497518 - DNA, 30 bp, Artificial Sequence
  Synthetic oligonucleotide
tatacattgactgcccgcaattatattagg

SEQ ID NO: 497519 - DNA, 30 bp, Artificial Sequence
  Synthetic oligonucleotide
gcactagtgatgtgaacaagccgtattagg

SEQ ID NO: 497520 - DNA, 30 bp, Artificial Sequence
  Synthetic oligonucleotide
acctaatggccggagtaacttagccttagg

SEQ ID NO: 497521 - DNA, 30 bp, Artificial Sequence
  Synthetic oligonucleotide
gccctgactaaggacgcggttaatcttagg

SEQ ID NO: 497522 - DNA, 30 bp, Artificial Sequence
  Synthetic oligonucleotide
tgtttggcacggagccaaatctgtcttagg

SEQ ID NO: 497523 - DNA, 30 bp, Artificial Sequence
  Synthetic oligonucleotide
ttgctagttgactggcagtttacagttagg

SEQ ID NO: 497524 - DNA, 30 bp, Artificial Sequence
  Synthetic oligonucleotide
caccccccgtaggtaccaaccacggttagg

SEQ ID NO: 497525 - DNA, 30 bp, Artificial Sequence
  Synthetic oligonucleotide
tcagaaaatgacgccgttatcctggttagg

SEQ ID NO: 497526 - DNA, 30 bp, Artificial Sequence
  Synthetic oligonucleotide
tcgccggtccgtggggcagaaaatgttagg

SEQ ID NO: 497527 - DNA, 30 bp, Artificial Sequence
  Synthetic oligonucleotide
gcaataatcctgtttgatctaaatgttagg

SEQ ID NO: 497528 - DNA, 30 bp, Artificial Sequence
  Synthetic oligonucleotide
gtctttgagagttttttatcatatgttagg

SEQ ID NO: 497529 - DNA, 30 bp, Artificial Sequence
  Synthetic oligonucleotide
tgttgaatgtacaagaaggattatgttagg

SEQ ID NO: 497530 - DNA, 30 bp, Artificial Sequence
  Synthetic oligonucleotide
ataaatgtggtgctgcgttgctctgttagg

SEQ ID NO: 497531 - DNA, 30 bp, Artificial Sequence
  Synthetic oligonucleotide
caggagcacctgcattttacataatttagg

SEQ ID NO: 497532 - DNA, 30 bp, Artificial Sequence
  Synthetic oligonucleotide
aaattgccgataatagggaagtaatttagg

SEQ ID NO: 497533 - DNA, 30 bp, Artificial Sequence
  Synthetic oligonucleotide
tatatgatgttagagcttcagaactttagg

SEQ ID NO: 497534 - DNA, 30 bp, Artificial Sequence
  Synthetic oligonucleotide
cagggatagtgggaaatagcggagtttagg

SEQ ID NO: 497535 - DNA, 30 bp, Artificial Sequence
  Synthetic oligonucleotide
tatcctgtgcaacgcagcgtcgcgtttagg

SEQ ID NO: 497536 - DNA, 30 bp, Artificial Sequence
  Synthetic oligonucleotide
gtaattgtatatcctatcctccgttttagg

SEQ ID NO: 497537 - DNA, 30 bp, Artificial Sequence
  Synthetic oligonucleotide
cctaccggctctccctattttcaaaaacgg

SEQ ID NO: 497538 - DNA, 30 bp, Artificial Sequence
  Synthetic oligonucleotide
tgggtagatgcgttgaggattataaaacgg

SEQ ID NO: 497539 - DNA, 30 bp, Artificial Sequence
  Synthetic oligonucleotide
acccgtctccgaatggggttcgagaaacgg

SEQ ID NO: 497540 - DNA, 30 bp, Artificial Sequence
  Synthetic oligonucleotide
cctttggtcgcgctgagattgtggaaacgg

SEQ ID NO: 497541 - DNA, 30 bp, Artificial Sequence
  Synthetic oligonucleotide
cggtccggtttgtatcgagcgcgtaaacgg

SEQ ID NO: 497542 - DNA, 30 bp, Artificial Sequence
  Synthetic oligonucleotide
ctgaccactctcgtacgacgtcaacaacgg

SEQ ID NO: 497543 - DNA, 30 bp, Artificial Sequence
  Synthetic oligonucleotide
agtatgtaatcgtcagtcaactaccaacgg

SEQ ID NO: 497544 - DNA, 30 bp, Artificial Sequence
  Synthetic oligonucleotide
agtgatttgaggcactgctccacccaacgg

SEQ ID NO: 497545 - DNA, 30 bp, Artificial Sequence
  Synthetic oligonucleotide
gtaatctttacgcttagtgattgccaacgg

SEQ ID NO: 497546 - DNA, 30 bp, Artificial Sequence
  Synthetic oligonucleotide
aattcaaaggccataatactgatccaacgg

SEQ ID NO: 497547 - DNA, 30 bp, Artificial Sequence
  Synthetic oligonucleotide
ctttatggcttgcattgtagatgagaacgg

SEQ ID NO: 497548 - DNA, 30 bp, Artificial Sequence
  Synthetic oligonucleotide
ggagcaagttctagcgttggcttagaacgg

SEQ ID NO: 497549 - DNA, 30 bp, Artificial Sequence
  Synthetic oligonucleotide
gggatttgatacgggcgttagaacgaacgg

SEQ ID NO: 497550 - DNA, 30 bp, Artificial Sequence
  Synthetic oligonucleotide
gtctcaaggcctatgagccatgaggaacgg

SEQ ID NO: 497551 - DNA, 30 bp, Artificial Sequence
  Synthetic oligonucleotide
cccattttcgcgtacttctcaacctaacgg

SEQ ID NO: 497552 - DNA, 30 bp, Artificial Sequence
  Synthetic oligonucleotide
tgatgtgaccgcattgcccgatcctaacgg

SEQ ID NO: 497553 - DNA, 30 bp, Artificial Sequence
  Synthetic oligonucleotide
gggccgccgcgagacggaccgtcctaacgg

SEQ ID NO: 497554 - DNA, 30 bp, Artificial Sequence
  Synthetic oligonucleotide
tatttgcggtactatgagatttgctaacgg

SEQ ID NO: 497555 - DNA, 30 bp, Artificial Sequence
  Synthetic oligonucleotide
gatatttacattgtaatcactaagtaacgg

SEQ ID NO: 497556 - DNA, 30 bp, Artificial Sequence
  Synthetic oligonucleotide
acttaccccgtcgccgaccgtacgtaacgg

SEQ ID NO: 497557 - DNA, 30 bp, Artificial Sequence
  Synthetic oligonucleotide
tacggcggaagaaaaggagccggttaacgg

SEQ ID NO: 497558 - DNA, 30 bp, Artificial Sequence
  Synthetic oligonucleotide
aatcagctttcgctgagcagatgttaacgg

SEQ ID NO: 497559 - DNA, 30 bp, Artificial Sequence
  Synthetic oligonucleotide
ctttatatgcataccacattgaaaacacgg

SEQ ID NO: 497560 - DNA, 30 bp, Artificial Sequence
  Synthetic oligonucleotide
aaccatcccgtttgaaacactgaaacacgg

SEQ ID NO: 497561 - DNA, 30 bp, Artificial Sequence
  Synthetic oligonucleotide
tttgacacggcacttaacatgtaaacacgg

SEQ ID NO: 497562 - DNA, 30 bp, Artificial Sequence
  Synthetic oligonucleotide
tcacccagtattgaatcggggagcacacgg

SEQ ID NO: 497563 - DNA, 30 bp, Artificial Sequence
  Synthetic oligonucleotide
gctttattcactgttaacggatgcacacgg

SEQ ID NO: 497564 - DNA, 30 bp, Artificial Sequence
  Synthetic oligonucleotide
gattccatcgagattccctttgtcacacgg

SEQ ID NO: 497565 - DNA, 30 bp, Artificial Sequence
  Synthetic oligonucleotide
tgacattttatatacttaaaattcacacgg

SEQ ID NO: 497566 - DNA, 30 bp, Artificial Sequence
  Synthetic oligonucleotide
agggaggcgagtaacctgtgggggacacgg

SEQ ID NO: 497567 - DNA, 30 bp, Artificial Sequence
  Synthetic oligonucleotide
tcgggattcaaagccacccttttgacacgg

SEQ ID NO: 497568 - DNA, 30 bp, Artificial Sequence
  Synthetic oligonucleotide
cggtggagtgtccacgtaagttcaccacgg

SEQ ID NO: 497569 - DNA, 30 bp, Artificial Sequence
  Synthetic oligonucleotide
acgcgggagtatcacttgaaacgaccacgg

SEQ ID NO: 497570 - DNA, 30 bp, Artificial Sequence
  Synthetic oligonucleotide
aaatccgagacgctccaatagcgaccacgg

SEQ ID NO: 497571 - DNA, 30 bp, Artificial Sequence
  Synthetic oligonucleotide
attctaagatgtgccgcgatgataccacgg

SEQ ID NO: 497572 - DNA, 30 bp, Artificial Sequence
  Synthetic oligonucleotide
ggaaaactccggaggtgcagttgcccacgg

SEQ ID NO: 497573 - DNA, 30 bp, Artificial Sequence
  Synthetic oligonucleotide
tcatgcgtgccgacatgaaatatcccacgg

SEQ ID NO: 497574 - DNA, 30 bp, Artificial Sequence
  Synthetic oligonucleotide
tacatgttcattcaccgcatctagccacgg

SEQ ID NO: 497575 - DNA, 30 bp, Artificial Sequence
  Synthetic oligonucleotide
cgttcattttggggcgtaccttggccacgg

SEQ ID NO: 497576 - DNA, 30 bp, Artificial Sequence
  Synthetic oligonucleotide
gggttcaccggaaacctagttagtccacgg

SEQ ID NO: 497577 - DNA, 30 bp, Artificial Sequence
  Synthetic oligonucleotide
tcggtccactcctcactcgtttcagcacgg

SEQ ID NO: 497578 - DNA, 30 bp, Artificial Sequence
  Synthetic oligonucleotide
cacaccagtttgcagtatgatggagcacgg

SEQ ID NO: 497579 - DNA, 30 bp, Artificial Sequence
  Synthetic oligonucleotide
ttcatctaaagaaacgacgcatgagcacgg

SEQ ID NO: 497580 - DNA, 30 bp, Artificial Sequence
  Synthetic oligonucleotide
taggggataacacccgcatagaacgcacgg

SEQ ID NO: 497581 - DNA, 30 bp, Artificial Sequence
  Synthetic oligonucleotide
aaatgggcctgagttattgatatcgcacgg

SEQ ID NO: 497582 - DNA, 30 bp, Artificial Sequence
  Synthetic oligonucleotide
ctcaacgaggcagggacatcggtcgcacgg

SEQ ID NO: 497583 - DNA, 30 bp, Artificial Sequence
  Synthetic oligonucleotide
ttggagtctgtatgacatccgaaggcacgg

SEQ ID NO: 497584 - DNA, 30 bp, Artificial Sequence
  Synthetic oligonucleotide
cctaatatgttatcacagggtatggcacgg

SEQ ID NO: 497585 - DNA, 30 bp, Artificial Sequence
  Synthetic oligonucleotide
gtaaatcatctggttaaaacagtggcacgg

SEQ ID NO: 497586 - DNA, 30 bp, Artificial Sequence
  Synthetic oligonucleotide
gctgggggatcagccttgctggatgcacgg

SEQ ID NO: 497587 - DNA, 30 bp, Artificial Sequence
  Synthetic oligonucleotide
gtgattcggagttattgtaggactgcacgg

SEQ ID NO: 497588 - DNA, 30 bp, Artificial Sequence
  Synthetic oligonucleotide
gtagccaagattcatggccgatttgcacgg

SEQ ID NO: 497589 - DNA, 30 bp, Artificial Sequence
  Synthetic oligonucleotide
ttagtatctgtgaaggtgtagcaatcacgg

SEQ ID NO: 497590 - DNA, 30 bp, Artificial Sequence
  Synthetic oligonucleotide
gttgttgttttgggcgatatagaatcacgg

SEQ ID NO: 497591 - DNA, 30 bp, Artificial Sequence
  Synthetic oligonucleotide
gggataactatgtttcgtaagagatcacgg

SEQ ID NO: 497592 - DNA, 30 bp, Artificial Sequence
  Synthetic oligonucleotide
gacggatgaaggatggctacggtatcacgg

SEQ ID NO: 497593 - DNA, 30 bp, Artificial Sequence
  Synthetic oligonucleotide
gaagacaagggccccggctttggctcacgg

SEQ ID NO: 497594 - DNA, 30 bp, Artificial Sequence
  Synthetic oligonucleotide
gtgggtagtctcgcattggcgacgtcacgg

SEQ ID NO: 497595 - DNA, 30 bp, Artificial Sequence
  Synthetic oligonucleotide
caaagcgatggaagcggagtgtcgtcacgg

SEQ ID NO: 497596 - DNA, 30 bp, Artificial Sequence
  Synthetic oligonucleotide
aagcacacctttcgcacgtacggcagacgg

SEQ ID NO: 497597 - DNA, 30 bp, Artificial Sequence
  Synthetic oligonucleotide
taacaagtatggaggtcctagttcagacgg

SEQ ID NO: 497598 - DNA, 30 bp, Artificial Sequence
  Synthetic oligonucleotide
tgtccacccgactctacggcctcgagacgg

SEQ ID NO: 497599 - DNA, 30 bp, Artificial Sequence
  Synthetic oligonucleotide
ctgaaaattagaccccgccataggagacgg

SEQ ID NO: 497600 - DNA, 30 bp, Artificial Sequence
  Synthetic oligonucleotide
ccgcggtctagggcctgctcccggagacgg

SEQ ID NO: 497601 - DNA, 30 bp, Artificial Sequence
  Synthetic oligonucleotide
accatttacggggatcacgacgggagacgg

SEQ ID NO: 497602 - DNA, 30 bp, Artificial Sequence
  Synthetic oligonucleotide
ggcaggcagctttagcccctatggagacgg

SEQ ID NO: 497603 - DNA, 30 bp, Artificial Sequence
  Synthetic oligonucleotide
caaatttaaccgccaggtcggtggagacgg

SEQ ID NO: 497604 - DNA, 30 bp, Artificial Sequence
  Synthetic oligonucleotide
attagtcacttccgtctgagggcccgacgg

SEQ ID NO: 497605 - DNA, 30 bp, Artificial Sequence
  Synthetic oligonucleotide
ctttttttctacgggggctggatccgacgg

SEQ ID NO: 497606 - DNA, 30 bp, Artificial Sequence
  Synthetic oligonucleotide
tacaaatctattcgcctacccaagcgacgg

SEQ ID NO: 497607 - DNA, 30 bp, Artificial Sequence
  Synthetic oligonucleotide
atggttgagggacggcagaacccaggacgg

SEQ ID NO: 497608 - DNA, 30 bp, Artificial Sequence
  Synthetic oligonucleotide
agtatatagcgggcctcaagaataggacgg

SEQ ID NO: 497609 - DNA, 30 bp, Artificial Sequence
  Synthetic oligonucleotide
atatttcgcgccttaaattgccacggacgg

SEQ ID NO: 497610 - DNA, 30 bp, Artificial Sequence
  Synthetic oligonucleotide
tttctccttgtgagctcgcttgacggacgg

SEQ ID NO: 497611 - DNA, 30 bp, Artificial Sequence
  Synthetic oligonucleotide
tagagggttttagtcgtcggcgcgggacgg

SEQ ID NO: 497612 - DNA, 30 bp, Artificial Sequence
  Synthetic oligonucleotide
atgtaaaacatagatgtggctcggggacgg

SEQ ID NO: 497613 - DNA, 30 bp, Artificial Sequence
  Synthetic oligonucleotide
cgtcaggctgatttccaactctatggacgg

SEQ ID NO: 497614 - DNA, 30 bp, Artificial Sequence
  Synthetic oligonucleotide
attcttttacggagtttcccggttggacgg

SEQ ID NO: 497615 - DNA, 30 bp, Artificial Sequence
  Synthetic oligonucleotide
actccgatgttgccgtcagtgacatgacgg

SEQ ID NO: 497616 - DNA, 30 bp, Artificial Sequence
  Synthetic oligonucleotide
ataaactcaggcgttaatttagcatgacgg

SEQ ID NO: 497617 - DNA, 30 bp, Artificial Sequence
  Synthetic oligonucleotide
ctctcatcatcgttccatggtctatgacgg

SEQ ID NO: 497618 - DNA, 30 bp, Artificial Sequence
  Synthetic oligonucleotide
cgcaccgcctcgagaacgatcgtatgacgg

SEQ ID NO: 497619 - DNA, 30 bp, Artificial Sequence
  Synthetic oligonucleotide
acaatcggactatgagtgggcagctgacgg

SEQ ID NO: 497620 - DNA, 30 bp, Artificial Sequence
  Synthetic oligonucleotide
aaatttaatcttcattacagtagctgacgg

SEQ ID NO: 497621 - DNA, 30 bp, Artificial Sequence
  Synthetic oligonucleotide
gataataaaactaggaatgaattctgacgg

SEQ ID NO: 497622 - DNA, 30 bp, Artificial Sequence
  Synthetic oligonucleotide
tatcacgacttataggaggatgattgacgg

SEQ ID NO: 497623 - DNA, 30 bp, Artificial Sequence
  Synthetic oligonucleotide
aacattgatacaggtcattcagtttgacgg

SEQ ID NO: 497624 - DNA, 30 bp, Artificial Sequence
  Synthetic oligonucleotide
taaattacatacggtcggaacttttgacgg

SEQ ID NO: 497625 - DNA, 29 bp, Artificial Sequence
  Synthetic oligonucleotide
ttttcttatagagcataatttcaatacgg

SEQ ID NO: 497626 - DNA, 30 bp, Artificial Sequence
  Synthetic oligonucleotide
gtcctcctactccggactgctaacatacgg

SEQ ID NO: 497627 - DNA, 30 bp, Artificial Sequence
  Synthetic oligonucleotide
gaaagtgtcatttgcaccgtacgcatacgg

SEQ ID NO: 497628 - DNA, 30 bp, Artificial Sequence
  Synthetic oligonucleotide
ctgattagctgagaaccgtaagtcatacgg

SEQ ID NO: 497629 - DNA, 30 bp, Artificial Sequence
  Synthetic oligonucleotide
tgtttccaatacgcgtatatacgtatacgg

SEQ ID NO: 497630 - DNA, 30 bp, Artificial Sequence
  Synthetic oligonucleotide
agctcacggccgaaatgctaaggtatacgg

SEQ ID NO: 497631 - DNA, 30 bp, Artificial Sequence
  Synthetic oligonucleotide
ctcaacagtagccatgccccgattatacgg

SEQ ID NO: 497632 - DNA, 30 bp, Artificial Sequence
  Synthetic oligonucleotide
gaccccacgtcatacatagtgtttatacgg

SEQ ID NO: 497633 - DNA, 30 bp, Artificial Sequence
  Synthetic oligonucleotide
ggtctatcattgattttacgtgcactacgg

SEQ ID NO: 497634 - DNA, 30 bp, Artificial Sequence
  Synthetic oligonucleotide
ttcgggaaggcggttaaccagggactacgg

SEQ ID NO: 497635 - DNA, 30 bp, Artificial Sequence
  Synthetic oligonucleotide
gcgcattgtttaccgctggagtgcctacgg

SEQ ID NO: 497636 - DNA, 30 bp, Artificial Sequence
  Synthetic oligonucleotide
gtttgtatgtcgatcgcagtgctagtacgg

SEQ ID NO: 497637 - DNA, 30 bp, Artificial Sequence
  Synthetic oligonucleotide
accgtgttatgaagggaatcaacattacgg

SEQ ID NO: 497638 - DNA, 30 bp, Artificial Sequence
  Synthetic oligonucleotide
tccggagctatcgaaatgataatattacgg

SEQ ID NO: 497639 - DNA, 30 bp, Artificial Sequence
  Synthetic oligonucleotide
gtgactaaacgtccaacgtagatcttacgg

SEQ ID NO: 497640 - DNA, 30 bp, Artificial Sequence
  Synthetic oligonucleotide
attgaacgcgggctttatatatttttacgg

SEQ ID NO: 497641 - DNA, 30 bp, Artificial Sequence
  Synthetic oligonucleotide
tagtttgcctactcatcgccaggaaaccgg

SEQ ID NO: 497642 - DNA, 30 bp, Artificial Sequence
  Synthetic oligonucleotide
tccccgtagtacgacgagcactcgaaccgg

SEQ ID NO: 497643 - DNA, 30 bp, Artificial Sequence
  Synthetic oligonucleotide
ccgcacccgaagggacgcaagtggaaccgg

SEQ ID NO: 497644 - DNA, 30 bp, Artificial Sequence
  Synthetic oligonucleotide
gtttctcgaagaggacttcctatgaaccgg

SEQ ID NO: 497645 - DNA, 30 bp, Artificial Sequence
  Synthetic oligonucleotide
tgtaatgatagatcattatcttctaaccgg

SEQ ID NO: 497646 - DNA, 30 bp, Artificial Sequence
  Synthetic oligonucleotide
ttgcgccggcacacgatggctgtacaccgg

SEQ ID NO: 497647 - DNA, 30 bp, Artificial Sequence
  Synthetic oligonucleotide
gggttccataagagagctctggaccaccgg

SEQ ID NO: 497648 - DNA, 30 bp, Artificial Sequence
  Synthetic oligonucleotide
ttttcacccggagattttggccagcaccgg

SEQ ID NO: 497649 - DNA, 30 bp, Artificial Sequence
  Synthetic oligonucleotide
cgcaaaggtactcgaacaaaggcgcaccgg

SEQ ID NO: 497650 - DNA, 30 bp, Artificial Sequence
  Synthetic oligonucleotide
ggcaaaacggagaagagggaattgcaccgg

SEQ ID NO: 497651 - DNA, 30 bp, Artificial Sequence
  Synthetic oligonucleotide
aatagagaacagactcgtgtgttgcaccgg

SEQ ID NO: 497652 - DNA, 30 bp, Artificial Sequence
  Synthetic oligonucleotide
aacggtaccggagaagcgaagcgtcaccgg

SEQ ID NO: 497653 - DNA, 30 bp, Artificial Sequence
  Synthetic oligonucleotide
ggtaacgggccgagcgcggtgcgagaccgg

SEQ ID NO: 497654 - DNA, 30 bp, Artificial Sequence
  Synthetic oligonucleotide
gaaactctgaacaacgcttctgcggaccgg

SEQ ID NO: 497655 - DNA, 30 bp, Artificial Sequence
  Synthetic oligonucleotide
aggagggtcctcggattcctctgggaccgg

SEQ ID NO: 497656 - DNA, 30 bp, Artificial Sequence
  Synthetic oligonucleotide
tctcccctagcgtctaccgggctggaccgg

SEQ ID NO: 497657 - DNA, 30 bp, Artificial Sequence
  Synthetic oligonucleotide
gcctgcggcaagcatccgttagcctaccgg

SEQ ID NO: 497658 - DNA, 30 bp, Artificial Sequence
  Synthetic oligonucleotide
gccgaactgccgctagacagtgagtaccgg

SEQ ID NO: 497659 - DNA, 31 bp, Artificial Sequence
  Synthetic oligonucleotide
taactggctaccttaccgttggacgtaccgg

SEQ ID NO: 497660 - DNA, 30 bp, Artificial Sequence
  Synthetic oligonucleotide
atcttcgcttccgtagactggttgtaccgg

SEQ ID NO: 497661 - DNA, 30 bp, Artificial Sequence
  Synthetic oligonucleotide
tttgggacacaggtttaccgtgattaccgg

SEQ ID NO: 497662 - DNA, 30 bp, Artificial Sequence
  Synthetic oligonucleotide
atatccaccaacgtgtggtggaaaacccgg

SEQ ID NO: 497663 - DNA, 30 bp, Artificial Sequence
  Synthetic oligonucleotide
cccctccgtgatgtgggattccgaacccgg

SEQ ID NO: 497664 - DNA, 30 bp, Artificial Sequence
  Synthetic oligonucleotide
ccagagatttattaaccctacaacacccgg

SEQ ID NO: 497665 - DNA, 30 bp, Artificial Sequence
  Synthetic oligonucleotide
gtatcatacggggttgtccgttcgacccgg

SEQ ID NO: 497666 - DNA, 30 bp, Artificial Sequence
  Synthetic oligonucleotide
tatggccaaatggtgtcatgatggacccgg

SEQ ID NO: 497667 - DNA, 30 bp, Artificial Sequence
  Synthetic oligonucleotide
actcagcattcacgggaagtacatacccgg

SEQ ID NO: 497668 - DNA, 30 bp, Artificial Sequence
  Synthetic oligonucleotide
tgataagcgcgtaccgacataggtacccgg

SEQ ID NO: 497669 - DNA, 30 bp, Artificial Sequence
  Synthetic oligonucleotide
gttccagtaatcagggcccgggttacccgg

SEQ ID NO: 497670 - DNA, 30 bp, Artificial Sequence
  Synthetic oligonucleotide
tgttttggttggctacgatgcaagccccgg

SEQ ID NO: 497671 - DNA, 30 bp, Artificial Sequence
  Synthetic oligonucleotide
tattagtgatacctgaggaattagccccgg

SEQ ID NO: 497672 - DNA, 30 bp, Artificial Sequence
  Synthetic oligonucleotide
ttagacggtgaaacaccggtttatccccgg

SEQ ID NO: 497673 - DNA, 30 bp, Artificial Sequence
  Synthetic oligonucleotide
aagtacgtttgtccaaggttttacgcccgg

SEQ ID NO: 497674 - DNA, 30 bp, Artificial Sequence
  Synthetic oligonucleotide
tttttcaaacacgcatctaatccggcccgg

SEQ ID NO: 497675 - DNA, 30 bp, Artificial Sequence
  Synthetic oligonucleotide
atcatctattgggaacaacccatctcccgg

SEQ ID NO: 497676 - DNA, 30 bp, Artificial Sequence
  Synthetic oligonucleotide
gcattcctttatacttctccatagtcccgg

SEQ ID NO: 497677 - DNA, 30 bp, Artificial Sequence
  Synthetic oligonucleotide
tccaccgggtgtcctaatgccatgtcccgg

SEQ ID NO: 497678 - DNA, 30 bp, Artificial Sequence
  Synthetic oligonucleotide
atcattgtttgtagacatgtagacagccgg

SEQ ID NO: 497679 - DNA, 30 bp, Artificial Sequence
  Synthetic oligonucleotide
gtctccgggatcattattaatcatagccgg

SEQ ID NO: 497680 - DNA, 30 bp, Artificial Sequence
  Synthetic oligonucleotide
gacccactttgcactggtgttgctagccgg

SEQ ID NO: 497681 - DNA, 30 bp, Artificial Sequence
  Synthetic oligonucleotide
ttagccgtccatatatgtacccgacgccgg

SEQ ID NO: 497682 - DNA, 30 bp, Artificial Sequence
  Synthetic oligonucleotide
ccgtcggctgcccgtctgggcaagcgccgg

SEQ ID NO: 497683 - DNA, 30 bp, Artificial Sequence
  Synthetic oligonucleotide
aagagcagcctcctggattagtatcgccgg

SEQ ID NO: 497684 - DNA, 30 bp, Artificial Sequence
  Synthetic oligonucleotide
cgattgcccctcagggctcgctacggccgg

SEQ ID NO: 497685 - DNA, 30 bp, Artificial Sequence
  Synthetic oligonucleotide
actgccggacgctggatacacgccggccgg

SEQ ID NO: 497686 - DNA, 30 bp, Artificial Sequence
  Synthetic oligonucleotide
ttttaaggcatatggttcactcgcggccgg

SEQ ID NO: 497687 - DNA, 30 bp, Artificial Sequence
  Synthetic oligonucleotide
tatgattcaacgcggacgtcgtgcggccgg

SEQ ID NO: 497688 - DNA, 30 bp, Artificial Sequence
  Synthetic oligonucleotide
acatagccggttgcatttgtttgcggccgg

SEQ ID NO: 497689 - DNA, 29 bp, Artificial Sequence
  Synthetic oligonucleotide
gagcgacccgagtagcggaatcgggccgg

SEQ ID NO: 497690 - DNA, 30 bp, Artificial Sequence
  Synthetic oligonucleotide
tttcggtctaccgacccgaattaatgccgg

SEQ ID NO: 497691 - DNA, 30 bp, Artificial Sequence
  Synthetic oligonucleotide
gatgactcagatcattactctagctgccgg

SEQ ID NO: 497692 - DNA, 30 bp, Artificial Sequence
  Synthetic oligonucleotide
cagaagatgcaagcgcgtcgtacaatccgg

SEQ ID NO: 497693 - DNA, 30 bp, Artificial Sequence
  Synthetic oligonucleotide
tataccgtgtctagtgtgagcagaatccgg

SEQ ID NO: 497694 - DNA, 30 bp, Artificial Sequence
  Synthetic oligonucleotide
attaactcgcagccccgccaagagatccgg

SEQ ID NO: 497695 - DNA, 30 bp, Artificial Sequence
  Synthetic oligonucleotide
gtaacatgattcgtagcatcggggatccgg

SEQ ID NO: 497696 - DNA, 30 bp, Artificial Sequence
  Synthetic oligonucleotide
caaatatctcacttggacagatttatccgg

SEQ ID NO: 497697 - DNA, 30 bp, Artificial Sequence
  Synthetic oligonucleotide
gtaatgtgcgtttttctcgcgatactccgg

SEQ ID NO: 497698 - DNA, 30 bp, Artificial Sequence
  Synthetic oligonucleotide
agcactatgctcaaaatcgcagccctccgg

SEQ ID NO: 497699 - DNA, 30 bp, Artificial Sequence
  Synthetic oligonucleotide
tgcgcctgaccggcgcagcaggccctccgg

SEQ ID NO: 497700 - DNA, 30 bp, Artificial Sequence
  Synthetic oligonucleotide
tgatgagtggggtctataatcatcctccgg

SEQ ID NO: 497701 - DNA, 30 bp, Artificial Sequence
  Synthetic oligonucleotide
gaatatcggcttgacgctacgaggctccgg

SEQ ID NO: 497702 - DNA, 30 bp, Artificial Sequence
  Synthetic oligonucleotide
cgaggctcggatagacggtcgagtctccgg

SEQ ID NO: 497703 - DNA, 30 bp, Artificial Sequence
  Synthetic oligonucleotide
cagttgcatattttagaataggccgtccgg

SEQ ID NO: 497704 - DNA, 30 bp, Artificial Sequence
  Synthetic oligonucleotide
ttgtttttgtgtagaactcggtccgtccgg

SEQ ID NO: 497705 - DNA, 30 bp, Artificial Sequence
  Synthetic oligonucleotide
gtgcgagtcggcgaatcataggaggtccgg

SEQ ID NO: 497706 - DNA, 30 bp, Artificial Sequence
  Synthetic oligonucleotide
gagataacgtatgccaccgaagtattccgg

SEQ ID NO: 497707 - DNA, 30 bp, Artificial Sequence
  Synthetic oligonucleotide
atttctgttgtagttgatgtcgccttccgg

SEQ ID NO: 497708 - DNA, 30 bp, Artificial Sequence
  Synthetic oligonucleotide
cacccatacaggtacggtaaccggttccgg

SEQ ID NO: 497709 - DNA, 30 bp, Artificial Sequence
  Synthetic oligonucleotide
cctagttgctctttcctgaagccaaagcgg

SEQ ID NO: 497710 - DNA, 29 bp, Artificial Sequence
  Synthetic oligonucleotide
gtaagggttttacgaagtataccaagcgg

SEQ ID NO: 497711 - DNA, 30 bp, Artificial Sequence
  Synthetic oligonucleotide
gattccaggacatatcggttctccaagcgg

SEQ ID NO: 497712 - DNA, 30 bp, Artificial Sequence
  Synthetic oligonucleotide
cactgtggtcaagttcaatgttgcaagcgg

SEQ ID NO: 497713 - DNA, 30 bp, Artificial Sequence
  Synthetic oligonucleotide
aaatatgcccccgctcatatacagaagcgg

SEQ ID NO: 497714 - DNA, 30 bp, Artificial Sequence
  Synthetic oligonucleotide
tggtcccctgcgccggaccatgttaagcgg

SEQ ID NO: 497715 - DNA, 30 bp, Artificial Sequence
  Synthetic oligonucleotide
cgtcagagatgaagcggacgtaaacagcgg

SEQ ID NO: 497716 - DNA, 30 bp, Artificial Sequence
  Synthetic oligonucleotide
tggcagtcctttcggactggaggacagcgg

SEQ ID NO: 497717 - DNA, 30 bp, Artificial Sequence
  Synthetic oligonucleotide
ggagaccgcactcctgggccaccccagcgg

SEQ ID NO: 497718 - DNA, 30 bp, Artificial Sequence
  Synthetic oligonucleotide
tttagcacattcaagggcagaccccagcgg

SEQ ID NO: 497719 - DNA, 30 bp, Artificial Sequence
  Synthetic oligonucleotide
gaccttaccagttagacgcttggccagcgg

SEQ ID NO: 497720 - DNA, 30 bp, Artificial Sequence
  Synthetic oligonucleotide
cgcatgttccagtctgtactgaagcagcgg

SEQ ID NO: 497721 - DNA, 30 bp, Artificial Sequence
  Synthetic oligonucleotide
gctctccttgtaaaagttatggggcagcgg

SEQ ID NO: 497722 - DNA, 30 bp, Artificial Sequence
  Synthetic oligonucleotide
tttggaagtgtcacgagtcctttgcagcgg

SEQ ID NO: 497723 - DNA, 30 bp, Artificial Sequence
  Synthetic oligonucleotide
ccacggctccttggtcgtcgcctagagcgg

SEQ ID NO: 497724 - DNA, 30 bp, Artificial Sequence
  Synthetic oligonucleotide
gggaaggtcctttgtgatggtaatgagcgg

SEQ ID NO: 497725 - DNA, 30 bp, Artificial Sequence
  Synthetic oligonucleotide
gcatcgtagcagcttattcatgctgagcgg

SEQ ID NO: 497726 - DNA, 30 bp, Artificial Sequence
  Synthetic oligonucleotide
gagagctagggtgctaaagccccatagcgg

SEQ ID NO: 497727 - DNA, 30 bp, Artificial Sequence
  Synthetic oligonucleotide
acccggggttgctatcgcctgccgtagcgg

SEQ ID NO: 497728 - DNA, 30 bp, Artificial Sequence
  Synthetic oligonucleotide
cttgagagtttcatggtttcagggtagcgg

SEQ ID NO: 497729 - DNA, 30 bp, Artificial Sequence
  Synthetic oligonucleotide
cggctgcagacctcacctgggacaacgcgg

SEQ ID NO: 497730 - DNA, 30 bp, Artificial Sequence
  Synthetic oligonucleotide
gctgtgacacagaatgatcatgacacgcgg

SEQ ID NO: 497731 - DNA, 30 bp, Artificial Sequence
  Synthetic oligonucleotide
ggatacgcaggagcgaggagccccacgcgg

SEQ ID NO: 497732 - DNA, 30 bp, Artificial Sequence
  Synthetic oligonucleotide
acaaaccccgtggccggctgcgccacgcgg

SEQ ID NO: 497733 - DNA, 30 bp, Artificial Sequence
  Synthetic oligonucleotide
atctctgcgctcggccctactatcacgcgg

SEQ ID NO: 497734 - DNA, 30 bp, Artificial Sequence
  Synthetic oligonucleotide
cgacgacctttctgcggggtatggacgcgg

SEQ ID NO: 497735 - DNA, 30 bp, Artificial Sequence
  Synthetic oligonucleotide
gatccccgactcgaggcatctctgacgcgg

SEQ ID NO: 497736 - DNA, 30 bp, Artificial Sequence
  Synthetic oligonucleotide
tagtgaatgatgtttggctctgctacgcgg

SEQ ID NO: 497737 - DNA, 30 bp, Artificial Sequence
  Synthetic oligonucleotide
tttcggtttctctccgcatccgttacgcgg

SEQ ID NO: 497738 - DNA, 30 bp, Artificial Sequence
  Synthetic oligonucleotide
attatgtgttacggactgtctgcaccgcgg

SEQ ID NO: 497739 - DNA, 30 bp, Artificial Sequence
  Synthetic oligonucleotide
agacgtgcatcgtgtggtgtccgcccgcgg

SEQ ID NO: 497740 - DNA, 30 bp, Artificial Sequence
  Synthetic oligonucleotide
aagtaatgcgccagtatactctggccgcgg

SEQ ID NO: 497741 - DNA, 30 bp, Artificial Sequence
  Synthetic oligonucleotide
caatgttgttcgtcttaggtcatgccgcgg

SEQ ID NO: 497742 - DNA, 30 bp, Artificial Sequence
  Synthetic oligonucleotide
tggatgaatgtcataatgatacttccgcgg

SEQ ID NO: 497743 - DNA, 30 bp, Artificial Sequence
  Synthetic oligonucleotide
ttcccgtattgggtcctcgatagagcgcgg

SEQ ID NO: 497744 - DNA, 30 bp, Artificial Sequence
  Synthetic oligonucleotide
tgccaaggcggacacattcctcaaaggcgg

SEQ ID NO: 497745 - DNA, 30 bp, Artificial Sequence
  Synthetic oligonucleotide
tggggcacatccttgcgcttgacgaggcgg

SEQ ID NO: 497746 - DNA, 30 bp, Artificial Sequence
  Synthetic oligonucleotide
cggttaccctctctttatatgctgaggcgg

SEQ ID NO: 497747 - DNA, 30 bp, Artificial Sequence
  Synthetic oligonucleotide
atttttaatcggcggtttgtcgtgaggcgg

SEQ ID NO: 497748 - DNA, 30 bp, Artificial Sequence
  Synthetic oligonucleotide
agctcagacccatatattcaccgtaggcgg

SEQ ID NO: 497749 - DNA, 30 bp, Artificial Sequence
  Synthetic oligonucleotide
atcattggatcaggagatactggtaggcgg

SEQ ID NO: 497750 - DNA, 30 bp, Artificial Sequence
  Synthetic oligonucleotide
ggtgcttacagtagggtttggcgacggcgg

SEQ ID NO: 497751 - DNA, 30 bp, Artificial Sequence
  Synthetic oligonucleotide
ctccagcgcaatttatcgaccccccggcgg

SEQ ID NO: 497752 - DNA, 30 bp, Artificial Sequence
  Synthetic oligonucleotide
agctgaccctaccccgctatgccgcggcgg

SEQ ID NO: 497753 - DNA, 30 bp, Artificial Sequence
  Synthetic oligonucleotide
ataattgtgatagattatccccggcggcgg

SEQ ID NO: 497754 - DNA, 30 bp, Artificial Sequence
  Synthetic oligonucleotide
ggggattaagcatgataaagcctagggcgg

SEQ ID NO: 497755 - DNA, 30 bp, Artificial Sequence
  Synthetic oligonucleotide
ttttacgcacaatgaagctgggacgggcgg

SEQ ID NO: 497756 - DNA, 30 bp, Artificial Sequence
  Synthetic oligonucleotide
actattaattgtcacgggggttttgggcgg

SEQ ID NO: 497757 - DNA, 30 bp, Artificial Sequence
  Synthetic oligonucleotide
cacccttcggggccggtgtagcaatggcgg

SEQ ID NO: 497758 - DNA, 30 bp, Artificial Sequence
  Synthetic oligonucleotide
gacggatttacatcaagtggtccatggcgg

SEQ ID NO: 497759 - DNA, 30 bp, Artificial Sequence
  Synthetic oligonucleotide
tttgacggcgtcaatttccgccgatggcgg

SEQ ID NO: 497760 - DNA, 30 bp, Artificial Sequence
  Synthetic oligonucleotide
ctgcaaacgacgcggggcgcagtgtggcgg

SEQ ID NO: 497761 - DNA, 30 bp, Artificial Sequence
  Synthetic oligonucleotide
aaaggctgtcacagcgcctataattggcgg

SEQ ID NO: 497762 - DNA, 30 bp, Artificial Sequence
  Synthetic oligonucleotide
aattaatcgcaacgcgagcgcgtaatgcgg

SEQ ID NO: 497763 - DNA, 30 bp, Artificial Sequence
  Synthetic oligonucleotide
gaatgtacgcgggtttttcaccttatgcgg

SEQ ID NO: 497764 - DNA, 30 bp, Artificial Sequence
  Synthetic oligonucleotide
ccagaggaacggacgccccacgggctgcgg

SEQ ID NO: 497765 - DNA, 30 bp, Artificial Sequence
  Synthetic oligonucleotide
agtcataggagtcggacatagcctctgcgg

SEQ ID NO: 497766 - DNA, 30 bp, Artificial Sequence
  Synthetic oligonucleotide
tagggcgcaccggaagtggtaggtctgcgg

SEQ ID NO: 497767 - DNA, 30 bp, Artificial Sequence
  Synthetic oligonucleotide
aatataggccactgcgcctagcttctgcgg

SEQ ID NO: 497768 - DNA, 30 bp, Artificial Sequence
  Synthetic oligonucleotide
tgctccaatacggcggcagcggtagtgcgg

SEQ ID NO: 497769 - DNA, 30 bp, Artificial Sequence
  Synthetic oligonucleotide
acttcggctaatttcaatttggatgtgcgg

SEQ ID NO: 497770 - DNA, 30 bp, Artificial Sequence
  Synthetic oligonucleotide
tatagcaggcccgcacactacggattgcgg

SEQ ID NO: 497771 - DNA, 30 bp, Artificial Sequence
  Synthetic oligonucleotide
gtgcactggcacttcactccccacttgcgg

SEQ ID NO: 497772 - DNA, 30 bp, Artificial Sequence
  Synthetic oligonucleotide
gacctacgcaactgtttatgtcccttgcgg

SEQ ID NO: 497773 - DNA, 30 bp, Artificial Sequence
  Synthetic oligonucleotide
tcaaagctagcgcaatatttgtgcttgcgg

SEQ ID NO: 497774 - DNA, 30 bp, Artificial Sequence
  Synthetic oligonucleotide
agtcgttgggaaggtccttcatggttgcgg

SEQ ID NO: 497775 - DNA, 30 bp, Artificial Sequence
  Synthetic oligonucleotide
agcagtatccatcggtgggaagtgttgcgg

SEQ ID NO: 497776 - DNA, 30 bp, Artificial Sequence
  Synthetic oligonucleotide
gagggcgctttggtacatgcaccaaatcgg

SEQ ID NO: 497777 - DNA, 30 bp, Artificial Sequence
  Synthetic oligonucleotide
ccgcgaagcgttcttctctttataaatcgg

SEQ ID NO: 497778 - DNA, 30 bp, Artificial Sequence
  Synthetic oligonucleotide
aaacaactttattgctttacggacaatcgg

SEQ ID NO: 497779 - DNA, 30 bp, Artificial Sequence
  Synthetic oligonucleotide
cgcgcggatggggtgtgctgtctgaatcgg

SEQ ID NO: 497780 - DNA, 30 bp, Artificial Sequence
  Synthetic oligonucleotide
agactcccgcgcacacccatttataatcgg

SEQ ID NO: 497781 - DNA, 30 bp, Artificial Sequence
  Synthetic oligonucleotide
tgaggacaggctaacgctgtctctaatcgg

SEQ ID NO: 497782 - DNA, 30 bp, Artificial Sequence
  Synthetic oligonucleotide
gacaattgaccccgggtacgctcgcatcgg

SEQ ID NO: 497783 - DNA, 30 bp, Artificial Sequence
  Synthetic oligonucleotide
gttggggagtagtgtcctatccggcatcgg

SEQ ID NO: 497784 - DNA, 30 bp, Artificial Sequence
  Synthetic oligonucleotide
cttggtaggccatattggctacaagatcgg

SEQ ID NO: 497785 - DNA, 31 bp, Artificial Sequence
  Synthetic oligonucleotide
cctttcggccgcaggataaaaccgcgatcgg

SEQ ID NO: 497786 - DNA, 30 bp, Artificial Sequence
  Synthetic oligonucleotide
ggcactatccacacacgcctccgggatcgg

SEQ ID NO: 497787 - DNA, 30 bp, Artificial Sequence
  Synthetic oligonucleotide
agtagtcatagatgcacactatatgatcgg

SEQ ID NO: 497788 - DNA, 30 bp, Artificial Sequence
  Synthetic oligonucleotide
ggttaggagcggcctggcgacggtgatcgg

SEQ ID NO: 497789 - DNA, 30 bp, Artificial Sequence
  Synthetic oligonucleotide
taaccttcaatggagtctcctggatatcgg

SEQ ID NO: 497790 - DNA, 30 bp, Artificial Sequence
  Synthetic oligonucleotide
tttaactatgatacactggagctctatcgg

SEQ ID NO: 497791 - DNA, 30 bp, Artificial Sequence
  Synthetic oligonucleotide
tgagtagggtttgactgcgtacagtatcgg

SEQ ID NO: 497792 - DNA, 30 bp, Artificial Sequence
  Synthetic oligonucleotide
actttctacgcgttatccgataaaactcgg

SEQ ID NO: 497793 - DNA, 30 bp, Artificial Sequence
  Synthetic oligonucleotide
agtatcggggttatgttacgtcccactcgg

SEQ ID NO: 497794 - DNA, 30 bp, Artificial Sequence
  Synthetic oligonucleotide
aagcccgttacggggctgaaaaggactcgg

SEQ ID NO: 497795 - DNA, 31 bp, Artificial Sequence
  Synthetic oligonucleotide
acagcggtcgactttaagggctcggactcgg

SEQ ID NO: 497796 - DNA, 30 bp, Artificial Sequence
  Synthetic oligonucleotide
ttatggaaataatcgtagcattggactcgg

SEQ ID NO: 497797 - DNA, 30 bp, Artificial Sequence
  Synthetic oligonucleotide
attgagtggccaggtatgcacgatactcgg

SEQ ID NO: 497798 - DNA, 30 bp, Artificial Sequence
  Synthetic oligonucleotide
ctttggcaacttctctagagaccacctcgg

SEQ ID NO: 497799 - DNA, 30 bp, Artificial Sequence
  Synthetic oligonucleotide
ttgggacgagacgcacaatgggcacctcgg

SEQ ID NO: 497800 - DNA, 30 bp, Artificial Sequence
  Synthetic oligonucleotide
acaacgacggggttattagccttacctcgg

SEQ ID NO: 497801 - DNA, 30 bp, Artificial Sequence
  Synthetic oligonucleotide
acccgacaactgggttgccgtctcgctcgg

SEQ ID NO: 497802 - DNA, 30 bp, Artificial Sequence
  Synthetic oligonucleotide
ccacagcctgaggcagtctctagctctcgg

SEQ ID NO: 497803 - DNA, 30 bp, Artificial Sequence
  Synthetic oligonucleotide
gattgctatttaatccccctccaaagtcgg

SEQ ID NO: 497804 - DNA, 30 bp, Artificial Sequence
  Synthetic oligonucleotide
atttctgatgagttataagcttcaagtcgg

SEQ ID NO: 497805 - DNA, 30 bp, Artificial Sequence
  Synthetic oligonucleotide
gtttacacaactcttatttggaccagtcgg

SEQ ID NO: 497806 - DNA, 30 bp, Artificial Sequence
  Synthetic oligonucleotide
gggatttggctgtacagcagatccagtcgg

SEQ ID NO: 497807 - DNA, 30 bp, Artificial Sequence
  Synthetic oligonucleotide
cgcaggcaaacgtctgtcctctgcagtcgg

SEQ ID NO: 497808 - DNA, 30 bp, Artificial Sequence
  Synthetic oligonucleotide
cgtaacagggttggacatttaaagagtcgg

SEQ ID NO: 497809 - DNA, 30 bp, Artificial Sequence
  Synthetic oligonucleotide
cgttagtcccgggcgatccttactagtcgg

SEQ ID NO: 497810 - DNA, 30 bp, Artificial Sequence
  Synthetic oligonucleotide
gcaatcaaacgtgtatagctagacggtcgg

SEQ ID NO: 497811 - DNA, 30 bp, Artificial Sequence
  Synthetic oligonucleotide
tgaagcagtcccagtccggtttaatgtcgg

SEQ ID NO: 497812 - DNA, 30 bp, Artificial Sequence
  Synthetic oligonucleotide
gaaaaggttgagccaccaccttcatgtcgg

SEQ ID NO: 497813 - DNA, 30 bp, Artificial Sequence
  Synthetic oligonucleotide
gttctatcggcttattcgatgatatgtcgg

SEQ ID NO: 497814 - DNA, 30 bp, Artificial Sequence
  Synthetic oligonucleotide
ttttagactccaaaaatagatttatgtcgg

SEQ ID NO: 497815 - DNA, 30 bp, Artificial Sequence
  Synthetic oligonucleotide
catcagccggccatatggttttccattcgg

SEQ ID NO: 497816 - DNA, 30 bp, Artificial Sequence
  Synthetic oligonucleotide
atgagacgtactggcatgtagaaacttcgg

SEQ ID NO: 497817 - DNA, 30 bp, Artificial Sequence
  Synthetic oligonucleotide
gttgacaaccgcataagcaccttacttcgg

SEQ ID NO: 497818 - DNA, 30 bp, Artificial Sequence
  Synthetic oligonucleotide
gaggtccgaaatggctcgatactgcttcgg

SEQ ID NO: 497819 - DNA, 30 bp, Artificial Sequence
  Synthetic oligonucleotide
agcagaccatgtctacgacgcttgcttcgg

SEQ ID NO: 497820 - DNA, 30 bp, Artificial Sequence
  Synthetic oligonucleotide
gcaaaagttatatttcgcgttaatcttcgg

SEQ ID NO: 497821 - DNA, 30 bp, Artificial Sequence
  Synthetic oligonucleotide
tctccctctacggcatatgtgctagttcgg

SEQ ID NO: 497822 - DNA, 30 bp, Artificial Sequence
  Synthetic oligonucleotide
ggtcagatgggtagacgccattatgttcgg

SEQ ID NO: 497823 - DNA, 30 bp, Artificial Sequence
  Synthetic oligonucleotide
aacttgtcacgcacgccacgaactgttcgg

SEQ ID NO: 497824 - DNA, 30 bp, Artificial Sequence
  Synthetic oligonucleotide
acagaccactgttgatgtagccaatttcgg

SEQ ID NO: 497825 - DNA, 30 bp, Artificial Sequence
  Synthetic oligonucleotide
ggaggtgtagagcattctatttaatttcgg

SEQ ID NO: 497826 - DNA, 30 bp, Artificial Sequence
  Synthetic oligonucleotide
gcggcagtctaagtggatgttcactttcgg

SEQ ID NO: 497827 - DNA, 30 bp, Artificial Sequence
  Synthetic oligonucleotide
atttttcttactaagtgaatatactttcgg

SEQ ID NO: 497828 - DNA, 30 bp, Artificial Sequence
  Synthetic oligonucleotide
acttcctccacttgacctgtcatctttcgg

SEQ ID NO: 497829 - DNA, 30 bp, Artificial Sequence
  Synthetic oligonucleotide
taaattctatacataagcttcacgtttcgg

SEQ ID NO: 497830 - DNA, 31 bp, Artificial Sequence
  Synthetic oligonucleotide
ttgaatcgaagacatcatcttaggaaaaggg

SEQ ID NO: 497831 - DNA, 30 bp, Artificial Sequence
  Synthetic oligonucleotide
agatgggtccggattcgcgaacccaaaggg

SEQ ID NO: 497832 - DNA, 30 bp, Artificial Sequence
  Synthetic oligonucleotide
ttctgattggatacctcaccccgcaaaggg

SEQ ID NO: 497833 - DNA, 30 bp, Artificial Sequence
  Synthetic oligonucleotide
tgaaacccaggactccctcggtctaaaggg

SEQ ID NO: 497834 - DNA, 30 bp, Artificial Sequence
  Synthetic oligonucleotide
cgagtttcccgatagcggtgaagacaaggg

SEQ ID NO: 497835 - DNA, 30 bp, Artificial Sequence
  Synthetic oligonucleotide
aatgagagtttatatggtcccgtacaaggg

SEQ ID NO: 497836 - DNA, 30 bp, Artificial Sequence
  Synthetic oligonucleotide
gctccgtatatggggggctagcaggaaggg

SEQ ID NO: 497837 - DNA, 30 bp, Artificial Sequence
  Synthetic oligonucleotide
atgaacggacacccagcccgtacggaaggg

SEQ ID NO: 497838 - DNA, 30 bp, Artificial Sequence
  Synthetic oligonucleotide
cgcaggagaatacaaggatccgctgaaggg

SEQ ID NO: 497839 - DNA, 31 bp, Artificial Sequence
  Synthetic oligonucleotide
tcgcagttgaattacaatcctcgtctaaggg

SEQ ID NO: 497840 - DNA, 30 bp, Artificial Sequence
  Synthetic oligonucleotide
tacccttgacgtggctgccaagcgtaaggg

SEQ ID NO: 497841 - DNA, 30 bp, Artificial Sequence
  Synthetic oligonucleotide
aagtcggttcgggccatttcttcttaaggg

SEQ ID NO: 497842 - DNA, 30 bp, Artificial Sequence
  Synthetic oligonucleotide
gcaccccgtcatggatattaccgttaaggg

SEQ ID NO: 497843 - DNA, 30 bp, Artificial Sequence
  Synthetic oligonucleotide
aattatctgaagccccccaaacgaacaggg

SEQ ID NO: 497844 - DNA, 30 bp, Artificial Sequence
  Synthetic oligonucleotide
aaaattttgttgtaacaagaagtaacaggg

SEQ ID NO: 497845 - DNA, 40 bp, Artificial Sequence
  Synthetic oligonucleotide
tgataaacgtacgtcaaagattccgaagagggtaacaggg

SEQ ID NO: 497846 - DNA, 30 bp, Artificial Sequence
  Synthetic oligonucleotide
atgtgggcagcgggccctttacgcacaggg

SEQ ID NO: 497847 - DNA, 30 bp, Artificial Sequence
  Synthetic oligonucleotide
taacaggttaacgtcgcaacctttacaggg

SEQ ID NO: 497848 - DNA, 30 bp, Artificial Sequence
  Synthetic oligonucleotide
ttaaaataagcgacactacctgtgccaggg

SEQ ID NO: 497849 - DNA, 30 bp, Artificial Sequence
  Synthetic oligonucleotide
aaaagacgcggcataagtaggcctccaggg

SEQ ID NO: 497850 - DNA, 30 bp, Artificial Sequence
  Synthetic oligonucleotide
aggcatacacaacggtggaagttagcaggg

SEQ ID NO: 497851 - DNA, 30 bp, Artificial Sequence
  Synthetic oligonucleotide
cagcaccatagccatagaccgcacgcaggg

SEQ ID NO: 497852 - DNA, 30 bp, Artificial Sequence
  Synthetic oligonucleotide
gaacaatgcaagagcgtttttcttgcaggg

SEQ ID NO: 497853 - DNA, 30 bp, Artificial Sequence
  Synthetic oligonucleotide
aatgcagtacacgggtgacgcgtgtcaggg

SEQ ID NO: 497854 - DNA, 30 bp, Artificial Sequence
  Synthetic oligonucleotide
cctaaggtgtgccgaagcacggtgtcaggg

SEQ ID NO: 497855 - DNA, 30 bp, Artificial Sequence
  Synthetic oligonucleotide
tcaagagtgaggaacaccggatattcaggg

SEQ ID NO: 497856 - DNA, 30 bp, Artificial Sequence
  Synthetic oligonucleotide
gcttacaggcgggacatgtccccttcaggg

SEQ ID NO: 497857 - DNA, 30 bp, Artificial Sequence
  Synthetic oligonucleotide
cagtagcacattctgtgggaaggttcaggg

SEQ ID NO: 497858 - DNA, 30 bp, Artificial Sequence
  Synthetic oligonucleotide
gcgaaggcgaaaattgttgatgtttcaggg

SEQ ID NO: 497859 - DNA, 30 bp, Artificial Sequence
  Synthetic oligonucleotide
aataggttccgctgatattaatccagaggg

SEQ ID NO: 497860 - DNA, 30 bp, Artificial Sequence
  Synthetic oligonucleotide
aagaaaataaagtcggaagtgtagagaggg

SEQ ID NO: 497861 - DNA, 30 bp, Artificial Sequence
  Synthetic oligonucleotide
tgggagggtagtggtggcggtgggagaggg

SEQ ID NO: 497862 - DNA, 30 bp, Artificial Sequence
  Synthetic oligonucleotide
atagtgcccccctagtaattcgctagaggg

SEQ ID NO: 497863 - DNA, 30 bp, Artificial Sequence
  Synthetic oligonucleotide
cctagaacatgtataatcaaacgacgaggg

SEQ ID NO: 497864 - DNA, 30 bp, Artificial Sequence
  Synthetic oligonucleotide
gttcgtggccacggtaacgattaccgaggg

SEQ ID NO: 497865 - DNA, 30 bp, Artificial Sequence
  Synthetic oligonucleotide
gttagaccttagacaatcggatcccgaggg

SEQ ID NO: 497866 - DNA, 30 bp, Artificial Sequence
  Synthetic oligonucleotide
aagaaattttttgtcacttgccatcgaggg

SEQ ID NO: 497867 - DNA, 30 bp, Artificial Sequence
  Synthetic oligonucleotide
tttatcaaccgtgatcatggagcaggaggg

SEQ ID NO: 497868 - DNA, 30 bp, Artificial Sequence
  Synthetic oligonucleotide
gccctccgacggtcctgatgtagaggaggg

SEQ ID NO: 497869 - DNA, 30 bp, Artificial Sequence
  Synthetic oligonucleotide
aacgctacataggggtgggcctgcggaggg

SEQ ID NO: 497870 - DNA, 30 bp, Artificial Sequence
  Synthetic oligonucleotide
agttataggtttcgagtggggtagggaggg

SEQ ID NO: 497871 - DNA, 30 bp, Artificial Sequence
  Synthetic oligonucleotide
tcgcctcccgatctccgtagaacgggaggg

SEQ ID NO: 497872 - DNA, 30 bp, Artificial Sequence
  Synthetic oligonucleotide
aagtaaggcttaaggccgctatggggaggg

SEQ ID NO: 497873 - DNA, 30 bp, Artificial Sequence
  Synthetic oligonucleotide
ctgcggaataccgcaggccctagatgaggg

SEQ ID NO: 497874 - DNA, 30 bp, Artificial Sequence
  Synthetic oligonucleotide
gcttacccatagccattactaggctgaggg

SEQ ID NO: 497875 - DNA, 30 bp, Artificial Sequence
  Synthetic oligonucleotide
gtcgggttcctccggcgcggcatctgaggg

SEQ ID NO: 497876 - DNA, 30 bp, Artificial Sequence
  Synthetic oligonucleotide
attaattgtttgggagtgagcgacataggg

SEQ ID NO: 497877 - DNA, 30 bp, Artificial Sequence
  Synthetic oligonucleotide
cggcgacataccaccgcttcccgcataggg

SEQ ID NO: 497878 - DNA, 30 bp, Artificial Sequence
  Synthetic oligonucleotide
accatgtgcacatttggaatggtcataggg

SEQ ID NO: 497879 - DNA, 30 bp, Artificial Sequence
  Synthetic oligonucleotide
taaagagtgacgaacactcagcagataggg

SEQ ID NO: 497880 - DNA, 30 bp, Artificial Sequence
  Synthetic oligonucleotide
ttacaaaggctcaaggactcgactataggg

SEQ ID NO: 497881 - DNA, 30 bp, Artificial Sequence
  Synthetic oligonucleotide
tagtcagggacagggcccacgagactaggg

SEQ ID NO: 497882 - DNA, 30 bp, Artificial Sequence
  Synthetic oligonucleotide
tcgcgtgaccaccctgtcgcgctgctaggg

SEQ ID NO: 497883 - DNA, 30 bp, Artificial Sequence
  Synthetic oligonucleotide
gggttgtaaaggccccgatgaactctaggg

SEQ ID NO: 497884 - DNA, 30 bp, Artificial Sequence
  Synthetic oligonucleotide
tgccctcacattcactcagtctaagtaggg

SEQ ID NO: 497885 - DNA, 30 bp, Artificial Sequence
  Synthetic oligonucleotide
cgagaaacgttctcggtcacggacgtaggg

SEQ ID NO: 497886 - DNA, 30 bp, Artificial Sequence
  Synthetic oligonucleotide
ttcgaaattcgggcacccttttctgtaggg

SEQ ID NO: 497887 - DNA, 30 bp, Artificial Sequence
  Synthetic oligonucleotide
gagtggcgaactggctggaatgccttaggg

SEQ ID NO: 497888 - DNA, 30 bp, Artificial Sequence
  Synthetic oligonucleotide
tgaagtacggtaagaagggggcgtttaggg

SEQ ID NO: 497889 - DNA, 30 bp, Artificial Sequence
  Synthetic oligonucleotide
cattccagttaggcacgagcgtgaaacggg

SEQ ID NO: 497890 - DNA, 30 bp, Artificial Sequence
  Synthetic oligonucleotide
gcatcctagccctcttagcgccagaacggg

SEQ ID NO: 497891 - DNA, 30 bp, Artificial Sequence
  Synthetic oligonucleotide
gaacatgagcaacactgccgtaggaacggg

SEQ ID NO: 497892 - DNA, 30 bp, Artificial Sequence
  Synthetic oligonucleotide
tgtcgcaccctccttaaagaattgaacggg

SEQ ID NO: 497893 - DNA, 30 bp, Artificial Sequence
  Synthetic oligonucleotide
ccttatcgcttctgttccgggcaacacggg

SEQ ID NO: 497894 - DNA, 30 bp, Artificial Sequence
  Synthetic oligonucleotide
cgcgagtactggtttagcggcgagcacggg

SEQ ID NO: 497895 - DNA, 30 bp, Artificial Sequence
  Synthetic oligonucleotide
gatcgtagagttattccagccatgcacggg

SEQ ID NO: 497896 - DNA, 30 bp, Artificial Sequence
  Synthetic oligonucleotide
gtctttatctcattgtgggatctgcacggg

SEQ ID NO: 497897 - DNA, 30 bp, Artificial Sequence
  Synthetic oligonucleotide
accccgtggagaggttaaaatcctcacggg

SEQ ID NO: 497898 - DNA, 30 bp, Artificial Sequence
  Synthetic oligonucleotide
cttcgacgactacatcagccgtgtcacggg

SEQ ID NO: 497899 - DNA, 30 bp, Artificial Sequence
  Synthetic oligonucleotide
ctacacagggagctcgccccgattcacggg

SEQ ID NO: 497900 - DNA, 30 bp, Artificial Sequence
  Synthetic oligonucleotide
tatgttatctgcgtggcgccataagacggg

SEQ ID NO: 497901 - DNA, 30 bp, Artificial Sequence
  Synthetic oligonucleotide
tagcgccatggtgtcctaaaggtagacggg

SEQ ID NO: 497902 - DNA, 30 bp, Artificial Sequence
  Synthetic oligonucleotide
ggactgccgacccaacattatccggacggg

SEQ ID NO: 497903 - DNA, 30 bp, Artificial Sequence
  Synthetic oligonucleotide
ggtagcgtctgaagccgttctgcggacggg

SEQ ID NO: 497904 - DNA, 30 bp, Artificial Sequence
  Synthetic oligonucleotide
tatctttcgtcggaggagctcggggacggg

SEQ ID NO: 497905 - DNA, 31 bp, Artificial Sequence
  Synthetic oligonucleotide
gagttcgcgggccggcaaggcactggacggg

SEQ ID NO: 497906 - DNA, 30 bp, Artificial Sequence
  Synthetic oligonucleotide
cgttgatagcagttcactgaagcgtacggg

SEQ ID NO: 497907 - DNA, 30 bp, Artificial Sequence
  Synthetic oligonucleotide
caaaatatatacccgattttcccttacggg

SEQ ID NO: 497908 - DNA, 30 bp, Artificial Sequence
  Synthetic oligonucleotide
gggaacgccggtgaagattgtttaaccggg

SEQ ID NO: 497909 - DNA, 30 bp, Artificial Sequence
  Synthetic oligonucleotide
gggaataaagcttttgaaatgcgcaccggg

SEQ ID NO: 497910 - DNA, 30 bp, Artificial Sequence
  Synthetic oligonucleotide
atccttgatgtgggggtgcggtgcaccggg

SEQ ID NO: 497911 - DNA, 30 bp, Artificial Sequence
  Synthetic oligonucleotide
ggacccggaaatgtgactttacgtaccggg

SEQ ID NO: 497912 - DNA, 30 bp, Artificial Sequence
  Synthetic oligonucleotide
atccattgttggggcttgagtgaacccggg

SEQ ID NO: 497913 - DNA, 30 bp, Artificial Sequence
  Synthetic oligonucleotide
cgtaattattgcgagcgctacccccccggg

SEQ ID NO: 497914 - DNA, 30 bp, Artificial Sequence
  Synthetic oligonucleotide
taagcctccatgtagccatttctccccggg

SEQ ID NO: 497915 - DNA, 30 bp, Artificial Sequence
  Synthetic oligonucleotide
attagttgagcgttgcgggctaagcccggg

SEQ ID NO: 497916 - DNA, 30 bp, Artificial Sequence
  Synthetic oligonucleotide
gaagaatcccgcgggccatttgctcccggg

SEQ ID NO: 497917 - DNA, 30 bp, Artificial Sequence
  Synthetic oligonucleotide
ccattgccattgagggcatgtcaagccggg

SEQ ID NO: 497918 - DNA, 30 bp, Artificial Sequence
  Synthetic oligonucleotide
tgtgttcaggagtcccatataatatccggg

SEQ ID NO: 497919 - DNA, 30 bp, Artificial Sequence
  Synthetic oligonucleotide
gcggactgtgcatatcctcgactatccggg

SEQ ID NO: 497920 - DNA, 30 bp, Artificial Sequence
  Synthetic oligonucleotide
ttacgttgacggttcactcatgtatccggg

SEQ ID NO: 497921 - DNA, 30 bp, Artificial Sequence
  Synthetic oligonucleotide
acgagaagctgttacaggcgcagctccggg

SEQ ID NO: 497922 - DNA, 30 bp, Artificial Sequence
  Synthetic oligonucleotide
gaatcgtcgctttggcgaagcatgtccggg

SEQ ID NO: 497923 - DNA, 30 bp, Artificial Sequence
  Synthetic oligonucleotide
ttttgtaccaaaccatgccatcgcagcggg

SEQ ID NO: 497924 - DNA, 30 bp, Artificial Sequence
  Synthetic oligonucleotide
ttgactggttcggaaatttccttgagcggg

SEQ ID NO: 497925 - DNA, 30 bp, Artificial Sequence
  Synthetic oligonucleotide
ttgcagtcatccgtgacctaccatagcggg

SEQ ID NO: 497926 - DNA, 30 bp, Artificial Sequence
  Synthetic oligonucleotide
gctatcatcgttcaggaacgagatagcggg

SEQ ID NO: 497927 - DNA, 30 bp, Artificial Sequence
  Synthetic oligonucleotide
aattcatttatatcccccgtctaacgcggg

SEQ ID NO: 497928 - DNA, 30 bp, Artificial Sequence
  Synthetic oligonucleotide
gttggaagaacgcggtcgcgtttacgcggg

SEQ ID NO: 497929 - DNA, 30 bp, Artificial Sequence
  Synthetic oligonucleotide
gtcgcacaaaccgcaccggggtaccgcggg

SEQ ID NO: 497930 - DNA, 30 bp, Artificial Sequence
  Synthetic oligonucleotide
taattatgagtaagtaccttatcccgcggg

SEQ ID NO: 497931 - DNA, 30 bp, Artificial Sequence
  Synthetic oligonucleotide
tgcgtcgcagcctagtagataacgcgcggg

SEQ ID NO: 497932 - DNA, 30 bp, Artificial Sequence
  Synthetic oligonucleotide
atttcacggtgctcggtgtatcatcgcggg

SEQ ID NO: 497933 - DNA, 30 bp, Artificial Sequence
  Synthetic oligonucleotide
gatttctttatatgttctgtgattcgcggg

SEQ ID NO: 497934 - DNA, 30 bp, Artificial Sequence
  Synthetic oligonucleotide
aggtctagaagcctaagcggggtgggcggg

SEQ ID NO: 497935 - DNA, 30 bp, Artificial Sequence
  Synthetic oligonucleotide
gcaccccgaaactctcagggattgggcggg

SEQ ID NO: 497936 - DNA, 30 bp, Artificial Sequence
  Synthetic oligonucleotide
gactttatcagttctggtaaacatggcggg

SEQ ID NO: 497937 - DNA, 30 bp, Artificial Sequence
  Synthetic oligonucleotide
tctattaaggggaggtctgcgactggcggg

SEQ ID NO: 497938 - DNA, 30 bp, Artificial Sequence
  Synthetic oligonucleotide
tcattatatttgcatcagcggacatgcggg

SEQ ID NO: 497939 - DNA, 30 bp, Artificial Sequence
  Synthetic oligonucleotide
atttcgggggggttgggaatttcatgcggg

SEQ ID NO: 497940 - DNA, 30 bp, Artificial Sequence
  Synthetic oligonucleotide
gaatatgacgcaaccgaattccgttgcggg

SEQ ID NO: 497941 - DNA, 30 bp, Artificial Sequence
  Synthetic oligonucleotide
cgcaggcccgcctgttgctatgggatcggg

SEQ ID NO: 497942 - DNA, 30 bp, Artificial Sequence
  Synthetic oligonucleotide
tatgcagtcaggtcatgaggcaatatcggg

SEQ ID NO: 497943 - DNA, 30 bp, Artificial Sequence
  Synthetic oligonucleotide
gcaccgatgcggcttcaaatgcgtatcggg

SEQ ID NO: 497944 - DNA, 30 bp, Artificial Sequence
  Synthetic oligonucleotide
gtgtgggataagaggaatcgcagtctcggg

SEQ ID NO: 497945 - DNA, 30 bp, Artificial Sequence
  Synthetic oligonucleotide
agcggccaacttggacttgtcagggtcggg

SEQ ID NO: 497946 - DNA, 30 bp, Artificial Sequence
  Synthetic oligonucleotide
aattatcggtcgacatgtcctaatgtcggg

SEQ ID NO: 497947 - DNA, 30 bp, Artificial Sequence
  Synthetic oligonucleotide
aggtacggattgctttacgcccttgtcggg

SEQ ID NO: 497948 - DNA, 30 bp, Artificial Sequence
  Synthetic oligonucleotide
gcgaatttaggcagattctttatcttcggg

SEQ ID NO: 497949 - DNA, 30 bp, Artificial Sequence
  Synthetic oligonucleotide
ggaagaaatataaagaaaaatttcttcggg

SEQ ID NO: 497950 - DNA, 30 bp, Artificial Sequence
  Synthetic oligonucleotide
aagtacgcattgcacctgccgaagttcggg

SEQ ID NO: 497951 - DNA, 30 bp, Artificial Sequence
  Synthetic oligonucleotide
aagaaggagctagaggccacacggcagggg

SEQ ID NO: 497952 - DNA, 30 bp, Artificial Sequence
  Synthetic oligonucleotide
gattcaacggaattcctggacgggcagggg

SEQ ID NO: 497953 - DNA, 30 bp, Artificial Sequence
  Synthetic oligonucleotide
gcacgccatactctctgaaagtgtcagggg

SEQ ID NO: 497954 - DNA, 30 bp, Artificial Sequence
  Synthetic oligonucleotide
gtaaacacagggttctcggctcaagagggg

SEQ ID NO: 497955 - DNA, 30 bp, Artificial Sequence
  Synthetic oligonucleotide
cgcaacacgtgtaccccgtccttagagggg

SEQ ID NO: 497956 - DNA, 30 bp, Artificial Sequence
  Synthetic oligonucleotide
atcattatggtctagggaagtgtggagggg

SEQ ID NO: 497957 - DNA, 30 bp, Artificial Sequence
  Synthetic oligonucleotide
ttataagtgagcttgacttgttgtgagggg

SEQ ID NO: 497958 - DNA, 30 bp, Artificial Sequence
  Synthetic oligonucleotide
catttctcgtttttattaatccgatagggg

SEQ ID NO: 497959 - DNA, 30 bp, Artificial Sequence
  Synthetic oligonucleotide
aaccgctcctaagtacgccgaccctagggg

SEQ ID NO: 497960 - DNA, 30 bp, Artificial Sequence
  Synthetic oligonucleotide
gtttacctggcaccgggtcaagggtagggg

SEQ ID NO: 497961 - DNA, 30 bp, Artificial Sequence
  Synthetic oligonucleotide
tatccagtagctatagacccatgttagggg

SEQ ID NO: 497962 - DNA, 30 bp, Artificial Sequence
  Synthetic oligonucleotide
ggacccttccgctgtggtccaatttagggg

SEQ ID NO: 497963 - DNA, 30 bp, Artificial Sequence
  Synthetic oligonucleotide
gacgtaccatagtaatacaacctttagggg

SEQ ID NO: 497964 - DNA, 30 bp, Artificial Sequence
  Synthetic oligonucleotide
ggctattgggtgtcgccttccttcacgggg

SEQ ID NO: 497965 - DNA, 30 bp, Artificial Sequence
  Synthetic oligonucleotide
atcccatcttttaagccgggcctgacgggg

SEQ ID NO: 497966 - DNA, 30 bp, Artificial Sequence
  Synthetic oligonucleotide
tgcctacgcagggggccgccggtgacgggg

SEQ ID NO: 497967 - DNA, 30 bp, Artificial Sequence
  Synthetic oligonucleotide
aataagttcaactgggttgttgctacgggg

SEQ ID NO: 497968 - DNA, 30 bp, Artificial Sequence
  Synthetic oligonucleotide
atttcctgagttatagtcagctaaccgggg

SEQ ID NO: 497969 - DNA, 30 bp, Artificial Sequence
  Synthetic oligonucleotide
gttggcgtggagacgccactgcgaccgggg

SEQ ID NO: 497970 - DNA, 30 bp, Artificial Sequence
  Synthetic oligonucleotide
gtcattagcccaaacacacgactaccgggg

SEQ ID NO: 497971 - DNA, 30 bp, Artificial Sequence
  Synthetic oligonucleotide
tttatagtctataagcctcgcgcgccgggg

SEQ ID NO: 497972 - DNA, 28 bp, Artificial Sequence
  Synthetic oligonucleotide
ggagtgtagaagtgggttccaagcgggg

SEQ ID NO: 497973 - DNA, 30 bp, Artificial Sequence
  Synthetic oligonucleotide
tttttgagcttcgctactttgccagcgggg

SEQ ID NO: 497974 - DNA, 30 bp, Artificial Sequence
  Synthetic oligonucleotide
atatctacacatccaagaccttgcgcgggg

SEQ ID NO: 497975 - DNA, 30 bp, Artificial Sequence
  Synthetic oligonucleotide
ttcaaaggtcaggatgaccctggtgcgggg

SEQ ID NO: 497976 - DNA, 30 bp, Artificial Sequence
  Synthetic oligonucleotide
gaaattgagcgccgcaagtaacgctcgggg

SEQ ID NO: 497977 - DNA, 30 bp, Artificial Sequence
  Synthetic oligonucleotide
catcccggttacttgcagctgtattcgggg

SEQ ID NO: 497978 - DNA, 30 bp, Artificial Sequence
  Synthetic oligonucleotide
gttcacgaacaccattggatatcttcgggg

SEQ ID NO: 497979 - DNA, 30 bp, Artificial Sequence
  Synthetic oligonucleotide
aattgtggggggaacagcgcgaaaaggggg

SEQ ID NO: 497980 - DNA, 30 bp, Artificial Sequence
  Synthetic oligonucleotide
aatgtacggttatgggcccaacgaaggggg

SEQ ID NO: 497981 - DNA, 30 bp, Artificial Sequence
  Synthetic oligonucleotide
agaatcccccatacacccatgaacaggggg

SEQ ID NO: 497982 - DNA, 30 bp, Artificial Sequence
  Synthetic oligonucleotide
cgaatggcgaccctgggtgtatgcaggggg

SEQ ID NO: 497983 - DNA, 30 bp, Artificial Sequence
  Synthetic oligonucleotide
actcagcggcgttgggtctgtatcaggggg

SEQ ID NO: 497984 - DNA, 30 bp, Artificial Sequence
  Synthetic oligonucleotide
gggtccacggctgggtgagcaactaggggg

SEQ ID NO: 497985 - DNA, 30 bp, Artificial Sequence
  Synthetic oligonucleotide
gatcgaggcgattaggggaatgcacggggg

SEQ ID NO: 497986 - DNA, 30 bp, Artificial Sequence
  Synthetic oligonucleotide
gccccctacccttggcgattaatacggggg

SEQ ID NO: 497987 - DNA, 30 bp, Artificial Sequence
  Synthetic oligonucleotide
ctacgtgtgatgtgcgcactccggcggggg

SEQ ID NO: 497988 - DNA, 30 bp, Artificial Sequence
  Synthetic oligonucleotide
cgttcggccgatgttcgagggcggcggggg

SEQ ID NO: 497989 - DNA, 30 bp, Artificial Sequence
  Synthetic oligonucleotide
tggccgcggcagtcggctaatggtcggggg

SEQ ID NO: 497990 - DNA, 30 bp, Artificial Sequence
  Synthetic oligonucleotide
gttctacgacgtatcaatgttcaagggggg

SEQ ID NO: 497991 - DNA, 30 bp, Artificial Sequence
  Synthetic oligonucleotide
gctgcagctaccacacaaattatagggggg

SEQ ID NO: 497992 - DNA, 30 bp, Artificial Sequence
  Synthetic oligonucleotide
aattcaatagaatttcagtgcttcgggggg

SEQ ID NO: 497993 - DNA, 30 bp, Artificial Sequence
  Synthetic oligonucleotide
gcccgttcacgcaacccatcgagctggggg

SEQ ID NO: 497994 - DNA, 30 bp, Artificial Sequence
  Synthetic oligonucleotide
gtttttgcggtgcccggctgccgctggggg

SEQ ID NO: 497995 - DNA, 27 bp, Artificial Sequence
  Synthetic oligonucleotide
gataatggtgcgaccgtcgtctggggg

SEQ ID NO: 497996 - DNA, 30 bp, Artificial Sequence
  Synthetic oligonucleotide
gttcaactgctaaatgttagctagatgggg

SEQ ID NO: 497997 - DNA, 30 bp, Artificial Sequence
  Synthetic oligonucleotide
aaatcatgttcaattacggacggtatgggg

SEQ ID NO: 497998 - DNA, 30 bp, Artificial Sequence
  Synthetic oligonucleotide
ttatgtcgctatacggaactttttatgggg

SEQ ID NO: 497999 - DNA, 30 bp, Artificial Sequence
  Synthetic oligonucleotide
ggattgacgtgtgcccagagtccactgggg

SEQ ID NO: 498000 - DNA, 30 bp, Artificial Sequence
  Synthetic oligonucleotide
aattagataacgaggttacacgtactgggg

SEQ ID NO: 498001 - DNA, 30 bp, Artificial Sequence
  Synthetic oligonucleotide
gtgcgctattctgggttgaaagcgctgggg

SEQ ID NO: 498002 - DNA, 30 bp, Artificial Sequence
  Synthetic oligonucleotide
agacatcgcgcttccaggttgttgctgggg

SEQ ID NO: 498003 - DNA, 30 bp, Artificial Sequence
  Synthetic oligonucleotide
taacctatatggtttcgcctaaatctgggg

SEQ ID NO: 498004 - DNA, 30 bp, Artificial Sequence
  Synthetic oligonucleotide
tctcaccgcgagaccctgtgtattctgggg

SEQ ID NO: 498005 - DNA, 30 bp, Artificial Sequence
  Synthetic oligonucleotide
attttcaacactccttatctagtagtgggg

SEQ ID NO: 498006 - DNA, 30 bp, Artificial Sequence
  Synthetic oligonucleotide
taatataacttcagcatcgattacgtgggg

SEQ ID NO: 498007 - DNA, 30 bp, Artificial Sequence
  Synthetic oligonucleotide
gagttctactgaagggaccatttcgtgggg

SEQ ID NO: 498008 - DNA, 30 bp, Artificial Sequence
  Synthetic oligonucleotide
ctgcatagcgactccttagtgtctgtgggg

SEQ ID NO: 498009 - DNA, 30 bp, Artificial Sequence
  Synthetic oligonucleotide
cggggactacccgcagcaagccaattgggg

SEQ ID NO: 498010 - DNA, 30 bp, Artificial Sequence
  Synthetic oligonucleotide
ggatcccatcaagtgtcttggcgattgggg

SEQ ID NO: 498011 - DNA, 30 bp, Artificial Sequence
  Synthetic oligonucleotide
gtttttctcttattatgtattctattgggg

SEQ ID NO: 498012 - DNA, 30 bp, Artificial Sequence
  Synthetic oligonucleotide
gtccaaactctggcggccactactttgggg

SEQ ID NO: 498013 - DNA, 30 bp, Artificial Sequence
  Synthetic oligonucleotide
agtcttgatacccactttcgggctttgggg

SEQ ID NO: 498014 - DNA, 30 bp, Artificial Sequence
  Synthetic oligonucleotide
ttatttccagttttaatggtagttttgggg

SEQ ID NO: 498015 - DNA, 30 bp, Artificial Sequence
  Synthetic oligonucleotide
atatttatatcttctcagcctgaaaatggg

SEQ ID NO: 498016 - DNA, 30 bp, Artificial Sequence
  Synthetic oligonucleotide
tcaactaccaggaatacggcaaccaatggg

SEQ ID NO: 498017 - DNA, 30 bp, Artificial Sequence
  Synthetic oligonucleotide
gcagcttgccctttataactaacgaatggg

SEQ ID NO: 498018 - DNA, 30 bp, Artificial Sequence
  Synthetic oligonucleotide
atgcgttccttcgctcattcgacgaatggg

SEQ ID NO: 498019 - DNA, 30 bp, Artificial Sequence
  Synthetic oligonucleotide
tttggcgcaaaaacccacgcttggaatggg

SEQ ID NO: 498020 - DNA, 30 bp, Artificial Sequence
  Synthetic oligonucleotide
ggactcatttaatcccgacacattaatggg

SEQ ID NO: 498021 - DNA, 30 bp, Artificial Sequence
  Synthetic oligonucleotide
cgatcctcaagtatattcctcgtacatggg

SEQ ID NO: 498022 - DNA, 30 bp, Artificial Sequence
  Synthetic oligonucleotide
gaggctagagatgaaattcggtagcatggg

SEQ ID NO: 498023 - DNA, 30 bp, Artificial Sequence
  Synthetic oligonucleotide
attatataaaaccgttcagaacatcatggg

SEQ ID NO: 498024 - DNA, 30 bp, Artificial Sequence
  Synthetic oligonucleotide
gtatacggatcgaccgaagcactcgatggg

SEQ ID NO: 498025 - DNA, 30 bp, Artificial Sequence
  Synthetic oligonucleotide
agtaaattccgtgggcgcccagggtatggg

SEQ ID NO: 498026 - DNA, 30 bp, Artificial Sequence
  Synthetic oligonucleotide
ctgtccgccagaataattatgcgttatggg

SEQ ID NO: 498027 - DNA, 30 bp, Artificial Sequence
  Synthetic oligonucleotide
gaattatatgcacaattggccgtttatggg

SEQ ID NO: 498028 - DNA, 30 bp, Artificial Sequence
  Synthetic oligonucleotide
ctaacgtaacgcggcacaactacaactggg

SEQ ID NO: 498029 - DNA, 30 bp, Artificial Sequence
  Synthetic oligonucleotide
ttctgtttcgagtcgcagtacgacactggg

SEQ ID NO: 498030 - DNA, 30 bp, Artificial Sequence
  Synthetic oligonucleotide
attagatcggtaccgcactatgggactggg

SEQ ID NO: 498031 - DNA, 30 bp, Artificial Sequence
  Synthetic oligonucleotide
aggctgagtagttggcggtcttggactggg

SEQ ID NO: 498032 - DNA, 30 bp, Artificial Sequence
  Synthetic oligonucleotide
taaaactatataatttcttaatctactggg

SEQ ID NO: 498033 - DNA, 30 bp, Artificial Sequence
  Synthetic oligonucleotide
atcggcgtgcgatccccggcgtaacctggg

SEQ ID NO: 498034 - DNA, 30 bp, Artificial Sequence
  Synthetic oligonucleotide
tcaccgggttccagcgtggacacccctggg

SEQ ID NO: 498035 - DNA, 30 bp, Artificial Sequence
  Synthetic oligonucleotide
ttagggcagctccagtttattagagctggg

SEQ ID NO: 498036 - DNA, 30 bp, Artificial Sequence
  Synthetic oligonucleotide
tcccgatctcggatggacttgaacgctggg

SEQ ID NO: 498037 - DNA, 30 bp, Artificial Sequence
  Synthetic oligonucleotide
aacgccagctggtaggtatcgcaggctggg

SEQ ID NO: 498038 - DNA, 30 bp, Artificial Sequence
  Synthetic oligonucleotide
ggtaaccgtggaatggttggagtggctggg

SEQ ID NO: 498039 - DNA, 30 bp, Artificial Sequence
  Synthetic oligonucleotide
ttcatagagtccggtgttgatttctctggg

SEQ ID NO: 498040 - DNA, 30 bp, Artificial Sequence
  Synthetic oligonucleotide
accctttttcccgcggccgagataagtggg

SEQ ID NO: 498041 - DNA, 30 bp, Artificial Sequence
  Synthetic oligonucleotide
cctcaccggggccgcggttcacacagtggg

SEQ ID NO: 498042 - DNA, 30 bp, Artificial Sequence
  Synthetic oligonucleotide
gtttgtgctgatacgcctcaggacagtggg

SEQ ID NO: 498043 - DNA, 30 bp, Artificial Sequence
  Synthetic oligonucleotide
tggccactccaactgggaatacgcagtggg

SEQ ID NO: 498044 - DNA, 30 bp, Artificial Sequence
  Synthetic oligonucleotide
cttctcgaggccaccatacggatgagtggg

SEQ ID NO: 498045 - DNA, 30 bp, Artificial Sequence
  Synthetic oligonucleotide
ctaatcgggtacagggcccgagttagtggg

SEQ ID NO: 498046 - DNA, 30 bp, Artificial Sequence
  Synthetic oligonucleotide
gattgaaagattcttctcgataaacgtggg

SEQ ID NO: 498047 - DNA, 30 bp, Artificial Sequence
  Synthetic oligonucleotide
tgggtggccacccggcggactacgcgtggg

SEQ ID NO: 498048 - DNA, 30 bp, Artificial Sequence
  Synthetic oligonucleotide
ctcgctttgcacctgaatacgtcaggtggg

SEQ ID NO: 498049 - DNA, 30 bp, Artificial Sequence
  Synthetic oligonucleotide
acaggctccttaagtgataacctaggtggg

SEQ ID NO: 498050 - DNA, 30 bp, Artificial Sequence
  Synthetic oligonucleotide
cctccgggggccaaatgagggtcgggtggg

SEQ ID NO: 498051 - DNA, 30 bp, Artificial Sequence
  Synthetic oligonucleotide
ggctcagtattttagttagacgggggtggg

SEQ ID NO: 498052 - DNA, 30 bp, Artificial Sequence
  Synthetic oligonucleotide
caataagtacaagaggtacttttgggtggg

SEQ ID NO: 498053 - DNA, 30 bp, Artificial Sequence
  Synthetic oligonucleotide
ttctctagcagttacccctgacatggtggg

SEQ ID NO: 498054 - DNA, 30 bp, Artificial Sequence
  Synthetic oligonucleotide
tgtaaggttcatatcttaagcactggtggg

SEQ ID NO: 498055 - DNA, 30 bp, Artificial Sequence
  Synthetic oligonucleotide
ttttcagcctctgctcgcactaaatgtggg

SEQ ID NO: 498056 - DNA, 30 bp, Artificial Sequence
  Synthetic oligonucleotide
cagttcccgcaatatcatattaggtgtggg

SEQ ID NO: 498057 - DNA, 30 bp, Artificial Sequence
  Synthetic oligonucleotide
ggctccgggaaacgcccctcactgtgtggg

SEQ ID NO: 498058 - DNA, 30 bp, Artificial Sequence
  Synthetic oligonucleotide
ctccgattccctccccagcgtaaaattggg

SEQ ID NO: 498059 - DNA, 30 bp, Artificial Sequence
  Synthetic oligonucleotide
catcgttttttttccgtgatatcaattggg

SEQ ID NO: 498060 - DNA, 30 bp, Artificial Sequence
  Synthetic oligonucleotide
actcgggtagacggagaccgcagaattggg

SEQ ID NO: 498061 - DNA, 30 bp, Artificial Sequence
  Synthetic oligonucleotide
ttagccgttccccgaggcaggctaattggg

SEQ ID NO: 498062 - DNA, 30 bp, Artificial Sequence
  Synthetic oligonucleotide
caaccctcgatgtctaatgatatcattggg

SEQ ID NO: 498063 - DNA, 30 bp, Artificial Sequence
  Synthetic oligonucleotide
aaccccattcaccccacttaacagattggg

SEQ ID NO: 498064 - DNA, 30 bp, Artificial Sequence
  Synthetic oligonucleotide
cgttagttacattgtatttatcgtattggg

SEQ ID NO: 498065 - DNA, 30 bp, Artificial Sequence
  Synthetic oligonucleotide
tgctcaaaggcctgttctggacaacttggg

SEQ ID NO: 498066 - DNA, 30 bp, Artificial Sequence
  Synthetic oligonucleotide
ttgaggtcgctaacgcgtacactacttggg

SEQ ID NO: 498067 - DNA, 30 bp, Artificial Sequence
  Synthetic oligonucleotide
ttgtagctggaggacggagcgtagcttggg

SEQ ID NO: 498068 - DNA, 30 bp, Artificial Sequence
  Synthetic oligonucleotide
tcaacagtcccaaagcgccccgggcttggg

SEQ ID NO: 498069 - DNA, 30 bp, Artificial Sequence
  Synthetic oligonucleotide
gcccgctgttgatacttcagagcagttggg

SEQ ID NO: 498070 - DNA, 30 bp, Artificial Sequence
  Synthetic oligonucleotide
tagaatgggtcccggttatccgcagttggg

SEQ ID NO: 498071 - DNA, 29 bp, Artificial Sequence
  Synthetic oligonucleotide
ttgtgtaggtttactcatctactgttggg

SEQ ID NO: 498072 - DNA, 30 bp, Artificial Sequence
  Synthetic oligonucleotide
tttgcttcgctggtgacgggtcgtgttggg

SEQ ID NO: 498073 - DNA, 30 bp, Artificial Sequence
  Synthetic oligonucleotide
ttaaatgttcagtcagcctggtttgttggg

SEQ ID NO: 498074 - DNA, 30 bp, Artificial Sequence
  Synthetic oligonucleotide
aaaattctcacgaacgccgttgaatttggg

SEQ ID NO: 498075 - DNA, 30 bp, Artificial Sequence
  Synthetic oligonucleotide
taagtgcttcatatccccagtaggtttggg

SEQ ID NO: 498076 - DNA, 30 bp, Artificial Sequence
  Synthetic oligonucleotide
aacagtacgtggaaaccaaccaattttggg

SEQ ID NO: 498077 - DNA, 30 bp, Artificial Sequence
  Synthetic oligonucleotide
agccataattgtccttatgcagccaaatgg

SEQ ID NO: 498078 - DNA, 30 bp, Artificial Sequence
  Synthetic oligonucleotide
tgggtttgcaccaagaaatgatgcaaatgg

SEQ ID NO: 498079 - DNA, 30 bp, Artificial Sequence
  Synthetic oligonucleotide
aaagacgcctcctgaggcgctctcaaatgg

SEQ ID NO: 498080 - DNA, 30 bp, Artificial Sequence
  Synthetic oligonucleotide
tatacccaagcgaacaaatatggacaatgg

SEQ ID NO: 498081 - DNA, 30 bp, Artificial Sequence
  Synthetic oligonucleotide
tgggttcttcgctaccgccaaagccaatgg

SEQ ID NO: 498082 - DNA, 30 bp, Artificial Sequence
  Synthetic oligonucleotide
cattgcccctaaataaaccgagtgcaatgg

SEQ ID NO: 498083 - DNA, 30 bp, Artificial Sequence
  Synthetic oligonucleotide
gttcagcagctggttgctaataatcaatgg

SEQ ID NO: 498084 - DNA, 30 bp, Artificial Sequence
  Synthetic oligonucleotide
tcacttcggttagaccgaagtaatcaatgg

SEQ ID NO: 498085 - DNA, 30 bp, Artificial Sequence
  Synthetic oligonucleotide
tttgacgcatgatcacacatagatcaatgg

SEQ ID NO: 498086 - DNA, 30 bp, Artificial Sequence
  Synthetic oligonucleotide
gccctctgtgttactttttttagtcaatgg

SEQ ID NO: 498087 - DNA, 30 bp, Artificial Sequence
  Synthetic oligonucleotide
cgtaatttgcgcaaatcaacaattcaatgg

SEQ ID NO: 498088 - DNA, 30 bp, Artificial Sequence
  Synthetic oligonucleotide
gctgagccgatgttgagccggatagaatgg

SEQ ID NO: 498089 - DNA, 30 bp, Artificial Sequence
  Synthetic oligonucleotide
ctctcgatccagccggagcacgccgaatgg

SEQ ID NO: 498090 - DNA, 30 bp, Artificial Sequence
  Synthetic oligonucleotide
cggtggaaaaagccgaccggatcggaatgg

SEQ ID NO: 498091 - DNA, 30 bp, Artificial Sequence
  Synthetic oligonucleotide
ttgtcatcgctcgcccattgcaatgaatgg

SEQ ID NO: 498092 - DNA, 30 bp, Artificial Sequence
  Synthetic oligonucleotide
aattctacgctcattaagtccacctaatgg

SEQ ID NO: 498093 - DNA, 30 bp, Artificial Sequence
  Synthetic oligonucleotide
agaatatatgggcggatccggttttaatgg

SEQ ID NO: 498094 - DNA, 30 bp, Artificial Sequence
  Synthetic oligonucleotide
cctgtaggccccggggttatccccacatgg

SEQ ID NO: 498095 - DNA, 30 bp, Artificial Sequence
  Synthetic oligonucleotide
gttaaccgtgtggagttcactatcacatgg

SEQ ID NO: 498096 - DNA, 30 bp, Artificial Sequence
  Synthetic oligonucleotide
ttattggcgcattaacacatggagacatgg

SEQ ID NO: 498097 - DNA, 30 bp, Artificial Sequence
  Synthetic oligonucleotide
ggccgtatggacgcccgtccccggacatgg

SEQ ID NO: 498098 - DNA, 30 bp, Artificial Sequence
  Synthetic oligonucleotide
atattcgggcctttaggaggatggacatgg

SEQ ID NO: 498099 - DNA, 30 bp, Artificial Sequence
  Synthetic oligonucleotide
ttaacgcaggacccatattactggacatgg

SEQ ID NO: 498100 - DNA, 26 bp, Artificial Sequence
  Synthetic oligonucleotide
tttagttccacgtgcttctgacatgg

SEQ ID NO: 498101 - DNA, 30 bp, Artificial Sequence
  Synthetic oligonucleotide
aactagcgtacagaacgtcaacacgcatgg

SEQ ID NO: 498102 - DNA, 30 bp, Artificial Sequence
  Synthetic oligonucleotide
atgaaagtacaagacccatgagacgcatgg

SEQ ID NO: 498103 - DNA, 30 bp, Artificial Sequence
  Synthetic oligonucleotide
gtattagcgatgctaatacttgtcgcatgg

SEQ ID NO: 498104 - DNA, 30 bp, Artificial Sequence
  Synthetic oligonucleotide
tgtcatatgtgcccaaatagataaagatgg

SEQ ID NO: 498105 - DNA, 30 bp, Artificial Sequence
  Synthetic oligonucleotide
cgagtcgtaagcggagaacgatacagatgg

SEQ ID NO: 498106 - DNA, 30 bp, Artificial Sequence
  Synthetic oligonucleotide
aaacaagcactgttgccagcacccagatgg

SEQ ID NO: 498107 - DNA, 30 bp, Artificial Sequence
  Synthetic oligonucleotide
aattcgatactcgaagcgttggtgagatgg

SEQ ID NO: 498108 - DNA, 30 bp, Artificial Sequence
  Synthetic oligonucleotide
aagacgtaggtattaggtatgcatagatgg

SEQ ID NO: 498109 - DNA, 30 bp, Artificial Sequence
  Synthetic oligonucleotide
cgtctttttacgctggcgccgcttagatgg

SEQ ID NO: 498110 - DNA, 30 bp, Artificial Sequence
  Synthetic oligonucleotide
gtgaagtggtttaggagcctaatacgatgg

SEQ ID NO: 498111 - DNA, 30 bp, Artificial Sequence
  Synthetic oligonucleotide
ctattacggagctgttaacgattccgatgg

SEQ ID NO: 498112 - DNA, 30 bp, Artificial Sequence
  Synthetic oligonucleotide
attttcctcgaccttggtcgagggcgatgg

SEQ ID NO: 498113 - DNA, 30 bp, Artificial Sequence
  Synthetic oligonucleotide
tgaggtagttcgcagcaactgagtcgatgg

SEQ ID NO: 498114 - DNA, 30 bp, Artificial Sequence
  Synthetic oligonucleotide
aaatgacgaagacacaacgtaggtcgatgg

SEQ ID NO: 498115 - DNA, 30 bp, Artificial Sequence
  Synthetic oligonucleotide
tcgatcggcgcaggtgcgcagcccggatgg

SEQ ID NO: 498116 - DNA, 30 bp, Artificial Sequence
  Synthetic oligonucleotide
catttaataatctggtagctgtggggatgg

SEQ ID NO: 498117 - DNA, 30 bp, Artificial Sequence
  Synthetic oligonucleotide
cctttttttttaatcagtttatttggatgg

SEQ ID NO: 498118 - DNA, 30 bp, Artificial Sequence
  Synthetic oligonucleotide
tctgcgctcgttctcattccgccatgatgg

SEQ ID NO: 498119 - DNA, 30 bp, Artificial Sequence
  Synthetic oligonucleotide
gccaattactaaaactctggagactgatgg

SEQ ID NO: 498120 - DNA, 30 bp, Artificial Sequence
  Synthetic oligonucleotide
ctaccatctcaactgtttccttggtgatgg

SEQ ID NO: 498121 - DNA, 30 bp, Artificial Sequence
  Synthetic oligonucleotide
ttttaacgttacgatcaacgcgacatatgg

SEQ ID NO: 498122 - DNA, 30 bp, Artificial Sequence
  Synthetic oligonucleotide
gcatgtaccctttttctgtaacgcatatgg

SEQ ID NO: 498123 - DNA, 30 bp, Artificial Sequence
  Synthetic oligonucleotide
tcccaaggtgtacctctagtcttgatatgg

SEQ ID NO: 498124 - DNA, 30 bp, Artificial Sequence
  Synthetic oligonucleotide
atccaggccggagcttcgttaaatatatgg

SEQ ID NO: 498125 - DNA, 30 bp, Artificial Sequence
  Synthetic oligonucleotide
cccggttacgcgaatcaacagcgtatatgg

SEQ ID NO: 498126 - DNA, 30 bp, Artificial Sequence
  Synthetic oligonucleotide
cttccccctcaggtaggtccttaactatgg

SEQ ID NO: 498127 - DNA, 30 bp, Artificial Sequence
  Synthetic oligonucleotide
ttgctaaacgtatacaagattatactatgg

SEQ ID NO: 498128 - DNA, 30 bp, Artificial Sequence
  Synthetic oligonucleotide
tcaattttttcgttaagtaaagtcctatgg

SEQ ID NO: 498129 - DNA, 30 bp, Artificial Sequence
  Synthetic oligonucleotide
ggagaatgatcgtttatggcaaagctatgg

SEQ ID NO: 498130 - DNA, 30 bp, Artificial Sequence
  Synthetic oligonucleotide
gcagttttctttttctttttgaaagtatgg

SEQ ID NO: 498131 - DNA, 30 bp, Artificial Sequence
  Synthetic oligonucleotide
ccgggaacgtcagcaagagtgtgcgtatgg

SEQ ID NO: 498132 - DNA, 30 bp, Artificial Sequence
  Synthetic oligonucleotide
aacagcttgtagggtaatgatgtggtatgg

SEQ ID NO: 498133 - DNA, 30 bp, Artificial Sequence
  Synthetic oligonucleotide
catacagtgataaccgttcaggttgtatgg

SEQ ID NO: 498134 - DNA, 30 bp, Artificial Sequence
  Synthetic oligonucleotide
gaattaacgtagacatccactgttgtatgg

SEQ ID NO: 498135 - DNA, 30 bp, Artificial Sequence
  Synthetic oligonucleotide
tccatgatcgatgttcacgcatacttatgg

SEQ ID NO: 498136 - DNA, 30 bp, Artificial Sequence
  Synthetic oligonucleotide
tcgttaagatatgcagctcacgtcttatgg

SEQ ID NO: 498137 - DNA, 30 bp, Artificial Sequence
  Synthetic oligonucleotide
ttcacatccggtgaagactagacgttatgg

SEQ ID NO: 498138 - DNA, 30 bp, Artificial Sequence
  Synthetic oligonucleotide
tatgtgctaatagcttcgagccatttatgg

SEQ ID NO: 498139 - DNA, 30 bp, Artificial Sequence
  Synthetic oligonucleotide
cggtcctctacgcgggatctagatttatgg

SEQ ID NO: 498140 - DNA, 30 bp, Artificial Sequence
  Synthetic oligonucleotide
atttgggggcgcttccctattgatttatgg

SEQ ID NO: 498141 - DNA, 30 bp, Artificial Sequence
  Synthetic oligonucleotide
acgccctctatttaaagataatatttatgg

SEQ ID NO: 498142 - DNA, 30 bp, Artificial Sequence
  Synthetic oligonucleotide
aagagttccaattagatgtgctgtttatgg

SEQ ID NO: 498143 - DNA, 30 bp, Artificial Sequence
  Synthetic oligonucleotide
gtgccctcagtcacgcccatttccaactgg

SEQ ID NO: 498144 - DNA, 30 bp, Artificial Sequence
  Synthetic oligonucleotide
catgagcgacagcgtgcaagcactaactgg

SEQ ID NO: 498145 - DNA, 30 bp, Artificial Sequence
  Synthetic oligonucleotide
ctcatcttaacagaattgatgagagactgg

SEQ ID NO: 498146 - DNA, 30 bp, Artificial Sequence
  Synthetic oligonucleotide
cactcgagtgaccgcaacgaccagacctgg

SEQ ID NO: 498147 - DNA, 30 bp, Artificial Sequence
  Synthetic oligonucleotide
ggtgaaggttcgccagagggccccccctgg

SEQ ID NO: 498148 - DNA, 30 bp, Artificial Sequence
  Synthetic oligonucleotide
atatgcatgagtatagtccgtaggccctgg

SEQ ID NO: 498149 - DNA, 30 bp, Artificial Sequence
  Synthetic oligonucleotide
tatttgactccattctttcgagatgcctgg

SEQ ID NO: 498150 - DNA, 30 bp, Artificial Sequence
  Synthetic oligonucleotide
ggatgttacggtccaggttctcctgcctgg

SEQ ID NO: 498151 - DNA, 30 bp, Artificial Sequence
  Synthetic oligonucleotide
gtggttcttatccagggtctaaagtcctgg

SEQ ID NO: 498152 - DNA, 30 bp, Artificial Sequence
  Synthetic oligonucleotide
ccgataataacgaaggccaaagagagctgg

SEQ ID NO: 498153 - DNA, 30 bp, Artificial Sequence
  Synthetic oligonucleotide
aaccgaggtcaagcgaaggtttggagctgg

SEQ ID NO: 498154 - DNA, 30 bp, Artificial Sequence
  Synthetic oligonucleotide
acccagatttgtttcgcacatcaacgctgg

SEQ ID NO: 498155 - DNA, 30 bp, Artificial Sequence
  Synthetic oligonucleotide
cagaatcactatagccacggtcgacgctgg

SEQ ID NO: 498156 - DNA, 30 bp, Artificial Sequence
  Synthetic oligonucleotide
cagtagccgtgtactcacatgggacgctgg

SEQ ID NO: 498157 - DNA, 30 bp, Artificial Sequence
  Synthetic oligonucleotide
tagttgataccctacccggtctcaggctgg

SEQ ID NO: 498158 - DNA, 30 bp, Artificial Sequence
  Synthetic oligonucleotide
cagcttcgcggtcccgtaattcgaggctgg

SEQ ID NO: 498159 - DNA, 31 bp, Artificial Sequence
  Synthetic oligonucleotide
atgtattgaggtgtttggcgcaggaggctgg

SEQ ID NO: 498160 - DNA, 30 bp, Artificial Sequence
  Synthetic oligonucleotide
tcgcagctacagtagcgtcggagcggctgg

SEQ ID NO: 498161 - DNA, 30 bp, Artificial Sequence
  Synthetic oligonucleotide
ccgacgtcgcgtgaattccgacgcggctgg

SEQ ID NO: 498162 - DNA, 30 bp, Artificial Sequence
  Synthetic oligonucleotide
aggatctcgtggctcaagttattcggctgg

SEQ ID NO: 498163 - DNA, 30 bp, Artificial Sequence
  Synthetic oligonucleotide
gccccgcgaacacgcaaatcgtggggctgg

SEQ ID NO: 498164 - DNA, 30 bp, Artificial Sequence
  Synthetic oligonucleotide
atgttccttcaatcatgaggatgatgctgg

SEQ ID NO: 498165 - DNA, 30 bp, Artificial Sequence
  Synthetic oligonucleotide
tattatactatcattggccaaagctgctgg

SEQ ID NO: 498166 - DNA, 30 bp, Artificial Sequence
  Synthetic oligonucleotide
gtcgcaagctagatcctgcttgtttgctgg

SEQ ID NO: 498167 - DNA, 30 bp, Artificial Sequence
  Synthetic oligonucleotide
accctttgaccataaccctacgagatctgg

SEQ ID NO: 498168 - DNA, 30 bp, Artificial Sequence
  Synthetic oligonucleotide
cagcagcccggcagcctaaggtcgatctgg

SEQ ID NO: 498169 - DNA, 30 bp, Artificial Sequence
  Synthetic oligonucleotide
taaaaggcataggctttagcgcggatctgg

SEQ ID NO: 498170 - DNA, 30 bp, Artificial Sequence
  Synthetic oligonucleotide
gacaccgtagtctgaacttagactatctgg

SEQ ID NO: 498171 - DNA, 30 bp, Artificial Sequence
  Synthetic oligonucleotide
ctcgccatatatatccgtaatcctatctgg

SEQ ID NO: 498172 - DNA, 30 bp, Artificial Sequence
  Synthetic oligonucleotide
agaatgtgtatgaaagccttgttactctgg

SEQ ID NO: 498173 - DNA, 30 bp, Artificial Sequence
  Synthetic oligonucleotide
cgctattatccagaggaaacggtcctctgg

SEQ ID NO: 498174 - DNA, 30 bp, Artificial Sequence
  Synthetic oligonucleotide
attcttctcttggcccaaaagtcgctctgg

SEQ ID NO: 498175 - DNA, 30 bp, Artificial Sequence
  Synthetic oligonucleotide
ctatgcccggctcctgtcgaagggctctgg

SEQ ID NO: 498176 - DNA, 30 bp, Artificial Sequence
  Synthetic oligonucleotide
atgattctaattgcacaggaaaatctctgg

SEQ ID NO: 498177 - DNA, 30 bp, Artificial Sequence
  Synthetic oligonucleotide
cccctattcgagtaatacaagcatctctgg

SEQ ID NO: 498178 - DNA, 30 bp, Artificial Sequence
  Synthetic oligonucleotide
agggggaagagcttagttacttaagtctgg

SEQ ID NO: 498179 - DNA, 30 bp, Artificial Sequence
  Synthetic oligonucleotide
catttaagtcataaggtgacaggggtctgg

SEQ ID NO: 498180 - DNA, 30 bp, Artificial Sequence
  Synthetic oligonucleotide
tttagtgtggtattatgggagcacttctgg

SEQ ID NO: 498181 - DNA, 30 bp, Artificial Sequence
  Synthetic oligonucleotide
ggcccagacccgagtgcctacgggttctgg

SEQ ID NO: 498182 - DNA, 30 bp, Artificial Sequence
  Synthetic oligonucleotide
caacaatacaatttacttaagtgtttctgg

SEQ ID NO: 498183 - DNA, 30 bp, Artificial Sequence
  Synthetic oligonucleotide
ccacatttgcccaagtttagaacaaagtgg

SEQ ID NO: 498184 - DNA, 30 bp, Artificial Sequence
  Synthetic oligonucleotide
actttagacgcgggatcaaaatgaaagtgg

SEQ ID NO: 498185 - DNA, 30 bp, Artificial Sequence
  Synthetic oligonucleotide
tggttgggcagtacaccatttgagaagtgg

SEQ ID NO: 498186 - DNA, 30 bp, Artificial Sequence
  Synthetic oligonucleotide
tatatttcttcaaacctgggattgaagtgg

SEQ ID NO: 498187 - DNA, 30 bp, Artificial Sequence
  Synthetic oligonucleotide
tgaagtcattcggcccagcaccgtaagtgg

SEQ ID NO: 498188 - DNA, 30 bp, Artificial Sequence
  Synthetic oligonucleotide
taacgggtggcttcacagatggcgcagtgg

SEQ ID NO: 498189 - DNA, 30 bp, Artificial Sequence
  Synthetic oligonucleotide
aacttggaacccggattcagactgcagtgg

SEQ ID NO: 498190 - DNA, 30 bp, Artificial Sequence
  Synthetic oligonucleotide
ccaaatcggcaccttagttcccatcagtgg

SEQ ID NO: 498191 - DNA, 30 bp, Artificial Sequence
  Synthetic oligonucleotide
gcgagggtagaaccctacgctgatcagtgg

SEQ ID NO: 498192 - DNA, 30 bp, Artificial Sequence
  Synthetic oligonucleotide
ggaagtatgcagtaatcctcagaagagtgg

SEQ ID NO: 498193 - DNA, 30 bp, Artificial Sequence
  Synthetic oligonucleotide
gccagcgcctcatgttattaacgagagtgg

SEQ ID NO: 498194 - DNA, 30 bp, Artificial Sequence
  Synthetic oligonucleotide
attttatatcgatgtgttaacgacgagtgg

SEQ ID NO: 498195 - DNA, 30 bp, Artificial Sequence
  Synthetic oligonucleotide
gtatatctgcgaataacggttgccgagtgg

SEQ ID NO: 498196 - DNA, 30 bp, Artificial Sequence
  Synthetic oligonucleotide
tgaccaaaggcctcgggcccctccgagtgg

SEQ ID NO: 498197 - DNA, 30 bp, Artificial Sequence
  Synthetic oligonucleotide
tttctcgggatgcaccttaagttatagtgg

SEQ ID NO: 498198 - DNA, 30 bp, Artificial Sequence
  Synthetic oligonucleotide
cccaggggggtcagctgccggcactagtgg

SEQ ID NO: 498199 - DNA, 30 bp, Artificial Sequence
  Synthetic oligonucleotide
atgctcccatgcctataactaggctagtgg

SEQ ID NO: 498200 - DNA, 30 bp, Artificial Sequence
  Synthetic oligonucleotide
atttacctttcattaaacaagaagtagtgg

SEQ ID NO: 498201 - DNA, 29 bp, Artificial Sequence
  Synthetic oligonucleotide
actgtagcgtgtgctgggtcgagtagtgg

SEQ ID NO: 498202 - DNA, 30 bp, Artificial Sequence
  Synthetic oligonucleotide
ttggtgttaaaagggcggattacgtagtgg

SEQ ID NO: 498203 - DNA, 30 bp, Artificial Sequence
  Synthetic oligonucleotide
acgtgctactgcctgccgcagtgaacgtgg

SEQ ID NO: 498204 - DNA, 30 bp, Artificial Sequence
  Synthetic oligonucleotide
cccgggctggacacttgcttgataacgtgg

SEQ ID NO: 498205 - DNA, 30 bp, Artificial Sequence
  Synthetic oligonucleotide
ctacatagagtgtgtcccggagagacgtgg

SEQ ID NO: 498206 - DNA, 30 bp, Artificial Sequence
  Synthetic oligonucleotide
cttgtagaagcaagcacctttattacgtgg

SEQ ID NO: 498207 - DNA, 30 bp, Artificial Sequence
  Synthetic oligonucleotide
tctggtactgagcaggcgcttgcggcgtgg

SEQ ID NO: 498208 - DNA, 30 bp, Artificial Sequence
  Synthetic oligonucleotide
gtaaacccggagacactggtacgggcgtgg

SEQ ID NO: 498209 - DNA, 30 bp, Artificial Sequence
  Synthetic oligonucleotide
gcttctgggagatgcgagtcgcgggcgtgg

SEQ ID NO: 498210 - DNA, 30 bp, Artificial Sequence
  Synthetic oligonucleotide
tggcgttagacccgcctcctatgggcgtgg

SEQ ID NO: 498211 - DNA, 30 bp, Artificial Sequence
  Synthetic oligonucleotide
cttctcagcatcttatgcgttaatgcgtgg

SEQ ID NO: 498212 - DNA, 30 bp, Artificial Sequence
  Synthetic oligonucleotide
cataaagcccggaagggagggtgtgcgtgg

SEQ ID NO: 498213 - DNA, 30 bp, Artificial Sequence
  Synthetic oligonucleotide
gaataggcataaacctcgccacttgcgtgg

SEQ ID NO: 498214 - DNA, 30 bp, Artificial Sequence
  Synthetic oligonucleotide
cttgagcgtttggtagcaacctttgcgtgg

SEQ ID NO: 498215 - DNA, 30 bp, Artificial Sequence
  Synthetic oligonucleotide
tcgggcggtttggtggtgcacgaatcgtgg

SEQ ID NO: 498216 - DNA, 30 bp, Artificial Sequence
  Synthetic oligonucleotide
atacgggtatactatggcaacggctcgtgg

SEQ ID NO: 498217 - DNA, 30 bp, Artificial Sequence
  Synthetic oligonucleotide
actataaatgctttaatctatatttcgtgg

SEQ ID NO: 498218 - DNA, 30 bp, Artificial Sequence
  Synthetic oligonucleotide
acgattaaggcgtagtgataagaaaggtgg

SEQ ID NO: 498219 - DNA, 30 bp, Artificial Sequence
  Synthetic oligonucleotide
agataggcgaatataagttatggaaggtgg

SEQ ID NO: 498220 - DNA, 30 bp, Artificial Sequence
  Synthetic oligonucleotide
tctcggcgcccttggtcggctgcgaggtgg

SEQ ID NO: 498221 - DNA, 30 bp, Artificial Sequence
  Synthetic oligonucleotide
aaaaattttacaattccagaaaggaggtgg

SEQ ID NO: 498222 - DNA, 30 bp, Artificial Sequence
  Synthetic oligonucleotide
tcggcgtatgggactccgagaaaacggtgg

SEQ ID NO: 498223 - DNA, 30 bp, Artificial Sequence
  Synthetic oligonucleotide
taaaccacatagtagtctggcgaacggtgg

SEQ ID NO: 498224 - DNA, 30 bp, Artificial Sequence
  Synthetic oligonucleotide
ctctgctcagccttactgcaaacacggtgg

SEQ ID NO: 498225 - DNA, 30 bp, Artificial Sequence
  Synthetic oligonucleotide
acacattaaatttgggggcctactcggtgg

SEQ ID NO: 498226 - DNA, 30 bp, Artificial Sequence
  Synthetic oligonucleotide
cctagaccgagcactacgcaaattcggtgg

SEQ ID NO: 498227 - DNA, 30 bp, Artificial Sequence
  Synthetic oligonucleotide
gcgcccttaggtaaatcgatcgccgggtgg

SEQ ID NO: 498228 - DNA, 30 bp, Artificial Sequence
  Synthetic oligonucleotide
aggcggatgcgtgaattccgtgcggggtgg

SEQ ID NO: 498229 - DNA, 30 bp, Artificial Sequence
  Synthetic oligonucleotide
aggaagggcggtgttaagtgagaatggtgg

SEQ ID NO: 498230 - DNA, 30 bp, Artificial Sequence
  Synthetic oligonucleotide
ggcagtgcactaaacggctctgagtggtgg

SEQ ID NO: 498231 - DNA, 30 bp, Artificial Sequence
  Synthetic oligonucleotide
gaaattttggcggagaattacaaaatgtgg

SEQ ID NO: 498232 - DNA, 30 bp, Artificial Sequence
  Synthetic oligonucleotide
tgccgtatttgtcgcaccccataaatgtgg

SEQ ID NO: 498233 - DNA, 30 bp, Artificial Sequence
  Synthetic oligonucleotide
gtacccaacgatttttacattagaatgtgg

SEQ ID NO: 498234 - DNA, 30 bp, Artificial Sequence
  Synthetic oligonucleotide
tgttgtagatgcaaaaagcgtaacatgtgg

SEQ ID NO: 498235 - DNA, 31 bp, Artificial Sequence
  Synthetic oligonucleotide
ttctttaacatgggttttgacatgcatgtgg

SEQ ID NO: 498236 - DNA, 30 bp, Artificial Sequence
  Synthetic oligonucleotide
gccatgagacgtgacaccggaaagatgtgg

SEQ ID NO: 498237 - DNA, 30 bp, Artificial Sequence
  Synthetic oligonucleotide
ttgacacccggaacgagacaacagatgtgg

SEQ ID NO: 498238 - DNA, 30 bp, Artificial Sequence
  Synthetic oligonucleotide
catgagaggggcctaagacttcttatgtgg

SEQ ID NO: 498239 - DNA, 31 bp, Artificial Sequence
  Synthetic oligonucleotide
tactgggcaaaatgcacagaagcacctgtgg

SEQ ID NO: 498240 - DNA, 30 bp, Artificial Sequence
  Synthetic oligonucleotide
atcaataatattctgcctggaggtctgtgg

SEQ ID NO: 498241 - DNA, 30 bp, Artificial Sequence
  Synthetic oligonucleotide
ttttgaatgatagattaagggtttctgtgg

SEQ ID NO: 498242 - DNA, 30 bp, Artificial Sequence
  Synthetic oligonucleotide
ccggcataagtgatttcagtggcagtgtgg

SEQ ID NO: 498243 - DNA, 30 bp, Artificial Sequence
  Synthetic oligonucleotide
cgcgtgttcgcggtaccgtgtgcagtgtgg

SEQ ID NO: 498244 - DNA, 30 bp, Artificial Sequence
  Synthetic oligonucleotide
gacgaagtcactaaacggcgccccgtgtgg

SEQ ID NO: 498245 - DNA, 30 bp, Artificial Sequence
  Synthetic oligonucleotide
gttacgcttaaactttatgccagcgtgtgg

SEQ ID NO: 498246 - DNA, 30 bp, Artificial Sequence
  Synthetic oligonucleotide
ggagtattttcgaggtggtcaaaggtgtgg

SEQ ID NO: 498247 - DNA, 30 bp, Artificial Sequence
  Synthetic oligonucleotide
gtatgtttatcgttaggggcgttggtgtgg

SEQ ID NO: 498248 - DNA, 30 bp, Artificial Sequence
  Synthetic oligonucleotide
tatgtgctattggagatattgccattgtgg

SEQ ID NO: 498249 - DNA, 30 bp, Artificial Sequence
  Synthetic oligonucleotide
attcttaccagcaccaaccgtctattgtgg

SEQ ID NO: 498250 - DNA, 30 bp, Artificial Sequence
  Synthetic oligonucleotide
tcgtctttgattatgcgccacttattgtgg

SEQ ID NO: 498251 - DNA, 30 bp, Artificial Sequence
  Synthetic oligonucleotide
ttataaatgtgaatagactttggcttgtgg

SEQ ID NO: 498252 - DNA, 30 bp, Artificial Sequence
  Synthetic oligonucleotide
ttttgtgaacgttagaatttgcggttgtgg

SEQ ID NO: 498253 - DNA, 30 bp, Artificial Sequence
  Synthetic oligonucleotide
gcctggtaccaggtgcaggtgttgttgtgg

SEQ ID NO: 498254 - DNA, 30 bp, Artificial Sequence
  Synthetic oligonucleotide
ccatccgatattaattacacataaaattgg

SEQ ID NO: 498255 - DNA, 30 bp, Artificial Sequence
  Synthetic oligonucleotide
gtagcaccccgatcttaagttcacaattgg

SEQ ID NO: 498256 - DNA, 30 bp, Artificial Sequence
  Synthetic oligonucleotide
atgacgacgaccaacgccgtagtcaattgg

SEQ ID NO: 498257 - DNA, 30 bp, Artificial Sequence
  Synthetic oligonucleotide
ctgagtcgtccctggactctggataattgg

SEQ ID NO: 498258 - DNA, 30 bp, Artificial Sequence
  Synthetic oligonucleotide
cgcacatattagacgggtctgtctaattgg

SEQ ID NO: 498259 - DNA, 30 bp, Artificial Sequence
  Synthetic oligonucleotide
aattttacataaattaagacggtccattgg

SEQ ID NO: 498260 - DNA, 30 bp, Artificial Sequence
  Synthetic oligonucleotide
ggttctttggggcgttataaacagcattgg

SEQ ID NO: 498261 - DNA, 30 bp, Artificial Sequence
  Synthetic oligonucleotide
tgaggcaagagcgataaagggcctcattgg

SEQ ID NO: 498262 - DNA, 30 bp, Artificial Sequence
  Synthetic oligonucleotide
atttggcaggcggactgaagcattcattgg

SEQ ID NO: 498263 - DNA, 30 bp, Artificial Sequence
  Synthetic oligonucleotide
aatgttatcacgggcgctccagacgattgg

SEQ ID NO: 498264 - DNA, 30 bp, Artificial Sequence
  Synthetic oligonucleotide
aaggttgaacggcagtacacgctcgattgg

SEQ ID NO: 498265 - DNA, 30 bp, Artificial Sequence
  Synthetic oligonucleotide
gctagcgtattgtgaacttagacggattgg

SEQ ID NO: 498266 - DNA, 30 bp, Artificial Sequence
  Synthetic oligonucleotide
aggaatacccaacagatgattacggattgg

SEQ ID NO: 498267 - DNA, 30 bp, Artificial Sequence
  Synthetic oligonucleotide
gtttttacgggagctcagatcaattattgg

SEQ ID NO: 498268 - DNA, 30 bp, Artificial Sequence
  Synthetic oligonucleotide
ggaaagatgagcttgagaacaaggacttgg

SEQ ID NO: 498269 - DNA, 30 bp, Artificial Sequence
  Synthetic oligonucleotide
cccctaacaaaggcacgagcccatacttgg

SEQ ID NO: 498270 - DNA, 30 bp, Artificial Sequence
  Synthetic oligonucleotide
atctcgaatgtttagtatatgataccttgg

SEQ ID NO: 498271 - DNA, 30 bp, Artificial Sequence
  Synthetic oligonucleotide
ttcttaacctgccagactagtgtaccttgg

SEQ ID NO: 498272 - DNA, 30 bp, Artificial Sequence
  Synthetic oligonucleotide
tacatttagagcgggaaatgcactccttgg

SEQ ID NO: 498273 - DNA, 30 bp, Artificial Sequence
  Synthetic oligonucleotide
gacgctccactatgagattggagtccttgg

SEQ ID NO: 498274 - DNA, 30 bp, Artificial Sequence
  Synthetic oligonucleotide
ccaaggcaacaagtagtgggatttccttgg

SEQ ID NO: 498275 - DNA, 30 bp, Artificial Sequence
  Synthetic oligonucleotide
agctttacaacaccgtaggtgtaagcttgg

SEQ ID NO: 498276 - DNA, 30 bp, Artificial Sequence
  Synthetic oligonucleotide
ttgatattagctcgcaccaaacacgcttgg

SEQ ID NO: 498277 - DNA, 30 bp, Artificial Sequence
  Synthetic oligonucleotide
actcccatacccgttgagacgcaatcttgg

SEQ ID NO: 498278 - DNA, 30 bp, Artificial Sequence
  Synthetic oligonucleotide
ttacttgattgcaggtcgccatgatcttgg

SEQ ID NO: 498279 - DNA, 30 bp, Artificial Sequence
  Synthetic oligonucleotide
gcacagtaccttctctggaagggctcttgg

SEQ ID NO: 498280 - DNA, 30 bp, Artificial Sequence
  Synthetic oligonucleotide
caatgcaggtctgctcattgttggtcttgg

SEQ ID NO: 498281 - DNA, 30 bp, Artificial Sequence
  Synthetic oligonucleotide
taatagtatgcgcccgtctgactcagttgg

SEQ ID NO: 498282 - DNA, 30 bp, Artificial Sequence
  Synthetic oligonucleotide
ccccggtcctaatatagggatcggagttgg

SEQ ID NO: 498283 - DNA, 30 bp, Artificial Sequence
  Synthetic oligonucleotide
ccgatgtagatatcaactggccaccgttgg

SEQ ID NO: 498284 - DNA, 30 bp, Artificial Sequence
  Synthetic oligonucleotide
accgtgttctcttgttcaagacgccgttgg

SEQ ID NO: 498285 - DNA, 30 bp, Artificial Sequence
  Synthetic oligonucleotide
taaaagatatgctagccatcgctgtgttgg

SEQ ID NO: 498286 - DNA, 30 bp, Artificial Sequence
  Synthetic oligonucleotide
caatcgcatagtagtattgtggattgttgg

SEQ ID NO: 498287 - DNA, 30 bp, Artificial Sequence
  Synthetic oligonucleotide
caagcttggttcgacgaaaacaaaatttgg

SEQ ID NO: 498288 - DNA, 30 bp, Artificial Sequence
  Synthetic oligonucleotide
acttagaaaatacgtcaagagccaatttgg

SEQ ID NO: 498289 - DNA, 30 bp, Artificial Sequence
  Synthetic oligonucleotide
gcaactactgccatcacagctccaatttgg

SEQ ID NO: 498290 - DNA, 30 bp, Artificial Sequence
  Synthetic oligonucleotide
tatagtcgaggagtacgtgcgtagatttgg

SEQ ID NO: 498291 - DNA, 30 bp, Artificial Sequence
  Synthetic oligonucleotide
tacccacttgattagggatcagatatttgg

SEQ ID NO: 498292 - DNA, 30 bp, Artificial Sequence
  Synthetic oligonucleotide
caacctccctgcggcagcatacttatttgg

SEQ ID NO: 498293 - DNA, 30 bp, Artificial Sequence
  Synthetic oligonucleotide
ctctctcgaatcgctcacacgcaactttgg

SEQ ID NO: 498294 - DNA, 30 bp, Artificial Sequence
  Synthetic oligonucleotide
gcccatcaagtgcagcacctgccactttgg

SEQ ID NO: 498295 - DNA, 30 bp, Artificial Sequence
  Synthetic oligonucleotide
gcccatatagtcgcaacgtatcgcctttgg

SEQ ID NO: 498296 - DNA, 30 bp, Artificial Sequence
  Synthetic oligonucleotide
gcgcacgagcctagtttttagggcctttgg

SEQ ID NO: 498297 - DNA, 30 bp, Artificial Sequence
  Synthetic oligonucleotide
cctatgacagaaggtaacacggcgctttgg

SEQ ID NO: 498298 - DNA, 30 bp, Artificial Sequence
  Synthetic oligonucleotide
atacgggcataggaagggcagactctttgg

SEQ ID NO: 498299 - DNA, 30 bp, Artificial Sequence
  Synthetic oligonucleotide
caggcctcgcagagagaggcgtctctttgg

SEQ ID NO: 498300 - DNA, 30 bp, Artificial Sequence
  Synthetic oligonucleotide
gttatttcacgggtatccaacaccgtttgg

SEQ ID NO: 498301 - DNA, 30 bp, Artificial Sequence
  Synthetic oligonucleotide
actttatgagcgaaggcaacacgcgtttgg

SEQ ID NO: 498302 - DNA, 30 bp, Artificial Sequence
  Synthetic oligonucleotide
agtgtagttattaagtcgtaggcggtttgg

SEQ ID NO: 498303 - DNA, 30 bp, Artificial Sequence
  Synthetic oligonucleotide
atgggggacagttgtagtgcaaatgtttgg

SEQ ID NO: 498304 - DNA, 31 bp, Artificial Sequence
  Synthetic oligonucleotide
gccgaggccccggggagtgttggatgtttgg

SEQ ID NO: 498305 - DNA, 30 bp, Artificial Sequence
  Synthetic oligonucleotide
aggaggcacatccacattttaggtgtttgg

SEQ ID NO: 498306 - DNA, 30 bp, Artificial Sequence
  Synthetic oligonucleotide
cacccaaatcggtttccgggttgtgtttgg

SEQ ID NO: 498307 - DNA, 30 bp, Artificial Sequence
  Synthetic oligonucleotide
aagagacttgatccggatgcgggattttgg

SEQ ID NO: 498308 - DNA, 30 bp, Artificial Sequence
  Synthetic oligonucleotide
aagtttattatacggaatggggcgttttgg

SEQ ID NO: 498309 - DNA, 30 bp, Artificial Sequence
  Synthetic oligonucleotide
tgttgccgttgataccgaccaactttttgg

SEQ ID NO: 498310 - DNA, 31 bp, Artificial Sequence
  Synthetic oligonucleotide
gtatgggtaagctatagatggctttttttgg

SEQ ID NO: 498311 - DNA, 30 bp, Artificial Sequence
  Synthetic oligonucleotide
gcgttcgagtccttcatcttcctaaaaatg

SEQ ID NO: 498312 - DNA, 30 bp, Artificial Sequence
  Synthetic oligonucleotide
gacgacgtcatggtagcagaacttaaaatg

SEQ ID NO: 498313 - DNA, 30 bp, Artificial Sequence
  Synthetic oligonucleotide
caaaccgccttatttgcagctgcacaaatg

SEQ ID NO: 498314 - DNA, 30 bp, Artificial Sequence
  Synthetic oligonucleotide
catcagacaaaatctaaagcaaagcaaatg

SEQ ID NO: 498315 - DNA, 30 bp, Artificial Sequence
  Synthetic oligonucleotide
gctcgcacattgcagcggaatgagcaaatg

SEQ ID NO: 498316 - DNA, 30 bp, Artificial Sequence
  Synthetic oligonucleotide
aacaagatatctagccgtgtgacgcaaatg

SEQ ID NO: 498317 - DNA, 30 bp, Artificial Sequence
  Synthetic oligonucleotide
caatatgcttgtgctttgctgatgcaaatg

SEQ ID NO: 498318 - DNA, 30 bp, Artificial Sequence
  Synthetic oligonucleotide
tgtggatggcaagcgtaacagccggaaatg

SEQ ID NO: 498319 - DNA, 30 bp, Artificial Sequence
  Synthetic oligonucleotide
gagactattcacaacgaagctcatgaaatg

SEQ ID NO: 498320 - DNA, 30 bp, Artificial Sequence
  Synthetic oligonucleotide
aatacagtgcgtaccggacgtgattaaatg

SEQ ID NO: 498321 - DNA, 30 bp, Artificial Sequence
  Synthetic oligonucleotide
tcctctagattttctttttacgtttaaatg

SEQ ID NO: 498322 - DNA, 30 bp, Artificial Sequence
  Synthetic oligonucleotide
cacggacagcatagcgaataagccacaatg

SEQ ID NO: 498323 - DNA, 30 bp, Artificial Sequence
  Synthetic oligonucleotide
tctgtatacaacgtagcagaatccacaatg

SEQ ID NO: 498324 - DNA, 30 bp, Artificial Sequence
  Synthetic oligonucleotide
aggagactacaatgtgagaaatagacaatg

SEQ ID NO: 498325 - DNA, 30 bp, Artificial Sequence
  Synthetic oligonucleotide
ctggtgagcgacatataaaccacgacaatg

SEQ ID NO: 498326 - DNA, 30 bp, Artificial Sequence
  Synthetic oligonucleotide
aacgtgtattataagtttatcttgacaatg

SEQ ID NO: 498327 - DNA, 30 bp, Artificial Sequence
  Synthetic oligonucleotide
tattttagtgatgaagaagctattacaatg

SEQ ID NO: 498328 - DNA, 30 bp, Artificial Sequence
  Synthetic oligonucleotide
ttttaggcgtgcagggtcatcgttacaatg

SEQ ID NO: 498329 - DNA, 30 bp, Artificial Sequence
  Synthetic oligonucleotide
ttggttttctgaatgtctatgagtccaatg

SEQ ID NO: 498330 - DNA, 30 bp, Artificial Sequence
  Synthetic oligonucleotide
acatttaattaaactaaaaaccgagcaatg

SEQ ID NO: 498331 - DNA, 30 bp, Artificial Sequence
  Synthetic oligonucleotide
acactcttccggtacgcaactctagcaatg

SEQ ID NO: 498332 - DNA, 30 bp, Artificial Sequence
  Synthetic oligonucleotide
ggccgataatgcaggtctttgggcgcaatg

SEQ ID NO: 498333 - DNA, 31 bp, Artificial Sequence
  Synthetic oligonucleotide
ggattagtttaggtcggcatactgggcaatg

SEQ ID NO: 498334 - DNA, 30 bp, Artificial Sequence
  Synthetic oligonucleotide
atggcttcaccttttgtaaacgttgcaatg

SEQ ID NO: 498335 - DNA, 30 bp, Artificial Sequence
  Synthetic oligonucleotide
ggacagcgcatgaagtccgtattatcaatg

SEQ ID NO: 498336 - DNA, 30 bp, Artificial Sequence
  Synthetic oligonucleotide
gacaactttagtataataatgttatcaatg

SEQ ID NO: 498337 - DNA, 30 bp, Artificial Sequence
  Synthetic oligonucleotide
ggtaaccatcttagattgcaacactcaatg

SEQ ID NO: 498338 - DNA, 30 bp, Artificial Sequence
  Synthetic oligonucleotide
taccggacccggcaagtatagcactcaatg

SEQ ID NO: 498339 - DNA, 30 bp, Artificial Sequence
  Synthetic oligonucleotide
atggccaaggttcgtacaacaaagtcaatg

SEQ ID NO: 498340 - DNA, 30 bp, Artificial Sequence
  Synthetic oligonucleotide
tacatggcgcatggtctcctggagtcaatg

SEQ ID NO: 498341 - DNA, 30 bp, Artificial Sequence
  Synthetic oligonucleotide
acccgcgacgtacttaaactaatttcaatg

SEQ ID NO: 498342 - DNA, 30 bp, Artificial Sequence
  Synthetic oligonucleotide
ggtgttgttgtcttgggatgtcaaagaatg

SEQ ID NO: 498343 - DNA, 30 bp, Artificial Sequence
  Synthetic oligonucleotide
gcatacgtctattgtgatgatagtagaatg

SEQ ID NO: 498344 - DNA, 30 bp, Artificial Sequence
  Synthetic oligonucleotide
tgtgattgattttatcctgtctttagaatg

SEQ ID NO: 498345 - DNA, 30 bp, Artificial Sequence
  Synthetic oligonucleotide
tggtcggtgcaggacacggggacacgaatg

SEQ ID NO: 498346 - DNA, 30 bp, Artificial Sequence
  Synthetic oligonucleotide
aagtgcgtagagcacgcaccgtagggaatg

SEQ ID NO: 498347 - DNA, 30 bp, Artificial Sequence
  Synthetic oligonucleotide
aattggacgcgttttggggctaggggaatg

SEQ ID NO: 498348 - DNA, 30 bp, Artificial Sequence
  Synthetic oligonucleotide
aattaaattcccatcgtcggtcagtgaatg

SEQ ID NO: 498349 - DNA, 30 bp, Artificial Sequence
  Synthetic oligonucleotide
tcacgcaactgggtgaacagcacaataatg

SEQ ID NO: 498350 - DNA, 30 bp, Artificial Sequence
  Synthetic oligonucleotide
tacgggtatagttggaacttcacaataatg

SEQ ID NO: 498351 - DNA, 30 bp, Artificial Sequence
  Synthetic oligonucleotide
gggttaccgttgtgactagtgtgaataatg

SEQ ID NO: 498352 - DNA, 30 bp, Artificial Sequence
  Synthetic oligonucleotide
aagtttcaagcgtaccagaacataataatg

SEQ ID NO: 498353 - DNA, 30 bp, Artificial Sequence
  Synthetic oligonucleotide
gtgctccctctgaagcaccggaccataatg

SEQ ID NO: 498354 - DNA, 30 bp, Artificial Sequence
  Synthetic oligonucleotide
ctaaggcgttgaaggatcgacgagataatg

SEQ ID NO: 498355 - DNA, 30 bp, Artificial Sequence
  Synthetic oligonucleotide
ccacaaggggcactgaacgccgggataatg

SEQ ID NO: 498356 - DNA, 30 bp, Artificial Sequence
  Synthetic oligonucleotide
aacctaaccatgttagcagcgggtataatg

SEQ ID NO: 498357 - DNA, 31 bp, Artificial Sequence
  Synthetic oligonucleotide
gatagccacgaagcccgccaccggtctaatg

SEQ ID NO: 498358 - DNA, 30 bp, Artificial Sequence
  Synthetic oligonucleotide
ggtgcacgctcgcagacccgcttagtaatg

SEQ ID NO: 498359 - DNA, 30 bp, Artificial Sequence
  Synthetic oligonucleotide
gaggctgtcttgacaagcgacgccgtaatg

SEQ ID NO: 498360 - DNA, 30 bp, Artificial Sequence
  Synthetic oligonucleotide
tgcatgcgatcggcgttttgtctcgtaatg

SEQ ID NO: 498361 - DNA, 30 bp, Artificial Sequence
  Synthetic oligonucleotide
gaccctgcgcatattaatacaatggtaatg

SEQ ID NO: 498362 - DNA, 30 bp, Artificial Sequence
  Synthetic oligonucleotide
tatttagaaaagtgttagtggactgtaatg

SEQ ID NO: 498363 - DNA, 30 bp, Artificial Sequence
  Synthetic oligonucleotide
gtcagtacgcaatgattagtgtaattaatg

SEQ ID NO: 498364 - DNA, 30 bp, Artificial Sequence
  Synthetic oligonucleotide
gaggtaccatctaggaggcacgcattaatg

SEQ ID NO: 498365 - DNA, 30 bp, Artificial Sequence
  Synthetic oligonucleotide
atatgctgcgcactgatcactatattaatg

SEQ ID NO: 498366 - DNA, 30 bp, Artificial Sequence
  Synthetic oligonucleotide
aggaatatgctgtccgagagccccttaatg

SEQ ID NO: 498367 - DNA, 30 bp, Artificial Sequence
  Synthetic oligonucleotide
agttcgtcctatcgacgcaattgcttaatg

SEQ ID NO: 498368 - DNA, 30 bp, Artificial Sequence
  Synthetic oligonucleotide
ggggaaacgaacattcccatagagttaatg

SEQ ID NO: 498369 - DNA, 30 bp, Artificial Sequence
  Synthetic oligonucleotide
ccggattgcatctcaccccagtctttaatg

SEQ ID NO: 498370 - DNA, 30 bp, Artificial Sequence
  Synthetic oligonucleotide
ttaaaataactatgaggtgttgttttaatg

SEQ ID NO: 498371 - DNA, 30 bp, Artificial Sequence
  Synthetic oligonucleotide
caaaaagtccaagcaaggatttgcaacatg

SEQ ID NO: 498372 - DNA, 30 bp, Artificial Sequence
  Synthetic oligonucleotide
gattatcacgacagttgtcaattcaacatg

SEQ ID NO: 498373 - DNA, 30 bp, Artificial Sequence
  Synthetic oligonucleotide
aaattatttctcaatgcgtcacggaacatg

SEQ ID NO: 498374 - DNA, 30 bp, Artificial Sequence
  Synthetic oligonucleotide
tttacaaagacgctttaggtgacacacatg

SEQ ID NO: 498375 - DNA, 30 bp, Artificial Sequence
  Synthetic oligonucleotide
gcagtacgcagacctcaatagggacacatg

SEQ ID NO: 498376 - DNA, 30 bp, Artificial Sequence
  Synthetic oligonucleotide
atccactttaattgtgaagtgaagcacatg

SEQ ID NO: 498377 - DNA, 30 bp, Artificial Sequence
  Synthetic oligonucleotide
gcaagggaatacactgttggtaagcacatg

SEQ ID NO: 498378 - DNA, 30 bp, Artificial Sequence
  Synthetic oligonucleotide
tctggttctataagtgctttcccgcacatg

SEQ ID NO: 498379 - DNA, 30 bp, Artificial Sequence
  Synthetic oligonucleotide
gccgctaacctccatcgatgcctgcacatg

SEQ ID NO: 498380 - DNA, 30 bp, Artificial Sequence
  Synthetic oligonucleotide
gccgagtatcacttagcatctaatcacatg

SEQ ID NO: 498381 - DNA, 30 bp, Artificial Sequence
  Synthetic oligonucleotide
atacacggcccggccttatcagctcacatg

SEQ ID NO: 498382 - DNA, 30 bp, Artificial Sequence
  Synthetic oligonucleotide
cacaacacacaggtggctttgtcagacatg

SEQ ID NO: 498383 - DNA, 30 bp, Artificial Sequence
  Synthetic oligonucleotide
actatatgaacgcatattgtagtagacatg

SEQ ID NO: 498384 - DNA, 30 bp, Artificial Sequence
  Synthetic oligonucleotide
acctgacggaggaattaggagtacgacatg

SEQ ID NO: 498385 - DNA, 30 bp, Artificial Sequence
  Synthetic oligonucleotide
gaaattaagtccaacgatagagtggacatg

SEQ ID NO: 498386 - DNA, 30 bp, Artificial Sequence
  Synthetic oligonucleotide
aacatattaagattgtgatgtttggacatg

SEQ ID NO: 498387 - DNA, 30 bp, Artificial Sequence
  Synthetic oligonucleotide
cgcaagcagcccaaggtcgtgtcatacatg

SEQ ID NO: 498388 - DNA, 30 bp, Artificial Sequence
  Synthetic oligonucleotide
acttacaacctgcatggcacagtatacatg

SEQ ID NO: 498389 - DNA, 30 bp, Artificial Sequence
  Synthetic oligonucleotide
tcaaggaccgctatggcggaattgtacatg

SEQ ID NO: 498390 - DNA, 30 bp, Artificial Sequence
  Synthetic oligonucleotide
ttcggacccttgaacaatgaattttacatg

SEQ ID NO: 498391 - DNA, 30 bp, Artificial Sequence
  Synthetic oligonucleotide
aaaaccgctcccgttttagcgtaaaccatg

SEQ ID NO: 498392 - DNA, 30 bp, Artificial Sequence
  Synthetic oligonucleotide
aaaggcattgcgtatcgcaagaacaccatg

SEQ ID NO: 498393 - DNA, 30 bp, Artificial Sequence
  Synthetic oligonucleotide
gttcgtccaacgacgcgaggcgacaccatg

SEQ ID NO: 498394 - DNA, 30 bp, Artificial Sequence
  Synthetic oligonucleotide
aaacaaggacgcaggtagggcaataccatg

SEQ ID NO: 498395 - DNA, 30 bp, Artificial Sequence
  Synthetic oligonucleotide
tcgcagcacgcacccctgcaaagtaccatg

SEQ ID NO: 498396 - DNA, 30 bp, Artificial Sequence
  Synthetic oligonucleotide
aattacttgtgcccaggcatattacccatg

SEQ ID NO: 498397 - DNA, 30 bp, Artificial Sequence
  Synthetic oligonucleotide
tagcaagtacttaatatggggcagcccatg

SEQ ID NO: 498398 - DNA, 25 bp, Artificial Sequence
  Synthetic oligonucleotide
gcagtcaatacccgtaacgcccatg

SEQ ID NO: 498399 - DNA, 30 bp, Artificial Sequence
  Synthetic oligonucleotide
tgcctgtcatcttaaaacagtgatcccatg

SEQ ID NO: 498400 - DNA, 29 bp, Artificial Sequence
  Synthetic oligonucleotide
tcgttctttacggataccatcacgccatg

SEQ ID NO: 498401 - DNA, 30 bp, Artificial Sequence
  Synthetic oligonucleotide
aagatgtgcacggtctagtagtctgccatg

SEQ ID NO: 498402 - DNA, 30 bp, Artificial Sequence
  Synthetic oligonucleotide
tttttgtggagtctagggcggtgatccatg

SEQ ID NO: 498403 - DNA, 30 bp, Artificial Sequence
  Synthetic oligonucleotide
gttacgctgttgcatgagtgaaggtccatg

SEQ ID NO: 498404 - DNA, 30 bp, Artificial Sequence
  Synthetic oligonucleotide
gggctaatttcaaacttggtcgcaagcatg

SEQ ID NO: 498405 - DNA, 30 bp, Artificial Sequence
  Synthetic oligonucleotide
tcctctatgggtggttcggatggaagcatg

SEQ ID NO: 498406 - DNA, 30 bp, Artificial Sequence
  Synthetic oligonucleotide
ggcattctaccgtttgatgttctcagcatg

SEQ ID NO: 498407 - DNA, 30 bp, Artificial Sequence
  Synthetic oligonucleotide
atacagacgtatcaggctcaacgtagcatg

SEQ ID NO: 498408 - DNA, 30 bp, Artificial Sequence
  Synthetic oligonucleotide
tcccacgcgtcatggcctgggtaacgcatg

SEQ ID NO: 498409 - DNA, 30 bp, Artificial Sequence
  Synthetic oligonucleotide
gatggccaaggtcgcaaaatttgacgcatg

SEQ ID NO: 498410 - DNA, 30 bp, Artificial Sequence
  Synthetic oligonucleotide
ttttgtatcgatcggcatcaggtacgcatg

SEQ ID NO: 498411 - DNA, 30 bp, Artificial Sequence
  Synthetic oligonucleotide
actcgccagcatgcaagtgtggtacgcatg

SEQ ID NO: 498412 - DNA, 30 bp, Artificial Sequence
  Synthetic oligonucleotide
gggctcgtatctaaggttccataccgcatg

SEQ ID NO: 498413 - DNA, 30 bp, Artificial Sequence
  Synthetic oligonucleotide
gtaaccagtcacgctcgccatctccgcatg

SEQ ID NO: 498414 - DNA, 30 bp, Artificial Sequence
  Synthetic oligonucleotide
aaagcttctagcactctgcacacgcgcatg

SEQ ID NO: 498415 - DNA, 30 bp, Artificial Sequence
  Synthetic oligonucleotide
tatggccaaggcgttcttgtctggcgcatg

SEQ ID NO: 498416 - DNA, 30 bp, Artificial Sequence
  Synthetic oligonucleotide
atgtatgcgcacaacctgagaaaaggcatg

SEQ ID NO: 498417 - DNA, 30 bp, Artificial Sequence
  Synthetic oligonucleotide
acttttcggtattcaaatgccggaggcatg

SEQ ID NO: 498418 - DNA, 30 bp, Artificial Sequence
  Synthetic oligonucleotide
taaacttgtataaaattggacggcggcatg

SEQ ID NO: 498419 - DNA, 30 bp, Artificial Sequence
  Synthetic oligonucleotide
gtttttttccatcagctgtctaggggcatg

SEQ ID NO: 498420 - DNA, 30 bp, Artificial Sequence
  Synthetic oligonucleotide
gctatactcgatcagagagcattgggcatg

SEQ ID NO: 498421 - DNA, 30 bp, Artificial Sequence
  Synthetic oligonucleotide
tgttttctttgtcggaaagtctttggcatg

SEQ ID NO: 498422 - DNA, 30 bp, Artificial Sequence
  Synthetic oligonucleotide
ctaatgtagcactaggacatgcgatgcatg

SEQ ID NO: 498423 - DNA, 30 bp, Artificial Sequence
  Synthetic oligonucleotide
attccactcgaggtcagcaacgtctgcatg

SEQ ID NO: 498424 - DNA, 30 bp, Artificial Sequence
  Synthetic oligonucleotide
gtaggacgtcaacaccgctgtaacatcatg

SEQ ID NO: 498425 - DNA, 30 bp, Artificial Sequence
  Synthetic oligonucleotide
gttataccgcgcacgcattcggtactcatg

SEQ ID NO: 498426 - DNA, 30 bp, Artificial Sequence
  Synthetic oligonucleotide
tgaaggtcttgatatgtctagatcctcatg

SEQ ID NO: 498427 - DNA, 30 bp, Artificial Sequence
  Synthetic oligonucleotide
ttgacatttccacgggcgttcaagctcatg

SEQ ID NO: 498428 - DNA, 30 bp, Artificial Sequence
  Synthetic oligonucleotide
cagttcttcttcagcgatccgttgctcatg

SEQ ID NO: 498429 - DNA, 30 bp, Artificial Sequence
  Synthetic oligonucleotide
ggccctccctagtaactagcgaaagtcatg

SEQ ID NO: 498430 - DNA, 30 bp, Artificial Sequence
  Synthetic oligonucleotide
accttttgaaaatttgcctgtatggtcatg

SEQ ID NO: 498431 - DNA, 30 bp, Artificial Sequence
  Synthetic oligonucleotide
ttgggttcgaagacgacagtcccattcatg

SEQ ID NO: 498432 - DNA, 30 bp, Artificial Sequence
  Synthetic oligonucleotide
cctaccaggtacttccagttgtatttcatg

SEQ ID NO: 498433 - DNA, 30 bp, Artificial Sequence
  Synthetic oligonucleotide
atccttatggttatgctgctatttttcatg

SEQ ID NO: 498434 - DNA, 30 bp, Artificial Sequence
  Synthetic oligonucleotide
caattttaatggaccggacttggcaagatg

SEQ ID NO: 498435 - DNA, 30 bp, Artificial Sequence
  Synthetic oligonucleotide
gtaacacaaaccccgtgccaagagaagatg

SEQ ID NO: 498436 - DNA, 30 bp, Artificial Sequence
  Synthetic oligonucleotide
taagtatcgccgcagccgtaagcgaagatg

SEQ ID NO: 498437 - DNA, 30 bp, Artificial Sequence
  Synthetic oligonucleotide
atagcgaatcgcatgctccaacaacagatg

SEQ ID NO: 498438 - DNA, 30 bp, Artificial Sequence
  Synthetic oligonucleotide
cacttgggtattcgctgttggacacagatg

SEQ ID NO: 498439 - DNA, 30 bp, Artificial Sequence
  Synthetic oligonucleotide
gcgttccatccgtcgtattactaccagatg

SEQ ID NO: 498440 - DNA, 30 bp, Artificial Sequence
  Synthetic oligonucleotide
atcttggcagttggctgacgcttgcagatg

SEQ ID NO: 498441 - DNA, 30 bp, Artificial Sequence
  Synthetic oligonucleotide
tatgactcaccaggcataacagcagagatg

SEQ ID NO: 498442 - DNA, 30 bp, Artificial Sequence
  Synthetic oligonucleotide
atcccgctgccttttgctcagtgagagatg

SEQ ID NO: 498443 - DNA, 30 bp, Artificial Sequence
  Synthetic oligonucleotide
taactccctgttgcaatacacgaggagatg

SEQ ID NO: 498444 - DNA, 30 bp, Artificial Sequence
  Synthetic oligonucleotide
aacacggttcttagacgcttgttggagatg

SEQ ID NO: 498445 - DNA, 30 bp, Artificial Sequence
  Synthetic oligonucleotide
gtggcccaggtggctgccatcgtatagatg

SEQ ID NO: 498446 - DNA, 30 bp, Artificial Sequence
  Synthetic oligonucleotide
tctctgtggctatataggggatcctagatg

SEQ ID NO: 498447 - DNA, 30 bp, Artificial Sequence
  Synthetic oligonucleotide
acggatcaaggagatgtagccatgtagatg

SEQ ID NO: 498448 - DNA, 30 bp, Artificial Sequence
  Synthetic oligonucleotide
gggcatcttatctcctgcggttattagatg

SEQ ID NO: 498449 - DNA, 30 bp, Artificial Sequence
  Synthetic oligonucleotide
attcctttgcttttttcctttagttagatg

SEQ ID NO: 498450 - DNA, 30 bp, Artificial Sequence
  Synthetic oligonucleotide
aaacttcaggacgcgttctttttttagatg

SEQ ID NO: 498451 - DNA, 30 bp, Artificial Sequence
  Synthetic oligonucleotide
gtcttagaagcgcctgcactggcaacgatg

SEQ ID NO: 498452 - DNA, 30 bp, Artificial Sequence
  Synthetic oligonucleotide
ctggtttttggtgactgtcatagaacgatg

SEQ ID NO: 498453 - DNA, 30 bp, Artificial Sequence
  Synthetic oligonucleotide
aactctttcggtaggtttggggccacgatg

SEQ ID NO: 498454 - DNA, 30 bp, Artificial Sequence
  Synthetic oligonucleotide
ggtgcttctaactgcgacggggtcacgatg

SEQ ID NO: 498455 - DNA, 30 bp, Artificial Sequence
  Synthetic oligonucleotide
cgataggcggacgtacgtgaacagacgatg

SEQ ID NO: 498456 - DNA, 30 bp, Artificial Sequence
  Synthetic oligonucleotide
gtcttattttgactgaggctgctcccgatg

SEQ ID NO: 498457 - DNA, 30 bp, Artificial Sequence
  Synthetic oligonucleotide
caggcccgactgctgcataacgcgccgatg

SEQ ID NO: 498458 - DNA, 30 bp, Artificial Sequence
  Synthetic oligonucleotide
actgatatcacggccccatactggccgatg

SEQ ID NO: 498459 - DNA, 30 bp, Artificial Sequence
  Synthetic oligonucleotide
aaacttatactaattactcagcatccgatg

SEQ ID NO: 498460 - DNA, 30 bp, Artificial Sequence
  Synthetic oligonucleotide
aaacttttttatggtacgataattccgatg

SEQ ID NO: 498461 - DNA, 30 bp, Artificial Sequence
  Synthetic oligonucleotide
agagcggcgcatggtcattggggagcgatg

SEQ ID NO: 498462 - DNA, 30 bp, Artificial Sequence
  Synthetic oligonucleotide
attccagcgatcacgcgggccatggcgatg

SEQ ID NO: 498463 - DNA, 30 bp, Artificial Sequence
  Synthetic oligonucleotide
gactccaatttagtcgataataaatcgatg

SEQ ID NO: 498464 - DNA, 30 bp, Artificial Sequence
  Synthetic oligonucleotide
agagatttatgtccatttacccgatcgatg

SEQ ID NO: 498465 - DNA, 30 bp, Artificial Sequence
  Synthetic oligonucleotide
ttagtccctggagtacacacgtgatcgatg

SEQ ID NO: 498466 - DNA, 30 bp, Artificial Sequence
  Synthetic oligonucleotide
tttggacgtggcaggggattcaactcgatg

SEQ ID NO: 498467 - DNA, 30 bp, Artificial Sequence
  Synthetic oligonucleotide
tggtgacggggtggacgacccccgtcgatg

SEQ ID NO: 498468 - DNA, 30 bp, Artificial Sequence
  Synthetic oligonucleotide
attttatgtttccaagttgagagaaggatg

SEQ ID NO: 498469 - DNA, 29 bp, Artificial Sequence
  Synthetic oligonucleotide
ctatttttaaagctctgggtaccaggatg

SEQ ID NO: 498470 - DNA, 30 bp, Artificial Sequence
  Synthetic oligonucleotide
ctcgggtaacccgagggggcacaacggatg

SEQ ID NO: 498471 - DNA, 30 bp, Artificial Sequence
  Synthetic oligonucleotide
gttttcgaatcgtcatgctgtctacggatg

SEQ ID NO: 498472 - DNA, 30 bp, Artificial Sequence
  Synthetic oligonucleotide
aatttagcgtctatcgggttactgcggatg

SEQ ID NO: 498473 - DNA, 30 bp, Artificial Sequence
  Synthetic oligonucleotide
tgtcttcaagcaggccacgcccgcgggatg

SEQ ID NO: 498474 - DNA, 30 bp, Artificial Sequence
  Synthetic oligonucleotide
ccctcgttgacatcgacaggggtcgggatg

SEQ ID NO: 498475 - DNA, 30 bp, Artificial Sequence
  Synthetic oligonucleotide
ttcagcgattgtgcagcaaatcatgggatg

SEQ ID NO: 498476 - DNA, 30 bp, Artificial Sequence
  Synthetic oligonucleotide
aatccacttgttcaatttcggcagtggatg

SEQ ID NO: 498477 - DNA, 30 bp, Artificial Sequence
  Synthetic oligonucleotide
tgtattttcgccagtgaaggtccttggatg

SEQ ID NO: 498478 - DNA, 30 bp, Artificial Sequence
  Synthetic oligonucleotide
gaacaacgtaagggtacgcttccttggatg

SEQ ID NO: 498479 - DNA, 30 bp, Artificial Sequence
  Synthetic oligonucleotide
acgctctttccagtgtgcttctcttggatg

SEQ ID NO: 498480 - DNA, 30 bp, Artificial Sequence
  Synthetic oligonucleotide
tttttttgcacgcactgaaagaccatgatg

SEQ ID NO: 498481 - DNA, 30 bp, Artificial Sequence
  Synthetic oligonucleotide
aggtttccccactaaggacctcagatgatg

SEQ ID NO: 498482 - DNA, 30 bp, Artificial Sequence
  Synthetic oligonucleotide
agcaggtcgcaattattccgtacgatgatg

SEQ ID NO: 498483 - DNA, 30 bp, Artificial Sequence
  Synthetic oligonucleotide
aagctttaggtgtcccgcggcgaactgatg

SEQ ID NO: 498484 - DNA, 30 bp, Artificial Sequence
  Synthetic oligonucleotide
aatttcactatttcatgtgggatgctgatg

SEQ ID NO: 498485 - DNA, 30 bp, Artificial Sequence
  Synthetic oligonucleotide
aactgatacaaattaataggtcatctgatg

SEQ ID NO: 498486 - DNA, 30 bp, Artificial Sequence
  Synthetic oligonucleotide
tactgtggttttcgggtacaagttctgatg

SEQ ID NO: 498487 - DNA, 30 bp, Artificial Sequence
  Synthetic oligonucleotide
tgcgcagtactcccatgcttgagcgtgatg

SEQ ID NO: 498488 - DNA, 30 bp, Artificial Sequence
  Synthetic oligonucleotide
tgtagaagccgcaaaatcacaccggtgatg

SEQ ID NO: 498489 - DNA, 30 bp, Artificial Sequence
  Synthetic oligonucleotide
ttggtactttaagggtgacgatacttgatg

SEQ ID NO: 498490 - DNA, 30 bp, Artificial Sequence
  Synthetic oligonucleotide
agaacattttgctgtatattttccttgatg

SEQ ID NO: 498491 - DNA, 30 bp, Artificial Sequence
  Synthetic oligonucleotide
gcctttcatttagcatagcgcagcttgatg

SEQ ID NO: 498492 - DNA, 29 bp, Artificial Sequence
  Synthetic oligonucleotide
ctaaacgaaactccgttcctggcttgatg

SEQ ID NO: 498493 - DNA, 30 bp, Artificial Sequence
  Synthetic oligonucleotide
acccagcataagcggtgcacctgcttgatg

SEQ ID NO: 498494 - DNA, 30 bp, Artificial Sequence
  Synthetic oligonucleotide
ggtcttcaagataagaattctatcttgatg

SEQ ID NO: 498495 - DNA, 30 bp, Artificial Sequence
  Synthetic oligonucleotide
gaatttggctgtggccactttttcttgatg

SEQ ID NO: 498496 - DNA, 30 bp, Artificial Sequence
  Synthetic oligonucleotide
acccgacggccatcaccatagtgtttgatg

SEQ ID NO: 498497 - DNA, 30 bp, Artificial Sequence
  Synthetic oligonucleotide
tattttctaggaagagggcagcgaaatatg

SEQ ID NO: 498498 - DNA, 30 bp, Artificial Sequence
  Synthetic oligonucleotide
ggaaggaagctaacagtaaggttaaatatg

SEQ ID NO: 498499 - DNA, 28 bp, Artificial Sequence
  Synthetic oligonucleotide
ctattctgataacgtgggctacaatatg

SEQ ID NO: 498500 - DNA, 30 bp, Artificial Sequence
  Synthetic oligonucleotide
ggaaaccatccaaataaggcgtacaatatg

SEQ ID NO: 498501 - DNA, 30 bp, Artificial Sequence
  Synthetic oligonucleotide
cgacagcaattattgatcctattcaatatg

SEQ ID NO: 498502 - DNA, 30 bp, Artificial Sequence
  Synthetic oligonucleotide
tatgtcgtatatcttgctgagcctaatatg

SEQ ID NO: 498503 - DNA, 30 bp, Artificial Sequence
  Synthetic oligonucleotide
taatagcagcatctacagctcatccatatg

SEQ ID NO: 498504 - DNA, 30 bp, Artificial Sequence
  Synthetic oligonucleotide
cacctgtgttgtcttatcccgtcgcatatg

SEQ ID NO: 498505 - DNA, 30 bp, Artificial Sequence
  Synthetic oligonucleotide
aaaaagttcacttggcgtaacaacgatatg

SEQ ID NO: 498506 - DNA, 30 bp, Artificial Sequence
  Synthetic oligonucleotide
tagttgctgatgtgtacagttcaggatatg

SEQ ID NO: 498507 - DNA, 30 bp, Artificial Sequence
  Synthetic oligonucleotide
atcgttaattttcttctgcctgaggatatg

SEQ ID NO: 498508 - DNA, 30 bp, Artificial Sequence
  Synthetic oligonucleotide
ttgcatcatacgccggatatcgtggatatg

SEQ ID NO: 498509 - DNA, 30 bp, Artificial Sequence
  Synthetic oligonucleotide
tccaatattgctcacaatttaatatatatg

SEQ ID NO: 498510 - DNA, 30 bp, Artificial Sequence
  Synthetic oligonucleotide
taccatagtcgaactcttgttaactatatg

SEQ ID NO: 498511 - DNA, 30 bp, Artificial Sequence
  Synthetic oligonucleotide
tgtaactctagatagtctatcagctatatg

SEQ ID NO: 498512 - DNA, 30 bp, Artificial Sequence
  Synthetic oligonucleotide
taacgcatatccgtttagcacctgtatatg

SEQ ID NO: 498513 - DNA, 30 bp, Artificial Sequence
  Synthetic oligonucleotide
ttgaaacattcgattcctcgattgtatatg

SEQ ID NO: 498514 - DNA, 30 bp, Artificial Sequence
  Synthetic oligonucleotide
gataaagtatgaacgcacataaattatatg

SEQ ID NO: 498515 - DNA, 30 bp, Artificial Sequence
  Synthetic oligonucleotide
taatcctttttcgaggaccttatttatatg

SEQ ID NO: 498516 - DNA, 30 bp, Artificial Sequence
  Synthetic oligonucleotide
attaagttaagactaagtgcggcaactatg

SEQ ID NO: 498517 - DNA, 30 bp, Artificial Sequence
  Synthetic oligonucleotide
gattaggtaaattaagcaagcgtcactatg

SEQ ID NO: 498518 - DNA, 30 bp, Artificial Sequence
  Synthetic oligonucleotide
cacctgggtaattattattaaccgactatg

SEQ ID NO: 498519 - DNA, 30 bp, Artificial Sequence
  Synthetic oligonucleotide
aaaacccggttgagagccacgtgtactatg

SEQ ID NO: 498520 - DNA, 30 bp, Artificial Sequence
  Synthetic oligonucleotide
ttaacgaacctagcgcagggcaaacctatg

SEQ ID NO: 498521 - DNA, 30 bp, Artificial Sequence
  Synthetic oligonucleotide
gcggttacatgcgcagtagtcgcacctatg

SEQ ID NO: 498522 - DNA, 30 bp, Artificial Sequence
  Synthetic oligonucleotide
aatctagctggagggcggtatagtcctatg

SEQ ID NO: 498523 - DNA, 30 bp, Artificial Sequence
  Synthetic oligonucleotide
gtttatgctttggaggggcatggtcctatg

SEQ ID NO: 498524 - DNA, 30 bp, Artificial Sequence
  Synthetic oligonucleotide
tgtttttctattgagggcgttagagctatg

SEQ ID NO: 498525 - DNA, 29 bp, Artificial Sequence
  Synthetic oligonucleotide
cctcgccggcacttacaaattccgctatg

SEQ ID NO: 498526 - DNA, 30 bp, Artificial Sequence
  Synthetic oligonucleotide
acaagaaggctctgggggtatggcgctatg

SEQ ID NO: 498527 - DNA, 30 bp, Artificial Sequence
  Synthetic oligonucleotide
ggccaccggtaggcagtaagtagggctatg

SEQ ID NO: 498528 - DNA, 30 bp, Artificial Sequence
  Synthetic oligonucleotide
tacaggctcgggcagatgtgaccatctatg

SEQ ID NO: 498529 - DNA, 30 bp, Artificial Sequence
  Synthetic oligonucleotide
ttaaggttcttttgggtatcaagatctatg

SEQ ID NO: 498530 - DNA, 30 bp, Artificial Sequence
  Synthetic oligonucleotide
aactatctgagactggcactgggatctatg

SEQ ID NO: 498531 - DNA, 30 bp, Artificial Sequence
  Synthetic oligonucleotide
ggattatttggccgcagtatcgtctctatg

SEQ ID NO: 498532 - DNA, 30 bp, Artificial Sequence
  Synthetic oligonucleotide
tcaggcgatgctgggggtgttgagtctatg

SEQ ID NO: 498533 - DNA, 30 bp, Artificial Sequence
  Synthetic oligonucleotide
acaggttttcttgcagtatcaccgtctatg

SEQ ID NO: 498534 - DNA, 30 bp, Artificial Sequence
  Synthetic oligonucleotide
atacagacctgcttatataataggtctatg

SEQ ID NO: 498535 - DNA, 30 bp, Artificial Sequence
  Synthetic oligonucleotide
atggattcatgcacaatagatgattctatg

SEQ ID NO: 498536 - DNA, 30 bp, Artificial Sequence
  Synthetic oligonucleotide
gttgcacataatataactcgcagttctatg

SEQ ID NO: 498537 - DNA, 30 bp, Artificial Sequence
  Synthetic oligonucleotide
attagggtcgggtctttcgtttgttctatg

SEQ ID NO: 498538 - DNA, 30 bp, Artificial Sequence
  Synthetic oligonucleotide
cttcgtcaaatagtaccggacgcaagtatg

SEQ ID NO: 498539 - DNA, 30 bp, Artificial Sequence
  Synthetic oligonucleotide
acatacgatgattatttgacgagcagtatg

SEQ ID NO: 498540 - DNA, 30 bp, Artificial Sequence
  Synthetic oligonucleotide
gattggttgcacttggagtgatcacgtatg

SEQ ID NO: 498541 - DNA, 30 bp, Artificial Sequence
  Synthetic oligonucleotide
agcgcagttcgacaagatcacggacgtatg

SEQ ID NO: 498542 - DNA, 30 bp, Artificial Sequence
  Synthetic oligonucleotide
tacgcaggcgccgtcctttcgctacgtatg

SEQ ID NO: 498543 - DNA, 30 bp, Artificial Sequence
  Synthetic oligonucleotide
ccgttgattctagtggtatttctgcgtatg

SEQ ID NO: 498544 - DNA, 30 bp, Artificial Sequence
  Synthetic oligonucleotide
tgttcttcgtactgacaatggtcaggtatg

SEQ ID NO: 498545 - DNA, 30 bp, Artificial Sequence
  Synthetic oligonucleotide
attcgaaaagaggcaccttttggaggtatg

SEQ ID NO: 498546 - DNA, 30 bp, Artificial Sequence
  Synthetic oligonucleotide
aatagacgtaaaactaaacagaatggtatg

SEQ ID NO: 498547 - DNA, 30 bp, Artificial Sequence
  Synthetic oligonucleotide
atattagtaacacaccaggactatggtatg

SEQ ID NO: 498548 - DNA, 30 bp, Artificial Sequence
  Synthetic oligonucleotide
gcaaagctggcccggagagttgttggtatg

SEQ ID NO: 498549 - DNA, 30 bp, Artificial Sequence
  Synthetic oligonucleotide
cccggattgcccctatccgtgaactgtatg

SEQ ID NO: 498550 - DNA, 30 bp, Artificial Sequence
  Synthetic oligonucleotide
taaacaaatgcatctacccgacgctgtatg

SEQ ID NO: 498551 - DNA, 30 bp, Artificial Sequence
  Synthetic oligonucleotide
aaattctagagtgtacttttagacattatg

SEQ ID NO: 498552 - DNA, 30 bp, Artificial Sequence
  Synthetic oligonucleotide
ctctgaggcccgatagcatctgacattatg

SEQ ID NO: 498553 - DNA, 30 bp, Artificial Sequence
  Synthetic oligonucleotide
ttgaactccgcggtataatacatgattatg

SEQ ID NO: 498554 - DNA, 30 bp, Artificial Sequence
  Synthetic oligonucleotide
ttcatccagtgagatgcctacatgattatg

SEQ ID NO: 498555 - DNA, 30 bp, Artificial Sequence
  Synthetic oligonucleotide
catatgcctggtcagctcccaaatattatg

SEQ ID NO: 498556 - DNA, 30 bp, Artificial Sequence
  Synthetic oligonucleotide
atcgcacggccgtatcgtggctttattatg

SEQ ID NO: 498557 - DNA, 30 bp, Artificial Sequence
  Synthetic oligonucleotide
acttgccacatatacatgcacgcacttatg

SEQ ID NO: 498558 - DNA, 30 bp, Artificial Sequence
  Synthetic oligonucleotide
cttgttgtatcatcagtctccgcacttatg

SEQ ID NO: 498559 - DNA, 30 bp, Artificial Sequence
  Synthetic oligonucleotide
taaaagaacaagactgccggggcacttatg

SEQ ID NO: 498560 - DNA, 30 bp, Artificial Sequence
  Synthetic oligonucleotide
tctgatccgtttagtttaagttaccttatg

SEQ ID NO: 498561 - DNA, 30 bp, Artificial Sequence
  Synthetic oligonucleotide
accctggctcttacggccggcccagttatg

SEQ ID NO: 498562 - DNA, 30 bp, Artificial Sequence
  Synthetic oligonucleotide
tttgcatattgacgatcccgagtagttatg

SEQ ID NO: 498563 - DNA, 30 bp, Artificial Sequence
  Synthetic oligonucleotide
gctcatccaaagcgtctgatagtagttatg

SEQ ID NO: 498564 - DNA, 29 bp, Artificial Sequence
  Synthetic oligonucleotide
ttcgagggggggggtagtatcgcgttatg

SEQ ID NO: 498565 - DNA, 30 bp, Artificial Sequence
  Synthetic oligonucleotide
atacccagttagggtaaggtgcgggttatg

SEQ ID NO: 498566 - DNA, 30 bp, Artificial Sequence
  Synthetic oligonucleotide
gtactgagctttcccggtaggggatttatg

SEQ ID NO: 498567 - DNA, 30 bp, Artificial Sequence
  Synthetic oligonucleotide
tcctttggttcaggagctcttccctttatg

SEQ ID NO: 498568 - DNA, 30 bp, Artificial Sequence
  Synthetic oligonucleotide
gccgcggaaagggtttatctggcctttatg

SEQ ID NO: 498569 - DNA, 30 bp, Artificial Sequence
  Synthetic oligonucleotide
cggatcgtgtaacctggtgtatgctttatg

SEQ ID NO: 498570 - DNA, 30 bp, Artificial Sequence
  Synthetic oligonucleotide
tttccctggggctgatgtgtggcgtttatg

SEQ ID NO: 498571 - DNA, 30 bp, Artificial Sequence
  Synthetic oligonucleotide
aacaaattcgactaccttaagctttttatg

SEQ ID NO: 498572 - DNA, 30 bp, Artificial Sequence
  Synthetic oligonucleotide
cgccaccgaatagagcggcggttttttatg

SEQ ID NO: 498573 - DNA, 30 bp, Artificial Sequence
  Synthetic oligonucleotide
gtcaagcgaagtacgctagcagtcaaactg

SEQ ID NO: 498574 - DNA, 31 bp, Artificial Sequence
  Synthetic oligonucleotide
agacaaggtagattgtgcgcataggaaactg

SEQ ID NO: 498575 - DNA, 30 bp, Artificial Sequence
  Synthetic oligonucleotide
gaaaagtgtgaaaaaacttgagctaaactg

SEQ ID NO: 498576 - DNA, 30 bp, Artificial Sequence
  Synthetic oligonucleotide
ttgtactagttttactttcccgcacaactg

SEQ ID NO: 498577 - DNA, 30 bp, Artificial Sequence
  Synthetic oligonucleotide
tgatgcggaacctttgagtcaatacaactg

SEQ ID NO: 498578 - DNA, 30 bp, Artificial Sequence
  Synthetic oligonucleotide
gaactggttctggacataggcgcccaactg

SEQ ID NO: 498579 - DNA, 30 bp, Artificial Sequence
  Synthetic oligonucleotide
gttcgctatcggttcagctaaaagcaactg

SEQ ID NO: 498580 - DNA, 30 bp, Artificial Sequence
  Synthetic oligonucleotide
tgagtgtgaggactacttttgacgcaactg

SEQ ID NO: 498581 - DNA, 30 bp, Artificial Sequence
  Synthetic oligonucleotide
cgactgcgttttagatgtcggtggcaactg

SEQ ID NO: 498582 - DNA, 30 bp, Artificial Sequence
  Synthetic oligonucleotide
gtactgcagtttgtcattgccattcaactg

SEQ ID NO: 498583 - DNA, 30 bp, Artificial Sequence
  Synthetic oligonucleotide
ctgggcgcataagttgagatcgcagaactg

SEQ ID NO: 498584 - DNA, 30 bp, Artificial Sequence
  Synthetic oligonucleotide
acttgcacgcaactgatcatactcgaactg

SEQ ID NO: 498585 - DNA, 30 bp, Artificial Sequence
  Synthetic oligonucleotide
atttacactgccataaataatcatgaactg

SEQ ID NO: 498586 - DNA, 30 bp, Artificial Sequence
  Synthetic oligonucleotide
ggtttttgggaaccaacattatctgaactg

SEQ ID NO: 498587 - DNA, 30 bp, Artificial Sequence
  Synthetic oligonucleotide
tataaatcgccttggcagcaaccctaactg

SEQ ID NO: 498588 - DNA, 30 bp, Artificial Sequence
  Synthetic oligonucleotide
taattgttggtatgaaattctaagtaactg

SEQ ID NO: 498589 - DNA, 30 bp, Artificial Sequence
  Synthetic oligonucleotide
aattaatattctaaaaaaggaatgtaactg

SEQ ID NO: 498590 - DNA, 30 bp, Artificial Sequence
  Synthetic oligonucleotide
aaacacgtctttgacgggcaccgttaactg

SEQ ID NO: 498591 - DNA, 30 bp, Artificial Sequence
  Synthetic oligonucleotide
aagcctagggccattatctaggtaacactg

SEQ ID NO: 498592 - DNA, 30 bp, Artificial Sequence
  Synthetic oligonucleotide
cacgggtaagtccaggtcgtgaggacactg

SEQ ID NO: 498593 - DNA, 30 bp, Artificial Sequence
  Synthetic oligonucleotide
aagatccgttatgaccagacgctaccactg

SEQ ID NO: 498594 - DNA, 31 bp, Artificial Sequence
  Synthetic oligonucleotide
agaggacggaataacgatggcgttcccactg

SEQ ID NO: 498595 - DNA, 30 bp, Artificial Sequence
  Synthetic oligonucleotide
ggcccacgtcaggtatccacgttgccactg

SEQ ID NO: 498596 - DNA, 30 bp, Artificial Sequence
  Synthetic oligonucleotide
gcccagtttcttgatagcggagtagcactg

SEQ ID NO: 498597 - DNA, 30 bp, Artificial Sequence
  Synthetic oligonucleotide
tgctaatttgtaccctggtagttagcactg

SEQ ID NO: 498598 - DNA, 30 bp, Artificial Sequence
  Synthetic oligonucleotide
tccgacagacccctatgcctgacggcactg

SEQ ID NO: 498599 - DNA, 30 bp, Artificial Sequence
  Synthetic oligonucleotide
taggattttttattaacggcccttgcactg

SEQ ID NO: 498600 - DNA, 30 bp, Artificial Sequence
  Synthetic oligonucleotide
ttttagcgcgtcagcttgtcttttgcactg

SEQ ID NO: 498601 - DNA, 30 bp, Artificial Sequence
  Synthetic oligonucleotide
gtatggctcatcttcgaccttgaaagactg

SEQ ID NO: 498602 - DNA, 30 bp, Artificial Sequence
  Synthetic oligonucleotide
gcacaggtcgtcttcacgggtgcaagactg

SEQ ID NO: 498603 - DNA, 30 bp, Artificial Sequence
  Synthetic oligonucleotide
cattcttagagcattacggagcctagactg

SEQ ID NO: 498604 - DNA, 30 bp, Artificial Sequence
  Synthetic oligonucleotide
gactatgtcgtacgagcgcatcttagactg

SEQ ID NO: 498605 - DNA, 30 bp, Artificial Sequence
  Synthetic oligonucleotide
atgtgatgcgtctcaggcgataaccgactg

SEQ ID NO: 498606 - DNA, 30 bp, Artificial Sequence
  Synthetic oligonucleotide
cttacgctctctttatgtagttcccgactg

SEQ ID NO: 498607 - DNA, 30 bp, Artificial Sequence
  Synthetic oligonucleotide
tggattgtgaatctaccattacttcgactg

SEQ ID NO: 498608 - DNA, 30 bp, Artificial Sequence
  Synthetic oligonucleotide
ggacattatcagccagcttcaagatgactg

SEQ ID NO: 498609 - DNA, 30 bp, Artificial Sequence
  Synthetic oligonucleotide
taaatggtttgtgtggcgcccatgtgactg

SEQ ID NO: 498610 - DNA, 30 bp, Artificial Sequence
  Synthetic oligonucleotide
caaccccccagctcctcagccgcttgactg

SEQ ID NO: 498611 - DNA, 31 bp, Artificial Sequence
  Synthetic oligonucleotide
ccccacttggacgctgggtaatgcttgactg

SEQ ID NO: 498612 - DNA, 30 bp, Artificial Sequence
  Synthetic oligonucleotide
ttagaaacctagaggtgacgctcttgactg

SEQ ID NO: 498613 - DNA, 30 bp, Artificial Sequence
  Synthetic oligonucleotide
aatatgtctagatcttggctagaaatactg

SEQ ID NO: 498614 - DNA, 30 bp, Artificial Sequence
  Synthetic oligonucleotide
tttcacaagggaatttttatccacatactg

SEQ ID NO: 498615 - DNA, 30 bp, Artificial Sequence
  Synthetic oligonucleotide
tcggaaaaacacccggaagaaagcatactg

SEQ ID NO: 498616 - DNA, 30 bp, Artificial Sequence
  Synthetic oligonucleotide
gacaaccaaacagtcaacggagcgatactg

SEQ ID NO: 498617 - DNA, 30 bp, Artificial Sequence
  Synthetic oligonucleotide
tcagttgacatcgcgcgggctagtatactg

SEQ ID NO: 498618 - DNA, 30 bp, Artificial Sequence
  Synthetic oligonucleotide
taggctcaatgcgaaattggaaacctactg

SEQ ID NO: 498619 - DNA, 30 bp, Artificial Sequence
  Synthetic oligonucleotide
ttatgtaattatcttgagttatacctactg

SEQ ID NO: 498620 - DNA, 30 bp, Artificial Sequence
  Synthetic oligonucleotide
aaggtttctcgctcattgattgagctactg

SEQ ID NO: 498621 - DNA, 30 bp, Artificial Sequence
  Synthetic oligonucleotide
ttaagtgccgatttactttttttcttactg

SEQ ID NO: 498622 - DNA, 30 bp, Artificial Sequence
  Synthetic oligonucleotide
aatcgtgtcgcatttctgctctagttactg

SEQ ID NO: 498623 - DNA, 30 bp, Artificial Sequence
  Synthetic oligonucleotide
gacatctaacgagccatatgtgtgttactg

SEQ ID NO: 498624 - DNA, 30 bp, Artificial Sequence
  Synthetic oligonucleotide
tcatagagcgggtataagatttcaaacctg

SEQ ID NO: 498625 - DNA, 30 bp, Artificial Sequence
  Synthetic oligonucleotide
attagaattcttcttgagtggtccaacctg

SEQ ID NO: 498626 - DNA, 30 bp, Artificial Sequence
  Synthetic oligonucleotide
cgacagcactgataggtcccaggccacctg

SEQ ID NO: 498627 - DNA, 30 bp, Artificial Sequence
  Synthetic oligonucleotide
accggacactcgggcagcacatcagacctg

SEQ ID NO: 498628 - DNA, 30 bp, Artificial Sequence
  Synthetic oligonucleotide
aatggagctaccacagaggcgggggacctg

SEQ ID NO: 498629 - DNA, 30 bp, Artificial Sequence
  Synthetic oligonucleotide
accctacccctagcgcgtctagtggacctg

SEQ ID NO: 498630 - DNA, 30 bp, Artificial Sequence
  Synthetic oligonucleotide
aaaaggcctcctgacaatatgagtgacctg

SEQ ID NO: 498631 - DNA, 30 bp, Artificial Sequence
  Synthetic oligonucleotide
tttgcctgattcaccttttgctttgacctg

SEQ ID NO: 498632 - DNA, 30 bp, Artificial Sequence
  Synthetic oligonucleotide
agggtcgtgataaggatagggagctacctg

SEQ ID NO: 498633 - DNA, 30 bp, Artificial Sequence
  Synthetic oligonucleotide
gagggtcaggacggattatattcgtacctg

SEQ ID NO: 498634 - DNA, 30 bp, Artificial Sequence
  Synthetic oligonucleotide
agtatattccaactggaagcgctgtacctg

SEQ ID NO: 498635 - DNA, 30 bp, Artificial Sequence
  Synthetic oligonucleotide
tccctgcaattttgccacctagaaaccctg

SEQ ID NO: 498636 - DNA, 30 bp, Artificial Sequence
  Synthetic oligonucleotide
ttacggggaattttcctaagtttaaccctg

SEQ ID NO: 498637 - DNA, 30 bp, Artificial Sequence
  Synthetic oligonucleotide
gaaattggatgggatggatcgcacaccctg

SEQ ID NO: 498638 - DNA, 30 bp, Artificial Sequence
  Synthetic oligonucleotide
acccctcggtgaagcgaggttgagaccctg

SEQ ID NO: 498639 - DNA, 30 bp, Artificial Sequence
  Synthetic oligonucleotide
taatctaaatattgtccgtcagcgaccctg

SEQ ID NO: 498640 - DNA, 30 bp, Artificial Sequence
  Synthetic oligonucleotide
gacccattagcgcatacctttagccccctg

SEQ ID NO: 498641 - DNA, 30 bp, Artificial Sequence
  Synthetic oligonucleotide
taaagcccggatgcggccatcgagcccctg

SEQ ID NO: 498642 - DNA, 30 bp, Artificial Sequence
  Synthetic oligonucleotide
tcgctcattctatttgttcgagcgcccctg

SEQ ID NO: 498643 - DNA, 30 bp, Artificial Sequence
  Synthetic oligonucleotide
ggtcataaaaataatggcgatcttcccctg

SEQ ID NO: 498644 - DNA, 30 bp, Artificial Sequence
  Synthetic oligonucleotide
agaagggctcctcgggcgtcggttcccctg

SEQ ID NO: 498645 - DNA, 30 bp, Artificial Sequence
  Synthetic oligonucleotide
ggtgttgaccgtttgtatatgtaggccctg

SEQ ID NO: 498646 - DNA, 30 bp, Artificial Sequence
  Synthetic oligonucleotide
atggttcagtattggagcgtatgggccctg

SEQ ID NO: 498647 - DNA, 30 bp, Artificial Sequence
  Synthetic oligonucleotide
catattcgaatagaaataggatctgccctg

SEQ ID NO: 498648 - DNA, 30 bp, Artificial Sequence
  Synthetic oligonucleotide
tcaggttcccctacaatgtaagtctccctg

SEQ ID NO: 498649 - DNA, 30 bp, Artificial Sequence
  Synthetic oligonucleotide
acgctgaacaccatgtggggtgggtccctg

SEQ ID NO: 498650 - DNA, 30 bp, Artificial Sequence
  Synthetic oligonucleotide
cttgtaatttcatagcgcccacattccctg

SEQ ID NO: 498651 - DNA, 30 bp, Artificial Sequence
  Synthetic oligonucleotide
gagtgcggcaaactattcgtcgacagcctg

SEQ ID NO: 498652 - DNA, 30 bp, Artificial Sequence
  Synthetic oligonucleotide
aactttctgagatgatgtttctgcagcctg

SEQ ID NO: 498653 - DNA, 30 bp, Artificial Sequence
  Synthetic oligonucleotide
ggctgaaggaaacagtgtgagttcagcctg

SEQ ID NO: 498654 - DNA, 25 bp, Artificial Sequence
  Synthetic oligonucleotide
acccttgctagctaccaatagcctg

SEQ ID NO: 498655 - DNA, 30 bp, Artificial Sequence
  Synthetic oligonucleotide
aatgggggccagagcaatacagcccgcctg

SEQ ID NO: 498656 - DNA, 30 bp, Artificial Sequence
  Synthetic oligonucleotide
tacaaagagttgagctgtttaggccgcctg

SEQ ID NO: 498657 - DNA, 30 bp, Artificial Sequence
  Synthetic oligonucleotide
attttggcggtttgccttctgacaggcctg

SEQ ID NO: 498658 - DNA, 30 bp, Artificial Sequence
  Synthetic oligonucleotide
ggtagcgacgggtctaagatgggcggcctg

SEQ ID NO: 498659 - DNA, 30 bp, Artificial Sequence
  Synthetic oligonucleotide
ctatcaggacaattctcgcgaattggcctg

SEQ ID NO: 498660 - DNA, 30 bp, Artificial Sequence
  Synthetic oligonucleotide
ctgtgtggcaatccagacggagcctgcctg

SEQ ID NO: 498661 - DNA, 30 bp, Artificial Sequence
  Synthetic oligonucleotide
gaggatcgcgtttaaccagacgtctgcctg

SEQ ID NO: 498662 - DNA, 30 bp, Artificial Sequence
  Synthetic oligonucleotide
acttgttatttggattaaacctcaatcctg

SEQ ID NO: 498663 - DNA, 30 bp, Artificial Sequence
  Synthetic oligonucleotide
cttctctctcatctatggagccatatcctg

SEQ ID NO: 498664 - DNA, 30 bp, Artificial Sequence
  Synthetic oligonucleotide
gattaatggcgtcggggggattctatcctg

SEQ ID NO: 498665 - DNA, 30 bp, Artificial Sequence
  Synthetic oligonucleotide
tgaagatttttggtttccataattatcctg

SEQ ID NO: 498666 - DNA, 30 bp, Artificial Sequence
  Synthetic oligonucleotide
cctatttgcggatgtgggtaattcctcctg

SEQ ID NO: 498667 - DNA, 30 bp, Artificial Sequence
  Synthetic oligonucleotide
taagcgtttgtacaggagacaattctcctg

SEQ ID NO: 498668 - DNA, 30 bp, Artificial Sequence
  Synthetic oligonucleotide
ggtatcgagcgagatacttgtttcgtcctg

SEQ ID NO: 498669 - DNA, 30 bp, Artificial Sequence
  Synthetic oligonucleotide
gtgagattgattcaactcgcagcggtcctg

SEQ ID NO: 498670 - DNA, 30 bp, Artificial Sequence
  Synthetic oligonucleotide
attttgccagttcttcggatcatggtcctg

SEQ ID NO: 498671 - DNA, 30 bp, Artificial Sequence
  Synthetic oligonucleotide
tttttaaaaagccacggatccgcattcctg

SEQ ID NO: 498672 - DNA, 30 bp, Artificial Sequence
  Synthetic oligonucleotide
gggcgctgttgttgctcatctttattcctg

SEQ ID NO: 498673 - DNA, 30 bp, Artificial Sequence
  Synthetic oligonucleotide
gcctgtcagtaaaccggtgtatagttcctg

SEQ ID NO: 498674 - DNA, 30 bp, Artificial Sequence
  Synthetic oligonucleotide
gtaccgcatcggctttcagatataaagctg

SEQ ID NO: 498675 - DNA, 30 bp, Artificial Sequence
  Synthetic oligonucleotide
gttacatatgcttgactacctggacagctg

SEQ ID NO: 498676 - DNA, 30 bp, Artificial Sequence
  Synthetic oligonucleotide
caatacaggtcacgggacgcgacccagctg

SEQ ID NO: 498677 - DNA, 30 bp, Artificial Sequence
  Synthetic oligonucleotide
agcccatacaatcgcggtggcttccagctg

SEQ ID NO: 498678 - DNA, 30 bp, Artificial Sequence
  Synthetic oligonucleotide
ctcggaacttttgatgagatcgcggagctg

SEQ ID NO: 498679 - DNA, 30 bp, Artificial Sequence
  Synthetic oligonucleotide
gtgaaatacagaccagggattactgagctg

SEQ ID NO: 498680 - DNA, 30 bp, Artificial Sequence
  Synthetic oligonucleotide
tctacaatttaagtctccgcaggatagctg

SEQ ID NO: 498681 - DNA, 30 bp, Artificial Sequence
  Synthetic oligonucleotide
ttaatgctatggggctacgtcctatagctg

SEQ ID NO: 498682 - DNA, 30 bp, Artificial Sequence
  Synthetic oligonucleotide
ttaaagagcctataactacatgcgtagctg

SEQ ID NO: 498683 - DNA, 30 bp, Artificial Sequence
  Synthetic oligonucleotide
tttgatctgacgctattatctgtgtagctg

SEQ ID NO: 498684 - DNA, 30 bp, Artificial Sequence
  Synthetic oligonucleotide
cgccctcgcgatttagttctgaaaacgctg

SEQ ID NO: 498685 - DNA, 30 bp, Artificial Sequence
  Synthetic oligonucleotide
gccagcgaattgctataagatctaacgctg

SEQ ID NO: 498686 - DNA, 30 bp, Artificial Sequence
  Synthetic oligonucleotide
gcgcttctcaaatccggtagtgacacgctg

SEQ ID NO: 498687 - DNA, 30 bp, Artificial Sequence
  Synthetic oligonucleotide
aaactatttaatgaaaagtgacagacgctg

SEQ ID NO: 498688 - DNA, 31 bp, Artificial Sequence
  Synthetic oligonucleotide
gctaaggacgcgggtttacccgatgacgctg

SEQ ID NO: 498689 - DNA, 30 bp, Artificial Sequence
  Synthetic oligonucleotide
tcgcaaatgtaacggtaacatctaccgctg

SEQ ID NO: 498690 - DNA, 30 bp, Artificial Sequence
  Synthetic oligonucleotide
aaaagctggataagtttcaaggcgccgctg

SEQ ID NO: 498691 - DNA, 30 bp, Artificial Sequence
  Synthetic oligonucleotide
tcaacgctgacccgtgacatcgctccgctg

SEQ ID NO: 498692 - DNA, 30 bp, Artificial Sequence
  Synthetic oligonucleotide
agaacctggccctgaggcgttctagcgctg

SEQ ID NO: 498693 - DNA, 30 bp, Artificial Sequence
  Synthetic oligonucleotide
atagggaaattcccgggcgcctacgcgctg

SEQ ID NO: 498694 - DNA, 30 bp, Artificial Sequence
  Synthetic oligonucleotide
gtcattgctttacccccaaggtctgcgctg

SEQ ID NO: 498695 - DNA, 30 bp, Artificial Sequence
  Synthetic oligonucleotide
cgtctcattgcccgaagcacagttgcgctg

SEQ ID NO: 498696 - DNA, 30 bp, Artificial Sequence
  Synthetic oligonucleotide
gacgctagcaaggttatgtaccgctcgctg

SEQ ID NO: 498697 - DNA, 30 bp, Artificial Sequence
  Synthetic oligonucleotide
gtctcagttaatttacgcggacaaaggctg

SEQ ID NO: 498698 - DNA, 30 bp, Artificial Sequence
  Synthetic oligonucleotide
gtaccgtaaaggagctgcacggcaaggctg

SEQ ID NO: 498699 - DNA, 30 bp, Artificial Sequence
  Synthetic oligonucleotide
gagcgacgatccgaggttcctcccaggctg

SEQ ID NO: 498700 - DNA, 30 bp, Artificial Sequence
  Synthetic oligonucleotide
atactacgaaccgtcggagcgcgtaggctg

SEQ ID NO: 498701 - DNA, 30 bp, Artificial Sequence
  Synthetic oligonucleotide
taagaagtcgacagttgctcttgccggctg

SEQ ID NO: 498702 - DNA, 30 bp, Artificial Sequence
  Synthetic oligonucleotide
ggccaggtgacggccggccaaccgcggctg

SEQ ID NO: 498703 - DNA, 30 bp, Artificial Sequence
  Synthetic oligonucleotide
tttcaagtactccgctatttccgtcggctg

SEQ ID NO: 498704 - DNA, 30 bp, Artificial Sequence
  Synthetic oligonucleotide
tatacccttcttccaacgatggaagggctg

SEQ ID NO: 498705 - DNA, 30 bp, Artificial Sequence
  Synthetic oligonucleotide
gagattcgaatacttccagaaagcgggctg

SEQ ID NO: 498706 - DNA, 30 bp, Artificial Sequence
  Synthetic oligonucleotide
gtcccgtgaggacccagtttttaggggctg

SEQ ID NO: 498707 - DNA, 30 bp, Artificial Sequence
  Synthetic oligonucleotide
gtcatgcacgccggaggccccggtgggctg

SEQ ID NO: 498708 - DNA, 30 bp, Artificial Sequence
  Synthetic oligonucleotide
aatgaacatttagtatactcatttgggctg

SEQ ID NO: 498709 - DNA, 30 bp, Artificial Sequence
  Synthetic oligonucleotide
gtcttagagtcgcccctcattccatggctg

SEQ ID NO: 498710 - DNA, 30 bp, Artificial Sequence
  Synthetic oligonucleotide
aaatctggggaagccccttaatagtggctg

SEQ ID NO: 498711 - DNA, 30 bp, Artificial Sequence
  Synthetic oligonucleotide
cggaccggcctcgggcagagttattggctg

SEQ ID NO: 498712 - DNA, 30 bp, Artificial Sequence
  Synthetic oligonucleotide
aacgtattgccgcctgggggtccttggctg

SEQ ID NO: 498713 - DNA, 30 bp, Artificial Sequence
  Synthetic oligonucleotide
ttggtcgctagtaaatgtaagaaaatgctg

SEQ ID NO: 498714 - DNA, 30 bp, Artificial Sequence
  Synthetic oligonucleotide
ggactctgaccgcaacatcgagcaatgctg

SEQ ID NO: 498715 - DNA, 30 bp, Artificial Sequence
  Synthetic oligonucleotide
aacagacgcgcggtccggtatgtgatgctg

SEQ ID NO: 498716 - DNA, 30 bp, Artificial Sequence
  Synthetic oligonucleotide
tattcctttggccttacctctgctatgctg

SEQ ID NO: 498717 - DNA, 30 bp, Artificial Sequence
  Synthetic oligonucleotide
ggacttggccttcggccagcgagtatgctg

SEQ ID NO: 498718 - DNA, 30 bp, Artificial Sequence
  Synthetic oligonucleotide
gtcgcacgaaaatctataatgagtatgctg

SEQ ID NO: 498719 - DNA, 30 bp, Artificial Sequence
  Synthetic oligonucleotide
gcaaggtttgtccctctgagttacctgctg

SEQ ID NO: 498720 - DNA, 30 bp, Artificial Sequence
  Synthetic oligonucleotide
tcgaatgtcagcatcactgccgcgctgctg

SEQ ID NO: 498721 - DNA, 30 bp, Artificial Sequence
  Synthetic oligonucleotide
ttttatcgggtggatcatcataggctgctg

SEQ ID NO: 498722 - DNA, 30 bp, Artificial Sequence
  Synthetic oligonucleotide
acgcgcctagtcataggactatggctgctg

SEQ ID NO: 498723 - DNA, 30 bp, Artificial Sequence
  Synthetic oligonucleotide
ctaagtcctaaaggatgcaggtggctgctg

SEQ ID NO: 498724 - DNA, 30 bp, Artificial Sequence
  Synthetic oligonucleotide
aatttatttcgtctaattgtcaaagtgctg

SEQ ID NO: 498725 - DNA, 30 bp, Artificial Sequence
  Synthetic oligonucleotide
ttgaatgagttaagacggttagtcgtgctg

SEQ ID NO: 498726 - DNA, 30 bp, Artificial Sequence
  Synthetic oligonucleotide
tacacagaccgtataggctgtaatgtgctg

SEQ ID NO: 498727 - DNA, 30 bp, Artificial Sequence
  Synthetic oligonucleotide
gtaaactagtctcatattaggcccttgctg

SEQ ID NO: 498728 - DNA, 30 bp, Artificial Sequence
  Synthetic oligonucleotide
ttgattaactatttactccggatgttgctg

SEQ ID NO: 498729 - DNA, 30 bp, Artificial Sequence
  Synthetic oligonucleotide
gaattgatggtaatcaatgtcacaaatctg

SEQ ID NO: 498730 - DNA, 30 bp, Artificial Sequence
  Synthetic oligonucleotide
ttatcgctcgtttcgcatacaagaaatctg

SEQ ID NO: 498731 - DNA, 30 bp, Artificial Sequence
  Synthetic oligonucleotide
gatagcatttagtcgcaaggttgaaatctg

SEQ ID NO: 498732 - DNA, 30 bp, Artificial Sequence
  Synthetic oligonucleotide
tttctccccaaacgaagggctgtaaatctg

SEQ ID NO: 498733 - DNA, 30 bp, Artificial Sequence
  Synthetic oligonucleotide
gcggccggagacacaagaattgtaaatctg

SEQ ID NO: 498734 - DNA, 30 bp, Artificial Sequence
  Synthetic oligonucleotide
cacatatgcagcccttgacttaccaatctg

SEQ ID NO: 498735 - DNA, 30 bp, Artificial Sequence
  Synthetic oligonucleotide
ttggaaattgcgtcttggttttgcaatctg

SEQ ID NO: 498736 - DNA, 30 bp, Artificial Sequence
  Synthetic oligonucleotide
aacccaagccggtggctatattcgaatctg

SEQ ID NO: 498737 - DNA, 30 bp, Artificial Sequence
  Synthetic oligonucleotide
gaaaccgtgaaggaatcagtcaataatctg

SEQ ID NO: 498738 - DNA, 30 bp, Artificial Sequence
  Synthetic oligonucleotide
ccctcatgccaaagatgcaccactaatctg

SEQ ID NO: 498739 - DNA, 30 bp, Artificial Sequence
  Synthetic oligonucleotide
cttaaaaaaacacctcgccagtgtaatctg

SEQ ID NO: 498740 - DNA, 30 bp, Artificial Sequence
  Synthetic oligonucleotide
tgaactgaggctaggaaaggcacagatctg

SEQ ID NO: 498741 - DNA, 30 bp, Artificial Sequence
  Synthetic oligonucleotide
aaggcaccgatcaaagttcgtgcggatctg

SEQ ID NO: 498742 - DNA, 30 bp, Artificial Sequence
  Synthetic oligonucleotide
ttacaagtcacggttgtaagtaatgatctg

SEQ ID NO: 498743 - DNA, 30 bp, Artificial Sequence
  Synthetic oligonucleotide
tctagaaattctacaggagcttaatatctg

SEQ ID NO: 498744 - DNA, 30 bp, Artificial Sequence
  Synthetic oligonucleotide
gtaaaaacccacatttagactttatatctg

SEQ ID NO: 498745 - DNA, 30 bp, Artificial Sequence
  Synthetic oligonucleotide
tgtaggacagaaagcctggccaggtatctg

SEQ ID NO: 498746 - DNA, 30 bp, Artificial Sequence
  Synthetic oligonucleotide
gaaataattaatctccgtgggacaactctg

SEQ ID NO: 498747 - DNA, 30 bp, Artificial Sequence
  Synthetic oligonucleotide
attatcatgtcagagcgaagcatgactctg

SEQ ID NO: 498748 - DNA, 30 bp, Artificial Sequence
  Synthetic oligonucleotide
tttttccataggctgaatatatatactctg

SEQ ID NO: 498749 - DNA, 30 bp, Artificial Sequence
  Synthetic oligonucleotide
aaccggtatgcttcaggaataggtactctg

SEQ ID NO: 498750 - DNA, 30 bp, Artificial Sequence
  Synthetic oligonucleotide
aatttatcagggtttaggcggggtactctg

SEQ ID NO: 498751 - DNA, 30 bp, Artificial Sequence
  Synthetic oligonucleotide
ctttagttcagcacagagtatttgcctctg

SEQ ID NO: 498752 - DNA, 30 bp, Artificial Sequence
  Synthetic oligonucleotide
ggtacgtaagtgaacgcgcagcaagctctg

SEQ ID NO: 498753 - DNA, 30 bp, Artificial Sequence
  Synthetic oligonucleotide
tggtttggacttttctgcctaatagctctg

SEQ ID NO: 498754 - DNA, 30 bp, Artificial Sequence
  Synthetic oligonucleotide
atcttcttggtagcacacggtaccgctctg

SEQ ID NO: 498755 - DNA, 30 bp, Artificial Sequence
  Synthetic oligonucleotide
gctgcagtcagttgtgctttaatggctctg

SEQ ID NO: 498756 - DNA, 30 bp, Artificial Sequence
  Synthetic oligonucleotide
ctggtgagctggttaggcgcggctgctctg

SEQ ID NO: 498757 - DNA, 30 bp, Artificial Sequence
  Synthetic oligonucleotide
gggttaagtttggccggtgtgtagtctctg

SEQ ID NO: 498758 - DNA, 30 bp, Artificial Sequence
  Synthetic oligonucleotide
tcttaattcggggagtgcagttcttctctg

SEQ ID NO: 498759 - DNA, 30 bp, Artificial Sequence
  Synthetic oligonucleotide
ctgtctaatcgggtttaatttggttctctg

SEQ ID NO: 498760 - DNA, 30 bp, Artificial Sequence
  Synthetic oligonucleotide
tttagactgagaacagactgtatttctctg

SEQ ID NO: 498761 - DNA, 30 bp, Artificial Sequence
  Synthetic oligonucleotide
atagctacggggtgttggctgttttctctg

SEQ ID NO: 498762 - DNA, 30 bp, Artificial Sequence
  Synthetic oligonucleotide
tatccgtatcttacccaaggggtaagtctg

SEQ ID NO: 498763 - DNA, 30 bp, Artificial Sequence
  Synthetic oligonucleotide
cgccggtctttcacgcaggacggtagtctg

SEQ ID NO: 498764 - DNA, 30 bp, Artificial Sequence
  Synthetic oligonucleotide
ctctatggtccgaggctgctccaccgtctg

SEQ ID NO: 498765 - DNA, 30 bp, Artificial Sequence
  Synthetic oligonucleotide
atccaggacacaaaggtcgctcgccgtctg

SEQ ID NO: 498766 - DNA, 30 bp, Artificial Sequence
  Synthetic oligonucleotide
catccataattgtctggttacagtcgtctg

SEQ ID NO: 498767 - DNA, 30 bp, Artificial Sequence
  Synthetic oligonucleotide
gcgaaacataagcctgcggggattcgtctg

SEQ ID NO: 498768 - DNA, 30 bp, Artificial Sequence
  Synthetic oligonucleotide
gaatgggtcaggctaagtatgagaggtctg

SEQ ID NO: 498769 - DNA, 30 bp, Artificial Sequence
  Synthetic oligonucleotide
gataattttgtttgatgttcagatggtctg

SEQ ID NO: 498770 - DNA, 30 bp, Artificial Sequence
  Synthetic oligonucleotide
tttctttttcggttaacaatgattggtctg

SEQ ID NO: 498771 - DNA, 30 bp, Artificial Sequence
  Synthetic oligonucleotide
atcgagcgtaatatggaataatttggtctg

SEQ ID NO: 498772 - DNA, 30 bp, Artificial Sequence
  Synthetic oligonucleotide
actcggggcagtcaaaggtgctcctgtctg

SEQ ID NO: 498773 - DNA, 30 bp, Artificial Sequence
  Synthetic oligonucleotide
tttcccttctataacgggtgactctgtctg

SEQ ID NO: 498774 - DNA, 30 bp, Artificial Sequence
  Synthetic oligonucleotide
gcggttctcgcggcgagacccatttgtctg

SEQ ID NO: 498775 - DNA, 30 bp, Artificial Sequence
  Synthetic oligonucleotide
ggccatctaaccgacagcacagtaattctg

SEQ ID NO: 498776 - DNA, 30 bp, Artificial Sequence
  Synthetic oligonucleotide
gaggatggtctaggtccaacctacattctg

SEQ ID NO: 498777 - DNA, 30 bp, Artificial Sequence
  Synthetic oligonucleotide
gaatctccgcaattatgggaaagcattctg

SEQ ID NO: 498778 - DNA, 30 bp, Artificial Sequence
  Synthetic oligonucleotide
gtaatttgctgttcaagctgtcgtattctg

SEQ ID NO: 498779 - DNA, 30 bp, Artificial Sequence
  Synthetic oligonucleotide
tcagatcgccgacagaattccctacttctg

SEQ ID NO: 498780 - DNA, 30 bp, Artificial Sequence
  Synthetic oligonucleotide
acgagttttatatgccttgatctccttctg

SEQ ID NO: 498781 - DNA, 30 bp, Artificial Sequence
  Synthetic oligonucleotide
cgtcgaacaatggacgtgacacagcttctg

SEQ ID NO: 498782 - DNA, 30 bp, Artificial Sequence
  Synthetic oligonucleotide
tgattttctttatgatacttacagcttctg

SEQ ID NO: 498783 - DNA, 30 bp, Artificial Sequence
  Synthetic oligonucleotide
tgttttacagctaggacacggatgcttctg

SEQ ID NO: 498784 - DNA, 30 bp, Artificial Sequence
  Synthetic oligonucleotide
cacgccaaaatgcctaagttagtgcttctg

SEQ ID NO: 498785 - DNA, 30 bp, Artificial Sequence
  Synthetic oligonucleotide
gtcggtaattttgacccacttaaagttctg

SEQ ID NO: 498786 - DNA, 30 bp, Artificial Sequence
  Synthetic oligonucleotide
catcgatcagtggtaagccgtggagttctg

SEQ ID NO: 498787 - DNA, 30 bp, Artificial Sequence
  Synthetic oligonucleotide
gatggtacttgcaggtccgggggggttctg

SEQ ID NO: 498788 - DNA, 30 bp, Artificial Sequence
  Synthetic oligonucleotide
agcttactatttagaggcagttctgttctg

SEQ ID NO: 498789 - DNA, 30 bp, Artificial Sequence
  Synthetic oligonucleotide
gtgtgttagcgtcaagcaacagaatttctg

SEQ ID NO: 498790 - DNA, 30 bp, Artificial Sequence
  Synthetic oligonucleotide
gcaaggtactcaccaacccaggagtttctg

SEQ ID NO: 498791 - DNA, 30 bp, Artificial Sequence
  Synthetic oligonucleotide
gtgtaggaatttagacatagagcgtttctg

SEQ ID NO: 498792 - DNA, 30 bp, Artificial Sequence
  Synthetic oligonucleotide
agagacacaggtccatagaacaattttctg

SEQ ID NO: 498793 - DNA, 30 bp, Artificial Sequence
  Synthetic oligonucleotide
agttcagtcgttgatctattttattttctg

SEQ ID NO: 498794 - DNA, 30 bp, Artificial Sequence
  Synthetic oligonucleotide
cttgctgatgacagctgcgctccttttctg

SEQ ID NO: 498795 - DNA, 30 bp, Artificial Sequence
  Synthetic oligonucleotide
cctatacggggtgtctactttggttttctg

SEQ ID NO: 498796 - DNA, 30 bp, Artificial Sequence
  Synthetic oligonucleotide
tactgactatccatcgtcagtttttttctg

SEQ ID NO: 498797 - DNA, 30 bp, Artificial Sequence
  Synthetic oligonucleotide
gagaaaactttgatctataggatgaaagtg

SEQ ID NO: 498798 - DNA, 30 bp, Artificial Sequence
  Synthetic oligonucleotide
tcggggtaaagccccgacaattgtaaagtg

SEQ ID NO: 498799 - DNA, 30 bp, Artificial Sequence
  Synthetic oligonucleotide
accgagcacactgcatcctacgttaaagtg

SEQ ID NO: 498800 - DNA, 30 bp, Artificial Sequence
  Synthetic oligonucleotide
ctaacttgtgtcagcgggtggacacaagtg

SEQ ID NO: 498801 - DNA, 30 bp, Artificial Sequence
  Synthetic oligonucleotide
tgtctttgctgtagagaagcttcgcaagtg

SEQ ID NO: 498802 - DNA, 30 bp, Artificial Sequence
  Synthetic oligonucleotide
agaatcccgagtcggagtcgagtgcaagtg

SEQ ID NO: 498803 - DNA, 30 bp, Artificial Sequence
  Synthetic oligonucleotide
agtgtttaagggtcttaagtctttcaagtg

SEQ ID NO: 498804 - DNA, 30 bp, Artificial Sequence
  Synthetic oligonucleotide
acccaggatcccccggccaagaaataagtg

SEQ ID NO: 498805 - DNA, 30 bp, Artificial Sequence
  Synthetic oligonucleotide
attttatttctttggaccattgaataagtg

SEQ ID NO: 498806 - DNA, 30 bp, Artificial Sequence
  Synthetic oligonucleotide
agaccctagacaagtcagagttcataagtg

SEQ ID NO: 498807 - DNA, 30 bp, Artificial Sequence
  Synthetic oligonucleotide
acgtacgactctcatagagacgtataagtg

SEQ ID NO: 498808 - DNA, 30 bp, Artificial Sequence
  Synthetic oligonucleotide
tgcgtggcacttacctaatcaaagtaagtg

SEQ ID NO: 498809 - DNA, 30 bp, Artificial Sequence
  Synthetic oligonucleotide
tttgaaattgacgtgatgcgaacgtaagtg

SEQ ID NO: 498810 - DNA, 30 bp, Artificial Sequence
  Synthetic oligonucleotide
aggacggcaggacacaacctgaattaagtg

SEQ ID NO: 498811 - DNA, 30 bp, Artificial Sequence
  Synthetic oligonucleotide
ctcattccgctccgcgtatgtgacacagtg

SEQ ID NO: 498812 - DNA, 30 bp, Artificial Sequence
  Synthetic oligonucleotide
taattttttagtatatccctgcatacagtg

SEQ ID NO: 498813 - DNA, 30 bp, Artificial Sequence
  Synthetic oligonucleotide
aacctagttggacctttaaggactacagtg

SEQ ID NO: 498814 - DNA, 30 bp, Artificial Sequence
  Synthetic oligonucleotide
tttgtttccaatcattatattatcccagtg

SEQ ID NO: 498815 - DNA, 30 bp, Artificial Sequence
  Synthetic oligonucleotide
attaaatgcagctcgtggctactcccagtg

SEQ ID NO: 498816 - DNA, 30 bp, Artificial Sequence
  Synthetic oligonucleotide
cgagtttgacaaacaacctcgtgtccagtg

SEQ ID NO: 498817 - DNA, 30 bp, Artificial Sequence
  Synthetic oligonucleotide
gttcggaggtccgcagcccgcgttccagtg

SEQ ID NO: 498818 - DNA, 30 bp, Artificial Sequence
  Synthetic oligonucleotide
ggtgtgtgattaccccatgggagagcagtg

SEQ ID NO: 498819 - DNA, 30 bp, Artificial Sequence
  Synthetic oligonucleotide
cgaccaataaccttcatgatctacgcagtg

SEQ ID NO: 498820 - DNA, 30 bp, Artificial Sequence
  Synthetic oligonucleotide
tgccttgtggaagacgcagtattcgcagtg

SEQ ID NO: 498821 - DNA, 40 bp, Artificial Sequence
  Synthetic oligonucleotide
gtgtcacgaacgttcaacgggatttacatcgacggcagtg

SEQ ID NO: 498822 - DNA, 30 bp, Artificial Sequence
  Synthetic oligonucleotide
tttcctaccaccgtatactcaccatcagtg

SEQ ID NO: 498823 - DNA, 30 bp, Artificial Sequence
  Synthetic oligonucleotide
atgatcagcagccctaccacagcttcagtg

SEQ ID NO: 498824 - DNA, 30 bp, Artificial Sequence
  Synthetic oligonucleotide
acatagtcgacggagactcaatgttcagtg

SEQ ID NO: 498825 - DNA, 30 bp, Artificial Sequence
  Synthetic oligonucleotide
tgcagtaatatttagagtattgccagagtg

SEQ ID NO: 498826 - DNA, 30 bp, Artificial Sequence
  Synthetic oligonucleotide
ctgggataattaatacgcagcggcagagtg

SEQ ID NO: 498827 - DNA, 30 bp, Artificial Sequence
  Synthetic oligonucleotide
gacttcgggggagagcggggctggagagtg

SEQ ID NO: 498828 - DNA, 30 bp, Artificial Sequence
  Synthetic oligonucleotide
cggtcaacatgtcacggagtaagtagagtg

SEQ ID NO: 498829 - DNA, 30 bp, Artificial Sequence
  Synthetic oligonucleotide
aaattcccccgcaaaaaagccacccgagtg

SEQ ID NO: 498830 - DNA, 30 bp, Artificial Sequence
  Synthetic oligonucleotide
aagttgtgttccgctagacaacggcgagtg

SEQ ID NO: 498831 - DNA, 30 bp, Artificial Sequence
  Synthetic oligonucleotide
acccccctcgtgacggtcaagcgtcgagtg

SEQ ID NO: 498832 - DNA, 30 bp, Artificial Sequence
  Synthetic oligonucleotide
tcagacaccgttgtatgcagggtaggagtg

SEQ ID NO: 498833 - DNA, 30 bp, Artificial Sequence
  Synthetic oligonucleotide
ctcccaccggtgagactggttggcggagtg

SEQ ID NO: 498834 - DNA, 30 bp, Artificial Sequence
  Synthetic oligonucleotide
accggttactctgttggactcgcgggagtg

SEQ ID NO: 498835 - DNA, 30 bp, Artificial Sequence
  Synthetic oligonucleotide
tttctcggtcgagaagaccatgctggagtg

SEQ ID NO: 498836 - DNA, 30 bp, Artificial Sequence
  Synthetic oligonucleotide
ctctttgccataatttgtcgctgtggagtg

SEQ ID NO: 498837 - DNA, 30 bp, Artificial Sequence
  Synthetic oligonucleotide
taacggccgggaccgttttctcactgagtg

SEQ ID NO: 498838 - DNA, 30 bp, Artificial Sequence
  Synthetic oligonucleotide
ataagagacctgggaggacgaacctgagtg

SEQ ID NO: 498839 - DNA, 30 bp, Artificial Sequence
  Synthetic oligonucleotide
gaagccctacggggtcgactgcggtgagtg

SEQ ID NO: 498840 - DNA, 30 bp, Artificial Sequence
  Synthetic oligonucleotide
ttacacactatctattctgcaatgtgagtg

SEQ ID NO: 498841 - DNA, 30 bp, Artificial Sequence
  Synthetic oligonucleotide
caaacaaattttgtcgttatcagttgagtg

SEQ ID NO: 498842 - DNA, 30 bp, Artificial Sequence
  Synthetic oligonucleotide
actggaaatgaacagcctcatgaaatagtg

SEQ ID NO: 498843 - DNA, 30 bp, Artificial Sequence
  Synthetic oligonucleotide
cagttgattggaattttaagcacaatagtg

SEQ ID NO: 498844 - DNA, 30 bp, Artificial Sequence
  Synthetic oligonucleotide
gttgccgcaacaccaaataaacgaatagtg

SEQ ID NO: 498845 - DNA, 30 bp, Artificial Sequence
  Synthetic oligonucleotide
aaagttatatattcccacaagactatagtg

SEQ ID NO: 498846 - DNA, 30 bp, Artificial Sequence
  Synthetic oligonucleotide
taatgcttttttcccagatccctcctagtg

SEQ ID NO: 498847 - DNA, 30 bp, Artificial Sequence
  Synthetic oligonucleotide
tgtgttcatgactttcgcgcagacgtagtg

SEQ ID NO: 498848 - DNA, 30 bp, Artificial Sequence
  Synthetic oligonucleotide
agacggattttgtcaggaatggacgtagtg

SEQ ID NO: 498849 - DNA, 30 bp, Artificial Sequence
  Synthetic oligonucleotide
gcatgctgactcggtgccggctcggtagtg

SEQ ID NO: 498850 - DNA, 30 bp, Artificial Sequence
  Synthetic oligonucleotide
caccagtgtttgccgcaattcggtgtagtg

SEQ ID NO: 498851 - DNA, 30 bp, Artificial Sequence
  Synthetic oligonucleotide
taagggcttagcgcgatccggtttgtagtg

SEQ ID NO: 498852 - DNA, 30 bp, Artificial Sequence
  Synthetic oligonucleotide
acgtcccagtttcaccggcgggtcttagtg

SEQ ID NO: 498853 - DNA, 30 bp, Artificial Sequence
  Synthetic oligonucleotide
aagaagtcactaaccttgccacggttagtg

SEQ ID NO: 498854 - DNA, 30 bp, Artificial Sequence
  Synthetic oligonucleotide
caggtctgtttggaaggcttgcatttagtg

SEQ ID NO: 498855 - DNA, 30 bp, Artificial Sequence
  Synthetic oligonucleotide
cccggtttgaagcctcagaaaagtttagtg

SEQ ID NO: 498856 - DNA, 30 bp, Artificial Sequence
  Synthetic oligonucleotide
tgaacgtcgtggatcatgtgcataaacgtg

SEQ ID NO: 498857 - DNA, 30 bp, Artificial Sequence
  Synthetic oligonucleotide
gacagcaaatccaagaacctagacaacgtg

SEQ ID NO: 498858 - DNA, 30 bp, Artificial Sequence
  Synthetic oligonucleotide
tggacccggctactacgtgagtctaacgtg

SEQ ID NO: 498859 - DNA, 30 bp, Artificial Sequence
  Synthetic oligonucleotide
cgttgttgacggtcatacaggtaccacgtg

SEQ ID NO: 498860 - DNA, 30 bp, Artificial Sequence
  Synthetic oligonucleotide
gccagccggccagcgcagcaccagcacgtg

SEQ ID NO: 498861 - DNA, 30 bp, Artificial Sequence
  Synthetic oligonucleotide
tacacggttctggaatcactgcggcacgtg

SEQ ID NO: 498862 - DNA, 30 bp, Artificial Sequence
  Synthetic oligonucleotide
gttaccgcttcgtcgctctgttggcacgtg

SEQ ID NO: 498863 - DNA, 29 bp, Artificial Sequence
  Synthetic oligonucleotide
ggttgcagattctgtggcgtatgcacgtg

SEQ ID NO: 498864 - DNA, 30 bp, Artificial Sequence
  Synthetic oligonucleotide
ccacgtgctggcacactgggacctcacgtg

SEQ ID NO: 498865 - DNA, 30 bp, Artificial Sequence
  Synthetic oligonucleotide
ctcttctgccttcgtgaaatacgtcacgtg

SEQ ID NO: 498866 - DNA, 30 bp, Artificial Sequence
  Synthetic oligonucleotide
gaatatccctccaagccagacattcacgtg

SEQ ID NO: 498867 - DNA, 30 bp, Artificial Sequence
  Synthetic oligonucleotide
gaaggttaggcgtcgcgtattgtggacgtg

SEQ ID NO: 498868 - DNA, 30 bp, Artificial Sequence
  Synthetic oligonucleotide
gcatcggggatacacccccgtttggacgtg

SEQ ID NO: 498869 - DNA, 30 bp, Artificial Sequence
  Synthetic oligonucleotide
aagcctacccgtagatactaatatgacgtg

SEQ ID NO: 498870 - DNA, 30 bp, Artificial Sequence
  Synthetic oligonucleotide
tacagggctatgagacaacaactatacgtg

SEQ ID NO: 498871 - DNA, 30 bp, Artificial Sequence
  Synthetic oligonucleotide
tttgtgctttcggactcgggtcactacgtg

SEQ ID NO: 498872 - DNA, 30 bp, Artificial Sequence
  Synthetic oligonucleotide
agctgataggacgcacggagctgctacgtg

SEQ ID NO: 498873 - DNA, 30 bp, Artificial Sequence
  Synthetic oligonucleotide
acttttcctgctaagagttaaatgtacgtg

SEQ ID NO: 498874 - DNA, 30 bp, Artificial Sequence
  Synthetic oligonucleotide
gaggaccaccgctaccgcagtctgtacgtg

SEQ ID NO: 498875 - DNA, 30 bp, Artificial Sequence
  Synthetic oligonucleotide
ccgtacggataaacggttggtgtttacgtg

SEQ ID NO: 498876 - DNA, 30 bp, Artificial Sequence
  Synthetic oligonucleotide
cagtggttccgctggcgatttcggaccgtg

SEQ ID NO: 498877 - DNA, 30 bp, Artificial Sequence
  Synthetic oligonucleotide
tgttttcgaaaaatcgaaagcccacccgtg

SEQ ID NO: 498878 - DNA, 30 bp, Artificial Sequence
  Synthetic oligonucleotide
ctaccggccttatcaccggaggcagccgtg

SEQ ID NO: 498879 - DNA, 30 bp, Artificial Sequence
  Synthetic oligonucleotide
gtttagcgatgtcgcaaactagtcgccgtg

SEQ ID NO: 498880 - DNA, 30 bp, Artificial Sequence
  Synthetic oligonucleotide
gatctacgcttgaagtagtacaaggccgtg

SEQ ID NO: 498881 - DNA, 30 bp, Artificial Sequence
  Synthetic oligonucleotide
gcgcatatttagtacgcgggcagtgccgtg

SEQ ID NO: 498882 - DNA, 30 bp, Artificial Sequence
  Synthetic oligonucleotide
gctttacctcgtacaatttttagtgccgtg

SEQ ID NO: 498883 - DNA, 30 bp, Artificial Sequence
  Synthetic oligonucleotide
cttcacgccggtatattacttgaatccgtg

SEQ ID NO: 498884 - DNA, 30 bp, Artificial Sequence
  Synthetic oligonucleotide
gagtaaacatgcaagcagcagccgtccgtg

SEQ ID NO: 498885 - DNA, 30 bp, Artificial Sequence
  Synthetic oligonucleotide
ctggctcacaccttagatatatggtccgtg

SEQ ID NO: 498886 - DNA, 30 bp, Artificial Sequence
  Synthetic oligonucleotide
gtttggaaagagccgggacatctttccgtg

SEQ ID NO: 498887 - DNA, 31 bp, Artificial Sequence
  Synthetic oligonucleotide
tgggcgctttcgtaccagcatttaaagcgtg

SEQ ID NO: 498888 - DNA, 30 bp, Artificial Sequence
  Synthetic oligonucleotide
gagagatttattttactacgctcaagcgtg

SEQ ID NO: 498889 - DNA, 30 bp, Artificial Sequence
  Synthetic oligonucleotide
gttctcgcgggcaaaccatgtcagagcgtg

SEQ ID NO: 498890 - DNA, 30 bp, Artificial Sequence
  Synthetic oligonucleotide
atgttctaaagttaagggtacgctagcgtg

SEQ ID NO: 498891 - DNA, 30 bp, Artificial Sequence
  Synthetic oligonucleotide
tacactaatggacacactgggttccgcgtg

SEQ ID NO: 498892 - DNA, 30 bp, Artificial Sequence
  Synthetic oligonucleotide
gatttcaatatctttgatcaccttcgcgtg

SEQ ID NO: 498893 - DNA, 30 bp, Artificial Sequence
  Synthetic oligonucleotide
tgccgaagtcgcatacccgcagagggcgtg

SEQ ID NO: 498894 - DNA, 30 bp, Artificial Sequence
  Synthetic oligonucleotide
taaactgggggtccgggacatcggggcgtg

SEQ ID NO: 498895 - DNA, 30 bp, Artificial Sequence
  Synthetic oligonucleotide
agtgccatttgaaagtattctcatggcgtg

SEQ ID NO: 498896 - DNA, 30 bp, Artificial Sequence
  Synthetic oligonucleotide
gcacgccaactgtacaaaatgtatggcgtg

SEQ ID NO: 498897 - DNA, 30 bp, Artificial Sequence
  Synthetic oligonucleotide
gtccaactcgacaattttcccggtggcgtg

SEQ ID NO: 498898 - DNA, 30 bp, Artificial Sequence
  Synthetic oligonucleotide
agagctgtagcacacacaggacttggcgtg

SEQ ID NO: 498899 - DNA, 30 bp, Artificial Sequence
  Synthetic oligonucleotide
atattgactgtccttgtgatttaaatcgtg

SEQ ID NO: 498900 - DNA, 30 bp, Artificial Sequence
  Synthetic oligonucleotide
aaaggacgatcatggtgacagggaatcgtg

SEQ ID NO: 498901 - DNA, 30 bp, Artificial Sequence
  Synthetic oligonucleotide
ctagtgtcgcacagtgggcgacagatcgtg

SEQ ID NO: 498902 - DNA, 30 bp, Artificial Sequence
  Synthetic oligonucleotide
ctcgcggacgattaccaaaaagttatcgtg

SEQ ID NO: 498903 - DNA, 30 bp, Artificial Sequence
  Synthetic oligonucleotide
ttggggtccgtaactctatggtttatcgtg

SEQ ID NO: 498904 - DNA, 30 bp, Artificial Sequence
  Synthetic oligonucleotide
aaaccacaagaagctaggagggtactcgtg

SEQ ID NO: 498905 - DNA, 30 bp, Artificial Sequence
  Synthetic oligonucleotide
cgacttcgcattagtcgagctcgcctcgtg

SEQ ID NO: 498906 - DNA, 30 bp, Artificial Sequence
  Synthetic oligonucleotide
acattctggtcctaggcaaagcagctcgtg

SEQ ID NO: 498907 - DNA, 30 bp, Artificial Sequence
  Synthetic oligonucleotide
tccggctttcaactggattttgatctcgtg

SEQ ID NO: 498908 - DNA, 30 bp, Artificial Sequence
  Synthetic oligonucleotide
gtagcacaagaccattggtatgctgtcgtg

SEQ ID NO: 498909 - DNA, 30 bp, Artificial Sequence
  Synthetic oligonucleotide
gggtacgctcacaggacttgttctgtcgtg

SEQ ID NO: 498910 - DNA, 30 bp, Artificial Sequence
  Synthetic oligonucleotide
aaggatatccttcacattgaaggattcgtg

SEQ ID NO: 498911 - DNA, 30 bp, Artificial Sequence
  Synthetic oligonucleotide
cgtagtcagtggggtctagagttcttcgtg

SEQ ID NO: 498912 - DNA, 30 bp, Artificial Sequence
  Synthetic oligonucleotide
tgccattggggggaggatactgttttcgtg

SEQ ID NO: 498913 - DNA, 30 bp, Artificial Sequence
  Synthetic oligonucleotide
aaaattgttgtctcgttcacgaaaaaggtg

SEQ ID NO: 498914 - DNA, 30 bp, Artificial Sequence
  Synthetic oligonucleotide
gaaaagatcactcaatgatatttcaaggtg

SEQ ID NO: 498915 - DNA, 30 bp, Artificial Sequence
  Synthetic oligonucleotide
gactttaaacggttcgcaacttggaaggtg

SEQ ID NO: 498916 - DNA, 30 bp, Artificial Sequence
  Synthetic oligonucleotide
taactttccgcgtccggttaagctaaggtg

SEQ ID NO: 498917 - DNA, 30 bp, Artificial Sequence
  Synthetic oligonucleotide
gacctttgcgtttacagtatgctacaggtg

SEQ ID NO: 498918 - DNA, 30 bp, Artificial Sequence
  Synthetic oligonucleotide
gctctgggtttcagctcgccttcccaggtg

SEQ ID NO: 498919 - DNA, 30 bp, Artificial Sequence
  Synthetic oligonucleotide
ctttggtcccctggatcaaaattccaggtg

SEQ ID NO: 498920 - DNA, 30 bp, Artificial Sequence
  Synthetic oligonucleotide
tagtttcgtcggcttatcactaagcaggtg

SEQ ID NO: 498921 - DNA, 30 bp, Artificial Sequence
  Synthetic oligonucleotide
gcgtcaactgctggggagccgcagcaggtg

SEQ ID NO: 498922 - DNA, 30 bp, Artificial Sequence
  Synthetic oligonucleotide
taaaggctatttctaccgttatatcaggtg

SEQ ID NO: 498923 - DNA, 30 bp, Artificial Sequence
  Synthetic oligonucleotide
atacagtgcagaacgtgtgctgaagaggtg

SEQ ID NO: 498924 - DNA, 30 bp, Artificial Sequence
  Synthetic oligonucleotide
attggattgggatctcgggcaggcgaggtg

SEQ ID NO: 498925 - DNA, 30 bp, Artificial Sequence
  Synthetic oligonucleotide
gctgggataaccactccccctttcgaggtg

SEQ ID NO: 498926 - DNA, 30 bp, Artificial Sequence
  Synthetic oligonucleotide
taaggcgtgcctggagcgggggcggaggtg

SEQ ID NO: 498927 - DNA, 30 bp, Artificial Sequence
  Synthetic oligonucleotide
acgttattaggagaggaaagtgagtaggtg

SEQ ID NO: 498928 - DNA, 30 bp, Artificial Sequence
  Synthetic oligonucleotide
gttcgggtgccactacatgtcacgtaggtg

SEQ ID NO: 498929 - DNA, 30 bp, Artificial Sequence
  Synthetic oligonucleotide
ggtggccgtaaaaacgatgatgggtaggtg

SEQ ID NO: 498930 - DNA, 30 bp, Artificial Sequence
  Synthetic oligonucleotide
gggggaatagttgttctgtaggtgtaggtg

SEQ ID NO: 498931 - DNA, 30 bp, Artificial Sequence
  Synthetic oligonucleotide
ggacgcaggcgcattgactcggcttaggtg

SEQ ID NO: 498932 - DNA, 30 bp, Artificial Sequence
  Synthetic oligonucleotide
ggcgggtgaatggtaaggatgttttaggtg

SEQ ID NO: 498933 - DNA, 30 bp, Artificial Sequence
  Synthetic oligonucleotide
gtttaaggaaccgctagacctcccacggtg

SEQ ID NO: 498934 - DNA, 30 bp, Artificial Sequence
  Synthetic oligonucleotide
cgcgcttaatggacccttgcacgcacggtg

SEQ ID NO: 498935 - DNA, 30 bp, Artificial Sequence
  Synthetic oligonucleotide
aattcgctcacgaagttccctgtcacggtg

SEQ ID NO: 498936 - DNA, 30 bp, Artificial Sequence
  Synthetic oligonucleotide
gtggctctcgaccggatttatccgacggtg

SEQ ID NO: 498937 - DNA, 30 bp, Artificial Sequence
  Synthetic oligonucleotide
cgggctaactagacgtggcatgggacggtg

SEQ ID NO: 498938 - DNA, 30 bp, Artificial Sequence
  Synthetic oligonucleotide
tataaagatgggtagctttgattgacggtg

SEQ ID NO: 498939 - DNA, 30 bp, Artificial Sequence
  Synthetic oligonucleotide
ttatatatagtattataagtgtctacggtg

SEQ ID NO: 498940 - DNA, 30 bp, Artificial Sequence
  Synthetic oligonucleotide
gttaggggccgaaaccctaccggtacggtg

SEQ ID NO: 498941 - DNA, 30 bp, Artificial Sequence
  Synthetic oligonucleotide
ctcaaagcgccccggcccgcgcacccggtg

SEQ ID NO: 498942 - DNA, 30 bp, Artificial Sequence
  Synthetic oligonucleotide
aaggtttcagggattaaaatctgcgcggtg

SEQ ID NO: 498943 - DNA, 30 bp, Artificial Sequence
  Synthetic oligonucleotide
gctatgctcgtttttcactctgcatcggtg

SEQ ID NO: 498944 - DNA, 30 bp, Artificial Sequence
  Synthetic oligonucleotide
ctgcccaccgattgtctaaggaagtcggtg

SEQ ID NO: 498945 - DNA, 30 bp, Artificial Sequence
  Synthetic oligonucleotide
ggcctcggtatattaagcggacagtcggtg

SEQ ID NO: 498946 - DNA, 30 bp, Artificial Sequence
  Synthetic oligonucleotide
tacggacttgcggcccaaaatcaaagggtg

SEQ ID NO: 498947 - DNA, 31 bp, Artificial Sequence
  Synthetic oligonucleotide
attgagggattttatggatgcggcaagggtg

SEQ ID NO: 498948 - DNA, 30 bp, Artificial Sequence
  Synthetic oligonucleotide
aacagtgtgagtgaatgtaatgccagggtg

SEQ ID NO: 498949 - DNA, 28 bp, Artificial Sequence
  Synthetic oligonucleotide
tttttacaaagtttcatacttgagggtg

SEQ ID NO: 498950 - DNA, 30 bp, Artificial Sequence
  Synthetic oligonucleotide
ccgatgggtctcgtacgcatcgttagggtg

SEQ ID NO: 498951 - DNA, 30 bp, Artificial Sequence
  Synthetic oligonucleotide
tggaataacactataaaacgactacgggtg

SEQ ID NO: 498952 - DNA, 30 bp, Artificial Sequence
  Synthetic oligonucleotide
ctaggctcatgtccggattttttacgggtg

SEQ ID NO: 498953 - DNA, 29 bp, Artificial Sequence
  Synthetic oligonucleotide
ctgtcctttgagtcgttgtacgccgggtg

SEQ ID NO: 498954 - DNA, 30 bp, Artificial Sequence
  Synthetic oligonucleotide
cccgatgttgtggtggaaggctgccgggtg

SEQ ID NO: 498955 - DNA, 30 bp, Artificial Sequence
  Synthetic oligonucleotide
gagacgcatgctaaacaaaaggctcgggtg

SEQ ID NO: 498956 - DNA, 30 bp, Artificial Sequence
  Synthetic oligonucleotide
cagatgtgcccgaacgcaatgtctcgggtg

SEQ ID NO: 498957 - DNA, 30 bp, Artificial Sequence
  Synthetic oligonucleotide
aattttgcgtattagctcccctgaggggtg

SEQ ID NO: 498958 - DNA, 30 bp, Artificial Sequence
  Synthetic oligonucleotide
aaggctcctgatcgggtggacgtaggggtg

SEQ ID NO: 498959 - DNA, 30 bp, Artificial Sequence
  Synthetic oligonucleotide
tcgaatgaggcggcttagttgtacggggtg

SEQ ID NO: 498960 - DNA, 30 bp, Artificial Sequence
  Synthetic oligonucleotide
ccattttgcgggccggacggccccggggtg

SEQ ID NO: 498961 - DNA, 30 bp, Artificial Sequence
  Synthetic oligonucleotide
gccggtcggtcgtttccaatgtccggggtg

SEQ ID NO: 498962 - DNA, 30 bp, Artificial Sequence
  Synthetic oligonucleotide
aatatgtgaaatggcccgcatgtcggggtg

SEQ ID NO: 498963 - DNA, 30 bp, Artificial Sequence
  Synthetic oligonucleotide
gtaaaggtggcttcagagcgctggggggtg

SEQ ID NO: 498964 - DNA, 30 bp, Artificial Sequence
  Synthetic oligonucleotide
tgttgcttgggtaaacgccgtactggggtg

SEQ ID NO: 498965 - DNA, 30 bp, Artificial Sequence
  Synthetic oligonucleotide
tgacctgcttttcggttagggggtggggtg

SEQ ID NO: 498966 - DNA, 30 bp, Artificial Sequence
  Synthetic oligonucleotide
tagagttattttctacgtacgcttggggtg

SEQ ID NO: 498967 - DNA, 30 bp, Artificial Sequence
  Synthetic oligonucleotide
gacaaagagcgttgcagaacttcgtgggtg

SEQ ID NO: 498968 - DNA, 30 bp, Artificial Sequence
  Synthetic oligonucleotide
ttagcgtagagggtccagatacgaatggtg

SEQ ID NO: 498969 - DNA, 30 bp, Artificial Sequence
  Synthetic oligonucleotide
ataccctgataagctccagcgggcatggtg

SEQ ID NO: 498970 - DNA, 30 bp, Artificial Sequence
  Synthetic oligonucleotide
acctttatacgtactttttgacggctggtg

SEQ ID NO: 498971 - DNA, 30 bp, Artificial Sequence
  Synthetic oligonucleotide
ttttaacttgtgcacttcccctctctggtg

SEQ ID NO: 498972 - DNA, 30 bp, Artificial Sequence
  Synthetic oligonucleotide
acacggtacagggggtccttcggtctggtg

SEQ ID NO: 498973 - DNA, 30 bp, Artificial Sequence
  Synthetic oligonucleotide
gatataatccacactgttttaaaagtggtg

SEQ ID NO: 498974 - DNA, 30 bp, Artificial Sequence
  Synthetic oligonucleotide
gggtataggtagtgtgtgtcacaagtggtg

SEQ ID NO: 498975 - DNA, 30 bp, Artificial Sequence
  Synthetic oligonucleotide
tatacgggtaagaacggatacgcagtggtg

SEQ ID NO: 498976 - DNA, 30 bp, Artificial Sequence
  Synthetic oligonucleotide
aatgcacggacactagcgcacgatgtggtg

SEQ ID NO: 498977 - DNA, 30 bp, Artificial Sequence
  Synthetic oligonucleotide
ttaaatacacttattaacggccaattggtg

SEQ ID NO: 498978 - DNA, 30 bp, Artificial Sequence
  Synthetic oligonucleotide
cttccgttgtaaagccttatcagattggtg

SEQ ID NO: 498979 - DNA, 30 bp, Artificial Sequence
  Synthetic oligonucleotide
catgaagttgggctttcgtcgacgttggtg

SEQ ID NO: 498980 - DNA, 30 bp, Artificial Sequence
  Synthetic oligonucleotide
ctattcatacacgcccgcaggcaaaatgtg

SEQ ID NO: 498981 - DNA, 30 bp, Artificial Sequence
  Synthetic oligonucleotide
tttgtccgtgaccgctgggtgtaaaatgtg

SEQ ID NO: 498982 - DNA, 30 bp, Artificial Sequence
  Synthetic oligonucleotide
gtttacgcaacctccccacatgagaatgtg

SEQ ID NO: 498983 - DNA, 30 bp, Artificial Sequence
  Synthetic oligonucleotide
gggcgttgggactaatggggaattaatgtg

SEQ ID NO: 498984 - DNA, 30 bp, Artificial Sequence
  Synthetic oligonucleotide
gtcattaagatcgacgtcagaaaccatgtg

SEQ ID NO: 498985 - DNA, 30 bp, Artificial Sequence
  Synthetic oligonucleotide
gactcttaactctgtagtcaggatcatgtg

SEQ ID NO: 498986 - DNA, 30 bp, Artificial Sequence
  Synthetic oligonucleotide
tccgacgcagattccaagactcttcatgtg

SEQ ID NO: 498987 - DNA, 30 bp, Artificial Sequence
  Synthetic oligonucleotide
cgataacgcagctaccttggttaagatgtg

SEQ ID NO: 498988 - DNA, 30 bp, Artificial Sequence
  Synthetic oligonucleotide
ttacttttggatctattctacgtagatgtg

SEQ ID NO: 498989 - DNA, 30 bp, Artificial Sequence
  Synthetic oligonucleotide
aaacggtaagcactgaaactacacgatgtg

SEQ ID NO: 498990 - DNA, 30 bp, Artificial Sequence
  Synthetic oligonucleotide
tctcttcgacccgtcggcgtgatcgatgtg

SEQ ID NO: 498991 - DNA, 30 bp, Artificial Sequence
  Synthetic oligonucleotide
gttcatccgagctgttcactacatgatgtg

SEQ ID NO: 498992 - DNA, 30 bp, Artificial Sequence
  Synthetic oligonucleotide
tgataagaagtctcggaggatgatgatgtg

SEQ ID NO: 498993 - DNA, 30 bp, Artificial Sequence
  Synthetic oligonucleotide
tgcctgttcaaaatgctatgtgatgatgtg

SEQ ID NO: 498994 - DNA, 30 bp, Artificial Sequence
  Synthetic oligonucleotide
gttatgagctgcgcgacgggcgcatatgtg

SEQ ID NO: 498995 - DNA, 30 bp, Artificial Sequence
  Synthetic oligonucleotide
cgtgacactctggcgcgcgaatcatatgtg

SEQ ID NO: 498996 - DNA, 30 bp, Artificial Sequence
  Synthetic oligonucleotide
tgcctagggttggggcgcaccgtatatgtg

SEQ ID NO: 498997 - DNA, 30 bp, Artificial Sequence
  Synthetic oligonucleotide
gaaagccgcttaatcgtttgagcctatgtg

SEQ ID NO: 498998 - DNA, 30 bp, Artificial Sequence
  Synthetic oligonucleotide
agagtcggacagcacatggttcagtatgtg

SEQ ID NO: 498999 - DNA, 31 bp, Artificial Sequence
  Synthetic oligonucleotide
tgcgtgtctcgtaaaattgtgcgcgtatgtg

SEQ ID NO: 499000 - DNA, 30 bp, Artificial Sequence
  Synthetic oligonucleotide
accggttatttcgctgatgatatgtatgtg

SEQ ID NO: 499001 - DNA, 30 bp, Artificial Sequence
  Synthetic oligonucleotide
gaatatatgtgactcgacggcctgtatgtg

SEQ ID NO: 499002 - DNA, 30 bp, Artificial Sequence
  Synthetic oligonucleotide
ctttacttgtgccatacagtgcattatgtg

SEQ ID NO: 499003 - DNA, 30 bp, Artificial Sequence
  Synthetic oligonucleotide
tcagtctctatgatagtcatgttttatgtg

SEQ ID NO: 499004 - DNA, 30 bp, Artificial Sequence
  Synthetic oligonucleotide
tgggtttccgaactaggacaaatcactgtg

SEQ ID NO: 499005 - DNA, 30 bp, Artificial Sequence
  Synthetic oligonucleotide
ccattaattataattagtaaggtgactgtg

SEQ ID NO: 499006 - DNA, 30 bp, Artificial Sequence
  Synthetic oligonucleotide
agaacgtatgatgtcagaacacttactgtg

SEQ ID NO: 499007 - DNA, 30 bp, Artificial Sequence
  Synthetic oligonucleotide
aagcccgtgctatccgcgttgtaccctgtg

SEQ ID NO: 499008 - DNA, 30 bp, Artificial Sequence
  Synthetic oligonucleotide
ttcccacaaggcacgccaccgggccctgtg

SEQ ID NO: 499009 - DNA, 30 bp, Artificial Sequence
  Synthetic oligonucleotide
ttaaccgacgggtagagatctggccctgtg

SEQ ID NO: 499010 - DNA, 30 bp, Artificial Sequence
  Synthetic oligonucleotide
cagccacacatgacttgttaaacgcctgtg

SEQ ID NO: 499011 - DNA, 30 bp, Artificial Sequence
  Synthetic oligonucleotide
tttggttaagtcctatagagacacgctgtg

SEQ ID NO: 499012 - DNA, 30 bp, Artificial Sequence
  Synthetic oligonucleotide
gctggatcctggagggacgctgtcgctgtg

SEQ ID NO: 499013 - DNA, 30 bp, Artificial Sequence
  Synthetic oligonucleotide
attaaaagtatacatttctgcctggctgtg

SEQ ID NO: 499014 - DNA, 30 bp, Artificial Sequence
  Synthetic oligonucleotide
gttaagcgtactgtttgaaatgctgctgtg

SEQ ID NO: 499015 - DNA, 30 bp, Artificial Sequence
  Synthetic oligonucleotide
ctctggggaagggcagcacattactctgtg

SEQ ID NO: 499016 - DNA, 30 bp, Artificial Sequence
  Synthetic oligonucleotide
gtatgtaccaaccgattaaagggctctgtg

SEQ ID NO: 499017 - DNA, 30 bp, Artificial Sequence
  Synthetic oligonucleotide
acctttcattcaggggtctaaaggtctgtg

SEQ ID NO: 499018 - DNA, 30 bp, Artificial Sequence
  Synthetic oligonucleotide
aaggacgcggccccaagacacgaaagtgtg

SEQ ID NO: 499019 - DNA, 30 bp, Artificial Sequence
  Synthetic oligonucleotide
atcggtcttatgttaaggtcctgaagtgtg

SEQ ID NO: 499020 - DNA, 30 bp, Artificial Sequence
  Synthetic oligonucleotide
tgatgacgcacaaccccgtctataagtgtg

SEQ ID NO: 499021 - DNA, 30 bp, Artificial Sequence
  Synthetic oligonucleotide
atattatatgcccgggtccgcatcagtgtg

SEQ ID NO: 499022 - DNA, 30 bp, Artificial Sequence
  Synthetic oligonucleotide
gccggtgcacactataaaagttaacgtgtg

SEQ ID NO: 499023 - DNA, 30 bp, Artificial Sequence
  Synthetic oligonucleotide
gctaatagcgattcctggaacacgcgtgtg

SEQ ID NO: 499024 - DNA, 30 bp, Artificial Sequence
  Synthetic oligonucleotide
cttcagtcggtgccaggctcacgtcgtgtg

SEQ ID NO: 499025 - DNA, 30 bp, Artificial Sequence
  Synthetic oligonucleotide
aagtctcggtgcgacggagcaacaggtgtg

SEQ ID NO: 499026 - DNA, 30 bp, Artificial Sequence
  Synthetic oligonucleotide
gacagtgcttatagacaccgacccggtgtg

SEQ ID NO: 499027 - DNA, 30 bp, Artificial Sequence
  Synthetic oligonucleotide
ggattcaattgtttgttgactgccggtgtg

SEQ ID NO: 499028 - DNA, 30 bp, Artificial Sequence
  Synthetic oligonucleotide
aaattccctacagcagcgagcacatgtgtg

SEQ ID NO: 499029 - DNA, 30 bp, Artificial Sequence
  Synthetic oligonucleotide
aattgaagtcgggtgaattaaccatgtgtg

SEQ ID NO: 499030 - DNA, 30 bp, Artificial Sequence
  Synthetic oligonucleotide
gccacgttacgcagactttcccgctgtgtg

SEQ ID NO: 499031 - DNA, 30 bp, Artificial Sequence
  Synthetic oligonucleotide
ttaaatccaggggcgcttcgcacgtgtgtg

SEQ ID NO: 499032 - DNA, 30 bp, Artificial Sequence
  Synthetic oligonucleotide
atgcaccagtcgcacgtaaccatgtgtgtg

SEQ ID NO: 499033 - DNA, 30 bp, Artificial Sequence
  Synthetic oligonucleotide
catatgccgagtcgtcgtttatattgtgtg

SEQ ID NO: 499034 - DNA, 30 bp, Artificial Sequence
  Synthetic oligonucleotide
ggaacgatgcagcgttcaattggaattgtg

SEQ ID NO: 499035 - DNA, 30 bp, Artificial Sequence
  Synthetic oligonucleotide
cacccaggcactaagtatgcatgaattgtg

SEQ ID NO: 499036 - DNA, 30 bp, Artificial Sequence
  Synthetic oligonucleotide
ctatgcgtttccctgacgctggacattgtg

SEQ ID NO: 499037 - DNA, 30 bp, Artificial Sequence
  Synthetic oligonucleotide
gactccttagatatgatagacgtgattgtg

SEQ ID NO: 499038 - DNA, 30 bp, Artificial Sequence
  Synthetic oligonucleotide
ttagcgtccgagaccgcggcacgacttgtg

SEQ ID NO: 499039 - DNA, 30 bp, Artificial Sequence
  Synthetic oligonucleotide
gggccgcagcccgtgaacatgcaccttgtg

SEQ ID NO: 499040 - DNA, 30 bp, Artificial Sequence
  Synthetic oligonucleotide
atagctgatgggatccttgacacccttgtg

SEQ ID NO: 499041 - DNA, 30 bp, Artificial Sequence
  Synthetic oligonucleotide
ccctcacgtgatgcgcgcagtgcccttgtg

SEQ ID NO: 499042 - DNA, 30 bp, Artificial Sequence
  Synthetic oligonucleotide
gttggtctgtgccggaaactgtagcttgtg

SEQ ID NO: 499043 - DNA, 30 bp, Artificial Sequence
  Synthetic oligonucleotide
aatttttgggggaatattttgtggcttgtg

SEQ ID NO: 499044 - DNA, 30 bp, Artificial Sequence
  Synthetic oligonucleotide
gtttgttatcttcatttgttatatcttgtg

SEQ ID NO: 499045 - DNA, 30 bp, Artificial Sequence
  Synthetic oligonucleotide
tagggctctactggaaatttttctcttgtg

SEQ ID NO: 499046 - DNA, 30 bp, Artificial Sequence
  Synthetic oligonucleotide
atctttatgacattaggctgcaaagttgtg

SEQ ID NO: 499047 - DNA, 30 bp, Artificial Sequence
  Synthetic oligonucleotide
cacgtatgttcgttactctacgcagttgtg

SEQ ID NO: 499048 - DNA, 30 bp, Artificial Sequence
  Synthetic oligonucleotide
acggtgttcctcggggcagatgcagttgtg

SEQ ID NO: 499049 - DNA, 30 bp, Artificial Sequence
  Synthetic oligonucleotide
taccttaagctcgttttggaattggttgtg

SEQ ID NO: 499050 - DNA, 30 bp, Artificial Sequence
  Synthetic oligonucleotide
tcataagtagccctaggctgttatgttgtg

SEQ ID NO: 499051 - DNA, 30 bp, Artificial Sequence
  Synthetic oligonucleotide
ctgccacgcagtacccaatactctgttgtg

SEQ ID NO: 499052 - DNA, 30 bp, Artificial Sequence
  Synthetic oligonucleotide
ggcaagagtacttgtttatcttgtgttgtg

SEQ ID NO: 499053 - DNA, 30 bp, Artificial Sequence
  Synthetic oligonucleotide
cttgttcgtggcttgtactgtgttgttgtg

SEQ ID NO: 499054 - DNA, 30 bp, Artificial Sequence
  Synthetic oligonucleotide
caaagacgtgtccccgccacacgatttgtg

SEQ ID NO: 499055 - DNA, 30 bp, Artificial Sequence
  Synthetic oligonucleotide
ccaagtagaaaaagtcagcgggtatttgtg

SEQ ID NO: 499056 - DNA, 30 bp, Artificial Sequence
  Synthetic oligonucleotide
ggcagcgtacaggatacgcaggtgtttgtg

SEQ ID NO: 499057 - DNA, 30 bp, Artificial Sequence
  Synthetic oligonucleotide
aattcgtcggcaatggccaattattttgtg

SEQ ID NO: 499058 - DNA, 30 bp, Artificial Sequence
  Synthetic oligonucleotide
gcttggccttattaatacgcacaaaaattg

SEQ ID NO: 499059 - DNA, 30 bp, Artificial Sequence
  Synthetic oligonucleotide
gctaattaggtttactcacaggaaaaattg

SEQ ID NO: 499060 - DNA, 30 bp, Artificial Sequence
  Synthetic oligonucleotide
gcccttaattccaactccctctaaaaattg

SEQ ID NO: 499061 - DNA, 30 bp, Artificial Sequence
  Synthetic oligonucleotide
cctcctaaaatccaatggtacccaaaattg

SEQ ID NO: 499062 - DNA, 30 bp, Artificial Sequence
  Synthetic oligonucleotide
cgtggcaattagtgccgaatggcaaaattg

SEQ ID NO: 499063 - DNA, 30 bp, Artificial Sequence
  Synthetic oligonucleotide
tttttagcgccctacgtgtgtctcaaattg

SEQ ID NO: 499064 - DNA, 30 bp, Artificial Sequence
  Synthetic oligonucleotide
ggttcagatatgttgcagagcaagaaattg

SEQ ID NO: 499065 - DNA, 30 bp, Artificial Sequence
  Synthetic oligonucleotide
acggacggttttataattacagggaaattg

SEQ ID NO: 499066 - DNA, 30 bp, Artificial Sequence
  Synthetic oligonucleotide
atcgggcgtgcgaccgctgatgggaaattg

SEQ ID NO: 499067 - DNA, 30 bp, Artificial Sequence
  Synthetic oligonucleotide
ttttacggttaatagatagagatgcaattg

SEQ ID NO: 499068 - DNA, 30 bp, Artificial Sequence
  Synthetic oligonucleotide
aatgttgcccgcagctatctggtgcaattg

SEQ ID NO: 499069 - DNA, 30 bp, Artificial Sequence
  Synthetic oligonucleotide
catgtcaattctatgcgtgtcatagaattg

SEQ ID NO: 499070 - DNA, 30 bp, Artificial Sequence
  Synthetic oligonucleotide
aataatatgctggttattaagctagaattg

SEQ ID NO: 499071 - DNA, 30 bp, Artificial Sequence
  Synthetic oligonucleotide
gtaaagccgcgacattattccttcgaattg

SEQ ID NO: 499072 - DNA, 30 bp, Artificial Sequence
  Synthetic oligonucleotide
ggggagcagtgcgaaaagaatcgggaattg

SEQ ID NO: 499073 - DNA, 30 bp, Artificial Sequence
  Synthetic oligonucleotide
cgccatgtgaaagtggtttgcacataattg

SEQ ID NO: 499074 - DNA, 30 bp, Artificial Sequence
  Synthetic oligonucleotide
ttttggcagcgtcggaccgcttgctaattg

SEQ ID NO: 499075 - DNA, 30 bp, Artificial Sequence
  Synthetic oligonucleotide
gaattcattataccttacagagcgtaattg

SEQ ID NO: 499076 - DNA, 30 bp, Artificial Sequence
  Synthetic oligonucleotide
acggtgccgcggggcagtgcaatttaattg

SEQ ID NO: 499077 - DNA, 30 bp, Artificial Sequence
  Synthetic oligonucleotide
gtagttatagtgattagccttgcaacattg

SEQ ID NO: 499078 - DNA, 30 bp, Artificial Sequence
  Synthetic oligonucleotide
gactcctgacatatactaacgaacacattg

SEQ ID NO: 499079 - DNA, 30 bp, Artificial Sequence
  Synthetic oligonucleotide
aagctccactttacattagaatgcacattg

SEQ ID NO: 499080 - DNA, 30 bp, Artificial Sequence
  Synthetic oligonucleotide
gacagtaaaacattgatgacacagacattg

SEQ ID NO: 499081 - DNA, 30 bp, Artificial Sequence
  Synthetic oligonucleotide
cgcttaagagagactggaattagtacattg

SEQ ID NO: 499082 - DNA, 30 bp, Artificial Sequence
  Synthetic oligonucleotide
aatgagggagcacaaggcaaactaccattg

SEQ ID NO: 499083 - DNA, 30 bp, Artificial Sequence
  Synthetic oligonucleotide
cagtcccggttgtttgaaccggagccattg

SEQ ID NO: 499084 - DNA, 30 bp, Artificial Sequence
  Synthetic oligonucleotide
gacttggtgaaaatatgtttgcaagcattg

SEQ ID NO: 499085 - DNA, 30 bp, Artificial Sequence
  Synthetic oligonucleotide
tatactgcttacgacatacatcaagcattg

SEQ ID NO: 499086 - DNA, 30 bp, Artificial Sequence
  Synthetic oligonucleotide
gtttgggatcgttccagggcgacagcattg

SEQ ID NO: 499087 - DNA, 29 bp, Artificial Sequence
  Synthetic oligonucleotide
ctacaatacgcagatctcggttagcattg

SEQ ID NO: 499088 - DNA, 30 bp, Artificial Sequence
  Synthetic oligonucleotide
gaggtcgcggccgctctcagtatcgcattg

SEQ ID NO: 499089 - DNA, 30 bp, Artificial Sequence
  Synthetic oligonucleotide
aaatcgttgtactaggcaatgggggcattg

SEQ ID NO: 499090 - DNA, 30 bp, Artificial Sequence
  Synthetic oligonucleotide
agatgattcgacgcgggacttccatcattg

SEQ ID NO: 499091 - DNA, 30 bp, Artificial Sequence
  Synthetic oligonucleotide
gttagcttaccaaatgcaacacgatcattg

SEQ ID NO: 499092 - DNA, 30 bp, Artificial Sequence
  Synthetic oligonucleotide
cctgattatgaggacgttgatatatcattg

SEQ ID NO: 499093 - DNA, 30 bp, Artificial Sequence
  Synthetic oligonucleotide
tcccggggattcgcagcaagcatgtcattg

SEQ ID NO: 499094 - DNA, 30 bp, Artificial Sequence
  Synthetic oligonucleotide
tagatataaatttgcatattcctgtcattg

SEQ ID NO: 499095 - DNA, 30 bp, Artificial Sequence
  Synthetic oligonucleotide
agcacggagtgtaccccatctgtttcattg

SEQ ID NO: 499096 - DNA, 30 bp, Artificial Sequence
  Synthetic oligonucleotide
gttattgaaaatctggggtaactaagattg

SEQ ID NO: 499097 - DNA, 30 bp, Artificial Sequence
  Synthetic oligonucleotide
tgagtatgacgccaacacgcgcacagattg

SEQ ID NO: 499098 - DNA, 30 bp, Artificial Sequence
  Synthetic oligonucleotide
gcactagtatgtgagttcctccatagattg

SEQ ID NO: 499099 - DNA, 30 bp, Artificial Sequence
  Synthetic oligonucleotide
tttcgaaatatgagcagtccgggtagattg

SEQ ID NO: 499100 - DNA, 30 bp, Artificial Sequence
  Synthetic oligonucleotide
cgaggggataccaaggtcaagcaccgattg

SEQ ID NO: 499101 - DNA, 30 bp, Artificial Sequence
  Synthetic oligonucleotide
ggggacgctgcggctgtaggatagcgattg

SEQ ID NO: 499102 - DNA, 30 bp, Artificial Sequence
  Synthetic oligonucleotide
acccatggcattggtacaggtcggcgattg

SEQ ID NO: 499103 - DNA, 30 bp, Artificial Sequence
  Synthetic oligonucleotide
cattttcgattggttgccttgatgcgattg

SEQ ID NO: 499104 - DNA, 30 bp, Artificial Sequence
  Synthetic oligonucleotide
ggttgcctattttcgaaggcaacaggattg

SEQ ID NO: 499105 - DNA, 30 bp, Artificial Sequence
  Synthetic oligonucleotide
ttattcttcaacctactgcaactaggattg

SEQ ID NO: 499106 - DNA, 30 bp, Artificial Sequence
  Synthetic oligonucleotide
actggggctcctagcccaccggacggattg

SEQ ID NO: 499107 - DNA, 30 bp, Artificial Sequence
  Synthetic oligonucleotide
caggcttaaatagaagcgtacaagggattg

SEQ ID NO: 499108 - DNA, 30 bp, Artificial Sequence
  Synthetic oligonucleotide
atgcaagcactacccgttgagcggtgattg

SEQ ID NO: 499109 - DNA, 30 bp, Artificial Sequence
  Synthetic oligonucleotide
tttcataaggggctcgacctgtaaatattg

SEQ ID NO: 499110 - DNA, 30 bp, Artificial Sequence
  Synthetic oligonucleotide
acccactcttcctctgcgttggcaatattg

SEQ ID NO: 499111 - DNA, 30 bp, Artificial Sequence
  Synthetic oligonucleotide
aatttgtagcgggaaaaccggaacatattg

SEQ ID NO: 499112 - DNA, 30 bp, Artificial Sequence
  Synthetic oligonucleotide
tcattaaccactgccgtgccagtcatattg

SEQ ID NO: 499113 - DNA, 30 bp, Artificial Sequence
  Synthetic oligonucleotide
atctaggttctccttcgaagcgagatattg

SEQ ID NO: 499114 - DNA, 30 bp, Artificial Sequence
  Synthetic oligonucleotide
ctgtgtgactgacgcgcctccttgatattg

SEQ ID NO: 499115 - DNA, 30 bp, Artificial Sequence
  Synthetic oligonucleotide
ttagctattgtattcgccccgtctatattg

SEQ ID NO: 499116 - DNA, 30 bp, Artificial Sequence
  Synthetic oligonucleotide
cttacgtgccttttcgggctaggtatattg

SEQ ID NO: 499117 - DNA, 30 bp, Artificial Sequence
  Synthetic oligonucleotide
gtcggcgaccaccagcgctaatccctattg

SEQ ID NO: 499118 - DNA, 30 bp, Artificial Sequence
  Synthetic oligonucleotide
gtttatgtggtatagcgaccagcgctattg

SEQ ID NO: 499119 - DNA, 30 bp, Artificial Sequence
  Synthetic oligonucleotide
ctcacgtaatttcccgtgtaagggctattg

SEQ ID NO: 499120 - DNA, 30 bp, Artificial Sequence
  Synthetic oligonucleotide
gcactcttcagttatcccagaagtctattg

SEQ ID NO: 499121 - DNA, 30 bp, Artificial Sequence
  Synthetic oligonucleotide
acacggcatcttaagttccgtgccgtattg

SEQ ID NO: 499122 - DNA, 30 bp, Artificial Sequence
  Synthetic oligonucleotide
ggcgcggcgtcaccctattcgtaggtattg

SEQ ID NO: 499123 - DNA, 30 bp, Artificial Sequence
  Synthetic oligonucleotide
actgcttttgcatttatttacgctgtattg

SEQ ID NO: 499124 - DNA, 30 bp, Artificial Sequence
  Synthetic oligonucleotide
ttgggttttttgcgcccgttgaccttattg

SEQ ID NO: 499125 - DNA, 30 bp, Artificial Sequence
  Synthetic oligonucleotide
gtgcgacccgaccgcgtgtggacgttattg

SEQ ID NO: 499126 - DNA, 30 bp, Artificial Sequence
  Synthetic oligonucleotide
ccagccgcgatatctcgccggccgttattg

SEQ ID NO: 499127 - DNA, 30 bp, Artificial Sequence
  Synthetic oligonucleotide
cgcagctgttatagtcttaacgtgttattg

SEQ ID NO: 499128 - DNA, 30 bp, Artificial Sequence
  Synthetic oligonucleotide
tggattttggcactcagcagcactttattg

SEQ ID NO: 499129 - DNA, 30 bp, Artificial Sequence
  Synthetic oligonucleotide
attaaagcctggcccttaggagaaaacttg

SEQ ID NO: 499130 - DNA, 30 bp, Artificial Sequence
  Synthetic oligonucleotide
gtatgaaacattcttaactatttcaacttg

SEQ ID NO: 499131 - DNA, 31 bp, Artificial Sequence
  Synthetic oligonucleotide
tatttatctggagagagacttttagaacttg

SEQ ID NO: 499132 - DNA, 30 bp, Artificial Sequence
  Synthetic oligonucleotide
cgatcctaatcattctttggccgtaacttg

SEQ ID NO: 499133 - DNA, 30 bp, Artificial Sequence
  Synthetic oligonucleotide
tattaaccggtttctagttgctttaacttg

SEQ ID NO: 499134 - DNA, 30 bp, Artificial Sequence
  Synthetic oligonucleotide
gtcgccatgtttgaccccgtactacacttg

SEQ ID NO: 499135 - DNA, 30 bp, Artificial Sequence
  Synthetic oligonucleotide
aactattatgtccaaagggcgctccacttg

SEQ ID NO: 499136 - DNA, 30 bp, Artificial Sequence
  Synthetic oligonucleotide
aagccaagtgctaatatataccctcacttg

SEQ ID NO: 499137 - DNA, 30 bp, Artificial Sequence
  Synthetic oligonucleotide
acttttactcgccgtggcaattgtcacttg

SEQ ID NO: 499138 - DNA, 30 bp, Artificial Sequence
  Synthetic oligonucleotide
accggacactcgggcagcacatcagacttg

SEQ ID NO: 499139 - DNA, 30 bp, Artificial Sequence
  Synthetic oligonucleotide
ttccgggcggaaagttgccggagggacttg

SEQ ID NO: 499140 - DNA, 30 bp, Artificial Sequence
  Synthetic oligonucleotide
aagcagtcacggcatttgtaaggggacttg

SEQ ID NO: 499141 - DNA, 30 bp, Artificial Sequence
  Synthetic oligonucleotide
tttcattataaacaggacgcttgggacttg

SEQ ID NO: 499142 - DNA, 30 bp, Artificial Sequence
  Synthetic oligonucleotide
gattttgcgttaatgtatgtgagtgacttg

SEQ ID NO: 499143 - DNA, 30 bp, Artificial Sequence
  Synthetic oligonucleotide
atataccgtaatgattggcccggtgacttg

SEQ ID NO: 499144 - DNA, 30 bp, Artificial Sequence
  Synthetic oligonucleotide
gaatctgggactacagcgccttaatacttg

SEQ ID NO: 499145 - DNA, 30 bp, Artificial Sequence
  Synthetic oligonucleotide
gataatcaaggtcggcgcatgctatacttg

SEQ ID NO: 499146 - DNA, 30 bp, Artificial Sequence
  Synthetic oligonucleotide
acctccgagctcacacaaggacgctacttg

SEQ ID NO: 499147 - DNA, 30 bp, Artificial Sequence
  Synthetic oligonucleotide
taatggcaaccttaacgaagcgtttacttg

SEQ ID NO: 499148 - DNA, 30 bp, Artificial Sequence
  Synthetic oligonucleotide
tgatatctcttgaagcgatttgtttacttg

SEQ ID NO: 499149 - DNA, 30 bp, Artificial Sequence
  Synthetic oligonucleotide
caagtatgccactaatgctacgcaaccttg

SEQ ID NO: 499150 - DNA, 30 bp, Artificial Sequence
  Synthetic oligonucleotide
tcgatggtaccagtacctgcagcgaccttg

SEQ ID NO: 499151 - DNA, 30 bp, Artificial Sequence
  Synthetic oligonucleotide
gcatcttggtcaatatttgtcgtgaccttg

SEQ ID NO: 499152 - DNA, 30 bp, Artificial Sequence
  Synthetic oligonucleotide
tggactacgtcgtccgactaaactaccttg

SEQ ID NO: 499153 - DNA, 30 bp, Artificial Sequence
  Synthetic oligonucleotide
ggcagcaacgccccgctcccgcgacccttg

SEQ ID NO: 499154 - DNA, 30 bp, Artificial Sequence
  Synthetic oligonucleotide
atctttaacctttgcagtgcccagcccttg

SEQ ID NO: 499155 - DNA, 30 bp, Artificial Sequence
  Synthetic oligonucleotide
ttgtgagcgctaaatctgctaacgcccttg

SEQ ID NO: 499156 - DNA, 30 bp, Artificial Sequence
  Synthetic oligonucleotide
agccctttcaggattaaccggacgcccttg

SEQ ID NO: 499157 - DNA, 30 bp, Artificial Sequence
  Synthetic oligonucleotide
tctggcgtataatgaaccgacggagccttg

SEQ ID NO: 499158 - DNA, 30 bp, Artificial Sequence
  Synthetic oligonucleotide
cgcgacgcagcttgaatgtggatcgccttg

SEQ ID NO: 499159 - DNA, 30 bp, Artificial Sequence
  Synthetic oligonucleotide
gcaaaggctgcctcgtcgaagacggccttg

SEQ ID NO: 499160 - DNA, 30 bp, Artificial Sequence
  Synthetic oligonucleotide
tccgcgtaaggatggcacattatggccttg

SEQ ID NO: 499161 - DNA, 30 bp, Artificial Sequence
  Synthetic oligonucleotide
acatgttagggggggacgactgatgccttg

SEQ ID NO: 499162 - DNA, 30 bp, Artificial Sequence
  Synthetic oligonucleotide
gagggccgttccttgaatcaaactgccttg

SEQ ID NO: 499163 - DNA, 30 bp, Artificial Sequence
  Synthetic oligonucleotide
gtatcgcacactgacgaggtttcatccttg

SEQ ID NO: 499164 - DNA, 30 bp, Artificial Sequence
  Synthetic oligonucleotide
ttttataaagagtaaagactaaactccttg

SEQ ID NO: 499165 - DNA, 30 bp, Artificial Sequence
  Synthetic oligonucleotide
aatacctgcacgcgaaaatttaagtccttg

SEQ ID NO: 499166 - DNA, 30 bp, Artificial Sequence
  Synthetic oligonucleotide
ggtctataaagggcaggctcttggtccttg

SEQ ID NO: 499167 - DNA, 30 bp, Artificial Sequence
  Synthetic oligonucleotide
gaataaccaacaagagaaggtcaaagcttg

SEQ ID NO: 499168 - DNA, 30 bp, Artificial Sequence
  Synthetic oligonucleotide
attttttggcacaaagcggcttgaagcttg

SEQ ID NO: 499169 - DNA, 30 bp, Artificial Sequence
  Synthetic oligonucleotide
ggtgggttttacaatacttaccccagcttg

SEQ ID NO: 499170 - DNA, 30 bp, Artificial Sequence
  Synthetic oligonucleotide
ccatggggacttgttcgagaccgtagcttg

SEQ ID NO: 499171 - DNA, 30 bp, Artificial Sequence
  Synthetic oligonucleotide
acactcgcgtcttacgtgcagggacgcttg

SEQ ID NO: 499172 - DNA, 30 bp, Artificial Sequence
  Synthetic oligonucleotide
atacttcggaacgttgcttttttacgcttg

SEQ ID NO: 499173 - DNA, 30 bp, Artificial Sequence
  Synthetic oligonucleotide
gattaaccgatggaagactcacaccgcttg

SEQ ID NO: 499174 - DNA, 30 bp, Artificial Sequence
  Synthetic oligonucleotide
cacgaaggtcatgcggtctaggcgcgcttg

SEQ ID NO: 499175 - DNA, 30 bp, Artificial Sequence
  Synthetic oligonucleotide
aattaggaatcctagtacggacgtcgcttg

SEQ ID NO: 499176 - DNA, 30 bp, Artificial Sequence
  Synthetic oligonucleotide
agacggagtcacggaccgggggaaggcttg

SEQ ID NO: 499177 - DNA, 30 bp, Artificial Sequence
  Synthetic oligonucleotide
atattatgcgtgtttcctgaagacggcttg

SEQ ID NO: 499178 - DNA, 30 bp, Artificial Sequence
  Synthetic oligonucleotide
caggcttttatattattcgcagggggcttg

SEQ ID NO: 499179 - DNA, 30 bp, Artificial Sequence
  Synthetic oligonucleotide
atgagaacctagacgaggcgggttggcttg

SEQ ID NO: 499180 - DNA, 30 bp, Artificial Sequence
  Synthetic oligonucleotide
caatatttttaagggcgaggaacatgcttg

SEQ ID NO: 499181 - DNA, 30 bp, Artificial Sequence
  Synthetic oligonucleotide
ccacgcattacaagaggtgaagtaatcttg

SEQ ID NO: 499182 - DNA, 30 bp, Artificial Sequence
  Synthetic oligonucleotide
gaaaatccaaatggctagattgggatcttg

SEQ ID NO: 499183 - DNA, 30 bp, Artificial Sequence
  Synthetic oligonucleotide
tgcagtatcatttttaggttttatatcttg

SEQ ID NO: 499184 - DNA, 30 bp, Artificial Sequence
  Synthetic oligonucleotide
gctatctcgcaaagcgttagatcactcttg

SEQ ID NO: 499185 - DNA, 30 bp, Artificial Sequence
  Synthetic oligonucleotide
tcctcttaaaggggaacactgggactcttg

SEQ ID NO: 499186 - DNA, 30 bp, Artificial Sequence
  Synthetic oligonucleotide
gcacgtgttcgtgttggagtagatctcttg

SEQ ID NO: 499187 - DNA, 30 bp, Artificial Sequence
  Synthetic oligonucleotide
agtctcagtctacgttgacagtatctcttg

SEQ ID NO: 499188 - DNA, 30 bp, Artificial Sequence
  Synthetic oligonucleotide
ggggagagtcaccattagtgtctagtcttg

SEQ ID NO: 499189 - DNA, 30 bp, Artificial Sequence
  Synthetic oligonucleotide
gtataggccctatgaccaatgcacgtcttg

SEQ ID NO: 499190 - DNA, 30 bp, Artificial Sequence
  Synthetic oligonucleotide
cggattattttaacgtctcttgccttcttg

SEQ ID NO: 499191 - DNA, 30 bp, Artificial Sequence
  Synthetic oligonucleotide
tttcgcagggttgggccaaggtcgttcttg

SEQ ID NO: 499192 - DNA, 29 bp, Artificial Sequence
  Synthetic oligonucleotide
agtattcatcggcagaggaccgtttcttg

SEQ ID NO: 499193 - DNA, 30 bp, Artificial Sequence
  Synthetic oligonucleotide
gcttacttctccaggtagcgacgaaagttg

SEQ ID NO: 499194 - DNA, 30 bp, Artificial Sequence
  Synthetic oligonucleotide
ccaacgtaacatctcctggtctgaaagttg

SEQ ID NO: 499195 - DNA, 30 bp, Artificial Sequence
  Synthetic oligonucleotide
gggggtttcatacggtcggcctctcagttg

SEQ ID NO: 499196 - DNA, 30 bp, Artificial Sequence
  Synthetic oligonucleotide
gatgttcgatatcaatcggtctgagagttg

SEQ ID NO: 499197 - DNA, 30 bp, Artificial Sequence
  Synthetic oligonucleotide
ttagtttacgctactaaggttgtagagttg

SEQ ID NO: 499198 - DNA, 30 bp, Artificial Sequence
  Synthetic oligonucleotide
gatattgggtggaacgtgtcatgggagttg

SEQ ID NO: 499199 - DNA, 30 bp, Artificial Sequence
  Synthetic oligonucleotide
accacaccccaaccctttatgttggagttg

SEQ ID NO: 499200 - DNA, 30 bp, Artificial Sequence
  Synthetic oligonucleotide
ttatcgtacgtccgctagacaacgtagttg

SEQ ID NO: 499201 - DNA, 30 bp, Artificial Sequence
  Synthetic oligonucleotide
tagagtcatttaagtcagagttggtagttg

SEQ ID NO: 499202 - DNA, 30 bp, Artificial Sequence
  Synthetic oligonucleotide
tttgtgagtttatgcaggatcatgtagttg

SEQ ID NO: 499203 - DNA, 30 bp, Artificial Sequence
  Synthetic oligonucleotide
aactgggaccggtgttttgtaacttagttg

SEQ ID NO: 499204 - DNA, 30 bp, Artificial Sequence
  Synthetic oligonucleotide
caatctagactactgtcaaatgccacgttg

SEQ ID NO: 499205 - DNA, 30 bp, Artificial Sequence
  Synthetic oligonucleotide
attggacggcagcaaccttcatagacgttg

SEQ ID NO: 499206 - DNA, 30 bp, Artificial Sequence
  Synthetic oligonucleotide
tttgtcagggtgtatgtcacccggacgttg

SEQ ID NO: 499207 - DNA, 30 bp, Artificial Sequence
  Synthetic oligonucleotide
accaatcggtgtttcacctaagggacgttg

SEQ ID NO: 499208 - DNA, 30 bp, Artificial Sequence
  Synthetic oligonucleotide
tttgtggtagtgccgctgccccttacgttg

SEQ ID NO: 499209 - DNA, 30 bp, Artificial Sequence
  Synthetic oligonucleotide
ctggaaaagctgagctacgggcgaccgttg

SEQ ID NO: 499210 - DNA, 30 bp, Artificial Sequence
  Synthetic oligonucleotide
ttgtgttagcgttcagtctctgagccgttg

SEQ ID NO: 499211 - DNA, 30 bp, Artificial Sequence
  Synthetic oligonucleotide
agcttgtgctgtaagagaatgttgccgttg

SEQ ID NO: 499212 - DNA, 30 bp, Artificial Sequence
  Synthetic oligonucleotide
aacgaaaacgcagctcttcgttatccgttg

SEQ ID NO: 499213 - DNA, 30 bp, Artificial Sequence
  Synthetic oligonucleotide
aacgcccgtttgtataaagtaggagcgttg

SEQ ID NO: 499214 - DNA, 30 bp, Artificial Sequence
  Synthetic oligonucleotide
cctgtgtgcaacgcggtattaatagcgttg

SEQ ID NO: 499215 - DNA, 30 bp, Artificial Sequence
  Synthetic oligonucleotide
taacttaacagcccgcattcggccgcgttg

SEQ ID NO: 499216 - DNA, 30 bp, Artificial Sequence
  Synthetic oligonucleotide
gagcatgggcgacaaacgcgggctgcgttg

SEQ ID NO: 499217 - DNA, 30 bp, Artificial Sequence
  Synthetic oligonucleotide
ctggtttcttctgagatatgcatttcgttg

SEQ ID NO: 499218 - DNA, 30 bp, Artificial Sequence
  Synthetic oligonucleotide
gtgcccgtaacaacgaattaatggaggttg

SEQ ID NO: 499219 - DNA, 30 bp, Artificial Sequence
  Synthetic oligonucleotide
attggtatattcgttaaggttagccggttg

SEQ ID NO: 499220 - DNA, 30 bp, Artificial Sequence
  Synthetic oligonucleotide
ggagtattaggtagtgccttgtgagggttg

SEQ ID NO: 499221 - DNA, 30 bp, Artificial Sequence
  Synthetic oligonucleotide
gccataactacactggacattaacgggttg

SEQ ID NO: 499222 - DNA, 30 bp, Artificial Sequence
  Synthetic oligonucleotide
ggtatataggccggggaggaaggggggttg

SEQ ID NO: 499223 - DNA, 30 bp, Artificial Sequence
  Synthetic oligonucleotide
tggatcagggagctactgcactgggggttg

SEQ ID NO: 499224 - DNA, 30 bp, Artificial Sequence
  Synthetic oligonucleotide
attaacgcagtaatccccaggactgggttg

SEQ ID NO: 499225 - DNA, 30 bp, Artificial Sequence
  Synthetic oligonucleotide
atgttgctttgatgtctctagtctgggttg

SEQ ID NO: 499226 - DNA, 30 bp, Artificial Sequence
  Synthetic oligonucleotide
gatcacatcagtagtgtcgcgtctgggttg

SEQ ID NO: 499227 - DNA, 30 bp, Artificial Sequence
  Synthetic oligonucleotide
gggggacgacagcttcttgctcttgggttg

SEQ ID NO: 499228 - DNA, 30 bp, Artificial Sequence
  Synthetic oligonucleotide
taaatatttccacgtggtgtctgatggttg

SEQ ID NO: 499229 - DNA, 30 bp, Artificial Sequence
  Synthetic oligonucleotide
tttgatcactagcctatcgaactctggttg

SEQ ID NO: 499230 - DNA, 30 bp, Artificial Sequence
  Synthetic oligonucleotide
ctattttagtgaatcatcgtactctggttg

SEQ ID NO: 499231 - DNA, 30 bp, Artificial Sequence
  Synthetic oligonucleotide
catcaacagttgtcatagccctcgtggttg

SEQ ID NO: 499232 - DNA, 30 bp, Artificial Sequence
  Synthetic oligonucleotide
ccgcccttgctattacatcgcaggtggttg

SEQ ID NO: 499233 - DNA, 30 bp, Artificial Sequence
  Synthetic oligonucleotide
tgttagtaaatttttggagaacggtggttg

SEQ ID NO: 499234 - DNA, 30 bp, Artificial Sequence
  Synthetic oligonucleotide
gccggtgtagtacaatgaattgggtggttg

SEQ ID NO: 499235 - DNA, 30 bp, Artificial Sequence
  Synthetic oligonucleotide
gtttttcgtatgagaaaggcatcttggttg

SEQ ID NO: 499236 - DNA, 30 bp, Artificial Sequence
  Synthetic oligonucleotide
tatggggtactccatctgcctctttggttg

SEQ ID NO: 499237 - DNA, 30 bp, Artificial Sequence
  Synthetic oligonucleotide
taacctatctaaaataattttcacatgttg

SEQ ID NO: 499238 - DNA, 30 bp, Artificial Sequence
  Synthetic oligonucleotide
aattgagcaggcacttggtccgggatgttg

SEQ ID NO: 499239 - DNA, 30 bp, Artificial Sequence
  Synthetic oligonucleotide
attcttagttttgttgtgattatgatgttg

SEQ ID NO: 499240 - DNA, 30 bp, Artificial Sequence
  Synthetic oligonucleotide
cttaagttattgtctcactcgtttatgttg

SEQ ID NO: 499241 - DNA, 30 bp, Artificial Sequence
  Synthetic oligonucleotide
gtacctcaattgatagtgaaccaactgttg

SEQ ID NO: 499242 - DNA, 30 bp, Artificial Sequence
  Synthetic oligonucleotide
accgagccacatgcgtgaattcacctgttg

SEQ ID NO: 499243 - DNA, 30 bp, Artificial Sequence
  Synthetic oligonucleotide
gggtttcccccttttttgccctcgctgttg

SEQ ID NO: 499244 - DNA, 30 bp, Artificial Sequence
  Synthetic oligonucleotide
ggaaatcgaaactatttccggactctgttg

SEQ ID NO: 499245 - DNA, 30 bp, Artificial Sequence
  Synthetic oligonucleotide
gtcggtccgtttcctgccaatgttctgttg

SEQ ID NO: 499246 - DNA, 30 bp, Artificial Sequence
  Synthetic oligonucleotide
agctatagctatggatgtgaggtggtgttg

SEQ ID NO: 499247 - DNA, 30 bp, Artificial Sequence
  Synthetic oligonucleotide
aatgagtcatttcactcgtacttggtgttg

SEQ ID NO: 499248 - DNA, 30 bp, Artificial Sequence
  Synthetic oligonucleotide
tcccgccgccgtacattgcagttggtgttg

SEQ ID NO: 499249 - DNA, 30 bp, Artificial Sequence
  Synthetic oligonucleotide
gacggaataacgttcattcaacttgtgttg

SEQ ID NO: 499250 - DNA, 30 bp, Artificial Sequence
  Synthetic oligonucleotide
aactgtgtgcgtccactctagttcttgttg

SEQ ID NO: 499251 - DNA, 30 bp, Artificial Sequence
  Synthetic oligonucleotide
ccgtttcacactgtgtagagtcggttgttg

SEQ ID NO: 499252 - DNA, 30 bp, Artificial Sequence
  Synthetic oligonucleotide
gagtgagtactttgttcacataaaaatttg

SEQ ID NO: 499253 - DNA, 30 bp, Artificial Sequence
  Synthetic oligonucleotide
gttaggccacgcacaaaaggtccaaatttg

SEQ ID NO: 499254 - DNA, 30 bp, Artificial Sequence
  Synthetic oligonucleotide
ctttttaacgcaataagcgctcgaaatttg

SEQ ID NO: 499255 - DNA, 30 bp, Artificial Sequence
  Synthetic oligonucleotide
cggcgaatgtacgcaagagcaataaatttg

SEQ ID NO: 499256 - DNA, 30 bp, Artificial Sequence
  Synthetic oligonucleotide
gaggtttttatttcgttagggttaaatttg

SEQ ID NO: 499257 - DNA, 30 bp, Artificial Sequence
  Synthetic oligonucleotide
tccttgctagtagatcagcgtttcaatttg

SEQ ID NO: 499258 - DNA, 30 bp, Artificial Sequence
  Synthetic oligonucleotide
agctgcaagcgtggccccgagacgaatttg

SEQ ID NO: 499259 - DNA, 30 bp, Artificial Sequence
  Synthetic oligonucleotide
tgtaggaaagtgcagcttaaagataatttg

SEQ ID NO: 499260 - DNA, 30 bp, Artificial Sequence
  Synthetic oligonucleotide
agcaaggtctgaatgcaggctcttaatttg

SEQ ID NO: 499261 - DNA, 30 bp, Artificial Sequence
  Synthetic oligonucleotide
ctccttcaaaaggtacaagatgttaatttg

SEQ ID NO: 499262 - DNA, 31 bp, Artificial Sequence
  Synthetic oligonucleotide
tccagactgaggattactttcatagcatttg

SEQ ID NO: 499263 - DNA, 30 bp, Artificial Sequence
  Synthetic oligonucleotide
gtcttttataagtaaatcgggcaagatttg

SEQ ID NO: 499264 - DNA, 30 bp, Artificial Sequence
  Synthetic oligonucleotide
tggcttgaagtttgtatatgtatagatttg

SEQ ID NO: 499265 - DNA, 30 bp, Artificial Sequence
  Synthetic oligonucleotide
gtttttgcgtacctacgggcgtgcgatttg

SEQ ID NO: 499266 - DNA, 30 bp, Artificial Sequence
  Synthetic oligonucleotide
ctttaaatttaagcgagtggcttggatttg

SEQ ID NO: 499267 - DNA, 30 bp, Artificial Sequence
  Synthetic oligonucleotide
gtgagagaaactgcactcgaccaatatttg

SEQ ID NO: 499268 - DNA, 30 bp, Artificial Sequence
  Synthetic oligonucleotide
gtttacgatcgggagtttcggaactatttg

SEQ ID NO: 499269 - DNA, 30 bp, Artificial Sequence
  Synthetic oligonucleotide
aatgcggatatctaagcgcatcagtatttg

SEQ ID NO: 499270 - DNA, 30 bp, Artificial Sequence
  Synthetic oligonucleotide
cgcctgggagtgcagcgtttgcggtatttg

SEQ ID NO: 499271 - DNA, 30 bp, Artificial Sequence
  Synthetic oligonucleotide
gaattatagagcgccattacgtattatttg

SEQ ID NO: 499272 - DNA, 30 bp, Artificial Sequence
  Synthetic oligonucleotide
atttgcagcttcaggctaaaactttatttg

SEQ ID NO: 499273 - DNA, 30 bp, Artificial Sequence
  Synthetic oligonucleotide
aaggtatttttacgagccggttgcactttg

SEQ ID NO: 499274 - DNA, 30 bp, Artificial Sequence
  Synthetic oligonucleotide
tgacgcaggagcatggagtctggtactttg

SEQ ID NO: 499275 - DNA, 30 bp, Artificial Sequence
  Synthetic oligonucleotide
gctcacctcttccatatcggcattactttg

SEQ ID NO: 499276 - DNA, 30 bp, Artificial Sequence
  Synthetic oligonucleotide
attcttagttcctatgggagaaaacctttg

SEQ ID NO: 499277 - DNA, 30 bp, Artificial Sequence
  Synthetic oligonucleotide
agtttcccgcttacgagattcgcagctttg

SEQ ID NO: 499278 - DNA, 30 bp, Artificial Sequence
  Synthetic oligonucleotide
gtagcaactaagcttttttgagtagctttg

SEQ ID NO: 499279 - DNA, 30 bp, Artificial Sequence
  Synthetic oligonucleotide
gaatgcaggatcttatagccggccgctttg

SEQ ID NO: 499280 - DNA, 30 bp, Artificial Sequence
  Synthetic oligonucleotide
ttatcgttaaggatcgtgtaaagcgctttg

SEQ ID NO: 499281 - DNA, 30 bp, Artificial Sequence
  Synthetic oligonucleotide
agcaacggttgccggttgcagcaggctttg

SEQ ID NO: 499282 - DNA, 30 bp, Artificial Sequence
  Synthetic oligonucleotide
ttggtaaaacgcgcaggtcatcctgctttg

SEQ ID NO: 499283 - DNA, 30 bp, Artificial Sequence
  Synthetic oligonucleotide
cgggctcatctgggtttgcatcactctttg

SEQ ID NO: 499284 - DNA, 30 bp, Artificial Sequence
  Synthetic oligonucleotide
gtttcttggtgggactatatacggtctttg

SEQ ID NO: 499285 - DNA, 30 bp, Artificial Sequence
  Synthetic oligonucleotide
agaaacagttatctcgctactgtttctttg

SEQ ID NO: 499286 - DNA, 27 bp, Artificial Sequence
  Synthetic oligonucleotide
ggtagtgattcgatatctcaaagtttg

SEQ ID NO: 499287 - DNA, 30 bp, Artificial Sequence
  Synthetic oligonucleotide
aactgcgacgcaagggacttctaaagtttg

SEQ ID NO: 499288 - DNA, 30 bp, Artificial Sequence
  Synthetic oligonucleotide
aaatgaattcgccgccaatacagcagtttg

SEQ ID NO: 499289 - DNA, 30 bp, Artificial Sequence
  Synthetic oligonucleotide
cttgttattagcgatgcatactgcagtttg

SEQ ID NO: 499290 - DNA, 30 bp, Artificial Sequence
  Synthetic oligonucleotide
agaatatttatcctgttgtaaactagtttg

SEQ ID NO: 499291 - DNA, 30 bp, Artificial Sequence
  Synthetic oligonucleotide
gaatgtgtcctcacaaaagttactagtttg

SEQ ID NO: 499292 - DNA, 30 bp, Artificial Sequence
  Synthetic oligonucleotide
tcttaacggagacagactgtaagtagtttg

SEQ ID NO: 499293 - DNA, 30 bp, Artificial Sequence
  Synthetic oligonucleotide
cccggccccggctgaggtttaaaacgtttg

SEQ ID NO: 499294 - DNA, 30 bp, Artificial Sequence
  Synthetic oligonucleotide
tagatgacagcaacgaacggtgaacgtttg

SEQ ID NO: 499295 - DNA, 30 bp, Artificial Sequence
  Synthetic oligonucleotide
gcagtcgggaattgggtttgctaacgtttg

SEQ ID NO: 499296 - DNA, 31 bp, Artificial Sequence
  Synthetic oligonucleotide
ggcgctaatgcacacaacgctctcccgtttg

SEQ ID NO: 499297 - DNA, 30 bp, Artificial Sequence
  Synthetic oligonucleotide
gcaaaatgacttgctagaaccggccgtttg

SEQ ID NO: 499298 - DNA, 30 bp, Artificial Sequence
  Synthetic oligonucleotide
aaaggatgtgttgggacactgcatcgtttg

SEQ ID NO: 499299 - DNA, 30 bp, Artificial Sequence
  Synthetic oligonucleotide
gctggttgcggtaccgcagcggttcgtttg

SEQ ID NO: 499300 - DNA, 30 bp, Artificial Sequence
  Synthetic oligonucleotide
ctccaggcagttaaaggaagggcaggtttg

SEQ ID NO: 499301 - DNA, 30 bp, Artificial Sequence
  Synthetic oligonucleotide
catttcggttccgcacatgggtgttgtttg

SEQ ID NO: 499302 - DNA, 30 bp, Artificial Sequence
  Synthetic oligonucleotide
cccagtccgatcaggagtatttgttgtttg

SEQ ID NO: 499303 - DNA, 30 bp, Artificial Sequence
  Synthetic oligonucleotide
tgtaaaaaaggcgtatactcatcaattttg

SEQ ID NO: 499304 - DNA, 30 bp, Artificial Sequence
  Synthetic oligonucleotide
actatttcggtgtctgctctattaattttg

SEQ ID NO: 499305 - DNA, 30 bp, Artificial Sequence
  Synthetic oligonucleotide
gcaagggtgggcaaccggaagcacattttg

SEQ ID NO: 499306 - DNA, 30 bp, Artificial Sequence
  Synthetic oligonucleotide
aatgttattcgtgttatgtagagcattttg

SEQ ID NO: 499307 - DNA, 29 bp, Artificial Sequence
  Synthetic oligonucleotide
cactatgaaacgccgcggcttagattttg

SEQ ID NO: 499308 - DNA, 30 bp, Artificial Sequence
  Synthetic oligonucleotide
cgccacgcccggctttattaatatattttg

SEQ ID NO: 499309 - DNA, 30 bp, Artificial Sequence
  Synthetic oligonucleotide
taaggccgcatcagcggccgcaaacttttg

SEQ ID NO: 499310 - DNA, 30 bp, Artificial Sequence
  Synthetic oligonucleotide
gtaataacgttatcatttaggagacttttg

SEQ ID NO: 499311 - DNA, 30 bp, Artificial Sequence
  Synthetic oligonucleotide
gttgcccaaggaatgccgtcaggacttttg

SEQ ID NO: 499312 - DNA, 30 bp, Artificial Sequence
  Synthetic oligonucleotide
ggctaaccgcaatcgcagacaaggcttttg

SEQ ID NO: 499313 - DNA, 30 bp, Artificial Sequence
  Synthetic oligonucleotide
gcagcccttactctcttctcgtgtcttttg

SEQ ID NO: 499314 - DNA, 30 bp, Artificial Sequence
  Synthetic oligonucleotide
aaaagttactatgcatcaactcgcgttttg

SEQ ID NO: 499315 - DNA, 30 bp, Artificial Sequence
  Synthetic oligonucleotide
tttggcagttagcgaaagctgtgggttttg

SEQ ID NO: 499316 - DNA, 30 bp, Artificial Sequence
  Synthetic oligonucleotide
ttggatcattaaagcttgggagttgttttg

SEQ ID NO: 499317 - DNA, 30 bp, Artificial Sequence
  Synthetic oligonucleotide
atctttactgcaaaggaatcttttgttttg

SEQ ID NO: 499318 - DNA, 30 bp, Artificial Sequence
  Synthetic oligonucleotide
gtgtcgcacgcaacattcggaggatttttg

SEQ ID NO: 499319 - DNA, 30 bp, Artificial Sequence
  Synthetic oligonucleotide
acaaccgacatgcatgtagccgtatttttg

SEQ ID NO: 499320 - DNA, 30 bp, Artificial Sequence
  Synthetic oligonucleotide
cactaaaaagactgttaatagaggtttttg

SEQ ID NO: 499321 - DNA, 30 bp, Artificial Sequence
  Synthetic oligonucleotide
gatgcaaacggccgttggtcggggtttttg

SEQ ID NO: 499322 - DNA, 30 bp, Artificial Sequence
  Synthetic oligonucleotide
acccagctgacgtagcctggagtgtttttg

SEQ ID NO: 499323 - DNA, 30 bp, Artificial Sequence
  Synthetic oligonucleotide
aatgacggtttatatgtagaattgtttttg

SEQ ID NO: 499324 - DNA, 31 bp, Artificial Sequence
  Synthetic oligonucleotide
atattaaaccggtgcagcggataattttttg

SEQ ID NO: 499325 - DNA, 30 bp, Artificial Sequence
  Synthetic oligonucleotide
ctaatggtatcaattaagtctatttttttg

SEQ ID NO: 499326 - DNA, 30 bp, Artificial Sequence
  Synthetic oligonucleotide
tctgtggaggagcccacgggaggaaaaaat

SEQ ID NO: 499327 - DNA, 30 bp, Artificial Sequence
  Synthetic oligonucleotide
cttaaaagtaatgcgtggcaaaagaaaaat

SEQ ID NO: 499328 - DNA, 30 bp, Artificial Sequence
  Synthetic oligonucleotide
acaagttccttgaaattccttgataaaaat

SEQ ID NO: 499329 - DNA, 30 bp, Artificial Sequence
  Synthetic oligonucleotide
gtctgcataagcgctatttcagaacaaaat

SEQ ID NO: 499330 - DNA, 30 bp, Artificial Sequence
  Synthetic oligonucleotide
aatctatcttttatgcccagagaacaaaat

SEQ ID NO: 499331 - DNA, 30 bp, Artificial Sequence
  Synthetic oligonucleotide
ctcgaccccgtcgccggtctctgacaaaat

SEQ ID NO: 499332 - DNA, 30 bp, Artificial Sequence
  Synthetic oligonucleotide
ggagttgaagtctgtacaaactaccaaaat

SEQ ID NO: 499333 - DNA, 30 bp, Artificial Sequence
  Synthetic oligonucleotide
tatcacctcgaagcagttgctttccaaaat

SEQ ID NO: 499334 - DNA, 30 bp, Artificial Sequence
  Synthetic oligonucleotide
cttgtcatcagttttagattaagtcaaaat

SEQ ID NO: 499335 - DNA, 30 bp, Artificial Sequence
  Synthetic oligonucleotide
gtgtctaagcagcagtttgcacgtcaaaat

SEQ ID NO: 499336 - DNA, 30 bp, Artificial Sequence
  Synthetic oligonucleotide
gggaaagatccacgtgctaatacagaaaat

SEQ ID NO: 499337 - DNA, 30 bp, Artificial Sequence
  Synthetic oligonucleotide
cgctttgtaagaggcctggttacagaaaat

SEQ ID NO: 499338 - DNA, 30 bp, Artificial Sequence
  Synthetic oligonucleotide
aacagactcatggctgatttacccgaaaat

SEQ ID NO: 499339 - DNA, 30 bp, Artificial Sequence
  Synthetic oligonucleotide
aaatggttctgggtaagggaattcgaaaat

SEQ ID NO: 499340 - DNA, 30 bp, Artificial Sequence
  Synthetic oligonucleotide
ttatttgtagtcgcttgcgttaaggaaaat

SEQ ID NO: 499341 - DNA, 30 bp, Artificial Sequence
  Synthetic oligonucleotide
taggtaaaggacttggtgacttaggaaaat

SEQ ID NO: 499342 - DNA, 30 bp, Artificial Sequence
  Synthetic oligonucleotide
ggattatgcaaacgcagtgggatggaaaat

SEQ ID NO: 499343 - DNA, 30 bp, Artificial Sequence
  Synthetic oligonucleotide
acagacgccaattttgaccatttggaaaat

SEQ ID NO: 499344 - DNA, 30 bp, Artificial Sequence
  Synthetic oligonucleotide
gaaagtaatacgtgactttgagcgtaaaat

SEQ ID NO: 499345 - DNA, 30 bp, Artificial Sequence
  Synthetic oligonucleotide
ggggttcctagacagaagcagcggtaaaat

SEQ ID NO: 499346 - DNA, 30 bp, Artificial Sequence
  Synthetic oligonucleotide
cgctcatgttcacccgtgccaatttaaaat

SEQ ID NO: 499347 - DNA, 30 bp, Artificial Sequence
  Synthetic oligonucleotide
tgttacgcctcaagtctaggcgtttaaaat

SEQ ID NO: 499348 - DNA, 30 bp, Artificial Sequence
  Synthetic oligonucleotide
gatatagtcctgcgtcaggagttttaaaat

SEQ ID NO: 499349 - DNA, 30 bp, Artificial Sequence
  Synthetic oligonucleotide
agcctatttggtaggtttatcaaaacaaat

SEQ ID NO: 499350 - DNA, 30 bp, Artificial Sequence
  Synthetic oligonucleotide
tgtagttcttcttcagtgaagcccacaaat

SEQ ID NO: 499351 - DNA, 31 bp, Artificial Sequence
  Synthetic oligonucleotide
cattgacatgtcttcatagtcgcgcacaaat

SEQ ID NO: 499352 - DNA, 30 bp, Artificial Sequence
  Synthetic oligonucleotide
ttgtgtgcgtaccgtagcgccacgacaaat

SEQ ID NO: 499353 - DNA, 30 bp, Artificial Sequence
  Synthetic oligonucleotide
ttttacatgaccgtcacacgcaatacaaat

SEQ ID NO: 499354 - DNA, 30 bp, Artificial Sequence
  Synthetic oligonucleotide
aatttaggccgcgtgaatgacattacaaat

SEQ ID NO: 499355 - DNA, 30 bp, Artificial Sequence
  Synthetic oligonucleotide
gaaatggttacggaattttcccttacaaat

SEQ ID NO: 499356 - DNA, 30 bp, Artificial Sequence
  Synthetic oligonucleotide
gtatccccgtgataatatgcagtcccaaat

SEQ ID NO: 499357 - DNA, 30 bp, Artificial Sequence
  Synthetic oligonucleotide
aggggccgtcataatttgaggaagccaaat

SEQ ID NO: 499358 - DNA, 30 bp, Artificial Sequence
  Synthetic oligonucleotide
ttgatgcgaagattatgtattctgccaaat

SEQ ID NO: 499359 - DNA, 30 bp, Artificial Sequence
  Synthetic oligonucleotide
acaatatgcgctttcccaaagcgtccaaat

SEQ ID NO: 499360 - DNA, 30 bp, Artificial Sequence
  Synthetic oligonucleotide
gattgtgatcgcaggcacttacttccaaat

SEQ ID NO: 499361 - DNA, 30 bp, Artificial Sequence
  Synthetic oligonucleotide
ctgaacacagcatatgcgaacctagcaaat

SEQ ID NO: 499362 - DNA, 30 bp, Artificial Sequence
  Synthetic oligonucleotide
gaacaattttgcgcatgactaaacgcaaat

SEQ ID NO: 499363 - DNA, 30 bp, Artificial Sequence
  Synthetic oligonucleotide
cgcggcccggcaactgcgaccgccgcaaat

SEQ ID NO: 499364 - DNA, 30 bp, Artificial Sequence
  Synthetic oligonucleotide
aatctgctgctaactgcatactgggcaaat

SEQ ID NO: 499365 - DNA, 30 bp, Artificial Sequence
  Synthetic oligonucleotide
ataaagttataattaggttcacttgcaaat

SEQ ID NO: 499366 - DNA, 30 bp, Artificial Sequence
  Synthetic oligonucleotide
aaaccttgtatacggaaacaatttgcaaat

SEQ ID NO: 499367 - DNA, 30 bp, Artificial Sequence
  Synthetic oligonucleotide
tcttctatattctggacgcggtaatcaaat

SEQ ID NO: 499368 - DNA, 31 bp, Artificial Sequence
  Synthetic oligonucleotide
aatttccgttcaacatatgatcacatcaaat

SEQ ID NO: 499369 - DNA, 30 bp, Artificial Sequence
  Synthetic oligonucleotide
ttatgtagaagccagcaattcacatcaaat

SEQ ID NO: 499370 - DNA, 30 bp, Artificial Sequence
  Synthetic oligonucleotide
tcaatagatttgtagattaccttatcaaat

SEQ ID NO: 499371 - DNA, 30 bp, Artificial Sequence
  Synthetic oligonucleotide
gagacaattcggacagggcttttctcaaat

SEQ ID NO: 499372 - DNA, 30 bp, Artificial Sequence
  Synthetic oligonucleotide
ctgctagctattctgtagtaacggtcaaat

SEQ ID NO: 499373 - DNA, 30 bp, Artificial Sequence
  Synthetic oligonucleotide
tacgtactgttgagtgataattggtcaaat

SEQ ID NO: 499374 - DNA, 30 bp, Artificial Sequence
  Synthetic oligonucleotide
gagtgtaattgagcacaatctgtgtcaaat

SEQ ID NO: 499375 - DNA, 30 bp, Artificial Sequence
  Synthetic oligonucleotide
ccggggccaagtctttccaagaaaagaaat

SEQ ID NO: 499376 - DNA, 30 bp, Artificial Sequence
  Synthetic oligonucleotide
cttgttcctgttaagtaatacacaagaaat

SEQ ID NO: 499377 - DNA, 30 bp, Artificial Sequence
  Synthetic oligonucleotide
ggactttcggacgcgtcgcgcgtaagaaat

SEQ ID NO: 499378 - DNA, 30 bp, Artificial Sequence
  Synthetic oligonucleotide
ggtggttgtattctctttgcgggcagaaat

SEQ ID NO: 499379 - DNA, 30 bp, Artificial Sequence
  Synthetic oligonucleotide
actttgaactggcacgaggtgctcagaaat

SEQ ID NO: 499380 - DNA, 30 bp, Artificial Sequence
  Synthetic oligonucleotide
gggctgatagagacggtttttttcagaaat

SEQ ID NO: 499381 - DNA, 30 bp, Artificial Sequence
  Synthetic oligonucleotide
agtatcttcaaggagggagcccctagaaat

SEQ ID NO: 499382 - DNA, 30 bp, Artificial Sequence
  Synthetic oligonucleotide
gagacgcgattttaaagccccaaacgaaat

SEQ ID NO: 499383 - DNA, 30 bp, Artificial Sequence
  Synthetic oligonucleotide
aactagtacgcaacgcaatcgaaacgaaat

SEQ ID NO: 499384 - DNA, 30 bp, Artificial Sequence
  Synthetic oligonucleotide
gagcggcatgtcgatccaatagaacgaaat

SEQ ID NO: 499385 - DNA, 30 bp, Artificial Sequence
  Synthetic oligonucleotide
acgagacgtgtgaatcctaggggacgaaat

SEQ ID NO: 499386 - DNA, 30 bp, Artificial Sequence
  Synthetic oligonucleotide
tgtttctttctttgtcgttatggacgaaat

SEQ ID NO: 499387 - DNA, 30 bp, Artificial Sequence
  Synthetic oligonucleotide
attgggcacggcgacggcggctggcgaaat

SEQ ID NO: 499388 - DNA, 30 bp, Artificial Sequence
  Synthetic oligonucleotide
gtaatgtcatattatgcacgttatcgaaat

SEQ ID NO: 499389 - DNA, 30 bp, Artificial Sequence
  Synthetic oligonucleotide
gcaggccaatcgacggccctttgtcgaaat

SEQ ID NO: 499390 - DNA, 30 bp, Artificial Sequence
  Synthetic oligonucleotide
aatatcgggggattcgtgttacaaggaaat

SEQ ID NO: 499391 - DNA, 30 bp, Artificial Sequence
  Synthetic oligonucleotide
ccccgtactgatgacttcatggcaggaaat

SEQ ID NO: 499392 - DNA, 30 bp, Artificial Sequence
  Synthetic oligonucleotide
cgcaagcaagtctttaactaaataggaaat

SEQ ID NO: 499393 - DNA, 30 bp, Artificial Sequence
  Synthetic oligonucleotide
attgtatgttttgaacgtgtctccggaaat

SEQ ID NO: 499394 - DNA, 30 bp, Artificial Sequence
  Synthetic oligonucleotide
ggctgttcgatgttgtagtcgagcggaaat

SEQ ID NO: 499395 - DNA, 30 bp, Artificial Sequence
  Synthetic oligonucleotide
ttgaaactgactcttgggtcttgcggaaat

SEQ ID NO: 499396 - DNA, 30 bp, Artificial Sequence
  Synthetic oligonucleotide
gcattttgacgaacgatttgtatgggaaat

SEQ ID NO: 499397 - DNA, 30 bp, Artificial Sequence
  Synthetic oligonucleotide
attaacaagcagttgctgcttgtgggaaat

SEQ ID NO: 499398 - DNA, 30 bp, Artificial Sequence
  Synthetic oligonucleotide
atgtgtctcggaagatcggtacatggaaat

SEQ ID NO: 499399 - DNA, 30 bp, Artificial Sequence
  Synthetic oligonucleotide
tcggaataatgccttaaagatcatggaaat

SEQ ID NO: 499400 - DNA, 30 bp, Artificial Sequence
  Synthetic oligonucleotide
taattgtttctccataatgggtgtggaaat

SEQ ID NO: 499401 - DNA, 30 bp, Artificial Sequence
  Synthetic oligonucleotide
ggtcgctttgattatattgtgaaatgaaat

SEQ ID NO: 499402 - DNA, 30 bp, Artificial Sequence
  Synthetic oligonucleotide
ccgtacatgcattccatggtttaatgaaat

SEQ ID NO: 499403 - DNA, 30 bp, Artificial Sequence
  Synthetic oligonucleotide
tttatttcctatataagccggaactgaaat

SEQ ID NO: 499404 - DNA, 30 bp, Artificial Sequence
  Synthetic oligonucleotide
gcttacggtggcgaactcgtccggtgaaat

SEQ ID NO: 499405 - DNA, 30 bp, Artificial Sequence
  Synthetic oligonucleotide
cacttcgatgcctctaattcagattgaaat

SEQ ID NO: 499406 - DNA, 30 bp, Artificial Sequence
  Synthetic oligonucleotide
gccctatcaagcgacaagtgtagttgaaat

SEQ ID NO: 499407 - DNA, 30 bp, Artificial Sequence
  Synthetic oligonucleotide
ggtgtagaagcccattggcattaaataaat

SEQ ID NO: 499408 - DNA, 30 bp, Artificial Sequence
  Synthetic oligonucleotide
ccttattatttaatagccgcctgcataaat

SEQ ID NO: 499409 - DNA, 30 bp, Artificial Sequence
  Synthetic oligonucleotide
tacgcaacgattttagaagtgtgcataaat

SEQ ID NO: 499410 - DNA, 30 bp, Artificial Sequence
  Synthetic oligonucleotide
cgtctggtacgcacaggcccggatataaat

SEQ ID NO: 499411 - DNA, 30 bp, Artificial Sequence
  Synthetic oligonucleotide
ctctatcatcggagttcatagtgtataaat

SEQ ID NO: 499412 - DNA, 30 bp, Artificial Sequence
  Synthetic oligonucleotide
ttctgggaaatttgctgtagtctactaaat

SEQ ID NO: 499413 - DNA, 30 bp, Artificial Sequence
  Synthetic oligonucleotide
cggtttatatttgcaacttcaaacctaaat

SEQ ID NO: 499414 - DNA, 30 bp, Artificial Sequence
  Synthetic oligonucleotide
cttatcggggaatctcggtcagacctaaat

SEQ ID NO: 499415 - DNA, 30 bp, Artificial Sequence
  Synthetic oligonucleotide
catagtccacgggttgatcgaccgctaaat

SEQ ID NO: 499416 - DNA, 30 bp, Artificial Sequence
  Synthetic oligonucleotide
ggtttatgcgtgtatgtggtggtgctaaat

SEQ ID NO: 499417 - DNA, 30 bp, Artificial Sequence
  Synthetic oligonucleotide
ccctttggaacttggggtcttagtctaaat

SEQ ID NO: 499418 - DNA, 30 bp, Artificial Sequence
  Synthetic oligonucleotide
gcaggttaattataggtatgaattctaaat

SEQ ID NO: 499419 - DNA, 30 bp, Artificial Sequence
  Synthetic oligonucleotide
taaaaccggattttctaatccattctaaat

SEQ ID NO: 499420 - DNA, 30 bp, Artificial Sequence
  Synthetic oligonucleotide
ccactgaaatcgatacccttagttctaaat

SEQ ID NO: 499421 - DNA, 30 bp, Artificial Sequence
  Synthetic oligonucleotide
tctagtgtatctcttcagggcacagtaaat

SEQ ID NO: 499422 - DNA, 30 bp, Artificial Sequence
  Synthetic oligonucleotide
ggttttgggccgaatgccccgttagtaaat

SEQ ID NO: 499423 - DNA, 30 bp, Artificial Sequence
  Synthetic oligonucleotide
cattgcttagctaagttggggttagtaaat

SEQ ID NO: 499424 - DNA, 30 bp, Artificial Sequence
  Synthetic oligonucleotide
tgttgctcaactgggatgtatgatgtaaat

SEQ ID NO: 499425 - DNA, 30 bp, Artificial Sequence
  Synthetic oligonucleotide
gatccgttgattttggcctcctatgtaaat

SEQ ID NO: 499426 - DNA, 30 bp, Artificial Sequence
  Synthetic oligonucleotide
gctctatagggagccggttccattgtaaat

SEQ ID NO: 499427 - DNA, 30 bp, Artificial Sequence
  Synthetic oligonucleotide
attcgttaagttagactgagttaattaaat

SEQ ID NO: 499428 - DNA, 30 bp, Artificial Sequence
  Synthetic oligonucleotide
cccacgcagtcacattcggaggtattaaat

SEQ ID NO: 499429 - DNA, 30 bp, Artificial Sequence
  Synthetic oligonucleotide
ttaggacttaaatataacatctacttaaat

SEQ ID NO: 499430 - DNA, 30 bp, Artificial Sequence
  Synthetic oligonucleotide
gcgttcagatttccacttatttacttaaat

SEQ ID NO: 499431 - DNA, 30 bp, Artificial Sequence
  Synthetic oligonucleotide
taatagcccttaaagcggatcctgttaaat

SEQ ID NO: 499432 - DNA, 30 bp, Artificial Sequence
  Synthetic oligonucleotide
acttcgcagctgagaaacaaaaatttaaat

SEQ ID NO: 499433 - DNA, 30 bp, Artificial Sequence
  Synthetic oligonucleotide
atttgccaatcttagtcatacgatttaaat

SEQ ID NO: 499434 - DNA, 30 bp, Artificial Sequence
  Synthetic oligonucleotide
ttggttatcttaggaggtctggatttaaat

SEQ ID NO: 499435 - DNA, 30 bp, Artificial Sequence
  Synthetic oligonucleotide
tctgcctacacgaaattcaagtctttaaat

SEQ ID NO: 499436 - DNA, 30 bp, Artificial Sequence
  Synthetic oligonucleotide
ggccctcgtggaacaaattagaaaaacaat

SEQ ID NO: 499437 - DNA, 30 bp, Artificial Sequence
  Synthetic oligonucleotide
tttgcagcttctgttatggttaaaaacaat

SEQ ID NO: 499438 - DNA, 30 bp, Artificial Sequence
  Synthetic oligonucleotide
aactagaagtattcgaatatagaaaacaat

SEQ ID NO: 499439 - DNA, 30 bp, Artificial Sequence
  Synthetic oligonucleotide
cttgggatgcgctttagcgtgtaaaacaat

SEQ ID NO: 499440 - DNA, 30 bp, Artificial Sequence
  Synthetic oligonucleotide
cgttccggtgttgcagccacgggaaacaat

SEQ ID NO: 499441 - DNA, 30 bp, Artificial Sequence
  Synthetic oligonucleotide
taaagtaggagcccgacgcacggcaacaat

SEQ ID NO: 499442 - DNA, 30 bp, Artificial Sequence
  Synthetic oligonucleotide
cctcgtattccctgacagcacgggaacaat

SEQ ID NO: 499443 - DNA, 30 bp, Artificial Sequence
  Synthetic oligonucleotide
aaacattgaatactatacgcttgtaacaat

SEQ ID NO: 499444 - DNA, 30 bp, Artificial Sequence
  Synthetic oligonucleotide
atctggttgaaacggctgattcttaacaat

SEQ ID NO: 499445 - DNA, 30 bp, Artificial Sequence
  Synthetic oligonucleotide
cgttttatgcatgcaaacgttgctcacaat

SEQ ID NO: 499446 - DNA, 30 bp, Artificial Sequence
  Synthetic oligonucleotide
ctatcgaggggatctccatattctcacaat

SEQ ID NO: 499447 - DNA, 30 bp, Artificial Sequence
  Synthetic oligonucleotide
tttcaggatttgtcaccactgaaagacaat

SEQ ID NO: 499448 - DNA, 30 bp, Artificial Sequence
  Synthetic oligonucleotide
tagcacagagcctctcaatactgagacaat

SEQ ID NO: 499449 - DNA, 30 bp, Artificial Sequence
  Synthetic oligonucleotide
actgggtgctggagctcggagagcgacaat

SEQ ID NO: 499450 - DNA, 30 bp, Artificial Sequence
  Synthetic oligonucleotide
atattgtcttagttctcaactgcggacaat

SEQ ID NO: 499451 - DNA, 30 bp, Artificial Sequence
  Synthetic oligonucleotide
catcgaatttatggccgcaagtatgacaat

SEQ ID NO: 499452 - DNA, 30 bp, Artificial Sequence
  Synthetic oligonucleotide
ttgatcgaattctcgctcgcagtgtacaat

SEQ ID NO: 499453 - DNA, 30 bp, Artificial Sequence
  Synthetic oligonucleotide
ccagagtgggcagttaatggttattacaat

SEQ ID NO: 499454 - DNA, 30 bp, Artificial Sequence
  Synthetic oligonucleotide
cgtgttcgtacagcgggaaattgttacaat

SEQ ID NO: 499455 - DNA, 30 bp, Artificial Sequence
  Synthetic oligonucleotide
ctcgatggaaaagtcatgtatttttacaat

SEQ ID NO: 499456 - DNA, 30 bp, Artificial Sequence
  Synthetic oligonucleotide
agcaatttgtctaagacgtggtcaaccaat

SEQ ID NO: 499457 - DNA, 30 bp, Artificial Sequence
  Synthetic oligonucleotide
gcttttaaagttcgaagttggtcaaccaat

SEQ ID NO: 499458 - DNA, 30 bp, Artificial Sequence
  Synthetic oligonucleotide
atttgcgcaattggaactgggatcaccaat

SEQ ID NO: 499459 - DNA, 30 bp, Artificial Sequence
  Synthetic oligonucleotide
aaactattgtgtcggggacccaataccaat

SEQ ID NO: 499460 - DNA, 30 bp, Artificial Sequence
  Synthetic oligonucleotide
gatttcgattggtttgccctaggtaccaat

SEQ ID NO: 499461 - DNA, 30 bp, Artificial Sequence
  Synthetic oligonucleotide
gaagcagttctttactacataattaccaat

SEQ ID NO: 499462 - DNA, 30 bp, Artificial Sequence
  Synthetic oligonucleotide
cgatctttagattttttcggtgaacccaat

SEQ ID NO: 499463 - DNA, 30 bp, Artificial Sequence
  Synthetic oligonucleotide
gccctcagcgcatgcgccagcgcacccaat

SEQ ID NO: 499464 - DNA, 30 bp, Artificial Sequence
  Synthetic oligonucleotide
actctaagtttacaaaactggctgcccaat

SEQ ID NO: 499465 - DNA, 30 bp, Artificial Sequence
  Synthetic oligonucleotide
agttgacgccgtcgtatcgcaaatcccaat

SEQ ID NO: 499466 - DNA, 30 bp, Artificial Sequence
  Synthetic oligonucleotide
ggtaataggtatatcttagaatctcccaat

SEQ ID NO: 499467 - DNA, 30 bp, Artificial Sequence
  Synthetic oligonucleotide
aaaatatgcttaggcgggcagacagccaat

SEQ ID NO: 499468 - DNA, 30 bp, Artificial Sequence
  Synthetic oligonucleotide
gcagtaggaagagcttcggtcgcggccaat

SEQ ID NO: 499469 - DNA, 30 bp, Artificial Sequence
  Synthetic oligonucleotide
cccttgatgagaagcatattgcgggccaat

SEQ ID NO: 499470 - DNA, 30 bp, Artificial Sequence
  Synthetic oligonucleotide
tggcgctgttagtgcggattcatggccaat

SEQ ID NO: 499471 - DNA, 30 bp, Artificial Sequence
  Synthetic oligonucleotide
gtataccgtagcatgttgcaaaaatccaat

SEQ ID NO: 499472 - DNA, 30 bp, Artificial Sequence
  Synthetic oligonucleotide
aatatacgggaacgcgcgtgcgaatccaat

SEQ ID NO: 499473 - DNA, 30 bp, Artificial Sequence
  Synthetic oligonucleotide
acgcctggacgtaaggatgcccagtccaat

SEQ ID NO: 499474 - DNA, 30 bp, Artificial Sequence
  Synthetic oligonucleotide
gagccgttattcatcacttgagagtccaat

SEQ ID NO: 499475 - DNA, 30 bp, Artificial Sequence
  Synthetic oligonucleotide
gattttccccgagtactcttagcgtccaat

SEQ ID NO: 499476 - DNA, 30 bp, Artificial Sequence
  Synthetic oligonucleotide
ggggtagattcgcgcgacccggtgtccaat

SEQ ID NO: 499477 - DNA, 30 bp, Artificial Sequence
  Synthetic oligonucleotide
ataagccggttcttggaggctacttccaat

SEQ ID NO: 499478 - DNA, 30 bp, Artificial Sequence
  Synthetic oligonucleotide
gattaggggtcccacctggacaaaagcaat

SEQ ID NO: 499479 - DNA, 30 bp, Artificial Sequence
  Synthetic oligonucleotide
gatcaatcgttcgtaacaaacacaagcaat

SEQ ID NO: 499480 - DNA, 30 bp, Artificial Sequence
  Synthetic oligonucleotide
ttcatgttttccttgacaccggacagcaat

SEQ ID NO: 499481 - DNA, 30 bp, Artificial Sequence
  Synthetic oligonucleotide
aaacgtttatgcggaatgcttaagagcaat

SEQ ID NO: 499482 - DNA, 30 bp, Artificial Sequence
  Synthetic oligonucleotide
tccacgcgcctaactcggcgcccgagcaat

SEQ ID NO: 499483 - DNA, 30 bp, Artificial Sequence
  Synthetic oligonucleotide
accttgccccggatattgggccggagcaat

SEQ ID NO: 499484 - DNA, 30 bp, Artificial Sequence
  Synthetic oligonucleotide
cattcctgtttgcgtgcaataaatagcaat

SEQ ID NO: 499485 - DNA, 30 bp, Artificial Sequence
  Synthetic oligonucleotide
attgcttctgtttgccaacaaggacgcaat

SEQ ID NO: 499486 - DNA, 30 bp, Artificial Sequence
  Synthetic oligonucleotide
gtgcgctgtgggagagatacatgacgcaat

SEQ ID NO: 499487 - DNA, 30 bp, Artificial Sequence
  Synthetic oligonucleotide
ctgaagtcgtcgcaattggtaatacgcaat

SEQ ID NO: 499488 - DNA, 30 bp, Artificial Sequence
  Synthetic oligonucleotide
gggatatctgtgagttggtcgaaccgcaat

SEQ ID NO: 499489 - DNA, 30 bp, Artificial Sequence
  Synthetic oligonucleotide
acgatagggtgccggcgttgccgccgcaat

SEQ ID NO: 499490 - DNA, 30 bp, Artificial Sequence
  Synthetic oligonucleotide
caacaaatgcgcggacgacgtgtccgcaat

SEQ ID NO: 499491 - DNA, 30 bp, Artificial Sequence
  Synthetic oligonucleotide
acgcgacttcccggcattccctagcgcaat

SEQ ID NO: 499492 - DNA, 30 bp, Artificial Sequence
  Synthetic oligonucleotide
cgcaatcgaggcataattcgtttgcgcaat

SEQ ID NO: 499493 - DNA, 30 bp, Artificial Sequence
  Synthetic oligonucleotide
ctccctaggctcccaccgttaactcgcaat

SEQ ID NO: 499494 - DNA, 30 bp, Artificial Sequence
  Synthetic oligonucleotide
cccgtggatcaccctttgcgcactcgcaat

SEQ ID NO: 499495 - DNA, 30 bp, Artificial Sequence
  Synthetic oligonucleotide
gcaccccataggcgggggtaagttcgcaat

SEQ ID NO: 499496 - DNA, 30 bp, Artificial Sequence
  Synthetic oligonucleotide
ttagggctcggcgtaggaatgtaaggcaat

SEQ ID NO: 499497 - DNA, 30 bp, Artificial Sequence
  Synthetic oligonucleotide
gcatcgctgatctaaccaaccaccggcaat

SEQ ID NO: 499498 - DNA, 30 bp, Artificial Sequence
  Synthetic oligonucleotide
ggaattctgggcaaaacggagggcggcaat

SEQ ID NO: 499499 - DNA, 30 bp, Artificial Sequence
  Synthetic oligonucleotide
gaaacgggtgcgtagggtgtgaagggcaat

SEQ ID NO: 499500 - DNA, 30 bp, Artificial Sequence
  Synthetic oligonucleotide
gtcgacctccggttgaataccacgggcaat

SEQ ID NO: 499501 - DNA, 30 bp, Artificial Sequence
  Synthetic oligonucleotide
gcatttctagggtccggcaactggggcaat

SEQ ID NO: 499502 - DNA, 30 bp, Artificial Sequence
  Synthetic oligonucleotide
atcgcctccctgagctctaccatgggcaat

SEQ ID NO: 499503 - DNA, 30 bp, Artificial Sequence
  Synthetic oligonucleotide
agaatacattgatgctacgtggatggcaat

SEQ ID NO: 499504 - DNA, 30 bp, Artificial Sequence
  Synthetic oligonucleotide
ttaacgcttgcagttcagggataatgcaat

SEQ ID NO: 499505 - DNA, 30 bp, Artificial Sequence
  Synthetic oligonucleotide
tattccccgtgtacaaaaaatggatgcaat

SEQ ID NO: 499506 - DNA, 30 bp, Artificial Sequence
  Synthetic oligonucleotide
actaagcatctattatgatgtgtatgcaat

SEQ ID NO: 499507 - DNA, 30 bp, Artificial Sequence
  Synthetic oligonucleotide
ggtttaagcatgttagattatgtctgcaat

SEQ ID NO: 499508 - DNA, 30 bp, Artificial Sequence
  Synthetic oligonucleotide
ctcctctgttggggatctctgccgtgcaat

SEQ ID NO: 499509 - DNA, 30 bp, Artificial Sequence
  Synthetic oligonucleotide
actataattgaacggcataggtggtgcaat

SEQ ID NO: 499510 - DNA, 30 bp, Artificial Sequence
  Synthetic oligonucleotide
atatgccccagttaagttcgtgcttgcaat

SEQ ID NO: 499511 - DNA, 30 bp, Artificial Sequence
  Synthetic oligonucleotide
tacggtataagctaataggcagcaatcaat

SEQ ID NO: 499512 - DNA, 30 bp, Artificial Sequence
  Synthetic oligonucleotide
atattcatacggtccaataatcgaatcaat

SEQ ID NO: 499513 - DNA, 30 bp, Artificial Sequence
  Synthetic oligonucleotide
cttaataagttgttggtatgtgtaatcaat

SEQ ID NO: 499514 - DNA, 30 bp, Artificial Sequence
  Synthetic oligonucleotide
ataaccgtttgttagtcgcgattaatcaat

SEQ ID NO: 499515 - DNA, 30 bp, Artificial Sequence
  Synthetic oligonucleotide
gaaaaacattacatgtcctgaaagatcaat

SEQ ID NO: 499516 - DNA, 30 bp, Artificial Sequence
  Synthetic oligonucleotide
gaacgaccgactcaaaatagatcgatcaat

SEQ ID NO: 499517 - DNA, 30 bp, Artificial Sequence
  Synthetic oligonucleotide
tgtagatcgcgacacccttaaaggatcaat

SEQ ID NO: 499518 - DNA, 30 bp, Artificial Sequence
  Synthetic oligonucleotide
ccagcgacttcgggtctcagccatatcaat

SEQ ID NO: 499519 - DNA, 30 bp, Artificial Sequence
  Synthetic oligonucleotide
aatctcaatagaactagtatatctatcaat

SEQ ID NO: 499520 - DNA, 30 bp, Artificial Sequence
  Synthetic oligonucleotide
gaggtctggatagggatctatggtatcaat

SEQ ID NO: 499521 - DNA, 30 bp, Artificial Sequence
  Synthetic oligonucleotide
gcccaggatatggaactcggatttatcaat

SEQ ID NO: 499522 - DNA, 30 bp, Artificial Sequence
  Synthetic oligonucleotide
tgatggattcatcatttggctgaactcaat

SEQ ID NO: 499523 - DNA, 30 bp, Artificial Sequence
  Synthetic oligonucleotide
aatatactcgtaaagagcgctcgactcaat

SEQ ID NO: 499524 - DNA, 30 bp, Artificial Sequence
  Synthetic oligonucleotide
aatccgcgagcgtccgcacttggactcaat

SEQ ID NO: 499525 - DNA, 30 bp, Artificial Sequence
  Synthetic oligonucleotide
ctaaagttgcggagtgacgggtggctcaat

SEQ ID NO: 499526 - DNA, 30 bp, Artificial Sequence
  Synthetic oligonucleotide
tttgatcgtaccgtttacacaccagtcaat

SEQ ID NO: 499527 - DNA, 30 bp, Artificial Sequence
  Synthetic oligonucleotide
tatcagattggctcgtgatatagagtcaat

SEQ ID NO: 499528 - DNA, 30 bp, Artificial Sequence
  Synthetic oligonucleotide
aatttggcaaggggctccgtgtccgtcaat

SEQ ID NO: 499529 - DNA, 30 bp, Artificial Sequence
  Synthetic oligonucleotide
gcccctgaatttgggacatctatcgtcaat

SEQ ID NO: 499530 - DNA, 30 bp, Artificial Sequence
  Synthetic oligonucleotide
cctcaacagttagcccccgacgcggtcaat

SEQ ID NO: 499531 - DNA, 30 bp, Artificial Sequence
  Synthetic oligonucleotide
ccggtcttgcgtcgcggaaatagggtcaat

SEQ ID NO: 499532 - DNA, 30 bp, Artificial Sequence
  Synthetic oligonucleotide
gtgatgtcgcgcggacccatatgggtcaat

SEQ ID NO: 499533 - DNA, 30 bp, Artificial Sequence
  Synthetic oligonucleotide
gacgcactccctgggtcagtacttgtcaat

SEQ ID NO: 499534 - DNA, 30 bp, Artificial Sequence
  Synthetic oligonucleotide
ggttattgactagttccggttgttgtcaat

SEQ ID NO: 499535 - DNA, 30 bp, Artificial Sequence
  Synthetic oligonucleotide
gctgtaactgtagttatggagtaattcaat

SEQ ID NO: 499536 - DNA, 30 bp, Artificial Sequence
  Synthetic oligonucleotide
gtttcaccgagaagtacaagagtcttcaat

SEQ ID NO: 499537 - DNA, 30 bp, Artificial Sequence
  Synthetic oligonucleotide
actggcgggggctgcaggtcttcgttcaat

SEQ ID NO: 499538 - DNA, 30 bp, Artificial Sequence
  Synthetic oligonucleotide
tcgatatatcggccaatctttcaaaagaat

SEQ ID NO: 499539 - DNA, 30 bp, Artificial Sequence
  Synthetic oligonucleotide
gaatgcacaatccccagacctatcaagaat

SEQ ID NO: 499540 - DNA, 30 bp, Artificial Sequence
  Synthetic oligonucleotide
ttgctatattagggttttatagcgaagaat

SEQ ID NO: 499541 - DNA, 30 bp, Artificial Sequence
  Synthetic oligonucleotide
tgatatagaggctacactttagagcagaat

SEQ ID NO: 499542 - DNA, 30 bp, Artificial Sequence
  Synthetic oligonucleotide
tagccggtgcttggggacacgggggagaat

SEQ ID NO: 499543 - DNA, 30 bp, Artificial Sequence
  Synthetic oligonucleotide
gttgcgtctacataaggtcgatgatagaat

SEQ ID NO: 499544 - DNA, 30 bp, Artificial Sequence
  Synthetic oligonucleotide
aaagtacgacaggtatgttcccagtagaat

SEQ ID NO: 499545 - DNA, 29 bp, Artificial Sequence
  Synthetic oligonucleotide
tggtaacacattcaacatttgggtagaat

SEQ ID NO: 499546 - DNA, 30 bp, Artificial Sequence
  Synthetic oligonucleotide
ggctccattacaacgtagagttcttagaat

SEQ ID NO: 499547 - DNA, 30 bp, Artificial Sequence
  Synthetic oligonucleotide
ctactccatgatcccggccgtagttagaat

SEQ ID NO: 499548 - DNA, 30 bp, Artificial Sequence
  Synthetic oligonucleotide
gcttttgacctcatgagtgagaaaacgaat

SEQ ID NO: 499549 - DNA, 30 bp, Artificial Sequence
  Synthetic oligonucleotide
ttgctgaacaggtgtcatcgtggaacgaat

SEQ ID NO: 499550 - DNA, 30 bp, Artificial Sequence
  Synthetic oligonucleotide
taggctgctgaattctgtgaactaacgaat

SEQ ID NO: 499551 - DNA, 30 bp, Artificial Sequence
  Synthetic oligonucleotide
gcacgttggcgtccagagggtttaacgaat

SEQ ID NO: 499552 - DNA, 30 bp, Artificial Sequence
  Synthetic oligonucleotide
attgaacgcaacgaattgcggtccacgaat

SEQ ID NO: 499553 - DNA, 30 bp, Artificial Sequence
  Synthetic oligonucleotide
aaattagcacagtctttaaagtgcacgaat

SEQ ID NO: 499554 - DNA, 30 bp, Artificial Sequence
  Synthetic oligonucleotide
agctgttattatgtcgtaggtaggacgaat

SEQ ID NO: 499555 - DNA, 30 bp, Artificial Sequence
  Synthetic oligonucleotide
ccgtttaatttgagctgcgatattacgaat

SEQ ID NO: 499556 - DNA, 30 bp, Artificial Sequence
  Synthetic oligonucleotide
gacgcagcggggcacccgcgctgaccgaat

SEQ ID NO: 499557 - DNA, 30 bp, Artificial Sequence
  Synthetic oligonucleotide
cattactatagtcgggaattttgaccgaat

SEQ ID NO: 499558 - DNA, 30 bp, Artificial Sequence
  Synthetic oligonucleotide
ttccaatcgagtcagggataacacccgaat

SEQ ID NO: 499559 - DNA, 30 bp, Artificial Sequence
  Synthetic oligonucleotide
tcaatcccgtatacgctataccacccgaat

SEQ ID NO: 499560 - DNA, 30 bp, Artificial Sequence
  Synthetic oligonucleotide
gttggcggtttggcagctttccagccgaat

SEQ ID NO: 499561 - DNA, 31 bp, Artificial Sequence
  Synthetic oligonucleotide
gttcgctatatatgtcagacgcacgccgaat

SEQ ID NO: 499562 - DNA, 30 bp, Artificial Sequence
  Synthetic oligonucleotide
tatcgtggaagcaaaaatcgagatccgaat

SEQ ID NO: 499563 - DNA, 30 bp, Artificial Sequence
  Synthetic oligonucleotide
ggcataagtgtcggcagcggataagcgaat

SEQ ID NO: 499564 - DNA, 30 bp, Artificial Sequence
  Synthetic oligonucleotide
gcttcagtcaccttctgtagtgcagcgaat

SEQ ID NO: 499565 - DNA, 30 bp, Artificial Sequence
  Synthetic oligonucleotide
accgacgtagccgctatacgccgggcgaat

SEQ ID NO: 499566 - DNA, 30 bp, Artificial Sequence
  Synthetic oligonucleotide
cgcgggaatctgcaccatgtatgtgcgaat

SEQ ID NO: 499567 - DNA, 30 bp, Artificial Sequence
  Synthetic oligonucleotide
cggttgcatgtataatcgcgaccatcgaat

SEQ ID NO: 499568 - DNA, 30 bp, Artificial Sequence
  Synthetic oligonucleotide
aaaaccatgataattgttgggcactcgaat

SEQ ID NO: 499569 - DNA, 30 bp, Artificial Sequence
  Synthetic oligonucleotide
tgcctgttttgacgtagtacgtgctcgaat

SEQ ID NO: 499570 - DNA, 30 bp, Artificial Sequence
  Synthetic oligonucleotide
atccgatcgcctaagcataggacgtcgaat

SEQ ID NO: 499571 - DNA, 31 bp, Artificial Sequence
  Synthetic oligonucleotide
gccgtgacttgatacgcaccgatggtcgaat

SEQ ID NO: 499572 - DNA, 30 bp, Artificial Sequence
  Synthetic oligonucleotide
gctggctagccctcttgggcggacaggaat

SEQ ID NO: 499573 - DNA, 30 bp, Artificial Sequence
  Synthetic oligonucleotide
gggctcacgaccaatatgggggccaggaat

SEQ ID NO: 499574 - DNA, 30 bp, Artificial Sequence
  Synthetic oligonucleotide
gaaagactttactgaaggagcatcaggaat

SEQ ID NO: 499575 - DNA, 30 bp, Artificial Sequence
  Synthetic oligonucleotide
aaatcgcagtttccaaactccatgaggaat

SEQ ID NO: 499576 - DNA, 30 bp, Artificial Sequence
  Synthetic oligonucleotide
ccgcctatcagtcacggggtaaataggaat

SEQ ID NO: 499577 - DNA, 30 bp, Artificial Sequence
  Synthetic oligonucleotide
aaccggccttcgcactgatgctaacggaat

SEQ ID NO: 499578 - DNA, 30 bp, Artificial Sequence
  Synthetic oligonucleotide
caggcactctcatcatacgccgaccggaat

SEQ ID NO: 499579 - DNA, 30 bp, Artificial Sequence
  Synthetic oligonucleotide
ttatactcccctctcgtgagataagggaat

SEQ ID NO: 499580 - DNA, 30 bp, Artificial Sequence
  Synthetic oligonucleotide
ccgggtcgccgctgctcttttccagggaat

SEQ ID NO: 499581 - DNA, 30 bp, Artificial Sequence
  Synthetic oligonucleotide
ctggtttactgagtgtctatttcagggaat

SEQ ID NO: 499582 - DNA, 30 bp, Artificial Sequence
  Synthetic oligonucleotide
ctatggacgagaacttagatactagggaat

SEQ ID NO: 499583 - DNA, 30 bp, Artificial Sequence
  Synthetic oligonucleotide
ttcaattatgttaacgatcgactcgggaat

SEQ ID NO: 499584 - DNA, 30 bp, Artificial Sequence
  Synthetic oligonucleotide
ttttcggctatctcagaatgattcgggaat

SEQ ID NO: 499585 - DNA, 30 bp, Artificial Sequence
  Synthetic oligonucleotide
tgtatggtccaattcgttacgagggggaat

SEQ ID NO: 499586 - DNA, 30 bp, Artificial Sequence
  Synthetic oligonucleotide
tccaatatctgcgatttttatcttgggaat

SEQ ID NO: 499587 - DNA, 30 bp, Artificial Sequence
  Synthetic oligonucleotide
aatacacgtgtacattcggtggcatggaat

SEQ ID NO: 499588 - DNA, 30 bp, Artificial Sequence
  Synthetic oligonucleotide
aaacttaaagcaaacactcttagatggaat

SEQ ID NO: 499589 - DNA, 30 bp, Artificial Sequence
  Synthetic oligonucleotide
attaattgttcatgtgaggcgcgatggaat

SEQ ID NO: 499590 - DNA, 30 bp, Artificial Sequence
  Synthetic oligonucleotide
cattatggaatatgcgtagcgtgatggaat

SEQ ID NO: 499591 - DNA, 30 bp, Artificial Sequence
  Synthetic oligonucleotide
aaacgagcgtccagtaatagatactggaat

SEQ ID NO: 499592 - DNA, 30 bp, Artificial Sequence
  Synthetic oligonucleotide
tccgtgcctgttgagatgttttactggaat

SEQ ID NO: 499593 - DNA, 30 bp, Artificial Sequence
  Synthetic oligonucleotide
ctgctttctgttccagtaatatggtggaat

SEQ ID NO: 499594 - DNA, 30 bp, Artificial Sequence
  Synthetic oligonucleotide
aattgcacgtccgcgccatatctgtggaat

SEQ ID NO: 499595 - DNA, 30 bp, Artificial Sequence
  Synthetic oligonucleotide
gacataatatgcacacggctagtaatgaat

SEQ ID NO: 499596 - DNA, 30 bp, Artificial Sequence
  Synthetic oligonucleotide
gaatgattgcagtaagatacattaatgaat

SEQ ID NO: 499597 - DNA, 30 bp, Artificial Sequence
  Synthetic oligonucleotide
atgatttatcgacgatcagcacagatgaat

SEQ ID NO: 499598 - DNA, 30 bp, Artificial Sequence
  Synthetic oligonucleotide
ttttaaatgcggtatgcactgtagatgaat

SEQ ID NO: 499599 - DNA, 30 bp, Artificial Sequence
  Synthetic oligonucleotide
acaatgaaagtctattaagatggactgaat

SEQ ID NO: 499600 - DNA, 30 bp, Artificial Sequence
  Synthetic oligonucleotide
tttaatttctcgcaacggtcagagctgaat

SEQ ID NO: 499601 - DNA, 30 bp, Artificial Sequence
  Synthetic oligonucleotide
gaatctgtcgtccttacctgaacgctgaat

SEQ ID NO: 499602 - DNA, 30 bp, Artificial Sequence
  Synthetic oligonucleotide
attatagatctgtatttcgcaaaagtgaat

SEQ ID NO: 499603 - DNA, 30 bp, Artificial Sequence
  Synthetic oligonucleotide
agatcgttggtgcgacttatcagagtgaat

SEQ ID NO: 499604 - DNA, 30 bp, Artificial Sequence
  Synthetic oligonucleotide
cataaaaccgtgatacctgcgttagtgaat

SEQ ID NO: 499605 - DNA, 30 bp, Artificial Sequence
  Synthetic oligonucleotide
acaggcgctcaagcgatgagttgcgtgaat

SEQ ID NO: 499606 - DNA, 30 bp, Artificial Sequence
  Synthetic oligonucleotide
agtcgtatggagtatgattatcgggtgaat

SEQ ID NO: 499607 - DNA, 29 bp, Artificial Sequence
  Synthetic oligonucleotide
ggatcatcggacaattcggtcgggtgaat

SEQ ID NO: 499608 - DNA, 30 bp, Artificial Sequence
  Synthetic oligonucleotide
ctctatggtcttgacatagcactggtgaat

SEQ ID NO: 499609 - DNA, 30 bp, Artificial Sequence
  Synthetic oligonucleotide
aaatgagacgttgtagtgggtttggtgaat

SEQ ID NO: 499610 - DNA, 30 bp, Artificial Sequence
  Synthetic oligonucleotide
atcacgatagaccgcggtatggctgtgaat

SEQ ID NO: 499611 - DNA, 30 bp, Artificial Sequence
  Synthetic oligonucleotide
tgaatcgcaataacgactacatcattgaat

SEQ ID NO: 499612 - DNA, 30 bp, Artificial Sequence
  Synthetic oligonucleotide
tgccgccgcatgccaccaggtggattgaat

SEQ ID NO: 499613 - DNA, 30 bp, Artificial Sequence
  Synthetic oligonucleotide
tcatctgagtgtctactgacggtattgaat

SEQ ID NO: 499614 - DNA, 30 bp, Artificial Sequence
  Synthetic oligonucleotide
agcgcttcgtaactgttctgttagttgaat

SEQ ID NO: 499615 - DNA, 30 bp, Artificial Sequence
  Synthetic oligonucleotide
gtttataccgtatctattacgcatttgaat

SEQ ID NO: 499616 - DNA, 30 bp, Artificial Sequence
  Synthetic oligonucleotide
gaaacgatagaagaaatacctattttgaat

SEQ ID NO: 499617 - DNA, 30 bp, Artificial Sequence
  Synthetic oligonucleotide
actatttcgaattgaggggagtaaaataat

SEQ ID NO: 499618 - DNA, 30 bp, Artificial Sequence
  Synthetic oligonucleotide
gaatgatatggtaacgtgccatcaaataat

SEQ ID NO: 499619 - DNA, 30 bp, Artificial Sequence
  Synthetic oligonucleotide
ttatttgggatccaactaattagaaataat

SEQ ID NO: 499620 - DNA, 30 bp, Artificial Sequence
  Synthetic oligonucleotide
atcctatcagagatctcgaaaagcaataat

SEQ ID NO: 499621 - DNA, 30 bp, Artificial Sequence
  Synthetic oligonucleotide
ccagtgtttaacacggcgcacagcaataat

SEQ ID NO: 499622 - DNA, 30 bp, Artificial Sequence
  Synthetic oligonucleotide
aataatcgtctagtaggggagcggaataat

SEQ ID NO: 499623 - DNA, 30 bp, Artificial Sequence
  Synthetic oligonucleotide
gggtgcttggcaacgtgctttatgaataat

SEQ ID NO: 499624 - DNA, 30 bp, Artificial Sequence
  Synthetic oligonucleotide
gcctcctcgccttgattggttctgaataat

SEQ ID NO: 499625 - DNA, 30 bp, Artificial Sequence
  Synthetic oligonucleotide
ttgccagagctagtcggggactaacataat

SEQ ID NO: 499626 - DNA, 30 bp, Artificial Sequence
  Synthetic oligonucleotide
tatcattcgtggtctataggacgacataat

SEQ ID NO: 499627 - DNA, 30 bp, Artificial Sequence
  Synthetic oligonucleotide
gatatggccgttccgcgtggttggcataat

SEQ ID NO: 499628 - DNA, 30 bp, Artificial Sequence
  Synthetic oligonucleotide
aattatccatatgagaacctttgtcataat

SEQ ID NO: 499629 - DNA, 30 bp, Artificial Sequence
  Synthetic oligonucleotide
gttttgtcttctcgcaaaatgcgagataat

SEQ ID NO: 499630 - DNA, 30 bp, Artificial Sequence
  Synthetic oligonucleotide
gctgacatattgctcattcggggagataat

SEQ ID NO: 499631 - DNA, 30 bp, Artificial Sequence
  Synthetic oligonucleotide
gggctctaactggcttagctggcggataat

SEQ ID NO: 499632 - DNA, 30 bp, Artificial Sequence
  Synthetic oligonucleotide
aaattcacagcgtccataaatcatgataat

SEQ ID NO: 499633 - DNA, 30 bp, Artificial Sequence
  Synthetic oligonucleotide
gttaaacttgttctatgccctcgtgataat

SEQ ID NO: 499634 - DNA, 30 bp, Artificial Sequence
  Synthetic oligonucleotide
ggtccgatgtttatattgatttaatataat

SEQ ID NO: 499635 - DNA, 30 bp, Artificial Sequence
  Synthetic oligonucleotide
ggccttacggccttcaatggaccatataat

SEQ ID NO: 499636 - DNA, 30 bp, Artificial Sequence
  Synthetic oligonucleotide
gaatccagcggccactcataatcatataat

SEQ ID NO: 499637 - DNA, 30 bp, Artificial Sequence
  Synthetic oligonucleotide
gccattgtatttgatcgggcatcatataat

SEQ ID NO: 499638 - DNA, 30 bp, Artificial Sequence
  Synthetic oligonucleotide
gaaagagtatgcgtggggataatatataat

SEQ ID NO: 499639 - DNA, 30 bp, Artificial Sequence
  Synthetic oligonucleotide
cgacaatagtgtttaactagagactataat

SEQ ID NO: 499640 - DNA, 30 bp, Artificial Sequence
  Synthetic oligonucleotide
attcgcaaaagtttctggcgttactataat

SEQ ID NO: 499641 - DNA, 30 bp, Artificial Sequence
  Synthetic oligonucleotide
atatacatcgactattggcccacctataat

SEQ ID NO: 499642 - DNA, 29 bp, Artificial Sequence
  Synthetic oligonucleotide
ccaagtgtgaattgacgggtgtttataat

SEQ ID NO: 499643 - DNA, 30 bp, Artificial Sequence
  Synthetic oligonucleotide
actctctccatcgtaggccggcaaactaat

SEQ ID NO: 499644 - DNA, 30 bp, Artificial Sequence
  Synthetic oligonucleotide
agcacactgtgataccaatatgtaactaat

SEQ ID NO: 499645 - DNA, 30 bp, Artificial Sequence
  Synthetic oligonucleotide
ttatttctccatgatccttagctcactaat

SEQ ID NO: 499646 - DNA, 30 bp, Artificial Sequence
  Synthetic oligonucleotide
ctcgattattgttatgtgtcttcgactaat

SEQ ID NO: 499647 - DNA, 30 bp, Artificial Sequence
  Synthetic oligonucleotide
gtgaattccagagtttagaaagtgactaat

SEQ ID NO: 499648 - DNA, 30 bp, Artificial Sequence
  Synthetic oligonucleotide
aaattcgggatgggggctcgggttactaat

SEQ ID NO: 499649 - DNA, 30 bp, Artificial Sequence
  Synthetic oligonucleotide
tcgggatagatcggtgcgtacgcacctaat

SEQ ID NO: 499650 - DNA, 30 bp, Artificial Sequence
  Synthetic oligonucleotide
acccgctcgtaccttgcacgtatacctaat

SEQ ID NO: 499651 - DNA, 30 bp, Artificial Sequence
  Synthetic oligonucleotide
tgatggtgtctgccaatatctcaccctaat

SEQ ID NO: 499652 - DNA, 30 bp, Artificial Sequence
  Synthetic oligonucleotide
gcgattagtccgacacgatggggccctaat

SEQ ID NO: 499653 - DNA, 30 bp, Artificial Sequence
  Synthetic oligonucleotide
gtacttctggcaagaggcggtaagcctaat

SEQ ID NO: 499654 - DNA, 30 bp, Artificial Sequence
  Synthetic oligonucleotide
gctatccaatgcgtgtccgtgtggcctaat

SEQ ID NO: 499655 - DNA, 30 bp, Artificial Sequence
  Synthetic oligonucleotide
acggctcctccggagtcgaatgatcctaat

SEQ ID NO: 499656 - DNA, 30 bp, Artificial Sequence
  Synthetic oligonucleotide
agatagggggtcttgacgcaccgtcctaat

SEQ ID NO: 499657 - DNA, 30 bp, Artificial Sequence
  Synthetic oligonucleotide
gactttagaattaaaaattataacgctaat

SEQ ID NO: 499658 - DNA, 30 bp, Artificial Sequence
  Synthetic oligonucleotide
tgcagatttatggcctaaggagaggctaat

SEQ ID NO: 499659 - DNA, 30 bp, Artificial Sequence
  Synthetic oligonucleotide
atgtgccagtgtgtaatgcaggatgctaat

SEQ ID NO: 499660 - DNA, 30 bp, Artificial Sequence
  Synthetic oligonucleotide
tacacgttaccgttagctagccaatctaat

SEQ ID NO: 499661 - DNA, 30 bp, Artificial Sequence
  Synthetic oligonucleotide
atatataagagctggacttggacatctaat

SEQ ID NO: 499662 - DNA, 30 bp, Artificial Sequence
  Synthetic oligonucleotide
aatgatcagggtttcttgtagttatctaat

SEQ ID NO: 499663 - DNA, 30 bp, Artificial Sequence
  Synthetic oligonucleotide
ctggctcggatcaaatagtttgcgtctaat

SEQ ID NO: 499664 - DNA, 30 bp, Artificial Sequence
  Synthetic oligonucleotide
gtgattctcgttggtttgtgacattctaat

SEQ ID NO: 499665 - DNA, 30 bp, Artificial Sequence
  Synthetic oligonucleotide
atttggatatgctatatctttgtttctaat

SEQ ID NO: 499666 - DNA, 30 bp, Artificial Sequence
  Synthetic oligonucleotide
aacactacaggggggggatttaaaagtaat

SEQ ID NO: 499667 - DNA, 30 bp, Artificial Sequence
  Synthetic oligonucleotide
caaatcgtaacggaaatgttaaacagtaat

SEQ ID NO: 499668 - DNA, 30 bp, Artificial Sequence
  Synthetic oligonucleotide
attttctggttaacaggttcgtccagtaat

SEQ ID NO: 499669 - DNA, 30 bp, Artificial Sequence
  Synthetic oligonucleotide
ccgctgcttattatacgggcgagcagtaat

SEQ ID NO: 499670 - DNA, 30 bp, Artificial Sequence
  Synthetic oligonucleotide
aaattgggggaaaagatcgtggtcagtaat

SEQ ID NO: 499671 - DNA, 30 bp, Artificial Sequence
  Synthetic oligonucleotide
cggttcattttaagtaaaacgggtagtaat

SEQ ID NO: 499672 - DNA, 30 bp, Artificial Sequence
  Synthetic oligonucleotide
gaacacgtattatggcgcttgggtagtaat

SEQ ID NO: 499673 - DNA, 30 bp, Artificial Sequence
  Synthetic oligonucleotide
atcatagggaaccattatcaatgtagtaat

SEQ ID NO: 499674 - DNA, 30 bp, Artificial Sequence
  Synthetic oligonucleotide
aaatttcgagtaggtagcagggttagtaat

SEQ ID NO: 499675 - DNA, 30 bp, Artificial Sequence
  Synthetic oligonucleotide
gatacgctagagagacgccggcgacgtaat

SEQ ID NO: 499676 - DNA, 30 bp, Artificial Sequence
  Synthetic oligonucleotide
ctataaagtctttgaaggggtatacgtaat

SEQ ID NO: 499677 - DNA, 30 bp, Artificial Sequence
  Synthetic oligonucleotide
ggggccgccaattatattcgtccgcgtaat

SEQ ID NO: 499678 - DNA, 30 bp, Artificial Sequence
  Synthetic oligonucleotide
ccgacgcatcggtttattctttaaggtaat

SEQ ID NO: 499679 - DNA, 30 bp, Artificial Sequence
  Synthetic oligonucleotide
aactctttcctatgtgccagcggaggtaat

SEQ ID NO: 499680 - DNA, 30 bp, Artificial Sequence
  Synthetic oligonucleotide
accaaccagcacaagccggctggaggtaat

SEQ ID NO: 499681 - DNA, 30 bp, Artificial Sequence
  Synthetic oligonucleotide
aatagatggcccggttgatgagtaggtaat

SEQ ID NO: 499682 - DNA, 30 bp, Artificial Sequence
  Synthetic oligonucleotide
gtctgcctaaatctattgagagccggtaat

SEQ ID NO: 499683 - DNA, 30 bp, Artificial Sequence
  Synthetic oligonucleotide
gttcgcaagtctgtcgtaggagagggtaat

SEQ ID NO: 499684 - DNA, 30 bp, Artificial Sequence
  Synthetic oligonucleotide
cccctgcgggttcggcctccaaggggtaat

SEQ ID NO: 499685 - DNA, 30 bp, Artificial Sequence
  Synthetic oligonucleotide
atgtgcatggcctgcggcaaaactggtaat

SEQ ID NO: 499686 - DNA, 30 bp, Artificial Sequence
  Synthetic oligonucleotide
cgagtgaccacgtggccctttgctggtaat

SEQ ID NO: 499687 - DNA, 30 bp, Artificial Sequence
  Synthetic oligonucleotide
cttttgtctcatatgtcctaacgtggtaat

SEQ ID NO: 499688 - DNA, 30 bp, Artificial Sequence
  Synthetic oligonucleotide
tctcccgataacgccgccgccacatgtaat

SEQ ID NO: 499689 - DNA, 30 bp, Artificial Sequence
  Synthetic oligonucleotide
agtcttttaagtaaaggatcgccatgtaat

SEQ ID NO: 499690 - DNA, 30 bp, Artificial Sequence
  Synthetic oligonucleotide
ggacgtacttccttatatactgcctgtaat

SEQ ID NO: 499691 - DNA, 30 bp, Artificial Sequence
  Synthetic oligonucleotide
ggcctaagcgggccgcgtgagtcgtgtaat

SEQ ID NO: 499692 - DNA, 30 bp, Artificial Sequence
  Synthetic oligonucleotide
gtacgcactaagtgatgttttcgttgtaat

SEQ ID NO: 499693 - DNA, 30 bp, Artificial Sequence
  Synthetic oligonucleotide
tgagtagacacgctgggttgatgttgtaat

SEQ ID NO: 499694 - DNA, 30 bp, Artificial Sequence
  Synthetic oligonucleotide
cgtttcaaacccaatgagggaggaattaat

SEQ ID NO: 499695 - DNA, 30 bp, Artificial Sequence
  Synthetic oligonucleotide
agacgaatgccagccattaattgaattaat

SEQ ID NO: 499696 - DNA, 30 bp, Artificial Sequence
  Synthetic oligonucleotide
cgtccgcattaatttctaatttgaattaat

SEQ ID NO: 499697 - DNA, 30 bp, Artificial Sequence
  Synthetic oligonucleotide
taacttatctggcgtcaataccacattaat

SEQ ID NO: 499698 - DNA, 30 bp, Artificial Sequence
  Synthetic oligonucleotide
ttatcgggagctcgcgtggcatccattaat

SEQ ID NO: 499699 - DNA, 30 bp, Artificial Sequence
  Synthetic oligonucleotide
atttgaggtaaacgcttttcgtgcattaat

SEQ ID NO: 499700 - DNA, 30 bp, Artificial Sequence
  Synthetic oligonucleotide
cattcatcaccgctgaatagattcattaat

SEQ ID NO: 499701 - DNA, 30 bp, Artificial Sequence
  Synthetic oligonucleotide
caaactatatctcaggaaagacctattaat

SEQ ID NO: 499702 - DNA, 30 bp, Artificial Sequence
  Synthetic oligonucleotide
gccagtgtactatgcccgcgctctattaat

SEQ ID NO: 499703 - DNA, 30 bp, Artificial Sequence
  Synthetic oligonucleotide
ctataagacttcgacgtccccagtattaat

SEQ ID NO: 499704 - DNA, 30 bp, Artificial Sequence
  Synthetic oligonucleotide
ctccacattatggcaccaagttgacttaat

SEQ ID NO: 499705 - DNA, 30 bp, Artificial Sequence
  Synthetic oligonucleotide
cacatgctaggtcgccacagcacccttaat

SEQ ID NO: 499706 - DNA, 30 bp, Artificial Sequence
  Synthetic oligonucleotide
cggtgtttccccgtgttgaccgcccttaat

SEQ ID NO: 499707 - DNA, 30 bp, Artificial Sequence
  Synthetic oligonucleotide
acgtagaaccatcatatacattcccttaat

SEQ ID NO: 499708 - DNA, 30 bp, Artificial Sequence
  Synthetic oligonucleotide
ttacggtactttgagcagccaggccttaat

SEQ ID NO: 499709 - DNA, 30 bp, Artificial Sequence
  Synthetic oligonucleotide
gaaaacgctcgggccgagagcgagcttaat

SEQ ID NO: 499710 - DNA, 30 bp, Artificial Sequence
  Synthetic oligonucleotide
catacaattatgtggacatgcgggcttaat

SEQ ID NO: 499711 - DNA, 30 bp, Artificial Sequence
  Synthetic oligonucleotide
gaaagcatgtcctccctatgtgtgcttaat

SEQ ID NO: 499712 - DNA, 30 bp, Artificial Sequence
  Synthetic oligonucleotide
gtattatctttccgtgtagaggatcttaat

SEQ ID NO: 499713 - DNA, 30 bp, Artificial Sequence
  Synthetic oligonucleotide
aagttctcgtgctctcctttatatcttaat

SEQ ID NO: 499714 - DNA, 30 bp, Artificial Sequence
  Synthetic oligonucleotide
ctaacttaacagcaggcttgcagtcttaat

SEQ ID NO: 499715 - DNA, 30 bp, Artificial Sequence
  Synthetic oligonucleotide
ttgcagttataattagcaagcggtcttaat

SEQ ID NO: 499716 - DNA, 30 bp, Artificial Sequence
  Synthetic oligonucleotide
atacctgatggtattgagtcatgtcttaat

SEQ ID NO: 499717 - DNA, 30 bp, Artificial Sequence
  Synthetic oligonucleotide
gtaacttagtaggatcgaaggcaagttaat

SEQ ID NO: 499718 - DNA, 30 bp, Artificial Sequence
  Synthetic oligonucleotide
atcttcgcacacccgatgtgttaagttaat

SEQ ID NO: 499719 - DNA, 30 bp, Artificial Sequence
  Synthetic oligonucleotide
atactactaataacctggggtacagttaat

SEQ ID NO: 499720 - DNA, 30 bp, Artificial Sequence
  Synthetic oligonucleotide
gaataggattccgcacagaactgagttaat

SEQ ID NO: 499721 - DNA, 30 bp, Artificial Sequence
  Synthetic oligonucleotide
atacaatttggagctccacggttcgttaat

SEQ ID NO: 499722 - DNA, 30 bp, Artificial Sequence
  Synthetic oligonucleotide
agcgatatttgagccagtatacatgttaat

SEQ ID NO: 499723 - DNA, 30 bp, Artificial Sequence
  Synthetic oligonucleotide
aatcaccgtccgacactaagccatgttaat

SEQ ID NO: 499724 - DNA, 30 bp, Artificial Sequence
  Synthetic oligonucleotide
tgaaggtgatttagccttggccctgttaat

SEQ ID NO: 499725 - DNA, 30 bp, Artificial Sequence
  Synthetic oligonucleotide
tgcaatggcagcgttcggggggctgttaat

SEQ ID NO: 499726 - DNA, 30 bp, Artificial Sequence
  Synthetic oligonucleotide
aaccagccaaacacgttattaagtgttaat

SEQ ID NO: 499727 - DNA, 30 bp, Artificial Sequence
  Synthetic oligonucleotide
cgctggcaactccaaataggagttgttaat

SEQ ID NO: 499728 - DNA, 30 bp, Artificial Sequence
  Synthetic oligonucleotide
acagaaagccctagcgacgtaccatttaat

SEQ ID NO: 499729 - DNA, 30 bp, Artificial Sequence
  Synthetic oligonucleotide
ccatcggctccaagcagcccctgatttaat

SEQ ID NO: 499730 - DNA, 30 bp, Artificial Sequence
  Synthetic oligonucleotide
taggcactatgccggggagtttgatttaat

SEQ ID NO: 499731 - DNA, 30 bp, Artificial Sequence
  Synthetic oligonucleotide
ataccggtaagagcatgacagcagtttaat

SEQ ID NO: 499732 - DNA, 30 bp, Artificial Sequence
  Synthetic oligonucleotide
aatcattacttaccccgcattaggtttaat

SEQ ID NO: 499733 - DNA, 30 bp, Artificial Sequence
  Synthetic oligonucleotide
cctcctaacagttgcgccacagggtttaat

SEQ ID NO: 499734 - DNA, 30 bp, Artificial Sequence
  Synthetic oligonucleotide
gggttggtctcatgctcgcatatttttaat

SEQ ID NO: 499735 - DNA, 30 bp, Artificial Sequence
  Synthetic oligonucleotide
accaaggctaagacaggtctaaaaaaacat

SEQ ID NO: 499736 - DNA, 30 bp, Artificial Sequence
  Synthetic oligonucleotide
aacttgttttgtgtgcctaagccaaaacat

SEQ ID NO: 499737 - DNA, 30 bp, Artificial Sequence
  Synthetic oligonucleotide
aaccattgagttaatgtccgggcaaaacat

SEQ ID NO: 499738 - DNA, 30 bp, Artificial Sequence
  Synthetic oligonucleotide
agaggccgggatacgcgcgatgtaaaacat

SEQ ID NO: 499739 - DNA, 30 bp, Artificial Sequence
  Synthetic oligonucleotide
gtttattggaaatgggctgcattaaaacat

SEQ ID NO: 499740 - DNA, 30 bp, Artificial Sequence
  Synthetic oligonucleotide
ttgagtgttatagtgggcttctccaaacat

SEQ ID NO: 499741 - DNA, 30 bp, Artificial Sequence
  Synthetic oligonucleotide
catgccgcgaaacgatgttaagggaaacat

SEQ ID NO: 499742 - DNA, 30 bp, Artificial Sequence
  Synthetic oligonucleotide
gatgtagttatcttgagtaagatgaaacat

SEQ ID NO: 499743 - DNA, 30 bp, Artificial Sequence
  Synthetic oligonucleotide
gcaattcgagatactcacaactataaacat

SEQ ID NO: 499744 - DNA, 30 bp, Artificial Sequence
  Synthetic oligonucleotide
aagtagcgagctacgcagtatccacaacat

SEQ ID NO: 499745 - DNA, 30 bp, Artificial Sequence
  Synthetic oligonucleotide
tttttatagagcgtatggcgtatacaacat

SEQ ID NO: 499746 - DNA, 30 bp, Artificial Sequence
  Synthetic oligonucleotide
tagtggtatatacgaggcgttttccaacat

SEQ ID NO: 499747 - DNA, 30 bp, Artificial Sequence
  Synthetic oligonucleotide
gaagtcgaaattaaaggtaacggagaacat

SEQ ID NO: 499748 - DNA, 30 bp, Artificial Sequence
  Synthetic oligonucleotide
attaatctggtgtcccagatcttagaacat

SEQ ID NO: 499749 - DNA, 30 bp, Artificial Sequence
  Synthetic oligonucleotide
ccgacgtcaacgacgttccgctcggaacat

SEQ ID NO: 499750 - DNA, 31 bp, Artificial Sequence
  Synthetic oligonucleotide
gaagtgatcaactggtccagtgtgggaacat

SEQ ID NO: 499751 - DNA, 30 bp, Artificial Sequence
  Synthetic oligonucleotide
cttttcgcgacccgtcgtttcggtgaacat

SEQ ID NO: 499752 - DNA, 30 bp, Artificial Sequence
  Synthetic oligonucleotide
gactaatagcttatagttcactgtgaacat

SEQ ID NO: 499753 - DNA, 30 bp, Artificial Sequence
  Synthetic oligonucleotide
cgtttacaagtgtgtcacacacttgaacat

SEQ ID NO: 499754 - DNA, 30 bp, Artificial Sequence
  Synthetic oligonucleotide
tccatatttgttggtggaaaccggtaacat

SEQ ID NO: 499755 - DNA, 30 bp, Artificial Sequence
  Synthetic oligonucleotide
atctcgctaccatgtttaagacattaacat

SEQ ID NO: 499756 - DNA, 30 bp, Artificial Sequence
  Synthetic oligonucleotide
ctcggcttgcctcagctaagggcttaacat

SEQ ID NO: 499757 - DNA, 30 bp, Artificial Sequence
  Synthetic oligonucleotide
ttatgtcacctatgataaacaggaacacat

SEQ ID NO: 499758 - DNA, 30 bp, Artificial Sequence
  Synthetic oligonucleotide
acaagcgctcacatgcggagcaccacacat

SEQ ID NO: 499759 - DNA, 30 bp, Artificial Sequence
  Synthetic oligonucleotide
tgcatatgactactaatcgaaacgacacat

SEQ ID NO: 499760 - DNA, 30 bp, Artificial Sequence
  Synthetic oligonucleotide
caggtgatagtgtagggaccatggacacat

SEQ ID NO: 499761 - DNA, 30 bp, Artificial Sequence
  Synthetic oligonucleotide
gccgcatcggatttattgtcatggacacat

SEQ ID NO: 499762 - DNA, 30 bp, Artificial Sequence
  Synthetic oligonucleotide
cccgtatcaaagggcactaggttgacacat

SEQ ID NO: 499763 - DNA, 30 bp, Artificial Sequence
  Synthetic oligonucleotide
cctttctaaaacccgcatatgtgtacacat

SEQ ID NO: 499764 - DNA, 30 bp, Artificial Sequence
  Synthetic oligonucleotide
gaaatatacagggtcgtgaatcgaccacat

SEQ ID NO: 499765 - DNA, 30 bp, Artificial Sequence
  Synthetic oligonucleotide
caggatgtgatttattcgtagaacccacat

SEQ ID NO: 499766 - DNA, 30 bp, Artificial Sequence
  Synthetic oligonucleotide
gtatctaaacttaggttcggatcagcacat

SEQ ID NO: 499767 - DNA, 30 bp, Artificial Sequence
  Synthetic oligonucleotide
cttggccctgtcactagaagtaacgcacat

SEQ ID NO: 499768 - DNA, 30 bp, Artificial Sequence
  Synthetic oligonucleotide
ctccagtggccgccgctcctgcaggcacat

SEQ ID NO: 499769 - DNA, 30 bp, Artificial Sequence
  Synthetic oligonucleotide
tcctgaatccgcagcaaaaatcaggcacat

SEQ ID NO: 499770 - DNA, 30 bp, Artificial Sequence
  Synthetic oligonucleotide
ttcttcttcccatcgacaggttgggcacat

SEQ ID NO: 499771 - DNA, 30 bp, Artificial Sequence
  Synthetic oligonucleotide
ggtcgcaactcatatcgcgacgaatcacat

SEQ ID NO: 499772 - DNA, 30 bp, Artificial Sequence
  Synthetic oligonucleotide
ctcttgcaactccccctcgaattatcacat

SEQ ID NO: 499773 - DNA, 30 bp, Artificial Sequence
  Synthetic oligonucleotide
gatgcggctcatcgagagacaacctcacat

SEQ ID NO: 499774 - DNA, 30 bp, Artificial Sequence
  Synthetic oligonucleotide
ctttgtaataagcatcgccaccgctcacat

SEQ ID NO: 499775 - DNA, 30 bp, Artificial Sequence
  Synthetic oligonucleotide
gccaaattgctcgccctcagcggctcacat

SEQ ID NO: 499776 - DNA, 30 bp, Artificial Sequence
  Synthetic oligonucleotide
tgggtccgggtttcggataccctctcacat

SEQ ID NO: 499777 - DNA, 30 bp, Artificial Sequence
  Synthetic oligonucleotide
gaaactctgctaccttcgaagcggtcacat

SEQ ID NO: 499778 - DNA, 31 bp, Artificial Sequence
  Synthetic oligonucleotide
ttaaaaaggctagccgctcgggcattcacat

SEQ ID NO: 499779 - DNA, 30 bp, Artificial Sequence
  Synthetic oligonucleotide
caatgttaacgtgtctcgagatcttcacat

SEQ ID NO: 499780 - DNA, 29 bp, Artificial Sequence
  Synthetic oligonucleotide
ttttttaccagtcctcaggcgcaagacat

SEQ ID NO: 499781 - DNA, 30 bp, Artificial Sequence
  Synthetic oligonucleotide
acttgcagacagtgctgagttcacagacat

SEQ ID NO: 499782 - DNA, 30 bp, Artificial Sequence
  Synthetic oligonucleotide
aatcttagtgccatgggatgagacagacat

SEQ ID NO: 499783 - DNA, 28 bp, Artificial Sequence
  Synthetic oligonucleotide
gcaccgcacttacgcacaaagcagacat

SEQ ID NO: 499784 - DNA, 30 bp, Artificial Sequence
  Synthetic oligonucleotide
tgattgtagaccaattacggcagcagacat

SEQ ID NO: 499785 - DNA, 30 bp, Artificial Sequence
  Synthetic oligonucleotide
ccatataataccaacgcaagagtcagacat

SEQ ID NO: 499786 - DNA, 30 bp, Artificial Sequence
  Synthetic oligonucleotide
gaaattcatgaaatatgtagcttcagacat

SEQ ID NO: 499787 - DNA, 30 bp, Artificial Sequence
  Synthetic oligonucleotide
attgttaaaaatggctagtacgggagacat

SEQ ID NO: 499788 - DNA, 30 bp, Artificial Sequence
  Synthetic oligonucleotide
aattccccgcatcgtgtaggctctagacat

SEQ ID NO: 499789 - DNA, 30 bp, Artificial Sequence
  Synthetic oligonucleotide
aatgatcgcagtgaggaccagatacgacat

SEQ ID NO: 499790 - DNA, 30 bp, Artificial Sequence
  Synthetic oligonucleotide
gtcctgttattttgttacctgtagcgacat

SEQ ID NO: 499791 - DNA, 30 bp, Artificial Sequence
  Synthetic oligonucleotide
gggtcctttaattcaatgacgccgcgacat

SEQ ID NO: 499792 - DNA, 30 bp, Artificial Sequence
  Synthetic oligonucleotide
actctagactgcgtagctacccggcgacat

SEQ ID NO: 499793 - DNA, 30 bp, Artificial Sequence
  Synthetic oligonucleotide
aaggagccgccggagcaggttcgtcgacat

SEQ ID NO: 499794 - DNA, 30 bp, Artificial Sequence
  Synthetic oligonucleotide
ttcgcgtttggcccttaggctattcgacat

SEQ ID NO: 499795 - DNA, 30 bp, Artificial Sequence
  Synthetic oligonucleotide
ttcatacgtccacgtccgtagcttcgacat

SEQ ID NO: 499796 - DNA, 30 bp, Artificial Sequence
  Synthetic oligonucleotide
cctcttaaccgctccactcaggcaggacat

SEQ ID NO: 499797 - DNA, 30 bp, Artificial Sequence
  Synthetic oligonucleotide
ggatagtcccatagcgtcctgcgaggacat

SEQ ID NO: 499798 - DNA, 25 bp, Artificial Sequence
  Synthetic oligonucleotide
ccatcggggcctcgttggaggacat

SEQ ID NO: 499799 - DNA, 30 bp, Artificial Sequence
  Synthetic oligonucleotide
gaaggcatggcccgcgtgctggccggacat

SEQ ID NO: 499800 - DNA, 30 bp, Artificial Sequence
  Synthetic oligonucleotide
ttccctcgatggcataatcgagtcggacat

SEQ ID NO: 499801 - DNA, 30 bp, Artificial Sequence
  Synthetic oligonucleotide
cgagttgtcccgcgcctcatgttgggacat

SEQ ID NO: 499802 - DNA, 30 bp, Artificial Sequence
  Synthetic oligonucleotide
gtgctttagtcaagatcattttatggacat

SEQ ID NO: 499803 - DNA, 30 bp, Artificial Sequence
  Synthetic oligonucleotide
acggttttcgccggtgcacaccttggacat

SEQ ID NO: 499804 - DNA, 30 bp, Artificial Sequence
  Synthetic oligonucleotide
ttcccaatggaagcacaatggttatgacat

SEQ ID NO: 499805 - DNA, 30 bp, Artificial Sequence
  Synthetic oligonucleotide
cccgacatttaaagtgcgggcctttgacat

SEQ ID NO: 499806 - DNA, 30 bp, Artificial Sequence
  Synthetic oligonucleotide
tcttcgtctgttgctcggacgtcaatacat

SEQ ID NO: 499807 - DNA, 30 bp, Artificial Sequence
  Synthetic oligonucleotide
ttgaggttggattggattttaataatacat

SEQ ID NO: 499808 - DNA, 30 bp, Artificial Sequence
  Synthetic oligonucleotide
tggcctgtttgccgtgcacgctagatacat

SEQ ID NO: 499809 - DNA, 30 bp, Artificial Sequence
  Synthetic oligonucleotide
agttccagggtaaatacaagcatgatacat

SEQ ID NO: 499810 - DNA, 30 bp, Artificial Sequence
  Synthetic oligonucleotide
gattaacagttcttgacgttttatatacat

SEQ ID NO: 499811 - DNA, 30 bp, Artificial Sequence
  Synthetic oligonucleotide
acaaacggaagataaagaggtgttatacat

SEQ ID NO: 499812 - DNA, 30 bp, Artificial Sequence
  Synthetic oligonucleotide
ggacgcagccaggggcgataaagactacat

SEQ ID NO: 499813 - DNA, 30 bp, Artificial Sequence
  Synthetic oligonucleotide
atcgcatcaaacctgaatgtctcgctacat

SEQ ID NO: 499814 - DNA, 30 bp, Artificial Sequence
  Synthetic oligonucleotide
ttttttggtaaattcaggttatggctacat

SEQ ID NO: 499815 - DNA, 30 bp, Artificial Sequence
  Synthetic oligonucleotide
caaactttgagactagttatgatgctacat

SEQ ID NO: 499816 - DNA, 30 bp, Artificial Sequence
  Synthetic oligonucleotide
ggagcgtacatgtaagcgtgcgttctacat

SEQ ID NO: 499817 - DNA, 30 bp, Artificial Sequence
  Synthetic oligonucleotide
cataggccgtgtagtgtatctaaagtacat

SEQ ID NO: 499818 - DNA, 30 bp, Artificial Sequence
  Synthetic oligonucleotide
ctcgttatatgttattaagcgctcgtacat

SEQ ID NO: 499819 - DNA, 30 bp, Artificial Sequence
  Synthetic oligonucleotide
ggtggatagatctctaaggatgaggtacat

SEQ ID NO: 499820 - DNA, 30 bp, Artificial Sequence
  Synthetic oligonucleotide
tgtaccacacctgaattggtgtaggtacat

SEQ ID NO: 499821 - DNA, 30 bp, Artificial Sequence
  Synthetic oligonucleotide
gaaccttttaatgcccaaagatatgtacat

SEQ ID NO: 499822 - DNA, 30 bp, Artificial Sequence
  Synthetic oligonucleotide
taaaaacatgccaaggcaatgattgtacat

SEQ ID NO: 499823 - DNA, 30 bp, Artificial Sequence
  Synthetic oligonucleotide
tatactttcaagcttggtattgaattacat

SEQ ID NO: 499824 - DNA, 30 bp, Artificial Sequence
  Synthetic oligonucleotide
attaaggagacgctctaatttccattacat

SEQ ID NO: 499825 - DNA, 30 bp, Artificial Sequence
  Synthetic oligonucleotide
ttaggtggttagatcgcgcaatcattacat

SEQ ID NO: 499826 - DNA, 30 bp, Artificial Sequence
  Synthetic oligonucleotide
actttcaactttttattaatacacttacat

SEQ ID NO: 499827 - DNA, 30 bp, Artificial Sequence
  Synthetic oligonucleotide
gacaatatcattatcacccagtacttacat

SEQ ID NO: 499828 - DNA, 30 bp, Artificial Sequence
  Synthetic oligonucleotide
ctgttgatttacagtattttaatgttacat

SEQ ID NO: 499829 - DNA, 30 bp, Artificial Sequence
  Synthetic oligonucleotide
taagtaacatgctgtcggcgatgtttacat

SEQ ID NO: 499830 - DNA, 30 bp, Artificial Sequence
  Synthetic oligonucleotide
gaccttaggaagttggcgatgattttacat

SEQ ID NO: 499831 - DNA, 30 bp, Artificial Sequence
  Synthetic oligonucleotide
cagcggtgtgatccctttgacgtaaaccat

SEQ ID NO: 499832 - DNA, 30 bp, Artificial Sequence
  Synthetic oligonucleotide
attggagattcgtcatagaggggcaaccat

SEQ ID NO: 499833 - DNA, 30 bp, Artificial Sequence
  Synthetic oligonucleotide
gtataggacatggggcacttctgtaaccat

SEQ ID NO: 499834 - DNA, 30 bp, Artificial Sequence
  Synthetic oligonucleotide
catcttttatacgtagaatccgttaaccat

SEQ ID NO: 499835 - DNA, 30 bp, Artificial Sequence
  Synthetic oligonucleotide
ggatttgcgggtctggacttaaaacaccat

SEQ ID NO: 499836 - DNA, 30 bp, Artificial Sequence
  Synthetic oligonucleotide
atgtcaggcgcagattatcagaaacaccat

SEQ ID NO: 499837 - DNA, 30 bp, Artificial Sequence
  Synthetic oligonucleotide
actcgagacaatttgttaggagaacaccat

SEQ ID NO: 499838 - DNA, 30 bp, Artificial Sequence
  Synthetic oligonucleotide
gctaaagacctccgcagtgttgaacaccat

SEQ ID NO: 499839 - DNA, 28 bp, Artificial Sequence
  Synthetic oligonucleotide
ggtcaggtggtgcatccatggccaccat

SEQ ID NO: 499840 - DNA, 30 bp, Artificial Sequence
  Synthetic oligonucleotide
caagaagaactttggggaaagcagcaccat

SEQ ID NO: 499841 - DNA, 30 bp, Artificial Sequence
  Synthetic oligonucleotide
ctatacacgcaaatccttgcgcagcaccat

SEQ ID NO: 499842 - DNA, 30 bp, Artificial Sequence
  Synthetic oligonucleotide
catcaatggtccggttaacgcgcgcaccat

SEQ ID NO: 499843 - DNA, 30 bp, Artificial Sequence
  Synthetic oligonucleotide
gcagggtggggacctttatgtaaagaccat

SEQ ID NO: 499844 - DNA, 30 bp, Artificial Sequence
  Synthetic oligonucleotide
gcgatgtatgacacagccaggccagaccat

SEQ ID NO: 499845 - DNA, 30 bp, Artificial Sequence
  Synthetic oligonucleotide
tttgcgccttaaggggcaaggcgctaccat

SEQ ID NO: 499846 - DNA, 30 bp, Artificial Sequence
  Synthetic oligonucleotide
caattggttacctgttgaaatacgtaccat

SEQ ID NO: 499847 - DNA, 30 bp, Artificial Sequence
  Synthetic oligonucleotide
gcccaacggctgctgagttttatgtaccat

SEQ ID NO: 499848 - DNA, 30 bp, Artificial Sequence
  Synthetic oligonucleotide
cacaggtccgccagataggacgcaacccat

SEQ ID NO: 499849 - DNA, 30 bp, Artificial Sequence
  Synthetic oligonucleotide
caatgcatcacaggggcatcctgaacccat

SEQ ID NO: 499850 - DNA, 30 bp, Artificial Sequence
  Synthetic oligonucleotide
gcctgcgcctcggctctgccggagacccat

SEQ ID NO: 499851 - DNA, 30 bp, Artificial Sequence
  Synthetic oligonucleotide
attttggacgcgtgtccgctatggacccat

SEQ ID NO: 499852 - DNA, 30 bp, Artificial Sequence
  Synthetic oligonucleotide
gaattttcgtgagtaatgaaagttacccat

SEQ ID NO: 499853 - DNA, 30 bp, Artificial Sequence
  Synthetic oligonucleotide
tacgtcgtagcgttgatgtgttccccccat

SEQ ID NO: 499854 - DNA, 30 bp, Artificial Sequence
  Synthetic oligonucleotide
attcgatattccatgcgtgtaagcccccat

SEQ ID NO: 499855 - DNA, 31 bp, Artificial Sequence
  Synthetic oligonucleotide
gtggcaattaggggtttgcaaacgcccccat

SEQ ID NO: 499856 - DNA, 30 bp, Artificial Sequence
  Synthetic oligonucleotide
agtagcaacatattcccacatcgcccccat

SEQ ID NO: 499857 - DNA, 30 bp, Artificial Sequence
  Synthetic oligonucleotide
cgcgtgacgagcaatcgcctgcccgcccat

SEQ ID NO: 499858 - DNA, 30 bp, Artificial Sequence
  Synthetic oligonucleotide
gtcagttcgccccagcactaggccgcccat

SEQ ID NO: 499859 - DNA, 30 bp, Artificial Sequence
  Synthetic oligonucleotide
tcggtaaggaacgctttggggagcgcccat

SEQ ID NO: 499860 - DNA, 29 bp, Artificial Sequence
  Synthetic oligonucleotide
tgacaccccaggcaacactcatcgcccat

SEQ ID NO: 499861 - DNA, 30 bp, Artificial Sequence
  Synthetic oligonucleotide
tagggatcaagacgcatgcagcaggcccat

SEQ ID NO: 499862 - DNA, 30 bp, Artificial Sequence
  Synthetic oligonucleotide
ttcttgagaaatctcctgaatacggcccat

SEQ ID NO: 499863 - DNA, 30 bp, Artificial Sequence
  Synthetic oligonucleotide
ctagaggtagtccgccggcaaagggcccat

SEQ ID NO: 499864 - DNA, 30 bp, Artificial Sequence
  Synthetic oligonucleotide
tgcaggaatattgtcgctagcaactcccat

SEQ ID NO: 499865 - DNA, 30 bp, Artificial Sequence
  Synthetic oligonucleotide
cactcattggactggtggcatcccagccat

SEQ ID NO: 499866 - DNA, 30 bp, Artificial Sequence
  Synthetic oligonucleotide
gcggatgttagctctctctgcgtcagccat

SEQ ID NO: 499867 - DNA, 30 bp, Artificial Sequence
  Synthetic oligonucleotide
aatgtgtggagataggcattagagagccat

SEQ ID NO: 499868 - DNA, 30 bp, Artificial Sequence
  Synthetic oligonucleotide
attgtgcgccaggcgtcaagcctgagccat

SEQ ID NO: 499869 - DNA, 30 bp, Artificial Sequence
  Synthetic oligonucleotide
aagggacgggagtcgtaaatcagtagccat

SEQ ID NO: 499870 - DNA, 30 bp, Artificial Sequence
  Synthetic oligonucleotide
acaataagcatgatggaatctattagccat

SEQ ID NO: 499871 - DNA, 30 bp, Artificial Sequence
  Synthetic oligonucleotide
acatagacctaccgaggagaaaaccgccat

SEQ ID NO: 499872 - DNA, 30 bp, Artificial Sequence
  Synthetic oligonucleotide
tctggctcatgcaagaaggagtaccgccat

SEQ ID NO: 499873 - DNA, 30 bp, Artificial Sequence
  Synthetic oligonucleotide
cggtagccgccggagaatcgcgcccgccat

SEQ ID NO: 499874 - DNA, 30 bp, Artificial Sequence
  Synthetic oligonucleotide
tatattctacgcaagacgcgtggccgccat

SEQ ID NO: 499875 - DNA, 30 bp, Artificial Sequence
  Synthetic oligonucleotide
agacttaaagggtctggttctatccgccat

SEQ ID NO: 499876 - DNA, 30 bp, Artificial Sequence
  Synthetic oligonucleotide
ggcgtagcctcgctgtcatagtatcgccat

SEQ ID NO: 499877 - DNA, 30 bp, Artificial Sequence
  Synthetic oligonucleotide
atacggaaagctatagggtttggtcgccat

SEQ ID NO: 499878 - DNA, 30 bp, Artificial Sequence
  Synthetic oligonucleotide
tgcaatgttattaccttgaaccttcgccat

SEQ ID NO: 499879 - DNA, 30 bp, Artificial Sequence
  Synthetic oligonucleotide
agtgttcctcagcggcttctcgaaggccat

SEQ ID NO: 499880 - DNA, 30 bp, Artificial Sequence
  Synthetic oligonucleotide
gggctcacaggcagaggccatccaggccat

SEQ ID NO: 499881 - DNA, 30 bp, Artificial Sequence
  Synthetic oligonucleotide
aatatgaacctggttcttggctacggccat

SEQ ID NO: 499882 - DNA, 30 bp, Artificial Sequence
  Synthetic oligonucleotide
acggaccaagcggctgggactcgcggccat

SEQ ID NO: 499883 - DNA, 30 bp, Artificial Sequence
  Synthetic oligonucleotide
ccgtggactttgactttatacggtggccat

SEQ ID NO: 499884 - DNA, 40 bp, Artificial Sequence
  Synthetic oligonucleotide
gcttttcgcaccgcatcgtctaccaatgcgttgtggccat

SEQ ID NO: 499885 - DNA, 30 bp, Artificial Sequence
  Synthetic oligonucleotide
gtggtctggcaaccgatccgcacatgccat

SEQ ID NO: 499886 - DNA, 30 bp, Artificial Sequence
  Synthetic oligonucleotide
aatctcggaggtatctgcttaggatgccat

SEQ ID NO: 499887 - DNA, 30 bp, Artificial Sequence
  Synthetic oligonucleotide
gtgctattataactcataaatagttgccat

SEQ ID NO: 499888 - DNA, 30 bp, Artificial Sequence
  Synthetic oligonucleotide
accttaaatctggctttcgttaaaatccat

SEQ ID NO: 499889 - DNA, 30 bp, Artificial Sequence
  Synthetic oligonucleotide
tagattttgcatctgagctagcaaatccat

SEQ ID NO: 499890 - DNA, 30 bp, Artificial Sequence
  Synthetic oligonucleotide
acccttcttgggcgtgctacatgaatccat

SEQ ID NO: 499891 - DNA, 30 bp, Artificial Sequence
  Synthetic oligonucleotide
ctggtggttaagttcagacggtccatccat

SEQ ID NO: 499892 - DNA, 30 bp, Artificial Sequence
  Synthetic oligonucleotide
aacctaatggacctgtggcttgatatccat

SEQ ID NO: 499893 - DNA, 30 bp, Artificial Sequence
  Synthetic oligonucleotide
cttttcgtgtggcacggagaatgtatccat

SEQ ID NO: 499894 - DNA, 30 bp, Artificial Sequence
  Synthetic oligonucleotide
cttctctgtcagtctggtgcgtgactccat

SEQ ID NO: 499895 - DNA, 30 bp, Artificial Sequence
  Synthetic oligonucleotide
cagatggtacccatccaaggggtactccat

SEQ ID NO: 499896 - DNA, 30 bp, Artificial Sequence
  Synthetic oligonucleotide
ggcacggagacgccagctaggttactccat

SEQ ID NO: 499897 - DNA, 30 bp, Artificial Sequence
  Synthetic oligonucleotide
accctgggtaaactctaatttaccctccat

SEQ ID NO: 499898 - DNA, 30 bp, Artificial Sequence
  Synthetic oligonucleotide
acacgagggaggcggatgaaacgcctccat

SEQ ID NO: 499899 - DNA, 30 bp, Artificial Sequence
  Synthetic oligonucleotide
gtatattaaggctggcagtccacgctccat

SEQ ID NO: 499900 - DNA, 30 bp, Artificial Sequence
  Synthetic oligonucleotide
ttttcgttttttccagttctaaggctccat

SEQ ID NO: 499901 - DNA, 30 bp, Artificial Sequence
  Synthetic oligonucleotide
atattaccgactgactctatcaggctccat

SEQ ID NO: 499902 - DNA, 30 bp, Artificial Sequence
  Synthetic oligonucleotide
ttccgacgggtcgtctgcacgcggctccat

SEQ ID NO: 499903 - DNA, 30 bp, Artificial Sequence
  Synthetic oligonucleotide
ataaacgggatagtttaaccgatgctccat

SEQ ID NO: 499904 - DNA, 30 bp, Artificial Sequence
  Synthetic oligonucleotide
cgggcgcaaggcgcttgggttatgctccat

SEQ ID NO: 499905 - DNA, 29 bp, Artificial Sequence
  Synthetic oligonucleotide
cagtgtatcactctttgtgagatctccat

SEQ ID NO: 499906 - DNA, 30 bp, Artificial Sequence
  Synthetic oligonucleotide
gcgattttgagggaacgatccttcgtccat

SEQ ID NO: 499907 - DNA, 30 bp, Artificial Sequence
  Synthetic oligonucleotide
tgaatgtttcgttgtccattgattgtccat

SEQ ID NO: 499908 - DNA, 30 bp, Artificial Sequence
  Synthetic oligonucleotide
tatatgatcaaggagccactatttgtccat

SEQ ID NO: 499909 - DNA, 30 bp, Artificial Sequence
  Synthetic oligonucleotide
aacgagccttgatcgcggcgcatattccat

SEQ ID NO: 499910 - DNA, 30 bp, Artificial Sequence
  Synthetic oligonucleotide
ctaggactttcactaaaagtatacttccat

SEQ ID NO: 499911 - DNA, 30 bp, Artificial Sequence
  Synthetic oligonucleotide
cctcttagatagcgtcctcaaatcttccat

SEQ ID NO: 499912 - DNA, 30 bp, Artificial Sequence
  Synthetic oligonucleotide
tgtagcatgtgtagatctgttctcttccat

SEQ ID NO: 499913 - DNA, 30 bp, Artificial Sequence
  Synthetic oligonucleotide
aacctttccaggattgggggattcttccat

SEQ ID NO: 499914 - DNA, 30 bp, Artificial Sequence
  Synthetic oligonucleotide
gtttagcttggaatgatagtgggtttccat

SEQ ID NO: 499915 - DNA, 30 bp, Artificial Sequence
  Synthetic oligonucleotide
tacctatgcgaagccgtggcaattttccat

SEQ ID NO: 499916 - DNA, 30 bp, Artificial Sequence
  Synthetic oligonucleotide
gtattgacgcgtgttaaagattgcaagcat

SEQ ID NO: 499917 - DNA, 30 bp, Artificial Sequence
  Synthetic oligonucleotide
gcgtgctttaaaacctttagggtcaagcat

SEQ ID NO: 499918 - DNA, 30 bp, Artificial Sequence
  Synthetic oligonucleotide
aactcctaaattttcgcgagtgggaagcat

SEQ ID NO: 499919 - DNA, 30 bp, Artificial Sequence
  Synthetic oligonucleotide
ctcaactagaaaaaatccatcgtgaagcat

SEQ ID NO: 499920 - DNA, 30 bp, Artificial Sequence
  Synthetic oligonucleotide
atcttccacggtattagggtaaaacagcat

SEQ ID NO: 499921 - DNA, 30 bp, Artificial Sequence
  Synthetic oligonucleotide
aataagtcttttaggtctaagcgacagcat

SEQ ID NO: 499922 - DNA, 30 bp, Artificial Sequence
  Synthetic oligonucleotide
cgtttaggacaggtaaacagtgaccagcat

SEQ ID NO: 499923 - DNA, 30 bp, Artificial Sequence
  Synthetic oligonucleotide
cacggagcaagaggcggtctcacccagcat

SEQ ID NO: 499924 - DNA, 30 bp, Artificial Sequence
  Synthetic oligonucleotide
ttcccatgtgtggttatggcataagagcat

SEQ ID NO: 499925 - DNA, 30 bp, Artificial Sequence
  Synthetic oligonucleotide
ggaccagtgacttcataagctctagagcat

SEQ ID NO: 499926 - DNA, 30 bp, Artificial Sequence
  Synthetic oligonucleotide
taaacagctcattagtgattgtacgagcat

SEQ ID NO: 499927 - DNA, 30 bp, Artificial Sequence
  Synthetic oligonucleotide
ctatacgtgtaatcgaactcctgggagcat

SEQ ID NO: 499928 - DNA, 30 bp, Artificial Sequence
  Synthetic oligonucleotide
ccccgaaagacggggtgacactatgagcat

SEQ ID NO: 499929 - DNA, 30 bp, Artificial Sequence
  Synthetic oligonucleotide
cgtgatttcctcaattctttttgtgagcat

SEQ ID NO: 499930 - DNA, 30 bp, Artificial Sequence
  Synthetic oligonucleotide
acggtaaccatacgcacgatgacgtagcat

SEQ ID NO: 499931 - DNA, 30 bp, Artificial Sequence
  Synthetic oligonucleotide
tttacagcaacgctttgggccgtgtagcat

SEQ ID NO: 499932 - DNA, 30 bp, Artificial Sequence
  Synthetic oligonucleotide
aaaaattgagagagttctactggcacgcat

SEQ ID NO: 499933 - DNA, 30 bp, Artificial Sequence
  Synthetic oligonucleotide
atctccgcgtaatttgtcttggtcacgcat

SEQ ID NO: 499934 - DNA, 30 bp, Artificial Sequence
  Synthetic oligonucleotide
aacccacgctcgagtaatcagttcacgcat

SEQ ID NO: 499935 - DNA, 30 bp, Artificial Sequence
  Synthetic oligonucleotide
ggcaaggacttaggttacataaagacgcat

SEQ ID NO: 499936 - DNA, 30 bp, Artificial Sequence
  Synthetic oligonucleotide
tcgtgctcgtaatttgatttcgagacgcat

SEQ ID NO: 499937 - DNA, 30 bp, Artificial Sequence
  Synthetic oligonucleotide
gggttgaacctacgcttaaggtcgacgcat

SEQ ID NO: 499938 - DNA, 30 bp, Artificial Sequence
  Synthetic oligonucleotide
ccctgtcgagaccgtatgctattgacgcat

SEQ ID NO: 499939 - DNA, 30 bp, Artificial Sequence
  Synthetic oligonucleotide
aaccccatgcataatcgtaggtttacgcat

SEQ ID NO: 499940 - DNA, 30 bp, Artificial Sequence
  Synthetic oligonucleotide
aattattgaattagctaatttctcccgcat

SEQ ID NO: 499941 - DNA, 30 bp, Artificial Sequence
  Synthetic oligonucleotide
cgacaatcaaggggaatcccacagccgcat

SEQ ID NO: 499942 - DNA, 30 bp, Artificial Sequence
  Synthetic oligonucleotide
tcctttgtcgcacatattgcaactccgcat

SEQ ID NO: 499943 - DNA, 30 bp, Artificial Sequence
  Synthetic oligonucleotide
aatttcgggactgttagactagaagcgcat

SEQ ID NO: 499944 - DNA, 30 bp, Artificial Sequence
  Synthetic oligonucleotide
ctacgtcagagctggtataagccagcgcat

SEQ ID NO: 499945 - DNA, 30 bp, Artificial Sequence
  Synthetic oligonucleotide
gactagtccctgcagcaaatcgacgcgcat

SEQ ID NO: 499946 - DNA, 30 bp, Artificial Sequence
  Synthetic oligonucleotide
gcctcctcgtggtttgtcgttctcgcgcat

SEQ ID NO: 499947 - DNA, 30 bp, Artificial Sequence
  Synthetic oligonucleotide
agtcgacctctttcagtctatccggcgcat

SEQ ID NO: 499948 - DNA, 30 bp, Artificial Sequence
  Synthetic oligonucleotide
ttattgctagcaggtggattcatatcgcat

SEQ ID NO: 499949 - DNA, 30 bp, Artificial Sequence
  Synthetic oligonucleotide
cccagcgacgcaaatcgacatcagtcgcat

SEQ ID NO: 499950 - DNA, 30 bp, Artificial Sequence
  Synthetic oligonucleotide
gagtccttacttatcggtacagcaaggcat

SEQ ID NO: 499951 - DNA, 30 bp, Artificial Sequence
  Synthetic oligonucleotide
attgaggtcagctaggctgtggtcaggcat

SEQ ID NO: 499952 - DNA, 30 bp, Artificial Sequence
  Synthetic oligonucleotide
cttcagcgataatgacctgcgcagaggcat

SEQ ID NO: 499953 - DNA, 30 bp, Artificial Sequence
  Synthetic oligonucleotide
taaggtactcgcaggtgtccaatgaggcat

SEQ ID NO: 499954 - DNA, 30 bp, Artificial Sequence
  Synthetic oligonucleotide
tccaatgggagtactgccccgctgaggcat

SEQ ID NO: 499955 - DNA, 30 bp, Artificial Sequence
  Synthetic oligonucleotide
gtgcctacagtaactccgcctctgaggcat

SEQ ID NO: 499956 - DNA, 30 bp, Artificial Sequence
  Synthetic oligonucleotide
gctttttatagttacagcggcggacggcat

SEQ ID NO: 499957 - DNA, 30 bp, Artificial Sequence
  Synthetic oligonucleotide
ccgggcacaggtctcactgaattgcggcat

SEQ ID NO: 499958 - DNA, 30 bp, Artificial Sequence
  Synthetic oligonucleotide
aaaagacgcagggtccactccacagggcat

SEQ ID NO: 499959 - DNA, 30 bp, Artificial Sequence
  Synthetic oligonucleotide
taagcgtctggtaatttggtatacgggcat

SEQ ID NO: 499960 - DNA, 30 bp, Artificial Sequence
  Synthetic oligonucleotide
aagaccagtgcaattgcgccagtcgggcat

SEQ ID NO: 499961 - DNA, 30 bp, Artificial Sequence
  Synthetic oligonucleotide
gaagtttggttaggataacatgtcgggcat

SEQ ID NO: 499962 - DNA, 30 bp, Artificial Sequence
  Synthetic oligonucleotide
ccgattccacatacgacatttacggggcat

SEQ ID NO: 499963 - DNA, 30 bp, Artificial Sequence
  Synthetic oligonucleotide
catgctcctatccgctagcaaagtgggcat

SEQ ID NO: 499964 - DNA, 30 bp, Artificial Sequence
  Synthetic oligonucleotide
tttggacaacattatgaccgtggtgggcat

SEQ ID NO: 499965 - DNA, 30 bp, Artificial Sequence
  Synthetic oligonucleotide
gcagtagttatagcgagagcactctggcat

SEQ ID NO: 499966 - DNA, 30 bp, Artificial Sequence
  Synthetic oligonucleotide
atgtttaaaccagcatacaggctctggcat

SEQ ID NO: 499967 - DNA, 30 bp, Artificial Sequence
  Synthetic oligonucleotide
ctgttgcaggacgaccactaaaggtggcat

SEQ ID NO: 499968 - DNA, 30 bp, Artificial Sequence
  Synthetic oligonucleotide
gatttaacaccctacttctaacggtggcat

SEQ ID NO: 499969 - DNA, 30 bp, Artificial Sequence
  Synthetic oligonucleotide
ttcttcgatggaatgcaaacaacttggcat

SEQ ID NO: 499970 - DNA, 30 bp, Artificial Sequence
  Synthetic oligonucleotide
ctgtgctcctttggtcacccggaaatgcat

SEQ ID NO: 499971 - DNA, 30 bp, Artificial Sequence
  Synthetic oligonucleotide
gctattacaataggttaatataacatgcat

SEQ ID NO: 499972 - DNA, 30 bp, Artificial Sequence
  Synthetic oligonucleotide
gtggaacctggccccctcaggcagatgcat

SEQ ID NO: 499973 - DNA, 30 bp, Artificial Sequence
  Synthetic oligonucleotide
aacctcacttatgcacaggacgcgatgcat

SEQ ID NO: 499974 - DNA, 30 bp, Artificial Sequence
  Synthetic oligonucleotide
ctacaacgcagaaccgatatgaggatgcat

SEQ ID NO: 499975 - DNA, 30 bp, Artificial Sequence
  Synthetic oligonucleotide
tgtgccttcactcatgcacaagttatgcat

SEQ ID NO: 499976 - DNA, 30 bp, Artificial Sequence
  Synthetic oligonucleotide
ttgtacccaggatgctagcacagactgcat

SEQ ID NO: 499977 - DNA, 30 bp, Artificial Sequence
  Synthetic oligonucleotide
gcatgcttaagaaattttgacggactgcat

SEQ ID NO: 499978 - DNA, 30 bp, Artificial Sequence
  Synthetic oligonucleotide
aacctccttaggcgtatcagctacgtgcat

SEQ ID NO: 499979 - DNA, 30 bp, Artificial Sequence
  Synthetic oligonucleotide
tatagtgattaagctaaataatccgtgcat

SEQ ID NO: 499980 - DNA, 30 bp, Artificial Sequence
  Synthetic oligonucleotide
tccggtttaatgccgcttttggtcgtgcat

SEQ ID NO: 499981 - DNA, 30 bp, Artificial Sequence
  Synthetic oligonucleotide
gacttgtataattggtgggtttcggtgcat

SEQ ID NO: 499982 - DNA, 30 bp, Artificial Sequence
  Synthetic oligonucleotide
ctcccccggattggtatacgttatgtgcat

SEQ ID NO: 499983 - DNA, 30 bp, Artificial Sequence
  Synthetic oligonucleotide
acatgggccttatatgtcacttctgtgcat

SEQ ID NO: 499984 - DNA, 30 bp, Artificial Sequence
  Synthetic oligonucleotide
cgcatcaatctctcacttggacgattgcat

SEQ ID NO: 499985 - DNA, 30 bp, Artificial Sequence
  Synthetic oligonucleotide
aagtcccaagtcagcattcgaggattgcat

SEQ ID NO: 499986 - DNA, 30 bp, Artificial Sequence
  Synthetic oligonucleotide
aaagaggcggaccaatgctcagtattgcat

SEQ ID NO: 499987 - DNA, 30 bp, Artificial Sequence
  Synthetic oligonucleotide
gcatggccaaattttctctgcttattgcat

SEQ ID NO: 499988 - DNA, 30 bp, Artificial Sequence
  Synthetic oligonucleotide
cagatgtttataggaccgaggttattgcat

SEQ ID NO: 499989 - DNA, 30 bp, Artificial Sequence
  Synthetic oligonucleotide
tgaattattttaaaataactctccttgcat

SEQ ID NO: 499990 - DNA, 30 bp, Artificial Sequence
  Synthetic oligonucleotide
ctctggccgctagagtgtcagcgcttgcat

SEQ ID NO: 499991 - DNA, 30 bp, Artificial Sequence
  Synthetic oligonucleotide
taaatggagtaaattgtacggatgttgcat

SEQ ID NO: 499992 - DNA, 30 bp, Artificial Sequence
  Synthetic oligonucleotide
aatttcacagtctgtaacgggcctttgcat

SEQ ID NO: 499993 - DNA, 30 bp, Artificial Sequence
  Synthetic oligonucleotide
gaacgaccgtgtctcactaaatctttgcat

SEQ ID NO: 499994 - DNA, 30 bp, Artificial Sequence
  Synthetic oligonucleotide
tcaatgttgggtcgtcgaaagcaaaatcat

SEQ ID NO: 499995 - DNA, 30 bp, Artificial Sequence
  Synthetic oligonucleotide
tatcgtatttactccggcatatgaaatcat

SEQ ID NO: 499996 - DNA, 30 bp, Artificial Sequence
  Synthetic oligonucleotide
atccgggaattccgggctctgcggaatcat

SEQ ID NO: 499997 - DNA, 30 bp, Artificial Sequence
  Synthetic oligonucleotide
ctgagacaaggtgcaggtcttccccatcat

SEQ ID NO: 499998 - DNA, 30 bp, Artificial Sequence
  Synthetic oligonucleotide
ggtaccttgccactgcgcgctttgcatcat

SEQ ID NO: 499999 - DNA, 30 bp, Artificial Sequence
  Synthetic oligonucleotide
gctagtcgatgccgatgccattaagatcat

SEQ ID NO: 500000 - DNA, 30 bp, Artificial Sequence
  Synthetic oligonucleotide
aaggcacttggcaaccgccaaggagatcat

SEQ ID NO: 500001 - DNA, 30 bp, Artificial Sequence
  Synthetic oligonucleotide
gatgagtaactagtaacgtcgtatgatcat

SEQ ID NO: 500002 - DNA, 30 bp, Artificial Sequence
  Synthetic oligonucleotide
gatatcttactagtgccgaggtatgatcat

SEQ ID NO: 500003 - DNA, 30 bp, Artificial Sequence
  Synthetic oligonucleotide
gacaaaggctattttgggattcgtgatcat

SEQ ID NO: 500004 - DNA, 30 bp, Artificial Sequence
  Synthetic oligonucleotide
gacatacgtagttattataacaaatatcat

SEQ ID NO: 500005 - DNA, 30 bp, Artificial Sequence
  Synthetic oligonucleotide
gtttgacgcaccgtttgaccatgatatcat

SEQ ID NO: 500006 - DNA, 30 bp, Artificial Sequence
  Synthetic oligonucleotide
atccttgggccactaggcacaacctatcat

SEQ ID NO: 500007 - DNA, 30 bp, Artificial Sequence
  Synthetic oligonucleotide
agccactcttgcttttacggaacgtatcat

SEQ ID NO: 500008 - DNA, 30 bp, Artificial Sequence
  Synthetic oligonucleotide
cttaccgttgtggacacctctgtgtatcat

SEQ ID NO: 500009 - DNA, 30 bp, Artificial Sequence
  Synthetic oligonucleotide
tgtgaaaggccacgcactcgagaaactcat

SEQ ID NO: 500010 - DNA, 30 bp, Artificial Sequence
  Synthetic oligonucleotide
tggccaccgtcagtgggcttactaactcat

SEQ ID NO: 500011 - DNA, 30 bp, Artificial Sequence
  Synthetic oligonucleotide
atgtagtgatgatgcacgatcaacactcat

SEQ ID NO: 500012 - DNA, 30 bp, Artificial Sequence
  Synthetic oligonucleotide
catcagatctctgatcctgaagagactcat

SEQ ID NO: 500013 - DNA, 30 bp, Artificial Sequence
  Synthetic oligonucleotide
gcatacggcaaagggtcggcgtagactcat

SEQ ID NO: 500014 - DNA, 30 bp, Artificial Sequence
  Synthetic oligonucleotide
ttgatgcatcctagtgagtggtagactcat

SEQ ID NO: 500015 - DNA, 30 bp, Artificial Sequence
  Synthetic oligonucleotide
ctctctaaactcggtattatgtcgactcat

SEQ ID NO: 500016 - DNA, 30 bp, Artificial Sequence
  Synthetic oligonucleotide
acactagttataacctggaccaggactcat

SEQ ID NO: 500017 - DNA, 30 bp, Artificial Sequence
  Synthetic oligonucleotide
cttcgtgggatatgacctgccatacctcat

SEQ ID NO: 500018 - DNA, 30 bp, Artificial Sequence
  Synthetic oligonucleotide
tataggtgactgctctggtcctcccctcat

SEQ ID NO: 500019 - DNA, 30 bp, Artificial Sequence
  Synthetic oligonucleotide
ctcacacagcaagcaccttttaagcctcat

SEQ ID NO: 500020 - DNA, 30 bp, Artificial Sequence
  Synthetic oligonucleotide
aatttgtcgtccggacgtgggatgcctcat

SEQ ID NO: 500021 - DNA, 30 bp, Artificial Sequence
  Synthetic oligonucleotide
tacagtgtatgaactcatcctgtgcctcat

SEQ ID NO: 500022 - DNA, 30 bp, Artificial Sequence
  Synthetic oligonucleotide
gcttcatcacgttaacgcacctatcctcat

SEQ ID NO: 500023 - DNA, 30 bp, Artificial Sequence
  Synthetic oligonucleotide
gagtagcataggtcccgcactatagctcat

SEQ ID NO: 500024 - DNA, 30 bp, Artificial Sequence
  Synthetic oligonucleotide
gagcaagacacgcgggaattgagggctcat

SEQ ID NO: 500025 - DNA, 30 bp, Artificial Sequence
  Synthetic oligonucleotide
catcctttctggacgagagagatctctcat

SEQ ID NO: 500026 - DNA, 30 bp, Artificial Sequence
  Synthetic oligonucleotide
tattaccggaaatgttctaataagtctcat

SEQ ID NO: 500027 - DNA, 30 bp, Artificial Sequence
  Synthetic oligonucleotide
tttctccggcattcgagattatattctcat

SEQ ID NO: 500028 - DNA, 30 bp, Artificial Sequence
  Synthetic oligonucleotide
gttttcgattcataagcatttgaaagtcat

SEQ ID NO: 500029 - DNA, 30 bp, Artificial Sequence
  Synthetic oligonucleotide
gtagccccccccctctagtacggaagtcat

SEQ ID NO: 500030 - DNA, 30 bp, Artificial Sequence
  Synthetic oligonucleotide
tgttacccaagaggaggtcatataagtcat

SEQ ID NO: 500031 - DNA, 30 bp, Artificial Sequence
  Synthetic oligonucleotide
ggcattcatggttgacttcttctaagtcat

SEQ ID NO: 500032 - DNA, 30 bp, Artificial Sequence
  Synthetic oligonucleotide
tattgctaatattgtacatcatccagtcat

SEQ ID NO: 500033 - DNA, 30 bp, Artificial Sequence
  Synthetic oligonucleotide
aattcaaaagtgagggtaggtccgagtcat

SEQ ID NO: 500034 - DNA, 30 bp, Artificial Sequence
  Synthetic oligonucleotide
tgactagtgggacactgcgtccggagtcat

SEQ ID NO: 500035 - DNA, 30 bp, Artificial Sequence
  Synthetic oligonucleotide
cctgagaactcgcgttattggttccgtcat

SEQ ID NO: 500036 - DNA, 30 bp, Artificial Sequence
  Synthetic oligonucleotide
gcgattacgccatcctattttaagcgtcat

SEQ ID NO: 500037 - DNA, 30 bp, Artificial Sequence
  Synthetic oligonucleotide
tgaacggataattaggatcgcgcgcgtcat

SEQ ID NO: 500038 - DNA, 30 bp, Artificial Sequence
  Synthetic oligonucleotide
caggcacggcctcaatgatcagggcgtcat

SEQ ID NO: 500039 - DNA, 30 bp, Artificial Sequence
  Synthetic oligonucleotide
gattgacgtgacgtcggtgtctttcgtcat

SEQ ID NO: 500040 - DNA, 30 bp, Artificial Sequence
  Synthetic oligonucleotide
agcagtagcaaaagtcagcggacgtgtcat

SEQ ID NO: 500041 - DNA, 30 bp, Artificial Sequence
  Synthetic oligonucleotide
gacttacgggtcttcgtacgcagaattcat

SEQ ID NO: 500042 - DNA, 30 bp, Artificial Sequence
  Synthetic oligonucleotide
taagtttatcatgatgcaagaatcattcat

SEQ ID NO: 500043 - DNA, 30 bp, Artificial Sequence
  Synthetic oligonucleotide
agcgcaaaatctgtttctcagctcattcat

SEQ ID NO: 500044 - DNA, 30 bp, Artificial Sequence
  Synthetic oligonucleotide
taagttttggttgtggaacaatggattcat

SEQ ID NO: 500045 - DNA, 30 bp, Artificial Sequence
  Synthetic oligonucleotide
gtactaagtcttctcattcggcatattcat

SEQ ID NO: 500046 - DNA, 30 bp, Artificial Sequence
  Synthetic oligonucleotide
taaaaagctctcattattgcttatattcat

SEQ ID NO: 500047 - DNA, 30 bp, Artificial Sequence
  Synthetic oligonucleotide
ttaacagatagatccgcggcatgtattcat

SEQ ID NO: 500048 - DNA, 31 bp, Artificial Sequence
  Synthetic oligonucleotide
aaatgaccaagacgcagggcattcacttcat

SEQ ID NO: 500049 - DNA, 30 bp, Artificial Sequence
  Synthetic oligonucleotide
gatcatatagacaacccaacttcacttcat

SEQ ID NO: 500050 - DNA, 30 bp, Artificial Sequence
  Synthetic oligonucleotide
gcaatcatgcctagtgcccgtttacttcat

SEQ ID NO: 500051 - DNA, 30 bp, Artificial Sequence
  Synthetic oligonucleotide
tcttagtaagctgatatagattagcttcat

SEQ ID NO: 500052 - DNA, 30 bp, Artificial Sequence
  Synthetic oligonucleotide
attattgcggaaaagagccctatgcttcat

SEQ ID NO: 500053 - DNA, 30 bp, Artificial Sequence
  Synthetic oligonucleotide
tatctcttggttatttctatggtgcttcat

SEQ ID NO: 500054 - DNA, 30 bp, Artificial Sequence
  Synthetic oligonucleotide
caattgaaatacgccgaatgccttcttcat

SEQ ID NO: 500055 - DNA, 30 bp, Artificial Sequence
  Synthetic oligonucleotide
atacgttacaaacagcctttatttcttcat

SEQ ID NO: 500056 - DNA, 30 bp, Artificial Sequence
  Synthetic oligonucleotide
tacttgtaggtccatatctctacagttcat

SEQ ID NO: 500057 - DNA, 30 bp, Artificial Sequence
  Synthetic oligonucleotide
gataacgcaccaggaccatttggcgttcat

SEQ ID NO: 500058 - DNA, 30 bp, Artificial Sequence
  Synthetic oligonucleotide
agtaacaggaatggcgcagcgggggttcat

SEQ ID NO: 500059 - DNA, 30 bp, Artificial Sequence
  Synthetic oligonucleotide
agtgactgatctatatgtcgactggttcat

SEQ ID NO: 500060 - DNA, 30 bp, Artificial Sequence
  Synthetic oligonucleotide
ttattgcgtctgatgatttctactgttcat

SEQ ID NO: 500061 - DNA, 30 bp, Artificial Sequence
  Synthetic oligonucleotide
aaagtctcggtgatcataaccgctgttcat

SEQ ID NO: 500062 - DNA, 30 bp, Artificial Sequence
  Synthetic oligonucleotide
gcttatcctggccatcttaattgtgttcat

SEQ ID NO: 500063 - DNA, 30 bp, Artificial Sequence
  Synthetic oligonucleotide
gaccttgatggtctatgacacatatttcat

SEQ ID NO: 500064 - DNA, 30 bp, Artificial Sequence
  Synthetic oligonucleotide
tgcattccgacaaggtttttactatttcat

SEQ ID NO: 500065 - DNA, 30 bp, Artificial Sequence
  Synthetic oligonucleotide
cctttcgtgagttgtgtggcggtatttcat

SEQ ID NO: 500066 - DNA, 30 bp, Artificial Sequence
  Synthetic oligonucleotide
attcgcccaacctaacgcaagagctttcat

SEQ ID NO: 500067 - DNA, 30 bp, Artificial Sequence
  Synthetic oligonucleotide
tgtctctaagaaccgggcaagcggtttcat

SEQ ID NO: 500068 - DNA, 30 bp, Artificial Sequence
  Synthetic oligonucleotide
gctgccatacatatgcggtattattttcat

SEQ ID NO: 500069 - DNA, 30 bp, Artificial Sequence
  Synthetic oligonucleotide
gggtagccagcaactcagcgctgaaaagat

SEQ ID NO: 500070 - DNA, 30 bp, Artificial Sequence
  Synthetic oligonucleotide
tattaattggtgtcgaaaacatccaaagat

SEQ ID NO: 500071 - DNA, 30 bp, Artificial Sequence
  Synthetic oligonucleotide
cgaaagttttgacgcaagtcaatcaaagat

SEQ ID NO: 500072 - DNA, 30 bp, Artificial Sequence
  Synthetic oligonucleotide
tcttcggagccatccctttttctcaaagat

SEQ ID NO: 500073 - DNA, 30 bp, Artificial Sequence
  Synthetic oligonucleotide
gctagggaccgccgtagcgtcttcaaagat

SEQ ID NO: 500074 - DNA, 30 bp, Artificial Sequence
  Synthetic oligonucleotide
cggagtggttcacgagctgtgaataaagat

SEQ ID NO: 500075 - DNA, 30 bp, Artificial Sequence
  Synthetic oligonucleotide
gtgattcctattctcttggctcataaagat

SEQ ID NO: 500076 - DNA, 30 bp, Artificial Sequence
  Synthetic oligonucleotide
ccgaagcccacggatcagcgtactaaagat

SEQ ID NO: 500077 - DNA, 30 bp, Artificial Sequence
  Synthetic oligonucleotide
gcacaacgtacaccagaaggtgtgcaagat

SEQ ID NO: 500078 - DNA, 31 bp, Artificial Sequence
  Synthetic oligonucleotide
gttggagctgtgcgtcgatggagcagaagat

SEQ ID NO: 500079 - DNA, 30 bp, Artificial Sequence
  Synthetic oligonucleotide
tttggcgtgggcgggtgaggagtagaagat

SEQ ID NO: 500080 - DNA, 30 bp, Artificial Sequence
  Synthetic oligonucleotide
tgaacatttgcttccttccgccaggaagat

SEQ ID NO: 500081 - DNA, 30 bp, Artificial Sequence
  Synthetic oligonucleotide
ggacgcccgtcttcgggtatccgataagat

SEQ ID NO: 500082 - DNA, 30 bp, Artificial Sequence
  Synthetic oligonucleotide
tgtacttcgactggaaggtctcattaagat

SEQ ID NO: 500083 - DNA, 30 bp, Artificial Sequence
  Synthetic oligonucleotide
ttaggaacaagggctcgctgtccaacagat

SEQ ID NO: 500084 - DNA, 30 bp, Artificial Sequence
  Synthetic oligonucleotide
cggatgagtcctctgggatagtccacagat

SEQ ID NO: 500085 - DNA, 30 bp, Artificial Sequence
  Synthetic oligonucleotide
tatgtcccgtaattatgtgcgtgcacagat

SEQ ID NO: 500086 - DNA, 30 bp, Artificial Sequence
  Synthetic oligonucleotide
agaagatgcagcagtgcaactgcgacagat

SEQ ID NO: 500087 - DNA, 30 bp, Artificial Sequence
  Synthetic oligonucleotide
actagaggatcctcttgtttcttgacagat

SEQ ID NO: 500088 - DNA, 30 bp, Artificial Sequence
  Synthetic oligonucleotide
atcgcttcgttctatgtaagcgatacagat

SEQ ID NO: 500089 - DNA, 30 bp, Artificial Sequence
  Synthetic oligonucleotide
agcttcagacgtagctttggcactacagat

SEQ ID NO: 500090 - DNA, 30 bp, Artificial Sequence
  Synthetic oligonucleotide
tgatcgggcctgagtcactaatgaccagat

SEQ ID NO: 500091 - DNA, 30 bp, Artificial Sequence
  Synthetic oligonucleotide
gccaccaacgtttatcttctattcccagat

SEQ ID NO: 500092 - DNA, 30 bp, Artificial Sequence
  Synthetic oligonucleotide
acaactggggtataagtctttttcccagat

SEQ ID NO: 500093 - DNA, 30 bp, Artificial Sequence
  Synthetic oligonucleotide
gactgctcaatgaacagcccagcgccagat

SEQ ID NO: 500094 - DNA, 30 bp, Artificial Sequence
  Synthetic oligonucleotide
aagttcttaatggacgccctagacgcagat

SEQ ID NO: 500095 - DNA, 30 bp, Artificial Sequence
  Synthetic oligonucleotide
ccaataggatgagacatccaatacgcagat

SEQ ID NO: 500096 - DNA, 30 bp, Artificial Sequence
  Synthetic oligonucleotide
tctctaaccatatcggcttagagcgcagat

SEQ ID NO: 500097 - DNA, 30 bp, Artificial Sequence
  Synthetic oligonucleotide
cttggccatagcgtaggttatgtcgcagat

SEQ ID NO: 500098 - DNA, 30 bp, Artificial Sequence
  Synthetic oligonucleotide
tttctacggtaatggcacaccgaggcagat

SEQ ID NO: 500099 - DNA, 30 bp, Artificial Sequence
  Synthetic oligonucleotide
ggaggtgcaacaaactggcttggtgcagat

SEQ ID NO: 500100 - DNA, 30 bp, Artificial Sequence
  Synthetic oligonucleotide
gcagattgttgggcagcaactgcctcagat

SEQ ID NO: 500101 - DNA, 30 bp, Artificial Sequence
  Synthetic oligonucleotide
aaatacaattgaccctggcaagtctcagat

SEQ ID NO: 500102 - DNA, 30 bp, Artificial Sequence
  Synthetic oligonucleotide
tgaaaatcttgtaatgggtcatggtcagat

SEQ ID NO: 500103 - DNA, 30 bp, Artificial Sequence
  Synthetic oligonucleotide
gtgcagcaaacagataatacgagaagagat

SEQ ID NO: 500104 - DNA, 30 bp, Artificial Sequence
  Synthetic oligonucleotide
gaaaggattacgttaggcattaatagagat

SEQ ID NO: 500105 - DNA, 30 bp, Artificial Sequence
  Synthetic oligonucleotide
ttcattgcacacgattatgtgtatagagat

SEQ ID NO: 500106 - DNA, 30 bp, Artificial Sequence
  Synthetic oligonucleotide
tgtgcacgtcaagcagtcactccacgagat

SEQ ID NO: 500107 - DNA, 30 bp, Artificial Sequence
  Synthetic oligonucleotide
ggcgagcacgtttggtacggcctacgagat

SEQ ID NO: 500108 - DNA, 30 bp, Artificial Sequence
  Synthetic oligonucleotide
acatctgggattactatcgccatgcgagat

SEQ ID NO: 500109 - DNA, 30 bp, Artificial Sequence
  Synthetic oligonucleotide
ggtagtttggtcatcttatatctgcgagat

SEQ ID NO: 500110 - DNA, 30 bp, Artificial Sequence
  Synthetic oligonucleotide
cagtttaattaaaaaaggcccaatcgagat

SEQ ID NO: 500111 - DNA, 30 bp, Artificial Sequence
  Synthetic oligonucleotide
caaatctagagttgggcacttctcggagat

SEQ ID NO: 500112 - DNA, 30 bp, Artificial Sequence
  Synthetic oligonucleotide
gacttggcatttgctttaacggtcggagat

SEQ ID NO: 500113 - DNA, 30 bp, Artificial Sequence
  Synthetic oligonucleotide
gtgaagtacagcgcaatgcctacgggagat

SEQ ID NO: 500114 - DNA, 30 bp, Artificial Sequence
  Synthetic oligonucleotide
tttatataaacagatatcatatatggagat

SEQ ID NO: 500115 - DNA, 30 bp, Artificial Sequence
  Synthetic oligonucleotide
cagcttggggcactccaaatttctggagat

SEQ ID NO: 500116 - DNA, 30 bp, Artificial Sequence
  Synthetic oligonucleotide
ctgttatcgatcaggtcatttagatgagat

SEQ ID NO: 500117 - DNA, 30 bp, Artificial Sequence
  Synthetic oligonucleotide
gtgacgcctagtgacggcgggtgatgagat

SEQ ID NO: 500118 - DNA, 30 bp, Artificial Sequence
  Synthetic oligonucleotide
gcgattgcattttcgtcaggttgatgagat

SEQ ID NO: 500119 - DNA, 30 bp, Artificial Sequence
  Synthetic oligonucleotide
catggggggcccttacagttgtactgagat

SEQ ID NO: 500120 - DNA, 30 bp, Artificial Sequence
  Synthetic oligonucleotide
ttggggctcgcacaacacttgagttgagat

SEQ ID NO: 500121 - DNA, 30 bp, Artificial Sequence
  Synthetic oligonucleotide
gtattccgagtcgcatatagtgacatagat

SEQ ID NO: 500122 - DNA, 30 bp, Artificial Sequence
  Synthetic oligonucleotide
gtttgggtcgttgtgtaaccctacatagat

SEQ ID NO: 500123 - DNA, 30 bp, Artificial Sequence
  Synthetic oligonucleotide
gtggtatgtgttgcgaaggcaacactagat

SEQ ID NO: 500124 - DNA, 30 bp, Artificial Sequence
  Synthetic oligonucleotide
ataaccttgatttgttcgcaactactagat

SEQ ID NO: 500125 - DNA, 30 bp, Artificial Sequence
  Synthetic oligonucleotide
cctcaggcgactcagagaactgtactagat

SEQ ID NO: 500126 - DNA, 30 bp, Artificial Sequence
  Synthetic oligonucleotide
tttcaatgcggaatatatcggagcctagat

SEQ ID NO: 500127 - DNA, 30 bp, Artificial Sequence
  Synthetic oligonucleotide
ctccctcaacccgtggatatgcagctagat

SEQ ID NO: 500128 - DNA, 31 bp, Artificial Sequence
  Synthetic oligonucleotide
gttatccagcactggggctttgcagctagat

SEQ ID NO: 500129 - DNA, 30 bp, Artificial Sequence
  Synthetic oligonucleotide
attccagtcgccggggcatgaaatctagat

SEQ ID NO: 500130 - DNA, 30 bp, Artificial Sequence
  Synthetic oligonucleotide
gatatcgtatgggatgtcgggtctctagat

SEQ ID NO: 500131 - DNA, 30 bp, Artificial Sequence
  Synthetic oligonucleotide
tgcaggccagccaattgacatggagtagat

SEQ ID NO: 500132 - DNA, 30 bp, Artificial Sequence
  Synthetic oligonucleotide
ttacgcagcttgtagaggtttgtagtagat

SEQ ID NO: 500133 - DNA, 30 bp, Artificial Sequence
  Synthetic oligonucleotide
gagtcttgatcaataggcggcaccgtagat

SEQ ID NO: 500134 - DNA, 30 bp, Artificial Sequence
  Synthetic oligonucleotide
tgcccgggaccctaattatgacccgtagat

SEQ ID NO: 500135 - DNA, 30 bp, Artificial Sequence
  Synthetic oligonucleotide
ctgaccgggccctatttatacgtcgtagat

SEQ ID NO: 500136 - DNA, 30 bp, Artificial Sequence
  Synthetic oligonucleotide
cccatccgtacatggaagtacggggtagat

SEQ ID NO: 500137 - DNA, 30 bp, Artificial Sequence
  Synthetic oligonucleotide
aaatattgacacgggccgtttaatgtagat

SEQ ID NO: 500138 - DNA, 30 bp, Artificial Sequence
  Synthetic oligonucleotide
aaatgtctgctactaacggctactgtagat

SEQ ID NO: 500139 - DNA, 30 bp, Artificial Sequence
  Synthetic oligonucleotide
tacaggttaaggtatgaaagaacattagat

SEQ ID NO: 500140 - DNA, 30 bp, Artificial Sequence
  Synthetic oligonucleotide
atctacataccggggcattagacattagat

SEQ ID NO: 500141 - DNA, 30 bp, Artificial Sequence
  Synthetic oligonucleotide
gacttattaatctgaacgggcatattagat

SEQ ID NO: 500142 - DNA, 31 bp, Artificial Sequence
  Synthetic oligonucleotide
tattcgccgttgtggtcgcccactattagat

SEQ ID NO: 500143 - DNA, 30 bp, Artificial Sequence
  Synthetic oligonucleotide
caaatataataggaacgctggaacttagat

SEQ ID NO: 500144 - DNA, 30 bp, Artificial Sequence
  Synthetic oligonucleotide
ctaggttccccgcaagcgcttagcttagat

SEQ ID NO: 500145 - DNA, 30 bp, Artificial Sequence
  Synthetic oligonucleotide
gcgcgcataggcgccccattgcgcttagat

SEQ ID NO: 500146 - DNA, 30 bp, Artificial Sequence
  Synthetic oligonucleotide
ttctaagaagcctcagccgacatcttagat

SEQ ID NO: 500147 - DNA, 30 bp, Artificial Sequence
  Synthetic oligonucleotide
gcgactcgctacacctacatctagttagat

SEQ ID NO: 500148 - DNA, 30 bp, Artificial Sequence
  Synthetic oligonucleotide
tactcgccccggatcatgaagtggttagat

SEQ ID NO: 500149 - DNA, 30 bp, Artificial Sequence
  Synthetic oligonucleotide
atgtgatcgttctggataacccatttagat

SEQ ID NO: 500150 - DNA, 30 bp, Artificial Sequence
  Synthetic oligonucleotide
tgaaacgccacctcgttgcacaaaaacgat

SEQ ID NO: 500151 - DNA, 30 bp, Artificial Sequence
  Synthetic oligonucleotide
gatatttagaacaattgccttaaaaacgat

SEQ ID NO: 500152 - DNA, 30 bp, Artificial Sequence
  Synthetic oligonucleotide
ggttatccgtttcttcgcaattcaaacgat

SEQ ID NO: 500153 - DNA, 30 bp, Artificial Sequence
  Synthetic oligonucleotide
cagtaagccaccggcgacgcggtcaacgat

SEQ ID NO: 500154 - DNA, 30 bp, Artificial Sequence
  Synthetic oligonucleotide
tactcgcaggaccgaacgcaacagaacgat

SEQ ID NO: 500155 - DNA, 30 bp, Artificial Sequence
  Synthetic oligonucleotide
gcaacgccttctgtgtatacctcgaacgat

SEQ ID NO: 500156 - DNA, 30 bp, Artificial Sequence
  Synthetic oligonucleotide
caggcgattaaattagtatgagataacgat

SEQ ID NO: 500157 - DNA, 30 bp, Artificial Sequence
  Synthetic oligonucleotide
aagcgcagttgatcaggccgttataacgat

SEQ ID NO: 500158 - DNA, 30 bp, Artificial Sequence
  Synthetic oligonucleotide
aattgcacttcgtagcatgagtgtaacgat

SEQ ID NO: 500159 - DNA, 30 bp, Artificial Sequence
  Synthetic oligonucleotide
gtgaaccagcatcttaaggctcttaacgat

SEQ ID NO: 500160 - DNA, 30 bp, Artificial Sequence
  Synthetic oligonucleotide
cagtctcttggacagcaatagctacacgat

SEQ ID NO: 500161 - DNA, 30 bp, Artificial Sequence
  Synthetic oligonucleotide
ctcgtcccggggcccgtagttgcccacgat

SEQ ID NO: 500162 - DNA, 30 bp, Artificial Sequence
  Synthetic oligonucleotide
ttaagattacttcggtcagcgccgcacgat

SEQ ID NO: 500163 - DNA, 30 bp, Artificial Sequence
  Synthetic oligonucleotide
cccgccaaggctcattcatctccgcacgat

SEQ ID NO: 500164 - DNA, 30 bp, Artificial Sequence
  Synthetic oligonucleotide
tggtcaagacggagcatcggcgggcacgat

SEQ ID NO: 500165 - DNA, 30 bp, Artificial Sequence
  Synthetic oligonucleotide
gagtgtagcgtagtatatccgcacgacgat

SEQ ID NO: 500166 - DNA, 30 bp, Artificial Sequence
  Synthetic oligonucleotide
ataggattaagtcacacccatgacgacgat

SEQ ID NO: 500167 - DNA, 30 bp, Artificial Sequence
  Synthetic oligonucleotide
ggtcttaatagaaggagcgccttggacgat

SEQ ID NO: 500168 - DNA, 30 bp, Artificial Sequence
  Synthetic oligonucleotide
ggaacagttggaacgcagcgtttggacgat

SEQ ID NO: 500169 - DNA, 30 bp, Artificial Sequence
  Synthetic oligonucleotide
gcgtcgtgcacacgggaacgggcctacgat

SEQ ID NO: 500170 - DNA, 30 bp, Artificial Sequence
  Synthetic oligonucleotide
tcggttgtctgtgtcgtttcattgtacgat

SEQ ID NO: 500171 - DNA, 30 bp, Artificial Sequence
  Synthetic oligonucleotide
aactgattcttggggcaacgattgtacgat

SEQ ID NO: 500172 - DNA, 30 bp, Artificial Sequence
  Synthetic oligonucleotide
ccaggttgttgtcagttgctcagttacgat

SEQ ID NO: 500173 - DNA, 30 bp, Artificial Sequence
  Synthetic oligonucleotide
cgctaatcggattgagtgattcaaaccgat

SEQ ID NO: 500174 - DNA, 30 bp, Artificial Sequence
  Synthetic oligonucleotide
cagcacgaaggtgccccagacgcaaccgat

SEQ ID NO: 500175 - DNA, 30 bp, Artificial Sequence
  Synthetic oligonucleotide
ttggtgctgagaacagggcgggtcaccgat

SEQ ID NO: 500176 - DNA, 30 bp, Artificial Sequence
  Synthetic oligonucleotide
tcttgtaattcatcaaactaaatgaccgat

SEQ ID NO: 500177 - DNA, 30 bp, Artificial Sequence
  Synthetic oligonucleotide
gtgttcgacttgcaaccttgcatccccgat

SEQ ID NO: 500178 - DNA, 30 bp, Artificial Sequence
  Synthetic oligonucleotide
ttttagctatctgtaaaggcggcagccgat

SEQ ID NO: 500179 - DNA, 32 bp, Artificial Sequence
  Synthetic oligonucleotide
gatgaattaatggctatgatgacgtggccgat

SEQ ID NO: 500180 - DNA, 30 bp, Artificial Sequence
  Synthetic oligonucleotide
ttatttctggagcaaccaagtgttgccgat

SEQ ID NO: 500181 - DNA, 30 bp, Artificial Sequence
  Synthetic oligonucleotide
aatttagtcctcgtgctaagaggatccgat

SEQ ID NO: 500182 - DNA, 30 bp, Artificial Sequence
  Synthetic oligonucleotide
gcctacaagagcggttgcttcggatccgat

SEQ ID NO: 500183 - DNA, 30 bp, Artificial Sequence
  Synthetic oligonucleotide
aatcccggtggtctcaggtcaacaagcgat

SEQ ID NO: 500184 - DNA, 30 bp, Artificial Sequence
  Synthetic oligonucleotide
atcatacttcttagagaacatcacagcgat

SEQ ID NO: 500185 - DNA, 30 bp, Artificial Sequence
  Synthetic oligonucleotide
ggggtctacttcctggaagattgcagcgat

SEQ ID NO: 500186 - DNA, 30 bp, Artificial Sequence
  Synthetic oligonucleotide
taatttgtcaacaagatgggaatcagcgat

SEQ ID NO: 500187 - DNA, 30 bp, Artificial Sequence
  Synthetic oligonucleotide
tatacaaacgctgcattgtcccggagcgat

SEQ ID NO: 500188 - DNA, 30 bp, Artificial Sequence
  Synthetic oligonucleotide
atccggggatcgagcttgttttagcgcgat

SEQ ID NO: 500189 - DNA, 30 bp, Artificial Sequence
  Synthetic oligonucleotide
tttgggccaagttaattccgaaggcgcgat

SEQ ID NO: 500190 - DNA, 30 bp, Artificial Sequence
  Synthetic oligonucleotide
actgtgcgccttaatgctgcggggcgcgat

SEQ ID NO: 500191 - DNA, 30 bp, Artificial Sequence
  Synthetic oligonucleotide
atttaaaggttagacgttagtgtgcgcgat

SEQ ID NO: 500192 - DNA, 30 bp, Artificial Sequence
  Synthetic oligonucleotide
cgtcaggaatggctcgctgggacgggcgat

SEQ ID NO: 500193 - DNA, 30 bp, Artificial Sequence
  Synthetic oligonucleotide
ttcctgatgactctctatgcaatgggcgat

SEQ ID NO: 500194 - DNA, 30 bp, Artificial Sequence
  Synthetic oligonucleotide
gtttttgagcccttttcgggtcctggcgat

SEQ ID NO: 500195 - DNA, 30 bp, Artificial Sequence
  Synthetic oligonucleotide
agcgcgcaaatccggcatgggtctggcgat

SEQ ID NO: 500196 - DNA, 30 bp, Artificial Sequence
  Synthetic oligonucleotide
tagccaaacgccagtcgctaaggtggcgat

SEQ ID NO: 500197 - DNA, 30 bp, Artificial Sequence
  Synthetic oligonucleotide
tcgcccagacgtaaacccacaattggcgat

SEQ ID NO: 500198 - DNA, 30 bp, Artificial Sequence
  Synthetic oligonucleotide
taccacataccgagcgcagctgcctgcgat

SEQ ID NO: 500199 - DNA, 30 bp, Artificial Sequence
  Synthetic oligonucleotide
accctcattggggttccgagtgcgtgcgat

SEQ ID NO: 500200 - DNA, 30 bp, Artificial Sequence
  Synthetic oligonucleotide
tagtttggtgggcacgtgggttgttgcgat

SEQ ID NO: 500201 - DNA, 30 bp, Artificial Sequence
  Synthetic oligonucleotide
actgtgcgaccatacaaccgaagaatcgat

SEQ ID NO: 500202 - DNA, 30 bp, Artificial Sequence
  Synthetic oligonucleotide
tatccacgtctgaggaggtatatgatcgat

SEQ ID NO: 500203 - DNA, 30 bp, Artificial Sequence
  Synthetic oligonucleotide
gcgttacaggccctaggcgctatgatcgat

SEQ ID NO: 500204 - DNA, 30 bp, Artificial Sequence
  Synthetic oligonucleotide
gaagccccgggcggcagcgctttgatcgat

SEQ ID NO: 500205 - DNA, 30 bp, Artificial Sequence
  Synthetic oligonucleotide
atactgtcctgcctatatgtccgtatcgat

SEQ ID NO: 500206 - DNA, 30 bp, Artificial Sequence
  Synthetic oligonucleotide
tgtgtagacgagttaatcgaggtactcgat

SEQ ID NO: 500207 - DNA, 30 bp, Artificial Sequence
  Synthetic oligonucleotide
tagcataaacagacgcctccgacgctcgat

SEQ ID NO: 500208 - DNA, 30 bp, Artificial Sequence
  Synthetic oligonucleotide
aggacgcgggctgactgcgttctgctcgat

SEQ ID NO: 500209 - DNA, 30 bp, Artificial Sequence
  Synthetic oligonucleotide
gtacttcagaatttgccaacctctctcgat

SEQ ID NO: 500210 - DNA, 30 bp, Artificial Sequence
  Synthetic oligonucleotide
tgctgcacagacgcgcttttgcgtctcgat

SEQ ID NO: 500211 - DNA, 30 bp, Artificial Sequence
  Synthetic oligonucleotide
tgctaagatctggtcccgattggtctcgat

SEQ ID NO: 500212 - DNA, 30 bp, Artificial Sequence
  Synthetic oligonucleotide
acagccatgatgtgcttgtgttgtctcgat

SEQ ID NO: 500213 - DNA, 30 bp, Artificial Sequence
  Synthetic oligonucleotide
ctgcagactcgacgaggttcgggagtcgat

SEQ ID NO: 500214 - DNA, 30 bp, Artificial Sequence
  Synthetic oligonucleotide
atgtgtctaaaacgcagatatctagtcgat

SEQ ID NO: 500215 - DNA, 30 bp, Artificial Sequence
  Synthetic oligonucleotide
ccgcgacaaccgactctttgcgtcgtcgat

SEQ ID NO: 500216 - DNA, 30 bp, Artificial Sequence
  Synthetic oligonucleotide
gcaacgggatccttttggttaaaggtcgat

SEQ ID NO: 500217 - DNA, 30 bp, Artificial Sequence
  Synthetic oligonucleotide
atctatttgcgtgcaggggaaggggtcgat

SEQ ID NO: 500218 - DNA, 30 bp, Artificial Sequence
  Synthetic oligonucleotide
gatcttttcgtgaatcgattctgggtcgat

SEQ ID NO: 500219 - DNA, 30 bp, Artificial Sequence
  Synthetic oligonucleotide
cttttctattaaagtcgttgccatgtcgat

SEQ ID NO: 500220 - DNA, 30 bp, Artificial Sequence
  Synthetic oligonucleotide
cggagtctgtctccggggatatgtgtcgat

SEQ ID NO: 500221 - DNA, 30 bp, Artificial Sequence
  Synthetic oligonucleotide
gagtctaccggacgtccactgcaattcgat

SEQ ID NO: 500222 - DNA, 30 bp, Artificial Sequence
  Synthetic oligonucleotide
acggctgcgtggggcaaatccagcttcgat

SEQ ID NO: 500223 - DNA, 30 bp, Artificial Sequence
  Synthetic oligonucleotide
gcagggctatctaggccatgggagttcgat

SEQ ID NO: 500224 - DNA, 30 bp, Artificial Sequence
  Synthetic oligonucleotide
agtattatttaggtaggcaacgcgttcgat

SEQ ID NO: 500225 - DNA, 30 bp, Artificial Sequence
  Synthetic oligonucleotide
gaagggttatttctgttgcaaaggttcgat

SEQ ID NO: 500226 - DNA, 30 bp, Artificial Sequence
  Synthetic oligonucleotide
tcttgttcggtgattagccgcgggttcgat

SEQ ID NO: 500227 - DNA, 30 bp, Artificial Sequence
  Synthetic oligonucleotide
cccggcgctcaaatagaaagggggttcgat

SEQ ID NO: 500228 - DNA, 30 bp, Artificial Sequence
  Synthetic oligonucleotide
tttacgattgagtacgctgatcatttcgat

SEQ ID NO: 500229 - DNA, 30 bp, Artificial Sequence
  Synthetic oligonucleotide
tcgcgacgcaatcgtgctcatcctttcgat

SEQ ID NO: 500230 - DNA, 30 bp, Artificial Sequence
  Synthetic oligonucleotide
tgtttttatgggggggacttgattttcgat

SEQ ID NO: 500231 - DNA, 30 bp, Artificial Sequence
  Synthetic oligonucleotide
ccctaaaggaaggcagtctatacaaaggat

SEQ ID NO: 500232 - DNA, 30 bp, Artificial Sequence
  Synthetic oligonucleotide
cggctccctaggtgcggcaccgtaaaggat

SEQ ID NO: 500233 - DNA, 30 bp, Artificial Sequence
  Synthetic oligonucleotide
actgcaagtacgttcccttgccgcaaggat

SEQ ID NO: 500234 - DNA, 30 bp, Artificial Sequence
  Synthetic oligonucleotide
tatcttttgtcccttgtaatgcgcaaggat

SEQ ID NO: 500235 - DNA, 30 bp, Artificial Sequence
  Synthetic oligonucleotide
tggggtttgtcgatttgatggtgcaaggat

SEQ ID NO: 500236 - DNA, 30 bp, Artificial Sequence
  Synthetic oligonucleotide
tcttcagaatccgggcaaacggagaaggat

SEQ ID NO: 500237 - DNA, 30 bp, Artificial Sequence
  Synthetic oligonucleotide
gtgcctgtacctgggcgatgaaggaaggat

SEQ ID NO: 500238 - DNA, 30 bp, Artificial Sequence
  Synthetic oligonucleotide
gagatgttttgtagttttacgaggaaggat

SEQ ID NO: 500239 - DNA, 30 bp, Artificial Sequence
  Synthetic oligonucleotide
tgaatggtcctttttgtacgccggaaggat

SEQ ID NO: 500240 - DNA, 30 bp, Artificial Sequence
  Synthetic oligonucleotide
ccatgccgcagggaccagaataatcaggat

SEQ ID NO: 500241 - DNA, 30 bp, Artificial Sequence
  Synthetic oligonucleotide
atccgacaaaggtgtgtaacggatcaggat

SEQ ID NO: 500242 - DNA, 30 bp, Artificial Sequence
  Synthetic oligonucleotide
aatatccctatatacagacgtgctcaggat

SEQ ID NO: 500243 - DNA, 30 bp, Artificial Sequence
  Synthetic oligonucleotide
attaacatagctaagtttagtaatgaggat

SEQ ID NO: 500244 - DNA, 30 bp, Artificial Sequence
  Synthetic oligonucleotide
cgcactagacaatacctgcggtaataggat

SEQ ID NO: 500245 - DNA, 30 bp, Artificial Sequence
  Synthetic oligonucleotide
ctctactagatgactaaacaaccataggat

SEQ ID NO: 500246 - DNA, 30 bp, Artificial Sequence
  Synthetic oligonucleotide
tgggtttgtgatcgggccacctcataggat

SEQ ID NO: 500247 - DNA, 30 bp, Artificial Sequence
  Synthetic oligonucleotide
aaaagccatgcgcctgtggcttcataggat

SEQ ID NO: 500248 - DNA, 30 bp, Artificial Sequence
  Synthetic oligonucleotide
tcccctgggcgcactggggaacattaggat

SEQ ID NO: 500249 - DNA, 30 bp, Artificial Sequence
  Synthetic oligonucleotide
atggagacgctgctcaatccacattaggat

SEQ ID NO: 500250 - DNA, 30 bp, Artificial Sequence
  Synthetic oligonucleotide
ctctgtcagtttttggctagggattaggat

SEQ ID NO: 500251 - DNA, 30 bp, Artificial Sequence
  Synthetic oligonucleotide
ttaagctgcgttatctgtataatttaggat

SEQ ID NO: 500252 - DNA, 30 bp, Artificial Sequence
  Synthetic oligonucleotide
tctggcaatctgattggggtttacacggat

SEQ ID NO: 500253 - DNA, 30 bp, Artificial Sequence
  Synthetic oligonucleotide
tcagtagtactcgtatcggagcatacggat

SEQ ID NO: 500254 - DNA, 30 bp, Artificial Sequence
  Synthetic oligonucleotide
gtaatctagtatttgtttttgtctacggat

SEQ ID NO: 500255 - DNA, 30 bp, Artificial Sequence
  Synthetic oligonucleotide
ctagccacgggggtcatactgggtacggat

SEQ ID NO: 500256 - DNA, 30 bp, Artificial Sequence
  Synthetic oligonucleotide
taccgttaaggtgcggcacaaccaccggat

SEQ ID NO: 500257 - DNA, 30 bp, Artificial Sequence
  Synthetic oligonucleotide
tcgcccccattttttgttttactaccggat

SEQ ID NO: 500258 - DNA, 30 bp, Artificial Sequence
  Synthetic oligonucleotide
cgcgcgcaagcataggagataaacccggat

SEQ ID NO: 500259 - DNA, 30 bp, Artificial Sequence
  Synthetic oligonucleotide
gttactacaggtcccgaagcttccccggat

SEQ ID NO: 500260 - DNA, 30 bp, Artificial Sequence
  Synthetic oligonucleotide
ggttctccgggagcccatcggcagccggat

SEQ ID NO: 500261 - DNA, 30 bp, Artificial Sequence
  Synthetic oligonucleotide
ctgatgaggcacgggtaaatcactccggat

SEQ ID NO: 500262 - DNA, 30 bp, Artificial Sequence
  Synthetic oligonucleotide
atgggctatgtctggccggacgccgcggat

SEQ ID NO: 500263 - DNA, 30 bp, Artificial Sequence
  Synthetic oligonucleotide
atattgcgagaatgatgcatccaggcggat

SEQ ID NO: 500264 - DNA, 30 bp, Artificial Sequence
  Synthetic oligonucleotide
gaaaatttgattacaatgacagaggcggat

SEQ ID NO: 500265 - DNA, 30 bp, Artificial Sequence
  Synthetic oligonucleotide
gaaactcgggggactgtcatccatgcggat

SEQ ID NO: 500266 - DNA, 30 bp, Artificial Sequence
  Synthetic oligonucleotide
aatgcagtcaggtcttaggctcactcggat

SEQ ID NO: 500267 - DNA, 30 bp, Artificial Sequence
  Synthetic oligonucleotide
gctgggcgaccaattgcccagttctcggat

SEQ ID NO: 500268 - DNA, 30 bp, Artificial Sequence
  Synthetic oligonucleotide
atagatttcggcacgtgtatcacgtcggat

SEQ ID NO: 500269 - DNA, 30 bp, Artificial Sequence
  Synthetic oligonucleotide
gggtcggtatagcatgcaaattggtcggat

SEQ ID NO: 500270 - DNA, 30 bp, Artificial Sequence
  Synthetic oligonucleotide
tggcatcagcatctgtcttcacattcggat

SEQ ID NO: 500271 - DNA, 30 bp, Artificial Sequence
  Synthetic oligonucleotide
tagtacttcgtgaatgggtatctttcggat

SEQ ID NO: 500272 - DNA, 30 bp, Artificial Sequence
  Synthetic oligonucleotide
gcagtgttttttacaaccctgggaagggat

SEQ ID NO: 500273 - DNA, 30 bp, Artificial Sequence
  Synthetic oligonucleotide
tttataaactgcatgcggacgggcagggat

SEQ ID NO: 500274 - DNA, 30 bp, Artificial Sequence
  Synthetic oligonucleotide
aatttaaaaatatggacaccggatagggat

SEQ ID NO: 500275 - DNA, 30 bp, Artificial Sequence
  Synthetic oligonucleotide
aatcatagttacgctccgcaccctagggat

SEQ ID NO: 500276 - DNA, 30 bp, Artificial Sequence
  Synthetic oligonucleotide
gttataatgaacttggttctgcctagggat

SEQ ID NO: 500277 - DNA, 30 bp, Artificial Sequence
  Synthetic oligonucleotide
acgcctgcgcacgagtgccctccacgggat

SEQ ID NO: 500278 - DNA, 30 bp, Artificial Sequence
  Synthetic oligonucleotide
gtccacgacgcacacggttacagacgggat

SEQ ID NO: 500279 - DNA, 30 bp, Artificial Sequence
  Synthetic oligonucleotide
gattaccttcgcttccaccttttacgggat

SEQ ID NO: 500280 - DNA, 30 bp, Artificial Sequence
  Synthetic oligonucleotide
gggtctattgggaactttttaacccgggat

SEQ ID NO: 500281 - DNA, 30 bp, Artificial Sequence
  Synthetic oligonucleotide
tcgagattcggtggatgagggctccgggat

SEQ ID NO: 500282 - DNA, 30 bp, Artificial Sequence
  Synthetic oligonucleotide
ttattgtacagcgattaatttcagcgggat

SEQ ID NO: 500283 - DNA, 30 bp, Artificial Sequence
  Synthetic oligonucleotide
tctccggggccagggacggctcttcgggat

SEQ ID NO: 500284 - DNA, 30 bp, Artificial Sequence
  Synthetic oligonucleotide
ccttttcatgctgatcatgtctcaggggat

SEQ ID NO: 500285 - DNA, 30 bp, Artificial Sequence
  Synthetic oligonucleotide
cgattgagtattcttgcctatagaggggat

SEQ ID NO: 500286 - DNA, 30 bp, Artificial Sequence
  Synthetic oligonucleotide
tctaaccccggcctctattacataggggat

SEQ ID NO: 500287 - DNA, 30 bp, Artificial Sequence
  Synthetic oligonucleotide
gacccggcagggagaggtcggataggggat

SEQ ID NO: 500288 - DNA, 30 bp, Artificial Sequence
  Synthetic oligonucleotide
cgattgagtattcttgcctatataggggat

SEQ ID NO: 500289 - DNA, 30 bp, Artificial Sequence
  Synthetic oligonucleotide
ttaaatactatcgatctgggtataggggat

SEQ ID NO: 500290 - DNA, 30 bp, Artificial Sequence
  Synthetic oligonucleotide
gctttgattgatagagggatactaggggat

SEQ ID NO: 500291 - DNA, 30 bp, Artificial Sequence
  Synthetic oligonucleotide
acaatgacatcaagttctccggtcggggat

SEQ ID NO: 500292 - DNA, 30 bp, Artificial Sequence
  Synthetic oligonucleotide
tttgttgcttccgatttagcgttcggggat

SEQ ID NO: 500293 - DNA, 30 bp, Artificial Sequence
  Synthetic oligonucleotide
ggctgcgctttcttctggcccgggggggat

SEQ ID NO: 500294 - DNA, 30 bp, Artificial Sequence
  Synthetic oligonucleotide
cctcgtattgacgcagttttcgatggggat

SEQ ID NO: 500295 - DNA, 30 bp, Artificial Sequence
  Synthetic oligonucleotide
cgcagtaccacctttcaatttggatgggat

SEQ ID NO: 500296 - DNA, 30 bp, Artificial Sequence
  Synthetic oligonucleotide
cattagtggttttgggttaagtgatgggat

SEQ ID NO: 500297 - DNA, 30 bp, Artificial Sequence
  Synthetic oligonucleotide
gaccagttgtgccagagggacatatgggat

SEQ ID NO: 500298 - DNA, 30 bp, Artificial Sequence
  Synthetic oligonucleotide
gaatcgtttggaggatctaagcggtgggat

SEQ ID NO: 500299 - DNA, 30 bp, Artificial Sequence
  Synthetic oligonucleotide
ataaagacgtacaatcgggccttgtgggat

SEQ ID NO: 500300 - DNA, 30 bp, Artificial Sequence
  Synthetic oligonucleotide
tcaaagaacttgaatgtctttcattgggat

SEQ ID NO: 500301 - DNA, 30 bp, Artificial Sequence
  Synthetic oligonucleotide
aacaagggatggtaatgggcctcttgggat

SEQ ID NO: 500302 - DNA, 30 bp, Artificial Sequence
  Synthetic oligonucleotide
aggtgactagaccgcaaaaacggcatggat

SEQ ID NO: 500303 - DNA, 30 bp, Artificial Sequence
  Synthetic oligonucleotide
taggctagtacctacattgtgaagatggat

SEQ ID NO: 500304 - DNA, 30 bp, Artificial Sequence
  Synthetic oligonucleotide
attacccttcggcgggcggctccgatggat

SEQ ID NO: 500305 - DNA, 30 bp, Artificial Sequence
  Synthetic oligonucleotide
atctctacttttcggagctttgaactggat

SEQ ID NO: 500306 - DNA, 30 bp, Artificial Sequence
  Synthetic oligonucleotide
gatgaaccggtccatataggccgactggat

SEQ ID NO: 500307 - DNA, 30 bp, Artificial Sequence
  Synthetic oligonucleotide
gcggcctgcatctcaggcacctacctggat

SEQ ID NO: 500308 - DNA, 30 bp, Artificial Sequence
  Synthetic oligonucleotide
gccctatttttaaacgtcccaaccctggat

SEQ ID NO: 500309 - DNA, 30 bp, Artificial Sequence
  Synthetic oligonucleotide
attttgtagggaacccgggaggtcctggat

SEQ ID NO: 500310 - DNA, 30 bp, Artificial Sequence
  Synthetic oligonucleotide
catatttagaatacgcagaaattcctggat

SEQ ID NO: 500311 - DNA, 30 bp, Artificial Sequence
  Synthetic oligonucleotide
ttcttgaagggttgggtaccatggctggat

SEQ ID NO: 500312 - DNA, 30 bp, Artificial Sequence
  Synthetic oligonucleotide
ctgcggggtaccagtgcttttgtgctggat

SEQ ID NO: 500313 - DNA, 30 bp, Artificial Sequence
  Synthetic oligonucleotide
agcctccaggggaacggcagggatctggat

SEQ ID NO: 500314 - DNA, 30 bp, Artificial Sequence
  Synthetic oligonucleotide
gttatcattaggcatctagccgctctggat

SEQ ID NO: 500315 - DNA, 30 bp, Artificial Sequence
  Synthetic oligonucleotide
gcacagaggtcatgggatttagaagtggat

SEQ ID NO: 500316 - DNA, 30 bp, Artificial Sequence
  Synthetic oligonucleotide
tcaactagggggtcacagtacgaagtggat

SEQ ID NO: 500317 - DNA, 30 bp, Artificial Sequence
  Synthetic oligonucleotide
ttcaaggatttacatcgttgtgaagtggat

SEQ ID NO: 500318 - DNA, 30 bp, Artificial Sequence
  Synthetic oligonucleotide
cagtcccgtagaaaacgggggagtgtggat

SEQ ID NO: 500319 - DNA, 30 bp, Artificial Sequence
  Synthetic oligonucleotide
tcttatctgttgtgttttcctcttgtggat

SEQ ID NO: 500320 - DNA, 30 bp, Artificial Sequence
  Synthetic oligonucleotide
ctcaactgcgccaattaccatcaattggat

SEQ ID NO: 500321 - DNA, 30 bp, Artificial Sequence
  Synthetic oligonucleotide
ctcgctggagccacggaggcaccattggat

SEQ ID NO: 500322 - DNA, 30 bp, Artificial Sequence
  Synthetic oligonucleotide
tgtgtctcacgtagtagaattgagttggat

SEQ ID NO: 500323 - DNA, 30 bp, Artificial Sequence
  Synthetic oligonucleotide
aaagtagtcctggcctgggtatggttggat

SEQ ID NO: 500324 - DNA, 30 bp, Artificial Sequence
  Synthetic oligonucleotide
aaaaattcatccgtcgaaacgcatttggat

SEQ ID NO: 500325 - DNA, 30 bp, Artificial Sequence
  Synthetic oligonucleotide
ggtaatttttataaactgtccgttttggat

SEQ ID NO: 500326 - DNA, 30 bp, Artificial Sequence
  Synthetic oligonucleotide
tgggaccattttccgcgtcgttttttggat

SEQ ID NO: 500327 - DNA, 30 bp, Artificial Sequence
  Synthetic oligonucleotide
tagctatgaacgtaaactcataacaatgat

SEQ ID NO: 500328 - DNA, 30 bp, Artificial Sequence
  Synthetic oligonucleotide
ccggcaacaataaaactttgaatcaatgat

SEQ ID NO: 500329 - DNA, 30 bp, Artificial Sequence
  Synthetic oligonucleotide
ttacggtgtcggtgctgatgcggtaatgat

SEQ ID NO: 500330 - DNA, 30 bp, Artificial Sequence
  Synthetic oligonucleotide
ctattcaggggaaaagtacgctgtaatgat

SEQ ID NO: 500331 - DNA, 30 bp, Artificial Sequence
  Synthetic oligonucleotide
gagagcagcacagctatcatcgcccatgat

SEQ ID NO: 500332 - DNA, 30 bp, Artificial Sequence
  Synthetic oligonucleotide
gtttttaatatcgttacgcgaagccatgat

SEQ ID NO: 500333 - DNA, 30 bp, Artificial Sequence
  Synthetic oligonucleotide
gccataatggctccgtgaggtagccatgat

SEQ ID NO: 500334 - DNA, 30 bp, Artificial Sequence
  Synthetic oligonucleotide
cttctctaggcctatcaaacttgagatgat

SEQ ID NO: 500335 - DNA, 30 bp, Artificial Sequence
  Synthetic oligonucleotide
cactttacgctgttttgactcgacgatgat

SEQ ID NO: 500336 - DNA, 30 bp, Artificial Sequence
  Synthetic oligonucleotide
ttattacctcggtttggacgtgccgatgat

SEQ ID NO: 500337 - DNA, 30 bp, Artificial Sequence
  Synthetic oligonucleotide
aaagtggttctactaggattcctcgatgat

SEQ ID NO: 500338 - DNA, 30 bp, Artificial Sequence
  Synthetic oligonucleotide
cgattgccacagctatcattttgtgatgat

SEQ ID NO: 500339 - DNA, 30 bp, Artificial Sequence
  Synthetic oligonucleotide
gccgacatatctgtacaggagcaatatgat

SEQ ID NO: 500340 - DNA, 30 bp, Artificial Sequence
  Synthetic oligonucleotide
cagcccggactggtattgtatcaatatgat

SEQ ID NO: 500341 - DNA, 30 bp, Artificial Sequence
  Synthetic oligonucleotide
cagctgtttaggttttacatctcatatgat

SEQ ID NO: 500342 - DNA, 30 bp, Artificial Sequence
  Synthetic oligonucleotide
agaactatacaatcataacactgatatgat

SEQ ID NO: 500343 - DNA, 30 bp, Artificial Sequence
  Synthetic oligonucleotide
actataggtataatgtggacctgatatgat

SEQ ID NO: 500344 - DNA, 30 bp, Artificial Sequence
  Synthetic oligonucleotide
taagcaacacccttgaacgagaagtatgat

SEQ ID NO: 500345 - DNA, 30 bp, Artificial Sequence
  Synthetic oligonucleotide
cctcataactgaattagccggaggtatgat

SEQ ID NO: 500346 - DNA, 30 bp, Artificial Sequence
  Synthetic oligonucleotide
atagttgacaaaaggacgcgcagttatgat

SEQ ID NO: 500347 - DNA, 30 bp, Artificial Sequence
  Synthetic oligonucleotide
ggggcgattataaacttttaacgttatgat

SEQ ID NO: 500348 - DNA, 30 bp, Artificial Sequence
  Synthetic oligonucleotide
agaatattccttcccgtgctctgttatgat

SEQ ID NO: 500349 - DNA, 30 bp, Artificial Sequence
  Synthetic oligonucleotide
ttgcaccaagcttgaagcagccgaactgat

SEQ ID NO: 500350 - DNA, 30 bp, Artificial Sequence
  Synthetic oligonucleotide
agtgcgtatcgttgtggatgatccactgat

SEQ ID NO: 500351 - DNA, 30 bp, Artificial Sequence
  Synthetic oligonucleotide
agatacttgtaagaggaagcctccactgat

SEQ ID NO: 500352 - DNA, 30 bp, Artificial Sequence
  Synthetic oligonucleotide
ttctgctccctgcaccccactatcactgat

SEQ ID NO: 500353 - DNA, 30 bp, Artificial Sequence
  Synthetic oligonucleotide
cactactctgcggcctcacttcggactgat

SEQ ID NO: 500354 - DNA, 30 bp, Artificial Sequence
  Synthetic oligonucleotide
caggttgtgtttctattaaactggactgat

SEQ ID NO: 500355 - DNA, 30 bp, Artificial Sequence
  Synthetic oligonucleotide
aaattcttggtcgtcacattcttgactgat

SEQ ID NO: 500356 - DNA, 30 bp, Artificial Sequence
  Synthetic oligonucleotide
gcccgtcgcacatcaatttcgttgactgat

SEQ ID NO: 500357 - DNA, 30 bp, Artificial Sequence
  Synthetic oligonucleotide
gaagtcacaatacgcatttgctctactgat

SEQ ID NO: 500358 - DNA, 30 bp, Artificial Sequence
  Synthetic oligonucleotide
ccgtggaccaccagtttcccagaacctgat

SEQ ID NO: 500359 - DNA, 30 bp, Artificial Sequence
  Synthetic oligonucleotide
cagatacatacgagaggcggtttccctgat

SEQ ID NO: 500360 - DNA, 30 bp, Artificial Sequence
  Synthetic oligonucleotide
atacggcgggtaggagggaagcagcctgat

SEQ ID NO: 500361 - DNA, 30 bp, Artificial Sequence
  Synthetic oligonucleotide
tctttatacggcacttagttttggcctgat

SEQ ID NO: 500362 - DNA, 30 bp, Artificial Sequence
  Synthetic oligonucleotide
gctgttgcatgcagtccacatcatcctgat

SEQ ID NO: 500363 - DNA, 30 bp, Artificial Sequence
  Synthetic oligonucleotide
gagcgcgtatagtcaatacagggtcctgat

SEQ ID NO: 500364 - DNA, 30 bp, Artificial Sequence
  Synthetic oligonucleotide
ttatatcgatacaaatagatctgtcctgat

SEQ ID NO: 500365 - DNA, 30 bp, Artificial Sequence
  Synthetic oligonucleotide
attgcggcttcgccgtgttttccagctgat

SEQ ID NO: 500366 - DNA, 30 bp, Artificial Sequence
  Synthetic oligonucleotide
aattcatagcaacaggcgtgcatagctgat

SEQ ID NO: 500367 - DNA, 30 bp, Artificial Sequence
  Synthetic oligonucleotide
acctccgttttcgacagggtacgcgctgat

SEQ ID NO: 500368 - DNA, 30 bp, Artificial Sequence
  Synthetic oligonucleotide
aaatcaagtgcaagcgactagttcgctgat

SEQ ID NO: 500369 - DNA, 30 bp, Artificial Sequence
  Synthetic oligonucleotide
attgaattggcaacatctacgaatgctgat

SEQ ID NO: 500370 - DNA, 29 bp, Artificial Sequence
  Synthetic oligonucleotide
gttgataccctcctatgtggactgctgat

SEQ ID NO: 500371 - DNA, 30 bp, Artificial Sequence
  Synthetic oligonucleotide
gtgctctagccgtgggggaaggaatctgat

SEQ ID NO: 500372 - DNA, 30 bp, Artificial Sequence
  Synthetic oligonucleotide
atttggaaaagagccgcctgtgactctgat

SEQ ID NO: 500373 - DNA, 30 bp, Artificial Sequence
  Synthetic oligonucleotide
gatccctgagccgcttggcgttggtctgat

SEQ ID NO: 500374 - DNA, 30 bp, Artificial Sequence
  Synthetic oligonucleotide
gtaatgataacttgttccccaagttctgat

SEQ ID NO: 500375 - DNA, 30 bp, Artificial Sequence
  Synthetic oligonucleotide
agcgcttaggtattcacgtaatgttctgat

SEQ ID NO: 500376 - DNA, 30 bp, Artificial Sequence
  Synthetic oligonucleotide
caagcaacttgctaaacactaggaagtgat

SEQ ID NO: 500377 - DNA, 30 bp, Artificial Sequence
  Synthetic oligonucleotide
cagcaacttccggatatccgttgaagtgat

SEQ ID NO: 500378 - DNA, 30 bp, Artificial Sequence
  Synthetic oligonucleotide
atcacgctttgcgatggctgcaacagtgat

SEQ ID NO: 500379 - DNA, 30 bp, Artificial Sequence
  Synthetic oligonucleotide
gtccgtacacgcgtggctgtgttcagtgat

SEQ ID NO: 500380 - DNA, 30 bp, Artificial Sequence
  Synthetic oligonucleotide
atgggtcgtacacaccattttctgagtgat

SEQ ID NO: 500381 - DNA, 30 bp, Artificial Sequence
  Synthetic oligonucleotide
tgtcttcgttattaagtaggcgttcgtgat

SEQ ID NO: 500382 - DNA, 30 bp, Artificial Sequence
  Synthetic oligonucleotide
ggacatagacctagaactatctaaggtgat

SEQ ID NO: 500383 - DNA, 30 bp, Artificial Sequence
  Synthetic oligonucleotide
agtacggactacttaacgcccacaggtgat

SEQ ID NO: 500384 - DNA, 30 bp, Artificial Sequence
  Synthetic oligonucleotide
ttacacaatagcgcagcgcatacaggtgat

SEQ ID NO: 500385 - DNA, 30 bp, Artificial Sequence
  Synthetic oligonucleotide
cgtgtgatacctccgagcctgctaggtgat

SEQ ID NO: 500386 - DNA, 30 bp, Artificial Sequence
  Synthetic oligonucleotide
ccgtatttttgattcacactagtaggtgat

SEQ ID NO: 500387 - DNA, 30 bp, Artificial Sequence
  Synthetic oligonucleotide
tcaagaatagggtaaagttgactgggtgat

SEQ ID NO: 500388 - DNA, 30 bp, Artificial Sequence
  Synthetic oligonucleotide
acgcatgatgtgtcacccgggagtggtgat

SEQ ID NO: 500389 - DNA, 30 bp, Artificial Sequence
  Synthetic oligonucleotide
aatgtctaggttcagacaagccttggtgat

SEQ ID NO: 500390 - DNA, 30 bp, Artificial Sequence
  Synthetic oligonucleotide
tatatagacagtaacagtccgctatgtgat

SEQ ID NO: 500391 - DNA, 30 bp, Artificial Sequence
  Synthetic oligonucleotide
acctgacggttcttacgtattgtgtgtgat

SEQ ID NO: 500392 - DNA, 30 bp, Artificial Sequence
  Synthetic oligonucleotide
gatggcgggcaatatatcttttcaattgat

SEQ ID NO: 500393 - DNA, 30 bp, Artificial Sequence
  Synthetic oligonucleotide
taatatccagacggtgttgtcttgattgat

SEQ ID NO: 500394 - DNA, 30 bp, Artificial Sequence
  Synthetic oligonucleotide
tgggcgcaagtcctcagaatgtctattgat

SEQ ID NO: 500395 - DNA, 30 bp, Artificial Sequence
  Synthetic oligonucleotide
ctatgagggttatcgtagaagggtattgat

SEQ ID NO: 500396 - DNA, 30 bp, Artificial Sequence
  Synthetic oligonucleotide
gtctttcctcttggtcggagatgacttgat

SEQ ID NO: 500397 - DNA, 30 bp, Artificial Sequence
  Synthetic oligonucleotide
ggagggggtcggtacctattgacccttgat

SEQ ID NO: 500398 - DNA, 30 bp, Artificial Sequence
  Synthetic oligonucleotide
atggtgtttgccctaaagaatgcccttgat

SEQ ID NO: 500399 - DNA, 30 bp, Artificial Sequence
  Synthetic oligonucleotide
tcctctaacttcgtgtttgatgcagttgat

SEQ ID NO: 500400 - DNA, 30 bp, Artificial Sequence
  Synthetic oligonucleotide
ttagcatagcaaccgtggttaacggttgat

SEQ ID NO: 500401 - DNA, 28 bp, Artificial Sequence
  Synthetic oligonucleotide
catgacaacggctaagtgggcggttgat

SEQ ID NO: 500402 - DNA, 30 bp, Artificial Sequence
  Synthetic oligonucleotide
tgtgaggcgaaaacaaccgccagggttgat

SEQ ID NO: 500403 - DNA, 30 bp, Artificial Sequence
  Synthetic oligonucleotide
ccatttcgttatgattagaaggatgttgat

SEQ ID NO: 500404 - DNA, 30 bp, Artificial Sequence
  Synthetic oligonucleotide
agagtatttaggtacaggttttctgttgat

SEQ ID NO: 500405 - DNA, 30 bp, Artificial Sequence
  Synthetic oligonucleotide
tttccgtaggcgggcttatgtcttgttgat

SEQ ID NO: 500406 - DNA, 30 bp, Artificial Sequence
  Synthetic oligonucleotide
gaatagatacatccagtttagcaatttgat

SEQ ID NO: 500407 - DNA, 30 bp, Artificial Sequence
  Synthetic oligonucleotide
ttgctttataatggatcaattgcatttgat

SEQ ID NO: 500408 - DNA, 30 bp, Artificial Sequence
  Synthetic oligonucleotide
gctcgtacacgaagcagcagccactttgat

SEQ ID NO: 500409 - DNA, 30 bp, Artificial Sequence
  Synthetic oligonucleotide
acccgcgcgcaatcaaacatctcctttgat

SEQ ID NO: 500410 - DNA, 30 bp, Artificial Sequence
  Synthetic oligonucleotide
ggcatctaagagtgagatcttctctttgat

SEQ ID NO: 500411 - DNA, 30 bp, Artificial Sequence
  Synthetic oligonucleotide
tgggatagtagattcagcacgtagtttgat

SEQ ID NO: 500412 - DNA, 30 bp, Artificial Sequence
  Synthetic oligonucleotide
gctatcatttccactccgtgctattttgat

SEQ ID NO: 500413 - DNA, 30 bp, Artificial Sequence
  Synthetic oligonucleotide
cgctgctaacgccaggcgagcgtttttgat

SEQ ID NO: 500414 - DNA, 30 bp, Artificial Sequence
  Synthetic oligonucleotide
gtcgttatacgacctgagccttaaaaatat

SEQ ID NO: 500415 - DNA, 30 bp, Artificial Sequence
  Synthetic oligonucleotide
aattgagatagcatatgagtctgaaaatat

SEQ ID NO: 500416 - DNA, 30 bp, Artificial Sequence
  Synthetic oligonucleotide
ggcctgggggccctaataccggccaaatat

SEQ ID NO: 500417 - DNA, 30 bp, Artificial Sequence
  Synthetic oligonucleotide
atagcacctgcgccagtgtatcgcaaatat

SEQ ID NO: 500418 - DNA, 30 bp, Artificial Sequence
  Synthetic oligonucleotide
cacaagagttctcctaaaattacgaaatat

SEQ ID NO: 500419 - DNA, 30 bp, Artificial Sequence
  Synthetic oligonucleotide
tataatcgcagaggaattcatcctaaatat

SEQ ID NO: 500420 - DNA, 30 bp, Artificial Sequence
  Synthetic oligonucleotide
ctcgtccccgctgccgcaacgagtaaatat

SEQ ID NO: 500421 - DNA, 30 bp, Artificial Sequence
  Synthetic oligonucleotide
agcatcacgacgcactagtaatcacaatat

SEQ ID NO: 500422 - DNA, 30 bp, Artificial Sequence
  Synthetic oligonucleotide
ttaccaaatgaatcccgtataggacaatat

SEQ ID NO: 500423 - DNA, 30 bp, Artificial Sequence
  Synthetic oligonucleotide
agatcgtcacacgcataagcatgccaatat

SEQ ID NO: 500424 - DNA, 30 bp, Artificial Sequence
  Synthetic oligonucleotide
aaaattcgccagtgacagatccagcaatat

SEQ ID NO: 500425 - DNA, 30 bp, Artificial Sequence
  Synthetic oligonucleotide
aacggaatcagtcgcatgtaagcgcaatat

SEQ ID NO: 500426 - DNA, 30 bp, Artificial Sequence
  Synthetic oligonucleotide
tatagctagctagatgtgcccatgcaatat

SEQ ID NO: 500427 - DNA, 30 bp, Artificial Sequence
  Synthetic oligonucleotide
tgtcccggccacgatccgggatgtcaatat

SEQ ID NO: 500428 - DNA, 30 bp, Artificial Sequence
  Synthetic oligonucleotide
acttcgcatgaggcgcaggagtttcaatat

SEQ ID NO: 500429 - DNA, 30 bp, Artificial Sequence
  Synthetic oligonucleotide
cctaatgacgtctgaggcaaccaagaatat

SEQ ID NO: 500430 - DNA, 30 bp, Artificial Sequence
  Synthetic oligonucleotide
cggtgcgtagatataggacagacagaatat

SEQ ID NO: 500431 - DNA, 30 bp, Artificial Sequence
  Synthetic oligonucleotide
gattttctgcgcacgatcaagcgagaatat

SEQ ID NO: 500432 - DNA, 30 bp, Artificial Sequence
  Synthetic oligonucleotide
gatgtgagccgaggtatgcagaacgaatat

SEQ ID NO: 500433 - DNA, 30 bp, Artificial Sequence
  Synthetic oligonucleotide
taacttagggtaattatcgagtccgaatat

SEQ ID NO: 500434 - DNA, 30 bp, Artificial Sequence
  Synthetic oligonucleotide
aatcaatcaaatatcatctgacgcgaatat

SEQ ID NO: 500435 - DNA, 30 bp, Artificial Sequence
  Synthetic oligonucleotide
gtgcatggcgggcgtccaggctgcgaatat

SEQ ID NO: 500436 - DNA, 30 bp, Artificial Sequence
  Synthetic oligonucleotide
aggtgtcttttcaatctcatatatgaatat

SEQ ID NO: 500437 - DNA, 30 bp, Artificial Sequence
  Synthetic oligonucleotide
ggtatcccatgtccaatgcagcctgaatat

SEQ ID NO: 500438 - DNA, 30 bp, Artificial Sequence
  Synthetic oligonucleotide
cactcttaactgggacatctctctgaatat

SEQ ID NO: 500439 - DNA, 30 bp, Artificial Sequence
  Synthetic oligonucleotide
cattatcagatcttgcgcatatgtgaatat

SEQ ID NO: 500440 - DNA, 30 bp, Artificial Sequence
  Synthetic oligonucleotide
gatcttactgacgtccagctgacataatat

SEQ ID NO: 500441 - DNA, 30 bp, Artificial Sequence
  Synthetic oligonucleotide
ttttgcccaacgcgtaaaaagagataatat

SEQ ID NO: 500442 - DNA, 30 bp, Artificial Sequence
  Synthetic oligonucleotide
caatactcaaggcgcggtacatgataatat

SEQ ID NO: 500443 - DNA, 30 bp, Artificial Sequence
  Synthetic oligonucleotide
aaatcgcggcaacttaatgattgataatat

SEQ ID NO: 500444 - DNA, 30 bp, Artificial Sequence
  Synthetic oligonucleotide
ggaggcggcctcagagtctaggggtaatat

SEQ ID NO: 500445 - DNA, 30 bp, Artificial Sequence
  Synthetic oligonucleotide
aattaccgtacggcttcctgactgtaatat

SEQ ID NO: 500446 - DNA, 30 bp, Artificial Sequence
  Synthetic oligonucleotide
atccctcatccggtttgcaggcgttaatat

SEQ ID NO: 500447 - DNA, 30 bp, Artificial Sequence
  Synthetic oligonucleotide
ttatgttaattgaattgtactctttaatat

SEQ ID NO: 500448 - DNA, 30 bp, Artificial Sequence
  Synthetic oligonucleotide
cagtccctttgtttattaaaattttaatat

SEQ ID NO: 500449 - DNA, 30 bp, Artificial Sequence
  Synthetic oligonucleotide
ccaagatacgagtgtactaacttttaatat

SEQ ID NO: 500450 - DNA, 30 bp, Artificial Sequence
  Synthetic oligonucleotide
gagagtcaccacactgctggtacaacatat

SEQ ID NO: 500451 - DNA, 30 bp, Artificial Sequence
  Synthetic oligonucleotide
aactactttctcatggtggctgccacatat

SEQ ID NO: 500452 - DNA, 30 bp, Artificial Sequence
  Synthetic oligonucleotide
tatagtccacagcagtccttttagacatat

SEQ ID NO: 500453 - DNA, 30 bp, Artificial Sequence
  Synthetic oligonucleotide
gttactgtgataaccttggccacgacatat

SEQ ID NO: 500454 - DNA, 30 bp, Artificial Sequence
  Synthetic oligonucleotide
aagatggcttttctctttgtaccgacatat

SEQ ID NO: 500455 - DNA, 30 bp, Artificial Sequence
  Synthetic oligonucleotide
agggcgcttcatctagtacctaggacatat

SEQ ID NO: 500456 - DNA, 30 bp, Artificial Sequence
  Synthetic oligonucleotide
gtcgcttgttagatctctctaagtacatat

SEQ ID NO: 500457 - DNA, 30 bp, Artificial Sequence
  Synthetic oligonucleotide
tcagcccatgtgccggcagaacgtacatat

SEQ ID NO: 500458 - DNA, 30 bp, Artificial Sequence
  Synthetic oligonucleotide
ttgaagtaatttgccaaaaaattaccatat

SEQ ID NO: 500459 - DNA, 30 bp, Artificial Sequence
  Synthetic oligonucleotide
gaatccaggttaaacaataacccgccatat

SEQ ID NO: 500460 - DNA, 30 bp, Artificial Sequence
  Synthetic oligonucleotide
tctgctctccgtgatatgaccaatccatat

SEQ ID NO: 500461 - DNA, 30 bp, Artificial Sequence
  Synthetic oligonucleotide
agtgatcggacactgtgtggcagtccatat

SEQ ID NO: 500462 - DNA, 30 bp, Artificial Sequence
  Synthetic oligonucleotide
ttcagttttcacattagacccgaagcatat

SEQ ID NO: 500463 - DNA, 30 bp, Artificial Sequence
  Synthetic oligonucleotide
cgaggtcttagagtgccatgcctagcatat

SEQ ID NO: 500464 - DNA, 30 bp, Artificial Sequence
  Synthetic oligonucleotide
gatattggataggacattaggcgcgcatat

SEQ ID NO: 500465 - DNA, 30 bp, Artificial Sequence
  Synthetic oligonucleotide
gcctctcgcatccagctgccaatggcatat

SEQ ID NO: 500466 - DNA, 30 bp, Artificial Sequence
  Synthetic oligonucleotide
ttttccgctgatgcccaccaactggcatat

SEQ ID NO: 500467 - DNA, 30 bp, Artificial Sequence
  Synthetic oligonucleotide
gtggatggacgttcaaaagacgatgcatat

SEQ ID NO: 500468 - DNA, 30 bp, Artificial Sequence
  Synthetic oligonucleotide
ttccatgtatgatcatccataacatcatat

SEQ ID NO: 500469 - DNA, 30 bp, Artificial Sequence
  Synthetic oligonucleotide
tagctgcaatttacgttgcgcttatcatat

SEQ ID NO: 500470 - DNA, 30 bp, Artificial Sequence
  Synthetic oligonucleotide
attccctgatcccgaaggaagaactcatat

SEQ ID NO: 500471 - DNA, 30 bp, Artificial Sequence
  Synthetic oligonucleotide
gctgcgatcaacaactatttgacttcatat

SEQ ID NO: 500472 - DNA, 30 bp, Artificial Sequence
  Synthetic oligonucleotide
gactggatattaatcggaatcggttcatat

SEQ ID NO: 500473 - DNA, 30 bp, Artificial Sequence
  Synthetic oligonucleotide
aacccgacaaaattatatcatggttcatat

SEQ ID NO: 500474 - DNA, 30 bp, Artificial Sequence
  Synthetic oligonucleotide
attcactgtgggcagaaataactttcatat

SEQ ID NO: 500475 - DNA, 30 bp, Artificial Sequence
  Synthetic oligonucleotide
tcgtttcggatcagtgcggctcgaagatat

SEQ ID NO: 500476 - DNA, 30 bp, Artificial Sequence
  Synthetic oligonucleotide
tcaattatggtaaatttggatggaagatat

SEQ ID NO: 500477 - DNA, 30 bp, Artificial Sequence
  Synthetic oligonucleotide
tatcccgcggcaagaagcggatccagatat

SEQ ID NO: 500478 - DNA, 30 bp, Artificial Sequence
  Synthetic oligonucleotide
gagaagtgttatatacatttttccagatat

SEQ ID NO: 500479 - DNA, 30 bp, Artificial Sequence
  Synthetic oligonucleotide
cataagtatagcttcaattggcgcagatat

SEQ ID NO: 500480 - DNA, 30 bp, Artificial Sequence
  Synthetic oligonucleotide
tctatcgacgagggacgttaatatagatat

SEQ ID NO: 500481 - DNA, 30 bp, Artificial Sequence
  Synthetic oligonucleotide
gtattggcagtcacactgttttcacgatat

SEQ ID NO: 500482 - DNA, 30 bp, Artificial Sequence
  Synthetic oligonucleotide
ggcgcgctgcgggctgtcagagtacgatat

SEQ ID NO: 500483 - DNA, 30 bp, Artificial Sequence
  Synthetic oligonucleotide
ccctatatgcaggcgcgtaggatgcgatat

SEQ ID NO: 500484 - DNA, 30 bp, Artificial Sequence
  Synthetic oligonucleotide
cgcagaaagcgtgaccgttcactgcgatat

SEQ ID NO: 500485 - DNA, 30 bp, Artificial Sequence
  Synthetic oligonucleotide
aaatagactgtcctaacctacttgcgatat

SEQ ID NO: 500486 - DNA, 30 bp, Artificial Sequence
  Synthetic oligonucleotide
cagcgatcttgccggagtgatcatcgatat

SEQ ID NO: 500487 - DNA, 30 bp, Artificial Sequence
  Synthetic oligonucleotide
ggcgagaccgcagcgtctagtcaaggatat

SEQ ID NO: 500488 - DNA, 30 bp, Artificial Sequence
  Synthetic oligonucleotide
tatttcatgtcttagaactgcccaggatat

SEQ ID NO: 500489 - DNA, 30 bp, Artificial Sequence
  Synthetic oligonucleotide
gtacgcagataggcacgtcgcataggatat

SEQ ID NO: 500490 - DNA, 30 bp, Artificial Sequence
  Synthetic oligonucleotide
ctgtatcacaatgttggcgatgtaggatat

SEQ ID NO: 500491 - DNA, 30 bp, Artificial Sequence
  Synthetic oligonucleotide
cgcagccaagtgagccgcatttatggatat

SEQ ID NO: 500492 - DNA, 30 bp, Artificial Sequence
  Synthetic oligonucleotide
cagtgacatggttcgggccattgtggatat

SEQ ID NO: 500493 - DNA, 30 bp, Artificial Sequence
  Synthetic oligonucleotide
ttgtattcccctatgggagatcttggatat

SEQ ID NO: 500494 - DNA, 30 bp, Artificial Sequence
  Synthetic oligonucleotide
tgggagaatggaaaaatttggtttggatat

SEQ ID NO: 500495 - DNA, 30 bp, Artificial Sequence
  Synthetic oligonucleotide
tattggaccctgcgatatgtttttggatat

SEQ ID NO: 500496 - DNA, 30 bp, Artificial Sequence
  Synthetic oligonucleotide
gcggctggtaaagtgtataaaggatgatat

SEQ ID NO: 500497 - DNA, 30 bp, Artificial Sequence
  Synthetic oligonucleotide
aagaaaacgcagagagtttcaaattgatat

SEQ ID NO: 500498 - DNA, 30 bp, Artificial Sequence
  Synthetic oligonucleotide
tcaagatagcttcccattacatcttgatat

SEQ ID NO: 500499 - DNA, 30 bp, Artificial Sequence
  Synthetic oligonucleotide
gcacttccctcgcaatgcacgggttgatat

SEQ ID NO: 500500 - DNA, 30 bp, Artificial Sequence
  Synthetic oligonucleotide
gttatgggtatggtttaagacctaatatat

SEQ ID NO: 500501 - DNA, 30 bp, Artificial Sequence
  Synthetic oligonucleotide
ttagaatattaccggatctctgcgatatat

SEQ ID NO: 500502 - DNA, 30 bp, Artificial Sequence
  Synthetic oligonucleotide
taagtacctgggcgtgcagcagggatatat

SEQ ID NO: 500503 - DNA, 30 bp, Artificial Sequence
  Synthetic oligonucleotide
tcctgggatttagtatagtgagtgatatat

SEQ ID NO: 500504 - DNA, 30 bp, Artificial Sequence
  Synthetic oligonucleotide
taatttcagtcaactttggagcctatatat

SEQ ID NO: 500505 - DNA, 30 bp, Artificial Sequence
  Synthetic oligonucleotide
cttagtacggttgaaattccaattatatat

SEQ ID NO: 500506 - DNA, 30 bp, Artificial Sequence
  Synthetic oligonucleotide
attttaatattgctcgtagctgttatatat

SEQ ID NO: 500507 - DNA, 30 bp, Artificial Sequence
  Synthetic oligonucleotide
caccgagatccctggatcggttttatatat

SEQ ID NO: 500508 - DNA, 30 bp, Artificial Sequence
  Synthetic oligonucleotide
ttgatatacttagctactccgcaactatat

SEQ ID NO: 500509 - DNA, 30 bp, Artificial Sequence
  Synthetic oligonucleotide
ggttgtacaagaggatgggtaaacctatat

SEQ ID NO: 500510 - DNA, 30 bp, Artificial Sequence
  Synthetic oligonucleotide
cgctggtcatagggcttccctaccctatat

SEQ ID NO: 500511 - DNA, 30 bp, Artificial Sequence
  Synthetic oligonucleotide
ccccgcgctaatgaattctcctggctatat

SEQ ID NO: 500512 - DNA, 30 bp, Artificial Sequence
  Synthetic oligonucleotide
agcttacagctataatttgctactctatat

SEQ ID NO: 500513 - DNA, 30 bp, Artificial Sequence
  Synthetic oligonucleotide
aagcccattagtgttagatgatctctatat

SEQ ID NO: 500514 - DNA, 30 bp, Artificial Sequence
  Synthetic oligonucleotide
gcgctgacctcagaagttctgagagtatat

SEQ ID NO: 500515 - DNA, 30 bp, Artificial Sequence
  Synthetic oligonucleotide
aacaccattgtcatataagaatgagtatat

SEQ ID NO: 500516 - DNA, 30 bp, Artificial Sequence
  Synthetic oligonucleotide
gcctgaaccgaaccgtttacgtgagtatat

SEQ ID NO: 500517 - DNA, 30 bp, Artificial Sequence
  Synthetic oligonucleotide
cttgtccgcgacatccgccaagtagtatat

SEQ ID NO: 500518 - DNA, 30 bp, Artificial Sequence
  Synthetic oligonucleotide
aagatcgaaccgttttcatatgaggtatat

SEQ ID NO: 500519 - DNA, 30 bp, Artificial Sequence
  Synthetic oligonucleotide
gtgctattacgaataggcttaagggtatat

SEQ ID NO: 500520 - DNA, 30 bp, Artificial Sequence
  Synthetic oligonucleotide
tttttcaacgggcaagatgaccatgtatat

SEQ ID NO: 500521 - DNA, 30 bp, Artificial Sequence
  Synthetic oligonucleotide
caccaccggctaaaacgatgcggtgtatat

SEQ ID NO: 500522 - DNA, 30 bp, Artificial Sequence
  Synthetic oligonucleotide
atgccatcatggtaaacgcgtcttgtatat

SEQ ID NO: 500523 - DNA, 30 bp, Artificial Sequence
  Synthetic oligonucleotide
gccgattgttagggccagcgacaattatat

SEQ ID NO: 500524 - DNA, 30 bp, Artificial Sequence
  Synthetic oligonucleotide
gccattataagtccacccggtccattatat

SEQ ID NO: 500525 - DNA, 30 bp, Artificial Sequence
  Synthetic oligonucleotide
cgccgatggatttggaagacgcacttatat

SEQ ID NO: 500526 - DNA, 30 bp, Artificial Sequence
  Synthetic oligonucleotide
ttaactcgtggcttccagtcgcacttatat

SEQ ID NO: 500527 - DNA, 30 bp, Artificial Sequence
  Synthetic oligonucleotide
tttctttactgctctgctcgttccttatat

SEQ ID NO: 500528 - DNA, 30 bp, Artificial Sequence
  Synthetic oligonucleotide
gtattactggtgatcacgtccttcttatat

SEQ ID NO: 500529 - DNA, 30 bp, Artificial Sequence
  Synthetic oligonucleotide
aatagcagcaatatgtagtagaatttatat

SEQ ID NO: 500530 - DNA, 30 bp, Artificial Sequence
  Synthetic oligonucleotide
ggatttagtcggcacaaccttattttatat

SEQ ID NO: 500531 - DNA, 30 bp, Artificial Sequence
  Synthetic oligonucleotide
attttccgaaatagctttgatgttttatat

SEQ ID NO: 500532 - DNA, 30 bp, Artificial Sequence
  Synthetic oligonucleotide
gcgactatgtatttttgccacttaaactat

SEQ ID NO: 500533 - DNA, 30 bp, Artificial Sequence
  Synthetic oligonucleotide
tgtcggatatcggtccatttatccaactat

SEQ ID NO: 500534 - DNA, 30 bp, Artificial Sequence
  Synthetic oligonucleotide
ttgctgagcgcaaccaacagtcgcaactat

SEQ ID NO: 500535 - DNA, 30 bp, Artificial Sequence
  Synthetic oligonucleotide
atggtcaaattccccttaccaccgaactat

SEQ ID NO: 500536 - DNA, 30 bp, Artificial Sequence
  Synthetic oligonucleotide
actgattttaccatcctggcagggaactat

SEQ ID NO: 500537 - DNA, 30 bp, Artificial Sequence
  Synthetic oligonucleotide
aaagtcttccccagctgtctagggaactat

SEQ ID NO: 500538 - DNA, 30 bp, Artificial Sequence
  Synthetic oligonucleotide
ctttgctaggctcggagcttcacacactat

SEQ ID NO: 500539 - DNA, 30 bp, Artificial Sequence
  Synthetic oligonucleotide
gagaagtcagcagttgttctttcccactat

SEQ ID NO: 500540 - DNA, 30 bp, Artificial Sequence
  Synthetic oligonucleotide
gaacctaggaatttcaccgtttcccactat

SEQ ID NO: 500541 - DNA, 30 bp, Artificial Sequence
  Synthetic oligonucleotide
tgcggcatatcatatagtgctggccactat

SEQ ID NO: 500542 - DNA, 30 bp, Artificial Sequence
  Synthetic oligonucleotide
aaccctaggatctgacttatgacgcactat

SEQ ID NO: 500543 - DNA, 30 bp, Artificial Sequence
  Synthetic oligonucleotide
ttagtatgagattagaccgcggttcactat

SEQ ID NO: 500544 - DNA, 30 bp, Artificial Sequence
  Synthetic oligonucleotide
cgctcctgatgggtcctaaatacagactat

SEQ ID NO: 500545 - DNA, 30 bp, Artificial Sequence
  Synthetic oligonucleotide
atccagaacgctacatacaccgcagactat

SEQ ID NO: 500546 - DNA, 30 bp, Artificial Sequence
  Synthetic oligonucleotide
taaagaatgtattgaaccctggcggactat

SEQ ID NO: 500547 - DNA, 30 bp, Artificial Sequence
  Synthetic oligonucleotide
ttccaatcaatcaaggtttcacatgactat

SEQ ID NO: 500548 - DNA, 30 bp, Artificial Sequence
  Synthetic oligonucleotide
tcaggtgcgcctttctaattggctgactat

SEQ ID NO: 500549 - DNA, 30 bp, Artificial Sequence
  Synthetic oligonucleotide
tttcctggctcgctgggtttacactactat

SEQ ID NO: 500550 - DNA, 30 bp, Artificial Sequence
  Synthetic oligonucleotide
aacctatacgctatggtataggcctactat

SEQ ID NO: 500551 - DNA, 30 bp, Artificial Sequence
  Synthetic oligonucleotide
gtggcacagccttgcacgaagaagtactat

SEQ ID NO: 500552 - DNA, 30 bp, Artificial Sequence
  Synthetic oligonucleotide
atcctttaagtccaggaaggtccgtactat

SEQ ID NO: 500553 - DNA, 30 bp, Artificial Sequence
  Synthetic oligonucleotide
aggcggcgacaatcaagtcgcctgtactat

SEQ ID NO: 500554 - DNA, 30 bp, Artificial Sequence
  Synthetic oligonucleotide
taggcctgttgacatcctccttattactat

SEQ ID NO: 500555 - DNA, 30 bp, Artificial Sequence
  Synthetic oligonucleotide
ctgtggcatccgtgccggtccggttactat

SEQ ID NO: 500556 - DNA, 30 bp, Artificial Sequence
  Synthetic oligonucleotide
tctataggtctaggttaatgcgccacctat

SEQ ID NO: 500557 - DNA, 30 bp, Artificial Sequence
  Synthetic oligonucleotide
cgacagctggcttcttaataggtgacctat

SEQ ID NO: 500558 - DNA, 29 bp, Artificial Sequence
  Synthetic oligonucleotide
gggataaagataatgtagggttgacctat

SEQ ID NO: 500559 - DNA, 30 bp, Artificial Sequence
  Synthetic oligonucleotide
aaatcggtccggagtgacaagcatacctat

SEQ ID NO: 500560 - DNA, 30 bp, Artificial Sequence
  Synthetic oligonucleotide
accactttttcaaggtcccgacaaccctat

SEQ ID NO: 500561 - DNA, 30 bp, Artificial Sequence
  Synthetic oligonucleotide
ttggcacattttgctgtatgataaccctat

SEQ ID NO: 500562 - DNA, 30 bp, Artificial Sequence
  Synthetic oligonucleotide
aaaatgatcaggtaactaggtagaccctat

SEQ ID NO: 500563 - DNA, 30 bp, Artificial Sequence
  Synthetic oligonucleotide
gtgaagtacttaagagccgcttgaccctat

SEQ ID NO: 500564 - DNA, 30 bp, Artificial Sequence
  Synthetic oligonucleotide
ttaacatattaaacatataataacccctat

SEQ ID NO: 500565 - DNA, 30 bp, Artificial Sequence
  Synthetic oligonucleotide
gaacagttttgtaggactacatacccctat

SEQ ID NO: 500566 - DNA, 30 bp, Artificial Sequence
  Synthetic oligonucleotide
taggtaaaggggcctgcgtctagcccctat

SEQ ID NO: 500567 - DNA, 30 bp, Artificial Sequence
  Synthetic oligonucleotide
tatccatcggggaaacagtctttcccctat

SEQ ID NO: 500568 - DNA, 30 bp, Artificial Sequence
  Synthetic oligonucleotide
ccagtccttggttgcgtaataccgccctat

SEQ ID NO: 500569 - DNA, 30 bp, Artificial Sequence
  Synthetic oligonucleotide
cgaagatggggacatcaatacgggccctat

SEQ ID NO: 500570 - DNA, 30 bp, Artificial Sequence
  Synthetic oligonucleotide
aaaatctgcagtcgcgggggtgatccctat

SEQ ID NO: 500571 - DNA, 30 bp, Artificial Sequence
  Synthetic oligonucleotide
atcttgccctcagactggtattgtccctat

SEQ ID NO: 500572 - DNA, 30 bp, Artificial Sequence
  Synthetic oligonucleotide
ttttatagccatacacgagattgagcctat

SEQ ID NO: 500573 - DNA, 30 bp, Artificial Sequence
  Synthetic oligonucleotide
ccactgtagatgaacagtctttccgcctat

SEQ ID NO: 500574 - DNA, 30 bp, Artificial Sequence
  Synthetic oligonucleotide
cgcgcccgcgggacggaagcatcatcctat

SEQ ID NO: 500575 - DNA, 30 bp, Artificial Sequence
  Synthetic oligonucleotide
gtcctctgagcatacaggtaacgctcctat

SEQ ID NO: 500576 - DNA, 30 bp, Artificial Sequence
  Synthetic oligonucleotide
tcctaagggaacctttccgtgcagtcctat

SEQ ID NO: 500577 - DNA, 30 bp, Artificial Sequence
  Synthetic oligonucleotide
ggagatagtgttcgcgcagtattgtcctat

SEQ ID NO: 500578 - DNA, 30 bp, Artificial Sequence
  Synthetic oligonucleotide
ctggccggtcagaagaggtggcgttcctat

SEQ ID NO: 500579 - DNA, 30 bp, Artificial Sequence
  Synthetic oligonucleotide
tatcgctgtccgtgttacagaatttcctat

SEQ ID NO: 500580 - DNA, 30 bp, Artificial Sequence
  Synthetic oligonucleotide
ttgttgtgttctctttatgtgttttcctat

SEQ ID NO: 500581 - DNA, 30 bp, Artificial Sequence
  Synthetic oligonucleotide
ttgttgtgttctctttctgtgttttcctat

SEQ ID NO: 500582 - DNA, 33 bp, Artificial Sequence
  Synthetic oligonucleotide
tgtgcctgtttccttattgttgtgttttcctat

SEQ ID NO: 500583 - DNA, 30 bp, Artificial Sequence
  Synthetic oligonucleotide
ttgttgtgctctctttttgtgttttcctat

SEQ ID NO: 500584 - DNA, 30 bp, Artificial Sequence
  Synthetic oligonucleotide
ttgttgagttctctttttgtgttttcctat

SEQ ID NO: 500585 - DNA, 30 bp, Artificial Sequence
  Synthetic oligonucleotide
tcgttgtgttctctttttgtgttttcctat

SEQ ID NO: 500586 - DNA, 30 bp, Artificial Sequence
  Synthetic oligonucleotide
ttgttgtgttctgtttttgtgttttcctat

SEQ ID NO: 500587 - DNA, 30 bp, Artificial Sequence
  Synthetic oligonucleotide
agaggaatccgcagacaagcacgaagctat

SEQ ID NO: 500588 - DNA, 30 bp, Artificial Sequence
  Synthetic oligonucleotide
accattacagaacgaggttactccagctat

SEQ ID NO: 500589 - DNA, 30 bp, Artificial Sequence
  Synthetic oligonucleotide
agacataaccgcggctatggctccagctat

SEQ ID NO: 500590 - DNA, 30 bp, Artificial Sequence
  Synthetic oligonucleotide
ataagtcattgggggactacccgcagctat

SEQ ID NO: 500591 - DNA, 30 bp, Artificial Sequence
  Synthetic oligonucleotide
aaaagttaacctcgcgtgatgtgcagctat

SEQ ID NO: 500592 - DNA, 30 bp, Artificial Sequence
  Synthetic oligonucleotide
catacaacctctgtggcaatcaatagctat

SEQ ID NO: 500593 - DNA, 30 bp, Artificial Sequence
  Synthetic oligonucleotide
tagcaacaatggtaaagcaggcgacgctat

SEQ ID NO: 500594 - DNA, 30 bp, Artificial Sequence
  Synthetic oligonucleotide
cctaaaactttcaaagctagaatacgctat

SEQ ID NO: 500595 - DNA, 30 bp, Artificial Sequence
  Synthetic oligonucleotide
gtccggccgacttcagctgtttcccgctat

SEQ ID NO: 500596 - DNA, 30 bp, Artificial Sequence
  Synthetic oligonucleotide
agatcacgtgaccttttggtagcgcgctat

SEQ ID NO: 500597 - DNA, 30 bp, Artificial Sequence
  Synthetic oligonucleotide
ggtcaatatggttattacaggaggcgctat

SEQ ID NO: 500598 - DNA, 30 bp, Artificial Sequence
  Synthetic oligonucleotide
tgtgtgtgtttccgtacgatcgggcgctat

SEQ ID NO: 500599 - DNA, 30 bp, Artificial Sequence
  Synthetic oligonucleotide
gtatatctgaatgaatgcgatctgcgctat

SEQ ID NO: 500600 - DNA, 30 bp, Artificial Sequence
  Synthetic oligonucleotide
tctaataaatatgctgctaacactcgctat

SEQ ID NO: 500601 - DNA, 30 bp, Artificial Sequence
  Synthetic oligonucleotide
tcagcagctatagcatgtgtaaaaggctat

SEQ ID NO: 500602 - DNA, 30 bp, Artificial Sequence
  Synthetic oligonucleotide
atgtcttataaggcagccggcgcaggctat

SEQ ID NO: 500603 - DNA, 30 bp, Artificial Sequence
  Synthetic oligonucleotide
ggtttgcagccggctgggccaataggctat

SEQ ID NO: 500604 - DNA, 30 bp, Artificial Sequence
  Synthetic oligonucleotide
gtatggcgagatctataatttttaggctat

SEQ ID NO: 500605 - DNA, 30 bp, Artificial Sequence
  Synthetic oligonucleotide
ctctttcgctgccttaagtctaccggctat

SEQ ID NO: 500606 - DNA, 30 bp, Artificial Sequence
  Synthetic oligonucleotide
ggactgaagactctaggctggccgggctat

SEQ ID NO: 500607 - DNA, 30 bp, Artificial Sequence
  Synthetic oligonucleotide
ccgaccagaccatgtctcaggtcgggctat

SEQ ID NO: 500608 - DNA, 30 bp, Artificial Sequence
  Synthetic oligonucleotide
actcaccaaccggttcagacccggggctat

SEQ ID NO: 500609 - DNA, 30 bp, Artificial Sequence
  Synthetic oligonucleotide
gaatctcaactctacccatctcggggctat

SEQ ID NO: 500610 - DNA, 30 bp, Artificial Sequence
  Synthetic oligonucleotide
ggcagaatggataggcttcaggtgggctat

SEQ ID NO: 500611 - DNA, 30 bp, Artificial Sequence
  Synthetic oligonucleotide
agagtaatcaaacctgtgaaccttggctat

SEQ ID NO: 500612 - DNA, 30 bp, Artificial Sequence
  Synthetic oligonucleotide
catttacacgaaatcttaatcaagtgctat

SEQ ID NO: 500613 - DNA, 30 bp, Artificial Sequence
  Synthetic oligonucleotide
gaattcgacttatttcagggacggtgctat

SEQ ID NO: 500614 - DNA, 30 bp, Artificial Sequence
  Synthetic oligonucleotide
atagtactgcgttgtctattacgttgctat

SEQ ID NO: 500615 - DNA, 30 bp, Artificial Sequence
  Synthetic oligonucleotide
ggatagttcacgattagggaatgttgctat

SEQ ID NO: 500616 - DNA, 30 bp, Artificial Sequence
  Synthetic oligonucleotide
ttgttgtgttctctttttgtgttttgctat

SEQ ID NO: 500617 - DNA, 30 bp, Artificial Sequence
  Synthetic oligonucleotide
accgctacgggaaattaatgtctaatctat

SEQ ID NO: 500618 - DNA, 30 bp, Artificial Sequence
  Synthetic oligonucleotide
gcagaagtttatttaccttttttaatctat

SEQ ID NO: 500619 - DNA, 30 bp, Artificial Sequence
  Synthetic oligonucleotide
acaccgaatcggttgctgcgcacgatctat

SEQ ID NO: 500620 - DNA, 30 bp, Artificial Sequence
  Synthetic oligonucleotide
ccggcttttagggcttcccagaggatctat

SEQ ID NO: 500621 - DNA, 30 bp, Artificial Sequence
  Synthetic oligonucleotide
gacatccgaacacaagtgagggatatctat

SEQ ID NO: 500622 - DNA, 30 bp, Artificial Sequence
  Synthetic oligonucleotide
caaggcaggcgcagccaaggatatatctat

SEQ ID NO: 500623 - DNA, 30 bp, Artificial Sequence
  Synthetic oligonucleotide
gcattagtgtatactccgtatcttatctat

SEQ ID NO: 500624 - DNA, 30 bp, Artificial Sequence
  Synthetic oligonucleotide
gtcgggttctgggggatccacgtactctat

SEQ ID NO: 500625 - DNA, 30 bp, Artificial Sequence
  Synthetic oligonucleotide
ttaaaagaatttgcggaagagttactctat

SEQ ID NO: 500626 - DNA, 30 bp, Artificial Sequence
  Synthetic oligonucleotide
gtggtgggatgctcagagccaaacctctat

SEQ ID NO: 500627 - DNA, 30 bp, Artificial Sequence
  Synthetic oligonucleotide
tgtttgggacgcatggatcaggacctctat

SEQ ID NO: 500628 - DNA, 30 bp, Artificial Sequence
  Synthetic oligonucleotide
ttgaaaggtattttgaaattgaccctctat

SEQ ID NO: 500629 - DNA, 30 bp, Artificial Sequence
  Synthetic oligonucleotide
ttgtaggaagacattctacgtctcctctat

SEQ ID NO: 500630 - DNA, 30 bp, Artificial Sequence
  Synthetic oligonucleotide
ttatcatggggacaatattccatgctctat

SEQ ID NO: 500631 - DNA, 30 bp, Artificial Sequence
  Synthetic oligonucleotide
atcttctaatgttcgacctctcaagtctat

SEQ ID NO: 500632 - DNA, 30 bp, Artificial Sequence
  Synthetic oligonucleotide
aactaacctagttcgtccgattcagtctat

SEQ ID NO: 500633 - DNA, 30 bp, Artificial Sequence
  Synthetic oligonucleotide
aggccacgccatggccccacggacgtctat

SEQ ID NO: 500634 - DNA, 30 bp, Artificial Sequence
  Synthetic oligonucleotide
tggttggttttcttatatcgaggggtctat

SEQ ID NO: 500635 - DNA, 30 bp, Artificial Sequence
  Synthetic oligonucleotide
ttcagttcgccctagagggtacatgtctat

SEQ ID NO: 500636 - DNA, 30 bp, Artificial Sequence
  Synthetic oligonucleotide
gtgcgcagctacgacggtcataaattctat

SEQ ID NO: 500637 - DNA, 30 bp, Artificial Sequence
  Synthetic oligonucleotide
atcttgatgggatacgacctggaattctat

SEQ ID NO: 500638 - DNA, 30 bp, Artificial Sequence
  Synthetic oligonucleotide
cacggggaggtttaatattgataattctat

SEQ ID NO: 500639 - DNA, 30 bp, Artificial Sequence
  Synthetic oligonucleotide
ctcggtcgctctagcttcggcggcttctat

SEQ ID NO: 500640 - DNA, 30 bp, Artificial Sequence
  Synthetic oligonucleotide
ttgagtgtcaccgcatataaattcttctat

SEQ ID NO: 500641 - DNA, 30 bp, Artificial Sequence
  Synthetic oligonucleotide
gagtaccgactttcgcgagtaaggttctat

SEQ ID NO: 500642 - DNA, 30 bp, Artificial Sequence
  Synthetic oligonucleotide
aaacaagtggctcgtgatctacttttctat

SEQ ID NO: 500643 - DNA, 30 bp, Artificial Sequence
  Synthetic oligonucleotide
gctttcctgcctatcctttctcgaaagtat

SEQ ID NO: 500644 - DNA, 30 bp, Artificial Sequence
  Synthetic oligonucleotide
ccctaccctacgatctacgtagacaagtat

SEQ ID NO: 500645 - DNA, 30 bp, Artificial Sequence
  Synthetic oligonucleotide
tgaattgccatttgttacaaaagtaagtat

SEQ ID NO: 500646 - DNA, 30 bp, Artificial Sequence
  Synthetic oligonucleotide
agtttacatcccacttggtgtcgtaagtat

SEQ ID NO: 500647 - DNA, 30 bp, Artificial Sequence
  Synthetic oligonucleotide
tgcctgttacctcgatggttcattaagtat

SEQ ID NO: 500648 - DNA, 30 bp, Artificial Sequence
  Synthetic oligonucleotide
aattcagtctcactttccgtttttaagtat

SEQ ID NO: 500649 - DNA, 30 bp, Artificial Sequence
  Synthetic oligonucleotide
agtaacttagcaatactatgccaacagtat

SEQ ID NO: 500650 - DNA, 29 bp, Artificial Sequence
  Synthetic oligonucleotide
ctccagtagtgcgtttttggctacagtat

SEQ ID NO: 500651 - DNA, 30 bp, Artificial Sequence
  Synthetic oligonucleotide
gtgacaatcaattgtcacggccaccagtat

SEQ ID NO: 500652 - DNA, 30 bp, Artificial Sequence
  Synthetic oligonucleotide
tcgggtaatgcccactaaagtacgcagtat

SEQ ID NO: 500653 - DNA, 30 bp, Artificial Sequence
  Synthetic oligonucleotide
ggggttaaaagcccatccacggcgcagtat

SEQ ID NO: 500654 - DNA, 30 bp, Artificial Sequence
  Synthetic oligonucleotide
ccctttaagctcctaggtaaccctcagtat

SEQ ID NO: 500655 - DNA, 30 bp, Artificial Sequence
  Synthetic oligonucleotide
gcgatttacttattcatgttgattcagtat

SEQ ID NO: 500656 - DNA, 30 bp, Artificial Sequence
  Synthetic oligonucleotide
agaagacacagtttaacggcagtagagtat

SEQ ID NO: 500657 - DNA, 30 bp, Artificial Sequence
  Synthetic oligonucleotide
tagactctgttcgtccgcgccacggagtat

SEQ ID NO: 500658 - DNA, 30 bp, Artificial Sequence
  Synthetic oligonucleotide
aaaacaattaccacaaatactacggagtat

SEQ ID NO: 500659 - DNA, 30 bp, Artificial Sequence
  Synthetic oligonucleotide
tcaaattctagctaacccagcgcggagtat

SEQ ID NO: 500660 - DNA, 30 bp, Artificial Sequence
  Synthetic oligonucleotide
ggatagctccatcgcttcattagggagtat

SEQ ID NO: 500661 - DNA, 30 bp, Artificial Sequence
  Synthetic oligonucleotide
cctacatgatcctattagtactttgagtat

SEQ ID NO: 500662 - DNA, 30 bp, Artificial Sequence
  Synthetic oligonucleotide
attgtttcaaggcgttaaattaaatagtat

SEQ ID NO: 500663 - DNA, 30 bp, Artificial Sequence
  Synthetic oligonucleotide
ctttggcttccactactgatatcctagtat

SEQ ID NO: 500664 - DNA, 30 bp, Artificial Sequence
  Synthetic oligonucleotide
ttaaaggcattagggccttagaggtagtat

SEQ ID NO: 500665 - DNA, 30 bp, Artificial Sequence
  Synthetic oligonucleotide
tcccttttctggaggagaacactgtagtat

SEQ ID NO: 500666 - DNA, 30 bp, Artificial Sequence
  Synthetic oligonucleotide
tcataagccgccctggcattgttgtagtat

SEQ ID NO: 500667 - DNA, 30 bp, Artificial Sequence
  Synthetic oligonucleotide
ggtttccgcactatgctaaatccttagtat

SEQ ID NO: 500668 - DNA, 30 bp, Artificial Sequence
  Synthetic oligonucleotide
gaataacctgtataatacattggttagtat

SEQ ID NO: 500669 - DNA, 30 bp, Artificial Sequence
  Synthetic oligonucleotide
tagcccgtagagataaactcgatttagtat

SEQ ID NO: 500670 - DNA, 30 bp, Artificial Sequence
  Synthetic oligonucleotide
agataataactttaataatttccaacgtat

SEQ ID NO: 500671 - DNA, 30 bp, Artificial Sequence
  Synthetic oligonucleotide
gaggcctagatatattctaaccgaacgtat

SEQ ID NO: 500672 - DNA, 30 bp, Artificial Sequence
  Synthetic oligonucleotide
agggcggagatctttggggatataacgtat

SEQ ID NO: 500673 - DNA, 30 bp, Artificial Sequence
  Synthetic oligonucleotide
gcgtgaccctagccttttggggtcacgtat

SEQ ID NO: 500674 - DNA, 30 bp, Artificial Sequence
  Synthetic oligonucleotide
tgtctaagggagcttcgggcctacccgtat

SEQ ID NO: 500675 - DNA, 30 bp, Artificial Sequence
  Synthetic oligonucleotide
gagccattggatgctgatttggatccgtat

SEQ ID NO: 500676 - DNA, 30 bp, Artificial Sequence
  Synthetic oligonucleotide
taaaagaaaggtgccccgaccgttccgtat

SEQ ID NO: 500677 - DNA, 30 bp, Artificial Sequence
  Synthetic oligonucleotide
cgcgcaattaagggactgggtctagcgtat

SEQ ID NO: 500678 - DNA, 30 bp, Artificial Sequence
  Synthetic oligonucleotide
attgatcgacaggttgttgcgcacgcgtat

SEQ ID NO: 500679 - DNA, 30 bp, Artificial Sequence
  Synthetic oligonucleotide
ctcctcccatcctaggggattaatgcgtat

SEQ ID NO: 500680 - DNA, 30 bp, Artificial Sequence
  Synthetic oligonucleotide
acttccggcctcaatgcgacgcatgcgtat

SEQ ID NO: 500681 - DNA, 30 bp, Artificial Sequence
  Synthetic oligonucleotide
agtaacgttattcgtcgagggcctgcgtat

SEQ ID NO: 500682 - DNA, 30 bp, Artificial Sequence
  Synthetic oligonucleotide
gaaataacgtatcgatattccaaatcgtat

SEQ ID NO: 500683 - DNA, 30 bp, Artificial Sequence
  Synthetic oligonucleotide
cctgttgtttccacggtctccatctcgtat

SEQ ID NO: 500684 - DNA, 30 bp, Artificial Sequence
  Synthetic oligonucleotide
gttatcggtcgcactcattgagtctcgtat

SEQ ID NO: 500685 - DNA, 30 bp, Artificial Sequence
  Synthetic oligonucleotide
gtaacactttgcccctggtttttctcgtat

SEQ ID NO: 500686 - DNA, 30 bp, Artificial Sequence
  Synthetic oligonucleotide
gatcagccacacgccacattatggtcgtat

SEQ ID NO: 500687 - DNA, 30 bp, Artificial Sequence
  Synthetic oligonucleotide
aggtcccggactccaaggtcctaaaggtat

SEQ ID NO: 500688 - DNA, 30 bp, Artificial Sequence
  Synthetic oligonucleotide
aattttggcgagtgaacagtctcaaggtat

SEQ ID NO: 500689 - DNA, 30 bp, Artificial Sequence
  Synthetic oligonucleotide
ggagtttgactaggacgttgggctaggtat

SEQ ID NO: 500690 - DNA, 30 bp, Artificial Sequence
  Synthetic oligonucleotide
aatcgcttcggacacgggcgtcgtaggtat

SEQ ID NO: 500691 - DNA, 30 bp, Artificial Sequence
  Synthetic oligonucleotide
gaatcacctacccgtctcaatggtaggtat

SEQ ID NO: 500692 - DNA, 30 bp, Artificial Sequence
  Synthetic oligonucleotide
cacccacccgctgataatatccttaggtat

SEQ ID NO: 500693 - DNA, 30 bp, Artificial Sequence
  Synthetic oligonucleotide
catcggcgtgagtcgagtggaacacggtat

SEQ ID NO: 500694 - DNA, 30 bp, Artificial Sequence
  Synthetic oligonucleotide
gataccatctgcattgtaaacagacggtat

SEQ ID NO: 500695 - DNA, 30 bp, Artificial Sequence
  Synthetic oligonucleotide
tattatgccagcacctggtccattcggtat

SEQ ID NO: 500696 - DNA, 30 bp, Artificial Sequence
  Synthetic oligonucleotide
ggccctttactgtgcttcagctttcggtat

SEQ ID NO: 500697 - DNA, 30 bp, Artificial Sequence
  Synthetic oligonucleotide
tttagagaatattacattctctcagggtat

SEQ ID NO: 500698 - DNA, 30 bp, Artificial Sequence
  Synthetic oligonucleotide
atacgtagcccgccacgccaatgcgggtat

SEQ ID NO: 500699 - DNA, 30 bp, Artificial Sequence
  Synthetic oligonucleotide
ccgcgttgggtacacgacaactcggggtat

SEQ ID NO: 500700 - DNA, 30 bp, Artificial Sequence
  Synthetic oligonucleotide
ataagaagtgttatatgtgccagtgggtat

SEQ ID NO: 500701 - DNA, 30 bp, Artificial Sequence
  Synthetic oligonucleotide
gagacagggctatagtcactacaatggtat

SEQ ID NO: 500702 - DNA, 30 bp, Artificial Sequence
  Synthetic oligonucleotide
tacaagcccacatccctccgcggatggtat

SEQ ID NO: 500703 - DNA, 30 bp, Artificial Sequence
  Synthetic oligonucleotide
tgcaagtgggcataagatttgaactggtat

SEQ ID NO: 500704 - DNA, 30 bp, Artificial Sequence
  Synthetic oligonucleotide
tcaatagaggatagccatccatactggtat

SEQ ID NO: 500705 - DNA, 30 bp, Artificial Sequence
  Synthetic oligonucleotide
gttcgaagcgaagtcatcgcttcgtggtat

SEQ ID NO: 500706 - DNA, 30 bp, Artificial Sequence
  Synthetic oligonucleotide
gggtaagtacgggttcgcagaagttggtat

SEQ ID NO: 500707 - DNA, 30 bp, Artificial Sequence
  Synthetic oligonucleotide
ttgaagactgtgtagacggaattttggtat

SEQ ID NO: 500708 - DNA, 30 bp, Artificial Sequence
  Synthetic oligonucleotide
ttgcttactagagatatttcggtcatgtat

SEQ ID NO: 500709 - DNA, 29 bp, Artificial Sequence
  Synthetic oligonucleotide
atatgtttgatgccaactaagcgatgtat

SEQ ID NO: 500710 - DNA, 30 bp, Artificial Sequence
  Synthetic oligonucleotide
atctctcgggggcccggatattatatgtat

SEQ ID NO: 500711 - DNA, 30 bp, Artificial Sequence
  Synthetic oligonucleotide
tttttctgaaatcggaagcttcacctgtat

SEQ ID NO: 500712 - DNA, 30 bp, Artificial Sequence
  Synthetic oligonucleotide
atctcgttgcacatgcaagaatagctgtat

SEQ ID NO: 500713 - DNA, 30 bp, Artificial Sequence
  Synthetic oligonucleotide
gatgacaaattggcgaggcgaagtctgtat

SEQ ID NO: 500714 - DNA, 30 bp, Artificial Sequence
  Synthetic oligonucleotide
tttggtgagatacccactaaaagcgtgtat

SEQ ID NO: 500715 - DNA, 30 bp, Artificial Sequence
  Synthetic oligonucleotide
cgaaatcgctctcagtctccgatcgtgtat

SEQ ID NO: 500716 - DNA, 30 bp, Artificial Sequence
  Synthetic oligonucleotide
ctaaatgagagcctcttacctctcgtgtat

SEQ ID NO: 500717 - DNA, 30 bp, Artificial Sequence
  Synthetic oligonucleotide
atggtgcgcgcgaaaacgaagggggtgtat

SEQ ID NO: 500718 - DNA, 30 bp, Artificial Sequence
  Synthetic oligonucleotide
tcttatctgttgtgttttcctcctgtgtat

SEQ ID NO: 500719 - DNA, 30 bp, Artificial Sequence
  Synthetic oligonucleotide
gtgccaagtgagacggcgaatggtgtgtat

SEQ ID NO: 500720 - DNA, 30 bp, Artificial Sequence
  Synthetic oligonucleotide
tcttatctgttgtgttttccccttgtgtat

SEQ ID NO: 500721 - DNA, 30 bp, Artificial Sequence
  Synthetic oligonucleotide
tcttatctgttgtgtttccctcttgtgtat

SEQ ID NO: 500722 - DNA, 30 bp, Artificial Sequence
  Synthetic oligonucleotide
tcttatctgatgtgttttcctcttgtgtat

SEQ ID NO: 500723 - DNA, 30 bp, Artificial Sequence
  Synthetic oligonucleotide
tcttatctgctgtgttttcctcttgtgtat

SEQ ID NO: 500724 - DNA, 30 bp, Artificial Sequence
  Synthetic oligonucleotide
tctaatctgttgtgttttcctcttgtgtat

SEQ ID NO: 500725 - DNA, 30 bp, Artificial Sequence
  Synthetic oligonucleotide
tcttttctgttgtgttttcctcttgtgtat

SEQ ID NO: 500726 - DNA, 30 bp, Artificial Sequence
  Synthetic oligonucleotide
tcttatgtgttgtgttttcctcttgtgtat

SEQ ID NO: 500727 - DNA, 30 bp, Artificial Sequence
  Synthetic oligonucleotide
tcttatctgttgtgttttcctgttgtgtat

SEQ ID NO: 500728 - DNA, 30 bp, Artificial Sequence
  Synthetic oligonucleotide
agttctcgatagctcaatcttcgattgtat

SEQ ID NO: 500729 - DNA, 30 bp, Artificial Sequence
  Synthetic oligonucleotide
tatatgatccctcttggcctggtattgtat

SEQ ID NO: 500730 - DNA, 30 bp, Artificial Sequence
  Synthetic oligonucleotide
aacaattcatggtcatggtgcgacttgtat

SEQ ID NO: 500731 - DNA, 30 bp, Artificial Sequence
  Synthetic oligonucleotide
aaaattgatctctgtaccagatacttgtat

SEQ ID NO: 500732 - DNA, 30 bp, Artificial Sequence
  Synthetic oligonucleotide
gtggtcaaagagccttcaccgctcttgtat

SEQ ID NO: 500733 - DNA, 30 bp, Artificial Sequence
  Synthetic oligonucleotide
tggtttccattgcttcagtgctagttgtat

SEQ ID NO: 500734 - DNA, 30 bp, Artificial Sequence
  Synthetic oligonucleotide
gtctgtgcattgcattcatgatggttgtat

SEQ ID NO: 500735 - DNA, 30 bp, Artificial Sequence
  Synthetic oligonucleotide
gagttaagcaggaaagacgtaaatttgtat

SEQ ID NO: 500736 - DNA, 30 bp, Artificial Sequence
  Synthetic oligonucleotide
gttctcacgtattcgtaccggaaaaattat

SEQ ID NO: 500737 - DNA, 30 bp, Artificial Sequence
  Synthetic oligonucleotide
agtttctgatgggttaaaccgccaaattat

SEQ ID NO: 500738 - DNA, 30 bp, Artificial Sequence
  Synthetic oligonucleotide
gcaaatagtttcgccaggtatataaattat

SEQ ID NO: 500739 - DNA, 30 bp, Artificial Sequence
  Synthetic oligonucleotide
actttcacacgaatcagcaactgcaattat

SEQ ID NO: 500740 - DNA, 30 bp, Artificial Sequence
  Synthetic oligonucleotide
tttttgggttaaaaaaacgagctcaattat

SEQ ID NO: 500741 - DNA, 30 bp, Artificial Sequence
  Synthetic oligonucleotide
gcacttcggcgtggcgtgataccgaattat

SEQ ID NO: 500742 - DNA, 30 bp, Artificial Sequence
  Synthetic oligonucleotide
tccgctggcaaagtacgttatactaattat

SEQ ID NO: 500743 - DNA, 30 bp, Artificial Sequence
  Synthetic oligonucleotide
cttcggggtggatttggtcattttaattat

SEQ ID NO: 500744 - DNA, 30 bp, Artificial Sequence
  Synthetic oligonucleotide
attgatttgacgattggttcgagccattat

SEQ ID NO: 500745 - DNA, 30 bp, Artificial Sequence
  Synthetic oligonucleotide
tgccttttactgcaaggagttcgccattat

SEQ ID NO: 500746 - DNA, 30 bp, Artificial Sequence
  Synthetic oligonucleotide
atcagtcaagtgatctagttttcgcattat

SEQ ID NO: 500747 - DNA, 30 bp, Artificial Sequence
  Synthetic oligonucleotide
ttgttaatacatggcgtatatatgcattat

SEQ ID NO: 500748 - DNA, 30 bp, Artificial Sequence
  Synthetic oligonucleotide
tcttatctcagttgtcctgtggcagattat

SEQ ID NO: 500749 - DNA, 30 bp, Artificial Sequence
  Synthetic oligonucleotide
atcttatactcagcttaatagcacgattat

SEQ ID NO: 500750 - DNA, 30 bp, Artificial Sequence
  Synthetic oligonucleotide
ttgtaccgtccagatcccttggacgattat

SEQ ID NO: 500751 - DNA, 30 bp, Artificial Sequence
  Synthetic oligonucleotide
tttcacttaggataaggtgtatacgattat

SEQ ID NO: 500752 - DNA, 30 bp, Artificial Sequence
  Synthetic oligonucleotide
tttggcgaaacgttctatcgattcgattat

SEQ ID NO: 500753 - DNA, 30 bp, Artificial Sequence
  Synthetic oligonucleotide
ctttgtatccggcaaccgaagtgggattat

SEQ ID NO: 500754 - DNA, 30 bp, Artificial Sequence
  Synthetic oligonucleotide
gtcgccagcgattgcacaccccgtgattat

SEQ ID NO: 500755 - DNA, 30 bp, Artificial Sequence
  Synthetic oligonucleotide
cctacggcacctgtgaaatttcttgattat

SEQ ID NO: 500756 - DNA, 30 bp, Artificial Sequence
  Synthetic oligonucleotide
gtagccccctgctagaaatagttatattat

SEQ ID NO: 500757 - DNA, 30 bp, Artificial Sequence
  Synthetic oligonucleotide
actagaggtcataggagcctgccctattat

SEQ ID NO: 500758 - DNA, 30 bp, Artificial Sequence
  Synthetic oligonucleotide
cgtccctcgctgcggttatctagctattat

SEQ ID NO: 500759 - DNA, 30 bp, Artificial Sequence
  Synthetic oligonucleotide
ctataatcgtcttaggtaacgtcgtattat

SEQ ID NO: 500760 - DNA, 30 bp, Artificial Sequence
  Synthetic oligonucleotide
atgtcacgattccctggcggttcgtattat

SEQ ID NO: 500761 - DNA, 30 bp, Artificial Sequence
  Synthetic oligonucleotide
actcggaaaaaatattcacttttgtattat

SEQ ID NO: 500762 - DNA, 30 bp, Artificial Sequence
  Synthetic oligonucleotide
gagtttacgtgctctacgggacattattat

SEQ ID NO: 500763 - DNA, 30 bp, Artificial Sequence
  Synthetic oligonucleotide
tataatatgtaccttgtgtgctgttattat

SEQ ID NO: 500764 - DNA, 30 bp, Artificial Sequence
  Synthetic oligonucleotide
tagcgttttcaattgtgcctttaaacttat

SEQ ID NO: 500765 - DNA, 30 bp, Artificial Sequence
  Synthetic oligonucleotide
ttccattaagcacataagtacacaacttat

SEQ ID NO: 500766 - DNA, 30 bp, Artificial Sequence
  Synthetic oligonucleotide
tagaacgcttctcatgttatttcaacttat

SEQ ID NO: 500767 - DNA, 30 bp, Artificial Sequence
  Synthetic oligonucleotide
agcgatacaccccgcgggcaaggaacttat

SEQ ID NO: 500768 - DNA, 30 bp, Artificial Sequence
  Synthetic oligonucleotide
cattattgttgagaggcacaattaacttat

SEQ ID NO: 500769 - DNA, 30 bp, Artificial Sequence
  Synthetic oligonucleotide
gtacctaataattaagtgtatcacacttat

SEQ ID NO: 500770 - DNA, 30 bp, Artificial Sequence
  Synthetic oligonucleotide
ccctgagttctcttgttcgctggcacttat

SEQ ID NO: 500771 - DNA, 30 bp, Artificial Sequence
  Synthetic oligonucleotide
atattagcacacaacataattaggacttat

SEQ ID NO: 500772 - DNA, 30 bp, Artificial Sequence
  Synthetic oligonucleotide
tttcatgcacatatgagtcctatgacttat

SEQ ID NO: 500773 - DNA, 30 bp, Artificial Sequence
  Synthetic oligonucleotide
agtaaatcgggccgctgccttcttacttat

SEQ ID NO: 500774 - DNA, 30 bp, Artificial Sequence
  Synthetic oligonucleotide
tgaagactagctttattattaaaaccttat

SEQ ID NO: 500775 - DNA, 30 bp, Artificial Sequence
  Synthetic oligonucleotide
actgactcggtcgcggcttcactaccttat

SEQ ID NO: 500776 - DNA, 30 bp, Artificial Sequence
  Synthetic oligonucleotide
atgcaggatggaatgaacatgcacccttat

SEQ ID NO: 500777 - DNA, 30 bp, Artificial Sequence
  Synthetic oligonucleotide
aagagtataccgtaagtttcggacccttat

SEQ ID NO: 500778 - DNA, 30 bp, Artificial Sequence
  Synthetic oligonucleotide
gcgaatagcagtcaccaaagtgacccttat

SEQ ID NO: 500779 - DNA, 30 bp, Artificial Sequence
  Synthetic oligonucleotide
aatctttaactatcgtctctacgcccttat

SEQ ID NO: 500780 - DNA, 30 bp, Artificial Sequence
  Synthetic oligonucleotide
cgcagatagcgtacgtgcggaatcccttat

SEQ ID NO: 500781 - DNA, 30 bp, Artificial Sequence
  Synthetic oligonucleotide
accctttgtggtttctgggcgctcccttat

SEQ ID NO: 500782 - DNA, 29 bp, Artificial Sequence
  Synthetic oligonucleotide
agacagacatttgtccatatgtcccttat

SEQ ID NO: 500783 - DNA, 30 bp, Artificial Sequence
  Synthetic oligonucleotide
ggtaccttctctgtttcgttcatgccttat

SEQ ID NO: 500784 - DNA, 30 bp, Artificial Sequence
  Synthetic oligonucleotide
ctgttctctccgctatgcgtgtatccttat

SEQ ID NO: 500785 - DNA, 30 bp, Artificial Sequence
  Synthetic oligonucleotide
agaccagcggtaaggatcgtgagtccttat

SEQ ID NO: 500786 - DNA, 30 bp, Artificial Sequence
  Synthetic oligonucleotide
tttgtagttatgcgtaaactactagcttat

SEQ ID NO: 500787 - DNA, 30 bp, Artificial Sequence
  Synthetic oligonucleotide
tctcgggcgttattaaagccaaacgcttat

SEQ ID NO: 500788 - DNA, 30 bp, Artificial Sequence
  Synthetic oligonucleotide
tcgaggacatgtgtggccgcagacgcttat

SEQ ID NO: 500789 - DNA, 30 bp, Artificial Sequence
  Synthetic oligonucleotide
tgaggcactggccgtgcccgggacgcttat

SEQ ID NO: 500790 - DNA, 30 bp, Artificial Sequence
  Synthetic oligonucleotide
attaggtcagtatccgggatcggcgcttat

SEQ ID NO: 500791 - DNA, 30 bp, Artificial Sequence
  Synthetic oligonucleotide
atagagtggcgttacaatgagctcgcttat

SEQ ID NO: 500792 - DNA, 30 bp, Artificial Sequence
  Synthetic oligonucleotide
gcaattacgccacacgcgtctgtggcttat

SEQ ID NO: 500793 - DNA, 30 bp, Artificial Sequence
  Synthetic oligonucleotide
gttattaggaggatatattccactgcttat

SEQ ID NO: 500794 - DNA, 30 bp, Artificial Sequence
  Synthetic oligonucleotide
aggctttctggggcgacggcccctgcttat

SEQ ID NO: 500795 - DNA, 30 bp, Artificial Sequence
  Synthetic oligonucleotide
atgatttctcgctccagatcccttgcttat

SEQ ID NO: 500796 - DNA, 30 bp, Artificial Sequence
  Synthetic oligonucleotide
aactgaagagcaccactgattgttgcttat

SEQ ID NO: 500797 - DNA, 30 bp, Artificial Sequence
  Synthetic oligonucleotide
cagcgctatgatgccagacagaaatcttat

SEQ ID NO: 500798 - DNA, 31 bp, Artificial Sequence
  Synthetic oligonucleotide
aatttcagcctggggggctccgagatcttat

SEQ ID NO: 500799 - DNA, 30 bp, Artificial Sequence
  Synthetic oligonucleotide
atgcaacaacgaaacgcggggcgatcttat

SEQ ID NO: 500800 - DNA, 30 bp, Artificial Sequence
  Synthetic oligonucleotide
gtatccatttcatgatagacagtatcttat

SEQ ID NO: 500801 - DNA, 30 bp, Artificial Sequence
  Synthetic oligonucleotide
aaacctccgtatcggacaatcgactcttat

SEQ ID NO: 500802 - DNA, 30 bp, Artificial Sequence
  Synthetic oligonucleotide
tatagaagagtatgtcaatgggactcttat

SEQ ID NO: 500803 - DNA, 30 bp, Artificial Sequence
  Synthetic oligonucleotide
ttcatatagtcgtaactagaaacgtcttat

SEQ ID NO: 500804 - DNA, 30 bp, Artificial Sequence
  Synthetic oligonucleotide
acctgacccgagaggtagccctattcttat

SEQ ID NO: 500805 - DNA, 30 bp, Artificial Sequence
  Synthetic oligonucleotide
atggctatggcttggggtgttccttcttat

SEQ ID NO: 500806 - DNA, 30 bp, Artificial Sequence
  Synthetic oligonucleotide
gttataatgacgattggtatcgcttcttat

SEQ ID NO: 500807 - DNA, 30 bp, Artificial Sequence
  Synthetic oligonucleotide
caccgctgaacaagccctgacctttcttat

SEQ ID NO: 500808 - DNA, 30 bp, Artificial Sequence
  Synthetic oligonucleotide
agtaaggaatcacctaacctaggaagttat

SEQ ID NO: 500809 - DNA, 32 bp, Artificial Sequence
  Synthetic oligonucleotide
ttcccattactagcgtcatcctcaaacgttat

SEQ ID NO: 500810 - DNA, 30 bp, Artificial Sequence
  Synthetic oligonucleotide
ctcgtaagttctcagacgtggtaacgttat

SEQ ID NO: 500811 - DNA, 30 bp, Artificial Sequence
  Synthetic oligonucleotide
ggtcgactattaattgacacggcacgttat

SEQ ID NO: 500812 - DNA, 30 bp, Artificial Sequence
  Synthetic oligonucleotide
tacatactattggagttgtagggacgttat

SEQ ID NO: 500813 - DNA, 30 bp, Artificial Sequence
  Synthetic oligonucleotide
agttgggcaacgttgccattcatacgttat

SEQ ID NO: 500814 - DNA, 30 bp, Artificial Sequence
  Synthetic oligonucleotide
aagacaacccaagaaagcggattacgttat

SEQ ID NO: 500815 - DNA, 30 bp, Artificial Sequence
  Synthetic oligonucleotide
gtgttggtttgtgaatagtatcggcgttat

SEQ ID NO: 500816 - DNA, 30 bp, Artificial Sequence
  Synthetic oligonucleotide
aaaagtcgttacatcagttacacaggttat

SEQ ID NO: 500817 - DNA, 30 bp, Artificial Sequence
  Synthetic oligonucleotide
ggcatagaagggcggattcgcccaggttat

SEQ ID NO: 500818 - DNA, 30 bp, Artificial Sequence
  Synthetic oligonucleotide
tgaacccggtctgaaatggactgaggttat

SEQ ID NO: 500819 - DNA, 30 bp, Artificial Sequence
  Synthetic oligonucleotide
gtggcctcctactgggtcggggtaggttat

SEQ ID NO: 500820 - DNA, 30 bp, Artificial Sequence
  Synthetic oligonucleotide
ctaggttactggctttgaggattaggttat

SEQ ID NO: 500821 - DNA, 30 bp, Artificial Sequence
  Synthetic oligonucleotide
caaacgagagcgcagtaccggtacggttat

SEQ ID NO: 500822 - DNA, 31 bp, Artificial Sequence
  Synthetic oligonucleotide
attctaacgtggtccaggatttggcggttat

SEQ ID NO: 500823 - DNA, 30 bp, Artificial Sequence
  Synthetic oligonucleotide
tgtggtgtaggtctcgcagtgatcggttat

SEQ ID NO: 500824 - DNA, 30 bp, Artificial Sequence
  Synthetic oligonucleotide
ttttctttccataaaggatccaggggttat

SEQ ID NO: 500825 - DNA, 30 bp, Artificial Sequence
  Synthetic oligonucleotide
caatattctgggaagagttcgcggggttat

SEQ ID NO: 500826 - DNA, 30 bp, Artificial Sequence
  Synthetic oligonucleotide
ttcgtagcgccaaaattaatcactggttat

SEQ ID NO: 500827 - DNA, 30 bp, Artificial Sequence
  Synthetic oligonucleotide
tagataatagttcacggtgttagtggttat

SEQ ID NO: 500828 - DNA, 30 bp, Artificial Sequence
  Synthetic oligonucleotide
catatagaatcttccgttgtagaatgttat

SEQ ID NO: 500829 - DNA, 30 bp, Artificial Sequence
  Synthetic oligonucleotide
ccaaaaggtcttcaggcacgtgcatgttat

SEQ ID NO: 500830 - DNA, 30 bp, Artificial Sequence
  Synthetic oligonucleotide
agggttcatagggcattctactcctgttat

SEQ ID NO: 500831 - DNA, 30 bp, Artificial Sequence
  Synthetic oligonucleotide
ttgcgccaaatacaaccgggtcagtgttat

SEQ ID NO: 500832 - DNA, 30 bp, Artificial Sequence
  Synthetic oligonucleotide
caatccaagcatttcccctgtgcgtgttat

SEQ ID NO: 500833 - DNA, 30 bp, Artificial Sequence
  Synthetic oligonucleotide
cccagtgaggtctctaagtaaaggtgttat

SEQ ID NO: 500834 - DNA, 30 bp, Artificial Sequence
  Synthetic oligonucleotide
gtatagaaagatttgtaatttcattgttat

SEQ ID NO: 500835 - DNA, 30 bp, Artificial Sequence
  Synthetic oligonucleotide
caaactgagtccaactcgggttattgttat

SEQ ID NO: 500836 - DNA, 30 bp, Artificial Sequence
  Synthetic oligonucleotide
taggtttgttttatggagtcagcttgttat

SEQ ID NO: 500837 - DNA, 30 bp, Artificial Sequence
  Synthetic oligonucleotide
gatccgttcgggtttattttttaaatttat

SEQ ID NO: 500838 - DNA, 30 bp, Artificial Sequence
  Synthetic oligonucleotide
tatggagtcatagttgggtagtagatttat

SEQ ID NO: 500839 - DNA, 30 bp, Artificial Sequence
  Synthetic oligonucleotide
ggaagttttggggtgtttacagcgatttat

SEQ ID NO: 500840 - DNA, 29 bp, Artificial Sequence
  Synthetic oligonucleotide
agcccctaatgaggaatacggctatttat

SEQ ID NO: 500841 - DNA, 30 bp, Artificial Sequence
  Synthetic oligonucleotide
aataattgcgatttgatcgttagtatttat

SEQ ID NO: 500842 - DNA, 30 bp, Artificial Sequence
  Synthetic oligonucleotide
cgttagcctgtggtcacaggggttatttat

SEQ ID NO: 500843 - DNA, 30 bp, Artificial Sequence
  Synthetic oligonucleotide
gcatgcggcattgcttgcctaaaactttat

SEQ ID NO: 500844 - DNA, 30 bp, Artificial Sequence
  Synthetic oligonucleotide
ggtattgtagcatacaacgcctcactttat

SEQ ID NO: 500845 - DNA, 30 bp, Artificial Sequence
  Synthetic oligonucleotide
attgttcgaacacccgcctcggaagtttat

SEQ ID NO: 500846 - DNA, 30 bp, Artificial Sequence
  Synthetic oligonucleotide
tgcagcgtttaaaggaaggatatagtttat

SEQ ID NO: 500847 - DNA, 30 bp, Artificial Sequence
  Synthetic oligonucleotide
gtatttcggcgacgaggtcgtgccgtttat

SEQ ID NO: 500848 - DNA, 30 bp, Artificial Sequence
  Synthetic oligonucleotide
agtttccaattgatcctgcgtagcgtttat

SEQ ID NO: 500849 - DNA, 30 bp, Artificial Sequence
  Synthetic oligonucleotide
ggccataaacgaccactacttagcgtttat

SEQ ID NO: 500850 - DNA, 30 bp, Artificial Sequence
  Synthetic oligonucleotide
tgcatgtataaattccgcctcgaggtttat

SEQ ID NO: 500851 - DNA, 30 bp, Artificial Sequence
  Synthetic oligonucleotide
cgtgcatacctgacgtaacacggggtttat

SEQ ID NO: 500852 - DNA, 30 bp, Artificial Sequence
  Synthetic oligonucleotide
ccggtaaggtgctaacctgtcaatgtttat

SEQ ID NO: 500853 - DNA, 30 bp, Artificial Sequence
  Synthetic oligonucleotide
tttataagaaacaaggttgtatttgtttat

SEQ ID NO: 500854 - DNA, 30 bp, Artificial Sequence
  Synthetic oligonucleotide
tgatcaaatggtaactgtatgcaattttat

SEQ ID NO: 500855 - DNA, 30 bp, Artificial Sequence
  Synthetic oligonucleotide
gagaagtattttggttctttcgtattttat

SEQ ID NO: 500856 - DNA, 30 bp, Artificial Sequence
  Synthetic oligonucleotide
cccgacctaataagatcatccgacttttat

SEQ ID NO: 500857 - DNA, 30 bp, Artificial Sequence
  Synthetic oligonucleotide
cttaatctaacctgaccttaatccttttat

SEQ ID NO: 500858 - DNA, 30 bp, Artificial Sequence
  Synthetic oligonucleotide
ttggtcgatgatgcacagtcttccttttat

SEQ ID NO: 500859 - DNA, 30 bp, Artificial Sequence
  Synthetic oligonucleotide
aatgcgccaaacgcttactgcgggttttat

SEQ ID NO: 500860 - DNA, 30 bp, Artificial Sequence
  Synthetic oligonucleotide
tgatataggctgcctgcctatctgttttat

SEQ ID NO: 500861 - DNA, 30 bp, Artificial Sequence
  Synthetic oligonucleotide
catattcatcatgtcgcactcgatttttat

SEQ ID NO: 500862 - DNA, 30 bp, Artificial Sequence
  Synthetic oligonucleotide
gcctatgcctatgaatcggcttgtttttat

SEQ ID NO: 500863 - DNA, 30 bp, Artificial Sequence
  Synthetic oligonucleotide
tctattccgaatcgtataatcgttttttat

SEQ ID NO: 500864 - DNA, 30 bp, Artificial Sequence
  Synthetic oligonucleotide
cacggacattctgggagatagcaaaaaact

SEQ ID NO: 500865 - DNA, 30 bp, Artificial Sequence
  Synthetic oligonucleotide
attcctgcggcacactgtcatacaaaaact

SEQ ID NO: 500866 - DNA, 30 bp, Artificial Sequence
  Synthetic oligonucleotide
ttccctctcagtgtggatcgatgaaaaact

SEQ ID NO: 500867 - DNA, 30 bp, Artificial Sequence
  Synthetic oligonucleotide
tggattttgatcagtcaagtcaacaaaact

SEQ ID NO: 500868 - DNA, 30 bp, Artificial Sequence
  Synthetic oligonucleotide
tctctgagttacgacataagcgtgaaaact

SEQ ID NO: 500869 - DNA, 30 bp, Artificial Sequence
  Synthetic oligonucleotide
taaattaaccgccctaaggatggtaaaact

SEQ ID NO: 500870 - DNA, 30 bp, Artificial Sequence
  Synthetic oligonucleotide
attcttacggtctattcctcaattaaaact

SEQ ID NO: 500871 - DNA, 30 bp, Artificial Sequence
  Synthetic oligonucleotide
agtcgactagccggacaatagtaacaaact

SEQ ID NO: 500872 - DNA, 31 bp, Artificial Sequence
  Synthetic oligonucleotide
actgatggagcatactgttcatggacaaact

SEQ ID NO: 500873 - DNA, 30 bp, Artificial Sequence
  Synthetic oligonucleotide
gacccagaggatgcaactgtccgccaaact

SEQ ID NO: 500874 - DNA, 30 bp, Artificial Sequence
  Synthetic oligonucleotide
ggttcggcgggtacgggcgatccgcaaact

SEQ ID NO: 500875 - DNA, 30 bp, Artificial Sequence
  Synthetic oligonucleotide
ttttgtagaggacctgtaaggtggcaaact

SEQ ID NO: 500876 - DNA, 30 bp, Artificial Sequence
  Synthetic oligonucleotide
cctgatatagttccattcaggatgcaaact

SEQ ID NO: 500877 - DNA, 30 bp, Artificial Sequence
  Synthetic oligonucleotide
tacgcaggaacgttcggacgtgaagaaact

SEQ ID NO: 500878 - DNA, 30 bp, Artificial Sequence
  Synthetic oligonucleotide
cggccaccctcccggcctaccgacgaaact

SEQ ID NO: 500879 - DNA, 30 bp, Artificial Sequence
  Synthetic oligonucleotide
aagaggcggtcacctaatattgtcgaaact

SEQ ID NO: 500880 - DNA, 30 bp, Artificial Sequence
  Synthetic oligonucleotide
aatactgtggtactaccctgttcggaaact

SEQ ID NO: 500881 - DNA, 30 bp, Artificial Sequence
  Synthetic oligonucleotide
agatccgtaatgaggggtcaccgggaaact

SEQ ID NO: 500882 - DNA, 29 bp, Artificial Sequence
  Synthetic oligonucleotide
cctgtctatcattgctgtaggttgaaact

SEQ ID NO: 500883 - DNA, 30 bp, Artificial Sequence
  Synthetic oligonucleotide
tttaatcatcggtatggcttaaaataaact

SEQ ID NO: 500884 - DNA, 30 bp, Artificial Sequence
  Synthetic oligonucleotide
gatatattagatgaagactagtcataaact

SEQ ID NO: 500885 - DNA, 30 bp, Artificial Sequence
  Synthetic oligonucleotide
tgtgaccgggctagtgtgatcgtataaact

SEQ ID NO: 500886 - DNA, 30 bp, Artificial Sequence
  Synthetic oligonucleotide
gaagttttatcccacaaataaacgtaaact

SEQ ID NO: 500887 - DNA, 30 bp, Artificial Sequence
  Synthetic oligonucleotide
gaaccgtgggaagggtgcgtcgtgtaaact

SEQ ID NO: 500888 - DNA, 30 bp, Artificial Sequence
  Synthetic oligonucleotide
attatgtcaagggagttttcccattaaact

SEQ ID NO: 500889 - DNA, 30 bp, Artificial Sequence
  Synthetic oligonucleotide
aacaatgtaagttttcgttgtgattaaact

SEQ ID NO: 500890 - DNA, 30 bp, Artificial Sequence
  Synthetic oligonucleotide
gttaatttcaagataggacccgcgacaact

SEQ ID NO: 500891 - DNA, 30 bp, Artificial Sequence
  Synthetic oligonucleotide
tttcatgtcgtacatagtggaaggacaact

SEQ ID NO: 500892 - DNA, 30 bp, Artificial Sequence
  Synthetic oligonucleotide
ctctagtggaggacgtcaggagtgacaact

SEQ ID NO: 500893 - DNA, 30 bp, Artificial Sequence
  Synthetic oligonucleotide
tgttaaactacagcttgtggatgaccaact

SEQ ID NO: 500894 - DNA, 30 bp, Artificial Sequence
  Synthetic oligonucleotide
ccagatccccttacaaccttgaccccaact

SEQ ID NO: 500895 - DNA, 30 bp, Artificial Sequence
  Synthetic oligonucleotide
ctacggagcccctacgcagggtttccaact

SEQ ID NO: 500896 - DNA, 30 bp, Artificial Sequence
  Synthetic oligonucleotide
gaaccgatctgaaggcctagtcacgcaact

SEQ ID NO: 500897 - DNA, 30 bp, Artificial Sequence
  Synthetic oligonucleotide
gggttcatgtgttcataatgtcacgcaact

SEQ ID NO: 500898 - DNA, 30 bp, Artificial Sequence
  Synthetic oligonucleotide
cctctaagcgctattggatatagcgcaact

SEQ ID NO: 500899 - DNA, 30 bp, Artificial Sequence
  Synthetic oligonucleotide
ttgattccgtcatctaattgatcggcaact

SEQ ID NO: 500900 - DNA, 30 bp, Artificial Sequence
  Synthetic oligonucleotide
gacaataaaagcgcagaggtttaatcaact

SEQ ID NO: 500901 - DNA, 30 bp, Artificial Sequence
  Synthetic oligonucleotide
gcaacttgccttagtaccgtgagatcaact

SEQ ID NO: 500902 - DNA, 30 bp, Artificial Sequence
  Synthetic oligonucleotide
gcaccatacagtttgtaccaaaactcaact

SEQ ID NO: 500903 - DNA, 30 bp, Artificial Sequence
  Synthetic oligonucleotide
ttcccgggcagtaactgagagcgctcaact

SEQ ID NO: 500904 - DNA, 30 bp, Artificial Sequence
  Synthetic oligonucleotide
gacttttgtgcattgagagaccagtcaact

SEQ ID NO: 500905 - DNA, 30 bp, Artificial Sequence
  Synthetic oligonucleotide
gtccggcaacagaacggctatttgtcaact

SEQ ID NO: 500906 - DNA, 30 bp, Artificial Sequence
  Synthetic oligonucleotide
ggactgtgtaggcacaccagcggttcaact

SEQ ID NO: 500907 - DNA, 30 bp, Artificial Sequence
  Synthetic oligonucleotide
agaacttataatacaatataagttagaact

SEQ ID NO: 500908 - DNA, 30 bp, Artificial Sequence
  Synthetic oligonucleotide
catttgtggtgtacgcagttggtccgaact

SEQ ID NO: 500909 - DNA, 30 bp, Artificial Sequence
  Synthetic oligonucleotide
tacctgatattatctccatcatagcgaact

SEQ ID NO: 500910 - DNA, 29 bp, Artificial Sequence
  Synthetic oligonucleotide
tgcacctgaaggcccttagcacgcgaact

SEQ ID NO: 500911 - DNA, 30 bp, Artificial Sequence
  Synthetic oligonucleotide
gtaccttgagtcttgcgttggtggcgaact

SEQ ID NO: 500912 - DNA, 30 bp, Artificial Sequence
  Synthetic oligonucleotide
ctatcccggacgtggccattcatgcgaact

SEQ ID NO: 500913 - DNA, 30 bp, Artificial Sequence
  Synthetic oligonucleotide
ggatacgcttcttcgctagactgtcgaact

SEQ ID NO: 500914 - DNA, 30 bp, Artificial Sequence
  Synthetic oligonucleotide
ttcatcgccgtgtgactagttattcgaact

SEQ ID NO: 500915 - DNA, 30 bp, Artificial Sequence
  Synthetic oligonucleotide
aggtcgcagcatgggttaggacaaggaact

SEQ ID NO: 500916 - DNA, 30 bp, Artificial Sequence
  Synthetic oligonucleotide
tttatcttgtaggaaattaacaccggaact

SEQ ID NO: 500917 - DNA, 30 bp, Artificial Sequence
  Synthetic oligonucleotide
atgatttcttaaccacatatgtccggaact

SEQ ID NO: 500918 - DNA, 30 bp, Artificial Sequence
  Synthetic oligonucleotide
agctattacgctggagcggtcaagggaact

SEQ ID NO: 500919 - DNA, 30 bp, Artificial Sequence
  Synthetic oligonucleotide
cacatcccgtttgtttgcagttagggaact

SEQ ID NO: 500920 - DNA, 30 bp, Artificial Sequence
  Synthetic oligonucleotide
ttcttcgggtccgcttcgcatgcgggaact

SEQ ID NO: 500921 - DNA, 30 bp, Artificial Sequence
  Synthetic oligonucleotide
agtaaaaacgcccatcgtgtttcttgaact

SEQ ID NO: 500922 - DNA, 30 bp, Artificial Sequence
  Synthetic oligonucleotide
ctcggcgtcgggttgcgagctctttgaact

SEQ ID NO: 500923 - DNA, 30 bp, Artificial Sequence
  Synthetic oligonucleotide
cttcgcttgaatgtggcgtctcgcataact

SEQ ID NO: 500924 - DNA, 30 bp, Artificial Sequence
  Synthetic oligonucleotide
cccgtacagcaaaagcttccatagataact

SEQ ID NO: 500925 - DNA, 30 bp, Artificial Sequence
  Synthetic oligonucleotide
ctgcttaaattttgaatgatcgcgataact

SEQ ID NO: 500926 - DNA, 30 bp, Artificial Sequence
  Synthetic oligonucleotide
gtaggaaatattgaaagtatttttataact

SEQ ID NO: 500927 - DNA, 30 bp, Artificial Sequence
  Synthetic oligonucleotide
accagatccaaacgtgaggcacaactaact

SEQ ID NO: 500928 - DNA, 30 bp, Artificial Sequence
  Synthetic oligonucleotide
tgttgcgtttaggaccagttgcaactaact

SEQ ID NO: 500929 - DNA, 30 bp, Artificial Sequence
  Synthetic oligonucleotide
tgatttgagctttattgtggagccctaact

SEQ ID NO: 500930 - DNA, 30 bp, Artificial Sequence
  Synthetic oligonucleotide
ccgcccacccaattatccacctccctaact

SEQ ID NO: 500931 - DNA, 30 bp, Artificial Sequence
  Synthetic oligonucleotide
gcatctaggcgcagggtaccgaagctaact

SEQ ID NO: 500932 - DNA, 30 bp, Artificial Sequence
  Synthetic oligonucleotide
ctcgacggtatttagataaagtatctaact

SEQ ID NO: 500933 - DNA, 30 bp, Artificial Sequence
  Synthetic oligonucleotide
acccaagcgagtaaattcacaattctaact

SEQ ID NO: 500934 - DNA, 30 bp, Artificial Sequence
  Synthetic oligonucleotide
tatggagccgttgcaaatgtataagtaact

SEQ ID NO: 500935 - DNA, 30 bp, Artificial Sequence
  Synthetic oligonucleotide
cccgaaaatactctcatctcccctgtaact

SEQ ID NO: 500936 - DNA, 30 bp, Artificial Sequence
  Synthetic oligonucleotide
aaataaatcactagcgggggcgttgtaact

SEQ ID NO: 500937 - DNA, 30 bp, Artificial Sequence
  Synthetic oligonucleotide
aattctcgacctgacgagcgatttgtaact

SEQ ID NO: 500938 - DNA, 30 bp, Artificial Sequence
  Synthetic oligonucleotide
tggtcacggggcatctgagagtttgtaact

SEQ ID NO: 500939 - DNA, 30 bp, Artificial Sequence
  Synthetic oligonucleotide
gctttgaatacttaagatatatcattaact

SEQ ID NO: 500940 - DNA, 30 bp, Artificial Sequence
  Synthetic oligonucleotide
ctctgataagacgcaaacaggcgattaact

SEQ ID NO: 500941 - DNA, 30 bp, Artificial Sequence
  Synthetic oligonucleotide
gaattatgaggttttaatgccaacttaact

SEQ ID NO: 500942 - DNA, 30 bp, Artificial Sequence
  Synthetic oligonucleotide
aacttacggggtcctcgcatccccttaact

SEQ ID NO: 500943 - DNA, 30 bp, Artificial Sequence
  Synthetic oligonucleotide
ctaaattttcaggtcaccggctcgttaact

SEQ ID NO: 500944 - DNA, 30 bp, Artificial Sequence
  Synthetic oligonucleotide
ttgtttataaggcagagtgcgcggttaact

SEQ ID NO: 500945 - DNA, 30 bp, Artificial Sequence
  Synthetic oligonucleotide
tgctcttgaaagtatgccactactttaact

SEQ ID NO: 500946 - DNA, 30 bp, Artificial Sequence
  Synthetic oligonucleotide
ggggccgttatacgtagaaaacgtttaact

SEQ ID NO: 500947 - DNA, 30 bp, Artificial Sequence
  Synthetic oligonucleotide
gccgctagccattcaggtttttgtttaact

SEQ ID NO: 500948 - DNA, 30 bp, Artificial Sequence
  Synthetic oligonucleotide
ggaaaagttcacaaagtgcacattttaact

SEQ ID NO: 500949 - DNA, 30 bp, Artificial Sequence
  Synthetic oligonucleotide
catttcggggccttcgtctctattttaact

SEQ ID NO: 500950 - DNA, 30 bp, Artificial Sequence
  Synthetic oligonucleotide
taacgattttctacttgggcctttttaact

SEQ ID NO: 500951 - DNA, 30 bp, Artificial Sequence
  Synthetic oligonucleotide
aatagtcgcctcaggtcgcaagaaaacact

SEQ ID NO: 500952 - DNA, 30 bp, Artificial Sequence
  Synthetic oligonucleotide
ggctgggcctgcacaggtacactaaacact

SEQ ID NO: 500953 - DNA, 29 bp, Artificial Sequence
  Synthetic oligonucleotide
gtcaacagcaggttaaggtagtaaacact

SEQ ID NO: 500954 - DNA, 30 bp, Artificial Sequence
  Synthetic oligonucleotide
tccgtctgcctaaaatcagcggtaaacact

SEQ ID NO: 500955 - DNA, 30 bp, Artificial Sequence
  Synthetic oligonucleotide
atttattatagcgcgagccctgataacact

SEQ ID NO: 500956 - DNA, 30 bp, Artificial Sequence
  Synthetic oligonucleotide
gccttagttgtaacccttccgggtaacact

SEQ ID NO: 500957 - DNA, 30 bp, Artificial Sequence
  Synthetic oligonucleotide
cccggtttataaggaatctgccttaacact

SEQ ID NO: 500958 - DNA, 30 bp, Artificial Sequence
  Synthetic oligonucleotide
cgacgttccagccacgtgcaaaagcacact

SEQ ID NO: 500959 - DNA, 30 bp, Artificial Sequence
  Synthetic oligonucleotide
aaagtgtctcggtagtgtccgctgcacact

SEQ ID NO: 500960 - DNA, 30 bp, Artificial Sequence
  Synthetic oligonucleotide
tcgaggatcgctgcaggatgggtgcacact

SEQ ID NO: 500961 - DNA, 30 bp, Artificial Sequence
  Synthetic oligonucleotide
cgcgtcaacacagactaactaaatcacact

SEQ ID NO: 500962 - DNA, 30 bp, Artificial Sequence
  Synthetic oligonucleotide
cgagacgctgacacgcgaagcggtcacact

SEQ ID NO: 500963 - DNA, 30 bp, Artificial Sequence
  Synthetic oligonucleotide
cacctatttggaaatgacgggcttcacact

SEQ ID NO: 500964 - DNA, 30 bp, Artificial Sequence
  Synthetic oligonucleotide
gctctatacgagcgttcaggttgcgacact

SEQ ID NO: 500965 - DNA, 30 bp, Artificial Sequence
  Synthetic oligonucleotide
cggtactaagcggttcaccgcacggacact

SEQ ID NO: 500966 - DNA, 30 bp, Artificial Sequence
  Synthetic oligonucleotide
ttatgttcctccgaaggaatcagggacact

SEQ ID NO: 500967 - DNA, 29 bp, Artificial Sequence
  Synthetic oligonucleotide
acaacccaagtagtcagatacctgacact

SEQ ID NO: 500968 - DNA, 30 bp, Artificial Sequence
  Synthetic oligonucleotide
ttatatcgttgtgtggcaacgcactacact

SEQ ID NO: 500969 - DNA, 30 bp, Artificial Sequence
  Synthetic oligonucleotide
gccatcacatggtgacaattaggctacact

SEQ ID NO: 500970 - DNA, 30 bp, Artificial Sequence
  Synthetic oligonucleotide
gggatcctaggtttatctagattgtacact

SEQ ID NO: 500971 - DNA, 30 bp, Artificial Sequence
  Synthetic oligonucleotide
gaagcaatttaataactgtttagttacact

SEQ ID NO: 500972 - DNA, 30 bp, Artificial Sequence
  Synthetic oligonucleotide
tgccgcaaacaagacggttgtgtcaccact

SEQ ID NO: 500973 - DNA, 30 bp, Artificial Sequence
  Synthetic oligonucleotide
ttgcgcagcgaggatcttgtgatacccact

SEQ ID NO: 500974 - DNA, 30 bp, Artificial Sequence
  Synthetic oligonucleotide
agagtggattgttgtggtttataccccact

SEQ ID NO: 500975 - DNA, 30 bp, Artificial Sequence
  Synthetic oligonucleotide
attcctatccgcaagcagtcaaatcccact

SEQ ID NO: 500976 - DNA, 30 bp, Artificial Sequence
  Synthetic oligonucleotide
gtcggaactcatggtcgcaaggatcccact

SEQ ID NO: 500977 - DNA, 30 bp, Artificial Sequence
  Synthetic oligonucleotide
aaagattgaagcagagtcttggatcccact

SEQ ID NO: 500978 - DNA, 30 bp, Artificial Sequence
  Synthetic oligonucleotide
tcagatacgctacgtcgcgcgagtcccact

SEQ ID NO: 500979 - DNA, 30 bp, Artificial Sequence
  Synthetic oligonucleotide
taatgtggggcctcatcataggttcccact

SEQ ID NO: 500980 - DNA, 30 bp, Artificial Sequence
  Synthetic oligonucleotide
ggaatatcctgcgagtggcaacaagccact

SEQ ID NO: 500981 - DNA, 30 bp, Artificial Sequence
  Synthetic oligonucleotide
gcccgtttgggcacatgcgggtcggccact

SEQ ID NO: 500982 - DNA, 30 bp, Artificial Sequence
  Synthetic oligonucleotide
cgcgtcctagctcttcgagacagggccact

SEQ ID NO: 500983 - DNA, 30 bp, Artificial Sequence
  Synthetic oligonucleotide
gggatacctagattttaccctaaatccact

SEQ ID NO: 500984 - DNA, 30 bp, Artificial Sequence
  Synthetic oligonucleotide
agctttaccatcgtgtgtatcgtatccact

SEQ ID NO: 500985 - DNA, 30 bp, Artificial Sequence
  Synthetic oligonucleotide
ttttttaagccacggccatcacgttccact

SEQ ID NO: 500986 - DNA, 30 bp, Artificial Sequence
  Synthetic oligonucleotide
gcaggttgtcgtgtagatgcactttccact

SEQ ID NO: 500987 - DNA, 30 bp, Artificial Sequence
  Synthetic oligonucleotide
tgtggagattagaacccacctggaagcact

SEQ ID NO: 500988 - DNA, 30 bp, Artificial Sequence
  Synthetic oligonucleotide
atagggtcttaagtgcgaaccaggagcact

SEQ ID NO: 500989 - DNA, 30 bp, Artificial Sequence
  Synthetic oligonucleotide
cacgcgcatcgtgtttcacggtgtagcact

SEQ ID NO: 500990 - DNA, 30 bp, Artificial Sequence
  Synthetic oligonucleotide
gacatcttataaaccggtttttgtagcact

SEQ ID NO: 500991 - DNA, 30 bp, Artificial Sequence
  Synthetic oligonucleotide
tttttggtcttcccaacaattcaacgcact

SEQ ID NO: 500992 - DNA, 30 bp, Artificial Sequence
  Synthetic oligonucleotide
agtattacacgtggctccctggcacgcact

SEQ ID NO: 500993 - DNA, 30 bp, Artificial Sequence
  Synthetic oligonucleotide
gtgctctaaaagtacaaggcacgacgcact

SEQ ID NO: 500994 - DNA, 30 bp, Artificial Sequence
  Synthetic oligonucleotide
ccctgaagcatggtcgagcatcgacgcact

SEQ ID NO: 500995 - DNA, 30 bp, Artificial Sequence
  Synthetic oligonucleotide
ggatagaaaaactcgtgtggaatacgcact

SEQ ID NO: 500996 - DNA, 30 bp, Artificial Sequence
  Synthetic oligonucleotide
aaggagatcgctcatgtggatcgccgcact

SEQ ID NO: 500997 - DNA, 30 bp, Artificial Sequence
  Synthetic oligonucleotide
ctcaatacgcggctgtaagacatccgcact

SEQ ID NO: 500998 - DNA, 30 bp, Artificial Sequence
  Synthetic oligonucleotide
ctttaggaattttttttaagggggcgcact

SEQ ID NO: 500999 - DNA, 30 bp, Artificial Sequence
  Synthetic oligonucleotide
tcgcctaggtatggtcctgtgcaaggcact

SEQ ID NO: 501000 - DNA, 30 bp, Artificial Sequence
  Synthetic oligonucleotide
aacgtcttacggtaaccatcgggaggcact

SEQ ID NO: 501001 - DNA, 30 bp, Artificial Sequence
  Synthetic oligonucleotide
atcttgacgtacagtaacggatagggcact

SEQ ID NO: 501002 - DNA, 30 bp, Artificial Sequence
  Synthetic oligonucleotide
ataatcagagtacgggatgctaggggcact

SEQ ID NO: 501003 - DNA, 30 bp, Artificial Sequence
  Synthetic oligonucleotide
ggaaaagtcgggaaccgcttttttggcact

SEQ ID NO: 501004 - DNA, 30 bp, Artificial Sequence
  Synthetic oligonucleotide
tgacaggagtccaaaaccgccaaatgcact

SEQ ID NO: 501005 - DNA, 30 bp, Artificial Sequence
  Synthetic oligonucleotide
aaaaagtcagtgcagtacgtagcatgcact

SEQ ID NO: 501006 - DNA, 30 bp, Artificial Sequence
  Synthetic oligonucleotide
ctcattcattgggttgagtcttgatgcact

SEQ ID NO: 501007 - DNA, 30 bp, Artificial Sequence
  Synthetic oligonucleotide
aaaccctacagctaggcaccagtctgcact

SEQ ID NO: 501008 - DNA, 30 bp, Artificial Sequence
  Synthetic oligonucleotide
cgacggcatgtccccgcccttgcgtgcact

SEQ ID NO: 501009 - DNA, 30 bp, Artificial Sequence
  Synthetic oligonucleotide
gctgtttgcacaaagcagagtctgtgcact

SEQ ID NO: 501010 - DNA, 30 bp, Artificial Sequence
  Synthetic oligonucleotide
agaatcgtaaatttctactgtacttgcact

SEQ ID NO: 501011 - DNA, 30 bp, Artificial Sequence
  Synthetic oligonucleotide
ttctagttctttcccggcagtacaatcact

SEQ ID NO: 501012 - DNA, 29 bp, Artificial Sequence
  Synthetic oligonucleotide
gagcgagcaccggaatccgcaccatcact

SEQ ID NO: 501013 - DNA, 30 bp, Artificial Sequence
  Synthetic oligonucleotide
tctttaatatggtaagcaacaagcatcact

SEQ ID NO: 501014 - DNA, 30 bp, Artificial Sequence
  Synthetic oligonucleotide
aagcgtctagcgagtaaggattatatcact

SEQ ID NO: 501015 - DNA, 27 bp, Artificial Sequence
  Synthetic oligonucleotide
tgttgatttggactgccgtaactcact

SEQ ID NO: 501016 - DNA, 30 bp, Artificial Sequence
  Synthetic oligonucleotide
tgagcccgcaagaatcgtatagcactcact

SEQ ID NO: 501017 - DNA, 30 bp, Artificial Sequence
  Synthetic oligonucleotide
aatatggtgacggctctgcgtagactcact

SEQ ID NO: 501018 - DNA, 30 bp, Artificial Sequence
  Synthetic oligonucleotide
cccgattcgctgagaagtaatctactcact

SEQ ID NO: 501019 - DNA, 30 bp, Artificial Sequence
  Synthetic oligonucleotide
tactaatttatacaaacctaagacctcact

SEQ ID NO: 501020 - DNA, 30 bp, Artificial Sequence
  Synthetic oligonucleotide
tgaacatttcgaactcagtcgcagctcact

SEQ ID NO: 501021 - DNA, 30 bp, Artificial Sequence
  Synthetic oligonucleotide
tctatgacgcatagaattctcactctcact

SEQ ID NO: 501022 - DNA, 29 bp, Artificial Sequence
  Synthetic oligonucleotide
accttcattgcttacgaagttttctcact

SEQ ID NO: 501023 - DNA, 30 bp, Artificial Sequence
  Synthetic oligonucleotide
aatatataccaggatatacggagagtcact

SEQ ID NO: 501024 - DNA, 30 bp, Artificial Sequence
  Synthetic oligonucleotide
agtaacgccttgaagggactatgagtcact

SEQ ID NO: 501025 - DNA, 30 bp, Artificial Sequence
  Synthetic oligonucleotide
cgtccggcctggtatgaggccccggtcact

SEQ ID NO: 501026 - DNA, 30 bp, Artificial Sequence
  Synthetic oligonucleotide
gcagttagtttgatcgcaggcagggtcact

SEQ ID NO: 501027 - DNA, 30 bp, Artificial Sequence
  Synthetic oligonucleotide
ttctgtgggtttccattgctgcgggtcact

SEQ ID NO: 501028 - DNA, 30 bp, Artificial Sequence
  Synthetic oligonucleotide
caggaatgaatctatagtcaaagattcact

SEQ ID NO: 501029 - DNA, 30 bp, Artificial Sequence
  Synthetic oligonucleotide
aatccacgtacgcaagaatcatgcttcact

SEQ ID NO: 501030 - DNA, 30 bp, Artificial Sequence
  Synthetic oligonucleotide
tatctactccatcattcgaattgcttcact

SEQ ID NO: 501031 - DNA, 30 bp, Artificial Sequence
  Synthetic oligonucleotide
ccgtatgcatttgtgcggcccacgttcact

SEQ ID NO: 501032 - DNA, 30 bp, Artificial Sequence
  Synthetic oligonucleotide
ttaagtcgtggaactttcgatgttttcact

SEQ ID NO: 501033 - DNA, 30 bp, Artificial Sequence
  Synthetic oligonucleotide
agaattaggggactatagacgcaaaagact

SEQ ID NO: 501034 - DNA, 30 bp, Artificial Sequence
  Synthetic oligonucleotide
ttcctccgtgatcggactcgagcaaagact

SEQ ID NO: 501035 - DNA, 30 bp, Artificial Sequence
  Synthetic oligonucleotide
atcgtcagggatctcagtcagctaaagact

SEQ ID NO: 501036 - DNA, 30 bp, Artificial Sequence
  Synthetic oligonucleotide
gatcttatctatagtcgtggtatcaagact

SEQ ID NO: 501037 - DNA, 30 bp, Artificial Sequence
  Synthetic oligonucleotide
gtatatcaatgatccctatattgtaagact

SEQ ID NO: 501038 - DNA, 30 bp, Artificial Sequence
  Synthetic oligonucleotide
cggcatgttgtgcgcagagctgaacagact

SEQ ID NO: 501039 - DNA, 30 bp, Artificial Sequence
  Synthetic oligonucleotide
aatatatttcggaaacgtagatgccagact

SEQ ID NO: 501040 - DNA, 30 bp, Artificial Sequence
  Synthetic oligonucleotide
aaataattttgtaaggtctatgtgcagact

SEQ ID NO: 501041 - DNA, 30 bp, Artificial Sequence
  Synthetic oligonucleotide
taggtttcatcaaagtttaatcttcagact

SEQ ID NO: 501042 - DNA, 30 bp, Artificial Sequence
  Synthetic oligonucleotide
tagtctaattcagcgcggccggtagagact

SEQ ID NO: 501043 - DNA, 30 bp, Artificial Sequence
  Synthetic oligonucleotide
attgtcttattaacagcctggtgcgagact

SEQ ID NO: 501044 - DNA, 30 bp, Artificial Sequence
  Synthetic oligonucleotide
aatgcgcatagcatgacagcagcggagact

SEQ ID NO: 501045 - DNA, 30 bp, Artificial Sequence
  Synthetic oligonucleotide
gacattgtcagttatatacattctgagact

SEQ ID NO: 501046 - DNA, 30 bp, Artificial Sequence
  Synthetic oligonucleotide
tgggacacggctccaacgagaagtgagact

SEQ ID NO: 501047 - DNA, 30 bp, Artificial Sequence
  Synthetic oligonucleotide
ttgttggatagtgcagcggtgtgatagact

SEQ ID NO: 501048 - DNA, 30 bp, Artificial Sequence
  Synthetic oligonucleotide
ctagtcttgccgatgtggaccgtatagact

SEQ ID NO: 501049 - DNA, 30 bp, Artificial Sequence
  Synthetic oligonucleotide
ccgggtttttcatgcgaggatttatagact

SEQ ID NO: 501050 - DNA, 30 bp, Artificial Sequence
  Synthetic oligonucleotide
ggtttcattggtattccaagccgctagact

SEQ ID NO: 501051 - DNA, 30 bp, Artificial Sequence
  Synthetic oligonucleotide
atggtacttcggccacggcccaagtagact

SEQ ID NO: 501052 - DNA, 30 bp, Artificial Sequence
  Synthetic oligonucleotide
gcagttgacgcatgtctaacagagtagact

SEQ ID NO: 501053 - DNA, 30 bp, Artificial Sequence
  Synthetic oligonucleotide
gtcttagcgagtagttctgttgattagact

SEQ ID NO: 501054 - DNA, 30 bp, Artificial Sequence
  Synthetic oligonucleotide
gcggcaaactcagtcgtttgtgtttagact

SEQ ID NO: 501055 - DNA, 30 bp, Artificial Sequence
  Synthetic oligonucleotide
gtttctaactaggtattgaatttttagact

SEQ ID NO: 501056 - DNA, 30 bp, Artificial Sequence
  Synthetic oligonucleotide
acgctctttcgtttatattgcatcacgact

SEQ ID NO: 501057 - DNA, 30 bp, Artificial Sequence
  Synthetic oligonucleotide
gattccgcgtagttgttatacaagacgact

SEQ ID NO: 501058 - DNA, 30 bp, Artificial Sequence
  Synthetic oligonucleotide
ggggctgttacgaagcgtgcgtagacgact

SEQ ID NO: 501059 - DNA, 31 bp, Artificial Sequence
  Synthetic oligonucleotide
aataagattcgacgccgcaggttatccgact

SEQ ID NO: 501060 - DNA, 30 bp, Artificial Sequence
  Synthetic oligonucleotide
acgaattcatagattcgtttgcaagcgact

SEQ ID NO: 501061 - DNA, 30 bp, Artificial Sequence
  Synthetic oligonucleotide
gcccgtccaagatgtacataccccgcgact

SEQ ID NO: 501062 - DNA, 30 bp, Artificial Sequence
  Synthetic oligonucleotide
cctccgacatcagacgtgtggcgggcgact

SEQ ID NO: 501063 - DNA, 30 bp, Artificial Sequence
  Synthetic oligonucleotide
gtatgtcccttagggattttgcctgcgact

SEQ ID NO: 501064 - DNA, 30 bp, Artificial Sequence
  Synthetic oligonucleotide
ggcggagcgggcgtgcaattttctgcgact

SEQ ID NO: 501065 - DNA, 30 bp, Artificial Sequence
  Synthetic oligonucleotide
aggccttctacgcatactaggtagtcgact

SEQ ID NO: 501066 - DNA, 30 bp, Artificial Sequence
  Synthetic oligonucleotide
cgtgcaagcgaatcgtgtaccgggtcgact

SEQ ID NO: 501067 - DNA, 30 bp, Artificial Sequence
  Synthetic oligonucleotide
gagtatgtagaaggaagaatccaaaggact

SEQ ID NO: 501068 - DNA, 30 bp, Artificial Sequence
  Synthetic oligonucleotide
ggtctgtttaaggccgctatagcaaggact

SEQ ID NO: 501069 - DNA, 30 bp, Artificial Sequence
  Synthetic oligonucleotide
attcctcctggcaagggatttggcaggact

SEQ ID NO: 501070 - DNA, 30 bp, Artificial Sequence
  Synthetic oligonucleotide
ttcctcgcgtttggaacattctcgaggact

SEQ ID NO: 501071 - DNA, 30 bp, Artificial Sequence
  Synthetic oligonucleotide
tgcctacagctagcgaagacctggaggact

SEQ ID NO: 501072 - DNA, 30 bp, Artificial Sequence
  Synthetic oligonucleotide
tttgctttaggcacaggtgtgcgacggact

SEQ ID NO: 501073 - DNA, 30 bp, Artificial Sequence
  Synthetic oligonucleotide
tatgttctccctaccagatttgcccggact

SEQ ID NO: 501074 - DNA, 30 bp, Artificial Sequence
  Synthetic oligonucleotide
gcgacacggacacgacttaccaggcggact

SEQ ID NO: 501075 - DNA, 30 bp, Artificial Sequence
  Synthetic oligonucleotide
atctattgcggcgataagtcactgcggact

SEQ ID NO: 501076 - DNA, 30 bp, Artificial Sequence
  Synthetic oligonucleotide
tcaatttatcctcctctcaaacccgggact

SEQ ID NO: 501077 - DNA, 30 bp, Artificial Sequence
  Synthetic oligonucleotide
agtaagtcattccggagggctcgcgggact

SEQ ID NO: 501078 - DNA, 30 bp, Artificial Sequence
  Synthetic oligonucleotide
ttaatcgcctgggatgaaccctaggggact

SEQ ID NO: 501079 - DNA, 30 bp, Artificial Sequence
  Synthetic oligonucleotide
gagatacgcgtgagtccttttttggggact

SEQ ID NO: 501080 - DNA, 30 bp, Artificial Sequence
  Synthetic oligonucleotide
actgatcggcgcccacaaatgaatgggact

SEQ ID NO: 501081 - DNA, 30 bp, Artificial Sequence
  Synthetic oligonucleotide
tttggtgcctcgtaaaagagatactggact

SEQ ID NO: 501082 - DNA, 30 bp, Artificial Sequence
  Synthetic oligonucleotide
cactagttcacgttcggacgcagttggact

SEQ ID NO: 501083 - DNA, 30 bp, Artificial Sequence
  Synthetic oligonucleotide
ctactgagggtacggatgcagcacatgact

SEQ ID NO: 501084 - DNA, 30 bp, Artificial Sequence
  Synthetic oligonucleotide
gtgtatatcaaatatgaacgcgtcatgact

SEQ ID NO: 501085 - DNA, 30 bp, Artificial Sequence
  Synthetic oligonucleotide
agtcgcgccacttcacactagacgatgact

SEQ ID NO: 501086 - DNA, 30 bp, Artificial Sequence
  Synthetic oligonucleotide
ggcgggaccccgggtctctaggcgatgact

SEQ ID NO: 501087 - DNA, 30 bp, Artificial Sequence
  Synthetic oligonucleotide
acctgttatagctccgggggtcggatgact

SEQ ID NO: 501088 - DNA, 30 bp, Artificial Sequence
  Synthetic oligonucleotide
taaagaatgttttggatagtatggatgact

SEQ ID NO: 501089 - DNA, 30 bp, Artificial Sequence
  Synthetic oligonucleotide
caaatgagggttttaaacaaaggtatgact

SEQ ID NO: 501090 - DNA, 30 bp, Artificial Sequence
  Synthetic oligonucleotide
cccacaggggaataaatagattttatgact

SEQ ID NO: 501091 - DNA, 30 bp, Artificial Sequence
  Synthetic oligonucleotide
catgtaggttcgctacaacataacctgact

SEQ ID NO: 501092 - DNA, 30 bp, Artificial Sequence
  Synthetic oligonucleotide
cagccaccgtcagggccccaaaggctgact

SEQ ID NO: 501093 - DNA, 30 bp, Artificial Sequence
  Synthetic oligonucleotide
ccttagctgtatctaactttcgggctgact

SEQ ID NO: 501094 - DNA, 30 bp, Artificial Sequence
  Synthetic oligonucleotide
tcgggagattgcgcctctcgtatgctgact

SEQ ID NO: 501095 - DNA, 30 bp, Artificial Sequence
  Synthetic oligonucleotide
tgacacaggcccatgaccaatattctgact

SEQ ID NO: 501096 - DNA, 30 bp, Artificial Sequence
  Synthetic oligonucleotide
ttcaatccctcgcagtgggctattctgact

SEQ ID NO: 501097 - DNA, 30 bp, Artificial Sequence
  Synthetic oligonucleotide
cgccagtattgctctgtcgtggaggtgact

SEQ ID NO: 501098 - DNA, 30 bp, Artificial Sequence
  Synthetic oligonucleotide
agtaaggggttctaataatattgggtgact

SEQ ID NO: 501099 - DNA, 30 bp, Artificial Sequence
  Synthetic oligonucleotide
aagtcggtgaacttatcatagtaattgact

SEQ ID NO: 501100 - DNA, 30 bp, Artificial Sequence
  Synthetic oligonucleotide
gttcagatgcatgttatttgtaccttgact

SEQ ID NO: 501101 - DNA, 30 bp, Artificial Sequence
  Synthetic oligonucleotide
aaccagcgaacgcgtagtaccatcttgact

SEQ ID NO: 501102 - DNA, 30 bp, Artificial Sequence
  Synthetic oligonucleotide
tctaagcgttgcggaaggaagctcttgact

SEQ ID NO: 501103 - DNA, 30 bp, Artificial Sequence
  Synthetic oligonucleotide
gacaagaatcctcgcagctcatcgttgact

SEQ ID NO: 501104 - DNA, 30 bp, Artificial Sequence
  Synthetic oligonucleotide
tggatacacgagaccccacgttggttgact

SEQ ID NO: 501105 - DNA, 30 bp, Artificial Sequence
  Synthetic oligonucleotide
acactcgctttaagtactcgacgtttgact

SEQ ID NO: 501106 - DNA, 30 bp, Artificial Sequence
  Synthetic oligonucleotide
atatgtcagttggaagagaagattttgact

SEQ ID NO: 501107 - DNA, 30 bp, Artificial Sequence
  Synthetic oligonucleotide
acttattcactgcaagcttaatttttgact

SEQ ID NO: 501108 - DNA, 30 bp, Artificial Sequence
  Synthetic oligonucleotide
cctgaatggcgtcaaagagactttttgact

SEQ ID NO: 501109 - DNA, 30 bp, Artificial Sequence
  Synthetic oligonucleotide
aacaggcttttggtatttaacgcaaatact

SEQ ID NO: 501110 - DNA, 30 bp, Artificial Sequence
  Synthetic oligonucleotide
gcggcagggtttatatgcttcataaatact

SEQ ID NO: 501111 - DNA, 30 bp, Artificial Sequence
  Synthetic oligonucleotide
cagtgtgacgttgttcctaaagtaaatact

SEQ ID NO: 501112 - DNA, 30 bp, Artificial Sequence
  Synthetic oligonucleotide
tgtgatccctttgtccctggattaaatact

SEQ ID NO: 501113 - DNA, 30 bp, Artificial Sequence
  Synthetic oligonucleotide
gttgtataagtcacatcggtacccaatact

SEQ ID NO: 501114 - DNA, 30 bp, Artificial Sequence
  Synthetic oligonucleotide
aagtcatttcctatttctgtaatcaatact

SEQ ID NO: 501115 - DNA, 30 bp, Artificial Sequence
  Synthetic oligonucleotide
ccgccttattaagctaaggagcagaatact

SEQ ID NO: 501116 - DNA, 30 bp, Artificial Sequence
  Synthetic oligonucleotide
cattccgtaatgtcttcctcattgaatact

SEQ ID NO: 501117 - DNA, 29 bp, Artificial Sequence
  Synthetic oligonucleotide
cgtaccgtcttaacggagcaaataatact

SEQ ID NO: 501118 - DNA, 30 bp, Artificial Sequence
  Synthetic oligonucleotide
gtacgttaggggtgtcagaacgcacatact

SEQ ID NO: 501119 - DNA, 30 bp, Artificial Sequence
  Synthetic oligonucleotide
cttcttcttgagcagagtaccatccatact

SEQ ID NO: 501120 - DNA, 30 bp, Artificial Sequence
  Synthetic oligonucleotide
ggacgttatcggtacgtactcgagcatact

SEQ ID NO: 501121 - DNA, 30 bp, Artificial Sequence
  Synthetic oligonucleotide
accagtcccttcgtctctcgttagcatact

SEQ ID NO: 501122 - DNA, 30 bp, Artificial Sequence
  Synthetic oligonucleotide
aattggccatccgcatcagcttatcatact

SEQ ID NO: 501123 - DNA, 30 bp, Artificial Sequence
  Synthetic oligonucleotide
accctcgtcggcagactgtcacccgatact

SEQ ID NO: 501124 - DNA, 30 bp, Artificial Sequence
  Synthetic oligonucleotide
gttacaagaccaataaaccagggggatact

SEQ ID NO: 501125 - DNA, 30 bp, Artificial Sequence
  Synthetic oligonucleotide
gtttactggaattctagactatgggatact

SEQ ID NO: 501126 - DNA, 30 bp, Artificial Sequence
  Synthetic oligonucleotide
tcacaaaccgtcgagatacgcgatgatact

SEQ ID NO: 501127 - DNA, 30 bp, Artificial Sequence
  Synthetic oligonucleotide
ttcagattctaagccttgtagattgatact

SEQ ID NO: 501128 - DNA, 30 bp, Artificial Sequence
  Synthetic oligonucleotide
ggctctagactcatcggcggatttgatact

SEQ ID NO: 501129 - DNA, 30 bp, Artificial Sequence
  Synthetic oligonucleotide
ccgtccagatcgcagcgctaatcatatact

SEQ ID NO: 501130 - DNA, 30 bp, Artificial Sequence
  Synthetic oligonucleotide
ggccggggcatatctggtttattatatact

SEQ ID NO: 501131 - DNA, 30 bp, Artificial Sequence
  Synthetic oligonucleotide
atcccaatcacgtgccggtctaactatact

SEQ ID NO: 501132 - DNA, 30 bp, Artificial Sequence
  Synthetic oligonucleotide
cgtttagacagtagttccttgggctatact

SEQ ID NO: 501133 - DNA, 30 bp, Artificial Sequence
  Synthetic oligonucleotide
aggaggagtgaggggaatctgaagtatact

SEQ ID NO: 501134 - DNA, 30 bp, Artificial Sequence
  Synthetic oligonucleotide
cctgcaggcattgtttaataggcgtatact

SEQ ID NO: 501135 - DNA, 30 bp, Artificial Sequence
  Synthetic oligonucleotide
gtctatgttctgatatcgtttctgtatact

SEQ ID NO: 501136 - DNA, 30 bp, Artificial Sequence
  Synthetic oligonucleotide
cagcagtctctcggcgatggcgtttatact

SEQ ID NO: 501137 - DNA, 30 bp, Artificial Sequence
  Synthetic oligonucleotide
ggagtgtttgacacaatgggaacaactact

SEQ ID NO: 501138 - DNA, 30 bp, Artificial Sequence
  Synthetic oligonucleotide
attttgtaccgcttgtgatgtaccactact

SEQ ID NO: 501139 - DNA, 30 bp, Artificial Sequence
  Synthetic oligonucleotide
gaaagagcgtttatctgatagcctactact

SEQ ID NO: 501140 - DNA, 30 bp, Artificial Sequence
  Synthetic oligonucleotide
ggataggtcttaatggtataggttactact

SEQ ID NO: 501141 - DNA, 30 bp, Artificial Sequence
  Synthetic oligonucleotide
cagtcgctcattgttggtcgcgagcctact

SEQ ID NO: 501142 - DNA, 30 bp, Artificial Sequence
  Synthetic oligonucleotide
aagaggcgtactaattgatgcgcgcctact

SEQ ID NO: 501143 - DNA, 30 bp, Artificial Sequence
  Synthetic oligonucleotide
accagtacgccccttcgtggcggagctact

SEQ ID NO: 501144 - DNA, 30 bp, Artificial Sequence
  Synthetic oligonucleotide
aagcacacctctgaataagaggaggctact

SEQ ID NO: 501145 - DNA, 30 bp, Artificial Sequence
  Synthetic oligonucleotide
atccacccgtcaaacctacacggggctact

SEQ ID NO: 501146 - DNA, 30 bp, Artificial Sequence
  Synthetic oligonucleotide
gggatacctggggttatcttcggggctact

SEQ ID NO: 501147 - DNA, 30 bp, Artificial Sequence
  Synthetic oligonucleotide
attcagatggagcagagataatttgctact

SEQ ID NO: 501148 - DNA, 30 bp, Artificial Sequence
  Synthetic oligonucleotide
actaattgatttttacgtacaacatctact

SEQ ID NO: 501149 - DNA, 30 bp, Artificial Sequence
  Synthetic oligonucleotide
ttatggatccggagcttgatcacatctact

SEQ ID NO: 501150 - DNA, 30 bp, Artificial Sequence
  Synthetic oligonucleotide
tatagtaggccgtggccagcgccctctact

SEQ ID NO: 501151 - DNA, 30 bp, Artificial Sequence
  Synthetic oligonucleotide
ctttatggtagtaccaagcttaagtctact

SEQ ID NO: 501152 - DNA, 30 bp, Artificial Sequence
  Synthetic oligonucleotide
acagatttgtttactttgaataggtctact

SEQ ID NO: 501153 - DNA, 30 bp, Artificial Sequence
  Synthetic oligonucleotide
tgggacacgtggtatagccgcctaagtact

SEQ ID NO: 501154 - DNA, 30 bp, Artificial Sequence
  Synthetic oligonucleotide
tactcattcatgattcgtggttagagtact

SEQ ID NO: 501155 - DNA, 30 bp, Artificial Sequence
  Synthetic oligonucleotide
agctcctcctgtgccttaacgacgagtact

SEQ ID NO: 501156 - DNA, 30 bp, Artificial Sequence
  Synthetic oligonucleotide
tatacatattgctgtaatatgtcgagtact

SEQ ID NO: 501157 - DNA, 30 bp, Artificial Sequence
  Synthetic oligonucleotide
ttaagcactaaagcaggcttttctagtact

SEQ ID NO: 501158 - DNA, 30 bp, Artificial Sequence
  Synthetic oligonucleotide
ggttagattatttagtgaacaggacgtact

SEQ ID NO: 501159 - DNA, 30 bp, Artificial Sequence
  Synthetic oligonucleotide
gaaccacatacgacaatgttcgtacgtact

SEQ ID NO: 501160 - DNA, 30 bp, Artificial Sequence
  Synthetic oligonucleotide
gcggcatcggggcggtcgcagaaccgtact

SEQ ID NO: 501161 - DNA, 30 bp, Artificial Sequence
  Synthetic oligonucleotide
gcaatgattcgatatgtactcatccgtact

SEQ ID NO: 501162 - DNA, 30 bp, Artificial Sequence
  Synthetic oligonucleotide
gcggaccgcattgcatgccaggtccgtact

SEQ ID NO: 501163 - DNA, 30 bp, Artificial Sequence
  Synthetic oligonucleotide
acaagtatttcttctgggaaggatcgtact

SEQ ID NO: 501164 - DNA, 30 bp, Artificial Sequence
  Synthetic oligonucleotide
ttcggtgaagagccactcggatcaggtact

SEQ ID NO: 501165 - DNA, 30 bp, Artificial Sequence
  Synthetic oligonucleotide
cttccagggtaagtaagcccctcaggtact

SEQ ID NO: 501166 - DNA, 27 bp, Artificial Sequence
  Synthetic oligonucleotide
accagtactgctatcagatgaggtact

SEQ ID NO: 501167 - DNA, 30 bp, Artificial Sequence
  Synthetic oligonucleotide
accagctgaacgaggcttcatcggggtact

SEQ ID NO: 501168 - DNA, 30 bp, Artificial Sequence
  Synthetic oligonucleotide
cacattcggctggcagtggttatgggtact

SEQ ID NO: 501169 - DNA, 30 bp, Artificial Sequence
  Synthetic oligonucleotide
tgtgtcctcgtgttcgctttgattggtact

SEQ ID NO: 501170 - DNA, 30 bp, Artificial Sequence
  Synthetic oligonucleotide
ttaaagagccgagaagccggatgatgtact

SEQ ID NO: 501171 - DNA, 30 bp, Artificial Sequence
  Synthetic oligonucleotide
gtaactaacgcttgctaatttgtatgtact

SEQ ID NO: 501172 - DNA, 30 bp, Artificial Sequence
  Synthetic oligonucleotide
tgccgggtgttgccgctttagaactgtact

SEQ ID NO: 501173 - DNA, 30 bp, Artificial Sequence
  Synthetic oligonucleotide
atatacttattcaataataagtcgtgtact

SEQ ID NO: 501174 - DNA, 30 bp, Artificial Sequence
  Synthetic oligonucleotide
attgtatgattaccgcattcatggtgtact

SEQ ID NO: 501175 - DNA, 30 bp, Artificial Sequence
  Synthetic oligonucleotide
cattcccacgaccgaagaaggacttgtact

SEQ ID NO: 501176 - DNA, 30 bp, Artificial Sequence
  Synthetic oligonucleotide
gatgcatgactgactcggcgcccaattact

SEQ ID NO: 501177 - DNA, 30 bp, Artificial Sequence
  Synthetic oligonucleotide
tgccgggatctaccacgatcccgaattact

SEQ ID NO: 501178 - DNA, 30 bp, Artificial Sequence
  Synthetic oligonucleotide
ggccgaggagggtagcatgttggaattact

SEQ ID NO: 501179 - DNA, 30 bp, Artificial Sequence
  Synthetic oligonucleotide
gtactgtgctaatcgctgttgtccattact

SEQ ID NO: 501180 - DNA, 30 bp, Artificial Sequence
  Synthetic oligonucleotide
tacatactaagtcccagtcttagcattact

SEQ ID NO: 501181 - DNA, 30 bp, Artificial Sequence
  Synthetic oligonucleotide
gggcgctcttcctgcggggtccggattact

SEQ ID NO: 501182 - DNA, 30 bp, Artificial Sequence
  Synthetic oligonucleotide
cgatccctcctgtcggagcggtatattact

SEQ ID NO: 501183 - DNA, 30 bp, Artificial Sequence
  Synthetic oligonucleotide
tgtgggcgcttaggcaaccattctattact

SEQ ID NO: 501184 - DNA, 30 bp, Artificial Sequence
  Synthetic oligonucleotide
agggcggcagcacgtagcttagaccttact

SEQ ID NO: 501185 - DNA, 30 bp, Artificial Sequence
  Synthetic oligonucleotide
aagaatggaaaattggtatcagggcttact

SEQ ID NO: 501186 - DNA, 30 bp, Artificial Sequence
  Synthetic oligonucleotide
gactaagtaagccactaaacctggcttact

SEQ ID NO: 501187 - DNA, 30 bp, Artificial Sequence
  Synthetic oligonucleotide
aatgtgcgtaacgagattatacctcttact

SEQ ID NO: 501188 - DNA, 30 bp, Artificial Sequence
  Synthetic oligonucleotide
ctgacatgagaaagaacgcaacaagttact

SEQ ID NO: 501189 - DNA, 30 bp, Artificial Sequence
  Synthetic oligonucleotide
tccaagggagcagtcacaaccacagttact

SEQ ID NO: 501190 - DNA, 30 bp, Artificial Sequence
  Synthetic oligonucleotide
actgtttcgtttcctccaagtgcggttact

SEQ ID NO: 501191 - DNA, 30 bp, Artificial Sequence
  Synthetic oligonucleotide
gctcagagtaatcgctagcttgcggttact

SEQ ID NO: 501192 - DNA, 30 bp, Artificial Sequence
  Synthetic oligonucleotide
ccccaaagggtggtggacatatgggttact

SEQ ID NO: 501193 - DNA, 30 bp, Artificial Sequence
  Synthetic oligonucleotide
atcttagggtctctaataaagcttgttact

SEQ ID NO: 501194 - DNA, 30 bp, Artificial Sequence
  Synthetic oligonucleotide
aagttaatggtccttctaatgtcatttact

SEQ ID NO: 501195 - DNA, 30 bp, Artificial Sequence
  Synthetic oligonucleotide
accggactttcgcagtcagggcgctttact

SEQ ID NO: 501196 - DNA, 30 bp, Artificial Sequence
  Synthetic oligonucleotide
tgcggggacctcctagatttatagtttact

SEQ ID NO: 501197 - DNA, 30 bp, Artificial Sequence
  Synthetic oligonucleotide
gtgtctggggtttatttgatcccgtttact

SEQ ID NO: 501198 - DNA, 30 bp, Artificial Sequence
  Synthetic oligonucleotide
aaattcgggtaatcttacgatatgtttact

SEQ ID NO: 501199 - DNA, 30 bp, Artificial Sequence
  Synthetic oligonucleotide
ttaggcgggcttctacatttttgttttact

SEQ ID NO: 501200 - DNA, 30 bp, Artificial Sequence
  Synthetic oligonucleotide
gtagtggctgcccgcaaggaagtttttact

SEQ ID NO: 501201 - DNA, 30 bp, Artificial Sequence
  Synthetic oligonucleotide
tgaaccagcatagtaacgattagaaaacct

SEQ ID NO: 501202 - DNA, 30 bp, Artificial Sequence
  Synthetic oligonucleotide
gtggctcgtccataaggcagtggcaaacct

SEQ ID NO: 501203 - DNA, 30 bp, Artificial Sequence
  Synthetic oligonucleotide
ccatacagcgacgaagccgctgggaaacct

SEQ ID NO: 501204 - DNA, 30 bp, Artificial Sequence
  Synthetic oligonucleotide
acggttgggattttctagttgtttaaacct

SEQ ID NO: 501205 - DNA, 30 bp, Artificial Sequence
  Synthetic oligonucleotide
gttctagtagtcatgtgccaggaacaacct

SEQ ID NO: 501206 - DNA, 30 bp, Artificial Sequence
  Synthetic oligonucleotide
acaattttccgatgtagtgagtaacaacct

SEQ ID NO: 501207 - DNA, 30 bp, Artificial Sequence
  Synthetic oligonucleotide
tttttaaattgttcgctttagcggcaacct

SEQ ID NO: 501208 - DNA, 30 bp, Artificial Sequence
  Synthetic oligonucleotide
gtagcctctttgattttgtaacttcaacct

SEQ ID NO: 501209 - DNA, 30 bp, Artificial Sequence
  Synthetic oligonucleotide
aactggatagacgtcgtcattaaagaacct

SEQ ID NO: 501210 - DNA, 30 bp, Artificial Sequence
  Synthetic oligonucleotide
gtgaactttttcctacaccgctaggaacct

SEQ ID NO: 501211 - DNA, 30 bp, Artificial Sequence
  Synthetic oligonucleotide
gaactaatttctaagtaataaggggaacct

SEQ ID NO: 501212 - DNA, 30 bp, Artificial Sequence
  Synthetic oligonucleotide
atacgtgaatcgcattttttgcctgaacct

SEQ ID NO: 501213 - DNA, 30 bp, Artificial Sequence
  Synthetic oligonucleotide
actaggggatgacatcaaccaattgaacct

SEQ ID NO: 501214 - DNA, 30 bp, Artificial Sequence
  Synthetic oligonucleotide
aggtgagacgtttacaaaacagttgaacct

SEQ ID NO: 501215 - DNA, 30 bp, Artificial Sequence
  Synthetic oligonucleotide
tcttgttttgctttaccccgtgtataacct

SEQ ID NO: 501216 - DNA, 30 bp, Artificial Sequence
  Synthetic oligonucleotide
cttaatccaaaaacacgcgggctctaacct

SEQ ID NO: 501217 - DNA, 30 bp, Artificial Sequence
  Synthetic oligonucleotide
agagttctattccggattgtagggtaacct

SEQ ID NO: 501218 - DNA, 30 bp, Artificial Sequence
  Synthetic oligonucleotide
gtagcccgtcgctagcgaggacattaacct

SEQ ID NO: 501219 - DNA, 30 bp, Artificial Sequence
  Synthetic oligonucleotide
taaatagtcgggtaggcgagggattaacct

SEQ ID NO: 501220 - DNA, 30 bp, Artificial Sequence
  Synthetic oligonucleotide
ttttacaggctctgttgagtatgttaacct

SEQ ID NO: 501221 - DNA, 30 bp, Artificial Sequence
  Synthetic oligonucleotide
tagttatgttggttagtattatcaacacct

SEQ ID NO: 501222 - DNA, 31 bp, Artificial Sequence
  Synthetic oligonucleotide
atatgtttgcactccaagtatggacacacct

SEQ ID NO: 501223 - DNA, 30 bp, Artificial Sequence
  Synthetic oligonucleotide
cataattgacgagcggccgatgagacacct

SEQ ID NO: 501224 - DNA, 30 bp, Artificial Sequence
  Synthetic oligonucleotide
aggtgctgccggaaaaatttccgcccacct

SEQ ID NO: 501225 - DNA, 30 bp, Artificial Sequence
  Synthetic oligonucleotide
taggtagctacagtgcagattttgccacct

SEQ ID NO: 501226 - DNA, 30 bp, Artificial Sequence
  Synthetic oligonucleotide
gctcagacgtgccttggttggtacgcacct

SEQ ID NO: 501227 - DNA, 30 bp, Artificial Sequence
  Synthetic oligonucleotide
aagggctcctgaaatacagtcaccgcacct

SEQ ID NO: 501228 - DNA, 30 bp, Artificial Sequence
  Synthetic oligonucleotide
gtgcaccgacagcaagtcagactcgcacct

SEQ ID NO: 501229 - DNA, 30 bp, Artificial Sequence
  Synthetic oligonucleotide
ttgaagcagtcagcggccaacaaggcacct

SEQ ID NO: 501230 - DNA, 30 bp, Artificial Sequence
  Synthetic oligonucleotide
gaaaccatttcaagagatattttggcacct

SEQ ID NO: 501231 - DNA, 30 bp, Artificial Sequence
  Synthetic oligonucleotide
agtctcccttttgtgtgtcaatatgcacct

SEQ ID NO: 501232 - DNA, 30 bp, Artificial Sequence
  Synthetic oligonucleotide
ctgcaaggattgctggttataactgcacct

SEQ ID NO: 501233 - DNA, 30 bp, Artificial Sequence
  Synthetic oligonucleotide
cagatggccgtcaacgtggtatgtgcacct

SEQ ID NO: 501234 - DNA, 30 bp, Artificial Sequence
  Synthetic oligonucleotide
gttttttgtggacggcacactcaatcacct

SEQ ID NO: 501235 - DNA, 30 bp, Artificial Sequence
  Synthetic oligonucleotide
cttagaaggagggacccttctcaatcacct

SEQ ID NO: 501236 - DNA, 30 bp, Artificial Sequence
  Synthetic oligonucleotide
ataacgacaggcgagtgaggccactcacct

SEQ ID NO: 501237 - DNA, 26 bp, Artificial Sequence
  Synthetic oligonucleotide
ctccaggctcttggtcggactcacct

SEQ ID NO: 501238 - DNA, 30 bp, Artificial Sequence
  Synthetic oligonucleotide
tagaaaataagcaatcgaacctactcacct

SEQ ID NO: 501239 - DNA, 30 bp, Artificial Sequence
  Synthetic oligonucleotide
aatctgggtcgtcggaggtttgcgtcacct

SEQ ID NO: 501240 - DNA, 30 bp, Artificial Sequence
  Synthetic oligonucleotide
gagtactccgccctgcgtgttgcttcacct

SEQ ID NO: 501241 - DNA, 30 bp, Artificial Sequence
  Synthetic oligonucleotide
ccgcagttgttaatccgcggactttcacct

SEQ ID NO: 501242 - DNA, 30 bp, Artificial Sequence
  Synthetic oligonucleotide
cgcagcacagtgtctgtctgtgtttcacct

SEQ ID NO: 501243 - DNA, 30 bp, Artificial Sequence
  Synthetic oligonucleotide
gaagccctgatgggctctccctcgagacct

SEQ ID NO: 501244 - DNA, 30 bp, Artificial Sequence
  Synthetic oligonucleotide
caatcgctacagaggcaaatgtatagacct

SEQ ID NO: 501245 - DNA, 30 bp, Artificial Sequence
  Synthetic oligonucleotide
ggacaggaccggcagtaaggacgacgacct

SEQ ID NO: 501246 - DNA, 30 bp, Artificial Sequence
  Synthetic oligonucleotide
gggggaaagctagtacgaagtctacgacct

SEQ ID NO: 501247 - DNA, 30 bp, Artificial Sequence
  Synthetic oligonucleotide
aagctcggtcaccgctgcgaataccgacct

SEQ ID NO: 501248 - DNA, 30 bp, Artificial Sequence
  Synthetic oligonucleotide
ggtcttcggattgtgggtcagaatcgacct

SEQ ID NO: 501249 - DNA, 30 bp, Artificial Sequence
  Synthetic oligonucleotide
agtattgctctggtatatggcccaggacct

SEQ ID NO: 501250 - DNA, 30 bp, Artificial Sequence
  Synthetic oligonucleotide
aaattgaacgactgcttgatccgcggacct

SEQ ID NO: 501251 - DNA, 30 bp, Artificial Sequence
  Synthetic oligonucleotide
cacgataaagctaaaaggaacgcgggacct

SEQ ID NO: 501252 - DNA, 30 bp, Artificial Sequence
  Synthetic oligonucleotide
ggatatggttttgggaaatcgttgggacct

SEQ ID NO: 501253 - DNA, 30 bp, Artificial Sequence
  Synthetic oligonucleotide
ctgggaatagggtgagactctgcgtgacct

SEQ ID NO: 501254 - DNA, 30 bp, Artificial Sequence
  Synthetic oligonucleotide
tctatttagcttgggcaaactaattgacct

SEQ ID NO: 501255 - DNA, 30 bp, Artificial Sequence
  Synthetic oligonucleotide
atggatggccccataccctcggcttgacct

SEQ ID NO: 501256 - DNA, 30 bp, Artificial Sequence
  Synthetic oligonucleotide
ttgtcaccgtacgaagtgtgagtttgacct

SEQ ID NO: 501257 - DNA, 30 bp, Artificial Sequence
  Synthetic oligonucleotide
cctctagtaaggctgacagtcgtttgacct

SEQ ID NO: 501258 - DNA, 30 bp, Artificial Sequence
  Synthetic oligonucleotide
gttacctcgcgggcggttaaagccatacct

SEQ ID NO: 501259 - DNA, 30 bp, Artificial Sequence
  Synthetic oligonucleotide
atctcgcttgcgtttttgcaggccatacct

SEQ ID NO: 501260 - DNA, 30 bp, Artificial Sequence
  Synthetic oligonucleotide
cttttacaaagattcgaagttcagatacct

SEQ ID NO: 501261 - DNA, 30 bp, Artificial Sequence
  Synthetic oligonucleotide
tcaacatcttttgcctccgcggtactacct

SEQ ID NO: 501262 - DNA, 30 bp, Artificial Sequence
  Synthetic oligonucleotide
ccggcgcgcttgcaaattcagcggctacct

SEQ ID NO: 501263 - DNA, 30 bp, Artificial Sequence
  Synthetic oligonucleotide
gcgcgtgtgcagcttttgggatccgtacct

SEQ ID NO: 501264 - DNA, 30 bp, Artificial Sequence
  Synthetic oligonucleotide
aagcatagtctctcatgttaaggggtacct

SEQ ID NO: 501265 - DNA, 30 bp, Artificial Sequence
  Synthetic oligonucleotide
tccgctcgggagcagtgtggggtggtacct

SEQ ID NO: 501266 - DNA, 30 bp, Artificial Sequence
  Synthetic oligonucleotide
gaaatgctgcaagatgtgatatatgtacct

SEQ ID NO: 501267 - DNA, 30 bp, Artificial Sequence
  Synthetic oligonucleotide
tgtctatgtattaagtcaagcgctgtacct

SEQ ID NO: 501268 - DNA, 30 bp, Artificial Sequence
  Synthetic oligonucleotide
cctcagctcccaaaagacggacgtgtacct

SEQ ID NO: 501269 - DNA, 30 bp, Artificial Sequence
  Synthetic oligonucleotide
tcattcccatgaggcatagctcaattacct

SEQ ID NO: 501270 - DNA, 30 bp, Artificial Sequence
  Synthetic oligonucleotide
aacaaatcctggtgcatcacattattacct

SEQ ID NO: 501271 - DNA, 30 bp, Artificial Sequence
  Synthetic oligonucleotide
ttgactctggcggtagtgtctcacttacct

SEQ ID NO: 501272 - DNA, 31 bp, Artificial Sequence
  Synthetic oligonucleotide
tgtctttaggtctttatgacacaggttacct

SEQ ID NO: 501273 - DNA, 30 bp, Artificial Sequence
  Synthetic oligonucleotide
tgtggactgtttaaccctgtggctttacct

SEQ ID NO: 501274 - DNA, 31 bp, Artificial Sequence
  Synthetic oligonucleotide
ttgaaaatacccggaaaagcgagcaaaccct

SEQ ID NO: 501275 - DNA, 30 bp, Artificial Sequence
  Synthetic oligonucleotide
gagaggtgaccttattgggtcgcaaaccct

SEQ ID NO: 501276 - DNA, 30 bp, Artificial Sequence
  Synthetic oligonucleotide
gtcctctaatatccccgcacaagaaaccct

SEQ ID NO: 501277 - DNA, 30 bp, Artificial Sequence
  Synthetic oligonucleotide
gaaagctcacaaaattttaacagaaaccct

SEQ ID NO: 501278 - DNA, 30 bp, Artificial Sequence
  Synthetic oligonucleotide
cttgttcgtgtaccgacactttagaaccct

SEQ ID NO: 501279 - DNA, 30 bp, Artificial Sequence
  Synthetic oligonucleotide
ttatctcagtgctcggtcattctgaaccct

SEQ ID NO: 501280 - DNA, 30 bp, Artificial Sequence
  Synthetic oligonucleotide
gtcgcctcgttatagcgaggttctaaccct

SEQ ID NO: 501281 - DNA, 30 bp, Artificial Sequence
  Synthetic oligonucleotide
ggttgttgagggtgtttaacttttaaccct

SEQ ID NO: 501282 - DNA, 30 bp, Artificial Sequence
  Synthetic oligonucleotide
gattccgggtgctagtaaaactatcaccct

SEQ ID NO: 501283 - DNA, 30 bp, Artificial Sequence
  Synthetic oligonucleotide
gaggtcgaggacccatattatcgcgaccct

SEQ ID NO: 501284 - DNA, 30 bp, Artificial Sequence
  Synthetic oligonucleotide
tgtagatgggactccctcgtgctcgaccct

SEQ ID NO: 501285 - DNA, 30 bp, Artificial Sequence
  Synthetic oligonucleotide
tccccatttcccctcatatccctggaccct

SEQ ID NO: 501286 - DNA, 30 bp, Artificial Sequence
  Synthetic oligonucleotide
ttcgccatcgagggatctcaaaatgaccct

SEQ ID NO: 501287 - DNA, 30 bp, Artificial Sequence
  Synthetic oligonucleotide
agaatttactcgctgttgcgttttgaccct

SEQ ID NO: 501288 - DNA, 30 bp, Artificial Sequence
  Synthetic oligonucleotide
caagtactgagactcagcttgatataccct

SEQ ID NO: 501289 - DNA, 30 bp, Artificial Sequence
  Synthetic oligonucleotide
ttctctgtatcgcaacttaagtggacccct

SEQ ID NO: 501290 - DNA, 30 bp, Artificial Sequence
  Synthetic oligonucleotide
gacaaggttagttgggcccctgtaccccct

SEQ ID NO: 501291 - DNA, 30 bp, Artificial Sequence
  Synthetic oligonucleotide
aaataacgctatcctgctcactttccccct

SEQ ID NO: 501292 - DNA, 30 bp, Artificial Sequence
  Synthetic oligonucleotide
actgtaccatggaaagcaaggtcagcccct

SEQ ID NO: 501293 - DNA, 30 bp, Artificial Sequence
  Synthetic oligonucleotide
gccactgcaacaggaaggcttggagcccct

SEQ ID NO: 501294 - DNA, 30 bp, Artificial Sequence
  Synthetic oligonucleotide
caatctacattgagttcctagaacgcccct

SEQ ID NO: 501295 - DNA, 30 bp, Artificial Sequence
  Synthetic oligonucleotide
cctgtcaattcaagtccgatatgatcccct

SEQ ID NO: 501296 - DNA, 30 bp, Artificial Sequence
  Synthetic oligonucleotide
ggaatgggaggggccgccaggctatcccct

SEQ ID NO: 501297 - DNA, 30 bp, Artificial Sequence
  Synthetic oligonucleotide
cagcagctagacagcaccagtcgttcccct

SEQ ID NO: 501298 - DNA, 30 bp, Artificial Sequence
  Synthetic oligonucleotide
gtcgtcaggagtatcggcggtatttcccct

SEQ ID NO: 501299 - DNA, 30 bp, Artificial Sequence
  Synthetic oligonucleotide
gtatagtcggctgggactcctgccagccct

SEQ ID NO: 501300 - DNA, 30 bp, Artificial Sequence
  Synthetic oligonucleotide
ccgacgaatcgtatcacgtttagcagccct

SEQ ID NO: 501301 - DNA, 30 bp, Artificial Sequence
  Synthetic oligonucleotide
ggtatattaattgcttccgcccagagccct

SEQ ID NO: 501302 - DNA, 30 bp, Artificial Sequence
  Synthetic oligonucleotide
cgttcagcactaaaggaacaagagagccct

SEQ ID NO: 501303 - DNA, 30 bp, Artificial Sequence
  Synthetic oligonucleotide
ccaggctactcgcctgtgagacggagccct

SEQ ID NO: 501304 - DNA, 30 bp, Artificial Sequence
  Synthetic oligonucleotide
taacaaggctctcgaagatttgatagccct

SEQ ID NO: 501305 - DNA, 30 bp, Artificial Sequence
  Synthetic oligonucleotide
ttacgtgtgatcgtacgcccagctagccct

SEQ ID NO: 501306 - DNA, 30 bp, Artificial Sequence
  Synthetic oligonucleotide
aattgtgtggcccacatctgggcacgccct

SEQ ID NO: 501307 - DNA, 30 bp, Artificial Sequence
  Synthetic oligonucleotide
ttaggttgcagcagaaacgccgggcgccct

SEQ ID NO: 501308 - DNA, 30 bp, Artificial Sequence
  Synthetic oligonucleotide
agtgtcaaggtgttcgagcacccaggccct

SEQ ID NO: 501309 - DNA, 30 bp, Artificial Sequence
  Synthetic oligonucleotide
tcgccgtaattatttcgccggatcggccct

SEQ ID NO: 501310 - DNA, 30 bp, Artificial Sequence
  Synthetic oligonucleotide
tccagtcttgagtctacccgtgtgggccct

SEQ ID NO: 501311 - DNA, 30 bp, Artificial Sequence
  Synthetic oligonucleotide
gtttttccagcaccaggggttaactgccct

SEQ ID NO: 501312 - DNA, 30 bp, Artificial Sequence
  Synthetic oligonucleotide
gttcgataggcttttatttatccgtgccct

SEQ ID NO: 501313 - DNA, 30 bp, Artificial Sequence
  Synthetic oligonucleotide
cccggggtctgctcgaacttggcgtgccct

SEQ ID NO: 501314 - DNA, 31 bp, Artificial Sequence
  Synthetic oligonucleotide
cccctctcgctttctattcctttggtgccct

SEQ ID NO: 501315 - DNA, 29 bp, Artificial Sequence
  Synthetic oligonucleotide
cccctctcgcttctattcctttgtgccct

SEQ ID NO: 501316 - DNA, 31 bp, Artificial Sequence
  Synthetic oligonucleotide
cccctctcgcttttctattcctttgtgccct

SEQ ID NO: 501317 - DNA, 30 bp, Artificial Sequence
  Synthetic oligonucleotide
cccctctcgttttctattcctttgtgccct

SEQ ID NO: 501318 - DNA, 30 bp, Artificial Sequence
  Synthetic oligonucleotide
cccctctcgctttctcttcctttgtgccct

SEQ ID NO: 501319 - DNA, 30 bp, Artificial Sequence
  Synthetic oligonucleotide
cccgcgagcaagagatctcgatattgccct

SEQ ID NO: 501320 - DNA, 30 bp, Artificial Sequence
  Synthetic oligonucleotide
cccctctcgctttctattcctttttgccct

SEQ ID NO: 501321 - DNA, 30 bp, Artificial Sequence
  Synthetic oligonucleotide
cgtgtcccttaggacctatgggcaatccct

SEQ ID NO: 501322 - DNA, 30 bp, Artificial Sequence
  Synthetic oligonucleotide
aacttcatggcatgctatgccagaatccct

SEQ ID NO: 501323 - DNA, 30 bp, Artificial Sequence
  Synthetic oligonucleotide
gtcgataaaattagacgtacgctaatccct

SEQ ID NO: 501324 - DNA, 30 bp, Artificial Sequence
  Synthetic oligonucleotide
agtgtatatcgttaccgtccattaatccct

SEQ ID NO: 501325 - DNA, 30 bp, Artificial Sequence
  Synthetic oligonucleotide
ttccatgctataaacctccggaacatccct

SEQ ID NO: 501326 - DNA, 30 bp, Artificial Sequence
  Synthetic oligonucleotide
gtattgcctgtcaccaaacgcaccatccct

SEQ ID NO: 501327 - DNA, 30 bp, Artificial Sequence
  Synthetic oligonucleotide
attgattattacgcgatacacagcatccct

SEQ ID NO: 501328 - DNA, 30 bp, Artificial Sequence
  Synthetic oligonucleotide
tactccgccgtatgatggtcgcagatccct

SEQ ID NO: 501329 - DNA, 30 bp, Artificial Sequence
  Synthetic oligonucleotide
atggaattcagttgttggcgcgcgatccct

SEQ ID NO: 501330 - DNA, 30 bp, Artificial Sequence
  Synthetic oligonucleotide
cccaatcgggtgcagagtcagagcctccct

SEQ ID NO: 501331 - DNA, 30 bp, Artificial Sequence
  Synthetic oligonucleotide
cattaaggagcgagaattttctcagtccct

SEQ ID NO: 501332 - DNA, 29 bp, Artificial Sequence
  Synthetic oligonucleotide
cgctcatgggtacttgtccacccgtccct

SEQ ID NO: 501333 - DNA, 30 bp, Artificial Sequence
  Synthetic oligonucleotide
tagaatcgtcaagtgtgccctagggtccct

SEQ ID NO: 501334 - DNA, 30 bp, Artificial Sequence
  Synthetic oligonucleotide
ggcaacgactgtcttagggcctgtgtccct

SEQ ID NO: 501335 - DNA, 30 bp, Artificial Sequence
  Synthetic oligonucleotide
agtagcggcattcgccgcggcgatttccct

SEQ ID NO: 501336 - DNA, 30 bp, Artificial Sequence
  Synthetic oligonucleotide
cgacatatacgcctttctaccagtttccct

SEQ ID NO: 501337 - DNA, 30 bp, Artificial Sequence
  Synthetic oligonucleotide
gtcaggccttgagttgaagactccaagcct

SEQ ID NO: 501338 - DNA, 30 bp, Artificial Sequence
  Synthetic oligonucleotide
tatgggctgcccctcttgacaggcaagcct

SEQ ID NO: 501339 - DNA, 30 bp, Artificial Sequence
  Synthetic oligonucleotide
agcaaagcgtaggggccaggcacgaagcct

SEQ ID NO: 501340 - DNA, 30 bp, Artificial Sequence
  Synthetic oligonucleotide
gtgggcggtaagggggcgtcggggaagcct

SEQ ID NO: 501341 - DNA, 30 bp, Artificial Sequence
  Synthetic oligonucleotide
aaactgtgactgactcgccaacataagcct

SEQ ID NO: 501342 - DNA, 30 bp, Artificial Sequence
  Synthetic oligonucleotide
agaacaatgaccctgtagctggttaagcct

SEQ ID NO: 501343 - DNA, 30 bp, Artificial Sequence
  Synthetic oligonucleotide
acagcaaaggagcctatgggctcacagcct

SEQ ID NO: 501344 - DNA, 30 bp, Artificial Sequence
  Synthetic oligonucleotide
gaattactctcgtatggcccataccagcct

SEQ ID NO: 501345 - DNA, 30 bp, Artificial Sequence
  Synthetic oligonucleotide
aaatacctttgcgagtcgacctcccagcct

SEQ ID NO: 501346 - DNA, 30 bp, Artificial Sequence
  Synthetic oligonucleotide
gggatgatgccactgtggacccagcagcct

SEQ ID NO: 501347 - DNA, 30 bp, Artificial Sequence
  Synthetic oligonucleotide
atgagtctacgtactcatttatagcagcct

SEQ ID NO: 501348 - DNA, 30 bp, Artificial Sequence
  Synthetic oligonucleotide
ataacatctgaactgattccgatgcagcct

SEQ ID NO: 501349 - DNA, 30 bp, Artificial Sequence
  Synthetic oligonucleotide
gtagggttctcttttgtcaaatatcagcct

SEQ ID NO: 501350 - DNA, 30 bp, Artificial Sequence
  Synthetic oligonucleotide
ttcggacaagctggccttatcccagagcct

SEQ ID NO: 501351 - DNA, 30 bp, Artificial Sequence
  Synthetic oligonucleotide
gttttgggggtgtaaacttcgatggagcct

SEQ ID NO: 501352 - DNA, 30 bp, Artificial Sequence
  Synthetic oligonucleotide
gttatacttgcctaaatgtaatatgagcct

SEQ ID NO: 501353 - DNA, 30 bp, Artificial Sequence
  Synthetic oligonucleotide
ttctgtatttacatgtggaatactgagcct

SEQ ID NO: 501354 - DNA, 30 bp, Artificial Sequence
  Synthetic oligonucleotide
gtgtctagattcccagacgccaaatagcct

SEQ ID NO: 501355 - DNA, 30 bp, Artificial Sequence
  Synthetic oligonucleotide
gagtacaaagaccaccccctagggtagcct

SEQ ID NO: 501356 - DNA, 30 bp, Artificial Sequence
  Synthetic oligonucleotide
tgcgaacccgatcttggtgtcatgtagcct

SEQ ID NO: 501357 - DNA, 30 bp, Artificial Sequence
  Synthetic oligonucleotide
gatttactggtcattgggttttattagcct

SEQ ID NO: 501358 - DNA, 30 bp, Artificial Sequence
  Synthetic oligonucleotide
aacaaagaagtctgtaaagatccttagcct

SEQ ID NO: 501359 - DNA, 30 bp, Artificial Sequence
  Synthetic oligonucleotide
tgtggcgccacatgggttcgtagaacgcct

SEQ ID NO: 501360 - DNA, 30 bp, Artificial Sequence
  Synthetic oligonucleotide
atgtcggcgcactctcgcccgttaacgcct

SEQ ID NO: 501361 - DNA, 30 bp, Artificial Sequence
  Synthetic oligonucleotide
ggcaagtgacgccgagcaattcccacgcct

SEQ ID NO: 501362 - DNA, 30 bp, Artificial Sequence
  Synthetic oligonucleotide
gagttaaatactatctgttctgccacgcct

SEQ ID NO: 501363 - DNA, 30 bp, Artificial Sequence
  Synthetic oligonucleotide
gttagtactcactacccgggtacgacgcct

SEQ ID NO: 501364 - DNA, 30 bp, Artificial Sequence
  Synthetic oligonucleotide
gcaaaatcagttatgagatttaatacgcct

SEQ ID NO: 501365 - DNA, 30 bp, Artificial Sequence
  Synthetic oligonucleotide
gcacgcggattgagactgttgtggccgcct

SEQ ID NO: 501366 - DNA, 30 bp, Artificial Sequence
  Synthetic oligonucleotide
ggggtaaagtaggggggccgaggtccgcct

SEQ ID NO: 501367 - DNA, 30 bp, Artificial Sequence
  Synthetic oligonucleotide
gaggggcgaaagggcgtgtgcaaagcgcct

SEQ ID NO: 501368 - DNA, 30 bp, Artificial Sequence
  Synthetic oligonucleotide
accaagcgtttttggtcgacgtaagcgcct

SEQ ID NO: 501369 - DNA, 30 bp, Artificial Sequence
  Synthetic oligonucleotide
atcaacctagcggcaagtacaatagcgcct

SEQ ID NO: 501370 - DNA, 30 bp, Artificial Sequence
  Synthetic oligonucleotide
atatctaaaaacatacgatgtatagcgcct

SEQ ID NO: 501371 - DNA, 30 bp, Artificial Sequence
  Synthetic oligonucleotide
tgtgatctccaattgtctcgtatcgcgcct

SEQ ID NO: 501372 - DNA, 30 bp, Artificial Sequence
  Synthetic oligonucleotide
tgaatcaagttcggcgtgcagcgggcgcct

SEQ ID NO: 501373 - DNA, 30 bp, Artificial Sequence
  Synthetic oligonucleotide
tgccgccggccttattgtgccggctcgcct

SEQ ID NO: 501374 - DNA, 30 bp, Artificial Sequence
  Synthetic oligonucleotide
ggggtctttttgcgtctgcaagtctcgcct

SEQ ID NO: 501375 - DNA, 30 bp, Artificial Sequence
  Synthetic oligonucleotide
aagagcagtagaggccgtcgcacttcgcct

SEQ ID NO: 501376 - DNA, 30 bp, Artificial Sequence
  Synthetic oligonucleotide
ttcgagcgttcacaaaatgatagttcgcct

SEQ ID NO: 501377 - DNA, 30 bp, Artificial Sequence
  Synthetic oligonucleotide
gggaacgttgccggataggcggtaaggcct

SEQ ID NO: 501378 - DNA, 30 bp, Artificial Sequence
  Synthetic oligonucleotide
ccggcataatatatttaggtggtaaggcct

SEQ ID NO: 501379 - DNA, 31 bp, Artificial Sequence
  Synthetic oligonucleotide
aaagttatgagcagcttcttctgagaggcct

SEQ ID NO: 501380 - DNA, 30 bp, Artificial Sequence
  Synthetic oligonucleotide
ctggacccgtacgcaggatcctgtaggcct

SEQ ID NO: 501381 - DNA, 30 bp, Artificial Sequence
  Synthetic oligonucleotide
gcatcagaataacgcattagcacacggcct

SEQ ID NO: 501382 - DNA, 30 bp, Artificial Sequence
  Synthetic oligonucleotide
cctatcgcctatacaaggcccgcacggcct

SEQ ID NO: 501383 - DNA, 30 bp, Artificial Sequence
  Synthetic oligonucleotide
tagcatacacagcggcccaagctccggcct

SEQ ID NO: 501384 - DNA, 30 bp, Artificial Sequence
  Synthetic oligonucleotide
agtctacgcgcgaccccgcatacgcggcct

SEQ ID NO: 501385 - DNA, 30 bp, Artificial Sequence
  Synthetic oligonucleotide
ggaatggtagaattgcaagactggcggcct

SEQ ID NO: 501386 - DNA, 30 bp, Artificial Sequence
  Synthetic oligonucleotide
gttgcggtgggggcctttcaagaagggcct

SEQ ID NO: 501387 - DNA, 30 bp, Artificial Sequence
  Synthetic oligonucleotide
tttaaaataataacctcagatttagggcct

SEQ ID NO: 501388 - DNA, 30 bp, Artificial Sequence
  Synthetic oligonucleotide
gtgagtgagtctgtacagctcaacgggcct

SEQ ID NO: 501389 - DNA, 30 bp, Artificial Sequence
  Synthetic oligonucleotide
gagagctacgcggtgagttagccggggcct

SEQ ID NO: 501390 - DNA, 30 bp, Artificial Sequence
  Synthetic oligonucleotide
gctatgccggacggcccaggttatgggcct

SEQ ID NO: 501391 - DNA, 30 bp, Artificial Sequence
  Synthetic oligonucleotide
cttctcgtcctctctcagcgaagatggcct

SEQ ID NO: 501392 - DNA, 30 bp, Artificial Sequence
  Synthetic oligonucleotide
aaacacctgctctgatatgcgggatggcct

SEQ ID NO: 501393 - DNA, 30 bp, Artificial Sequence
  Synthetic oligonucleotide
ataacgccgtcgggcggggttggctggcct

SEQ ID NO: 501394 - DNA, 30 bp, Artificial Sequence
  Synthetic oligonucleotide
caaggtacggatggaccgaagtagtggcct

SEQ ID NO: 501395 - DNA, 30 bp, Artificial Sequence
  Synthetic oligonucleotide
gtgaggtcctgcaagaggcgttcttggcct

SEQ ID NO: 501396 - DNA, 30 bp, Artificial Sequence
  Synthetic oligonucleotide
ttgatgtagccctggggggtcctttggcct

SEQ ID NO: 501397 - DNA, 30 bp, Artificial Sequence
  Synthetic oligonucleotide
tacatttagttacgtttggaagacatgcct

SEQ ID NO: 501398 - DNA, 30 bp, Artificial Sequence
  Synthetic oligonucleotide
atcaagtacctgttggccgcagacatgcct

SEQ ID NO: 501399 - DNA, 30 bp, Artificial Sequence
  Synthetic oligonucleotide
agtgtactcataagtcggttagtcatgcct

SEQ ID NO: 501400 - DNA, 30 bp, Artificial Sequence
  Synthetic oligonucleotide
cgcagtaaccagaaagccccgttcatgcct

SEQ ID NO: 501401 - DNA, 30 bp, Artificial Sequence
  Synthetic oligonucleotide
tacctctacctacgaagagcctagatgcct

SEQ ID NO: 501402 - DNA, 30 bp, Artificial Sequence
  Synthetic oligonucleotide
atattataccctgccggggacctgatgcct

SEQ ID NO: 501403 - DNA, 30 bp, Artificial Sequence
  Synthetic oligonucleotide
gagtccccaggtaagggctctactatgcct

SEQ ID NO: 501404 - DNA, 30 bp, Artificial Sequence
  Synthetic oligonucleotide
tacgtgtgatgatcgcctgcacgtatgcct

SEQ ID NO: 501405 - DNA, 30 bp, Artificial Sequence
  Synthetic oligonucleotide
ttaatgtcagtaaaggtcgcccttatgcct

SEQ ID NO: 501406 - DNA, 30 bp, Artificial Sequence
  Synthetic oligonucleotide
accctgtcatagcatgttcgaaaactgcct

SEQ ID NO: 501407 - DNA, 30 bp, Artificial Sequence
  Synthetic oligonucleotide
tagcttgcacataaggctcgaacgctgcct

SEQ ID NO: 501408 - DNA, 30 bp, Artificial Sequence
  Synthetic oligonucleotide
accagatacctggttaggacggcgctgcct

SEQ ID NO: 501409 - DNA, 30 bp, Artificial Sequence
  Synthetic oligonucleotide
tgttttgaggggggggcgataggcgtgcct

SEQ ID NO: 501410 - DNA, 30 bp, Artificial Sequence
  Synthetic oligonucleotide
gaggcgcatttgatggaagccatcgtgcct

SEQ ID NO: 501411 - DNA, 30 bp, Artificial Sequence
  Synthetic oligonucleotide
ggatttgacaggcatcatgtttaggtgcct

SEQ ID NO: 501412 - DNA, 30 bp, Artificial Sequence
  Synthetic oligonucleotide
gagctgcagcagtattatggttaattgcct

SEQ ID NO: 501413 - DNA, 30 bp, Artificial Sequence
  Synthetic oligonucleotide
ataccggcgccgtagttcgcaaccttgcct

SEQ ID NO: 501414 - DNA, 30 bp, Artificial Sequence
  Synthetic oligonucleotide
accaccgcaaccagcactacggagttgcct

SEQ ID NO: 501415 - DNA, 30 bp, Artificial Sequence
  Synthetic oligonucleotide
aaaagtgtcataggctatcgtagaaatcct

SEQ ID NO: 501416 - DNA, 30 bp, Artificial Sequence
  Synthetic oligonucleotide
attctatgtatttgagccagaataaatcct

SEQ ID NO: 501417 - DNA, 30 bp, Artificial Sequence
  Synthetic oligonucleotide
ctttctaaaacaatcttttctcgcaatcct

SEQ ID NO: 501418 - DNA, 30 bp, Artificial Sequence
  Synthetic oligonucleotide
tatcctctcagtttgtaagtggtcaatcct

SEQ ID NO: 501419 - DNA, 30 bp, Artificial Sequence
  Synthetic oligonucleotide
agcaatgcgggccattggacattcaatcct

SEQ ID NO: 501420 - DNA, 31 bp, Artificial Sequence
  Synthetic oligonucleotide
gtgccgaagtagtcaattcaatcagaatcct

SEQ ID NO: 501421 - DNA, 30 bp, Artificial Sequence
  Synthetic oligonucleotide
ctcgtgacgcacaaaaactgccataatcct

SEQ ID NO: 501422 - DNA, 30 bp, Artificial Sequence
  Synthetic oligonucleotide
agcttattttgaccgtgcactggtaatcct

SEQ ID NO: 501423 - DNA, 30 bp, Artificial Sequence
  Synthetic oligonucleotide
caatgcgcgccatacagatatgagcatcct

SEQ ID NO: 501424 - DNA, 30 bp, Artificial Sequence
  Synthetic oligonucleotide
ttcgcaagacgtactgggattgctcatcct

SEQ ID NO: 501425 - DNA, 30 bp, Artificial Sequence
  Synthetic oligonucleotide
acccttacctaatagttttgacaagatcct

SEQ ID NO: 501426 - DNA, 30 bp, Artificial Sequence
  Synthetic oligonucleotide
ggtttcccaatttggagcgaatcagatcct

SEQ ID NO: 501427 - DNA, 30 bp, Artificial Sequence
  Synthetic oligonucleotide
agcaagtttaactttgcgtttagagatcct

SEQ ID NO: 501428 - DNA, 30 bp, Artificial Sequence
  Synthetic oligonucleotide
ccgtcgcccccaggtaagggaggagatcct

SEQ ID NO: 501429 - DNA, 30 bp, Artificial Sequence
  Synthetic oligonucleotide
tcgcgtgttcttcagtactataaggatcct

SEQ ID NO: 501430 - DNA, 29 bp, Artificial Sequence
  Synthetic oligonucleotide
gaagggaatcgcaggcattataggatcct

SEQ ID NO: 501431 - DNA, 30 bp, Artificial Sequence
  Synthetic oligonucleotide
cccgtcgtggttcggcagagtctggatcct

SEQ ID NO: 501432 - DNA, 30 bp, Artificial Sequence
  Synthetic oligonucleotide
aacttatagtgtcggtctgcatatgatcct

SEQ ID NO: 501433 - DNA, 30 bp, Artificial Sequence
  Synthetic oligonucleotide
taaatggatttgaccagttcgaaatatcct

SEQ ID NO: 501434 - DNA, 30 bp, Artificial Sequence
  Synthetic oligonucleotide
aactacccgttgctactatcataatatcct

SEQ ID NO: 501435 - DNA, 30 bp, Artificial Sequence
  Synthetic oligonucleotide
ccccgtttaattacgttcaggccatatcct

SEQ ID NO: 501436 - DNA, 30 bp, Artificial Sequence
  Synthetic oligonucleotide
tccatacttcgggcaaaccacttatatcct

SEQ ID NO: 501437 - DNA, 30 bp, Artificial Sequence
  Synthetic oligonucleotide
gtatgcaagcgccgatatagatggtatcct

SEQ ID NO: 501438 - DNA, 30 bp, Artificial Sequence
  Synthetic oligonucleotide
aacatcatacagttgaagtggttgtatcct

SEQ ID NO: 501439 - DNA, 30 bp, Artificial Sequence
  Synthetic oligonucleotide
tgctcgcatgccgccgcgccggattatcct

SEQ ID NO: 501440 - DNA, 30 bp, Artificial Sequence
  Synthetic oligonucleotide
caatttgcctactgaatggagcaaactcct

SEQ ID NO: 501441 - DNA, 30 bp, Artificial Sequence
  Synthetic oligonucleotide
ttatagattcttgattggtaggcaactcct

SEQ ID NO: 501442 - DNA, 30 bp, Artificial Sequence
  Synthetic oligonucleotide
tgaaagagctcatggagtcctttaactcct

SEQ ID NO: 501443 - DNA, 30 bp, Artificial Sequence
  Synthetic oligonucleotide
catttcatttctgttcaataggacactcct

SEQ ID NO: 501444 - DNA, 30 bp, Artificial Sequence
  Synthetic oligonucleotide
taaggagatctgatttatctaccgactcct

SEQ ID NO: 501445 - DNA, 30 bp, Artificial Sequence
  Synthetic oligonucleotide
cacgctagctaattctgcatcgggactcct

SEQ ID NO: 501446 - DNA, 30 bp, Artificial Sequence
  Synthetic oligonucleotide
cggggcaaggtaatctagttcatgactcct

SEQ ID NO: 501447 - DNA, 30 bp, Artificial Sequence
  Synthetic oligonucleotide
ttgaccgggtcatggtaaaaagatactcct

SEQ ID NO: 501448 - DNA, 30 bp, Artificial Sequence
  Synthetic oligonucleotide
ctaatgccgaagcggaaggattatactcct

SEQ ID NO: 501449 - DNA, 30 bp, Artificial Sequence
  Synthetic oligonucleotide
gtctatgtatggactcacaccgaacctcct

SEQ ID NO: 501450 - DNA, 30 bp, Artificial Sequence
  Synthetic oligonucleotide
cgccgcaggtctcatacgggaagacctcct

SEQ ID NO: 501451 - DNA, 30 bp, Artificial Sequence
  Synthetic oligonucleotide
aatcttatcgtaaatcgaaacacccctcct

SEQ ID NO: 501452 - DNA, 30 bp, Artificial Sequence
  Synthetic oligonucleotide
cggaagttacacccccaaccggcccctcct

SEQ ID NO: 501453 - DNA, 30 bp, Artificial Sequence
  Synthetic oligonucleotide
cccgccgctaagttaactattttccctcct

SEQ ID NO: 501454 - DNA, 30 bp, Artificial Sequence
  Synthetic oligonucleotide
gcccgggtcacggacaaccggacgcctcct

SEQ ID NO: 501455 - DNA, 30 bp, Artificial Sequence
  Synthetic oligonucleotide
accccggagctgtcgttttacacggctcct

SEQ ID NO: 501456 - DNA, 30 bp, Artificial Sequence
  Synthetic oligonucleotide
gaatgaaattgaccgaagcttgatgctcct

SEQ ID NO: 501457 - DNA, 30 bp, Artificial Sequence
  Synthetic oligonucleotide
ttcaagaagaagttaacccgaagtgctcct

SEQ ID NO: 501458 - DNA, 30 bp, Artificial Sequence
  Synthetic oligonucleotide
tggctaaaaaaacgatcgggaggtgctcct

SEQ ID NO: 501459 - DNA, 30 bp, Artificial Sequence
  Synthetic oligonucleotide
ccatgggtgtccctgtccctcgggtctcct

SEQ ID NO: 501460 - DNA, 30 bp, Artificial Sequence
  Synthetic oligonucleotide
gatctgacgctgagcgtgttggtaagtcct

SEQ ID NO: 501461 - DNA, 30 bp, Artificial Sequence
  Synthetic oligonucleotide
tataaaagtttgtatgcttaaaagagtcct

SEQ ID NO: 501462 - DNA, 30 bp, Artificial Sequence
  Synthetic oligonucleotide
gcctagttatgggaatgccgggggagtcct

SEQ ID NO: 501463 - DNA, 30 bp, Artificial Sequence
  Synthetic oligonucleotide
tttttcgcacgccgaaatattggacgtcct

SEQ ID NO: 501464 - DNA, 30 bp, Artificial Sequence
  Synthetic oligonucleotide
ttcctgaccttacaatcacgacatcgtcct

SEQ ID NO: 501465 - DNA, 30 bp, Artificial Sequence
  Synthetic oligonucleotide
tacacgaaggatatatgtccatttcgtcct

SEQ ID NO: 501466 - DNA, 30 bp, Artificial Sequence
  Synthetic oligonucleotide
catacctggtcataagtagatccaggtcct

SEQ ID NO: 501467 - DNA, 30 bp, Artificial Sequence
  Synthetic oligonucleotide
aggagaatattgcgttacacatcaggtcct

SEQ ID NO: 501468 - DNA, 30 bp, Artificial Sequence
  Synthetic oligonucleotide
aactagtcctatcgatatatcaacggtcct

SEQ ID NO: 501469 - DNA, 30 bp, Artificial Sequence
  Synthetic oligonucleotide
acgttacgcaatggtaacgtcagcggtcct

SEQ ID NO: 501470 - DNA, 30 bp, Artificial Sequence
  Synthetic oligonucleotide
accagagaaatcatcttctcgcgcggtcct

SEQ ID NO: 501471 - DNA, 30 bp, Artificial Sequence
  Synthetic oligonucleotide
aacttgaagttttcacgcgcgggcggtcct

SEQ ID NO: 501472 - DNA, 30 bp, Artificial Sequence
  Synthetic oligonucleotide
cgctagtccggataaggcggtgtcggtcct

SEQ ID NO: 501473 - DNA, 30 bp, Artificial Sequence
  Synthetic oligonucleotide
gcgtttgtattcagagtatatggtggtcct

SEQ ID NO: 501474 - DNA, 30 bp, Artificial Sequence
  Synthetic oligonucleotide
ccccaagcataacatccagcaggatgtcct

SEQ ID NO: 501475 - DNA, 30 bp, Artificial Sequence
  Synthetic oligonucleotide
tggcctgagggcctcactaggaggtgtcct

SEQ ID NO: 501476 - DNA, 30 bp, Artificial Sequence
  Synthetic oligonucleotide
caggcataactttctatgcacacttgtcct

SEQ ID NO: 501477 - DNA, 30 bp, Artificial Sequence
  Synthetic oligonucleotide
tgatgccctactgttgagggatctattcct

SEQ ID NO: 501478 - DNA, 30 bp, Artificial Sequence
  Synthetic oligonucleotide
cagagcccaaagagatagccagtccttcct

SEQ ID NO: 501479 - DNA, 30 bp, Artificial Sequence
  Synthetic oligonucleotide
cctcttataagggcctcttatccgcttcct

SEQ ID NO: 501480 - DNA, 30 bp, Artificial Sequence
  Synthetic oligonucleotide
taggcacagaacaaggaagcacctcttcct

SEQ ID NO: 501481 - DNA, 30 bp, Artificial Sequence
  Synthetic oligonucleotide
ggttccacgattgtgtcactacaagttcct

SEQ ID NO: 501482 - DNA, 30 bp, Artificial Sequence
  Synthetic oligonucleotide
ttttgaaactcgttattatgttaagttcct

SEQ ID NO: 501483 - DNA, 30 bp, Artificial Sequence
  Synthetic oligonucleotide
aagtgtagaactctagtggctaccgttcct

SEQ ID NO: 501484 - DNA, 30 bp, Artificial Sequence
  Synthetic oligonucleotide
tatatacggacactggacgctatggttcct

SEQ ID NO: 501485 - DNA, 30 bp, Artificial Sequence
  Synthetic oligonucleotide
aatgcgttcgccctgctgttcctggttcct

SEQ ID NO: 501486 - DNA, 30 bp, Artificial Sequence
  Synthetic oligonucleotide
atctaaccttgtcgtgtatagaatgttcct

SEQ ID NO: 501487 - DNA, 30 bp, Artificial Sequence
  Synthetic oligonucleotide
agctgtaaaatagggatcacgactgttcct

SEQ ID NO: 501488 - DNA, 30 bp, Artificial Sequence
  Synthetic oligonucleotide
aggtgtccaatcccacgagccgttgttcct

SEQ ID NO: 501489 - DNA, 30 bp, Artificial Sequence
  Synthetic oligonucleotide
ttatcatattaattgagattatttgttcct

SEQ ID NO: 501490 - DNA, 30 bp, Artificial Sequence
  Synthetic oligonucleotide
acatgttcaccggacttatctcaatttcct

SEQ ID NO: 501491 - DNA, 30 bp, Artificial Sequence
  Synthetic oligonucleotide
gtttcttcgaaccaacaacttaactttcct

SEQ ID NO: 501492 - DNA, 30 bp, Artificial Sequence
  Synthetic oligonucleotide
cgtaagctagaataattaacgtagtttcct

SEQ ID NO: 501493 - DNA, 30 bp, Artificial Sequence
  Synthetic oligonucleotide
cgacgtatttcgcacgagtaatcgtttcct

SEQ ID NO: 501494 - DNA, 30 bp, Artificial Sequence
  Synthetic oligonucleotide
cctgaaaattgcgcagggcgatcgtttcct

SEQ ID NO: 501495 - DNA, 30 bp, Artificial Sequence
  Synthetic oligonucleotide
gagacttgttgggttacttactggtttcct

SEQ ID NO: 501496 - DNA, 30 bp, Artificial Sequence
  Synthetic oligonucleotide
agggggtgacggaaggcgaggatgtttcct

SEQ ID NO: 501497 - DNA, 30 bp, Artificial Sequence
  Synthetic oligonucleotide
aacaacaggttcgcagttgttcgaaaagct

SEQ ID NO: 501498 - DNA, 30 bp, Artificial Sequence
  Synthetic oligonucleotide
gcacgggacgtagatacagttggaaaagct

SEQ ID NO: 501499 - DNA, 30 bp, Artificial Sequence
  Synthetic oligonucleotide
caagcttcgacgcgtgaagtgttaaaagct

SEQ ID NO: 501500 - DNA, 30 bp, Artificial Sequence
  Synthetic oligonucleotide
cgtgtgcagcgattgctgccaaacaaagct

SEQ ID NO: 501501 - DNA, 30 bp, Artificial Sequence
  Synthetic oligonucleotide
ggttctctcgtcacaaagtttcccaaagct

SEQ ID NO: 501502 - DNA, 30 bp, Artificial Sequence
  Synthetic oligonucleotide
gttaatctatgggttaatgaggagaaagct

SEQ ID NO: 501503 - DNA, 30 bp, Artificial Sequence
  Synthetic oligonucleotide
gagtaccgctgtacggcaatatagaaagct

SEQ ID NO: 501504 - DNA, 30 bp, Artificial Sequence
  Synthetic oligonucleotide
tagtctcctccccgggccttatcgaaagct

SEQ ID NO: 501505 - DNA, 30 bp, Artificial Sequence
  Synthetic oligonucleotide
cgacgagcggcatacccctatcggaaagct

SEQ ID NO: 501506 - DNA, 30 bp, Artificial Sequence
  Synthetic oligonucleotide
tgtaagggtataaagtaaaagtttaaagct

SEQ ID NO: 501507 - DNA, 30 bp, Artificial Sequence
  Synthetic oligonucleotide
gatgtgcgcatattcatgctgtttaaagct

SEQ ID NO: 501508 - DNA, 30 bp, Artificial Sequence
  Synthetic oligonucleotide
ttctttttgttgttcgcaagctaacaagct

SEQ ID NO: 501509 - DNA, 30 bp, Artificial Sequence
  Synthetic oligonucleotide
tttctctgggcgggtcaacttttacaagct

SEQ ID NO: 501510 - DNA, 30 bp, Artificial Sequence
  Synthetic oligonucleotide
agtcagtcccaagagccgtcggcgcaagct

SEQ ID NO: 501511 - DNA, 30 bp, Artificial Sequence
  Synthetic oligonucleotide
gcctttagaccgggaagccccgggcaagct

SEQ ID NO: 501512 - DNA, 30 bp, Artificial Sequence
  Synthetic oligonucleotide
gactgttatggcagaacctttattcaagct

SEQ ID NO: 501513 - DNA, 30 bp, Artificial Sequence
  Synthetic oligonucleotide
ttacatgcgaggtcggttaaaacagaagct

SEQ ID NO: 501514 - DNA, 30 bp, Artificial Sequence
  Synthetic oligonucleotide
aaaaaacaggacgagcagaactgagaagct

SEQ ID NO: 501515 - DNA, 30 bp, Artificial Sequence
  Synthetic oligonucleotide
agtatgcgggaattatttgaattagaagct

SEQ ID NO: 501516 - DNA, 30 bp, Artificial Sequence
  Synthetic oligonucleotide
tccacgacgacaagggaaggtgacgaagct

SEQ ID NO: 501517 - DNA, 30 bp, Artificial Sequence
  Synthetic oligonucleotide
agtatcgaataatgtttcctgtccgaagct

SEQ ID NO: 501518 - DNA, 30 bp, Artificial Sequence
  Synthetic oligonucleotide
attgatccataaggggtataatatgaagct

SEQ ID NO: 501519 - DNA, 30 bp, Artificial Sequence
  Synthetic oligonucleotide
ggcgtagtccgttaggcacccgtctaagct

SEQ ID NO: 501520 - DNA, 30 bp, Artificial Sequence
  Synthetic oligonucleotide
actgctgggatattaccgcattcgtaagct

SEQ ID NO: 501521 - DNA, 30 bp, Artificial Sequence
  Synthetic oligonucleotide
gttgcaagcgagtggggcactcggtaagct

SEQ ID NO: 501522 - DNA, 30 bp, Artificial Sequence
  Synthetic oligonucleotide
ccccatcacagcgcatacgagccttaagct

SEQ ID NO: 501523 - DNA, 30 bp, Artificial Sequence
  Synthetic oligonucleotide
tctcccatgttacttctgaacgcaacagct

SEQ ID NO: 501524 - DNA, 30 bp, Artificial Sequence
  Synthetic oligonucleotide
atataatgatgcacgagcgatctcacagct

SEQ ID NO: 501525 - DNA, 30 bp, Artificial Sequence
  Synthetic oligonucleotide
agagagtccccggtatgcgacatgacagct

SEQ ID NO: 501526 - DNA, 30 bp, Artificial Sequence
  Synthetic oligonucleotide
acttggctttctttcttacccctgacagct

SEQ ID NO: 501527 - DNA, 30 bp, Artificial Sequence
  Synthetic oligonucleotide
cccgctggctcgcactacaggtttacagct

SEQ ID NO: 501528 - DNA, 30 bp, Artificial Sequence
  Synthetic oligonucleotide
ggaacaatccgtgtacagccttgaccagct

SEQ ID NO: 501529 - DNA, 30 bp, Artificial Sequence
  Synthetic oligonucleotide
cctgtggcgataatgccatgtataccagct

SEQ ID NO: 501530 - DNA, 30 bp, Artificial Sequence
  Synthetic oligonucleotide
tgatgccgtccacataatggcgcgccagct

SEQ ID NO: 501531 - DNA, 30 bp, Artificial Sequence
  Synthetic oligonucleotide
ctcggatatgggagacacagcaggccagct

SEQ ID NO: 501532 - DNA, 30 bp, Artificial Sequence
  Synthetic oligonucleotide
attggttttgtagtaatacaacgtccagct

SEQ ID NO: 501533 - DNA, 30 bp, Artificial Sequence
  Synthetic oligonucleotide
ttcgttcccgagtgatatgcttcagcagct

SEQ ID NO: 501534 - DNA, 30 bp, Artificial Sequence
  Synthetic oligonucleotide
ttgggatccgctttttgacgcctagcagct

SEQ ID NO: 501535 - DNA, 30 bp, Artificial Sequence
  Synthetic oligonucleotide
gtctatgatagagggtcattgttagcagct

SEQ ID NO: 501536 - DNA, 30 bp, Artificial Sequence
  Synthetic oligonucleotide
agttttttatcagagagatcagccgcagct

SEQ ID NO: 501537 - DNA, 30 bp, Artificial Sequence
  Synthetic oligonucleotide
tattttcgtgcgtccctgtgctaggcagct

SEQ ID NO: 501538 - DNA, 30 bp, Artificial Sequence
  Synthetic oligonucleotide
accgcccccaccccggtgtaaaatgcagct

SEQ ID NO: 501539 - DNA, 30 bp, Artificial Sequence
  Synthetic oligonucleotide
agggcagttcatagacgccctgcgtcagct

SEQ ID NO: 501540 - DNA, 30 bp, Artificial Sequence
  Synthetic oligonucleotide
aatgaatcgctcacgcacgaactttcagct

SEQ ID NO: 501541 - DNA, 30 bp, Artificial Sequence
  Synthetic oligonucleotide
gtaattggtcttgggttcctgccaagagct

SEQ ID NO: 501542 - DNA, 30 bp, Artificial Sequence
  Synthetic oligonucleotide
agctctcaagctgaattcggggagagagct

SEQ ID NO: 501543 - DNA, 30 bp, Artificial Sequence
  Synthetic oligonucleotide
tttcgaatttatccatgacgctagagagct

SEQ ID NO: 501544 - DNA, 30 bp, Artificial Sequence
  Synthetic oligonucleotide
cctaatttcgggacttagcagccgagagct

SEQ ID NO: 501545 - DNA, 30 bp, Artificial Sequence
  Synthetic oligonucleotide
gaacttggccgaccggtaaggcggagagct

SEQ ID NO: 501546 - DNA, 30 bp, Artificial Sequence
  Synthetic oligonucleotide
ctgttccgccagaagacttcggcacgagct

SEQ ID NO: 501547 - DNA, 30 bp, Artificial Sequence
  Synthetic oligonucleotide
gatttgaacatgcgcccgatatcacgagct

SEQ ID NO: 501548 - DNA, 30 bp, Artificial Sequence
  Synthetic oligonucleotide
tgtcggtacgtacgggaaatgtcacgagct

SEQ ID NO: 501549 - DNA, 30 bp, Artificial Sequence
  Synthetic oligonucleotide
gaagtaattaaatcgttgagtagacgagct

SEQ ID NO: 501550 - DNA, 30 bp, Artificial Sequence
  Synthetic oligonucleotide
taagtggtacctctgcggatctgacgagct

SEQ ID NO: 501551 - DNA, 30 bp, Artificial Sequence
  Synthetic oligonucleotide
gttggtcgttttcttaagctgacccgagct

SEQ ID NO: 501552 - DNA, 30 bp, Artificial Sequence
  Synthetic oligonucleotide
gttgctaaggcccggtgatgttgccgagct

SEQ ID NO: 501553 - DNA, 30 bp, Artificial Sequence
  Synthetic oligonucleotide
gcccgcatcatactgcgattttatcgagct

SEQ ID NO: 501554 - DNA, 30 bp, Artificial Sequence
  Synthetic oligonucleotide
ttctttttcgtaagattatcttaaggagct

SEQ ID NO: 501555 - DNA, 30 bp, Artificial Sequence
  Synthetic oligonucleotide
tctctggcgaggtaagtgcggtccggagct

SEQ ID NO: 501556 - DNA, 30 bp, Artificial Sequence
  Synthetic oligonucleotide
tacaaaacatccgcacttacggtcggagct

SEQ ID NO: 501557 - DNA, 30 bp, Artificial Sequence
  Synthetic oligonucleotide
agttgcggatcatgcggtaaggcgggagct

SEQ ID NO: 501558 - DNA, 30 bp, Artificial Sequence
  Synthetic oligonucleotide
acgtgctcagtgcccgttacggcttgagct

SEQ ID NO: 501559 - DNA, 30 bp, Artificial Sequence
  Synthetic oligonucleotide
tttccgataaaggagctcttatgttgagct

SEQ ID NO: 501560 - DNA, 30 bp, Artificial Sequence
  Synthetic oligonucleotide
tcgattcactttatatatttaaaaatagct

SEQ ID NO: 501561 - DNA, 30 bp, Artificial Sequence
  Synthetic oligonucleotide
ggtaactaggctcatataataagaatagct

SEQ ID NO: 501562 - DNA, 30 bp, Artificial Sequence
  Synthetic oligonucleotide
ctttagttgttcgcggaatagttaatagct

SEQ ID NO: 501563 - DNA, 30 bp, Artificial Sequence
  Synthetic oligonucleotide
tttctatgtatataggaaagtactatagct

SEQ ID NO: 501564 - DNA, 30 bp, Artificial Sequence
  Synthetic oligonucleotide
gggcagtttagctatctagacattatagct

SEQ ID NO: 501565 - DNA, 30 bp, Artificial Sequence
  Synthetic oligonucleotide
cttgtcaatgccaagctgaagattatagct

SEQ ID NO: 501566 - DNA, 30 bp, Artificial Sequence
  Synthetic oligonucleotide
ctttttgaagccttcttcacagaactagct

SEQ ID NO: 501567 - DNA, 30 bp, Artificial Sequence
  Synthetic oligonucleotide
acagtcggagcaaccgcggtactactagct

SEQ ID NO: 501568 - DNA, 30 bp, Artificial Sequence
  Synthetic oligonucleotide
gagtaggttactttactgtcgagcctagct

SEQ ID NO: 501569 - DNA, 30 bp, Artificial Sequence
  Synthetic oligonucleotide
tcgcacagacggaagccttataggctagct

SEQ ID NO: 501570 - DNA, 30 bp, Artificial Sequence
  Synthetic oligonucleotide
cagcatcaatacttctgtagactgctagct

SEQ ID NO: 501571 - DNA, 30 bp, Artificial Sequence
  Synthetic oligonucleotide
ataaatatgcagcaagagtgataggtagct

SEQ ID NO: 501572 - DNA, 30 bp, Artificial Sequence
  Synthetic oligonucleotide
tttttaagcatctgggaatttgctgtagct

SEQ ID NO: 501573 - DNA, 30 bp, Artificial Sequence
  Synthetic oligonucleotide
gcttagcgttcgctaatttgtttattagct

SEQ ID NO: 501574 - DNA, 30 bp, Artificial Sequence
  Synthetic oligonucleotide
tgtcacaggatcccagcggttcctttagct

SEQ ID NO: 501575 - DNA, 30 bp, Artificial Sequence
  Synthetic oligonucleotide
tcgcggatcaggggtgcaaaaataaacgct

SEQ ID NO: 501576 - DNA, 30 bp, Artificial Sequence
  Synthetic oligonucleotide
ggccggggcagatgcggcgagttaaacgct

SEQ ID NO: 501577 - DNA, 30 bp, Artificial Sequence
  Synthetic oligonucleotide
acatgcaccggcggagcgccgttaaacgct

SEQ ID NO: 501578 - DNA, 30 bp, Artificial Sequence
  Synthetic oligonucleotide
tataacgtcgttagcaaggtcgacaacgct

SEQ ID NO: 501579 - DNA, 30 bp, Artificial Sequence
  Synthetic oligonucleotide
gatagctgagtaccgtgaagacgcaacgct

SEQ ID NO: 501580 - DNA, 30 bp, Artificial Sequence
  Synthetic oligonucleotide
tacgttccacttgccctgcggcagaacgct

SEQ ID NO: 501581 - DNA, 30 bp, Artificial Sequence
  Synthetic oligonucleotide
aagctgacccgtcacctgcgctctaacgct

SEQ ID NO: 501582 - DNA, 30 bp, Artificial Sequence
  Synthetic oligonucleotide
gaggacactcattcatgttattctaacgct

SEQ ID NO: 501583 - DNA, 31 bp, Artificial Sequence
  Synthetic oligonucleotide
gttgcacggacgttagcatcggcaacacgct

SEQ ID NO: 501584 - DNA, 30 bp, Artificial Sequence
  Synthetic oligonucleotide
gcaatatgtcatttggtgaacaaccacgct

SEQ ID NO: 501585 - DNA, 30 bp, Artificial Sequence
  Synthetic oligonucleotide
gatcggttagtaggtcgtaaacagcacgct

SEQ ID NO: 501586 - DNA, 30 bp, Artificial Sequence
  Synthetic oligonucleotide
ggttattcattacagttacttgggcacgct

SEQ ID NO: 501587 - DNA, 30 bp, Artificial Sequence
  Synthetic oligonucleotide
tcggcagtccccaggaattgtggtcacgct

SEQ ID NO: 501588 - DNA, 30 bp, Artificial Sequence
  Synthetic oligonucleotide
ttcatagtcaccaaagatgcggcagacgct

SEQ ID NO: 501589 - DNA, 30 bp, Artificial Sequence
  Synthetic oligonucleotide
aattgtctaaagtaagaacgctgagacgct

SEQ ID NO: 501590 - DNA, 30 bp, Artificial Sequence
  Synthetic oligonucleotide
gataagagttttattaggcttaccgacgct

SEQ ID NO: 501591 - DNA, 30 bp, Artificial Sequence
  Synthetic oligonucleotide
tgggtcgagacaaggaagtttcaggacgct

SEQ ID NO: 501592 - DNA, 30 bp, Artificial Sequence
  Synthetic oligonucleotide
cggtcgtatcgataggtaatttgggacgct

SEQ ID NO: 501593 - DNA, 30 bp, Artificial Sequence
  Synthetic oligonucleotide
ggcgtttgagtagtagacgtgtatgacgct

SEQ ID NO: 501594 - DNA, 30 bp, Artificial Sequence
  Synthetic oligonucleotide
ttgtcatatgaggcactacagtctgacgct

SEQ ID NO: 501595 - DNA, 30 bp, Artificial Sequence
  Synthetic oligonucleotide
tgtcgggcagagatcaaagaaggtgacgct

SEQ ID NO: 501596 - DNA, 30 bp, Artificial Sequence
  Synthetic oligonucleotide
cactaaccgaatcaacattaaggtgacgct

SEQ ID NO: 501597 - DNA, 30 bp, Artificial Sequence
  Synthetic oligonucleotide
gagggctcgggttgttctttagttgacgct

SEQ ID NO: 501598 - DNA, 30 bp, Artificial Sequence
  Synthetic oligonucleotide
gcgttgtatgtccgcggacaaccatacgct

SEQ ID NO: 501599 - DNA, 30 bp, Artificial Sequence
  Synthetic oligonucleotide
actctagacctgggaacgcgagtatacgct

SEQ ID NO: 501600 - DNA, 30 bp, Artificial Sequence
  Synthetic oligonucleotide
gcggaactaccccggtgcaagaactacgct

SEQ ID NO: 501601 - DNA, 30 bp, Artificial Sequence
  Synthetic oligonucleotide
aatcttcagtgattaggatacccctacgct

SEQ ID NO: 501602 - DNA, 30 bp, Artificial Sequence
  Synthetic oligonucleotide
cgctgcttagatcttgacgctaagtacgct

SEQ ID NO: 501603 - DNA, 30 bp, Artificial Sequence
  Synthetic oligonucleotide
cacccactgttttgttattaaatgtacgct

SEQ ID NO: 501604 - DNA, 30 bp, Artificial Sequence
  Synthetic oligonucleotide
acaaccatcttactgttcctcttgtacgct

SEQ ID NO: 501605 - DNA, 30 bp, Artificial Sequence
  Synthetic oligonucleotide
attgatatatagcaaacgacactttacgct

SEQ ID NO: 501606 - DNA, 30 bp, Artificial Sequence
  Synthetic oligonucleotide
aaacaaccttgagtaactaacgtttacgct

SEQ ID NO: 501607 - DNA, 30 bp, Artificial Sequence
  Synthetic oligonucleotide
ttaacactttaaccggctccgcacaccgct

SEQ ID NO: 501608 - DNA, 30 bp, Artificial Sequence
  Synthetic oligonucleotide
aagtaacggtagtatatataatcgaccgct

SEQ ID NO: 501609 - DNA, 30 bp, Artificial Sequence
  Synthetic oligonucleotide
cgggcgttcacacaatctaggtctaccgct

SEQ ID NO: 501610 - DNA, 30 bp, Artificial Sequence
  Synthetic oligonucleotide
cccgttgttaaagagcccattaatcccgct

SEQ ID NO: 501611 - DNA, 30 bp, Artificial Sequence
  Synthetic oligonucleotide
ccggcggttcacctagcagtgccggccgct

SEQ ID NO: 501612 - DNA, 30 bp, Artificial Sequence
  Synthetic oligonucleotide
tgtttgatgatcggagtgtggcctgccgct

SEQ ID NO: 501613 - DNA, 30 bp, Artificial Sequence
  Synthetic oligonucleotide
tatttcgaccgagttcttcaacttgccgct

SEQ ID NO: 501614 - DNA, 30 bp, Artificial Sequence
  Synthetic oligonucleotide
aacagggagaagatgttgggcagatccgct

SEQ ID NO: 501615 - DNA, 30 bp, Artificial Sequence
  Synthetic oligonucleotide
gaattcgatgtctacgccttttgatccgct

SEQ ID NO: 501616 - DNA, 30 bp, Artificial Sequence
  Synthetic oligonucleotide
tacgacgcaatccggctaagaatatccgct

SEQ ID NO: 501617 - DNA, 30 bp, Artificial Sequence
  Synthetic oligonucleotide
attcaggtatggatttgcccgatatccgct

SEQ ID NO: 501618 - DNA, 30 bp, Artificial Sequence
  Synthetic oligonucleotide
gtgtttaagctaatgaagttattctccgct

SEQ ID NO: 501619 - DNA, 30 bp, Artificial Sequence
  Synthetic oligonucleotide
tgcaatgggaagcggggcttttcttccgct

SEQ ID NO: 501620 - DNA, 30 bp, Artificial Sequence
  Synthetic oligonucleotide
gcgttttccctggttgccctattttccgct

SEQ ID NO: 501621 - DNA, 30 bp, Artificial Sequence
  Synthetic oligonucleotide
ccactcctacctgaacgggaaaaaagcgct

SEQ ID NO: 501622 - DNA, 30 bp, Artificial Sequence
  Synthetic oligonucleotide
ctatgttggaccaagtgtggcgccagcgct

SEQ ID NO: 501623 - DNA, 30 bp, Artificial Sequence
  Synthetic oligonucleotide
gctattttagcgttcgaagtgctgagcgct

SEQ ID NO: 501624 - DNA, 30 bp, Artificial Sequence
  Synthetic oligonucleotide
tttacacacagtaaatcgcttaatagcgct

SEQ ID NO: 501625 - DNA, 30 bp, Artificial Sequence
  Synthetic oligonucleotide
cagcttcatcgttcacggtagagtagcgct

SEQ ID NO: 501626 - DNA, 30 bp, Artificial Sequence
  Synthetic oligonucleotide
tgcagtccatgagtttcgtttttacgcgct

SEQ ID NO: 501627 - DNA, 30 bp, Artificial Sequence
  Synthetic oligonucleotide
acaagcttacggattttcgataaccgcgct

SEQ ID NO: 501628 - DNA, 30 bp, Artificial Sequence
  Synthetic oligonucleotide
agaagccgtcacttcgtgaaacgccgcgct

SEQ ID NO: 501629 - DNA, 30 bp, Artificial Sequence
  Synthetic oligonucleotide
gtaatccggtgtggcggggatgttcgcgct

SEQ ID NO: 501630 - DNA, 30 bp, Artificial Sequence
  Synthetic oligonucleotide
ttatgtctgacagtaactgatgaaggcgct

SEQ ID NO: 501631 - DNA, 30 bp, Artificial Sequence
  Synthetic oligonucleotide
tgtataagggtttatcgacatgcaggcgct

SEQ ID NO: 501632 - DNA, 30 bp, Artificial Sequence
  Synthetic oligonucleotide
gtcttagctggcccgcctatctgaggcgct

SEQ ID NO: 501633 - DNA, 30 bp, Artificial Sequence
  Synthetic oligonucleotide
caagaagcccagtcttgggggctaggcgct

SEQ ID NO: 501634 - DNA, 30 bp, Artificial Sequence
  Synthetic oligonucleotide
ggatctagataagagagtgaaaggggcgct

SEQ ID NO: 501635 - DNA, 31 bp, Artificial Sequence
  Synthetic oligonucleotide
aagattttgtctcagagcaccttggggcgct

SEQ ID NO: 501636 - DNA, 30 bp, Artificial Sequence
  Synthetic oligonucleotide
cattcgcaacgcatctctcgctatggcgct

SEQ ID NO: 501637 - DNA, 30 bp, Artificial Sequence
  Synthetic oligonucleotide
tttacgtatctgcccacgactgcatgcgct

SEQ ID NO: 501638 - DNA, 30 bp, Artificial Sequence
  Synthetic oligonucleotide
tgttcgcagaatcatctaagcgtaatcgct

SEQ ID NO: 501639 - DNA, 30 bp, Artificial Sequence
  Synthetic oligonucleotide
agtactgttcgaagcgggataccgatcgct

SEQ ID NO: 501640 - DNA, 30 bp, Artificial Sequence
  Synthetic oligonucleotide
attcattcagcgttcatataagctatcgct

SEQ ID NO: 501641 - DNA, 30 bp, Artificial Sequence
  Synthetic oligonucleotide
tccggtggcgttatttcagcacttatcgct

SEQ ID NO: 501642 - DNA, 30 bp, Artificial Sequence
  Synthetic oligonucleotide
ttcctcagcgtcgagcatggtctactcgct

SEQ ID NO: 501643 - DNA, 30 bp, Artificial Sequence
  Synthetic oligonucleotide
gcccccaggtatgaagtcggtttactcgct

SEQ ID NO: 501644 - DNA, 30 bp, Artificial Sequence
  Synthetic oligonucleotide
gtgtgtaattcttcatttagcggcctcgct

SEQ ID NO: 501645 - DNA, 30 bp, Artificial Sequence
  Synthetic oligonucleotide
atcaaacactccgagcgcttcaatctcgct

SEQ ID NO: 501646 - DNA, 30 bp, Artificial Sequence
  Synthetic oligonucleotide
gtgtgcatgtttattatttttaaagtcgct

SEQ ID NO: 501647 - DNA, 30 bp, Artificial Sequence
  Synthetic oligonucleotide
ttgtgaatcaacctgtttccttaagtcgct

SEQ ID NO: 501648 - DNA, 30 bp, Artificial Sequence
  Synthetic oligonucleotide
tatcctttatgacggtaactatcagtcgct

SEQ ID NO: 501649 - DNA, 30 bp, Artificial Sequence
  Synthetic oligonucleotide
agatcccacaagcgtgctgccggagtcgct

SEQ ID NO: 501650 - DNA, 30 bp, Artificial Sequence
  Synthetic oligonucleotide
ttcttgattttcttacatttcgtagtcgct

SEQ ID NO: 501651 - DNA, 30 bp, Artificial Sequence
  Synthetic oligonucleotide
tggagtcgcgagtgtctaggtcacgtcgct

SEQ ID NO: 501652 - DNA, 30 bp, Artificial Sequence
  Synthetic oligonucleotide
gatatggtcgattcaacgtttattgtcgct

SEQ ID NO: 501653 - DNA, 30 bp, Artificial Sequence
  Synthetic oligonucleotide
tccaatggatctcgacgatccggattcgct

SEQ ID NO: 501654 - DNA, 30 bp, Artificial Sequence
  Synthetic oligonucleotide
attgggggatgttatatcacggtattcgct

SEQ ID NO: 501655 - DNA, 30 bp, Artificial Sequence
  Synthetic oligonucleotide
tgtcacgcacttggagaattatccttcgct

SEQ ID NO: 501656 - DNA, 30 bp, Artificial Sequence
  Synthetic oligonucleotide
ttataacaggtaccaaatctcgcgttcgct

SEQ ID NO: 501657 - DNA, 30 bp, Artificial Sequence
  Synthetic oligonucleotide
aagcgtgagtggtgttagcggcctttcgct

SEQ ID NO: 501658 - DNA, 30 bp, Artificial Sequence
  Synthetic oligonucleotide
ccgaacgaggacttctgcgggtaaaaggct

SEQ ID NO: 501659 - DNA, 30 bp, Artificial Sequence
  Synthetic oligonucleotide
aaggttgggctcgaagacaggcagaaggct

SEQ ID NO: 501660 - DNA, 30 bp, Artificial Sequence
  Synthetic oligonucleotide
gcggtacaatagaattcgagtttgaaggct

SEQ ID NO: 501661 - DNA, 30 bp, Artificial Sequence
  Synthetic oligonucleotide
tgttgcccctggatatttttatgccaggct

SEQ ID NO: 501662 - DNA, 30 bp, Artificial Sequence
  Synthetic oligonucleotide
attcccgtactgcgcttataatagcaggct

SEQ ID NO: 501663 - DNA, 30 bp, Artificial Sequence
  Synthetic oligonucleotide
cggaaacatccaaaaggtactcggcaggct

SEQ ID NO: 501664 - DNA, 30 bp, Artificial Sequence
  Synthetic oligonucleotide
gtgttgacgcggcgcaaggaagggcaggct

SEQ ID NO: 501665 - DNA, 30 bp, Artificial Sequence
  Synthetic oligonucleotide
gaaagaatctaaaattctacaggtcaggct

SEQ ID NO: 501666 - DNA, 30 bp, Artificial Sequence
  Synthetic oligonucleotide
gtacaatacgaaatgccaccggaagaggct

SEQ ID NO: 501667 - DNA, 30 bp, Artificial Sequence
  Synthetic oligonucleotide
aaccctatgaggtgagtagagccagaggct

SEQ ID NO: 501668 - DNA, 30 bp, Artificial Sequence
  Synthetic oligonucleotide
actgcagtagcactcgggtggctcgaggct

SEQ ID NO: 501669 - DNA, 30 bp, Artificial Sequence
  Synthetic oligonucleotide
ggaggtccagcggttaggtcgttcgaggct

SEQ ID NO: 501670 - DNA, 30 bp, Artificial Sequence
  Synthetic oligonucleotide
cttgaagttcgggcgagggcgggggaggct

SEQ ID NO: 501671 - DNA, 30 bp, Artificial Sequence
  Synthetic oligonucleotide
agaggcaacattctttttttattggaggct

SEQ ID NO: 501672 - DNA, 30 bp, Artificial Sequence
  Synthetic oligonucleotide
gtttcataagtcgataactccttggaggct

SEQ ID NO: 501673 - DNA, 30 bp, Artificial Sequence
  Synthetic oligonucleotide
taagttaactacattttatctgatgaggct

SEQ ID NO: 501674 - DNA, 30 bp, Artificial Sequence
  Synthetic oligonucleotide
tgcctcaaactatgtgttgggactgaggct

SEQ ID NO: 501675 - DNA, 30 bp, Artificial Sequence
  Synthetic oligonucleotide
tgcgacgccccgtcaccccccgagtaggct

SEQ ID NO: 501676 - DNA, 30 bp, Artificial Sequence
  Synthetic oligonucleotide
cagttgttgcacctcgaaagcacgtaggct

SEQ ID NO: 501677 - DNA, 30 bp, Artificial Sequence
  Synthetic oligonucleotide
cctttgacatcgctagggccgtcgtaggct

SEQ ID NO: 501678 - DNA, 30 bp, Artificial Sequence
  Synthetic oligonucleotide
ttccgtaatatgaccctcgcccacacggct

SEQ ID NO: 501679 - DNA, 30 bp, Artificial Sequence
  Synthetic oligonucleotide
attctgcgtcaaagaggctctagcacggct

SEQ ID NO: 501680 - DNA, 30 bp, Artificial Sequence
  Synthetic oligonucleotide
atatgcacgggggacgggcgaggcacggct

SEQ ID NO: 501681 - DNA, 30 bp, Artificial Sequence
  Synthetic oligonucleotide
aattctcacgggcggtcggtcgggacggct

SEQ ID NO: 501682 - DNA, 30 bp, Artificial Sequence
  Synthetic oligonucleotide
gaaggcgattgtccgttttcggatacggct

SEQ ID NO: 501683 - DNA, 30 bp, Artificial Sequence
  Synthetic oligonucleotide
ttctgaatcgctcgagtgccatgaccggct

SEQ ID NO: 501684 - DNA, 30 bp, Artificial Sequence
  Synthetic oligonucleotide
aaaaaattcccaagatttcgcagcccggct

SEQ ID NO: 501685 - DNA, 30 bp, Artificial Sequence
  Synthetic oligonucleotide
gaccatggacacgcgcgattggtgccggct

SEQ ID NO: 501686 - DNA, 30 bp, Artificial Sequence
  Synthetic oligonucleotide
atctatgacatgatgtatcttaacgcggct

SEQ ID NO: 501687 - DNA, 30 bp, Artificial Sequence
  Synthetic oligonucleotide
ctacagctgtattaagcgcgggacgcggct

SEQ ID NO: 501688 - DNA, 30 bp, Artificial Sequence
  Synthetic oligonucleotide
ggtcataacgggtaaccgggcttttcggct

SEQ ID NO: 501689 - DNA, 31 bp, Artificial Sequence
  Synthetic oligonucleotide
ccttaggcaactgggccacttttcaagggct

SEQ ID NO: 501690 - DNA, 30 bp, Artificial Sequence
  Synthetic oligonucleotide
gtgggtctcgcagacccgtacataagggct

SEQ ID NO: 501691 - DNA, 30 bp, Artificial Sequence
  Synthetic oligonucleotide
gtcacatctaacgggtctggccacagggct

SEQ ID NO: 501692 - DNA, 30 bp, Artificial Sequence
  Synthetic oligonucleotide
agaggccggctagaattggtgaagagggct

SEQ ID NO: 501693 - DNA, 31 bp, Artificial Sequence
  Synthetic oligonucleotide
ccttttttctgaatgtagtgagacgagggct

SEQ ID NO: 501694 - DNA, 30 bp, Artificial Sequence
  Synthetic oligonucleotide
gggctcttgcagccgctctctgggagggct

SEQ ID NO: 501695 - DNA, 30 bp, Artificial Sequence
  Synthetic oligonucleotide
gcttcttggaccgagtaaagtctgagggct

SEQ ID NO: 501696 - DNA, 30 bp, Artificial Sequence
  Synthetic oligonucleotide
gaatgttgcgcatcacaacgggctagggct

SEQ ID NO: 501697 - DNA, 30 bp, Artificial Sequence
  Synthetic oligonucleotide
aggtagccaactcggggtattggtagggct

SEQ ID NO: 501698 - DNA, 30 bp, Artificial Sequence
  Synthetic oligonucleotide
gctagcaataactaacccatgtttagggct

SEQ ID NO: 501699 - DNA, 30 bp, Artificial Sequence
  Synthetic oligonucleotide
ctctgggccccgacctcgaagtaacgggct

SEQ ID NO: 501700 - DNA, 30 bp, Artificial Sequence
  Synthetic oligonucleotide
gccttccctagattcgtacttccacgggct

SEQ ID NO: 501701 - DNA, 30 bp, Artificial Sequence
  Synthetic oligonucleotide
attggcctgcattccggaccgccgcgggct

SEQ ID NO: 501702 - DNA, 30 bp, Artificial Sequence
  Synthetic oligonucleotide
gaggaaccgtaccgtccctgatggcgggct

SEQ ID NO: 501703 - DNA, 30 bp, Artificial Sequence
  Synthetic oligonucleotide
aaatctacccacggtttagcgattcgggct

SEQ ID NO: 501704 - DNA, 30 bp, Artificial Sequence
  Synthetic oligonucleotide
tttgatccaaaatgcggtaccgacggggct

SEQ ID NO: 501705 - DNA, 30 bp, Artificial Sequence
  Synthetic oligonucleotide
atccaagtctcaatgagggactacggggct

SEQ ID NO: 501706 - DNA, 30 bp, Artificial Sequence
  Synthetic oligonucleotide
gagtagcctctgaactctagccgcggggct

SEQ ID NO: 501707 - DNA, 30 bp, Artificial Sequence
  Synthetic oligonucleotide
ccgcggccactgtgctaagtagtcggggct

SEQ ID NO: 501708 - DNA, 30 bp, Artificial Sequence
  Synthetic oligonucleotide
gccactcagccagaaccggtggtcggggct

SEQ ID NO: 501709 - DNA, 30 bp, Artificial Sequence
  Synthetic oligonucleotide
aattatcatcaacgcaaaatagcgggggct

SEQ ID NO: 501710 - DNA, 30 bp, Artificial Sequence
  Synthetic oligonucleotide
caagcgctccaagcctgaaaatggggggct

SEQ ID NO: 501711 - DNA, 30 bp, Artificial Sequence
  Synthetic oligonucleotide
tagtcagtctatccacgggtgaatggggct

SEQ ID NO: 501712 - DNA, 30 bp, Artificial Sequence
  Synthetic oligonucleotide
taagcggtctgtttgtttatcggtggggct

SEQ ID NO: 501713 - DNA, 30 bp, Artificial Sequence
  Synthetic oligonucleotide
caaacacggtcccgggccagtaaatgggct

SEQ ID NO: 501714 - DNA, 30 bp, Artificial Sequence
  Synthetic oligonucleotide
cttccatggcgcaggaaggggtaatgggct

SEQ ID NO: 501715 - DNA, 30 bp, Artificial Sequence
  Synthetic oligonucleotide
gccgcatatgttcagagttgttaatgggct

SEQ ID NO: 501716 - DNA, 30 bp, Artificial Sequence
  Synthetic oligonucleotide
ttctctagatataaaggagtagtatgggct

SEQ ID NO: 501717 - DNA, 30 bp, Artificial Sequence
  Synthetic oligonucleotide
atgggtttgctttatgtaataacctgggct

SEQ ID NO: 501718 - DNA, 30 bp, Artificial Sequence
  Synthetic oligonucleotide
gcaagaaacgtccgtgggtgcagctgggct

SEQ ID NO: 501719 - DNA, 30 bp, Artificial Sequence
  Synthetic oligonucleotide
taatggtttggggtaaacgttccgtgggct

SEQ ID NO: 501720 - DNA, 30 bp, Artificial Sequence
  Synthetic oligonucleotide
ccctttgcgttagaaaggaaagggtgggct

SEQ ID NO: 501721 - DNA, 30 bp, Artificial Sequence
  Synthetic oligonucleotide
aattggaaatattccatctacggttgggct

SEQ ID NO: 501722 - DNA, 30 bp, Artificial Sequence
  Synthetic oligonucleotide
tactgtttctgggggcaatgcatttgggct

SEQ ID NO: 501723 - DNA, 30 bp, Artificial Sequence
  Synthetic oligonucleotide
gggccactttcggaattcatagaaatggct

SEQ ID NO: 501724 - DNA, 30 bp, Artificial Sequence
  Synthetic oligonucleotide
cgtactcatatctataagctttaaatggct

SEQ ID NO: 501725 - DNA, 30 bp, Artificial Sequence
  Synthetic oligonucleotide
aagttgaccgaagcccacttcgcaatggct

SEQ ID NO: 501726 - DNA, 31 bp, Artificial Sequence
  Synthetic oligonucleotide
tcagtggttcgaaacgcacagaaagatggct

SEQ ID NO: 501727 - DNA, 30 bp, Artificial Sequence
  Synthetic oligonucleotide
tctatgatgaggcggtatgtccagatggct

SEQ ID NO: 501728 - DNA, 30 bp, Artificial Sequence
  Synthetic oligonucleotide
gccggcaccccgccttgggcagcgatggct

SEQ ID NO: 501729 - DNA, 30 bp, Artificial Sequence
  Synthetic oligonucleotide
cttcctctgttacgtcgtcgatatatggct

SEQ ID NO: 501730 - DNA, 30 bp, Artificial Sequence
  Synthetic oligonucleotide
ttgtttcgtcattaagaagcgggtatggct

SEQ ID NO: 501731 - DNA, 30 bp, Artificial Sequence
  Synthetic oligonucleotide
gtatctttaaatatgtaagtttttatggct

SEQ ID NO: 501732 - DNA, 30 bp, Artificial Sequence
  Synthetic oligonucleotide
gcagttggtaccataggatcccggctggct

SEQ ID NO: 501733 - DNA, 30 bp, Artificial Sequence
  Synthetic oligonucleotide
tgtgtacagagtgtttgtcacgcagtggct

SEQ ID NO: 501734 - DNA, 31 bp, Artificial Sequence
  Synthetic oligonucleotide
gagtgagaggggtaggctggctctcgtggct

SEQ ID NO: 501735 - DNA, 30 bp, Artificial Sequence
  Synthetic oligonucleotide
gcactatttgtattttcacaaccggtggct

SEQ ID NO: 501736 - DNA, 30 bp, Artificial Sequence
  Synthetic oligonucleotide
gcataatcctttaaagattaggatgtggct

SEQ ID NO: 501737 - DNA, 30 bp, Artificial Sequence
  Synthetic oligonucleotide
gcaagagagggggacacggggcttgtggct

SEQ ID NO: 501738 - DNA, 30 bp, Artificial Sequence
  Synthetic oligonucleotide
cgcgacaagtgcacaactcgataattggct

SEQ ID NO: 501739 - DNA, 30 bp, Artificial Sequence
  Synthetic oligonucleotide
cacaattgccggcagaggccgaccttggct

SEQ ID NO: 501740 - DNA, 30 bp, Artificial Sequence
  Synthetic oligonucleotide
gttccactgtactcttcaccaaatttggct

SEQ ID NO: 501741 - DNA, 30 bp, Artificial Sequence
  Synthetic oligonucleotide
atttagggtttgtgccttatttatttggct

SEQ ID NO: 501742 - DNA, 30 bp, Artificial Sequence
  Synthetic oligonucleotide
gaccctaatcggcttttattggacaatgct

SEQ ID NO: 501743 - DNA, 30 bp, Artificial Sequence
  Synthetic oligonucleotide
ttttttggggtggacgagatcgtcaatgct

SEQ ID NO: 501744 - DNA, 30 bp, Artificial Sequence
  Synthetic oligonucleotide
tatgttgattgagccgctgatcataatgct

SEQ ID NO: 501745 - DNA, 30 bp, Artificial Sequence
  Synthetic oligonucleotide
actaacttctgtgaatgatatcataatgct

SEQ ID NO: 501746 - DNA, 30 bp, Artificial Sequence
  Synthetic oligonucleotide
taaagggcgccgtctgcattttataatgct

SEQ ID NO: 501747 - DNA, 30 bp, Artificial Sequence
  Synthetic oligonucleotide
aaccaaggttaaccttaaagaacacatgct

SEQ ID NO: 501748 - DNA, 30 bp, Artificial Sequence
  Synthetic oligonucleotide
tacatccttcctatcgttctaacccatgct

SEQ ID NO: 501749 - DNA, 30 bp, Artificial Sequence
  Synthetic oligonucleotide
tctgatggatccggtgggaacccgcatgct

SEQ ID NO: 501750 - DNA, 30 bp, Artificial Sequence
  Synthetic oligonucleotide
tttcaccgcccatgccgcaagtcgcatgct

SEQ ID NO: 501751 - DNA, 30 bp, Artificial Sequence
  Synthetic oligonucleotide
aacccttttcgttccgatgaaatgcatgct

SEQ ID NO: 501752 - DNA, 30 bp, Artificial Sequence
  Synthetic oligonucleotide
tctaaggagcgcttaagttaagatcatgct

SEQ ID NO: 501753 - DNA, 30 bp, Artificial Sequence
  Synthetic oligonucleotide
gcgatggcggcgtagagctccgaagatgct

SEQ ID NO: 501754 - DNA, 30 bp, Artificial Sequence
  Synthetic oligonucleotide
ttcatggcactctggcttatgtccgatgct

SEQ ID NO: 501755 - DNA, 30 bp, Artificial Sequence
  Synthetic oligonucleotide
gccgattcaaatagaggtctttccgatgct

SEQ ID NO: 501756 - DNA, 30 bp, Artificial Sequence
  Synthetic oligonucleotide
tctacgcgttagtatagacagccatatgct

SEQ ID NO: 501757 - DNA, 30 bp, Artificial Sequence
  Synthetic oligonucleotide
atccctgcatcttcgcaggcgtcatatgct

SEQ ID NO: 501758 - DNA, 30 bp, Artificial Sequence
  Synthetic oligonucleotide
gataagcttcttgccgtggggtcatatgct

SEQ ID NO: 501759 - DNA, 30 bp, Artificial Sequence
  Synthetic oligonucleotide
ccatgatatcgtactttagttatatatgct

SEQ ID NO: 501760 - DNA, 30 bp, Artificial Sequence
  Synthetic oligonucleotide
ctgcaccgctgcgagacacccttatatgct

SEQ ID NO: 501761 - DNA, 30 bp, Artificial Sequence
  Synthetic oligonucleotide
aacacaagtcttgcgaacgcgggctatgct

SEQ ID NO: 501762 - DNA, 30 bp, Artificial Sequence
  Synthetic oligonucleotide
caatagatcaggagtcctacaatgtatgct

SEQ ID NO: 501763 - DNA, 30 bp, Artificial Sequence
  Synthetic oligonucleotide
aagttccttacagactaatggtcttatgct

SEQ ID NO: 501764 - DNA, 30 bp, Artificial Sequence
  Synthetic oligonucleotide
tttctactagacaccggcagtctttatgct

SEQ ID NO: 501765 - DNA, 30 bp, Artificial Sequence
  Synthetic oligonucleotide
cagctgtaccatgcgatatgctgcactgct

SEQ ID NO: 501766 - DNA, 30 bp, Artificial Sequence
  Synthetic oligonucleotide
tcctatctgtggacgcccctgagtactgct

SEQ ID NO: 501767 - DNA, 30 bp, Artificial Sequence
  Synthetic oligonucleotide
atgggatcttggagatagggtcgtactgct

SEQ ID NO: 501768 - DNA, 30 bp, Artificial Sequence
  Synthetic oligonucleotide
ggtgggttgctctaggcaagacgacctgct

SEQ ID NO: 501769 - DNA, 30 bp, Artificial Sequence
  Synthetic oligonucleotide
agtcatcggctacacaagactctacctgct

SEQ ID NO: 501770 - DNA, 30 bp, Artificial Sequence
  Synthetic oligonucleotide
ctatgtagatctagtgccaccgggcctgct

SEQ ID NO: 501771 - DNA, 30 bp, Artificial Sequence
  Synthetic oligonucleotide
aagttatgtcttgcgctacgctctcctgct

SEQ ID NO: 501772 - DNA, 30 bp, Artificial Sequence
  Synthetic oligonucleotide
agcccaacgcttttgtgaaacaaagctgct

SEQ ID NO: 501773 - DNA, 30 bp, Artificial Sequence
  Synthetic oligonucleotide
ttagacgcttgctgctataccttcgctgct

SEQ ID NO: 501774 - DNA, 30 bp, Artificial Sequence
  Synthetic oligonucleotide
gcaagaggaaccccttccattggtgctgct

SEQ ID NO: 501775 - DNA, 30 bp, Artificial Sequence
  Synthetic oligonucleotide
gaaagtgcccgtataaatattccaagtgct

SEQ ID NO: 501776 - DNA, 30 bp, Artificial Sequence
  Synthetic oligonucleotide
agcacaatggcttcgtagtagctaagtgct

SEQ ID NO: 501777 - DNA, 30 bp, Artificial Sequence
  Synthetic oligonucleotide
atgtgattttatccgtttaagtgcagtgct

SEQ ID NO: 501778 - DNA, 30 bp, Artificial Sequence
  Synthetic oligonucleotide
taatcgtcggtaggcagcggaatcagtgct

SEQ ID NO: 501779 - DNA, 30 bp, Artificial Sequence
  Synthetic oligonucleotide
agcacgttataaggcatgtagcatagtgct

SEQ ID NO: 501780 - DNA, 30 bp, Artificial Sequence
  Synthetic oligonucleotide
taaggccgcgatttgcccaggtttagtgct

SEQ ID NO: 501781 - DNA, 30 bp, Artificial Sequence
  Synthetic oligonucleotide
agaagtctattttatcatatcacacgtgct

SEQ ID NO: 501782 - DNA, 30 bp, Artificial Sequence
  Synthetic oligonucleotide
cgcagcatatctcaggccgcataccgtgct

SEQ ID NO: 501783 - DNA, 30 bp, Artificial Sequence
  Synthetic oligonucleotide
cacggcaagcccagatgactgaatcgtgct

SEQ ID NO: 501784 - DNA, 30 bp, Artificial Sequence
  Synthetic oligonucleotide
tagagcgactctctatgggccctaggtgct

SEQ ID NO: 501785 - DNA, 30 bp, Artificial Sequence
  Synthetic oligonucleotide
ttagctaactgcgaaatataaaccggtgct

SEQ ID NO: 501786 - DNA, 30 bp, Artificial Sequence
  Synthetic oligonucleotide
tcaagcccaggcaatctcttgccgggtgct

SEQ ID NO: 501787 - DNA, 30 bp, Artificial Sequence
  Synthetic oligonucleotide
taactaaagcttccattcagccatggtgct

SEQ ID NO: 501788 - DNA, 30 bp, Artificial Sequence
  Synthetic oligonucleotide
ggctacagatatgcattgagtattggtgct

SEQ ID NO: 501789 - DNA, 30 bp, Artificial Sequence
  Synthetic oligonucleotide
ccggaaactaatctttggaaagtatgtgct

SEQ ID NO: 501790 - DNA, 30 bp, Artificial Sequence
  Synthetic oligonucleotide
cgtacgtacaacaattgggtcaattgtgct

SEQ ID NO: 501791 - DNA, 30 bp, Artificial Sequence
  Synthetic oligonucleotide
gcaacccccctccgcagccattcttgtgct

SEQ ID NO: 501792 - DNA, 30 bp, Artificial Sequence
  Synthetic oligonucleotide
tatttaagttaatgtatgtgaatttgtgct

SEQ ID NO: 501793 - DNA, 30 bp, Artificial Sequence
  Synthetic oligonucleotide
gcagtggtcctaaattactgcaaaattgct

SEQ ID NO: 501794 - DNA, 30 bp, Artificial Sequence
  Synthetic oligonucleotide
aagcaatgttcgggcaagggtgaaattgct

SEQ ID NO: 501795 - DNA, 30 bp, Artificial Sequence
  Synthetic oligonucleotide
aatgatgtacggatcgcagatttcattgct

SEQ ID NO: 501796 - DNA, 30 bp, Artificial Sequence
  Synthetic oligonucleotide
tttccggatacggtacagagctaacttgct

SEQ ID NO: 501797 - DNA, 30 bp, Artificial Sequence
  Synthetic oligonucleotide
aatggccaggccacgcggtgcggacttgct

SEQ ID NO: 501798 - DNA, 30 bp, Artificial Sequence
  Synthetic oligonucleotide
tatgcaagaatggtgatagttgtacttgct

SEQ ID NO: 501799 - DNA, 30 bp, Artificial Sequence
  Synthetic oligonucleotide
tacgagaccgggcgagacccgtaccttgct

SEQ ID NO: 501800 - DNA, 30 bp, Artificial Sequence
  Synthetic oligonucleotide
aggcagcgttgacatggagccatccttgct

SEQ ID NO: 501801 - DNA, 30 bp, Artificial Sequence
  Synthetic oligonucleotide
cccaaggaatctgagttgacgtagcttgct

SEQ ID NO: 501802 - DNA, 30 bp, Artificial Sequence
  Synthetic oligonucleotide
atacgttcattcttcctcatatcggttgct

SEQ ID NO: 501803 - DNA, 30 bp, Artificial Sequence
  Synthetic oligonucleotide
agttgcgcgcaggtcaacagctgtgttgct

SEQ ID NO: 501804 - DNA, 30 bp, Artificial Sequence
  Synthetic oligonucleotide
ttgttttcgggagaataagcaaaatttgct

SEQ ID NO: 501805 - DNA, 30 bp, Artificial Sequence
  Synthetic oligonucleotide
taggcctgtgtggaatacttagaatttgct

SEQ ID NO: 501806 - DNA, 30 bp, Artificial Sequence
  Synthetic oligonucleotide
tagttttaagttcatagccccgcctttgct

SEQ ID NO: 501807 - DNA, 30 bp, Artificial Sequence
  Synthetic oligonucleotide
tattatatatataccctcatgcgctttgct

SEQ ID NO: 501808 - DNA, 30 bp, Artificial Sequence
  Synthetic oligonucleotide
cttatattaatagatgttccaaagtttgct

SEQ ID NO: 501809 - DNA, 30 bp, Artificial Sequence
  Synthetic oligonucleotide
gacgaagaggtcaatggcaagcattttgct

SEQ ID NO: 501810 - DNA, 30 bp, Artificial Sequence
  Synthetic oligonucleotide
tcaggtgtcgaagtcgatatttattttgct

SEQ ID NO: 501811 - DNA, 30 bp, Artificial Sequence
  Synthetic oligonucleotide
gttagatttagaaattcgtttgtttttgct

SEQ ID NO: 501812 - DNA, 30 bp, Artificial Sequence
  Synthetic oligonucleotide
gatcctcactcagttgagtcgtaaaaatct

SEQ ID NO: 501813 - DNA, 30 bp, Artificial Sequence
  Synthetic oligonucleotide
gagtgcgtcgtgcaggtaaatccaaaatct

SEQ ID NO: 501814 - DNA, 30 bp, Artificial Sequence
  Synthetic oligonucleotide
gaaaatgtggcatctcatgggttaaaatct

SEQ ID NO: 501815 - DNA, 30 bp, Artificial Sequence
  Synthetic oligonucleotide
gtgtgtagatattacattattttaaaatct

SEQ ID NO: 501816 - DNA, 30 bp, Artificial Sequence
  Synthetic oligonucleotide
actccactattaggcaggatatttaaatct

SEQ ID NO: 501817 - DNA, 30 bp, Artificial Sequence
  Synthetic oligonucleotide
agaaatggattcttgcacggtctacaatct

SEQ ID NO: 501818 - DNA, 30 bp, Artificial Sequence
  Synthetic oligonucleotide
actcgttttaatgaggtttgagtccaatct

SEQ ID NO: 501819 - DNA, 30 bp, Artificial Sequence
  Synthetic oligonucleotide
tctagttgagctaacgttcaagagcaatct

SEQ ID NO: 501820 - DNA, 30 bp, Artificial Sequence
  Synthetic oligonucleotide
cgttccttactagcaccccagaatcaatct

SEQ ID NO: 501821 - DNA, 30 bp, Artificial Sequence
  Synthetic oligonucleotide
tttgttgcaaggatatctaagtttcaatct

SEQ ID NO: 501822 - DNA, 30 bp, Artificial Sequence
  Synthetic oligonucleotide
tttagcttgctatgtaaagtgctcgaatct

SEQ ID NO: 501823 - DNA, 30 bp, Artificial Sequence
  Synthetic oligonucleotide
tagaataccggagcggggttcacggaatct

SEQ ID NO: 501824 - DNA, 30 bp, Artificial Sequence
  Synthetic oligonucleotide
tacgctgcgtttttagattacagggaatct

SEQ ID NO: 501825 - DNA, 30 bp, Artificial Sequence
  Synthetic oligonucleotide
atattgggccagccgatacctatggaatct

SEQ ID NO: 501826 - DNA, 30 bp, Artificial Sequence
  Synthetic oligonucleotide
gtttacacgtctaccacggcgaagtaatct

SEQ ID NO: 501827 - DNA, 30 bp, Artificial Sequence
  Synthetic oligonucleotide
tcttgtggttgcgctaagagagagtaatct

SEQ ID NO: 501828 - DNA, 30 bp, Artificial Sequence
  Synthetic oligonucleotide
agactctgcatgaccgagtttgagtaatct

SEQ ID NO: 501829 - DNA, 30 bp, Artificial Sequence
  Synthetic oligonucleotide
gattcatggtaagtcaatacttggtaatct

SEQ ID NO: 501830 - DNA, 30 bp, Artificial Sequence
  Synthetic oligonucleotide
acaagttgttcgaccttatgcgtgtaatct

SEQ ID NO: 501831 - DNA, 30 bp, Artificial Sequence
  Synthetic oligonucleotide
aggcgcaagattcgatggtaaagttaatct

SEQ ID NO: 501832 - DNA, 30 bp, Artificial Sequence
  Synthetic oligonucleotide
cgcaatgccgccgggtgttttcgaacatct

SEQ ID NO: 501833 - DNA, 30 bp, Artificial Sequence
  Synthetic oligonucleotide
tgcgcgcagacttgcggggggtgaacatct

SEQ ID NO: 501834 - DNA, 30 bp, Artificial Sequence
  Synthetic oligonucleotide
taaacctgtgttgactaacggataacatct

SEQ ID NO: 501835 - DNA, 30 bp, Artificial Sequence
  Synthetic oligonucleotide
attcgcggcagatgttactcgatcacatct

SEQ ID NO: 501836 - DNA, 29 bp, Artificial Sequence
  Synthetic oligonucleotide
gaaatgtaactggcctaatggtgacatct

SEQ ID NO: 501837 - DNA, 30 bp, Artificial Sequence
  Synthetic oligonucleotide
ctattttcacggaaattaacgcatacatct

SEQ ID NO: 501838 - DNA, 30 bp, Artificial Sequence
  Synthetic oligonucleotide
ggtgactcgtgcgcgggcgggtaaccatct

SEQ ID NO: 501839 - DNA, 30 bp, Artificial Sequence
  Synthetic oligonucleotide
cagctggattagaggccgtgagacccatct

SEQ ID NO: 501840 - DNA, 30 bp, Artificial Sequence
  Synthetic oligonucleotide
aatgaagcgcaaggtaggcggaagccatct

SEQ ID NO: 501841 - DNA, 29 bp, Artificial Sequence
  Synthetic oligonucleotide
tttctattcgaggtatggctaagccatct

SEQ ID NO: 501842 - DNA, 30 bp, Artificial Sequence
  Synthetic oligonucleotide
ctagtcctattggatcccgtgtcgccatct

SEQ ID NO: 501843 - DNA, 30 bp, Artificial Sequence
  Synthetic oligonucleotide
gattatcggccacaacacccctctccatct

SEQ ID NO: 501844 - DNA, 30 bp, Artificial Sequence
  Synthetic oligonucleotide
actgaattcctcgttcggtaatgagcatct

SEQ ID NO: 501845 - DNA, 30 bp, Artificial Sequence
  Synthetic oligonucleotide
attgctcctgggcagtgaggtttcgcatct

SEQ ID NO: 501846 - DNA, 30 bp, Artificial Sequence
  Synthetic oligonucleotide
ttctggcttatcctttaagatatggcatct

SEQ ID NO: 501847 - DNA, 30 bp, Artificial Sequence
  Synthetic oligonucleotide
ttttatgtttttagggtactattggcatct

SEQ ID NO: 501848 - DNA, 30 bp, Artificial Sequence
  Synthetic oligonucleotide
tggtctccattacggagaatgatatcatct

SEQ ID NO: 501849 - DNA, 30 bp, Artificial Sequence
  Synthetic oligonucleotide
gggatgtcctcaaatttaggagactcatct

SEQ ID NO: 501850 - DNA, 30 bp, Artificial Sequence
  Synthetic oligonucleotide
gtttgttaaggcaggcggtatgactcatct

SEQ ID NO: 501851 - DNA, 30 bp, Artificial Sequence
  Synthetic oligonucleotide
aaaatataagggcgcagcgggtagtcatct

SEQ ID NO: 501852 - DNA, 30 bp, Artificial Sequence
  Synthetic oligonucleotide
cccacagcgctggtaccggcgccttcatct

SEQ ID NO: 501853 - DNA, 30 bp, Artificial Sequence
  Synthetic oligonucleotide
ttcaccgcagcagaaaagattgaaagatct

SEQ ID NO: 501854 - DNA, 30 bp, Artificial Sequence
  Synthetic oligonucleotide
aaccaagcgtccccgtattggctaagatct

SEQ ID NO: 501855 - DNA, 29 bp, Artificial Sequence
  Synthetic oligonucleotide
tcgaagatgaagtggtaccgcagagatct

SEQ ID NO: 501856 - DNA, 30 bp, Artificial Sequence
  Synthetic oligonucleotide
ctaaaacgaagattgtgcaaagagagatct

SEQ ID NO: 501857 - DNA, 30 bp, Artificial Sequence
  Synthetic oligonucleotide
tcgaaagccatctctcacgcagtgagatct

SEQ ID NO: 501858 - DNA, 30 bp, Artificial Sequence
  Synthetic oligonucleotide
accccgcgactggaggggagacgtagatct

SEQ ID NO: 501859 - DNA, 30 bp, Artificial Sequence
  Synthetic oligonucleotide
ctccttctctagccggcttattttagatct

SEQ ID NO: 501860 - DNA, 30 bp, Artificial Sequence
  Synthetic oligonucleotide
atccttcctcgtaacggatagtcccgatct

SEQ ID NO: 501861 - DNA, 30 bp, Artificial Sequence
  Synthetic oligonucleotide
gacttagtatccgcatcctgctacggatct

SEQ ID NO: 501862 - DNA, 30 bp, Artificial Sequence
  Synthetic oligonucleotide
ctagcggtagtacttctaccttagggatct

SEQ ID NO: 501863 - DNA, 30 bp, Artificial Sequence
  Synthetic oligonucleotide
acaagctatttgcatcgccctaggggatct

SEQ ID NO: 501864 - DNA, 30 bp, Artificial Sequence
  Synthetic oligonucleotide
tgccacgctatagtacactagcatggatct

SEQ ID NO: 501865 - DNA, 30 bp, Artificial Sequence
  Synthetic oligonucleotide
ttgattatgtactccatatccgctggatct

SEQ ID NO: 501866 - DNA, 30 bp, Artificial Sequence
  Synthetic oligonucleotide
gcagctgaccggcccacgtgtccatgatct

SEQ ID NO: 501867 - DNA, 30 bp, Artificial Sequence
  Synthetic oligonucleotide
gcaaatgagaacctctgttatatctgatct

SEQ ID NO: 501868 - DNA, 29 bp, Artificial Sequence
  Synthetic oligonucleotide
ggaaaaagcgagccttaatgaggtgatct

SEQ ID NO: 501869 - DNA, 30 bp, Artificial Sequence
  Synthetic oligonucleotide
gcaacaaggtattaagcgtgcgggtgatct

SEQ ID NO: 501870 - DNA, 30 bp, Artificial Sequence
  Synthetic oligonucleotide
cctgagcatatactcgttggtcattgatct

SEQ ID NO: 501871 - DNA, 30 bp, Artificial Sequence
  Synthetic oligonucleotide
atcagaggtatggtattcattttaatatct

SEQ ID NO: 501872 - DNA, 30 bp, Artificial Sequence
  Synthetic oligonucleotide
tgtttacggggcatacttaaacgcatatct

SEQ ID NO: 501873 - DNA, 30 bp, Artificial Sequence
  Synthetic oligonucleotide
ctagggattgccgcagagaatatcatatct

SEQ ID NO: 501874 - DNA, 30 bp, Artificial Sequence
  Synthetic oligonucleotide
tacaacatccctgatctttggttcatatct

SEQ ID NO: 501875 - DNA, 30 bp, Artificial Sequence
  Synthetic oligonucleotide
cgtaggttctcgtcgctagattagatatct

SEQ ID NO: 501876 - DNA, 30 bp, Artificial Sequence
  Synthetic oligonucleotide
aaagttatatcttatggtatatggatatct

SEQ ID NO: 501877 - DNA, 30 bp, Artificial Sequence
  Synthetic oligonucleotide
gcaattcgaccgtgccgggcggatatatct

SEQ ID NO: 501878 - DNA, 30 bp, Artificial Sequence
  Synthetic oligonucleotide
ttccacacggtgctcaaacggaaactatct

SEQ ID NO: 501879 - DNA, 30 bp, Artificial Sequence
  Synthetic oligonucleotide
agcggcgagggctcccctagcatcctatct

SEQ ID NO: 501880 - DNA, 30 bp, Artificial Sequence
  Synthetic oligonucleotide
caatgccgcttaaggaataacctgctatct

SEQ ID NO: 501881 - DNA, 30 bp, Artificial Sequence
  Synthetic oligonucleotide
ggtgagttggcctatatagcccttctatct

SEQ ID NO: 501882 - DNA, 30 bp, Artificial Sequence
  Synthetic oligonucleotide
aaatgatttatcgctagaggactagtatct

SEQ ID NO: 501883 - DNA, 30 bp, Artificial Sequence
  Synthetic oligonucleotide
tttctaagtgcgacacacctgtccgtatct

SEQ ID NO: 501884 - DNA, 30 bp, Artificial Sequence
  Synthetic oligonucleotide
gttgagtggcagcaattctatatcgtatct

SEQ ID NO: 501885 - DNA, 30 bp, Artificial Sequence
  Synthetic oligonucleotide
ttcagtgttgccccgcgcaggtgggtatct

SEQ ID NO: 501886 - DNA, 30 bp, Artificial Sequence
  Synthetic oligonucleotide
aaaagcccagttttgttattgcgtgtatct

SEQ ID NO: 501887 - DNA, 30 bp, Artificial Sequence
  Synthetic oligonucleotide
gcaagtttataagctagtcgcctattatct

SEQ ID NO: 501888 - DNA, 30 bp, Artificial Sequence
  Synthetic oligonucleotide
tagagcatttgccaaatcttctagttatct

SEQ ID NO: 501889 - DNA, 30 bp, Artificial Sequence
  Synthetic oligonucleotide
agattcaatcgagcgctgccgacgttatct

SEQ ID NO: 501890 - DNA, 30 bp, Artificial Sequence
  Synthetic oligonucleotide
acaaagaagccgcaaggacgcatgttatct

SEQ ID NO: 501891 - DNA, 30 bp, Artificial Sequence
  Synthetic oligonucleotide
tttactatcgtgccagattttagtttatct

SEQ ID NO: 501892 - DNA, 30 bp, Artificial Sequence
  Synthetic oligonucleotide
ttaatagcctagtttatcttggaaaactct

SEQ ID NO: 501893 - DNA, 30 bp, Artificial Sequence
  Synthetic oligonucleotide
cacgcaaacgggcaatggtgcagaaactct

SEQ ID NO: 501894 - DNA, 30 bp, Artificial Sequence
  Synthetic oligonucleotide
gaaatagcccccctctaccgggtcaactct

SEQ ID NO: 501895 - DNA, 30 bp, Artificial Sequence
  Synthetic oligonucleotide
ttcaagacggtagcaccgattcggaactct

SEQ ID NO: 501896 - DNA, 30 bp, Artificial Sequence
  Synthetic oligonucleotide
cattctcacgaggtcgacaggactaactct

SEQ ID NO: 501897 - DNA, 30 bp, Artificial Sequence
  Synthetic oligonucleotide
catatacccctttgacggttttctaactct

SEQ ID NO: 501898 - DNA, 30 bp, Artificial Sequence
  Synthetic oligonucleotide
tgccaccctccgatagatgatatacactct

SEQ ID NO: 501899 - DNA, 30 bp, Artificial Sequence
  Synthetic oligonucleotide
tttcaaatcctagaccggcgctaccactct

SEQ ID NO: 501900 - DNA, 30 bp, Artificial Sequence
  Synthetic oligonucleotide
ctagatatgatagatttcgcttcccactct

SEQ ID NO: 501901 - DNA, 30 bp, Artificial Sequence
  Synthetic oligonucleotide
ccgcgaagtaagtgcagattatagcactct

SEQ ID NO: 501902 - DNA, 30 bp, Artificial Sequence
  Synthetic oligonucleotide
gactaagtattctcagggcattagcactct

SEQ ID NO: 501903 - DNA, 30 bp, Artificial Sequence
  Synthetic oligonucleotide
gaattgtaacgagtcattatagtgcactct

SEQ ID NO: 501904 - DNA, 30 bp, Artificial Sequence
  Synthetic oligonucleotide
cggcaagcaacgaagtgtagcaaagactct

SEQ ID NO: 501905 - DNA, 30 bp, Artificial Sequence
  Synthetic oligonucleotide
aactgggtgtactagaccccgtaagactct

SEQ ID NO: 501906 - DNA, 30 bp, Artificial Sequence
  Synthetic oligonucleotide
accatagacgtccattttcgagcagactct

SEQ ID NO: 501907 - DNA, 30 bp, Artificial Sequence
  Synthetic oligonucleotide
acctacggagtggccgtctaggtcgactct

SEQ ID NO: 501908 - DNA, 30 bp, Artificial Sequence
  Synthetic oligonucleotide
gacgtcttactacaattacgtagggactct

SEQ ID NO: 501909 - DNA, 30 bp, Artificial Sequence
  Synthetic oligonucleotide
tagcagagcattgttggttagaatgactct

SEQ ID NO: 501910 - DNA, 30 bp, Artificial Sequence
  Synthetic oligonucleotide
ctatgaggtcccagcccggcgtatgactct

SEQ ID NO: 501911 - DNA, 30 bp, Artificial Sequence
  Synthetic oligonucleotide
ttgtagacgatacaatgtcagtctgactct

SEQ ID NO: 501912 - DNA, 30 bp, Artificial Sequence
  Synthetic oligonucleotide
gaaaagctttggatccgccacatatactct

SEQ ID NO: 501913 - DNA, 30 bp, Artificial Sequence
  Synthetic oligonucleotide
aacgacttgccaccgacagctgcgtactct

SEQ ID NO: 501914 - DNA, 30 bp, Artificial Sequence
  Synthetic oligonucleotide
gcatgagcgggttgcaagtgacggtactct

SEQ ID NO: 501915 - DNA, 30 bp, Artificial Sequence
  Synthetic oligonucleotide
gcctaagaggagattttcacagtttactct

SEQ ID NO: 501916 - DNA, 30 bp, Artificial Sequence
  Synthetic oligonucleotide
tagtcgacatcaaggggtggagacacctct

SEQ ID NO: 501917 - DNA, 30 bp, Artificial Sequence
  Synthetic oligonucleotide
cgcttaaggatcgcccagaggtacacctct

SEQ ID NO: 501918 - DNA, 30 bp, Artificial Sequence
  Synthetic oligonucleotide
actctccacgggtggcaaaggcctacctct

SEQ ID NO: 501919 - DNA, 30 bp, Artificial Sequence
  Synthetic oligonucleotide
cgaacacggccgcagaaagggagtacctct

SEQ ID NO: 501920 - DNA, 30 bp, Artificial Sequence
  Synthetic oligonucleotide
cccgttgaaatcggtcgtgatgttacctct

SEQ ID NO: 501921 - DNA, 30 bp, Artificial Sequence
  Synthetic oligonucleotide
gctggctctaattatgtctttagcccctct

SEQ ID NO: 501922 - DNA, 30 bp, Artificial Sequence
  Synthetic oligonucleotide
tttacagggatagtactgaggatcccctct

SEQ ID NO: 501923 - DNA, 30 bp, Artificial Sequence
  Synthetic oligonucleotide
gggattccggagtcggtatgcccgccctct

SEQ ID NO: 501924 - DNA, 30 bp, Artificial Sequence
  Synthetic oligonucleotide
gttgagtcccctttgcgttcccgtccctct

SEQ ID NO: 501925 - DNA, 30 bp, Artificial Sequence
  Synthetic oligonucleotide
ggtccgtgtcccgaggtgtaggttccctct

SEQ ID NO: 501926 - DNA, 30 bp, Artificial Sequence
  Synthetic oligonucleotide
attcgggttttgaggcatggattcgcctct

SEQ ID NO: 501927 - DNA, 30 bp, Artificial Sequence
  Synthetic oligonucleotide
gccggctgcacgggtaaagcgtaggcctct

SEQ ID NO: 501928 - DNA, 30 bp, Artificial Sequence
  Synthetic oligonucleotide
gctccctctagttcacggcaagtggcctct

SEQ ID NO: 501929 - DNA, 30 bp, Artificial Sequence
  Synthetic oligonucleotide
ttccggatactattttatttttgctcctct

SEQ ID NO: 501930 - DNA, 30 bp, Artificial Sequence
  Synthetic oligonucleotide
taccgaaacacggttgggaggacaagctct

SEQ ID NO: 501931 - DNA, 30 bp, Artificial Sequence
  Synthetic oligonucleotide
cctatactgggagcaagcgtttcaagctct

SEQ ID NO: 501932 - DNA, 30 bp, Artificial Sequence
  Synthetic oligonucleotide
gagtaacctgcggcaggctatggaagctct

SEQ ID NO: 501933 - DNA, 30 bp, Artificial Sequence
  Synthetic oligonucleotide
aagagagactgtgttcgaccgcagagctct

SEQ ID NO: 501934 - DNA, 30 bp, Artificial Sequence
  Synthetic oligonucleotide
aaccatggatagggtaaattacatagctct

SEQ ID NO: 501935 - DNA, 30 bp, Artificial Sequence
  Synthetic oligonucleotide
gtactgtagtgcgaatatggctttagctct

SEQ ID NO: 501936 - DNA, 30 bp, Artificial Sequence
  Synthetic oligonucleotide
ccttattgcggagactgacgataacgctct

SEQ ID NO: 501937 - DNA, 30 bp, Artificial Sequence
  Synthetic oligonucleotide
taaaactgtggcttagggtgtctacgctct

SEQ ID NO: 501938 - DNA, 30 bp, Artificial Sequence
  Synthetic oligonucleotide
atccgcttttaagtggatagggtacgctct

SEQ ID NO: 501939 - DNA, 30 bp, Artificial Sequence
  Synthetic oligonucleotide
gaaaggaatacacagtaacgacgccgctct

SEQ ID NO: 501940 - DNA, 30 bp, Artificial Sequence
  Synthetic oligonucleotide
cctagggcgatgagcgtttaggtccgctct

SEQ ID NO: 501941 - DNA, 34 bp, Artificial Sequence
  Synthetic oligonucleotide
tgttttccttcttacctttatgctgcgtcgctct

SEQ ID NO: 501942 - DNA, 30 bp, Artificial Sequence
  Synthetic oligonucleotide
tggcatcaaacaaccagaatgattcgctct

SEQ ID NO: 501943 - DNA, 30 bp, Artificial Sequence
  Synthetic oligonucleotide
tggttgacactagaggcactttaaggctct

SEQ ID NO: 501944 - DNA, 30 bp, Artificial Sequence
  Synthetic oligonucleotide
cgttgggtacctattttcgacccaggctct

SEQ ID NO: 501945 - DNA, 30 bp, Artificial Sequence
  Synthetic oligonucleotide
ccccgcaattcaattggggattccggctct

SEQ ID NO: 501946 - DNA, 30 bp, Artificial Sequence
  Synthetic oligonucleotide
atatgggttatcacagagtccttcggctct

SEQ ID NO: 501947 - DNA, 30 bp, Artificial Sequence
  Synthetic oligonucleotide
gtccagcctcacatattaaacaaatgctct

SEQ ID NO: 501948 - DNA, 30 bp, Artificial Sequence
  Synthetic oligonucleotide
ggacagttggagaagttaggcgtatgctct

SEQ ID NO: 501949 - DNA, 30 bp, Artificial Sequence
  Synthetic oligonucleotide
gagtcatatggaagctttaacatttgctct

SEQ ID NO: 501950 - DNA, 30 bp, Artificial Sequence
  Synthetic oligonucleotide
taagatggtttgatgaggagcaacatctct

SEQ ID NO: 501951 - DNA, 30 bp, Artificial Sequence
  Synthetic oligonucleotide
gaaggttttgtagagaacctgatcatctct

SEQ ID NO: 501952 - DNA, 30 bp, Artificial Sequence
  Synthetic oligonucleotide
aacaatttgggtatctcctcactcatctct

SEQ ID NO: 501953 - DNA, 30 bp, Artificial Sequence
  Synthetic oligonucleotide
cataaggacccattaaaagcgcagatctct

SEQ ID NO: 501954 - DNA, 30 bp, Artificial Sequence
  Synthetic oligonucleotide
tgtaagtatgtgtcctcataatcgatctct

SEQ ID NO: 501955 - DNA, 30 bp, Artificial Sequence
  Synthetic oligonucleotide
ggcagttcaaacgaccatccagatatctct

SEQ ID NO: 501956 - DNA, 30 bp, Artificial Sequence
  Synthetic oligonucleotide
ctggtcccagcttatattaatgatatctct

SEQ ID NO: 501957 - DNA, 30 bp, Artificial Sequence
  Synthetic oligonucleotide
aaacgggtgaccgcgctccccggcctctct

SEQ ID NO: 501958 - DNA, 30 bp, Artificial Sequence
  Synthetic oligonucleotide
atatagaacgctgccaaaggaccgctctct

SEQ ID NO: 501959 - DNA, 30 bp, Artificial Sequence
  Synthetic oligonucleotide
gtatgcagcttggaggaggacgatctctct

SEQ ID NO: 501960 - DNA, 30 bp, Artificial Sequence
  Synthetic oligonucleotide
acttgatcgtagctaagtggaaaagtctct

SEQ ID NO: 501961 - DNA, 30 bp, Artificial Sequence
  Synthetic oligonucleotide
gatggacggcaagagttagaaccagtctct

SEQ ID NO: 501962 - DNA, 29 bp, Artificial Sequence
  Synthetic oligonucleotide
tatttagggaataccatgaatcagtctct

SEQ ID NO: 501963 - DNA, 30 bp, Artificial Sequence
  Synthetic oligonucleotide
atatcttggtttagcgaagagatagtctct

SEQ ID NO: 501964 - DNA, 30 bp, Artificial Sequence
  Synthetic oligonucleotide
gtttaggcagcgctgactctatacgtctct

SEQ ID NO: 501965 - DNA, 30 bp, Artificial Sequence
  Synthetic oligonucleotide
gcacgctgctctgatgccaggttcgtctct

SEQ ID NO: 501966 - DNA, 30 bp, Artificial Sequence
  Synthetic oligonucleotide
gggagtctgcttatccggtggttcgtctct

SEQ ID NO: 501967 - DNA, 30 bp, Artificial Sequence
  Synthetic oligonucleotide
agctaattgcgcgcgtggtatttcgtctct

SEQ ID NO: 501968 - DNA, 30 bp, Artificial Sequence
  Synthetic oligonucleotide
caacgagaaacattgggatattatgtctct

SEQ ID NO: 501969 - DNA, 30 bp, Artificial Sequence
  Synthetic oligonucleotide
tcctgattccgtgttagtgcacctgtctct

SEQ ID NO: 501970 - DNA, 30 bp, Artificial Sequence
  Synthetic oligonucleotide
tatttacgcatcatgggggcatcattctct

SEQ ID NO: 501971 - DNA, 30 bp, Artificial Sequence
  Synthetic oligonucleotide
ttctcaagaaccccccatgtgtggttctct

SEQ ID NO: 501972 - DNA, 30 bp, Artificial Sequence
  Synthetic oligonucleotide
ggaacagctgatggtccaggtggtttctct

SEQ ID NO: 501973 - DNA, 30 bp, Artificial Sequence
  Synthetic oligonucleotide
accttccgggacggtagccgcagcaagtct

SEQ ID NO: 501974 - DNA, 30 bp, Artificial Sequence
  Synthetic oligonucleotide
ttgtatgaaggtttagtacaccgcaagtct

SEQ ID NO: 501975 - DNA, 30 bp, Artificial Sequence
  Synthetic oligonucleotide
gagagtgtctcccgcccacgaccgaagtct

SEQ ID NO: 501976 - DNA, 30 bp, Artificial Sequence
  Synthetic oligonucleotide
tcactccgagtctgctagacttttaagtct

SEQ ID NO: 501977 - DNA, 30 bp, Artificial Sequence
  Synthetic oligonucleotide
ctaattgagttgcatactacgctccagtct

SEQ ID NO: 501978 - DNA, 30 bp, Artificial Sequence
  Synthetic oligonucleotide
tagaaagtagtttattctgtcttgcagtct

SEQ ID NO: 501979 - DNA, 30 bp, Artificial Sequence
  Synthetic oligonucleotide
atgacgctgctatcggtatatggtcagtct

SEQ ID NO: 501980 - DNA, 30 bp, Artificial Sequence
  Synthetic oligonucleotide
aatccggccagtcgtagggtttaagagtct

SEQ ID NO: 501981 - DNA, 30 bp, Artificial Sequence
  Synthetic oligonucleotide
gtgtctcgtgttaagtaccctgtagagtct

SEQ ID NO: 501982 - DNA, 30 bp, Artificial Sequence
  Synthetic oligonucleotide
taacgcaacatgtcattccatagcgagtct

SEQ ID NO: 501983 - DNA, 30 bp, Artificial Sequence
  Synthetic oligonucleotide
aacacaaatacggaggtcggtaaggagtct

SEQ ID NO: 501984 - DNA, 30 bp, Artificial Sequence
  Synthetic oligonucleotide
gagtcgcagggggcacgccgcaaatagtct

SEQ ID NO: 501985 - DNA, 30 bp, Artificial Sequence
  Synthetic oligonucleotide
ccatgctaccgctattaggtcgcatagtct

SEQ ID NO: 501986 - DNA, 30 bp, Artificial Sequence
  Synthetic oligonucleotide
ctgtaatgtggagatgttataatatagtct

SEQ ID NO: 501987 - DNA, 30 bp, Artificial Sequence
  Synthetic oligonucleotide
cgcttcttcatgcctacattaggctagtct

SEQ ID NO: 501988 - DNA, 30 bp, Artificial Sequence
  Synthetic oligonucleotide
gtccaatgcaaggtatgagaactctagtct

SEQ ID NO: 501989 - DNA, 30 bp, Artificial Sequence
  Synthetic oligonucleotide
atctcgtccaagagacttggcgggtagtct

SEQ ID NO: 501990 - DNA, 30 bp, Artificial Sequence
  Synthetic oligonucleotide
aggctctgacgcacacaaaaattaacgtct

SEQ ID NO: 501991 - DNA, 30 bp, Artificial Sequence
  Synthetic oligonucleotide
gcataatagacggcaagctgaacaccgtct

SEQ ID NO: 501992 - DNA, 30 bp, Artificial Sequence
  Synthetic oligonucleotide
caatcgcgtaccttcccggactgaccgtct

SEQ ID NO: 501993 - DNA, 30 bp, Artificial Sequence
  Synthetic oligonucleotide
atacattaaatgaaattgacgccgccgtct

SEQ ID NO: 501994 - DNA, 30 bp, Artificial Sequence
  Synthetic oligonucleotide
gtaggacaaggcaatctacgaccagcgtct

SEQ ID NO: 501995 - DNA, 30 bp, Artificial Sequence
  Synthetic oligonucleotide
gataagacaggacgtctagatggggcgtct

SEQ ID NO: 501996 - DNA, 30 bp, Artificial Sequence
  Synthetic oligonucleotide
gcaagcggttgctgtcggctaattgcgtct

SEQ ID NO: 501997 - DNA, 30 bp, Artificial Sequence
  Synthetic oligonucleotide
gaatacgccctactagagaatagatcgtct

SEQ ID NO: 501998 - DNA, 30 bp, Artificial Sequence
  Synthetic oligonucleotide
aaatcaatatgctgagcatgtgtatcgtct

SEQ ID NO: 501999 - DNA, 30 bp, Artificial Sequence
  Synthetic oligonucleotide
gctctctctctgtctcgggcacactcgtct

SEQ ID NO: 502000 - DNA, 30 bp, Artificial Sequence
  Synthetic oligonucleotide
aagatggtaatcttgatggggggctcgtct

SEQ ID NO: 502001 - DNA, 30 bp, Artificial Sequence
  Synthetic oligonucleotide
aacaggcccgttcatcgcagcatgtcgtct

SEQ ID NO: 502002 - DNA, 30 bp, Artificial Sequence
  Synthetic oligonucleotide
attctacgcaggcctacgacggtgtcgtct

SEQ ID NO: 502003 - DNA, 30 bp, Artificial Sequence
  Synthetic oligonucleotide
caaaaatgtggatataatggtgattcgtct

SEQ ID NO: 502004 - DNA, 30 bp, Artificial Sequence
  Synthetic oligonucleotide
tttgataatccgttgctaggaagaaggtct

SEQ ID NO: 502005 - DNA, 30 bp, Artificial Sequence
  Synthetic oligonucleotide
taagttgagctcctaaatcgatgaaggtct

SEQ ID NO: 502006 - DNA, 30 bp, Artificial Sequence
  Synthetic oligonucleotide
ctcggatagacacagcatatccacaggtct

SEQ ID NO: 502007 - DNA, 30 bp, Artificial Sequence
  Synthetic oligonucleotide
gtcttcacgattatgttgttgcccaggtct

SEQ ID NO: 502008 - DNA, 30 bp, Artificial Sequence
  Synthetic oligonucleotide
gaatcgcgataatatttttagtccaggtct

SEQ ID NO: 502009 - DNA, 30 bp, Artificial Sequence
  Synthetic oligonucleotide
gtagttagcttctccgtattcctcaggtct

SEQ ID NO: 502010 - DNA, 30 bp, Artificial Sequence
  Synthetic oligonucleotide
aagagcctagttgagtccaagctcaggtct

SEQ ID NO: 502011 - DNA, 30 bp, Artificial Sequence
  Synthetic oligonucleotide
attttcagttaatgggggtaagaacggtct

SEQ ID NO: 502012 - DNA, 30 bp, Artificial Sequence
  Synthetic oligonucleotide
aaaatctttcgtggttctgcgccacggtct

SEQ ID NO: 502013 - DNA, 29 bp, Artificial Sequence
  Synthetic oligonucleotide
accggacctttaggacatccgaccggtct

SEQ ID NO: 502014 - DNA, 30 bp, Artificial Sequence
  Synthetic oligonucleotide
tttggaattcacgtattatatcgccggtct

SEQ ID NO: 502015 - DNA, 30 bp, Artificial Sequence
  Synthetic oligonucleotide
gacaacccggtcatgctcactgagcggtct

SEQ ID NO: 502016 - DNA, 30 bp, Artificial Sequence
  Synthetic oligonucleotide
ccagcttagacgtgcgtacttacgcggtct

SEQ ID NO: 502017 - DNA, 30 bp, Artificial Sequence
  Synthetic oligonucleotide
ctgtgttctaaatctacttctaatcggtct

SEQ ID NO: 502018 - DNA, 30 bp, Artificial Sequence
  Synthetic oligonucleotide
aacccgtgaagatgattgctatctcggtct

SEQ ID NO: 502019 - DNA, 30 bp, Artificial Sequence
  Synthetic oligonucleotide
gagcttgtacgtgtcgcgggctgtcggtct

SEQ ID NO: 502020 - DNA, 30 bp, Artificial Sequence
  Synthetic oligonucleotide
ttgaattagcaggtattttttgacgggtct

SEQ ID NO: 502021 - DNA, 30 bp, Artificial Sequence
  Synthetic oligonucleotide
agataaaactccgcggtgccgcccgggtct

SEQ ID NO: 502022 - DNA, 30 bp, Artificial Sequence
  Synthetic oligonucleotide
caaaattcgacaggccggtccttcgggtct

SEQ ID NO: 502023 - DNA, 30 bp, Artificial Sequence
  Synthetic oligonucleotide
cccttaattgctggtccatttgaggggtct

SEQ ID NO: 502024 - DNA, 30 bp, Artificial Sequence
  Synthetic oligonucleotide
aggccgaaagacctcgacgggtaggggtct

SEQ ID NO: 502025 - DNA, 30 bp, Artificial Sequence
  Synthetic oligonucleotide
ggaccctcagatcgtagacaagatgggtct

SEQ ID NO: 502026 - DNA, 30 bp, Artificial Sequence
  Synthetic oligonucleotide
cagagagtttggtgggtggtgtgtgggtct

SEQ ID NO: 502027 - DNA, 30 bp, Artificial Sequence
  Synthetic oligonucleotide
cgtcgctgcgtccaaagaaagtaatggtct

SEQ ID NO: 502028 - DNA, 30 bp, Artificial Sequence
  Synthetic oligonucleotide
actatctgagtgactattcggcactggtct

SEQ ID NO: 502029 - DNA, 30 bp, Artificial Sequence
  Synthetic oligonucleotide
gagtatttaaattacaacctaatctggtct

SEQ ID NO: 502030 - DNA, 30 bp, Artificial Sequence
  Synthetic oligonucleotide
tagggcgtatttactcgggcattctggtct

SEQ ID NO: 502031 - DNA, 30 bp, Artificial Sequence
  Synthetic oligonucleotide
caagcagcgtgctttgattacttctggtct

SEQ ID NO: 502032 - DNA, 30 bp, Artificial Sequence
  Synthetic oligonucleotide
gcgcggaaacccacgggtaacacgtggtct

SEQ ID NO: 502033 - DNA, 30 bp, Artificial Sequence
  Synthetic oligonucleotide
ttgcttttgattgcccggaaaatgtggtct

SEQ ID NO: 502034 - DNA, 30 bp, Artificial Sequence
  Synthetic oligonucleotide
tcgtgaggtcctccaccttgtttgtggtct

SEQ ID NO: 502035 - DNA, 30 bp, Artificial Sequence
  Synthetic oligonucleotide
atctacttaggggtaggatagccttggtct

SEQ ID NO: 502036 - DNA, 30 bp, Artificial Sequence
  Synthetic oligonucleotide
tatgcgaaataacggacctacgcttggtct

SEQ ID NO: 502037 - DNA, 30 bp, Artificial Sequence
  Synthetic oligonucleotide
tagacagctgtcaagtctacttccatgtct

SEQ ID NO: 502038 - DNA, 30 bp, Artificial Sequence
  Synthetic oligonucleotide
agagaatgtacttcctggacgttcatgtct

SEQ ID NO: 502039 - DNA, 30 bp, Artificial Sequence
  Synthetic oligonucleotide
gggtctcatatctggaggccctaactgtct

SEQ ID NO: 502040 - DNA, 30 bp, Artificial Sequence
  Synthetic oligonucleotide
aaccgttatgtgcgtttcgattcactgtct

SEQ ID NO: 502041 - DNA, 30 bp, Artificial Sequence
  Synthetic oligonucleotide
actctctagtaggacaaacactgactgtct

SEQ ID NO: 502042 - DNA, 30 bp, Artificial Sequence
  Synthetic oligonucleotide
ggctagtcaagtatagacgcccacctgtct

SEQ ID NO: 502043 - DNA, 30 bp, Artificial Sequence
  Synthetic oligonucleotide
cacaggagggaaaacagggactccctgtct

SEQ ID NO: 502044 - DNA, 30 bp, Artificial Sequence
  Synthetic oligonucleotide
tatcattaatacaggtatgtataagtgtct

SEQ ID NO: 502045 - DNA, 30 bp, Artificial Sequence
  Synthetic oligonucleotide
cgtttacaaagagagcactttatagtgtct

SEQ ID NO: 502046 - DNA, 30 bp, Artificial Sequence
  Synthetic oligonucleotide
taaaacggatcggagcggccggccgtgtct

SEQ ID NO: 502047 - DNA, 28 bp, Artificial Sequence
  Synthetic oligonucleotide
ctaactataatgcagacgcgcggtgtct

SEQ ID NO: 502048 - DNA, 30 bp, Artificial Sequence
  Synthetic oligonucleotide
cacgccgtaacctgaattcgatcggtgtct

SEQ ID NO: 502049 - DNA, 30 bp, Artificial Sequence
  Synthetic oligonucleotide
ggatcttctccctgaacagcaggggtgtct

SEQ ID NO: 502050 - DNA, 30 bp, Artificial Sequence
  Synthetic oligonucleotide
tccggacagttcctaagtgtggcattgtct

SEQ ID NO: 502051 - DNA, 30 bp, Artificial Sequence
  Synthetic oligonucleotide
ttacaggttacctgtgtgaacagattgtct

SEQ ID NO: 502052 - DNA, 30 bp, Artificial Sequence
  Synthetic oligonucleotide
catccgcagcaggcgtttacgtgattgtct

SEQ ID NO: 502053 - DNA, 30 bp, Artificial Sequence
  Synthetic oligonucleotide
gccattcccgaaccgtgagagtacttgtct

SEQ ID NO: 502054 - DNA, 30 bp, Artificial Sequence
  Synthetic oligonucleotide
tttgtctttcaaacgtgctagctgttgtct

SEQ ID NO: 502055 - DNA, 30 bp, Artificial Sequence
  Synthetic oligonucleotide
gggatgacattcgaaactttcgatttgtct

SEQ ID NO: 502056 - DNA, 30 bp, Artificial Sequence
  Synthetic oligonucleotide
accttacactatgcgtcacgctgaaattct

SEQ ID NO: 502057 - DNA, 30 bp, Artificial Sequence
  Synthetic oligonucleotide
gccataatcgttgggtaaatactaaattct

SEQ ID NO: 502058 - DNA, 30 bp, Artificial Sequence
  Synthetic oligonucleotide
cctgcgataagttcctatctagtaaattct

SEQ ID NO: 502059 - DNA, 30 bp, Artificial Sequence
  Synthetic oligonucleotide
aggcctggaaatcggaccgccgtaaattct

SEQ ID NO: 502060 - DNA, 31 bp, Artificial Sequence
  Synthetic oligonucleotide
ttggtgattacctttaatggtgtagaattct

SEQ ID NO: 502061 - DNA, 30 bp, Artificial Sequence
  Synthetic oligonucleotide
gtggataggttgcagaattccctgaattct

SEQ ID NO: 502062 - DNA, 30 bp, Artificial Sequence
  Synthetic oligonucleotide
gaatccaaaggccttgaacacgcgcattct

SEQ ID NO: 502063 - DNA, 28 bp, Artificial Sequence
  Synthetic oligonucleotide
actgtatcgaattttagcggggcattct

SEQ ID NO: 502064 - DNA, 30 bp, Artificial Sequence
  Synthetic oligonucleotide
gataacgccagccgtgatgcggctcattct

SEQ ID NO: 502065 - DNA, 30 bp, Artificial Sequence
  Synthetic oligonucleotide
agtattttcatcgctctagtgacagattct

SEQ ID NO: 502066 - DNA, 30 bp, Artificial Sequence
  Synthetic oligonucleotide
cacagttcccgttgatattgcagcgattct

SEQ ID NO: 502067 - DNA, 30 bp, Artificial Sequence
  Synthetic oligonucleotide
accgttcacagaattatctctagggattct

SEQ ID NO: 502068 - DNA, 30 bp, Artificial Sequence
  Synthetic oligonucleotide
gcccttgagggtttctaacttgtatattct

SEQ ID NO: 502069 - DNA, 30 bp, Artificial Sequence
  Synthetic oligonucleotide
ttggctgtgatcgataataggccctattct

SEQ ID NO: 502070 - DNA, 30 bp, Artificial Sequence
  Synthetic oligonucleotide
atggtgttcggtcttatatcatgttattct

SEQ ID NO: 502071 - DNA, 30 bp, Artificial Sequence
  Synthetic oligonucleotide
actatcggaatcgtggccgtgatttattct

SEQ ID NO: 502072 - DNA, 30 bp, Artificial Sequence
  Synthetic oligonucleotide
ccaaagtcatgatttgtcccgctttattct

SEQ ID NO: 502073 - DNA, 30 bp, Artificial Sequence
  Synthetic oligonucleotide
gttcgctaccatatctcagtatgcacttct

SEQ ID NO: 502074 - DNA, 30 bp, Artificial Sequence
  Synthetic oligonucleotide
ttaattgaatgccgcgctgggtgcacttct

SEQ ID NO: 502075 - DNA, 30 bp, Artificial Sequence
  Synthetic oligonucleotide
cgcgcgttgcactcaaccggactgacttct

SEQ ID NO: 502076 - DNA, 30 bp, Artificial Sequence
  Synthetic oligonucleotide
acccgtgacattagttcgcataatacttct

SEQ ID NO: 502077 - DNA, 30 bp, Artificial Sequence
  Synthetic oligonucleotide
ctcattctgcaagtcaaggccaaaccttct

SEQ ID NO: 502078 - DNA, 30 bp, Artificial Sequence
  Synthetic oligonucleotide
agtgtcttttattgcactattacaccttct

SEQ ID NO: 502079 - DNA, 30 bp, Artificial Sequence
  Synthetic oligonucleotide
attgggggcatatttgtcaaattaccttct

SEQ ID NO: 502080 - DNA, 30 bp, Artificial Sequence
  Synthetic oligonucleotide
cccacacagcacccctacaacaccccttct

SEQ ID NO: 502081 - DNA, 30 bp, Artificial Sequence
  Synthetic oligonucleotide
tacgtcgaagaacccatctcggggccttct

SEQ ID NO: 502082 - DNA, 30 bp, Artificial Sequence
  Synthetic oligonucleotide
atgaccagtgtacgaaggcttatgccttct

SEQ ID NO: 502083 - DNA, 30 bp, Artificial Sequence
  Synthetic oligonucleotide
gtctagagggacgctcaggggaacgcttct

SEQ ID NO: 502084 - DNA, 30 bp, Artificial Sequence
  Synthetic oligonucleotide
tccaccttttcgccaaacggagacgcttct

SEQ ID NO: 502085 - DNA, 30 bp, Artificial Sequence
  Synthetic oligonucleotide
gtgcgcaatcaagtaaattgcaaggcttct

SEQ ID NO: 502086 - DNA, 30 bp, Artificial Sequence
  Synthetic oligonucleotide
tagtttgagcgtagcgttcagacggcttct

SEQ ID NO: 502087 - DNA, 30 bp, Artificial Sequence
  Synthetic oligonucleotide
cacctagtactgaagctgtttcatgcttct

SEQ ID NO: 502088 - DNA, 30 bp, Artificial Sequence
  Synthetic oligonucleotide
accggtttacagtgttccactgctgcttct

SEQ ID NO: 502089 - DNA, 30 bp, Artificial Sequence
  Synthetic oligonucleotide
atatttaatgtccacggccaagcatcttct

SEQ ID NO: 502090 - DNA, 30 bp, Artificial Sequence
  Synthetic oligonucleotide
cactcattattgcgtaaagcactatcttct

SEQ ID NO: 502091 - DNA, 30 bp, Artificial Sequence
  Synthetic oligonucleotide
aatgagttggggttttgttacccctcttct

SEQ ID NO: 502092 - DNA, 30 bp, Artificial Sequence
  Synthetic oligonucleotide
cggggcttctccccgagagacttttcttct

SEQ ID NO: 502093 - DNA, 30 bp, Artificial Sequence
  Synthetic oligonucleotide
tgtagtgtctagttttcgcaatctagttct

SEQ ID NO: 502094 - DNA, 30 bp, Artificial Sequence
  Synthetic oligonucleotide
ggtgtctgtgtacttcagtgcagtagttct

SEQ ID NO: 502095 - DNA, 30 bp, Artificial Sequence
  Synthetic oligonucleotide
ccgtattaattagtctagctattacgttct

SEQ ID NO: 502096 - DNA, 30 bp, Artificial Sequence
  Synthetic oligonucleotide
gtcatcggttaaatacgggttgcccgttct

SEQ ID NO: 502097 - DNA, 30 bp, Artificial Sequence
  Synthetic oligonucleotide
gttcgatagagtggagttttctgccgttct

SEQ ID NO: 502098 - DNA, 30 bp, Artificial Sequence
  Synthetic oligonucleotide
ttggttcggtgaatcaaccctccaggttct

SEQ ID NO: 502099 - DNA, 30 bp, Artificial Sequence
  Synthetic oligonucleotide
tatctacgatcgataaaatttataggttct

SEQ ID NO: 502100 - DNA, 30 bp, Artificial Sequence
  Synthetic oligonucleotide
ggagtacgggaaatagggaacggcggttct

SEQ ID NO: 502101 - DNA, 30 bp, Artificial Sequence
  Synthetic oligonucleotide
gtgtgatcagtcacgaggagtatgggttct

SEQ ID NO: 502102 - DNA, 30 bp, Artificial Sequence
  Synthetic oligonucleotide
ggtgatgcaatatacacatgttatggttct

SEQ ID NO: 502103 - DNA, 30 bp, Artificial Sequence
  Synthetic oligonucleotide
ctccattgccacccgtctaattgtggttct

SEQ ID NO: 502104 - DNA, 30 bp, Artificial Sequence
  Synthetic oligonucleotide
agaggcggaccaattggtcccccatgttct

SEQ ID NO: 502105 - DNA, 30 bp, Artificial Sequence
  Synthetic oligonucleotide
tagatgataatcggcagtgatccatgttct

SEQ ID NO: 502106 - DNA, 30 bp, Artificial Sequence
  Synthetic oligonucleotide
taaaacgcccccgggactggcgcatgttct

SEQ ID NO: 502107 - DNA, 30 bp, Artificial Sequence
  Synthetic oligonucleotide
gcgaccgcctagacaaaacacccctgttct

SEQ ID NO: 502108 - DNA, 30 bp, Artificial Sequence
  Synthetic oligonucleotide
gaaactcggatgggagtgacagtgtgttct

SEQ ID NO: 502109 - DNA, 30 bp, Artificial Sequence
  Synthetic oligonucleotide
cggaggaggagaaaaaaggtaaattgttct

SEQ ID NO: 502110 - DNA, 30 bp, Artificial Sequence
  Synthetic oligonucleotide
tatatagttgggtgagtcatctaaatttct

SEQ ID NO: 502111 - DNA, 30 bp, Artificial Sequence
  Synthetic oligonucleotide
gctgcccgggatggaagcttagcaatttct

SEQ ID NO: 502112 - DNA, 30 bp, Artificial Sequence
  Synthetic oligonucleotide
cataagaggccgtttcgcggcggcatttct

SEQ ID NO: 502113 - DNA, 30 bp, Artificial Sequence
  Synthetic oligonucleotide
ttcatgccacagggagtgtttaagatttct

SEQ ID NO: 502114 - DNA, 30 bp, Artificial Sequence
  Synthetic oligonucleotide
taatgacctcgttttcggggggtgatttct

SEQ ID NO: 502115 - DNA, 30 bp, Artificial Sequence
  Synthetic oligonucleotide
ggcatcgggttgttctttcaggttatttct

SEQ ID NO: 502116 - DNA, 30 bp, Artificial Sequence
  Synthetic oligonucleotide
gctcctaaaaatgggcgctgttttatttct

SEQ ID NO: 502117 - DNA, 30 bp, Artificial Sequence
  Synthetic oligonucleotide
tctatgaacaattgtcttccgaaactttct

SEQ ID NO: 502118 - DNA, 30 bp, Artificial Sequence
  Synthetic oligonucleotide
ccttcaaagttaattagtgaaacactttct

SEQ ID NO: 502119 - DNA, 30 bp, Artificial Sequence
  Synthetic oligonucleotide
cgggattagtcatatccaagctccctttct

SEQ ID NO: 502120 - DNA, 30 bp, Artificial Sequence
  Synthetic oligonucleotide
aaaggcttatctcgtcaagcggagctttct

SEQ ID NO: 502121 - DNA, 30 bp, Artificial Sequence
  Synthetic oligonucleotide
tgtcatgttgaagcacatcatcggctttct

SEQ ID NO: 502122 - DNA, 30 bp, Artificial Sequence
  Synthetic oligonucleotide
cgaggagtagctattacagccgggctttct

SEQ ID NO: 502123 - DNA, 30 bp, Artificial Sequence
  Synthetic oligonucleotide
cttctataggttcgcgacgtcaatctttct

SEQ ID NO: 502124 - DNA, 30 bp, Artificial Sequence
  Synthetic oligonucleotide
tttggagttagaacgaaagttgatctttct

SEQ ID NO: 502125 - DNA, 30 bp, Artificial Sequence
  Synthetic oligonucleotide
aacaaaatttcccggggatgagcagtttct

SEQ ID NO: 502126 - DNA, 30 bp, Artificial Sequence
  Synthetic oligonucleotide
atattagtatccgattcagtagaggtttct

SEQ ID NO: 502127 - DNA, 30 bp, Artificial Sequence
  Synthetic oligonucleotide
caacctgggggttggaccgggacggtttct

SEQ ID NO: 502128 - DNA, 30 bp, Artificial Sequence
  Synthetic oligonucleotide
ggggtactactctcggggggcggattttct

SEQ ID NO: 502129 - DNA, 30 bp, Artificial Sequence
  Synthetic oligonucleotide
tgatctgttgtgttttcctttggattttct

SEQ ID NO: 502130 - DNA, 30 bp, Artificial Sequence
  Synthetic oligonucleotide
aaaagcatgatacccatcgcgaacttttct

SEQ ID NO: 502131 - DNA, 30 bp, Artificial Sequence
  Synthetic oligonucleotide
gctaggcccattccgtgtattaacttttct

SEQ ID NO: 502132 - DNA, 30 bp, Artificial Sequence
  Synthetic oligonucleotide
gcaatatatatgcggtccatctccttttct

SEQ ID NO: 502133 - DNA, 29 bp, Artificial Sequence
  Synthetic oligonucleotide
cccccctctgtctcttgtttctcttttct

SEQ ID NO: 502134 - DNA, 30 bp, Artificial Sequence
  Synthetic oligonucleotide
acgaccagctgaagaaacagacagttttct

SEQ ID NO: 502135 - DNA, 30 bp, Artificial Sequence
  Synthetic oligonucleotide
tgtggggccagacactgggatttgttttct

SEQ ID NO: 502136 - DNA, 30 bp, Artificial Sequence
  Synthetic oligonucleotide
tggggggctaggtaaaggggtttgttttct

SEQ ID NO: 502137 - DNA, 30 bp, Artificial Sequence
  Synthetic oligonucleotide
cctggctgttgtggtaggcggggtttttct

SEQ ID NO: 502138 - DNA, 30 bp, Artificial Sequence
  Synthetic oligonucleotide
ttgtaaaatttattcgcggggggaaaaagt

SEQ ID NO: 502139 - DNA, 30 bp, Artificial Sequence
  Synthetic oligonucleotide
atcagtattggacaccatcggtttaaaagt

SEQ ID NO: 502140 - DNA, 30 bp, Artificial Sequence
  Synthetic oligonucleotide
gaccgaagattattcgagtggagccaaagt

SEQ ID NO: 502141 - DNA, 30 bp, Artificial Sequence
  Synthetic oligonucleotide
atgcggagctataggagcacacgccaaagt

SEQ ID NO: 502142 - DNA, 30 bp, Artificial Sequence
  Synthetic oligonucleotide
ttgcttgaaggattacgccccccgcaaagt

SEQ ID NO: 502143 - DNA, 30 bp, Artificial Sequence
  Synthetic oligonucleotide
taaaggttgttgcattcagaggggcaaagt

SEQ ID NO: 502144 - DNA, 30 bp, Artificial Sequence
  Synthetic oligonucleotide
tctgcccgcagcctgtcgtagatgcaaagt

SEQ ID NO: 502145 - DNA, 30 bp, Artificial Sequence
  Synthetic oligonucleotide
cgttagagtcctctgtgaactctgcaaagt

SEQ ID NO: 502146 - DNA, 30 bp, Artificial Sequence
  Synthetic oligonucleotide
atcttgatgttaggctgacacgtgcaaagt

SEQ ID NO: 502147 - DNA, 30 bp, Artificial Sequence
  Synthetic oligonucleotide
gaacaaacgatgtctgatccattgcaaagt

SEQ ID NO: 502148 - DNA, 30 bp, Artificial Sequence
  Synthetic oligonucleotide
ggtaggatgaggttcaacatctttcaaagt

SEQ ID NO: 502149 - DNA, 30 bp, Artificial Sequence
  Synthetic oligonucleotide
acaaaattaccctcctagtattaagaaagt

SEQ ID NO: 502150 - DNA, 30 bp, Artificial Sequence
  Synthetic oligonucleotide
tgtccctccaaaagccacatcgcagaaagt

SEQ ID NO: 502151 - DNA, 30 bp, Artificial Sequence
  Synthetic oligonucleotide
cattgtctggggcatgtattcctcgaaagt

SEQ ID NO: 502152 - DNA, 30 bp, Artificial Sequence
  Synthetic oligonucleotide
gggcccaacatcttgcaagacgaggaaagt

SEQ ID NO: 502153 - DNA, 30 bp, Artificial Sequence
  Synthetic oligonucleotide
gagtcatcagagtcgttcaactttgaaagt

SEQ ID NO: 502154 - DNA, 30 bp, Artificial Sequence
  Synthetic oligonucleotide
cgttccatgatgatagtataaccctaaagt

SEQ ID NO: 502155 - DNA, 30 bp, Artificial Sequence
  Synthetic oligonucleotide
gcgtcggggcggctcgacttaggttaaagt

SEQ ID NO: 502156 - DNA, 31 bp, Artificial Sequence
  Synthetic oligonucleotide
gtctatggtaatcagtggtttgttaacaagt

SEQ ID NO: 502157 - DNA, 30 bp, Artificial Sequence
  Synthetic oligonucleotide
ccagtttatgtagccatcaaactcacaagt

SEQ ID NO: 502158 - DNA, 30 bp, Artificial Sequence
  Synthetic oligonucleotide
caactgtcgttaccgctctctctgacaagt

SEQ ID NO: 502159 - DNA, 30 bp, Artificial Sequence
  Synthetic oligonucleotide
agcagtgaggttcggggcatgtatacaagt

SEQ ID NO: 502160 - DNA, 30 bp, Artificial Sequence
  Synthetic oligonucleotide
aagcccgtggactaccacaaactaccaagt

SEQ ID NO: 502161 - DNA, 30 bp, Artificial Sequence
  Synthetic oligonucleotide
gatagatcaatcttgctttctgtcccaagt

SEQ ID NO: 502162 - DNA, 30 bp, Artificial Sequence
  Synthetic oligonucleotide
agtagtccgttactggagggctggccaagt

SEQ ID NO: 502163 - DNA, 30 bp, Artificial Sequence
  Synthetic oligonucleotide
caaactcaggcaggcccttggatagcaagt

SEQ ID NO: 502164 - DNA, 30 bp, Artificial Sequence
  Synthetic oligonucleotide
agggcaaaccttgtgcgtttgaacgcaagt

SEQ ID NO: 502165 - DNA, 30 bp, Artificial Sequence
  Synthetic oligonucleotide
atccgtatgtcgaaatttcaggacgcaagt

SEQ ID NO: 502166 - DNA, 30 bp, Artificial Sequence
  Synthetic oligonucleotide
tgttggctggcagcgtgtcagacatcaagt

SEQ ID NO: 502167 - DNA, 30 bp, Artificial Sequence
  Synthetic oligonucleotide
agaatgcagctagcttacagtccatcaagt

SEQ ID NO: 502168 - DNA, 30 bp, Artificial Sequence
  Synthetic oligonucleotide
gcgtagaaatgtcaaacaaacttatcaagt

SEQ ID NO: 502169 - DNA, 30 bp, Artificial Sequence
  Synthetic oligonucleotide
cgggtaatagcgcgactcgaagcctcaagt

SEQ ID NO: 502170 - DNA, 30 bp, Artificial Sequence
  Synthetic oligonucleotide
aggtcgccgcggtacgtcgaacgctcaagt

SEQ ID NO: 502171 - DNA, 30 bp, Artificial Sequence
  Synthetic oligonucleotide
gggaagggcatgagcggagtacattcaagt

SEQ ID NO: 502172 - DNA, 30 bp, Artificial Sequence
  Synthetic oligonucleotide
tatagataatgaaaaaaagcgctttcaagt

SEQ ID NO: 502173 - DNA, 30 bp, Artificial Sequence
  Synthetic oligonucleotide
cgtgtcaacatccgtaagcgggaaagaagt

SEQ ID NO: 502174 - DNA, 30 bp, Artificial Sequence
  Synthetic oligonucleotide
tctcggatggatgtgtagcgcaatcgaagt

SEQ ID NO: 502175 - DNA, 30 bp, Artificial Sequence
  Synthetic oligonucleotide
ttggttctcatttgcgcacatcatcgaagt

SEQ ID NO: 502176 - DNA, 30 bp, Artificial Sequence
  Synthetic oligonucleotide
caggaggtgcttagggcgattcatcgaagt

SEQ ID NO: 502177 - DNA, 30 bp, Artificial Sequence
  Synthetic oligonucleotide
gtatccggccccgatccgaatgtaggaagt

SEQ ID NO: 502178 - DNA, 30 bp, Artificial Sequence
  Synthetic oligonucleotide
gttggctgaccctctacgcggcacggaagt

SEQ ID NO: 502179 - DNA, 30 bp, Artificial Sequence
  Synthetic oligonucleotide
cctttagcgacgttggtaaactccggaagt

SEQ ID NO: 502180 - DNA, 30 bp, Artificial Sequence
  Synthetic oligonucleotide
cttttgtatatggatttacgtgagggaagt

SEQ ID NO: 502181 - DNA, 30 bp, Artificial Sequence
  Synthetic oligonucleotide
ccccaccttgaggtatttgtcgcgggaagt

SEQ ID NO: 502182 - DNA, 30 bp, Artificial Sequence
  Synthetic oligonucleotide
tttaagttagattacatcgtcggtggaagt

SEQ ID NO: 502183 - DNA, 30 bp, Artificial Sequence
  Synthetic oligonucleotide
ttttgaaagatcccaccgatccaatgaagt

SEQ ID NO: 502184 - DNA, 30 bp, Artificial Sequence
  Synthetic oligonucleotide
ctttcagctcctagaatgtggagatgaagt

SEQ ID NO: 502185 - DNA, 30 bp, Artificial Sequence
  Synthetic oligonucleotide
gtttgggccattgcttgatggcactgaagt

SEQ ID NO: 502186 - DNA, 30 bp, Artificial Sequence
  Synthetic oligonucleotide
ccgcagaatcggggaaaacctgcgtgaagt

SEQ ID NO: 502187 - DNA, 30 bp, Artificial Sequence
  Synthetic oligonucleotide
gacgcggatgtcgaatcgctcttttgaagt

SEQ ID NO: 502188 - DNA, 30 bp, Artificial Sequence
  Synthetic oligonucleotide
gcaaccggggatatatcctccaatataagt

SEQ ID NO: 502189 - DNA, 30 bp, Artificial Sequence
  Synthetic oligonucleotide
atgcgaatgtaaacatgtaaggttataagt

SEQ ID NO: 502190 - DNA, 30 bp, Artificial Sequence
  Synthetic oligonucleotide
tggcaaacaacataaccgtcgttcctaagt

SEQ ID NO: 502191 - DNA, 31 bp, Artificial Sequence
  Synthetic oligonucleotide
gctatgaacgctgggaactcgtacgctaagt

SEQ ID NO: 502192 - DNA, 30 bp, Artificial Sequence
  Synthetic oligonucleotide
gggagcgcttgtaccgctctcaacgtaagt

SEQ ID NO: 502193 - DNA, 30 bp, Artificial Sequence
  Synthetic oligonucleotide
tacagaggtccctgtaggaagcacgtaagt

SEQ ID NO: 502194 - DNA, 30 bp, Artificial Sequence
  Synthetic oligonucleotide
agagtcctcgctctgacaggttacgtaagt

SEQ ID NO: 502195 - DNA, 30 bp, Artificial Sequence
  Synthetic oligonucleotide
cagctacgacctcggaaacctgaggtaagt

SEQ ID NO: 502196 - DNA, 30 bp, Artificial Sequence
  Synthetic oligonucleotide
gcggtaggtagcaacaattggtatgtaagt

SEQ ID NO: 502197 - DNA, 30 bp, Artificial Sequence
  Synthetic oligonucleotide
tctaggcagcctgttaccgcagctgtaagt

SEQ ID NO: 502198 - DNA, 30 bp, Artificial Sequence
  Synthetic oligonucleotide
tcggactgttggtaggaacagcgtgtaagt

SEQ ID NO: 502199 - DNA, 30 bp, Artificial Sequence
  Synthetic oligonucleotide
gtatattgcacgcacgcttcgtaattaagt

SEQ ID NO: 502200 - DNA, 30 bp, Artificial Sequence
  Synthetic oligonucleotide
ttgtgtcatcgtattccttatcgattaagt

SEQ ID NO: 502201 - DNA, 30 bp, Artificial Sequence
  Synthetic oligonucleotide
gcaaaatctctccgggagtggtgattaagt

SEQ ID NO: 502202 - DNA, 30 bp, Artificial Sequence
  Synthetic oligonucleotide
gattcaaggggcctctttgcctagttaagt

SEQ ID NO: 502203 - DNA, 30 bp, Artificial Sequence
  Synthetic oligonucleotide
gaccttagggtccagcgggatgcgttaagt

SEQ ID NO: 502204 - DNA, 30 bp, Artificial Sequence
  Synthetic oligonucleotide
ggttacgagcaactgaacttgatgttaagt

SEQ ID NO: 502205 - DNA, 30 bp, Artificial Sequence
  Synthetic oligonucleotide
gggcagtagagatgaagatagctgttaagt

SEQ ID NO: 502206 - DNA, 30 bp, Artificial Sequence
  Synthetic oligonucleotide
gcactgctgtttagactcgagaaaaacagt

SEQ ID NO: 502207 - DNA, 30 bp, Artificial Sequence
  Synthetic oligonucleotide
tcaactgccctagttttctaattaaacagt

SEQ ID NO: 502208 - DNA, 30 bp, Artificial Sequence
  Synthetic oligonucleotide
acgcacaagttacgcagcccggacaacagt

SEQ ID NO: 502209 - DNA, 30 bp, Artificial Sequence
  Synthetic oligonucleotide
ttaatttggcaccacccagcatagaacagt

SEQ ID NO: 502210 - DNA, 30 bp, Artificial Sequence
  Synthetic oligonucleotide
caggtttatccaaaagtgctaacgaacagt

SEQ ID NO: 502211 - DNA, 30 bp, Artificial Sequence
  Synthetic oligonucleotide
ggtccttcggcaatggttctaagtaacagt

SEQ ID NO: 502212 - DNA, 30 bp, Artificial Sequence
  Synthetic oligonucleotide
cttttagcgtagcgaagctaaggtaacagt

SEQ ID NO: 502213 - DNA, 30 bp, Artificial Sequence
  Synthetic oligonucleotide
cccacgcagacacaggaaatcagacacagt

SEQ ID NO: 502214 - DNA, 30 bp, Artificial Sequence
  Synthetic oligonucleotide
actttgcgtaccgcaggaacggcccacagt

SEQ ID NO: 502215 - DNA, 30 bp, Artificial Sequence
  Synthetic oligonucleotide
gaagcgcttttaagggagaagcagcacagt

SEQ ID NO: 502216 - DNA, 30 bp, Artificial Sequence
  Synthetic oligonucleotide
tatgagagaatgcagcctcggacgcacagt

SEQ ID NO: 502217 - DNA, 30 bp, Artificial Sequence
  Synthetic oligonucleotide
aagcgcggcgtctggaatgtccaagacagt

SEQ ID NO: 502218 - DNA, 30 bp, Artificial Sequence
  Synthetic oligonucleotide
cggagacagtttttttgctttatcgacagt

SEQ ID NO: 502219 - DNA, 30 bp, Artificial Sequence
  Synthetic oligonucleotide
aagctcgtaacccgcgctcatggggacagt

SEQ ID NO: 502220 - DNA, 30 bp, Artificial Sequence
  Synthetic oligonucleotide
ggtaactaatactgggctatctatgacagt

SEQ ID NO: 502221 - DNA, 30 bp, Artificial Sequence
  Synthetic oligonucleotide
ctagtgcttattgtagttaagtttgacagt

SEQ ID NO: 502222 - DNA, 30 bp, Artificial Sequence
  Synthetic oligonucleotide
tccaaagagccggggcagttataatacagt

SEQ ID NO: 502223 - DNA, 30 bp, Artificial Sequence
  Synthetic oligonucleotide
cgattcggcaatatctgtattatatacagt

SEQ ID NO: 502224 - DNA, 30 bp, Artificial Sequence
  Synthetic oligonucleotide
tgcataccgctttaatcggggaagtacagt

SEQ ID NO: 502225 - DNA, 30 bp, Artificial Sequence
  Synthetic oligonucleotide
ccagtgtatgcgaggcatatgtggtacagt

SEQ ID NO: 502226 - DNA, 30 bp, Artificial Sequence
  Synthetic oligonucleotide
gctttttacttagagacaggtctgtacagt

SEQ ID NO: 502227 - DNA, 30 bp, Artificial Sequence
  Synthetic oligonucleotide
acactctaattcgaatttgtgttgtacagt

SEQ ID NO: 502228 - DNA, 30 bp, Artificial Sequence
  Synthetic oligonucleotide
ctgagagcgaattccatatgaagcaccagt

SEQ ID NO: 502229 - DNA, 30 bp, Artificial Sequence
  Synthetic oligonucleotide
caaagtgtcccggatatacagctcaccagt

SEQ ID NO: 502230 - DNA, 30 bp, Artificial Sequence
  Synthetic oligonucleotide
aatcgactagcgggcctgcgacgtaccagt

SEQ ID NO: 502231 - DNA, 30 bp, Artificial Sequence
  Synthetic oligonucleotide
gagcaagtagcgactgtgactgagcccagt

SEQ ID NO: 502232 - DNA, 30 bp, Artificial Sequence
  Synthetic oligonucleotide
gtgcttgcgcgcccaacaaacgtgcccagt

SEQ ID NO: 502233 - DNA, 30 bp, Artificial Sequence
  Synthetic oligonucleotide
agatgagtggccgtggttaaatgtcccagt

SEQ ID NO: 502234 - DNA, 30 bp, Artificial Sequence
  Synthetic oligonucleotide
gagacctcgctaatgtcctgtagggccagt

SEQ ID NO: 502235 - DNA, 30 bp, Artificial Sequence
  Synthetic oligonucleotide
cattttgactcaatacaaggatgatccagt

SEQ ID NO: 502236 - DNA, 30 bp, Artificial Sequence
  Synthetic oligonucleotide
ggacatgaagacccatgccgttactccagt

SEQ ID NO: 502237 - DNA, 30 bp, Artificial Sequence
  Synthetic oligonucleotide
gcaacacgtgcggggggtaatacctccagt

SEQ ID NO: 502238 - DNA, 30 bp, Artificial Sequence
  Synthetic oligonucleotide
aatatctgtgagaggctcgggctctccagt

SEQ ID NO: 502239 - DNA, 30 bp, Artificial Sequence
  Synthetic oligonucleotide
ttcctgcgcgatgcgccggtctggtccagt

SEQ ID NO: 502240 - DNA, 31 bp, Artificial Sequence
  Synthetic oligonucleotide
agttatcccgggtggggcgatcgcttccagt

SEQ ID NO: 502241 - DNA, 30 bp, Artificial Sequence
  Synthetic oligonucleotide
atgtgcctatgacctattaggcgaagcagt

SEQ ID NO: 502242 - DNA, 30 bp, Artificial Sequence
  Synthetic oligonucleotide
atgatacatatggcgctcgcggagagcagt

SEQ ID NO: 502243 - DNA, 30 bp, Artificial Sequence
  Synthetic oligonucleotide
ggggtggttggaggtggttggtatagcagt

SEQ ID NO: 502244 - DNA, 30 bp, Artificial Sequence
  Synthetic oligonucleotide
agcaactgctacgcgaagcaatcacgcagt

SEQ ID NO: 502245 - DNA, 30 bp, Artificial Sequence
  Synthetic oligonucleotide
aggctcaagcagcctgttagacgacgcagt

SEQ ID NO: 502246 - DNA, 30 bp, Artificial Sequence
  Synthetic oligonucleotide
ccgggcactcatgtaactgatggacgcagt

SEQ ID NO: 502247 - DNA, 30 bp, Artificial Sequence
  Synthetic oligonucleotide
gaaacatctttgtcaggggtcaaccgcagt

SEQ ID NO: 502248 - DNA, 30 bp, Artificial Sequence
  Synthetic oligonucleotide
gaagcaaacatggcgcggtataaccgcagt

SEQ ID NO: 502249 - DNA, 30 bp, Artificial Sequence
  Synthetic oligonucleotide
agcgaggcctttgattctgatgcccgcagt

SEQ ID NO: 502250 - DNA, 30 bp, Artificial Sequence
  Synthetic oligonucleotide
ctcatctttaggtttcgggacttccgcagt

SEQ ID NO: 502251 - DNA, 30 bp, Artificial Sequence
  Synthetic oligonucleotide
aatgctgtcgtacggctcgacgatcgcagt

SEQ ID NO: 502252 - DNA, 30 bp, Artificial Sequence
  Synthetic oligonucleotide
caatctatgctggttttggaggatcgcagt

SEQ ID NO: 502253 - DNA, 30 bp, Artificial Sequence
  Synthetic oligonucleotide
aattccgactagtagccggttactcgcagt

SEQ ID NO: 502254 - DNA, 30 bp, Artificial Sequence
  Synthetic oligonucleotide
tatgggatttcgatattagtaattcgcagt

SEQ ID NO: 502255 - DNA, 30 bp, Artificial Sequence
  Synthetic oligonucleotide
ggcaacgttatcaggagcgcccccggcagt

SEQ ID NO: 502256 - DNA, 30 bp, Artificial Sequence
  Synthetic oligonucleotide
tcttgggtcaagctctcggtttccggcagt

SEQ ID NO: 502257 - DNA, 30 bp, Artificial Sequence
  Synthetic oligonucleotide
ggtttggcgcacttcccgatgccgggcagt

SEQ ID NO: 502258 - DNA, 30 bp, Artificial Sequence
  Synthetic oligonucleotide
tgttaaactaacgtgaaatacagtggcagt

SEQ ID NO: 502259 - DNA, 30 bp, Artificial Sequence
  Synthetic oligonucleotide
attagttacgacatagatgccacctgcagt

SEQ ID NO: 502260 - DNA, 30 bp, Artificial Sequence
  Synthetic oligonucleotide
taatagacatataccgaacctggctgcagt

SEQ ID NO: 502261 - DNA, 30 bp, Artificial Sequence
  Synthetic oligonucleotide
atacttagttccgcgtcagcaatgtgcagt

SEQ ID NO: 502262 - DNA, 30 bp, Artificial Sequence
  Synthetic oligonucleotide
aacggcatgcaggtgaatgacctgtgcagt

SEQ ID NO: 502263 - DNA, 30 bp, Artificial Sequence
  Synthetic oligonucleotide
ctctcgtcgcgcatcaagttcaaaatcagt

SEQ ID NO: 502264 - DNA, 30 bp, Artificial Sequence
  Synthetic oligonucleotide
acaatctcatttcctatagcatcaatcagt

SEQ ID NO: 502265 - DNA, 30 bp, Artificial Sequence
  Synthetic oligonucleotide
tagtttgggcgaaactatgattcaatcagt

SEQ ID NO: 502266 - DNA, 30 bp, Artificial Sequence
  Synthetic oligonucleotide
ggatattgtgcgaggaaagaacacatcagt

SEQ ID NO: 502267 - DNA, 30 bp, Artificial Sequence
  Synthetic oligonucleotide
ttaaacattacgctcacttgctacatcagt

SEQ ID NO: 502268 - DNA, 30 bp, Artificial Sequence
  Synthetic oligonucleotide
gtctgtcgctcgaatctatcgtacatcagt

SEQ ID NO: 502269 - DNA, 30 bp, Artificial Sequence
  Synthetic oligonucleotide
gcctctcatgggcatacatagacgatcagt

SEQ ID NO: 502270 - DNA, 30 bp, Artificial Sequence
  Synthetic oligonucleotide
gaattacgatctgctcaacttaggatcagt

SEQ ID NO: 502271 - DNA, 30 bp, Artificial Sequence
  Synthetic oligonucleotide
tatttggcaacggccagggcgtcactcagt

SEQ ID NO: 502272 - DNA, 30 bp, Artificial Sequence
  Synthetic oligonucleotide
gtttgccggctaaggctccattgactcagt

SEQ ID NO: 502273 - DNA, 30 bp, Artificial Sequence
  Synthetic oligonucleotide
aacctttgagaaggctcaagatttctcagt

SEQ ID NO: 502274 - DNA, 30 bp, Artificial Sequence
  Synthetic oligonucleotide
agtatctacgtgatttaagactcagtcagt

SEQ ID NO: 502275 - DNA, 30 bp, Artificial Sequence
  Synthetic oligonucleotide
gccgagtatcctgcctgccggatagtcagt

SEQ ID NO: 502276 - DNA, 30 bp, Artificial Sequence
  Synthetic oligonucleotide
gctgatcgacgaaccgcctacgccgtcagt

SEQ ID NO: 502277 - DNA, 30 bp, Artificial Sequence
  Synthetic oligonucleotide
ttagcatgactactcagacgcagggtcagt

SEQ ID NO: 502278 - DNA, 30 bp, Artificial Sequence
  Synthetic oligonucleotide
gtttctgtatttcccttgatagctgtcagt

SEQ ID NO: 502279 - DNA, 30 bp, Artificial Sequence
  Synthetic oligonucleotide
acgattaccgctcaacaggattaattcagt

SEQ ID NO: 502280 - DNA, 30 bp, Artificial Sequence
  Synthetic oligonucleotide
gttccctagacactcaccatttcattcagt

SEQ ID NO: 502281 - DNA, 30 bp, Artificial Sequence
  Synthetic oligonucleotide
atggtttaccgtgaactggcgcgattcagt

SEQ ID NO: 502282 - DNA, 30 bp, Artificial Sequence
  Synthetic oligonucleotide
gcaactatccataaaaggtacttattcagt

SEQ ID NO: 502283 - DNA, 30 bp, Artificial Sequence
  Synthetic oligonucleotide
tatgcggacagcatgatcaattccttcagt

SEQ ID NO: 502284 - DNA, 30 bp, Artificial Sequence
  Synthetic oligonucleotide
ctttaataggggggaccggtttgcttcagt

SEQ ID NO: 502285 - DNA, 30 bp, Artificial Sequence
  Synthetic oligonucleotide
catttaatggtatgcagcggcccgttcagt

SEQ ID NO: 502286 - DNA, 30 bp, Artificial Sequence
  Synthetic oligonucleotide
gaatttgccggctaaaaatcaaatttcagt

SEQ ID NO: 502287 - DNA, 30 bp, Artificial Sequence
  Synthetic oligonucleotide
atcgcggcgacgctccgaaccgctttcagt

SEQ ID NO: 502288 - DNA, 30 bp, Artificial Sequence
  Synthetic oligonucleotide
ctcgttgacagcgcgacctgatgtttcagt

SEQ ID NO: 502289 - DNA, 30 bp, Artificial Sequence
  Synthetic oligonucleotide
aacatgcatgttgatccactggttttcagt

SEQ ID NO: 502290 - DNA, 30 bp, Artificial Sequence
  Synthetic oligonucleotide
cccatttaaccatttcttgagtttttcagt

SEQ ID NO: 502291 - DNA, 30 bp, Artificial Sequence
  Synthetic oligonucleotide
cggtgagaaataaacggcgttaaaaagagt

SEQ ID NO: 502292 - DNA, 30 bp, Artificial Sequence
  Synthetic oligonucleotide
cattgatcgcaaatctctctgaacaagagt

SEQ ID NO: 502293 - DNA, 30 bp, Artificial Sequence
  Synthetic oligonucleotide
gaatcctgagcgaattataggcgcaagagt

SEQ ID NO: 502294 - DNA, 30 bp, Artificial Sequence
  Synthetic oligonucleotide
ctgcatgggaccccggcagctcagaagagt

SEQ ID NO: 502295 - DNA, 30 bp, Artificial Sequence
  Synthetic oligonucleotide
atttgtacgaaacaacgcttagctaagagt

SEQ ID NO: 502296 - DNA, 30 bp, Artificial Sequence
  Synthetic oligonucleotide
gtagctgcggttccagctttctaacagagt

SEQ ID NO: 502297 - DNA, 30 bp, Artificial Sequence
  Synthetic oligonucleotide
aagcccggattcttacctgtgtgccagagt

SEQ ID NO: 502298 - DNA, 30 bp, Artificial Sequence
  Synthetic oligonucleotide
tgcttgaaaagtgaatgaactcagcagagt

SEQ ID NO: 502299 - DNA, 30 bp, Artificial Sequence
  Synthetic oligonucleotide
ctaaaacattcctggacggcgcggcagagt

SEQ ID NO: 502300 - DNA, 30 bp, Artificial Sequence
  Synthetic oligonucleotide
gttagacggattgcccgactaagagagagt

SEQ ID NO: 502301 - DNA, 30 bp, Artificial Sequence
  Synthetic oligonucleotide
catattgaataatgctcctctctcgagagt

SEQ ID NO: 502302 - DNA, 30 bp, Artificial Sequence
  Synthetic oligonucleotide
cttgagttagcgccggcccctacggagagt

SEQ ID NO: 502303 - DNA, 30 bp, Artificial Sequence
  Synthetic oligonucleotide
cagtgacaaggtgggcagactgtggagagt

SEQ ID NO: 502304 - DNA, 30 bp, Artificial Sequence
  Synthetic oligonucleotide
ctttatcctgataggcagggctttgagagt

SEQ ID NO: 502305 - DNA, 30 bp, Artificial Sequence
  Synthetic oligonucleotide
tatctggacccatgtttctggccctagagt

SEQ ID NO: 502306 - DNA, 30 bp, Artificial Sequence
  Synthetic oligonucleotide
atctcgtttgataccaaacgggtctagagt

SEQ ID NO: 502307 - DNA, 30 bp, Artificial Sequence
  Synthetic oligonucleotide
tcaatctatcaggcagtagcaccttagagt

SEQ ID NO: 502308 - DNA, 30 bp, Artificial Sequence
  Synthetic oligonucleotide
tgccggtcgtacgcgacgtgcatttagagt

SEQ ID NO: 502309 - DNA, 30 bp, Artificial Sequence
  Synthetic oligonucleotide
tctgacctcaactactaggaatagacgagt

SEQ ID NO: 502310 - DNA, 30 bp, Artificial Sequence
  Synthetic oligonucleotide
gtccttatctatcgtaccaacgcaccgagt

SEQ ID NO: 502311 - DNA, 30 bp, Artificial Sequence
  Synthetic oligonucleotide
gagtccacgagtcggatgtgtataccgagt

SEQ ID NO: 502312 - DNA, 30 bp, Artificial Sequence
  Synthetic oligonucleotide
ctcttgtgctcccttagttatattccgagt

SEQ ID NO: 502313 - DNA, 30 bp, Artificial Sequence
  Synthetic oligonucleotide
tatctaaccagctaagtacacacagcgagt

SEQ ID NO: 502314 - DNA, 30 bp, Artificial Sequence
  Synthetic oligonucleotide
gaaatacatttggtattgctgtaggcgagt

SEQ ID NO: 502315 - DNA, 30 bp, Artificial Sequence
  Synthetic oligonucleotide
tattgactagagctctcaggtcttgcgagt

SEQ ID NO: 502316 - DNA, 30 bp, Artificial Sequence
  Synthetic oligonucleotide
ccatatttggcgcgggctccttactcgagt

SEQ ID NO: 502317 - DNA, 31 bp, Artificial Sequence
  Synthetic oligonucleotide
attcaatcggtagaagggtcctccttcgagt

SEQ ID NO: 502318 - DNA, 30 bp, Artificial Sequence
  Synthetic oligonucleotide
gcgagcggctctcctttttgggacaggagt

SEQ ID NO: 502319 - DNA, 30 bp, Artificial Sequence
  Synthetic oligonucleotide
ggcagtgatcttattttttggaagaggagt

SEQ ID NO: 502320 - DNA, 30 bp, Artificial Sequence
  Synthetic oligonucleotide
gtaaatatgccataataattgatgaggagt

SEQ ID NO: 502321 - DNA, 30 bp, Artificial Sequence
  Synthetic oligonucleotide
tgtataaaacgtatgtatagagctaggagt

SEQ ID NO: 502322 - DNA, 30 bp, Artificial Sequence
  Synthetic oligonucleotide
caccttgtctgaggcatagctgttaggagt

SEQ ID NO: 502323 - DNA, 30 bp, Artificial Sequence
  Synthetic oligonucleotide
ttcgagtttttttttagactcaaacggagt

SEQ ID NO: 502324 - DNA, 30 bp, Artificial Sequence
  Synthetic oligonucleotide
tccggctttcgttcgggtttaagacggagt

SEQ ID NO: 502325 - DNA, 30 bp, Artificial Sequence
  Synthetic oligonucleotide
agtggcattcgtatcgttattttccggagt

SEQ ID NO: 502326 - DNA, 30 bp, Artificial Sequence
  Synthetic oligonucleotide
gctggtgtgcctgtagcgtcctagcggagt

SEQ ID NO: 502327 - DNA, 30 bp, Artificial Sequence
  Synthetic oligonucleotide
gagggattaaaacaccccttgtaggggagt

SEQ ID NO: 502328 - DNA, 30 bp, Artificial Sequence
  Synthetic oligonucleotide
ccccaccccagggacagtggtcaatggagt

SEQ ID NO: 502329 - DNA, 30 bp, Artificial Sequence
  Synthetic oligonucleotide
aacaccgtacccaatcagaggggatggagt

SEQ ID NO: 502330 - DNA, 30 bp, Artificial Sequence
  Synthetic oligonucleotide
aagcctggtgagggacgctcgaccatgagt

SEQ ID NO: 502331 - DNA, 30 bp, Artificial Sequence
  Synthetic oligonucleotide
gttagttttttaggatggctctgcatgagt

SEQ ID NO: 502332 - DNA, 30 bp, Artificial Sequence
  Synthetic oligonucleotide
atagatctgtttaacttctaggtgatgagt

SEQ ID NO: 502333 - DNA, 30 bp, Artificial Sequence
  Synthetic oligonucleotide
tttaccagataaccttttttggatatgagt

SEQ ID NO: 502334 - DNA, 30 bp, Artificial Sequence
  Synthetic oligonucleotide
acgtgcctgtacgatccacctcgtatgagt

SEQ ID NO: 502335 - DNA, 30 bp, Artificial Sequence
  Synthetic oligonucleotide
gtgcttattgatcgcttcgcttgtatgagt

SEQ ID NO: 502336 - DNA, 30 bp, Artificial Sequence
  Synthetic oligonucleotide
aatagatcagtctgagccacctgactgagt

SEQ ID NO: 502337 - DNA, 30 bp, Artificial Sequence
  Synthetic oligonucleotide
gacaactttataaatgtaggaaccctgagt

SEQ ID NO: 502338 - DNA, 30 bp, Artificial Sequence
  Synthetic oligonucleotide
taaccgtgctcgaggccgcaagcgctgagt

SEQ ID NO: 502339 - DNA, 30 bp, Artificial Sequence
  Synthetic oligonucleotide
actgttatcgcaatcgcgtgctatctgagt

SEQ ID NO: 502340 - DNA, 30 bp, Artificial Sequence
  Synthetic oligonucleotide
tgagaccgctcgcgcgctaatcctctgagt

SEQ ID NO: 502341 - DNA, 30 bp, Artificial Sequence
  Synthetic oligonucleotide
aagtctgcatgacggtatgcaagtctgagt

SEQ ID NO: 502342 - DNA, 30 bp, Artificial Sequence
  Synthetic oligonucleotide
ggtggtgacgccagtacagacgacgtgagt

SEQ ID NO: 502343 - DNA, 30 bp, Artificial Sequence
  Synthetic oligonucleotide
ccgctagtctgtcacgatgtcaccgtgagt

SEQ ID NO: 502344 - DNA, 30 bp, Artificial Sequence
  Synthetic oligonucleotide
gagatcgctctgctcatctggagcgtgagt

SEQ ID NO: 502345 - DNA, 30 bp, Artificial Sequence
  Synthetic oligonucleotide
aacctacgctattatgctgcttgcgtgagt

SEQ ID NO: 502346 - DNA, 30 bp, Artificial Sequence
  Synthetic oligonucleotide
ccgctttgcactagcggccctcaggtgagt

SEQ ID NO: 502347 - DNA, 30 bp, Artificial Sequence
  Synthetic oligonucleotide
gtgaacgggctactcggatactaggtgagt

SEQ ID NO: 502348 - DNA, 30 bp, Artificial Sequence
  Synthetic oligonucleotide
agggctcgcgacaggggcattcgggtgagt

SEQ ID NO: 502349 - DNA, 30 bp, Artificial Sequence
  Synthetic oligonucleotide
ctagagccatttaagagattggtggtgagt

SEQ ID NO: 502350 - DNA, 30 bp, Artificial Sequence
  Synthetic oligonucleotide
cgctatgcactcttgtttgcgacattgagt

SEQ ID NO: 502351 - DNA, 30 bp, Artificial Sequence
  Synthetic oligonucleotide
tccttttcagatcttaagagtgcgttgagt

SEQ ID NO: 502352 - DNA, 30 bp, Artificial Sequence
  Synthetic oligonucleotide
atctattgaacctaactattctggttgagt

SEQ ID NO: 502353 - DNA, 30 bp, Artificial Sequence
  Synthetic oligonucleotide
atgatttgtaggttttgaaacgctttgagt

SEQ ID NO: 502354 - DNA, 30 bp, Artificial Sequence
  Synthetic oligonucleotide
tttctaggttggtggcagccctctttgagt

SEQ ID NO: 502355 - DNA, 30 bp, Artificial Sequence
  Synthetic oligonucleotide
tttgactacgtcaataccacacgtttgagt

SEQ ID NO: 502356 - DNA, 30 bp, Artificial Sequence
  Synthetic oligonucleotide
gacggcccctcgaaagagttgaaaaatagt

SEQ ID NO: 502357 - DNA, 30 bp, Artificial Sequence
  Synthetic oligonucleotide
tagaatttcttattaactactataaatagt

SEQ ID NO: 502358 - DNA, 30 bp, Artificial Sequence
  Synthetic oligonucleotide
gttgatcacggttgacacacccgcaatagt

SEQ ID NO: 502359 - DNA, 30 bp, Artificial Sequence
  Synthetic oligonucleotide
cactctgctaagtgtcacgcagataatagt

SEQ ID NO: 502360 - DNA, 30 bp, Artificial Sequence
  Synthetic oligonucleotide
acgcaaccatcatatccttcttataatagt

SEQ ID NO: 502361 - DNA, 30 bp, Artificial Sequence
  Synthetic oligonucleotide
aggggaagtgccaatgaggcatctaatagt

SEQ ID NO: 502362 - DNA, 30 bp, Artificial Sequence
  Synthetic oligonucleotide
atcccacgcagccccaaaggtgttaatagt

SEQ ID NO: 502363 - DNA, 30 bp, Artificial Sequence
  Synthetic oligonucleotide
tatctacacggctagggacttctacatagt

SEQ ID NO: 502364 - DNA, 30 bp, Artificial Sequence
  Synthetic oligonucleotide
ggtagtacttcgatgcaatcatgccatagt

SEQ ID NO: 502365 - DNA, 30 bp, Artificial Sequence
  Synthetic oligonucleotide
taaacttcctacacggcaccgtggcatagt

SEQ ID NO: 502366 - DNA, 30 bp, Artificial Sequence
  Synthetic oligonucleotide
gaatataatagcaccacgacgatgcatagt

SEQ ID NO: 502367 - DNA, 30 bp, Artificial Sequence
  Synthetic oligonucleotide
ggcaacaacagaggagaatccgctcatagt

SEQ ID NO: 502368 - DNA, 30 bp, Artificial Sequence
  Synthetic oligonucleotide
atgacgctgcgggtgctcctgatagatagt

SEQ ID NO: 502369 - DNA, 30 bp, Artificial Sequence
  Synthetic oligonucleotide
atgcggtacttccgtcactgcaacgatagt

SEQ ID NO: 502370 - DNA, 30 bp, Artificial Sequence
  Synthetic oligonucleotide
aacgggaagtttaccttgctccccgatagt

SEQ ID NO: 502371 - DNA, 30 bp, Artificial Sequence
  Synthetic oligonucleotide
gactctggacatgagagatttctcgatagt

SEQ ID NO: 502372 - DNA, 30 bp, Artificial Sequence
  Synthetic oligonucleotide
agtcccccctcccaaggggagtgggatagt

SEQ ID NO: 502373 - DNA, 30 bp, Artificial Sequence
  Synthetic oligonucleotide
agcggtattaaatctcatgacgtggatagt

SEQ ID NO: 502374 - DNA, 30 bp, Artificial Sequence
  Synthetic oligonucleotide
acttaagagagagcaagatgcgtggatagt

SEQ ID NO: 502375 - DNA, 30 bp, Artificial Sequence
  Synthetic oligonucleotide
aacctatccccaggaagaagttatgatagt

SEQ ID NO: 502376 - DNA, 30 bp, Artificial Sequence
  Synthetic oligonucleotide
gacgtttaacctaatcagtctagtgatagt

SEQ ID NO: 502377 - DNA, 30 bp, Artificial Sequence
  Synthetic oligonucleotide
tacacgtgtatctgtaacactgcatatagt

SEQ ID NO: 502378 - DNA, 30 bp, Artificial Sequence
  Synthetic oligonucleotide
gaagtgactgattttatcgacctctatagt

SEQ ID NO: 502379 - DNA, 30 bp, Artificial Sequence
  Synthetic oligonucleotide
cggcaatgatcaaacggatcttagtatagt

SEQ ID NO: 502380 - DNA, 30 bp, Artificial Sequence
  Synthetic oligonucleotide
gttcagtctgcaatcttttacgggtatagt

SEQ ID NO: 502381 - DNA, 30 bp, Artificial Sequence
  Synthetic oligonucleotide
gttcagaagaattgactataccattatagt

SEQ ID NO: 502382 - DNA, 30 bp, Artificial Sequence
  Synthetic oligonucleotide
gcagttacatcgtacataagtatttatagt

SEQ ID NO: 502383 - DNA, 30 bp, Artificial Sequence
  Synthetic oligonucleotide
gagttgtacggtccattctatagaactagt

SEQ ID NO: 502384 - DNA, 30 bp, Artificial Sequence
  Synthetic oligonucleotide
gagttaatgtgctacctaaccaagactagt

SEQ ID NO: 502385 - DNA, 30 bp, Artificial Sequence
  Synthetic oligonucleotide
tctctctgggactgccgaatagcacctagt

SEQ ID NO: 502386 - DNA, 30 bp, Artificial Sequence
  Synthetic oligonucleotide
aacgcagcggaatcccgggtccaccctagt

SEQ ID NO: 502387 - DNA, 30 bp, Artificial Sequence
  Synthetic oligonucleotide
atgttaggagctatcggatcgccccctagt

SEQ ID NO: 502388 - DNA, 30 bp, Artificial Sequence
  Synthetic oligonucleotide
actatcatttggttctctactcgccctagt

SEQ ID NO: 502389 - DNA, 30 bp, Artificial Sequence
  Synthetic oligonucleotide
ggctcgtaacgggatcgggtctgccctagt

SEQ ID NO: 502390 - DNA, 30 bp, Artificial Sequence
  Synthetic oligonucleotide
gcactaaaggagtttggtgttgctcctagt

SEQ ID NO: 502391 - DNA, 30 bp, Artificial Sequence
  Synthetic oligonucleotide
gttgccttgttcatgaataaacgtcctagt

SEQ ID NO: 502392 - DNA, 30 bp, Artificial Sequence
  Synthetic oligonucleotide
cactaggtttaaatactgaagtttcctagt

SEQ ID NO: 502393 - DNA, 30 bp, Artificial Sequence
  Synthetic oligonucleotide
aaaggctcgcagggtttgtagtttcctagt

SEQ ID NO: 502394 - DNA, 30 bp, Artificial Sequence
  Synthetic oligonucleotide
agctaatgcgtatctcctagttacgctagt

SEQ ID NO: 502395 - DNA, 30 bp, Artificial Sequence
  Synthetic oligonucleotide
ttgaggagctttgggcaatgcagcgctagt

SEQ ID NO: 502396 - DNA, 30 bp, Artificial Sequence
  Synthetic oligonucleotide
cgcgcggccagcgataacgctatcgctagt

SEQ ID NO: 502397 - DNA, 30 bp, Artificial Sequence
  Synthetic oligonucleotide
ctgtaagcaggaattgtacgactcgctagt

SEQ ID NO: 502398 - DNA, 30 bp, Artificial Sequence
  Synthetic oligonucleotide
tgttttctgttggcaacggctaaggctagt

SEQ ID NO: 502399 - DNA, 30 bp, Artificial Sequence
  Synthetic oligonucleotide
ctataggcatacagcaaagactttgctagt

SEQ ID NO: 502400 - DNA, 30 bp, Artificial Sequence
  Synthetic oligonucleotide
aagtggtcgagacgctgcgtaagatctagt

SEQ ID NO: 502401 - DNA, 30 bp, Artificial Sequence
  Synthetic oligonucleotide
tgttattgcttcttaacaactatatctagt

SEQ ID NO: 502402 - DNA, 30 bp, Artificial Sequence
  Synthetic oligonucleotide
ggacggttgctttgcaccatcgtctctagt

SEQ ID NO: 502403 - DNA, 30 bp, Artificial Sequence
  Synthetic oligonucleotide
gcaagtaaacgcgttcgtcaggagtctagt

SEQ ID NO: 502404 - DNA, 30 bp, Artificial Sequence
  Synthetic oligonucleotide
ttttccggactaagtcaataaaggtctagt

SEQ ID NO: 502405 - DNA, 30 bp, Artificial Sequence
  Synthetic oligonucleotide
aatttagatttgaaagcaatccggtctagt

SEQ ID NO: 502406 - DNA, 30 bp, Artificial Sequence
  Synthetic oligonucleotide
taaagggaacggattcggcgcccttctagt

SEQ ID NO: 502407 - DNA, 30 bp, Artificial Sequence
  Synthetic oligonucleotide
tttttcaacgtagaccgtgaaagttctagt

SEQ ID NO: 502408 - DNA, 30 bp, Artificial Sequence
  Synthetic oligonucleotide
ttttgttcgccctctggcgcgttttctagt

SEQ ID NO: 502409 - DNA, 30 bp, Artificial Sequence
  Synthetic oligonucleotide
acgcatacttggtatactgaatcaagtagt

SEQ ID NO: 502410 - DNA, 30 bp, Artificial Sequence
  Synthetic oligonucleotide
tttaagcgggggcgttaggtctcaagtagt

SEQ ID NO: 502411 - DNA, 30 bp, Artificial Sequence
  Synthetic oligonucleotide
gcctgatagggtccacggtagttaagtagt

SEQ ID NO: 502412 - DNA, 30 bp, Artificial Sequence
  Synthetic oligonucleotide
gtttacttatgtctgcaggacgacagtagt

SEQ ID NO: 502413 - DNA, 30 bp, Artificial Sequence
  Synthetic oligonucleotide
tagcaccttcttggtctcaatgcgagtagt

SEQ ID NO: 502414 - DNA, 30 bp, Artificial Sequence
  Synthetic oligonucleotide
gcgggactacgcgccagtattccccgtagt

SEQ ID NO: 502415 - DNA, 30 bp, Artificial Sequence
  Synthetic oligonucleotide
acgagggccgttaggtttatctggcgtagt

SEQ ID NO: 502416 - DNA, 30 bp, Artificial Sequence
  Synthetic oligonucleotide
atcaggttggtgacacatgcacgtcgtagt

SEQ ID NO: 502417 - DNA, 30 bp, Artificial Sequence
  Synthetic oligonucleotide
tcaacgttcaggcttggaattgttcgtagt

SEQ ID NO: 502418 - DNA, 30 bp, Artificial Sequence
  Synthetic oligonucleotide
aggacacttggctggcagggtctaggtagt

SEQ ID NO: 502419 - DNA, 30 bp, Artificial Sequence
  Synthetic oligonucleotide
tcgattaagaaagacgtggctcacggtagt

SEQ ID NO: 502420 - DNA, 30 bp, Artificial Sequence
  Synthetic oligonucleotide
tttcctttgagttccgcagaatccggtagt

SEQ ID NO: 502421 - DNA, 30 bp, Artificial Sequence
  Synthetic oligonucleotide
gcccggtagcacggggtccttcgcggtagt

SEQ ID NO: 502422 - DNA, 30 bp, Artificial Sequence
  Synthetic oligonucleotide
ttgcggacatctgccgactaatgcggtagt

SEQ ID NO: 502423 - DNA, 30 bp, Artificial Sequence
  Synthetic oligonucleotide
agggttgattaaacaggtcaatagggtagt

SEQ ID NO: 502424 - DNA, 30 bp, Artificial Sequence
  Synthetic oligonucleotide
gccggtacctagtccaagccggctggtagt

SEQ ID NO: 502425 - DNA, 30 bp, Artificial Sequence
  Synthetic oligonucleotide
cccgaaattcgccttgaattctctggtagt

SEQ ID NO: 502426 - DNA, 30 bp, Artificial Sequence
  Synthetic oligonucleotide
gagtgctttcctcgtagccaaattggtagt

SEQ ID NO: 502427 - DNA, 30 bp, Artificial Sequence
  Synthetic oligonucleotide
attcaacctatgaacggagacagatgtagt

SEQ ID NO: 502428 - DNA, 30 bp, Artificial Sequence
  Synthetic oligonucleotide
ggcgggaagtacttggtaagttactgtagt

SEQ ID NO: 502429 - DNA, 30 bp, Artificial Sequence
  Synthetic oligonucleotide
gggtcgaggcagttgcagcgttgctgtagt

SEQ ID NO: 502430 - DNA, 30 bp, Artificial Sequence
  Synthetic oligonucleotide
ctggtgcggccttcttttatggggtgtagt

SEQ ID NO: 502431 - DNA, 30 bp, Artificial Sequence
  Synthetic oligonucleotide
gtctccactttatattagccatgttgtagt

SEQ ID NO: 502432 - DNA, 30 bp, Artificial Sequence
  Synthetic oligonucleotide
aagaattatcattgactaagcaaaattagt

SEQ ID NO: 502433 - DNA, 30 bp, Artificial Sequence
  Synthetic oligonucleotide
aactattaagtttgaagcgccggaattagt

SEQ ID NO: 502434 - DNA, 30 bp, Artificial Sequence
  Synthetic oligonucleotide
ttatgctatcgactggcggcggtaattagt

SEQ ID NO: 502435 - DNA, 30 bp, Artificial Sequence
  Synthetic oligonucleotide
tggacccagcatggaaggcatgacattagt

SEQ ID NO: 502436 - DNA, 30 bp, Artificial Sequence
  Synthetic oligonucleotide
gcgggcaacaaatgttattcacccattagt

SEQ ID NO: 502437 - DNA, 30 bp, Artificial Sequence
  Synthetic oligonucleotide
gggagagcagacacggtaggaatcattagt

SEQ ID NO: 502438 - DNA, 30 bp, Artificial Sequence
  Synthetic oligonucleotide
gactactactagaagtaaggcttcattagt

SEQ ID NO: 502439 - DNA, 30 bp, Artificial Sequence
  Synthetic oligonucleotide
ttactcagcgtgtaatccgacaagattagt

SEQ ID NO: 502440 - DNA, 30 bp, Artificial Sequence
  Synthetic oligonucleotide
ttggtgttgaggtttctctcgtcgattagt

SEQ ID NO: 502441 - DNA, 30 bp, Artificial Sequence
  Synthetic oligonucleotide
tttcaccacaagttgtgagccttgattagt

SEQ ID NO: 502442 - DNA, 30 bp, Artificial Sequence
  Synthetic oligonucleotide
gcaatcccggcaaccgaccgggatattagt

SEQ ID NO: 502443 - DNA, 30 bp, Artificial Sequence
  Synthetic oligonucleotide
accatctttggggtggaactggcacttagt

SEQ ID NO: 502444 - DNA, 30 bp, Artificial Sequence
  Synthetic oligonucleotide
gtcctatagattcgaatctccgcccttagt

SEQ ID NO: 502445 - DNA, 30 bp, Artificial Sequence
  Synthetic oligonucleotide
gggagggaagcgaagctaatcatccttagt

SEQ ID NO: 502446 - DNA, 30 bp, Artificial Sequence
  Synthetic oligonucleotide
gaggcgccaggaggagttcgactccttagt

SEQ ID NO: 502447 - DNA, 30 bp, Artificial Sequence
  Synthetic oligonucleotide
tgggcaggtatgtacacaggagagcttagt

SEQ ID NO: 502448 - DNA, 30 bp, Artificial Sequence
  Synthetic oligonucleotide
taggactggaacgcaggtaatgggcttagt

SEQ ID NO: 502449 - DNA, 30 bp, Artificial Sequence
  Synthetic oligonucleotide
accccagctcgccaggcgcactatcttagt

SEQ ID NO: 502450 - DNA, 30 bp, Artificial Sequence
  Synthetic oligonucleotide
cttgtctgccgttcgggcgctgctcttagt

SEQ ID NO: 502451 - DNA, 30 bp, Artificial Sequence
  Synthetic oligonucleotide
gtcttaaagtcttaggccttatctcttagt

SEQ ID NO: 502452 - DNA, 30 bp, Artificial Sequence
  Synthetic oligonucleotide
tctcggatagaaaactatctctttcttagt

SEQ ID NO: 502453 - DNA, 30 bp, Artificial Sequence
  Synthetic oligonucleotide
cctcccgggtcaatgcgagcaaaagttagt

SEQ ID NO: 502454 - DNA, 30 bp, Artificial Sequence
  Synthetic oligonucleotide
aacaatctaaccttctatgcctaggttagt

SEQ ID NO: 502455 - DNA, 30 bp, Artificial Sequence
  Synthetic oligonucleotide
atagcacataaccgcgatccgtaggttagt

SEQ ID NO: 502456 - DNA, 30 bp, Artificial Sequence
  Synthetic oligonucleotide
tgtaatctattgaggtgtgagagggttagt

SEQ ID NO: 502457 - DNA, 30 bp, Artificial Sequence
  Synthetic oligonucleotide
aacccggtcaagatctcttggcatgttagt

SEQ ID NO: 502458 - DNA, 30 bp, Artificial Sequence
  Synthetic oligonucleotide
tttgtactacagatcaacggtactgttagt

SEQ ID NO: 502459 - DNA, 30 bp, Artificial Sequence
  Synthetic oligonucleotide
gtccgccggaggcggcgagtccgatttagt

SEQ ID NO: 502460 - DNA, 30 bp, Artificial Sequence
  Synthetic oligonucleotide
attagtttaactcggagcacactatttagt

SEQ ID NO: 502461 - DNA, 30 bp, Artificial Sequence
  Synthetic oligonucleotide
tgaaatgcacgagaactcctactatttagt

SEQ ID NO: 502462 - DNA, 30 bp, Artificial Sequence
  Synthetic oligonucleotide
caactaggttcccgattgggtaactttagt

SEQ ID NO: 502463 - DNA, 30 bp, Artificial Sequence
  Synthetic oligonucleotide
cccgtttataggtacctataggcctttagt

SEQ ID NO: 502464 - DNA, 30 bp, Artificial Sequence
  Synthetic oligonucleotide
ctttgatgtggcaccgccgtatagtttagt

SEQ ID NO: 502465 - DNA, 30 bp, Artificial Sequence
  Synthetic oligonucleotide
tggcggtccagaagatgacgcaggtttagt

SEQ ID NO: 502466 - DNA, 30 bp, Artificial Sequence
  Synthetic oligonucleotide
cattccactattgctacccttatttttagt

SEQ ID NO: 502467 - DNA, 30 bp, Artificial Sequence
  Synthetic oligonucleotide
tttcgtcatactcacagttgccgaaaacgt

SEQ ID NO: 502468 - DNA, 30 bp, Artificial Sequence
  Synthetic oligonucleotide
ttttattgtatccggtgacaagtaaaacgt

SEQ ID NO: 502469 - DNA, 30 bp, Artificial Sequence
  Synthetic oligonucleotide
accagctgcgagcttcacaaggtaaaacgt

SEQ ID NO: 502470 - DNA, 30 bp, Artificial Sequence
  Synthetic oligonucleotide
atatcgaaacagtgggctattcacaaacgt

SEQ ID NO: 502471 - DNA, 30 bp, Artificial Sequence
  Synthetic oligonucleotide
tacttatagttctgcttactttggaaacgt

SEQ ID NO: 502472 - DNA, 30 bp, Artificial Sequence
  Synthetic oligonucleotide
ttgggtccatgggtgcgagcaaataaacgt

SEQ ID NO: 502473 - DNA, 30 bp, Artificial Sequence
  Synthetic oligonucleotide
ctgttaatatcaagagggattcgtaaacgt

SEQ ID NO: 502474 - DNA, 30 bp, Artificial Sequence
  Synthetic oligonucleotide
aaggttcgggtatggcgaaaagcacaacgt

SEQ ID NO: 502475 - DNA, 30 bp, Artificial Sequence
  Synthetic oligonucleotide
ttcaggtcctaacatagacgcggccaacgt

SEQ ID NO: 502476 - DNA, 30 bp, Artificial Sequence
  Synthetic oligonucleotide
agcccccatttacaacggagctgagaacgt

SEQ ID NO: 502477 - DNA, 30 bp, Artificial Sequence
  Synthetic oligonucleotide
agaatcccgcggtgctgactgtgagaacgt

SEQ ID NO: 502478 - DNA, 30 bp, Artificial Sequence
  Synthetic oligonucleotide
aattagggctcatatctattggacgaacgt

SEQ ID NO: 502479 - DNA, 30 bp, Artificial Sequence
  Synthetic oligonucleotide
atctccggagctctgacgggaatcgaacgt

SEQ ID NO: 502480 - DNA, 30 bp, Artificial Sequence
  Synthetic oligonucleotide
gaattgttattgcgtatgctacaggaacgt

SEQ ID NO: 502481 - DNA, 30 bp, Artificial Sequence
  Synthetic oligonucleotide
gcggtgtttatccgttaataccatgaacgt

SEQ ID NO: 502482 - DNA, 30 bp, Artificial Sequence
  Synthetic oligonucleotide
gcgactagcgcaagcgacatttgtgaacgt

SEQ ID NO: 502483 - DNA, 30 bp, Artificial Sequence
  Synthetic oligonucleotide
tgccccaggcgacccttatatccgtaacgt

SEQ ID NO: 502484 - DNA, 30 bp, Artificial Sequence
  Synthetic oligonucleotide
aaatcttagggccaacaatttcattaacgt

SEQ ID NO: 502485 - DNA, 30 bp, Artificial Sequence
  Synthetic oligonucleotide
tgataggaggtacaatcggtagtaacacgt

SEQ ID NO: 502486 - DNA, 30 bp, Artificial Sequence
  Synthetic oligonucleotide
cgaggtctgtacgttgggaatgccacacgt

SEQ ID NO: 502487 - DNA, 30 bp, Artificial Sequence
  Synthetic oligonucleotide
tgtaaacaattttcaaggtttactacacgt

SEQ ID NO: 502488 - DNA, 30 bp, Artificial Sequence
  Synthetic oligonucleotide
cttatgaaactcatcgaacgtattacacgt

SEQ ID NO: 502489 - DNA, 30 bp, Artificial Sequence
  Synthetic oligonucleotide
cttacgatgcctcgtaaggacaaaccacgt

SEQ ID NO: 502490 - DNA, 30 bp, Artificial Sequence
  Synthetic oligonucleotide
gctccgtctaagaggtctgatgagccacgt

SEQ ID NO: 502491 - DNA, 30 bp, Artificial Sequence
  Synthetic oligonucleotide
gcctctttccaatgcccaagtaatccacgt

SEQ ID NO: 502492 - DNA, 30 bp, Artificial Sequence
  Synthetic oligonucleotide
ataggtagccacacgtcggtgggtccacgt

SEQ ID NO: 502493 - DNA, 30 bp, Artificial Sequence
  Synthetic oligonucleotide
gcctagcatccactccgccgcacagcacgt

SEQ ID NO: 502494 - DNA, 30 bp, Artificial Sequence
  Synthetic oligonucleotide
tatctcgtgctcgtaaagagagacgcacgt

SEQ ID NO: 502495 - DNA, 30 bp, Artificial Sequence
  Synthetic oligonucleotide
cccgctggctcatctgtatccacggcacgt

SEQ ID NO: 502496 - DNA, 30 bp, Artificial Sequence
  Synthetic oligonucleotide
ctagataaggtgtcactttatcgggcacgt

SEQ ID NO: 502497 - DNA, 30 bp, Artificial Sequence
  Synthetic oligonucleotide
agtatgggctctcttaaagacgctgcacgt

SEQ ID NO: 502498 - DNA, 30 bp, Artificial Sequence
  Synthetic oligonucleotide
tattgtgctgcagccgtcaagagatcacgt

SEQ ID NO: 502499 - DNA, 30 bp, Artificial Sequence
  Synthetic oligonucleotide
ctttgctgcagacagctaaacttatcacgt

SEQ ID NO: 502500 - DNA, 30 bp, Artificial Sequence
  Synthetic oligonucleotide
gataaacatcggctactcttccgctcacgt

SEQ ID NO: 502501 - DNA, 30 bp, Artificial Sequence
  Synthetic oligonucleotide
tttaaatcggcacggtccatgtgttcacgt

SEQ ID NO: 502502 - DNA, 30 bp, Artificial Sequence
  Synthetic oligonucleotide
tttgacaagctacgctcaaatatttcacgt

SEQ ID NO: 502503 - DNA, 30 bp, Artificial Sequence
  Synthetic oligonucleotide
agagataaaattggctgctcttcaagacgt

SEQ ID NO: 502504 - DNA, 30 bp, Artificial Sequence
  Synthetic oligonucleotide
ctaatctcttgtgaaggcaggcgaagacgt

SEQ ID NO: 502505 - DNA, 30 bp, Artificial Sequence
  Synthetic oligonucleotide
tgccggggatttttaacgccaggaagacgt

SEQ ID NO: 502506 - DNA, 30 bp, Artificial Sequence
  Synthetic oligonucleotide
atggctagggggtctgacggcagcagacgt

SEQ ID NO: 502507 - DNA, 30 bp, Artificial Sequence
  Synthetic oligonucleotide
atccgacattaatctcaatcttgcagacgt

SEQ ID NO: 502508 - DNA, 30 bp, Artificial Sequence
  Synthetic oligonucleotide
ataaaacttgtaccgctaaacctcagacgt

SEQ ID NO: 502509 - DNA, 30 bp, Artificial Sequence
  Synthetic oligonucleotide
gtcacatggatactgggttcgaagagacgt

SEQ ID NO: 502510 - DNA, 30 bp, Artificial Sequence
  Synthetic oligonucleotide
aatactcttggtgtcgactgcgagagacgt

SEQ ID NO: 502511 - DNA, 30 bp, Artificial Sequence
  Synthetic oligonucleotide
taacattagggctttatagttgcgagacgt

SEQ ID NO: 502512 - DNA, 30 bp, Artificial Sequence
  Synthetic oligonucleotide
atgaagctataatcagcacgtttgagacgt

SEQ ID NO: 502513 - DNA, 30 bp, Artificial Sequence
  Synthetic oligonucleotide
ctatcttctttgcaatatcgggatagacgt

SEQ ID NO: 502514 - DNA, 30 bp, Artificial Sequence
  Synthetic oligonucleotide
tgacagttacgttcaagctgctgtagacgt

SEQ ID NO: 502515 - DNA, 30 bp, Artificial Sequence
  Synthetic oligonucleotide
acttgttgtcacttgttttcagtacgacgt

SEQ ID NO: 502516 - DNA, 30 bp, Artificial Sequence
  Synthetic oligonucleotide
aaatctaaggtcagacagaacttacgacgt

SEQ ID NO: 502517 - DNA, 30 bp, Artificial Sequence
  Synthetic oligonucleotide
gaatgttaatatggacgtaagcgccgacgt

SEQ ID NO: 502518 - DNA, 30 bp, Artificial Sequence
  Synthetic oligonucleotide
cagcaacgagcagcactatttgcgcgacgt

SEQ ID NO: 502519 - DNA, 30 bp, Artificial Sequence
  Synthetic oligonucleotide
ggggaacacgctggtcaacgagggcgacgt

SEQ ID NO: 502520 - DNA, 30 bp, Artificial Sequence
  Synthetic oligonucleotide
tttcactgcataaggtcatgactgcgacgt

SEQ ID NO: 502521 - DNA, 30 bp, Artificial Sequence
  Synthetic oligonucleotide
tctgtgactattgcagatctattaggacgt

SEQ ID NO: 502522 - DNA, 30 bp, Artificial Sequence
  Synthetic oligonucleotide
taaggcagccgggtaggggggaacggacgt

SEQ ID NO: 502523 - DNA, 30 bp, Artificial Sequence
  Synthetic oligonucleotide
gtaccttccatgggcgagtgaatgggacgt

SEQ ID NO: 502524 - DNA, 30 bp, Artificial Sequence
  Synthetic oligonucleotide
ttcccgcttctatattaactcgaaatacgt

SEQ ID NO: 502525 - DNA, 30 bp, Artificial Sequence
  Synthetic oligonucleotide
aatactacgctcgtgcgtgtaggaatacgt

SEQ ID NO: 502526 - DNA, 31 bp, Artificial Sequence
  Synthetic oligonucleotide
cctcatccaggaatttacgggaaccatacgt

SEQ ID NO: 502527 - DNA, 31 bp, Artificial Sequence
  Synthetic oligonucleotide
atcgaacctacagtgagtcctaaccatacgt

SEQ ID NO: 502528 - DNA, 30 bp, Artificial Sequence
  Synthetic oligonucleotide
cccatcctcacataaactaataccatacgt

SEQ ID NO: 502529 - DNA, 30 bp, Artificial Sequence
  Synthetic oligonucleotide
tctttcatgctttttacaataggcatacgt

SEQ ID NO: 502530 - DNA, 31 bp, Artificial Sequence
  Synthetic oligonucleotide
aagtagaccgccgagctggcctatgatacgt

SEQ ID NO: 502531 - DNA, 30 bp, Artificial Sequence
  Synthetic oligonucleotide
gtacgggatttaacgacataagctatacgt

SEQ ID NO: 502532 - DNA, 27 bp, Artificial Sequence
  Synthetic oligonucleotide
acccgcgttgacctattgggtatacgt

SEQ ID NO: 502533 - DNA, 30 bp, Artificial Sequence
  Synthetic oligonucleotide
accggcgtcggtcccgatctggttatacgt

SEQ ID NO: 502534 - DNA, 30 bp, Artificial Sequence
  Synthetic oligonucleotide
gatggacgacgaacgcgacaataactacgt

SEQ ID NO: 502535 - DNA, 30 bp, Artificial Sequence
  Synthetic oligonucleotide
cacattgtacaagttataagtgtactacgt

SEQ ID NO: 502536 - DNA, 30 bp, Artificial Sequence
  Synthetic oligonucleotide
ccggtccctcgcgtgagtacgtacctacgt

SEQ ID NO: 502537 - DNA, 30 bp, Artificial Sequence
  Synthetic oligonucleotide
aatgactgccggcttgctcgcatcctacgt

SEQ ID NO: 502538 - DNA, 30 bp, Artificial Sequence
  Synthetic oligonucleotide
gcaactgtgcggcgtgagttccggctacgt

SEQ ID NO: 502539 - DNA, 30 bp, Artificial Sequence
  Synthetic oligonucleotide
ttccacaccaaggagccagctgggctacgt

SEQ ID NO: 502540 - DNA, 30 bp, Artificial Sequence
  Synthetic oligonucleotide
acctcgtggaattggggtgtgaatctacgt

SEQ ID NO: 502541 - DNA, 30 bp, Artificial Sequence
  Synthetic oligonucleotide
tgtcgggtcgtgagggaataacctctacgt

SEQ ID NO: 502542 - DNA, 30 bp, Artificial Sequence
  Synthetic oligonucleotide
acagagcataaagccgagcccgttctacgt

SEQ ID NO: 502543 - DNA, 30 bp, Artificial Sequence
  Synthetic oligonucleotide
actcgtaccgcatctaaaacgcgagtacgt

SEQ ID NO: 502544 - DNA, 30 bp, Artificial Sequence
  Synthetic oligonucleotide
atcccgtattatgattgaagtaacgtacgt

SEQ ID NO: 502545 - DNA, 30 bp, Artificial Sequence
  Synthetic oligonucleotide
tttttacataaaccgtcagactacgtacgt

SEQ ID NO: 502546 - DNA, 30 bp, Artificial Sequence
  Synthetic oligonucleotide
gctttacgccggcggacgtcctaggtacgt

SEQ ID NO: 502547 - DNA, 30 bp, Artificial Sequence
  Synthetic oligonucleotide
cttctcactgaagcagttattcttgtacgt

SEQ ID NO: 502548 - DNA, 30 bp, Artificial Sequence
  Synthetic oligonucleotide
aatattctgcaattgccgatcagattacgt

SEQ ID NO: 502549 - DNA, 30 bp, Artificial Sequence
  Synthetic oligonucleotide
atgatctgaggcctagtaagcgtattacgt

SEQ ID NO: 502550 - DNA, 30 bp, Artificial Sequence
  Synthetic oligonucleotide
gccacaatttcgcaactaccggtattacgt

SEQ ID NO: 502551 - DNA, 30 bp, Artificial Sequence
  Synthetic oligonucleotide
ctaaatttgtcttcgtagatcaacttacgt

SEQ ID NO: 502552 - DNA, 30 bp, Artificial Sequence
  Synthetic oligonucleotide
tacgtaactggccctcgaggcaagttacgt

SEQ ID NO: 502553 - DNA, 30 bp, Artificial Sequence
  Synthetic oligonucleotide
ccctacgactcaccttcaggaccgttacgt

SEQ ID NO: 502554 - DNA, 30 bp, Artificial Sequence
  Synthetic oligonucleotide
cttgtccggatacgttagtatatgttacgt

SEQ ID NO: 502555 - DNA, 30 bp, Artificial Sequence
  Synthetic oligonucleotide
ctaggtccgaacattaaagttcggaaccgt

SEQ ID NO: 502556 - DNA, 30 bp, Artificial Sequence
  Synthetic oligonucleotide
tcgacggaggcggtggctcggtataaccgt

SEQ ID NO: 502557 - DNA, 30 bp, Artificial Sequence
  Synthetic oligonucleotide
cgcagttgagcaagcaccatgggtaaccgt

SEQ ID NO: 502558 - DNA, 30 bp, Artificial Sequence
  Synthetic oligonucleotide
aaagcctatattccggcgctaggacaccgt

SEQ ID NO: 502559 - DNA, 30 bp, Artificial Sequence
  Synthetic oligonucleotide
caccgctaagtagtttgacttgtacaccgt

SEQ ID NO: 502560 - DNA, 30 bp, Artificial Sequence
  Synthetic oligonucleotide
ggattccgttcaggatgaaccaaccaccgt

SEQ ID NO: 502561 - DNA, 30 bp, Artificial Sequence
  Synthetic oligonucleotide
cggcggcgtagatggtgccaaagccaccgt

SEQ ID NO: 502562 - DNA, 30 bp, Artificial Sequence
  Synthetic oligonucleotide
gatgtcctgattgggatatcatagcaccgt

SEQ ID NO: 502563 - DNA, 30 bp, Artificial Sequence
  Synthetic oligonucleotide
ggaatagattaatattccgggcatcaccgt

SEQ ID NO: 502564 - DNA, 30 bp, Artificial Sequence
  Synthetic oligonucleotide
actacagtgtctctaagggatagtcaccgt

SEQ ID NO: 502565 - DNA, 30 bp, Artificial Sequence
  Synthetic oligonucleotide
gtctcattgtaattatcaggacgtcaccgt

SEQ ID NO: 502566 - DNA, 30 bp, Artificial Sequence
  Synthetic oligonucleotide
cgcacttaaggcagaaccttgtaggaccgt

SEQ ID NO: 502567 - DNA, 30 bp, Artificial Sequence
  Synthetic oligonucleotide
tggatccctaaccctacttcgtcggaccgt

SEQ ID NO: 502568 - DNA, 30 bp, Artificial Sequence
  Synthetic oligonucleotide
ttgtataaaactaaggggatttagtaccgt

SEQ ID NO: 502569 - DNA, 30 bp, Artificial Sequence
  Synthetic oligonucleotide
agtgtatccgcagatcccgtatcgtaccgt

SEQ ID NO: 502570 - DNA, 30 bp, Artificial Sequence
  Synthetic oligonucleotide
tgctttggagaccctgcgatatcttaccgt

SEQ ID NO: 502571 - DNA, 30 bp, Artificial Sequence
  Synthetic oligonucleotide
gttaactatatatagctaagtcgttaccgt

SEQ ID NO: 502572 - DNA, 30 bp, Artificial Sequence
  Synthetic oligonucleotide
catttcttacaagtgccaccagtaacccgt

SEQ ID NO: 502573 - DNA, 29 bp, Artificial Sequence
  Synthetic oligonucleotide
gataaaattttgtgattgtccacacccgt

SEQ ID NO: 502574 - DNA, 30 bp, Artificial Sequence
  Synthetic oligonucleotide
taagcgtgactctttgaattccatacccgt

SEQ ID NO: 502575 - DNA, 30 bp, Artificial Sequence
  Synthetic oligonucleotide
tttacggcggctgccgtgttgactacccgt

SEQ ID NO: 502576 - DNA, 30 bp, Artificial Sequence
  Synthetic oligonucleotide
cttgcacaagggatacagattggtacccgt

SEQ ID NO: 502577 - DNA, 30 bp, Artificial Sequence
  Synthetic oligonucleotide
gcgaaggttgagactcagtaacaaccccgt

SEQ ID NO: 502578 - DNA, 30 bp, Artificial Sequence
  Synthetic oligonucleotide
tctcattcatagatgatcatggccccccgt

SEQ ID NO: 502579 - DNA, 30 bp, Artificial Sequence
  Synthetic oligonucleotide
gttgtctccgcagagggcataacgccccgt

SEQ ID NO: 502580 - DNA, 30 bp, Artificial Sequence
  Synthetic oligonucleotide
tgcggacacctgtataagatcaggccccgt

SEQ ID NO: 502581 - DNA, 30 bp, Artificial Sequence
  Synthetic oligonucleotide
ctaatcacgcattggttggcaaaagcccgt

SEQ ID NO: 502582 - DNA, 30 bp, Artificial Sequence
  Synthetic oligonucleotide
attctaattacatctcctatgggagcccgt

SEQ ID NO: 502583 - DNA, 30 bp, Artificial Sequence
  Synthetic oligonucleotide
cttacacctgggtcatggtgaaacgcccgt

SEQ ID NO: 502584 - DNA, 30 bp, Artificial Sequence
  Synthetic oligonucleotide
gttagcgtgttcaacttaacatccgcccgt

SEQ ID NO: 502585 - DNA, 30 bp, Artificial Sequence
  Synthetic oligonucleotide
aattccatttcagatacggtgccatcccgt

SEQ ID NO: 502586 - DNA, 30 bp, Artificial Sequence
  Synthetic oligonucleotide
atatctcttctagttcattaacgctcccgt

SEQ ID NO: 502587 - DNA, 30 bp, Artificial Sequence
  Synthetic oligonucleotide
actcagtttcggcacgctcaccgctcccgt

SEQ ID NO: 502588 - DNA, 30 bp, Artificial Sequence
  Synthetic oligonucleotide
aggcgtcaaacatgccttgggaggtcccgt

SEQ ID NO: 502589 - DNA, 30 bp, Artificial Sequence
  Synthetic oligonucleotide
ccagttttatagaaatcctttagttcccgt

SEQ ID NO: 502590 - DNA, 30 bp, Artificial Sequence
  Synthetic oligonucleotide
aatggtcgcagcaattggaattcaagccgt

SEQ ID NO: 502591 - DNA, 30 bp, Artificial Sequence
  Synthetic oligonucleotide
cggagggacttctcccctgacggcagccgt

SEQ ID NO: 502592 - DNA, 30 bp, Artificial Sequence
  Synthetic oligonucleotide
cggtcctttaatgtgcaagggggcagccgt

SEQ ID NO: 502593 - DNA, 30 bp, Artificial Sequence
  Synthetic oligonucleotide
gtaaagccacagggcgggttaaaacgccgt

SEQ ID NO: 502594 - DNA, 30 bp, Artificial Sequence
  Synthetic oligonucleotide
gtgtgtaggaatccgtgtataacacgccgt

SEQ ID NO: 502595 - DNA, 30 bp, Artificial Sequence
  Synthetic oligonucleotide
cggtaaggagggtcaccgacgtcacgccgt

SEQ ID NO: 502596 - DNA, 30 bp, Artificial Sequence
  Synthetic oligonucleotide
gcgttggtataaacactttagtcccgccgt

SEQ ID NO: 502597 - DNA, 30 bp, Artificial Sequence
  Synthetic oligonucleotide
gacattgatcgattttccgttctccgccgt

SEQ ID NO: 502598 - DNA, 30 bp, Artificial Sequence
  Synthetic oligonucleotide
acccgcagcgagctacgtaccgtccgccgt

SEQ ID NO: 502599 - DNA, 30 bp, Artificial Sequence
  Synthetic oligonucleotide
cggtaatgagggtcaccgacgtcgcgccgt

SEQ ID NO: 502600 - DNA, 30 bp, Artificial Sequence
  Synthetic oligonucleotide
atgcaggtagtaccggttctggatcgccgt

SEQ ID NO: 502601 - DNA, 30 bp, Artificial Sequence
  Synthetic oligonucleotide
gttcgttctcgtcaatggcggtgtcgccgt

SEQ ID NO: 502602 - DNA, 30 bp, Artificial Sequence
  Synthetic oligonucleotide
agggcctgggtgttatcagtctttcgccgt

SEQ ID NO: 502603 - DNA, 31 bp, Artificial Sequence
  Synthetic oligonucleotide
gttaccctattgaacgcagtggctgggccgt

SEQ ID NO: 502604 - DNA, 30 bp, Artificial Sequence
  Synthetic oligonucleotide
gcatatcgttctctgaatggtcaatgccgt

SEQ ID NO: 502605 - DNA, 30 bp, Artificial Sequence
  Synthetic oligonucleotide
atgcgagtaccacactatataacatgccgt

SEQ ID NO: 502606 - DNA, 30 bp, Artificial Sequence
  Synthetic oligonucleotide
agttttccgttagctccgcttggatgccgt

SEQ ID NO: 502607 - DNA, 30 bp, Artificial Sequence
  Synthetic oligonucleotide
acagttttgggttccaaaggaacctgccgt

SEQ ID NO: 502608 - DNA, 30 bp, Artificial Sequence
  Synthetic oligonucleotide
gcgttaatagaagtgataaaactctgccgt

SEQ ID NO: 502609 - DNA, 30 bp, Artificial Sequence
  Synthetic oligonucleotide
gaaacaatataataggtccgtatgtgccgt

SEQ ID NO: 502610 - DNA, 30 bp, Artificial Sequence
  Synthetic oligonucleotide
cggagtatcacacgagggctcctcatccgt

SEQ ID NO: 502611 - DNA, 30 bp, Artificial Sequence
  Synthetic oligonucleotide
agaagtgtctggttaaagccttagatccgt

SEQ ID NO: 502612 - DNA, 30 bp, Artificial Sequence
  Synthetic oligonucleotide
tcgcttgtggcgtagatttaaagtatccgt

SEQ ID NO: 502613 - DNA, 30 bp, Artificial Sequence
  Synthetic oligonucleotide
ggaacgctggagcgcagtattaaactccgt

SEQ ID NO: 502614 - DNA, 30 bp, Artificial Sequence
  Synthetic oligonucleotide
gagtcctatacatctgcctaaggactccgt

SEQ ID NO: 502615 - DNA, 30 bp, Artificial Sequence
  Synthetic oligonucleotide
gacccgttgcttcgtttggtaggactccgt

SEQ ID NO: 502616 - DNA, 30 bp, Artificial Sequence
  Synthetic oligonucleotide
ggttccttgacattgtggacgtgagtccgt

SEQ ID NO: 502617 - DNA, 30 bp, Artificial Sequence
  Synthetic oligonucleotide
tactgtatctaggttttgttgttagtccgt

SEQ ID NO: 502618 - DNA, 30 bp, Artificial Sequence
  Synthetic oligonucleotide
ccgcgagtttcgttgagcagtttggtccgt

SEQ ID NO: 502619 - DNA, 30 bp, Artificial Sequence
  Synthetic oligonucleotide
cgtattctttggatcaggatacgtgtccgt

SEQ ID NO: 502620 - DNA, 30 bp, Artificial Sequence
  Synthetic oligonucleotide
atttttgtggagggttgatccagattccgt

SEQ ID NO: 502621 - DNA, 30 bp, Artificial Sequence
  Synthetic oligonucleotide
ttattacacgatgtgtaataatatttccgt

SEQ ID NO: 502622 - DNA, 31 bp, Artificial Sequence
  Synthetic oligonucleotide
ggaaccaactgggtcacagcctggtttccgt

SEQ ID NO: 502623 - DNA, 30 bp, Artificial Sequence
  Synthetic oligonucleotide
ctttgtctctggtatctttaactaaagcgt

SEQ ID NO: 502624 - DNA, 30 bp, Artificial Sequence
  Synthetic oligonucleotide
cctcccgtatttccgggcgcggtaaagcgt

SEQ ID NO: 502625 - DNA, 30 bp, Artificial Sequence
  Synthetic oligonucleotide
gcagaggtatttatgaattgagacaagcgt

SEQ ID NO: 502626 - DNA, 30 bp, Artificial Sequence
  Synthetic oligonucleotide
tacgtaggttctgggcggcaggccaagcgt

SEQ ID NO: 502627 - DNA, 30 bp, Artificial Sequence
  Synthetic oligonucleotide
caactcttacagtacctttccttcaagcgt

SEQ ID NO: 502628 - DNA, 30 bp, Artificial Sequence
  Synthetic oligonucleotide
gatcctgtcgcctggtagacctagaagcgt

SEQ ID NO: 502629 - DNA, 30 bp, Artificial Sequence
  Synthetic oligonucleotide
gcatactggccgtggtcgagccggaagcgt

SEQ ID NO: 502630 - DNA, 30 bp, Artificial Sequence
  Synthetic oligonucleotide
acccggcaaatccggggccctctgaagcgt

SEQ ID NO: 502631 - DNA, 30 bp, Artificial Sequence
  Synthetic oligonucleotide
gagaatttgcgtttttcgcggcataagcgt

SEQ ID NO: 502632 - DNA, 30 bp, Artificial Sequence
  Synthetic oligonucleotide
gaccaaaaagatttactgtgcatacagcgt

SEQ ID NO: 502633 - DNA, 30 bp, Artificial Sequence
  Synthetic oligonucleotide
aattttgtcttgctggacagcggccagcgt

SEQ ID NO: 502634 - DNA, 30 bp, Artificial Sequence
  Synthetic oligonucleotide
tgaatatttgcttggtatctagtccagcgt

SEQ ID NO: 502635 - DNA, 31 bp, Artificial Sequence
  Synthetic oligonucleotide
taggcacttattgactaccgtctagcagcgt

SEQ ID NO: 502636 - DNA, 30 bp, Artificial Sequence
  Synthetic oligonucleotide
agagcacccacacttgatgagcggcagcgt

SEQ ID NO: 502637 - DNA, 31 bp, Artificial Sequence
  Synthetic oligonucleotide
acatggttacgatatatggacagaagagcgt

SEQ ID NO: 502638 - DNA, 30 bp, Artificial Sequence
  Synthetic oligonucleotide
tttagcctcgcaccccagcataacgagcgt

SEQ ID NO: 502639 - DNA, 30 bp, Artificial Sequence
  Synthetic oligonucleotide
ttctcaaccttgtagggcctgaccgagcgt

SEQ ID NO: 502640 - DNA, 30 bp, Artificial Sequence
  Synthetic oligonucleotide
tcaatcgagccccctacctacttggagcgt

SEQ ID NO: 502641 - DNA, 30 bp, Artificial Sequence
  Synthetic oligonucleotide
cgtgcttgggcggtgaagagtcaatagcgt

SEQ ID NO: 502642 - DNA, 30 bp, Artificial Sequence
  Synthetic oligonucleotide
ctagtcagtttataggggattacatagcgt

SEQ ID NO: 502643 - DNA, 30 bp, Artificial Sequence
  Synthetic oligonucleotide
tgtttttaggttttttgcgtccgatagcgt

SEQ ID NO: 502644 - DNA, 30 bp, Artificial Sequence
  Synthetic oligonucleotide
ccaggtaagagtggcagccgctcctagcgt

SEQ ID NO: 502645 - DNA, 30 bp, Artificial Sequence
  Synthetic oligonucleotide
tgacacaagagatacatttggacgtagcgt

SEQ ID NO: 502646 - DNA, 30 bp, Artificial Sequence
  Synthetic oligonucleotide
gattacgatagtgatggagtcgcgtagcgt

SEQ ID NO: 502647 - DNA, 30 bp, Artificial Sequence
  Synthetic oligonucleotide
gatatgttagtccaccctatactgtagcgt

SEQ ID NO: 502648 - DNA, 30 bp, Artificial Sequence
  Synthetic oligonucleotide
gtgaaatgtttccatgcagggcattagcgt

SEQ ID NO: 502649 - DNA, 26 bp, Artificial Sequence
  Synthetic oligonucleotide
aagcaattcgaacgatactttagcgt

SEQ ID NO: 502650 - DNA, 30 bp, Artificial Sequence
  Synthetic oligonucleotide
tgcgaacgccagtctacgttgcaaacgcgt

SEQ ID NO: 502651 - DNA, 30 bp, Artificial Sequence
  Synthetic oligonucleotide
gtatctgcatttagttgcgcaggaacgcgt

SEQ ID NO: 502652 - DNA, 30 bp, Artificial Sequence
  Synthetic oligonucleotide
gtgtaactcggagcgaagggcgccacgcgt

SEQ ID NO: 502653 - DNA, 30 bp, Artificial Sequence
  Synthetic oligonucleotide
tttaacctatgtgcctcacggatcacgcgt

SEQ ID NO: 502654 - DNA, 30 bp, Artificial Sequence
  Synthetic oligonucleotide
gccgttcgcgtactcaaaagtcagacgcgt

SEQ ID NO: 502655 - DNA, 30 bp, Artificial Sequence
  Synthetic oligonucleotide
caatgcaaaaaatagctttaatcgacgcgt

SEQ ID NO: 502656 - DNA, 30 bp, Artificial Sequence
  Synthetic oligonucleotide
cacggtctagcccattgaccccggacgcgt

SEQ ID NO: 502657 - DNA, 30 bp, Artificial Sequence
  Synthetic oligonucleotide
acagcctcatggtgatactaggggacgcgt

SEQ ID NO: 502658 - DNA, 30 bp, Artificial Sequence
  Synthetic oligonucleotide
gcacccagttatgtgatcgtttggacgcgt

SEQ ID NO: 502659 - DNA, 30 bp, Artificial Sequence
  Synthetic oligonucleotide
gctcgaacacccctgttctagatgacgcgt

SEQ ID NO: 502660 - DNA, 30 bp, Artificial Sequence
  Synthetic oligonucleotide
atgggtcaagccttgttatggtatacgcgt

SEQ ID NO: 502661 - DNA, 30 bp, Artificial Sequence
  Synthetic oligonucleotide
gcggcgcgaccggacggagcacgtacgcgt

SEQ ID NO: 502662 - DNA, 30 bp, Artificial Sequence
  Synthetic oligonucleotide
ttcactgccggagttcgatcggttacgcgt

SEQ ID NO: 502663 - DNA, 30 bp, Artificial Sequence
  Synthetic oligonucleotide
ggagtgacgttgatggcccggccaccgcgt

SEQ ID NO: 502664 - DNA, 30 bp, Artificial Sequence
  Synthetic oligonucleotide
cagcgatgtcagctcacggattcaccgcgt

SEQ ID NO: 502665 - DNA, 30 bp, Artificial Sequence
  Synthetic oligonucleotide
gaataaggacacgcttggaggcgtccgcgt

SEQ ID NO: 502666 - DNA, 30 bp, Artificial Sequence
  Synthetic oligonucleotide
atccaagtgtcagagaaagattttccgcgt

SEQ ID NO: 502667 - DNA, 30 bp, Artificial Sequence
  Synthetic oligonucleotide
ggatcgataggaacccgcgtcatagcgcgt

SEQ ID NO: 502668 - DNA, 30 bp, Artificial Sequence
  Synthetic oligonucleotide
aaaatgtccgagataatttcctcctcgcgt

SEQ ID NO: 502669 - DNA, 30 bp, Artificial Sequence
  Synthetic oligonucleotide
aaatagaatcccctgatggcacggtcgcgt

SEQ ID NO: 502670 - DNA, 30 bp, Artificial Sequence
  Synthetic oligonucleotide
ggccgggctcaatgcaggcggccttcgcgt

SEQ ID NO: 502671 - DNA, 30 bp, Artificial Sequence
  Synthetic oligonucleotide
cactaccactaccttcgcaaattttcgcgt

SEQ ID NO: 502672 - DNA, 30 bp, Artificial Sequence
  Synthetic oligonucleotide
taactggcctgcgtctttcccttttcgcgt

SEQ ID NO: 502673 - DNA, 30 bp, Artificial Sequence
  Synthetic oligonucleotide
cccctgagggaattcactcttacaaggcgt

SEQ ID NO: 502674 - DNA, 30 bp, Artificial Sequence
  Synthetic oligonucleotide
cagatcagggactcgatagtgtgaaggcgt

SEQ ID NO: 502675 - DNA, 30 bp, Artificial Sequence
  Synthetic oligonucleotide
ggagtcgtgggaatctgccttgacaggcgt

SEQ ID NO: 502676 - DNA, 30 bp, Artificial Sequence
  Synthetic oligonucleotide
ggttgctggtgaagtagcaccgcgaggcgt

SEQ ID NO: 502677 - DNA, 30 bp, Artificial Sequence
  Synthetic oligonucleotide
tgacagatcaaatcgctggaacgtaggcgt

SEQ ID NO: 502678 - DNA, 30 bp, Artificial Sequence
  Synthetic oligonucleotide
gtcctggaggagatacctttaccacggcgt

SEQ ID NO: 502679 - DNA, 30 bp, Artificial Sequence
  Synthetic oligonucleotide
tagacgtggtccctcagccgagcacggcgt

SEQ ID NO: 502680 - DNA, 30 bp, Artificial Sequence
  Synthetic oligonucleotide
tgtacaagggtgcctccagcaacccggcgt

SEQ ID NO: 502681 - DNA, 30 bp, Artificial Sequence
  Synthetic oligonucleotide
cggatatctataccggaattgtagcggcgt

SEQ ID NO: 502682 - DNA, 30 bp, Artificial Sequence
  Synthetic oligonucleotide
atactaagatgcctggttgccacgcggcgt

SEQ ID NO: 502683 - DNA, 30 bp, Artificial Sequence
  Synthetic oligonucleotide
ttatatttcgtcgaagcaacaatgcggcgt

SEQ ID NO: 502684 - DNA, 30 bp, Artificial Sequence
  Synthetic oligonucleotide
ttacttagatttaacttcacccatcggcgt

SEQ ID NO: 502685 - DNA, 30 bp, Artificial Sequence
  Synthetic oligonucleotide
acgcgcatttgagattctcatacagggcgt

SEQ ID NO: 502686 - DNA, 30 bp, Artificial Sequence
  Synthetic oligonucleotide
attacagtaagtcatcctgtatcagggcgt

SEQ ID NO: 502687 - DNA, 30 bp, Artificial Sequence
  Synthetic oligonucleotide
tgaagatttaaaaatccttttgacgggcgt

SEQ ID NO: 502688 - DNA, 30 bp, Artificial Sequence
  Synthetic oligonucleotide
catatgaagttaataagcccatacgggcgt

SEQ ID NO: 502689 - DNA, 30 bp, Artificial Sequence
  Synthetic oligonucleotide
cccggactctaaaccgtggctctcgggcgt

SEQ ID NO: 502690 - DNA, 30 bp, Artificial Sequence
  Synthetic oligonucleotide
aaactcgctgcgctcagactccatgggcgt

SEQ ID NO: 502691 - DNA, 30 bp, Artificial Sequence
  Synthetic oligonucleotide
tcagccgctctggatctctctcctgggcgt

SEQ ID NO: 502692 - DNA, 30 bp, Artificial Sequence
  Synthetic oligonucleotide
gaacaacgcccagtgtaaactctctggcgt

SEQ ID NO: 502693 - DNA, 30 bp, Artificial Sequence
  Synthetic oligonucleotide
tacagttgtaaatgatagcagcggtggcgt

SEQ ID NO: 502694 - DNA, 30 bp, Artificial Sequence
  Synthetic oligonucleotide
gtttccttgtaccaacaacatcggtggcgt

SEQ ID NO: 502695 - DNA, 30 bp, Artificial Sequence
  Synthetic oligonucleotide
ggtcggtttgatcggtgagggccttggcgt

SEQ ID NO: 502696 - DNA, 30 bp, Artificial Sequence
  Synthetic oligonucleotide
gcaaaggcagggcacgatgggccttggcgt

SEQ ID NO: 502697 - DNA, 30 bp, Artificial Sequence
  Synthetic oligonucleotide
taatttcggcgaacctttatcgtttggcgt

SEQ ID NO: 502698 - DNA, 30 bp, Artificial Sequence
  Synthetic oligonucleotide
atcggtctgttacggaagcccagaatgcgt

SEQ ID NO: 502699 - DNA, 30 bp, Artificial Sequence
  Synthetic oligonucleotide
tatcggaatcccccaaaggtgtccatgcgt

SEQ ID NO: 502700 - DNA, 30 bp, Artificial Sequence
  Synthetic oligonucleotide
cacacagcagctcatccgtattggatgcgt

SEQ ID NO: 502701 - DNA, 30 bp, Artificial Sequence
  Synthetic oligonucleotide
cagtgtgcttgtacccactagttgatgcgt

SEQ ID NO: 502702 - DNA, 30 bp, Artificial Sequence
  Synthetic oligonucleotide
tagagctttcaggcccctgcagaactgcgt

SEQ ID NO: 502703 - DNA, 29 bp, Artificial Sequence
  Synthetic oligonucleotide
tattatgcattcacgcgctgatcctgcgt

SEQ ID NO: 502704 - DNA, 30 bp, Artificial Sequence
  Synthetic oligonucleotide
acccacgatgcagttcggtgggtcctgcgt

SEQ ID NO: 502705 - DNA, 30 bp, Artificial Sequence
  Synthetic oligonucleotide
tttttgaggaattgatagagagggctgcgt

SEQ ID NO: 502706 - DNA, 30 bp, Artificial Sequence
  Synthetic oligonucleotide
tattatcctgagaaaatgcagaccgtgcgt

SEQ ID NO: 502707 - DNA, 30 bp, Artificial Sequence
  Synthetic oligonucleotide
tatccggcgacagcaagaagcattgtgcgt

SEQ ID NO: 502708 - DNA, 30 bp, Artificial Sequence
  Synthetic oligonucleotide
agatttctaaaactttggagaaccttgcgt

SEQ ID NO: 502709 - DNA, 30 bp, Artificial Sequence
  Synthetic oligonucleotide
gtcagtttgtcttttatcaaatccttgcgt

SEQ ID NO: 502710 - DNA, 30 bp, Artificial Sequence
  Synthetic oligonucleotide
cagccacgccagtgtaatctgatcttgcgt

SEQ ID NO: 502711 - DNA, 30 bp, Artificial Sequence
  Synthetic oligonucleotide
acggacccggttgacaggtgcttcttgcgt

SEQ ID NO: 502712 - DNA, 30 bp, Artificial Sequence
  Synthetic oligonucleotide
ctacgggcccttggatttcgtttcttgcgt

SEQ ID NO: 502713 - DNA, 30 bp, Artificial Sequence
  Synthetic oligonucleotide
taggccttgggcgaaggcaacggtttgcgt

SEQ ID NO: 502714 - DNA, 29 bp, Artificial Sequence
  Synthetic oligonucleotide
gagtcaatcgacagactaccccaaatcgt

SEQ ID NO: 502715 - DNA, 30 bp, Artificial Sequence
  Synthetic oligonucleotide
cgctggctaaactgtcaagcgcccaatcgt

SEQ ID NO: 502716 - DNA, 30 bp, Artificial Sequence
  Synthetic oligonucleotide
aggttgttatctatcgcttcctgcaatcgt

SEQ ID NO: 502717 - DNA, 30 bp, Artificial Sequence
  Synthetic oligonucleotide
gatgtctagcaacatagatttaggaatcgt

SEQ ID NO: 502718 - DNA, 30 bp, Artificial Sequence
  Synthetic oligonucleotide
gaaattctaggaaagaactggagacatcgt

SEQ ID NO: 502719 - DNA, 30 bp, Artificial Sequence
  Synthetic oligonucleotide
taacactcagagcactggaatcgacatcgt

SEQ ID NO: 502720 - DNA, 30 bp, Artificial Sequence
  Synthetic oligonucleotide
cttccctgtgtgaacgatggtacccatcgt

SEQ ID NO: 502721 - DNA, 30 bp, Artificial Sequence
  Synthetic oligonucleotide
acatctgctactcaacgatgttgccatcgt

SEQ ID NO: 502722 - DNA, 30 bp, Artificial Sequence
  Synthetic oligonucleotide
gggctttgcggtgtaaataacccgcatcgt

SEQ ID NO: 502723 - DNA, 30 bp, Artificial Sequence
  Synthetic oligonucleotide
ttaagttcctcgcggtgagaacggcatcgt

SEQ ID NO: 502724 - DNA, 30 bp, Artificial Sequence
  Synthetic oligonucleotide
ctactctcggaagaggcatctctgcatcgt

SEQ ID NO: 502725 - DNA, 30 bp, Artificial Sequence
  Synthetic oligonucleotide
taactgctgcaacagtagactcgtcatcgt

SEQ ID NO: 502726 - DNA, 30 bp, Artificial Sequence
  Synthetic oligonucleotide
cagtctgggcatattggggtcttagatcgt

SEQ ID NO: 502727 - DNA, 30 bp, Artificial Sequence
  Synthetic oligonucleotide
gggaatcctggcttttagtgcttcgatcgt

SEQ ID NO: 502728 - DNA, 30 bp, Artificial Sequence
  Synthetic oligonucleotide
ggccgacgccgttagacggtggcggatcgt

SEQ ID NO: 502729 - DNA, 30 bp, Artificial Sequence
  Synthetic oligonucleotide
gaatatggaagagtgaggatcatggatcgt

SEQ ID NO: 502730 - DNA, 30 bp, Artificial Sequence
  Synthetic oligonucleotide
gatcgacgtccaagaccgatataatatcgt

SEQ ID NO: 502731 - DNA, 30 bp, Artificial Sequence
  Synthetic oligonucleotide
gggttagttggtagatcggtcagatatcgt

SEQ ID NO: 502732 - DNA, 30 bp, Artificial Sequence
  Synthetic oligonucleotide
gacgaagctgaagccgtagccctatatcgt

SEQ ID NO: 502733 - DNA, 30 bp, Artificial Sequence
  Synthetic oligonucleotide
ctcttgattcagatctcatctttatatcgt

SEQ ID NO: 502734 - DNA, 30 bp, Artificial Sequence
  Synthetic oligonucleotide
aatgacgagagcacaatcgtgacctatcgt

SEQ ID NO: 502735 - DNA, 30 bp, Artificial Sequence
  Synthetic oligonucleotide
agtacatagggtaacgttttagcctatcgt

SEQ ID NO: 502736 - DNA, 30 bp, Artificial Sequence
  Synthetic oligonucleotide
ctgcctaaatcagtcagcccgttctatcgt

SEQ ID NO: 502737 - DNA, 30 bp, Artificial Sequence
  Synthetic oligonucleotide
tatttcataaactgcctttgcgagtatcgt

SEQ ID NO: 502738 - DNA, 30 bp, Artificial Sequence
  Synthetic oligonucleotide
ggataaatgggcctgtcacatagttatcgt

SEQ ID NO: 502739 - DNA, 30 bp, Artificial Sequence
  Synthetic oligonucleotide
taatgtaatctactgtttgttaagactcgt

SEQ ID NO: 502740 - DNA, 30 bp, Artificial Sequence
  Synthetic oligonucleotide
tgctcaacgggctgttgtcctcagactcgt

SEQ ID NO: 502741 - DNA, 30 bp, Artificial Sequence
  Synthetic oligonucleotide
gcgacctgtgagttttaggcctagactcgt

SEQ ID NO: 502742 - DNA, 30 bp, Artificial Sequence
  Synthetic oligonucleotide
tgaccgggatagcaaggtcgaaaccctcgt

SEQ ID NO: 502743 - DNA, 30 bp, Artificial Sequence
  Synthetic oligonucleotide
aattaatgataggtcgagttgattcctcgt

SEQ ID NO: 502744 - DNA, 30 bp, Artificial Sequence
  Synthetic oligonucleotide
ttgagtcatctaggttcttttatagctcgt

SEQ ID NO: 502745 - DNA, 30 bp, Artificial Sequence
  Synthetic oligonucleotide
gaatcagctgcaaacgcgggacgcgctcgt

SEQ ID NO: 502746 - DNA, 30 bp, Artificial Sequence
  Synthetic oligonucleotide
gtatttttttcctggctggtataggctcgt

SEQ ID NO: 502747 - DNA, 30 bp, Artificial Sequence
  Synthetic oligonucleotide
tcgccccaatttaatctggtggtggctcgt

SEQ ID NO: 502748 - DNA, 30 bp, Artificial Sequence
  Synthetic oligonucleotide
tcagtttttacataggggaggggctctcgt

SEQ ID NO: 502749 - DNA, 30 bp, Artificial Sequence
  Synthetic oligonucleotide
tagtataatatccaaatattaaggtctcgt

SEQ ID NO: 502750 - DNA, 30 bp, Artificial Sequence
  Synthetic oligonucleotide
ggccgtcgtatgcgagtgattcgttctcgt

SEQ ID NO: 502751 - DNA, 30 bp, Artificial Sequence
  Synthetic oligonucleotide
agtggaggccgtcatgtagtacaaagtcgt

SEQ ID NO: 502752 - DNA, 30 bp, Artificial Sequence
  Synthetic oligonucleotide
ggttagtatgctccagcgtcttaaagtcgt

SEQ ID NO: 502753 - DNA, 30 bp, Artificial Sequence
  Synthetic oligonucleotide
tacgtcagacgatgtgcgcgccgaagtcgt

SEQ ID NO: 502754 - DNA, 30 bp, Artificial Sequence
  Synthetic oligonucleotide
ccttatgtgtggtgacttccctggagtcgt

SEQ ID NO: 502755 - DNA, 30 bp, Artificial Sequence
  Synthetic oligonucleotide
gcctgacgcaatcccattggatatagtcgt

SEQ ID NO: 502756 - DNA, 30 bp, Artificial Sequence
  Synthetic oligonucleotide
agctaatggcacttgttcaacgcacgtcgt

SEQ ID NO: 502757 - DNA, 30 bp, Artificial Sequence
  Synthetic oligonucleotide
tttcggttggattgattatggtcacgtcgt

SEQ ID NO: 502758 - DNA, 30 bp, Artificial Sequence
  Synthetic oligonucleotide
gagaattaaggatttaagtggcaaggtcgt

SEQ ID NO: 502759 - DNA, 30 bp, Artificial Sequence
  Synthetic oligonucleotide
acctacttcagaaatcctcctataggtcgt

SEQ ID NO: 502760 - DNA, 30 bp, Artificial Sequence
  Synthetic oligonucleotide
tatttaaccgtaaggcaggtcaacggtcgt

SEQ ID NO: 502761 - DNA, 30 bp, Artificial Sequence
  Synthetic oligonucleotide
ttccgaattcgcttcagagaaaccggtcgt

SEQ ID NO: 502762 - DNA, 30 bp, Artificial Sequence
  Synthetic oligonucleotide
ttgtgttgtcgagtcaagagaagatgtcgt

SEQ ID NO: 502763 - DNA, 30 bp, Artificial Sequence
  Synthetic oligonucleotide
agaaccgttttggcattctagagatgtcgt

SEQ ID NO: 502764 - DNA, 30 bp, Artificial Sequence
  Synthetic oligonucleotide
ggtggttacggggcagggcatgtatgtcgt

SEQ ID NO: 502765 - DNA, 30 bp, Artificial Sequence
  Synthetic oligonucleotide
actggatgatttccctagtcattatgtcgt

SEQ ID NO: 502766 - DNA, 30 bp, Artificial Sequence
  Synthetic oligonucleotide
tgttgaaattctcccgcaactacctgtcgt

SEQ ID NO: 502767 - DNA, 30 bp, Artificial Sequence
  Synthetic oligonucleotide
agaatggtgtggaacctacgcacaattcgt

SEQ ID NO: 502768 - DNA, 30 bp, Artificial Sequence
  Synthetic oligonucleotide
actacgtagttcccgaccctcgcgattcgt

SEQ ID NO: 502769 - DNA, 30 bp, Artificial Sequence
  Synthetic oligonucleotide
gattaactagaactcaagttcttgattcgt

SEQ ID NO: 502770 - DNA, 30 bp, Artificial Sequence
  Synthetic oligonucleotide
agtcgctgaagtttgttacggagacttcgt

SEQ ID NO: 502771 - DNA, 30 bp, Artificial Sequence
  Synthetic oligonucleotide
aacttctgtttggggcagcgccggcttcgt

SEQ ID NO: 502772 - DNA, 30 bp, Artificial Sequence
  Synthetic oligonucleotide
tcttttcgtgttacggcagtacatcttcgt

SEQ ID NO: 502773 - DNA, 30 bp, Artificial Sequence
  Synthetic oligonucleotide
tataatccagcatttcacacctgtcttcgt

SEQ ID NO: 502774 - DNA, 31 bp, Artificial Sequence
  Synthetic oligonucleotide
agcgataggcgcaatacgaatgtttcttcgt

SEQ ID NO: 502775 - DNA, 30 bp, Artificial Sequence
  Synthetic oligonucleotide
ggaacacatttcggtagtatcctagttcgt

SEQ ID NO: 502776 - DNA, 30 bp, Artificial Sequence
  Synthetic oligonucleotide
agagagggcatgtttaaggctaaggttcgt

SEQ ID NO: 502777 - DNA, 30 bp, Artificial Sequence
  Synthetic oligonucleotide
ccggtacatagttggctaaagttatttcgt

SEQ ID NO: 502778 - DNA, 30 bp, Artificial Sequence
  Synthetic oligonucleotide
gtcctttcggtccgacctctagcctttcgt

SEQ ID NO: 502779 - DNA, 30 bp, Artificial Sequence
  Synthetic oligonucleotide
gagtcgactccattcattgaaagctttcgt

SEQ ID NO: 502780 - DNA, 30 bp, Artificial Sequence
  Synthetic oligonucleotide
cgcactacggtagggtcacgggtctttcgt

SEQ ID NO: 502781 - DNA, 30 bp, Artificial Sequence
  Synthetic oligonucleotide
cttcgatagcccataataagttcgtttcgt

SEQ ID NO: 502782 - DNA, 31 bp, Artificial Sequence
  Synthetic oligonucleotide
cgtaaccggttcgttcatcaaacggtttcgt

SEQ ID NO: 502783 - DNA, 30 bp, Artificial Sequence
  Synthetic oligonucleotide
aagtctataatgccagcaattcggtttcgt

SEQ ID NO: 502784 - DNA, 30 bp, Artificial Sequence
  Synthetic oligonucleotide
ttcttgggtgatagagtaaacagttttcgt

SEQ ID NO: 502785 - DNA, 30 bp, Artificial Sequence
  Synthetic oligonucleotide
gctctgtgaaaactcccgaagggcaaaggt

SEQ ID NO: 502786 - DNA, 30 bp, Artificial Sequence
  Synthetic oligonucleotide
cttcgtgggccacataattatacgaaaggt

SEQ ID NO: 502787 - DNA, 30 bp, Artificial Sequence
  Synthetic oligonucleotide
caaaagctcttaggatgccatgcacaaggt

SEQ ID NO: 502788 - DNA, 30 bp, Artificial Sequence
  Synthetic oligonucleotide
cccgagatgcgagacttgccgatacaaggt

SEQ ID NO: 502789 - DNA, 30 bp, Artificial Sequence
  Synthetic oligonucleotide
aatggttatgtatcatacaggttacaaggt

SEQ ID NO: 502790 - DNA, 30 bp, Artificial Sequence
  Synthetic oligonucleotide
caccatgtacttaccgtgttctcccaaggt

SEQ ID NO: 502791 - DNA, 30 bp, Artificial Sequence
  Synthetic oligonucleotide
ggtcggcacctgacacgtttgatccaaggt

SEQ ID NO: 502792 - DNA, 30 bp, Artificial Sequence
  Synthetic oligonucleotide
gttttgcacgaatttcatatactccaaggt

SEQ ID NO: 502793 - DNA, 30 bp, Artificial Sequence
  Synthetic oligonucleotide
ttcgacctggtactggtaaatttccaaggt

SEQ ID NO: 502794 - DNA, 30 bp, Artificial Sequence
  Synthetic oligonucleotide
atgggcccatggtcggcatcaattcaaggt

SEQ ID NO: 502795 - DNA, 30 bp, Artificial Sequence
  Synthetic oligonucleotide
tattgttagaaacaacgttatgttcaaggt

SEQ ID NO: 502796 - DNA, 30 bp, Artificial Sequence
  Synthetic oligonucleotide
aggaggaacgcttaaactccgtttcaaggt

SEQ ID NO: 502797 - DNA, 30 bp, Artificial Sequence
  Synthetic oligonucleotide
gatatttggcctccggtgtccggcgaaggt

SEQ ID NO: 502798 - DNA, 30 bp, Artificial Sequence
  Synthetic oligonucleotide
gcaattggtaagtttagagtgggcgaaggt

SEQ ID NO: 502799 - DNA, 30 bp, Artificial Sequence
  Synthetic oligonucleotide
tgtctgcgctgtttacgtggtaatgaaggt

SEQ ID NO: 502800 - DNA, 30 bp, Artificial Sequence
  Synthetic oligonucleotide
gagctcccgtgacacggcaatagataaggt

SEQ ID NO: 502801 - DNA, 30 bp, Artificial Sequence
  Synthetic oligonucleotide
ccgtctgtattaggaagctgtctataaggt

SEQ ID NO: 502802 - DNA, 30 bp, Artificial Sequence
  Synthetic oligonucleotide
tctttcgcctcacgaatagtagtctaaggt

SEQ ID NO: 502803 - DNA, 30 bp, Artificial Sequence
  Synthetic oligonucleotide
cccttcggttggaccagtcaactgtaaggt

SEQ ID NO: 502804 - DNA, 30 bp, Artificial Sequence
  Synthetic oligonucleotide
gaagtttttaatttttagaagacttaaggt

SEQ ID NO: 502805 - DNA, 30 bp, Artificial Sequence
  Synthetic oligonucleotide
attttacacgtgtgaaccattatttaaggt

SEQ ID NO: 502806 - DNA, 30 bp, Artificial Sequence
  Synthetic oligonucleotide
ggagccgcgcgtagcttaagtcaaacaggt

SEQ ID NO: 502807 - DNA, 30 bp, Artificial Sequence
  Synthetic oligonucleotide
atagttctcgaaataaacccaccgacaggt

SEQ ID NO: 502808 - DNA, 30 bp, Artificial Sequence
  Synthetic oligonucleotide
cgagcgggcctttttgaaatcccgacaggt

SEQ ID NO: 502809 - DNA, 30 bp, Artificial Sequence
  Synthetic oligonucleotide
cctcagcaatatggaataaggtggacaggt

SEQ ID NO: 502810 - DNA, 30 bp, Artificial Sequence
  Synthetic oligonucleotide
accgtaccttgatagtgcactggtacaggt

SEQ ID NO: 502811 - DNA, 30 bp, Artificial Sequence
  Synthetic oligonucleotide
aatttggtcaccatttggactcggccaggt

SEQ ID NO: 502812 - DNA, 30 bp, Artificial Sequence
  Synthetic oligonucleotide
tattttctactgtaaggtggtcttccaggt

SEQ ID NO: 502813 - DNA, 30 bp, Artificial Sequence
  Synthetic oligonucleotide
gagttttacctgtctgttcgcaaagcaggt

SEQ ID NO: 502814 - DNA, 30 bp, Artificial Sequence
  Synthetic oligonucleotide
ttggagtttaccatttgactaaccgcaggt

SEQ ID NO: 502815 - DNA, 30 bp, Artificial Sequence
  Synthetic oligonucleotide
tatatatgtattaaaccagcaagcgcaggt

SEQ ID NO: 502816 - DNA, 30 bp, Artificial Sequence
  Synthetic oligonucleotide
gattagatctgcaccgttgagtatgcaggt

SEQ ID NO: 502817 - DNA, 30 bp, Artificial Sequence
  Synthetic oligonucleotide
aaaagtaagacaggaaccgagacatcaggt

SEQ ID NO: 502818 - DNA, 30 bp, Artificial Sequence
  Synthetic oligonucleotide
aggacgcagcgatgtctactcgcatcaggt

SEQ ID NO: 502819 - DNA, 30 bp, Artificial Sequence
  Synthetic oligonucleotide
ccttcaccagagcctcgcggttgctcaggt

SEQ ID NO: 502820 - DNA, 30 bp, Artificial Sequence
  Synthetic oligonucleotide
gattcttggtatcaaggtccgaattcaggt

SEQ ID NO: 502821 - DNA, 30 bp, Artificial Sequence
  Synthetic oligonucleotide
catgcaggaggccctgctgcatattcaggt

SEQ ID NO: 502822 - DNA, 30 bp, Artificial Sequence
  Synthetic oligonucleotide
tacgtcactttgaccttgctcccttcaggt

SEQ ID NO: 502823 - DNA, 30 bp, Artificial Sequence
  Synthetic oligonucleotide
actgtcgatggagcagctgttccttcaggt

SEQ ID NO: 502824 - DNA, 30 bp, Artificial Sequence
  Synthetic oligonucleotide
gatcccgtttcgaagcacgaatgttcaggt

SEQ ID NO: 502825 - DNA, 30 bp, Artificial Sequence
  Synthetic oligonucleotide
gactcaatacataaacgggatggaagaggt

SEQ ID NO: 502826 - DNA, 30 bp, Artificial Sequence
  Synthetic oligonucleotide
ctacaagtcactcggcattagtgaagaggt

SEQ ID NO: 502827 - DNA, 30 bp, Artificial Sequence
  Synthetic oligonucleotide
cgctggttaagcattcatcttttcagaggt

SEQ ID NO: 502828 - DNA, 30 bp, Artificial Sequence
  Synthetic oligonucleotide
gtcgattctcgctccgtgtcggagagaggt

SEQ ID NO: 502829 - DNA, 30 bp, Artificial Sequence
  Synthetic oligonucleotide
accgcttgtatgattgcgttgtggagaggt

SEQ ID NO: 502830 - DNA, 30 bp, Artificial Sequence
  Synthetic oligonucleotide
tgcgcgcaacttgtagtcaattctagaggt

SEQ ID NO: 502831 - DNA, 30 bp, Artificial Sequence
  Synthetic oligonucleotide
atgaatacaggctatggtataccgcgaggt

SEQ ID NO: 502832 - DNA, 30 bp, Artificial Sequence
  Synthetic oligonucleotide
tggctagtctacggtaactctacaggaggt

SEQ ID NO: 502833 - DNA, 30 bp, Artificial Sequence
  Synthetic oligonucleotide
tattggtggactggggaggccccaggaggt

SEQ ID NO: 502834 - DNA, 30 bp, Artificial Sequence
  Synthetic oligonucleotide
tccaaccattacagacctccgtcgggaggt

SEQ ID NO: 502835 - DNA, 30 bp, Artificial Sequence
  Synthetic oligonucleotide
ggggatcgccacattccatgctatggaggt

SEQ ID NO: 502836 - DNA, 30 bp, Artificial Sequence
  Synthetic oligonucleotide
attttgatccatcatccaggcactggaggt

SEQ ID NO: 502837 - DNA, 30 bp, Artificial Sequence
  Synthetic oligonucleotide
ttaggagaggaataagcattacgtggaggt

SEQ ID NO: 502838 - DNA, 30 bp, Artificial Sequence
  Synthetic oligonucleotide
ataatcttcgttcggatttcagttggaggt

SEQ ID NO: 502839 - DNA, 30 bp, Artificial Sequence
  Synthetic oligonucleotide
tttattttttgacgagagatctactgaggt

SEQ ID NO: 502840 - DNA, 30 bp, Artificial Sequence
  Synthetic oligonucleotide
cgtactgaccctccggcggcacgctgaggt

SEQ ID NO: 502841 - DNA, 30 bp, Artificial Sequence
  Synthetic oligonucleotide
atctagcgagtagatatatcgcgctgaggt

SEQ ID NO: 502842 - DNA, 30 bp, Artificial Sequence
  Synthetic oligonucleotide
cggtacgtggacttctaggtgacgtgaggt

SEQ ID NO: 502843 - DNA, 30 bp, Artificial Sequence
  Synthetic oligonucleotide
gccgagggattttactgttatcggtgaggt

SEQ ID NO: 502844 - DNA, 30 bp, Artificial Sequence
  Synthetic oligonucleotide
ttttactatcacaggtagaggacaataggt

SEQ ID NO: 502845 - DNA, 30 bp, Artificial Sequence
  Synthetic oligonucleotide
aagcataggtcttggtataccataataggt

SEQ ID NO: 502846 - DNA, 30 bp, Artificial Sequence
  Synthetic oligonucleotide
gattactgttaccgatagattggcataggt

SEQ ID NO: 502847 - DNA, 30 bp, Artificial Sequence
  Synthetic oligonucleotide
cagtcttcaatacggttgcgcccgataggt

SEQ ID NO: 502848 - DNA, 30 bp, Artificial Sequence
  Synthetic oligonucleotide
tctacgacttctgcctccatagggataggt

SEQ ID NO: 502849 - DNA, 30 bp, Artificial Sequence
  Synthetic oligonucleotide
tagaacgtcacctgttatgtgttgataggt

SEQ ID NO: 502850 - DNA, 30 bp, Artificial Sequence
  Synthetic oligonucleotide
aaatcagaggggttttatgtgtctataggt

SEQ ID NO: 502851 - DNA, 30 bp, Artificial Sequence
  Synthetic oligonucleotide
actgttttaaataaggtaaatggtataggt

SEQ ID NO: 502852 - DNA, 30 bp, Artificial Sequence
  Synthetic oligonucleotide
aatagtgacagcagccgcaactaactaggt

SEQ ID NO: 502853 - DNA, 30 bp, Artificial Sequence
  Synthetic oligonucleotide
ggcctgtttttggcgtttgaatcactaggt

SEQ ID NO: 502854 - DNA, 30 bp, Artificial Sequence
  Synthetic oligonucleotide
tcctgtatgacctggagtccctgactaggt

SEQ ID NO: 502855 - DNA, 30 bp, Artificial Sequence
  Synthetic oligonucleotide
ccgttcaggctactacgacttctcctaggt

SEQ ID NO: 502856 - DNA, 30 bp, Artificial Sequence
  Synthetic oligonucleotide
gccaaggaaacttgagattggacgctaggt

SEQ ID NO: 502857 - DNA, 30 bp, Artificial Sequence
  Synthetic oligonucleotide
gctctcaagttctttggttaacatctaggt

SEQ ID NO: 502858 - DNA, 30 bp, Artificial Sequence
  Synthetic oligonucleotide
atgtcatcgattgacctaggctatctaggt

SEQ ID NO: 502859 - DNA, 30 bp, Artificial Sequence
  Synthetic oligonucleotide
aagggatacgaaattcgagtcggagtaggt

SEQ ID NO: 502860 - DNA, 30 bp, Artificial Sequence
  Synthetic oligonucleotide
aatacacctatcccgtgcagtctagtaggt

SEQ ID NO: 502861 - DNA, 30 bp, Artificial Sequence
  Synthetic oligonucleotide
tagcgttatccaggtgtggataacgtaggt

SEQ ID NO: 502862 - DNA, 30 bp, Artificial Sequence
  Synthetic oligonucleotide
ctgtactcgatggggtgcgacaccgtaggt

SEQ ID NO: 502863 - DNA, 30 bp, Artificial Sequence
  Synthetic oligonucleotide
tttgtatactgttcttcttataccgtaggt

SEQ ID NO: 502864 - DNA, 30 bp, Artificial Sequence
  Synthetic oligonucleotide
cgcggccacggccgaggcctacccgtaggt

SEQ ID NO: 502865 - DNA, 30 bp, Artificial Sequence
  Synthetic oligonucleotide
gtgttcaatcaagacccatatgaggtaggt

SEQ ID NO: 502866 - DNA, 30 bp, Artificial Sequence
  Synthetic oligonucleotide
atacgttcccgggctctttccgcggtaggt

SEQ ID NO: 502867 - DNA, 30 bp, Artificial Sequence
  Synthetic oligonucleotide
ccgcctcccctcccgtgtcaaagggtaggt

SEQ ID NO: 502868 - DNA, 30 bp, Artificial Sequence
  Synthetic oligonucleotide
tacaatttaacgtttgtctgaagggtaggt

SEQ ID NO: 502869 - DNA, 30 bp, Artificial Sequence
  Synthetic oligonucleotide
gattttgcttctcgttagttgcgggtaggt

SEQ ID NO: 502870 - DNA, 30 bp, Artificial Sequence
  Synthetic oligonucleotide
taaagaggtagcgtaatctcgtgggtaggt

SEQ ID NO: 502871 - DNA, 30 bp, Artificial Sequence
  Synthetic oligonucleotide
cggagttgctcttttcccccttatgtaggt

SEQ ID NO: 502872 - DNA, 30 bp, Artificial Sequence
  Synthetic oligonucleotide
gcgactgaatcgatgggatcgtgtgtaggt

SEQ ID NO: 502873 - DNA, 30 bp, Artificial Sequence
  Synthetic oligonucleotide
caccccgggagagttcgctatgtattaggt

SEQ ID NO: 502874 - DNA, 30 bp, Artificial Sequence
  Synthetic oligonucleotide
aaataacggtttattaagatttacttaggt

SEQ ID NO: 502875 - DNA, 30 bp, Artificial Sequence
  Synthetic oligonucleotide
cgttgtaagtaagggaacgatcgcttaggt

SEQ ID NO: 502876 - DNA, 30 bp, Artificial Sequence
  Synthetic oligonucleotide
cagctttggtctaaaaccgtaagtttaggt

SEQ ID NO: 502877 - DNA, 30 bp, Artificial Sequence
  Synthetic oligonucleotide
tgggtcgcataacgcaactgtcgtttaggt

SEQ ID NO: 502878 - DNA, 30 bp, Artificial Sequence
  Synthetic oligonucleotide
tttgacgtcttgtcttaatgacttttaggt

SEQ ID NO: 502879 - DNA, 30 bp, Artificial Sequence
  Synthetic oligonucleotide
aaagttttagccacgtggtgacaaaacggt

SEQ ID NO: 502880 - DNA, 30 bp, Artificial Sequence
  Synthetic oligonucleotide
acccgggagaatccatttggtacaaacggt

SEQ ID NO: 502881 - DNA, 30 bp, Artificial Sequence
  Synthetic oligonucleotide
gtctgtatagacgttaaaactgacaacggt

SEQ ID NO: 502882 - DNA, 31 bp, Artificial Sequence
  Synthetic oligonucleotide
aaaacaaataccgatagaagcggccaacggt

SEQ ID NO: 502883 - DNA, 30 bp, Artificial Sequence
  Synthetic oligonucleotide
cgtctgtaaggtgttgaaccgtgcaacggt

SEQ ID NO: 502884 - DNA, 30 bp, Artificial Sequence
  Synthetic oligonucleotide
gctgctatgacagtcagtactgtcaacggt

SEQ ID NO: 502885 - DNA, 30 bp, Artificial Sequence
  Synthetic oligonucleotide
acaaccggtattagaatgcctcctaacggt

SEQ ID NO: 502886 - DNA, 30 bp, Artificial Sequence
  Synthetic oligonucleotide
cgttatatttagccctgtcgggctaacggt

SEQ ID NO: 502887 - DNA, 30 bp, Artificial Sequence
  Synthetic oligonucleotide
agcgaccgtgaaattaatgtacgtaacggt

SEQ ID NO: 502888 - DNA, 30 bp, Artificial Sequence
  Synthetic oligonucleotide
tgattagtaataaaagcctttcaacacggt

SEQ ID NO: 502889 - DNA, 30 bp, Artificial Sequence
  Synthetic oligonucleotide
gttgaggttgattggaccccataccacggt

SEQ ID NO: 502890 - DNA, 30 bp, Artificial Sequence
  Synthetic oligonucleotide
tatgccatgacagacaaaccctgccacggt

SEQ ID NO: 502891 - DNA, 30 bp, Artificial Sequence
  Synthetic oligonucleotide
atccggtaatggcggcgcattatccacggt

SEQ ID NO: 502892 - DNA, 30 bp, Artificial Sequence
  Synthetic oligonucleotide
tggtatcgtaatgaattcgaagggcacggt

SEQ ID NO: 502893 - DNA, 30 bp, Artificial Sequence
  Synthetic oligonucleotide
gagagggagccgcgacagaatatgcacggt

SEQ ID NO: 502894 - DNA, 30 bp, Artificial Sequence
  Synthetic oligonucleotide
gattcagtgaagaataaatagttgcacggt

SEQ ID NO: 502895 - DNA, 30 bp, Artificial Sequence
  Synthetic oligonucleotide
cgagtccgggcggctaaggtttttcacggt

SEQ ID NO: 502896 - DNA, 30 bp, Artificial Sequence
  Synthetic oligonucleotide
aagcaagcgtctacagtttggtaagacggt

SEQ ID NO: 502897 - DNA, 30 bp, Artificial Sequence
  Synthetic oligonucleotide
cgagtagaattgtccgtactatacgacggt

SEQ ID NO: 502898 - DNA, 30 bp, Artificial Sequence
  Synthetic oligonucleotide
aagtaatttgacagctctgggctcgacggt

SEQ ID NO: 502899 - DNA, 30 bp, Artificial Sequence
  Synthetic oligonucleotide
caaatactattatatttgtagccggacggt

SEQ ID NO: 502900 - DNA, 30 bp, Artificial Sequence
  Synthetic oligonucleotide
gattgagtacaacgcaagctacaatacggt

SEQ ID NO: 502901 - DNA, 30 bp, Artificial Sequence
  Synthetic oligonucleotide
gaggggttggggtaatgagattaatacggt

SEQ ID NO: 502902 - DNA, 30 bp, Artificial Sequence
  Synthetic oligonucleotide
tctgttgttatcaccagtataacatacggt

SEQ ID NO: 502903 - DNA, 30 bp, Artificial Sequence
  Synthetic oligonucleotide
attgtttgtcatctcagcatgctatacggt

SEQ ID NO: 502904 - DNA, 30 bp, Artificial Sequence
  Synthetic oligonucleotide
agagaaataaaagctcatttcttatacggt

SEQ ID NO: 502905 - DNA, 30 bp, Artificial Sequence
  Synthetic oligonucleotide
gctagcagttaacctacgcggaactacggt

SEQ ID NO: 502906 - DNA, 30 bp, Artificial Sequence
  Synthetic oligonucleotide
atctgcctgactaagaatatattctacggt

SEQ ID NO: 502907 - DNA, 30 bp, Artificial Sequence
  Synthetic oligonucleotide
ttacctggattacgggctgtacggtacggt

SEQ ID NO: 502908 - DNA, 30 bp, Artificial Sequence
  Synthetic oligonucleotide
agaatttagggaaaattgatcttgtacggt

SEQ ID NO: 502909 - DNA, 30 bp, Artificial Sequence
  Synthetic oligonucleotide
aacttcttgagttggcgccacagttacggt

SEQ ID NO: 502910 - DNA, 30 bp, Artificial Sequence
  Synthetic oligonucleotide
gacgcttcatatggctactgacaaaccggt

SEQ ID NO: 502911 - DNA, 30 bp, Artificial Sequence
  Synthetic oligonucleotide
gagctgttaacgagcatcgacgcaaccggt

SEQ ID NO: 502912 - DNA, 30 bp, Artificial Sequence
  Synthetic oligonucleotide
tttaggacaatgccgacggacataaccggt

SEQ ID NO: 502913 - DNA, 30 bp, Artificial Sequence
  Synthetic oligonucleotide
tctaaaggagctggcagtcgcagcaccggt

SEQ ID NO: 502914 - DNA, 30 bp, Artificial Sequence
  Synthetic oligonucleotide
aatagaaagggattttctgtaaggaccggt

SEQ ID NO: 502915 - DNA, 30 bp, Artificial Sequence
  Synthetic oligonucleotide
ctcttgaggactttttacaacacacccggt

SEQ ID NO: 502916 - DNA, 30 bp, Artificial Sequence
  Synthetic oligonucleotide
aaaagtattagacttcctgtgagacccggt

SEQ ID NO: 502917 - DNA, 30 bp, Artificial Sequence
  Synthetic oligonucleotide
actccatgtttccacaggggtaaccccggt

SEQ ID NO: 502918 - DNA, 30 bp, Artificial Sequence
  Synthetic oligonucleotide
tggggctcgctcatgcaagcagaccccggt

SEQ ID NO: 502919 - DNA, 30 bp, Artificial Sequence
  Synthetic oligonucleotide
gtaggtttaatctagtactggatccccggt

SEQ ID NO: 502920 - DNA, 30 bp, Artificial Sequence
  Synthetic oligonucleotide
aatttgaaaagcgttttgagtctccccggt

SEQ ID NO: 502921 - DNA, 30 bp, Artificial Sequence
  Synthetic oligonucleotide
aacacagggccgcgctccgcttagcccggt

SEQ ID NO: 502922 - DNA, 30 bp, Artificial Sequence
  Synthetic oligonucleotide
aagctatgacccgtacgcacagctcccggt

SEQ ID NO: 502923 - DNA, 30 bp, Artificial Sequence
  Synthetic oligonucleotide
gttaatatgttgggcttgacgtgtcccggt

SEQ ID NO: 502924 - DNA, 30 bp, Artificial Sequence
  Synthetic oligonucleotide
cgtcacaaatatctgggtttgtaagccggt

SEQ ID NO: 502925 - DNA, 30 bp, Artificial Sequence
  Synthetic oligonucleotide
tgcctccgttcatatgcgacggcagccggt

SEQ ID NO: 502926 - DNA, 30 bp, Artificial Sequence
  Synthetic oligonucleotide
aacattttgtgcaaacactaactagccggt

SEQ ID NO: 502927 - DNA, 30 bp, Artificial Sequence
  Synthetic oligonucleotide
caattaccgaaggtgtgcgaatgcgccggt

SEQ ID NO: 502928 - DNA, 30 bp, Artificial Sequence
  Synthetic oligonucleotide
gtgaagtgtgaaggtggcatgcatgccggt

SEQ ID NO: 502929 - DNA, 30 bp, Artificial Sequence
  Synthetic oligonucleotide
tgtgttcaatgcattgggtagaactccggt

SEQ ID NO: 502930 - DNA, 30 bp, Artificial Sequence
  Synthetic oligonucleotide
tagcctccgataacgcaaatcgactccggt

SEQ ID NO: 502931 - DNA, 30 bp, Artificial Sequence
  Synthetic oligonucleotide
ctcccatgatggttaagtgcagcctccggt

SEQ ID NO: 502932 - DNA, 30 bp, Artificial Sequence
  Synthetic oligonucleotide
ttcagcccacgtttagctactaagtccggt

SEQ ID NO: 502933 - DNA, 30 bp, Artificial Sequence
  Synthetic oligonucleotide
ttgccgcacgactggagccaggagtccggt

SEQ ID NO: 502934 - DNA, 30 bp, Artificial Sequence
  Synthetic oligonucleotide
gtgctcctgcttgggtatattgcgtccggt

SEQ ID NO: 502935 - DNA, 30 bp, Artificial Sequence
  Synthetic oligonucleotide
ggttgagattcagcacttaggatttccggt

SEQ ID NO: 502936 - DNA, 30 bp, Artificial Sequence
  Synthetic oligonucleotide
aggctcaacggcaggtgcagtcaaagcggt

SEQ ID NO: 502937 - DNA, 30 bp, Artificial Sequence
  Synthetic oligonucleotide
ctttggtggaactcatcgttataaagcggt

SEQ ID NO: 502938 - DNA, 30 bp, Artificial Sequence
  Synthetic oligonucleotide
cgcagccaaatgacttacgttagaagcggt

SEQ ID NO: 502939 - DNA, 30 bp, Artificial Sequence
  Synthetic oligonucleotide
tccccaaatttaacgtcttgaggaagcggt

SEQ ID NO: 502940 - DNA, 30 bp, Artificial Sequence
  Synthetic oligonucleotide
aaacggtgaacaggcactcccggaagcggt

SEQ ID NO: 502941 - DNA, 30 bp, Artificial Sequence
  Synthetic oligonucleotide
gagtctgcaccatcctatatgggaagcggt

SEQ ID NO: 502942 - DNA, 30 bp, Artificial Sequence
  Synthetic oligonucleotide
gaacaatcatgccggcatacgcgcagcggt

SEQ ID NO: 502943 - DNA, 30 bp, Artificial Sequence
  Synthetic oligonucleotide
tgccgttaccgggtcttgctgtagagcggt

SEQ ID NO: 502944 - DNA, 30 bp, Artificial Sequence
  Synthetic oligonucleotide
acgttatttatcgattgggcggtccgcggt

SEQ ID NO: 502945 - DNA, 30 bp, Artificial Sequence
  Synthetic oligonucleotide
atttgtttactggtttttgattagcgcggt

SEQ ID NO: 502946 - DNA, 30 bp, Artificial Sequence
  Synthetic oligonucleotide
ctaaaaacaatccggttggagccgcgcggt

SEQ ID NO: 502947 - DNA, 30 bp, Artificial Sequence
  Synthetic oligonucleotide
ctcaggcatcgtccccgatggcggcgcggt

SEQ ID NO: 502948 - DNA, 30 bp, Artificial Sequence
  Synthetic oligonucleotide
gtttaaaacttcgtacatatagtaggcggt

SEQ ID NO: 502949 - DNA, 30 bp, Artificial Sequence
  Synthetic oligonucleotide
gcgatcgccgctgcggggaggcagggcggt

SEQ ID NO: 502950 - DNA, 30 bp, Artificial Sequence
  Synthetic oligonucleotide
ttcgggggcagatccgctgcactgggcggt

SEQ ID NO: 502951 - DNA, 30 bp, Artificial Sequence
  Synthetic oligonucleotide
aacggtgggtggttcgcatgatgtggcggt

SEQ ID NO: 502952 - DNA, 30 bp, Artificial Sequence
  Synthetic oligonucleotide
actctcagagggatttttctaatctgcggt

SEQ ID NO: 502953 - DNA, 30 bp, Artificial Sequence
  Synthetic oligonucleotide
gtcacctaacaagttctgagcacttgcggt

SEQ ID NO: 502954 - DNA, 30 bp, Artificial Sequence
  Synthetic oligonucleotide
tgcgctacagaatgttcatatcgttgcggt

SEQ ID NO: 502955 - DNA, 29 bp, Artificial Sequence
  Synthetic oligonucleotide
gtttcctgcttgggttatattgttgcggt

SEQ ID NO: 502956 - DNA, 30 bp, Artificial Sequence
  Synthetic oligonucleotide
ggcggcgaggatgagtgagttcaaatcggt

SEQ ID NO: 502957 - DNA, 30 bp, Artificial Sequence
  Synthetic oligonucleotide
acatcctcccgcgcttttaaaataatcggt

SEQ ID NO: 502958 - DNA, 30 bp, Artificial Sequence
  Synthetic oligonucleotide
gtacttttcaaacgtagaccgataatcggt

SEQ ID NO: 502959 - DNA, 30 bp, Artificial Sequence
  Synthetic oligonucleotide
taggtgtggttcgtaccttgaaccatcggt

SEQ ID NO: 502960 - DNA, 30 bp, Artificial Sequence
  Synthetic oligonucleotide
gagtattttggtgcaaaacttttgatcggt

SEQ ID NO: 502961 - DNA, 30 bp, Artificial Sequence
  Synthetic oligonucleotide
aaggccttacttgaagtgccaggactcggt

SEQ ID NO: 502962 - DNA, 30 bp, Artificial Sequence
  Synthetic oligonucleotide
gagatagagaacttcctctggaacctcggt

SEQ ID NO: 502963 - DNA, 30 bp, Artificial Sequence
  Synthetic oligonucleotide
ggcaaccggataatctgggactacctcggt

SEQ ID NO: 502964 - DNA, 30 bp, Artificial Sequence
  Synthetic oligonucleotide
caccctctggggcgtagtgtggtcctcggt

SEQ ID NO: 502965 - DNA, 30 bp, Artificial Sequence
  Synthetic oligonucleotide
caatcttttcgtatgtaaggttgtctcggt

SEQ ID NO: 502966 - DNA, 30 bp, Artificial Sequence
  Synthetic oligonucleotide
caccgtccgcatcatgtcctggttctcggt

SEQ ID NO: 502967 - DNA, 30 bp, Artificial Sequence
  Synthetic oligonucleotide
ttcctttgttatgaccgtggctcagtcggt

SEQ ID NO: 502968 - DNA, 30 bp, Artificial Sequence
  Synthetic oligonucleotide
gcctgtatccggaccgtagtgatagtcggt

SEQ ID NO: 502969 - DNA, 30 bp, Artificial Sequence
  Synthetic oligonucleotide
gcaccttatttgcgagcttagcaggtcggt

SEQ ID NO: 502970 - DNA, 30 bp, Artificial Sequence
  Synthetic oligonucleotide
acttcctatctagctttaggtccggtcggt

SEQ ID NO: 502971 - DNA, 30 bp, Artificial Sequence
  Synthetic oligonucleotide
taaattattgtttgagcgcgttaattcggt

SEQ ID NO: 502972 - DNA, 30 bp, Artificial Sequence
  Synthetic oligonucleotide
tccctggcagcttcccgtgggatattcggt

SEQ ID NO: 502973 - DNA, 30 bp, Artificial Sequence
  Synthetic oligonucleotide
tacaccgtgcacgttagtagtagtttcggt

SEQ ID NO: 502974 - DNA, 30 bp, Artificial Sequence
  Synthetic oligonucleotide
tcgcttaagtagctcgggtgcagcaagggt

SEQ ID NO: 502975 - DNA, 30 bp, Artificial Sequence
  Synthetic oligonucleotide
gtaccgctatgttaatgcagtaagaagggt

SEQ ID NO: 502976 - DNA, 30 bp, Artificial Sequence
  Synthetic oligonucleotide
gttgctctgcaaatttattgccagaagggt

SEQ ID NO: 502977 - DNA, 30 bp, Artificial Sequence
  Synthetic oligonucleotide
atgtacgcgcatcccaagtctcagaagggt

SEQ ID NO: 502978 - DNA, 30 bp, Artificial Sequence
  Synthetic oligonucleotide
agctgcactatggcttcagtgaggaagggt

SEQ ID NO: 502979 - DNA, 30 bp, Artificial Sequence
  Synthetic oligonucleotide
tattgccgcgtgtacaggtcccggaagggt

SEQ ID NO: 502980 - DNA, 30 bp, Artificial Sequence
  Synthetic oligonucleotide
acaatgcccagttataggaattgtaagggt

SEQ ID NO: 502981 - DNA, 30 bp, Artificial Sequence
  Synthetic oligonucleotide
atctcctcatgctaccgtttgtttaagggt

SEQ ID NO: 502982 - DNA, 30 bp, Artificial Sequence
  Synthetic oligonucleotide
cattagctagcgatggcctgtatacagggt

SEQ ID NO: 502983 - DNA, 30 bp, Artificial Sequence
  Synthetic oligonucleotide
tgcggtcactacgggggggggggccagggt

SEQ ID NO: 502984 - DNA, 30 bp, Artificial Sequence
  Synthetic oligonucleotide
ttttagatccggtatacagctctccagggt

SEQ ID NO: 502985 - DNA, 30 bp, Artificial Sequence
  Synthetic oligonucleotide
ggcccataaagtacgcagtgctaggagggt

SEQ ID NO: 502986 - DNA, 30 bp, Artificial Sequence
  Synthetic oligonucleotide
ctaagctttgtgagctcttgcacggagggt

SEQ ID NO: 502987 - DNA, 30 bp, Artificial Sequence
  Synthetic oligonucleotide
aaactctactgcatatagctctcggagggt

SEQ ID NO: 502988 - DNA, 30 bp, Artificial Sequence
  Synthetic oligonucleotide
cagtaattgagccgtggattactggagggt

SEQ ID NO: 502989 - DNA, 30 bp, Artificial Sequence
  Synthetic oligonucleotide
acttcttcgtcacaattgggagatgagggt

SEQ ID NO: 502990 - DNA, 30 bp, Artificial Sequence
  Synthetic oligonucleotide
gtacaatatatcgtttcattggatgagggt

SEQ ID NO: 502991 - DNA, 30 bp, Artificial Sequence
  Synthetic oligonucleotide
ttaatttttcgctatcgttaacgtgagggt

SEQ ID NO: 502992 - DNA, 30 bp, Artificial Sequence
  Synthetic oligonucleotide
gatgaccggcaacctcgtagattatagggt

SEQ ID NO: 502993 - DNA, 30 bp, Artificial Sequence
  Synthetic oligonucleotide
tgagtgccgtgtattgctgcaacgtagggt

SEQ ID NO: 502994 - DNA, 30 bp, Artificial Sequence
  Synthetic oligonucleotide
ataaactcgggtgtaaggacgggaacgggt

SEQ ID NO: 502995 - DNA, 30 bp, Artificial Sequence
  Synthetic oligonucleotide
ggcaaataatggggttcgccgggcacgggt

SEQ ID NO: 502996 - DNA, 30 bp, Artificial Sequence
  Synthetic oligonucleotide
aggtcttgtgtcgacggagctatcacgggt

SEQ ID NO: 502997 - DNA, 30 bp, Artificial Sequence
  Synthetic oligonucleotide
ccgttgaccgcccgccggttggagacgggt

SEQ ID NO: 502998 - DNA, 30 bp, Artificial Sequence
  Synthetic oligonucleotide
cttaggttttttcctcacacggggacgggt

SEQ ID NO: 502999 - DNA, 30 bp, Artificial Sequence
  Synthetic oligonucleotide
agaaccccgctgcaacaggcacatacgggt

SEQ ID NO: 503000 - DNA, 30 bp, Artificial Sequence
  Synthetic oligonucleotide
ccgtgcacgacttcaagtcgtgatacgggt

SEQ ID NO: 503001 - DNA, 30 bp, Artificial Sequence
  Synthetic oligonucleotide
ggcatcccttcaggtaggtgtataccgggt

SEQ ID NO: 503002 - DNA, 30 bp, Artificial Sequence
  Synthetic oligonucleotide
ccttggttgcgtcagcaagtccgcccgggt

SEQ ID NO: 503003 - DNA, 30 bp, Artificial Sequence
  Synthetic oligonucleotide
gattctgctggtagccgcaaatatccgggt

SEQ ID NO: 503004 - DNA, 30 bp, Artificial Sequence
  Synthetic oligonucleotide
aaaaacgctagtatgccagacgtagcgggt

SEQ ID NO: 503005 - DNA, 30 bp, Artificial Sequence
  Synthetic oligonucleotide
atagtactgcagctgcgggcacccgcgggt

SEQ ID NO: 503006 - DNA, 30 bp, Artificial Sequence
  Synthetic oligonucleotide
caacgcgagcctgataagtcgtccgcgggt

SEQ ID NO: 503007 - DNA, 30 bp, Artificial Sequence
  Synthetic oligonucleotide
cggcgggccaacggtgaagtcgcggcgggt

SEQ ID NO: 503008 - DNA, 30 bp, Artificial Sequence
  Synthetic oligonucleotide
tccccgacaatgatatccatttcggcgggt

SEQ ID NO: 503009 - DNA, 30 bp, Artificial Sequence
  Synthetic oligonucleotide
agctatcttcctcactgtcggagggcgggt

SEQ ID NO: 503010 - DNA, 30 bp, Artificial Sequence
  Synthetic oligonucleotide
ctccagtgcggtaaatttccgtctgcgggt

SEQ ID NO: 503011 - DNA, 30 bp, Artificial Sequence
  Synthetic oligonucleotide
taaacagcacacagggagcgacgtgcgggt

SEQ ID NO: 503012 - DNA, 30 bp, Artificial Sequence
  Synthetic oligonucleotide
cgatggcgatttggctgagacggtgcgggt

SEQ ID NO: 503013 - DNA, 30 bp, Artificial Sequence
  Synthetic oligonucleotide
acccgtatatcgttcgggcggacatcgggt

SEQ ID NO: 503014 - DNA, 30 bp, Artificial Sequence
  Synthetic oligonucleotide
cttttaattccggcgagatctcgctcgggt

SEQ ID NO: 503015 - DNA, 30 bp, Artificial Sequence
  Synthetic oligonucleotide
taatactactttctaggaacaaggtcgggt

SEQ ID NO: 503016 - DNA, 30 bp, Artificial Sequence
  Synthetic oligonucleotide
gtggacttcattgttcatgaggattcgggt

SEQ ID NO: 503017 - DNA, 30 bp, Artificial Sequence
  Synthetic oligonucleotide
ccttgattgttgtgtttaataccttcgggt

SEQ ID NO: 503018 - DNA, 30 bp, Artificial Sequence
  Synthetic oligonucleotide
agccaggatgcgtacactgagttttcgggt

SEQ ID NO: 503019 - DNA, 28 bp, Artificial Sequence
  Synthetic oligonucleotide
gtcgggtcctttgccaccccccaggggt

SEQ ID NO: 503020 - DNA, 30 bp, Artificial Sequence
  Synthetic oligonucleotide
agggtgcgacgctacgaggccaataggggt

SEQ ID NO: 503021 - DNA, 30 bp, Artificial Sequence
  Synthetic oligonucleotide
gattgttagggtgcgcccgtatataggggt

SEQ ID NO: 503022 - DNA, 30 bp, Artificial Sequence
  Synthetic oligonucleotide
atgcaaacccacataggatacagtaggggt

SEQ ID NO: 503023 - DNA, 30 bp, Artificial Sequence
  Synthetic oligonucleotide
agtttatggaagtttcttgctgttaggggt

SEQ ID NO: 503024 - DNA, 30 bp, Artificial Sequence
  Synthetic oligonucleotide
acacccgaaataatgaggatttttaggggt

SEQ ID NO: 503025 - DNA, 30 bp, Artificial Sequence
  Synthetic oligonucleotide
atgtaatttgctttaaccctaagacggggt

SEQ ID NO: 503026 - DNA, 30 bp, Artificial Sequence
  Synthetic oligonucleotide
ctagggttaacgcaggctgcaggacggggt

SEQ ID NO: 503027 - DNA, 30 bp, Artificial Sequence
  Synthetic oligonucleotide
ttgatcagtcgaaacatccactaccggggt

SEQ ID NO: 503028 - DNA, 30 bp, Artificial Sequence
  Synthetic oligonucleotide
tacaggtagctctcaggaatcgggcggggt

SEQ ID NO: 503029 - DNA, 30 bp, Artificial Sequence
  Synthetic oligonucleotide
caattaactcggggaaatcactgtcggggt

SEQ ID NO: 503030 - DNA, 30 bp, Artificial Sequence
  Synthetic oligonucleotide
caggtcaaaggaaataaaggttgtcggggt

SEQ ID NO: 503031 - DNA, 30 bp, Artificial Sequence
  Synthetic oligonucleotide
gtcatttacgacgcggcaggatttcggggt

SEQ ID NO: 503032 - DNA, 30 bp, Artificial Sequence
  Synthetic oligonucleotide
gcccccagttatcaagtatcgtttcggggt

SEQ ID NO: 503033 - DNA, 30 bp, Artificial Sequence
  Synthetic oligonucleotide
cccatacctttatgttcatgtggagggggt

SEQ ID NO: 503034 - DNA, 30 bp, Artificial Sequence
  Synthetic oligonucleotide
agcatagtataacgcgcggcggccgggggt

SEQ ID NO: 503035 - DNA, 30 bp, Artificial Sequence
  Synthetic oligonucleotide
agaattccgataccttattgttaggggggt

SEQ ID NO: 503036 - DNA, 30 bp, Artificial Sequence
  Synthetic oligonucleotide
ccgacgccaaaaacccaaccctgggggggt

SEQ ID NO: 503037 - DNA, 30 bp, Artificial Sequence
  Synthetic oligonucleotide
ttatattttacgcgtcatataaatgggggt

SEQ ID NO: 503038 - DNA, 30 bp, Artificial Sequence
  Synthetic oligonucleotide
ccttccgttcgccagcatatacttgggggt

SEQ ID NO: 503039 - DNA, 30 bp, Artificial Sequence
  Synthetic oligonucleotide
tgtgctggtacggtaaattgcttatggggt

SEQ ID NO: 503040 - DNA, 30 bp, Artificial Sequence
  Synthetic oligonucleotide
tagtttcaggtcggtcccactacgtggggt

SEQ ID NO: 503041 - DNA, 30 bp, Artificial Sequence
  Synthetic oligonucleotide
tgggaatattaagattccgggagttggggt

SEQ ID NO: 503042 - DNA, 30 bp, Artificial Sequence
  Synthetic oligonucleotide
agccgtcagcctctctcgagaggttggggt

SEQ ID NO: 503043 - DNA, 30 bp, Artificial Sequence
  Synthetic oligonucleotide
gggcctatagtggaaaatcggctttggggt

SEQ ID NO: 503044 - DNA, 30 bp, Artificial Sequence
  Synthetic oligonucleotide
ttggcatcgacgagcccagagttttggggt

SEQ ID NO: 503045 - DNA, 30 bp, Artificial Sequence
  Synthetic oligonucleotide
aacttctcgttgatggtacttttaatgggt

SEQ ID NO: 503046 - DNA, 30 bp, Artificial Sequence
  Synthetic oligonucleotide
actctagatccaactctaggttcgatgggt

SEQ ID NO: 503047 - DNA, 30 bp, Artificial Sequence
  Synthetic oligonucleotide
acgttgcacgaacctggccaggatatgggt

SEQ ID NO: 503048 - DNA, 30 bp, Artificial Sequence
  Synthetic oligonucleotide
ccgcaacaacacatgttcaatgaactgggt

SEQ ID NO: 503049 - DNA, 30 bp, Artificial Sequence
  Synthetic oligonucleotide
agtagctggaagtatggtcaaaccctgggt

SEQ ID NO: 503050 - DNA, 30 bp, Artificial Sequence
  Synthetic oligonucleotide
aatttgctcccgtgcgaaacaacgctgggt

SEQ ID NO: 503051 - DNA, 30 bp, Artificial Sequence
  Synthetic oligonucleotide
gtcttgtagtaacaatcacaacatctgggt

SEQ ID NO: 503052 - DNA, 30 bp, Artificial Sequence
  Synthetic oligonucleotide
taagcctgttatctggcttaagttctgggt

SEQ ID NO: 503053 - DNA, 30 bp, Artificial Sequence
  Synthetic oligonucleotide
aagtccttggacataaatactgacgtgggt

SEQ ID NO: 503054 - DNA, 30 bp, Artificial Sequence
  Synthetic oligonucleotide
atactcaatctctcatgatgatgattgggt

SEQ ID NO: 503055 - DNA, 30 bp, Artificial Sequence
  Synthetic oligonucleotide
aaaaggttgaaaggtcgccattccttgggt

SEQ ID NO: 503056 - DNA, 30 bp, Artificial Sequence
  Synthetic oligonucleotide
atacaaggtcaacgtttgtcaatcttgggt

SEQ ID NO: 503057 - DNA, 30 bp, Artificial Sequence
  Synthetic oligonucleotide
caaatgtcaaagactattaccccgttgggt

SEQ ID NO: 503058 - DNA, 30 bp, Artificial Sequence
  Synthetic oligonucleotide
gcgataataagcctactatcatggttgggt

SEQ ID NO: 503059 - DNA, 30 bp, Artificial Sequence
  Synthetic oligonucleotide
agaactgtaccatagtgcgctataaatggt

SEQ ID NO: 503060 - DNA, 30 bp, Artificial Sequence
  Synthetic oligonucleotide
ccattaaaatggtcccctcccgacaatggt

SEQ ID NO: 503061 - DNA, 30 bp, Artificial Sequence
  Synthetic oligonucleotide
tcaattaccagatactgtgttgcgaatggt

SEQ ID NO: 503062 - DNA, 30 bp, Artificial Sequence
  Synthetic oligonucleotide
attagcgcgcttagatgagttatgaatggt

SEQ ID NO: 503063 - DNA, 30 bp, Artificial Sequence
  Synthetic oligonucleotide
tttacttaagtccattacgaccgtaatggt

SEQ ID NO: 503064 - DNA, 30 bp, Artificial Sequence
  Synthetic oligonucleotide
tgtcataggctgcgtgtaattggacatggt

SEQ ID NO: 503065 - DNA, 30 bp, Artificial Sequence
  Synthetic oligonucleotide
cattcgtttcgaactctccgatgtcatggt

SEQ ID NO: 503066 - DNA, 30 bp, Artificial Sequence
  Synthetic oligonucleotide
ttctacttacaatcgagccatcaagatggt

SEQ ID NO: 503067 - DNA, 30 bp, Artificial Sequence
  Synthetic oligonucleotide
ggatccatcacatccgtggcaacagatggt

SEQ ID NO: 503068 - DNA, 30 bp, Artificial Sequence
  Synthetic oligonucleotide
ggcagttgaatgtcaagccatcacgatggt

SEQ ID NO: 503069 - DNA, 30 bp, Artificial Sequence
  Synthetic oligonucleotide
cagcaataccgaatatctattgtcgatggt

SEQ ID NO: 503070 - DNA, 30 bp, Artificial Sequence
  Synthetic oligonucleotide
cggtcatttatcatgtttatcgaggatggt

SEQ ID NO: 503071 - DNA, 30 bp, Artificial Sequence
  Synthetic oligonucleotide
accgtcttgggttaaccaatcttggatggt

SEQ ID NO: 503072 - DNA, 30 bp, Artificial Sequence
  Synthetic oligonucleotide
tcatagagttgttatgaccctcatgatggt

SEQ ID NO: 503073 - DNA, 30 bp, Artificial Sequence
  Synthetic oligonucleotide
gcaggaaagggttttcgcggcttatatggt

SEQ ID NO: 503074 - DNA, 30 bp, Artificial Sequence
  Synthetic oligonucleotide
ctcgataataaatactgggtcccctatggt

SEQ ID NO: 503075 - DNA, 30 bp, Artificial Sequence
  Synthetic oligonucleotide
ctatgacgacgcgaggtgctctgctatggt

SEQ ID NO: 503076 - DNA, 30 bp, Artificial Sequence
  Synthetic oligonucleotide
acgtcagtacataatatctatcagtatggt

SEQ ID NO: 503077 - DNA, 30 bp, Artificial Sequence
  Synthetic oligonucleotide
taatttctttgccgaaacttttggtatggt

SEQ ID NO: 503078 - DNA, 30 bp, Artificial Sequence
  Synthetic oligonucleotide
caggaattcgcggctcataatatgtatggt

SEQ ID NO: 503079 - DNA, 30 bp, Artificial Sequence
  Synthetic oligonucleotide
gggggtttcttaagaaattcgcattatggt

SEQ ID NO: 503080 - DNA, 30 bp, Artificial Sequence
  Synthetic oligonucleotide
ctgtccttacgccatgaaccctaaactggt

SEQ ID NO: 503081 - DNA, 30 bp, Artificial Sequence
  Synthetic oligonucleotide
tattccagcgtcagtattatttgaactggt

SEQ ID NO: 503082 - DNA, 30 bp, Artificial Sequence
  Synthetic oligonucleotide
ttaacgtgacacattgaacccgtaactggt

SEQ ID NO: 503083 - DNA, 30 bp, Artificial Sequence
  Synthetic oligonucleotide
taagtacaggacccttcacttttcactggt

SEQ ID NO: 503084 - DNA, 29 bp, Artificial Sequence
  Synthetic oligonucleotide
acccggcctgcgtacattaatttactggt

SEQ ID NO: 503085 - DNA, 30 bp, Artificial Sequence
  Synthetic oligonucleotide
tacgttgattaggttactgatgagcctggt

SEQ ID NO: 503086 - DNA, 30 bp, Artificial Sequence
  Synthetic oligonucleotide
aacacagcaataggctgcttacggcctggt

SEQ ID NO: 503087 - DNA, 30 bp, Artificial Sequence
  Synthetic oligonucleotide
gctgaggggctagtacggatgagagctggt

SEQ ID NO: 503088 - DNA, 30 bp, Artificial Sequence
  Synthetic oligonucleotide
gtgtccacgaaatatcaggtcttagctggt

SEQ ID NO: 503089 - DNA, 30 bp, Artificial Sequence
  Synthetic oligonucleotide
cattttcgaagtgaagagctctcggctggt

SEQ ID NO: 503090 - DNA, 30 bp, Artificial Sequence
  Synthetic oligonucleotide
tagttagttgggggtgaggcgtcctctggt

SEQ ID NO: 503091 - DNA, 30 bp, Artificial Sequence
  Synthetic oligonucleotide
gtccacaaatcggcgctcgcttcctctggt

SEQ ID NO: 503092 - DNA, 30 bp, Artificial Sequence
  Synthetic oligonucleotide
attggcaaatttcttaggcttcaaagtggt

SEQ ID NO: 503093 - DNA, 30 bp, Artificial Sequence
  Synthetic oligonucleotide
gtccactacacccgagtgccctaaagtggt

SEQ ID NO: 503094 - DNA, 30 bp, Artificial Sequence
  Synthetic oligonucleotide
gttagctttcagtgtctgtcgtcaagtggt

SEQ ID NO: 503095 - DNA, 30 bp, Artificial Sequence
  Synthetic oligonucleotide
ggggtttagcaatagcccagtaccagtggt

SEQ ID NO: 503096 - DNA, 30 bp, Artificial Sequence
  Synthetic oligonucleotide
gtagtttcggtggcaacggtacgcagtggt

SEQ ID NO: 503097 - DNA, 30 bp, Artificial Sequence
  Synthetic oligonucleotide
aaaataagcgtgcgcggacgctcgagtggt

SEQ ID NO: 503098 - DNA, 30 bp, Artificial Sequence
  Synthetic oligonucleotide
accactttgtcttgaaattctcaccgtggt

SEQ ID NO: 503099 - DNA, 30 bp, Artificial Sequence
  Synthetic oligonucleotide
agcgtagtgcgggaatgttgctaccgtggt

SEQ ID NO: 503100 - DNA, 30 bp, Artificial Sequence
  Synthetic oligonucleotide
tgggtttctgtatgtcatcacagccgtggt

SEQ ID NO: 503101 - DNA, 30 bp, Artificial Sequence
  Synthetic oligonucleotide
ccactagttggaatctgaagggatcgtggt

SEQ ID NO: 503102 - DNA, 30 bp, Artificial Sequence
  Synthetic oligonucleotide
ttgagtcggacacgattttaaaaaggtggt

SEQ ID NO: 503103 - DNA, 30 bp, Artificial Sequence
  Synthetic oligonucleotide
aacttgtttatgttccaatatgaaggtggt

SEQ ID NO: 503104 - DNA, 30 bp, Artificial Sequence
  Synthetic oligonucleotide
ggctatttggcgcttgcgtacttaggtggt

SEQ ID NO: 503105 - DNA, 30 bp, Artificial Sequence
  Synthetic oligonucleotide
cattgctcaccattgtacttcaagggtggt

SEQ ID NO: 503106 - DNA, 30 bp, Artificial Sequence
  Synthetic oligonucleotide
gataagaggtgacaggtgggggtgggtggt

SEQ ID NO: 503107 - DNA, 30 bp, Artificial Sequence
  Synthetic oligonucleotide
ggtttgaactggcaaaggacgccatgtggt

SEQ ID NO: 503108 - DNA, 30 bp, Artificial Sequence
  Synthetic oligonucleotide
ttacaacttggtgagatttcttcatgtggt

SEQ ID NO: 503109 - DNA, 30 bp, Artificial Sequence
  Synthetic oligonucleotide
tttgactgcgttgctgcacgttcatgtggt

SEQ ID NO: 503110 - DNA, 30 bp, Artificial Sequence
  Synthetic oligonucleotide
cataattatcgttataggacaggctgtggt

SEQ ID NO: 503111 - DNA, 30 bp, Artificial Sequence
  Synthetic oligonucleotide
taaagagcgcatgggaatagaatctgtggt

SEQ ID NO: 503112 - DNA, 30 bp, Artificial Sequence
  Synthetic oligonucleotide
aacgtatgggacggcacatagctctgtggt

SEQ ID NO: 503113 - DNA, 30 bp, Artificial Sequence
  Synthetic oligonucleotide
aacagccctaaccgctcttcaacgtgtggt

SEQ ID NO: 503114 - DNA, 30 bp, Artificial Sequence
  Synthetic oligonucleotide
cgagtcggttttttgtggggcacgtgtggt

SEQ ID NO: 503115 - DNA, 30 bp, Artificial Sequence
  Synthetic oligonucleotide
aagacccggcaatttatcgcgctttgtggt

SEQ ID NO: 503116 - DNA, 30 bp, Artificial Sequence
  Synthetic oligonucleotide
attcgttataatggcagaatcttttgtggt

SEQ ID NO: 503117 - DNA, 30 bp, Artificial Sequence
  Synthetic oligonucleotide
tccttccttcacgtaaagcttttttgtggt

SEQ ID NO: 503118 - DNA, 30 bp, Artificial Sequence
  Synthetic oligonucleotide
ggccgggacgttaaggggccctgaattggt

SEQ ID NO: 503119 - DNA, 30 bp, Artificial Sequence
  Synthetic oligonucleotide
gttgtggcggatcatggggagtggattggt

SEQ ID NO: 503120 - DNA, 29 bp, Artificial Sequence
  Synthetic oligonucleotide
gggctcagcaaccagttataatgattggt

SEQ ID NO: 503121 - DNA, 30 bp, Artificial Sequence
  Synthetic oligonucleotide
gcccctgcaacttgtaccgcaaatattggt

SEQ ID NO: 503122 - DNA, 30 bp, Artificial Sequence
  Synthetic oligonucleotide
gagatggtgcaggtccagcctaatattggt

SEQ ID NO: 503123 - DNA, 30 bp, Artificial Sequence
  Synthetic oligonucleotide
aagttataccatcgccgtgctgctattggt

SEQ ID NO: 503124 - DNA, 30 bp, Artificial Sequence
  Synthetic oligonucleotide
cggctaccggaagactttaaatctattggt

SEQ ID NO: 503125 - DNA, 30 bp, Artificial Sequence
  Synthetic oligonucleotide
gaaccatttcgtgtaaaccctattattggt

SEQ ID NO: 503126 - DNA, 30 bp, Artificial Sequence
  Synthetic oligonucleotide
aggccccttcccggctggtcgacacttggt

SEQ ID NO: 503127 - DNA, 30 bp, Artificial Sequence
  Synthetic oligonucleotide
ttcgctgacgtaggatatgatgcacttggt

SEQ ID NO: 503128 - DNA, 30 bp, Artificial Sequence
  Synthetic oligonucleotide
gttattggggcccgggtcctcggacttggt

SEQ ID NO: 503129 - DNA, 30 bp, Artificial Sequence
  Synthetic oligonucleotide
ctcattcgttactccgcaacgctacttggt

SEQ ID NO: 503130 - DNA, 30 bp, Artificial Sequence
  Synthetic oligonucleotide
atggggagcggcggtccatcgaggcttggt

SEQ ID NO: 503131 - DNA, 31 bp, Artificial Sequence
  Synthetic oligonucleotide
gaaatgacctgagactaccgattgagttggt

SEQ ID NO: 503132 - DNA, 30 bp, Artificial Sequence
  Synthetic oligonucleotide
atatacggttggcccttgtgagtagttggt

SEQ ID NO: 503133 - DNA, 30 bp, Artificial Sequence
  Synthetic oligonucleotide
ttaattgtagcgtttaaccggcgcgttggt

SEQ ID NO: 503134 - DNA, 30 bp, Artificial Sequence
  Synthetic oligonucleotide
actacgagtgataggtagacactcgttggt

SEQ ID NO: 503135 - DNA, 30 bp, Artificial Sequence
  Synthetic oligonucleotide
accctgggctgtacggcacacactgttggt

SEQ ID NO: 503136 - DNA, 30 bp, Artificial Sequence
  Synthetic oligonucleotide
aattgcagaattcccggagagagtgttggt

SEQ ID NO: 503137 - DNA, 30 bp, Artificial Sequence
  Synthetic oligonucleotide
catggcttgtgtagggtggtgggtgttggt

SEQ ID NO: 503138 - DNA, 30 bp, Artificial Sequence
  Synthetic oligonucleotide
gtacccgttggttcattgtgcaaatttggt

SEQ ID NO: 503139 - DNA, 30 bp, Artificial Sequence
  Synthetic oligonucleotide
ttgttccggtaagccataaccatatttggt

SEQ ID NO: 503140 - DNA, 30 bp, Artificial Sequence
  Synthetic oligonucleotide
gattgaaaagctacgggccacttatttggt

SEQ ID NO: 503141 - DNA, 30 bp, Artificial Sequence
  Synthetic oligonucleotide
actgttctttaagaataacttctctttggt

SEQ ID NO: 503142 - DNA, 30 bp, Artificial Sequence
  Synthetic oligonucleotide
atcccattgcggaccaacatccagtttggt

SEQ ID NO: 503143 - DNA, 30 bp, Artificial Sequence
  Synthetic oligonucleotide
gttccatgtgtgcttggttccctgtttggt

SEQ ID NO: 503144 - DNA, 30 bp, Artificial Sequence
  Synthetic oligonucleotide
tcgcactgtttcggctattaccattttggt

SEQ ID NO: 503145 - DNA, 30 bp, Artificial Sequence
  Synthetic oligonucleotide
gatatacagtgtagtgcagcgccttttggt

SEQ ID NO: 503146 - DNA, 30 bp, Artificial Sequence
  Synthetic oligonucleotide
cgccttcagtccagccaagtgctttttggt

SEQ ID NO: 503147 - DNA, 30 bp, Artificial Sequence
  Synthetic oligonucleotide
tcctgtcttttcatttattgtttttttggt

SEQ ID NO: 503148 - DNA, 30 bp, Artificial Sequence
  Synthetic oligonucleotide
cgctcgcacataacgtgtggtacaaaatgt

SEQ ID NO: 503149 - DNA, 30 bp, Artificial Sequence
  Synthetic oligonucleotide
gatatacctctattagacactcagaaatgt

SEQ ID NO: 503150 - DNA, 30 bp, Artificial Sequence
  Synthetic oligonucleotide
cgaatgcttgtataatctcatccacaatgt

SEQ ID NO: 503151 - DNA, 30 bp, Artificial Sequence
  Synthetic oligonucleotide
ctcacggcgccatgcacgaggcaccaatgt

SEQ ID NO: 503152 - DNA, 30 bp, Artificial Sequence
  Synthetic oligonucleotide
actgaacctgcgtaaagtttcccgcaatgt

SEQ ID NO: 503153 - DNA, 30 bp, Artificial Sequence
  Synthetic oligonucleotide
gatacacccggcggtgtaccttatcaatgt

SEQ ID NO: 503154 - DNA, 30 bp, Artificial Sequence
  Synthetic oligonucleotide
aaattaatacacggttgacagctagaatgt

SEQ ID NO: 503155 - DNA, 30 bp, Artificial Sequence
  Synthetic oligonucleotide
ttatcccacagcgatgatcaagcggaatgt

SEQ ID NO: 503156 - DNA, 30 bp, Artificial Sequence
  Synthetic oligonucleotide
gggtcttagttctgtgtttatcgtgaatgt

SEQ ID NO: 503157 - DNA, 30 bp, Artificial Sequence
  Synthetic oligonucleotide
aattggcggacattagcatcagtataatgt

SEQ ID NO: 503158 - DNA, 30 bp, Artificial Sequence
  Synthetic oligonucleotide
acacaatggatgcggagtcccaactaatgt

SEQ ID NO: 503159 - DNA, 30 bp, Artificial Sequence
  Synthetic oligonucleotide
gttttactctgatgtatttatgactaatgt

SEQ ID NO: 503160 - DNA, 30 bp, Artificial Sequence
  Synthetic oligonucleotide
actttttgcccaattagtgaaacctaatgt

SEQ ID NO: 503161 - DNA, 30 bp, Artificial Sequence
  Synthetic oligonucleotide
atcggtctgttatttccctaggcctaatgt

SEQ ID NO: 503162 - DNA, 30 bp, Artificial Sequence
  Synthetic oligonucleotide
tatgtttcgtacggacgaaatgtctaatgt

SEQ ID NO: 503163 - DNA, 30 bp, Artificial Sequence
  Synthetic oligonucleotide
agtttaatagattccgtctttttctaatgt

SEQ ID NO: 503164 - DNA, 30 bp, Artificial Sequence
  Synthetic oligonucleotide
tgataaaggtaaggttcagaaaagtaatgt

SEQ ID NO: 503165 - DNA, 30 bp, Artificial Sequence
  Synthetic oligonucleotide
gaagtttcgttggaaatgcgtacttaatgt

SEQ ID NO: 503166 - DNA, 30 bp, Artificial Sequence
  Synthetic oligonucleotide
ataaggttcttatataaactaagaacatgt

SEQ ID NO: 503167 - DNA, 30 bp, Artificial Sequence
  Synthetic oligonucleotide
atacaggcagaaatggtgttacacacatgt

SEQ ID NO: 503168 - DNA, 30 bp, Artificial Sequence
  Synthetic oligonucleotide
tactttactatatcgtacagataaccatgt

SEQ ID NO: 503169 - DNA, 30 bp, Artificial Sequence
  Synthetic oligonucleotide
cgtagcaccaaattttatggcacgccatgt

SEQ ID NO: 503170 - DNA, 30 bp, Artificial Sequence
  Synthetic oligonucleotide
accaccgtatattcgttatacactccatgt

SEQ ID NO: 503171 - DNA, 30 bp, Artificial Sequence
  Synthetic oligonucleotide
tcacactaaatgtagcatagagaagcatgt

SEQ ID NO: 503172 - DNA, 30 bp, Artificial Sequence
  Synthetic oligonucleotide
ggtctgtatttgcagcgcgcttacgcatgt

SEQ ID NO: 503173 - DNA, 30 bp, Artificial Sequence
  Synthetic oligonucleotide
attgcgtgtattgttgtgtgttccgcatgt

SEQ ID NO: 503174 - DNA, 30 bp, Artificial Sequence
  Synthetic oligonucleotide
ctggaaatacgtcatgcgtaaagcgcatgt

SEQ ID NO: 503175 - DNA, 30 bp, Artificial Sequence
  Synthetic oligonucleotide
ctccactctgcacacacagccggggcatgt

SEQ ID NO: 503176 - DNA, 30 bp, Artificial Sequence
  Synthetic oligonucleotide
tttggaggagacgcccctagccgtgcatgt

SEQ ID NO: 503177 - DNA, 30 bp, Artificial Sequence
  Synthetic oligonucleotide
ctcccggtttttaagtaaatcaactcatgt

SEQ ID NO: 503178 - DNA, 30 bp, Artificial Sequence
  Synthetic oligonucleotide
tacttgacgttccgacggggacactcatgt

SEQ ID NO: 503179 - DNA, 30 bp, Artificial Sequence
  Synthetic oligonucleotide
aagggtctatcttttgatgtgcactcatgt

SEQ ID NO: 503180 - DNA, 30 bp, Artificial Sequence
  Synthetic oligonucleotide
caattactttcagtagcgtagtgctcatgt

SEQ ID NO: 503181 - DNA, 30 bp, Artificial Sequence
  Synthetic oligonucleotide
cgtctcaaggtcttttaatcgatctcatgt

SEQ ID NO: 503182 - DNA, 30 bp, Artificial Sequence
  Synthetic oligonucleotide
gccttaaggagggtcggcttaatgtcatgt

SEQ ID NO: 503183 - DNA, 30 bp, Artificial Sequence
  Synthetic oligonucleotide
tatgggttaatccagtggcggatgtcatgt

SEQ ID NO: 503184 - DNA, 30 bp, Artificial Sequence
  Synthetic oligonucleotide
gatccaaacttaaagttagaggcttcatgt

SEQ ID NO: 503185 - DNA, 30 bp, Artificial Sequence
  Synthetic oligonucleotide
ctcttaaccgttgcggcatacatttcatgt

SEQ ID NO: 503186 - DNA, 30 bp, Artificial Sequence
  Synthetic oligonucleotide
accgcagcggtttaggtctgagtttcatgt

SEQ ID NO: 503187 - DNA, 30 bp, Artificial Sequence
  Synthetic oligonucleotide
tataagattcgtccggagtgtgtttcatgt

SEQ ID NO: 503188 - DNA, 30 bp, Artificial Sequence
  Synthetic oligonucleotide
gagggcgcttacgcggatctacaaagatgt

SEQ ID NO: 503189 - DNA, 30 bp, Artificial Sequence
  Synthetic oligonucleotide
ggagtgcgatcaaccttttttgatagatgt

SEQ ID NO: 503190 - DNA, 30 bp, Artificial Sequence
  Synthetic oligonucleotide
aatccactcaactttcccagacctagatgt

SEQ ID NO: 503191 - DNA, 30 bp, Artificial Sequence
  Synthetic oligonucleotide
cgtcattcaggtatcctccttagtagatgt

SEQ ID NO: 503192 - DNA, 30 bp, Artificial Sequence
  Synthetic oligonucleotide
tcacagatttcagtatcatggattagatgt

SEQ ID NO: 503193 - DNA, 30 bp, Artificial Sequence
  Synthetic oligonucleotide
cttatatgacagaacgcgcccaaccgatgt

SEQ ID NO: 503194 - DNA, 31 bp, Artificial Sequence
  Synthetic oligonucleotide
atcaacgtaccgtggcatcacgctccgatgt

SEQ ID NO: 503195 - DNA, 30 bp, Artificial Sequence
  Synthetic oligonucleotide
ttcacaaccgggatgtgacgcattcgatgt

SEQ ID NO: 503196 - DNA, 30 bp, Artificial Sequence
  Synthetic oligonucleotide
gaataccggcgcatggagaattttcgatgt

SEQ ID NO: 503197 - DNA, 30 bp, Artificial Sequence
  Synthetic oligonucleotide
gtacttgctaacatgacgtagtaaggatgt

SEQ ID NO: 503198 - DNA, 30 bp, Artificial Sequence
  Synthetic oligonucleotide
tatgtatgaccggcaaaaaaatcaggatgt

SEQ ID NO: 503199 - DNA, 30 bp, Artificial Sequence
  Synthetic oligonucleotide
agatggtccggatgattatgaatcggatgt

SEQ ID NO: 503200 - DNA, 30 bp, Artificial Sequence
  Synthetic oligonucleotide
gttttctgcggacggcgtcgcatcggatgt

SEQ ID NO: 503201 - DNA, 30 bp, Artificial Sequence
  Synthetic oligonucleotide
tttcttccccactctactggccatggatgt

SEQ ID NO: 503202 - DNA, 30 bp, Artificial Sequence
  Synthetic oligonucleotide
ggttgggccgtagcccgccggtttggatgt

SEQ ID NO: 503203 - DNA, 30 bp, Artificial Sequence
  Synthetic oligonucleotide
gaaaaatttggacttgtcgtgccatgatgt

SEQ ID NO: 503204 - DNA, 30 bp, Artificial Sequence
  Synthetic oligonucleotide
tatggtagttcgttcccggcactatgatgt

SEQ ID NO: 503205 - DNA, 30 bp, Artificial Sequence
  Synthetic oligonucleotide
tgcgcttggtagaggccgtcgggctgatgt

SEQ ID NO: 503206 - DNA, 30 bp, Artificial Sequence
  Synthetic oligonucleotide
cctggtgtttaattttaccatacttgatgt

SEQ ID NO: 503207 - DNA, 30 bp, Artificial Sequence
  Synthetic oligonucleotide
gcaacctacgtagcgaactaattttgatgt

SEQ ID NO: 503208 - DNA, 30 bp, Artificial Sequence
  Synthetic oligonucleotide
gaatcctcggagcgcaccaaaaaaatatgt

SEQ ID NO: 503209 - DNA, 30 bp, Artificial Sequence
  Synthetic oligonucleotide
caatttcctgtaataggtacgggaatatgt

SEQ ID NO: 503210 - DNA, 30 bp, Artificial Sequence
  Synthetic oligonucleotide
gacggagccatattcgctgatgtaatatgt

SEQ ID NO: 503211 - DNA, 30 bp, Artificial Sequence
  Synthetic oligonucleotide
ttgtattcgacgagccaatctgtcatatgt

SEQ ID NO: 503212 - DNA, 30 bp, Artificial Sequence
  Synthetic oligonucleotide
cacagtcaaccgggccctcgcttcatatgt

SEQ ID NO: 503213 - DNA, 30 bp, Artificial Sequence
  Synthetic oligonucleotide
ggattcacacacgcctgcaagtagatatgt

SEQ ID NO: 503214 - DNA, 30 bp, Artificial Sequence
  Synthetic oligonucleotide
gagtgcggattctaagttgctgcgatatgt

SEQ ID NO: 503215 - DNA, 30 bp, Artificial Sequence
  Synthetic oligonucleotide
tatgtaaacaatttacgggaggtgatatgt

SEQ ID NO: 503216 - DNA, 30 bp, Artificial Sequence
  Synthetic oligonucleotide
atactatcaagattacttatggttatatgt

SEQ ID NO: 503217 - DNA, 30 bp, Artificial Sequence
  Synthetic oligonucleotide
cagcccttcgaataggtacgctttatatgt

SEQ ID NO: 503218 - DNA, 30 bp, Artificial Sequence
  Synthetic oligonucleotide
cccgaagttttagattcgctaagcctatgt

SEQ ID NO: 503219 - DNA, 30 bp, Artificial Sequence
  Synthetic oligonucleotide
caaaaacaggcttgattgcgcagcctatgt

SEQ ID NO: 503220 - DNA, 30 bp, Artificial Sequence
  Synthetic oligonucleotide
atgaaatcttgaataatagaattcctatgt

SEQ ID NO: 503221 - DNA, 30 bp, Artificial Sequence
  Synthetic oligonucleotide
cctattcgtggtgttacggtgcggctatgt

SEQ ID NO: 503222 - DNA, 30 bp, Artificial Sequence
  Synthetic oligonucleotide
aaactcgatgcgttatctctccatctatgt

SEQ ID NO: 503223 - DNA, 30 bp, Artificial Sequence
  Synthetic oligonucleotide
ctgcaaacgcggggacgcagagaagtatgt

SEQ ID NO: 503224 - DNA, 30 bp, Artificial Sequence
  Synthetic oligonucleotide
ctccagctgaggtaatacgtctcagtatgt

SEQ ID NO: 503225 - DNA, 30 bp, Artificial Sequence
  Synthetic oligonucleotide
ggagccccataggatatacctaacgtatgt

SEQ ID NO: 503226 - DNA, 30 bp, Artificial Sequence
  Synthetic oligonucleotide
ctatctgagcggtaccaaaagctcgtatgt

SEQ ID NO: 503227 - DNA, 30 bp, Artificial Sequence
  Synthetic oligonucleotide
tggatagcgcgttcctctgtctcggtatgt

SEQ ID NO: 503228 - DNA, 30 bp, Artificial Sequence
  Synthetic oligonucleotide
aaccacgatatttagtataagtcggtatgt

SEQ ID NO: 503229 - DNA, 30 bp, Artificial Sequence
  Synthetic oligonucleotide
cagaactatatatgggctgttctggtatgt

SEQ ID NO: 503230 - DNA, 30 bp, Artificial Sequence
  Synthetic oligonucleotide
cccttaatttatgagcgatcaattgtatgt

SEQ ID NO: 503231 - DNA, 30 bp, Artificial Sequence
  Synthetic oligonucleotide
ctcagggggaaagttgcctgttttgtatgt

SEQ ID NO: 503232 - DNA, 30 bp, Artificial Sequence
  Synthetic oligonucleotide
tttcgggttaccatcgcatcgaacttatgt

SEQ ID NO: 503233 - DNA, 30 bp, Artificial Sequence
  Synthetic oligonucleotide
aaattgttacgatcatcgtcagcgttatgt

SEQ ID NO: 503234 - DNA, 30 bp, Artificial Sequence
  Synthetic oligonucleotide
acatgttggcttattcattagaatttatgt

SEQ ID NO: 503235 - DNA, 26 bp, Artificial Sequence
  Synthetic oligonucleotide
taatcctttcccttagatgtttatgt

SEQ ID NO: 503236 - DNA, 30 bp, Artificial Sequence
  Synthetic oligonucleotide
gaaatattgacgtttaggagtcttttatgt

SEQ ID NO: 503237 - DNA, 30 bp, Artificial Sequence
  Synthetic oligonucleotide
gctagcacagaagcgaacggctttttatgt

SEQ ID NO: 503238 - DNA, 30 bp, Artificial Sequence
  Synthetic oligonucleotide
gcttgcggggtgccttaaggcaggaactgt

SEQ ID NO: 503239 - DNA, 30 bp, Artificial Sequence
  Synthetic oligonucleotide
aacggtccttaaaccgatgtgttgaactgt

SEQ ID NO: 503240 - DNA, 30 bp, Artificial Sequence
  Synthetic oligonucleotide
tactgcgtagtcgcacgacacagtaactgt

SEQ ID NO: 503241 - DNA, 30 bp, Artificial Sequence
  Synthetic oligonucleotide
caggtttaatgtcaagtatttattaactgt

SEQ ID NO: 503242 - DNA, 30 bp, Artificial Sequence
  Synthetic oligonucleotide
ggtaagttaaagcacgtagctacacactgt

SEQ ID NO: 503243 - DNA, 30 bp, Artificial Sequence
  Synthetic oligonucleotide
tcgatctgagcgaatacttgtctacactgt

SEQ ID NO: 503244 - DNA, 30 bp, Artificial Sequence
  Synthetic oligonucleotide
gggcccctgggcgttatatatagccactgt

SEQ ID NO: 503245 - DNA, 30 bp, Artificial Sequence
  Synthetic oligonucleotide
tcaggcctacaagcagggatctgccactgt

SEQ ID NO: 503246 - DNA, 30 bp, Artificial Sequence
  Synthetic oligonucleotide
actcttccgggacgcgaaaaagcgcactgt

SEQ ID NO: 503247 - DNA, 30 bp, Artificial Sequence
  Synthetic oligonucleotide
ggcgttaaggcagggtacctcaggcactgt

SEQ ID NO: 503248 - DNA, 30 bp, Artificial Sequence
  Synthetic oligonucleotide
gataaaaaccctcaatcgaacgggcactgt

SEQ ID NO: 503249 - DNA, 30 bp, Artificial Sequence
  Synthetic oligonucleotide
gtaatcaacatagagtcttagagagactgt

SEQ ID NO: 503250 - DNA, 30 bp, Artificial Sequence
  Synthetic oligonucleotide
gttatctgccggaaatgtgcacacgactgt

SEQ ID NO: 503251 - DNA, 30 bp, Artificial Sequence
  Synthetic oligonucleotide
tctcatgttacatctgccagggcggactgt

SEQ ID NO: 503252 - DNA, 30 bp, Artificial Sequence
  Synthetic oligonucleotide
tcaagttcataccaagtgtctaatgactgt

SEQ ID NO: 503253 - DNA, 30 bp, Artificial Sequence
  Synthetic oligonucleotide
aaatcgatgaagttgcagtctcttgactgt

SEQ ID NO: 503254 - DNA, 30 bp, Artificial Sequence
  Synthetic oligonucleotide
tgggagttaagtacccttagatgaacctgt

SEQ ID NO: 503255 - DNA, 30 bp, Artificial Sequence
  Synthetic oligonucleotide
caacggtaaaaatttgggcttttcacctgt

SEQ ID NO: 503256 - DNA, 30 bp, Artificial Sequence
  Synthetic oligonucleotide
atgttaatcgaagcgaaacttaagacctgt

SEQ ID NO: 503257 - DNA, 30 bp, Artificial Sequence
  Synthetic oligonucleotide
agtaggtcctcaccccctggagagacctgt

SEQ ID NO: 503258 - DNA, 30 bp, Artificial Sequence
  Synthetic oligonucleotide
ataagttggacgtgagaacatgctacctgt

SEQ ID NO: 503259 - DNA, 30 bp, Artificial Sequence
  Synthetic oligonucleotide
caaaagtttattatagcaattaaaccctgt

SEQ ID NO: 503260 - DNA, 30 bp, Artificial Sequence
  Synthetic oligonucleotide
gcaacaaagtcatactatgcatcaccctgt

SEQ ID NO: 503261 - DNA, 30 bp, Artificial Sequence
  Synthetic oligonucleotide
agccagacacagatgcctgtcttaccctgt

SEQ ID NO: 503262 - DNA, 30 bp, Artificial Sequence
  Synthetic oligonucleotide
atatgcgtgatgtacaccactacgccctgt

SEQ ID NO: 503263 - DNA, 30 bp, Artificial Sequence
  Synthetic oligonucleotide
tgctattcgcgcaacccatatatgccctgt

SEQ ID NO: 503264 - DNA, 30 bp, Artificial Sequence
  Synthetic oligonucleotide
cgaagtaatcgcactgagctataagcctgt

SEQ ID NO: 503265 - DNA, 30 bp, Artificial Sequence
  Synthetic oligonucleotide
cgctacttatagatttggattacagcctgt

SEQ ID NO: 503266 - DNA, 30 bp, Artificial Sequence
  Synthetic oligonucleotide
atgaacatagtagagacactgttggcctgt

SEQ ID NO: 503267 - DNA, 30 bp, Artificial Sequence
  Synthetic oligonucleotide
ttcacttcgcacctggaggacagtgcctgt

SEQ ID NO: 503268 - DNA, 30 bp, Artificial Sequence
  Synthetic oligonucleotide
ttacacattatacgttaggcccagtcctgt

SEQ ID NO: 503269 - DNA, 30 bp, Artificial Sequence
  Synthetic oligonucleotide
aatatccgacgcgggtggaactattcctgt

SEQ ID NO: 503270 - DNA, 30 bp, Artificial Sequence
  Synthetic oligonucleotide
gtatttacgtgatccaggtacggttcctgt

SEQ ID NO: 503271 - DNA, 30 bp, Artificial Sequence
  Synthetic oligonucleotide
tatgatgttcacgcatcgatgctttcctgt

SEQ ID NO: 503272 - DNA, 30 bp, Artificial Sequence
  Synthetic oligonucleotide
tgcacctgataacagaattttctgagctgt

SEQ ID NO: 503273 - DNA, 30 bp, Artificial Sequence
  Synthetic oligonucleotide
gccagactaccatacctgagaacacgctgt

SEQ ID NO: 503274 - DNA, 30 bp, Artificial Sequence
  Synthetic oligonucleotide
ctatgtcaagtttcctgctggagacgctgt

SEQ ID NO: 503275 - DNA, 30 bp, Artificial Sequence
  Synthetic oligonucleotide
tctctttcgcaatttcactatatacgctgt

SEQ ID NO: 503276 - DNA, 30 bp, Artificial Sequence
  Synthetic oligonucleotide
ctctggatcagtcccgattctaaccgctgt

SEQ ID NO: 503277 - DNA, 30 bp, Artificial Sequence
  Synthetic oligonucleotide
agagactcctacgcaggtactttccgctgt

SEQ ID NO: 503278 - DNA, 30 bp, Artificial Sequence
  Synthetic oligonucleotide
gtctgccggcccgcgcatgattgtcgctgt

SEQ ID NO: 503279 - DNA, 30 bp, Artificial Sequence
  Synthetic oligonucleotide
aacctgcacctccttgcttacttaggctgt

SEQ ID NO: 503280 - DNA, 30 bp, Artificial Sequence
  Synthetic oligonucleotide
gctctatccggtgagttgtaaaaatgctgt

SEQ ID NO: 503281 - DNA, 30 bp, Artificial Sequence
  Synthetic oligonucleotide
ttcctcgttactagaatgcagacatgctgt

SEQ ID NO: 503282 - DNA, 30 bp, Artificial Sequence
  Synthetic oligonucleotide
aagaccacttcggaacatcatctatgctgt

SEQ ID NO: 503283 - DNA, 30 bp, Artificial Sequence
  Synthetic oligonucleotide
gattgttatcatgagggggccatctgctgt

SEQ ID NO: 503284 - DNA, 30 bp, Artificial Sequence
  Synthetic oligonucleotide
tttacaatcccatggccattgctctgctgt

SEQ ID NO: 503285 - DNA, 30 bp, Artificial Sequence
  Synthetic oligonucleotide
gttagtatctgtgacccaggtagcatctgt

SEQ ID NO: 503286 - DNA, 30 bp, Artificial Sequence
  Synthetic oligonucleotide
agctatggcctagaccaaacggcgatctgt

SEQ ID NO: 503287 - DNA, 30 bp, Artificial Sequence
  Synthetic oligonucleotide
tctggtaagatgacgctcagacaactctgt

SEQ ID NO: 503288 - DNA, 30 bp, Artificial Sequence
  Synthetic oligonucleotide
gaagtttcatgttgaggcgcgtgactctgt

SEQ ID NO: 503289 - DNA, 30 bp, Artificial Sequence
  Synthetic oligonucleotide
atcctttcggtttgacgatcacagctctgt

SEQ ID NO: 503290 - DNA, 30 bp, Artificial Sequence
  Synthetic oligonucleotide
agaagttgctgtttttggtagcgtctctgt

SEQ ID NO: 503291 - DNA, 30 bp, Artificial Sequence
  Synthetic oligonucleotide
atcacgatatcttgttgatcttaagtctgt

SEQ ID NO: 503292 - DNA, 30 bp, Artificial Sequence
  Synthetic oligonucleotide
gcctcctatcagcatcggggtgcagtctgt

SEQ ID NO: 503293 - DNA, 30 bp, Artificial Sequence
  Synthetic oligonucleotide
tccccttaccagccacccttgctagtctgt

SEQ ID NO: 503294 - DNA, 30 bp, Artificial Sequence
  Synthetic oligonucleotide
aatccgctcaccagtaaaatcactgtctgt

SEQ ID NO: 503295 - DNA, 30 bp, Artificial Sequence
  Synthetic oligonucleotide
aacgcctctgataggctaacacgtgtctgt

SEQ ID NO: 503296 - DNA, 30 bp, Artificial Sequence
  Synthetic oligonucleotide
gcgtttcccacacattaccctcggttctgt

SEQ ID NO: 503297 - DNA, 30 bp, Artificial Sequence
  Synthetic oligonucleotide
aaccgactttctattatgtcgaaaaagtgt

SEQ ID NO: 503298 - DNA, 30 bp, Artificial Sequence
  Synthetic oligonucleotide
aaatagcataaatctattttaataaagtgt

SEQ ID NO: 503299 - DNA, 30 bp, Artificial Sequence
  Synthetic oligonucleotide
aaatgtccaaatactcataatccccagtgt

SEQ ID NO: 503300 - DNA, 30 bp, Artificial Sequence
  Synthetic oligonucleotide
gcccgtccagtttggaatatatgccagtgt

SEQ ID NO: 503301 - DNA, 30 bp, Artificial Sequence
  Synthetic oligonucleotide
cgtcagcaaggctcgctcctttctcagtgt

SEQ ID NO: 503302 - DNA, 30 bp, Artificial Sequence
  Synthetic oligonucleotide
ctcttccttcattcagctctaattcagtgt

SEQ ID NO: 503303 - DNA, 30 bp, Artificial Sequence
  Synthetic oligonucleotide
acactttagttaagcaggtccgttcagtgt

SEQ ID NO: 503304 - DNA, 30 bp, Artificial Sequence
  Synthetic oligonucleotide
cgaagagatgggcgtgaccagtttcagtgt

SEQ ID NO: 503305 - DNA, 30 bp, Artificial Sequence
  Synthetic oligonucleotide
ttctaatacgcccggccttcgaccgagtgt

SEQ ID NO: 503306 - DNA, 30 bp, Artificial Sequence
  Synthetic oligonucleotide
ccgcagcagtacggtacacgggtcgagtgt

SEQ ID NO: 503307 - DNA, 30 bp, Artificial Sequence
  Synthetic oligonucleotide
gaggctcctttcagtcaagtgactgagtgt

SEQ ID NO: 503308 - DNA, 30 bp, Artificial Sequence
  Synthetic oligonucleotide
ggcggcgcgcggacaatgtcgcgtgagtgt

SEQ ID NO: 503309 - DNA, 30 bp, Artificial Sequence
  Synthetic oligonucleotide
gtgtcgttcgtgcctgttcgggttgagtgt

SEQ ID NO: 503310 - DNA, 30 bp, Artificial Sequence
  Synthetic oligonucleotide
tatggaacactagtatcatacggctagtgt

SEQ ID NO: 503311 - DNA, 30 bp, Artificial Sequence
  Synthetic oligonucleotide
caaagtatgaaactctgcttgggctagtgt

SEQ ID NO: 503312 - DNA, 30 bp, Artificial Sequence
  Synthetic oligonucleotide
tggagggcttatttataaacccggtagtgt

SEQ ID NO: 503313 - DNA, 30 bp, Artificial Sequence
  Synthetic oligonucleotide
gaaatcccctaaaaggtaagacattagtgt

SEQ ID NO: 503314 - DNA, 30 bp, Artificial Sequence
  Synthetic oligonucleotide
gtggatgaccatctatgaacctattagtgt

SEQ ID NO: 503315 - DNA, 30 bp, Artificial Sequence
  Synthetic oligonucleotide
acctaggatttgtaaccgggaacttagtgt

SEQ ID NO: 503316 - DNA, 30 bp, Artificial Sequence
  Synthetic oligonucleotide
cctgttgcagttaggaagcaaccttagtgt

SEQ ID NO: 503317 - DNA, 30 bp, Artificial Sequence
  Synthetic oligonucleotide
ttggcgacggaagagatgatgaaaacgtgt

SEQ ID NO: 503318 - DNA, 30 bp, Artificial Sequence
  Synthetic oligonucleotide
tgtctaataatgcagtatacgcaaacgtgt

SEQ ID NO: 503319 - DNA, 31 bp, Artificial Sequence
  Synthetic oligonucleotide
ttgttatgacacagaacaaaggtcaacgtgt

SEQ ID NO: 503320 - DNA, 30 bp, Artificial Sequence
  Synthetic oligonucleotide
ttcaactcaggaccggctcttacgacgtgt

SEQ ID NO: 503321 - DNA, 30 bp, Artificial Sequence
  Synthetic oligonucleotide
gctacccaaattgcggtcatggggacgtgt

SEQ ID NO: 503322 - DNA, 30 bp, Artificial Sequence
  Synthetic oligonucleotide
caaaattcatgcgcgcctgttacaccgtgt

SEQ ID NO: 503323 - DNA, 30 bp, Artificial Sequence
  Synthetic oligonucleotide
cacaagcttgcaacccttcgttcaccgtgt

SEQ ID NO: 503324 - DNA, 30 bp, Artificial Sequence
  Synthetic oligonucleotide
acccggatgtgttagctgccagtaccgtgt

SEQ ID NO: 503325 - DNA, 30 bp, Artificial Sequence
  Synthetic oligonucleotide
cgtcataatttgccgcaactagccccgtgt

SEQ ID NO: 503326 - DNA, 30 bp, Artificial Sequence
  Synthetic oligonucleotide
gaggacgggaagatttagccaagtccgtgt

SEQ ID NO: 503327 - DNA, 30 bp, Artificial Sequence
  Synthetic oligonucleotide
acccggcggacacgtcactgttgagcgtgt

SEQ ID NO: 503328 - DNA, 30 bp, Artificial Sequence
  Synthetic oligonucleotide
aaacctttcatcatatacattgaggcgtgt

SEQ ID NO: 503329 - DNA, 30 bp, Artificial Sequence
  Synthetic oligonucleotide
aattaccgccgtcatgtatttgaggcgtgt

SEQ ID NO: 503330 - DNA, 30 bp, Artificial Sequence
  Synthetic oligonucleotide
ccgaggttttggatcttcgatccggcgtgt

SEQ ID NO: 503331 - DNA, 30 bp, Artificial Sequence
  Synthetic oligonucleotide
ggagcccgatagcatcgtaagggggcgtgt

SEQ ID NO: 503332 - DNA, 30 bp, Artificial Sequence
  Synthetic oligonucleotide
attccaacgtaatatccgtttatatcgtgt

SEQ ID NO: 503333 - DNA, 30 bp, Artificial Sequence
  Synthetic oligonucleotide
ttttcataagcttccccccgcccgtcgtgt

SEQ ID NO: 503334 - DNA, 30 bp, Artificial Sequence
  Synthetic oligonucleotide
cagggtgaccttactcccctatattcgtgt

SEQ ID NO: 503335 - DNA, 30 bp, Artificial Sequence
  Synthetic oligonucleotide
tatccgcaatgcccctttggtatttcgtgt

SEQ ID NO: 503336 - DNA, 30 bp, Artificial Sequence
  Synthetic oligonucleotide
accacttaacgcagtaactaactttcgtgt

SEQ ID NO: 503337 - DNA, 30 bp, Artificial Sequence
  Synthetic oligonucleotide
cccgccgggggttcgtagacctcaaggtgt

SEQ ID NO: 503338 - DNA, 30 bp, Artificial Sequence
  Synthetic oligonucleotide
tgttcgcgggagttcgacctactaaggtgt

SEQ ID NO: 503339 - DNA, 30 bp, Artificial Sequence
  Synthetic oligonucleotide
ctttaatgtaggttagggagcactaggtgt

SEQ ID NO: 503340 - DNA, 30 bp, Artificial Sequence
  Synthetic oligonucleotide
attttattcgttaccgacttagaacggtgt

SEQ ID NO: 503341 - DNA, 30 bp, Artificial Sequence
  Synthetic oligonucleotide
aactcaacagctagcgtgagtctacggtgt

SEQ ID NO: 503342 - DNA, 30 bp, Artificial Sequence
  Synthetic oligonucleotide
agtctctgtgcatggtgtgatcagcggtgt

SEQ ID NO: 503343 - DNA, 30 bp, Artificial Sequence
  Synthetic oligonucleotide
gcagctgcatatcacatgtctctgcggtgt

SEQ ID NO: 503344 - DNA, 30 bp, Artificial Sequence
  Synthetic oligonucleotide
cagcagcacaagtaagccggtgaagggtgt

SEQ ID NO: 503345 - DNA, 30 bp, Artificial Sequence
  Synthetic oligonucleotide
gcaccgactttatacataggcagagggtgt

SEQ ID NO: 503346 - DNA, 30 bp, Artificial Sequence
  Synthetic oligonucleotide
gaacactatgaattttttgcggtagggtgt

SEQ ID NO: 503347 - DNA, 30 bp, Artificial Sequence
  Synthetic oligonucleotide
gtgcacacatgggcatagataggcgggtgt

SEQ ID NO: 503348 - DNA, 30 bp, Artificial Sequence
  Synthetic oligonucleotide
tggcagttctgctggtactaatgcgggtgt

SEQ ID NO: 503349 - DNA, 30 bp, Artificial Sequence
  Synthetic oligonucleotide
taacagtgtggaaactttccatcggggtgt

SEQ ID NO: 503350 - DNA, 30 bp, Artificial Sequence
  Synthetic oligonucleotide
gaaaataatacgttttcgtgttcggggtgt

SEQ ID NO: 503351 - DNA, 30 bp, Artificial Sequence
  Synthetic oligonucleotide
gggcctcaactcttctacgtcagggggtgt

SEQ ID NO: 503352 - DNA, 30 bp, Artificial Sequence
  Synthetic oligonucleotide
gtaatatcccactgcgtgccttgggggtgt

SEQ ID NO: 503353 - DNA, 30 bp, Artificial Sequence
  Synthetic oligonucleotide
ctcctggactcgagcttatagactgggtgt

SEQ ID NO: 503354 - DNA, 30 bp, Artificial Sequence
  Synthetic oligonucleotide
acaatttgagaagcgagaacaattgggtgt

SEQ ID NO: 503355 - DNA, 30 bp, Artificial Sequence
  Synthetic oligonucleotide
atgtccatgttttgaataataattgggtgt

SEQ ID NO: 503356 - DNA, 30 bp, Artificial Sequence
  Synthetic oligonucleotide
actttatagtgccagtttggcatctggtgt

SEQ ID NO: 503357 - DNA, 30 bp, Artificial Sequence
  Synthetic oligonucleotide
gaacactccactgatccaaggaagtggtgt

SEQ ID NO: 503358 - DNA, 30 bp, Artificial Sequence
  Synthetic oligonucleotide
ctttatgacagcaacccgttattaatgtgt

SEQ ID NO: 503359 - DNA, 30 bp, Artificial Sequence
  Synthetic oligonucleotide
gcaaccttggtccaccccaagccgatgtgt

SEQ ID NO: 503360 - DNA, 30 bp, Artificial Sequence
  Synthetic oligonucleotide
gttaaacagcggacgcaagcatcgatgtgt

SEQ ID NO: 503361 - DNA, 29 bp, Artificial Sequence
  Synthetic oligonucleotide
gccgtgcatgtgttcacctgctgatgtgt

SEQ ID NO: 503362 - DNA, 30 bp, Artificial Sequence
  Synthetic oligonucleotide
ggggtcctccacaaattgcaccctatgtgt

SEQ ID NO: 503363 - DNA, 30 bp, Artificial Sequence
  Synthetic oligonucleotide
gcgggtcgctctattaaaccagttatgtgt

SEQ ID NO: 503364 - DNA, 30 bp, Artificial Sequence
  Synthetic oligonucleotide
ctctagtggttaacgctagggaaactgtgt

SEQ ID NO: 503365 - DNA, 30 bp, Artificial Sequence
  Synthetic oligonucleotide
tgcagcacattttaattaattagactgtgt

SEQ ID NO: 503366 - DNA, 30 bp, Artificial Sequence
  Synthetic oligonucleotide
gcgaaaataacgtaactgccaaatctgtgt

SEQ ID NO: 503367 - DNA, 30 bp, Artificial Sequence
  Synthetic oligonucleotide
tttaatctgataccacaaagacctctgtgt

SEQ ID NO: 503368 - DNA, 30 bp, Artificial Sequence
  Synthetic oligonucleotide
ttgctgtaggcgggcctacggcctctgtgt

SEQ ID NO: 503369 - DNA, 30 bp, Artificial Sequence
  Synthetic oligonucleotide
acgtgcatacacaggttaagcactgtgtgt

SEQ ID NO: 503370 - DNA, 30 bp, Artificial Sequence
  Synthetic oligonucleotide
tcttatctgttgtgttttcctcttgtgtgt

SEQ ID NO: 503371 - DNA, 30 bp, Artificial Sequence
  Synthetic oligonucleotide
atattatgtatatgacgctacaaattgtgt

SEQ ID NO: 503372 - DNA, 30 bp, Artificial Sequence
  Synthetic oligonucleotide
cttgttttgcttaacaataggcatttgtgt

SEQ ID NO: 503373 - DNA, 30 bp, Artificial Sequence
  Synthetic oligonucleotide
ctcacccaaacgcgtgcagctcctttgtgt

SEQ ID NO: 503374 - DNA, 30 bp, Artificial Sequence
  Synthetic oligonucleotide
caccctggcggggttatagggtctttgtgt

SEQ ID NO: 503375 - DNA, 30 bp, Artificial Sequence
  Synthetic oligonucleotide
gtagattacagactatatcaaattttgtgt

SEQ ID NO: 503376 - DNA, 30 bp, Artificial Sequence
  Synthetic oligonucleotide
aaaagtgatccagccccatcttttttgtgt

SEQ ID NO: 503377 - DNA, 30 bp, Artificial Sequence
  Synthetic oligonucleotide
aacttaatgacggttgataatgaaaattgt

SEQ ID NO: 503378 - DNA, 30 bp, Artificial Sequence
  Synthetic oligonucleotide
tgcgccgtcaatggccgacctaggaattgt

SEQ ID NO: 503379 - DNA, 30 bp, Artificial Sequence
  Synthetic oligonucleotide
agcatggcctgctgatgtagtctgaattgt

SEQ ID NO: 503380 - DNA, 30 bp, Artificial Sequence
  Synthetic oligonucleotide
ccggaccccggcccgagcctccctaattgt

SEQ ID NO: 503381 - DNA, 30 bp, Artificial Sequence
  Synthetic oligonucleotide
tcgttcccttagcttttgcgtgctaattgt

SEQ ID NO: 503382 - DNA, 30 bp, Artificial Sequence
  Synthetic oligonucleotide
tccctcttagtccgcctgtcggttaattgt

SEQ ID NO: 503383 - DNA, 30 bp, Artificial Sequence
  Synthetic oligonucleotide
ataacgtttggtcgttcgtatgcccattgt

SEQ ID NO: 503384 - DNA, 30 bp, Artificial Sequence
  Synthetic oligonucleotide
ttggttaagctaaggctcacgttccattgt

SEQ ID NO: 503385 - DNA, 30 bp, Artificial Sequence
  Synthetic oligonucleotide
ggggcattacttttgattaatgaagattgt

SEQ ID NO: 503386 - DNA, 30 bp, Artificial Sequence
  Synthetic oligonucleotide
ccaaatattttgagggggaaagtagattgt

SEQ ID NO: 503387 - DNA, 30 bp, Artificial Sequence
  Synthetic oligonucleotide
ctgcgctctactgtcgcccgacacgattgt

SEQ ID NO: 503388 - DNA, 30 bp, Artificial Sequence
  Synthetic oligonucleotide
agaattaacgtcacctacgggggggattgt

SEQ ID NO: 503389 - DNA, 29 bp, Artificial Sequence
  Synthetic oligonucleotide
gagattttgtatccagctcgcggtattgt

SEQ ID NO: 503390 - DNA, 30 bp, Artificial Sequence
  Synthetic oligonucleotide
cagcgcaacaccgggcatcgactgtattgt

SEQ ID NO: 503391 - DNA, 30 bp, Artificial Sequence
  Synthetic oligonucleotide
gagccgttattcttccatgacgtttattgt

SEQ ID NO: 503392 - DNA, 30 bp, Artificial Sequence
  Synthetic oligonucleotide
cttttcatacctctcgggtccacaacttgt

SEQ ID NO: 503393 - DNA, 30 bp, Artificial Sequence
  Synthetic oligonucleotide
ctataaagcaaggcccaaatgataacttgt

SEQ ID NO: 503394 - DNA, 30 bp, Artificial Sequence
  Synthetic oligonucleotide
tcactatatttaacgcgacattagacttgt

SEQ ID NO: 503395 - DNA, 30 bp, Artificial Sequence
  Synthetic oligonucleotide
aagtaatcgcaatcagactccgaaccttgt

SEQ ID NO: 503396 - DNA, 30 bp, Artificial Sequence
  Synthetic oligonucleotide
tttcagtactcatactaatcagcaccttgt

SEQ ID NO: 503397 - DNA, 30 bp, Artificial Sequence
  Synthetic oligonucleotide
gcagcaaagcatcacgaagatgaagcttgt

SEQ ID NO: 503398 - DNA, 30 bp, Artificial Sequence
  Synthetic oligonucleotide
aattcttccacaggaattcgtcaggcttgt

SEQ ID NO: 503399 - DNA, 30 bp, Artificial Sequence
  Synthetic oligonucleotide
ctaggtggcgaaaagatggtctaggcttgt

SEQ ID NO: 503400 - DNA, 30 bp, Artificial Sequence
  Synthetic oligonucleotide
acattcgccgacggaaccttccgggcttgt

SEQ ID NO: 503401 - DNA, 30 bp, Artificial Sequence
  Synthetic oligonucleotide
agtggtccaaagacttaggtctttgcttgt

SEQ ID NO: 503402 - DNA, 30 bp, Artificial Sequence
  Synthetic oligonucleotide
atgagcgttcgacaaactttttcatcttgt

SEQ ID NO: 503403 - DNA, 30 bp, Artificial Sequence
  Synthetic oligonucleotide
cgaagttcccacagaaccatatactcttgt

SEQ ID NO: 503404 - DNA, 30 bp, Artificial Sequence
  Synthetic oligonucleotide
ggtaacgcttcccgtgcgcggccttcttgt

SEQ ID NO: 503405 - DNA, 29 bp, Artificial Sequence
  Synthetic oligonucleotide
agtcgacgatatagcgcagattttcttgt

SEQ ID NO: 503406 - DNA, 30 bp, Artificial Sequence
  Synthetic oligonucleotide
gtatgcagatatttggcacaaccaagttgt

SEQ ID NO: 503407 - DNA, 30 bp, Artificial Sequence
  Synthetic oligonucleotide
ggtcgcagattacgatgatattgaagttgt

SEQ ID NO: 503408 - DNA, 30 bp, Artificial Sequence
  Synthetic oligonucleotide
gctcctatatactgggaatagggcagttgt

SEQ ID NO: 503409 - DNA, 30 bp, Artificial Sequence
  Synthetic oligonucleotide
tctctcaattaaggggaacttttcagttgt

SEQ ID NO: 503410 - DNA, 30 bp, Artificial Sequence
  Synthetic oligonucleotide
tatataaacattgcgggccaacagagttgt

SEQ ID NO: 503411 - DNA, 30 bp, Artificial Sequence
  Synthetic oligonucleotide
tgcttgaaatggactctttgcaatagttgt

SEQ ID NO: 503412 - DNA, 30 bp, Artificial Sequence
  Synthetic oligonucleotide
gccacctagagtggttcacaccatagttgt

SEQ ID NO: 503413 - DNA, 30 bp, Artificial Sequence
  Synthetic oligonucleotide
gacgacgcgtcaaaacgctctagacgttgt

SEQ ID NO: 503414 - DNA, 30 bp, Artificial Sequence
  Synthetic oligonucleotide
taagctatcaacggttgttccccccgttgt

SEQ ID NO: 503415 - DNA, 30 bp, Artificial Sequence
  Synthetic oligonucleotide
ggacccgccagatgcacacactcccgttgt

SEQ ID NO: 503416 - DNA, 30 bp, Artificial Sequence
  Synthetic oligonucleotide
cccccgggagggaaagtccaagggcgttgt

SEQ ID NO: 503417 - DNA, 30 bp, Artificial Sequence
  Synthetic oligonucleotide
taagagcaagtacttacatcaaaaggttgt

SEQ ID NO: 503418 - DNA, 30 bp, Artificial Sequence
  Synthetic oligonucleotide
aaagcaattatagactacactgggtgttgt

SEQ ID NO: 503419 - DNA, 30 bp, Artificial Sequence
  Synthetic oligonucleotide
gcctaccttagcatgacgggtgggtgttgt

SEQ ID NO: 503420 - DNA, 30 bp, Artificial Sequence
  Synthetic oligonucleotide
acaaccaatgggtacggctgacgcatttgt

SEQ ID NO: 503421 - DNA, 30 bp, Artificial Sequence
  Synthetic oligonucleotide
ctcgaccacgcactggtatggcgcctttgt

SEQ ID NO: 503422 - DNA, 30 bp, Artificial Sequence
  Synthetic oligonucleotide
ccgtataagtagctcggccagctcctttgt

SEQ ID NO: 503423 - DNA, 30 bp, Artificial Sequence
  Synthetic oligonucleotide
gtaacaagtacacgcattaggtggctttgt

SEQ ID NO: 503424 - DNA, 30 bp, Artificial Sequence
  Synthetic oligonucleotide
aatattgacacagtcgaacatatgctttgt

SEQ ID NO: 503425 - DNA, 30 bp, Artificial Sequence
  Synthetic oligonucleotide
ttctttaccggtctagccgagaatctttgt

SEQ ID NO: 503426 - DNA, 30 bp, Artificial Sequence
  Synthetic oligonucleotide
tcctatccatcattattcctgagtctttgt

SEQ ID NO: 503427 - DNA, 30 bp, Artificial Sequence
  Synthetic oligonucleotide
atcgtgggattttaagctgaggttctttgt

SEQ ID NO: 503428 - DNA, 30 bp, Artificial Sequence
  Synthetic oligonucleotide
gctttatttcacgactattgtagcgtttgt

SEQ ID NO: 503429 - DNA, 30 bp, Artificial Sequence
  Synthetic oligonucleotide
gccatagcccacagctttatcgtcgtttgt

SEQ ID NO: 503430 - DNA, 30 bp, Artificial Sequence
  Synthetic oligonucleotide
ggccattaggataccgcacccctggtttgt

SEQ ID NO: 503431 - DNA, 30 bp, Artificial Sequence
  Synthetic oligonucleotide
atcaagagtttcgatcttatatctgtttgt

SEQ ID NO: 503432 - DNA, 30 bp, Artificial Sequence
  Synthetic oligonucleotide
gattagtgacggtcttgcaagggtgtttgt

SEQ ID NO: 503433 - DNA, 30 bp, Artificial Sequence
  Synthetic oligonucleotide
tcgaatgatagcgaacccgcgtttgtttgt

SEQ ID NO: 503434 - DNA, 30 bp, Artificial Sequence
  Synthetic oligonucleotide
aattgatggtgcgcggttaggaaattttgt

SEQ ID NO: 503435 - DNA, 30 bp, Artificial Sequence
  Synthetic oligonucleotide
ctttggcggttgtgatattatccattttgt

SEQ ID NO: 503436 - DNA, 30 bp, Artificial Sequence
  Synthetic oligonucleotide
ctttccatttatactgatgttgcattttgt

SEQ ID NO: 503437 - DNA, 30 bp, Artificial Sequence
  Synthetic oligonucleotide
tgtgatggccacgataaattgtcattttgt

SEQ ID NO: 503438 - DNA, 30 bp, Artificial Sequence
  Synthetic oligonucleotide
ttgggccttaaactagtggagatattttgt

SEQ ID NO: 503439 - DNA, 30 bp, Artificial Sequence
  Synthetic oligonucleotide
ccctcacctcaagcgcgcagacacttttgt

SEQ ID NO: 503440 - DNA, 30 bp, Artificial Sequence
  Synthetic oligonucleotide
gccctattcccgcgctttctccccttttgt

SEQ ID NO: 503441 - DNA, 30 bp, Artificial Sequence
  Synthetic oligonucleotide
catgatatggtacgcaggaggagcttttgt

SEQ ID NO: 503442 - DNA, 30 bp, Artificial Sequence
  Synthetic oligonucleotide
cgcctgacagaactatcgtatagcttttgt

SEQ ID NO: 503443 - DNA, 30 bp, Artificial Sequence
  Synthetic oligonucleotide
agaattaagaaacgtcacaatggcttttgt

SEQ ID NO: 503444 - DNA, 30 bp, Artificial Sequence
  Synthetic oligonucleotide
agaaatccggataattggatggggttttgt

SEQ ID NO: 503445 - DNA, 30 bp, Artificial Sequence
  Synthetic oligonucleotide
cctggtcgggtgcaaacgctggggttttgt

SEQ ID NO: 503446 - DNA, 30 bp, Artificial Sequence
  Synthetic oligonucleotide
taaagccaacttaaagacccgcatttttgt

SEQ ID NO: 503447 - DNA, 30 bp, Artificial Sequence
  Synthetic oligonucleotide
gattggtttttttatttgctaactttttgt

SEQ ID NO: 503448 - DNA, 30 bp, Artificial Sequence
  Synthetic oligonucleotide
atcgcttttgcggcgttaggttacaaaatt

SEQ ID NO: 503449 - DNA, 30 bp, Artificial Sequence
  Synthetic oligonucleotide
cacgatggcattcagggtcgtagcaaaatt

SEQ ID NO: 503450 - DNA, 30 bp, Artificial Sequence
  Synthetic oligonucleotide
ggagttacgagcagccgctgcgtcaaaatt

SEQ ID NO: 503451 - DNA, 30 bp, Artificial Sequence
  Synthetic oligonucleotide
actcaaacggcgttccagatctagaaaatt

SEQ ID NO: 503452 - DNA, 30 bp, Artificial Sequence
  Synthetic oligonucleotide
gatttacatatcgcggttctaccgaaaatt

SEQ ID NO: 503453 - DNA, 30 bp, Artificial Sequence
  Synthetic oligonucleotide
tacctgcgggcgcaagcaaggttgaaaatt

SEQ ID NO: 503454 - DNA, 30 bp, Artificial Sequence
  Synthetic oligonucleotide
agttgaatttctccggccatagataaaatt

SEQ ID NO: 503455 - DNA, 30 bp, Artificial Sequence
  Synthetic oligonucleotide
aaatcttctaaagcttcctagactaaaatt

SEQ ID NO: 503456 - DNA, 30 bp, Artificial Sequence
  Synthetic oligonucleotide
acattcatgaatgggattaatcctaaaatt

SEQ ID NO: 503457 - DNA, 30 bp, Artificial Sequence
  Synthetic oligonucleotide
ggagcgccctatctctcgcccgcgcaaatt

SEQ ID NO: 503458 - DNA, 30 bp, Artificial Sequence
  Synthetic oligonucleotide
gagatgagcatgcccaaaagcgcgcaaatt

SEQ ID NO: 503459 - DNA, 30 bp, Artificial Sequence
  Synthetic oligonucleotide
tttgctttcctcagtttgcttcggcaaatt

SEQ ID NO: 503460 - DNA, 30 bp, Artificial Sequence
  Synthetic oligonucleotide
tatcgtagttcaggcacccccaatcaaatt

SEQ ID NO: 503461 - DNA, 30 bp, Artificial Sequence
  Synthetic oligonucleotide
aggattcgcaacctcaggcacggtcaaatt

SEQ ID NO: 503462 - DNA, 30 bp, Artificial Sequence
  Synthetic oligonucleotide
attcgccacgaatgaaagcgcgtagaaatt

SEQ ID NO: 503463 - DNA, 30 bp, Artificial Sequence
  Synthetic oligonucleotide
ttactttttatagtcttatttgtagaaatt

SEQ ID NO: 503464 - DNA, 30 bp, Artificial Sequence
  Synthetic oligonucleotide
cacaagtagatctctggccccagcgaaatt

SEQ ID NO: 503465 - DNA, 30 bp, Artificial Sequence
  Synthetic oligonucleotide
ttcacaaatcttgtgggctctcgggaaatt

SEQ ID NO: 503466 - DNA, 30 bp, Artificial Sequence
  Synthetic oligonucleotide
catcactcggctcaataccaaagtgaaatt

SEQ ID NO: 503467 - DNA, 30 bp, Artificial Sequence
  Synthetic oligonucleotide
tagttcgcttttctacttcgatgtgaaatt

SEQ ID NO: 503468 - DNA, 30 bp, Artificial Sequence
  Synthetic oligonucleotide
cagatttcattaccaaagtctcaataaatt

SEQ ID NO: 503469 - DNA, 30 bp, Artificial Sequence
  Synthetic oligonucleotide
gtcctccataatatatctggcgaataaatt

SEQ ID NO: 503470 - DNA, 30 bp, Artificial Sequence
  Synthetic oligonucleotide
gtggaaatatgttgccgtacgtcataaatt

SEQ ID NO: 503471 - DNA, 30 bp, Artificial Sequence
  Synthetic oligonucleotide
tttcttggtgtagccgtggactgataaatt

SEQ ID NO: 503472 - DNA, 30 bp, Artificial Sequence
  Synthetic oligonucleotide
gagttagctgcagagatggggtactaaatt

SEQ ID NO: 503473 - DNA, 30 bp, Artificial Sequence
  Synthetic oligonucleotide
ggttcgtcctggactaccagtagctaaatt

SEQ ID NO: 503474 - DNA, 30 bp, Artificial Sequence
  Synthetic oligonucleotide
ttgtctttcacgtatccgaaccagtaaatt

SEQ ID NO: 503475 - DNA, 30 bp, Artificial Sequence
  Synthetic oligonucleotide
aacacgtggatcattgaaatggcgtaaatt

SEQ ID NO: 503476 - DNA, 30 bp, Artificial Sequence
  Synthetic oligonucleotide
tgctcctcacagtctctgtggaggtaaatt

SEQ ID NO: 503477 - DNA, 30 bp, Artificial Sequence
  Synthetic oligonucleotide
atcggaggtggggataagaggcgttaaatt

SEQ ID NO: 503478 - DNA, 30 bp, Artificial Sequence
  Synthetic oligonucleotide
gattatttgggccggactccgcccacaatt

SEQ ID NO: 503479 - DNA, 30 bp, Artificial Sequence
  Synthetic oligonucleotide
gtacataaaaatcgcgctatctgcacaatt

SEQ ID NO: 503480 - DNA, 30 bp, Artificial Sequence
  Synthetic oligonucleotide
tatagcaactgcaagaaacagaacccaatt

SEQ ID NO: 503481 - DNA, 30 bp, Artificial Sequence
  Synthetic oligonucleotide
gagcaggtacagcagctacctaacccaatt

SEQ ID NO: 503482 - DNA, 30 bp, Artificial Sequence
  Synthetic oligonucleotide
tattctcgagagatttaagatacgccaatt

SEQ ID NO: 503483 - DNA, 30 bp, Artificial Sequence
  Synthetic oligonucleotide
atgcggctgtctaggcttccgtggccaatt

SEQ ID NO: 503484 - DNA, 30 bp, Artificial Sequence
  Synthetic oligonucleotide
gatgttctgtctctaggatcactgccaatt

SEQ ID NO: 503485 - DNA, 30 bp, Artificial Sequence
  Synthetic oligonucleotide
taagccgccagtaacggactcttgccaatt

SEQ ID NO: 503486 - DNA, 30 bp, Artificial Sequence
  Synthetic oligonucleotide
ctatttttgcgtagtttgagggctccaatt

SEQ ID NO: 503487 - DNA, 30 bp, Artificial Sequence
  Synthetic oligonucleotide
caatactcactatgtcatactagagcaatt

SEQ ID NO: 503488 - DNA, 30 bp, Artificial Sequence
  Synthetic oligonucleotide
cttgcccggctttcattgccccacgcaatt

SEQ ID NO: 503489 - DNA, 30 bp, Artificial Sequence
  Synthetic oligonucleotide
tggttgggccgcctgtcccggaccgcaatt

SEQ ID NO: 503490 - DNA, 30 bp, Artificial Sequence
  Synthetic oligonucleotide
acccgattctgcccatggtttttcgcaatt

SEQ ID NO: 503491 - DNA, 30 bp, Artificial Sequence
  Synthetic oligonucleotide
gcatggtggcttaaatggagtgaggcaatt

SEQ ID NO: 503492 - DNA, 30 bp, Artificial Sequence
  Synthetic oligonucleotide
cgtgcccagcattaacagccgcgggcaatt

SEQ ID NO: 503493 - DNA, 30 bp, Artificial Sequence
  Synthetic oligonucleotide
gccataatgctgaactcgggtttggcaatt

SEQ ID NO: 503494 - DNA, 30 bp, Artificial Sequence
  Synthetic oligonucleotide
ctcaagtggcctcgcccaatacgtgcaatt

SEQ ID NO: 503495 - DNA, 30 bp, Artificial Sequence
  Synthetic oligonucleotide
ataatgcctctcaggaacgcattatcaatt

SEQ ID NO: 503496 - DNA, 30 bp, Artificial Sequence
  Synthetic oligonucleotide
gctcgagtacacagtagatgtttatcaatt

SEQ ID NO: 503497 - DNA, 30 bp, Artificial Sequence
  Synthetic oligonucleotide
cctctcaccgattgtagtatactaagaatt

SEQ ID NO: 503498 - DNA, 30 bp, Artificial Sequence
  Synthetic oligonucleotide
cacgttgttcgggggtagaattacagaatt

SEQ ID NO: 503499 - DNA, 30 bp, Artificial Sequence
  Synthetic oligonucleotide
aataatcctggtgtgtcatatagcagaatt

SEQ ID NO: 503500 - DNA, 30 bp, Artificial Sequence
  Synthetic oligonucleotide
aaacttagcttaggttaggcatgcagaatt

SEQ ID NO: 503501 - DNA, 30 bp, Artificial Sequence
  Synthetic oligonucleotide
gttttggcctgggcagcattcacgagaatt

SEQ ID NO: 503502 - DNA, 30 bp, Artificial Sequence
  Synthetic oligonucleotide
cccactcatacaaggtgactacggagaatt

SEQ ID NO: 503503 - DNA, 30 bp, Artificial Sequence
  Synthetic oligonucleotide
atcatcatcggcttgccggaattgagaatt

SEQ ID NO: 503504 - DNA, 30 bp, Artificial Sequence
  Synthetic oligonucleotide
gtgctccaggcggagtagttcggtagaatt

SEQ ID NO: 503505 - DNA, 30 bp, Artificial Sequence
  Synthetic oligonucleotide
tacaacaccatgcaacctagtcttagaatt

SEQ ID NO: 503506 - DNA, 30 bp, Artificial Sequence
  Synthetic oligonucleotide
attattcactaataaaacgacgtacgaatt

SEQ ID NO: 503507 - DNA, 30 bp, Artificial Sequence
  Synthetic oligonucleotide
attgtgaaaatgctggaggaattacgaatt

SEQ ID NO: 503508 - DNA, 30 bp, Artificial Sequence
  Synthetic oligonucleotide
attaataacgttagtgatcccttacgaatt

SEQ ID NO: 503509 - DNA, 30 bp, Artificial Sequence
  Synthetic oligonucleotide
gcgattccgttttgcagcagagaccgaatt

SEQ ID NO: 503510 - DNA, 30 bp, Artificial Sequence
  Synthetic oligonucleotide
aattagcttatgtttgtctataagcgaatt

SEQ ID NO: 503511 - DNA, 30 bp, Artificial Sequence
  Synthetic oligonucleotide
gtgtactccctcccttttacagcgcgaatt

SEQ ID NO: 503512 - DNA, 30 bp, Artificial Sequence
  Synthetic oligonucleotide
gcacttaaatccattcgcttagtgcgaatt

SEQ ID NO: 503513 - DNA, 30 bp, Artificial Sequence
  Synthetic oligonucleotide
caacttcgagtttgcatctggttgcgaatt

SEQ ID NO: 503514 - DNA, 30 bp, Artificial Sequence
  Synthetic oligonucleotide
catcccagttctatgctcgtacttcgaatt

SEQ ID NO: 503515 - DNA, 30 bp, Artificial Sequence
  Synthetic oligonucleotide
ctctcactggactcagaaaacctaggaatt

SEQ ID NO: 503516 - DNA, 30 bp, Artificial Sequence
  Synthetic oligonucleotide
atgacttatgtacaactggtggtaggaatt

SEQ ID NO: 503517 - DNA, 30 bp, Artificial Sequence
  Synthetic oligonucleotide
ttattgacaatggggctgtgctccggaatt

SEQ ID NO: 503518 - DNA, 30 bp, Artificial Sequence
  Synthetic oligonucleotide
gtatgcccgttctaacttgcacgcggaatt

SEQ ID NO: 503519 - DNA, 30 bp, Artificial Sequence
  Synthetic oligonucleotide
gtttatgacatggaagtcaaggggggaatt

SEQ ID NO: 503520 - DNA, 30 bp, Artificial Sequence
  Synthetic oligonucleotide
acctcattgagtatccatgcttggggaatt

SEQ ID NO: 503521 - DNA, 30 bp, Artificial Sequence
  Synthetic oligonucleotide
gagtgttggagcagagaaaatctatgaatt

SEQ ID NO: 503522 - DNA, 30 bp, Artificial Sequence
  Synthetic oligonucleotide
tgtcgttccctatgtgtatcaaactgaatt

SEQ ID NO: 503523 - DNA, 30 bp, Artificial Sequence
  Synthetic oligonucleotide
ggagccctctcagtcatgcgttgctgaatt

SEQ ID NO: 503524 - DNA, 30 bp, Artificial Sequence
  Synthetic oligonucleotide
ctcccttaggattatgcccaatcgtgaatt

SEQ ID NO: 503525 - DNA, 30 bp, Artificial Sequence
  Synthetic oligonucleotide
tattatgtctcacagtcaccggggtgaatt

SEQ ID NO: 503526 - DNA, 30 bp, Artificial Sequence
  Synthetic oligonucleotide
gattccggcaaaacacttggattgtgaatt

SEQ ID NO: 503527 - DNA, 30 bp, Artificial Sequence
  Synthetic oligonucleotide
aaatactttttgcatggtcgggtttgaatt

SEQ ID NO: 503528 - DNA, 30 bp, Artificial Sequence
  Synthetic oligonucleotide
attattcgaggcaagctaacgaaaataatt

SEQ ID NO: 503529 - DNA, 30 bp, Artificial Sequence
  Synthetic oligonucleotide
ccaacatagcgatacgctctagcaataatt

SEQ ID NO: 503530 - DNA, 30 bp, Artificial Sequence
  Synthetic oligonucleotide
atccccgacctagttacaggctcaataatt

SEQ ID NO: 503531 - DNA, 30 bp, Artificial Sequence
  Synthetic oligonucleotide
cagtcacggatactacccacactaataatt

SEQ ID NO: 503532 - DNA, 30 bp, Artificial Sequence
  Synthetic oligonucleotide
tgttcccgaataagcttccataccataatt

SEQ ID NO: 503533 - DNA, 30 bp, Artificial Sequence
  Synthetic oligonucleotide
gaaagatacctatcagcctaggccataatt

SEQ ID NO: 503534 - DNA, 30 bp, Artificial Sequence
  Synthetic oligonucleotide
aacgatctgtatgacaggtctggcataatt

SEQ ID NO: 503535 - DNA, 30 bp, Artificial Sequence
  Synthetic oligonucleotide
cttcttaacttaggtagagtggtcataatt

SEQ ID NO: 503536 - DNA, 30 bp, Artificial Sequence
  Synthetic oligonucleotide
aaactggcttatcaaattatgtatataatt

SEQ ID NO: 503537 - DNA, 30 bp, Artificial Sequence
  Synthetic oligonucleotide
gatttcgtgctagttcgaactattataatt

SEQ ID NO: 503538 - DNA, 30 bp, Artificial Sequence
  Synthetic oligonucleotide
taaatctgatataggttgtcttaactaatt

SEQ ID NO: 503539 - DNA, 30 bp, Artificial Sequence
  Synthetic oligonucleotide
gttggcgcagggtaccttatgggactaatt

SEQ ID NO: 503540 - DNA, 30 bp, Artificial Sequence
  Synthetic oligonucleotide
aagaaggtgcccgtattctgacacctaatt

SEQ ID NO: 503541 - DNA, 30 bp, Artificial Sequence
  Synthetic oligonucleotide
tggggctccttggtgtatgttggcctaatt

SEQ ID NO: 503542 - DNA, 30 bp, Artificial Sequence
  Synthetic oligonucleotide
atgcattacaaagggggcgtaaatctaatt

SEQ ID NO: 503543 - DNA, 30 bp, Artificial Sequence
  Synthetic oligonucleotide
tacagttttcttgtccttctaattctaatt

SEQ ID NO: 503544 - DNA, 30 bp, Artificial Sequence
  Synthetic oligonucleotide
gctccaactttgaccctacggaaagtaatt

SEQ ID NO: 503545 - DNA, 30 bp, Artificial Sequence
  Synthetic oligonucleotide
ttgaaacatgccatcgggttcatagtaatt

SEQ ID NO: 503546 - DNA, 30 bp, Artificial Sequence
  Synthetic oligonucleotide
aaactcagtgttgacacgggagccgtaatt

SEQ ID NO: 503547 - DNA, 30 bp, Artificial Sequence
  Synthetic oligonucleotide
tgaatatagttaacttttgtccgcgtaatt

SEQ ID NO: 503548 - DNA, 30 bp, Artificial Sequence
  Synthetic oligonucleotide
gttcaaatgagctagatagtaatcgtaatt

SEQ ID NO: 503549 - DNA, 30 bp, Artificial Sequence
  Synthetic oligonucleotide
cgtagcaactgtcatactcgggaggtaatt

SEQ ID NO: 503550 - DNA, 30 bp, Artificial Sequence
  Synthetic oligonucleotide
gagtagccgactgttgcgctaaatgtaatt

SEQ ID NO: 503551 - DNA, 30 bp, Artificial Sequence
  Synthetic oligonucleotide
taatattgagaatcttcgacagatgtaatt

SEQ ID NO: 503552 - DNA, 30 bp, Artificial Sequence
  Synthetic oligonucleotide
cagacgctgcaatgcacccgccgtgtaatt

SEQ ID NO: 503553 - DNA, 30 bp, Artificial Sequence
  Synthetic oligonucleotide
gagtgcctttattaagatgacggtgtaatt

SEQ ID NO: 503554 - DNA, 30 bp, Artificial Sequence
  Synthetic oligonucleotide
attagggcatatggttgtccccttgtaatt

SEQ ID NO: 503555 - DNA, 30 bp, Artificial Sequence
  Synthetic oligonucleotide
ccacctcttttgacacgtgcaagattaatt

SEQ ID NO: 503556 - DNA, 30 bp, Artificial Sequence
  Synthetic oligonucleotide
aaccctacagccgttacgccgcatttaatt

SEQ ID NO: 503557 - DNA, 30 bp, Artificial Sequence
  Synthetic oligonucleotide
cttattgcatcataacggagcggtttaatt

SEQ ID NO: 503558 - DNA, 30 bp, Artificial Sequence
  Synthetic oligonucleotide
gtctaagagcactatgcatgttgtttaatt

SEQ ID NO: 503559 - DNA, 30 bp, Artificial Sequence
  Synthetic oligonucleotide
agggtcctttaatacatgaaaattttaatt

SEQ ID NO: 503560 - DNA, 30 bp, Artificial Sequence
  Synthetic oligonucleotide
cgttgatttgagtccgagtcactcaacatt

SEQ ID NO: 503561 - DNA, 30 bp, Artificial Sequence
  Synthetic oligonucleotide
ccctggggactacacagagggttcaacatt

SEQ ID NO: 503562 - DNA, 30 bp, Artificial Sequence
  Synthetic oligonucleotide
attcctttatgtgtatgcccgcctaacatt

SEQ ID NO: 503563 - DNA, 30 bp, Artificial Sequence
  Synthetic oligonucleotide
gcaggttaagatgctgcattaggtaacatt

SEQ ID NO: 503564 - DNA, 30 bp, Artificial Sequence
  Synthetic oligonucleotide
gccgtagctctattagtggtacaacacatt

SEQ ID NO: 503565 - DNA, 30 bp, Artificial Sequence
  Synthetic oligonucleotide
ggacttgtggcactcccgccttaccacatt

SEQ ID NO: 503566 - DNA, 30 bp, Artificial Sequence
  Synthetic oligonucleotide
gtaacatttgctctgtaatctatccacatt

SEQ ID NO: 503567 - DNA, 30 bp, Artificial Sequence
  Synthetic oligonucleotide
atcccgacacgtacccctacgtagcacatt

SEQ ID NO: 503568 - DNA, 30 bp, Artificial Sequence
  Synthetic oligonucleotide
ggaatgagatttgttgttatttatcacatt

SEQ ID NO: 503569 - DNA, 30 bp, Artificial Sequence
  Synthetic oligonucleotide
tttgcagcggtacctggaaagattcacatt

SEQ ID NO: 503570 - DNA, 30 bp, Artificial Sequence
  Synthetic oligonucleotide
cagagggattgtcggtaggcgcttcacatt

SEQ ID NO: 503571 - DNA, 30 bp, Artificial Sequence
  Synthetic oligonucleotide
ttggaaaatgatccattttggtgagacatt

SEQ ID NO: 503572 - DNA, 30 bp, Artificial Sequence
  Synthetic oligonucleotide
agcttaaaccgtgtttgaacaggggacatt

SEQ ID NO: 503573 - DNA, 30 bp, Artificial Sequence
  Synthetic oligonucleotide
tctggtactggctccacggcgatggacatt

SEQ ID NO: 503574 - DNA, 30 bp, Artificial Sequence
  Synthetic oligonucleotide
gtttacctggtgagactttatatggacatt

SEQ ID NO: 503575 - DNA, 30 bp, Artificial Sequence
  Synthetic oligonucleotide
ttgcgatcgcctgggcatccatttgacatt

SEQ ID NO: 503576 - DNA, 30 bp, Artificial Sequence
  Synthetic oligonucleotide
atgtggttctgcaagtgcgtataatacatt

SEQ ID NO: 503577 - DNA, 30 bp, Artificial Sequence
  Synthetic oligonucleotide
cgtatccctcccggacggatcagatacatt

SEQ ID NO: 503578 - DNA, 30 bp, Artificial Sequence
  Synthetic oligonucleotide
tcagtttctccacacctgatccactacatt

SEQ ID NO: 503579 - DNA, 28 bp, Artificial Sequence
  Synthetic oligonucleotide
actgctttaactaatgagtctctacatt

SEQ ID NO: 503580 - DNA, 30 bp, Artificial Sequence
  Synthetic oligonucleotide
gtgttatccccccaagcccccaattacatt

SEQ ID NO: 503581 - DNA, 30 bp, Artificial Sequence
  Synthetic oligonucleotide
gggtcaatagtcggtttaacgtattacatt

SEQ ID NO: 503582 - DNA, 30 bp, Artificial Sequence
  Synthetic oligonucleotide
aagggttgctataccagcggcgcttacatt

SEQ ID NO: 503583 - DNA, 30 bp, Artificial Sequence
  Synthetic oligonucleotide
gcttaggcacttaaggtgcttttttacatt

SEQ ID NO: 503584 - DNA, 30 bp, Artificial Sequence
  Synthetic oligonucleotide
ttacactttacgacgtattaggcaaccatt

SEQ ID NO: 503585 - DNA, 30 bp, Artificial Sequence
  Synthetic oligonucleotide
gcagtttaacaatgccaacgatcaaccatt

SEQ ID NO: 503586 - DNA, 30 bp, Artificial Sequence
  Synthetic oligonucleotide
ctgcggttcaatgaattaacacataccatt

SEQ ID NO: 503587 - DNA, 30 bp, Artificial Sequence
  Synthetic oligonucleotide
atttctatgggggaaaataagcctaccatt

SEQ ID NO: 503588 - DNA, 30 bp, Artificial Sequence
  Synthetic oligonucleotide
ttaatccgcacggatgcccttagtaccatt

SEQ ID NO: 503589 - DNA, 30 bp, Artificial Sequence
  Synthetic oligonucleotide
ggggaagggcccggcgatagcagacccatt

SEQ ID NO: 503590 - DNA, 30 bp, Artificial Sequence
  Synthetic oligonucleotide
tagcactcacatttttacggacagcccatt

SEQ ID NO: 503591 - DNA, 30 bp, Artificial Sequence
  Synthetic oligonucleotide
attatgtaaagtggaagtcgcaggcccatt

SEQ ID NO: 503592 - DNA, 30 bp, Artificial Sequence
  Synthetic oligonucleotide
aagcgttcgcgaattctaaagcatcccatt

SEQ ID NO: 503593 - DNA, 30 bp, Artificial Sequence
  Synthetic oligonucleotide
tagttagcttattggcttgtaaaagccatt

SEQ ID NO: 503594 - DNA, 30 bp, Artificial Sequence
  Synthetic oligonucleotide
gcaggcgttaatggtagtaatatagccatt

SEQ ID NO: 503595 - DNA, 30 bp, Artificial Sequence
  Synthetic oligonucleotide
ataaagagattttgtaatccgcaggccatt

SEQ ID NO: 503596 - DNA, 30 bp, Artificial Sequence
  Synthetic oligonucleotide
tatcgtgctctactatactacagggccatt

SEQ ID NO: 503597 - DNA, 30 bp, Artificial Sequence
  Synthetic oligonucleotide
ttaggttgaggtttacccgcattatccatt

SEQ ID NO: 503598 - DNA, 30 bp, Artificial Sequence
  Synthetic oligonucleotide
gtataaagttttattttgcaatgctccatt

SEQ ID NO: 503599 - DNA, 30 bp, Artificial Sequence
  Synthetic oligonucleotide
tggtcaccaaatggactcttttagtccatt

SEQ ID NO: 503600 - DNA, 30 bp, Artificial Sequence
  Synthetic oligonucleotide
gtatttttgcatccttcaggggattccatt

SEQ ID NO: 503601 - DNA, 30 bp, Artificial Sequence
  Synthetic oligonucleotide
gctattctcttagtagaagacagcagcatt

SEQ ID NO: 503602 - DNA, 30 bp, Artificial Sequence
  Synthetic oligonucleotide
gggtaatgaggtattaggtgtggcagcatt

SEQ ID NO: 503603 - DNA, 30 bp, Artificial Sequence
  Synthetic oligonucleotide
ctttctgcatgtcaaagtacaggtagcatt

SEQ ID NO: 503604 - DNA, 30 bp, Artificial Sequence
  Synthetic oligonucleotide
ttacacttgtcactaggcagatgtagcatt

SEQ ID NO: 503605 - DNA, 30 bp, Artificial Sequence
  Synthetic oligonucleotide
ggatttttcacctttttaacgtgtagcatt

SEQ ID NO: 503606 - DNA, 30 bp, Artificial Sequence
  Synthetic oligonucleotide
ccagggtagccccaagtttgtagacgcatt

SEQ ID NO: 503607 - DNA, 30 bp, Artificial Sequence
  Synthetic oligonucleotide
tctttagcatctcctcttcttagacgcatt

SEQ ID NO: 503608 - DNA, 30 bp, Artificial Sequence
  Synthetic oligonucleotide
ttttatggaatctccagacctggacgcatt

SEQ ID NO: 503609 - DNA, 30 bp, Artificial Sequence
  Synthetic oligonucleotide
ccgcatgtaacgcgacggcaaaggcgcatt

SEQ ID NO: 503610 - DNA, 30 bp, Artificial Sequence
  Synthetic oligonucleotide
agtgcctatctgggttgacggatgcgcatt

SEQ ID NO: 503611 - DNA, 30 bp, Artificial Sequence
  Synthetic oligonucleotide
gacgttaggagaatataacatggtcgcatt

SEQ ID NO: 503612 - DNA, 30 bp, Artificial Sequence
  Synthetic oligonucleotide
tgagcacagtaacctgcgaaggttcgcatt

SEQ ID NO: 503613 - DNA, 30 bp, Artificial Sequence
  Synthetic oligonucleotide
tttaatcgaacccgtgcagagaaaggcatt

SEQ ID NO: 503614 - DNA, 30 bp, Artificial Sequence
  Synthetic oligonucleotide
caatcttctgcgtgatggccgataggcatt

SEQ ID NO: 503615 - DNA, 30 bp, Artificial Sequence
  Synthetic oligonucleotide
gtgagcaagtacccatcacgggggggcatt

SEQ ID NO: 503616 - DNA, 30 bp, Artificial Sequence
  Synthetic oligonucleotide
cacggttctatagttctccctgtgggcatt

SEQ ID NO: 503617 - DNA, 30 bp, Artificial Sequence
  Synthetic oligonucleotide
aaagtttcggcacctttactacgatgcatt

SEQ ID NO: 503618 - DNA, 30 bp, Artificial Sequence
  Synthetic oligonucleotide
gacggcaaagcttaagttctacgatgcatt

SEQ ID NO: 503619 - DNA, 30 bp, Artificial Sequence
  Synthetic oligonucleotide
ctagatacatttgacccgaagcgatgcatt

SEQ ID NO: 503620 - DNA, 30 bp, Artificial Sequence
  Synthetic oligonucleotide
gatgtctatagcatgagccccttatgcatt

SEQ ID NO: 503621 - DNA, 30 bp, Artificial Sequence
  Synthetic oligonucleotide
attccggccatatggggaattttctgcatt

SEQ ID NO: 503622 - DNA, 31 bp, Artificial Sequence
  Synthetic oligonucleotide
tttcagatgctgtccgtccgctccgtgcatt

SEQ ID NO: 503623 - DNA, 30 bp, Artificial Sequence
  Synthetic oligonucleotide
tcgtggtacagtggacccgctgcttgcatt

SEQ ID NO: 503624 - DNA, 30 bp, Artificial Sequence
  Synthetic oligonucleotide
ggttagacaccacgtacttgcatttgcatt

SEQ ID NO: 503625 - DNA, 30 bp, Artificial Sequence
  Synthetic oligonucleotide
gaccggattcactcatcgcaccaaatcatt

SEQ ID NO: 503626 - DNA, 30 bp, Artificial Sequence
  Synthetic oligonucleotide
caaatcggcccattgtaaagacgtatcatt

SEQ ID NO: 503627 - DNA, 30 bp, Artificial Sequence
  Synthetic oligonucleotide
attcgcatttcaaggcctccacgcctcatt

SEQ ID NO: 503628 - DNA, 30 bp, Artificial Sequence
  Synthetic oligonucleotide
tgaaatatggcgggattagatcgcctcatt

SEQ ID NO: 503629 - DNA, 30 bp, Artificial Sequence
  Synthetic oligonucleotide
tccacgctttggttcacgcggtagctcatt

SEQ ID NO: 503630 - DNA, 30 bp, Artificial Sequence
  Synthetic oligonucleotide
aaataattcatctcccccttcagagtcatt

SEQ ID NO: 503631 - DNA, 30 bp, Artificial Sequence
  Synthetic oligonucleotide
aatgagcgtacaacatgccgccgcgtcatt

SEQ ID NO: 503632 - DNA, 30 bp, Artificial Sequence
  Synthetic oligonucleotide
gtgttctagattacaaacttgagggtcatt

SEQ ID NO: 503633 - DNA, 30 bp, Artificial Sequence
  Synthetic oligonucleotide
tatagatagaggtccacggagtaattcatt

SEQ ID NO: 503634 - DNA, 30 bp, Artificial Sequence
  Synthetic oligonucleotide
gtagtagcgttaccgaagtttaacttcatt

SEQ ID NO: 503635 - DNA, 30 bp, Artificial Sequence
  Synthetic oligonucleotide
actagcaagaaagataagatctttttcatt

SEQ ID NO: 503636 - DNA, 30 bp, Artificial Sequence
  Synthetic oligonucleotide
ttgttcattcgtcggctatggtttttcatt

SEQ ID NO: 503637 - DNA, 30 bp, Artificial Sequence
  Synthetic oligonucleotide
tatatttgtggttatgggatctaaaagatt

SEQ ID NO: 503638 - DNA, 30 bp, Artificial Sequence
  Synthetic oligonucleotide
taacgcagttgaattgtctgtgcaaagatt

SEQ ID NO: 503639 - DNA, 30 bp, Artificial Sequence
  Synthetic oligonucleotide
tatttggcgagcttatctacgtgaaagatt

SEQ ID NO: 503640 - DNA, 30 bp, Artificial Sequence
  Synthetic oligonucleotide
tgggcgcagcttacgggttgcttaaagatt

SEQ ID NO: 503641 - DNA, 30 bp, Artificial Sequence
  Synthetic oligonucleotide
gatacggacttgcatcgaaggcgcaagatt

SEQ ID NO: 503642 - DNA, 30 bp, Artificial Sequence
  Synthetic oligonucleotide
gtacggaatgtcacttctaatggcaagatt

SEQ ID NO: 503643 - DNA, 30 bp, Artificial Sequence
  Synthetic oligonucleotide
aaaactagacctcgaatgtcccgtaagatt

SEQ ID NO: 503644 - DNA, 30 bp, Artificial Sequence
  Synthetic oligonucleotide
accgtgaacttaccttaagacgcacagatt

SEQ ID NO: 503645 - DNA, 30 bp, Artificial Sequence
  Synthetic oligonucleotide
ggaaatagggtggtgatttttttccagatt

SEQ ID NO: 503646 - DNA, 30 bp, Artificial Sequence
  Synthetic oligonucleotide
tctgaggcattgcagtatggaaggcagatt

SEQ ID NO: 503647 - DNA, 30 bp, Artificial Sequence
  Synthetic oligonucleotide
aaatattcctacgcgtcattacatcagatt

SEQ ID NO: 503648 - DNA, 30 bp, Artificial Sequence
  Synthetic oligonucleotide
gggggttttctgtcgcgggctgatcagatt

SEQ ID NO: 503649 - DNA, 30 bp, Artificial Sequence
  Synthetic oligonucleotide
ggtttttgattaggtttaatctatcagatt

SEQ ID NO: 503650 - DNA, 30 bp, Artificial Sequence
  Synthetic oligonucleotide
tcctggatgaaacgccagtgaactcagatt

SEQ ID NO: 503651 - DNA, 30 bp, Artificial Sequence
  Synthetic oligonucleotide
tagattcagacctgagagatgagtcagatt

SEQ ID NO: 503652 - DNA, 30 bp, Artificial Sequence
  Synthetic oligonucleotide
gtccagttgtgtggtgtagttgttcagatt

SEQ ID NO: 503653 - DNA, 30 bp, Artificial Sequence
  Synthetic oligonucleotide
gaattccgtcatagtctgctttgagagatt

SEQ ID NO: 503654 - DNA, 30 bp, Artificial Sequence
  Synthetic oligonucleotide
gcacttttctgaggcgcaacatctgagatt

SEQ ID NO: 503655 - DNA, 30 bp, Artificial Sequence
  Synthetic oligonucleotide
gcaaattcaaattcaattgggtttgagatt

SEQ ID NO: 503656 - DNA, 30 bp, Artificial Sequence
  Synthetic oligonucleotide
ggggctctcgttcaaacccaataatagatt

SEQ ID NO: 503657 - DNA, 30 bp, Artificial Sequence
  Synthetic oligonucleotide
tgtgatacggtgattgttacggactagatt

SEQ ID NO: 503658 - DNA, 28 bp, Artificial Sequence
  Synthetic oligonucleotide
aagatttaggaatccaaaatgctagatt

SEQ ID NO: 503659 - DNA, 30 bp, Artificial Sequence
  Synthetic oligonucleotide
aacttatcgggagcacttcgcaagtagatt

SEQ ID NO: 503660 - DNA, 30 bp, Artificial Sequence
  Synthetic oligonucleotide
gtatcaggtttcaccgtagcttcttagatt

SEQ ID NO: 503661 - DNA, 30 bp, Artificial Sequence
  Synthetic oligonucleotide
acatgaggttgtttatgtatgctttagatt

SEQ ID NO: 503662 - DNA, 30 bp, Artificial Sequence
  Synthetic oligonucleotide
tgtgcagtcaaacttccggatgtttagatt

SEQ ID NO: 503663 - DNA, 30 bp, Artificial Sequence
  Synthetic oligonucleotide
gattcgcgtctcgaggcggcaagaacgatt

SEQ ID NO: 503664 - DNA, 30 bp, Artificial Sequence
  Synthetic oligonucleotide
aacgaaattacagaaatattcgtaacgatt

SEQ ID NO: 503665 - DNA, 30 bp, Artificial Sequence
  Synthetic oligonucleotide
ggcgtggtcacaatgtcgtaggctacgatt

SEQ ID NO: 503666 - DNA, 30 bp, Artificial Sequence
  Synthetic oligonucleotide
cgtcagcaactcgtgtagcgtagtacgatt

SEQ ID NO: 503667 - DNA, 30 bp, Artificial Sequence
  Synthetic oligonucleotide
agtgcgcttaagggcacttgttgcccgatt

SEQ ID NO: 503668 - DNA, 30 bp, Artificial Sequence
  Synthetic oligonucleotide
tcgaaagctacatacgctctgatcccgatt

SEQ ID NO: 503669 - DNA, 30 bp, Artificial Sequence
  Synthetic oligonucleotide
atagcttcagtgaaataacgagtcgcgatt

SEQ ID NO: 503670 - DNA, 30 bp, Artificial Sequence
  Synthetic oligonucleotide
agcggttccgcatcacacccgcgggcgatt

SEQ ID NO: 503671 - DNA, 30 bp, Artificial Sequence
  Synthetic oligonucleotide
cgtatacaagaactcgtctatcgggcgatt

SEQ ID NO: 503672 - DNA, 30 bp, Artificial Sequence
  Synthetic oligonucleotide
agactactgcttaaaaagacaatggcgatt

SEQ ID NO: 503673 - DNA, 30 bp, Artificial Sequence
  Synthetic oligonucleotide
ttatgaacgataataatcgaatatgcgatt

SEQ ID NO: 503674 - DNA, 30 bp, Artificial Sequence
  Synthetic oligonucleotide
ggtctttgggacgactaaagcgtctcgatt

SEQ ID NO: 503675 - DNA, 30 bp, Artificial Sequence
  Synthetic oligonucleotide
gcaatcgaggcgagtgtattggtctcgatt

SEQ ID NO: 503676 - DNA, 30 bp, Artificial Sequence
  Synthetic oligonucleotide
ggcaccctaaacgcttacgtctagtcgatt

SEQ ID NO: 503677 - DNA, 30 bp, Artificial Sequence
  Synthetic oligonucleotide
cccggtccacgggattgcagcgattcgatt

SEQ ID NO: 503678 - DNA, 30 bp, Artificial Sequence
  Synthetic oligonucleotide
tacgattgttacgatgccaagctttcgatt

SEQ ID NO: 503679 - DNA, 30 bp, Artificial Sequence
  Synthetic oligonucleotide
cttcactacccgaatacagtggtttcgatt

SEQ ID NO: 503680 - DNA, 30 bp, Artificial Sequence
  Synthetic oligonucleotide
gtacctcttactccagccgatttttcgatt

SEQ ID NO: 503681 - DNA, 30 bp, Artificial Sequence
  Synthetic oligonucleotide
tcaactgtgaattgacttcagcaaaggatt

SEQ ID NO: 503682 - DNA, 30 bp, Artificial Sequence
  Synthetic oligonucleotide
cgtctcgcccaatggggccccgtaaggatt

SEQ ID NO: 503683 - DNA, 30 bp, Artificial Sequence
  Synthetic oligonucleotide
atgcgatgccggatttgtagggtgaggatt

SEQ ID NO: 503684 - DNA, 30 bp, Artificial Sequence
  Synthetic oligonucleotide
gatcttaccgtcggcgaaaccgataggatt

SEQ ID NO: 503685 - DNA, 30 bp, Artificial Sequence
  Synthetic oligonucleotide
cacaaaaaaatcccctgtacgcctaggatt

SEQ ID NO: 503686 - DNA, 30 bp, Artificial Sequence
  Synthetic oligonucleotide
aaccagtatcgcgccaggattcaacggatt

SEQ ID NO: 503687 - DNA, 30 bp, Artificial Sequence
  Synthetic oligonucleotide
gtatttggagtatgtcttatggaccggatt

SEQ ID NO: 503688 - DNA, 30 bp, Artificial Sequence
  Synthetic oligonucleotide
gtttatggcaacgcgggaatcatccggatt

SEQ ID NO: 503689 - DNA, 30 bp, Artificial Sequence
  Synthetic oligonucleotide
gccgtctagtgaaaccccggatcgcggatt

SEQ ID NO: 503690 - DNA, 30 bp, Artificial Sequence
  Synthetic oligonucleotide
tccatgtgtggtcgcaaactgcggcggatt

SEQ ID NO: 503691 - DNA, 30 bp, Artificial Sequence
  Synthetic oligonucleotide
aattgacgtctgtggataccgatgcggatt

SEQ ID NO: 503692 - DNA, 30 bp, Artificial Sequence
  Synthetic oligonucleotide
cgtcggacgctcagaaccactattcggatt

SEQ ID NO: 503693 - DNA, 30 bp, Artificial Sequence
  Synthetic oligonucleotide
tggcagtgcgtcacagcggatcacgggatt

SEQ ID NO: 503694 - DNA, 30 bp, Artificial Sequence
  Synthetic oligonucleotide
atcgatttctttggcgtgtcaagcgggatt

SEQ ID NO: 503695 - DNA, 30 bp, Artificial Sequence
  Synthetic oligonucleotide
cagttctatgtacgctctatacaggggatt

SEQ ID NO: 503696 - DNA, 30 bp, Artificial Sequence
  Synthetic oligonucleotide
tcgcatcatagcctcatagccagtgggatt

SEQ ID NO: 503697 - DNA, 30 bp, Artificial Sequence
  Synthetic oligonucleotide
ctgtatagcggaactttccttcgtgggatt

SEQ ID NO: 503698 - DNA, 30 bp, Artificial Sequence
  Synthetic oligonucleotide
gagggccggatgatatgcggacttgggatt

SEQ ID NO: 503699 - DNA, 30 bp, Artificial Sequence
  Synthetic oligonucleotide
cagtggctgcatacatagctctcatggatt

SEQ ID NO: 503700 - DNA, 30 bp, Artificial Sequence
  Synthetic oligonucleotide
agtgtcgtgaactagtattgctgatggatt

SEQ ID NO: 503701 - DNA, 30 bp, Artificial Sequence
  Synthetic oligonucleotide
gatctaatctttaaacttcttttatggatt

SEQ ID NO: 503702 - DNA, 30 bp, Artificial Sequence
  Synthetic oligonucleotide
attatgtttcaggaacacgctgactggatt

SEQ ID NO: 503703 - DNA, 30 bp, Artificial Sequence
  Synthetic oligonucleotide
tacagtcatctagactgtaggacctggatt

SEQ ID NO: 503704 - DNA, 31 bp, Artificial Sequence
  Synthetic oligonucleotide
ctgtttgccgtgaccctcgcagccctggatt

SEQ ID NO: 503705 - DNA, 30 bp, Artificial Sequence
  Synthetic oligonucleotide
ggggtccatgagcgcaagcaccgctggatt

SEQ ID NO: 503706 - DNA, 30 bp, Artificial Sequence
  Synthetic oligonucleotide
gtggggaattggatcagagtgaagtggatt

SEQ ID NO: 503707 - DNA, 30 bp, Artificial Sequence
  Synthetic oligonucleotide
ctgaacatgtttagcggcagctaaatgatt

SEQ ID NO: 503708 - DNA, 30 bp, Artificial Sequence
  Synthetic oligonucleotide
gaatatgtgcccgctattgcggtaatgatt

SEQ ID NO: 503709 - DNA, 30 bp, Artificial Sequence
  Synthetic oligonucleotide
gtcgtaaagaagagggccgggttcatgatt

SEQ ID NO: 503710 - DNA, 30 bp, Artificial Sequence
  Synthetic oligonucleotide
attaatcagcggaaactcatgtagatgatt

SEQ ID NO: 503711 - DNA, 30 bp, Artificial Sequence
  Synthetic oligonucleotide
ctgtcagtaggaggcattaggcatatgatt

SEQ ID NO: 503712 - DNA, 30 bp, Artificial Sequence
  Synthetic oligonucleotide
agatttaggccccaaatttttggtatgatt

SEQ ID NO: 503713 - DNA, 30 bp, Artificial Sequence
  Synthetic oligonucleotide
attctgctccatgctcaggatggactgatt

SEQ ID NO: 503714 - DNA, 30 bp, Artificial Sequence
  Synthetic oligonucleotide
tcatacctttatttatgtgtcatactgatt

SEQ ID NO: 503715 - DNA, 30 bp, Artificial Sequence
  Synthetic oligonucleotide
ggcacacctttcagtgacatatacctgatt

SEQ ID NO: 503716 - DNA, 30 bp, Artificial Sequence
  Synthetic oligonucleotide
gcgaacattgttagtaagatcaagctgatt

SEQ ID NO: 503717 - DNA, 30 bp, Artificial Sequence
  Synthetic oligonucleotide
tgatgcaggaagtgcagttactatctgatt

SEQ ID NO: 503718 - DNA, 30 bp, Artificial Sequence
  Synthetic oligonucleotide
gttaaaatcaggtagtgatcttctctgatt

SEQ ID NO: 503719 - DNA, 30 bp, Artificial Sequence
  Synthetic oligonucleotide
ctgcataaacgtatgtagataagtctgatt

SEQ ID NO: 503720 - DNA, 30 bp, Artificial Sequence
  Synthetic oligonucleotide
agtctgtatagagcaccgctaagtctgatt

SEQ ID NO: 503721 - DNA, 30 bp, Artificial Sequence
  Synthetic oligonucleotide
tccttacccgtagcaacatacagtctgatt

SEQ ID NO: 503722 - DNA, 30 bp, Artificial Sequence
  Synthetic oligonucleotide
gcgcatcgtggaatcacactgccagtgatt

SEQ ID NO: 503723 - DNA, 30 bp, Artificial Sequence
  Synthetic oligonucleotide
ggcctcaatatcacgtctttttgggtgatt

SEQ ID NO: 503724 - DNA, 30 bp, Artificial Sequence
  Synthetic oligonucleotide
aaccttttgttggggattacgaatgtgatt

SEQ ID NO: 503725 - DNA, 30 bp, Artificial Sequence
  Synthetic oligonucleotide
acacacataaagttgctcctgggattgatt

SEQ ID NO: 503726 - DNA, 30 bp, Artificial Sequence
  Synthetic oligonucleotide
tttgcacctatatatcattgtggattgatt

SEQ ID NO: 503727 - DNA, 30 bp, Artificial Sequence
  Synthetic oligonucleotide
tccacaaacacaattcacccttacttgatt

SEQ ID NO: 503728 - DNA, 30 bp, Artificial Sequence
  Synthetic oligonucleotide
ttagtgcaagatactgttttgaccttgatt

SEQ ID NO: 503729 - DNA, 30 bp, Artificial Sequence
  Synthetic oligonucleotide
tagcgcgcgttctacatcttcgagttgatt

SEQ ID NO: 503730 - DNA, 30 bp, Artificial Sequence
  Synthetic oligonucleotide
gggtcgggccaatgggaactatcgttgatt

SEQ ID NO: 503731 - DNA, 30 bp, Artificial Sequence
  Synthetic oligonucleotide
gaggttcactgtacggatgattctttgatt

SEQ ID NO: 503732 - DNA, 30 bp, Artificial Sequence
  Synthetic oligonucleotide
gtgttaattgtagtttataggcgtttgatt

SEQ ID NO: 503733 - DNA, 30 bp, Artificial Sequence
  Synthetic oligonucleotide
gttgtctgcctaggaactacgattttgatt

SEQ ID NO: 503734 - DNA, 30 bp, Artificial Sequence
  Synthetic oligonucleotide
taatctggggaggactaaggcacaaatatt

SEQ ID NO: 503735 - DNA, 30 bp, Artificial Sequence
  Synthetic oligonucleotide
ttgtaagatcagtgaacattagcaaatatt

SEQ ID NO: 503736 - DNA, 30 bp, Artificial Sequence
  Synthetic oligonucleotide
gacgcgcaaagtaggtttccgtcaaatatt

SEQ ID NO: 503737 - DNA, 30 bp, Artificial Sequence
  Synthetic oligonucleotide
gactggcgctggccgatgctggccaatatt

SEQ ID NO: 503738 - DNA, 30 bp, Artificial Sequence
  Synthetic oligonucleotide
gcctaattctttcggccgttgactaatatt

SEQ ID NO: 503739 - DNA, 30 bp, Artificial Sequence
  Synthetic oligonucleotide
gttacacgtttttcggcgccggttaatatt

SEQ ID NO: 503740 - DNA, 30 bp, Artificial Sequence
  Synthetic oligonucleotide
tagtcccgtaccttgaaatgctttaatatt

SEQ ID NO: 503741 - DNA, 30 bp, Artificial Sequence
  Synthetic oligonucleotide
agctctccattagagtggaaaacacatatt

SEQ ID NO: 503742 - DNA, 30 bp, Artificial Sequence
  Synthetic oligonucleotide
caactttacacacggtttgggggacatatt

SEQ ID NO: 503743 - DNA, 30 bp, Artificial Sequence
  Synthetic oligonucleotide
attggtgaatcaggtggcgtgatacatatt

SEQ ID NO: 503744 - DNA, 30 bp, Artificial Sequence
  Synthetic oligonucleotide
taatacgtgcatactggacatgaccatatt

SEQ ID NO: 503745 - DNA, 30 bp, Artificial Sequence
  Synthetic oligonucleotide
ctatcattcctcgccgggcagacccatatt

SEQ ID NO: 503746 - DNA, 30 bp, Artificial Sequence
  Synthetic oligonucleotide
ttgagtacgagcatttggagggcccatatt

SEQ ID NO: 503747 - DNA, 30 bp, Artificial Sequence
  Synthetic oligonucleotide
acgtagtgatgttgctggggtcagcatatt

SEQ ID NO: 503748 - DNA, 30 bp, Artificial Sequence
  Synthetic oligonucleotide
tgggggtttcccttgcggattcagcatatt

SEQ ID NO: 503749 - DNA, 30 bp, Artificial Sequence
  Synthetic oligonucleotide
atttgcttaaattgaacttcaacgcatatt

SEQ ID NO: 503750 - DNA, 30 bp, Artificial Sequence
  Synthetic oligonucleotide
gaagcagacgatgctggagcaccgcatatt

SEQ ID NO: 503751 - DNA, 30 bp, Artificial Sequence
  Synthetic oligonucleotide
gcagatttggttatatgctatggtcatatt

SEQ ID NO: 503752 - DNA, 30 bp, Artificial Sequence
  Synthetic oligonucleotide
gattccttcccaatggacagacgagatatt

SEQ ID NO: 503753 - DNA, 30 bp, Artificial Sequence
  Synthetic oligonucleotide
gagtgttacggcatgctagaaggtgatatt

SEQ ID NO: 503754 - DNA, 30 bp, Artificial Sequence
  Synthetic oligonucleotide
tgtgggggtcctactaggtatattgatatt

SEQ ID NO: 503755 - DNA, 30 bp, Artificial Sequence
  Synthetic oligonucleotide
tcccgagcaactgtcgatcgcgcatatatt

SEQ ID NO: 503756 - DNA, 30 bp, Artificial Sequence
  Synthetic oligonucleotide
ttcgagttgataggtgagacaagatatatt

SEQ ID NO: 503757 - DNA, 30 bp, Artificial Sequence
  Synthetic oligonucleotide
ttaagctgcacacagcatgctgcctatatt

SEQ ID NO: 503758 - DNA, 30 bp, Artificial Sequence
  Synthetic oligonucleotide
caccagaagtttattatctataagtatatt

SEQ ID NO: 503759 - DNA, 30 bp, Artificial Sequence
  Synthetic oligonucleotide
cggggttaacacaccccgtgaaggtatatt

SEQ ID NO: 503760 - DNA, 30 bp, Artificial Sequence
  Synthetic oligonucleotide
attaggacttatatgcgcctgctttatatt

SEQ ID NO: 503761 - DNA, 30 bp, Artificial Sequence
  Synthetic oligonucleotide
caagtacaggggtgcccgcatggcactatt

SEQ ID NO: 503762 - DNA, 30 bp, Artificial Sequence
  Synthetic oligonucleotide
caaccttagcaaacctacatatatactatt

SEQ ID NO: 503763 - DNA, 30 bp, Artificial Sequence
  Synthetic oligonucleotide
gcggctgctacattctgcagccttactatt

SEQ ID NO: 503764 - DNA, 30 bp, Artificial Sequence
  Synthetic oligonucleotide
atggcttaacgctctaggtgaacacctatt

SEQ ID NO: 503765 - DNA, 30 bp, Artificial Sequence
  Synthetic oligonucleotide
ccccacccaccacgcttgactagagctatt

SEQ ID NO: 503766 - DNA, 30 bp, Artificial Sequence
  Synthetic oligonucleotide
tatggtccttcgtttttgcttgtagctatt

SEQ ID NO: 503767 - DNA, 30 bp, Artificial Sequence
  Synthetic oligonucleotide
tagcttttaatatagtaagctagcgctatt

SEQ ID NO: 503768 - DNA, 30 bp, Artificial Sequence
  Synthetic oligonucleotide
ccgtggttgcagcttatatttcgggctatt

SEQ ID NO: 503769 - DNA, 30 bp, Artificial Sequence
  Synthetic oligonucleotide
gggcttcagggaccgaggtgcgtggctatt

SEQ ID NO: 503770 - DNA, 30 bp, Artificial Sequence
  Synthetic oligonucleotide
agttatcgtccttaagaagcctttgctatt

SEQ ID NO: 503771 - DNA, 30 bp, Artificial Sequence
  Synthetic oligonucleotide
tcaacatcggtcgcgggccgtgaatctatt

SEQ ID NO: 503772 - DNA, 30 bp, Artificial Sequence
  Synthetic oligonucleotide
ttttgcgtgatccgcattacgacatctatt

SEQ ID NO: 503773 - DNA, 30 bp, Artificial Sequence
  Synthetic oligonucleotide
tatcatatgttcttgggtggcgcctctatt

SEQ ID NO: 503774 - DNA, 30 bp, Artificial Sequence
  Synthetic oligonucleotide
ctccaatcttacaaaccaccgggctctatt

SEQ ID NO: 503775 - DNA, 30 bp, Artificial Sequence
  Synthetic oligonucleotide
acatttaaatttggctcccaagtctctatt

SEQ ID NO: 503776 - DNA, 30 bp, Artificial Sequence
  Synthetic oligonucleotide
aataaaaagcagagctttggaatgtctatt

SEQ ID NO: 503777 - DNA, 30 bp, Artificial Sequence
  Synthetic oligonucleotide
tgtcggtgcaaacggcgggttgaaagtatt

SEQ ID NO: 503778 - DNA, 30 bp, Artificial Sequence
  Synthetic oligonucleotide
ttcgtaacgctcaccataataataagtatt

SEQ ID NO: 503779 - DNA, 30 bp, Artificial Sequence
  Synthetic oligonucleotide
accctgttctatagccagagtataagtatt

SEQ ID NO: 503780 - DNA, 30 bp, Artificial Sequence
  Synthetic oligonucleotide
acttccgctttgttccttgatgtaagtatt

SEQ ID NO: 503781 - DNA, 30 bp, Artificial Sequence
  Synthetic oligonucleotide
atctttgaggagctcggcagccacagtatt

SEQ ID NO: 503782 - DNA, 30 bp, Artificial Sequence
  Synthetic oligonucleotide
tgcggctcaatgcgctcaacgcgcagtatt

SEQ ID NO: 503783 - DNA, 30 bp, Artificial Sequence
  Synthetic oligonucleotide
aatcgagcctttccgcaccactagagtatt

SEQ ID NO: 503784 - DNA, 30 bp, Artificial Sequence
  Synthetic oligonucleotide
gtagaggtaaaattaggatgtaggagtatt

SEQ ID NO: 503785 - DNA, 30 bp, Artificial Sequence
  Synthetic oligonucleotide
ttatgggtttgatgatcacctcggagtatt

SEQ ID NO: 503786 - DNA, 30 bp, Artificial Sequence
  Synthetic oligonucleotide
gtgcaacatccgtgcaagcccgggagtatt

SEQ ID NO: 503787 - DNA, 30 bp, Artificial Sequence
  Synthetic oligonucleotide
tacatcgaactgccatattatatgagtatt

SEQ ID NO: 503788 - DNA, 30 bp, Artificial Sequence
  Synthetic oligonucleotide
ttgcctgtaaaaccgtacatcgaacgtatt

SEQ ID NO: 503789 - DNA, 30 bp, Artificial Sequence
  Synthetic oligonucleotide
ttatgaatacaaggtctgcggtaacgtatt

SEQ ID NO: 503790 - DNA, 30 bp, Artificial Sequence
  Synthetic oligonucleotide
ttgtaatatgcaacaatatgaaaccgtatt

SEQ ID NO: 503791 - DNA, 30 bp, Artificial Sequence
  Synthetic oligonucleotide
gaggagcaattctatgagggcagccgtatt

SEQ ID NO: 503792 - DNA, 30 bp, Artificial Sequence
  Synthetic oligonucleotide
gtctcgttgccgtgttgtcactgccgtatt

SEQ ID NO: 503793 - DNA, 30 bp, Artificial Sequence
  Synthetic oligonucleotide
cgggaacgccttgtccacaagttgcgtatt

SEQ ID NO: 503794 - DNA, 30 bp, Artificial Sequence
  Synthetic oligonucleotide
ctggtttgtgggacaggaacgccaggtatt

SEQ ID NO: 503795 - DNA, 30 bp, Artificial Sequence
  Synthetic oligonucleotide
ttgcttttattttccttgcatatcggtatt

SEQ ID NO: 503796 - DNA, 30 bp, Artificial Sequence
  Synthetic oligonucleotide
gtaattacacaacagaattaatggggtatt

SEQ ID NO: 503797 - DNA, 30 bp, Artificial Sequence
  Synthetic oligonucleotide
gtgccatattgtaggacgatagttggtatt

SEQ ID NO: 503798 - DNA, 30 bp, Artificial Sequence
  Synthetic oligonucleotide
ggctgtacggccgttgttaaaaaatgtatt

SEQ ID NO: 503799 - DNA, 30 bp, Artificial Sequence
  Synthetic oligonucleotide
acagttgctgcattagtgggattctgtatt

SEQ ID NO: 503800 - DNA, 30 bp, Artificial Sequence
  Synthetic oligonucleotide
gataagctacgtaagcatgatgggtgtatt

SEQ ID NO: 503801 - DNA, 30 bp, Artificial Sequence
  Synthetic oligonucleotide
agcaccacattacaggttttttggtgtatt

SEQ ID NO: 503802 - DNA, 30 bp, Artificial Sequence
  Synthetic oligonucleotide
tctccttgcacagtgatatacgtgtgtatt

SEQ ID NO: 503803 - DNA, 30 bp, Artificial Sequence
  Synthetic oligonucleotide
ctccagcgcttagaagcgaccgtgtgtatt

SEQ ID NO: 503804 - DNA, 30 bp, Artificial Sequence
  Synthetic oligonucleotide
taaggatccaaaccgacttaggaaattatt

SEQ ID NO: 503805 - DNA, 30 bp, Artificial Sequence
  Synthetic oligonucleotide
ttactaggtatccccgcgaaaacaattatt

SEQ ID NO: 503806 - DNA, 30 bp, Artificial Sequence
  Synthetic oligonucleotide
aatctaaaatagcaaggggcctcaattatt

SEQ ID NO: 503807 - DNA, 30 bp, Artificial Sequence
  Synthetic oligonucleotide
ccccgtccttccgtaaaccccgtaattatt

SEQ ID NO: 503808 - DNA, 30 bp, Artificial Sequence
  Synthetic oligonucleotide
aaatcccgagggtgtttgattcacattatt

SEQ ID NO: 503809 - DNA, 30 bp, Artificial Sequence
  Synthetic oligonucleotide
catttacagctgcacttggtacgcattatt

SEQ ID NO: 503810 - DNA, 30 bp, Artificial Sequence
  Synthetic oligonucleotide
ttctatgcattgggcccgtaccgcattatt

SEQ ID NO: 503811 - DNA, 30 bp, Artificial Sequence
  Synthetic oligonucleotide
catataactgtttcccttgagacgattatt

SEQ ID NO: 503812 - DNA, 30 bp, Artificial Sequence
  Synthetic oligonucleotide
atactaccgccgggtgaacgctggattatt

SEQ ID NO: 503813 - DNA, 30 bp, Artificial Sequence
  Synthetic oligonucleotide
aatattctcgtgagtaattgactgattatt

SEQ ID NO: 503814 - DNA, 30 bp, Artificial Sequence
  Synthetic oligonucleotide
tccaggcacctacgcccctgttctattatt

SEQ ID NO: 503815 - DNA, 30 bp, Artificial Sequence
  Synthetic oligonucleotide
aattacgttactagctctggcgttattatt

SEQ ID NO: 503816 - DNA, 30 bp, Artificial Sequence
  Synthetic oligonucleotide
ccccgcatttccggatgtgtataacttatt

SEQ ID NO: 503817 - DNA, 30 bp, Artificial Sequence
  Synthetic oligonucleotide
caaagttaaaccacaaggcgctgacttatt

SEQ ID NO: 503818 - DNA, 30 bp, Artificial Sequence
  Synthetic oligonucleotide
gtgggttataaaaagttctatgtacttatt

SEQ ID NO: 503819 - DNA, 30 bp, Artificial Sequence
  Synthetic oligonucleotide
tacaacaataggcttggggccgaccttatt

SEQ ID NO: 503820 - DNA, 29 bp, Artificial Sequence
  Synthetic oligonucleotide
taaaattaagttgcttttcgacccttatt

SEQ ID NO: 503821 - DNA, 30 bp, Artificial Sequence
  Synthetic oligonucleotide
ctgggatttattcatattgggtgccttatt

SEQ ID NO: 503822 - DNA, 30 bp, Artificial Sequence
  Synthetic oligonucleotide
cgtcttaaccttccgttcgtattccttatt

SEQ ID NO: 503823 - DNA, 30 bp, Artificial Sequence
  Synthetic oligonucleotide
tttcctagctaaggaaaggggtagcttatt

SEQ ID NO: 503824 - DNA, 30 bp, Artificial Sequence
  Synthetic oligonucleotide
atggttttcttctacacaaaaccgcttatt

SEQ ID NO: 503825 - DNA, 30 bp, Artificial Sequence
  Synthetic oligonucleotide
ctactgttaagagggaaatcgtggcttatt

SEQ ID NO: 503826 - DNA, 30 bp, Artificial Sequence
  Synthetic oligonucleotide
cagggtcgacaagaattgacagatcttatt

SEQ ID NO: 503827 - DNA, 30 bp, Artificial Sequence
  Synthetic oligonucleotide
aagttttcggacaacaggcattttcttatt

SEQ ID NO: 503828 - DNA, 30 bp, Artificial Sequence
  Synthetic oligonucleotide
ataggagatgacggtctcttcagagttatt

SEQ ID NO: 503829 - DNA, 30 bp, Artificial Sequence
  Synthetic oligonucleotide
atcatgttatgccgcaggctatgagttatt

SEQ ID NO: 503830 - DNA, 30 bp, Artificial Sequence
  Synthetic oligonucleotide
gagcgttcaggtaatcacggctgagttatt

SEQ ID NO: 503831 - DNA, 30 bp, Artificial Sequence
  Synthetic oligonucleotide
gaattgtctagtacctacatactagttatt

SEQ ID NO: 503832 - DNA, 30 bp, Artificial Sequence
  Synthetic oligonucleotide
ctttaggggggggaccgcctcaccgttatt

SEQ ID NO: 503833 - DNA, 30 bp, Artificial Sequence
  Synthetic oligonucleotide
tttactggaatcgaaaaaagatccgttatt

SEQ ID NO: 503834 - DNA, 30 bp, Artificial Sequence
  Synthetic oligonucleotide
tgtttgatttctgcctggcattccgttatt

SEQ ID NO: 503835 - DNA, 30 bp, Artificial Sequence
  Synthetic oligonucleotide
gacagtaatacactttgtgtcttcgttatt

SEQ ID NO: 503836 - DNA, 30 bp, Artificial Sequence
  Synthetic oligonucleotide
gatctgatagtggtcaagagaccggttatt

SEQ ID NO: 503837 - DNA, 30 bp, Artificial Sequence
  Synthetic oligonucleotide
ccaggggaatcagtgttgcggggggttatt

SEQ ID NO: 503838 - DNA, 30 bp, Artificial Sequence
  Synthetic oligonucleotide
cactttgtcactcaagcgggtggggttatt

SEQ ID NO: 503839 - DNA, 30 bp, Artificial Sequence
  Synthetic oligonucleotide
cagcctggattccaggcttttctggttatt

SEQ ID NO: 503840 - DNA, 30 bp, Artificial Sequence
  Synthetic oligonucleotide
acaagcccggcgtttgtcgtttatgttatt

SEQ ID NO: 503841 - DNA, 30 bp, Artificial Sequence
  Synthetic oligonucleotide
gggagttacgggtattattctactgttatt

SEQ ID NO: 503842 - DNA, 30 bp, Artificial Sequence
  Synthetic oligonucleotide
gttaaacgcgtttgtcaacatcgtgttatt

SEQ ID NO: 503843 - DNA, 30 bp, Artificial Sequence
  Synthetic oligonucleotide
ggggtggaaaacagtcgaaaggttgttatt

SEQ ID NO: 503844 - DNA, 30 bp, Artificial Sequence
  Synthetic oligonucleotide
atagattgcagactcctctccaaatttatt

SEQ ID NO: 503845 - DNA, 30 bp, Artificial Sequence
  Synthetic oligonucleotide
atacaattacagtcggtagcgacatttatt

SEQ ID NO: 503846 - DNA, 30 bp, Artificial Sequence
  Synthetic oligonucleotide
gcgatattatcccgggctatgctatttatt

SEQ ID NO: 503847 - DNA, 30 bp, Artificial Sequence
  Synthetic oligonucleotide
gcttgcgaccagacgcgaagcgactttatt

SEQ ID NO: 503848 - DNA, 30 bp, Artificial Sequence
  Synthetic oligonucleotide
gtaaagctctggttacactgaaagtttatt

SEQ ID NO: 503849 - DNA, 30 bp, Artificial Sequence
  Synthetic oligonucleotide
gtgcgctgtccacgctccatctcgtttatt

SEQ ID NO: 503850 - DNA, 30 bp, Artificial Sequence
  Synthetic oligonucleotide
aacggtatagtcgctgatctatgttttatt

SEQ ID NO: 503851 - DNA, 30 bp, Artificial Sequence
  Synthetic oligonucleotide
taaccttaacatgcacaggtagtttttatt

SEQ ID NO: 503852 - DNA, 30 bp, Artificial Sequence
  Synthetic oligonucleotide
atacctatgtttttaacctagcacaaactt

SEQ ID NO: 503853 - DNA, 30 bp, Artificial Sequence
  Synthetic oligonucleotide
ctttataggagatgagaagactagaaactt

SEQ ID NO: 503854 - DNA, 30 bp, Artificial Sequence
  Synthetic oligonucleotide
ttgttatacgctgtgatgaaatggaaactt

SEQ ID NO: 503855 - DNA, 30 bp, Artificial Sequence
  Synthetic oligonucleotide
tgctccgttattagaacggagcttaaactt

SEQ ID NO: 503856 - DNA, 30 bp, Artificial Sequence
  Synthetic oligonucleotide
gttaaaagcgtagcttttacaagccaactt

SEQ ID NO: 503857 - DNA, 30 bp, Artificial Sequence
  Synthetic oligonucleotide
atttgtgctgaaactcattcgcgccaactt

SEQ ID NO: 503858 - DNA, 30 bp, Artificial Sequence
  Synthetic oligonucleotide
ctgtagacgtatcttgtaatacgtcaactt

SEQ ID NO: 503859 - DNA, 30 bp, Artificial Sequence
  Synthetic oligonucleotide
ggtattatccccccagggacaattcaactt

SEQ ID NO: 503860 - DNA, 30 bp, Artificial Sequence
  Synthetic oligonucleotide
tcgggatgaatctgcaaagcctctgaactt

SEQ ID NO: 503861 - DNA, 30 bp, Artificial Sequence
  Synthetic oligonucleotide
gagctagagctactactgctgcaataactt

SEQ ID NO: 503862 - DNA, 30 bp, Artificial Sequence
  Synthetic oligonucleotide
tatttcatgagtcgaccgtttcagtaactt

SEQ ID NO: 503863 - DNA, 30 bp, Artificial Sequence
  Synthetic oligonucleotide
cgctatattggaccagctcactagtaactt

SEQ ID NO: 503864 - DNA, 30 bp, Artificial Sequence
  Synthetic oligonucleotide
ctgcgcaatacgtaggcctacaggtaactt

SEQ ID NO: 503865 - DNA, 30 bp, Artificial Sequence
  Synthetic oligonucleotide
tccggtttgatgggacttcgcttcacactt

SEQ ID NO: 503866 - DNA, 30 bp, Artificial Sequence
  Synthetic oligonucleotide
atcaccggccagcactagctcttcacactt

SEQ ID NO: 503867 - DNA, 29 bp, Artificial Sequence
  Synthetic oligonucleotide
aagagtgtagtggtgtggcttagacactt

SEQ ID NO: 503868 - DNA, 30 bp, Artificial Sequence
  Synthetic oligonucleotide
gtccgggcagctgcgcacggtttgacactt

SEQ ID NO: 503869 - DNA, 30 bp, Artificial Sequence
  Synthetic oligonucleotide
gccaacgacaacggcccgttaggaccactt

SEQ ID NO: 503870 - DNA, 30 bp, Artificial Sequence
  Synthetic oligonucleotide
gtcttggtagccaatgattgtgtaccactt

SEQ ID NO: 503871 - DNA, 30 bp, Artificial Sequence
  Synthetic oligonucleotide
gcgttcagtctctgtagataggccccactt

SEQ ID NO: 503872 - DNA, 27 bp, Artificial Sequence
  Synthetic oligonucleotide
gtggctgtgtagatagtggcgccactt

SEQ ID NO: 503873 - DNA, 30 bp, Artificial Sequence
  Synthetic oligonucleotide
cgtgaagtatgagccgttatccggccactt

SEQ ID NO: 503874 - DNA, 30 bp, Artificial Sequence
  Synthetic oligonucleotide
tacagccctgatctgggaggtttcgcactt

SEQ ID NO: 503875 - DNA, 30 bp, Artificial Sequence
  Synthetic oligonucleotide
cacagacgtatagccgttcgagaggcactt

SEQ ID NO: 503876 - DNA, 31 bp, Artificial Sequence
  Synthetic oligonucleotide
attttatatgttggtgtcgttaccggcactt

SEQ ID NO: 503877 - DNA, 30 bp, Artificial Sequence
  Synthetic oligonucleotide
gctgtttgtgatcgcacgatacgggcactt

SEQ ID NO: 503878 - DNA, 30 bp, Artificial Sequence
  Synthetic oligonucleotide
cgcgcctaccgtctctaatgatctgcactt

SEQ ID NO: 503879 - DNA, 30 bp, Artificial Sequence
  Synthetic oligonucleotide
attccagaaggacagattacacttgcactt

SEQ ID NO: 503880 - DNA, 30 bp, Artificial Sequence
  Synthetic oligonucleotide
cttgaccagccttttgtgaggacatcactt

SEQ ID NO: 503881 - DNA, 30 bp, Artificial Sequence
  Synthetic oligonucleotide
aatttatgtatcatggggcagacgtcactt

SEQ ID NO: 503882 - DNA, 30 bp, Artificial Sequence
  Synthetic oligonucleotide
gggggaacgccatgcatctgctggtcactt

SEQ ID NO: 503883 - DNA, 30 bp, Artificial Sequence
  Synthetic oligonucleotide
accataaaatgcaattgcagtttgtcactt

SEQ ID NO: 503884 - DNA, 30 bp, Artificial Sequence
  Synthetic oligonucleotide
atccaaaatccgcgcctgtagaattcactt

SEQ ID NO: 503885 - DNA, 30 bp, Artificial Sequence
  Synthetic oligonucleotide
ttgatgactactagatgtagcgattcactt

SEQ ID NO: 503886 - DNA, 30 bp, Artificial Sequence
  Synthetic oligonucleotide
tcggagggggattatctccacggttcactt

SEQ ID NO: 503887 - DNA, 30 bp, Artificial Sequence
  Synthetic oligonucleotide
acgagcgctctgcagcgcgtcctaagactt

SEQ ID NO: 503888 - DNA, 30 bp, Artificial Sequence
  Synthetic oligonucleotide
tgtgttagactgtatctaactttaagactt

SEQ ID NO: 503889 - DNA, 30 bp, Artificial Sequence
  Synthetic oligonucleotide
gaagcatgaaactttgtcgcggtcagactt

SEQ ID NO: 503890 - DNA, 30 bp, Artificial Sequence
  Synthetic oligonucleotide
gttgctacatgtgagtttccaggtagactt

SEQ ID NO: 503891 - DNA, 30 bp, Artificial Sequence
  Synthetic oligonucleotide
gaacctcgcatgcggcaaacggttagactt

SEQ ID NO: 503892 - DNA, 30 bp, Artificial Sequence
  Synthetic oligonucleotide
gatctagaatgtcgttttcaaaaacgactt

SEQ ID NO: 503893 - DNA, 30 bp, Artificial Sequence
  Synthetic oligonucleotide
gaggaactcgccgatattggaaagcgactt

SEQ ID NO: 503894 - DNA, 30 bp, Artificial Sequence
  Synthetic oligonucleotide
actttgtgggacccgagtggccagcgactt

SEQ ID NO: 503895 - DNA, 30 bp, Artificial Sequence
  Synthetic oligonucleotide
tcaaacgcagttcagtccctttggcgactt

SEQ ID NO: 503896 - DNA, 30 bp, Artificial Sequence
  Synthetic oligonucleotide
catctgccgtccgcgttagttgttcgactt

SEQ ID NO: 503897 - DNA, 30 bp, Artificial Sequence
  Synthetic oligonucleotide
cttcatcgatgcaatcgcctagccggactt

SEQ ID NO: 503898 - DNA, 30 bp, Artificial Sequence
  Synthetic oligonucleotide
aacctggtaagatatattcactccggactt

SEQ ID NO: 503899 - DNA, 30 bp, Artificial Sequence
  Synthetic oligonucleotide
ggctgttatacaacgttatggtatggactt

SEQ ID NO: 503900 - DNA, 30 bp, Artificial Sequence
  Synthetic oligonucleotide
aaatctccagggtactgtcgttctggactt

SEQ ID NO: 503901 - DNA, 30 bp, Artificial Sequence
  Synthetic oligonucleotide
gaatatctagaagattccagaagatgactt

SEQ ID NO: 503902 - DNA, 30 bp, Artificial Sequence
  Synthetic oligonucleotide
gctcgacacgctgactttctcagatgactt

SEQ ID NO: 503903 - DNA, 30 bp, Artificial Sequence
  Synthetic oligonucleotide
aattttcagcgaatggtctggtactgactt

SEQ ID NO: 503904 - DNA, 30 bp, Artificial Sequence
  Synthetic oligonucleotide
atcgtagcgctgctgagaacactttgactt

SEQ ID NO: 503905 - DNA, 30 bp, Artificial Sequence
  Synthetic oligonucleotide
atcacaacacattatatcttcttttgactt

SEQ ID NO: 503906 - DNA, 30 bp, Artificial Sequence
  Synthetic oligonucleotide
aatcctaaacgctgaagcacggacatactt

SEQ ID NO: 503907 - DNA, 30 bp, Artificial Sequence
  Synthetic oligonucleotide
ttgtttgaccgaacatagctagagatactt

SEQ ID NO: 503908 - DNA, 30 bp, Artificial Sequence
  Synthetic oligonucleotide
ttgtcttcatctatcacctggaggatactt

SEQ ID NO: 503909 - DNA, 30 bp, Artificial Sequence
  Synthetic oligonucleotide
agaagtggccgccacgaccgggatatactt

SEQ ID NO: 503910 - DNA, 30 bp, Artificial Sequence
  Synthetic oligonucleotide
agttaataatgtggactatagacactactt

SEQ ID NO: 503911 - DNA, 30 bp, Artificial Sequence
  Synthetic oligonucleotide
tggcagcagacagagccattatcactactt

SEQ ID NO: 503912 - DNA, 30 bp, Artificial Sequence
  Synthetic oligonucleotide
gtgcagttactgtgccggcacttactactt

SEQ ID NO: 503913 - DNA, 30 bp, Artificial Sequence
  Synthetic oligonucleotide
gagaataataaggaactgaaaatcctactt

SEQ ID NO: 503914 - DNA, 30 bp, Artificial Sequence
  Synthetic oligonucleotide
tggcaacttctaagtacgctgtaagtactt

SEQ ID NO: 503915 - DNA, 30 bp, Artificial Sequence
  Synthetic oligonucleotide
aaccatactaacaattgagtattagtactt

SEQ ID NO: 503916 - DNA, 30 bp, Artificial Sequence
  Synthetic oligonucleotide
aaaaatgtcagtgaccggtatcaggtactt

SEQ ID NO: 503917 - DNA, 30 bp, Artificial Sequence
  Synthetic oligonucleotide
cccatagcgagcaaatgatgtgaggtactt

SEQ ID NO: 503918 - DNA, 30 bp, Artificial Sequence
  Synthetic oligonucleotide
gataaccgactttaagtaccgttggtactt

SEQ ID NO: 503919 - DNA, 30 bp, Artificial Sequence
  Synthetic oligonucleotide
tatccaagaagcgagggctggttggtactt

SEQ ID NO: 503920 - DNA, 30 bp, Artificial Sequence
  Synthetic oligonucleotide
attggtgacgggaagggggtaaatgtactt

SEQ ID NO: 503921 - DNA, 30 bp, Artificial Sequence
  Synthetic oligonucleotide
tcttgttcgaacgagcttgatggtgtactt

SEQ ID NO: 503922 - DNA, 30 bp, Artificial Sequence
  Synthetic oligonucleotide
gaaagaaaagctgtgtattgtgttgtactt

SEQ ID NO: 503923 - DNA, 30 bp, Artificial Sequence
  Synthetic oligonucleotide
atgcgggcagttcattactttacattactt

SEQ ID NO: 503924 - DNA, 30 bp, Artificial Sequence
  Synthetic oligonucleotide
gcgcgtgttgcggcaataaatccattactt

SEQ ID NO: 503925 - DNA, 30 bp, Artificial Sequence
  Synthetic oligonucleotide
attgagcaatgaggttccaaagtattactt

SEQ ID NO: 503926 - DNA, 30 bp, Artificial Sequence
  Synthetic oligonucleotide
tgtttccattactaccttctcagtttactt

SEQ ID NO: 503927 - DNA, 30 bp, Artificial Sequence
  Synthetic oligonucleotide
ctaccaatcatttttgggggcggaaacctt

SEQ ID NO: 503928 - DNA, 30 bp, Artificial Sequence
  Synthetic oligonucleotide
aatcgcggcgggcagccaagtaacaacctt

SEQ ID NO: 503929 - DNA, 30 bp, Artificial Sequence
  Synthetic oligonucleotide
agacgctcaaggaagagccccgccaacctt

SEQ ID NO: 503930 - DNA, 30 bp, Artificial Sequence
  Synthetic oligonucleotide
ggggcggatatacaaaagagtatcaacctt

SEQ ID NO: 503931 - DNA, 30 bp, Artificial Sequence
  Synthetic oligonucleotide
gttacgtgtcgggcgtctaggtggaacctt

SEQ ID NO: 503932 - DNA, 30 bp, Artificial Sequence
  Synthetic oligonucleotide
gatgttcagtaggttttactagtgaacctt

SEQ ID NO: 503933 - DNA, 30 bp, Artificial Sequence
  Synthetic oligonucleotide
ttcaagctagaagttgtgttgcttaacctt

SEQ ID NO: 503934 - DNA, 30 bp, Artificial Sequence
  Synthetic oligonucleotide
cagcttcgtgacggtgtctctcaacacctt

SEQ ID NO: 503935 - DNA, 30 bp, Artificial Sequence
  Synthetic oligonucleotide
accacacgcagcaaattacttggacacctt

SEQ ID NO: 503936 - DNA, 30 bp, Artificial Sequence
  Synthetic oligonucleotide
taggctctgtcgcgcatacgttcgcacctt

SEQ ID NO: 503937 - DNA, 30 bp, Artificial Sequence
  Synthetic oligonucleotide
tgaggctcaagcgctctaggttcgcacctt

SEQ ID NO: 503938 - DNA, 30 bp, Artificial Sequence
  Synthetic oligonucleotide
cccacattcctggttgtggtaaatcacctt

SEQ ID NO: 503939 - DNA, 30 bp, Artificial Sequence
  Synthetic oligonucleotide
cttctatagcggctgggtctccaagacctt

SEQ ID NO: 503940 - DNA, 30 bp, Artificial Sequence
  Synthetic oligonucleotide
caaacggtgcatggcccgttcgtagacctt

SEQ ID NO: 503941 - DNA, 30 bp, Artificial Sequence
  Synthetic oligonucleotide
gagccgaatggtcaaaagaatacggacctt

SEQ ID NO: 503942 - DNA, 30 bp, Artificial Sequence
  Synthetic oligonucleotide
cgccggatacagcccgcaggctgggacctt

SEQ ID NO: 503943 - DNA, 30 bp, Artificial Sequence
  Synthetic oligonucleotide
ctatttgggcattctaagatattggacctt

SEQ ID NO: 503944 - DNA, 30 bp, Artificial Sequence
  Synthetic oligonucleotide
accatgtttggagaggcggtataatacctt

SEQ ID NO: 503945 - DNA, 30 bp, Artificial Sequence
  Synthetic oligonucleotide
atcgagcgtggtttttttgtcctctacctt

SEQ ID NO: 503946 - DNA, 30 bp, Artificial Sequence
  Synthetic oligonucleotide
tattccggaggtcgtcctaggttgtacctt

SEQ ID NO: 503947 - DNA, 30 bp, Artificial Sequence
  Synthetic oligonucleotide
ttcagcaaagttgtacattctccttacctt

SEQ ID NO: 503948 - DNA, 30 bp, Artificial Sequence
  Synthetic oligonucleotide
aaacactcataatgcatcgaaggaaccctt

SEQ ID NO: 503949 - DNA, 30 bp, Artificial Sequence
  Synthetic oligonucleotide
ccatggcatgtgtttgagtcgaacaccctt

SEQ ID NO: 503950 - DNA, 30 bp, Artificial Sequence
  Synthetic oligonucleotide
cccagtgactggatacttttgaccaccctt

SEQ ID NO: 503951 - DNA, 30 bp, Artificial Sequence
  Synthetic oligonucleotide
tgtccccattagtgcatttgcagtaccctt

SEQ ID NO: 503952 - DNA, 30 bp, Artificial Sequence
  Synthetic oligonucleotide
gagacgactgggaccagaaacatacccctt

SEQ ID NO: 503953 - DNA, 30 bp, Artificial Sequence
  Synthetic oligonucleotide
gaccgggtattggagggcccccaccccctt

SEQ ID NO: 503954 - DNA, 30 bp, Artificial Sequence
  Synthetic oligonucleotide
cggttgcgaaagccttttcgcgacgccctt

SEQ ID NO: 503955 - DNA, 30 bp, Artificial Sequence
  Synthetic oligonucleotide
gtgtccgctgcgggataatccctggccctt

SEQ ID NO: 503956 - DNA, 30 bp, Artificial Sequence
  Synthetic oligonucleotide
caattcaatccatttctacggagtgccctt

SEQ ID NO: 503957 - DNA, 30 bp, Artificial Sequence
  Synthetic oligonucleotide
tgctttgatgtgtttcgtgggacatccctt

SEQ ID NO: 503958 - DNA, 30 bp, Artificial Sequence
  Synthetic oligonucleotide
gacatagtgcctggggccgctggatccctt

SEQ ID NO: 503959 - DNA, 30 bp, Artificial Sequence
  Synthetic oligonucleotide
ttgtaaaggcgcctcagtatctgatccctt

SEQ ID NO: 503960 - DNA, 30 bp, Artificial Sequence
  Synthetic oligonucleotide
gggaccgagcaaatgcgcgcttattccctt

SEQ ID NO: 503961 - DNA, 30 bp, Artificial Sequence
  Synthetic oligonucleotide
caattaacattgattcttggtgcttccctt

SEQ ID NO: 503962 - DNA, 30 bp, Artificial Sequence
  Synthetic oligonucleotide
tggtctatacattatcccgagttttccctt

SEQ ID NO: 503963 - DNA, 30 bp, Artificial Sequence
  Synthetic oligonucleotide
tctaaagttggaggccgctgcaacagcctt

SEQ ID NO: 503964 - DNA, 30 bp, Artificial Sequence
  Synthetic oligonucleotide
ttaccgtaacttagatcgcggcacagcctt

SEQ ID NO: 503965 - DNA, 30 bp, Artificial Sequence
  Synthetic oligonucleotide
aagcaaagctatgcaggaaagaccagcctt

SEQ ID NO: 503966 - DNA, 30 bp, Artificial Sequence
  Synthetic oligonucleotide
cgacttagcacgagaacctctatgagcctt

SEQ ID NO: 503967 - DNA, 30 bp, Artificial Sequence
  Synthetic oligonucleotide
tttggtgtagttgcaatgtggtatagcctt

SEQ ID NO: 503968 - DNA, 30 bp, Artificial Sequence
  Synthetic oligonucleotide
gacgaggcaggaagttaggtagctagcctt

SEQ ID NO: 503969 - DNA, 30 bp, Artificial Sequence
  Synthetic oligonucleotide
gcaccgttcgcaatgaccgacggtagcctt

SEQ ID NO: 503970 - DNA, 30 bp, Artificial Sequence
  Synthetic oligonucleotide
ctgcacaagaccgtattgcaattacgcctt

SEQ ID NO: 503971 - DNA, 30 bp, Artificial Sequence
  Synthetic oligonucleotide
attagtcaaccttggccacaaacccgcctt

SEQ ID NO: 503972 - DNA, 30 bp, Artificial Sequence
  Synthetic oligonucleotide
gagttgtctccagcaacccagctccgcctt

SEQ ID NO: 503973 - DNA, 30 bp, Artificial Sequence
  Synthetic oligonucleotide
acatcgcaaagctacaacgggacgcgcctt

SEQ ID NO: 503974 - DNA, 28 bp, Artificial Sequence
  Synthetic oligonucleotide
gattcgatagttgatattggctcgcctt

SEQ ID NO: 503975 - DNA, 30 bp, Artificial Sequence
  Synthetic oligonucleotide
cggtctcacgtgcccgcggcatctcgcctt

SEQ ID NO: 503976 - DNA, 30 bp, Artificial Sequence
  Synthetic oligonucleotide
gtcatttattcaggcgctgtgtctcgcctt

SEQ ID NO: 503977 - DNA, 29 bp, Artificial Sequence
  Synthetic oligonucleotide
cgaccatacgcaataaaagcagtcgcctt

SEQ ID NO: 503978 - DNA, 30 bp, Artificial Sequence
  Synthetic oligonucleotide
gggttagatacgcacgcatgttgtcgcctt

SEQ ID NO: 503979 - DNA, 30 bp, Artificial Sequence
  Synthetic oligonucleotide
cacgttcgttggtttatccgcagaggcctt

SEQ ID NO: 503980 - DNA, 30 bp, Artificial Sequence
  Synthetic oligonucleotide
ccgaagcccgcgttattccagataggcctt

SEQ ID NO: 503981 - DNA, 30 bp, Artificial Sequence
  Synthetic oligonucleotide
attcgcttttgcagagccaggtccggcctt

SEQ ID NO: 503982 - DNA, 30 bp, Artificial Sequence
  Synthetic oligonucleotide
cttatatctgttgacgcccatatcggcctt

SEQ ID NO: 503983 - DNA, 30 bp, Artificial Sequence
  Synthetic oligonucleotide
aggcagtacagagcagtccaagtcggcctt

SEQ ID NO: 503984 - DNA, 30 bp, Artificial Sequence
  Synthetic oligonucleotide
ttagtttatggacacgaaggaaagggcctt

SEQ ID NO: 503985 - DNA, 30 bp, Artificial Sequence
  Synthetic oligonucleotide
cataaattgcataatgtatcctatggcctt

SEQ ID NO: 503986 - DNA, 30 bp, Artificial Sequence
  Synthetic oligonucleotide
tggtccacacactggtgagctagtggcctt

SEQ ID NO: 503987 - DNA, 30 bp, Artificial Sequence
  Synthetic oligonucleotide
cagttaagatacacgcgccgtaaatgcctt

SEQ ID NO: 503988 - DNA, 30 bp, Artificial Sequence
  Synthetic oligonucleotide
cccacgtgtacagcagggatgcaatgcctt

SEQ ID NO: 503989 - DNA, 30 bp, Artificial Sequence
  Synthetic oligonucleotide
aacatgcatggccagacactaagatgcctt

SEQ ID NO: 503990 - DNA, 30 bp, Artificial Sequence
  Synthetic oligonucleotide
cccgatggatagcgtgatcgcgcctgcctt

SEQ ID NO: 503991 - DNA, 30 bp, Artificial Sequence
  Synthetic oligonucleotide
ggaaaattcataatcaagacaaagtgcctt

SEQ ID NO: 503992 - DNA, 30 bp, Artificial Sequence
  Synthetic oligonucleotide
taacgtctagcttagtcaccagagtgcctt

SEQ ID NO: 503993 - DNA, 30 bp, Artificial Sequence
  Synthetic oligonucleotide
cggtgtcctaaatgcacgatctagtgcctt

SEQ ID NO: 503994 - DNA, 30 bp, Artificial Sequence
  Synthetic oligonucleotide
gagtcctcgtaacatcgccttacttgcctt

SEQ ID NO: 503995 - DNA, 30 bp, Artificial Sequence
  Synthetic oligonucleotide
gagttgttgaacagcatgctcaaaatcctt

SEQ ID NO: 503996 - DNA, 30 bp, Artificial Sequence
  Synthetic oligonucleotide
tttgaggactatagacacgggtgcatcctt

SEQ ID NO: 503997 - DNA, 30 bp, Artificial Sequence
  Synthetic oligonucleotide
atttctttttaacatgagtgtaagatcctt

SEQ ID NO: 503998 - DNA, 30 bp, Artificial Sequence
  Synthetic oligonucleotide
tggcctattactccggccctatagatcctt

SEQ ID NO: 503999 - DNA, 30 bp, Artificial Sequence
  Synthetic oligonucleotide
gaaagtttatatgttctagtgccgatcctt

SEQ ID NO: 504000 - DNA, 30 bp, Artificial Sequence
  Synthetic oligonucleotide
aaggggttacaacagatttaatgactcctt

SEQ ID NO: 504001 - DNA, 30 bp, Artificial Sequence
  Synthetic oligonucleotide
aagaaagttggtcgcagtgagctactcctt

SEQ ID NO: 504002 - DNA, 30 bp, Artificial Sequence
  Synthetic oligonucleotide
attgttgttggttttgtcgccgccctcctt

SEQ ID NO: 504003 - DNA, 30 bp, Artificial Sequence
  Synthetic oligonucleotide
gcctttctgaatgagtctgagccgctcctt

SEQ ID NO: 504004 - DNA, 30 bp, Artificial Sequence
  Synthetic oligonucleotide
ccccgatcacggaatctgggtaaagtcctt

SEQ ID NO: 504005 - DNA, 30 bp, Artificial Sequence
  Synthetic oligonucleotide
agatccgccctctactcaccgcgagtcctt

SEQ ID NO: 504006 - DNA, 30 bp, Artificial Sequence
  Synthetic oligonucleotide
gtgtcaaccgacttaataacggcggtcctt

SEQ ID NO: 504007 - DNA, 30 bp, Artificial Sequence
  Synthetic oligonucleotide
tcgccagctaaggtcaggatgtctgtcctt

SEQ ID NO: 504008 - DNA, 30 bp, Artificial Sequence
  Synthetic oligonucleotide
gtttcccgtgaccatatcacagtattcctt

SEQ ID NO: 504009 - DNA, 30 bp, Artificial Sequence
  Synthetic oligonucleotide
tgatggatgattaattacccattattcctt

SEQ ID NO: 504010 - DNA, 30 bp, Artificial Sequence
  Synthetic oligonucleotide
aagattggcttatatatagccaacttcctt

SEQ ID NO: 504011 - DNA, 30 bp, Artificial Sequence
  Synthetic oligonucleotide
cgagtttcgagatgccactagggcttcctt

SEQ ID NO: 504012 - DNA, 30 bp, Artificial Sequence
  Synthetic oligonucleotide
aataagtcgacacggttgtggttgttcctt

SEQ ID NO: 504013 - DNA, 29 bp, Artificial Sequence
  Synthetic oligonucleotide
gctaggctgattctgggtgccctttcctt

SEQ ID NO: 504014 - DNA, 30 bp, Artificial Sequence
  Synthetic oligonucleotide
cgggtgctataaggacgttgtaaaaagctt

SEQ ID NO: 504015 - DNA, 30 bp, Artificial Sequence
  Synthetic oligonucleotide
gctaaagcccgcacacatgtggcgaagctt

SEQ ID NO: 504016 - DNA, 30 bp, Artificial Sequence
  Synthetic oligonucleotide
tttagcaaaggtgctttagaagtgaagctt

SEQ ID NO: 504017 - DNA, 30 bp, Artificial Sequence
  Synthetic oligonucleotide
tttgggggcccgcagaacactgctaagctt

SEQ ID NO: 504018 - DNA, 30 bp, Artificial Sequence
  Synthetic oligonucleotide
gacagctgcttgtactttgcgaaacagctt

SEQ ID NO: 504019 - DNA, 30 bp, Artificial Sequence
  Synthetic oligonucleotide
taaaaccaggtcttacgttagacacagctt

SEQ ID NO: 504020 - DNA, 30 bp, Artificial Sequence
  Synthetic oligonucleotide
gtatcctcggaactacttatgtaccagctt

SEQ ID NO: 504021 - DNA, 30 bp, Artificial Sequence
  Synthetic oligonucleotide
gccagctgtggacgcagggtgtaccagctt

SEQ ID NO: 504022 - DNA, 30 bp, Artificial Sequence
  Synthetic oligonucleotide
cagccctgtaactccacggtgcgccagctt

SEQ ID NO: 504023 - DNA, 30 bp, Artificial Sequence
  Synthetic oligonucleotide
caaattttagctacggtgtaatgccagctt

SEQ ID NO: 504024 - DNA, 30 bp, Artificial Sequence
  Synthetic oligonucleotide
tagcaagcaaatcagcatacttggcagctt

SEQ ID NO: 504025 - DNA, 30 bp, Artificial Sequence
  Synthetic oligonucleotide
ggtaaatggaaaactgagacgttgcagctt

SEQ ID NO: 504026 - DNA, 30 bp, Artificial Sequence
  Synthetic oligonucleotide
cttcatgacataatagcagcccatcagctt

SEQ ID NO: 504027 - DNA, 30 bp, Artificial Sequence
  Synthetic oligonucleotide
gaaccatggacttgaagggggcctcagctt

SEQ ID NO: 504028 - DNA, 30 bp, Artificial Sequence
  Synthetic oligonucleotide
taaagaaccgcttccatatacgacgagctt

SEQ ID NO: 504029 - DNA, 30 bp, Artificial Sequence
  Synthetic oligonucleotide
ctcacctcgtttctcaggtcttacgagctt

SEQ ID NO: 504030 - DNA, 30 bp, Artificial Sequence
  Synthetic oligonucleotide
ggcggggtgcacgggaggtcctgggagctt

SEQ ID NO: 504031 - DNA, 30 bp, Artificial Sequence
  Synthetic oligonucleotide
ttaaatttgggggtcttccggtgggagctt

SEQ ID NO: 504032 - DNA, 30 bp, Artificial Sequence
  Synthetic oligonucleotide
attcgtaattcatccgcaggtgtggagctt

SEQ ID NO: 504033 - DNA, 30 bp, Artificial Sequence
  Synthetic oligonucleotide
cataggtttaaatacagggttttggagctt

SEQ ID NO: 504034 - DNA, 30 bp, Artificial Sequence
  Synthetic oligonucleotide
ggttgcggttttatgtgtgaagatgagctt

SEQ ID NO: 504035 - DNA, 30 bp, Artificial Sequence
  Synthetic oligonucleotide
atcctgttaggccggacctgggatgagctt

SEQ ID NO: 504036 - DNA, 30 bp, Artificial Sequence
  Synthetic oligonucleotide
ttatatggacccgcaccccccctatagctt

SEQ ID NO: 504037 - DNA, 30 bp, Artificial Sequence
  Synthetic oligonucleotide
gtttcataaaacacggaacgctggtagctt

SEQ ID NO: 504038 - DNA, 30 bp, Artificial Sequence
  Synthetic oligonucleotide
gaccagattggtggggaagttgtgtagctt

SEQ ID NO: 504039 - DNA, 30 bp, Artificial Sequence
  Synthetic oligonucleotide
gatttaaccatatttcactgaccttagctt

SEQ ID NO: 504040 - DNA, 30 bp, Artificial Sequence
  Synthetic oligonucleotide
aatagaacccgtgaacaatgcaaaacgctt

SEQ ID NO: 504041 - DNA, 30 bp, Artificial Sequence
  Synthetic oligonucleotide
gtgagaattgtgtaatgtatcgcaacgctt

SEQ ID NO: 504042 - DNA, 30 bp, Artificial Sequence
  Synthetic oligonucleotide
cggacacgtcttttagggtctcgaacgctt

SEQ ID NO: 504043 - DNA, 30 bp, Artificial Sequence
  Synthetic oligonucleotide
tcgttttgaaacgtccatactagcacgctt

SEQ ID NO: 504044 - DNA, 30 bp, Artificial Sequence
  Synthetic oligonucleotide
ggtggggtcgatcggattaccaggacgctt

SEQ ID NO: 504045 - DNA, 30 bp, Artificial Sequence
  Synthetic oligonucleotide
ggcaatgccgcagaacggctcatgacgctt

SEQ ID NO: 504046 - DNA, 30 bp, Artificial Sequence
  Synthetic oligonucleotide
cacgacctctcctctattgcatttacgctt

SEQ ID NO: 504047 - DNA, 30 bp, Artificial Sequence
  Synthetic oligonucleotide
ccctcccacagcgtgggtagtggaccgctt

SEQ ID NO: 504048 - DNA, 30 bp, Artificial Sequence
  Synthetic oligonucleotide
gccatcgggtacttagcgcagcacccgctt

SEQ ID NO: 504049 - DNA, 30 bp, Artificial Sequence
  Synthetic oligonucleotide
taatgggtagtagagcggtcaaagccgctt

SEQ ID NO: 504050 - DNA, 30 bp, Artificial Sequence
  Synthetic oligonucleotide
agtgtcgcctaaccggtgcctacgccgctt

SEQ ID NO: 504051 - DNA, 30 bp, Artificial Sequence
  Synthetic oligonucleotide
agactcattatagggcgattattgccgctt

SEQ ID NO: 504052 - DNA, 30 bp, Artificial Sequence
  Synthetic oligonucleotide
gagtttaagctggaagactatttgccgctt

SEQ ID NO: 504053 - DNA, 30 bp, Artificial Sequence
  Synthetic oligonucleotide
atatcgttagcgcatagactggttccgctt

SEQ ID NO: 504054 - DNA, 30 bp, Artificial Sequence
  Synthetic oligonucleotide
ctctgagcgctcgattattaattggcgctt

SEQ ID NO: 504055 - DNA, 30 bp, Artificial Sequence
  Synthetic oligonucleotide
acttacagacgaatctgaacgcttgcgctt

SEQ ID NO: 504056 - DNA, 30 bp, Artificial Sequence
  Synthetic oligonucleotide
cttcaaagccttagtattcgcaaatcgctt

SEQ ID NO: 504057 - DNA, 30 bp, Artificial Sequence
  Synthetic oligonucleotide
aaatggtaccaatagctagacccatcgctt

SEQ ID NO: 504058 - DNA, 30 bp, Artificial Sequence
  Synthetic oligonucleotide
tactttccaggcggtaataccttctcgctt

SEQ ID NO: 504059 - DNA, 30 bp, Artificial Sequence
  Synthetic oligonucleotide
gctgctaggctcagctccatctagtcgctt

SEQ ID NO: 504060 - DNA, 30 bp, Artificial Sequence
  Synthetic oligonucleotide
ccgaacttcacctgaatgcaacggtcgctt

SEQ ID NO: 504061 - DNA, 30 bp, Artificial Sequence
  Synthetic oligonucleotide
cggcggtggaccaggcaaatacggtcgctt

SEQ ID NO: 504062 - DNA, 30 bp, Artificial Sequence
  Synthetic oligonucleotide
tagtcagccttcgaggtggaatggtcgctt

SEQ ID NO: 504063 - DNA, 30 bp, Artificial Sequence
  Synthetic oligonucleotide
acttacgtggctgttcacctaggttcgctt

SEQ ID NO: 504064 - DNA, 30 bp, Artificial Sequence
  Synthetic oligonucleotide
cgaggcggacttcaattggtacgcaggctt

SEQ ID NO: 504065 - DNA, 30 bp, Artificial Sequence
  Synthetic oligonucleotide
ggatagcaaatttatattacacagaggctt

SEQ ID NO: 504066 - DNA, 30 bp, Artificial Sequence
  Synthetic oligonucleotide
ggtttttaataatattatttggggaggctt

SEQ ID NO: 504067 - DNA, 30 bp, Artificial Sequence
  Synthetic oligonucleotide
attttactggccagttcgccagttaggctt

SEQ ID NO: 504068 - DNA, 30 bp, Artificial Sequence
  Synthetic oligonucleotide
ataagcggtggcaaaaggaataggcggctt

SEQ ID NO: 504069 - DNA, 30 bp, Artificial Sequence
  Synthetic oligonucleotide
atagtaagcgtaatgccgcatatgcggctt

SEQ ID NO: 504070 - DNA, 30 bp, Artificial Sequence
  Synthetic oligonucleotide
cgctcacgttacaggtaaacccgtcggctt

SEQ ID NO: 504071 - DNA, 30 bp, Artificial Sequence
  Synthetic oligonucleotide
caaccgggtgacgtaaccgcaaaagggctt

SEQ ID NO: 504072 - DNA, 30 bp, Artificial Sequence
  Synthetic oligonucleotide
atactagcggccgcccaatgaacagggctt

SEQ ID NO: 504073 - DNA, 30 bp, Artificial Sequence
  Synthetic oligonucleotide
tgctattgctagcatgtcctaccagggctt

SEQ ID NO: 504074 - DNA, 30 bp, Artificial Sequence
  Synthetic oligonucleotide
catgaagattaattttgccaaagagggctt

SEQ ID NO: 504075 - DNA, 30 bp, Artificial Sequence
  Synthetic oligonucleotide
tgagagaaacgctgcattggtgtagggctt

SEQ ID NO: 504076 - DNA, 30 bp, Artificial Sequence
  Synthetic oligonucleotide
acttggatatagaatgaacacgacgggctt

SEQ ID NO: 504077 - DNA, 30 bp, Artificial Sequence
  Synthetic oligonucleotide
agaatatctccagtgggtgctggggggctt

SEQ ID NO: 504078 - DNA, 30 bp, Artificial Sequence
  Synthetic oligonucleotide
atatgcacgaccttaaggacaaatgggctt

SEQ ID NO: 504079 - DNA, 30 bp, Artificial Sequence
  Synthetic oligonucleotide
gagtattcataaatccacaaggatgggctt

SEQ ID NO: 504080 - DNA, 30 bp, Artificial Sequence
  Synthetic oligonucleotide
gatgatattggcgcccaaaaagttgggctt

SEQ ID NO: 504081 - DNA, 30 bp, Artificial Sequence
  Synthetic oligonucleotide
tacgcgggtcaacgcacgtgctaatggctt

SEQ ID NO: 504082 - DNA, 30 bp, Artificial Sequence
  Synthetic oligonucleotide
aaacatatctttcaaatattgtggtggctt

SEQ ID NO: 504083 - DNA, 30 bp, Artificial Sequence
  Synthetic oligonucleotide
aaacgtgctatagtatagtttatgtggctt

SEQ ID NO: 504084 - DNA, 30 bp, Artificial Sequence
  Synthetic oligonucleotide
tcagagaaaaggaggcggctcctttggctt

SEQ ID NO: 504085 - DNA, 30 bp, Artificial Sequence
  Synthetic oligonucleotide
ggtaactctacatttactacaaaaatgctt

SEQ ID NO: 504086 - DNA, 31 bp, Artificial Sequence
  Synthetic oligonucleotide
tatattctggtacagtgttcttaacatgctt

SEQ ID NO: 504087 - DNA, 30 bp, Artificial Sequence
  Synthetic oligonucleotide
cacagcgctctatagttctgagacatgctt

SEQ ID NO: 504088 - DNA, 30 bp, Artificial Sequence
  Synthetic oligonucleotide
gtaacagcctcgaggttcgtaaccatgctt

SEQ ID NO: 504089 - DNA, 30 bp, Artificial Sequence
  Synthetic oligonucleotide
ccggaaaaataccctcatctcggactgctt

SEQ ID NO: 504090 - DNA, 31 bp, Artificial Sequence
  Synthetic oligonucleotide
ttgctcataatttacataccttggcctgctt

SEQ ID NO: 504091 - DNA, 30 bp, Artificial Sequence
  Synthetic oligonucleotide
tcgaattgttgcagcataatgttcgtgctt

SEQ ID NO: 504092 - DNA, 30 bp, Artificial Sequence
  Synthetic oligonucleotide
agggtcgtggacggatgcggttaggtgctt

SEQ ID NO: 504093 - DNA, 30 bp, Artificial Sequence
  Synthetic oligonucleotide
agggtccccggtgtatggattgcggtgctt

SEQ ID NO: 504094 - DNA, 30 bp, Artificial Sequence
  Synthetic oligonucleotide
ttgaaagaagggaataaaaatcccttgctt

SEQ ID NO: 504095 - DNA, 30 bp, Artificial Sequence
  Synthetic oligonucleotide
ctagtaaatttgtccggactatatttgctt

SEQ ID NO: 504096 - DNA, 30 bp, Artificial Sequence
  Synthetic oligonucleotide
gagctgtcaacttaaggtgttgctttgctt

SEQ ID NO: 504097 - DNA, 30 bp, Artificial Sequence
  Synthetic oligonucleotide
ggttagtggttgagtgtcggctgtttgctt

SEQ ID NO: 504098 - DNA, 30 bp, Artificial Sequence
  Synthetic oligonucleotide
aagtcgacaaccccatagggccttttgctt

SEQ ID NO: 504099 - DNA, 30 bp, Artificial Sequence
  Synthetic oligonucleotide
gggttagccttctttgcctaccgcaatctt

SEQ ID NO: 504100 - DNA, 30 bp, Artificial Sequence
  Synthetic oligonucleotide
attcacgcacgaccgcaaattaataatctt

SEQ ID NO: 504101 - DNA, 30 bp, Artificial Sequence
  Synthetic oligonucleotide
accataagggccatcccctgcactaatctt

SEQ ID NO: 504102 - DNA, 29 bp, Artificial Sequence
  Synthetic oligonucleotide
tgactccatgaacgcccctgtgtaatctt

SEQ ID NO: 504103 - DNA, 30 bp, Artificial Sequence
  Synthetic oligonucleotide
ggatggctgagcatggccaaaggacatctt

SEQ ID NO: 504104 - DNA, 30 bp, Artificial Sequence
  Synthetic oligonucleotide
agccggcaggagcgagtgtcagtacatctt

SEQ ID NO: 504105 - DNA, 30 bp, Artificial Sequence
  Synthetic oligonucleotide
gcaaaattccaaagactgataagccatctt

SEQ ID NO: 504106 - DNA, 30 bp, Artificial Sequence
  Synthetic oligonucleotide
ggtattgacgaaagcgaccgagcgcatctt

SEQ ID NO: 504107 - DNA, 30 bp, Artificial Sequence
  Synthetic oligonucleotide
gatttatctctctaccaccatgtgcatctt

SEQ ID NO: 504108 - DNA, 30 bp, Artificial Sequence
  Synthetic oligonucleotide
tagcatccggtcgatagcaggactcatctt

SEQ ID NO: 504109 - DNA, 30 bp, Artificial Sequence
  Synthetic oligonucleotide
ctctactccattactttttgggctcatctt

SEQ ID NO: 504110 - DNA, 30 bp, Artificial Sequence
  Synthetic oligonucleotide
gactgatttaatattggtatgccagatctt

SEQ ID NO: 504111 - DNA, 30 bp, Artificial Sequence
  Synthetic oligonucleotide
cagatttagccgcatagtggtcacgatctt

SEQ ID NO: 504112 - DNA, 28 bp, Artificial Sequence
  Synthetic oligonucleotide
gggtttcgcaacactttaatacgatctt

SEQ ID NO: 504113 - DNA, 30 bp, Artificial Sequence
  Synthetic oligonucleotide
acgtgcccctcttatcgcagataatatctt

SEQ ID NO: 504114 - DNA, 30 bp, Artificial Sequence
  Synthetic oligonucleotide
agcgtaccgaactgagcctgtcgatatctt

SEQ ID NO: 504115 - DNA, 30 bp, Artificial Sequence
  Synthetic oligonucleotide
agggggtgacgatactataagatatatctt

SEQ ID NO: 504116 - DNA, 30 bp, Artificial Sequence
  Synthetic oligonucleotide
ttccgctatcgaactcattaagcttatctt

SEQ ID NO: 504117 - DNA, 30 bp, Artificial Sequence
  Synthetic oligonucleotide
ttccctaacgatctcaagggtatttatctt

SEQ ID NO: 504118 - DNA, 30 bp, Artificial Sequence
  Synthetic oligonucleotide
gatactgcaccggaatttatacaaactctt

SEQ ID NO: 504119 - DNA, 30 bp, Artificial Sequence
  Synthetic oligonucleotide
ctgatccatttggatgctccagcaactctt

SEQ ID NO: 504120 - DNA, 30 bp, Artificial Sequence
  Synthetic oligonucleotide
taatcctggctcttgtgtgtggtaactctt

SEQ ID NO: 504121 - DNA, 30 bp, Artificial Sequence
  Synthetic oligonucleotide
gcaccatacatagttgcacgcttaactctt

SEQ ID NO: 504122 - DNA, 30 bp, Artificial Sequence
  Synthetic oligonucleotide
ctcccaagacaaacggggggagttactctt

SEQ ID NO: 504123 - DNA, 30 bp, Artificial Sequence
  Synthetic oligonucleotide
catcattgttagcaagagcggatacctctt

SEQ ID NO: 504124 - DNA, 30 bp, Artificial Sequence
  Synthetic oligonucleotide
gtccaccctgaagcagtagtctaccctctt

SEQ ID NO: 504125 - DNA, 30 bp, Artificial Sequence
  Synthetic oligonucleotide
agttaagagcgaatctacaaaccgcctctt

SEQ ID NO: 504126 - DNA, 30 bp, Artificial Sequence
  Synthetic oligonucleotide
agagaggatatttggcttcatgatcctctt

SEQ ID NO: 504127 - DNA, 30 bp, Artificial Sequence
  Synthetic oligonucleotide
ttgcgcggttttgccgggctaacggctctt

SEQ ID NO: 504128 - DNA, 30 bp, Artificial Sequence
  Synthetic oligonucleotide
agtcagtctggcaatgttaatccggctctt

SEQ ID NO: 504129 - DNA, 30 bp, Artificial Sequence
  Synthetic oligonucleotide
agctaaagctgttttacatccattgctctt

SEQ ID NO: 504130 - DNA, 30 bp, Artificial Sequence
  Synthetic oligonucleotide
gtaatgatgggtagctacagtcgatctctt

SEQ ID NO: 504131 - DNA, 30 bp, Artificial Sequence
  Synthetic oligonucleotide
aacctggtcctatcctcgtcaggatctctt

SEQ ID NO: 504132 - DNA, 30 bp, Artificial Sequence
  Synthetic oligonucleotide
agtaaaatagaaatacgcataggatctctt

SEQ ID NO: 504133 - DNA, 30 bp, Artificial Sequence
  Synthetic oligonucleotide
ttcaccttagcaggggcggatctctctctt

SEQ ID NO: 504134 - DNA, 30 bp, Artificial Sequence
  Synthetic oligonucleotide
caccccatatgataggagcaagcttctctt

SEQ ID NO: 504135 - DNA, 30 bp, Artificial Sequence
  Synthetic oligonucleotide
actttgtgctcccagtttaacacaagtctt

SEQ ID NO: 504136 - DNA, 30 bp, Artificial Sequence
  Synthetic oligonucleotide
gagtgttcgagcgtgttatttataagtctt

SEQ ID NO: 504137 - DNA, 30 bp, Artificial Sequence
  Synthetic oligonucleotide
aagacagtaattctgacgttggtcagtctt

SEQ ID NO: 504138 - DNA, 30 bp, Artificial Sequence
  Synthetic oligonucleotide
ggaaaatactatcatacgaagcttagtctt

SEQ ID NO: 504139 - DNA, 30 bp, Artificial Sequence
  Synthetic oligonucleotide
gccatcagacgtagctagagagttagtctt

SEQ ID NO: 504140 - DNA, 30 bp, Artificial Sequence
  Synthetic oligonucleotide
caaccactgctgattggcacaaaacgtctt

SEQ ID NO: 504141 - DNA, 30 bp, Artificial Sequence
  Synthetic oligonucleotide
tcacgcttccgggcgcggcactcacgtctt

SEQ ID NO: 504142 - DNA, 30 bp, Artificial Sequence
  Synthetic oligonucleotide
ctccgatggtgcgataggataacgcgtctt

SEQ ID NO: 504143 - DNA, 30 bp, Artificial Sequence
  Synthetic oligonucleotide
ttaactcccaaacaggcaatgtcgcgtctt

SEQ ID NO: 504144 - DNA, 30 bp, Artificial Sequence
  Synthetic oligonucleotide
gtgacggaaatattgcaccaaaaaggtctt

SEQ ID NO: 504145 - DNA, 30 bp, Artificial Sequence
  Synthetic oligonucleotide
gttatatttccggtttggtaataaggtctt

SEQ ID NO: 504146 - DNA, 30 bp, Artificial Sequence
  Synthetic oligonucleotide
caacatcggctcgacaattcttacggtctt

SEQ ID NO: 504147 - DNA, 31 bp, Artificial Sequence
  Synthetic oligonucleotide
aacgtgaaaccccatcgccaagtgcggtctt

SEQ ID NO: 504148 - DNA, 30 bp, Artificial Sequence
  Synthetic oligonucleotide
gaaggtatagtagttcggagctagggtctt

SEQ ID NO: 504149 - DNA, 30 bp, Artificial Sequence
  Synthetic oligonucleotide
acgtacagcaaaaatttgcgcgcgggtctt

SEQ ID NO: 504150 - DNA, 30 bp, Artificial Sequence
  Synthetic oligonucleotide
gcgttcctagaaccagcttataggggtctt

SEQ ID NO: 504151 - DNA, 30 bp, Artificial Sequence
  Synthetic oligonucleotide
taaaaacatatttgaccaacctggggtctt

SEQ ID NO: 504152 - DNA, 30 bp, Artificial Sequence
  Synthetic oligonucleotide
agtaccagtaaaattaaccggtggggtctt

SEQ ID NO: 504153 - DNA, 30 bp, Artificial Sequence
  Synthetic oligonucleotide
cttcaggtcaatgagttcactgatggtctt

SEQ ID NO: 504154 - DNA, 30 bp, Artificial Sequence
  Synthetic oligonucleotide
atgccaaacggtgatttgagccgtggtctt

SEQ ID NO: 504155 - DNA, 30 bp, Artificial Sequence
  Synthetic oligonucleotide
gtggcagattcttccaaaatatcctgtctt

SEQ ID NO: 504156 - DNA, 30 bp, Artificial Sequence
  Synthetic oligonucleotide
cgatattgttccttttacgaaagctgtctt

SEQ ID NO: 504157 - DNA, 30 bp, Artificial Sequence
  Synthetic oligonucleotide
gtggaggggatcgagctccccctctgtctt

SEQ ID NO: 504158 - DNA, 30 bp, Artificial Sequence
  Synthetic oligonucleotide
ggttctcttccgacgccgaacaagtgtctt

SEQ ID NO: 504159 - DNA, 30 bp, Artificial Sequence
  Synthetic oligonucleotide
tgcatgcaacgtcgaagtcaccattgtctt

SEQ ID NO: 504160 - DNA, 30 bp, Artificial Sequence
  Synthetic oligonucleotide
tctgttttatagctggttctcagttgtctt

SEQ ID NO: 504161 - DNA, 30 bp, Artificial Sequence
  Synthetic oligonucleotide
aattccaccgatccggctccactttgtctt

SEQ ID NO: 504162 - DNA, 30 bp, Artificial Sequence
  Synthetic oligonucleotide
gatattgtaaggtagtagcgtgaaattctt

SEQ ID NO: 504163 - DNA, 30 bp, Artificial Sequence
  Synthetic oligonucleotide
ctagctacacgtcaacaactacacattctt

SEQ ID NO: 504164 - DNA, 30 bp, Artificial Sequence
  Synthetic oligonucleotide
agtcaaagcgtcttgtgactgaccattctt

SEQ ID NO: 504165 - DNA, 30 bp, Artificial Sequence
  Synthetic oligonucleotide
cgaaattttgcgttttagaggccgattctt

SEQ ID NO: 504166 - DNA, 30 bp, Artificial Sequence
  Synthetic oligonucleotide
gtgatcggataagctttttaacatattctt

SEQ ID NO: 504167 - DNA, 30 bp, Artificial Sequence
  Synthetic oligonucleotide
taactttagactgcagggtttaggcttctt

SEQ ID NO: 504168 - DNA, 30 bp, Artificial Sequence
  Synthetic oligonucleotide
aaaagctgattagtacatgagttgcttctt

SEQ ID NO: 504169 - DNA, 30 bp, Artificial Sequence
  Synthetic oligonucleotide
aatcctgagaacgggtagacgggtcttctt

SEQ ID NO: 504170 - DNA, 30 bp, Artificial Sequence
  Synthetic oligonucleotide
ttgttagaaattggccgggtcgttcttctt

SEQ ID NO: 504171 - DNA, 30 bp, Artificial Sequence
  Synthetic oligonucleotide
acaatagctctgtgtgccccccgcgttctt

SEQ ID NO: 504172 - DNA, 30 bp, Artificial Sequence
  Synthetic oligonucleotide
gatattacggcgggtacctttatggttctt

SEQ ID NO: 504173 - DNA, 30 bp, Artificial Sequence
  Synthetic oligonucleotide
ggagaacggacaccgtgggtcagtgttctt

SEQ ID NO: 504174 - DNA, 30 bp, Artificial Sequence
  Synthetic oligonucleotide
tttcccatcgccggtaacaatggatttctt

SEQ ID NO: 504175 - DNA, 30 bp, Artificial Sequence
  Synthetic oligonucleotide
ccataggctatcattagcgactactttctt

SEQ ID NO: 504176 - DNA, 30 bp, Artificial Sequence
  Synthetic oligonucleotide
aaagtttaatcacctccaaaagcctttctt

SEQ ID NO: 504177 - DNA, 30 bp, Artificial Sequence
  Synthetic oligonucleotide
gtttctattcccagcataggcaagtttctt

SEQ ID NO: 504178 - DNA, 30 bp, Artificial Sequence
  Synthetic oligonucleotide
aactgtatttgcggactagtagcgtttctt

SEQ ID NO: 504179 - DNA, 30 bp, Artificial Sequence
  Synthetic oligonucleotide
tgtttgggaccgggtctggtaaggtttctt

SEQ ID NO: 504180 - DNA, 30 bp, Artificial Sequence
  Synthetic oligonucleotide
gcagcggctcggtagtttgttgggtttctt

SEQ ID NO: 504181 - DNA, 30 bp, Artificial Sequence
  Synthetic oligonucleotide
ataatcaaaactgtatctctgcattttctt

SEQ ID NO: 504182 - DNA, 30 bp, Artificial Sequence
  Synthetic oligonucleotide
tcatatttcgatttcaggtgaacttttctt

SEQ ID NO: 504183 - DNA, 30 bp, Artificial Sequence
  Synthetic oligonucleotide
attatgacgtgtgtcattacgtcaaaagtt

SEQ ID NO: 504184 - DNA, 30 bp, Artificial Sequence
  Synthetic oligonucleotide
tgctggaagcgtcgcttatcttgaaaagtt

SEQ ID NO: 504185 - DNA, 30 bp, Artificial Sequence
  Synthetic oligonucleotide
caccctcctcgccttctaggagtaaaagtt

SEQ ID NO: 504186 - DNA, 30 bp, Artificial Sequence
  Synthetic oligonucleotide
gaatatcatgccccagcacatcgcaaagtt

SEQ ID NO: 504187 - DNA, 30 bp, Artificial Sequence
  Synthetic oligonucleotide
gaaggttgggtttgtgatcactaacaagtt

SEQ ID NO: 504188 - DNA, 30 bp, Artificial Sequence
  Synthetic oligonucleotide
gtagtttattcggagaccgacacacaagtt

SEQ ID NO: 504189 - DNA, 30 bp, Artificial Sequence
  Synthetic oligonucleotide
cgcagcttaggttgcagctctgcccaagtt

SEQ ID NO: 504190 - DNA, 30 bp, Artificial Sequence
  Synthetic oligonucleotide
cccagcgcaggcagccctcccgggcaagtt

SEQ ID NO: 504191 - DNA, 30 bp, Artificial Sequence
  Synthetic oligonucleotide
gaactgtacaggttactccctgggcaagtt

SEQ ID NO: 504192 - DNA, 30 bp, Artificial Sequence
  Synthetic oligonucleotide
tggtgacatggaaggcacttgcgcgaagtt

SEQ ID NO: 504193 - DNA, 30 bp, Artificial Sequence
  Synthetic oligonucleotide
tgacacgggtgcaccaaaccaagggaagtt

SEQ ID NO: 504194 - DNA, 30 bp, Artificial Sequence
  Synthetic oligonucleotide
gtatttaaaatagatatggactatgaagtt

SEQ ID NO: 504195 - DNA, 31 bp, Artificial Sequence
  Synthetic oligonucleotide
aactcacaggaccgcactttcttgtgaagtt

SEQ ID NO: 504196 - DNA, 30 bp, Artificial Sequence
  Synthetic oligonucleotide
tggaataccgattagggtaccccataagtt

SEQ ID NO: 504197 - DNA, 30 bp, Artificial Sequence
  Synthetic oligonucleotide
ttgtggcacgaccgtttcagttattaagtt

SEQ ID NO: 504198 - DNA, 30 bp, Artificial Sequence
  Synthetic oligonucleotide
ggccttacttgtttagggttaacttaagtt

SEQ ID NO: 504199 - DNA, 30 bp, Artificial Sequence
  Synthetic oligonucleotide
taataaaattcagtgatcaccggttaagtt

SEQ ID NO: 504200 - DNA, 30 bp, Artificial Sequence
  Synthetic oligonucleotide
aatactcggcaatccggcttgggttaagtt

SEQ ID NO: 504201 - DNA, 30 bp, Artificial Sequence
  Synthetic oligonucleotide
gtgcatgcatacgggtcaggtttttaagtt

SEQ ID NO: 504202 - DNA, 30 bp, Artificial Sequence
  Synthetic oligonucleotide
cttcgctgcggaaattggttagcaacagtt

SEQ ID NO: 504203 - DNA, 30 bp, Artificial Sequence
  Synthetic oligonucleotide
acttggggaaaccatgggtgaagaacagtt

SEQ ID NO: 504204 - DNA, 30 bp, Artificial Sequence
  Synthetic oligonucleotide
atttaacccgtacccgggtactgaacagtt

SEQ ID NO: 504205 - DNA, 30 bp, Artificial Sequence
  Synthetic oligonucleotide
tcctcttacgtagtgcggcttggcacagtt

SEQ ID NO: 504206 - DNA, 30 bp, Artificial Sequence
  Synthetic oligonucleotide
aataatggttcatagaatgtttagacagtt

SEQ ID NO: 504207 - DNA, 30 bp, Artificial Sequence
  Synthetic oligonucleotide
gatactcatccttcgggaggcatgacagtt

SEQ ID NO: 504208 - DNA, 30 bp, Artificial Sequence
  Synthetic oligonucleotide
ttcacactgggcgcagctccccgtacagtt

SEQ ID NO: 504209 - DNA, 30 bp, Artificial Sequence
  Synthetic oligonucleotide
ctcctcagcattgtgggtactggtccagtt

SEQ ID NO: 504210 - DNA, 30 bp, Artificial Sequence
  Synthetic oligonucleotide
ataattactcgttatagcacgcttccagtt

SEQ ID NO: 504211 - DNA, 30 bp, Artificial Sequence
  Synthetic oligonucleotide
gcagttactgactacaaccgacgagcagtt

SEQ ID NO: 504212 - DNA, 30 bp, Artificial Sequence
  Synthetic oligonucleotide
taaaacacatagttcgcctgacacgcagtt

SEQ ID NO: 504213 - DNA, 30 bp, Artificial Sequence
  Synthetic oligonucleotide
tagattctggtcgcgaaaatgagcgcagtt

SEQ ID NO: 504214 - DNA, 30 bp, Artificial Sequence
  Synthetic oligonucleotide
cagtgttcagtgacgctctagatcgcagtt

SEQ ID NO: 504215 - DNA, 30 bp, Artificial Sequence
  Synthetic oligonucleotide
gagacattggagacgctcagactggcagtt

SEQ ID NO: 504216 - DNA, 30 bp, Artificial Sequence
  Synthetic oligonucleotide
caggatagaagttctaatcgggatgcagtt

SEQ ID NO: 504217 - DNA, 30 bp, Artificial Sequence
  Synthetic oligonucleotide
ggttgatattatagcacgtcagttgcagtt

SEQ ID NO: 504218 - DNA, 30 bp, Artificial Sequence
  Synthetic oligonucleotide
gaatttccgcccacggggaggaaatcagtt

SEQ ID NO: 504219 - DNA, 30 bp, Artificial Sequence
  Synthetic oligonucleotide
gttctggtagcgctcccctgttattcagtt

SEQ ID NO: 504220 - DNA, 30 bp, Artificial Sequence
  Synthetic oligonucleotide
ccggctaacttgtacgcggtagcaagagtt

SEQ ID NO: 504221 - DNA, 30 bp, Artificial Sequence
  Synthetic oligonucleotide
ctcgactagggtacggttgaagtaagagtt

SEQ ID NO: 504222 - DNA, 30 bp, Artificial Sequence
  Synthetic oligonucleotide
atcctaaccggctgggacatctatagagtt

SEQ ID NO: 504223 - DNA, 30 bp, Artificial Sequence
  Synthetic oligonucleotide
tgatcctccgggggaggaactcctagagtt

SEQ ID NO: 504224 - DNA, 30 bp, Artificial Sequence
  Synthetic oligonucleotide
gcaaaatcatgggttgaaaagattagagtt

SEQ ID NO: 504225 - DNA, 30 bp, Artificial Sequence
  Synthetic oligonucleotide
taatttaaattaacctatagataccgagtt

SEQ ID NO: 504226 - DNA, 30 bp, Artificial Sequence
  Synthetic oligonucleotide
gttacgattgtaacacgatatgcaggagtt

SEQ ID NO: 504227 - DNA, 30 bp, Artificial Sequence
  Synthetic oligonucleotide
tttgctcagtaccttgctcatcgaggagtt

SEQ ID NO: 504228 - DNA, 30 bp, Artificial Sequence
  Synthetic oligonucleotide
tacccaagtacatgcccgctccggggagtt

SEQ ID NO: 504229 - DNA, 30 bp, Artificial Sequence
  Synthetic oligonucleotide
tatttaatagaacggaatgctctgggagtt

SEQ ID NO: 504230 - DNA, 30 bp, Artificial Sequence
  Synthetic oligonucleotide
agccggtacatgactccatgatatggagtt

SEQ ID NO: 504231 - DNA, 30 bp, Artificial Sequence
  Synthetic oligonucleotide
aattgatgccacaccgattctcgtggagtt

SEQ ID NO: 504232 - DNA, 30 bp, Artificial Sequence
  Synthetic oligonucleotide
cggttactaaagcaactgaatacatgagtt

SEQ ID NO: 504233 - DNA, 30 bp, Artificial Sequence
  Synthetic oligonucleotide
cctgacagcaagcctacgagattatgagtt

SEQ ID NO: 504234 - DNA, 30 bp, Artificial Sequence
  Synthetic oligonucleotide
gtaagggtcttgctccaagcagcctgagtt

SEQ ID NO: 504235 - DNA, 30 bp, Artificial Sequence
  Synthetic oligonucleotide
tgtatttgaacttataggatgacttgagtt

SEQ ID NO: 504236 - DNA, 30 bp, Artificial Sequence
  Synthetic oligonucleotide
ggtatgtaatttgtcctggggaaaatagtt

SEQ ID NO: 504237 - DNA, 30 bp, Artificial Sequence
  Synthetic oligonucleotide
caatgcaaacatttcacgtctgaaatagtt

SEQ ID NO: 504238 - DNA, 30 bp, Artificial Sequence
  Synthetic oligonucleotide
ttgtaaacagttttatgcgcaagaatagtt

SEQ ID NO: 504239 - DNA, 30 bp, Artificial Sequence
  Synthetic oligonucleotide
atgcggacaggtgtagtcggccgaatagtt

SEQ ID NO: 504240 - DNA, 30 bp, Artificial Sequence
  Synthetic oligonucleotide
aaaatggggtcaggagttaaaccgatagtt

SEQ ID NO: 504241 - DNA, 30 bp, Artificial Sequence
  Synthetic oligonucleotide
tctggttctatagatctgtccgtgatagtt

SEQ ID NO: 504242 - DNA, 30 bp, Artificial Sequence
  Synthetic oligonucleotide
tttgactaactgggcagccttttgatagtt

SEQ ID NO: 504243 - DNA, 30 bp, Artificial Sequence
  Synthetic oligonucleotide
gttcctggcgggtgattcatccctatagtt

SEQ ID NO: 504244 - DNA, 30 bp, Artificial Sequence
  Synthetic oligonucleotide
ggctctcctgccgccgagacttcactagtt

SEQ ID NO: 504245 - DNA, 30 bp, Artificial Sequence
  Synthetic oligonucleotide
gttctttcaaatggatctccaatactagtt

SEQ ID NO: 504246 - DNA, 30 bp, Artificial Sequence
  Synthetic oligonucleotide
gatttcggtgacgtggcccagatcctagtt

SEQ ID NO: 504247 - DNA, 30 bp, Artificial Sequence
  Synthetic oligonucleotide
gtagggtgaaattacctgtccctcctagtt

SEQ ID NO: 504248 - DNA, 30 bp, Artificial Sequence
  Synthetic oligonucleotide
ttgattttaaatctaaatgtgacgctagtt

SEQ ID NO: 504249 - DNA, 30 bp, Artificial Sequence
  Synthetic oligonucleotide
atggtctgcagttttttctaaattctagtt

SEQ ID NO: 504250 - DNA, 30 bp, Artificial Sequence
  Synthetic oligonucleotide
tccaacacctactttgaaagcacagtagtt

SEQ ID NO: 504251 - DNA, 30 bp, Artificial Sequence
  Synthetic oligonucleotide
acttttatctagacctctttgacagtagtt

SEQ ID NO: 504252 - DNA, 30 bp, Artificial Sequence
  Synthetic oligonucleotide
attgtagaattccgctatgtgagcgtagtt

SEQ ID NO: 504253 - DNA, 30 bp, Artificial Sequence
  Synthetic oligonucleotide
gtgtcgtaagggacttcacaaatggtagtt

SEQ ID NO: 504254 - DNA, 30 bp, Artificial Sequence
  Synthetic oligonucleotide
acatgcacaaatccaagctacatggtagtt

SEQ ID NO: 504255 - DNA, 30 bp, Artificial Sequence
  Synthetic oligonucleotide
cacaatagaagtaattgcttcgatgtagtt

SEQ ID NO: 504256 - DNA, 30 bp, Artificial Sequence
  Synthetic oligonucleotide
accactgacaatgtaaaagacaaattagtt

SEQ ID NO: 504257 - DNA, 30 bp, Artificial Sequence
  Synthetic oligonucleotide
gtatcagcaaataaacctcccaaattagtt

SEQ ID NO: 504258 - DNA, 30 bp, Artificial Sequence
  Synthetic oligonucleotide
ataaaatgccatcaatttgtcatattagtt

SEQ ID NO: 504259 - DNA, 30 bp, Artificial Sequence
  Synthetic oligonucleotide
ggctaaagtgttgcataacggctattagtt

SEQ ID NO: 504260 - DNA, 30 bp, Artificial Sequence
  Synthetic oligonucleotide
ggtggcgtaatgttgtcggcaaacttagtt

SEQ ID NO: 504261 - DNA, 30 bp, Artificial Sequence
  Synthetic oligonucleotide
caatgctggctctggtctgttgagttagtt

SEQ ID NO: 504262 - DNA, 30 bp, Artificial Sequence
  Synthetic oligonucleotide
gtttggtcgggctaggtaaactagttagtt

SEQ ID NO: 504263 - DNA, 30 bp, Artificial Sequence
  Synthetic oligonucleotide
taataaatggcggaaaccccgacaaacgtt

SEQ ID NO: 504264 - DNA, 30 bp, Artificial Sequence
  Synthetic oligonucleotide
tcgtagaacgcccgtgcgtgactaaacgtt

SEQ ID NO: 504265 - DNA, 30 bp, Artificial Sequence
  Synthetic oligonucleotide
tctgctaggtcccgtcaaacgcgcaacgtt

SEQ ID NO: 504266 - DNA, 30 bp, Artificial Sequence
  Synthetic oligonucleotide
accatggtcgttgcggatacagtcaacgtt

SEQ ID NO: 504267 - DNA, 30 bp, Artificial Sequence
  Synthetic oligonucleotide
gtagatactgatgaaccgaataagaacgtt

SEQ ID NO: 504268 - DNA, 30 bp, Artificial Sequence
  Synthetic oligonucleotide
gatgaaggcgccgtgtgagtatcacacgtt

SEQ ID NO: 504269 - DNA, 30 bp, Artificial Sequence
  Synthetic oligonucleotide
gtatattacttccgcagagcgctacacgtt

SEQ ID NO: 504270 - DNA, 30 bp, Artificial Sequence
  Synthetic oligonucleotide
atataagcgctcggaacaacgatgcacgtt

SEQ ID NO: 504271 - DNA, 30 bp, Artificial Sequence
  Synthetic oligonucleotide
tcactgcgtcttgacaccattttgcacgtt

SEQ ID NO: 504272 - DNA, 30 bp, Artificial Sequence
  Synthetic oligonucleotide
aacatttactgcccgaaaaaagctcacgtt

SEQ ID NO: 504273 - DNA, 29 bp, Artificial Sequence
  Synthetic oligonucleotide
gtcttgttgtactctggggctgtcacgtt

SEQ ID NO: 504274 - DNA, 30 bp, Artificial Sequence
  Synthetic oligonucleotide
aagtcacctaagttacgtttggcagacgtt

SEQ ID NO: 504275 - DNA, 30 bp, Artificial Sequence
  Synthetic oligonucleotide
atgcccaagacggtattcgatcgcgacgtt

SEQ ID NO: 504276 - DNA, 30 bp, Artificial Sequence
  Synthetic oligonucleotide
gcagctcctgttaagttcgtcccggacgtt

SEQ ID NO: 504277 - DNA, 30 bp, Artificial Sequence
  Synthetic oligonucleotide
ggtttattcgttgtgatgtaattggacgtt

SEQ ID NO: 504278 - DNA, 30 bp, Artificial Sequence
  Synthetic oligonucleotide
ctgagccccagagggctgaatgatgacgtt

SEQ ID NO: 504279 - DNA, 30 bp, Artificial Sequence
  Synthetic oligonucleotide
aataaactgtgccaaggggttagtgacgtt

SEQ ID NO: 504280 - DNA, 30 bp, Artificial Sequence
  Synthetic oligonucleotide
aaattcgcaaggaaatttagttaatacgtt

SEQ ID NO: 504281 - DNA, 30 bp, Artificial Sequence
  Synthetic oligonucleotide
gaccttgagaccattgaacggagatacgtt

SEQ ID NO: 504282 - DNA, 30 bp, Artificial Sequence
  Synthetic oligonucleotide
tagtgacgtggcaggttaaaaatatacgtt

SEQ ID NO: 504283 - DNA, 30 bp, Artificial Sequence
  Synthetic oligonucleotide
tcatcgtaagcgtaggatgtcctatacgtt

SEQ ID NO: 504284 - DNA, 29 bp, Artificial Sequence
  Synthetic oligonucleotide
acatgatgagggtcccccgaccctacgtt

SEQ ID NO: 504285 - DNA, 30 bp, Artificial Sequence
  Synthetic oligonucleotide
accgctagagttttgttaaccgcgtacgtt

SEQ ID NO: 504286 - DNA, 30 bp, Artificial Sequence
  Synthetic oligonucleotide
tccataaggggtccgggataggggtacgtt

SEQ ID NO: 504287 - DNA, 30 bp, Artificial Sequence
  Synthetic oligonucleotide
gattgctggccacgtaggaaggcttacgtt

SEQ ID NO: 504288 - DNA, 30 bp, Artificial Sequence
  Synthetic oligonucleotide
ccctggtatcaagtagtgtatcgttacgtt

SEQ ID NO: 504289 - DNA, 30 bp, Artificial Sequence
  Synthetic oligonucleotide
taacaaggctgtagataggccgtttacgtt

SEQ ID NO: 504290 - DNA, 30 bp, Artificial Sequence
  Synthetic oligonucleotide
gaagtgccacataaacataggttttacgtt

SEQ ID NO: 504291 - DNA, 30 bp, Artificial Sequence
  Synthetic oligonucleotide
ttatgccttatacggacatgtttttacgtt

SEQ ID NO: 504292 - DNA, 30 bp, Artificial Sequence
  Synthetic oligonucleotide
aatggttatgtgaattcacggtaaaccgtt

SEQ ID NO: 504293 - DNA, 30 bp, Artificial Sequence
  Synthetic oligonucleotide
gtctaggataccaactatcacggaaccgtt

SEQ ID NO: 504294 - DNA, 30 bp, Artificial Sequence
  Synthetic oligonucleotide
tccataaaggtgccggttgtcttaaccgtt

SEQ ID NO: 504295 - DNA, 30 bp, Artificial Sequence
  Synthetic oligonucleotide
gagccttatcgttatatgaggcagaccgtt

SEQ ID NO: 504296 - DNA, 30 bp, Artificial Sequence
  Synthetic oligonucleotide
cagtccctggaaaagtccaatgggaccgtt

SEQ ID NO: 504297 - DNA, 30 bp, Artificial Sequence
  Synthetic oligonucleotide
cttcattcggttttactacgaagtaccgtt

SEQ ID NO: 504298 - DNA, 30 bp, Artificial Sequence
  Synthetic oligonucleotide
taataacgaaagattgttggtcttaccgtt

SEQ ID NO: 504299 - DNA, 30 bp, Artificial Sequence
  Synthetic oligonucleotide
tatgatgtaacaggcaataccatcgccgtt

SEQ ID NO: 504300 - DNA, 30 bp, Artificial Sequence
  Synthetic oligonucleotide
gagctatcgtgagacaatcggtcggccgtt

SEQ ID NO: 504301 - DNA, 30 bp, Artificial Sequence
  Synthetic oligonucleotide
tgaggtcgaagcgagaaaacttactccgtt

SEQ ID NO: 504302 - DNA, 30 bp, Artificial Sequence
  Synthetic oligonucleotide
acggttgaaagttgaaatcggccctccgtt

SEQ ID NO: 504303 - DNA, 30 bp, Artificial Sequence
  Synthetic oligonucleotide
gttacatacggagcctttaataggtccgtt

SEQ ID NO: 504304 - DNA, 30 bp, Artificial Sequence
  Synthetic oligonucleotide
atcttcgaatagttgactaccccaagcgtt

SEQ ID NO: 504305 - DNA, 30 bp, Artificial Sequence
  Synthetic oligonucleotide
ctcgcaacggaaaccgctttatcaagcgtt

SEQ ID NO: 504306 - DNA, 30 bp, Artificial Sequence
  Synthetic oligonucleotide
tattttacaaggcttgagcgccgaagcgtt

SEQ ID NO: 504307 - DNA, 30 bp, Artificial Sequence
  Synthetic oligonucleotide
gcttttgattcccaggtcggaataagcgtt

SEQ ID NO: 504308 - DNA, 30 bp, Artificial Sequence
  Synthetic oligonucleotide
ttgggcggctgcttgtggcccgtaagcgtt

SEQ ID NO: 504309 - DNA, 30 bp, Artificial Sequence
  Synthetic oligonucleotide
tagttgtccaagatatttagcgacagcgtt

SEQ ID NO: 504310 - DNA, 30 bp, Artificial Sequence
  Synthetic oligonucleotide
ttagaccacgatgtgtacgcctccagcgtt

SEQ ID NO: 504311 - DNA, 30 bp, Artificial Sequence
  Synthetic oligonucleotide
tgtaggctgtgagatcgaactactagcgtt

SEQ ID NO: 504312 - DNA, 30 bp, Artificial Sequence
  Synthetic oligonucleotide
catcaaacgacgcaaaacaacccacgcgtt

SEQ ID NO: 504313 - DNA, 30 bp, Artificial Sequence
  Synthetic oligonucleotide
aactcctactaattgcataagcgtcgcgtt

SEQ ID NO: 504314 - DNA, 30 bp, Artificial Sequence
  Synthetic oligonucleotide
tatttttcactttgatgtccgggtcgcgtt

SEQ ID NO: 504315 - DNA, 30 bp, Artificial Sequence
  Synthetic oligonucleotide
agaacttccagccaggtggcctcaggcgtt

SEQ ID NO: 504316 - DNA, 30 bp, Artificial Sequence
  Synthetic oligonucleotide
atccgccatactcaggtgaagagcggcgtt

SEQ ID NO: 504317 - DNA, 30 bp, Artificial Sequence
  Synthetic oligonucleotide
tgactcagtggtcaatagtaacggggcgtt

SEQ ID NO: 504318 - DNA, 30 bp, Artificial Sequence
  Synthetic oligonucleotide
atgaatataccatgttgaagtgtgggcgtt

SEQ ID NO: 504319 - DNA, 30 bp, Artificial Sequence
  Synthetic oligonucleotide
ttattggcctcggcgcagtcgccatgcgtt

SEQ ID NO: 504320 - DNA, 30 bp, Artificial Sequence
  Synthetic oligonucleotide
ctgaaagtctgggccctcgttatatgcgtt

SEQ ID NO: 504321 - DNA, 30 bp, Artificial Sequence
  Synthetic oligonucleotide
ctctctcaattattgtcatatcggtgcgtt

SEQ ID NO: 504322 - DNA, 30 bp, Artificial Sequence
  Synthetic oligonucleotide
tttgaacgtcgacaggcaccgctgtgcgtt

SEQ ID NO: 504323 - DNA, 30 bp, Artificial Sequence
  Synthetic oligonucleotide
cccgtggtaaggttagcggtagtgtgcgtt

SEQ ID NO: 504324 - DNA, 30 bp, Artificial Sequence
  Synthetic oligonucleotide
acgttgtagccaaacgtttttaaaatcgtt

SEQ ID NO: 504325 - DNA, 30 bp, Artificial Sequence
  Synthetic oligonucleotide
cataacgctggtaaagttgtaacaatcgtt

SEQ ID NO: 504326 - DNA, 30 bp, Artificial Sequence
  Synthetic oligonucleotide
ggatctggcgccggggacgcactaatcgtt

SEQ ID NO: 504327 - DNA, 30 bp, Artificial Sequence
  Synthetic oligonucleotide
tgttccttgtgtaagaagcaacggatcgtt

SEQ ID NO: 504328 - DNA, 30 bp, Artificial Sequence
  Synthetic oligonucleotide
aacagggtctactatccatactgtatcgtt

SEQ ID NO: 504329 - DNA, 30 bp, Artificial Sequence
  Synthetic oligonucleotide
gctcccgatacaggatgtggccaactcgtt

SEQ ID NO: 504330 - DNA, 30 bp, Artificial Sequence
  Synthetic oligonucleotide
tgtttacgcaagaggtgtggtttactcgtt

SEQ ID NO: 504331 - DNA, 30 bp, Artificial Sequence
  Synthetic oligonucleotide
ctaacggtcgaggagcatcacatcctcgtt

SEQ ID NO: 504332 - DNA, 30 bp, Artificial Sequence
  Synthetic oligonucleotide
ctctaaagttagtctagaggtttgctcgtt

SEQ ID NO: 504333 - DNA, 30 bp, Artificial Sequence
  Synthetic oligonucleotide
ttacgaggccgcgatacccacgaagtcgtt

SEQ ID NO: 504334 - DNA, 30 bp, Artificial Sequence
  Synthetic oligonucleotide
ggataccgtatataactatatacagtcgtt

SEQ ID NO: 504335 - DNA, 30 bp, Artificial Sequence
  Synthetic oligonucleotide
atcgcggggttgccagacgtactagtcgtt

SEQ ID NO: 504336 - DNA, 30 bp, Artificial Sequence
  Synthetic oligonucleotide
atccttggcagcagatttttgatcgtcgtt

SEQ ID NO: 504337 - DNA, 30 bp, Artificial Sequence
  Synthetic oligonucleotide
tatggatatattctcctgtggccggtcgtt

SEQ ID NO: 504338 - DNA, 30 bp, Artificial Sequence
  Synthetic oligonucleotide
tccgaccggggctactttttaatggtcgtt

SEQ ID NO: 504339 - DNA, 30 bp, Artificial Sequence
  Synthetic oligonucleotide
tgaaacaattgattagtgcttcatgtcgtt

SEQ ID NO: 504340 - DNA, 30 bp, Artificial Sequence
  Synthetic oligonucleotide
aaccctgggaatgatataatagctgtcgtt

SEQ ID NO: 504341 - DNA, 30 bp, Artificial Sequence
  Synthetic oligonucleotide
aatatactgcgccagtagcacaaattcgtt

SEQ ID NO: 504342 - DNA, 30 bp, Artificial Sequence
  Synthetic oligonucleotide
aattcattatgaagtgagtagttcttcgtt

SEQ ID NO: 504343 - DNA, 30 bp, Artificial Sequence
  Synthetic oligonucleotide
gttatcgcgtctacggggtgacctttcgtt

SEQ ID NO: 504344 - DNA, 30 bp, Artificial Sequence
  Synthetic oligonucleotide
caagatcgcccctacgcatgatctttcgtt

SEQ ID NO: 504345 - DNA, 30 bp, Artificial Sequence
  Synthetic oligonucleotide
ctcctaaatccacggtgtagtcgtttcgtt

SEQ ID NO: 504346 - DNA, 30 bp, Artificial Sequence
  Synthetic oligonucleotide
gagctaaggtactcgcaaagaattttcgtt

SEQ ID NO: 504347 - DNA, 30 bp, Artificial Sequence
  Synthetic oligonucleotide
agaaggatgaagcctggaacgcttttcgtt

SEQ ID NO: 504348 - DNA, 30 bp, Artificial Sequence
  Synthetic oligonucleotide
gatgtgacgttaagctctgagtttttcgtt

SEQ ID NO: 504349 - DNA, 30 bp, Artificial Sequence
  Synthetic oligonucleotide
gacgtgagccatccgtccgaggaaaaggtt

SEQ ID NO: 504350 - DNA, 30 bp, Artificial Sequence
  Synthetic oligonucleotide
cgattaactatgttgctcatgttaaaggtt

SEQ ID NO: 504351 - DNA, 30 bp, Artificial Sequence
  Synthetic oligonucleotide
ttggtgatctctctgacgaaacacaaggtt

SEQ ID NO: 504352 - DNA, 30 bp, Artificial Sequence
  Synthetic oligonucleotide
gtaattagatgcttgtgaagaacgaaggtt

SEQ ID NO: 504353 - DNA, 30 bp, Artificial Sequence
  Synthetic oligonucleotide
gagccgaaacctacgctggacgggaaggtt

SEQ ID NO: 504354 - DNA, 30 bp, Artificial Sequence
  Synthetic oligonucleotide
tatctatcagcaatccgacctaataaggtt

SEQ ID NO: 504355 - DNA, 30 bp, Artificial Sequence
  Synthetic oligonucleotide
aatttacgttgccctcacatctgtaaggtt

SEQ ID NO: 504356 - DNA, 30 bp, Artificial Sequence
  Synthetic oligonucleotide
atctgccaggtatcaacgtagaaccaggtt

SEQ ID NO: 504357 - DNA, 30 bp, Artificial Sequence
  Synthetic oligonucleotide
cgctcaactcgaggacgagagctccaggtt

SEQ ID NO: 504358 - DNA, 30 bp, Artificial Sequence
  Synthetic oligonucleotide
atttgaaactgtgccgttattacgcaggtt

SEQ ID NO: 504359 - DNA, 30 bp, Artificial Sequence
  Synthetic oligonucleotide
caactgtgccgagtccttgctgcgcaggtt

SEQ ID NO: 504360 - DNA, 30 bp, Artificial Sequence
  Synthetic oligonucleotide
tgccgtaccggcccggatcctaggcaggtt

SEQ ID NO: 504361 - DNA, 30 bp, Artificial Sequence
  Synthetic oligonucleotide
agtgagttctcgtaggtattgtctcaggtt

SEQ ID NO: 504362 - DNA, 30 bp, Artificial Sequence
  Synthetic oligonucleotide
taaaaatctgactgcccgggcgaagaggtt

SEQ ID NO: 504363 - DNA, 30 bp, Artificial Sequence
  Synthetic oligonucleotide
gtatcggacatgcaccgaccttaagaggtt

SEQ ID NO: 504364 - DNA, 30 bp, Artificial Sequence
  Synthetic oligonucleotide
atattcaggaaccgtgagcagtgagaggtt

SEQ ID NO: 504365 - DNA, 30 bp, Artificial Sequence
  Synthetic oligonucleotide
cctgtgagcaagcgaacgcactccgaggtt

SEQ ID NO: 504366 - DNA, 30 bp, Artificial Sequence
  Synthetic oligonucleotide
tacgtcatgccaccccggcggctcgaggtt

SEQ ID NO: 504367 - DNA, 30 bp, Artificial Sequence
  Synthetic oligonucleotide
agtcgtaggctaaccttatttccggaggtt

SEQ ID NO: 504368 - DNA, 30 bp, Artificial Sequence
  Synthetic oligonucleotide
gcacgatggggtaatggtgggggtgaggtt

SEQ ID NO: 504369 - DNA, 30 bp, Artificial Sequence
  Synthetic oligonucleotide
ttaggacatcggatcatgactccataggtt

SEQ ID NO: 504370 - DNA, 30 bp, Artificial Sequence
  Synthetic oligonucleotide
ctatatggtttagctttggctggataggtt

SEQ ID NO: 504371 - DNA, 30 bp, Artificial Sequence
  Synthetic oligonucleotide
attaacttatctgacgctgatcagtaggtt

SEQ ID NO: 504372 - DNA, 30 bp, Artificial Sequence
  Synthetic oligonucleotide
tagttaagtaactaatgttagttgtaggtt

SEQ ID NO: 504373 - DNA, 30 bp, Artificial Sequence
  Synthetic oligonucleotide
cattgtatttggttagatatagtaacggtt

SEQ ID NO: 504374 - DNA, 30 bp, Artificial Sequence
  Synthetic oligonucleotide
gcgcactgtttccgggttacatacacggtt

SEQ ID NO: 504375 - DNA, 30 bp, Artificial Sequence
  Synthetic oligonucleotide
cgcttgagggcactaaacacgtccacggtt

SEQ ID NO: 504376 - DNA, 30 bp, Artificial Sequence
  Synthetic oligonucleotide
tagtgggaactttcgtggtctgtcacggtt

SEQ ID NO: 504377 - DNA, 30 bp, Artificial Sequence
  Synthetic oligonucleotide
aatgagaaagactcagcgaggttcacggtt

SEQ ID NO: 504378 - DNA, 30 bp, Artificial Sequence
  Synthetic oligonucleotide
attcgtgtggaaaacccgctacagacggtt

SEQ ID NO: 504379 - DNA, 30 bp, Artificial Sequence
  Synthetic oligonucleotide
gctatgacttgggggagctcctagacggtt

SEQ ID NO: 504380 - DNA, 30 bp, Artificial Sequence
  Synthetic oligonucleotide
tgggattttttgtagaaaaacatgacggtt

SEQ ID NO: 504381 - DNA, 30 bp, Artificial Sequence
  Synthetic oligonucleotide
ttttactgcagttcaatatcccgtacggtt

SEQ ID NO: 504382 - DNA, 30 bp, Artificial Sequence
  Synthetic oligonucleotide
gctattaaacgattaatagccccaccggtt

SEQ ID NO: 504383 - DNA, 30 bp, Artificial Sequence
  Synthetic oligonucleotide
ttgaagtactacggtacctctcgaccggtt

SEQ ID NO: 504384 - DNA, 30 bp, Artificial Sequence
  Synthetic oligonucleotide
cagacaaaccgccgtatcgtcataccggtt

SEQ ID NO: 504385 - DNA, 30 bp, Artificial Sequence
  Synthetic oligonucleotide
aagcagtgtagtcgcaggtcgtacccggtt

SEQ ID NO: 504386 - DNA, 30 bp, Artificial Sequence
  Synthetic oligonucleotide
gtgcccgttctggcatgtgtgctcccggtt

SEQ ID NO: 504387 - DNA, 30 bp, Artificial Sequence
  Synthetic oligonucleotide
agaggttccgttgctgtattaaagccggtt

SEQ ID NO: 504388 - DNA, 30 bp, Artificial Sequence
  Synthetic oligonucleotide
acataaaacttagcaatcctaactccggtt

SEQ ID NO: 504389 - DNA, 30 bp, Artificial Sequence
  Synthetic oligonucleotide
gttaagacgctaatcatcctgcgtccggtt

SEQ ID NO: 504390 - DNA, 30 bp, Artificial Sequence
  Synthetic oligonucleotide
tgcaaaccactgagttatataaaagcggtt

SEQ ID NO: 504391 - DNA, 30 bp, Artificial Sequence
  Synthetic oligonucleotide
cggtgggggatgaaaatgggatacgcggtt

SEQ ID NO: 504392 - DNA, 30 bp, Artificial Sequence
  Synthetic oligonucleotide
tatttctttatgtataacaggcgggcggtt

SEQ ID NO: 504393 - DNA, 30 bp, Artificial Sequence
  Synthetic oligonucleotide
ccataatgctgggagactctgcctgcggtt

SEQ ID NO: 504394 - DNA, 30 bp, Artificial Sequence
  Synthetic oligonucleotide
tagaggatttataaaaccgcggctgcggtt

SEQ ID NO: 504395 - DNA, 30 bp, Artificial Sequence
  Synthetic oligonucleotide
atcgagccccggacacgggatcgatcggtt

SEQ ID NO: 504396 - DNA, 30 bp, Artificial Sequence
  Synthetic oligonucleotide
ctggaatccgactccgtctacgagtcggtt

SEQ ID NO: 504397 - DNA, 30 bp, Artificial Sequence
  Synthetic oligonucleotide
aaagtctcgaaattaacggtttattcggtt

SEQ ID NO: 504398 - DNA, 30 bp, Artificial Sequence
  Synthetic oligonucleotide
cagagggatccaggaaggggactttcggtt

SEQ ID NO: 504399 - DNA, 30 bp, Artificial Sequence
  Synthetic oligonucleotide
aatctttgcgtagggagaagtgtttcggtt

SEQ ID NO: 504400 - DNA, 30 bp, Artificial Sequence
  Synthetic oligonucleotide
ttctggtcactcatccggagaaaaagggtt

SEQ ID NO: 504401 - DNA, 30 bp, Artificial Sequence
  Synthetic oligonucleotide
aatgagtgtgggcgcttttgcgcaagggtt

SEQ ID NO: 504402 - DNA, 30 bp, Artificial Sequence
  Synthetic oligonucleotide
ggcattcacgcgctgattgggagcagggtt

SEQ ID NO: 504403 - DNA, 30 bp, Artificial Sequence
  Synthetic oligonucleotide
tgaaggaacgccgccccgtaaggcagggtt

SEQ ID NO: 504404 - DNA, 30 bp, Artificial Sequence
  Synthetic oligonucleotide
caaacccaaggctttggtgagtgcagggtt

SEQ ID NO: 504405 - DNA, 30 bp, Artificial Sequence
  Synthetic oligonucleotide
taagtggagggatgtaacgtcatcagggtt

SEQ ID NO: 504406 - DNA, 30 bp, Artificial Sequence
  Synthetic oligonucleotide
cctgtctttacttagtgcttgtatagggtt

SEQ ID NO: 504407 - DNA, 30 bp, Artificial Sequence
  Synthetic oligonucleotide
gctgctccccggttatgggttcttagggtt

SEQ ID NO: 504408 - DNA, 30 bp, Artificial Sequence
  Synthetic oligonucleotide
gtgaaactcaccacacgcatccaacgggtt

SEQ ID NO: 504409 - DNA, 30 bp, Artificial Sequence
  Synthetic oligonucleotide
ctggttttagtctattatcggtcacgggtt

SEQ ID NO: 504410 - DNA, 30 bp, Artificial Sequence
  Synthetic oligonucleotide
ggccgcatctagttaactgcttcacgggtt

SEQ ID NO: 504411 - DNA, 30 bp, Artificial Sequence
  Synthetic oligonucleotide
gccctttcacaaacgacgagtttacgggtt

SEQ ID NO: 504412 - DNA, 30 bp, Artificial Sequence
  Synthetic oligonucleotide
gggcccactgcgtggagataacaccgggtt

SEQ ID NO: 504413 - DNA, 30 bp, Artificial Sequence
  Synthetic oligonucleotide
actaggccacggttccgaatacagcgggtt

SEQ ID NO: 504414 - DNA, 30 bp, Artificial Sequence
  Synthetic oligonucleotide
catgagcccatggagacagattagcgggtt

SEQ ID NO: 504415 - DNA, 30 bp, Artificial Sequence
  Synthetic oligonucleotide
tgcagctcagtcagactgaatcttcgggtt

SEQ ID NO: 504416 - DNA, 30 bp, Artificial Sequence
  Synthetic oligonucleotide
ctacaatgtaaacgtataacctccggggtt

SEQ ID NO: 504417 - DNA, 30 bp, Artificial Sequence
  Synthetic oligonucleotide
gcaactccgctatcatttacaggcggggtt

SEQ ID NO: 504418 - DNA, 30 bp, Artificial Sequence
  Synthetic oligonucleotide
cccagaggcattcagattcttgtcggggtt

SEQ ID NO: 504419 - DNA, 30 bp, Artificial Sequence
  Synthetic oligonucleotide
acatcgttagcgacgcctaaatagggggtt

SEQ ID NO: 504420 - DNA, 30 bp, Artificial Sequence
  Synthetic oligonucleotide
ttggtaaatcaacttggctgctagggggtt

SEQ ID NO: 504421 - DNA, 30 bp, Artificial Sequence
  Synthetic oligonucleotide
atgagtttaatattgtccttcgatggggtt

SEQ ID NO: 504422 - DNA, 30 bp, Artificial Sequence
  Synthetic oligonucleotide
gattcattggtgacaatcgttgagtgggtt

SEQ ID NO: 504423 - DNA, 30 bp, Artificial Sequence
  Synthetic oligonucleotide
ggtgtccccgtcttcagacattagtgggtt

SEQ ID NO: 504424 - DNA, 30 bp, Artificial Sequence
  Synthetic oligonucleotide
caaagctacgtaacaatgtctaattgggtt

SEQ ID NO: 504425 - DNA, 30 bp, Artificial Sequence
  Synthetic oligonucleotide
aatctggcaacggtttcaagttgttgggtt

SEQ ID NO: 504426 - DNA, 30 bp, Artificial Sequence
  Synthetic oligonucleotide
gtaaacaaagcagttagcgttttttgggtt

SEQ ID NO: 504427 - DNA, 30 bp, Artificial Sequence
  Synthetic oligonucleotide
tttagcgattttaccgaactcaaaatggtt

SEQ ID NO: 504428 - DNA, 30 bp, Artificial Sequence
  Synthetic oligonucleotide
cagttgcaacaattttgtctgaacatggtt

SEQ ID NO: 504429 - DNA, 30 bp, Artificial Sequence
  Synthetic oligonucleotide
cggcggtattctttattatgcgacatggtt

SEQ ID NO: 504430 - DNA, 30 bp, Artificial Sequence
  Synthetic oligonucleotide
gttttcaccgtatacattctttgcatggtt

SEQ ID NO: 504431 - DNA, 30 bp, Artificial Sequence
  Synthetic oligonucleotide
caaccatcctgggtactagtacggatggtt

SEQ ID NO: 504432 - DNA, 30 bp, Artificial Sequence
  Synthetic oligonucleotide
taagacaactgctattagtgtcctatggtt

SEQ ID NO: 504433 - DNA, 30 bp, Artificial Sequence
  Synthetic oligonucleotide
cgtgtgacctttgcgaatacgctcctggtt

SEQ ID NO: 504434 - DNA, 30 bp, Artificial Sequence
  Synthetic oligonucleotide
atcaagactgcattacaattcccgctggtt

SEQ ID NO: 504435 - DNA, 30 bp, Artificial Sequence
  Synthetic oligonucleotide
ggtggaggctaaatctgaggacatctggtt

SEQ ID NO: 504436 - DNA, 30 bp, Artificial Sequence
  Synthetic oligonucleotide
gtagagacagcgtgtggatcatttctggtt

SEQ ID NO: 504437 - DNA, 30 bp, Artificial Sequence
  Synthetic oligonucleotide
gcgactcaaatgtaaagaccgacagtggtt

SEQ ID NO: 504438 - DNA, 30 bp, Artificial Sequence
  Synthetic oligonucleotide
tgcggccctctttaggggtccctagtggtt

SEQ ID NO: 504439 - DNA, 30 bp, Artificial Sequence
  Synthetic oligonucleotide
gcgtttatcgaatgatccacatacgtggtt

SEQ ID NO: 504440 - DNA, 30 bp, Artificial Sequence
  Synthetic oligonucleotide
aacttcaattttagtgtttatagcgtggtt

SEQ ID NO: 504441 - DNA, 30 bp, Artificial Sequence
  Synthetic oligonucleotide
tgagtttcataaccacgcccgttggtggtt

SEQ ID NO: 504442 - DNA, 30 bp, Artificial Sequence
  Synthetic oligonucleotide
tagctacacaattgcctgtgcaaattggtt

SEQ ID NO: 504443 - DNA, 30 bp, Artificial Sequence
  Synthetic oligonucleotide
gcaaaatctattattcgtttcgtattggtt

SEQ ID NO: 504444 - DNA, 29 bp, Artificial Sequence
  Synthetic oligonucleotide
aagggtataccaggctagattccttggtt

SEQ ID NO: 504445 - DNA, 30 bp, Artificial Sequence
  Synthetic oligonucleotide
gtcttattgtggggtcagcccaagttggtt

SEQ ID NO: 504446 - DNA, 30 bp, Artificial Sequence
  Synthetic oligonucleotide
attaaatagaaggcaccggatgagttggtt

SEQ ID NO: 504447 - DNA, 30 bp, Artificial Sequence
  Synthetic oligonucleotide
ttatacaacgtgctgacgctcgcgttggtt

SEQ ID NO: 504448 - DNA, 30 bp, Artificial Sequence
  Synthetic oligonucleotide
tgtcgcaacactcgtgcgtcgtcgttggtt

SEQ ID NO: 504449 - DNA, 30 bp, Artificial Sequence
  Synthetic oligonucleotide
tttctccagacacagtggaatcttttggtt

SEQ ID NO: 504450 - DNA, 30 bp, Artificial Sequence
  Synthetic oligonucleotide
tatttatcgtactgagggtcatgaaatgtt

SEQ ID NO: 504451 - DNA, 30 bp, Artificial Sequence
  Synthetic oligonucleotide
gtcacgagtgatgcgaagcggcacaatgtt

SEQ ID NO: 504452 - DNA, 30 bp, Artificial Sequence
  Synthetic oligonucleotide
gttgtgtacccatcacaacagtacaatgtt

SEQ ID NO: 504453 - DNA, 30 bp, Artificial Sequence
  Synthetic oligonucleotide
tgcgtaaccaactccgggttaagcaatgtt

SEQ ID NO: 504454 - DNA, 30 bp, Artificial Sequence
  Synthetic oligonucleotide
tgggtcttgcgcggtcaagagcgcaatgtt

SEQ ID NO: 504455 - DNA, 30 bp, Artificial Sequence
  Synthetic oligonucleotide
caccccatgggggtgctaaatggcaatgtt

SEQ ID NO: 504456 - DNA, 30 bp, Artificial Sequence
  Synthetic oligonucleotide
ctgtttatttaaataccgctcgtgaatgtt

SEQ ID NO: 504457 - DNA, 30 bp, Artificial Sequence
  Synthetic oligonucleotide
attatcttatcaggtcatggagctaatgtt

SEQ ID NO: 504458 - DNA, 30 bp, Artificial Sequence
  Synthetic oligonucleotide
ttacatgatatagatcgtggaaaacatgtt

SEQ ID NO: 504459 - DNA, 30 bp, Artificial Sequence
  Synthetic oligonucleotide
ctcccgctggtaagatggcacggacatgtt

SEQ ID NO: 504460 - DNA, 30 bp, Artificial Sequence
  Synthetic oligonucleotide
tttggccgtttttacctcgcgttacatgtt

SEQ ID NO: 504461 - DNA, 30 bp, Artificial Sequence
  Synthetic oligonucleotide
tgcaaactgcgcctttagagcacgcatgtt

SEQ ID NO: 504462 - DNA, 30 bp, Artificial Sequence
  Synthetic oligonucleotide
ggcgttcgcacggtcggtgactcgcatgtt

SEQ ID NO: 504463 - DNA, 30 bp, Artificial Sequence
  Synthetic oligonucleotide
aacccacgcctctggagggaccctcatgtt

SEQ ID NO: 504464 - DNA, 30 bp, Artificial Sequence
  Synthetic oligonucleotide
aattgccgtaccatagactgagaagatgtt

SEQ ID NO: 504465 - DNA, 30 bp, Artificial Sequence
  Synthetic oligonucleotide
ttggaaggggtagtaatatctgaagatgtt

SEQ ID NO: 504466 - DNA, 30 bp, Artificial Sequence
  Synthetic oligonucleotide
cctttcccttggtcatcccgattagatgtt

SEQ ID NO: 504467 - DNA, 30 bp, Artificial Sequence
  Synthetic oligonucleotide
agatgttcgtatatgttggaccacgatgtt

SEQ ID NO: 504468 - DNA, 30 bp, Artificial Sequence
  Synthetic oligonucleotide
ctcgcccaaatcatcggcgatggcgatgtt

SEQ ID NO: 504469 - DNA, 30 bp, Artificial Sequence
  Synthetic oligonucleotide
tccccaaagtagagtctggacatcgatgtt

SEQ ID NO: 504470 - DNA, 30 bp, Artificial Sequence
  Synthetic oligonucleotide
aatgattagagaatacgtctggtggatgtt

SEQ ID NO: 504471 - DNA, 30 bp, Artificial Sequence
  Synthetic oligonucleotide
gtaagacatagaaaagtacagacatatgtt

SEQ ID NO: 504472 - DNA, 30 bp, Artificial Sequence
  Synthetic oligonucleotide
attcgaggttcgtttgacgggacatatgtt

SEQ ID NO: 504473 - DNA, 30 bp, Artificial Sequence
  Synthetic oligonucleotide
aatacctatagcactggttcgttatatgtt

SEQ ID NO: 504474 - DNA, 30 bp, Artificial Sequence
  Synthetic oligonucleotide
tatactgccatacgtttgattcggtatgtt

SEQ ID NO: 504475 - DNA, 30 bp, Artificial Sequence
  Synthetic oligonucleotide
gataaagatgcaaatcagaaacattatgtt

SEQ ID NO: 504476 - DNA, 30 bp, Artificial Sequence
  Synthetic oligonucleotide
caaaccgtaacttccgtgctagtaactgtt

SEQ ID NO: 504477 - DNA, 30 bp, Artificial Sequence
  Synthetic oligonucleotide
cgacagatagaggacttggtggtaactgtt

SEQ ID NO: 504478 - DNA, 30 bp, Artificial Sequence
  Synthetic oligonucleotide
ccatcatggacgtctccaaagtccactgtt

SEQ ID NO: 504479 - DNA, 30 bp, Artificial Sequence
  Synthetic oligonucleotide
tccgatcccagcttatagacgagcactgtt

SEQ ID NO: 504480 - DNA, 30 bp, Artificial Sequence
  Synthetic oligonucleotide
cgcttctgattgagcgctcatcgcactgtt

SEQ ID NO: 504481 - DNA, 30 bp, Artificial Sequence
  Synthetic oligonucleotide
atctcacgaccgaatgatcggacgactgtt

SEQ ID NO: 504482 - DNA, 30 bp, Artificial Sequence
  Synthetic oligonucleotide
gtattttaggagtacaatgtgtttactgtt

SEQ ID NO: 504483 - DNA, 30 bp, Artificial Sequence
  Synthetic oligonucleotide
cgaacttaatatgagcgtagcgtacctgtt

SEQ ID NO: 504484 - DNA, 30 bp, Artificial Sequence
  Synthetic oligonucleotide
ccttgtgtagccgctagcctgaaccctgtt

SEQ ID NO: 504485 - DNA, 30 bp, Artificial Sequence
  Synthetic oligonucleotide
gcaacaaggacagggctcagccatcctgtt

SEQ ID NO: 504486 - DNA, 30 bp, Artificial Sequence
  Synthetic oligonucleotide
gctcggacggcaagatcacaggctcctgtt

SEQ ID NO: 504487 - DNA, 30 bp, Artificial Sequence
  Synthetic oligonucleotide
attaaaagcttacgggtaccaacagctgtt

SEQ ID NO: 504488 - DNA, 30 bp, Artificial Sequence
  Synthetic oligonucleotide
ttgatatattagagaaggaaatgtgctgtt

SEQ ID NO: 504489 - DNA, 30 bp, Artificial Sequence
  Synthetic oligonucleotide
gttttttggccaactgcgagcacctctgtt

SEQ ID NO: 504490 - DNA, 30 bp, Artificial Sequence
  Synthetic oligonucleotide
ggtcgcggtttccagaaatacgcgtctgtt

SEQ ID NO: 504491 - DNA, 29 bp, Artificial Sequence
  Synthetic oligonucleotide
aagaatttcgcctcagataacggtctgtt

SEQ ID NO: 504492 - DNA, 30 bp, Artificial Sequence
  Synthetic oligonucleotide
cccaggtttcgctactgaagtccaagtgtt

SEQ ID NO: 504493 - DNA, 30 bp, Artificial Sequence
  Synthetic oligonucleotide
gggtgacatggttaaaccttgggaagtgtt

SEQ ID NO: 504494 - DNA, 30 bp, Artificial Sequence
  Synthetic oligonucleotide
acttatatcctgacggtttatgtaagtgtt

SEQ ID NO: 504495 - DNA, 30 bp, Artificial Sequence
  Synthetic oligonucleotide
catgttatatgttctcaggcatgcagtgtt

SEQ ID NO: 504496 - DNA, 30 bp, Artificial Sequence
  Synthetic oligonucleotide
ggacaaaggagctcttgggaacagagtgtt

SEQ ID NO: 504497 - DNA, 30 bp, Artificial Sequence
  Synthetic oligonucleotide
ggggaacaattttccggtttggcgagtgtt

SEQ ID NO: 504498 - DNA, 30 bp, Artificial Sequence
  Synthetic oligonucleotide
cactgcgcgtggactctcgtaatgagtgtt

SEQ ID NO: 504499 - DNA, 30 bp, Artificial Sequence
  Synthetic oligonucleotide
gttggggttgtgattctcttccatagtgtt

SEQ ID NO: 504500 - DNA, 30 bp, Artificial Sequence
  Synthetic oligonucleotide
aggaaacagctgggatacatagttagtgtt

SEQ ID NO: 504501 - DNA, 30 bp, Artificial Sequence
  Synthetic oligonucleotide
cgacgttttcaatacggtttttttagtgtt

SEQ ID NO: 504502 - DNA, 30 bp, Artificial Sequence
  Synthetic oligonucleotide
aatctagtagacgcgcggtacgcacgtgtt

SEQ ID NO: 504503 - DNA, 30 bp, Artificial Sequence
  Synthetic oligonucleotide
gttagtgtctaacctgagctcctacgtgtt

SEQ ID NO: 504504 - DNA, 30 bp, Artificial Sequence
  Synthetic oligonucleotide
aatttcgggcttcgtcatgaactgcgtgtt

SEQ ID NO: 504505 - DNA, 30 bp, Artificial Sequence
  Synthetic oligonucleotide
ccaatagttgtgtggactgcggtgcgtgtt

SEQ ID NO: 504506 - DNA, 30 bp, Artificial Sequence
  Synthetic oligonucleotide
tgatgggaattacgccgaattactcgtgtt

SEQ ID NO: 504507 - DNA, 30 bp, Artificial Sequence
  Synthetic oligonucleotide
tttcacattgcacaaagacgaaaaggtgtt

SEQ ID NO: 504508 - DNA, 30 bp, Artificial Sequence
  Synthetic oligonucleotide
catactggcggctcagccaccaaaggtgtt

SEQ ID NO: 504509 - DNA, 30 bp, Artificial Sequence
  Synthetic oligonucleotide
cagagaggctcagacgcctaccaaggtgtt

SEQ ID NO: 504510 - DNA, 30 bp, Artificial Sequence
  Synthetic oligonucleotide
ttcccataataataagtatgggggggtgtt

SEQ ID NO: 504511 - DNA, 30 bp, Artificial Sequence
  Synthetic oligonucleotide
aaactgaagttctgtcataggacatgtgtt

SEQ ID NO: 504512 - DNA, 30 bp, Artificial Sequence
  Synthetic oligonucleotide
ataaactccgggtttcgtcccgcatgtgtt

SEQ ID NO: 504513 - DNA, 30 bp, Artificial Sequence
  Synthetic oligonucleotide
gagccgaaagctacttaatgcgactgtgtt

SEQ ID NO: 504514 - DNA, 30 bp, Artificial Sequence
  Synthetic oligonucleotide
tgggtccccatgtggaccctatactgtgtt

SEQ ID NO: 504515 - DNA, 30 bp, Artificial Sequence
  Synthetic oligonucleotide
ggatgcatgttcagacgtggtttctgtgtt

SEQ ID NO: 504516 - DNA, 30 bp, Artificial Sequence
  Synthetic oligonucleotide
tcttcgttaggattagatggagagtgtgtt

SEQ ID NO: 504517 - DNA, 30 bp, Artificial Sequence
  Synthetic oligonucleotide
taagtccgaagtgcactaaacgcgtgtgtt

SEQ ID NO: 504518 - DNA, 30 bp, Artificial Sequence
  Synthetic oligonucleotide
gtgatttttgtgggcctgacaatttgtgtt

SEQ ID NO: 504519 - DNA, 30 bp, Artificial Sequence
  Synthetic oligonucleotide
ttgggtcatatcaatggaggaatttgtgtt

SEQ ID NO: 504520 - DNA, 30 bp, Artificial Sequence
  Synthetic oligonucleotide
actgaggccgcagcagactgtaaaattgtt

SEQ ID NO: 504521 - DNA, 30 bp, Artificial Sequence
  Synthetic oligonucleotide
ctgttctggcggtgtaacgctcaaattgtt

SEQ ID NO: 504522 - DNA, 30 bp, Artificial Sequence
  Synthetic oligonucleotide
aagtatttcctttaacacgccgaaattgtt

SEQ ID NO: 504523 - DNA, 30 bp, Artificial Sequence
  Synthetic oligonucleotide
tagagcaataatctggtttacccaattgtt

SEQ ID NO: 504524 - DNA, 30 bp, Artificial Sequence
  Synthetic oligonucleotide
attgtcctttgaggacggaatggaattgtt

SEQ ID NO: 504525 - DNA, 30 bp, Artificial Sequence
  Synthetic oligonucleotide
tgattgaaagttacttgtcttgtaattgtt

SEQ ID NO: 504526 - DNA, 30 bp, Artificial Sequence
  Synthetic oligonucleotide
tagtattgctagttcggggacagcattgtt

SEQ ID NO: 504527 - DNA, 30 bp, Artificial Sequence
  Synthetic oligonucleotide
gcaaataacgacagctttgcctgcattgtt

SEQ ID NO: 504528 - DNA, 30 bp, Artificial Sequence
  Synthetic oligonucleotide
gtattttaatcacggaacaattgcattgtt

SEQ ID NO: 504529 - DNA, 30 bp, Artificial Sequence
  Synthetic oligonucleotide
agcgcagcgtaatgaaaatcattcattgtt

SEQ ID NO: 504530 - DNA, 30 bp, Artificial Sequence
  Synthetic oligonucleotide
gtttcccggcgatccggtttggcgattgtt

SEQ ID NO: 504531 - DNA, 30 bp, Artificial Sequence
  Synthetic oligonucleotide
aacagatatactaatagagctgggattgtt

SEQ ID NO: 504532 - DNA, 30 bp, Artificial Sequence
  Synthetic oligonucleotide
atgcactggtatatgtttgtcaatattgtt

SEQ ID NO: 504533 - DNA, 30 bp, Artificial Sequence
  Synthetic oligonucleotide
gcaaactatatgcagcaagaacatattgtt

SEQ ID NO: 504534 - DNA, 30 bp, Artificial Sequence
  Synthetic oligonucleotide
ctgttcggttcttgtggagttaaacttgtt

SEQ ID NO: 504535 - DNA, 30 bp, Artificial Sequence
  Synthetic oligonucleotide
taggggcatatcgggtccttacaacttgtt

SEQ ID NO: 504536 - DNA, 30 bp, Artificial Sequence
  Synthetic oligonucleotide
cagggttcgaagtcacttcgataacttgtt

SEQ ID NO: 504537 - DNA, 30 bp, Artificial Sequence
  Synthetic oligonucleotide
cgttttgtcagtaaaggactaaagcttgtt

SEQ ID NO: 504538 - DNA, 30 bp, Artificial Sequence
  Synthetic oligonucleotide
aagggggaagcctcggatgcagtgcttgtt

SEQ ID NO: 504539 - DNA, 30 bp, Artificial Sequence
  Synthetic oligonucleotide
ttaaccatagtgcaagctcctggtcttgtt

SEQ ID NO: 504540 - DNA, 30 bp, Artificial Sequence
  Synthetic oligonucleotide
aatacaatccgccacagcggcgcagttgtt

SEQ ID NO: 504541 - DNA, 30 bp, Artificial Sequence
  Synthetic oligonucleotide
tctggtagttcctcatcacaaatggttgtt

SEQ ID NO: 504542 - DNA, 30 bp, Artificial Sequence
  Synthetic oligonucleotide
gaaaaaaatccagtgagtgagctggttgtt

SEQ ID NO: 504543 - DNA, 30 bp, Artificial Sequence
  Synthetic oligonucleotide
atttggggtatacgttgtcggcatgttgtt

SEQ ID NO: 504544 - DNA, 30 bp, Artificial Sequence
  Synthetic oligonucleotide
gttaaggcacggtgcatttactggtttgtt

SEQ ID NO: 504545 - DNA, 30 bp, Artificial Sequence
  Synthetic oligonucleotide
cacccgtgggggtaaaccaacagaaaattt

SEQ ID NO: 504546 - DNA, 30 bp, Artificial Sequence
  Synthetic oligonucleotide
gtcctgtcagagtgaggtagtcacaaattt

SEQ ID NO: 504547 - DNA, 30 bp, Artificial Sequence
  Synthetic oligonucleotide
tttttctagtggcgcaaaaaagacaaattt

SEQ ID NO: 504548 - DNA, 30 bp, Artificial Sequence
  Synthetic oligonucleotide
atcgtgctactgactaagtaaaggaaattt

SEQ ID NO: 504549 - DNA, 30 bp, Artificial Sequence
  Synthetic oligonucleotide
catcatagtcaaaaccacatgggtaaattt

SEQ ID NO: 504550 - DNA, 30 bp, Artificial Sequence
  Synthetic oligonucleotide
tacccataaaaaagcgaaacgacacaattt

SEQ ID NO: 504551 - DNA, 30 bp, Artificial Sequence
  Synthetic oligonucleotide
cacagccgcctgtacgatcgcgtacaattt

SEQ ID NO: 504552 - DNA, 30 bp, Artificial Sequence
  Synthetic oligonucleotide
gaatataaccatgacacggttaaccaattt

SEQ ID NO: 504553 - DNA, 30 bp, Artificial Sequence
  Synthetic oligonucleotide
agtgtttatcgctccacaaagtcccaattt

SEQ ID NO: 504554 - DNA, 30 bp, Artificial Sequence
  Synthetic oligonucleotide
tactgctccgtgccggtcagtccgcaattt

SEQ ID NO: 504555 - DNA, 30 bp, Artificial Sequence
  Synthetic oligonucleotide
cactagggtctcattgctgcaatgcaattt

SEQ ID NO: 504556 - DNA, 30 bp, Artificial Sequence
  Synthetic oligonucleotide
tctcaagtaagagtaacgatggtgcaattt

SEQ ID NO: 504557 - DNA, 30 bp, Artificial Sequence
  Synthetic oligonucleotide
tttagaaagggactctttgatgaagaattt

SEQ ID NO: 504558 - DNA, 30 bp, Artificial Sequence
  Synthetic oligonucleotide
tggttcgtaccgattctttgtagagaattt

SEQ ID NO: 504559 - DNA, 30 bp, Artificial Sequence
  Synthetic oligonucleotide
cttccttcttgcgtgcacatgcaggaattt

SEQ ID NO: 504560 - DNA, 30 bp, Artificial Sequence
  Synthetic oligonucleotide
cccccggatccactacggcgcatggaattt

SEQ ID NO: 504561 - DNA, 30 bp, Artificial Sequence
  Synthetic oligonucleotide
caagcttgtacatttggtagctatgaattt

SEQ ID NO: 504562 - DNA, 30 bp, Artificial Sequence
  Synthetic oligonucleotide
gaccatatagattcgatgactggataattt

SEQ ID NO: 504563 - DNA, 30 bp, Artificial Sequence
  Synthetic oligonucleotide
aggcgaagtgattattactagtcctaattt

SEQ ID NO: 504564 - DNA, 30 bp, Artificial Sequence
  Synthetic oligonucleotide
gtgggcacggtttcctcccagcgctaattt

SEQ ID NO: 504565 - DNA, 30 bp, Artificial Sequence
  Synthetic oligonucleotide
gccgcattctatatagaagatgcttaattt

SEQ ID NO: 504566 - DNA, 30 bp, Artificial Sequence
  Synthetic oligonucleotide
ggctctttatagattcttctttcttaattt

SEQ ID NO: 504567 - DNA, 30 bp, Artificial Sequence
  Synthetic oligonucleotide
aaatataacgacgccattgaactttaattt

SEQ ID NO: 504568 - DNA, 30 bp, Artificial Sequence
  Synthetic oligonucleotide
gatggtttgcacgcgttaacgcaaacattt

SEQ ID NO: 504569 - DNA, 30 bp, Artificial Sequence
  Synthetic oligonucleotide
ctacaactgttcatcgtgtgttaaacattt

SEQ ID NO: 504570 - DNA, 30 bp, Artificial Sequence
  Synthetic oligonucleotide
tctacactcggtgtgagttttctaacattt

SEQ ID NO: 504571 - DNA, 30 bp, Artificial Sequence
  Synthetic oligonucleotide
actttgtttgcggttgacagatagacattt

SEQ ID NO: 504572 - DNA, 30 bp, Artificial Sequence
  Synthetic oligonucleotide
agggctcgcgtacggcgatccacgacattt

SEQ ID NO: 504573 - DNA, 30 bp, Artificial Sequence
  Synthetic oligonucleotide
ttacttggcaaccgtgtgtgcgcgacattt

SEQ ID NO: 504574 - DNA, 30 bp, Artificial Sequence
  Synthetic oligonucleotide
acatcaatggaactgcacctgtctacattt

SEQ ID NO: 504575 - DNA, 31 bp, Artificial Sequence
  Synthetic oligonucleotide
ggcgcatcggcaaacttagcaacgaccattt

SEQ ID NO: 504576 - DNA, 30 bp, Artificial Sequence
  Synthetic oligonucleotide
cttctaagccaacgttgaggagtcccattt

SEQ ID NO: 504577 - DNA, 30 bp, Artificial Sequence
  Synthetic oligonucleotide
ttattcgatgtcgtagtaatcaagccattt

SEQ ID NO: 504578 - DNA, 30 bp, Artificial Sequence
  Synthetic oligonucleotide
aacagatccggacgcttgttcgttccattt

SEQ ID NO: 504579 - DNA, 30 bp, Artificial Sequence
  Synthetic oligonucleotide
ggcttcttatcgccttttataaaagcattt

SEQ ID NO: 504580 - DNA, 30 bp, Artificial Sequence
  Synthetic oligonucleotide
tgaatttcggctagaacggtccaagcattt

SEQ ID NO: 504581 - DNA, 30 bp, Artificial Sequence
  Synthetic oligonucleotide
cgtccaccctggatccatattgaagcattt

SEQ ID NO: 504582 - DNA, 31 bp, Artificial Sequence
  Synthetic oligonucleotide
cccgggggtaccaccggtaatgcacgcattt

SEQ ID NO: 504583 - DNA, 30 bp, Artificial Sequence
  Synthetic oligonucleotide
caggaatctccatatttcttgagcgcattt

SEQ ID NO: 504584 - DNA, 30 bp, Artificial Sequence
  Synthetic oligonucleotide
cgcgactcagaagaatgcccatatgcattt

SEQ ID NO: 504585 - DNA, 30 bp, Artificial Sequence
  Synthetic oligonucleotide
tctcttaaattttgtgaggtatatgcattt

SEQ ID NO: 504586 - DNA, 30 bp, Artificial Sequence
  Synthetic oligonucleotide
aatatcgggcatttatagcccgactcattt

SEQ ID NO: 504587 - DNA, 30 bp, Artificial Sequence
  Synthetic oligonucleotide
cacaacatggccacttttagaagctcattt

SEQ ID NO: 504588 - DNA, 30 bp, Artificial Sequence
  Synthetic oligonucleotide
gcgagctgacccgtttgatagccgtcattt

SEQ ID NO: 504589 - DNA, 30 bp, Artificial Sequence
  Synthetic oligonucleotide
ttccggtgcaatgtgtaggggcggtcattt

SEQ ID NO: 504590 - DNA, 30 bp, Artificial Sequence
  Synthetic oligonucleotide
tgttgacccaacttatgcgtaaattcattt

SEQ ID NO: 504591 - DNA, 30 bp, Artificial Sequence
  Synthetic oligonucleotide
tgcgccgcataaactaattatgtttcattt

SEQ ID NO: 504592 - DNA, 30 bp, Artificial Sequence
  Synthetic oligonucleotide
tgtcctatgtaggccctgttaacaagattt

SEQ ID NO: 504593 - DNA, 30 bp, Artificial Sequence
  Synthetic oligonucleotide
taaatcaaggcgttaccatccctaagattt

SEQ ID NO: 504594 - DNA, 30 bp, Artificial Sequence
  Synthetic oligonucleotide
gagcctatcgatagccactgaccgagattt

SEQ ID NO: 504595 - DNA, 30 bp, Artificial Sequence
  Synthetic oligonucleotide
cccggccttgtggcggaaggtaggagattt

SEQ ID NO: 504596 - DNA, 30 bp, Artificial Sequence
  Synthetic oligonucleotide
atatgacgtgaatactgaataagtagattt

SEQ ID NO: 504597 - DNA, 25 bp, Artificial Sequence
  Synthetic oligonucleotide
caactctgccgcgcgaggtagattt

SEQ ID NO: 504598 - DNA, 30 bp, Artificial Sequence
  Synthetic oligonucleotide
caaaaccagttttgacctgagtttagattt

SEQ ID NO: 504599 - DNA, 30 bp, Artificial Sequence
  Synthetic oligonucleotide
gagagcgatgttgcagcaaggaaacgattt

SEQ ID NO: 504600 - DNA, 30 bp, Artificial Sequence
  Synthetic oligonucleotide
ttcaccgaggtttagtttgtgctacgattt

SEQ ID NO: 504601 - DNA, 30 bp, Artificial Sequence
  Synthetic oligonucleotide
cagctgtggtggatgtacacctggcgattt

SEQ ID NO: 504602 - DNA, 30 bp, Artificial Sequence
  Synthetic oligonucleotide
atttgcattaagacgtaaacctgtcgattt

SEQ ID NO: 504603 - DNA, 31 bp, Artificial Sequence
  Synthetic oligonucleotide
caccataatgcgtactagggtgtttcgattt

SEQ ID NO: 504604 - DNA, 30 bp, Artificial Sequence
  Synthetic oligonucleotide
taagtcagcaacgaacgcccgaaaggattt

SEQ ID NO: 504605 - DNA, 30 bp, Artificial Sequence
  Synthetic oligonucleotide
gtgttttgatcttggcaagagtaaggattt

SEQ ID NO: 504606 - DNA, 30 bp, Artificial Sequence
  Synthetic oligonucleotide
gtttctaacgcggctggacggtaaggattt

SEQ ID NO: 504607 - DNA, 30 bp, Artificial Sequence
  Synthetic oligonucleotide
aaactggtttcacatgcagaattaggattt

SEQ ID NO: 504608 - DNA, 30 bp, Artificial Sequence
  Synthetic oligonucleotide
tattaacgctgcgggccgatcgacggattt

SEQ ID NO: 504609 - DNA, 30 bp, Artificial Sequence
  Synthetic oligonucleotide
ctcatgtcaaaagcagcaaaggtcggattt

SEQ ID NO: 504610 - DNA, 30 bp, Artificial Sequence
  Synthetic oligonucleotide
cgcagtgtatcgatacctatgaggggattt

SEQ ID NO: 504611 - DNA, 30 bp, Artificial Sequence
  Synthetic oligonucleotide
ttccattgggtagtgcgtgacgatggattt

SEQ ID NO: 504612 - DNA, 30 bp, Artificial Sequence
  Synthetic oligonucleotide
atacaataaaactccaagttctaatgattt

SEQ ID NO: 504613 - DNA, 30 bp, Artificial Sequence
  Synthetic oligonucleotide
cccggtactattgtatctcatctatgattt

SEQ ID NO: 504614 - DNA, 30 bp, Artificial Sequence
  Synthetic oligonucleotide
cgcaggggatcacacccaggggagtgattt

SEQ ID NO: 504615 - DNA, 30 bp, Artificial Sequence
  Synthetic oligonucleotide
aatcctcgatccatgatttgtatgtgattt

SEQ ID NO: 504616 - DNA, 30 bp, Artificial Sequence
  Synthetic oligonucleotide
ctaaatttaatcacaaaaatattttgattt

SEQ ID NO: 504617 - DNA, 30 bp, Artificial Sequence
  Synthetic oligonucleotide
tcgttccggcccaggtttatccaaatattt

SEQ ID NO: 504618 - DNA, 30 bp, Artificial Sequence
  Synthetic oligonucleotide
actagtcatatactgacagttctaatattt

SEQ ID NO: 504619 - DNA, 30 bp, Artificial Sequence
  Synthetic oligonucleotide
catttctggttataccaggtccctatattt

SEQ ID NO: 504620 - DNA, 30 bp, Artificial Sequence
  Synthetic oligonucleotide
acattccggtatacaatatcttttatattt

SEQ ID NO: 504621 - DNA, 30 bp, Artificial Sequence
  Synthetic oligonucleotide
ttagcccatacggttattatcccactattt

SEQ ID NO: 504622 - DNA, 30 bp, Artificial Sequence
  Synthetic oligonucleotide
gacgtatcgtttggggaaaggcgactattt

SEQ ID NO: 504623 - DNA, 30 bp, Artificial Sequence
  Synthetic oligonucleotide
gacaagcgccaagcctcttgtgtactattt

SEQ ID NO: 504624 - DNA, 30 bp, Artificial Sequence
  Synthetic oligonucleotide
ctcgtaatttcgtgttagcggaatctattt

SEQ ID NO: 504625 - DNA, 30 bp, Artificial Sequence
  Synthetic oligonucleotide
caaagctatcatatgttacggactctattt

SEQ ID NO: 504626 - DNA, 30 bp, Artificial Sequence
  Synthetic oligonucleotide
gttatcaataatttccagggaacagtattt

SEQ ID NO: 504627 - DNA, 30 bp, Artificial Sequence
  Synthetic oligonucleotide
tctacagagccggctccgatctcagtattt

SEQ ID NO: 504628 - DNA, 30 bp, Artificial Sequence
  Synthetic oligonucleotide
agctcaagctcggatgccatcgacgtattt

SEQ ID NO: 504629 - DNA, 30 bp, Artificial Sequence
  Synthetic oligonucleotide
ctactgaagtagatttgctacgaggtattt

SEQ ID NO: 504630 - DNA, 30 bp, Artificial Sequence
  Synthetic oligonucleotide
agtgtatattctaaacggttctaggtattt

SEQ ID NO: 504631 - DNA, 30 bp, Artificial Sequence
  Synthetic oligonucleotide
accccctcatagagcaatgggacggtattt

SEQ ID NO: 504632 - DNA, 30 bp, Artificial Sequence
  Synthetic oligonucleotide
aacaatactggccatgtaggcttggtattt

SEQ ID NO: 504633 - DNA, 30 bp, Artificial Sequence
  Synthetic oligonucleotide
gctaagcgtgatccacaggccggtgtattt

SEQ ID NO: 504634 - DNA, 30 bp, Artificial Sequence
  Synthetic oligonucleotide
attgttaccagggcacggtgtcacttattt

SEQ ID NO: 504635 - DNA, 30 bp, Artificial Sequence
  Synthetic oligonucleotide
attggccccgaccgaggatgtcccttattt

SEQ ID NO: 504636 - DNA, 30 bp, Artificial Sequence
  Synthetic oligonucleotide
ccaattcacgtaccgccactccagttattt

SEQ ID NO: 504637 - DNA, 30 bp, Artificial Sequence
  Synthetic oligonucleotide
gtcgctcatgcgtccccgcaactgttattt

SEQ ID NO: 504638 - DNA, 30 bp, Artificial Sequence
  Synthetic oligonucleotide
cagaactggaacatttgacctaaaaacttt

SEQ ID NO: 504639 - DNA, 30 bp, Artificial Sequence
  Synthetic oligonucleotide
ttggggcatttctttcaaatgtgaaacttt

SEQ ID NO: 504640 - DNA, 30 bp, Artificial Sequence
  Synthetic oligonucleotide
agtttccatcttggcggtgagtacaacttt

SEQ ID NO: 504641 - DNA, 30 bp, Artificial Sequence
  Synthetic oligonucleotide
gtcatatccgagacatcgccggtgaacttt

SEQ ID NO: 504642 - DNA, 30 bp, Artificial Sequence
  Synthetic oligonucleotide
ttgcgttagaatacttgtccggctaacttt

SEQ ID NO: 504643 - DNA, 30 bp, Artificial Sequence
  Synthetic oligonucleotide
gaatctaccaggtgtatataacaacacttt

SEQ ID NO: 504644 - DNA, 30 bp, Artificial Sequence
  Synthetic oligonucleotide
agttggccgacatatgcggcccaacacttt

SEQ ID NO: 504645 - DNA, 30 bp, Artificial Sequence
  Synthetic oligonucleotide
ctttgatgaggcagggcacagggacacttt

SEQ ID NO: 504646 - DNA, 30 bp, Artificial Sequence
  Synthetic oligonucleotide
gtattgtcggtgggaatagttaaccacttt

SEQ ID NO: 504647 - DNA, 30 bp, Artificial Sequence
  Synthetic oligonucleotide
agtgaacccaggtgatgcgtcatccacttt

SEQ ID NO: 504648 - DNA, 30 bp, Artificial Sequence
  Synthetic oligonucleotide
gggaatttactaatgtgggcagtccacttt

SEQ ID NO: 504649 - DNA, 30 bp, Artificial Sequence
  Synthetic oligonucleotide
taaactccgtcactcagcctagagcacttt

SEQ ID NO: 504650 - DNA, 29 bp, Artificial Sequence
  Synthetic oligonucleotide
ggggaataagctaaaaaggcgggcacttt

SEQ ID NO: 504651 - DNA, 30 bp, Artificial Sequence
  Synthetic oligonucleotide
gcaaatactcgaatacctacacgagacttt

SEQ ID NO: 504652 - DNA, 30 bp, Artificial Sequence
  Synthetic oligonucleotide
aaattgttgaaaataattagggtagacttt

SEQ ID NO: 504653 - DNA, 30 bp, Artificial Sequence
  Synthetic oligonucleotide
accttcgtgctcggtctgattgcggacttt

SEQ ID NO: 504654 - DNA, 30 bp, Artificial Sequence
  Synthetic oligonucleotide
caactgctatggaccacgcacagggacttt

SEQ ID NO: 504655 - DNA, 30 bp, Artificial Sequence
  Synthetic oligonucleotide
gcaaaacgcgctcttgaataagcatacttt

SEQ ID NO: 504656 - DNA, 30 bp, Artificial Sequence
  Synthetic oligonucleotide
gtgtattagttatgtgtcggaagatacttt

SEQ ID NO: 504657 - DNA, 30 bp, Artificial Sequence
  Synthetic oligonucleotide
aagtacacggatgatccccaactatacttt

SEQ ID NO: 504658 - DNA, 30 bp, Artificial Sequence
  Synthetic oligonucleotide
gaacactgcacttctgtggaggtatacttt

SEQ ID NO: 504659 - DNA, 30 bp, Artificial Sequence
  Synthetic oligonucleotide
ttttcataagaaccacaaggttgctacttt

SEQ ID NO: 504660 - DNA, 30 bp, Artificial Sequence
  Synthetic oligonucleotide
aagcactgtctgataggtcgcctgtacttt

SEQ ID NO: 504661 - DNA, 30 bp, Artificial Sequence
  Synthetic oligonucleotide
caagctaggataactggccgtttgtacttt

SEQ ID NO: 504662 - DNA, 30 bp, Artificial Sequence
  Synthetic oligonucleotide
aggccgaaagcgcacggtttaatttacttt

SEQ ID NO: 504663 - DNA, 30 bp, Artificial Sequence
  Synthetic oligonucleotide
tcattggaacgcgccatccctatttacttt

SEQ ID NO: 504664 - DNA, 30 bp, Artificial Sequence
  Synthetic oligonucleotide
aatttatgtttttcctatcgtataaccttt

SEQ ID NO: 504665 - DNA, 30 bp, Artificial Sequence
  Synthetic oligonucleotide
atagtcgcttggcggaatgttgtaaccttt

SEQ ID NO: 504666 - DNA, 30 bp, Artificial Sequence
  Synthetic oligonucleotide
caaaagcacagggaacgggttgacaccttt

SEQ ID NO: 504667 - DNA, 30 bp, Artificial Sequence
  Synthetic oligonucleotide
ttcactctatgaagaagcttcatcaccttt

SEQ ID NO: 504668 - DNA, 30 bp, Artificial Sequence
  Synthetic oligonucleotide
gtcatggacgttcggtgtcaacggaccttt

SEQ ID NO: 504669 - DNA, 30 bp, Artificial Sequence
  Synthetic oligonucleotide
cccgtccatggggcacgggggtcacccttt

SEQ ID NO: 504670 - DNA, 30 bp, Artificial Sequence
  Synthetic oligonucleotide
ctgcagactagattagagactcaccccttt

SEQ ID NO: 504671 - DNA, 30 bp, Artificial Sequence
  Synthetic oligonucleotide
gacgagcgcgcagtcctttgtaagcccttt

SEQ ID NO: 504672 - DNA, 30 bp, Artificial Sequence
  Synthetic oligonucleotide
gcacagtgtctgcatagtgttcagcccttt

SEQ ID NO: 504673 - DNA, 29 bp, Artificial Sequence
  Synthetic oligonucleotide
ctagaacgtatcggatagggtatcccttt

SEQ ID NO: 504674 - DNA, 30 bp, Artificial Sequence
  Synthetic oligonucleotide
gctttgtgattcgtacctaggcgtcccttt

SEQ ID NO: 504675 - DNA, 30 bp, Artificial Sequence
  Synthetic oligonucleotide
gcccggtctcagtctagtcataccgccttt

SEQ ID NO: 504676 - DNA, 30 bp, Artificial Sequence
  Synthetic oligonucleotide
atcacaaatcataagtgcataggcgccttt

SEQ ID NO: 504677 - DNA, 30 bp, Artificial Sequence
  Synthetic oligonucleotide
gtatacaggcgtaatacacctttcgccttt

SEQ ID NO: 504678 - DNA, 30 bp, Artificial Sequence
  Synthetic oligonucleotide
taagccgcgggaggagtgttttcggccttt

SEQ ID NO: 504679 - DNA, 30 bp, Artificial Sequence
  Synthetic oligonucleotide
tgggcccatacagtttcaattattgccttt

SEQ ID NO: 504680 - DNA, 30 bp, Artificial Sequence
  Synthetic oligonucleotide
gttctgcggcgtttgaatcggcaatccttt

SEQ ID NO: 504681 - DNA, 30 bp, Artificial Sequence
  Synthetic oligonucleotide
attacgtcacaataaggttgtcgatccttt

SEQ ID NO: 504682 - DNA, 30 bp, Artificial Sequence
  Synthetic oligonucleotide
aaaacacccaccgcagcggcgacctccttt

SEQ ID NO: 504683 - DNA, 30 bp, Artificial Sequence
  Synthetic oligonucleotide
ttccactttcccttcattgtattctccttt

SEQ ID NO: 504684 - DNA, 30 bp, Artificial Sequence
  Synthetic oligonucleotide
ttccactatcccttcgttgtattctccttt

SEQ ID NO: 504685 - DNA, 30 bp, Artificial Sequence
  Synthetic oligonucleotide
ttcctctttcccttcgttgtattctccttt

SEQ ID NO: 504686 - DNA, 26 bp, Artificial Sequence
  Synthetic oligonucleotide
tgttttccttcgttgtattctccttt

SEQ ID NO: 504687 - DNA, 30 bp, Artificial Sequence
  Synthetic oligonucleotide
ttgttgtgttctctttttgtattctccttt

SEQ ID NO: 504688 - DNA, 30 bp, Artificial Sequence
  Synthetic oligonucleotide
tggtccattgggtgcagccgaacgtccttt

SEQ ID NO: 504689 - DNA, 30 bp, Artificial Sequence
  Synthetic oligonucleotide
ggtttagcggaagtagcattggggtccttt

SEQ ID NO: 504690 - DNA, 30 bp, Artificial Sequence
  Synthetic oligonucleotide
ttgcagagcatccgttggcctgggtccttt

SEQ ID NO: 504691 - DNA, 30 bp, Artificial Sequence
  Synthetic oligonucleotide
gcatcaggcccagctgacttgctgtccttt

SEQ ID NO: 504692 - DNA, 30 bp, Artificial Sequence
  Synthetic oligonucleotide
cgcaaagaatacagggatgagagttccttt

SEQ ID NO: 504693 - DNA, 30 bp, Artificial Sequence
  Synthetic oligonucleotide
aaagggaccattctgactggtcaaagcttt

SEQ ID NO: 504694 - DNA, 30 bp, Artificial Sequence
  Synthetic oligonucleotide
gtaaccagcgtgctagcacgtgaaagcttt

SEQ ID NO: 504695 - DNA, 30 bp, Artificial Sequence
  Synthetic oligonucleotide
gtgtcatggtgaccttgaaagtaaagcttt

SEQ ID NO: 504696 - DNA, 30 bp, Artificial Sequence
  Synthetic oligonucleotide
aatgggtatctacagacccaaacaagcttt

SEQ ID NO: 504697 - DNA, 30 bp, Artificial Sequence
  Synthetic oligonucleotide
tgtactatggctcatgcgagcacaagcttt

SEQ ID NO: 504698 - DNA, 30 bp, Artificial Sequence
  Synthetic oligonucleotide
tcgcaaactttaacgttgtgtgtaagcttt

SEQ ID NO: 504699 - DNA, 30 bp, Artificial Sequence
  Synthetic oligonucleotide
cggcatccacatgacactttcaacagcttt

SEQ ID NO: 504700 - DNA, 30 bp, Artificial Sequence
  Synthetic oligonucleotide
taaattttctaagagtaatcggacagcttt

SEQ ID NO: 504701 - DNA, 28 bp, Artificial Sequence
  Synthetic oligonucleotide
acatatttgtgcccgctaccagagcttt

SEQ ID NO: 504702 - DNA, 30 bp, Artificial Sequence
  Synthetic oligonucleotide
tttagaaacagccttcattcggcgagcttt

SEQ ID NO: 504703 - DNA, 30 bp, Artificial Sequence
  Synthetic oligonucleotide
cttcaagaatagggcgttcactggagcttt

SEQ ID NO: 504704 - DNA, 30 bp, Artificial Sequence
  Synthetic oligonucleotide
tacggtggtatactttacgaagaacgcttt

SEQ ID NO: 504705 - DNA, 30 bp, Artificial Sequence
  Synthetic oligonucleotide
agtatagggtgtcagaatgcataacgcttt

SEQ ID NO: 504706 - DNA, 30 bp, Artificial Sequence
  Synthetic oligonucleotide
taaaattgacgggtattacggttacgcttt

SEQ ID NO: 504707 - DNA, 30 bp, Artificial Sequence
  Synthetic oligonucleotide
aattttaagcaaaatttcagtggccgcttt

SEQ ID NO: 504708 - DNA, 30 bp, Artificial Sequence
  Synthetic oligonucleotide
gtccgagtctccaccgaccgacagcgcttt

SEQ ID NO: 504709 - DNA, 30 bp, Artificial Sequence
  Synthetic oligonucleotide
acagatatgctaggataatatgagcgcttt

SEQ ID NO: 504710 - DNA, 30 bp, Artificial Sequence
  Synthetic oligonucleotide
gattgacgatgacctagaataacaggcttt

SEQ ID NO: 504711 - DNA, 30 bp, Artificial Sequence
  Synthetic oligonucleotide
ttttacgtttaacacacgcatgtaggcttt

SEQ ID NO: 504712 - DNA, 30 bp, Artificial Sequence
  Synthetic oligonucleotide
aagcaagcgctccacttccgaaatggcttt

SEQ ID NO: 504713 - DNA, 30 bp, Artificial Sequence
  Synthetic oligonucleotide
ctcggggacgaaagcatcaaagggtgcttt

SEQ ID NO: 504714 - DNA, 30 bp, Artificial Sequence
  Synthetic oligonucleotide
aggaatgtcctgaattcagtgaaaatcttt

SEQ ID NO: 504715 - DNA, 30 bp, Artificial Sequence
  Synthetic oligonucleotide
ttggtcgtttcatccattctgtacatcttt

SEQ ID NO: 504716 - DNA, 30 bp, Artificial Sequence
  Synthetic oligonucleotide
tttgtaatacgcacctcgacggtgatcttt

SEQ ID NO: 504717 - DNA, 30 bp, Artificial Sequence
  Synthetic oligonucleotide
gatgttagaacgttggcgccccatatcttt

SEQ ID NO: 504718 - DNA, 30 bp, Artificial Sequence
  Synthetic oligonucleotide
ctacaatttgaatgagatcagactatcttt

SEQ ID NO: 504719 - DNA, 30 bp, Artificial Sequence
  Synthetic oligonucleotide
cagttttcctagggagagtattcactcttt

SEQ ID NO: 504720 - DNA, 30 bp, Artificial Sequence
  Synthetic oligonucleotide
tcggggtgtgatatagacatgcagctcttt

SEQ ID NO: 504721 - DNA, 30 bp, Artificial Sequence
  Synthetic oligonucleotide
ctgttaatgttcacacagaggtagctcttt

SEQ ID NO: 504722 - DNA, 30 bp, Artificial Sequence
  Synthetic oligonucleotide
cttatcagtgagtttgcgtttgtgctcttt

SEQ ID NO: 504723 - DNA, 30 bp, Artificial Sequence
  Synthetic oligonucleotide
aggtcaccctgtagagagtattatctcttt

SEQ ID NO: 504724 - DNA, 30 bp, Artificial Sequence
  Synthetic oligonucleotide
tgaaaagctacacatgcgttgacagtcttt

SEQ ID NO: 504725 - DNA, 30 bp, Artificial Sequence
  Synthetic oligonucleotide
gtgtggtaataggctacagtttgagtcttt

SEQ ID NO: 504726 - DNA, 30 bp, Artificial Sequence
  Synthetic oligonucleotide
gaaatagtgagacctattattttagtcttt

SEQ ID NO: 504727 - DNA, 30 bp, Artificial Sequence
  Synthetic oligonucleotide
cggtgcggaggaacaagcagacgcgtcttt

SEQ ID NO: 504728 - DNA, 29 bp, Artificial Sequence
  Synthetic oligonucleotide
tattttggaaaagacatgacgatgtcttt

SEQ ID NO: 504729 - DNA, 29 bp, Artificial Sequence
  Synthetic oligonucleotide
gagcgcagggcagggtccgttatgtcttt

SEQ ID NO: 504730 - DNA, 30 bp, Artificial Sequence
  Synthetic oligonucleotide
ggcttttcgaccttatatgctagtgtcttt

SEQ ID NO: 504731 - DNA, 30 bp, Artificial Sequence
  Synthetic oligonucleotide
taaatgagtacgagagtgttttttgtcttt

SEQ ID NO: 504732 - DNA, 30 bp, Artificial Sequence
  Synthetic oligonucleotide
aatccaagcgacccttctacgccattcttt

SEQ ID NO: 504733 - DNA, 30 bp, Artificial Sequence
  Synthetic oligonucleotide
tacgctgactccagtattaggatattcttt

SEQ ID NO: 504734 - DNA, 30 bp, Artificial Sequence
  Synthetic oligonucleotide
cactggagttttgctgggggcctattcttt

SEQ ID NO: 504735 - DNA, 30 bp, Artificial Sequence
  Synthetic oligonucleotide
agtattttttgattggttccagacttcttt

SEQ ID NO: 504736 - DNA, 30 bp, Artificial Sequence
  Synthetic oligonucleotide
ccccgataaatcggtactaaccccttcttt

SEQ ID NO: 504737 - DNA, 30 bp, Artificial Sequence
  Synthetic oligonucleotide
tggtgtactgctctaccaacatccttcttt

SEQ ID NO: 504738 - DNA, 30 bp, Artificial Sequence
  Synthetic oligonucleotide
tatgcacggaacgtaacgttttggttcttt

SEQ ID NO: 504739 - DNA, 30 bp, Artificial Sequence
  Synthetic oligonucleotide
cgcgtagataagctctttcaggctttcttt

SEQ ID NO: 504740 - DNA, 30 bp, Artificial Sequence
  Synthetic oligonucleotide
cccacctttcagtcacgtggggaaaagttt

SEQ ID NO: 504741 - DNA, 30 bp, Artificial Sequence
  Synthetic oligonucleotide
cttactgtctctggtaaaggttcgaagttt

SEQ ID NO: 504742 - DNA, 30 bp, Artificial Sequence
  Synthetic oligonucleotide
gcttatcatcggggacgtacaactaagttt

SEQ ID NO: 504743 - DNA, 30 bp, Artificial Sequence
  Synthetic oligonucleotide
taccaataacgttttaacgcggttaagttt

SEQ ID NO: 504744 - DNA, 30 bp, Artificial Sequence
  Synthetic oligonucleotide
cgagcctgttctcttgggtcagaacagttt

SEQ ID NO: 504745 - DNA, 30 bp, Artificial Sequence
  Synthetic oligonucleotide
gggaggtgacggagcgtcgccaaccagttt

SEQ ID NO: 504746 - DNA, 30 bp, Artificial Sequence
  Synthetic oligonucleotide
acgcaggggacgttcagctcgaggcagttt

SEQ ID NO: 504747 - DNA, 30 bp, Artificial Sequence
  Synthetic oligonucleotide
ttcaactcaccatacgaagtaatgcagttt

SEQ ID NO: 504748 - DNA, 30 bp, Artificial Sequence
  Synthetic oligonucleotide
atagttcttataagaagacaaaatcagttt

SEQ ID NO: 504749 - DNA, 30 bp, Artificial Sequence
  Synthetic oligonucleotide
ccgatgttaagcttacccccacgcgagttt

SEQ ID NO: 504750 - DNA, 30 bp, Artificial Sequence
  Synthetic oligonucleotide
attagtagattagatatgtatgtcgagttt

SEQ ID NO: 504751 - DNA, 30 bp, Artificial Sequence
  Synthetic oligonucleotide
aataaattttggtaccacaggttcgagttt

SEQ ID NO: 504752 - DNA, 30 bp, Artificial Sequence
  Synthetic oligonucleotide
atgtacattttgacgacgcttacggagttt

SEQ ID NO: 504753 - DNA, 30 bp, Artificial Sequence
  Synthetic oligonucleotide
tggagcatatggtacagggcaatggagttt

SEQ ID NO: 504754 - DNA, 30 bp, Artificial Sequence
  Synthetic oligonucleotide
tattcaaattgtaatggcccggtggagttt

SEQ ID NO: 504755 - DNA, 30 bp, Artificial Sequence
  Synthetic oligonucleotide
ggatccatctttgggtttgaggctgagttt

SEQ ID NO: 504756 - DNA, 30 bp, Artificial Sequence
  Synthetic oligonucleotide
aggatgtttttgggctccggaagatagttt

SEQ ID NO: 504757 - DNA, 30 bp, Artificial Sequence
  Synthetic oligonucleotide
ggaggtgtaccacaccgaacattatagttt

SEQ ID NO: 504758 - DNA, 30 bp, Artificial Sequence
  Synthetic oligonucleotide
aacggatcgcaagtattccgaccgtagttt

SEQ ID NO: 504759 - DNA, 30 bp, Artificial Sequence
  Synthetic oligonucleotide
ggctattacgttcttctttcagcgtagttt

SEQ ID NO: 504760 - DNA, 30 bp, Artificial Sequence
  Synthetic oligonucleotide
tgttttaccttattcaccatatcgtagttt

SEQ ID NO: 504761 - DNA, 30 bp, Artificial Sequence
  Synthetic oligonucleotide
cgcccattgaagcgtaggagcgtgtagttt

SEQ ID NO: 504762 - DNA, 30 bp, Artificial Sequence
  Synthetic oligonucleotide
tttatagcccgtgcgtcgccaagaacgttt

SEQ ID NO: 504763 - DNA, 30 bp, Artificial Sequence
  Synthetic oligonucleotide
ctatttaaggtcttaaagcgattcacgttt

SEQ ID NO: 504764 - DNA, 30 bp, Artificial Sequence
  Synthetic oligonucleotide
gtcatatttagcgtggtaaatttcacgttt

SEQ ID NO: 504765 - DNA, 30 bp, Artificial Sequence
  Synthetic oligonucleotide
ggcccattaaacgatgggcccgagacgttt

SEQ ID NO: 504766 - DNA, 30 bp, Artificial Sequence
  Synthetic oligonucleotide
cacgcaacaaatagtttcctttcgacgttt

SEQ ID NO: 504767 - DNA, 30 bp, Artificial Sequence
  Synthetic oligonucleotide
tagaggtgaggtatcctctcagctacgttt

SEQ ID NO: 504768 - DNA, 30 bp, Artificial Sequence
  Synthetic oligonucleotide
agctttaggcgaaggagcaaacgtacgttt

SEQ ID NO: 504769 - DNA, 30 bp, Artificial Sequence
  Synthetic oligonucleotide
ccagcacgcgctcggttactctcaccgttt

SEQ ID NO: 504770 - DNA, 30 bp, Artificial Sequence
  Synthetic oligonucleotide
aacttgcgcgcgggtcattgcgtaccgttt

SEQ ID NO: 504771 - DNA, 30 bp, Artificial Sequence
  Synthetic oligonucleotide
agcttcatcgtaggacgtcaaactccgttt

SEQ ID NO: 504772 - DNA, 30 bp, Artificial Sequence
  Synthetic oligonucleotide
gtaccagctgttacgacccctgctccgttt

SEQ ID NO: 504773 - DNA, 30 bp, Artificial Sequence
  Synthetic oligonucleotide
actggcatcttacgggctatcggtccgttt

SEQ ID NO: 504774 - DNA, 30 bp, Artificial Sequence
  Synthetic oligonucleotide
atcttcatggggacctagcagccagcgttt

SEQ ID NO: 504775 - DNA, 30 bp, Artificial Sequence
  Synthetic oligonucleotide
ctaggaaccttgcagtcattagcagcgttt

SEQ ID NO: 504776 - DNA, 30 bp, Artificial Sequence
  Synthetic oligonucleotide
gcttagaataggatgtagacaagagcgttt

SEQ ID NO: 504777 - DNA, 30 bp, Artificial Sequence
  Synthetic oligonucleotide
ttagtatatataggtaactgctacgcgttt

SEQ ID NO: 504778 - DNA, 30 bp, Artificial Sequence
  Synthetic oligonucleotide
caaaacttcaaggaatgccaagtggcgttt

SEQ ID NO: 504779 - DNA, 30 bp, Artificial Sequence
  Synthetic oligonucleotide
tgtataacttttcaagctacatgtgcgttt

SEQ ID NO: 504780 - DNA, 30 bp, Artificial Sequence
  Synthetic oligonucleotide
ataaaacggctcttacaacggagatcgttt

SEQ ID NO: 504781 - DNA, 30 bp, Artificial Sequence
  Synthetic oligonucleotide
agtagaccataacggctagttggatcgttt

SEQ ID NO: 504782 - DNA, 30 bp, Artificial Sequence
  Synthetic oligonucleotide
tgtatttgttaatcatacgacttatcgttt

SEQ ID NO: 504783 - DNA, 30 bp, Artificial Sequence
  Synthetic oligonucleotide
tagagcgctaggtcgcatcaagactcgttt

SEQ ID NO: 504784 - DNA, 30 bp, Artificial Sequence
  Synthetic oligonucleotide
actgctctcatagtgtaagtcaattcgttt

SEQ ID NO: 504785 - DNA, 30 bp, Artificial Sequence
  Synthetic oligonucleotide
agtttagttcgcacgaaccggagaaggttt

SEQ ID NO: 504786 - DNA, 30 bp, Artificial Sequence
  Synthetic oligonucleotide
gactgaactaaagcgggtgtacgcaggttt

SEQ ID NO: 504787 - DNA, 30 bp, Artificial Sequence
  Synthetic oligonucleotide
gttattcgtaaatagtctctccggaggttt

SEQ ID NO: 504788 - DNA, 30 bp, Artificial Sequence
  Synthetic oligonucleotide
gggatttccgcatgtataagttggaggttt

SEQ ID NO: 504789 - DNA, 30 bp, Artificial Sequence
  Synthetic oligonucleotide
ggcgagaagggaagccggcacagtaggttt

SEQ ID NO: 504790 - DNA, 30 bp, Artificial Sequence
  Synthetic oligonucleotide
aaccccggacttagcctctcatttaggttt

SEQ ID NO: 504791 - DNA, 30 bp, Artificial Sequence
  Synthetic oligonucleotide
cccagccaatttataaaaagcccacggttt

SEQ ID NO: 504792 - DNA, 30 bp, Artificial Sequence
  Synthetic oligonucleotide
gtttcaccggcaacgcagaactgacggttt

SEQ ID NO: 504793 - DNA, 30 bp, Artificial Sequence
  Synthetic oligonucleotide
gaggttgggtcactagaagtttgacggttt

SEQ ID NO: 504794 - DNA, 30 bp, Artificial Sequence
  Synthetic oligonucleotide
tagcttttgaacaaagggtaacaccggttt

SEQ ID NO: 504795 - DNA, 30 bp, Artificial Sequence
  Synthetic oligonucleotide
atgagcaggggcggttgacttgtccggttt

SEQ ID NO: 504796 - DNA, 30 bp, Artificial Sequence
  Synthetic oligonucleotide
catgtaaagttggcgcatcggcagcggttt

SEQ ID NO: 504797 - DNA, 30 bp, Artificial Sequence
  Synthetic oligonucleotide
cgatccctgacgctgcaagctcagcggttt

SEQ ID NO: 504798 - DNA, 30 bp, Artificial Sequence
  Synthetic oligonucleotide
ccggccatcctgccgcgcatatagcggttt

SEQ ID NO: 504799 - DNA, 30 bp, Artificial Sequence
  Synthetic oligonucleotide
cttccggtagcctgtacatctacgcggttt

SEQ ID NO: 504800 - DNA, 30 bp, Artificial Sequence
  Synthetic oligonucleotide
ccccttttatgtgtatagttagatcggttt

SEQ ID NO: 504801 - DNA, 30 bp, Artificial Sequence
  Synthetic oligonucleotide
gtaaagttcgagcgccctggtcctcggttt

SEQ ID NO: 504802 - DNA, 30 bp, Artificial Sequence
  Synthetic oligonucleotide
cttctaagggttggagcacctggtcggttt

SEQ ID NO: 504803 - DNA, 30 bp, Artificial Sequence
  Synthetic oligonucleotide
ttcgcatagcaaactaaagaatgtcggttt

SEQ ID NO: 504804 - DNA, 30 bp, Artificial Sequence
  Synthetic oligonucleotide
atgctgtgccgaacgacttccgttcggttt

SEQ ID NO: 504805 - DNA, 30 bp, Artificial Sequence
  Synthetic oligonucleotide
aagtttctggtacgatattaaaaagggttt

SEQ ID NO: 504806 - DNA, 29 bp, Artificial Sequence
  Synthetic oligonucleotide
cgcggctccgcctagcatttccagggttt

SEQ ID NO: 504807 - DNA, 30 bp, Artificial Sequence
  Synthetic oligonucleotide
tgccggttcttttgtcacggagcagggttt

SEQ ID NO: 504808 - DNA, 30 bp, Artificial Sequence
  Synthetic oligonucleotide
ctagggagatgaggcatgatgagagggttt

SEQ ID NO: 504809 - DNA, 30 bp, Artificial Sequence
  Synthetic oligonucleotide
tgttatattgccgtgtgtagcggagggttt

SEQ ID NO: 504810 - DNA, 30 bp, Artificial Sequence
  Synthetic oligonucleotide
aaggaaagccgggttcggtgtttagggttt

SEQ ID NO: 504811 - DNA, 29 bp, Artificial Sequence
  Synthetic oligonucleotide
ggcgtgaggtgggggagggggacgggttt

SEQ ID NO: 504812 - DNA, 30 bp, Artificial Sequence
  Synthetic oligonucleotide
cggtctacggagcggggctctggcgggttt

SEQ ID NO: 504813 - DNA, 30 bp, Artificial Sequence
  Synthetic oligonucleotide
aaaataggcaattagttcatcaaggggttt

SEQ ID NO: 504814 - DNA, 30 bp, Artificial Sequence
  Synthetic oligonucleotide
gcgtttagatgcgctctttcacttgggttt

SEQ ID NO: 504815 - DNA, 30 bp, Artificial Sequence
  Synthetic oligonucleotide
tcaaacatctaggctatgatctgatggttt

SEQ ID NO: 504816 - DNA, 30 bp, Artificial Sequence
  Synthetic oligonucleotide
ataagcctttgcagccttagagactggttt

SEQ ID NO: 504817 - DNA, 30 bp, Artificial Sequence
  Synthetic oligonucleotide
tataatagcattaatttaatgtagtggttt

SEQ ID NO: 504818 - DNA, 30 bp, Artificial Sequence
  Synthetic oligonucleotide
aattatatttagcggaaaacatgaatgttt

SEQ ID NO: 504819 - DNA, 30 bp, Artificial Sequence
  Synthetic oligonucleotide
gatggtgtcgtcatatctcaaataatgttt

SEQ ID NO: 504820 - DNA, 30 bp, Artificial Sequence
  Synthetic oligonucleotide
gttgcaaaactattacatgcggccatgttt

SEQ ID NO: 504821 - DNA, 30 bp, Artificial Sequence
  Synthetic oligonucleotide
tattcatctgtaaagtctcgttgcatgttt

SEQ ID NO: 504822 - DNA, 30 bp, Artificial Sequence
  Synthetic oligonucleotide
atttttcttgcatctgttggcatcatgttt

SEQ ID NO: 504823 - DNA, 30 bp, Artificial Sequence
  Synthetic oligonucleotide
catcatggtggcgaaccatcgaagatgttt

SEQ ID NO: 504824 - DNA, 30 bp, Artificial Sequence
  Synthetic oligonucleotide
ctgtcactgaggcagatatagtgactgttt

SEQ ID NO: 504825 - DNA, 30 bp, Artificial Sequence
  Synthetic oligonucleotide
caagagggtaactaggtttttttactgttt

SEQ ID NO: 504826 - DNA, 30 bp, Artificial Sequence
  Synthetic oligonucleotide
cgtaagcattgtttatgcacgggcctgttt

SEQ ID NO: 504827 - DNA, 30 bp, Artificial Sequence
  Synthetic oligonucleotide
tgactgttctttaccgccaagttcctgttt

SEQ ID NO: 504828 - DNA, 30 bp, Artificial Sequence
  Synthetic oligonucleotide
cgcgttggtatttatgtatagactctgttt

SEQ ID NO: 504829 - DNA, 30 bp, Artificial Sequence
  Synthetic oligonucleotide
agaatactacacaggcgcagaatagtgttt

SEQ ID NO: 504830 - DNA, 30 bp, Artificial Sequence
  Synthetic oligonucleotide
ctagtaacaagattaacggttgtagtgttt

SEQ ID NO: 504831 - DNA, 30 bp, Artificial Sequence
  Synthetic oligonucleotide
gagagcagcttgtcagccattaacgtgttt

SEQ ID NO: 504832 - DNA, 30 bp, Artificial Sequence
  Synthetic oligonucleotide
gcattgtaatgaacgaatatatcggtgttt

SEQ ID NO: 504833 - DNA, 30 bp, Artificial Sequence
  Synthetic oligonucleotide
tacagagtttgccagagtgaaactgtgttt

SEQ ID NO: 504834 - DNA, 30 bp, Artificial Sequence
  Synthetic oligonucleotide
caaataaaggttggcaagagccaattgttt

SEQ ID NO: 504835 - DNA, 30 bp, Artificial Sequence
  Synthetic oligonucleotide
gtagaaatgttcattagcgacgaattgttt

SEQ ID NO: 504836 - DNA, 30 bp, Artificial Sequence
  Synthetic oligonucleotide
gcgcaggaaacaggagtggaacgattgttt

SEQ ID NO: 504837 - DNA, 30 bp, Artificial Sequence
  Synthetic oligonucleotide
taggtctataggatgggtataaagttgttt

SEQ ID NO: 504838 - DNA, 30 bp, Artificial Sequence
  Synthetic oligonucleotide
gcccactagagttgccctatccggttgttt

SEQ ID NO: 504839 - DNA, 30 bp, Artificial Sequence
  Synthetic oligonucleotide
agctacaatcttttcccggtacaaaatttt

SEQ ID NO: 504840 - DNA, 29 bp, Artificial Sequence
  Synthetic oligonucleotide
catattccagctgccagagtgtaaatttt

SEQ ID NO: 504841 - DNA, 30 bp, Artificial Sequence
  Synthetic oligonucleotide
ggtttacctcaggcggccttgttaaatttt

SEQ ID NO: 504842 - DNA, 30 bp, Artificial Sequence
  Synthetic oligonucleotide
catccgtaggttacgactctatacaatttt

SEQ ID NO: 504843 - DNA, 30 bp, Artificial Sequence
  Synthetic oligonucleotide
gtgcgcgcggcagtcaaagacatcaatttt

SEQ ID NO: 504844 - DNA, 30 bp, Artificial Sequence
  Synthetic oligonucleotide
gtaggtctcaatgtgccgaccgggaatttt

SEQ ID NO: 504845 - DNA, 30 bp, Artificial Sequence
  Synthetic oligonucleotide
tcgatgtaccgctgagcgcataataatttt

SEQ ID NO: 504846 - DNA, 30 bp, Artificial Sequence
  Synthetic oligonucleotide
accccgagaggtcctgccgatactaatttt

SEQ ID NO: 504847 - DNA, 30 bp, Artificial Sequence
  Synthetic oligonucleotide
ccggggcccacttatccgtcgattaatttt

SEQ ID NO: 504848 - DNA, 30 bp, Artificial Sequence
  Synthetic oligonucleotide
gtattgttgtatcgtaacgtctttaatttt

SEQ ID NO: 504849 - DNA, 30 bp, Artificial Sequence
  Synthetic oligonucleotide
gcagagctaattgtgttaattgaacatttt

SEQ ID NO: 504850 - DNA, 30 bp, Artificial Sequence
  Synthetic oligonucleotide
accgccgtatcaaggtagtactgacatttt

SEQ ID NO: 504851 - DNA, 30 bp, Artificial Sequence
  Synthetic oligonucleotide
aaccatggagcacgttgcatgcaccatttt

SEQ ID NO: 504852 - DNA, 30 bp, Artificial Sequence
  Synthetic oligonucleotide
ttcccggcgaaacgctcacgaccccatttt

SEQ ID NO: 504853 - DNA, 30 bp, Artificial Sequence
  Synthetic oligonucleotide
tgttctttttggtatttcgtaagccatttt

SEQ ID NO: 504854 - DNA, 30 bp, Artificial Sequence
  Synthetic oligonucleotide
ccgcagagcccagtataggcctctcatttt

SEQ ID NO: 504855 - DNA, 30 bp, Artificial Sequence
  Synthetic oligonucleotide
cccgcacagggcagtaatctacaagatttt

SEQ ID NO: 504856 - DNA, 30 bp, Artificial Sequence
  Synthetic oligonucleotide
ccggcataatctgcagtagttttagatttt

SEQ ID NO: 504857 - DNA, 30 bp, Artificial Sequence
  Synthetic oligonucleotide
atggcgaagcagccctgcgagggcgatttt

SEQ ID NO: 504858 - DNA, 30 bp, Artificial Sequence
  Synthetic oligonucleotide
tagagttctttgatcagggtgcaggatttt

SEQ ID NO: 504859 - DNA, 30 bp, Artificial Sequence
  Synthetic oligonucleotide
ttatagtttacactcacacgtagggatttt

SEQ ID NO: 504860 - DNA, 30 bp, Artificial Sequence
  Synthetic oligonucleotide
cttacggttaattcgttatagactgatttt

SEQ ID NO: 504861 - DNA, 30 bp, Artificial Sequence
  Synthetic oligonucleotide
aaataagtggttcttcaccgcgctgatttt

SEQ ID NO: 504862 - DNA, 30 bp, Artificial Sequence
  Synthetic oligonucleotide
ttatttcggtacggtaaatacttatatttt

SEQ ID NO: 504863 - DNA, 30 bp, Artificial Sequence
  Synthetic oligonucleotide
cgctgacgtcgagcattttcgcactatttt

SEQ ID NO: 504864 - DNA, 30 bp, Artificial Sequence
  Synthetic oligonucleotide
agttatgagagccgtagcagaccctatttt

SEQ ID NO: 504865 - DNA, 30 bp, Artificial Sequence
  Synthetic oligonucleotide
tttgatggtatgcgatttatcgcctatttt

SEQ ID NO: 504866 - DNA, 30 bp, Artificial Sequence
  Synthetic oligonucleotide
aactttcactcggaagcggccagctatttt

SEQ ID NO: 504867 - DNA, 28 bp, Artificial Sequence
  Synthetic oligonucleotide
tttccagatcgaacccattctctatttt

SEQ ID NO: 504868 - DNA, 30 bp, Artificial Sequence
  Synthetic oligonucleotide
gcccaacttcggatcatcttagcgtatttt

SEQ ID NO: 504869 - DNA, 30 bp, Artificial Sequence
  Synthetic oligonucleotide
tacaagacggccgtttgtggggggtatttt

SEQ ID NO: 504870 - DNA, 30 bp, Artificial Sequence
  Synthetic oligonucleotide
agagctacagcctcccttaggctgtatttt

SEQ ID NO: 504871 - DNA, 30 bp, Artificial Sequence
  Synthetic oligonucleotide
ttgtcgtaaagtcacaacgttttgtatttt

SEQ ID NO: 504872 - DNA, 30 bp, Artificial Sequence
  Synthetic oligonucleotide
ggtccggcccttcgggtcattcattatttt

SEQ ID NO: 504873 - DNA, 30 bp, Artificial Sequence
  Synthetic oligonucleotide
gggttgggacattttactcggatttatttt

SEQ ID NO: 504874 - DNA, 30 bp, Artificial Sequence
  Synthetic oligonucleotide
gagttgaagaagcgcgcactcgtttatttt

SEQ ID NO: 504875 - DNA, 30 bp, Artificial Sequence
  Synthetic oligonucleotide
gataatttatattaatgagtattttatttt

SEQ ID NO: 504876 - DNA, 30 bp, Artificial Sequence
  Synthetic oligonucleotide
gaggagccaccttgaaatcatccaactttt

SEQ ID NO: 504877 - DNA, 30 bp, Artificial Sequence
  Synthetic oligonucleotide
tcgttataattgggcccgacagcaactttt

SEQ ID NO: 504878 - DNA, 30 bp, Artificial Sequence
  Synthetic oligonucleotide
acagtttgagatatctgttgcggaactttt

SEQ ID NO: 504879 - DNA, 30 bp, Artificial Sequence
  Synthetic oligonucleotide
aaagcctttaggcagcgcacacacactttt

SEQ ID NO: 504880 - DNA, 30 bp, Artificial Sequence
  Synthetic oligonucleotide
atcttggccaataaagcgcagtacactttt

SEQ ID NO: 504881 - DNA, 30 bp, Artificial Sequence
  Synthetic oligonucleotide
gtgatgtatttgcctgtgtttatcactttt

SEQ ID NO: 504882 - DNA, 30 bp, Artificial Sequence
  Synthetic oligonucleotide
attcttgatatggcacaattactcactttt

SEQ ID NO: 504883 - DNA, 30 bp, Artificial Sequence
  Synthetic oligonucleotide
accatcgtccgactgccttctacgactttt

SEQ ID NO: 504884 - DNA, 30 bp, Artificial Sequence
  Synthetic oligonucleotide
aagttattaaggtatcggcatgggactttt

SEQ ID NO: 504885 - DNA, 30 bp, Artificial Sequence
  Synthetic oligonucleotide
agttgcttaaccgcggggttatgtactttt

SEQ ID NO: 504886 - DNA, 30 bp, Artificial Sequence
  Synthetic oligonucleotide
ttgaccagcagtgataagcgtattactttt

SEQ ID NO: 504887 - DNA, 30 bp, Artificial Sequence
  Synthetic oligonucleotide
gcccttctacatggaggacgccttactttt

SEQ ID NO: 504888 - DNA, 30 bp, Artificial Sequence
  Synthetic oligonucleotide
gatacttgaccctatgattgcgttactttt

SEQ ID NO: 504889 - DNA, 30 bp, Artificial Sequence
  Synthetic oligonucleotide
tgagtgcaatgtaggggtatagaacctttt

SEQ ID NO: 504890 - DNA, 30 bp, Artificial Sequence
  Synthetic oligonucleotide
ctgcagcttccgcccttgttgaaccctttt

SEQ ID NO: 504891 - DNA, 30 bp, Artificial Sequence
  Synthetic oligonucleotide
ccgacccatgagaagtagctgcagcctttt

SEQ ID NO: 504892 - DNA, 30 bp, Artificial Sequence
  Synthetic oligonucleotide
taattacgcatccgcatgcctgagcctttt

SEQ ID NO: 504893 - DNA, 30 bp, Artificial Sequence
  Synthetic oligonucleotide
agtcccggagagcttccagtgcatcctttt

SEQ ID NO: 504894 - DNA, 30 bp, Artificial Sequence
  Synthetic oligonucleotide
cttttttgcacgtttaatattgatcctttt

SEQ ID NO: 504895 - DNA, 30 bp, Artificial Sequence
  Synthetic oligonucleotide
taatgccatacaagcggacagtctcctttt

SEQ ID NO: 504896 - DNA, 30 bp, Artificial Sequence
  Synthetic oligonucleotide
gatattcgattcgttctctcacaagctttt

SEQ ID NO: 504897 - DNA, 30 bp, Artificial Sequence
  Synthetic oligonucleotide
gattcgctttacttaatcgagtaagctttt

SEQ ID NO: 504898 - DNA, 30 bp, Artificial Sequence
  Synthetic oligonucleotide
gagaaagcagcacatgtcagtaccgctttt

SEQ ID NO: 504899 - DNA, 30 bp, Artificial Sequence
  Synthetic oligonucleotide
ggaatggcccggaggcaattccccgctttt

SEQ ID NO: 504900 - DNA, 30 bp, Artificial Sequence
  Synthetic oligonucleotide
caaaatgttttttacgcgaaccgcgctttt

SEQ ID NO: 504901 - DNA, 30 bp, Artificial Sequence
  Synthetic oligonucleotide
ctttacttcgggggaccgttcatcgctttt

SEQ ID NO: 504902 - DNA, 30 bp, Artificial Sequence
  Synthetic oligonucleotide
tctgtcgtacgacatacgccagcggctttt

SEQ ID NO: 504903 - DNA, 30 bp, Artificial Sequence
  Synthetic oligonucleotide
caaacgcaacctcctttatagggggctttt

SEQ ID NO: 504904 - DNA, 30 bp, Artificial Sequence
  Synthetic oligonucleotide
aacatgcaccgactccgcaatgtggctttt

SEQ ID NO: 504905 - DNA, 30 bp, Artificial Sequence
  Synthetic oligonucleotide
ggggcaacccatgtggtttgcacatctttt

SEQ ID NO: 504906 - DNA, 30 bp, Artificial Sequence
  Synthetic oligonucleotide
ttctagtcgggactctgatggcagtctttt

SEQ ID NO: 504907 - DNA, 30 bp, Artificial Sequence
  Synthetic oligonucleotide
actgtccatacgggaagccgtcaaagtttt

SEQ ID NO: 504908 - DNA, 30 bp, Artificial Sequence
  Synthetic oligonucleotide
gcatgatgcgaaatggtattcgcaagtttt

SEQ ID NO: 504909 - DNA, 30 bp, Artificial Sequence
  Synthetic oligonucleotide
ttgtcatatgggagtaataggtgaagtttt

SEQ ID NO: 504910 - DNA, 30 bp, Artificial Sequence
  Synthetic oligonucleotide
ctctctcctttaagatctgaagagagtttt

SEQ ID NO: 504911 - DNA, 30 bp, Artificial Sequence
  Synthetic oligonucleotide
ttcttcctgacctttcccgactcgagtttt

SEQ ID NO: 504912 - DNA, 30 bp, Artificial Sequence
  Synthetic oligonucleotide
ggctttgaggtctggtgttcctggagtttt

SEQ ID NO: 504913 - DNA, 30 bp, Artificial Sequence
  Synthetic oligonucleotide
tgtgcaaaagaggccgagtatgtgagtttt

SEQ ID NO: 504914 - DNA, 30 bp, Artificial Sequence
  Synthetic oligonucleotide
ctggaagcggttcttaccgttttgagtttt

SEQ ID NO: 504915 - DNA, 30 bp, Artificial Sequence
  Synthetic oligonucleotide
ctgaataattcaggggccgggaatagtttt

SEQ ID NO: 504916 - DNA, 30 bp, Artificial Sequence
  Synthetic oligonucleotide
ggatatgattcgttgcaactttatagtttt

SEQ ID NO: 504917 - DNA, 31 bp, Artificial Sequence
  Synthetic oligonucleotide
aatcgatccaggggtgaactcaagtagtttt

SEQ ID NO: 504918 - DNA, 30 bp, Artificial Sequence
  Synthetic oligonucleotide
gtagtgtcgtttacggttccagttagtttt

SEQ ID NO: 504919 - DNA, 30 bp, Artificial Sequence
  Synthetic oligonucleotide
gaatcctttacacatgtccgtagacgtttt

SEQ ID NO: 504920 - DNA, 30 bp, Artificial Sequence
  Synthetic oligonucleotide
atactgcacctagaaaaagggtgccgtttt

SEQ ID NO: 504921 - DNA, 30 bp, Artificial Sequence
  Synthetic oligonucleotide
gcatgtggtgcaccagctttggagcgtttt

SEQ ID NO: 504922 - DNA, 29 bp, Artificial Sequence
  Synthetic oligonucleotide
gccattatgaatccctcatcctgcgtttt

SEQ ID NO: 504923 - DNA, 30 bp, Artificial Sequence
  Synthetic oligonucleotide
gttggttgggctgggggattacatcgtttt

SEQ ID NO: 504924 - DNA, 30 bp, Artificial Sequence
  Synthetic oligonucleotide
cgtcaaagcgctgttgtaaaaacaggtttt

SEQ ID NO: 504925 - DNA, 30 bp, Artificial Sequence
  Synthetic oligonucleotide
gatgtcaattacccttaatgcccaggtttt

SEQ ID NO: 504926 - DNA, 29 bp, Artificial Sequence
  Synthetic oligonucleotide
ctggcctcagcaacgggcgggcaggtttt

SEQ ID NO: 504927 - DNA, 30 bp, Artificial Sequence
  Synthetic oligonucleotide
aaaaaatccctatatctaggcataggtttt

SEQ ID NO: 504928 - DNA, 30 bp, Artificial Sequence
  Synthetic oligonucleotide
ctgaccgggagcaacgggcccctaggtttt

SEQ ID NO: 504929 - DNA, 30 bp, Artificial Sequence
  Synthetic oligonucleotide
acgcttgactcgtgaccgggatacggtttt

SEQ ID NO: 504930 - DNA, 30 bp, Artificial Sequence
  Synthetic oligonucleotide
ccccaacaatatggcatcaccgccggtttt

SEQ ID NO: 504931 - DNA, 30 bp, Artificial Sequence
  Synthetic oligonucleotide
gagtgtcaggtgacttaacactagggtttt

SEQ ID NO: 504932 - DNA, 30 bp, Artificial Sequence
  Synthetic oligonucleotide
cggttcggacggcttgttcagacgggtttt

SEQ ID NO: 504933 - DNA, 30 bp, Artificial Sequence
  Synthetic oligonucleotide
tccactttcggagtaggatgttcgggtttt

SEQ ID NO: 504934 - DNA, 30 bp, Artificial Sequence
  Synthetic oligonucleotide
agccccaccaaaaatatgtcactgggtttt

SEQ ID NO: 504935 - DNA, 30 bp, Artificial Sequence
  Synthetic oligonucleotide
tttaaggcgcgggatattcctgatggtttt

SEQ ID NO: 504936 - DNA, 30 bp, Artificial Sequence
  Synthetic oligonucleotide
gctcccaatgggtgctgactctatggtttt

SEQ ID NO: 504937 - DNA, 30 bp, Artificial Sequence
  Synthetic oligonucleotide
caaggacaagacgggacgggttatggtttt

SEQ ID NO: 504938 - DNA, 30 bp, Artificial Sequence
  Synthetic oligonucleotide
gagaaaagttggatgcgtgcttctggtttt

SEQ ID NO: 504939 - DNA, 30 bp, Artificial Sequence
  Synthetic oligonucleotide
gttctgaaatacggaaaccccgttggtttt

SEQ ID NO: 504940 - DNA, 30 bp, Artificial Sequence
  Synthetic oligonucleotide
ttggcatatgcagcattatcatttggtttt

SEQ ID NO: 504941 - DNA, 30 bp, Artificial Sequence
  Synthetic oligonucleotide
cgccgaactaacgaagtggcgaaatgtttt

SEQ ID NO: 504942 - DNA, 30 bp, Artificial Sequence
  Synthetic oligonucleotide
agatattaaggggataagctcacatgtttt

SEQ ID NO: 504943 - DNA, 30 bp, Artificial Sequence
  Synthetic oligonucleotide
tggccccttgcgttctcgcttatatgtttt

SEQ ID NO: 504944 - DNA, 30 bp, Artificial Sequence
  Synthetic oligonucleotide
gggtgtcttaccgaatgacagctatgtttt

SEQ ID NO: 504945 - DNA, 30 bp, Artificial Sequence
  Synthetic oligonucleotide
cttgtccgggaagcagctatcagctgtttt

SEQ ID NO: 504946 - DNA, 30 bp, Artificial Sequence
  Synthetic oligonucleotide
agtatgaatcaataatcacagagctgtttt

SEQ ID NO: 504947 - DNA, 30 bp, Artificial Sequence
  Synthetic oligonucleotide
ttaaattttcccccaggcccgtgctgtttt

SEQ ID NO: 504948 - DNA, 30 bp, Artificial Sequence
  Synthetic oligonucleotide
aagcgtttggggcgtcctggaatttgtttt

SEQ ID NO: 504949 - DNA, 30 bp, Artificial Sequence
  Synthetic oligonucleotide
tttcgcgcaaagcgacagtttgtttgtttt

SEQ ID NO: 504950 - DNA, 30 bp, Artificial Sequence
  Synthetic oligonucleotide
atgcaaaacgaccctttgaggaaaattttt

SEQ ID NO: 504951 - DNA, 30 bp, Artificial Sequence
  Synthetic oligonucleotide
gcgacgcgtatcgcgggtacggcaattttt

SEQ ID NO: 504952 - DNA, 30 bp, Artificial Sequence
  Synthetic oligonucleotide
taaaataaatgatgcgcgagaagaattttt

SEQ ID NO: 504953 - DNA, 30 bp, Artificial Sequence
  Synthetic oligonucleotide
ggttacatcaactcgtggttccgaattttt

SEQ ID NO: 504954 - DNA, 30 bp, Artificial Sequence
  Synthetic oligonucleotide
tctaaggtttgtaatttccttggaattttt

SEQ ID NO: 504955 - DNA, 30 bp, Artificial Sequence
  Synthetic oligonucleotide
tcttagggcgagaagccgaatataattttt

SEQ ID NO: 504956 - DNA, 30 bp, Artificial Sequence
  Synthetic oligonucleotide
tactggccatccggggattcactaattttt

SEQ ID NO: 504957 - DNA, 30 bp, Artificial Sequence
  Synthetic oligonucleotide
atcagcccggagcacacttcattaattttt

SEQ ID NO: 504958 - DNA, 30 bp, Artificial Sequence
  Synthetic oligonucleotide
attattatccaggaccaatcaaacattttt

SEQ ID NO: 504959 - DNA, 30 bp, Artificial Sequence
  Synthetic oligonucleotide
ccagcagctatatcgaaattcttcattttt

SEQ ID NO: 504960 - DNA, 30 bp, Artificial Sequence
  Synthetic oligonucleotide
tgaaaaaaatcagtgtcactcatgattttt

SEQ ID NO: 504961 - DNA, 30 bp, Artificial Sequence
  Synthetic oligonucleotide
tccttggggctgatcacggacgtgattttt

SEQ ID NO: 504962 - DNA, 30 bp, Artificial Sequence
  Synthetic oligonucleotide
aaaatggggcgacccactgtcttgattttt

SEQ ID NO: 504963 - DNA, 30 bp, Artificial Sequence
  Synthetic oligonucleotide
aggagggccgttactcgtaatttgattttt

SEQ ID NO: 504964 - DNA, 30 bp, Artificial Sequence
  Synthetic oligonucleotide
tatccgtatatgtaaagcgtcaatattttt

SEQ ID NO: 504965 - DNA, 30 bp, Artificial Sequence
  Synthetic oligonucleotide
acgaagtcaaactccggagtcactattttt

SEQ ID NO: 504966 - DNA, 30 bp, Artificial Sequence
  Synthetic oligonucleotide
tgcgtcgatcacgcttgttagtgtattttt

SEQ ID NO: 504967 - DNA, 30 bp, Artificial Sequence
  Synthetic oligonucleotide
cggagattactagtacattggtgtattttt

SEQ ID NO: 504968 - DNA, 30 bp, Artificial Sequence
  Synthetic oligonucleotide
atttacagtggtgaacttgtcattattttt

SEQ ID NO: 504969 - DNA, 30 bp, Artificial Sequence
  Synthetic oligonucleotide
ttcctcacagggccgtaacaggaacttttt

SEQ ID NO: 504970 - DNA, 30 bp, Artificial Sequence
  Synthetic oligonucleotide
tccgtgcttccccgttaccagacacttttt

SEQ ID NO: 504971 - DNA, 30 bp, Artificial Sequence
  Synthetic oligonucleotide
acagtggataaacggcaaggtttacttttt

SEQ ID NO: 504972 - DNA, 30 bp, Artificial Sequence
  Synthetic oligonucleotide
gggacgcccgcttgttaatagaaccttttt

SEQ ID NO: 504973 - DNA, 30 bp, Artificial Sequence
  Synthetic oligonucleotide
taataaccgctggcgagtctttcccttttt

SEQ ID NO: 504974 - DNA, 30 bp, Artificial Sequence
  Synthetic oligonucleotide
ggctaaggaaaactctgattgcgccttttt

SEQ ID NO: 504975 - DNA, 30 bp, Artificial Sequence
  Synthetic oligonucleotide
aacatttagctctttttcgtgtgccttttt

SEQ ID NO: 504976 - DNA, 30 bp, Artificial Sequence
  Synthetic oligonucleotide
cgcctacatagtgcagctcccgtccttttt

SEQ ID NO: 504977 - DNA, 30 bp, Artificial Sequence
  Synthetic oligonucleotide
aacgcgtttggcagagtcgtgttccttttt

SEQ ID NO: 504978 - DNA, 30 bp, Artificial Sequence
  Synthetic oligonucleotide
ttcaggttgaaagtccgcggtcggcttttt

SEQ ID NO: 504979 - DNA, 30 bp, Artificial Sequence
  Synthetic oligonucleotide
gggcatttaacggccggtacttggcttttt

SEQ ID NO: 504980 - DNA, 30 bp, Artificial Sequence
  Synthetic oligonucleotide
tattcagataattgcccggtagctcttttt

SEQ ID NO: 504981 - DNA, 29 bp, Artificial Sequence
  Synthetic oligonucleotide
gaaccggcatgtttagactttctcttttt

SEQ ID NO: 504982 - DNA, 30 bp, Artificial Sequence
  Synthetic oligonucleotide
ggaaccgacttcggagattagattcttttt

SEQ ID NO: 504983 - DNA, 30 bp, Artificial Sequence
  Synthetic oligonucleotide
taactggggcgtcccacaaggcttcttttt

SEQ ID NO: 504984 - DNA, 30 bp, Artificial Sequence
  Synthetic oligonucleotide
gaagaacggattgcggaaatataagttttt

SEQ ID NO: 504985 - DNA, 30 bp, Artificial Sequence
  Synthetic oligonucleotide
gtgaagatccggacctgatcagcagttttt

SEQ ID NO: 504986 - DNA, 30 bp, Artificial Sequence
  Synthetic oligonucleotide
tatagcgcaaaaacatgccctgtagttttt

SEQ ID NO: 504987 - DNA, 30 bp, Artificial Sequence
  Synthetic oligonucleotide
tgttgtagatgcatcagttgtaacgttttt

SEQ ID NO: 504988 - DNA, 30 bp, Artificial Sequence
  Synthetic oligonucleotide
tagatcgcgactcattactaaaccgttttt

SEQ ID NO: 504989 - DNA, 30 bp, Artificial Sequence
  Synthetic oligonucleotide
cgcgtcctagtgaagattcactcggttttt

SEQ ID NO: 504990 - DNA, 30 bp, Artificial Sequence
  Synthetic oligonucleotide
aaggactttatacgtatcaatcatgttttt

SEQ ID NO: 504991 - DNA, 30 bp, Artificial Sequence
  Synthetic oligonucleotide
atttgtcaaaaaacggacctcagtgttttt

SEQ ID NO: 504992 - DNA, 30 bp, Artificial Sequence
  Synthetic oligonucleotide
gtaattctacgttaagggatcattgttttt

SEQ ID NO: 504993 - DNA, 31 bp, Artificial Sequence
  Synthetic oligonucleotide
caatcgaagttacccgcggagggaatttttt

SEQ ID NO: 504994 - DNA, 30 bp, Artificial Sequence
  Synthetic oligonucleotide
agaaacgtgagacgaacggcttgatttttt

SEQ ID NO: 504995 - DNA, 30 bp, Artificial Sequence
  Synthetic oligonucleotide
tgaacttcgaccatgctcggggtatttttt

SEQ ID NO: 504996 - DNA, 30 bp, Artificial Sequence
  Synthetic oligonucleotide
agaaacgtgagacgaacggctttatttttt

SEQ ID NO: 504997 - DNA, 30 bp, Artificial Sequence
  Synthetic oligonucleotide
taagtgtatggagggcattaacactttttt

SEQ ID NO: 504998 - DNA, 30 bp, Artificial Sequence
  Synthetic oligonucleotide
gaacacggtttccagaggctttactttttt

SEQ ID NO: 504999 - DNA, 30 bp, Artificial Sequence
  Synthetic oligonucleotide
ttcttctatacctgtgtacggggctttttt

SEQ ID NO: 505000 - DNA, 30 bp, Artificial Sequence
  Synthetic oligonucleotide
ttaattggttggttttaacatccgtttttt

SEQ ID NO: 505001 - DNA, 30 bp, Artificial Sequence
  Synthetic oligonucleotide
gatgcggaaagcattgatttaaattttttt

SEQ ID NO: 505002 - DNA, 30 bp, Artificial Sequence
  Synthetic oligonucleotide
aataggaccctgtatgaaaggaattttttt

SEQ ID NO: 505003 - DNA, 30 bp, Artificial Sequence
  Synthetic oligonucleotide
cgttaggttgattggggggacaaaaaaaaa

SEQ ID NO: 505004 - DNA, 30 bp, Artificial Sequence
  Synthetic oligonucleotide
aagctactcgtttgttcctagcaaaaaaaa

SEQ ID NO: 505005 - DNA, 30 bp, Artificial Sequence
  Synthetic oligonucleotide
gccatccctcacaaacggagctaaaaaaaa

SEQ ID NO: 505006 - DNA, 30 bp, Artificial Sequence
  Synthetic oligonucleotide
gatgggtataccaagcgataaccaaaaaaa

SEQ ID NO: 505007 - DNA, 30 bp, Artificial Sequence
  Synthetic oligonucleotide
cagtcatatcatctcgaatggagaaaaaaa

SEQ ID NO: 505008 - DNA, 30 bp, Artificial Sequence
  Synthetic oligonucleotide
tttatgagttttgagtcatcgctaaaaaaa

SEQ ID NO: 505009 - DNA, 30 bp, Artificial Sequence
  Synthetic oligonucleotide
ggaagctcggagtaagagatcgtaaaaaaa

SEQ ID NO: 505010 - DNA, 30 bp, Artificial Sequence
  Synthetic oligonucleotide
tcagcggattgtatcagcaaaaacaaaaaa

SEQ ID NO: 505011 - DNA, 30 bp, Artificial Sequence
  Synthetic oligonucleotide
agccgatcgtaggcaaaaggtatcaaaaaa

SEQ ID NO: 505012 - DNA, 30 bp, Artificial Sequence
  Synthetic oligonucleotide
ttcgtgtccattgttctggacctcaaaaaa

SEQ ID NO: 505013 - DNA, 30 bp, Artificial Sequence
  Synthetic oligonucleotide
tttagaaggtgaccctattcatagaaaaaa

SEQ ID NO: 505014 - DNA, 30 bp, Artificial Sequence
  Synthetic oligonucleotide
tcaagtaaggaggggggtcatgggaaaaaa

SEQ ID NO: 505015 - DNA, 30 bp, Artificial Sequence
  Synthetic oligonucleotide
ctagtaatgcacatataggatgggaaaaaa

SEQ ID NO: 505016 - DNA, 30 bp, Artificial Sequence
  Synthetic oligonucleotide
atgagtccaatctcagtagctttgaaaaaa

SEQ ID NO: 505017 - DNA, 30 bp, Artificial Sequence
  Synthetic oligonucleotide
tctttcttccctgagatatacgataaaaaa

SEQ ID NO: 505018 - DNA, 30 bp, Artificial Sequence
  Synthetic oligonucleotide
atctgacgaaatagaatcgcaactaaaaaa

SEQ ID NO: 505019 - DNA, 30 bp, Artificial Sequence
  Synthetic oligonucleotide
aggcagcgtcaaatggatgcggttaaaaaa

SEQ ID NO: 505020 - DNA, 30 bp, Artificial Sequence
  Synthetic oligonucleotide
gacgaccgaatggggttaacgtttaaaaaa

SEQ ID NO: 505021 - DNA, 30 bp, Artificial Sequence
  Synthetic oligonucleotide
ctgcataatctttgataagtttgacaaaaa

SEQ ID NO: 505022 - DNA, 30 bp, Artificial Sequence
  Synthetic oligonucleotide
aaagactaattttgctttgtgcaccaaaaa

SEQ ID NO: 505023 - DNA, 30 bp, Artificial Sequence
  Synthetic oligonucleotide
agggcgctagagatggaacgtcaccaaaaa

SEQ ID NO: 505024 - DNA, 30 bp, Artificial Sequence
  Synthetic oligonucleotide
cagctatatctgtctactcagatccaaaaa

SEQ ID NO: 505025 - DNA, 30 bp, Artificial Sequence
  Synthetic oligonucleotide
cacaactatgggtcgtcagcttagcaaaaa

SEQ ID NO: 505026 - DNA, 30 bp, Artificial Sequence
  Synthetic oligonucleotide
gatgattatgcctgtatataggctcaaaaa

SEQ ID NO: 505027 - DNA, 30 bp, Artificial Sequence
  Synthetic oligonucleotide
cgctaagaaccgaccgcaagcaaagaaaaa

SEQ ID NO: 505028 - DNA, 30 bp, Artificial Sequence
  Synthetic oligonucleotide
gcgccgcagaacgctccttgtaaagaaaaa

SEQ ID NO: 505029 - DNA, 30 bp, Artificial Sequence
  Synthetic oligonucleotide
gacagctgacgctaagttaacatagaaaaa

SEQ ID NO: 505030 - DNA, 30 bp, Artificial Sequence
  Synthetic oligonucleotide
aatggccacggagcctttcgattagaaaaa

SEQ ID NO: 505031 - DNA, 30 bp, Artificial Sequence
  Synthetic oligonucleotide
cttggtcgcagcatgtgggataacgaaaaa

SEQ ID NO: 505032 - DNA, 30 bp, Artificial Sequence
  Synthetic oligonucleotide
cggagaatgtccggcagggaggccgaaaaa

SEQ ID NO: 505033 - DNA, 30 bp, Artificial Sequence
  Synthetic oligonucleotide
gccagcgtaacagcgcccacatccgaaaaa

SEQ ID NO: 505034 - DNA, 30 bp, Artificial Sequence
  Synthetic oligonucleotide
gtccttggcgtgtccttgtgctccgaaaaa

SEQ ID NO: 505035 - DNA, 30 bp, Artificial Sequence
  Synthetic oligonucleotide
ggtttgggccaagcaaggcgaatggaaaaa

SEQ ID NO: 505036 - DNA, 30 bp, Artificial Sequence
  Synthetic oligonucleotide
ccgctcttgactcttatttacgctgaaaaa

SEQ ID NO: 505037 - DNA, 30 bp, Artificial Sequence
  Synthetic oligonucleotide
gtaacgccagcaaatacatctgctgaaaaa

SEQ ID NO: 505038 - DNA, 30 bp, Artificial Sequence
  Synthetic oligonucleotide
tatgacaggcctctctccccaagtgaaaaa

SEQ ID NO: 505039 - DNA, 30 bp, Artificial Sequence
  Synthetic oligonucleotide
gcctggtaataggcggccccccgataaaaa

SEQ ID NO: 505040 - DNA, 30 bp, Artificial Sequence
  Synthetic oligonucleotide
gaacgaagaggaaggaaaagatgctaaaaa

SEQ ID NO: 505041 - DNA, 30 bp, Artificial Sequence
  Synthetic oligonucleotide
gtcctctacgcttgcgagtggctctaaaaa

SEQ ID NO: 505042 - DNA, 30 bp, Artificial Sequence
  Synthetic oligonucleotide
tgtccggttaccctcttttaaaagtaaaaa

SEQ ID NO: 505043 - DNA, 30 bp, Artificial Sequence
  Synthetic oligonucleotide
gagattagattacgtcccataacgtaaaaa

SEQ ID NO: 505044 - DNA, 30 bp, Artificial Sequence
  Synthetic oligonucleotide
tattggcctgagattctgcggaattaaaaa

SEQ ID NO: 505045 - DNA, 30 bp, Artificial Sequence
  Synthetic oligonucleotide
atacaactatagtgctctactaattaaaaa

SEQ ID NO: 505046 - DNA, 30 bp, Artificial Sequence
  Synthetic oligonucleotide
cttcgtttcagttcgctggcgcattaaaaa

SEQ ID NO: 505047 - DNA, 30 bp, Artificial Sequence
  Synthetic oligonucleotide
cgtggtcgccgtatcaagtaggcttaaaaa

SEQ ID NO: 505048 - DNA, 30 bp, Artificial Sequence
  Synthetic oligonucleotide
aaatcccatgggtgattggttttttaaaaa

SEQ ID NO: 505049 - DNA, 30 bp, Artificial Sequence
  Synthetic oligonucleotide
gcatttatatgtttcgtactaaaaacaaaa

SEQ ID NO: 505050 - DNA, 30 bp, Artificial Sequence
  Synthetic oligonucleotide
gccggccactaggtggtctctcgcacaaaa

SEQ ID NO: 505051 - DNA, 30 bp, Artificial Sequence
  Synthetic oligonucleotide
atccacctatggcgccggaacaagacaaaa

SEQ ID NO: 505052 - DNA, 30 bp, Artificial Sequence
  Synthetic oligonucleotide
gttgaaacgcgttggagaaaatagacaaaa

SEQ ID NO: 505053 - DNA, 30 bp, Artificial Sequence
  Synthetic oligonucleotide
gttcttttcgtatatccaatatagacaaaa

SEQ ID NO: 505054 - DNA, 30 bp, Artificial Sequence
  Synthetic oligonucleotide
agcagccggatagtgtatggaaatacaaaa

SEQ ID NO: 505055 - DNA, 29 bp, Artificial Sequence
  Synthetic oligonucleotide
gtggttaatagctcggagtaaatacaaaa

SEQ ID NO: 505056 - DNA, 30 bp, Artificial Sequence
  Synthetic oligonucleotide
tttagtcatgtagattgaaagcctacaaaa

SEQ ID NO: 505057 - DNA, 30 bp, Artificial Sequence
  Synthetic oligonucleotide
tcaagaagtcacggggcatttgttacaaaa

SEQ ID NO: 505058 - DNA, 30 bp, Artificial Sequence
  Synthetic oligonucleotide
cggaaaccacgacgagaaaatataccaaaa

SEQ ID NO: 505059 - DNA, 30 bp, Artificial Sequence
  Synthetic oligonucleotide
gctggtcaatataaagtcgcgtcgccaaaa

SEQ ID NO: 505060 - DNA, 30 bp, Artificial Sequence
  Synthetic oligonucleotide
atttgggccgctggcacactgactccaaaa

SEQ ID NO: 505061 - DNA, 30 bp, Artificial Sequence
  Synthetic oligonucleotide
aacgaagccgctctggacgcaggtccaaaa

SEQ ID NO: 505062 - DNA, 30 bp, Artificial Sequence
  Synthetic oligonucleotide
cgcaggggagctcgaaatagagttccaaaa

SEQ ID NO: 505063 - DNA, 30 bp, Artificial Sequence
  Synthetic oligonucleotide
ctattttaatcactttgctagtaagcaaaa

SEQ ID NO: 505064 - DNA, 30 bp, Artificial Sequence
  Synthetic oligonucleotide
gtgtttaactattttactttacccgcaaaa

SEQ ID NO: 505065 - DNA, 30 bp, Artificial Sequence
  Synthetic oligonucleotide
catatgtgaataccacgtgcgttcgcaaaa

SEQ ID NO: 505066 - DNA, 30 bp, Artificial Sequence
  Synthetic oligonucleotide
gataaggaatactcagcaattagggcaaaa

SEQ ID NO: 505067 - DNA, 30 bp, Artificial Sequence
  Synthetic oligonucleotide
ggccggcgtccccaggcattcggggcaaaa

SEQ ID NO: 505068 - DNA, 30 bp, Artificial Sequence
  Synthetic oligonucleotide
ccatcgggtgatgcaacacacattgcaaaa

SEQ ID NO: 505069 - DNA, 30 bp, Artificial Sequence
  Synthetic oligonucleotide
acgtaagggcacgattctatggtatcaaaa

SEQ ID NO: 505070 - DNA, 30 bp, Artificial Sequence
  Synthetic oligonucleotide
gttactagaaagagccgcacaagctcaaaa

SEQ ID NO: 505071 - DNA, 30 bp, Artificial Sequence
  Synthetic oligonucleotide
aggcggaaattatcggatcttaagtcaaaa

SEQ ID NO: 505072 - DNA, 30 bp, Artificial Sequence
  Synthetic oligonucleotide
gcacaagccccgctatgaaggaggtcaaaa

SEQ ID NO: 505073 - DNA, 30 bp, Artificial Sequence
  Synthetic oligonucleotide
aggtaatttgatgggtttggtgcttcaaaa

SEQ ID NO: 505074 - DNA, 30 bp, Artificial Sequence
  Synthetic oligonucleotide
agggcagttctgctgatgcaggaaagaaaa

SEQ ID NO: 505075 - DNA, 30 bp, Artificial Sequence
  Synthetic oligonucleotide
gaagcttctttggtcgaacactaaagaaaa

SEQ ID NO: 505076 - DNA, 30 bp, Artificial Sequence
  Synthetic oligonucleotide
caagctgtataggtgcattagggaagaaaa

SEQ ID NO: 505077 - DNA, 31 bp, Artificial Sequence
  Synthetic oligonucleotide
gtgattttttagcgcagctgacgtaagaaaa

SEQ ID NO: 505078 - DNA, 30 bp, Artificial Sequence
  Synthetic oligonucleotide
ggatgcgatcgttatacgcaagccagaaaa

SEQ ID NO: 505079 - DNA, 30 bp, Artificial Sequence
  Synthetic oligonucleotide
tcgttctaccccatgagcggccgcagaaaa

SEQ ID NO: 505080 - DNA, 30 bp, Artificial Sequence
  Synthetic oligonucleotide
acccacatatatcatagacgaggcagaaaa

SEQ ID NO: 505081 - DNA, 30 bp, Artificial Sequence
  Synthetic oligonucleotide
tcagtgatatctcacatttttaagagaaaa

SEQ ID NO: 505082 - DNA, 30 bp, Artificial Sequence
  Synthetic oligonucleotide
tgccttgcgttggttgttgtctatagaaaa

SEQ ID NO: 505083 - DNA, 30 bp, Artificial Sequence
  Synthetic oligonucleotide
tgacgtctgctgacaatgagaacacgaaaa

SEQ ID NO: 505084 - DNA, 30 bp, Artificial Sequence
  Synthetic oligonucleotide
tgcgcatgcgttctgtggtaatgccgaaaa

SEQ ID NO: 505085 - DNA, 30 bp, Artificial Sequence
  Synthetic oligonucleotide
tggctgcgcagcttaatccctacgcgaaaa

SEQ ID NO: 505086 - DNA, 30 bp, Artificial Sequence
  Synthetic oligonucleotide
tgcgtatcgtagggtggtacacctcgaaaa

SEQ ID NO: 505087 - DNA, 30 bp, Artificial Sequence
  Synthetic oligonucleotide
aatcggcgactggaaatttccagtcgaaaa

SEQ ID NO: 505088 - DNA, 30 bp, Artificial Sequence
  Synthetic oligonucleotide
aggatacgcgtggaagaagcacgaggaaaa

SEQ ID NO: 505089 - DNA, 30 bp, Artificial Sequence
  Synthetic oligonucleotide
atagatttccctgacgtgcacgccggaaaa

SEQ ID NO: 505090 - DNA, 30 bp, Artificial Sequence
  Synthetic oligonucleotide
gagaatatctccggcccagaggtcggaaaa

SEQ ID NO: 505091 - DNA, 29 bp, Artificial Sequence
  Synthetic oligonucleotide
ttcctagacatgccgcactacgtggaaaa

SEQ ID NO: 505092 - DNA, 30 bp, Artificial Sequence
  Synthetic oligonucleotide
gcgagtccgtcttccggacgttaatgaaaa

SEQ ID NO: 505093 - DNA, 30 bp, Artificial Sequence
  Synthetic oligonucleotide
ccgtgtgcctgccagcatccaacctgaaaa

SEQ ID NO: 505094 - DNA, 30 bp, Artificial Sequence
  Synthetic oligonucleotide
ttaatctgtaccgtgaattgtctctgaaaa

SEQ ID NO: 505095 - DNA, 30 bp, Artificial Sequence
  Synthetic oligonucleotide
gtttaggatctctgtgggggccagtgaaaa

SEQ ID NO: 505096 - DNA, 30 bp, Artificial Sequence
  Synthetic oligonucleotide
tgggaaaccacatcccacggtaggtgaaaa

SEQ ID NO: 505097 - DNA, 30 bp, Artificial Sequence
  Synthetic oligonucleotide
tataagggtttattacagtcgcgttgaaaa

SEQ ID NO: 505098 - DNA, 30 bp, Artificial Sequence
  Synthetic oligonucleotide
tggaagtatcaacaccggcccgtttgaaaa

SEQ ID NO: 505099 - DNA, 30 bp, Artificial Sequence
  Synthetic oligonucleotide
cgccggcggggcacgaggcacttttgaaaa

SEQ ID NO: 505100 - DNA, 30 bp, Artificial Sequence
  Synthetic oligonucleotide
tgatccttgtagcagtttttcacaataaaa

SEQ ID NO: 505101 - DNA, 30 bp, Artificial Sequence
  Synthetic oligonucleotide
tacaataaggtgacgcatatggcaataaaa

SEQ ID NO: 505102 - DNA, 30 bp, Artificial Sequence
  Synthetic oligonucleotide
tgggggtatccgggctgggtcggaataaaa

SEQ ID NO: 505103 - DNA, 30 bp, Artificial Sequence
  Synthetic oligonucleotide
ggtaacgtgtctacttaaatgtgaataaaa

SEQ ID NO: 505104 - DNA, 30 bp, Artificial Sequence
  Synthetic oligonucleotide
aggcgagttatttttcgcttcataataaaa

SEQ ID NO: 505105 - DNA, 30 bp, Artificial Sequence
  Synthetic oligonucleotide
gacgcgtgattcgagaagtaagccataaaa

SEQ ID NO: 505106 - DNA, 30 bp, Artificial Sequence
  Synthetic oligonucleotide
ggtaacctgcgaatatcacgcggcataaaa

SEQ ID NO: 505107 - DNA, 30 bp, Artificial Sequence
  Synthetic oligonucleotide
cccttcgtggaaagaactatcgtcataaaa

SEQ ID NO: 505108 - DNA, 30 bp, Artificial Sequence
  Synthetic oligonucleotide
attctcagtgcatgggagcgtccgataaaa

SEQ ID NO: 505109 - DNA, 30 bp, Artificial Sequence
  Synthetic oligonucleotide
gcttttgtacacaaacgtgtagcgataaaa

SEQ ID NO: 505110 - DNA, 30 bp, Artificial Sequence
  Synthetic oligonucleotide
tggagcctgtcacccgcaagaaaactaaaa

SEQ ID NO: 505111 - DNA, 30 bp, Artificial Sequence
  Synthetic oligonucleotide
ttcgatgggcgtactccataagccctaaaa

SEQ ID NO: 505112 - DNA, 30 bp, Artificial Sequence
  Synthetic oligonucleotide
ttgtgtctaggtattgggtctgatctaaaa

SEQ ID NO: 505113 - DNA, 30 bp, Artificial Sequence
  Synthetic oligonucleotide
ctgggatggcgaagacgagatccagtaaaa

SEQ ID NO: 505114 - DNA, 30 bp, Artificial Sequence
  Synthetic oligonucleotide
tagcctgtaccagaatcctacggagtaaaa

SEQ ID NO: 505115 - DNA, 30 bp, Artificial Sequence
  Synthetic oligonucleotide
cccagggtttgttgggttgtattagtaaaa

SEQ ID NO: 505116 - DNA, 30 bp, Artificial Sequence
  Synthetic oligonucleotide
acaatggtgcaagacaacctaggcgtaaaa

SEQ ID NO: 505117 - DNA, 30 bp, Artificial Sequence
  Synthetic oligonucleotide
tgcagtatcccagaaagtaatttcgtaaaa

SEQ ID NO: 505118 - DNA, 30 bp, Artificial Sequence
  Synthetic oligonucleotide
tgttgtaggtcgtcggagctgcaggtaaaa

SEQ ID NO: 505119 - DNA, 30 bp, Artificial Sequence
  Synthetic oligonucleotide
ccgcatttgtaaacgcagcctaatgtaaaa

SEQ ID NO: 505120 - DNA, 30 bp, Artificial Sequence
  Synthetic oligonucleotide
aaccacggtccggtatcctaatttgtaaaa

SEQ ID NO: 505121 - DNA, 30 bp, Artificial Sequence
  Synthetic oligonucleotide
gcatttaacgtggctcattaccaattaaaa

SEQ ID NO: 505122 - DNA, 30 bp, Artificial Sequence
  Synthetic oligonucleotide
gaattttacaagatcatgtgaagattaaaa

SEQ ID NO: 505123 - DNA, 30 bp, Artificial Sequence
  Synthetic oligonucleotide
aatgggttacaagtcttaagactattaaaa

SEQ ID NO: 505124 - DNA, 30 bp, Artificial Sequence
  Synthetic oligonucleotide
ccgcgcgagttatccatggctaacttaaaa

SEQ ID NO: 505125 - DNA, 30 bp, Artificial Sequence
  Synthetic oligonucleotide
gcactaccatacgcactagccaccttaaaa

SEQ ID NO: 505126 - DNA, 30 bp, Artificial Sequence
  Synthetic oligonucleotide
agagaagccgtacgcttttaaaagttaaaa

SEQ ID NO: 505127 - DNA, 30 bp, Artificial Sequence
  Synthetic oligonucleotide
aatatcagtcctggttcgtgagagttaaaa

SEQ ID NO: 505128 - DNA, 40 bp, Artificial Sequence
  Synthetic oligonucleotide
gacagcctgcgcaacttcttacgtgttaaccgcgttaaaa

SEQ ID NO: 505129 - DNA, 29 bp, Artificial Sequence
  Synthetic oligonucleotide
gatctcaggggccgcaaaaatggttaaaa

SEQ ID NO: 505130 - DNA, 30 bp, Artificial Sequence
  Synthetic oligonucleotide
aatgaccctgttgcgggttgcaatttaaaa

SEQ ID NO: 505131 - DNA, 30 bp, Artificial Sequence
  Synthetic oligonucleotide
tcgagattccgcctagtacgggtaaacaaa

SEQ ID NO: 505132 - DNA, 30 bp, Artificial Sequence
  Synthetic oligonucleotide
cggcaattgatttgtttgtaatacaacaaa

SEQ ID NO: 505133 - DNA, 30 bp, Artificial Sequence
  Synthetic oligonucleotide
ggtcagaaacgaagtgtatggtgcaacaaa

SEQ ID NO: 505134 - DNA, 30 bp, Artificial Sequence
  Synthetic oligonucleotide
actcccaagaagcgtattgatatcaacaaa

SEQ ID NO: 505135 - DNA, 30 bp, Artificial Sequence
  Synthetic oligonucleotide
gataagaacaagtacggaagcaagaacaaa

SEQ ID NO: 505136 - DNA, 30 bp, Artificial Sequence
  Synthetic oligonucleotide
ttcataggcggcacttgttcatagaacaaa

SEQ ID NO: 505137 - DNA, 30 bp, Artificial Sequence
  Synthetic oligonucleotide
attagttaacttgggaagccaaataacaaa

SEQ ID NO: 505138 - DNA, 30 bp, Artificial Sequence
  Synthetic oligonucleotide
cgcataaggtagacgtagcaggttaacaaa

SEQ ID NO: 505139 - DNA, 30 bp, Artificial Sequence
  Synthetic oligonucleotide
ttgccgccgttacgtcgctgtctacacaaa

SEQ ID NO: 505140 - DNA, 30 bp, Artificial Sequence
  Synthetic oligonucleotide
tatatcgattttgttcagatattacacaaa

SEQ ID NO: 505141 - DNA, 30 bp, Artificial Sequence
  Synthetic oligonucleotide
gaaattaacgttcagggttcctaccacaaa

SEQ ID NO: 505142 - DNA, 30 bp, Artificial Sequence
  Synthetic oligonucleotide
cgttctattttaatggatgacgagcacaaa

SEQ ID NO: 505143 - DNA, 30 bp, Artificial Sequence
  Synthetic oligonucleotide
attatcgatgttgttatcatgccgcacaaa

SEQ ID NO: 505144 - DNA, 30 bp, Artificial Sequence
  Synthetic oligonucleotide
ttactcaaagttttttagatacatcacaaa

SEQ ID NO: 505145 - DNA, 30 bp, Artificial Sequence
  Synthetic oligonucleotide
gcgcgccagcttctaaggggtcttcacaaa

SEQ ID NO: 505146 - DNA, 30 bp, Artificial Sequence
  Synthetic oligonucleotide
ccccaaggtctggctgatgcggttcacaaa

SEQ ID NO: 505147 - DNA, 30 bp, Artificial Sequence
  Synthetic oligonucleotide
cgcaaaccagaagtgaaataaacagacaaa

SEQ ID NO: 505148 - DNA, 30 bp, Artificial Sequence
  Synthetic oligonucleotide
gaataattaagacgagcattgagcgacaaa

SEQ ID NO: 505149 - DNA, 30 bp, Artificial Sequence
  Synthetic oligonucleotide
gtcggatagcgtccaaccgcggcggacaaa

SEQ ID NO: 505150 - DNA, 30 bp, Artificial Sequence
  Synthetic oligonucleotide
cgacatatggcgaaaccgtggcctgacaaa

SEQ ID NO: 505151 - DNA, 30 bp, Artificial Sequence
  Synthetic oligonucleotide
gagtctcctttaaaatagcttagtgacaaa

SEQ ID NO: 505152 - DNA, 30 bp, Artificial Sequence
  Synthetic oligonucleotide
agcgatttctctgtatgcctgacatacaaa

SEQ ID NO: 505153 - DNA, 30 bp, Artificial Sequence
  Synthetic oligonucleotide
ggtgtctcggctgtggtggaaggctacaaa

SEQ ID NO: 505154 - DNA, 30 bp, Artificial Sequence
  Synthetic oligonucleotide
aacaccgttccgactttgtctaagtacaaa

SEQ ID NO: 505155 - DNA, 29 bp, Artificial Sequence
  Synthetic oligonucleotide
tttgttgtgtaggtttactcccgtacaaa

SEQ ID NO: 505156 - DNA, 30 bp, Artificial Sequence
  Synthetic oligonucleotide
caggctcgaaacagcactatggcgtacaaa

SEQ ID NO: 505157 - DNA, 30 bp, Artificial Sequence
  Synthetic oligonucleotide
aaagtcgggaggtggagttctatgtacaaa

SEQ ID NO: 505158 - DNA, 30 bp, Artificial Sequence
  Synthetic oligonucleotide
ctcgtatagcctaataattatctgtacaaa

SEQ ID NO: 505159 - DNA, 30 bp, Artificial Sequence
  Synthetic oligonucleotide
gagtgggtccctaaatcgcatgaaaccaaa

SEQ ID NO: 505160 - DNA, 30 bp, Artificial Sequence
  Synthetic oligonucleotide
ttaaagacgccgccagcacaatgaaccaaa

SEQ ID NO: 505161 - DNA, 30 bp, Artificial Sequence
  Synthetic oligonucleotide
gtttatgcaacttaggcgcagttaaccaaa

SEQ ID NO: 505162 - DNA, 30 bp, Artificial Sequence
  Synthetic oligonucleotide
tccagagaaaaacccctgactttaaccaaa

SEQ ID NO: 505163 - DNA, 30 bp, Artificial Sequence
  Synthetic oligonucleotide
cctgactctatcgtacctatactgaccaaa

SEQ ID NO: 505164 - DNA, 30 bp, Artificial Sequence
  Synthetic oligonucleotide
ctttggtgcgcatagtagagctctaccaaa

SEQ ID NO: 505165 - DNA, 30 bp, Artificial Sequence
  Synthetic oligonucleotide
ggcatagatagcatgccgcggtgtaccaaa

SEQ ID NO: 505166 - DNA, 30 bp, Artificial Sequence
  Synthetic oligonucleotide
tagtttaggacgcagttacgaagacccaaa

SEQ ID NO: 505167 - DNA, 30 bp, Artificial Sequence
  Synthetic oligonucleotide
ttcgggtcgatatgcggcctctaccccaaa

SEQ ID NO: 505168 - DNA, 30 bp, Artificial Sequence
  Synthetic oligonucleotide
cgcaggggcctcaagtctaaagggcccaaa

SEQ ID NO: 505169 - DNA, 30 bp, Artificial Sequence
  Synthetic oligonucleotide
atttcactttgttgtatgtcagatcccaaa

SEQ ID NO: 505170 - DNA, 30 bp, Artificial Sequence
  Synthetic oligonucleotide
tatctgtaccgcacgtaggcaaaagccaaa

SEQ ID NO: 505171 - DNA, 30 bp, Artificial Sequence
  Synthetic oligonucleotide
acgtatcatttgtaccgcccagccgccaaa

SEQ ID NO: 505172 - DNA, 30 bp, Artificial Sequence
  Synthetic oligonucleotide
attttcgaggagtacttaacgctcgccaaa

SEQ ID NO: 505173 - DNA, 30 bp, Artificial Sequence
  Synthetic oligonucleotide
aatccctcctcctgtagacgattcgccaaa

SEQ ID NO: 505174 - DNA, 30 bp, Artificial Sequence
  Synthetic oligonucleotide
aaaacctcagagttgcatttccgggccaaa

SEQ ID NO: 505175 - DNA, 30 bp, Artificial Sequence
  Synthetic oligonucleotide
acccgctcttgagaggcattgttggccaaa

SEQ ID NO: 505176 - DNA, 30 bp, Artificial Sequence
  Synthetic oligonucleotide
ttttgctaggatttaatcggtgctgccaaa

SEQ ID NO: 505177 - DNA, 30 bp, Artificial Sequence
  Synthetic oligonucleotide
gttattaaatgtggacccagttttgccaaa

SEQ ID NO: 505178 - DNA, 30 bp, Artificial Sequence
  Synthetic oligonucleotide
gatttgttatcatacgcgaacttatccaaa

SEQ ID NO: 505179 - DNA, 30 bp, Artificial Sequence
  Synthetic oligonucleotide
gcccgtttttatgtaaccggcgtctccaaa

SEQ ID NO: 505180 - DNA, 30 bp, Artificial Sequence
  Synthetic oligonucleotide
tgcacggaattggaacgcggaacgtccaaa

SEQ ID NO: 505181 - DNA, 30 bp, Artificial Sequence
  Synthetic oligonucleotide
ccacacggaagttaacgcgaaacaagcaaa

SEQ ID NO: 505182 - DNA, 30 bp, Artificial Sequence
  Synthetic oligonucleotide
cgtttatacgaagacctcctaacaagcaaa

SEQ ID NO: 505183 - DNA, 30 bp, Artificial Sequence
  Synthetic oligonucleotide
acactgtctcccagagggtgcataagcaaa

SEQ ID NO: 505184 - DNA, 30 bp, Artificial Sequence
  Synthetic oligonucleotide
ttactgatcaattctagggagaccagcaaa

SEQ ID NO: 505185 - DNA, 30 bp, Artificial Sequence
  Synthetic oligonucleotide
cattaaaggtcatagtgttccagcagcaaa

SEQ ID NO: 505186 - DNA, 30 bp, Artificial Sequence
  Synthetic oligonucleotide
cgttaccggtggcagggtgacgggagcaaa

SEQ ID NO: 505187 - DNA, 30 bp, Artificial Sequence
  Synthetic oligonucleotide
agttctaaatgcgtacgagcaatgagcaaa

SEQ ID NO: 505188 - DNA, 30 bp, Artificial Sequence
  Synthetic oligonucleotide
aaaggtgaggtgaggttacgtcgtagcaaa

SEQ ID NO: 505189 - DNA, 30 bp, Artificial Sequence
  Synthetic oligonucleotide
atctctgtatttgcagcagaatttagcaaa

SEQ ID NO: 505190 - DNA, 30 bp, Artificial Sequence
  Synthetic oligonucleotide
caagcccgtcagttttgttgtacccgcaaa

SEQ ID NO: 505191 - DNA, 30 bp, Artificial Sequence
  Synthetic oligonucleotide
tggtcgtcgttatggtttcatagtcgcaaa

SEQ ID NO: 505192 - DNA, 30 bp, Artificial Sequence
  Synthetic oligonucleotide
aggcttttctatcgccagacctttcgcaaa

SEQ ID NO: 505193 - DNA, 30 bp, Artificial Sequence
  Synthetic oligonucleotide
aagccgtagtactcgcaattgaaaggcaaa

SEQ ID NO: 505194 - DNA, 30 bp, Artificial Sequence
  Synthetic oligonucleotide
gaagcatcgttgtttgggctgcaaggcaaa

SEQ ID NO: 505195 - DNA, 30 bp, Artificial Sequence
  Synthetic oligonucleotide
aatgttccgtaagagagttttcaaggcaaa

SEQ ID NO: 505196 - DNA, 30 bp, Artificial Sequence
  Synthetic oligonucleotide
gtaataagagggatcagcacgtaaggcaaa

SEQ ID NO: 505197 - DNA, 30 bp, Artificial Sequence
  Synthetic oligonucleotide
gatttaacctcatggatctaaagaggcaaa

SEQ ID NO: 505198 - DNA, 30 bp, Artificial Sequence
  Synthetic oligonucleotide
cacttctaggttacaagaggcagaggcaaa

SEQ ID NO: 505199 - DNA, 30 bp, Artificial Sequence
  Synthetic oligonucleotide
tgctctatgatcgggggtcccttaggcaaa

SEQ ID NO: 505200 - DNA, 30 bp, Artificial Sequence
  Synthetic oligonucleotide
cgggaccggtgttgctgtcaagacggcaaa

SEQ ID NO: 505201 - DNA, 30 bp, Artificial Sequence
  Synthetic oligonucleotide
gaaaagtcgaatctgttagaacggggcaaa

SEQ ID NO: 505202 - DNA, 30 bp, Artificial Sequence
  Synthetic oligonucleotide
taacagcttttcagcactccggggggcaaa

SEQ ID NO: 505203 - DNA, 30 bp, Artificial Sequence
  Synthetic oligonucleotide
atccgttcccgttagttttgtcctggcaaa

SEQ ID NO: 505204 - DNA, 30 bp, Artificial Sequence
  Synthetic oligonucleotide
catatccgcggcatttgtctcgaatgcaaa

SEQ ID NO: 505205 - DNA, 30 bp, Artificial Sequence
  Synthetic oligonucleotide
taaaagattcttgcatggacatgatgcaaa

SEQ ID NO: 505206 - DNA, 30 bp, Artificial Sequence
  Synthetic oligonucleotide
agcgataataactcctaaaggtgatgcaaa

SEQ ID NO: 505207 - DNA, 30 bp, Artificial Sequence
  Synthetic oligonucleotide
agcttcctctatcttggttgcggctgcaaa

SEQ ID NO: 505208 - DNA, 30 bp, Artificial Sequence
  Synthetic oligonucleotide
ctcccttactgtggacacgcactctgcaaa

SEQ ID NO: 505209 - DNA, 30 bp, Artificial Sequence
  Synthetic oligonucleotide
ttaccgaacgcggttctttgaccgtgcaaa

SEQ ID NO: 505210 - DNA, 30 bp, Artificial Sequence
  Synthetic oligonucleotide
gtccgccgtgcaagtcacatatcgtgcaaa

SEQ ID NO: 505211 - DNA, 30 bp, Artificial Sequence
  Synthetic oligonucleotide
tggggcatagctaggtaggggcgttgcaaa

SEQ ID NO: 505212 - DNA, 30 bp, Artificial Sequence
  Synthetic oligonucleotide
catgtctaccgcgctggccctggttgcaaa

SEQ ID NO: 505213 - DNA, 30 bp, Artificial Sequence
  Synthetic oligonucleotide
gatttgcaatctggtttcaggttttgcaaa

SEQ ID NO: 505214 - DNA, 30 bp, Artificial Sequence
  Synthetic oligonucleotide
tttgctgtgtcatcagggacacaaatcaaa

SEQ ID NO: 505215 - DNA, 30 bp, Artificial Sequence
  Synthetic oligonucleotide
tataagggattcagcatatttgaaatcaaa

SEQ ID NO: 505216 - DNA, 30 bp, Artificial Sequence
  Synthetic oligonucleotide
tccgggtgcttcttgcaagagtaaatcaaa

SEQ ID NO: 505217 - DNA, 30 bp, Artificial Sequence
  Synthetic oligonucleotide
ataatcaatattcaggttggctgaatcaaa

SEQ ID NO: 505218 - DNA, 30 bp, Artificial Sequence
  Synthetic oligonucleotide
gaacaattgccacggagccctgacatcaaa

SEQ ID NO: 505219 - DNA, 30 bp, Artificial Sequence
  Synthetic oligonucleotide
caggaacaccgtccacacatctacatcaaa

SEQ ID NO: 505220 - DNA, 30 bp, Artificial Sequence
  Synthetic oligonucleotide
aaagcagcccgtcttgaaggctccatcaaa

SEQ ID NO: 505221 - DNA, 30 bp, Artificial Sequence
  Synthetic oligonucleotide
ttctggctttgagtttcgggcatcatcaaa

SEQ ID NO: 505222 - DNA, 30 bp, Artificial Sequence
  Synthetic oligonucleotide
ctcgaattttatgtttaattgcggatcaaa

SEQ ID NO: 505223 - DNA, 30 bp, Artificial Sequence
  Synthetic oligonucleotide
tttgactggccaagacatttttctatcaaa

SEQ ID NO: 505224 - DNA, 30 bp, Artificial Sequence
  Synthetic oligonucleotide
cattgataagtacatggccgccttatcaaa

SEQ ID NO: 505225 - DNA, 30 bp, Artificial Sequence
  Synthetic oligonucleotide
atgttgaagcagaccatctgtcttatcaaa

SEQ ID NO: 505226 - DNA, 30 bp, Artificial Sequence
  Synthetic oligonucleotide
gttgccattggggagtcaagtctcctcaaa

SEQ ID NO: 505227 - DNA, 30 bp, Artificial Sequence
  Synthetic oligonucleotide
gtgccatactcgcgttttcacgggctcaaa

SEQ ID NO: 505228 - DNA, 30 bp, Artificial Sequence
  Synthetic oligonucleotide
cgacaacttgtgagaaatttacatctcaaa

SEQ ID NO: 505229 - DNA, 30 bp, Artificial Sequence
  Synthetic oligonucleotide
gatcgtgctcttttgtgcataatagtcaaa

SEQ ID NO: 505230 - DNA, 30 bp, Artificial Sequence
  Synthetic oligonucleotide
ccccagcatcagtcttgtagcatcgtcaaa

SEQ ID NO: 505231 - DNA, 30 bp, Artificial Sequence
  Synthetic oligonucleotide
gaatttatgcgtagagccggccaggtcaaa

SEQ ID NO: 505232 - DNA, 30 bp, Artificial Sequence
  Synthetic oligonucleotide
atttgtgtatatggttcataaagggtcaaa

SEQ ID NO: 505233 - DNA, 30 bp, Artificial Sequence
  Synthetic oligonucleotide
gcatatcgatgatcgcttatggaattcaaa

SEQ ID NO: 505234 - DNA, 30 bp, Artificial Sequence
  Synthetic oligonucleotide
ttaacggccttaggagttcctcgattcaaa

SEQ ID NO: 505235 - DNA, 30 bp, Artificial Sequence
  Synthetic oligonucleotide
gtctcgaggttgaccgtagggcacttcaaa

SEQ ID NO: 505236 - DNA, 30 bp, Artificial Sequence
  Synthetic oligonucleotide
ctagagacgtaaatggtcacaccgttcaaa

SEQ ID NO: 505237 - DNA, 30 bp, Artificial Sequence
  Synthetic oligonucleotide
ggctcggggaggcggctaaaacggttcaaa

SEQ ID NO: 505238 - DNA, 30 bp, Artificial Sequence
  Synthetic oligonucleotide
ttgtctaagccggtgcaggatagtttcaaa

SEQ ID NO: 505239 - DNA, 30 bp, Artificial Sequence
  Synthetic oligonucleotide
gccccccactttgaatcgtatagtttcaaa

SEQ ID NO: 505240 - DNA, 30 bp, Artificial Sequence
  Synthetic oligonucleotide
gtaaaccttaacagagctttgcacaagaaa

SEQ ID NO: 505241 - DNA, 30 bp, Artificial Sequence
  Synthetic oligonucleotide
gtattcaggcgtaacctcgaagacaagaaa

SEQ ID NO: 505242 - DNA, 30 bp, Artificial Sequence
  Synthetic oligonucleotide
tttatttgggtgcaaatttgcgccaagaaa

SEQ ID NO: 505243 - DNA, 30 bp, Artificial Sequence
  Synthetic oligonucleotide
ggccgtttgcgtttctctgaagtcaagaaa

SEQ ID NO: 505244 - DNA, 30 bp, Artificial Sequence
  Synthetic oligonucleotide
gttgccgaaaacaaatcagaattcaagaaa

SEQ ID NO: 505245 - DNA, 30 bp, Artificial Sequence
  Synthetic oligonucleotide
tagtgagcgctgcgcatcttttagaagaaa

SEQ ID NO: 505246 - DNA, 30 bp, Artificial Sequence
  Synthetic oligonucleotide
cgggatctcacataaagcactgggaagaaa

SEQ ID NO: 505247 - DNA, 30 bp, Artificial Sequence
  Synthetic oligonucleotide
tttgggatgattcatcttcgacataagaaa

SEQ ID NO: 505248 - DNA, 30 bp, Artificial Sequence
  Synthetic oligonucleotide
caccgcatgcatcgtgatagagtacagaaa

SEQ ID NO: 505249 - DNA, 30 bp, Artificial Sequence
  Synthetic oligonucleotide
ttttaaaaaaggtcgatccgagtccagaaa

SEQ ID NO: 505250 - DNA, 30 bp, Artificial Sequence
  Synthetic oligonucleotide
atatacggtacgttgtgttagaggcagaaa

SEQ ID NO: 505251 - DNA, 30 bp, Artificial Sequence
  Synthetic oligonucleotide
ccccatcttgtttgtcatgactggcagaaa

SEQ ID NO: 505252 - DNA, 30 bp, Artificial Sequence
  Synthetic oligonucleotide
tggtgccccatgtacctacggatgcagaaa

SEQ ID NO: 505253 - DNA, 30 bp, Artificial Sequence
  Synthetic oligonucleotide
catgtgtcacgcgatgttgcactgcagaaa

SEQ ID NO: 505254 - DNA, 30 bp, Artificial Sequence
  Synthetic oligonucleotide
gacgcttcagagcttatattcagtcagaaa

SEQ ID NO: 505255 - DNA, 30 bp, Artificial Sequence
  Synthetic oligonucleotide
gtttcagctccggagcagcttccagagaaa

SEQ ID NO: 505256 - DNA, 30 bp, Artificial Sequence
  Synthetic oligonucleotide
attccccggtgggtacccccttcagagaaa

SEQ ID NO: 505257 - DNA, 30 bp, Artificial Sequence
  Synthetic oligonucleotide
caaccgtgccaacaatcatccgtagagaaa

SEQ ID NO: 505258 - DNA, 30 bp, Artificial Sequence
  Synthetic oligonucleotide
gaagcagtcagggcacgtttattagagaaa

SEQ ID NO: 505259 - DNA, 30 bp, Artificial Sequence
  Synthetic oligonucleotide
cttatcgtcgaagcacacggtcacgagaaa

SEQ ID NO: 505260 - DNA, 30 bp, Artificial Sequence
  Synthetic oligonucleotide
acgctctaagcaccgggctttagcgagaaa

SEQ ID NO: 505261 - DNA, 30 bp, Artificial Sequence
  Synthetic oligonucleotide
ggtttttaatcacgtttgtgatgcgagaaa

SEQ ID NO: 505262 - DNA, 30 bp, Artificial Sequence
  Synthetic oligonucleotide
aatatgggggaggatgcctctcaggagaaa

SEQ ID NO: 505263 - DNA, 30 bp, Artificial Sequence
  Synthetic oligonucleotide
ggtcagtaggattatgtgactggtgagaaa

SEQ ID NO: 505264 - DNA, 30 bp, Artificial Sequence
  Synthetic oligonucleotide
ctttggattgcagtcgttaacgcatagaaa

SEQ ID NO: 505265 - DNA, 30 bp, Artificial Sequence
  Synthetic oligonucleotide
actggggatatggatgtaactttatagaaa

SEQ ID NO: 505266 - DNA, 30 bp, Artificial Sequence
  Synthetic oligonucleotide
gctgatgcctttcaggcatacttctagaaa

SEQ ID NO: 505267 - DNA, 30 bp, Artificial Sequence
  Synthetic oligonucleotide
tcgggtgctcgctggtcagatcggtagaaa

SEQ ID NO: 505268 - DNA, 30 bp, Artificial Sequence
  Synthetic oligonucleotide
gaagcacattcggggggatcggggtagaaa

SEQ ID NO: 505269 - DNA, 30 bp, Artificial Sequence
  Synthetic oligonucleotide
tccccgggtaacgtgtgtagggggtagaaa

SEQ ID NO: 505270 - DNA, 30 bp, Artificial Sequence
  Synthetic oligonucleotide
actgcaaggacagaaagaaaccgcacgaaa

SEQ ID NO: 505271 - DNA, 30 bp, Artificial Sequence
  Synthetic oligonucleotide
atttataacacctgtctatttaagacgaaa

SEQ ID NO: 505272 - DNA, 30 bp, Artificial Sequence
  Synthetic oligonucleotide
cacttagattggccagctggggagacgaaa

SEQ ID NO: 505273 - DNA, 30 bp, Artificial Sequence
  Synthetic oligonucleotide
tcagttcgcgataggctcaccttgacgaaa

SEQ ID NO: 505274 - DNA, 30 bp, Artificial Sequence
  Synthetic oligonucleotide
agtggctagggccgccgagtgttgacgaaa

SEQ ID NO: 505275 - DNA, 30 bp, Artificial Sequence
  Synthetic oligonucleotide
aggtgggtagttttagggagtttgacgaaa

SEQ ID NO: 505276 - DNA, 30 bp, Artificial Sequence
  Synthetic oligonucleotide
ttatatattctgtccgccccccctacgaaa

SEQ ID NO: 505277 - DNA, 30 bp, Artificial Sequence
  Synthetic oligonucleotide
tatgacccttggctgcatactcttacgaaa

SEQ ID NO: 505278 - DNA, 30 bp, Artificial Sequence
  Synthetic oligonucleotide
cataccgcacagccacataagcaaccgaaa

SEQ ID NO: 505279 - DNA, 30 bp, Artificial Sequence
  Synthetic oligonucleotide
gcgatgtgtttcaagtggatgaccccgaaa

SEQ ID NO: 505280 - DNA, 30 bp, Artificial Sequence
  Synthetic oligonucleotide
gacgaacgttgggccagccaacgtccgaaa

SEQ ID NO: 505281 - DNA, 30 bp, Artificial Sequence
  Synthetic oligonucleotide
acaatgcacgaatttttgcggttcgcgaaa

SEQ ID NO: 505282 - DNA, 30 bp, Artificial Sequence
  Synthetic oligonucleotide
cgggcaagatggtccgtccagtaggcgaaa

SEQ ID NO: 505283 - DNA, 30 bp, Artificial Sequence
  Synthetic oligonucleotide
agtttttccacggtcgacgtctaatcgaaa

SEQ ID NO: 505284 - DNA, 30 bp, Artificial Sequence
  Synthetic oligonucleotide
gtatcctccgacccggcaatttaatcgaaa

SEQ ID NO: 505285 - DNA, 30 bp, Artificial Sequence
  Synthetic oligonucleotide
gttctgattccgtacgctgcccactcgaaa

SEQ ID NO: 505286 - DNA, 30 bp, Artificial Sequence
  Synthetic oligonucleotide
gctctgagtgacacgttgtgtttctcgaaa

SEQ ID NO: 505287 - DNA, 30 bp, Artificial Sequence
  Synthetic oligonucleotide
gcttttgtatccgccacgctggggtcgaaa

SEQ ID NO: 505288 - DNA, 30 bp, Artificial Sequence
  Synthetic oligonucleotide
agttcgcaacaagcattcgagaattcgaaa

SEQ ID NO: 505289 - DNA, 30 bp, Artificial Sequence
  Synthetic oligonucleotide
ctacgtggacggagcccattcagttcgaaa

SEQ ID NO: 505290 - DNA, 30 bp, Artificial Sequence
  Synthetic oligonucleotide
ggagagtaaagagaagctaagccaaggaaa

SEQ ID NO: 505291 - DNA, 30 bp, Artificial Sequence
  Synthetic oligonucleotide
taggcagtccgaaagctttttgcaaggaaa

SEQ ID NO: 505292 - DNA, 30 bp, Artificial Sequence
  Synthetic oligonucleotide
gtgtagtagcaggggtttaatagcaggaaa

SEQ ID NO: 505293 - DNA, 30 bp, Artificial Sequence
  Synthetic oligonucleotide
tgggattccgcgttctatttacgcaggaaa

SEQ ID NO: 505294 - DNA, 30 bp, Artificial Sequence
  Synthetic oligonucleotide
caagggagttcgcgaaaggatggcaggaaa

SEQ ID NO: 505295 - DNA, 30 bp, Artificial Sequence
  Synthetic oligonucleotide
atttcataagtatgagagaagttgaggaaa

SEQ ID NO: 505296 - DNA, 30 bp, Artificial Sequence
  Synthetic oligonucleotide
ccgaacaacgaaggaggctgtacacggaaa

SEQ ID NO: 505297 - DNA, 30 bp, Artificial Sequence
  Synthetic oligonucleotide
cattgtcaacctactattgttagacggaaa

SEQ ID NO: 505298 - DNA, 30 bp, Artificial Sequence
  Synthetic oligonucleotide
agtcaatttgagtatatgagatgacggaaa

SEQ ID NO: 505299 - DNA, 30 bp, Artificial Sequence
  Synthetic oligonucleotide
ccgaacaaaagggtcagacgaaaccggaaa

SEQ ID NO: 505300 - DNA, 30 bp, Artificial Sequence
  Synthetic oligonucleotide
tatcatgtggaacacccgtctgtccggaaa

SEQ ID NO: 505301 - DNA, 30 bp, Artificial Sequence
  Synthetic oligonucleotide
gaggtcggcagcggtcaagcgaatcggaaa

SEQ ID NO: 505302 - DNA, 30 bp, Artificial Sequence
  Synthetic oligonucleotide
gataaaaagaacataaaatgctatcggaaa

SEQ ID NO: 505303 - DNA, 30 bp, Artificial Sequence
  Synthetic oligonucleotide
ctcatttttgcttagtatatataagggaaa

SEQ ID NO: 505304 - DNA, 30 bp, Artificial Sequence
  Synthetic oligonucleotide
aaattcctggcccaagcggttgcagggaaa

SEQ ID NO: 505305 - DNA, 30 bp, Artificial Sequence
  Synthetic oligonucleotide
aaaaaacaagcggggttcgaggtagggaaa

SEQ ID NO: 505306 - DNA, 30 bp, Artificial Sequence
  Synthetic oligonucleotide
tcgtcagcgaatcccggttctaaggggaaa

SEQ ID NO: 505307 - DNA, 30 bp, Artificial Sequence
  Synthetic oligonucleotide
cggtccatgtgttggtgggggggtgggaaa

SEQ ID NO: 505308 - DNA, 30 bp, Artificial Sequence
  Synthetic oligonucleotide
tagtctgctggtaggacgcagtgtgggaaa

SEQ ID NO: 505309 - DNA, 30 bp, Artificial Sequence
  Synthetic oligonucleotide
aattgactatgagagctcccgcttgggaaa

SEQ ID NO: 505310 - DNA, 30 bp, Artificial Sequence
  Synthetic oligonucleotide
ctctgtactagaagtgttgttctatggaaa

SEQ ID NO: 505311 - DNA, 30 bp, Artificial Sequence
  Synthetic oligonucleotide
cagcagtataccctgacaaccgactggaaa

SEQ ID NO: 505312 - DNA, 31 bp, Artificial Sequence
  Synthetic oligonucleotide
tctggtgtcatagttcaggccctactggaaa

SEQ ID NO: 505313 - DNA, 30 bp, Artificial Sequence
  Synthetic oligonucleotide
gggttcccggtaggttgtccgtcgtggaaa

SEQ ID NO: 505314 - DNA, 30 bp, Artificial Sequence
  Synthetic oligonucleotide
attgtttgcagattatgtgccaggtggaaa

SEQ ID NO: 505315 - DNA, 30 bp, Artificial Sequence
  Synthetic oligonucleotide
attagcatcgggccataacttccttggaaa

SEQ ID NO: 505316 - DNA, 30 bp, Artificial Sequence
  Synthetic oligonucleotide
atcttcaatgatgcttggcatgtttggaaa

SEQ ID NO: 505317 - DNA, 30 bp, Artificial Sequence
  Synthetic oligonucleotide
gtatgcgcccctttggaattcttttggaaa

SEQ ID NO: 505318 - DNA, 30 bp, Artificial Sequence
  Synthetic oligonucleotide
gtcaccggccattaagcgtgcaacatgaaa

SEQ ID NO: 505319 - DNA, 30 bp, Artificial Sequence
  Synthetic oligonucleotide
agagtagcacgtaatgcaccgccgatgaaa

SEQ ID NO: 505320 - DNA, 30 bp, Artificial Sequence
  Synthetic oligonucleotide
aatacgcccaggttatttacggatatgaaa

SEQ ID NO: 505321 - DNA, 30 bp, Artificial Sequence
  Synthetic oligonucleotide
aagattaggccttcactagtcactatgaaa

SEQ ID NO: 505322 - DNA, 30 bp, Artificial Sequence
  Synthetic oligonucleotide
tcttgcgcccacgaggatcattcactgaaa

SEQ ID NO: 505323 - DNA, 30 bp, Artificial Sequence
  Synthetic oligonucleotide
gttcacccgtattaaaagttaagactgaaa

SEQ ID NO: 505324 - DNA, 30 bp, Artificial Sequence
  Synthetic oligonucleotide
tggataatatattgttcgttaagactgaaa

SEQ ID NO: 505325 - DNA, 30 bp, Artificial Sequence
  Synthetic oligonucleotide
ataacagtactgttccttcgtaacctgaaa

SEQ ID NO: 505326 - DNA, 30 bp, Artificial Sequence
  Synthetic oligonucleotide
agaggcgcatttattcggtcatacctgaaa

SEQ ID NO: 505327 - DNA, 30 bp, Artificial Sequence
  Synthetic oligonucleotide
ctgtgagcttcacaaaatgtgaggctgaaa

SEQ ID NO: 505328 - DNA, 30 bp, Artificial Sequence
  Synthetic oligonucleotide
gatccaagcaatacggttctacggctgaaa

SEQ ID NO: 505329 - DNA, 30 bp, Artificial Sequence
  Synthetic oligonucleotide
taaacgcgtttgtagttgagattagtgaaa

SEQ ID NO: 505330 - DNA, 30 bp, Artificial Sequence
  Synthetic oligonucleotide
ggatcggatgagacggggcgggtggtgaaa

SEQ ID NO: 505331 - DNA, 30 bp, Artificial Sequence
  Synthetic oligonucleotide
ctattccctcaactgagcgcagatgtgaaa

SEQ ID NO: 505332 - DNA, 30 bp, Artificial Sequence
  Synthetic oligonucleotide
gcgcacagcgcaagtatggatcctgtgaaa

SEQ ID NO: 505333 - DNA, 30 bp, Artificial Sequence
  Synthetic oligonucleotide
gatacatctcagcaaaggaactgtgtgaaa

SEQ ID NO: 505334 - DNA, 30 bp, Artificial Sequence
  Synthetic oligonucleotide
atgtaatgaacttacatggtctttgtgaaa

SEQ ID NO: 505335 - DNA, 30 bp, Artificial Sequence
  Synthetic oligonucleotide
actactaaaaggccgtatgcatacttgaaa

SEQ ID NO: 505336 - DNA, 30 bp, Artificial Sequence
  Synthetic oligonucleotide
gcccggagcctctggacgccctccttgaaa

SEQ ID NO: 505337 - DNA, 30 bp, Artificial Sequence
  Synthetic oligonucleotide
gagtagataagtgcgactggatgcttgaaa

SEQ ID NO: 505338 - DNA, 30 bp, Artificial Sequence
  Synthetic oligonucleotide
gatcagctcatgtccattcagaagttgaaa

SEQ ID NO: 505339 - DNA, 30 bp, Artificial Sequence
  Synthetic oligonucleotide
ggttatggtgtaggacctgggtctttgaaa

SEQ ID NO: 505340 - DNA, 30 bp, Artificial Sequence
  Synthetic oligonucleotide
tgttcaaagggtctgctccaacttttgaaa

SEQ ID NO: 505341 - DNA, 30 bp, Artificial Sequence
  Synthetic oligonucleotide
ctttttctcgtcaatcctttaaaaaataaa

SEQ ID NO: 505342 - DNA, 30 bp, Artificial Sequence
  Synthetic oligonucleotide
cagagatacaaaaagaatgaggaaaataaa

SEQ ID NO: 505343 - DNA, 30 bp, Artificial Sequence
  Synthetic oligonucleotide
actatgtgagcctgtattattacaaataaa

SEQ ID NO: 505344 - DNA, 30 bp, Artificial Sequence
  Synthetic oligonucleotide
ttgttctggcacaaagcgccaggaaataaa

SEQ ID NO: 505345 - DNA, 30 bp, Artificial Sequence
  Synthetic oligonucleotide
aaatgcgctttattgcattggttaaataaa

SEQ ID NO: 505346 - DNA, 30 bp, Artificial Sequence
  Synthetic oligonucleotide
tcatagtgctgttataaccaacacaataaa

SEQ ID NO: 505347 - DNA, 30 bp, Artificial Sequence
  Synthetic oligonucleotide
tataggtttgtaacgattgtgtacaataaa

SEQ ID NO: 505348 - DNA, 30 bp, Artificial Sequence
  Synthetic oligonucleotide
actctcgttccggccttgacgaagaataaa

SEQ ID NO: 505349 - DNA, 30 bp, Artificial Sequence
  Synthetic oligonucleotide
gaccgttgaagtgtttacggtgagaataaa

SEQ ID NO: 505350 - DNA, 30 bp, Artificial Sequence
  Synthetic oligonucleotide
ataatgattactaacaccattgagaataaa

SEQ ID NO: 505351 - DNA, 30 bp, Artificial Sequence
  Synthetic oligonucleotide
gtcgtaggtatagcatatatttcgaataaa

SEQ ID NO: 505352 - DNA, 30 bp, Artificial Sequence
  Synthetic oligonucleotide
tgacaaggataggcaacgatggcacataaa

SEQ ID NO: 505353 - DNA, 30 bp, Artificial Sequence
  Synthetic oligonucleotide
ggctaacaggtctgccctcgcagacataaa

SEQ ID NO: 505354 - DNA, 30 bp, Artificial Sequence
  Synthetic oligonucleotide
ccactgctaagtcgtgaagcgcgacataaa

SEQ ID NO: 505355 - DNA, 30 bp, Artificial Sequence
  Synthetic oligonucleotide
ccgtcagcagctttcgttcttgatcataaa

SEQ ID NO: 505356 - DNA, 30 bp, Artificial Sequence
  Synthetic oligonucleotide
tccactttaactggccgcaccagagataaa

SEQ ID NO: 505357 - DNA, 30 bp, Artificial Sequence
  Synthetic oligonucleotide
ttaagggcacttaaggggtaaatagataaa

SEQ ID NO: 505358 - DNA, 30 bp, Artificial Sequence
  Synthetic oligonucleotide
aggaggatcggatctttcgatgacgataaa

SEQ ID NO: 505359 - DNA, 30 bp, Artificial Sequence
  Synthetic oligonucleotide
ggtccccatgtttttgtcgaggccgataaa

SEQ ID NO: 505360 - DNA, 30 bp, Artificial Sequence
  Synthetic oligonucleotide
ggttccaggtagatacactcgcgcgataaa

SEQ ID NO: 505361 - DNA, 30 bp, Artificial Sequence
  Synthetic oligonucleotide
acgttggtatttttcacgaaggtggataaa

SEQ ID NO: 505362 - DNA, 30 bp, Artificial Sequence
  Synthetic oligonucleotide
aggcgtgacaccgtgacgtgggaatataaa

SEQ ID NO: 505363 - DNA, 29 bp, Artificial Sequence
  Synthetic oligonucleotide
tttgttgtgtaggtttactccagtataaa

SEQ ID NO: 505364 - DNA, 30 bp, Artificial Sequence
  Synthetic oligonucleotide
gtgccggacgatccacggtgggagtataaa

SEQ ID NO: 505365 - DNA, 29 bp, Artificial Sequence
  Synthetic oligonucleotide
tttgttgtggaggtttactcccgtataaa

SEQ ID NO: 505366 - DNA, 25 bp, Artificial Sequence
  Synthetic oligonucleotide
ttgtgtaggtttactcccgtataaa

SEQ ID NO: 505367 - DNA, 29 bp, Artificial Sequence
  Synthetic oligonucleotide
tttgttttgtaggtttactcccgtataaa

SEQ ID NO: 505368 - DNA, 28 bp, Artificial Sequence
  Synthetic oligonucleotide
ttgttgtgtatgtttactcccgtataaa

SEQ ID NO: 505369 - DNA, 29 bp, Artificial Sequence
  Synthetic oligonucleotide
tttgttgtgtaggtttactcctgtataaa

SEQ ID NO: 505370 - DNA, 30 bp, Artificial Sequence
  Synthetic oligonucleotide
gtagtcagaagaactagcttgtaaactaaa

SEQ ID NO: 505371 - DNA, 30 bp, Artificial Sequence
  Synthetic oligonucleotide
gtaatcgatttgacccaggaatgaactaaa

SEQ ID NO: 505372 - DNA, 30 bp, Artificial Sequence
  Synthetic oligonucleotide
ttagatagggtgatacgtgtcgccactaaa

SEQ ID NO: 505373 - DNA, 30 bp, Artificial Sequence
  Synthetic oligonucleotide
cgtgtcacaagtagcccccggaatactaaa

SEQ ID NO: 505374 - DNA, 30 bp, Artificial Sequence
  Synthetic oligonucleotide
ttccttatgtcttaggagatatgtactaaa

SEQ ID NO: 505375 - DNA, 30 bp, Artificial Sequence
  Synthetic oligonucleotide
aggatcgcacattgatgtcccgcacctaaa

SEQ ID NO: 505376 - DNA, 30 bp, Artificial Sequence
  Synthetic oligonucleotide
ggtcgccaggatacaagatttgtacctaaa

SEQ ID NO: 505377 - DNA, 30 bp, Artificial Sequence
  Synthetic oligonucleotide
gttgaaaagaacgcgtgaagagaccctaaa

SEQ ID NO: 505378 - DNA, 30 bp, Artificial Sequence
  Synthetic oligonucleotide
taagtcactgggtggctgatcatgcctaaa

SEQ ID NO: 505379 - DNA, 30 bp, Artificial Sequence
  Synthetic oligonucleotide
agaggataggattctccctaactgcctaaa

SEQ ID NO: 505380 - DNA, 30 bp, Artificial Sequence
  Synthetic oligonucleotide
atccaattgtggggggttgattttcctaaa

SEQ ID NO: 505381 - DNA, 30 bp, Artificial Sequence
  Synthetic oligonucleotide
gttgaccagttgaactggccgcaagctaaa

SEQ ID NO: 505382 - DNA, 30 bp, Artificial Sequence
  Synthetic oligonucleotide
tcttttcgagtgaaacacatgttagctaaa

SEQ ID NO: 505383 - DNA, 30 bp, Artificial Sequence
  Synthetic oligonucleotide
tattgtagtctttacctgttggacgctaaa

SEQ ID NO: 505384 - DNA, 30 bp, Artificial Sequence
  Synthetic oligonucleotide
cagaccttagcagaaacttacactgctaaa

SEQ ID NO: 505385 - DNA, 30 bp, Artificial Sequence
  Synthetic oligonucleotide
accttcggggcttcgccgggttaatctaaa

SEQ ID NO: 505386 - DNA, 30 bp, Artificial Sequence
  Synthetic oligonucleotide
caaaacgttctggtttgacccctatctaaa

SEQ ID NO: 505387 - DNA, 30 bp, Artificial Sequence
  Synthetic oligonucleotide
ggggtcctctacggattttttttatctaaa

SEQ ID NO: 505388 - DNA, 30 bp, Artificial Sequence
  Synthetic oligonucleotide
tgtcgcactggacgactgtaagcctctaaa

SEQ ID NO: 505389 - DNA, 30 bp, Artificial Sequence
  Synthetic oligonucleotide
taggttgatttgaaggtacatgcctctaaa

SEQ ID NO: 505390 - DNA, 31 bp, Artificial Sequence
  Synthetic oligonucleotide
tgttaggacgtgcagcgagcacggctctaaa

SEQ ID NO: 505391 - DNA, 30 bp, Artificial Sequence
  Synthetic oligonucleotide
caagagcacatttggcccgcagcgtctaaa

SEQ ID NO: 505392 - DNA, 30 bp, Artificial Sequence
  Synthetic oligonucleotide
tctttctcggcaaactttttcgtttctaaa

SEQ ID NO: 505393 - DNA, 30 bp, Artificial Sequence
  Synthetic oligonucleotide
atcgcttagttagtattgccttgcagtaaa

SEQ ID NO: 505394 - DNA, 30 bp, Artificial Sequence
  Synthetic oligonucleotide
cgtctcagcgtttaattcagtctcagtaaa

SEQ ID NO: 505395 - DNA, 30 bp, Artificial Sequence
  Synthetic oligonucleotide
gtaaggcgaaatatcgcgccattcagtaaa

SEQ ID NO: 505396 - DNA, 30 bp, Artificial Sequence
  Synthetic oligonucleotide
agaggttagtatcattcacaaatgagtaaa

SEQ ID NO: 505397 - DNA, 30 bp, Artificial Sequence
  Synthetic oligonucleotide
tattttttgtcaaccagttagaatagtaaa

SEQ ID NO: 505398 - DNA, 30 bp, Artificial Sequence
  Synthetic oligonucleotide
gtttacaatatacaatgtaattatagtaaa

SEQ ID NO: 505399 - DNA, 30 bp, Artificial Sequence
  Synthetic oligonucleotide
accaagcccagtcttttttagtctagtaaa

SEQ ID NO: 505400 - DNA, 30 bp, Artificial Sequence
  Synthetic oligonucleotide
atcgcgaccatatcagtgtggcaacgtaaa

SEQ ID NO: 505401 - DNA, 30 bp, Artificial Sequence
  Synthetic oligonucleotide
acatggggggtggttggacacggacgtaaa

SEQ ID NO: 505402 - DNA, 30 bp, Artificial Sequence
  Synthetic oligonucleotide
tgaccacgtggctctcaacgtatacgtaaa

SEQ ID NO: 505403 - DNA, 30 bp, Artificial Sequence
  Synthetic oligonucleotide
gcctttatggcattattagagtaccgtaaa

SEQ ID NO: 505404 - DNA, 30 bp, Artificial Sequence
  Synthetic oligonucleotide
ggtgcctcaggcaggagtgcagcgcgtaaa

SEQ ID NO: 505405 - DNA, 30 bp, Artificial Sequence
  Synthetic oligonucleotide
tagagaaggtttcgcggtgcagctcgtaaa

SEQ ID NO: 505406 - DNA, 30 bp, Artificial Sequence
  Synthetic oligonucleotide
atgtacctcattgcttgaatgcgaggtaaa

SEQ ID NO: 505407 - DNA, 30 bp, Artificial Sequence
  Synthetic oligonucleotide
cccttgttctggccctgcgtgtgcggtaaa

SEQ ID NO: 505408 - DNA, 30 bp, Artificial Sequence
  Synthetic oligonucleotide
tagctatgctgcgcatctcacactggtaaa

SEQ ID NO: 505409 - DNA, 30 bp, Artificial Sequence
  Synthetic oligonucleotide
tatatctacgggtgtgacagcattggtaaa

SEQ ID NO: 505410 - DNA, 30 bp, Artificial Sequence
  Synthetic oligonucleotide
cgtggatttattagttgcaaacttggtaaa

SEQ ID NO: 505411 - DNA, 30 bp, Artificial Sequence
  Synthetic oligonucleotide
ttgagctatatacgaaaatggtttggtaaa

SEQ ID NO: 505412 - DNA, 30 bp, Artificial Sequence
  Synthetic oligonucleotide
actgcctgcttcccagacatagcatgtaaa

SEQ ID NO: 505413 - DNA, 30 bp, Artificial Sequence
  Synthetic oligonucleotide
tgtatttgataaccgatttgacgatgtaaa

SEQ ID NO: 505414 - DNA, 30 bp, Artificial Sequence
  Synthetic oligonucleotide
gtagtacccaatatcgtcatattatgtaaa

SEQ ID NO: 505415 - DNA, 30 bp, Artificial Sequence
  Synthetic oligonucleotide
agttagaagatttaaatattcgcctgtaaa

SEQ ID NO: 505416 - DNA, 30 bp, Artificial Sequence
  Synthetic oligonucleotide
ttagactccggggggggtaccgtgtgtaaa

SEQ ID NO: 505417 - DNA, 30 bp, Artificial Sequence
  Synthetic oligonucleotide
agaattcttgacggacataacttgtgtaaa

SEQ ID NO: 505418 - DNA, 30 bp, Artificial Sequence
  Synthetic oligonucleotide
tatcatatccagaatgcgtatgattgtaaa

SEQ ID NO: 505419 - DNA, 30 bp, Artificial Sequence
  Synthetic oligonucleotide
cgtatgattagttatgatcatagttgtaaa

SEQ ID NO: 505420 - DNA, 30 bp, Artificial Sequence
  Synthetic oligonucleotide
gtacccagcgcaccatgataaatttgtaaa

SEQ ID NO: 505421 - DNA, 30 bp, Artificial Sequence
  Synthetic oligonucleotide
gagtttgtgcggcctttgcagataattaaa

SEQ ID NO: 505422 - DNA, 30 bp, Artificial Sequence
  Synthetic oligonucleotide
tgggcacaacgacgctcccttataattaaa

SEQ ID NO: 505423 - DNA, 30 bp, Artificial Sequence
  Synthetic oligonucleotide
agccctcacgaccgcatcaacttaattaaa

SEQ ID NO: 505424 - DNA, 30 bp, Artificial Sequence
  Synthetic oligonucleotide
aagttcccgaccatcttaagggacattaaa

SEQ ID NO: 505425 - DNA, 30 bp, Artificial Sequence
  Synthetic oligonucleotide
acagggcttaaaggattcttgcgcattaaa

SEQ ID NO: 505426 - DNA, 30 bp, Artificial Sequence
  Synthetic oligonucleotide
ccccactccgacgttgtaaaaatcattaaa

SEQ ID NO: 505427 - DNA, 30 bp, Artificial Sequence
  Synthetic oligonucleotide
ctaagattgtacattgatacgtcgattaaa

SEQ ID NO: 505428 - DNA, 30 bp, Artificial Sequence
  Synthetic oligonucleotide
ggaccctaacagtaaagagatccacttaaa

SEQ ID NO: 505429 - DNA, 30 bp, Artificial Sequence
  Synthetic oligonucleotide
tgaaaggtcttatgtacggcaacccttaaa

SEQ ID NO: 505430 - DNA, 30 bp, Artificial Sequence
  Synthetic oligonucleotide
ttattgtatcgggcaggagatgcgcttaaa

SEQ ID NO: 505431 - DNA, 30 bp, Artificial Sequence
  Synthetic oligonucleotide
agctagacagagcaggttactagtcttaaa

SEQ ID NO: 505432 - DNA, 30 bp, Artificial Sequence
  Synthetic oligonucleotide
atcatcggtcgctgactgtgatgtcttaaa

SEQ ID NO: 505433 - DNA, 30 bp, Artificial Sequence
  Synthetic oligonucleotide
gtccgctaaccattcaatgatcttcttaaa

SEQ ID NO: 505434 - DNA, 30 bp, Artificial Sequence
  Synthetic oligonucleotide
tgcattctgaacctaggtccataggttaaa

SEQ ID NO: 505435 - DNA, 30 bp, Artificial Sequence
  Synthetic oligonucleotide
gattcctggaacgttgccgcggatgttaaa

SEQ ID NO: 505436 - DNA, 30 bp, Artificial Sequence
  Synthetic oligonucleotide
ggtgtcaggctaagttctgtggatgttaaa

SEQ ID NO: 505437 - DNA, 30 bp, Artificial Sequence
  Synthetic oligonucleotide
aattcagacaacatagagagtaaatttaaa

SEQ ID NO: 505438 - DNA, 30 bp, Artificial Sequence
  Synthetic oligonucleotide
gttgtatgtcacgaggaccagacatttaaa

SEQ ID NO: 505439 - DNA, 30 bp, Artificial Sequence
  Synthetic oligonucleotide
tcttcctcccaacatctacgcatatttaaa

SEQ ID NO: 505440 - DNA, 30 bp, Artificial Sequence
  Synthetic oligonucleotide
gaggggacatcaagagacttgatatttaaa

SEQ ID NO: 505441 - DNA, 30 bp, Artificial Sequence
  Synthetic oligonucleotide
gtataacaaaggagtcggctcttatttaaa

SEQ ID NO: 505442 - DNA, 30 bp, Artificial Sequence
  Synthetic oligonucleotide
agcggcctttaaaatgtctttgactttaaa

SEQ ID NO: 505443 - DNA, 30 bp, Artificial Sequence
  Synthetic oligonucleotide
gggtcaaatgtttggtcttgcgcctttaaa

SEQ ID NO: 505444 - DNA, 30 bp, Artificial Sequence
  Synthetic oligonucleotide
tgttcgttgatcaagatacagtagtttaaa

SEQ ID NO: 505445 - DNA, 30 bp, Artificial Sequence
  Synthetic oligonucleotide
cccttgcaggcatttttggtggcgtttaaa

SEQ ID NO: 505446 - DNA, 30 bp, Artificial Sequence
  Synthetic oligonucleotide
aacgcgtcacctgttaaacctatgtttaaa

SEQ ID NO: 505447 - DNA, 30 bp, Artificial Sequence
  Synthetic oligonucleotide
tcacagaggtctgcagattgtaattttaaa

SEQ ID NO: 505448 - DNA, 30 bp, Artificial Sequence
  Synthetic oligonucleotide
caacaacctcaaagtccaactgtttttaaa

SEQ ID NO: 505449 - DNA, 30 bp, Artificial Sequence
  Synthetic oligonucleotide
agtcaggtagcagttctttcccaaaaacaa

SEQ ID NO: 505450 - DNA, 30 bp, Artificial Sequence
  Synthetic oligonucleotide
gcatgtcgtttggtgttatctcaaaaacaa

SEQ ID NO: 505451 - DNA, 30 bp, Artificial Sequence
  Synthetic oligonucleotide
accaggggttcgattcattagtcaaaacaa

SEQ ID NO: 505452 - DNA, 30 bp, Artificial Sequence
  Synthetic oligonucleotide
cttagtaggcggagttggtgtaataaacaa

SEQ ID NO: 505453 - DNA, 30 bp, Artificial Sequence
  Synthetic oligonucleotide
gttcttggaatttaacggatctttaaacaa

SEQ ID NO: 505454 - DNA, 30 bp, Artificial Sequence
  Synthetic oligonucleotide
taactagggcaagactattcacagcaacaa

SEQ ID NO: 505455 - DNA, 30 bp, Artificial Sequence
  Synthetic oligonucleotide
ttcagtcgagcgcatgtagcctcgcaacaa

SEQ ID NO: 505456 - DNA, 30 bp, Artificial Sequence
  Synthetic oligonucleotide
taatcttcagagcaccgcaaggttcaacaa

SEQ ID NO: 505457 - DNA, 30 bp, Artificial Sequence
  Synthetic oligonucleotide
ttcatcccgtcattccgccatagagaacaa

SEQ ID NO: 505458 - DNA, 30 bp, Artificial Sequence
  Synthetic oligonucleotide
gatagttccgttttcctgtaacgagaacaa

SEQ ID NO: 505459 - DNA, 30 bp, Artificial Sequence
  Synthetic oligonucleotide
aaagagtacccgtccctacttcgagaacaa

SEQ ID NO: 505460 - DNA, 30 bp, Artificial Sequence
  Synthetic oligonucleotide
acagcaagcacagcataaaaggtagaacaa

SEQ ID NO: 505461 - DNA, 30 bp, Artificial Sequence
  Synthetic oligonucleotide
ggacgtatagatgccagatattaggaacaa

SEQ ID NO: 505462 - DNA, 30 bp, Artificial Sequence
  Synthetic oligonucleotide
gcaagtaggggaagttatgggcgggaacaa

SEQ ID NO: 505463 - DNA, 30 bp, Artificial Sequence
  Synthetic oligonucleotide
ctcttttagttgctgagtgttctggaacaa

SEQ ID NO: 505464 - DNA, 30 bp, Artificial Sequence
  Synthetic oligonucleotide
cgggctgagtggcgctgttacgctgaacaa

SEQ ID NO: 505465 - DNA, 30 bp, Artificial Sequence
  Synthetic oligonucleotide
cgtctagacggagtcacgaccgctgaacaa

SEQ ID NO: 505466 - DNA, 30 bp, Artificial Sequence
  Synthetic oligonucleotide
aaaggtaacaagctcaaatacgttgaacaa

SEQ ID NO: 505467 - DNA, 30 bp, Artificial Sequence
  Synthetic oligonucleotide
atgatgcaatttacatccgaggcataacaa

SEQ ID NO: 505468 - DNA, 30 bp, Artificial Sequence
  Synthetic oligonucleotide
gcattcttattaggatactgcgtctaacaa

SEQ ID NO: 505469 - DNA, 30 bp, Artificial Sequence
  Synthetic oligonucleotide
cattgctgactcagctatcagccgtaacaa

SEQ ID NO: 505470 - DNA, 30 bp, Artificial Sequence
  Synthetic oligonucleotide
agggccggtctaaaatttgatgggtaacaa

SEQ ID NO: 505471 - DNA, 30 bp, Artificial Sequence
  Synthetic oligonucleotide
gagattatcatttaacattcaagttaacaa

SEQ ID NO: 505472 - DNA, 30 bp, Artificial Sequence
  Synthetic oligonucleotide
cgtggaagtgcacagttgaattcaacacaa

SEQ ID NO: 505473 - DNA, 30 bp, Artificial Sequence
  Synthetic oligonucleotide
gcgtggtcctgagggtcattgtacccacaa

SEQ ID NO: 505474 - DNA, 30 bp, Artificial Sequence
  Synthetic oligonucleotide
ccgtatagcctttatacgtgcagcccacaa

SEQ ID NO: 505475 - DNA, 30 bp, Artificial Sequence
  Synthetic oligonucleotide
ggaagtccttctatcatcaacaggccacaa

SEQ ID NO: 505476 - DNA, 30 bp, Artificial Sequence
  Synthetic oligonucleotide
actgtacgcagtgtagagccgaggccacaa

SEQ ID NO: 505477 - DNA, 30 bp, Artificial Sequence
  Synthetic oligonucleotide
tttttcggatcaagtgatgagattccacaa

SEQ ID NO: 505478 - DNA, 30 bp, Artificial Sequence
  Synthetic oligonucleotide
aaacggaaggccaagatagaagttccacaa

SEQ ID NO: 505479 - DNA, 30 bp, Artificial Sequence
  Synthetic oligonucleotide
caagttgcagcaatcatgccagaagcacaa

SEQ ID NO: 505480 - DNA, 30 bp, Artificial Sequence
  Synthetic oligonucleotide
tcgacagaggaggggtgtagttaggcacaa

SEQ ID NO: 505481 - DNA, 30 bp, Artificial Sequence
  Synthetic oligonucleotide
atacgcggtaaagacactttttaggcacaa

SEQ ID NO: 505482 - DNA, 30 bp, Artificial Sequence
  Synthetic oligonucleotide
caatagggtccactatggggccactcacaa

SEQ ID NO: 505483 - DNA, 30 bp, Artificial Sequence
  Synthetic oligonucleotide
ctagaacggttggtgtgagtttcgtcacaa

SEQ ID NO: 505484 - DNA, 30 bp, Artificial Sequence
  Synthetic oligonucleotide
cgtgaattatactaagcgccactgtcacaa

SEQ ID NO: 505485 - DNA, 30 bp, Artificial Sequence
  Synthetic oligonucleotide
attcctccacttgggcgtcaagattcacaa

SEQ ID NO: 505486 - DNA, 30 bp, Artificial Sequence
  Synthetic oligonucleotide
tggaggccgttgcaatggccctccagacaa

SEQ ID NO: 505487 - DNA, 30 bp, Artificial Sequence
  Synthetic oligonucleotide
gcagttccgcctttgaacgcaacgagacaa

SEQ ID NO: 505488 - DNA, 30 bp, Artificial Sequence
  Synthetic oligonucleotide
tgcggtcatcatatcatgaatatgagacaa

SEQ ID NO: 505489 - DNA, 30 bp, Artificial Sequence
  Synthetic oligonucleotide
gacccttcgggaatattttggacccgacaa

SEQ ID NO: 505490 - DNA, 30 bp, Artificial Sequence
  Synthetic oligonucleotide
acctgtaagttgcttgagtaattccgacaa

SEQ ID NO: 505491 - DNA, 30 bp, Artificial Sequence
  Synthetic oligonucleotide
ctggtaccatccaccaaatgaactcgacaa

SEQ ID NO: 505492 - DNA, 30 bp, Artificial Sequence
  Synthetic oligonucleotide
gattctctcagggcagcatggattcgacaa

SEQ ID NO: 505493 - DNA, 30 bp, Artificial Sequence
  Synthetic oligonucleotide
gcatgtcatgttatcttggataaaggacaa

SEQ ID NO: 505494 - DNA, 30 bp, Artificial Sequence
  Synthetic oligonucleotide
tatcattattctggttgggcggcaggacaa

SEQ ID NO: 505495 - DNA, 30 bp, Artificial Sequence
  Synthetic oligonucleotide
gagcggctactattgggagacggaggacaa

SEQ ID NO: 505496 - DNA, 30 bp, Artificial Sequence
  Synthetic oligonucleotide
ctaatgagtacattatccgggctaggacaa

SEQ ID NO: 505497 - DNA, 30 bp, Artificial Sequence
  Synthetic oligonucleotide
ccggccagtttgtggtcctttaccggacaa

SEQ ID NO: 505498 - DNA, 30 bp, Artificial Sequence
  Synthetic oligonucleotide
ctattagttttcggcccgcttcagggacaa

SEQ ID NO: 505499 - DNA, 30 bp, Artificial Sequence
  Synthetic oligonucleotide
tttcatttattttatttttgggggggacaa

SEQ ID NO: 505500 - DNA, 30 bp, Artificial Sequence
  Synthetic oligonucleotide
ataattgtgatacagatcattgtgtgacaa

SEQ ID NO: 505501 - DNA, 30 bp, Artificial Sequence
  Synthetic oligonucleotide
tgagtttagttatgcggctccagttgacaa

SEQ ID NO: 505502 - DNA, 30 bp, Artificial Sequence
  Synthetic oligonucleotide
ctgttctgactgaatccggttagaatacaa

SEQ ID NO: 505503 - DNA, 30 bp, Artificial Sequence
  Synthetic oligonucleotide
aggcaagataaagactagagctgaatacaa

SEQ ID NO: 505504 - DNA, 30 bp, Artificial Sequence
  Synthetic oligonucleotide
cagggttttgctgtttcatgctgcatacaa

SEQ ID NO: 505505 - DNA, 30 bp, Artificial Sequence
  Synthetic oligonucleotide
cgcacggacacgtcaaatcttctcatacaa

SEQ ID NO: 505506 - DNA, 30 bp, Artificial Sequence
  Synthetic oligonucleotide
tgggggtggccgaaaggtaaggtcatacaa

SEQ ID NO: 505507 - DNA, 30 bp, Artificial Sequence
  Synthetic oligonucleotide
ctctgtatctttaacgacgttccgatacaa

SEQ ID NO: 505508 - DNA, 30 bp, Artificial Sequence
  Synthetic oligonucleotide
aaaccgacggtccgcttggacatgatacaa

SEQ ID NO: 505509 - DNA, 30 bp, Artificial Sequence
  Synthetic oligonucleotide
aaaatatatatacgtaatgacatgatacaa

SEQ ID NO: 505510 - DNA, 30 bp, Artificial Sequence
  Synthetic oligonucleotide
agcagtttaaccgtacggttaagtatacaa

SEQ ID NO: 505511 - DNA, 30 bp, Artificial Sequence
  Synthetic oligonucleotide
ttgccttgttgattggccataattatacaa

SEQ ID NO: 505512 - DNA, 30 bp, Artificial Sequence
  Synthetic oligonucleotide
tgtatgtgtctgcgctggtggccactacaa

SEQ ID NO: 505513 - DNA, 30 bp, Artificial Sequence
  Synthetic oligonucleotide
ataaaagtgcaaccgcgactctgactacaa

SEQ ID NO: 505514 - DNA, 30 bp, Artificial Sequence
  Synthetic oligonucleotide
aaagtaacgtatctacagtttatactacaa

SEQ ID NO: 505515 - DNA, 30 bp, Artificial Sequence
  Synthetic oligonucleotide
aaaaccggttatttagcttctcacctacaa

SEQ ID NO: 505516 - DNA, 30 bp, Artificial Sequence
  Synthetic oligonucleotide
acccactagcgctccttctggtacctacaa

SEQ ID NO: 505517 - DNA, 30 bp, Artificial Sequence
  Synthetic oligonucleotide
gagtagaatttcaatgcctaaaggctacaa

SEQ ID NO: 505518 - DNA, 30 bp, Artificial Sequence
  Synthetic oligonucleotide
attcatgggtcgtccacatcatggctacaa

SEQ ID NO: 505519 - DNA, 30 bp, Artificial Sequence
  Synthetic oligonucleotide
ccgtgatttgggccccatagatggctacaa

SEQ ID NO: 505520 - DNA, 31 bp, Artificial Sequence
  Synthetic oligonucleotide
cagatgcccatgatccaacgaggatctacaa

SEQ ID NO: 505521 - DNA, 30 bp, Artificial Sequence
  Synthetic oligonucleotide
aagtagatagactagatattttatctacaa

SEQ ID NO: 505522 - DNA, 30 bp, Artificial Sequence
  Synthetic oligonucleotide
gactatggatatgaacgatgaattctacaa

SEQ ID NO: 505523 - DNA, 30 bp, Artificial Sequence
  Synthetic oligonucleotide
cggtaaccattaaggtaaacaacagtacaa

SEQ ID NO: 505524 - DNA, 30 bp, Artificial Sequence
  Synthetic oligonucleotide
aagacacgcgtagatttgatgccagtacaa

SEQ ID NO: 505525 - DNA, 30 bp, Artificial Sequence
  Synthetic oligonucleotide
acgcgtgctgttcgccgtttcctagtacaa

SEQ ID NO: 505526 - DNA, 30 bp, Artificial Sequence
  Synthetic oligonucleotide
cttactgcgcctcgggtcttagacgtacaa

SEQ ID NO: 505527 - DNA, 30 bp, Artificial Sequence
  Synthetic oligonucleotide
taagtctcttgctctgttaccgtcgtacaa

SEQ ID NO: 505528 - DNA, 30 bp, Artificial Sequence
  Synthetic oligonucleotide
aatgccgcagctccgatacgtttggtacaa

SEQ ID NO: 505529 - DNA, 30 bp, Artificial Sequence
  Synthetic oligonucleotide
aataaagtagggttcacagcatgattacaa

SEQ ID NO: 505530 - DNA, 30 bp, Artificial Sequence
  Synthetic oligonucleotide
gacaacgcgattgcgacgaggccgttacaa

SEQ ID NO: 505531 - DNA, 30 bp, Artificial Sequence
  Synthetic oligonucleotide
taagggtctagcggtgaggtaaggttacaa

SEQ ID NO: 505532 - DNA, 30 bp, Artificial Sequence
  Synthetic oligonucleotide
ctccctcgagggtgtcgctacctgttacaa

SEQ ID NO: 505533 - DNA, 30 bp, Artificial Sequence
  Synthetic oligonucleotide
tggctatgtgggcgtatgataactttacaa

SEQ ID NO: 505534 - DNA, 30 bp, Artificial Sequence
  Synthetic oligonucleotide
cggcggtgcatggttagcaggggaaaccaa

SEQ ID NO: 505535 - DNA, 30 bp, Artificial Sequence
  Synthetic oligonucleotide
taattaggtagaatgacctaaataaaccaa

SEQ ID NO: 505536 - DNA, 30 bp, Artificial Sequence
  Synthetic oligonucleotide
atgttcctgctattggggatccccaaccaa

SEQ ID NO: 505537 - DNA, 30 bp, Artificial Sequence
  Synthetic oligonucleotide
taaatgtcaaggggctgttcaaagaaccaa

SEQ ID NO: 505538 - DNA, 30 bp, Artificial Sequence
  Synthetic oligonucleotide
tcatgattcattgctatatactagaaccaa

SEQ ID NO: 505539 - DNA, 30 bp, Artificial Sequence
  Synthetic oligonucleotide
tgagatacgcctattcctcagatgaaccaa

SEQ ID NO: 505540 - DNA, 30 bp, Artificial Sequence
  Synthetic oligonucleotide
tgtacgagactcgcagctagtagtaaccaa

SEQ ID NO: 505541 - DNA, 30 bp, Artificial Sequence
  Synthetic oligonucleotide
tctaaaacgtatgaggaggattttaaccaa

SEQ ID NO: 505542 - DNA, 30 bp, Artificial Sequence
  Synthetic oligonucleotide
tattattgcgacacggcgcggttacaccaa

SEQ ID NO: 505543 - DNA, 30 bp, Artificial Sequence
  Synthetic oligonucleotide
aatgcatgggcagcgaacgcggcccaccaa

SEQ ID NO: 505544 - DNA, 30 bp, Artificial Sequence
  Synthetic oligonucleotide
ttcggttacggcctctaaggtagtcaccaa

SEQ ID NO: 505545 - DNA, 30 bp, Artificial Sequence
  Synthetic oligonucleotide
acataagtagtccccgggtaacttcaccaa

SEQ ID NO: 505546 - DNA, 30 bp, Artificial Sequence
  Synthetic oligonucleotide
caatcaagcgggtaaccgatcacagaccaa

SEQ ID NO: 505547 - DNA, 30 bp, Artificial Sequence
  Synthetic oligonucleotide
aagtgactcagattttggatataggaccaa

SEQ ID NO: 505548 - DNA, 30 bp, Artificial Sequence
  Synthetic oligonucleotide
cgcggttaatgcgagcgccgtttggaccaa

SEQ ID NO: 505549 - DNA, 30 bp, Artificial Sequence
  Synthetic oligonucleotide
aaaaatctagcgactccagatgaataccaa

SEQ ID NO: 505550 - DNA, 30 bp, Artificial Sequence
  Synthetic oligonucleotide
aattcactcctattcctgcgataataccaa

SEQ ID NO: 505551 - DNA, 30 bp, Artificial Sequence
  Synthetic oligonucleotide
gctcttaattaacgcgcgcgtccgtaccaa

SEQ ID NO: 505552 - DNA, 30 bp, Artificial Sequence
  Synthetic oligonucleotide
aggtcatagtgcaggtctgaggggtaccaa

SEQ ID NO: 505553 - DNA, 30 bp, Artificial Sequence
  Synthetic oligonucleotide
acttattcgcggggtagctggtggtaccaa

SEQ ID NO: 505554 - DNA, 30 bp, Artificial Sequence
  Synthetic oligonucleotide
cgcttagcaccgctgcattatgaaacccaa

SEQ ID NO: 505555 - DNA, 30 bp, Artificial Sequence
  Synthetic oligonucleotide
cgttgttacaataagtggcagaccacccaa

SEQ ID NO: 505556 - DNA, 30 bp, Artificial Sequence
  Synthetic oligonucleotide
gtatccgacctgtggtacgccatcacccaa

SEQ ID NO: 505557 - DNA, 30 bp, Artificial Sequence
  Synthetic oligonucleotide
gtcattgaagagtgaaggaaattcacccaa

SEQ ID NO: 505558 - DNA, 30 bp, Artificial Sequence
  Synthetic oligonucleotide
cgagtaaactgcacttgtagtagaccccaa

SEQ ID NO: 505559 - DNA, 30 bp, Artificial Sequence
  Synthetic oligonucleotide
aaattggacatgctatcaaatatcccccaa

SEQ ID NO: 505560 - DNA, 30 bp, Artificial Sequence
  Synthetic oligonucleotide
ttttaatgccatggccccctgacgccccaa

SEQ ID NO: 505561 - DNA, 30 bp, Artificial Sequence
  Synthetic oligonucleotide
ccgagaataacgaggtactggaggccccaa

SEQ ID NO: 505562 - DNA, 30 bp, Artificial Sequence
  Synthetic oligonucleotide
tttagtaatcgtaggcagacgactccccaa

SEQ ID NO: 505563 - DNA, 30 bp, Artificial Sequence
  Synthetic oligonucleotide
cacccatgcttttgaattccacctccccaa

SEQ ID NO: 505564 - DNA, 30 bp, Artificial Sequence
  Synthetic oligonucleotide
gcgcgcctggacgctttatcacccgcccaa

SEQ ID NO: 505565 - DNA, 30 bp, Artificial Sequence
  Synthetic oligonucleotide
atcaaaaacagagtgcaatcaggcgcccaa

SEQ ID NO: 505566 - DNA, 30 bp, Artificial Sequence
  Synthetic oligonucleotide
aagcccgtgcactgtctatagcatgcccaa

SEQ ID NO: 505567 - DNA, 30 bp, Artificial Sequence
  Synthetic oligonucleotide
atgactgatcaatcccacgtggaaagccaa

SEQ ID NO: 505568 - DNA, 30 bp, Artificial Sequence
  Synthetic oligonucleotide
gcaatccatttcacagacgcggacagccaa

SEQ ID NO: 505569 - DNA, 30 bp, Artificial Sequence
  Synthetic oligonucleotide
cacatcttctgggtggcggattacagccaa

SEQ ID NO: 505570 - DNA, 30 bp, Artificial Sequence
  Synthetic oligonucleotide
aatcgccgacgcctgcatcgttacagccaa

SEQ ID NO: 505571 - DNA, 30 bp, Artificial Sequence
  Synthetic oligonucleotide
cgatcgtacactaactagaatagcagccaa

SEQ ID NO: 505572 - DNA, 30 bp, Artificial Sequence
  Synthetic oligonucleotide
ttagtgcccatattgcgacaagtcagccaa

SEQ ID NO: 505573 - DNA, 30 bp, Artificial Sequence
  Synthetic oligonucleotide
gggtcaaactccactagcgcgccgagccaa

SEQ ID NO: 505574 - DNA, 30 bp, Artificial Sequence
  Synthetic oligonucleotide
tcgtcagagaaaaatcaacacatccgccaa

SEQ ID NO: 505575 - DNA, 30 bp, Artificial Sequence
  Synthetic oligonucleotide
ccctacccaggatgctgacataagcgccaa

SEQ ID NO: 505576 - DNA, 30 bp, Artificial Sequence
  Synthetic oligonucleotide
ccagttgacggccctggttgcgcgcgccaa

SEQ ID NO: 505577 - DNA, 30 bp, Artificial Sequence
  Synthetic oligonucleotide
tcgggcatcaaaacgaatctcctgcgccaa

SEQ ID NO: 505578 - DNA, 30 bp, Artificial Sequence
  Synthetic oligonucleotide
gatgcaaaagaccgttgttcgggtcgccaa

SEQ ID NO: 505579 - DNA, 30 bp, Artificial Sequence
  Synthetic oligonucleotide
caaatgcaggggccgcaagattttcgccaa

SEQ ID NO: 505580 - DNA, 30 bp, Artificial Sequence
  Synthetic oligonucleotide
ccgccacgcacacgatagactacaggccaa

SEQ ID NO: 505581 - DNA, 30 bp, Artificial Sequence
  Synthetic oligonucleotide
cacggaactctgaacacggccgtaggccaa

SEQ ID NO: 505582 - DNA, 30 bp, Artificial Sequence
  Synthetic oligonucleotide
gaacctgtccatccccggcacaacggccaa

SEQ ID NO: 505583 - DNA, 30 bp, Artificial Sequence
  Synthetic oligonucleotide
ggtagactaaattgcattgaagacggccaa

SEQ ID NO: 505584 - DNA, 30 bp, Artificial Sequence
  Synthetic oligonucleotide
ggacacttcgtgttaccgcggtgcggccaa

SEQ ID NO: 505585 - DNA, 30 bp, Artificial Sequence
  Synthetic oligonucleotide
taatccccctgaccagcggcatggggccaa

SEQ ID NO: 505586 - DNA, 30 bp, Artificial Sequence
  Synthetic oligonucleotide
gaccccgcgcccctcgcagaattgggccaa

SEQ ID NO: 505587 - DNA, 30 bp, Artificial Sequence
  Synthetic oligonucleotide
gtaggtagccattacgctgtaattggccaa

SEQ ID NO: 505588 - DNA, 30 bp, Artificial Sequence
  Synthetic oligonucleotide
ggtgctaatctggttattcggtcatgccaa

SEQ ID NO: 505589 - DNA, 30 bp, Artificial Sequence
  Synthetic oligonucleotide
caaggattcgctgcatggagaggatgccaa

SEQ ID NO: 505590 - DNA, 30 bp, Artificial Sequence
  Synthetic oligonucleotide
cctaccgcatggtgcggtgtcgtatgccaa

SEQ ID NO: 505591 - DNA, 30 bp, Artificial Sequence
  Synthetic oligonucleotide
caacctgcgtgctggatgataacgtgccaa

SEQ ID NO: 505592 - DNA, 30 bp, Artificial Sequence
  Synthetic oligonucleotide
ttttagggtttaattgctttacgaatccaa

SEQ ID NO: 505593 - DNA, 30 bp, Artificial Sequence
  Synthetic oligonucleotide
atgctatgttcaggaccggctagcatccaa

SEQ ID NO: 505594 - DNA, 30 bp, Artificial Sequence
  Synthetic oligonucleotide
gcttaatgatatgcctgagtcagtatccaa

SEQ ID NO: 505595 - DNA, 30 bp, Artificial Sequence
  Synthetic oligonucleotide
gacactgggatgaccccgacgtctctccaa

SEQ ID NO: 505596 - DNA, 30 bp, Artificial Sequence
  Synthetic oligonucleotide
tgtggcaacctagacgtttaatacgtccaa

SEQ ID NO: 505597 - DNA, 30 bp, Artificial Sequence
  Synthetic oligonucleotide
ggcaggtcctaattgtcgatggccgtccaa

SEQ ID NO: 505598 - DNA, 30 bp, Artificial Sequence
  Synthetic oligonucleotide
cgcataggttcggcccatcctttcgtccaa

SEQ ID NO: 505599 - DNA, 35 bp, Artificial Sequence
  Synthetic oligonucleotide
gatgttaggtcaaaattgccaagcccccggtccaa

SEQ ID NO: 505600 - DNA, 30 bp, Artificial Sequence
  Synthetic oligonucleotide
gggcccctcattgtgcagcggccggtccaa

SEQ ID NO: 505601 - DNA, 30 bp, Artificial Sequence
  Synthetic oligonucleotide
ccgcctgatcccgccagcgcatatgtccaa

SEQ ID NO: 505602 - DNA, 30 bp, Artificial Sequence
  Synthetic oligonucleotide
gagcttcattattaaggaaaagtattccaa

SEQ ID NO: 505603 - DNA, 30 bp, Artificial Sequence
  Synthetic oligonucleotide
ataaagcacatagttgcggaatacttccaa

SEQ ID NO: 505604 - DNA, 30 bp, Artificial Sequence
  Synthetic oligonucleotide
ttattaccatcatcctatttttccttccaa

SEQ ID NO: 505605 - DNA, 30 bp, Artificial Sequence
  Synthetic oligonucleotide
ctttgggccaaattagcgcgtctcttccaa

SEQ ID NO: 505606 - DNA, 30 bp, Artificial Sequence
  Synthetic oligonucleotide
accgattagatgaagtatggattcttccaa

SEQ ID NO: 505607 - DNA, 30 bp, Artificial Sequence
  Synthetic oligonucleotide
aaattccgagttgtaaaatttataaagcaa

SEQ ID NO: 505608 - DNA, 30 bp, Artificial Sequence
  Synthetic oligonucleotide
tcccgaatgagtacataacgcaagaagcaa

SEQ ID NO: 505609 - DNA, 30 bp, Artificial Sequence
  Synthetic oligonucleotide
tggccgagatactgaggtatgcagaagcaa

SEQ ID NO: 505610 - DNA, 30 bp, Artificial Sequence
  Synthetic oligonucleotide
tgatagcttcattttataaggccgaagcaa

SEQ ID NO: 505611 - DNA, 30 bp, Artificial Sequence
  Synthetic oligonucleotide
gctcttagaaaggtcgcacaccggaagcaa

SEQ ID NO: 505612 - DNA, 30 bp, Artificial Sequence
  Synthetic oligonucleotide
attgcaggggtgtggcgttgatctaagcaa

SEQ ID NO: 505613 - DNA, 30 bp, Artificial Sequence
  Synthetic oligonucleotide
agagggagaaaagtgcaaaacattaagcaa

SEQ ID NO: 505614 - DNA, 30 bp, Artificial Sequence
  Synthetic oligonucleotide
tttttaagctattaaggtggccttaagcaa

SEQ ID NO: 505615 - DNA, 30 bp, Artificial Sequence
  Synthetic oligonucleotide
gttgttagttgcggcacatattttaagcaa

SEQ ID NO: 505616 - DNA, 30 bp, Artificial Sequence
  Synthetic oligonucleotide
gacttagtaggggaacggaggttacagcaa

SEQ ID NO: 505617 - DNA, 30 bp, Artificial Sequence
  Synthetic oligonucleotide
ccaaagccatctctgttgaacgcccagcaa

SEQ ID NO: 505618 - DNA, 30 bp, Artificial Sequence
  Synthetic oligonucleotide
acatgtatatgtggtatcgagatccagcaa

SEQ ID NO: 505619 - DNA, 28 bp, Artificial Sequence
  Synthetic oligonucleotide
tagcgctcttagactcctaccgcagcaa

SEQ ID NO: 505620 - DNA, 30 bp, Artificial Sequence
  Synthetic oligonucleotide
accatggtatgaaggtttttaccgcagcaa

SEQ ID NO: 505621 - DNA, 30 bp, Artificial Sequence
  Synthetic oligonucleotide
aggttttataactatggtatgaatcagcaa

SEQ ID NO: 505622 - DNA, 30 bp, Artificial Sequence
  Synthetic oligonucleotide
tcgaaattctaaggtccaggaaaagagcaa

SEQ ID NO: 505623 - DNA, 30 bp, Artificial Sequence
  Synthetic oligonucleotide
agtaatttgctttgttttaggcgagagcaa

SEQ ID NO: 505624 - DNA, 30 bp, Artificial Sequence
  Synthetic oligonucleotide
cgcaatcggcatatattgcacggagagcaa

SEQ ID NO: 505625 - DNA, 30 bp, Artificial Sequence
  Synthetic oligonucleotide
cggcactgggaggggacagcacgggagcaa

SEQ ID NO: 505626 - DNA, 30 bp, Artificial Sequence
  Synthetic oligonucleotide
ttaccattagaaacgctttagccatagcaa

SEQ ID NO: 505627 - DNA, 30 bp, Artificial Sequence
  Synthetic oligonucleotide
tttcaacctatatacggtcgatgatagcaa

SEQ ID NO: 505628 - DNA, 30 bp, Artificial Sequence
  Synthetic oligonucleotide
aagttggtcaattaatttcctatatagcaa

SEQ ID NO: 505629 - DNA, 30 bp, Artificial Sequence
  Synthetic oligonucleotide
cgcctgttcgtgggtcatgtactatagcaa

SEQ ID NO: 505630 - DNA, 30 bp, Artificial Sequence
  Synthetic oligonucleotide
ctttttcgagagctaccagccagctagcaa

SEQ ID NO: 505631 - DNA, 30 bp, Artificial Sequence
  Synthetic oligonucleotide
ttcgcattactttctgaacgtagctagcaa

SEQ ID NO: 505632 - DNA, 30 bp, Artificial Sequence
  Synthetic oligonucleotide
gaactttggatttggtgaaccgtctagcaa

SEQ ID NO: 505633 - DNA, 30 bp, Artificial Sequence
  Synthetic oligonucleotide
aacgaaaagggcgtttggctttagtagcaa

SEQ ID NO: 505634 - DNA, 30 bp, Artificial Sequence
  Synthetic oligonucleotide
gtttggccgctaggtaatgcgcgttagcaa

SEQ ID NO: 505635 - DNA, 30 bp, Artificial Sequence
  Synthetic oligonucleotide
aatgctcttgtccattaatcgatttagcaa

SEQ ID NO: 505636 - DNA, 30 bp, Artificial Sequence
  Synthetic oligonucleotide
aacgtgataagctattgacaaataacgcaa

SEQ ID NO: 505637 - DNA, 30 bp, Artificial Sequence
  Synthetic oligonucleotide
attgtgactcttcatgcattattaacgcaa

SEQ ID NO: 505638 - DNA, 30 bp, Artificial Sequence
  Synthetic oligonucleotide
cttttattaaatattgccgccagcacgcaa

SEQ ID NO: 505639 - DNA, 30 bp, Artificial Sequence
  Synthetic oligonucleotide
gcattgggttaagatccctgaatcacgcaa

SEQ ID NO: 505640 - DNA, 30 bp, Artificial Sequence
  Synthetic oligonucleotide
ccgaaactatggagcagatttcagacgcaa

SEQ ID NO: 505641 - DNA, 30 bp, Artificial Sequence
  Synthetic oligonucleotide
aatttgaccctatttatcaaggagacgcaa

SEQ ID NO: 505642 - DNA, 30 bp, Artificial Sequence
  Synthetic oligonucleotide
atggtaaagacagaatgaggtgagacgcaa

SEQ ID NO: 505643 - DNA, 30 bp, Artificial Sequence
  Synthetic oligonucleotide
cgcaggaacatttcactgttatagacgcaa

SEQ ID NO: 505644 - DNA, 30 bp, Artificial Sequence
  Synthetic oligonucleotide
taaacgactttctctgggttctagacgcaa

SEQ ID NO: 505645 - DNA, 30 bp, Artificial Sequence
  Synthetic oligonucleotide
aagggcttcttttgcgctaacgggacgcaa

SEQ ID NO: 505646 - DNA, 30 bp, Artificial Sequence
  Synthetic oligonucleotide
caatgacttgcgcctcgtgctggtacgcaa

SEQ ID NO: 505647 - DNA, 30 bp, Artificial Sequence
  Synthetic oligonucleotide
atgcgatttcggataataacctcaccgcaa

SEQ ID NO: 505648 - DNA, 30 bp, Artificial Sequence
  Synthetic oligonucleotide
cttctctagtcttttgatcgaggcccgcaa

SEQ ID NO: 505649 - DNA, 30 bp, Artificial Sequence
  Synthetic oligonucleotide
ccgtacggcggctcaaaggtcttcccgcaa

SEQ ID NO: 505650 - DNA, 30 bp, Artificial Sequence
  Synthetic oligonucleotide
agctggcggctactatttgaggagccgcaa

SEQ ID NO: 505651 - DNA, 30 bp, Artificial Sequence
  Synthetic oligonucleotide
ggttgttgtattggtatggaatggccgcaa

SEQ ID NO: 505652 - DNA, 30 bp, Artificial Sequence
  Synthetic oligonucleotide
gctggtttaggagtcttgtgtacagcgcaa

SEQ ID NO: 505653 - DNA, 30 bp, Artificial Sequence
  Synthetic oligonucleotide
atttcaggcgttagtgaatacagagcgcaa

SEQ ID NO: 505654 - DNA, 30 bp, Artificial Sequence
  Synthetic oligonucleotide
tcactcgcacgcattctgctaggcgcgcaa

SEQ ID NO: 505655 - DNA, 30 bp, Artificial Sequence
  Synthetic oligonucleotide
gtagacacttgccccgttactgcctcgcaa

SEQ ID NO: 505656 - DNA, 30 bp, Artificial Sequence
  Synthetic oligonucleotide
aggtcacgctgcgtgcgcgatcgctcgcaa

SEQ ID NO: 505657 - DNA, 30 bp, Artificial Sequence
  Synthetic oligonucleotide
attgattaaccccataaaggtgcgtcgcaa

SEQ ID NO: 505658 - DNA, 30 bp, Artificial Sequence
  Synthetic oligonucleotide
cggttacatagtaatgtgcaaacttcgcaa

SEQ ID NO: 505659 - DNA, 30 bp, Artificial Sequence
  Synthetic oligonucleotide
ttaaatggtacccagcgacttgcttcgcaa

SEQ ID NO: 505660 - DNA, 30 bp, Artificial Sequence
  Synthetic oligonucleotide
ctgttatttttgataacacaaatttcgcaa

SEQ ID NO: 505661 - DNA, 30 bp, Artificial Sequence
  Synthetic oligonucleotide
acgcatcggcgcagcgctgcggaaaggcaa

SEQ ID NO: 505662 - DNA, 30 bp, Artificial Sequence
  Synthetic oligonucleotide
atatagttatcggcagttggaggcaggcaa

SEQ ID NO: 505663 - DNA, 30 bp, Artificial Sequence
  Synthetic oligonucleotide
atggaggtatacgtcatgccagcgaggcaa

SEQ ID NO: 505664 - DNA, 30 bp, Artificial Sequence
  Synthetic oligonucleotide
agaaggcaaggctagcgtgagcataggcaa

SEQ ID NO: 505665 - DNA, 30 bp, Artificial Sequence
  Synthetic oligonucleotide
tctgtcttgcgcaaataaaatgataggcaa

SEQ ID NO: 505666 - DNA, 30 bp, Artificial Sequence
  Synthetic oligonucleotide
taatccggttttgtatggattggtaggcaa

SEQ ID NO: 505667 - DNA, 30 bp, Artificial Sequence
  Synthetic oligonucleotide
agcaggctggccgttcgatttatacggcaa

SEQ ID NO: 505668 - DNA, 30 bp, Artificial Sequence
  Synthetic oligonucleotide
gtacccgactttgcgttcgcagtacggcaa

SEQ ID NO: 505669 - DNA, 30 bp, Artificial Sequence
  Synthetic oligonucleotide
atttttgtttgttatgatgttttccggcaa

SEQ ID NO: 505670 - DNA, 30 bp, Artificial Sequence
  Synthetic oligonucleotide
tggagttaaaggataaccgagaagcggcaa

SEQ ID NO: 505671 - DNA, 30 bp, Artificial Sequence
  Synthetic oligonucleotide
cgcagtagcagcccttccagaccgcggcaa

SEQ ID NO: 505672 - DNA, 30 bp, Artificial Sequence
  Synthetic oligonucleotide
aatccttgtggtctttgggctcgagggcaa

SEQ ID NO: 505673 - DNA, 30 bp, Artificial Sequence
  Synthetic oligonucleotide
tactgggcaacactgattcaggacgggcaa

SEQ ID NO: 505674 - DNA, 30 bp, Artificial Sequence
  Synthetic oligonucleotide
gggatgcccgttttccttcggtcggggcaa

SEQ ID NO: 505675 - DNA, 30 bp, Artificial Sequence
  Synthetic oligonucleotide
atcgtaggccccacagtcttatatgggcaa

SEQ ID NO: 505676 - DNA, 30 bp, Artificial Sequence
  Synthetic oligonucleotide
catgttatccccctcgcacttgctgggcaa

SEQ ID NO: 505677 - DNA, 30 bp, Artificial Sequence
  Synthetic oligonucleotide
acagaccattcaacagtgctgcactggcaa

SEQ ID NO: 505678 - DNA, 30 bp, Artificial Sequence
  Synthetic oligonucleotide
caggccacaggcatgtggtccagctggcaa

SEQ ID NO: 505679 - DNA, 30 bp, Artificial Sequence
  Synthetic oligonucleotide
ccagtcttccactcggggtatacgtggcaa

SEQ ID NO: 505680 - DNA, 30 bp, Artificial Sequence
  Synthetic oligonucleotide
tcacacataggcaggatcctaaattggcaa

SEQ ID NO: 505681 - DNA, 30 bp, Artificial Sequence
  Synthetic oligonucleotide
acagtttagggtcccttgggggacatgcaa

SEQ ID NO: 505682 - DNA, 30 bp, Artificial Sequence
  Synthetic oligonucleotide
gcgagggatatgttgcaaccgttcatgcaa

SEQ ID NO: 505683 - DNA, 30 bp, Artificial Sequence
  Synthetic oligonucleotide
tattaaacgggggtatcttcagggatgcaa

SEQ ID NO: 505684 - DNA, 30 bp, Artificial Sequence
  Synthetic oligonucleotide
tacttgatcgttagtagtgtttctatgcaa

SEQ ID NO: 505685 - DNA, 30 bp, Artificial Sequence
  Synthetic oligonucleotide
ggttggtcaaagttttacatgacactgcaa

SEQ ID NO: 505686 - DNA, 30 bp, Artificial Sequence
  Synthetic oligonucleotide
ctgggcgtcaattgatagagagcactgcaa

SEQ ID NO: 505687 - DNA, 30 bp, Artificial Sequence
  Synthetic oligonucleotide
aattcgtacttttgcgaaacgcacctgcaa

SEQ ID NO: 505688 - DNA, 30 bp, Artificial Sequence
  Synthetic oligonucleotide
cagctttcgtactttggttggaccctgcaa

SEQ ID NO: 505689 - DNA, 30 bp, Artificial Sequence
  Synthetic oligonucleotide
agtgatcatgtgatcctagagtgcctgcaa

SEQ ID NO: 505690 - DNA, 30 bp, Artificial Sequence
  Synthetic oligonucleotide
tccgtacgcaaaatgcagatatggctgcaa

SEQ ID NO: 505691 - DNA, 30 bp, Artificial Sequence
  Synthetic oligonucleotide
cgaagttggaattgatagcacggagtgcaa

SEQ ID NO: 505692 - DNA, 30 bp, Artificial Sequence
  Synthetic oligonucleotide
acgcagtcaatccgttactggagcgtgcaa

SEQ ID NO: 505693 - DNA, 30 bp, Artificial Sequence
  Synthetic oligonucleotide
ttatacgttttgtaccttaatgtcgtgcaa

SEQ ID NO: 505694 - DNA, 30 bp, Artificial Sequence
  Synthetic oligonucleotide
tatctccttagttgtacggatgcggtgcaa

SEQ ID NO: 505695 - DNA, 30 bp, Artificial Sequence
  Synthetic oligonucleotide
ccgaacaacgcggcttctccgcttgtgcaa

SEQ ID NO: 505696 - DNA, 30 bp, Artificial Sequence
  Synthetic oligonucleotide
catgcagtaaacgattattgtgttgtgcaa

SEQ ID NO: 505697 - DNA, 30 bp, Artificial Sequence
  Synthetic oligonucleotide
aaactcggggttctcgcgagctacttgcaa

SEQ ID NO: 505698 - DNA, 30 bp, Artificial Sequence
  Synthetic oligonucleotide
gagttatagggtcagttttgacggttgcaa

SEQ ID NO: 505699 - DNA, 30 bp, Artificial Sequence
  Synthetic oligonucleotide
gagaacatgccattccgcacggatttgcaa

SEQ ID NO: 505700 - DNA, 30 bp, Artificial Sequence
  Synthetic oligonucleotide
tgcacttctaagcacgtacagcctttgcaa

SEQ ID NO: 505701 - DNA, 30 bp, Artificial Sequence
  Synthetic oligonucleotide
tcacatgaaatttgttcatagaaaaatcaa

SEQ ID NO: 505702 - DNA, 30 bp, Artificial Sequence
  Synthetic oligonucleotide
attacgcatcttagacccggagtcaatcaa

SEQ ID NO: 505703 - DNA, 30 bp, Artificial Sequence
  Synthetic oligonucleotide
agtaatgagaattaaaaaaccgagaatcaa

SEQ ID NO: 505704 - DNA, 30 bp, Artificial Sequence
  Synthetic oligonucleotide
gtacgtggcagtgattcatccgagaatcaa

SEQ ID NO: 505705 - DNA, 30 bp, Artificial Sequence
  Synthetic oligonucleotide
cgcagcaggcattgactttgaccgaatcaa

SEQ ID NO: 505706 - DNA, 30 bp, Artificial Sequence
  Synthetic oligonucleotide
tgagtaagacgcggtgtgactatgaatcaa

SEQ ID NO: 505707 - DNA, 30 bp, Artificial Sequence
  Synthetic oligonucleotide
attatacgcccgaacaccccaaataatcaa

SEQ ID NO: 505708 - DNA, 30 bp, Artificial Sequence
  Synthetic oligonucleotide
aagctttcgagatgagcccgatttaatcaa

SEQ ID NO: 505709 - DNA, 30 bp, Artificial Sequence
  Synthetic oligonucleotide
atggcctttaaatcgctgacaaaacatcaa

SEQ ID NO: 505710 - DNA, 30 bp, Artificial Sequence
  Synthetic oligonucleotide
tacgccacgcagcatcaaaaaatacatcaa

SEQ ID NO: 505711 - DNA, 30 bp, Artificial Sequence
  Synthetic oligonucleotide
agttgacgggcctgcataccgaaccatcaa

SEQ ID NO: 505712 - DNA, 30 bp, Artificial Sequence
  Synthetic oligonucleotide
tggcggttatcaacggacagcgcccatcaa

SEQ ID NO: 505713 - DNA, 30 bp, Artificial Sequence
  Synthetic oligonucleotide
ccaaactctgccagcgttactcgccatcaa

SEQ ID NO: 505714 - DNA, 30 bp, Artificial Sequence
  Synthetic oligonucleotide
taacccgtttcgtttcggatccagcatcaa

SEQ ID NO: 505715 - DNA, 30 bp, Artificial Sequence
  Synthetic oligonucleotide
atcgcagcgattgcgtataacgatcatcaa

SEQ ID NO: 505716 - DNA, 30 bp, Artificial Sequence
  Synthetic oligonucleotide
gcgtagttcgcatgttgcttatctcatcaa

SEQ ID NO: 505717 - DNA, 30 bp, Artificial Sequence
  Synthetic oligonucleotide
ggctgatataagttacaagaatttgatcaa

SEQ ID NO: 505718 - DNA, 30 bp, Artificial Sequence
  Synthetic oligonucleotide
gagttcttgggccgatgcaaaggctatcaa

SEQ ID NO: 505719 - DNA, 30 bp, Artificial Sequence
  Synthetic oligonucleotide
atatcgactcatggcgtatcaatgtatcaa

SEQ ID NO: 505720 - DNA, 30 bp, Artificial Sequence
  Synthetic oligonucleotide
ttcgatgctcgttgcttggtgggttatcaa

SEQ ID NO: 505721 - DNA, 30 bp, Artificial Sequence
  Synthetic oligonucleotide
ggtagactccgatcgtagagtccaactcaa

SEQ ID NO: 505722 - DNA, 30 bp, Artificial Sequence
  Synthetic oligonucleotide
ttagatgcgaggttcccagagctaactcaa

SEQ ID NO: 505723 - DNA, 30 bp, Artificial Sequence
  Synthetic oligonucleotide
gaagatcagtatctggtggctgatactcaa

SEQ ID NO: 505724 - DNA, 30 bp, Artificial Sequence
  Synthetic oligonucleotide
attaatcatgggatccaacgcgttactcaa

SEQ ID NO: 505725 - DNA, 30 bp, Artificial Sequence
  Synthetic oligonucleotide
gctcacttaacgctttatttggatcctcaa

SEQ ID NO: 505726 - DNA, 30 bp, Artificial Sequence
  Synthetic oligonucleotide
ggaactcggtgtaacatgagcgtcgctcaa

SEQ ID NO: 505727 - DNA, 30 bp, Artificial Sequence
  Synthetic oligonucleotide
tctattagactcaggccctgtcgggctcaa

SEQ ID NO: 505728 - DNA, 30 bp, Artificial Sequence
  Synthetic oligonucleotide
atatgcttctcttggcttctgttggctcaa

SEQ ID NO: 505729 - DNA, 30 bp, Artificial Sequence
  Synthetic oligonucleotide
tgtctacagcggcgcttatccgttgctcaa

SEQ ID NO: 505730 - DNA, 30 bp, Artificial Sequence
  Synthetic oligonucleotide
tgtctacagcggcgcttatcctttgctcaa

SEQ ID NO: 505731 - DNA, 30 bp, Artificial Sequence
  Synthetic oligonucleotide
atagtgtggcatcaaacgcatcgatctcaa

SEQ ID NO: 505732 - DNA, 30 bp, Artificial Sequence
  Synthetic oligonucleotide
ttatcaaaaaatgctggtgtttactctcaa

SEQ ID NO: 505733 - DNA, 30 bp, Artificial Sequence
  Synthetic oligonucleotide
ggcactgaagacgataaggagaaaagtcaa

SEQ ID NO: 505734 - DNA, 30 bp, Artificial Sequence
  Synthetic oligonucleotide
gtggttgctcggtacaagatctaaagtcaa

SEQ ID NO: 505735 - DNA, 30 bp, Artificial Sequence
  Synthetic oligonucleotide
aagtcgcttcttatttgctcaacaagtcaa

SEQ ID NO: 505736 - DNA, 30 bp, Artificial Sequence
  Synthetic oligonucleotide
tgacattgtaagtggtaacacggaagtcaa

SEQ ID NO: 505737 - DNA, 30 bp, Artificial Sequence
  Synthetic oligonucleotide
attgcttatcagcacccttcttgaagtcaa

SEQ ID NO: 505738 - DNA, 30 bp, Artificial Sequence
  Synthetic oligonucleotide
ggtcacaacctaatatgtttctacagtcaa

SEQ ID NO: 505739 - DNA, 30 bp, Artificial Sequence
  Synthetic oligonucleotide
tgaaatttcgtgtaaatagatggcagtcaa

SEQ ID NO: 505740 - DNA, 30 bp, Artificial Sequence
  Synthetic oligonucleotide
taagattgcccgacgctttgcttgagtcaa

SEQ ID NO: 505741 - DNA, 30 bp, Artificial Sequence
  Synthetic oligonucleotide
gaactttcctgtgagcaacaggatagtcaa

SEQ ID NO: 505742 - DNA, 30 bp, Artificial Sequence
  Synthetic oligonucleotide
gacacttaaacgagcggattgccacgtcaa

SEQ ID NO: 505743 - DNA, 30 bp, Artificial Sequence
  Synthetic oligonucleotide
tagctggcccttttcgccgtagagcgtcaa

SEQ ID NO: 505744 - DNA, 30 bp, Artificial Sequence
  Synthetic oligonucleotide
ggagcaggatcacattaaaaggggcgtcaa

SEQ ID NO: 505745 - DNA, 30 bp, Artificial Sequence
  Synthetic oligonucleotide
aaggtctagtttcggtttgaatggcgtcaa

SEQ ID NO: 505746 - DNA, 30 bp, Artificial Sequence
  Synthetic oligonucleotide
ctcatttgatccgcactccttttgcgtcaa

SEQ ID NO: 505747 - DNA, 30 bp, Artificial Sequence
  Synthetic oligonucleotide
gtggcagattctgccgcaagtcatcgtcaa

SEQ ID NO: 505748 - DNA, 30 bp, Artificial Sequence
  Synthetic oligonucleotide
gggcgtagaaacctggcaagttgaggtcaa

SEQ ID NO: 505749 - DNA, 30 bp, Artificial Sequence
  Synthetic oligonucleotide
ggacctagctccgcggctacgaacggtcaa

SEQ ID NO: 505750 - DNA, 30 bp, Artificial Sequence
  Synthetic oligonucleotide
ttaatccgccacaacatgacccgcggtcaa

SEQ ID NO: 505751 - DNA, 30 bp, Artificial Sequence
  Synthetic oligonucleotide
atagtagataatttattgaacgcgggtcaa

SEQ ID NO: 505752 - DNA, 30 bp, Artificial Sequence
  Synthetic oligonucleotide
tcttcatgaaataattagggttcgggtcaa

SEQ ID NO: 505753 - DNA, 30 bp, Artificial Sequence
  Synthetic oligonucleotide
tcgggggacccgggctcttttcatggtcaa

SEQ ID NO: 505754 - DNA, 30 bp, Artificial Sequence
  Synthetic oligonucleotide
gaaaacgacatataggatgaagatggtcaa

SEQ ID NO: 505755 - DNA, 30 bp, Artificial Sequence
  Synthetic oligonucleotide
cgtcagcctcaattgccctgtcgtggtcaa

SEQ ID NO: 505756 - DNA, 30 bp, Artificial Sequence
  Synthetic oligonucleotide
gaattctgccaggggtagtgtctatgtcaa

SEQ ID NO: 505757 - DNA, 30 bp, Artificial Sequence
  Synthetic oligonucleotide
cttcaaagtagacaccgctaattatgtcaa

SEQ ID NO: 505758 - DNA, 30 bp, Artificial Sequence
  Synthetic oligonucleotide
tagtctattttgccggggtagccctgtcaa

SEQ ID NO: 505759 - DNA, 30 bp, Artificial Sequence
  Synthetic oligonucleotide
ccactaagtcgcgacattccatagtgtcaa

SEQ ID NO: 505760 - DNA, 30 bp, Artificial Sequence
  Synthetic oligonucleotide
ggatttgtatgagtgatattctagtgtcaa

SEQ ID NO: 505761 - DNA, 30 bp, Artificial Sequence
  Synthetic oligonucleotide
aaccgtacgtcggcaagaatagtaattcaa

SEQ ID NO: 505762 - DNA, 30 bp, Artificial Sequence
  Synthetic oligonucleotide
ctccatttgtgtcactgattgttcattcaa

SEQ ID NO: 505763 - DNA, 30 bp, Artificial Sequence
  Synthetic oligonucleotide
accgatcgatctacgctgacgcatattcaa

SEQ ID NO: 505764 - DNA, 30 bp, Artificial Sequence
  Synthetic oligonucleotide
gagagtataagctaggatttttatattcaa

SEQ ID NO: 505765 - DNA, 30 bp, Artificial Sequence
  Synthetic oligonucleotide
ctttataactccatcaagtacattattcaa

SEQ ID NO: 505766 - DNA, 30 bp, Artificial Sequence
  Synthetic oligonucleotide
agtttatcgagccggagccttaaacttcaa

SEQ ID NO: 505767 - DNA, 30 bp, Artificial Sequence
  Synthetic oligonucleotide
gagcaggtgttcagagggcacgaacttcaa

SEQ ID NO: 505768 - DNA, 30 bp, Artificial Sequence
  Synthetic oligonucleotide
cgactataactcggtgtatgcgaacttcaa

SEQ ID NO: 505769 - DNA, 30 bp, Artificial Sequence
  Synthetic oligonucleotide
ggggcctcatctaattatccaccgcttcaa

SEQ ID NO: 505770 - DNA, 30 bp, Artificial Sequence
  Synthetic oligonucleotide
gccgcattggttgtcctgacgcgtcttcaa

SEQ ID NO: 505771 - DNA, 30 bp, Artificial Sequence
  Synthetic oligonucleotide
atttagaaatcaacgtacttatacgttcaa

SEQ ID NO: 505772 - DNA, 30 bp, Artificial Sequence
  Synthetic oligonucleotide
cagttggaggaccgcagttacaccgttcaa

SEQ ID NO: 505773 - DNA, 30 bp, Artificial Sequence
  Synthetic oligonucleotide
ccttgggtcttaccgaataggagggttcaa

SEQ ID NO: 505774 - DNA, 30 bp, Artificial Sequence
  Synthetic oligonucleotide
gtttccaatggacaagctgatgtggttcaa

SEQ ID NO: 505775 - DNA, 30 bp, Artificial Sequence
  Synthetic oligonucleotide
atgcattttgaatttgaaacctctgttcaa

SEQ ID NO: 505776 - DNA, 30 bp, Artificial Sequence
  Synthetic oligonucleotide
cattccggttatccaaggatcgttgttcaa

SEQ ID NO: 505777 - DNA, 30 bp, Artificial Sequence
  Synthetic oligonucleotide
gtgactattaccgctaaactagactttcaa

SEQ ID NO: 505778 - DNA, 30 bp, Artificial Sequence
  Synthetic oligonucleotide
tgactgcagcacttagcttgtcagtttcaa

SEQ ID NO: 505779 - DNA, 30 bp, Artificial Sequence
  Synthetic oligonucleotide
tcttgaatctagaacctcctctggtttcaa

SEQ ID NO: 505780 - DNA, 30 bp, Artificial Sequence
  Synthetic oligonucleotide
aaatggagctattttaaaccaccttttcaa

SEQ ID NO: 505781 - DNA, 30 bp, Artificial Sequence
  Synthetic oligonucleotide
gcgatccaaaaactgaccggcgcttttcaa

SEQ ID NO: 505782 - DNA, 30 bp, Artificial Sequence
  Synthetic oligonucleotide
gccatcgcgtcctaacgcccagaaaaagaa

SEQ ID NO: 505783 - DNA, 30 bp, Artificial Sequence
  Synthetic oligonucleotide
agtgaacgcgggtccaggcaccgaaaagaa

SEQ ID NO: 505784 - DNA, 30 bp, Artificial Sequence
  Synthetic oligonucleotide
gggtccccaactttcttagtatccaaagaa

SEQ ID NO: 505785 - DNA, 30 bp, Artificial Sequence
  Synthetic oligonucleotide
aatacccgggtgatagcctatagcaaagaa

SEQ ID NO: 505786 - DNA, 30 bp, Artificial Sequence
  Synthetic oligonucleotide
ttctccaacatacgtgtggttggcaaagaa

SEQ ID NO: 505787 - DNA, 30 bp, Artificial Sequence
  Synthetic oligonucleotide
atattagtcttgctgctcgatatcaaagaa

SEQ ID NO: 505788 - DNA, 30 bp, Artificial Sequence
  Synthetic oligonucleotide
tgccacgccagcccttgtggtctcaaagaa

SEQ ID NO: 505789 - DNA, 30 bp, Artificial Sequence
  Synthetic oligonucleotide
ttaggcgcggaggcaaagtccttgaaagaa

SEQ ID NO: 505790 - DNA, 30 bp, Artificial Sequence
  Synthetic oligonucleotide
ggggtctctccactggctaagcttaaagaa

SEQ ID NO: 505791 - DNA, 30 bp, Artificial Sequence
  Synthetic oligonucleotide
ccgcaaaggcacaacatattgaaacaagaa

SEQ ID NO: 505792 - DNA, 30 bp, Artificial Sequence
  Synthetic oligonucleotide
ctcccgagtgtatcttgatgtgaacaagaa

SEQ ID NO: 505793 - DNA, 30 bp, Artificial Sequence
  Synthetic oligonucleotide
taccgctcagggtaacagcagggccaagaa

SEQ ID NO: 505794 - DNA, 30 bp, Artificial Sequence
  Synthetic oligonucleotide
cgttttgattatgccctgctggtccaagaa

SEQ ID NO: 505795 - DNA, 30 bp, Artificial Sequence
  Synthetic oligonucleotide
gtatattttatgcttggcttcttccaagaa

SEQ ID NO: 505796 - DNA, 31 bp, Artificial Sequence
  Synthetic oligonucleotide
aatggacttgatcgcggcttcacagcaagaa

SEQ ID NO: 505797 - DNA, 30 bp, Artificial Sequence
  Synthetic oligonucleotide
tgatattctagcttttccaaagggcaagaa

SEQ ID NO: 505798 - DNA, 30 bp, Artificial Sequence
  Synthetic oligonucleotide
gtcggtgtatagcgtgcctactatcaagaa

SEQ ID NO: 505799 - DNA, 30 bp, Artificial Sequence
  Synthetic oligonucleotide
gtgtggagggcccaaggtctaggtcaagaa

SEQ ID NO: 505800 - DNA, 30 bp, Artificial Sequence
  Synthetic oligonucleotide
gattcgttttctcctgttagatgtcaagaa

SEQ ID NO: 505801 - DNA, 30 bp, Artificial Sequence
  Synthetic oligonucleotide
caggtccaggatgtcacggaagaagaagaa

SEQ ID NO: 505802 - DNA, 31 bp, Artificial Sequence
  Synthetic oligonucleotide
tcgacggcctgtggagcttcgttgagaagaa

SEQ ID NO: 505803 - DNA, 30 bp, Artificial Sequence
  Synthetic oligonucleotide
aaccagcccatctatacgtacagtgaagaa

SEQ ID NO: 505804 - DNA, 30 bp, Artificial Sequence
  Synthetic oligonucleotide
ggagttatcgtgatatttagggaataagaa

SEQ ID NO: 505805 - DNA, 30 bp, Artificial Sequence
  Synthetic oligonucleotide
aataccacctgcgcttaagcgtaataagaa

SEQ ID NO: 505806 - DNA, 30 bp, Artificial Sequence
  Synthetic oligonucleotide
atgaacctatttatcgcagatatataagaa

SEQ ID NO: 505807 - DNA, 30 bp, Artificial Sequence
  Synthetic oligonucleotide
ggagtgaggagttagtagtctgtataagaa

SEQ ID NO: 505808 - DNA, 30 bp, Artificial Sequence
  Synthetic oligonucleotide
aggaatcgagggacacctgctggctaagaa

SEQ ID NO: 505809 - DNA, 30 bp, Artificial Sequence
  Synthetic oligonucleotide
atctgcctagaacttaagttttagtaagaa

SEQ ID NO: 505810 - DNA, 30 bp, Artificial Sequence
  Synthetic oligonucleotide
ctagttcaacggtgctgcatgatttaagaa

SEQ ID NO: 505811 - DNA, 30 bp, Artificial Sequence
  Synthetic oligonucleotide
cttataccacctgcttagccggtttaagaa

SEQ ID NO: 505812 - DNA, 30 bp, Artificial Sequence
  Synthetic oligonucleotide
gccttgtgatgcaactttattgaaacagaa

SEQ ID NO: 505813 - DNA, 30 bp, Artificial Sequence
  Synthetic oligonucleotide
atgttcgaataagggtgaagccacacagaa

SEQ ID NO: 505814 - DNA, 30 bp, Artificial Sequence
  Synthetic oligonucleotide
agaactgagtgcggcacggtaagcacagaa

SEQ ID NO: 505815 - DNA, 30 bp, Artificial Sequence
  Synthetic oligonucleotide
gaaaaagccatgcaacgcatgagcacagaa

SEQ ID NO: 505816 - DNA, 30 bp, Artificial Sequence
  Synthetic oligonucleotide
cccaacccgttgccagcttcaggcacagaa

SEQ ID NO: 505817 - DNA, 30 bp, Artificial Sequence
  Synthetic oligonucleotide
agacaggcgcgcgagcctgcgtgcacagaa

SEQ ID NO: 505818 - DNA, 30 bp, Artificial Sequence
  Synthetic oligonucleotide
accactgagatgtgtgagctcttcacagaa

SEQ ID NO: 505819 - DNA, 30 bp, Artificial Sequence
  Synthetic oligonucleotide
aaattcatgtgaagttgtgagttcacagaa

SEQ ID NO: 505820 - DNA, 30 bp, Artificial Sequence
  Synthetic oligonucleotide
catggattgcgggaaccaagagagacagaa

SEQ ID NO: 505821 - DNA, 30 bp, Artificial Sequence
  Synthetic oligonucleotide
tagaaggttgaccttaccaagccgacagaa

SEQ ID NO: 505822 - DNA, 30 bp, Artificial Sequence
  Synthetic oligonucleotide
aagagcgcatgctttgagtttttgacagaa

SEQ ID NO: 505823 - DNA, 30 bp, Artificial Sequence
  Synthetic oligonucleotide
gagatgggcacgggttgaggtagtacagaa

SEQ ID NO: 505824 - DNA, 30 bp, Artificial Sequence
  Synthetic oligonucleotide
ctcgcggcccgcatcgtattacttacagaa

SEQ ID NO: 505825 - DNA, 30 bp, Artificial Sequence
  Synthetic oligonucleotide
aagtaggaacgatttaggaaggttacagaa

SEQ ID NO: 505826 - DNA, 30 bp, Artificial Sequence
  Synthetic oligonucleotide
tgagtattgcgtcccataagacgcccagaa

SEQ ID NO: 505827 - DNA, 30 bp, Artificial Sequence
  Synthetic oligonucleotide
gcatgaacaacttgagtcttcgttccagaa

SEQ ID NO: 505828 - DNA, 30 bp, Artificial Sequence
  Synthetic oligonucleotide
gtggcaggctcagcactcgcagaggcagaa

SEQ ID NO: 505829 - DNA, 30 bp, Artificial Sequence
  Synthetic oligonucleotide
ctgcgccaatgcatccttccgatggcagaa

SEQ ID NO: 505830 - DNA, 30 bp, Artificial Sequence
  Synthetic oligonucleotide
tcattcgctatggtataaccgtttgcagaa

SEQ ID NO: 505831 - DNA, 30 bp, Artificial Sequence
  Synthetic oligonucleotide
tctgactcgtcgttaggcgtagtatcagaa

SEQ ID NO: 505832 - DNA, 30 bp, Artificial Sequence
  Synthetic oligonucleotide
atgcgacttttaaccagactcttatcagaa

SEQ ID NO: 505833 - DNA, 30 bp, Artificial Sequence
  Synthetic oligonucleotide
tggtactcatgcaacggtaataactcagaa

SEQ ID NO: 505834 - DNA, 30 bp, Artificial Sequence
  Synthetic oligonucleotide
aatcttccggtatcaagaattgcctcagaa

SEQ ID NO: 505835 - DNA, 30 bp, Artificial Sequence
  Synthetic oligonucleotide
tttcgtcggggttttcgcatacgctcagaa

SEQ ID NO: 505836 - DNA, 30 bp, Artificial Sequence
  Synthetic oligonucleotide
cgtgactgaggacgacagtcagtctcagaa

SEQ ID NO: 505837 - DNA, 30 bp, Artificial Sequence
  Synthetic oligonucleotide
atcactgaccgcactttaacgtagtcagaa

SEQ ID NO: 505838 - DNA, 30 bp, Artificial Sequence
  Synthetic oligonucleotide
aatgtacgggttcttaagcacccgtcagaa

SEQ ID NO: 505839 - DNA, 30 bp, Artificial Sequence
  Synthetic oligonucleotide
agtctcagtttcctctgggtgttttcagaa

SEQ ID NO: 505840 - DNA, 30 bp, Artificial Sequence
  Synthetic oligonucleotide
gatgcatctcttagtaacccagaaagagaa

SEQ ID NO: 505841 - DNA, 30 bp, Artificial Sequence
  Synthetic oligonucleotide
aacgtagggtgagagagttcaagcagagaa

SEQ ID NO: 505842 - DNA, 30 bp, Artificial Sequence
  Synthetic oligonucleotide
cgggtgatccatacgtagtgatgcagagaa

SEQ ID NO: 505843 - DNA, 30 bp, Artificial Sequence
  Synthetic oligonucleotide
ccgatgccaaccttttaaatgatcagagaa

SEQ ID NO: 505844 - DNA, 30 bp, Artificial Sequence
  Synthetic oligonucleotide
aactacgattggcgcgtgtattggagagaa

SEQ ID NO: 505845 - DNA, 30 bp, Artificial Sequence
  Synthetic oligonucleotide
ggactggtgtatgcaatcgggcatagagaa

SEQ ID NO: 505846 - DNA, 30 bp, Artificial Sequence
  Synthetic oligonucleotide
ctgaggctcatctctcttggctctagagaa

SEQ ID NO: 505847 - DNA, 30 bp, Artificial Sequence
  Synthetic oligonucleotide
cagaggaatctaattcacgatagtagagaa

SEQ ID NO: 505848 - DNA, 30 bp, Artificial Sequence
  Synthetic oligonucleotide
ggtcaaagagtgctaaaggagcgtagagaa

SEQ ID NO: 505849 - DNA, 30 bp, Artificial Sequence
  Synthetic oligonucleotide
tgactttgcaatgtctaggtttaacgagaa

SEQ ID NO: 505850 - DNA, 30 bp, Artificial Sequence
  Synthetic oligonucleotide
gtgtaattgtgagcaaaataagtgcgagaa

SEQ ID NO: 505851 - DNA, 30 bp, Artificial Sequence
  Synthetic oligonucleotide
cgctggccgtctgcgccttaaacaggagaa

SEQ ID NO: 505852 - DNA, 30 bp, Artificial Sequence
  Synthetic oligonucleotide
aaactcctggttaattaaagcccaggagaa

SEQ ID NO: 505853 - DNA, 30 bp, Artificial Sequence
  Synthetic oligonucleotide
gtcataacttctccatgcacccgaggagaa

SEQ ID NO: 505854 - DNA, 30 bp, Artificial Sequence
  Synthetic oligonucleotide
cataacgcgctgttacatttgacgggagaa

SEQ ID NO: 505855 - DNA, 30 bp, Artificial Sequence
  Synthetic oligonucleotide
atacgaagcatggccgagtagatgggagaa

SEQ ID NO: 505856 - DNA, 30 bp, Artificial Sequence
  Synthetic oligonucleotide
cgtagcaagaatataatcgtcgtgggagaa

SEQ ID NO: 505857 - DNA, 30 bp, Artificial Sequence
  Synthetic oligonucleotide
ttttacttagacgttttccgaaatggagaa

SEQ ID NO: 505858 - DNA, 30 bp, Artificial Sequence
  Synthetic oligonucleotide
cgagatcattggccatcgttacttggagaa

SEQ ID NO: 505859 - DNA, 30 bp, Artificial Sequence
  Synthetic oligonucleotide
gtttctagcaaacataactcgaaatgagaa

SEQ ID NO: 505860 - DNA, 30 bp, Artificial Sequence
  Synthetic oligonucleotide
tgggctaatcagaaacgcattgcatgagaa

SEQ ID NO: 505861 - DNA, 30 bp, Artificial Sequence
  Synthetic oligonucleotide
cgctatcgccaacctagaggtctctgagaa

SEQ ID NO: 505862 - DNA, 30 bp, Artificial Sequence
  Synthetic oligonucleotide
ggtctcggaacgcctacgcaatcgtgagaa

SEQ ID NO: 505863 - DNA, 30 bp, Artificial Sequence
  Synthetic oligonucleotide
aacaataaatacctgcacggaaggtgagaa

SEQ ID NO: 505864 - DNA, 30 bp, Artificial Sequence
  Synthetic oligonucleotide
tcatttacatggcctggaatacggtgagaa

SEQ ID NO: 505865 - DNA, 30 bp, Artificial Sequence
  Synthetic oligonucleotide
gttggtttacagactacagaacattgagaa

SEQ ID NO: 505866 - DNA, 30 bp, Artificial Sequence
  Synthetic oligonucleotide
tccagtagcagtcataaaaacgcttgagaa

SEQ ID NO: 505867 - DNA, 30 bp, Artificial Sequence
  Synthetic oligonucleotide
acgcgagaagggaagggcatatcttgagaa

SEQ ID NO: 505868 - DNA, 30 bp, Artificial Sequence
  Synthetic oligonucleotide
gtacgacataaacgcgggggttcttgagaa

SEQ ID NO: 505869 - DNA, 30 bp, Artificial Sequence
  Synthetic oligonucleotide
cactcagatattccctgatgccgttgagaa

SEQ ID NO: 505870 - DNA, 30 bp, Artificial Sequence
  Synthetic oligonucleotide
ggcttggacaatgtggttgtccgttgagaa

SEQ ID NO: 505871 - DNA, 30 bp, Artificial Sequence
  Synthetic oligonucleotide
gttagttgggtgtatcgtctcaccatagaa

SEQ ID NO: 505872 - DNA, 30 bp, Artificial Sequence
  Synthetic oligonucleotide
taagcatgcaattaatgatatttcatagaa

SEQ ID NO: 505873 - DNA, 30 bp, Artificial Sequence
  Synthetic oligonucleotide
gggttttatgcagccaactgatcgatagaa

SEQ ID NO: 505874 - DNA, 30 bp, Artificial Sequence
  Synthetic oligonucleotide
tttacgtattttaggattttactgatagaa

SEQ ID NO: 505875 - DNA, 30 bp, Artificial Sequence
  Synthetic oligonucleotide
tccgcgggtccccttgttggatttatagaa

SEQ ID NO: 505876 - DNA, 30 bp, Artificial Sequence
  Synthetic oligonucleotide
agttctcgtgaagatcacacctttatagaa

SEQ ID NO: 505877 - DNA, 30 bp, Artificial Sequence
  Synthetic oligonucleotide
aacctttcgaccccgacaaatatactagaa

SEQ ID NO: 505878 - DNA, 30 bp, Artificial Sequence
  Synthetic oligonucleotide
gccccaaatcttgggagcagcatcctagaa

SEQ ID NO: 505879 - DNA, 30 bp, Artificial Sequence
  Synthetic oligonucleotide
attgaatcgaaggactatttgcagctagaa

SEQ ID NO: 505880 - DNA, 30 bp, Artificial Sequence
  Synthetic oligonucleotide
tgttatatatatctagctgaggcagtagaa

SEQ ID NO: 505881 - DNA, 30 bp, Artificial Sequence
  Synthetic oligonucleotide
tggatacttatgtgccggacatcagtagaa

SEQ ID NO: 505882 - DNA, 30 bp, Artificial Sequence
  Synthetic oligonucleotide
attcactttcaacgttagtttgtagtagaa

SEQ ID NO: 505883 - DNA, 30 bp, Artificial Sequence
  Synthetic oligonucleotide
gcctgttacagtgatacagtacgcgtagaa

SEQ ID NO: 505884 - DNA, 30 bp, Artificial Sequence
  Synthetic oligonucleotide
gttttcctcgccttgcttgtccgcgtagaa

SEQ ID NO: 505885 - DNA, 30 bp, Artificial Sequence
  Synthetic oligonucleotide
gaattccagtcgagtattcctgtcgtagaa

SEQ ID NO: 505886 - DNA, 31 bp, Artificial Sequence
  Synthetic oligonucleotide
ggaataattataaatcggagcgcgggtagaa

SEQ ID NO: 505887 - DNA, 30 bp, Artificial Sequence
  Synthetic oligonucleotide
taaacgggcgcaattaatgactgggtagaa

SEQ ID NO: 505888 - DNA, 30 bp, Artificial Sequence
  Synthetic oligonucleotide
agtattgttgttgctgtggccctggtagaa

SEQ ID NO: 505889 - DNA, 30 bp, Artificial Sequence
  Synthetic oligonucleotide
acaatttctccgtttgcaatagtggtagaa

SEQ ID NO: 505890 - DNA, 30 bp, Artificial Sequence
  Synthetic oligonucleotide
gtacacagttaaatccgtaagcatgtagaa

SEQ ID NO: 505891 - DNA, 30 bp, Artificial Sequence
  Synthetic oligonucleotide
cgtctcgattttgcgaacggatttgtagaa

SEQ ID NO: 505892 - DNA, 30 bp, Artificial Sequence
  Synthetic oligonucleotide
tgtttcagcgcatcactcgtttttgtagaa

SEQ ID NO: 505893 - DNA, 30 bp, Artificial Sequence
  Synthetic oligonucleotide
gctcagcgtttggtgagtcagcaattagaa

SEQ ID NO: 505894 - DNA, 30 bp, Artificial Sequence
  Synthetic oligonucleotide
ccctgacctacgccttcgcattacttagaa

SEQ ID NO: 505895 - DNA, 30 bp, Artificial Sequence
  Synthetic oligonucleotide
tcaccagttatgccccacgacagcttagaa

SEQ ID NO: 505896 - DNA, 30 bp, Artificial Sequence
  Synthetic oligonucleotide
gatttgaccgcagccgaaagtatcttagaa

SEQ ID NO: 505897 - DNA, 30 bp, Artificial Sequence
  Synthetic oligonucleotide
cctagcacggagagtacttatcagttagaa

SEQ ID NO: 505898 - DNA, 30 bp, Artificial Sequence
  Synthetic oligonucleotide
tgcattgtgtactgtgtctttatgttagaa

SEQ ID NO: 505899 - DNA, 30 bp, Artificial Sequence
  Synthetic oligonucleotide
gtttgctagagttctgctttgcatttagaa

SEQ ID NO: 505900 - DNA, 30 bp, Artificial Sequence
  Synthetic oligonucleotide
gagtgaaatcacagctaggtgcctttagaa

SEQ ID NO: 505901 - DNA, 30 bp, Artificial Sequence
  Synthetic oligonucleotide
cggtccgagaagattgtgttggaaaacgaa

SEQ ID NO: 505902 - DNA, 30 bp, Artificial Sequence
  Synthetic oligonucleotide
cctcagaggtgcacgacgtgcttgaacgaa

SEQ ID NO: 505903 - DNA, 30 bp, Artificial Sequence
  Synthetic oligonucleotide
actcggttggcgagtcacaggtataacgaa

SEQ ID NO: 505904 - DNA, 30 bp, Artificial Sequence
  Synthetic oligonucleotide
gtcccatttggataacctggcagtaacgaa

SEQ ID NO: 505905 - DNA, 30 bp, Artificial Sequence
  Synthetic oligonucleotide
aagctatcaatgctgtgatccgtacacgaa

SEQ ID NO: 505906 - DNA, 30 bp, Artificial Sequence
  Synthetic oligonucleotide
aggacgcgcgcaataccgtggtaccacgaa

SEQ ID NO: 505907 - DNA, 30 bp, Artificial Sequence
  Synthetic oligonucleotide
cgtttgtcacctagactttagacgcacgaa

SEQ ID NO: 505908 - DNA, 30 bp, Artificial Sequence
  Synthetic oligonucleotide
acagtccgggaatgtagtaggacgcacgaa

SEQ ID NO: 505909 - DNA, 30 bp, Artificial Sequence
  Synthetic oligonucleotide
ctcaacgctatatgtgcctcaaggcacgaa

SEQ ID NO: 505910 - DNA, 30 bp, Artificial Sequence
  Synthetic oligonucleotide
aacgcccaaggacggtggcagaggcacgaa

SEQ ID NO: 505911 - DNA, 30 bp, Artificial Sequence
  Synthetic oligonucleotide
tgaatcatctgatctgatgagcttcacgaa

SEQ ID NO: 505912 - DNA, 30 bp, Artificial Sequence
  Synthetic oligonucleotide
aatgctgtaccaacaactctacaagacgaa

SEQ ID NO: 505913 - DNA, 30 bp, Artificial Sequence
  Synthetic oligonucleotide
ggttcttgcatcgtgtctctaagagacgaa

SEQ ID NO: 505914 - DNA, 30 bp, Artificial Sequence
  Synthetic oligonucleotide
aatccttgcctggcgcattccgtagacgaa

SEQ ID NO: 505915 - DNA, 30 bp, Artificial Sequence
  Synthetic oligonucleotide
atattacgtcgtgctcgttatcaggacgaa

SEQ ID NO: 505916 - DNA, 30 bp, Artificial Sequence
  Synthetic oligonucleotide
aaggattgacctcgctcaatttttgacgaa

SEQ ID NO: 505917 - DNA, 30 bp, Artificial Sequence
  Synthetic oligonucleotide
aaaatacccgggaaaggttttacctacgaa

SEQ ID NO: 505918 - DNA, 30 bp, Artificial Sequence
  Synthetic oligonucleotide
accgatgactggggcacattgttctacgaa

SEQ ID NO: 505919 - DNA, 30 bp, Artificial Sequence
  Synthetic oligonucleotide
ttcctagggcggcgggttatacagtacgaa

SEQ ID NO: 505920 - DNA, 30 bp, Artificial Sequence
  Synthetic oligonucleotide
gtatgagttggagctggcaaggtgtacgaa

SEQ ID NO: 505921 - DNA, 30 bp, Artificial Sequence
  Synthetic oligonucleotide
ggtacgagattcacgcatttgttgtacgaa

SEQ ID NO: 505922 - DNA, 30 bp, Artificial Sequence
  Synthetic oligonucleotide
cttccgtctcactgatagctacattacgaa

SEQ ID NO: 505923 - DNA, 30 bp, Artificial Sequence
  Synthetic oligonucleotide
ttctaagtggaacttatagacagttacgaa

SEQ ID NO: 505924 - DNA, 30 bp, Artificial Sequence
  Synthetic oligonucleotide
ctttaaggtttataaacggagctttacgaa

SEQ ID NO: 505925 - DNA, 30 bp, Artificial Sequence
  Synthetic oligonucleotide
caacatcctggcagtacgcgcaacaccgaa

SEQ ID NO: 505926 - DNA, 30 bp, Artificial Sequence
  Synthetic oligonucleotide
tcgtcggccatggcaatcatcttcaccgaa

SEQ ID NO: 505927 - DNA, 30 bp, Artificial Sequence
  Synthetic oligonucleotide
gacattgacgcatatagggtgtcgaccgaa

SEQ ID NO: 505928 - DNA, 30 bp, Artificial Sequence
  Synthetic oligonucleotide
tggcctacggtgacaggagcatggaccgaa

SEQ ID NO: 505929 - DNA, 30 bp, Artificial Sequence
  Synthetic oligonucleotide
ttcaaaggactcaccgaccatgtgaccgaa

SEQ ID NO: 505930 - DNA, 30 bp, Artificial Sequence
  Synthetic oligonucleotide
attacacgttacaacatttgtgataccgaa

SEQ ID NO: 505931 - DNA, 30 bp, Artificial Sequence
  Synthetic oligonucleotide
tatcctacaaaacaaggtgcgtttaccgaa

SEQ ID NO: 505932 - DNA, 30 bp, Artificial Sequence
  Synthetic oligonucleotide
gtaaatacacggtgagtaaccaaacccgaa

SEQ ID NO: 505933 - DNA, 30 bp, Artificial Sequence
  Synthetic oligonucleotide
ggactcgggtcctgggatgagcgccccgaa

SEQ ID NO: 505934 - DNA, 30 bp, Artificial Sequence
  Synthetic oligonucleotide
cctctcgtatcctaaagcttttagcccgaa

SEQ ID NO: 505935 - DNA, 30 bp, Artificial Sequence
  Synthetic oligonucleotide
ttgcatgatgatgcaaatatacgtcccgaa

SEQ ID NO: 505936 - DNA, 30 bp, Artificial Sequence
  Synthetic oligonucleotide
aggcgtaggactttagggctcgaggccgaa

SEQ ID NO: 505937 - DNA, 30 bp, Artificial Sequence
  Synthetic oligonucleotide
agagtgggcggttcatcgtatactgccgaa

SEQ ID NO: 505938 - DNA, 30 bp, Artificial Sequence
  Synthetic oligonucleotide
agcttgggtttatcggtaaaataatccgaa

SEQ ID NO: 505939 - DNA, 30 bp, Artificial Sequence
  Synthetic oligonucleotide
tatcggactctgagtatcatttgatccgaa

SEQ ID NO: 505940 - DNA, 30 bp, Artificial Sequence
  Synthetic oligonucleotide
aactagcgagctctaatacccggctccgaa

SEQ ID NO: 505941 - DNA, 30 bp, Artificial Sequence
  Synthetic oligonucleotide
catgagactagatggaatacagggtccgaa

SEQ ID NO: 505942 - DNA, 30 bp, Artificial Sequence
  Synthetic oligonucleotide
tttttgctgtatcctctaggaatttccgaa

SEQ ID NO: 505943 - DNA, 30 bp, Artificial Sequence
  Synthetic oligonucleotide
ctcattggtaaaaacggtggtccaagcgaa

SEQ ID NO: 505944 - DNA, 30 bp, Artificial Sequence
  Synthetic oligonucleotide
tagttaacagtcattttgatcgcaagcgaa

SEQ ID NO: 505945 - DNA, 30 bp, Artificial Sequence
  Synthetic oligonucleotide
atattcgacccaccgttttggcgaagcgaa

SEQ ID NO: 505946 - DNA, 30 bp, Artificial Sequence
  Synthetic oligonucleotide
cagacattaaaaatgggggcactaagcgaa

SEQ ID NO: 505947 - DNA, 30 bp, Artificial Sequence
  Synthetic oligonucleotide
gagctctaggttggatcgggtagcagcgaa

SEQ ID NO: 505948 - DNA, 30 bp, Artificial Sequence
  Synthetic oligonucleotide
gtgaatgtcgggtaaataagaggcagcgaa

SEQ ID NO: 505949 - DNA, 30 bp, Artificial Sequence
  Synthetic oligonucleotide
cgaaacaaaatgcggggattactcagcgaa

SEQ ID NO: 505950 - DNA, 30 bp, Artificial Sequence
  Synthetic oligonucleotide
ttatcgtacctcaattagggcttcagcgaa

SEQ ID NO: 505951 - DNA, 30 bp, Artificial Sequence
  Synthetic oligonucleotide
gcctccgaggcacgcagctccgagagcgaa

SEQ ID NO: 505952 - DNA, 30 bp, Artificial Sequence
  Synthetic oligonucleotide
gggcagggcatacgagtatacgtgagcgaa

SEQ ID NO: 505953 - DNA, 30 bp, Artificial Sequence
  Synthetic oligonucleotide
tgcttgaggatgtatcgcagacaccgcgaa

SEQ ID NO: 505954 - DNA, 30 bp, Artificial Sequence
  Synthetic oligonucleotide
atctctaccgttacgcagatacgccgcgaa

SEQ ID NO: 505955 - DNA, 30 bp, Artificial Sequence
  Synthetic oligonucleotide
aattatgactgcaggtcaatcgatcgcgaa

SEQ ID NO: 505956 - DNA, 30 bp, Artificial Sequence
  Synthetic oligonucleotide
taatggctaagtccgaagatggaaggcgaa

SEQ ID NO: 505957 - DNA, 30 bp, Artificial Sequence
  Synthetic oligonucleotide
ttacaaccatcggcgagaactcgaggcgaa

SEQ ID NO: 505958 - DNA, 30 bp, Artificial Sequence
  Synthetic oligonucleotide
tgtgcacatgtaccctgaatttgaggcgaa

SEQ ID NO: 505959 - DNA, 30 bp, Artificial Sequence
  Synthetic oligonucleotide
agcattcaaaagcaagatatcataggcgaa

SEQ ID NO: 505960 - DNA, 30 bp, Artificial Sequence
  Synthetic oligonucleotide
cggctaggggctgccgttggatccggcgaa

SEQ ID NO: 505961 - DNA, 30 bp, Artificial Sequence
  Synthetic oligonucleotide
gatagccgtagttcttttaaatggggcgaa

SEQ ID NO: 505962 - DNA, 30 bp, Artificial Sequence
  Synthetic oligonucleotide
gtccgagctatagtatgcggacgtggcgaa

SEQ ID NO: 505963 - DNA, 30 bp, Artificial Sequence
  Synthetic oligonucleotide
cagtttacggaatggacgctagcctgcgaa

SEQ ID NO: 505964 - DNA, 30 bp, Artificial Sequence
  Synthetic oligonucleotide
ggcaccggtggcgccttttacagctgcgaa

SEQ ID NO: 505965 - DNA, 30 bp, Artificial Sequence
  Synthetic oligonucleotide
taaattctggggcgccagcagttctgcgaa

SEQ ID NO: 505966 - DNA, 30 bp, Artificial Sequence
  Synthetic oligonucleotide
attgacacgagggcgcgtatcgcgtgcgaa

SEQ ID NO: 505967 - DNA, 30 bp, Artificial Sequence
  Synthetic oligonucleotide
ccacctattcagcacggagtgtaaatcgaa

SEQ ID NO: 505968 - DNA, 30 bp, Artificial Sequence
  Synthetic oligonucleotide
cgggatggaactgtcacactgataatcgaa

SEQ ID NO: 505969 - DNA, 30 bp, Artificial Sequence
  Synthetic oligonucleotide
tttacttcgtgatatgtctcatacatcgaa

SEQ ID NO: 505970 - DNA, 30 bp, Artificial Sequence
  Synthetic oligonucleotide
ctccagctggttagactaccgggcatcgaa

SEQ ID NO: 505971 - DNA, 30 bp, Artificial Sequence
  Synthetic oligonucleotide
aattctcggcgtagaggtttgttgatcgaa

SEQ ID NO: 505972 - DNA, 30 bp, Artificial Sequence
  Synthetic oligonucleotide
ataattattaatgcgcatcacccactcgaa

SEQ ID NO: 505973 - DNA, 30 bp, Artificial Sequence
  Synthetic oligonucleotide
ggttgtcgggcggcacagcactccctcgaa

SEQ ID NO: 505974 - DNA, 30 bp, Artificial Sequence
  Synthetic oligonucleotide
tacgcacactctttacttgaaaaagtcgaa

SEQ ID NO: 505975 - DNA, 30 bp, Artificial Sequence
  Synthetic oligonucleotide
ttttttaacaggacaccgcacaaagtcgaa

SEQ ID NO: 505976 - DNA, 30 bp, Artificial Sequence
  Synthetic oligonucleotide
tgagatctgggcacgggctcggtagtcgaa

SEQ ID NO: 505977 - DNA, 30 bp, Artificial Sequence
  Synthetic oligonucleotide
atgccgatcccggtgttcaacgaaaaggaa

SEQ ID NO: 505978 - DNA, 30 bp, Artificial Sequence
  Synthetic oligonucleotide
agacttgctgaatagacgcgaagcaaggaa

SEQ ID NO: 505979 - DNA, 30 bp, Artificial Sequence
  Synthetic oligonucleotide
agtgaagcctagtgtacaagacggaaggaa

SEQ ID NO: 505980 - DNA, 30 bp, Artificial Sequence
  Synthetic oligonucleotide
ccgcaccgcacctttcaggggcggaaggaa

SEQ ID NO: 505981 - DNA, 30 bp, Artificial Sequence
  Synthetic oligonucleotide
aatcttaacacaattttttccactaaggaa

SEQ ID NO: 505982 - DNA, 30 bp, Artificial Sequence
  Synthetic oligonucleotide
ggttgttactgcatgcaccgctgtaaggaa

SEQ ID NO: 505983 - DNA, 30 bp, Artificial Sequence
  Synthetic oligonucleotide
gtttaaactgttatttataataaacaggaa

SEQ ID NO: 505984 - DNA, 30 bp, Artificial Sequence
  Synthetic oligonucleotide
tcttcgcgtaaatttatcaaatgacaggaa

SEQ ID NO: 505985 - DNA, 30 bp, Artificial Sequence
  Synthetic oligonucleotide
tgaattcaataagacagttatgcccaggaa

SEQ ID NO: 505986 - DNA, 30 bp, Artificial Sequence
  Synthetic oligonucleotide
gttaactacctctggcctcaaccgcaggaa

SEQ ID NO: 505987 - DNA, 30 bp, Artificial Sequence
  Synthetic oligonucleotide
tcgatgcgactcgcaaaacacaggcaggaa

SEQ ID NO: 505988 - DNA, 31 bp, Artificial Sequence
  Synthetic oligonucleotide
aggggatcgcgcccgagggcaggttcaggaa

SEQ ID NO: 505989 - DNA, 30 bp, Artificial Sequence
  Synthetic oligonucleotide
agtcgacaaaattgatgtgagccagaggaa

SEQ ID NO: 505990 - DNA, 30 bp, Artificial Sequence
  Synthetic oligonucleotide
agtatcattaggctatgtaacggagaggaa

SEQ ID NO: 505991 - DNA, 30 bp, Artificial Sequence
  Synthetic oligonucleotide
tacacggtccctggataccttatcgaggaa

SEQ ID NO: 505992 - DNA, 30 bp, Artificial Sequence
  Synthetic oligonucleotide
gcagagggtgccatcaggtccgaggaggaa

SEQ ID NO: 505993 - DNA, 30 bp, Artificial Sequence
  Synthetic oligonucleotide
ttgtagaagttgatgattaaaagggaggaa

SEQ ID NO: 505994 - DNA, 30 bp, Artificial Sequence
  Synthetic oligonucleotide
aaatcttcccaccgtggctggcctgaggaa

SEQ ID NO: 505995 - DNA, 30 bp, Artificial Sequence
  Synthetic oligonucleotide
ttttttcgatacattaaaataacctaggaa

SEQ ID NO: 505996 - DNA, 30 bp, Artificial Sequence
  Synthetic oligonucleotide
atacatcgctcgtaaatcatctgctaggaa

SEQ ID NO: 505997 - DNA, 30 bp, Artificial Sequence
  Synthetic oligonucleotide
atttctgccttctcaccctcggtttaggaa

SEQ ID NO: 505998 - DNA, 30 bp, Artificial Sequence
  Synthetic oligonucleotide
gaaaaggattctaggtacgcatcaacggaa

SEQ ID NO: 505999 - DNA, 30 bp, Artificial Sequence
  Synthetic oligonucleotide
tttaggttacgagtttctaacagaacggaa

SEQ ID NO: 506000 - DNA, 30 bp, Artificial Sequence
  Synthetic oligonucleotide
tatggagaggtgttaagaatgctaacggaa

SEQ ID NO: 506001 - DNA, 30 bp, Artificial Sequence
  Synthetic oligonucleotide
aaagagttcaagaactcgggcgccacggaa

SEQ ID NO: 506002 - DNA, 30 bp, Artificial Sequence
  Synthetic oligonucleotide
caaacgttacaacagtaagtggccacggaa

SEQ ID NO: 506003 - DNA, 30 bp, Artificial Sequence
  Synthetic oligonucleotide
gggaacgcctgttcagtcttcatgacggaa

SEQ ID NO: 506004 - DNA, 30 bp, Artificial Sequence
  Synthetic oligonucleotide
gacgatttccggattctgttccaaccggaa

SEQ ID NO: 506005 - DNA, 30 bp, Artificial Sequence
  Synthetic oligonucleotide
taatgcagcccgtatattttctacccggaa

SEQ ID NO: 506006 - DNA, 30 bp, Artificial Sequence
  Synthetic oligonucleotide
gactcacgtaatggtgcaagtgccccggaa

SEQ ID NO: 506007 - DNA, 30 bp, Artificial Sequence
  Synthetic oligonucleotide
gaggcggggccaagggatctaaggccggaa

SEQ ID NO: 506008 - DNA, 30 bp, Artificial Sequence
  Synthetic oligonucleotide
cgaagcacgctagagactccgtctccggaa

SEQ ID NO: 506009 - DNA, 30 bp, Artificial Sequence
  Synthetic oligonucleotide
cttagcccgctagaggtcaaacttccggaa

SEQ ID NO: 506010 - DNA, 30 bp, Artificial Sequence
  Synthetic oligonucleotide
gccgcccgattttctgataaatccgcggaa

SEQ ID NO: 506011 - DNA, 30 bp, Artificial Sequence
  Synthetic oligonucleotide
gtcgcttcccgacagatcgaagatgcggaa

SEQ ID NO: 506012 - DNA, 30 bp, Artificial Sequence
  Synthetic oligonucleotide
tgcacatccatgcacgccattggtgcggaa

SEQ ID NO: 506013 - DNA, 30 bp, Artificial Sequence
  Synthetic oligonucleotide
gagtgcgtttaggtagccgtttaatcggaa

SEQ ID NO: 506014 - DNA, 30 bp, Artificial Sequence
  Synthetic oligonucleotide
taattctctctgtagactatgccttcggaa

SEQ ID NO: 506015 - DNA, 30 bp, Artificial Sequence
  Synthetic oligonucleotide
acgttgaatcagatagtgaacaccagggaa

SEQ ID NO: 506016 - DNA, 30 bp, Artificial Sequence
  Synthetic oligonucleotide
aaaatgtaatcacgtgggcattgcagggaa

SEQ ID NO: 506017 - DNA, 30 bp, Artificial Sequence
  Synthetic oligonucleotide
tgcagcttcggggttgattacatcagggaa

SEQ ID NO: 506018 - DNA, 30 bp, Artificial Sequence
  Synthetic oligonucleotide
ccagaaggacagccgatgttggcgagggaa

SEQ ID NO: 506019 - DNA, 30 bp, Artificial Sequence
  Synthetic oligonucleotide
ctttagacgggggtccggagtcctagggaa

SEQ ID NO: 506020 - DNA, 30 bp, Artificial Sequence
  Synthetic oligonucleotide
ttacttgcggtagcattcactggtagggaa

SEQ ID NO: 506021 - DNA, 30 bp, Artificial Sequence
  Synthetic oligonucleotide
ggatagcccgaatcgccgacaatacgggaa

SEQ ID NO: 506022 - DNA, 30 bp, Artificial Sequence
  Synthetic oligonucleotide
gataggtatgataaatgatgagcccgggaa

SEQ ID NO: 506023 - DNA, 30 bp, Artificial Sequence
  Synthetic oligonucleotide
ttaaccctccatgtttttggcgtccgggaa

SEQ ID NO: 506024 - DNA, 30 bp, Artificial Sequence
  Synthetic oligonucleotide
gggaaggcccccacgtcggtaacgcgggaa

SEQ ID NO: 506025 - DNA, 30 bp, Artificial Sequence
  Synthetic oligonucleotide
actaaagtcttgcttcttttgacgcgggaa

SEQ ID NO: 506026 - DNA, 30 bp, Artificial Sequence
  Synthetic oligonucleotide
ccttcctcaaccgcaggtaatccgcgggaa

SEQ ID NO: 506027 - DNA, 30 bp, Artificial Sequence
  Synthetic oligonucleotide
aaagaagatgaagttaggagttcgcgggaa

SEQ ID NO: 506028 - DNA, 30 bp, Artificial Sequence
  Synthetic oligonucleotide
tttattaacgaggcccatgccttgcgggaa

SEQ ID NO: 506029 - DNA, 30 bp, Artificial Sequence
  Synthetic oligonucleotide
accccttcgatcttgttctctttgcgggaa

SEQ ID NO: 506030 - DNA, 30 bp, Artificial Sequence
  Synthetic oligonucleotide
tgtcgtgaccgggtatatggcggtcgggaa

SEQ ID NO: 506031 - DNA, 30 bp, Artificial Sequence
  Synthetic oligonucleotide
gagaacgctttaatttctcattaaggggaa

SEQ ID NO: 506032 - DNA, 30 bp, Artificial Sequence
  Synthetic oligonucleotide
tggttgctcaattgaacacgaacaggggaa

SEQ ID NO: 506033 - DNA, 30 bp, Artificial Sequence
  Synthetic oligonucleotide
ggaacacacatgtaagcatgatccggggaa

SEQ ID NO: 506034 - DNA, 30 bp, Artificial Sequence
  Synthetic oligonucleotide
cgcggattcctaccggcttacgagggggaa

SEQ ID NO: 506035 - DNA, 31 bp, Artificial Sequence
  Synthetic oligonucleotide
ctgtcgtccaagcgcccggcatacgggggaa

SEQ ID NO: 506036 - DNA, 30 bp, Artificial Sequence
  Synthetic oligonucleotide
ggcgctataaagggcaggcaacatggggaa

SEQ ID NO: 506037 - DNA, 30 bp, Artificial Sequence
  Synthetic oligonucleotide
ataaggctgcagctgtacgcctatggggaa

SEQ ID NO: 506038 - DNA, 30 bp, Artificial Sequence
  Synthetic oligonucleotide
ggtcaaagagtgctaaaggagcgtggggaa

SEQ ID NO: 506039 - DNA, 30 bp, Artificial Sequence
  Synthetic oligonucleotide
cgctgatatgtcgtcggatcatttggggaa

SEQ ID NO: 506040 - DNA, 30 bp, Artificial Sequence
  Synthetic oligonucleotide
ggattctattaggctggcgggaaatgggaa

SEQ ID NO: 506041 - DNA, 30 bp, Artificial Sequence
  Synthetic oligonucleotide
ttttcccatgacagggcattgatctgggaa

SEQ ID NO: 506042 - DNA, 30 bp, Artificial Sequence
  Synthetic oligonucleotide
gaactctggctccattggacacagtgggaa

SEQ ID NO: 506043 - DNA, 30 bp, Artificial Sequence
  Synthetic oligonucleotide
aaaataacgcggatcccgtctatgtgggaa

SEQ ID NO: 506044 - DNA, 30 bp, Artificial Sequence
  Synthetic oligonucleotide
gacccggtcaagatacattcctgttgggaa

SEQ ID NO: 506045 - DNA, 30 bp, Artificial Sequence
  Synthetic oligonucleotide
acccacaccgcgatgacatgtatttgggaa

SEQ ID NO: 506046 - DNA, 30 bp, Artificial Sequence
  Synthetic oligonucleotide
cggcaacgcagagtgacctatgcaatggaa

SEQ ID NO: 506047 - DNA, 30 bp, Artificial Sequence
  Synthetic oligonucleotide
gtacttcaattgcctgttgggagaatggaa

SEQ ID NO: 506048 - DNA, 30 bp, Artificial Sequence
  Synthetic oligonucleotide
cgtcactacctacccggatacgccatggaa

SEQ ID NO: 506049 - DNA, 30 bp, Artificial Sequence
  Synthetic oligonucleotide
tcaccatagtgttttccgaccatcatggaa

SEQ ID NO: 506050 - DNA, 30 bp, Artificial Sequence
  Synthetic oligonucleotide
caatcgccccttacggatccctagatggaa

SEQ ID NO: 506051 - DNA, 30 bp, Artificial Sequence
  Synthetic oligonucleotide
gaactagtgcagcccaaatctaggatggaa

SEQ ID NO: 506052 - DNA, 30 bp, Artificial Sequence
  Synthetic oligonucleotide
gtaggatctatgggacttggattgatggaa

SEQ ID NO: 506053 - DNA, 30 bp, Artificial Sequence
  Synthetic oligonucleotide
ggctactgcccatatagccctgatatggaa

SEQ ID NO: 506054 - DNA, 30 bp, Artificial Sequence
  Synthetic oligonucleotide
gcacttggtccggtggcagttgttatggaa

SEQ ID NO: 506055 - DNA, 30 bp, Artificial Sequence
  Synthetic oligonucleotide
ggttgtgacagcaataccacttaactggaa

SEQ ID NO: 506056 - DNA, 30 bp, Artificial Sequence
  Synthetic oligonucleotide
ggagggggggggctgtaacgtgccctggaa

SEQ ID NO: 506057 - DNA, 30 bp, Artificial Sequence
  Synthetic oligonucleotide
ggttcagcttccgttcccggttttctggaa

SEQ ID NO: 506058 - DNA, 30 bp, Artificial Sequence
  Synthetic oligonucleotide
agcggatggcccacgaacattaacgtggaa

SEQ ID NO: 506059 - DNA, 30 bp, Artificial Sequence
  Synthetic oligonucleotide
tttgttgtagtccgtcacaaaatcgtggaa

SEQ ID NO: 506060 - DNA, 30 bp, Artificial Sequence
  Synthetic oligonucleotide
gataatcacctggatgtgaatccggtggaa

SEQ ID NO: 506061 - DNA, 30 bp, Artificial Sequence
  Synthetic oligonucleotide
attctggcgaggctaataaccaatgtggaa

SEQ ID NO: 506062 - DNA, 30 bp, Artificial Sequence
  Synthetic oligonucleotide
tgccggggggccggcctttctcttgtggaa

SEQ ID NO: 506063 - DNA, 30 bp, Artificial Sequence
  Synthetic oligonucleotide
atggctcaggcaggtccactctaattggaa

SEQ ID NO: 506064 - DNA, 30 bp, Artificial Sequence
  Synthetic oligonucleotide
gggttccactatgcatgaacctacttggaa

SEQ ID NO: 506065 - DNA, 30 bp, Artificial Sequence
  Synthetic oligonucleotide
ttccatttatcatccggatagtacttggaa

SEQ ID NO: 506066 - DNA, 30 bp, Artificial Sequence
  Synthetic oligonucleotide
ggtccgatatcgaactacgcagatttggaa

SEQ ID NO: 506067 - DNA, 30 bp, Artificial Sequence
  Synthetic oligonucleotide
gacggatatggggttgatattgctttggaa

SEQ ID NO: 506068 - DNA, 30 bp, Artificial Sequence
  Synthetic oligonucleotide
atatgctatgcgggtggtatgaaaaatgaa

SEQ ID NO: 506069 - DNA, 30 bp, Artificial Sequence
  Synthetic oligonucleotide
ctgtttaccgcgagcaatttcccaaatgaa

SEQ ID NO: 506070 - DNA, 30 bp, Artificial Sequence
  Synthetic oligonucleotide
aacaatctcaatgggtcacgagacaatgaa

SEQ ID NO: 506071 - DNA, 30 bp, Artificial Sequence
  Synthetic oligonucleotide
ctgtcgacgaatgcctggggtttcaatgaa

SEQ ID NO: 506072 - DNA, 30 bp, Artificial Sequence
  Synthetic oligonucleotide
tctcgtgaacacgaggaaccaaagaatgaa

SEQ ID NO: 506073 - DNA, 30 bp, Artificial Sequence
  Synthetic oligonucleotide
tatacgttaccgctcgcatgtaagaatgaa

SEQ ID NO: 506074 - DNA, 30 bp, Artificial Sequence
  Synthetic oligonucleotide
accgggggggacgttacatcgtagaatgaa

SEQ ID NO: 506075 - DNA, 31 bp, Artificial Sequence
  Synthetic oligonucleotide
gatacaagccttcgacgctggaacgaatgaa

SEQ ID NO: 506076 - DNA, 30 bp, Artificial Sequence
  Synthetic oligonucleotide
tcaggaggaataagtcacgcagcgaatgaa

SEQ ID NO: 506077 - DNA, 30 bp, Artificial Sequence
  Synthetic oligonucleotide
cggaccgagactctttatccttttaatgaa

SEQ ID NO: 506078 - DNA, 30 bp, Artificial Sequence
  Synthetic oligonucleotide
gattatttaatcgagtcaactgcacatgaa

SEQ ID NO: 506079 - DNA, 30 bp, Artificial Sequence
  Synthetic oligonucleotide
catttaaagagttggtccaaataccatgaa

SEQ ID NO: 506080 - DNA, 30 bp, Artificial Sequence
  Synthetic oligonucleotide
agattcttgcgggaaagattccgccatgaa

SEQ ID NO: 506081 - DNA, 30 bp, Artificial Sequence
  Synthetic oligonucleotide
gagtatatgcccttgaaatcggtgcatgaa

SEQ ID NO: 506082 - DNA, 30 bp, Artificial Sequence
  Synthetic oligonucleotide
cggggagtgcagaagagctaatatcatgaa

SEQ ID NO: 506083 - DNA, 30 bp, Artificial Sequence
  Synthetic oligonucleotide
gtttttctaaacgggccgcgcccagatgaa

SEQ ID NO: 506084 - DNA, 30 bp, Artificial Sequence
  Synthetic oligonucleotide
ctttggcatgctttccagtcttgagatgaa

SEQ ID NO: 506085 - DNA, 30 bp, Artificial Sequence
  Synthetic oligonucleotide
tttgtcgggattcactcttgagtagatgaa

SEQ ID NO: 506086 - DNA, 30 bp, Artificial Sequence
  Synthetic oligonucleotide
gtcgattatggacagcagccttgtgatgaa

SEQ ID NO: 506087 - DNA, 30 bp, Artificial Sequence
  Synthetic oligonucleotide
ggagtgtcaagaccgtagtgcgttgatgaa

SEQ ID NO: 506088 - DNA, 30 bp, Artificial Sequence
  Synthetic oligonucleotide
ggccctttaggggccgaacctggctatgaa

SEQ ID NO: 506089 - DNA, 29 bp, Artificial Sequence
  Synthetic oligonucleotide
tttgttgtgtaggtttactcccgtatgaa

SEQ ID NO: 506090 - DNA, 30 bp, Artificial Sequence
  Synthetic oligonucleotide
ctgcctcgaacgcactctcgtaattatgaa

SEQ ID NO: 506091 - DNA, 30 bp, Artificial Sequence
  Synthetic oligonucleotide
gtagtagaccggagcttattgcgttatgaa

SEQ ID NO: 506092 - DNA, 30 bp, Artificial Sequence
  Synthetic oligonucleotide
aaaaacggagtagctacgaaaccaactgaa

SEQ ID NO: 506093 - DNA, 30 bp, Artificial Sequence
  Synthetic oligonucleotide
acctggcaatatttcagccaacgaactgaa

SEQ ID NO: 506094 - DNA, 30 bp, Artificial Sequence
  Synthetic oligonucleotide
tattgctgctggtttcgctgttacactgaa

SEQ ID NO: 506095 - DNA, 30 bp, Artificial Sequence
  Synthetic oligonucleotide
tcaccattcaagaattatgaaggcactgaa

SEQ ID NO: 506096 - DNA, 30 bp, Artificial Sequence
  Synthetic oligonucleotide
gaattgggcagcgttcctcagggcactgaa

SEQ ID NO: 506097 - DNA, 30 bp, Artificial Sequence
  Synthetic oligonucleotide
tcctgagcttcttggtccatattcactgaa

SEQ ID NO: 506098 - DNA, 30 bp, Artificial Sequence
  Synthetic oligonucleotide
gttctttcagtctccacaacgttgactgaa

SEQ ID NO: 506099 - DNA, 30 bp, Artificial Sequence
  Synthetic oligonucleotide
tctcgcctcatgtgtggtactcatactgaa

SEQ ID NO: 506100 - DNA, 30 bp, Artificial Sequence
  Synthetic oligonucleotide
tttatggtatcagcacaatctgatactgaa

SEQ ID NO: 506101 - DNA, 30 bp, Artificial Sequence
  Synthetic oligonucleotide
gaccgtaggtttccccctcgcactactgaa

SEQ ID NO: 506102 - DNA, 30 bp, Artificial Sequence
  Synthetic oligonucleotide
tataattccccgagcggattggctactgaa

SEQ ID NO: 506103 - DNA, 30 bp, Artificial Sequence
  Synthetic oligonucleotide
tttttgttatgtaggtgatgtagtactgaa

SEQ ID NO: 506104 - DNA, 30 bp, Artificial Sequence
  Synthetic oligonucleotide
gggtgacaggaagtaaagacacagcctgaa

SEQ ID NO: 506105 - DNA, 30 bp, Artificial Sequence
  Synthetic oligonucleotide
gattgctaccccatgatcgggcagcctgaa

SEQ ID NO: 506106 - DNA, 30 bp, Artificial Sequence
  Synthetic oligonucleotide
ataacaaagggggatgtagtctcgcctgaa

SEQ ID NO: 506107 - DNA, 30 bp, Artificial Sequence
  Synthetic oligonucleotide
cgtcagcgaagggggcccagtgggcctgaa

SEQ ID NO: 506108 - DNA, 30 bp, Artificial Sequence
  Synthetic oligonucleotide
cggggtcggaaattatactgcgctcctgaa

SEQ ID NO: 506109 - DNA, 30 bp, Artificial Sequence
  Synthetic oligonucleotide
gtttccatcgcttataactattttcctgaa

SEQ ID NO: 506110 - DNA, 30 bp, Artificial Sequence
  Synthetic oligonucleotide
agttggacggtggatatgggcgcagctgaa

SEQ ID NO: 506111 - DNA, 30 bp, Artificial Sequence
  Synthetic oligonucleotide
ttttatttagtaattttgggaacggctgaa

SEQ ID NO: 506112 - DNA, 30 bp, Artificial Sequence
  Synthetic oligonucleotide
gaccagcgccggtcacctcggacggctgaa

SEQ ID NO: 506113 - DNA, 30 bp, Artificial Sequence
  Synthetic oligonucleotide
gcccgcatgaagctcagccactgtgctgaa

SEQ ID NO: 506114 - DNA, 30 bp, Artificial Sequence
  Synthetic oligonucleotide
attaagtctgttgagaacttccttgctgaa

SEQ ID NO: 506115 - DNA, 30 bp, Artificial Sequence
  Synthetic oligonucleotide
aaaggtaacggtcgctactgatttgctgaa

SEQ ID NO: 506116 - DNA, 30 bp, Artificial Sequence
  Synthetic oligonucleotide
tttatcggggtttggagggggcaatctgaa

SEQ ID NO: 506117 - DNA, 30 bp, Artificial Sequence
  Synthetic oligonucleotide
aagcacaacagcccgtcctcacagtctgaa

SEQ ID NO: 506118 - DNA, 30 bp, Artificial Sequence
  Synthetic oligonucleotide
tattcgaaagccgggtcttcggtgtctgaa

SEQ ID NO: 506119 - DNA, 30 bp, Artificial Sequence
  Synthetic oligonucleotide
ctaagctgctaccatgtaaatccttctgaa

SEQ ID NO: 506120 - DNA, 30 bp, Artificial Sequence
  Synthetic oligonucleotide
gagtagcgctagaaggcttattcttctgaa

SEQ ID NO: 506121 - DNA, 30 bp, Artificial Sequence
  Synthetic oligonucleotide
gtatattcgagtccatctgcagtttctgaa

SEQ ID NO: 506122 - DNA, 31 bp, Artificial Sequence
  Synthetic oligonucleotide
aacataaacacggaaaatatgccccagtgaa

SEQ ID NO: 506123 - DNA, 30 bp, Artificial Sequence
  Synthetic oligonucleotide
ttgcggtggcagcgagctcgaggcagtgaa

SEQ ID NO: 506124 - DNA, 30 bp, Artificial Sequence
  Synthetic oligonucleotide
aaatttctgtgatgttttaacatcagtgaa

SEQ ID NO: 506125 - DNA, 30 bp, Artificial Sequence
  Synthetic oligonucleotide
ggatttgtggtctcggaggtttcgagtgaa

SEQ ID NO: 506126 - DNA, 30 bp, Artificial Sequence
  Synthetic oligonucleotide
aaattagcctcaaattcaccggatagtgaa

SEQ ID NO: 506127 - DNA, 30 bp, Artificial Sequence
  Synthetic oligonucleotide
aggggctcaatacatattacagttagtgaa

SEQ ID NO: 506128 - DNA, 30 bp, Artificial Sequence
  Synthetic oligonucleotide
cgtacatccatggtccggagtgtacgtgaa

SEQ ID NO: 506129 - DNA, 30 bp, Artificial Sequence
  Synthetic oligonucleotide
aatgctctgctggtcataatattccgtgaa

SEQ ID NO: 506130 - DNA, 30 bp, Artificial Sequence
  Synthetic oligonucleotide
gactgttaagacgggctttacacgcgtgaa

SEQ ID NO: 506131 - DNA, 30 bp, Artificial Sequence
  Synthetic oligonucleotide
tttttaggacatccgtattcctcaggtgaa

SEQ ID NO: 506132 - DNA, 30 bp, Artificial Sequence
  Synthetic oligonucleotide
atgacactgcatcaggtagtattaggtgaa

SEQ ID NO: 506133 - DNA, 30 bp, Artificial Sequence
  Synthetic oligonucleotide
gtggaagttgaagggagagatttaggtgaa

SEQ ID NO: 506134 - DNA, 30 bp, Artificial Sequence
  Synthetic oligonucleotide
agcatgtcaccttcggcgctagccggtgaa

SEQ ID NO: 506135 - DNA, 30 bp, Artificial Sequence
  Synthetic oligonucleotide
tttggccagcgacgtaggcaagtcggtgaa

SEQ ID NO: 506136 - DNA, 30 bp, Artificial Sequence
  Synthetic oligonucleotide
ttctcataaccttatctgggtcatggtgaa

SEQ ID NO: 506137 - DNA, 30 bp, Artificial Sequence
  Synthetic oligonucleotide
gcaagcggtcctctgctagagactggtgaa

SEQ ID NO: 506138 - DNA, 30 bp, Artificial Sequence
  Synthetic oligonucleotide
ttggctaatgcagacgtgtaggctggtgaa

SEQ ID NO: 506139 - DNA, 30 bp, Artificial Sequence
  Synthetic oligonucleotide
agacattcggtttacaagagccaatgtgaa

SEQ ID NO: 506140 - DNA, 30 bp, Artificial Sequence
  Synthetic oligonucleotide
ggattgctgccgcaacaaacatcttgtgaa

SEQ ID NO: 506141 - DNA, 30 bp, Artificial Sequence
  Synthetic oligonucleotide
caaacgaatccccccccagctctttgtgaa

SEQ ID NO: 506142 - DNA, 30 bp, Artificial Sequence
  Synthetic oligonucleotide
gatcttacacgacaagctagcgaaattgaa

SEQ ID NO: 506143 - DNA, 30 bp, Artificial Sequence
  Synthetic oligonucleotide
atcccagtacgtagtacctgagtaattgaa

SEQ ID NO: 506144 - DNA, 30 bp, Artificial Sequence
  Synthetic oligonucleotide
cgcgcgacttactctaattcgcacattgaa

SEQ ID NO: 506145 - DNA, 30 bp, Artificial Sequence
  Synthetic oligonucleotide
gcgcatattgtcgtacgctaatacattgaa

SEQ ID NO: 506146 - DNA, 30 bp, Artificial Sequence
  Synthetic oligonucleotide
gccgtcaatggatctaccaagcccattgaa

SEQ ID NO: 506147 - DNA, 30 bp, Artificial Sequence
  Synthetic oligonucleotide
agcccttttttgctctcttttgggattgaa

SEQ ID NO: 506148 - DNA, 40 bp, Artificial Sequence
  Synthetic oligonucleotide
cgttagacgaggtcaaaagcgtagcgtagagtggattgaa

SEQ ID NO: 506149 - DNA, 30 bp, Artificial Sequence
  Synthetic oligonucleotide
agttacggcgacaccagcatactgattgaa

SEQ ID NO: 506150 - DNA, 30 bp, Artificial Sequence
  Synthetic oligonucleotide
ctaaacaaattccggtggcttaatattgaa

SEQ ID NO: 506151 - DNA, 30 bp, Artificial Sequence
  Synthetic oligonucleotide
ctggtccactctagaaaatcctaacttgaa

SEQ ID NO: 506152 - DNA, 30 bp, Artificial Sequence
  Synthetic oligonucleotide
tccaacttagtcttcttaacatgacttgaa

SEQ ID NO: 506153 - DNA, 30 bp, Artificial Sequence
  Synthetic oligonucleotide
ttccagttgttagttcatccaatacttgaa

SEQ ID NO: 506154 - DNA, 30 bp, Artificial Sequence
  Synthetic oligonucleotide
atccatccgcagtatacttgggtacttgaa

SEQ ID NO: 506155 - DNA, 30 bp, Artificial Sequence
  Synthetic oligonucleotide
gcaccaaagtggccctacacggcccttgaa

SEQ ID NO: 506156 - DNA, 30 bp, Artificial Sequence
  Synthetic oligonucleotide
agttttcaaaaggacactgcgcgccttgaa

SEQ ID NO: 506157 - DNA, 30 bp, Artificial Sequence
  Synthetic oligonucleotide
tgacttaaagcacgcagcagaggccttgaa

SEQ ID NO: 506158 - DNA, 30 bp, Artificial Sequence
  Synthetic oligonucleotide
attcagtcgcctacaggaaccttccttgaa

SEQ ID NO: 506159 - DNA, 30 bp, Artificial Sequence
  Synthetic oligonucleotide
gacagggattacccggcgctttggcttgaa

SEQ ID NO: 506160 - DNA, 30 bp, Artificial Sequence
  Synthetic oligonucleotide
cgggtctatcaagcatgtgacatgcttgaa

SEQ ID NO: 506161 - DNA, 30 bp, Artificial Sequence
  Synthetic oligonucleotide
gttgggaattgacgccgaggttgtcttgaa

SEQ ID NO: 506162 - DNA, 30 bp, Artificial Sequence
  Synthetic oligonucleotide
acttaacttctccgcggttcccaagttgaa

SEQ ID NO: 506163 - DNA, 30 bp, Artificial Sequence
  Synthetic oligonucleotide
gatgtacgaatttgcgagcgaagagttgaa

SEQ ID NO: 506164 - DNA, 30 bp, Artificial Sequence
  Synthetic oligonucleotide
gggggttaagtggtccaagggggagttgaa

SEQ ID NO: 506165 - DNA, 30 bp, Artificial Sequence
  Synthetic oligonucleotide
aagtacgtacggcgcggtatcctagttgaa

SEQ ID NO: 506166 - DNA, 30 bp, Artificial Sequence
  Synthetic oligonucleotide
agactatctattaataggcagcacgttgaa

SEQ ID NO: 506167 - DNA, 30 bp, Artificial Sequence
  Synthetic oligonucleotide
cttttctgctttagtactaagtacgttgaa

SEQ ID NO: 506168 - DNA, 30 bp, Artificial Sequence
  Synthetic oligonucleotide
gtcttgaggcgtctcagtctataggttgaa

SEQ ID NO: 506169 - DNA, 30 bp, Artificial Sequence
  Synthetic oligonucleotide
gcatcaacgtatagtttgtaccgtgttgaa

SEQ ID NO: 506170 - DNA, 30 bp, Artificial Sequence
  Synthetic oligonucleotide
cacttaggggtctggttagcacaatttgaa

SEQ ID NO: 506171 - DNA, 30 bp, Artificial Sequence
  Synthetic oligonucleotide
aactttgcctacggcgccgattaatttgaa

SEQ ID NO: 506172 - DNA, 30 bp, Artificial Sequence
  Synthetic oligonucleotide
ggaagcgtggggtacgttctaggctttgaa

SEQ ID NO: 506173 - DNA, 30 bp, Artificial Sequence
  Synthetic oligonucleotide
tgtcctttttttgcctaatatggctttgaa

SEQ ID NO: 506174 - DNA, 30 bp, Artificial Sequence
  Synthetic oligonucleotide
aatagaatgttctgaggctcagcgtttgaa

SEQ ID NO: 506175 - DNA, 30 bp, Artificial Sequence
  Synthetic oligonucleotide
acagctgacctttaacttgcgctgtttgaa

SEQ ID NO: 506176 - DNA, 30 bp, Artificial Sequence
  Synthetic oligonucleotide
caatgttcgatacgtgcaaatcgttttgaa

SEQ ID NO: 506177 - DNA, 30 bp, Artificial Sequence
  Synthetic oligonucleotide
ttagtgttccgtttatcttccggttttgaa

SEQ ID NO: 506178 - DNA, 30 bp, Artificial Sequence
  Synthetic oligonucleotide
gtcagtttccggtggctaagtatttttgaa

SEQ ID NO: 506179 - DNA, 30 bp, Artificial Sequence
  Synthetic oligonucleotide
ccgtttgccgttatggacgtataaaaataa

SEQ ID NO: 506180 - DNA, 30 bp, Artificial Sequence
  Synthetic oligonucleotide
acgcaaagtcccccctcgacaccaaaataa

SEQ ID NO: 506181 - DNA, 30 bp, Artificial Sequence
  Synthetic oligonucleotide
ttcctactcaagcggaatgctgcaaaataa

SEQ ID NO: 506182 - DNA, 30 bp, Artificial Sequence
  Synthetic oligonucleotide
tcatgactatttagatcagaggtaaaataa

SEQ ID NO: 506183 - DNA, 29 bp, Artificial Sequence
  Synthetic oligonucleotide
gtggcataaccgtaccgcctttaaaataa

SEQ ID NO: 506184 - DNA, 30 bp, Artificial Sequence
  Synthetic oligonucleotide
ttctccacacgcgccgcaagcgacaaataa

SEQ ID NO: 506185 - DNA, 30 bp, Artificial Sequence
  Synthetic oligonucleotide
tctctagaggtctggttagttgtcaaataa

SEQ ID NO: 506186 - DNA, 30 bp, Artificial Sequence
  Synthetic oligonucleotide
tgcaatagttcgcagtattaggcgaaataa

SEQ ID NO: 506187 - DNA, 30 bp, Artificial Sequence
  Synthetic oligonucleotide
catttgggattattctgctctcggaaataa

SEQ ID NO: 506188 - DNA, 30 bp, Artificial Sequence
  Synthetic oligonucleotide
aggtggaggtctggcattatggttaaataa

SEQ ID NO: 506189 - DNA, 30 bp, Artificial Sequence
  Synthetic oligonucleotide
ataatatagtgctcgtttaaagcacaataa

SEQ ID NO: 506190 - DNA, 30 bp, Artificial Sequence
  Synthetic oligonucleotide
ggttctcttcgatatccatggagacaataa

SEQ ID NO: 506191 - DNA, 30 bp, Artificial Sequence
  Synthetic oligonucleotide
cgcgcccggatttggacccaggaccaataa

SEQ ID NO: 506192 - DNA, 30 bp, Artificial Sequence
  Synthetic oligonucleotide
gaatcatagtgtacattgcgctcccaataa

SEQ ID NO: 506193 - DNA, 30 bp, Artificial Sequence
  Synthetic oligonucleotide
caagacagcttagacgctagcggccaataa

SEQ ID NO: 506194 - DNA, 30 bp, Artificial Sequence
  Synthetic oligonucleotide
tcgattgagcagtttaccggcacgcaataa

SEQ ID NO: 506195 - DNA, 30 bp, Artificial Sequence
  Synthetic oligonucleotide
agttcgtacttattcatctaaccgcaataa

SEQ ID NO: 506196 - DNA, 30 bp, Artificial Sequence
  Synthetic oligonucleotide
tttctgccctgtgcctcgcccccgcaataa

SEQ ID NO: 506197 - DNA, 30 bp, Artificial Sequence
  Synthetic oligonucleotide
cgcacgttcagttgaattaagccgcaataa

SEQ ID NO: 506198 - DNA, 30 bp, Artificial Sequence
  Synthetic oligonucleotide
ttgtttacttggaataggaaggcgcaataa

SEQ ID NO: 506199 - DNA, 30 bp, Artificial Sequence
  Synthetic oligonucleotide
ggttttcactggcgtttggcccttcaataa

SEQ ID NO: 506200 - DNA, 30 bp, Artificial Sequence
  Synthetic oligonucleotide
atacagggaggcctacctgacccagaataa

SEQ ID NO: 506201 - DNA, 30 bp, Artificial Sequence
  Synthetic oligonucleotide
tcaagctaatttcggatcttcctagaataa

SEQ ID NO: 506202 - DNA, 30 bp, Artificial Sequence
  Synthetic oligonucleotide
aagggtaagttgaatagatacggcgaataa

SEQ ID NO: 506203 - DNA, 30 bp, Artificial Sequence
  Synthetic oligonucleotide
atcgcatcattgtttttctcgatggaataa

SEQ ID NO: 506204 - DNA, 30 bp, Artificial Sequence
  Synthetic oligonucleotide
atatcttcacgtaattacgaccgtgaataa

SEQ ID NO: 506205 - DNA, 30 bp, Artificial Sequence
  Synthetic oligonucleotide
gaacgtggattcggatgccgcattgaataa

SEQ ID NO: 506206 - DNA, 30 bp, Artificial Sequence
  Synthetic oligonucleotide
caaatgttcgtcctccgctatgtgtaataa

SEQ ID NO: 506207 - DNA, 30 bp, Artificial Sequence
  Synthetic oligonucleotide
tcaaaatgtcgtcatttgtgcttgtaataa

SEQ ID NO: 506208 - DNA, 30 bp, Artificial Sequence
  Synthetic oligonucleotide
tcaatgattatttccgcaccatattaataa

SEQ ID NO: 506209 - DNA, 30 bp, Artificial Sequence
  Synthetic oligonucleotide
aaaaatttgggtcgtcagctaacttaataa

SEQ ID NO: 506210 - DNA, 30 bp, Artificial Sequence
  Synthetic oligonucleotide
atccttgtggatgggtaaaaagcttaataa

SEQ ID NO: 506211 - DNA, 30 bp, Artificial Sequence
  Synthetic oligonucleotide
taaggcgtagtcttgattaacagttaataa

SEQ ID NO: 506212 - DNA, 30 bp, Artificial Sequence
  Synthetic oligonucleotide
tccgtaagcgtgccagcacgcgtcacataa

SEQ ID NO: 506213 - DNA, 30 bp, Artificial Sequence
  Synthetic oligonucleotide
atactgtactgtgaaaattttggtacataa

SEQ ID NO: 506214 - DNA, 30 bp, Artificial Sequence
  Synthetic oligonucleotide
ctggtgttaagtcggttatttggaccataa

SEQ ID NO: 506215 - DNA, 30 bp, Artificial Sequence
  Synthetic oligonucleotide
aattccgtggattaccgggagtacccataa

SEQ ID NO: 506216 - DNA, 30 bp, Artificial Sequence
  Synthetic oligonucleotide
gctaataattatggggttccgttcccataa

SEQ ID NO: 506217 - DNA, 30 bp, Artificial Sequence
  Synthetic oligonucleotide
gtacctcccccgaatacgcgctagccataa

SEQ ID NO: 506218 - DNA, 30 bp, Artificial Sequence
  Synthetic oligonucleotide
ctttaagacggaggactagcaccgccataa

SEQ ID NO: 506219 - DNA, 30 bp, Artificial Sequence
  Synthetic oligonucleotide
gaatgattttaaaccgatttcaggccataa

SEQ ID NO: 506220 - DNA, 30 bp, Artificial Sequence
  Synthetic oligonucleotide
catagcccgggtaagcgcttagggccataa

SEQ ID NO: 506221 - DNA, 30 bp, Artificial Sequence
  Synthetic oligonucleotide
ctttactgatctggtccgtgctggccataa

SEQ ID NO: 506222 - DNA, 30 bp, Artificial Sequence
  Synthetic oligonucleotide
caaattatgtatttcccagaaagtccataa

SEQ ID NO: 506223 - DNA, 30 bp, Artificial Sequence
  Synthetic oligonucleotide
aagttgaaacaggatcacgcgtaagcataa

SEQ ID NO: 506224 - DNA, 30 bp, Artificial Sequence
  Synthetic oligonucleotide
ggttacctagtctactctatgatagcataa

SEQ ID NO: 506225 - DNA, 30 bp, Artificial Sequence
  Synthetic oligonucleotide
caagtgtgctcgggatgtggattagcataa

SEQ ID NO: 506226 - DNA, 30 bp, Artificial Sequence
  Synthetic oligonucleotide
taacgttctagtgattgcgacaacgcataa

SEQ ID NO: 506227 - DNA, 31 bp, Artificial Sequence
  Synthetic oligonucleotide
cagcatatgtggtcggtgcggggccgcataa

SEQ ID NO: 506228 - DNA, 30 bp, Artificial Sequence
  Synthetic oligonucleotide
cgctaattttgcccgctaggtagcgcataa

SEQ ID NO: 506229 - DNA, 30 bp, Artificial Sequence
  Synthetic oligonucleotide
gccttcagcaaacttgtcggcgaggcataa

SEQ ID NO: 506230 - DNA, 30 bp, Artificial Sequence
  Synthetic oligonucleotide
ccttttactctttgcacagttccggcataa

SEQ ID NO: 506231 - DNA, 30 bp, Artificial Sequence
  Synthetic oligonucleotide
acacataagtgtgcggatgcggtggcataa

SEQ ID NO: 506232 - DNA, 30 bp, Artificial Sequence
  Synthetic oligonucleotide
tggagttaagtaagcacagtagatgcataa

SEQ ID NO: 506233 - DNA, 30 bp, Artificial Sequence
  Synthetic oligonucleotide
gctaatatcataacgacggggtctgcataa

SEQ ID NO: 506234 - DNA, 30 bp, Artificial Sequence
  Synthetic oligonucleotide
tactcatctaccggagttctgaaatcataa

SEQ ID NO: 506235 - DNA, 30 bp, Artificial Sequence
  Synthetic oligonucleotide
agggttttcttttggacgtcaagatcataa

SEQ ID NO: 506236 - DNA, 30 bp, Artificial Sequence
  Synthetic oligonucleotide
ggcgccaaatagagtacacggaaaagataa

SEQ ID NO: 506237 - DNA, 30 bp, Artificial Sequence
  Synthetic oligonucleotide
ttcatgtaagggacgcagtcgctaagataa

SEQ ID NO: 506238 - DNA, 30 bp, Artificial Sequence
  Synthetic oligonucleotide
agtccctcacgattaccccttgtaagataa

SEQ ID NO: 506239 - DNA, 30 bp, Artificial Sequence
  Synthetic oligonucleotide
gctcagcatacctcaatggttttaagataa

SEQ ID NO: 506240 - DNA, 30 bp, Artificial Sequence
  Synthetic oligonucleotide
cagcgaggtgtcccctatcacaccagataa

SEQ ID NO: 506241 - DNA, 30 bp, Artificial Sequence
  Synthetic oligonucleotide
tatgaccaaagcttaactcgtctcagataa

SEQ ID NO: 506242 - DNA, 30 bp, Artificial Sequence
  Synthetic oligonucleotide
ttttactacttcggtgagatactgagataa

SEQ ID NO: 506243 - DNA, 30 bp, Artificial Sequence
  Synthetic oligonucleotide
atgggactgagttgtatgttcgcacgataa

SEQ ID NO: 506244 - DNA, 30 bp, Artificial Sequence
  Synthetic oligonucleotide
gttgtatttagcaccggtgttggacgataa

SEQ ID NO: 506245 - DNA, 30 bp, Artificial Sequence
  Synthetic oligonucleotide
gcaggccttgcgcgaataccgcagcgataa

SEQ ID NO: 506246 - DNA, 30 bp, Artificial Sequence
  Synthetic oligonucleotide
atgtgcagtgcaagttactaaggtcgataa

SEQ ID NO: 506247 - DNA, 30 bp, Artificial Sequence
  Synthetic oligonucleotide
gcagacatgtccgctgccagcacaggataa

SEQ ID NO: 506248 - DNA, 30 bp, Artificial Sequence
  Synthetic oligonucleotide
tgtcccgaaaaggggagtaaatgaggataa

SEQ ID NO: 506249 - DNA, 30 bp, Artificial Sequence
  Synthetic oligonucleotide
gacgggactggattattaacactaggataa

SEQ ID NO: 506250 - DNA, 30 bp, Artificial Sequence
  Synthetic oligonucleotide
aacctattacgtcgtccgtgattcggataa

SEQ ID NO: 506251 - DNA, 30 bp, Artificial Sequence
  Synthetic oligonucleotide
tgtaattcataaggcgtcagggcgggataa

SEQ ID NO: 506252 - DNA, 30 bp, Artificial Sequence
  Synthetic oligonucleotide
ggggtattattaaggcccgttaggggataa

SEQ ID NO: 506253 - DNA, 30 bp, Artificial Sequence
  Synthetic oligonucleotide
gttttttttcaggttactttctggggataa

SEQ ID NO: 506254 - DNA, 30 bp, Artificial Sequence
  Synthetic oligonucleotide
aatcttcgatgtggcactaaagtgggataa

SEQ ID NO: 506255 - DNA, 30 bp, Artificial Sequence
  Synthetic oligonucleotide
gccaacaccaacccccttgtaggtggataa

SEQ ID NO: 506256 - DNA, 30 bp, Artificial Sequence
  Synthetic oligonucleotide
tagactttacgaagactccagcttggataa

SEQ ID NO: 506257 - DNA, 30 bp, Artificial Sequence
  Synthetic oligonucleotide
tctttggtatttaattaagtgtttggataa

SEQ ID NO: 506258 - DNA, 30 bp, Artificial Sequence
  Synthetic oligonucleotide
gaaaatattcttcctatagattaatgataa

SEQ ID NO: 506259 - DNA, 30 bp, Artificial Sequence
  Synthetic oligonucleotide
gtagcgcgggctttgtatcgcagctgataa

SEQ ID NO: 506260 - DNA, 30 bp, Artificial Sequence
  Synthetic oligonucleotide
cgttaaatttacgtaataattagctgataa

SEQ ID NO: 506261 - DNA, 30 bp, Artificial Sequence
  Synthetic oligonucleotide
caggagtgagggcgaatcagccggtgataa

SEQ ID NO: 506262 - DNA, 30 bp, Artificial Sequence
  Synthetic oligonucleotide
ccgcgacggacgcaacgtcacgtgtgataa

SEQ ID NO: 506263 - DNA, 30 bp, Artificial Sequence
  Synthetic oligonucleotide
gaagaaattttcaggcgttttacttgataa

SEQ ID NO: 506264 - DNA, 30 bp, Artificial Sequence
  Synthetic oligonucleotide
atacctggtcgcagtttgcttgaaatataa

SEQ ID NO: 506265 - DNA, 30 bp, Artificial Sequence
  Synthetic oligonucleotide
ccattctcttatacgtacattttaatataa

SEQ ID NO: 506266 - DNA, 30 bp, Artificial Sequence
  Synthetic oligonucleotide
ggccccatattgcataaggataccatataa

SEQ ID NO: 506267 - DNA, 30 bp, Artificial Sequence
  Synthetic oligonucleotide
cgggacgccaggttaggtaggggcatataa

SEQ ID NO: 506268 - DNA, 30 bp, Artificial Sequence
  Synthetic oligonucleotide
ttcaaggtttagtactagcttatcatataa

SEQ ID NO: 506269 - DNA, 30 bp, Artificial Sequence
  Synthetic oligonucleotide
ttttagtcaaagtaggtaactaagatataa

SEQ ID NO: 506270 - DNA, 30 bp, Artificial Sequence
  Synthetic oligonucleotide
cgcctaaggctacggttgtccgtgatataa

SEQ ID NO: 506271 - DNA, 30 bp, Artificial Sequence
  Synthetic oligonucleotide
taattatagaccgtaaggtctcttatataa

SEQ ID NO: 506272 - DNA, 31 bp, Artificial Sequence
  Synthetic oligonucleotide
tcctgcattctccccaggtggaaacctataa

SEQ ID NO: 506273 - DNA, 30 bp, Artificial Sequence
  Synthetic oligonucleotide
ttatgtccggtcttctcgaacttcctataa

SEQ ID NO: 506274 - DNA, 30 bp, Artificial Sequence
  Synthetic oligonucleotide
gaagatagggaaacatgaatagagctataa

SEQ ID NO: 506275 - DNA, 30 bp, Artificial Sequence
  Synthetic oligonucleotide
gccagtcgtctttcaagggttatagtataa

SEQ ID NO: 506276 - DNA, 30 bp, Artificial Sequence
  Synthetic oligonucleotide
aagcatgtctttttttttaggttagtataa

SEQ ID NO: 506277 - DNA, 30 bp, Artificial Sequence
  Synthetic oligonucleotide
ttattcggtgggcggcgcgcaaacgtataa

SEQ ID NO: 506278 - DNA, 30 bp, Artificial Sequence
  Synthetic oligonucleotide
ttttcctagggttcgatatagtacgtataa

SEQ ID NO: 506279 - DNA, 29 bp, Artificial Sequence
  Synthetic oligonucleotide
taattgtggatcttactcaattcgtataa

SEQ ID NO: 506280 - DNA, 30 bp, Artificial Sequence
  Synthetic oligonucleotide
gtacgataggagtagcggtaaacggtataa

SEQ ID NO: 506281 - DNA, 30 bp, Artificial Sequence
  Synthetic oligonucleotide
actgatagtattttacaaattatggtataa

SEQ ID NO: 506282 - DNA, 30 bp, Artificial Sequence
  Synthetic oligonucleotide
aattaggtgagatatgattggctggtataa

SEQ ID NO: 506283 - DNA, 30 bp, Artificial Sequence
  Synthetic oligonucleotide
ggatacggctggcttctgactttggtataa

SEQ ID NO: 506284 - DNA, 30 bp, Artificial Sequence
  Synthetic oligonucleotide
actttcggcccccagggacaacatgtataa

SEQ ID NO: 506285 - DNA, 30 bp, Artificial Sequence
  Synthetic oligonucleotide
aagtgggacacacttggagtgtctgtataa

SEQ ID NO: 506286 - DNA, 30 bp, Artificial Sequence
  Synthetic oligonucleotide
ttgattacccacctgccgcaacgattataa

SEQ ID NO: 506287 - DNA, 30 bp, Artificial Sequence
  Synthetic oligonucleotide
tgccgatgcagtaagttgaacgtattataa

SEQ ID NO: 506288 - DNA, 30 bp, Artificial Sequence
  Synthetic oligonucleotide
atggttacagccatctattggaacttataa

SEQ ID NO: 506289 - DNA, 30 bp, Artificial Sequence
  Synthetic oligonucleotide
gattatgatacctctcgtttgcacttataa

SEQ ID NO: 506290 - DNA, 30 bp, Artificial Sequence
  Synthetic oligonucleotide
gctattataagctagcaaaaaagcttataa

SEQ ID NO: 506291 - DNA, 30 bp, Artificial Sequence
  Synthetic oligonucleotide
cccttacgacccggtgcccgacgtttataa

SEQ ID NO: 506292 - DNA, 30 bp, Artificial Sequence
  Synthetic oligonucleotide
ttcgcccaaaaacgcattgtatgtttataa

SEQ ID NO: 506293 - DNA, 30 bp, Artificial Sequence
  Synthetic oligonucleotide
tttactcttttaaatgagctttttttataa

SEQ ID NO: 506294 - DNA, 30 bp, Artificial Sequence
  Synthetic oligonucleotide
acaatatatgtattatttagtgccaactaa

SEQ ID NO: 506295 - DNA, 30 bp, Artificial Sequence
  Synthetic oligonucleotide
cttccaattaatgggactaacccgaactaa

SEQ ID NO: 506296 - DNA, 30 bp, Artificial Sequence
  Synthetic oligonucleotide
actcctgaagagttcacacctccgaactaa

SEQ ID NO: 506297 - DNA, 30 bp, Artificial Sequence
  Synthetic oligonucleotide
gaaaacgggcaagccattacatgtaactaa

SEQ ID NO: 506298 - DNA, 30 bp, Artificial Sequence
  Synthetic oligonucleotide
atcggtaatctcgagcaaggttttaactaa

SEQ ID NO: 506299 - DNA, 30 bp, Artificial Sequence
  Synthetic oligonucleotide
cgtgtcatattggcttctcggcgccactaa

SEQ ID NO: 506300 - DNA, 30 bp, Artificial Sequence
  Synthetic oligonucleotide
ttaagtgctttcaaaggcaaaaagcactaa

SEQ ID NO: 506301 - DNA, 30 bp, Artificial Sequence
  Synthetic oligonucleotide
aactctgtaagcattcctccgcagcactaa

SEQ ID NO: 506302 - DNA, 30 bp, Artificial Sequence
  Synthetic oligonucleotide
acccagctgctaaggtatgcagcagactaa

SEQ ID NO: 506303 - DNA, 30 bp, Artificial Sequence
  Synthetic oligonucleotide
gagtgcgactggcgtccttcgcacgactaa

SEQ ID NO: 506304 - DNA, 30 bp, Artificial Sequence
  Synthetic oligonucleotide
gagcgccaggtcgtgtgactacccgactaa

SEQ ID NO: 506305 - DNA, 30 bp, Artificial Sequence
  Synthetic oligonucleotide
atcgtttgttcgtccaatgcccgcgactaa

SEQ ID NO: 506306 - DNA, 30 bp, Artificial Sequence
  Synthetic oligonucleotide
attctcaagacggttaatcgttgtgactaa

SEQ ID NO: 506307 - DNA, 30 bp, Artificial Sequence
  Synthetic oligonucleotide
gagtgatttaggatgtaattgcttgactaa

SEQ ID NO: 506308 - DNA, 30 bp, Artificial Sequence
  Synthetic oligonucleotide
agtacttttagggggcggccttttgactaa

SEQ ID NO: 506309 - DNA, 30 bp, Artificial Sequence
  Synthetic oligonucleotide
gggatgacacattaattcgttgtatactaa

SEQ ID NO: 506310 - DNA, 30 bp, Artificial Sequence
  Synthetic oligonucleotide
gaacgttcttgaccataggagaactactaa

SEQ ID NO: 506311 - DNA, 30 bp, Artificial Sequence
  Synthetic oligonucleotide
gctatttaatctgaaaggtaactctactaa

SEQ ID NO: 506312 - DNA, 30 bp, Artificial Sequence
  Synthetic oligonucleotide
gggtccccgtacgcaatagaagcaacctaa

SEQ ID NO: 506313 - DNA, 30 bp, Artificial Sequence
  Synthetic oligonucleotide
gcgtcactttagtgcggcgtggacacctaa

SEQ ID NO: 506314 - DNA, 30 bp, Artificial Sequence
  Synthetic oligonucleotide
agggccttagaagcaatttccacgacctaa

SEQ ID NO: 506315 - DNA, 30 bp, Artificial Sequence
  Synthetic oligonucleotide
tacagcacgcaggtcccctacccgacctaa

SEQ ID NO: 506316 - DNA, 30 bp, Artificial Sequence
  Synthetic oligonucleotide
aatatatgacacgggtcgtggatgacctaa

SEQ ID NO: 506317 - DNA, 30 bp, Artificial Sequence
  Synthetic oligonucleotide
tttctttaaccgccaatgggatgtacctaa

SEQ ID NO: 506318 - DNA, 30 bp, Artificial Sequence
  Synthetic oligonucleotide
caaacagacatgcattaaacgacaccctaa

SEQ ID NO: 506319 - DNA, 30 bp, Artificial Sequence
  Synthetic oligonucleotide
cacctcggtggcctcgatatgctaccctaa

SEQ ID NO: 506320 - DNA, 30 bp, Artificial Sequence
  Synthetic oligonucleotide
cacacggggcgcccgctaggccccccctaa

SEQ ID NO: 506321 - DNA, 30 bp, Artificial Sequence
  Synthetic oligonucleotide
tctacctaaggcatttaggctagtccctaa

SEQ ID NO: 506322 - DNA, 30 bp, Artificial Sequence
  Synthetic oligonucleotide
ccttctttcacatttctcgcaccagcctaa

SEQ ID NO: 506323 - DNA, 30 bp, Artificial Sequence
  Synthetic oligonucleotide
attccgtttgactgtattttaagcgcctaa

SEQ ID NO: 506324 - DNA, 30 bp, Artificial Sequence
  Synthetic oligonucleotide
gtcgacggcctttcccacgaagcggcctaa

SEQ ID NO: 506325 - DNA, 30 bp, Artificial Sequence
  Synthetic oligonucleotide
aggttgttattttagaaacatgcggcctaa

SEQ ID NO: 506326 - DNA, 30 bp, Artificial Sequence
  Synthetic oligonucleotide
gcaaactcgctatgattttaatatgcctaa

SEQ ID NO: 506327 - DNA, 30 bp, Artificial Sequence
  Synthetic oligonucleotide
cgtaatcaaactatacgacagagtgcctaa

SEQ ID NO: 506328 - DNA, 30 bp, Artificial Sequence
  Synthetic oligonucleotide
atcttccgctctccaaatcgatcctcctaa

SEQ ID NO: 506329 - DNA, 30 bp, Artificial Sequence
  Synthetic oligonucleotide
agcatcattcagggaaagttattctcctaa

SEQ ID NO: 506330 - DNA, 30 bp, Artificial Sequence
  Synthetic oligonucleotide
gaatttctccacacaatttgagattcctaa

SEQ ID NO: 506331 - DNA, 30 bp, Artificial Sequence
  Synthetic oligonucleotide
tcttgtccaaatttgattctaccttcctaa

SEQ ID NO: 506332 - DNA, 30 bp, Artificial Sequence
  Synthetic oligonucleotide
ttccctttccttatgttacggccttcctaa

SEQ ID NO: 506333 - DNA, 30 bp, Artificial Sequence
  Synthetic oligonucleotide
aagttataattaaacgggacgtcttcctaa

SEQ ID NO: 506334 - DNA, 30 bp, Artificial Sequence
  Synthetic oligonucleotide
atctgtacctgtgaataatggctttcctaa

SEQ ID NO: 506335 - DNA, 30 bp, Artificial Sequence
  Synthetic oligonucleotide
tcagtccaagacccataccttttttcctaa

SEQ ID NO: 506336 - DNA, 30 bp, Artificial Sequence
  Synthetic oligonucleotide
gcgacacgttccagactgaacacaagctaa

SEQ ID NO: 506337 - DNA, 30 bp, Artificial Sequence
  Synthetic oligonucleotide
gccccaataagcacctacccgtgcagctaa

SEQ ID NO: 506338 - DNA, 30 bp, Artificial Sequence
  Synthetic oligonucleotide
gtttcgggtaccttctgtgcagggagctaa

SEQ ID NO: 506339 - DNA, 30 bp, Artificial Sequence
  Synthetic oligonucleotide
ccttattaacccgtagaaggagctagctaa

SEQ ID NO: 506340 - DNA, 30 bp, Artificial Sequence
  Synthetic oligonucleotide
actccgcggacggatactagctgtagctaa

SEQ ID NO: 506341 - DNA, 30 bp, Artificial Sequence
  Synthetic oligonucleotide
gacttgccggatccccttagcgaacgctaa

SEQ ID NO: 506342 - DNA, 30 bp, Artificial Sequence
  Synthetic oligonucleotide
gtagcggcaacacaagaggtaagacgctaa

SEQ ID NO: 506343 - DNA, 31 bp, Artificial Sequence
  Synthetic oligonucleotide
attacgttcacggtgcaagttgtgacgctaa

SEQ ID NO: 506344 - DNA, 30 bp, Artificial Sequence
  Synthetic oligonucleotide
ccgtcgggattgtacttgatcctacgctaa

SEQ ID NO: 506345 - DNA, 30 bp, Artificial Sequence
  Synthetic oligonucleotide
ctccgtcctagggttatgatggaccgctaa

SEQ ID NO: 506346 - DNA, 30 bp, Artificial Sequence
  Synthetic oligonucleotide
tgcggcgttcagcgtcgacgaggccgctaa

SEQ ID NO: 506347 - DNA, 30 bp, Artificial Sequence
  Synthetic oligonucleotide
ctaattttaagctacgatctcttgcgctaa

SEQ ID NO: 506348 - DNA, 30 bp, Artificial Sequence
  Synthetic oligonucleotide
gttgggtattattaggggtatacaggctaa

SEQ ID NO: 506349 - DNA, 30 bp, Artificial Sequence
  Synthetic oligonucleotide
aaatccaaaacagtgcctagttcaggctaa

SEQ ID NO: 506350 - DNA, 30 bp, Artificial Sequence
  Synthetic oligonucleotide
atcccagttagtcgaaaagctataggctaa

SEQ ID NO: 506351 - DNA, 30 bp, Artificial Sequence
  Synthetic oligonucleotide
gatgcctaccgctcttcggagctaggctaa

SEQ ID NO: 506352 - DNA, 30 bp, Artificial Sequence
  Synthetic oligonucleotide
cttgaggcagcgttcgggggagccggctaa

SEQ ID NO: 506353 - DNA, 30 bp, Artificial Sequence
  Synthetic oligonucleotide
atgcgatcggattccacagggagcggctaa

SEQ ID NO: 506354 - DNA, 30 bp, Artificial Sequence
  Synthetic oligonucleotide
acaaaaaagggcttgatagaccgcggctaa

SEQ ID NO: 506355 - DNA, 30 bp, Artificial Sequence
  Synthetic oligonucleotide
ggcgggtagaccattatacaggagggctaa

SEQ ID NO: 506356 - DNA, 30 bp, Artificial Sequence
  Synthetic oligonucleotide
gtattattcgggtctccataacttggctaa

SEQ ID NO: 506357 - DNA, 30 bp, Artificial Sequence
  Synthetic oligonucleotide
gtggaagtttactgtgcgtagctctgctaa

SEQ ID NO: 506358 - DNA, 30 bp, Artificial Sequence
  Synthetic oligonucleotide
gagccatagtaatagagcgcacagtgctaa

SEQ ID NO: 506359 - DNA, 30 bp, Artificial Sequence
  Synthetic oligonucleotide
gtattaggagcacttgtccttcagtgctaa

SEQ ID NO: 506360 - DNA, 30 bp, Artificial Sequence
  Synthetic oligonucleotide
cgagttggaatgctcacgtgggtgtgctaa

SEQ ID NO: 506361 - DNA, 30 bp, Artificial Sequence
  Synthetic oligonucleotide
actttttttggcttgtccagctaaatctaa

SEQ ID NO: 506362 - DNA, 30 bp, Artificial Sequence
  Synthetic oligonucleotide
tggcggagtcctcaatccgtctgaatctaa

SEQ ID NO: 506363 - DNA, 30 bp, Artificial Sequence
  Synthetic oligonucleotide
gaacggaagaggctggatacgataatctaa

SEQ ID NO: 506364 - DNA, 30 bp, Artificial Sequence
  Synthetic oligonucleotide
gagtgaaacgccagttgagggaccatctaa

SEQ ID NO: 506365 - DNA, 30 bp, Artificial Sequence
  Synthetic oligonucleotide
gtctttaaaccaagaaataggttcatctaa

SEQ ID NO: 506366 - DNA, 30 bp, Artificial Sequence
  Synthetic oligonucleotide
ctcaaaattgctatcaatccggcgatctaa

SEQ ID NO: 506367 - DNA, 30 bp, Artificial Sequence
  Synthetic oligonucleotide
cctgaacatatctcacaagaagaactctaa

SEQ ID NO: 506368 - DNA, 30 bp, Artificial Sequence
  Synthetic oligonucleotide
gctctggggtggataaagatcctactctaa

SEQ ID NO: 506369 - DNA, 29 bp, Artificial Sequence
  Synthetic oligonucleotide
acgcgcagtgcatgggttatgacctctaa

SEQ ID NO: 506370 - DNA, 30 bp, Artificial Sequence
  Synthetic oligonucleotide
gacaataggtgcacctttggacgcctctaa

SEQ ID NO: 506371 - DNA, 30 bp, Artificial Sequence
  Synthetic oligonucleotide
aggctaacgtgagcttttgtgcgcctctaa

SEQ ID NO: 506372 - DNA, 30 bp, Artificial Sequence
  Synthetic oligonucleotide
tcctcgagcatgatgtcaagcaatctctaa

SEQ ID NO: 506373 - DNA, 30 bp, Artificial Sequence
  Synthetic oligonucleotide
tatcctcgttggtcgcgatgatcagtctaa

SEQ ID NO: 506374 - DNA, 30 bp, Artificial Sequence
  Synthetic oligonucleotide
acgtggacgccactactctaagtagtctaa

SEQ ID NO: 506375 - DNA, 30 bp, Artificial Sequence
  Synthetic oligonucleotide
accatctgccgcttttgttcgagcgtctaa

SEQ ID NO: 506376 - DNA, 30 bp, Artificial Sequence
  Synthetic oligonucleotide
gcattacagcttttaattttatcggtctaa

SEQ ID NO: 506377 - DNA, 30 bp, Artificial Sequence
  Synthetic oligonucleotide
ggggcttctcttcatagacgctatgtctaa

SEQ ID NO: 506378 - DNA, 30 bp, Artificial Sequence
  Synthetic oligonucleotide
tggtgaatcgcagtgcttgggtgtgtctaa

SEQ ID NO: 506379 - DNA, 30 bp, Artificial Sequence
  Synthetic oligonucleotide
ctccaaccggtatcaacgcgataattctaa

SEQ ID NO: 506380 - DNA, 30 bp, Artificial Sequence
  Synthetic oligonucleotide
ttagtaggggcgcctatgatagacttctaa

SEQ ID NO: 506381 - DNA, 30 bp, Artificial Sequence
  Synthetic oligonucleotide
ttcgcggggacctttcggcttcccttctaa

SEQ ID NO: 506382 - DNA, 30 bp, Artificial Sequence
  Synthetic oligonucleotide
ggaatgtcctttgccttaccgacgttctaa

SEQ ID NO: 506383 - DNA, 30 bp, Artificial Sequence
  Synthetic oligonucleotide
aacaacatgttctgggtttttaggttctaa

SEQ ID NO: 506384 - DNA, 30 bp, Artificial Sequence
  Synthetic oligonucleotide
gggagaagcgccgcgtatcgatatttctaa

SEQ ID NO: 506385 - DNA, 30 bp, Artificial Sequence
  Synthetic oligonucleotide
ttggattcaagacgtgcttgatatttctaa

SEQ ID NO: 506386 - DNA, 30 bp, Artificial Sequence
  Synthetic oligonucleotide
taattacggtggcctattagccttttctaa

SEQ ID NO: 506387 - DNA, 30 bp, Artificial Sequence
  Synthetic oligonucleotide
cggcctagcggattcggtgtggttttctaa

SEQ ID NO: 506388 - DNA, 30 bp, Artificial Sequence
  Synthetic oligonucleotide
ggctgaaacgcattgggcgctggaaagtaa

SEQ ID NO: 506389 - DNA, 30 bp, Artificial Sequence
  Synthetic oligonucleotide
catatagtattatgactctggtacaagtaa

SEQ ID NO: 506390 - DNA, 30 bp, Artificial Sequence
  Synthetic oligonucleotide
agggtatatgcacttagttaggccaagtaa

SEQ ID NO: 506391 - DNA, 30 bp, Artificial Sequence
  Synthetic oligonucleotide
gcgcggcatcctcagctggaaagcaagtaa

SEQ ID NO: 506392 - DNA, 30 bp, Artificial Sequence
  Synthetic oligonucleotide
taatgagaagactcagcttgaatcaagtaa

SEQ ID NO: 506393 - DNA, 30 bp, Artificial Sequence
  Synthetic oligonucleotide
caaattgggtcggacgaagttatcaagtaa

SEQ ID NO: 506394 - DNA, 30 bp, Artificial Sequence
  Synthetic oligonucleotide
ggacagtaattccgcgtcgacgcgaagtaa

SEQ ID NO: 506395 - DNA, 30 bp, Artificial Sequence
  Synthetic oligonucleotide
agtacgaatggcttgtatgtcgcgaagtaa

SEQ ID NO: 506396 - DNA, 30 bp, Artificial Sequence
  Synthetic oligonucleotide
tgcagtagggtaatgcagctacgtaagtaa

SEQ ID NO: 506397 - DNA, 30 bp, Artificial Sequence
  Synthetic oligonucleotide
tgtggtggaggtgggtcatgccgacagtaa

SEQ ID NO: 506398 - DNA, 30 bp, Artificial Sequence
  Synthetic oligonucleotide
cgttatgcgaacacaaatcgcgtacagtaa

SEQ ID NO: 506399 - DNA, 30 bp, Artificial Sequence
  Synthetic oligonucleotide
gacagcatatattacaagagtcaccagtaa

SEQ ID NO: 506400 - DNA, 30 bp, Artificial Sequence
  Synthetic oligonucleotide
acctggaaacccaggtgtctcgcccagtaa

SEQ ID NO: 506401 - DNA, 30 bp, Artificial Sequence
  Synthetic oligonucleotide
aacctctgtcataacacacaatgccagtaa

SEQ ID NO: 506402 - DNA, 30 bp, Artificial Sequence
  Synthetic oligonucleotide
aacctctggcaagtcatagcaacgcagtaa

SEQ ID NO: 506403 - DNA, 30 bp, Artificial Sequence
  Synthetic oligonucleotide
ttgacattttcttctgtcctaacgcagtaa

SEQ ID NO: 506404 - DNA, 30 bp, Artificial Sequence
  Synthetic oligonucleotide
cagcggcacatacgtacgcatgggcagtaa

SEQ ID NO: 506405 - DNA, 30 bp, Artificial Sequence
  Synthetic oligonucleotide
aaggtgtgaccgaatggagtcggcgagtaa

SEQ ID NO: 506406 - DNA, 30 bp, Artificial Sequence
  Synthetic oligonucleotide
aaagatataataccattgggaagtgagtaa

SEQ ID NO: 506407 - DNA, 30 bp, Artificial Sequence
  Synthetic oligonucleotide
gcgctcagggctctaacatgcggtgagtaa

SEQ ID NO: 506408 - DNA, 30 bp, Artificial Sequence
  Synthetic oligonucleotide
ttaaaaaatgttgctagttaaaaatagtaa

SEQ ID NO: 506409 - DNA, 30 bp, Artificial Sequence
  Synthetic oligonucleotide
tatagagacaagttgtagacgcaatagtaa

SEQ ID NO: 506410 - DNA, 30 bp, Artificial Sequence
  Synthetic oligonucleotide
tttccagcaatacgctgggaacactagtaa

SEQ ID NO: 506411 - DNA, 30 bp, Artificial Sequence
  Synthetic oligonucleotide
atcgcatagttgcatcgggaaagctagtaa

SEQ ID NO: 506412 - DNA, 30 bp, Artificial Sequence
  Synthetic oligonucleotide
gagtttacatatgatgccgcctgttagtaa

SEQ ID NO: 506413 - DNA, 30 bp, Artificial Sequence
  Synthetic oligonucleotide
cactccgccgaactgtacaagagaacgtaa

SEQ ID NO: 506414 - DNA, 30 bp, Artificial Sequence
  Synthetic oligonucleotide
ccgagacagggaagactcttgtgcacgtaa

SEQ ID NO: 506415 - DNA, 30 bp, Artificial Sequence
  Synthetic oligonucleotide
tgtccagataccatgcagggttgcacgtaa

SEQ ID NO: 506416 - DNA, 30 bp, Artificial Sequence
  Synthetic oligonucleotide
gataatttgtacctatggcgggagacgtaa

SEQ ID NO: 506417 - DNA, 30 bp, Artificial Sequence
  Synthetic oligonucleotide
tacctagtaattcgaatgcgatctacgtaa

SEQ ID NO: 506418 - DNA, 30 bp, Artificial Sequence
  Synthetic oligonucleotide
gtataaaaatcgtttaggcccattacgtaa

SEQ ID NO: 506419 - DNA, 27 bp, Artificial Sequence
  Synthetic oligonucleotide
catcacgttggggagtagtaaccgtaa

SEQ ID NO: 506420 - DNA, 30 bp, Artificial Sequence
  Synthetic oligonucleotide
cgatcatgtcgaaatttcctaacaccgtaa

SEQ ID NO: 506421 - DNA, 30 bp, Artificial Sequence
  Synthetic oligonucleotide
agaatcatgatggttcactgcctaccgtaa

SEQ ID NO: 506422 - DNA, 30 bp, Artificial Sequence
  Synthetic oligonucleotide
gattggttttgtttattgccccacccgtaa

SEQ ID NO: 506423 - DNA, 31 bp, Artificial Sequence
  Synthetic oligonucleotide
acgtcattacatcggcatggtcgggccgtaa

SEQ ID NO: 506424 - DNA, 30 bp, Artificial Sequence
  Synthetic oligonucleotide
tacttttcttgaggaaaacgacatccgtaa
